United States Patent Application Publication US 2007/0042381 A1 - sequence listing, part 23

SEQ ID NO: 998757 - RNA, 22 nt, Human
uggccagcccuucagccaugcc

SEQ ID NO: 998758 - RNA, 17 nt, Human
ugugcgcuugugugagg

SEQ ID NO: 998759 - RNA, 22 nt, Human
uuuuguauccucccuuucacug

SEQ ID NO: 998760 - RNA, 22 nt, Human
ucuggcugacauccuguaugag

SEQ ID NO: 998761 - RNA, 22 nt, Human
cuguggcucagcacggggucag

SEQ ID NO: 998762 - RNA, 22 nt, Human
uuuucucuccagguggggugau

SEQ ID NO: 998763 - RNA, 22 nt, Human
auuuacagacguggauuagugc

SEQ ID NO: 998764 - RNA, 22 nt, Human
auauauuuuuugagacagaguc

SEQ ID NO: 998765 - RNA, 22 nt, Human
ucuuuagcuagaaauacucuaa

SEQ ID NO: 998766 - RNA, 22 nt, Human
auuuacagaagcauguaauagc

SEQ ID NO: 998767 - RNA, 22 nt, Human
agauauuuugugugauguuuca

SEQ ID NO: 998768 - RNA, 22 nt, Human
uucuccuuccugguuuucaggc

SEQ ID NO: 998769 - RNA, 20 nt, Human
cugcugcccugucagccucu

SEQ ID NO: 998770 - RNA, 22 nt, Human
cuuacagugacccugcagauuu

SEQ ID NO: 998771 - RNA, 22 nt, Human
agcugcccuuuaugaugcugaa

SEQ ID NO: 998772 - RNA, 22 nt, Human
aggcuguggcccuggucuagca

SEQ ID NO: 998773 - RNA, 22 nt, Human
ugucuguaauagucacuaugug

SEQ ID NO: 998774 - RNA, 22 nt, Human
cagccacuugugaugcugggga

SEQ ID NO: 998775 - RNA, 22 nt, Human
uucucucuggaccugggaugcg

SEQ ID NO: 998776 - RNA, 22 nt, Human
uacagucagagugccuuucuaa

SEQ ID NO: 998777 - RNA, 22 nt, Human
ucucucugccaacucacagcca

SEQ ID NO: 998778 - RNA, 22 nt, Human
guguggcuguuuagugacuuuc

SEQ ID NO: 998779 - RNA, 22 nt, Human
gggcuguguuaggugcgguuac

SEQ ID NO: 998780 - RNA, 22 nt, Human
cguguaugauaaauguuaauaa

SEQ ID NO: 998781 - RNA, 22 nt, Human
ucuuaacaagcuccucagugcu

SEQ ID NO: 998782 - RNA, 22 nt, Human
cugcccacaguucucugccaug

SEQ ID NO: 998783 - RNA, 22 nt, Human
acaguauauauagucuaaaagc

SEQ ID NO: 998784 - RNA, 19 nt, Human
uuuucucgugcuugucugc

SEQ ID NO: 998785 - RNA, 22 nt, Human
ugcuguguaaaaggugauugaa

SEQ ID NO: 998786 - RNA, 22 nt, Human
aguauauuuaccauuggguggg

SEQ ID NO: 998787 - RNA, 22 nt, Human
acuuauuuauucauucagcuca

SEQ ID NO: 998788 - RNA, 22 nt, Human
cucugugucagcugggugugca

SEQ ID NO: 998789 - RNA, 22 nt, Human
cuguggcugcgcccugggggag

SEQ ID NO: 998790 - RNA, 22 nt, Human
uuuccucuucgauuaaguuugg

SEQ ID NO: 998791 - RNA, 22 nt, Human
uaguguguaugguaaugaugaa

SEQ ID NO: 998792 - RNA, 22 nt, Human
aagcuggagaguuucacagaug

SEQ ID NO: 998793 - RNA, 22 nt, Human
uugacaguauagcuuuaccuau

SEQ ID NO: 998794 - RNA, 22 nt, Human
gcagcccaggcucgcucacugc

SEQ ID NO: 998795 - RNA, 22 nt, Human
ucugugucguucugugcucugg

SEQ ID NO: 998796 - RNA, 15 nt, Human
aucucucuagcugcu

SEQ ID NO: 998797 - RNA, 22 nt, Human
uguguguauaauaaugucugca

SEQ ID NO: 998798 - RNA, 22 nt, Human
gguggcugugagcauuauguga

SEQ ID NO: 998799 - RNA, 22 nt, Human
caggacagcucaacaccuccuc

SEQ ID NO: 998800 - RNA, 22 nt, Human
guuucucuuugaagccuggcug

SEQ ID NO: 998801 - RNA, 22 nt, Human
uggcugugaauggcaaauaauc

SEQ ID NO: 998802 - RNA, 22 nt, Human
auuacagugccaccucgugguc

SEQ ID NO: 998803 - RNA, 22 nt, Human
auugucucugaauuuucagcug

SEQ ID NO: 998804 - RNA, 22 nt, Human
acaguauaccauugugacuuug

SEQ ID NO: 998805 - RNA, 18 nt, Human
uaguuucuaauggccuuu

SEQ ID NO: 998806 - RNA, 22 nt, Human
agcugugugaccuagggcaagc

SEQ ID NO: 998807 - RNA, 22 nt, Human
guggcuguauagccaagucaga

SEQ ID NO: 998808 - RNA, 22 nt, Human
uuuagaguccaaguucuucacu

SEQ ID NO: 998809 - RNA, 22 nt, Human
aguuuucugauguguagugaga

SEQ ID NO: 998810 - RNA, 22 nt, Human
ccugcucugguuuagucagucu

SEQ ID NO: 998811 - RNA, 22 nt, Human
ggaagcugccaguccaccagcu

SEQ ID NO: 998812 - RNA, 22 nt, Human
uggaggugggagggacuguccu

SEQ ID NO: 998813 - RNA, 22 nt, Human
auguaugcuuugauuuuagaug

SEQ ID NO: 998814 - RNA, 22 nt, Human
uucaguauuucaugacuuucuu

SEQ ID NO: 998815 - RNA, 22 nt, Human
ucucuacagauccuauauagaa

SEQ ID NO: 998816 - RNA, 22 nt, Human
cauguauauuucuguaugugca

SEQ ID NO: 998817 - RNA, 22 nt, Human
ugacaguagaagaugcuguuac

SEQ ID NO: 998818 - RNA, 22 nt, Human
uagcuuuuauccacugcuuuug

SEQ ID NO: 998819 - RNA, 22 nt, Human
gugaguguuaacccacugcuuc

SEQ ID NO: 998820 - RNA, 22 nt, Human
guucucucugcuuccaagaugg

SEQ ID NO: 998821 - RNA, 22 nt, Human
ugauuuucaugggugaucuuug

SEQ ID NO: 998822 - RNA, 22 nt, Human
uuacagaaucuacucgugguga

SEQ ID NO: 998823 - RNA, 22 nt, Human
ucucucugaguugagcaggagu

SEQ ID NO: 998824 - RNA, 22 nt, Human
gugaaugccgcagucuguugcu

SEQ ID NO: 998825 - RNA, 22 nt, Human
cuucuuuagggaucucuugcug

SEQ ID NO: 998826 - RNA, 22 nt, Human
ugugugcagccucugucuuugg

SEQ ID NO: 998827 - RNA, 22 nt, Human
cuuauuauaaaauccuguuuga

SEQ ID NO: 998828 - RNA, 23 nt, Human
uuuaacuuuccaauaauucauug

SEQ ID NO: 998829 - RNA, 22 nt, Human
uuucucucagccuguagaaacu

SEQ ID NO: 998830 - RNA, 22 nt, Human
cugugcugagugaugugacuua

SEQ ID NO: 998831 - RNA, 22 nt, Human
uuccucuuucucugugcuaugu

SEQ ID NO: 998832 - RNA, 22 nt, Human
uguacaguuuuaacucugaggg

SEQ ID NO: 998833 - RNA, 22 nt, Human
auacaguauguaggcuuuucag

SEQ ID NO: 998834 - RNA, 22 nt, Human
ccacucugauuuuggcuccacu

SEQ ID NO: 998835 - RNA, 22 nt, Human
aagcugccaaugguaagcugcu

SEQ ID NO: 998836 - RNA, 22 nt, Human
agcuguguaagucauguaggug

SEQ ID NO: 998837 - RNA, 22 nt, Human
uuuaacuggucuccugcugcuu

SEQ ID NO: 998838 - RNA, 19 nt, Human
guauauuuauauggcugua

SEQ ID NO: 998839 - RNA, 22 nt, Human
uucuuuacaguggguuuugaau

SEQ ID NO: 998840 - RNA, 22 nt, Human
uuacaguaugaucaacuuuuca

SEQ ID NO: 998841 - RNA, 22 nt, Human
uucuaacuuaacacuccuguga

SEQ ID NO: 998842 - RNA, 22 nt, Human
uguguugguagaucugaggucu

SEQ ID NO: 998843 - RNA, 22 nt, Human
uuuaacagaugugaaauuuuca

SEQ ID NO: 998844 - RNA, 22 nt, Human
ugaguguggggaaugucaugag

SEQ ID NO: 998845 - RNA, 22 nt, Human
gggcuguguaaugugcucuuuu

SEQ ID NO: 998846 - RNA, 22 nt, Human
ucucuuucuuuguaugucuauu

SEQ ID NO: 998847 - RNA, 20 nt, Human
ccuguguggccagcugaggc

SEQ ID NO: 998848 - RNA, 22 nt, Human
uucucuucaucucaguaaaugu

SEQ ID NO: 998849 - RNA, 22 nt, Human
uucucucugagagcaucuggaa

SEQ ID NO: 998850 - RNA, 22 nt, Human
auucucucucuaugaaaacuga

SEQ ID NO: 998851 - RNA, 22 nt, Human
guuacagugagaagauagccua

SEQ ID NO: 998852 - RNA, 22 nt, Human
uacaaguauggaaugauucuca

SEQ ID NO: 998853 - RNA, 22 nt, Human
uuaacuauuauuagcaucuuug

SEQ ID NO: 998854 - RNA, 22 nt, Human
uguagugugacauaggugucca

SEQ ID NO: 998855 - RNA, 22 nt, Human
gcaugugucccucagucugugc

SEQ ID NO: 998856 - RNA, 22 nt, Human
uacagugaggugguuuccuuua

SEQ ID NO: 998857 - RNA, 22 nt, Human
guguauggacacaugucauguu

SEQ ID NO: 998858 - RNA, 22 nt, Human
ugcgauguaugcaguauuuguu

SEQ ID NO: 998859 - RNA, 22 nt, Human
ucuacuuuucccuauacaguuu

SEQ ID NO: 998860 - RNA, 22 nt, Human
acuuuguuguuccuugucuaaa

SEQ ID NO: 998861 - RNA, 22 nt, Human
cucucuuucugaaugaggacua

SEQ ID NO: 998862 - RNA, 18 nt, Human
gugcaugcaugcucugcc

SEQ ID NO: 998863 - RNA, 22 nt, Human
aguggcugaagcaucaaaggca

SEQ ID NO: 998864 - RNA, 22 nt, Human
ugagggguugugagaaauguag

SEQ ID NO: 998865 - RNA, 22 nt, Human
aaggcaguuugggccaccaucu

SEQ ID NO: 998866 - RNA, 22 nt, Human
aacuuuucacaggcuagcucuu

SEQ ID NO: 998867 - RNA, 22 nt, Human
caaggcagaauucagacucagg

SEQ ID NO: 998868 - RNA, 22 nt, Human
acuuuacaauauccugugacuu

SEQ ID NO: 998869 - RNA, 22 nt, Human
aguuauuuacuccuuugucucu

SEQ ID NO: 998870 - RNA, 23 nt, Human
aagcugccagucugaagccuggg

SEQ ID NO: 998871 - RNA, 15 nt, Human
uaacuuuuuugggcu

SEQ ID NO: 998872 - RNA, 22 nt, Human
agcuguguaggaucauaacacg

SEQ ID NO: 998873 - RNA, 22 nt, Human
aggcugugcaauuaggguaaga

SEQ ID NO: 998874 - RNA, 22 nt, Human
cagcuggcugcaugaugccaaa

SEQ ID NO: 998875 - RNA, 22 nt, Human
aguauaucugcuucuggguccc

SEQ ID NO: 998876 - RNA, 22 nt, Human
gugcaugcacacaugugugagg

SEQ ID NO: 998877 - RNA, 23 nt, Human
uguaggcuguaguuuguaggucc

SEQ ID NO: 998878 - RNA, 22 nt, Human
ucucucuccuaguuuuuagugg

SEQ ID NO: 998879 - RNA, 22 nt, Human
ugugugugaaccauugagggcu

SEQ ID NO: 998880 - RNA, 22 nt, Human
aguacauuuuucaguggggagu

SEQ ID NO: 998881 - RNA, 22 nt, Human
uuuucugcggugugaauggccu

SEQ ID NO: 998882 - RNA, 22 nt, Human
agucauauuuagcuuguggaau

SEQ ID NO: 998883 - RNA, 22 nt, Human
uuuacagugagagcuuagugag

SEQ ID NO: 998884 - RNA, 21 nt, Human
uacagaaugcgcuucagucug

SEQ ID NO: 998885 - RNA, 22 nt, Human
guauauuuugaucacccucuau

SEQ ID NO: 998886 - RNA, 20 nt, Human
auguuucucugucgugauuu

SEQ ID NO: 998887 - RNA, 20 nt, Human
uuuaacuggccuucuggcuc

SEQ ID NO: 998888 - RNA, 22 nt, Human
uaguauaugucuaugguuguag

SEQ ID NO: 998889 - RNA, 22 nt, Human
uuucacagagaauauugccuug

SEQ ID NO: 998890 - RNA, 22 nt, Human
uuguauuugauugucauaucgu

SEQ ID NO: 998891 - RNA, 22 nt, Human
cuggcuguaagcguguuuccua

SEQ ID NO: 998892 - RNA, 22 nt, Human
uaacuucucugagccucauucc

SEQ ID NO: 998893 - RNA, 22 nt, Human
guguguauuauugcauacacau

SEQ ID NO: 998894 - RNA, 22 nt, Human
uuuuccuguuaaaucugggcac

SEQ ID NO: 998895 - RNA, 22 nt, Human
ucauauuuggggguguguguuu

SEQ ID NO: 998896 - RNA, 22 nt, Human
cgcugugugcagacugaaaaug

SEQ ID NO: 998897 - RNA, 22 nt, Human
uacacuuuucugguuacucuug

SEQ ID NO: 998898 - RNA, 22 nt, Human
ucugugcggucuguguuaugaa

SEQ ID NO: 998899 - RNA, 22 nt, Human
auguaugcauguauguaucgcu

SEQ ID NO: 998900 - RNA, 20 nt, Human
ucugugugccaucaccuaac

SEQ ID NO: 998901 - RNA, 22 nt, Human
uguggcuguggaugcuuuccag

SEQ ID NO: 998902 - RNA, 19 nt, Human
uuucucucccucaucccga

SEQ ID NO: 998903 - RNA, 22 nt, Human
auauuuguuagagucuaugugu

SEQ ID NO: 998904 - RNA, 22 nt, Human
cguguaugugccugcauucaca

SEQ ID NO: 998905 - RNA, 22 nt, Human
uccuguguucuagguauggucu

SEQ ID NO: 998906 - RNA, 22 nt, Human
ucugugugguaguuucagugaa

SEQ ID NO: 998907 - RNA, 22 nt, Human
ccuguguggaaaccgcaugacg

SEQ ID NO: 998908 - RNA, 22 nt, Human
auuuuuucagauugaguguuaa

SEQ ID NO: 998909 - RNA, 22 nt, Human
uuguacagaaaaaauucuuggu

SEQ ID NO: 998910 - RNA, 22 nt, Human
ucucucuucuuuguuaagaaug

SEQ ID NO: 998911 - RNA, 22 nt, Human
ugucuuuacuuaauaaauauac

SEQ ID NO: 998912 - RNA, 19 nt, Human
ggcugucuggcguguggau

SEQ ID NO: 998913 - RNA, 22 nt, Human
aggcugugagcaagaacaccua

SEQ ID NO: 998914 - RNA, 19 nt, Human
aguggcugggcagaagcaa

SEQ ID NO: 998915 - RNA, 22 nt, Human
cuguggugagcaacugacugaa

SEQ ID NO: 998916 - RNA, 22 nt, Human
cuguggcuuuuccggggagccu

SEQ ID NO: 998917 - RNA, 22 nt, Human
gcuuuacauuuuggaaagguga

SEQ ID NO: 998918 - RNA, 18 nt, Human
cgauguguaugugauuug

SEQ ID NO: 998919 - RNA, 22 nt, Human
uuacaguagcuuuauuuggagu

SEQ ID NO: 998920 - RNA, 22 nt, Human
guuacaguuugggcuugauuca

SEQ ID NO: 998921 - RNA, 22 nt, Human
uggccuggugucugcgaggccu

SEQ ID NO: 998922 - RNA, 22 nt, Human
gggcaggaugcaguuucagaga

SEQ ID NO: 998923 - RNA, 23 nt, Human
ugcgugugugcugaggggcgucc

SEQ ID NO: 998924 - RNA, 20 nt, Human
uguuugugccagcuuuguca

SEQ ID NO: 998925 - RNA, 22 nt, Human
ugccugugggugaugauuugau

SEQ ID NO: 998926 - RNA, 22 nt, Human
cugugccucccuuuacuuugag

SEQ ID NO: 998927 - RNA, 19 nt, Human
uuuaaagugacugguauuu

SEQ ID NO: 998928 - RNA, 20 nt, Human
uuaucugucaaucugucuca

SEQ ID NO: 998929 - RNA, 22 nt, Human
cuuuagcaacgaugaugauauu

SEQ ID NO: 998930 - RNA, 23 nt, Human
ggcucugugcuaauugcugaaaa

SEQ ID NO: 998931 - RNA, 22 nt, Human
gagugugugacuucacuuuagc

SEQ ID NO: 998932 - RNA, 22 nt, Human
uacauuaucuuguuaucuuuca

SEQ ID NO: 998933 - RNA, 22 nt, Human
uuguguguguaacuuuaugaga

SEQ ID NO: 998934 - RNA, 22 nt, Human
uuacacuuggguguggauuuua

SEQ ID NO: 998935 - RNA, 22 nt, Human
uggcagugugugagcuguuauu

SEQ ID NO: 998936 - RNA, 23 nt, Human
auuuacagcugugugagcaaguu

SEQ ID NO: 998937 - RNA, 22 nt, Human
cuguggcugucucuuucccaug

SEQ ID NO: 998938 - RNA, 23 nt, Human
ucugauguucucuuaugcuguag

SEQ ID NO: 998939 - RNA, 22 nt, Human
agccacugugcaggagcagugu

SEQ ID NO: 998940 - RNA, 22 nt, Human
uguguggaugcagcgugggucu

SEQ ID NO: 998941 - RNA, 22 nt, Human
guaucuuuaucccucguuggag

SEQ ID NO: 998942 - RNA, 22 nt, Human
ggcugcuggggacgugggagag

SEQ ID NO: 998943 - RNA, 22 nt, Human
uuacauauugucuauuguucaa

SEQ ID NO: 998944 - RNA, 21 nt, Human
ucugggugcuaguguuugcuu

SEQ ID NO: 998945 - RNA, 22 nt, Human
uguuuguggaauauucuuuaag

SEQ ID NO: 998946 - RNA, 22 nt, Human
guggguggaucaccugagguca

SEQ ID NO: 998947 - RNA, 22 nt, Human
gauauuuucauucggaugcuca

SEQ ID NO: 998948 - RNA, 22 nt, Human
aggcugugaagguuaaagacga

SEQ ID NO: 998949 - RNA, 22 nt, Human
acagcauaaucacuucuuucuu

SEQ ID NO: 998950 - RNA, 22 nt, Human
uuaacauuucuuuuccacucau

SEQ ID NO: 998951 - RNA, 22 nt, Human
gggcugugugcccacuucccau

SEQ ID NO: 998952 - RNA, 22 nt, Human
uaccaguaauugcuugugcugu

SEQ ID NO: 998953 - RNA, 22 nt, Human
uguguguauguuuacuuuuccu

SEQ ID NO: 998954 - RNA, 22 nt, Human
cugucuguaucccuguugguaa

SEQ ID NO: 998955 - RNA, 22 nt, Human
caguuuuauacacugcagcucc

SEQ ID NO: 998956 - RNA, 22 nt, Human
cuguacaggagacgucugugca

SEQ ID NO: 998957 - RNA, 22 nt, Human
uuuccucuaaacgcauuugcuu

SEQ ID NO: 998958 - RNA, 22 nt, Human
ugugggugguaaaauacaauga

SEQ ID NO: 998959 - RNA, 22 nt, Human
aggcugugauuccaccacucuc

SEQ ID NO: 998960 - RNA, 22 nt, Human
cccugcagccuugcaugccuuc

SEQ ID NO: 998961 - RNA, 22 nt, Human
cugggguggugcaggccucaug

SEQ ID NO: 998962 - RNA, 22 nt, Human
accaguaugugccuucaguguc

SEQ ID NO: 998963 - RNA, 22 nt, Human
uuuuccugggcuuucuguguaa

SEQ ID NO: 998964 - RNA, 21 nt, Human
cuuuucucuccgcaggacauu

SEQ ID NO: 998965 - RNA, 23 nt, Human
cugugugugccgaggguggccac

SEQ ID NO: 998966 - RNA, 22 nt, Human
uauguguauaccuauacaugug

SEQ ID NO: 998967 - RNA, 22 nt, Human
uuuaggaaguuucagauaggaa

SEQ ID NO: 998968 - RNA, 19 nt, Human
auacaguaagguguuugcc

SEQ ID NO: 998969 - RNA, 22 nt, Human
ucuccugccacugcuucccauu

SEQ ID NO: 998970 - RNA, 22 nt, Human
uucaguauucaaauaugucuua

SEQ ID NO: 998971 - RNA, 22 nt, Human
auguggcuuaguuaggugcccc

SEQ ID NO: 998972 - RNA, 17 nt, Human
ucucuuucccuuucugc

SEQ ID NO: 998973 - RNA, 22 nt, Human
gaacuuuugggaagccguguga

SEQ ID NO: 998974 - RNA, 22 nt, Human
gcagcugccaguccccuuccag

SEQ ID NO: 998975 - RNA, 22 nt, Human
cauguguauuauucuuguggaa

SEQ ID NO: 998976 - RNA, 20 nt, Human
uacaaguacauuauaguuau

SEQ ID NO: 998977 - RNA, 22 nt, Human
ucucuucuugauuuucacugga

SEQ ID NO: 998978 - RNA, 22 nt, Human
ccuguguggccgcacugcuccc

SEQ ID NO: 998979 - RNA, 22 nt, Human
uggaggugacggggccucguug

SEQ ID NO: 998980 - RNA, 22 nt, Human
ucuuuauuuaagucuguuguaa

SEQ ID NO: 998981 - RNA, 22 nt, Human
cccacguugaaccgcuuacaga

SEQ ID NO: 998982 - RNA, 19 nt, Human
uauguguauauguaucugu

SEQ ID NO: 998983 - RNA, 22 nt, Human
auucucucuagaagcugagaug

SEQ ID NO: 998984 - RNA, 22 nt, Human
ugcucuaagaacucuaggaauu

SEQ ID NO: 998985 - RNA, 20 nt, Human
gcccacucuaauccacuguc

SEQ ID NO: 998986 - RNA, 22 nt, Human
aagcugccacacggugaguacu

SEQ ID NO: 998987 - RNA, 22 nt, Human
uuucucugaguuguuacaaaac

SEQ ID NO: 998988 - RNA, 22 nt, Human
uuggcugugaaagcuucucaaa

SEQ ID NO: 998989 - RNA, 22 nt, Human
ugcuggcuguauaugugagagu

SEQ ID NO: 998990 - RNA, 22 nt, Human
cugugugugcuacaggcuucca

SEQ ID NO: 998991 - RNA, 22 nt, Human
uugggguguuggauggagcaag

SEQ ID NO: 998992 - RNA, 22 nt, Human
gugugguggcccuccuucaggc

SEQ ID NO: 998993 - RNA, 22 nt, Human
auauuuuccgaacuugagguag

SEQ ID NO: 998994 - RNA, 22 nt, Human
cuguguagagcggcugcgagcg

SEQ ID NO: 998995 - RNA, 22 nt, Human
acaguauaacuccaugccaccc

SEQ ID NO: 998996 - RNA, 22 nt, Human
auguggcugaucgcagagcucu

SEQ ID NO: 998997 - RNA, 22 nt, Human
cuauuuucugucucuauagagu

SEQ ID NO: 998998 - RNA, 22 nt, Human
uggcauguauuuguggugaauu

SEQ ID NO: 998999 - RNA, 22 nt, Human
aguggcugacaacuggguuaac

SEQ ID NO: 999000 - RNA, 22 nt, Human
acaguaaugauucugagucucu

SEQ ID NO: 999001 - RNA, 22 nt, Human
uguggcugggaagaagguaacu

SEQ ID NO: 999002 - RNA, 22 nt, Human
uacuguauacuacugcuguucu

SEQ ID NO: 999003 - RNA, 22 nt, Human
cuuauuuugcugaugacccagg

SEQ ID NO: 999004 - RNA, 22 nt, Human
uggcucugcaccucaguguacc

SEQ ID NO: 999005 - RNA, 22 nt, Human
ggcuguguccuguaugauuauu

SEQ ID NO: 999006 - RNA, 22 nt, Human
auuuucuucucucccuggcugc

SEQ ID NO: 999007 - RNA, 22 nt, Human
acuuucucaggaauucacagac

SEQ ID NO: 999008 - RNA, 22 nt, Human
uucugcuccaccacuuccagca

SEQ ID NO: 999009 - RNA, 21 nt, Human
ugagggguuauaacagggugg

SEQ ID NO: 999010 - RNA, 22 nt, Human
guguggcuaccucagaggagca

SEQ ID NO: 999011 - RNA, 22 nt, Human
guuauuuuaacuucucaguaau

SEQ ID NO: 999012 - RNA, 23 nt, Human
agcugugugcgcguccggguucu

SEQ ID NO: 999013 - RNA, 22 nt, Human
gcugugauugucagucuucaau

SEQ ID NO: 999014 - RNA, 22 nt, Human
auauauuuugcggucacguggc

SEQ ID NO: 999015 - RNA, 22 nt, Human
cuuucucuucacugucaugauc

SEQ ID NO: 999016 - RNA, 22 nt, Human
uuuccucuuauacaguguuuau

SEQ ID NO: 999017 - RNA, 22 nt, Human
uuuauuugucuugccauuuagu

SEQ ID NO: 999018 - RNA, 22 nt, Human
acaguuauauacauguagcugu

SEQ ID NO: 999019 - RNA, 22 nt, Human
gcccacuccagcuucucccaca

SEQ ID NO: 999020 - RNA, 22 nt, Human
ucucaucugccauuugcaggag

SEQ ID NO: 999021 - RNA, 22 nt, Human
ucuugacaacuauacuacuuac

SEQ ID NO: 999022 - RNA, 22 nt, Human
ugucuuuaguugcuuagauuug

SEQ ID NO: 999023 - RNA, 22 nt, Human
agcuguguggugucugacagcu

SEQ ID NO: 999024 - RNA, 22 nt, Human
auuuacagugugccuacuauau

SEQ ID NO: 999025 - RNA, 22 nt, Human
ugugucuguccucgguugaugc

SEQ ID NO: 999026 - RNA, 22 nt, Human
gcucucugcagccuccuuggag

SEQ ID NO: 999027 - RNA, 17 nt, Human
uauguguguuugcagca

SEQ ID NO: 999028 - RNA, 22 nt, Human
ucuucuacuauaauaauuuucu

SEQ ID NO: 999029 - RNA, 22 nt, Human
uacagauauauagugugugccu

SEQ ID NO: 999030 - RNA, 22 nt, Human
ucuuucuucuuucauaguguga

SEQ ID NO: 999031 - RNA, 22 nt, Human
uuacauuagacccacuuucaug

SEQ ID NO: 999032 - RNA, 22 nt, Human
aggggugauuugggacaggaca

SEQ ID NO: 999033 - RNA, 20 nt, Human
ggcaguuaaggcacagucau

SEQ ID NO: 999034 - RNA, 19 nt, Human
uuuucucagcuucuagcgg

SEQ ID NO: 999035 - RNA, 22 nt, Human
cugugucuccuuggugggauau

SEQ ID NO: 999036 - RNA, 22 nt, Human
gcgugugugauaugccucugca

SEQ ID NO: 999037 - RNA, 21 nt, Human
ucuguggcagcaugaugaggu

SEQ ID NO: 999038 - RNA, 22 nt, Human
caguuuuaaauuguuagauaau

SEQ ID NO: 999039 - RNA, 22 nt, Human
cuacaguagagaggauguagaa

SEQ ID NO: 999040 - RNA, 22 nt, Human
augcuguggggagugaggguag

SEQ ID NO: 999041 - RNA, 22 nt, Human
auguauauacuuacaugugugg

SEQ ID NO: 999042 - RNA, 22 nt, Human
cuguggcuucagcauucagagc

SEQ ID NO: 999043 - RNA, 23 nt, Human
ucucuuaucacaauucauuuugc

SEQ ID NO: 999044 - RNA, 22 nt, Human
cuguguacccacgugggcaccc

SEQ ID NO: 999045 - RNA, 22 nt, Human
uuaacuuuuauuucugcucgcc

SEQ ID NO: 999046 - RNA, 22 nt, Human
uggcuaguaggugaguagugcu

SEQ ID NO: 999047 - RNA, 22 nt, Human
agcugugugugaauuuggccua

SEQ ID NO: 999048 - RNA, 22 nt, Human
uuccuguucaggaaaguugugu

SEQ ID NO: 999049 - RNA, 22 nt, Human
cuuaacagcaagaucuguguca

SEQ ID NO: 999050 - RNA, 22 nt, Human
caggcagugucccaggaagcca

SEQ ID NO: 999051 - RNA, 22 nt, Human
ucaguauagcuucuaaacuaac

SEQ ID NO: 999052 - RNA, 22 nt, Human
aacaguaucuacgggaacuauu

SEQ ID NO: 999053 - RNA, 22 nt, Human
ugucuguauugaggugcauauu

SEQ ID NO: 999054 - RNA, 22 nt, Human
ugugcuauuuuugcauaugugu

SEQ ID NO: 999055 - RNA, 22 nt, Human
uuauuuucagcuaggaaagcca

SEQ ID NO: 999056 - RNA, 22 nt, Human
aggcuguguccucauuuuauau

SEQ ID NO: 999057 - RNA, 19 nt, Human
cuauacagccucugaggaa

SEQ ID NO: 999058 - RNA, 22 nt, Human
aguauguugaguuuugcuuuag

SEQ ID NO: 999059 - RNA, 17 nt, Human
uauggcuguguuugugc

SEQ ID NO: 999060 - RNA, 22 nt, Human
ccugugugucugucacugcaca

SEQ ID NO: 999061 - RNA, 22 nt, Human
uucucuuuuugcaucucaaccu

SEQ ID NO: 999062 - RNA, 22 nt, Human
aggcugugaggggcccgcaugc

SEQ ID NO: 999063 - RNA, 22 nt, Human
guuucucuguaccucuguccca

SEQ ID NO: 999064 - RNA, 22 nt, Human
ugugugcauucacaugcaugcc

SEQ ID NO: 999065 - RNA, 22 nt, Human
gauauauuuuccauggucugca

SEQ ID NO: 999066 - RNA, 20 nt, Human
acugugugaucuggaaagcu

SEQ ID NO: 999067 - RNA, 22 nt, Human
uauauuguaggugcuauuugaa

SEQ ID NO: 999068 - RNA, 22 nt, Human
ugugugccagccuacgaggagc

SEQ ID NO: 999069 - RNA, 22 nt, Human
ccugugugcugaugacgacaga

SEQ ID NO: 999070 - RNA, 22 nt, Human
uucucuuuauguauuuaguggg

SEQ ID NO: 999071 - RNA, 22 nt, Human
uauauucuuaccaguguaugua

SEQ ID NO: 999072 - RNA, 22 nt, Human
cuuuacagcuuagugguaugga

SEQ ID NO: 999073 - RNA, 22 nt, Human
ugugugugugcgcgcacgcaua

SEQ ID NO: 999074 - RNA, 22 nt, Human
ugugugggcgaagacagccuuu

SEQ ID NO: 999075 - RNA, 22 nt, Human
cuucacagucuuuauuuccucc

SEQ ID NO: 999076 - RNA, 22 nt, Human
caguauauucugcagagccuua

SEQ ID NO: 999077 - RNA, 22 nt, Human
uaaccuuuuuaucuuaccucca

SEQ ID NO: 999078 - RNA, 22 nt, Human
guauuuucaugauuucagacca

SEQ ID NO: 999079 - RNA, 22 nt, Human
guggcugcagcggcuguggaga

SEQ ID NO: 999080 - RNA, 23 nt, Human
uaucauuucagcucucugccugg

SEQ ID NO: 999081 - RNA, 22 nt, Human
ccugucuguccuuugcauucuu

SEQ ID NO: 999082 - RNA, 17 nt, Human
aucucucuaaggcaggc

SEQ ID NO: 999083 - RNA, 22 nt, Human
auuguucuaaggguuuaauuaa

SEQ ID NO: 999084 - RNA, 18 nt, Human
ucugucuguguugucuuu

SEQ ID NO: 999085 - RNA, 22 nt, Human
uguguguguuccuccucagcua

SEQ ID NO: 999086 - RNA, 22 nt, Human
uuucuaucuaggguuagaguga

SEQ ID NO: 999087 - RNA, 22 nt, Human
uaccaguaauguaacuuugcaa

SEQ ID NO: 999088 - RNA, 22 nt, Human
uguauguguauguacauaugca

SEQ ID NO: 999089 - RNA, 22 nt, Human
ucuacuuuauaaguauauaagu

SEQ ID NO: 999090 - RNA, 22 nt, Human
ugcagcugguaucccauggauu

SEQ ID NO: 999091 - RNA, 20 nt, Human
ccugugugguuugcacuaca

SEQ ID NO: 999092 - RNA, 22 nt, Human
aucuuuacaagaaauucuuuua

SEQ ID NO: 999093 - RNA, 22 nt, Human
gauuuucugagccuucaaauuu

SEQ ID NO: 999094 - RNA, 22 nt, Human
cuugacagaagguuuuauccua

SEQ ID NO: 999095 - RNA, 22 nt, Human
ucuguuugcuggugcauggguu

SEQ ID NO: 999096 - RNA, 22 nt, Human
cuuuuauuuugaauuaagggcu

SEQ ID NO: 999097 - RNA, 22 nt, Human
aucuguguaugaaaguauaacu

SEQ ID NO: 999098 - RNA, 22 nt, Human
cugucuuuucauacuuucccuc

SEQ ID NO: 999099 - RNA, 22 nt, Human
agggggugcauuugugaaugaa

SEQ ID NO: 999100 - RNA, 22 nt, Human
auguguauugagcaccuacugc

SEQ ID NO: 999101 - RNA, 22 nt, Human
guacaguaaauguaaauggauu

SEQ ID NO: 999102 - RNA, 22 nt, Human
gugugugugcauauaacauaua

SEQ ID NO: 999103 - RNA, 22 nt, Human
uguggcugcucaggugcagacc

SEQ ID NO: 999104 - RNA, 22 nt, Human
uucuaacuaaagucuuuguuuu

SEQ ID NO: 999105 - RNA, 22 nt, Human
cucugugugcuggugggguccu

SEQ ID NO: 999106 - RNA, 22 nt, Human
gugugucuuucauuucaugagg

SEQ ID NO: 999107 - RNA, 22 nt, Human
cuguguuugacaggcggucucc

SEQ ID NO: 999108 - RNA, 22 nt, Human
gcucucuuuccauguggaggau

SEQ ID NO: 999109 - RNA, 22 nt, Human
uauguguguuucaguggaaaug

SEQ ID NO: 999110 - RNA, 22 nt, Human
ugcggguugguggcauaugcag

SEQ ID NO: 999111 - RNA, 22 nt, Human
uggccugggugcugcugacauc

SEQ ID NO: 999112 - RNA, 23 nt, Human
uugacaguaggugguuuucauug

SEQ ID NO: 999113 - RNA, 22 nt, Human
uauguguguaugacagacagag

SEQ ID NO: 999114 - RNA, 22 nt, Human
uuugacagugaugauauauaca

SEQ ID NO: 999115 - RNA, 22 nt, Human
cauauuuuaguugcugaacagc

SEQ ID NO: 999116 - RNA, 22 nt, Human
uuuucuguauuauugugcuuca

SEQ ID NO: 999117 - RNA, 16 nt, Human
uuguggcuuuugcaca

SEQ ID NO: 999118 - RNA, 22 nt, Human
ccauggccucgcucuacguggg

SEQ ID NO: 999119 - RNA, 22 nt, Human
cuuauuuuaagucaguuugggu

SEQ ID NO: 999120 - RNA, 22 nt, Human
auuuacagaaacuuaaucauag

SEQ ID NO: 999121 - RNA, 22 nt, Human
caguauaaugcccccugugggg

SEQ ID NO: 999122 - RNA, 22 nt, Human
uucguguggagauguuucugca

SEQ ID NO: 999123 - RNA, 22 nt, Human
cagugugugacucuggggguac

SEQ ID NO: 999124 - RNA, 21 nt, Human
aguggcugucaagggggccuu

SEQ ID NO: 999125 - RNA, 22 nt, Human
ucuuuacaguccucugucaauc

SEQ ID NO: 999126 - RNA, 22 nt, Human
ggcugguguugagugccuguag

SEQ ID NO: 999127 - RNA, 22 nt, Human
guuuacaguacucacuugcauu

SEQ ID NO: 999128 - RNA, 22 nt, Human
uuuacaguuaagaaauguuacc

SEQ ID NO: 999129 - RNA, 22 nt, Human
ucuacagugucaaugugucuug

SEQ ID NO: 999130 - RNA, 22 nt, Human
uggcugugccucuuuccaggcc

SEQ ID NO: 999131 - RNA, 23 nt, Human
uggcugagguccagguaguuuca

SEQ ID NO: 999132 - RNA, 16 nt, Human
gggggugagagagagu

SEQ ID NO: 999133 - RNA, 22 nt, Human
uuuuuaucuuguaugugucucu

SEQ ID NO: 999134 - RNA, 22 nt, Human
agcuguguuauuagaaaccugc

SEQ ID NO: 999135 - RNA, 22 nt, Human
acucucugggcaugccccacca

SEQ ID NO: 999136 - RNA, 22 nt, Human
ugcuguggcaguuuauguauag

SEQ ID NO: 999137 - RNA, 22 nt, Human
gcuggaggauggacuggaagaa

SEQ ID NO: 999138 - RNA, 22 nt, Human
uauguguaaccuugugauuuau

SEQ ID NO: 999139 - RNA, 22 nt, Human
gccgugggugucauggcccaua

SEQ ID NO: 999140 - RNA, 22 nt, Human
ugguggccgaagcccucucuca

SEQ ID NO: 999141 - RNA, 22 nt, Human
gaguauauaauuaauuggucug

SEQ ID NO: 999142 - RNA, 22 nt, Human
ggacugugaggucugggugagg

SEQ ID NO: 999143 - RNA, 22 nt, Human
ucuuuaacaggaauuauuacag

SEQ ID NO: 999144 - RNA, 22 nt, Human
ucugucuuagcaucuuugcuca

SEQ ID NO: 999145 - RNA, 22 nt, Human
aggcugugcacagggcaccugc

SEQ ID NO: 999146 - RNA, 22 nt, Human
cacuauaucuguucuuguuuau

SEQ ID NO: 999147 - RNA, 22 nt, Human
uuucucucugacugggagcuga

SEQ ID NO: 999148 - RNA, 22 nt, Human
uuuacagaucuguugauuuguu

SEQ ID NO: 999149 - RNA, 22 nt, Human
uacaguauggaaaauguauagu

SEQ ID NO: 999150 - RNA, 21 nt, Human
ugugugcauaugcauguacau

SEQ ID NO: 999151 - RNA, 22 nt, Human
gauauuuuugcagacaccuggg

SEQ ID NO: 999152 - RNA, 22 nt, Human
uaggggugggauccaggaauua

SEQ ID NO: 999153 - RNA, 22 nt, Human
uuugcaguguucaucaguauuu

SEQ ID NO: 999154 - RNA, 22 nt, Human
ugcucuguccagugcaccauca

SEQ ID NO: 999155 - RNA, 22 nt, Human
gcugugugcugggcauggcacu

SEQ ID NO: 999156 - RNA, 22 nt, Human
aggcugugagagguggcuccca

SEQ ID NO: 999157 - RNA, 22 nt, Human
agcauauugucuuuggugucuc

SEQ ID NO: 999158 - RNA, 22 nt, Human
aaacuuuuucuuagguaugucu

SEQ ID NO: 999159 - RNA, 22 nt, Human
cuguguguuuauaucauuuccu

SEQ ID NO: 999160 - RNA, 21 nt, Human
ugcaccugugccccauccuuc

SEQ ID NO: 999161 - RNA, 22 nt, Human
uguauuuucagaguggcauuuc

SEQ ID NO: 999162 - RNA, 22 nt, Human
uguauuuuuaggaaugcgcuau

SEQ ID NO: 999163 - RNA, 22 nt, Human
uguguauagguugugcuaauag

SEQ ID NO: 999164 - RNA, 22 nt, Human
uucacagugagcuaugucuugu

SEQ ID NO: 999165 - RNA, 22 nt, Human
caggauauaucucuaguguugg

SEQ ID NO: 999166 - RNA, 22 nt, Human
ggcuguguccccaccugagcag

SEQ ID NO: 999167 - RNA, 22 nt, Human
gugggugugguucguuuaagac

SEQ ID NO: 999168 - RNA, 22 nt, Human
cugugcugggugugcuuaugau

SEQ ID NO: 999169 - RNA, 22 nt, Human
ugagggcagagcacuggggagc

SEQ ID NO: 999170 - RNA, 22 nt, Human
ggccuggaaggacagcgugaug

SEQ ID NO: 999171 - RNA, 22 nt, Human
cugcugccccugagcucagccu

SEQ ID NO: 999172 - RNA, 22 nt, Human
ggaagaaagguggacaacaggu

SEQ ID NO: 999173 - RNA, 22 nt, Human
ugugugaaggagccacuguuca

SEQ ID NO: 999174 - RNA, 22 nt, Human
cuuucucuggaggggagugguu

SEQ ID NO: 999175 - RNA, 22 nt, Human
auuacaguggacagcuaugcac

SEQ ID NO: 999176 - RNA, 22 nt, Human
uugacuuuacaguuuucuuagg

SEQ ID NO: 999177 - RNA, 22 nt, Human
ucucuacagaaucuuauuauug

SEQ ID NO: 999178 - RNA, 22 nt, Human
ucaucucucaggauaccagcag

SEQ ID NO: 999179 - RNA, 22 nt, Human
uucuacagaauaaauguuuaca

SEQ ID NO: 999180 - RNA, 22 nt, Human
uggcucugggcaccguguccac

SEQ ID NO: 999181 - RNA, 22 nt, Human
cucuucuugaaagaggaauuca

SEQ ID NO: 999182 - RNA, 22 nt, Human
uucucucuuuuggguaggaggu

SEQ ID NO: 999183 - RNA, 20 nt, Human
acuuucucgguuucucaccu

SEQ ID NO: 999184 - RNA, 22 nt, Human
uguggcugaucaaagcgcucag

SEQ ID NO: 999185 - RNA, 22 nt, Human
cugugugugagaagcagguuga

SEQ ID NO: 999186 - RNA, 22 nt, Human
cuuucucuguguuucacaugcu

SEQ ID NO: 999187 - RNA, 22 nt, Human
uuacacguguguguaucuguau

SEQ ID NO: 999188 - RNA, 22 nt, Human
ugugacuggcagaggugucugg

SEQ ID NO: 999189 - RNA, 18 nt, Human
cucucuuuccacucuuug

SEQ ID NO: 999190 - RNA, 22 nt, Human
guuuuauuggaacacagccaug

SEQ ID NO: 999191 - RNA, 22 nt, Human
cugugucucauccgccucuggc

SEQ ID NO: 999192 - RNA, 22 nt, Human
guaacuuuggauuuaggguacc

SEQ ID NO: 999193 - RNA, 22 nt, Human
aacuuuuguccgaucuccugga

SEQ ID NO: 999194 - RNA, 22 nt, Human
aucuuuacuuucagugcugagc

SEQ ID NO: 999195 - RNA, 22 nt, Human
uucuaacuccacuucccacucc

SEQ ID NO: 999196 - RNA, 22 nt, Human
cucucuuugauguauaaauaau

SEQ ID NO: 999197 - RNA, 22 nt, Human
uuuuucuggauaacuguaucuc

SEQ ID NO: 999198 - RNA, 19 nt, Human
aggcugugagggaggacuc

SEQ ID NO: 999199 - RNA, 22 nt, Human
uuuuacaggugugagccaccau

SEQ ID NO: 999200 - RNA, 22 nt, Human
gugugucugaaguugaguagac

SEQ ID NO: 999201 - RNA, 22 nt, Human
guggagggaaugaaucuucucu

SEQ ID NO: 999202 - RNA, 19 nt, Human
cucucagccugucuccuug

SEQ ID NO: 999203 - RNA, 22 nt, Human
auuuuuaugacaaaccauccuc

SEQ ID NO: 999204 - RNA, 22 nt, Human
cugcugcugcuaucuacccagg

SEQ ID NO: 999205 - RNA, 22 nt, Human
uucucuuuuagaggcuccauga

SEQ ID NO: 999206 - RNA, 22 nt, Human
cacaguaugaucuaaaguaagu

SEQ ID NO: 999207 - RNA, 22 nt, Human
acagauauguuggguucuuguu

SEQ ID NO: 999208 - RNA, 22 nt, Human
uuccucucucuugccagaaugu

SEQ ID NO: 999209 - RNA, 21 nt, Human
auuagaagguauuuagggccu

SEQ ID NO: 999210 - RNA, 22 nt, Human
ucuguggcgcauaguugucucu

SEQ ID NO: 999211 - RNA, 22 nt, Human
auguguauuuauuuggggcuua

SEQ ID NO: 999212 - RNA, 22 nt, Human
uucacaguggcccucucugagu

SEQ ID NO: 999213 - RNA, 17 nt, Human
ucugcucugccaaucca

SEQ ID NO: 999214 - RNA, 22 nt, Human
uucucucuuccaguucccacuu

SEQ ID NO: 999215 - RNA, 22 nt, Human
gcuguguucauuuugcauaugu

SEQ ID NO: 999216 - RNA, 21 nt, Human
ucucugugucuuuaagcugga

SEQ ID NO: 999217 - RNA, 23 nt, Human
uguguguguauucuacgcaaggu

SEQ ID NO: 999218 - RNA, 22 nt, Human
auucuucugccuacuuucaucc

SEQ ID NO: 999219 - RNA, 22 nt, Human
cuggagggacuuucucacggau

SEQ ID NO: 999220 - RNA, 22 nt, Human
acugugugcccugacgccaggg

SEQ ID NO: 999221 - RNA, 22 nt, Human
uuggcuguuuuauaggucaguu

SEQ ID NO: 999222 - RNA, 22 nt, Human
uacaguaggauuuucagggucu

SEQ ID NO: 999223 - RNA, 21 nt, Human
uguuacaguccaaauguuugu

SEQ ID NO: 999224 - RNA, 22 nt, Human
uguggcuggauugauuuuaccu

SEQ ID NO: 999225 - RNA, 22 nt, Human
aaacuuuuccugcucuuguccu

SEQ ID NO: 999226 - RNA, 22 nt, Human
auguggcuagggaauaaaauau

SEQ ID NO: 999227 - RNA, 23 nt, Human
uuguacagcccagauuccucuuc

SEQ ID NO: 999228 - RNA, 22 nt, Human
uuucucuuucaaucugcaguac

SEQ ID NO: 999229 - RNA, 21 nt, Human
aggcugugacuuacacuaucu

SEQ ID NO: 999230 - RNA, 22 nt, Human
cuuucacagccuucguucugaa

SEQ ID NO: 999231 - RNA, 22 nt, Human
augugugguuuaagaauugaau

SEQ ID NO: 999232 - RNA, 22 nt, Human
guuauauucaaaaugaggcugu

SEQ ID NO: 999233 - RNA, 22 nt, Human
guuaacuuuuuacagaaaugaa

SEQ ID NO: 999234 - RNA, 22 nt, Human
guguggcuaggauggcuuugcu

SEQ ID NO: 999235 - RNA, 23 nt, Human
ugucuggcucauggugggucuca

SEQ ID NO: 999236 - RNA, 22 nt, Human
aucauuuuauggcugagaggac

SEQ ID NO: 999237 - RNA, 22 nt, Human
uuuacauggaauauugucuugu

SEQ ID NO: 999238 - RNA, 22 nt, Human
ccaccaugggaagagagacuaa

SEQ ID NO: 999239 - RNA, 22 nt, Human
auguguaucuaagguguucuau

SEQ ID NO: 999240 - RNA, 22 nt, Human
uggcauguuuaauguacuguau

SEQ ID NO: 999241 - RNA, 22 nt, Human
ucuguggcuuucuuauguugua

SEQ ID NO: 999242 - RNA, 22 nt, Human
uuuauauugggagucguuuuga

SEQ ID NO: 999243 - RNA, 22 nt, Human
uuguaacuuugcauacuccugu

SEQ ID NO: 999244 - RNA, 22 nt, Human
acaguacauaauccugagucug

SEQ ID NO: 999245 - RNA, 22 nt, Human
gcuggagggguaauaggauggg

SEQ ID NO: 999246 - RNA, 22 nt, Human
auguggcuagugcagaugaaua

SEQ ID NO: 999247 - RNA, 22 nt, Human
ucugucuucuguagcuaauaau

SEQ ID NO: 999248 - RNA, 22 nt, Human
ucucuguguguuggcuguauau

SEQ ID NO: 999249 - RNA, 22 nt, Human
uuuaucuuuggaucuucagaaa

SEQ ID NO: 999250 - RNA, 19 nt, Human
uugugugucagucagaguu

SEQ ID NO: 999251 - RNA, 22 nt, Human
uguguguacucuccaguccuga

SEQ ID NO: 999252 - RNA, 22 nt, Human
gcaguauaaguggauuaugucc

SEQ ID NO: 999253 - RNA, 22 nt, Human
uucucuuuugugaugugagaug

SEQ ID NO: 999254 - RNA, 22 nt, Human
uacuuuuuagcacagugugugc

SEQ ID NO: 999255 - RNA, 22 nt, Human
aggggugugcauccuggaggau

SEQ ID NO: 999256 - RNA, 22 nt, Human
ugugugggagcacgggcuguug

SEQ ID NO: 999257 - RNA, 18 nt, Human
aacaguuuccagauucuc

SEQ ID NO: 999258 - RNA, 20 nt, Human
gaguauauuucuuccuuugc

SEQ ID NO: 999259 - RNA, 22 nt, Human
uguguguccuugaccucagugg

SEQ ID NO: 999260 - RNA, 22 nt, Human
uuucucacccaagaguuauuuu

SEQ ID NO: 999261 - RNA, 21 nt, Human
uaacuuuugugccuaucuugu

SEQ ID NO: 999262 - RNA, 22 nt, Human
uacaguauguucuugaauuugg

SEQ ID NO: 999263 - RNA, 21 nt, Human
ccugugugucugacugggcua

SEQ ID NO: 999264 - RNA, 22 nt, Human
uuuaguuugauguucuacuccu

SEQ ID NO: 999265 - RNA, 22 nt, Human
ugugugucauuuaggguggagc

SEQ ID NO: 999266 - RNA, 22 nt, Human
aggcuguguuuccccuggagcu

SEQ ID NO: 999267 - RNA, 21 nt, Human
ucuuugcaucaguuguuuucu

SEQ ID NO: 999268 - RNA, 22 nt, Human
ucugcuguacuuuuggucuguu

SEQ ID NO: 999269 - RNA, 22 nt, Human
ucuucacaucauguuuuuuaau

SEQ ID NO: 999270 - RNA, 22 nt, Human
cuuuuuuaagguagcuccuccu

SEQ ID NO: 999271 - RNA, 22 nt, Human
gucauauuauaaauguucuguu

SEQ ID NO: 999272 - RNA, 22 nt, Human
guguguggcaaacugggccugc

SEQ ID NO: 999273 - RNA, 22 nt, Human
gugcccaguaaaugaaagcuuu

SEQ ID NO: 999274 - RNA, 22 nt, Human
gcucucuggaggccauggacag

SEQ ID NO: 999275 - RNA, 22 nt, Human
acaguauuugcgauacugauga

SEQ ID NO: 999276 - RNA, 20 nt, Human
aguggcugauggaaagaagc

SEQ ID NO: 999277 - RNA, 22 nt, Human
uaacuuuucuaggugugauaau

SEQ ID NO: 999278 - RNA, 22 nt, Human
uucucuuuucaccaguugcuaa

SEQ ID NO: 999279 - RNA, 22 nt, Human
agccaguuuccagauauuaacu

SEQ ID NO: 999280 - RNA, 22 nt, Human
ccacugccagcuuuguccuccc

SEQ ID NO: 999281 - RNA, 23 nt, Human
guguguggaaagugcaugggccu

SEQ ID NO: 999282 - RNA, 22 nt, Human
ggugcugccuauagucugaaac

SEQ ID NO: 999283 - RNA, 22 nt, Human
cuuuacaggaaaagguggcugu

SEQ ID NO: 999284 - RNA, 22 nt, Human
ugucuuuaguuuuacugucugg

SEQ ID NO: 999285 - RNA, 22 nt, Human
uuuaacuuagaagagauauccu

SEQ ID NO: 999286 - RNA, 22 nt, Human
gaggggugggcuggaaguuaua

SEQ ID NO: 999287 - RNA, 22 nt, Human
agccccacacucucucugagaa

SEQ ID NO: 999288 - RNA, 22 nt, Human
cauuuacagugagaguuuuuac

SEQ ID NO: 999289 - RNA, 22 nt, Human
ucuguacaaaggcuauuuggag

SEQ ID NO: 999290 - RNA, 22 nt, Human
uguguuuguuagacuaauguua

SEQ ID NO: 999291 - RNA, 22 nt, Human
auuacaguaacagcuacaaugc

SEQ ID NO: 999292 - RNA, 22 nt, Human
uguguauaaacaagagucugug

SEQ ID NO: 999293 - RNA, 22 nt, Human
aggcugugggugauuuacugug

SEQ ID NO: 999294 - RNA, 22 nt, Human
uguguguauaugcauuuaucua

SEQ ID NO: 999295 - RNA, 22 nt, Human
gggcuguggagccgcgagggcu

SEQ ID NO: 999296 - RNA, 22 nt, Human
ugugugaccuggggugagauag

SEQ ID NO: 999297 - RNA, 22 nt, Human
gucugugugcacagagcuuugg

SEQ ID NO: 999298 - RNA, 22 nt, Human
gcaguauauacucuuugagggg

SEQ ID NO: 999299 - RNA, 22 nt, Human
acuguguggaccacucugaggc

SEQ ID NO: 999300 - RNA, 22 nt, Human
ucauuuacaugucuuucucuga

SEQ ID NO: 999301 - RNA, 22 nt, Human
ggcugaugggcaugagcuguca

SEQ ID NO: 999302 - RNA, 22 nt, Human
ucucuguggugggaggcugagu

SEQ ID NO: 999303 - RNA, 22 nt, Human
uuugugugguggauacugggua

SEQ ID NO: 999304 - RNA, 22 nt, Human
acucuuuagagguacaucucuu

SEQ ID NO: 999305 - RNA, 20 nt, Human
uaucaguaggauauucugcc

SEQ ID NO: 999306 - RNA, 22 nt, Human
uccugugugggcaggaugagaa

SEQ ID NO: 999307 - RNA, 22 nt, Human
uggcugagaaugggaugaugcc

SEQ ID NO: 999308 - RNA, 22 nt, Human
cuguggcuguauuuggccagag

SEQ ID NO: 999309 - RNA, 23 nt, Human
cugcugugaaacaugguuuuggu

SEQ ID NO: 999310 - RNA, 22 nt, Human
caagggugguauugggagcaua

SEQ ID NO: 999311 - RNA, 22 nt, Human
cuuucucugugugguaaagggc

SEQ ID NO: 999312 - RNA, 22 nt, Human
caguuuuauugguugaaaucug

SEQ ID NO: 999313 - RNA, 22 nt, Human
uguuuguaucucucucuguggc

SEQ ID NO: 999314 - RNA, 17 nt, Human
uauguguguguuuauac

SEQ ID NO: 999315 - RNA, 22 nt, Human
agcugcccugggcuggagaugg

SEQ ID NO: 999316 - RNA, 22 nt, Human
gagcugccggcccacaguacua

SEQ ID NO: 999317 - RNA, 22 nt, Human
uguggcugcaggcgauggagga

SEQ ID NO: 999318 - RNA, 22 nt, Human
auuuucaucgcuagguuggccu

SEQ ID NO: 999319 - RNA, 22 nt, Human
uauguuuccugagcuuacacca

SEQ ID NO: 999320 - RNA, 22 nt, Human
guuuuuauauccuguggagugu

SEQ ID NO: 999321 - RNA, 22 nt, Human
uuaguuuucucaucuaucucac

SEQ ID NO: 999322 - RNA, 22 nt, Human
uauuuugcaaaccugaguuuga

SEQ ID NO: 999323 - RNA, 22 nt, Human
gcuggcugaguucugucgucug

SEQ ID NO: 999324 - RNA, 22 nt, Human
uguguguucucaauuauugaug

SEQ ID NO: 999325 - RNA, 22 nt, Human
uuauuugccagaauuucucuug

SEQ ID NO: 999326 - RNA, 22 nt, Human
aggcggugcuguggacagugac

SEQ ID NO: 999327 - RNA, 23 nt, Human
uguaacuucuuaaauucuucacu

SEQ ID NO: 999328 - RNA, 22 nt, Human
uaguauuugcagauuuguguca

SEQ ID NO: 999329 - RNA, 22 nt, Human
uuguguguuuguagaaaaucca

SEQ ID NO: 999330 - RNA, 22 nt, Human
gaaggcagguuuuucaaaacug

SEQ ID NO: 999331 - RNA, 22 nt, Human
auucucuguucaaggaugguga

SEQ ID NO: 999332 - RNA, 22 nt, Human
acagaauauugguuacuguugc

SEQ ID NO: 999333 - RNA, 22 nt, Human
ccuguguggccaggcuggaguc

SEQ ID NO: 999334 - RNA, 22 nt, Human
ucucuccugcacugaauuaugu

SEQ ID NO: 999335 - RNA, 22 nt, Human
ugucucuugaguuuguuuuaau

SEQ ID NO: 999336 - RNA, 22 nt, Human
auacaguauuaccuguucagga

SEQ ID NO: 999337 - RNA, 22 nt, Human
aguggcuguacuauuuuuucau

SEQ ID NO: 999338 - RNA, 22 nt, Human
aggcugugagaaguccuucagu

SEQ ID NO: 999339 - RNA, 22 nt, Human
cauguauagcaaauauuuguuc

SEQ ID NO: 999340 - RNA, 22 nt, Human
uuuagaguugguccccugugag

SEQ ID NO: 999341 - RNA, 23 nt, Human
ccacgucugcacuguagcuguug

SEQ ID NO: 999342 - RNA, 22 nt, Human
aguguaugucaaguauauacac

SEQ ID NO: 999343 - RNA, 22 nt, Human
cucuguguuccggguugcugcu

SEQ ID NO: 999344 - RNA, 22 nt, Human
cuguguagccucaugugggcuu

SEQ ID NO: 999345 - RNA, 22 nt, Human
ugcagccaucgcagagucugua

SEQ ID NO: 999346 - RNA, 22 nt, Human
ugcaguguuuggaugcugaguc

SEQ ID NO: 999347 - RNA, 20 nt, Human
ugaguggccacugggucgca

SEQ ID NO: 999348 - RNA, 22 nt, Human
gacagcuggcaguggaaaggug

SEQ ID NO: 999349 - RNA, 22 nt, Human
gcccagcccugaggucacagcu

SEQ ID NO: 999350 - RNA, 22 nt, Human
gucuggcuuuugcccuguguuu

SEQ ID NO: 999351 - RNA, 22 nt, Human
uauuuucuguggaggaccagau

SEQ ID NO: 999352 - RNA, 22 nt, Human
acguauauugaaauaucaugag

SEQ ID NO: 999353 - RNA, 22 nt, Human
uguuugugcugccuggugggca

SEQ ID NO: 999354 - RNA, 22 nt, Human
ugugccuggucccugagucgag

SEQ ID NO: 999355 - RNA, 22 nt, Human
cugcugugcaggugccuaugau

SEQ ID NO: 999356 - RNA, 22 nt, Human
uuuaucugugggaguuguuugg

SEQ ID NO: 999357 - RNA, 22 nt, Human
cucucugggguuccagacgugg

SEQ ID NO: 999358 - RNA, 22 nt, Human
uuuacaguuccaugugauaggc

SEQ ID NO: 999359 - RNA, 22 nt, Human
auucuucuugagucuuggacuc

SEQ ID NO: 999360 - RNA, 22 nt, Human
uguucucucuggcugccaguac

SEQ ID NO: 999361 - RNA, 22 nt, Human
guuuuuauuguguaaauguggg

SEQ ID NO: 999362 - RNA, 22 nt, Human
aggcuguggaugcuuaacaaau

SEQ ID NO: 999363 - RNA, 22 nt, Human
ggggcagcucccgagggcagga

SEQ ID NO: 999364 - RNA, 22 nt, Human
cuauauuucuuggcuuuaaaca

SEQ ID NO: 999365 - RNA, 22 nt, Human
auuugucucucuggguuuacuu

SEQ ID NO: 999366 - RNA, 19 nt, Human
gucuguguauuuguugcug

SEQ ID NO: 999367 - RNA, 22 nt, Human
acugugugaaacaucaaugugu

SEQ ID NO: 999368 - RNA, 22 nt, Human
uuuucaguuacuguuuauguga

SEQ ID NO: 999369 - RNA, 22 nt, Human
auacaguauaacuaauaaaccc

SEQ ID NO: 999370 - RNA, 22 nt, Human
cagccacucggccauaaaggcu

SEQ ID NO: 999371 - RNA, 22 nt, Human
cuucuguguuaaaugagucuuu

SEQ ID NO: 999372 - RNA, 22 nt, Human
cuguguuuuuggucugaucuau

SEQ ID NO: 999373 - RNA, 22 nt, Human
acaguacugaguacugaguugg

SEQ ID NO: 999374 - RNA, 22 nt, Human
aaacuuuuuauucuaaugucua

SEQ ID NO: 999375 - RNA, 22 nt, Human
uucuauguagauaaggcugcuc

SEQ ID NO: 999376 - RNA, 19 nt, Human
ucugugcugggaggcagca

SEQ ID NO: 999377 - RNA, 22 nt, Human
auuugcucuagcugcagugaau

SEQ ID NO: 999378 - RNA, 22 nt, Human
ugcccagcugucaaaguagaua

SEQ ID NO: 999379 - RNA, 22 nt, Human
aguggcugcuggaguggagaug

SEQ ID NO: 999380 - RNA, 22 nt, Human
uguguuguuuuaagcugcugca

SEQ ID NO: 999381 - RNA, 22 nt, Human
cuguguaucucugugggacaga

SEQ ID NO: 999382 - RNA, 22 nt, Human
auggcugugagcaggcagcuuc

SEQ ID NO: 999383 - RNA, 22 nt, Human
uaaccuuugaccuugcuugugc

SEQ ID NO: 999384 - RNA, 22 nt, Human
aggagguggccugagcgugccc

SEQ ID NO: 999385 - RNA, 21 nt, Human
uuuuacagaugaggggaaggg

SEQ ID NO: 999386 - RNA, 22 nt, Human
ucuuuaagggauguucugcuuu

SEQ ID NO: 999387 - RNA, 22 nt, Human
ugucucuuggcucuaucacuua

SEQ ID NO: 999388 - RNA, 22 nt, Human
uaauauuucuacccugcugccu

SEQ ID NO: 999389 - RNA, 17 nt, Human
cguggcugagccauaga

SEQ ID NO: 999390 - RNA, 22 nt, Human
gcuuuacauguuucccuuuaag

SEQ ID NO: 999391 - RNA, 20 nt, Human
uuagcaguagagugugcuuc

SEQ ID NO: 999392 - RNA, 22 nt, Human
gaguauauuucucucucuuaag

SEQ ID NO: 999393 - RNA, 17 nt, Human
cuuuuaauuuacuuccc

SEQ ID NO: 999394 - RNA, 22 nt, Human
caguuuuaggacauguggaugu

SEQ ID NO: 999395 - RNA, 22 nt, Human
cuggagggaggaggcugcuauu

SEQ ID NO: 999396 - RNA, 22 nt, Human
cuauuuuccgcagcaggaagua

SEQ ID NO: 999397 - RNA, 22 nt, Human
auugucucugaauuuccagcug

SEQ ID NO: 999398 - RNA, 22 nt, Human
aguuuuaaaugauggugguggu

SEQ ID NO: 999399 - RNA, 20 nt, Human
cucuuuacaugucucuuccu

SEQ ID NO: 999400 - RNA, 22 nt, Human
gcugugugacugagagccuggc

SEQ ID NO: 999401 - RNA, 22 nt, Human
guuuucucaucuccucaauggu

SEQ ID NO: 999402 - RNA, 22 nt, Human
auguuucugaguguauauacau

SEQ ID NO: 999403 - RNA, 22 nt, Human
uggagguguccaacucgugggu

SEQ ID NO: 999404 - RNA, 22 nt, Human
uguauacauacauaugugugug

SEQ ID NO: 999405 - RNA, 22 nt, Human
uggccugguccuugucaaggca

SEQ ID NO: 999406 - RNA, 22 nt, Human
aguggcuguuuauaggugggua

SEQ ID NO: 999407 - RNA, 22 nt, Human
acugucugcuggccccugguua

SEQ ID NO: 999408 - RNA, 22 nt, Human
auguguauuuccaucgaucagc

SEQ ID NO: 999409 - RNA, 21 nt, Human
ccugugugugucccuuuaaga

SEQ ID NO: 999410 - RNA, 22 nt, Human
cuuuacagccuccagaaggaac

SEQ ID NO: 999411 - RNA, 22 nt, Human
auucucucuucugcugcccgug

SEQ ID NO: 999412 - RNA, 22 nt, Human
auuuucugaguccagaauuuac

SEQ ID NO: 999413 - RNA, 22 nt, Human
cuguguauugaaaaaggguuaa

SEQ ID NO: 999414 - RNA, 22 nt, Human
uuuaaccucuaauuuaguucuc

SEQ ID NO: 999415 - RNA, 22 nt, Human
gcugccacuuggucaugucaug

SEQ ID NO: 999416 - RNA, 22 nt, Human
uucucucuuacugccaugcugu

SEQ ID NO: 999417 - RNA, 17 nt, Human
uaucucuucaaguuuca

SEQ ID NO: 999418 - RNA, 22 nt, Human
uauauuuuagacacccucacgc

SEQ ID NO: 999419 - RNA, 22 nt, Human
uacaggauaucacuucauuucu

SEQ ID NO: 999420 - RNA, 22 nt, Human
guguguggaaugcucauuuauu

SEQ ID NO: 999421 - RNA, 22 nt, Human
aauauuuuugaggcccuguuau

SEQ ID NO: 999422 - RNA, 22 nt, Human
acagucugcuugucuccauggu

SEQ ID NO: 999423 - RNA, 22 nt, Human
ugucugugaccucuuuggagcc

SEQ ID NO: 999424 - RNA, 22 nt, Human
ucuuuaaggugauuucugcuac

SEQ ID NO: 999425 - RNA, 22 nt, Human
ugacaguauacuugugauggga

SEQ ID NO: 999426 - RNA, 22 nt, Human
aguggcugccaagauauaauuc

SEQ ID NO: 999427 - RNA, 22 nt, Human
cuuucucuugagcaagagcugu

SEQ ID NO: 999428 - RNA, 22 nt, Human
uggacucuaugaugcgccagca

SEQ ID NO: 999429 - RNA, 22 nt, Human
caguuuauauucuagugcuguu

SEQ ID NO: 999430 - RNA, 18 nt, Human
ucucucugauaacauuuu

SEQ ID NO: 999431 - RNA, 22 nt, Human
uggcauguauacuugaguagga

SEQ ID NO: 999432 - RNA, 22 nt, Human
ugugugcacguacauacuguau

SEQ ID NO: 999433 - RNA, 22 nt, Human
uccucuuucucaacauuaguua

SEQ ID NO: 999434 - RNA, 22 nt, Human
auguguauuaccucgauuguga

SEQ ID NO: 999435 - RNA, 22 nt, Human
auguggcuauuuuaauguuaau

SEQ ID NO: 999436 - RNA, 22 nt, Human
uguaugccuuuuucuguuguaa

SEQ ID NO: 999437 - RNA, 21 nt, Human
acuuuacaauuuacauaguga

SEQ ID NO: 999438 - RNA, 21 nt, Human
cuaacuuugaguccuggcccc

SEQ ID NO: 999439 - RNA, 22 nt, Human
ccuagccccagauaucucacac

SEQ ID NO: 999440 - RNA, 22 nt, Human
ccuuuuauacucuguccucugg

SEQ ID NO: 999441 - RNA, 20 nt, Human
ucucuuuuagcuuacagcug

SEQ ID NO: 999442 - RNA, 22 nt, Human
ucuuuacuuguguauuguauau

SEQ ID NO: 999443 - RNA, 22 nt, Human
ucuggcugaaaggggcugugcc

SEQ ID NO: 999444 - RNA, 22 nt, Human
uauuguucuucacuggucuuau

SEQ ID NO: 999445 - RNA, 22 nt, Human
uacaguauuugaagaauaugag

SEQ ID NO: 999446 - RNA, 22 nt, Human
cuguggcuggcucaucauaggu

SEQ ID NO: 999447 - RNA, 22 nt, Human
ucacucuuuaucuuuuaugucu

SEQ ID NO: 999448 - RNA, 22 nt, Human
gaagccuggagaccagauguug

SEQ ID NO: 999449 - RNA, 22 nt, Human
ucucuguucauggcacuauguc

SEQ ID NO: 999450 - RNA, 22 nt, Human
uacaguaucuucuggcaagcau

SEQ ID NO: 999451 - RNA, 22 nt, Human
gugcgugugccuaucaauaaag

SEQ ID NO: 999452 - RNA, 22 nt, Human
uguauaugugcacaugugcuuc

SEQ ID NO: 999453 - RNA, 22 nt, Human
uuagcuuuugagaaugauuucu

SEQ ID NO: 999454 - RNA, 22 nt, Human
uguguuugaggcauguugcaga

SEQ ID NO: 999455 - RNA, 22 nt, Human
uguggcugugccgucacacgug

SEQ ID NO: 999456 - RNA, 22 nt, Human
auauauuuugaauagccucugu

SEQ ID NO: 999457 - RNA, 22 nt, Human
ugugugugggcggaacggcccc

SEQ ID NO: 999458 - RNA, 22 nt, Human
ucuuuucuguaacucagugucu

SEQ ID NO: 999459 - RNA, 22 nt, Human
uuuuaucuucauuccuaucuac

SEQ ID NO: 999460 - RNA, 22 nt, Human
gaagccacagggaaggagaaca

SEQ ID NO: 999461 - RNA, 22 nt, Human
aagcugcccaagacugaagcau

SEQ ID NO: 999462 - RNA, 22 nt, Human
gcuguguuugacaguagcagac

SEQ ID NO: 999463 - RNA, 23 nt, Human
ucugagugauuagccucuggggu

SEQ ID NO: 999464 - RNA, 21 nt, Human
uguggcugccucuggcccugg

SEQ ID NO: 999465 - RNA, 20 nt, Human
aggcaguuagaaggagauga

SEQ ID NO: 999466 - RNA, 22 nt, Human
uuucucucuauuuagacaggua

SEQ ID NO: 999467 - RNA, 22 nt, Human
ucuuuccaaggacucuguagca

SEQ ID NO: 999468 - RNA, 22 nt, Human
uguucucuucucauugaacaug

SEQ ID NO: 999469 - RNA, 22 nt, Human
auuuucucacaaugcagaagga

SEQ ID NO: 999470 - RNA, 22 nt, Human
uguguguauccauuagaggcca

SEQ ID NO: 999471 - RNA, 22 nt, Human
uuaacuguaucauacuguuuca

SEQ ID NO: 999472 - RNA, 22 nt, Human
aggaagcuccuggagagccagu

SEQ ID NO: 999473 - RNA, 22 nt, Human
uguguguguuucugcucauaca

SEQ ID NO: 999474 - RNA, 22 nt, Human
aucuguguguugaguucucagc

SEQ ID NO: 999475 - RNA, 22 nt, Human
uuuagcagaucuauguauguga

SEQ ID NO: 999476 - RNA, 22 nt, Human
uuacaaguacugaauaugauuu

SEQ ID NO: 999477 - RNA, 21 nt, Human
auggagggaccagggaagcag

SEQ ID NO: 999478 - RNA, 22 nt, Human
aggacagcauaugggaaccagu

SEQ ID NO: 999479 - RNA, 22 nt, Human
uuacaguagauacaaugaguaa

SEQ ID NO: 999480 - RNA, 22 nt, Human
caguuuuaugaaugcuuauuag

SEQ ID NO: 999481 - RNA, 22 nt, Human
gcauguguggaggagaugugcu

SEQ ID NO: 999482 - RNA, 21 nt, Human
ggcugguguuuagcugugaua

SEQ ID NO: 999483 - RNA, 22 nt, Human
ugugugugcacgugcgcgcgag

SEQ ID NO: 999484 - RNA, 15 nt, Human
cuguggcuaaccuaa

SEQ ID NO: 999485 - RNA, 22 nt, Human
agcugugugccaggggagaugu

SEQ ID NO: 999486 - RNA, 18 nt, Human
gcugcgugggaugugacc

SEQ ID NO: 999487 - RNA, 22 nt, Human
uguuugugguuauaauaaguau

SEQ ID NO: 999488 - RNA, 22 nt, Human
aguggcugguaguuacugagca

SEQ ID NO: 999489 - RNA, 22 nt, Human
gcucugugggugaguagaaucu

SEQ ID NO: 999490 - RNA, 22 nt, Human
cuuuaucauggagguaaauaug

SEQ ID NO: 999491 - RNA, 22 nt, Human
guguauugcacauccuguagcc

SEQ ID NO: 999492 - RNA, 22 nt, Human
ucuacagucaaguuauauugcu

SEQ ID NO: 999493 - RNA, 22 nt, Human
aguuuucugaccccugcucuau

SEQ ID NO: 999494 - RNA, 22 nt, Human
aucucucugcccaggggcugug

SEQ ID NO: 999495 - RNA, 23 nt, Human
ugugucugaggauauaugugcau

SEQ ID NO: 999496 - RNA, 22 nt, Human
uugcugugucauuuguuuaauc

SEQ ID NO: 999497 - RNA, 23 nt, Human
auauuuccagguuagugagguaa

SEQ ID NO: 999498 - RNA, 22 nt, Human
uguguggcaagcuguaugcuag

SEQ ID NO: 999499 - RNA, 22 nt, Human
ucugugugggauaguuugagga

SEQ ID NO: 999500 - RNA, 22 nt, Human
acuuguuugaaucucucuagag

SEQ ID NO: 999501 - RNA, 21 nt, Human
auauuuuuguuuggacuguca

SEQ ID NO: 999502 - RNA, 22 nt, Human
uauaauuuuagaagagauggaa

SEQ ID NO: 999503 - RNA, 22 nt, Human
agcugcccuguggggaggguug

SEQ ID NO: 999504 - RNA, 22 nt, Human
aagccacucacaauaacugucc

SEQ ID NO: 999505 - RNA, 22 nt, Human
uuuaacauguaauugcugcuuu

SEQ ID NO: 999506 - RNA, 19 nt, Human
aauauuuuagccucuuccu

SEQ ID NO: 999507 - RNA, 22 nt, Human
uuggcugugagggguugcacag

SEQ ID NO: 999508 - RNA, 22 nt, Human
uacagguagggucuauguuaga

SEQ ID NO: 999509 - RNA, 22 nt, Human
aggcuguggcauuaaacguuug

SEQ ID NO: 999510 - RNA, 22 nt, Human
ucacuuuuugauaucauucugc

SEQ ID NO: 999511 - RNA, 22 nt, Human
ucugcuguuuacugugugauau

SEQ ID NO: 999512 - RNA, 22 nt, Human
auguggcuuggcagggaauaug

SEQ ID NO: 999513 - RNA, 17 nt, Human
uuuucucucuuggauuc

SEQ ID NO: 999514 - RNA, 22 nt, Human
guguauguucuacuuaauauua

SEQ ID NO: 999515 - RNA, 22 nt, Human
uguguagugauuuucuuccaac

SEQ ID NO: 999516 - RNA, 22 nt, Human
auguggcuguggacaccuuuca

SEQ ID NO: 999517 - RNA, 22 nt, Human
guggcuagaaaaauaugggugc

SEQ ID NO: 999518 - RNA, 22 nt, Human
uacaguuuguuacauuguuagu

SEQ ID NO: 999519 - RNA, 22 nt, Human
auuucucucauuguuagcuagg

SEQ ID NO: 999520 - RNA, 22 nt, Human
gcaguauauccauuacuucaua

SEQ ID NO: 999521 - RNA, 22 nt, Human
uuuaaauuauaguuaaugucug

SEQ ID NO: 999522 - RNA, 22 nt, Human
aggaaacagagugaagcuuggg

SEQ ID NO: 999523 - RNA, 22 nt, Human
uguggcugggcuaauaggcaaa

SEQ ID NO: 999524 - RNA, 18 nt, Human
gcagcugacacuggaguu

SEQ ID NO: 999525 - RNA, 22 nt, Human
uggccuggaaccuggcagggac

SEQ ID NO: 999526 - RNA, 22 nt, Human
aguggcuggagccccaggcugg

SEQ ID NO: 999527 - RNA, 23 nt, Human
ccccucugguggcucagcuccug

SEQ ID NO: 999528 - RNA, 22 nt, Human
uuuacuguguccaucugugacu

SEQ ID NO: 999529 - RNA, 22 nt, Human
uacuguguggugagcugucucc

SEQ ID NO: 999530 - RNA, 22 nt, Human
gacaguauccagguggugaaga

SEQ ID NO: 999531 - RNA, 22 nt, Human
uguaugcuuugguuguuucucu

SEQ ID NO: 999532 - RNA, 19 nt, Human
gcugggugaggucguugga

SEQ ID NO: 999533 - RNA, 22 nt, Human
aggcugugcauuuuggagggcc

SEQ ID NO: 999534 - RNA, 22 nt, Human
agcuguggaagacugucagggu

SEQ ID NO: 999535 - RNA, 22 nt, Human
uucuauguaccuagcguuguau

SEQ ID NO: 999536 - RNA, 22 nt, Human
gugugggcuaugugcgugggca

SEQ ID NO: 999537 - RNA, 22 nt, Human
uauguggccauucuguuugugu

SEQ ID NO: 999538 - RNA, 22 nt, Human
augcauguuuauagggugcuuc

SEQ ID NO: 999539 - RNA, 22 nt, Human
cugccuggaugaauggcgccuu

SEQ ID NO: 999540 - RNA, 22 nt, Human
uaauuucuaauucauuuucagu

SEQ ID NO: 999541 - RNA, 22 nt, Human
uacauuauccugucuuuguccu

SEQ ID NO: 999542 - RNA, 22 nt, Human
uuguaacuugugauuauaaucu

SEQ ID NO: 999543 - RNA, 20 nt, Human
agcugccccugggcacugcc

SEQ ID NO: 999544 - RNA, 22 nt, Human
uuauacagcauugcuagugaug

SEQ ID NO: 999545 - RNA, 22 nt, Human
cagauauaaauggaugugguag

SEQ ID NO: 999546 - RNA, 18 nt, Human
acugugugaauuagcucc

SEQ ID NO: 999547 - RNA, 22 nt, Human
cuggcugugugucuucauucag

SEQ ID NO: 999548 - RNA, 22 nt, Human
ucugugcugccauccuguggcc

SEQ ID NO: 999549 - RNA, 22 nt, Human
aucuggggucagacagcccugg

SEQ ID NO: 999550 - RNA, 22 nt, Human
auuaucucaagggauagcagau

SEQ ID NO: 999551 - RNA, 22 nt, Human
uaacuuugaagggaauuuuacu

SEQ ID NO: 999552 - RNA, 21 nt, Human
uguguuugagacuauguuucc

SEQ ID NO: 999553 - RNA, 22 nt, Human
uguguuuacuucuaugcaguuu

SEQ ID NO: 999554 - RNA, 22 nt, Human
uuauucuucuucucuugccagg

SEQ ID NO: 999555 - RNA, 22 nt, Human
cucuguguucagccuagcagaa

SEQ ID NO: 999556 - RNA, 22 nt, Human
uaaaguauccaguuauucuucu

SEQ ID NO: 999557 - RNA, 19 nt, Human
caauauauagugaguggau

SEQ ID NO: 999558 - RNA, 22 nt, Human
cuuugcagugauuguucuugga

SEQ ID NO: 999559 - RNA, 22 nt, Human
ugaugugugauucauucucaaa

SEQ ID NO: 999560 - RNA, 22 nt, Human
uuacagauuaaaaugcugaggu

SEQ ID NO: 999561 - RNA, 22 nt, Human
uucucacuauguauguagauug

SEQ ID NO: 999562 - RNA, 17 nt, Human
ugcagcugcucccaggc

SEQ ID NO: 999563 - RNA, 22 nt, Human
aguguaugcagguuuucaaugu

SEQ ID NO: 999564 - RNA, 22 nt, Human
aacaguuuaugagauaugcuau

SEQ ID NO: 999565 - RNA, 22 nt, Human
uuuuccuggggcuucuggacuc

SEQ ID NO: 999566 - RNA, 22 nt, Human
uguggguguucucacuuagaua

SEQ ID NO: 999567 - RNA, 22 nt, Human
ucucuucuauuugagacuauuu

SEQ ID NO: 999568 - RNA, 22 nt, Human
aacuuuuucugggauggagggu

SEQ ID NO: 999569 - RNA, 22 nt, Human
uaucuuuaacuugcaguauuua

SEQ ID NO: 999570 - RNA, 22 nt, Human
uguauguauacacugaucauca

SEQ ID NO: 999571 - RNA, 22 nt, Human
aggcuguguucugguucuuagc

SEQ ID NO: 999572 - RNA, 22 nt, Human
uuuaacuuaaucugcuugauga

SEQ ID NO: 999573 - RNA, 22 nt, Human
uauguucugucuguacagauuu

SEQ ID NO: 999574 - RNA, 22 nt, Human
uggccugucuuguugugcuaga

SEQ ID NO: 999575 - RNA, 18 nt, Human
gguguguaacguguuuuc

SEQ ID NO: 999576 - RNA, 22 nt, Human
cuuacaguguugagggaauuaa

SEQ ID NO: 999577 - RNA, 22 nt, Human
uuuaaccugucaauuugcaugc

SEQ ID NO: 999578 - RNA, 22 nt, Human
uguuacagucauuguuuucuga

SEQ ID NO: 999579 - RNA, 22 nt, Human
gaggaaaaugggacaggcugua

SEQ ID NO: 999580 - RNA, 22 nt, Human
auuuucucuuuguauaugcuag

SEQ ID NO: 999581 - RNA, 22 nt, Human
guaggggugcugagaucuggaa

SEQ ID NO: 999582 - RNA, 22 nt, Human
cuguggcuucugcuugggccuc

SEQ ID NO: 999583 - RNA, 22 nt, Human
gugcccagugcaggcccgcagg

SEQ ID NO: 999584 - RNA, 21 nt, Human
uguguguaugcacacacaugc

SEQ ID NO: 999585 - RNA, 20 nt, Human
uuugaacuuuguacucuguu

SEQ ID NO: 999586 - RNA, 22 nt, Human
gagaggauccacaaaccaggaa

SEQ ID NO: 999587 - RNA, 22 nt, Human
ucugugugauuucagggaaguc

SEQ ID NO: 999588 - RNA, 22 nt, Human
aguguguaaugccaggggcugc

SEQ ID NO: 999589 - RNA, 22 nt, Human
auggcuguccaguuucuagaga

SEQ ID NO: 999590 - RNA, 22 nt, Human
guacaguacuucagaaccagcc

SEQ ID NO: 999591 - RNA, 22 nt, Human
cuucucucugcauaggcauggg

SEQ ID NO: 999592 - RNA, 18 nt, Human
uguggcugguccacacug

SEQ ID NO: 999593 - RNA, 22 nt, Human
uguguugugucaccuaucaugc

SEQ ID NO: 999594 - RNA, 22 nt, Human
uauuugucaccuauggcugucc

SEQ ID NO: 999595 - RNA, 22 nt, Human
cugugucuuuccuacuuugugg

SEQ ID NO: 999596 - RNA, 23 nt, Human
uguaacuuugggcauguugcuuc

SEQ ID NO: 999597 - RNA, 22 nt, Human
aguggcugcuaugaucaggaca

SEQ ID NO: 999598 - RNA, 22 nt, Human
ugugccugauggucacguggcc

SEQ ID NO: 999599 - RNA, 19 nt, Human
ucucucuguacauuagaua

SEQ ID NO: 999600 - RNA, 22 nt, Human
cuggcugugucuuggaggagcu

SEQ ID NO: 999601 - RNA, 23 nt, Human
uggcugagauccuacuguuugcu

SEQ ID NO: 999602 - RNA, 22 nt, Human
cuauuacauuucuggacauuca

SEQ ID NO: 999603 - RNA, 22 nt, Human
uaguuucuaaagcuuccuaggu

SEQ ID NO: 999604 - RNA, 22 nt, Human
ucucacuuuccagacuuuucaa

SEQ ID NO: 999605 - RNA, 22 nt, Human
aucuguguaugugaccuuaucu

SEQ ID NO: 999606 - RNA, 20 nt, Human
gcuguguagcagugugcagu

SEQ ID NO: 999607 - RNA, 22 nt, Human
uucuuauuucccccuucaucau

SEQ ID NO: 999608 - RNA, 22 nt, Human
uuucuucuguuuguaguuacac

SEQ ID NO: 999609 - RNA, 21 nt, Human
caaguguggauguggaaggua

SEQ ID NO: 999610 - RNA, 23 nt, Human
acuuuucaauuagcuaugcuuaa

SEQ ID NO: 999611 - RNA, 21 nt, Human
gcauguguggugugcuccaca

SEQ ID NO: 999612 - RNA, 22 nt, Human
guacauuuuacuuuguuugaau

SEQ ID NO: 999613 - RNA, 22 nt, Human
ucuuuaagccaagauauauuua

SEQ ID NO: 999614 - RNA, 22 nt, Human
cauguguguccaugugacuaag

SEQ ID NO: 999615 - RNA, 22 nt, Human
aaaagcucuuucugcuguagau

SEQ ID NO: 999616 - RNA, 22 nt, Human
guggccuggaguuugauguagg

SEQ ID NO: 999617 - RNA, 22 nt, Human
ucuuuagacauccaguuucucu

SEQ ID NO: 999618 - RNA, 19 nt, Human
ggccuggcuaucccugcug

SEQ ID NO: 999619 - RNA, 22 nt, Human
agucauauauuuuguuugugca

SEQ ID NO: 999620 - RNA, 22 nt, Human
gugcccaguugaggccaggacu

SEQ ID NO: 999621 - RNA, 22 nt, Human
ucugucacccaggcuggagugc

SEQ ID NO: 999622 - RNA, 22 nt, Human
acagucuaggugugugauuuaa

SEQ ID NO: 999623 - RNA, 22 nt, Human
uuuacagucugucuagcaaugu

SEQ ID NO: 999624 - RNA, 19 nt, Human
cuuauacagauuuucucau

SEQ ID NO: 999625 - RNA, 22 nt, Human
uggcaguggcuuugcuggugga

SEQ ID NO: 999626 - RNA, 22 nt, Human
uauuuucuggacagucuugcuu

SEQ ID NO: 999627 - RNA, 22 nt, Human
aguggcuguaggcuaugagaga

SEQ ID NO: 999628 - RNA, 20 nt, Human
uggcugugggcaucuguuuc

SEQ ID NO: 999629 - RNA, 22 nt, Human
uugucucuacagagaguaguag

SEQ ID NO: 999630 - RNA, 22 nt, Human
uaaggaaggggaaagacauguc

SEQ ID NO: 999631 - RNA, 22 nt, Human
agcugugugugcuugggauuau

SEQ ID NO: 999632 - RNA, 22 nt, Human
guucucucaaacuuuguguuug

SEQ ID NO: 999633 - RNA, 22 nt, Human
uguauguauguauguauuuggg

SEQ ID NO: 999634 - RNA, 22 nt, Human
gcaguauauggauuuuaaacau

SEQ ID NO: 999635 - RNA, 22 nt, Human
aauuuucugaugaugaagcacg

SEQ ID NO: 999636 - RNA, 22 nt, Human
augugugguacagucccguuua

SEQ ID NO: 999637 - RNA, 22 nt, Human
uuuaucuguccuuugccaguga

SEQ ID NO: 999638 - RNA, 22 nt, Human
ugcaugcguuaguuggcguguu

SEQ ID NO: 999639 - RNA, 17 nt, Human
auguggcuaagcugcug

SEQ ID NO: 999640 - RNA, 22 nt, Human
ucgcugugguuucuguacaugg

SEQ ID NO: 999641 - RNA, 22 nt, Human
uacugugugacccuggguaggu

SEQ ID NO: 999642 - RNA, 22 nt, Human
uguguagcuuucuucugugggg

SEQ ID NO: 999643 - RNA, 22 nt, Human
gguggcugaaucaaaucaggcc

SEQ ID NO: 999644 - RNA, 22 nt, Human
ugugucuggauagguaauggau

SEQ ID NO: 999645 - RNA, 22 nt, Human
cuguggcucauucuugguggca

SEQ ID NO: 999646 - RNA, 22 nt, Human
acagucuaaucuuguguucugu

SEQ ID NO: 999647 - RNA, 22 nt, Human
ccucucuuggauguggaugggu

SEQ ID NO: 999648 - RNA, 22 nt, Human
cugugccuccaaguggucucug

SEQ ID NO: 999649 - RNA, 19 nt, Human
guguauguaaguugugagg

SEQ ID NO: 999650 - RNA, 22 nt, Human
auguaugcauagugaguaaaug

SEQ ID NO: 999651 - RNA, 22 nt, Human
cuguggcuucugggucaguuca

SEQ ID NO: 999652 - RNA, 22 nt, Human
gguguggcaguggaccugugaa

SEQ ID NO: 999653 - RNA, 22 nt, Human
uauguucuaggaaugguugaug

SEQ ID NO: 999654 - RNA, 22 nt, Human
cucugcuuggaacuggacagaa

SEQ ID NO: 999655 - RNA, 22 nt, Human
uuuaaacuguugauuuuaugaa

SEQ ID NO: 999656 - RNA, 22 nt, Human
cacuguguaagaagaugggcuu

SEQ ID NO: 999657 - RNA, 22 nt, Human
uuauuuacaacucuucucuucc

SEQ ID NO: 999658 - RNA, 22 nt, Human
auguggcucacauagcuggaaa

SEQ ID NO: 999659 - RNA, 20 nt, Human
ugugugcaucuguauguauu

SEQ ID NO: 999660 - RNA, 22 nt, Human
uggucucugcugcagcuucuca

SEQ ID NO: 999661 - RNA, 22 nt, Human
gcuguguguucaauaaugugau

SEQ ID NO: 999662 - RNA, 22 nt, Human
guuuucucugagaugccuuucu

SEQ ID NO: 999663 - RNA, 22 nt, Human
ucuggcuguguaauauguguag

SEQ ID NO: 999664 - RNA, 22 nt, Human
aguauauuuugauuguaugugu

SEQ ID NO: 999665 - RNA, 22 nt, Human
aauauuuuaggcuuuccaggcu

SEQ ID NO: 999666 - RNA, 22 nt, Human
auuguucuggauauuuacauug

SEQ ID NO: 999667 - RNA, 22 nt, Human
uauugucuaucgcugcuuucau

SEQ ID NO: 999668 - RNA, 22 nt, Human
gcugccaccguggagaugagug

SEQ ID NO: 999669 - RNA, 23 nt, Human
aucucucuuuauucuuggggaua

SEQ ID NO: 999670 - RNA, 22 nt, Human
cuggccccuguggcuaaaauca

SEQ ID NO: 999671 - RNA, 23 nt, Human
ccguguguauacucuguaauaga

SEQ ID NO: 999672 - RNA, 23 nt, Human
ucucucuuagcuaugcuuauggc

SEQ ID NO: 999673 - RNA, 20 nt, Human
uguguauaaauauauguuuc

SEQ ID NO: 999674 - RNA, 22 nt, Human
ucuguguauaggguugugcgcu

SEQ ID NO: 999675 - RNA, 22 nt, Human
uuucacagauauaagauuucac

SEQ ID NO: 999676 - RNA, 22 nt, Human
uguacaguauugguguuaguag

SEQ ID NO: 999677 - RNA, 22 nt, Human
uuucacaggaguccuuucuaua

SEQ ID NO: 999678 - RNA, 22 nt, Human
uuguaugcuguaggcaugcauu

SEQ ID NO: 999679 - RNA, 22 nt, Human
aggaagaaccuaagaaagucuc

SEQ ID NO: 999680 - RNA, 22 nt, Human
ucugcuuuagugcaaagucuua

SEQ ID NO: 999681 - RNA, 22 nt, Human
acuuuacacaucuuuucucauu

SEQ ID NO: 999682 - RNA, 22 nt, Human
auggcuguuccugggaguucua

SEQ ID NO: 999683 - RNA, 19 nt, Human
gguguuucuucauuuucca

SEQ ID NO: 999684 - RNA, 22 nt, Human
cuguggcuuugcagggcuuguu

SEQ ID NO: 999685 - RNA, 21 nt, Human
uacagucuccccuguugucca

SEQ ID NO: 999686 - RNA, 22 nt, Human
aguguaugugaaacuuuccaaa

SEQ ID NO: 999687 - RNA, 22 nt, Human
cuucugugagucaguguuucug

SEQ ID NO: 999688 - RNA, 22 nt, Human
uaugcgugccucugucugucug

SEQ ID NO: 999689 - RNA, 22 nt, Human
aguaaauuucugcauguguacu

SEQ ID NO: 999690 - RNA, 20 nt, Human
acuuuacagagaagacugac

SEQ ID NO: 999691 - RNA, 22 nt, Human
uuuucaguuccaucucugcucu

SEQ ID NO: 999692 - RNA, 22 nt, Human
uucucuuucuacagugugauug

SEQ ID NO: 999693 - RNA, 22 nt, Human
ugaguguguauuauguaucagg

SEQ ID NO: 999694 - RNA, 22 nt, Human
uccaguaugacugauguccuuc

SEQ ID NO: 999695 - RNA, 22 nt, Human
cuuaacagauacaucugugguu

SEQ ID NO: 999696 - RNA, 22 nt, Human
cucugugucugaguuauggucu

SEQ ID NO: 999697 - RNA, 22 nt, Human
uggcugugggaugagagccuca

SEQ ID NO: 999698 - RNA, 22 nt, Human
agcuguguuaggauguuaauaa

SEQ ID NO: 999699 - RNA, 20 nt, Human
ugugugcacacaugacauuc

SEQ ID NO: 999700 - RNA, 22 nt, Human
cucucuuucauuggucgccuug

SEQ ID NO: 999701 - RNA, 22 nt, Human
uuucacaguagaaaucauuaug

SEQ ID NO: 999702 - RNA, 22 nt, Human
uuugacuucugggcauuuuggu

SEQ ID NO: 999703 - RNA, 22 nt, Human
ucuugacauugcaaucuucaga

SEQ ID NO: 999704 - RNA, 22 nt, Human
cuaacuuuuugauucuugggga

SEQ ID NO: 999705 - RNA, 22 nt, Human
cucuuuacucuguguuauuguu

SEQ ID NO: 999706 - RNA, 22 nt, Human
gaggaaaaugcaacaggaaugc

SEQ ID NO: 999707 - RNA, 22 nt, Human
ugugcuauuugacuguuugcua

SEQ ID NO: 999708 - RNA, 22 nt, Human
gcuuuacaugauuucucacccu

SEQ ID NO: 999709 - RNA, 22 nt, Human
uguaguguggccuaucuuugcc

SEQ ID NO: 999710 - RNA, 22 nt, Human
gggcugugagaguggggcugcu

SEQ ID NO: 999711 - RNA, 22 nt, Human
ugcagcugaugauacccccaug

SEQ ID NO: 999712 - RNA, 18 nt, Human
gugcugugggcaguggcc

SEQ ID NO: 999713 - RNA, 22 nt, Human
ucucugugacugcagcuuugca

SEQ ID NO: 999714 - RNA, 22 nt, Human
gcaguauacacugauacaugag

SEQ ID NO: 999715 - RNA, 22 nt, Human
uauuugcugacagugcuggagc

SEQ ID NO: 999716 - RNA, 22 nt, Human
ugagcugucuaugguccugucu

SEQ ID NO: 999717 - RNA, 22 nt, Human
acaguguacuagguacauguuc

SEQ ID NO: 999718 - RNA, 19 nt, Human
uuagggguaugaaguggua

SEQ ID NO: 999719 - RNA, 22 nt, Human
acauguauacaauguguaauga

SEQ ID NO: 999720 - RNA, 22 nt, Human
ucuuuccacauucucuguuuag

SEQ ID NO: 999721 - RNA, 22 nt, Human
acgaguauguuuguauuuucuu

SEQ ID NO: 999722 - RNA, 22 nt, Human
uaaggcaggacuggauagcuau

SEQ ID NO: 999723 - RNA, 22 nt, Human
guuuacaguggcuucauuggau

SEQ ID NO: 999724 - RNA, 22 nt, Human
cuguggcuuuggggcggaggac

SEQ ID NO: 999725 - RNA, 22 nt, Human
agucauauggcuauuuaguggg

SEQ ID NO: 999726 - RNA, 22 nt, Human
uuuacagucaccaaacuuugcu

SEQ ID NO: 999727 - RNA, 22 nt, Human
uggcugugauuugcacgagaug

SEQ ID NO: 999728 - RNA, 21 nt, Human
uguggcaucauugaucuguga

SEQ ID NO: 999729 - RNA, 22 nt, Human
cuguauguuucuaugaauguga

SEQ ID NO: 999730 - RNA, 22 nt, Human
uaucucuugucuguuuugcaaa

SEQ ID NO: 999731 - RNA, 22 nt, Human
gacagcuguacacuccugguua

SEQ ID NO: 999732 - RNA, 22 nt, Human
uugucucuaagugugaucuuca

SEQ ID NO: 999733 - RNA, 22 nt, Human
guguggcugugggagauguuca

SEQ ID NO: 999734 - RNA, 22 nt, Human
ucuuacagccacucugugaagc

SEQ ID NO: 999735 - RNA, 22 nt, Human
auuucucuuccuccuaggguug

SEQ ID NO: 999736 - RNA, 22 nt, Human
guggcugcaguaguguaggguc

SEQ ID NO: 999737 - RNA, 22 nt, Human
uuaacaguaaagaauugugcaa

SEQ ID NO: 999738 - RNA, 22 nt, Human
gugccuguaaguuguaugggcu

SEQ ID NO: 999739 - RNA, 22 nt, Human
uuuacagcuucuauacuaugug

SEQ ID NO: 999740 - RNA, 22 nt, Human
ucucucuugucaccccaucugc

SEQ ID NO: 999741 - RNA, 22 nt, Human
guuucucuuaacacauaaagua

SEQ ID NO: 999742 - RNA, 22 nt, Human
uuacaguaacauuuucagucug

SEQ ID NO: 999743 - RNA, 22 nt, Human
gggcugugaggugagaacuuac

SEQ ID NO: 999744 - RNA, 22 nt, Human
guguguguauauauacacacac

SEQ ID NO: 999745 - RNA, 19 nt, Human
uacaaguaggcguuuucuc

SEQ ID NO: 999746 - RNA, 22 nt, Human
uuuaucagaggcuauguuucau

SEQ ID NO: 999747 - RNA, 22 nt, Human
uuugaacuucuaccugucauau

SEQ ID NO: 999748 - RNA, 22 nt, Human
acagcuccuacugaagccaugu

SEQ ID NO: 999749 - RNA, 22 nt, Human
ugugaugucagugguaucaaag

SEQ ID NO: 999750 - RNA, 22 nt, Human
auguguguaaacaaguauaauu

SEQ ID NO: 999751 - RNA, 22 nt, Human
cuuuuuaucucuuaaugauguu

SEQ ID NO: 999752 - RNA, 21 nt, Human
uuucucaccaugguauggaaa

SEQ ID NO: 999753 - RNA, 22 nt, Human
auacuuuuaauuccuucugagu

SEQ ID NO: 999754 - RNA, 22 nt, Human
guggccguguaacuugaguaca

SEQ ID NO: 999755 - RNA, 22 nt, Human
uuacgaguuugcaauuuuaaau

SEQ ID NO: 999756 - RNA, 20 nt, Human
uguguagcaggugcugugcc

SEQ ID NO: 999757 - RNA, 22 nt, Human
gucugugugcacagcgagugcc

SEQ ID NO: 999758 - RNA, 22 nt, Human
uguuaacuuccuccuccucugc

SEQ ID NO: 999759 - RNA, 23 nt, Human
aagcugccuucgcaguuggucug

SEQ ID NO: 999760 - RNA, 22 nt, Human
auacaguaagugucccugaaac

SEQ ID NO: 999761 - RNA, 22 nt, Human
cucucucuuuagaagcgucugg

SEQ ID NO: 999762 - RNA, 22 nt, Human
acagugaugagggaauuuugug

SEQ ID NO: 999763 - RNA, 22 nt, Human
auguguguguuuaauccucaaa

SEQ ID NO: 999764 - RNA, 21 nt, Human
ugugugugcaggcacacacac

SEQ ID NO: 999765 - RNA, 22 nt, Human
ccagcuccugggucuuagucag

SEQ ID NO: 999766 - RNA, 22 nt, Human
guggguguggaacugugagacc

SEQ ID NO: 999767 - RNA, 22 nt, Human
uuuuuuaucuaugguaguacca

SEQ ID NO: 999768 - RNA, 22 nt, Human
gccacagcuuagaucacagccu

SEQ ID NO: 999769 - RNA, 22 nt, Human
uucacagugugaucuaugggca

SEQ ID NO: 999770 - RNA, 22 nt, Human
aaaguuuggauuagcaguuaga

SEQ ID NO: 999771 - RNA, 22 nt, Human
guacaguagagccagguucagu

SEQ ID NO: 999772 - RNA, 22 nt, Human
uuuucuguuacaaaguacagcg

SEQ ID NO: 999773 - RNA, 22 nt, Human
auuacaguucugcagguaguuu

SEQ ID NO: 999774 - RNA, 22 nt, Human
uuuucucaggugcuuaucuaag

SEQ ID NO: 999775 - RNA, 22 nt, Human
uugacaguugaggguugucuaa

SEQ ID NO: 999776 - RNA, 18 nt, Human
gggcuguguucaugccca

SEQ ID NO: 999777 - RNA, 22 nt, Human
ucugcuguguccccugugcggg

SEQ ID NO: 999778 - RNA, 21 nt, Human
acaguauauuagauauuugaa

SEQ ID NO: 999779 - RNA, 22 nt, Human
gugccugugccaggggugugcu

SEQ ID NO: 999780 - RNA, 22 nt, Human
uuacaggaggugcuagguguuu

SEQ ID NO: 999781 - RNA, 19 nt, Human
cauuuucucauugugcccc

SEQ ID NO: 999782 - RNA, 22 nt, Human
uacuauuuauggagugguuauu

SEQ ID NO: 999783 - RNA, 22 nt, Human
gcuuuacacagcugguucuugu

SEQ ID NO: 999784 - RNA, 22 nt, Human
cuggcuguaugcuggccucaga

SEQ ID NO: 999785 - RNA, 22 nt, Human
uuuagcuugaaucuuguuuaaa

SEQ ID NO: 999786 - RNA, 22 nt, Human
auauuucuggggguguguuucu

SEQ ID NO: 999787 - RNA, 22 nt, Human
ugugugcuuauagucuaguagu

SEQ ID NO: 999788 - RNA, 22 nt, Human
ccuguguguaggccaggggagu

SEQ ID NO: 999789 - RNA, 22 nt, Human
aucuuucucugcacuauacaau

SEQ ID NO: 999790 - RNA, 22 nt, Human
cucucucuucuuuguaggggcc

SEQ ID NO: 999791 - RNA, 22 nt, Human
uguguuugggggagaugcauuu

SEQ ID NO: 999792 - RNA, 22 nt, Human
auauuuuuccaugugggacucu

SEQ ID NO: 999793 - RNA, 19 nt, Human
uuccugugcugcugugucc

SEQ ID NO: 999794 - RNA, 22 nt, Human
aacguuuuaucgugugcucuuc

SEQ ID NO: 999795 - RNA, 22 nt, Human
caggauauuaguuuucuuguua

SEQ ID NO: 999796 - RNA, 22 nt, Human
cuauuacaaucugcuacuauga

SEQ ID NO: 999797 - RNA, 17 nt, Human
uucucuuccuggauagu

SEQ ID NO: 999798 - RNA, 22 nt, Human
cuguggcuaauaauuaguauuu

SEQ ID NO: 999799 - RNA, 22 nt, Human
cuuguuaucuccguguccuugu

SEQ ID NO: 999800 - RNA, 22 nt, Human
uccuguguuacccuugcaguga

SEQ ID NO: 999801 - RNA, 22 nt, Human
uguguguuggcuggagagggcu

SEQ ID NO: 999802 - RNA, 20 nt, Human
augugucugccucuguguuc

SEQ ID NO: 999803 - RNA, 22 nt, Human
ccugaggagauuguggcugggg

SEQ ID NO: 999804 - RNA, 22 nt, Human
uacucucuggaaauuauaguga

SEQ ID NO: 999805 - RNA, 19 nt, Human
ucucugugucucuguuuau

SEQ ID NO: 999806 - RNA, 22 nt, Human
gcuguggcuuucuguuucuguu

SEQ ID NO: 999807 - RNA, 19 nt, Human
cuguggcugaccucuggcc

SEQ ID NO: 999808 - RNA, 22 nt, Human
uggcuguagaacaguggauauu

SEQ ID NO: 999809 - RNA, 22 nt, Human
acagugauuauuaguugguggu

SEQ ID NO: 999810 - RNA, 22 nt, Human
uacaguuaaaaaguucaauggu

SEQ ID NO: 999811 - RNA, 22 nt, Human
uacacuaugggcuuuguguaau

SEQ ID NO: 999812 - RNA, 22 nt, Human
gcauguguuauuucucuguggg

SEQ ID NO: 999813 - RNA, 22 nt, Human
aggggugaaggcccgauaggag

SEQ ID NO: 999814 - RNA, 22 nt, Human
aaacuuuuauaaagcugcagau

SEQ ID NO: 999815 - RNA, 22 nt, Human
uggcugaguaaguugugauaug

SEQ ID NO: 999816 - RNA, 18 nt, Human
auguggcuagugcuacug

SEQ ID NO: 999817 - RNA, 22 nt, Human
uuucucugugccauuuccauaa

SEQ ID NO: 999818 - RNA, 22 nt, Human
cuuucucuguggugaggagggu

SEQ ID NO: 999819 - RNA, 22 nt, Human
guucucucagccuuuguuauua

SEQ ID NO: 999820 - RNA, 23 nt, Human
auuacaguuaauuacaacaucuu

SEQ ID NO: 999821 - RNA, 22 nt, Human
uacaguaaccuuauuugucauu

SEQ ID NO: 999822 - RNA, 20 nt, Human
aguguauuuggguagagugu

SEQ ID NO: 999823 - RNA, 21 nt, Human
ugcaguauguauuuguaucca

SEQ ID NO: 999824 - RNA, 22 nt, Human
gcuguguaccuacuaacugcuu

SEQ ID NO: 999825 - RNA, 22 nt, Human
acuuuacaagcuuauagccuag

SEQ ID NO: 999826 - RNA, 22 nt, Human
uuucucugcuguguuggcagcu

SEQ ID NO: 999827 - RNA, 22 nt, Human
gugugauaacagggcaugacgg

SEQ ID NO: 999828 - RNA, 21 nt, Human
uuagcuuucuagaaucuuugu

SEQ ID NO: 999829 - RNA, 22 nt, Human
ggccugugagccuuaguuuaua

SEQ ID NO: 999830 - RNA, 22 nt, Human
cugcgugucucugucucauggc

SEQ ID NO: 999831 - RNA, 22 nt, Human
acuuuacauuugaucucucuaa

SEQ ID NO: 999832 - RNA, 22 nt, Human
acugugugcuggacaugauguu

SEQ ID NO: 999833 - RNA, 22 nt, Human
gcugugugcuaggauauguuuu

SEQ ID NO: 999834 - RNA, 22 nt, Human
uuuauguuugcauuuucaaaga

SEQ ID NO: 999835 - RNA, 22 nt, Human
cuaucuuuuguucauuuugagu

SEQ ID NO: 999836 - RNA, 22 nt, Human
auggcugugugacugaguucua

SEQ ID NO: 999837 - RNA, 22 nt, Human
gcucucuuuuuccagugguggu

SEQ ID NO: 999838 - RNA, 22 nt, Human
gcuggcugccuuacuuugugga

SEQ ID NO: 999839 - RNA, 22 nt, Human
uaguuucugaggauugaaagau

SEQ ID NO: 999840 - RNA, 22 nt, Human
ucuuuagccaguaucauaauga

SEQ ID NO: 999841 - RNA, 22 nt, Human
uauuucucagcauuuuacaucc

SEQ ID NO: 999842 - RNA, 22 nt, Human
acugugugccaggcgcuggucu

SEQ ID NO: 999843 - RNA, 22 nt, Human
uuugcaguagacaucuuauuuu

SEQ ID NO: 999844 - RNA, 22 nt, Human
uauauuuaauuaguugcuggau

SEQ ID NO: 999845 - RNA, 22 nt, Human
gguggcugaagcagucuucggg

SEQ ID NO: 999846 - RNA, 22 nt, Human
guaugcuuauuccuuguuguga

SEQ ID NO: 999847 - RNA, 22 nt, Human
ugugugugaguccuggcuuucc

SEQ ID NO: 999848 - RNA, 22 nt, Human
uauuugcugugcuuauuccauu

SEQ ID NO: 999849 - RNA, 22 nt, Human
ucuuugaccaaauuauccuguu

SEQ ID NO: 999850 - RNA, 22 nt, Human
uuugacaguccccugauguuug

SEQ ID NO: 999851 - RNA, 22 nt, Human
uuucucuccccaaguggaauug

SEQ ID NO: 999852 - RNA, 22 nt, Human
ccugucuggccuuccacggggg

SEQ ID NO: 999853 - RNA, 22 nt, Human
ccuuuuauauggcucaucacag

SEQ ID NO: 999854 - RNA, 22 nt, Human
auuugucuuugagugcccugcu

SEQ ID NO: 999855 - RNA, 22 nt, Human
auuugucuuuggaccugugaga

SEQ ID NO: 999856 - RNA, 21 nt, Human
ucugugcuuuuuuggcuccua

SEQ ID NO: 999857 - RNA, 22 nt, Human
aguguggcaggaaugacuagaa

SEQ ID NO: 999858 - RNA, 22 nt, Human
ucuguguguugucaggaggauu

SEQ ID NO: 999859 - RNA, 22 nt, Human
aguggcugugaaauacauggga

SEQ ID NO: 999860 - RNA, 22 nt, Human
auuauuuuaugugcggccugau

SEQ ID NO: 999861 - RNA, 22 nt, Human
uggcaguggcucagagugcaga

SEQ ID NO: 999862 - RNA, 20 nt, Human
uaugcaguauguguguauaa

SEQ ID NO: 999863 - RNA, 22 nt, Human
ugaggcagcauucuucaagaca

SEQ ID NO: 999864 - RNA, 20 nt, Human
ugcuguguggcccagcauga

SEQ ID NO: 999865 - RNA, 22 nt, Human
aguguauggaauuagcucccuu

SEQ ID NO: 999866 - RNA, 23 nt, Human
uuacagaaaguaugcuuuuguuu

SEQ ID NO: 999867 - RNA, 22 nt, Human
aagcugccuuccaugugaggaa

SEQ ID NO: 999868 - RNA, 22 nt, Human
uuucuuguaaaagcugugggaa

SEQ ID NO: 999869 - RNA, 22 nt, Human
acuuuugaggacuuuauuguau

SEQ ID NO: 999870 - RNA, 22 nt, Human
uaugccugauaacugugucucu

SEQ ID NO: 999871 - RNA, 22 nt, Human
cacaguaucccucuuucucccc

SEQ ID NO: 999872 - RNA, 22 nt, Human
ugugcugugggacucaggcucc

SEQ ID NO: 999873 - RNA, 20 nt, Human
uguguaugugcacaugcgaa

SEQ ID NO: 999874 - RNA, 22 nt, Human
ucuucugugaucuauguguuuu

SEQ ID NO: 999875 - RNA, 22 nt, Human
uuuuacaggucauagguauagu

SEQ ID NO: 999876 - RNA, 21 nt, Human
uagggcaggcauuggaagaga

SEQ ID NO: 999877 - RNA, 22 nt, Human
ucucugugcaggaugcugaguu

SEQ ID NO: 999878 - RNA, 17 nt, Human
gcaguuaaauuaagaug

SEQ ID NO: 999879 - RNA, 22 nt, Human
gccagccccuccauccuguuca

SEQ ID NO: 999880 - RNA, 22 nt, Human
aggcugugaguuuugucucaga

SEQ ID NO: 999881 - RNA, 22 nt, Human
aacaguaucuuuuaucagaaau

SEQ ID NO: 999882 - RNA, 23 nt, Human
cauguguaauuucugguugggug

SEQ ID NO: 999883 - RNA, 20 nt, Human
gcucugugguuugagucucc

SEQ ID NO: 999884 - RNA, 22 nt, Human
aaggcaguggcuggaaaaccug

SEQ ID NO: 999885 - RNA, 22 nt, Human
uucuaugucagugugcucugug

SEQ ID NO: 999886 - RNA, 18 nt, Human
guuggcugcuguggcugg

SEQ ID NO: 999887 - RNA, 22 nt, Human
uguuuacagggugauuuuaccu

SEQ ID NO: 999888 - RNA, 22 nt, Human
cuguggcucaaaaucccaugau

SEQ ID NO: 999889 - RNA, 22 nt, Human
uuuaacucugucauucucuuua

SEQ ID NO: 999890 - RNA, 22 nt, Human
aguguguguuugggcgguuuau

SEQ ID NO: 999891 - RNA, 22 nt, Human
uauucucugcagcugaauguuu

SEQ ID NO: 999892 - RNA, 22 nt, Human
gcuauguguguuuugcugcagc

SEQ ID NO: 999893 - RNA, 22 nt, Human
aggcuguguucugcccucuccc

SEQ ID NO: 999894 - RNA, 22 nt, Human
uuugacuuugggcucuaacuca

SEQ ID NO: 999895 - RNA, 22 nt, Human
uuugacagagcucuuagucucu

SEQ ID NO: 999896 - RNA, 17 nt, Human
ucuucucuuccagucuu

SEQ ID NO: 999897 - RNA, 22 nt, Human
uuacuguaugagugugguaguc

SEQ ID NO: 999898 - RNA, 22 nt, Human
cugugcugaggaugcaguuucu

SEQ ID NO: 999899 - RNA, 22 nt, Human
gcucucuugguggcuguccugg

SEQ ID NO: 999900 - RNA, 22 nt, Human
gucucucugcuaggccuccagu

SEQ ID NO: 999901 - RNA, 22 nt, Human
caguauauuuuagagaaguccc

SEQ ID NO: 999902 - RNA, 22 nt, Human
auuuacagccuugccaucuaua

SEQ ID NO: 999903 - RNA, 22 nt, Human
ggacaggaugcugaagaugaag

SEQ ID NO: 999904 - RNA, 22 nt, Human
uguguauguaagcaugugcaua

SEQ ID NO: 999905 - RNA, 22 nt, Human
cugcccugggaguaccuguccu

SEQ ID NO: 999906 - RNA, 22 nt, Human
acuguuuaggaggcuuauaugc

SEQ ID NO: 999907 - RNA, 22 nt, Human
uaguuucuaaacugaacuguca

SEQ ID NO: 999908 - RNA, 22 nt, Human
cuggcuguuucuccuuugucua

SEQ ID NO: 999909 - RNA, 22 nt, Human
uguauaugagucugaguguaca

SEQ ID NO: 999910 - RNA, 22 nt, Human
agcugugugacucuaagcaagu

SEQ ID NO: 999911 - RNA, 22 nt, Human
cucucuuuuucgugugccgaag

SEQ ID NO: 999912 - RNA, 18 nt, Human
agcugcccugggcuggag

SEQ ID NO: 999913 - RNA, 20 nt, Human
aguaugauccacucugcucu

SEQ ID NO: 999914 - RNA, 22 nt, Human
aguggcugagugacugugacuc

SEQ ID NO: 999915 - RNA, 22 nt, Human
ccuggcccuggaauagggcagg

SEQ ID NO: 999916 - RNA, 20 nt, Human
aaguauauguccguguacuu

SEQ ID NO: 999917 - RNA, 22 nt, Human
ucuuuccagaggaauuuuuaga

SEQ ID NO: 999918 - RNA, 22 nt, Human
aaguauauuuagcugagcuugu

SEQ ID NO: 999919 - RNA, 22 nt, Human
gugcaugcaguaaguguuuuaa

SEQ ID NO: 999920 - RNA, 22 nt, Human
cagggugcagagcuaggguagu

SEQ ID NO: 999921 - RNA, 22 nt, Human
uuccugugaagccgguggucuc

SEQ ID NO: 999922 - RNA, 22 nt, Human
ucucugugacagcuggguaugu

SEQ ID NO: 999923 - RNA, 22 nt, Human
guguguggaaaguuuuccaugg

SEQ ID NO: 999924 - RNA, 22 nt, Human
cagccacuguggaauagccccc

SEQ ID NO: 999925 - RNA, 22 nt, Human
auggcugucacgccacugugag

SEQ ID NO: 999926 - RNA, 22 nt, Human
ucugggugccacugucuguaca

SEQ ID NO: 999927 - RNA, 22 nt, Human
uguuugugagaugugagguacg

SEQ ID NO: 999928 - RNA, 22 nt, Human
auuugucucugcacuuuacuca

SEQ ID NO: 999929 - RNA, 18 nt, Human
gugggguguugugaggau

SEQ ID NO: 999930 - RNA, 22 nt, Human
uuuucagugguaucuuuguaaa

SEQ ID NO: 999931 - RNA, 22 nt, Human
cuuguacauugauuucugcauu

SEQ ID NO: 999932 - RNA, 22 nt, Human
aauuuucugccuagcaaaaacu

SEQ ID NO: 999933 - RNA, 21 nt, Human
ucugucugguuuuagaguggc

SEQ ID NO: 999934 - RNA, 22 nt, Human
guuacaguggguuuggggccca

SEQ ID NO: 999935 - RNA, 22 nt, Human
acuuauuagacaucuucauugu

SEQ ID NO: 999936 - RNA, 22 nt, Human
ucugucugagggagugacauuu

SEQ ID NO: 999937 - RNA, 22 nt, Human
cuaacuuugucaucuucccuuu

SEQ ID NO: 999938 - RNA, 22 nt, Human
uacaguuucuguccuuguggag

SEQ ID NO: 999939 - RNA, 22 nt, Human
uggcauguggcuuugagucauc

SEQ ID NO: 999940 - RNA, 22 nt, Human
ccugugugauuggaagcugaga

SEQ ID NO: 999941 - RNA, 22 nt, Human
uggcugugguuuaucccaguuc

SEQ ID NO: 999942 - RNA, 22 nt, Human
ucugcguggcugcugugagcgu

SEQ ID NO: 999943 - RNA, 22 nt, Human
gugugugucuccgcggccguag

SEQ ID NO: 999944 - RNA, 22 nt, Human
agcugccccucauuuucaccac

SEQ ID NO: 999945 - RNA, 22 nt, Human
ccugugugcacacgaggccaug

SEQ ID NO: 999946 - RNA, 22 nt, Human
agcugcccccagggcugugcuu

SEQ ID NO: 999947 - RNA, 22 nt, Human
ggcugaguucucuugcugaauc

SEQ ID NO: 999948 - RNA, 22 nt, Human
guuuucucuguguuuggaugau

SEQ ID NO: 999949 - RNA, 22 nt, Human
ucugugcuagaggaguuggcca

SEQ ID NO: 999950 - RNA, 22 nt, Human
aacaguauggaagccauuagga

SEQ ID NO: 999951 - RNA, 22 nt, Human
cuucuguguuuuacuauaugua

SEQ ID NO: 999952 - RNA, 22 nt, Human
uuaucucucacuuuuaaggaca

SEQ ID NO: 999953 - RNA, 22 nt, Human
cuguggcuaggaagcuguggga

SEQ ID NO: 999954 - RNA, 22 nt, Human
uagaguauagcuaacuguauua

SEQ ID NO: 999955 - RNA, 22 nt, Human
uguggcuguguccaccugcugc

SEQ ID NO: 999956 - RNA, 23 nt, Human
ucuuuacagcagcaggauuugga

SEQ ID NO: 999957 - RNA, 22 nt, Human
gacagcugugcaggagaagggg

SEQ ID NO: 999958 - RNA, 22 nt, Human
cuggagggacaagguaugcauu

SEQ ID NO: 999959 - RNA, 22 nt, Human
uacaguauuacuguguuguuuu

SEQ ID NO: 999960 - RNA, 22 nt, Human
ucaugugucugccaguguuuau

SEQ ID NO: 999961 - RNA, 22 nt, Human
uguauauugccugagucuuucc

SEQ ID NO: 999962 - RNA, 22 nt, Human
cuauacagcagcuuacuaguua

SEQ ID NO: 999963 - RNA, 22 nt, Human
ggcagugaacagaaaugcagaa

SEQ ID NO: 999964 - RNA, 22 nt, Human
ucugucacuauuggccagaaca

SEQ ID NO: 999965 - RNA, 22 nt, Human
uuauuuucuccucagaaagugg

SEQ ID NO: 999966 - RNA, 22 nt, Human
ucuuuaagaguaauuauuuugg

SEQ ID NO: 999967 - RNA, 22 nt, Human
uagcaguacugggcauguguuu

SEQ ID NO: 999968 - RNA, 20 nt, Human
ggaagcuguggguccccagg

SEQ ID NO: 999969 - RNA, 22 nt, Human
acuuuacaaacuccucacuguu

SEQ ID NO: 999970 - RNA, 19 nt, Human
uacuuuuucaggacagagu

SEQ ID NO: 999971 - RNA, 19 nt, Human
uguguguauuucaguucuu

SEQ ID NO: 999972 - RNA, 22 nt, Human
ucagugugacugauggcuuuau

SEQ ID NO: 999973 - RNA, 22 nt, Human
cuuuacaccaagcagaucuuuc

SEQ ID NO: 999974 - RNA, 22 nt, Human
uauuacaguucgaguuucuagg

SEQ ID NO: 999975 - RNA, 22 nt, Human
gggcugugccucaggugggguc

SEQ ID NO: 999976 - RNA, 22 nt, Human
ucuguguccugcuagcugucuu

SEQ ID NO: 999977 - RNA, 22 nt, Human
ugaguguauaugaagguuguaa

SEQ ID NO: 999978 - RNA, 22 nt, Human
ggaggggugcucagcugucacg

SEQ ID NO: 999979 - RNA, 22 nt, Human
uuucugcuuaggacucugugga

SEQ ID NO: 999980 - RNA, 18 nt, Human
uaucuuuuccagugguau

SEQ ID NO: 999981 - RNA, 22 nt, Human
acagucugcauaugaccuguag

SEQ ID NO: 999982 - RNA, 22 nt, Human
gugugugugccugcacacacac

SEQ ID NO: 999983 - RNA, 22 nt, Human
agcuguguuuccagaugguagc

SEQ ID NO: 999984 - RNA, 22 nt, Human
uaacuucuggaaaugcaucugc

SEQ ID NO: 999985 - RNA, 22 nt, Human
aucuggggagguaucuguaguc

SEQ ID NO: 999986 - RNA, 22 nt, Human
uuuucaguuugcacugcagugc

SEQ ID NO: 999987 - RNA, 22 nt, Human
cuuuacagugcugcuaauggcu

SEQ ID NO: 999988 - RNA, 22 nt, Human
uacaguaguaucuucauuuguu

SEQ ID NO: 999989 - RNA, 22 nt, Human
uucugucuggaaaaggacauag

SEQ ID NO: 999990 - RNA, 22 nt, Human
uuauuuugguaaauguuugccu

SEQ ID NO: 999991 - RNA, 22 nt, Human
auacaguagggaccaugucuga

SEQ ID NO: 999992 - RNA, 23 nt, Human
uuucucauccagagagucagucc

SEQ ID NO: 999993 - RNA, 22 nt, Human
cuacaguagagguugucaggga

SEQ ID NO: 999994 - RNA, 22 nt, Human
augugucuucuguggguuugaa

SEQ ID NO: 999995 - RNA, 22 nt, Human
ugggugugccauauuccauuuc

SEQ ID NO: 999996 - RNA, 22 nt, Human
uacacuuuauggauccuacuuu

SEQ ID NO: 999997 - RNA, 22 nt, Human
gguggcuggaggagcugaugga

SEQ ID NO: 999998 - RNA, 22 nt, Human
uucucccugguauuuacuuagu

SEQ ID NO: 999999 - RNA, 22 nt, Human
aggcuguguaaagugcuuuccc

SEQ ID NO: 1000000 - RNA, 22 nt, Human
aucaguauauuccuuggucuuu

SEQ ID NO: 1000001 - RNA, 22 nt, Human
gugugcacagagcuccaguguu

SEQ ID NO: 1000002 - RNA, 22 nt, Human
uuugugugcuugguauugaaga

SEQ ID NO: 1000003 - RNA, 22 nt, Human
aagcuuuucucuguauuaccug

SEQ ID NO: 1000004 - RNA, 22 nt, Human
uuuacaaggcaguuauuuuccu

SEQ ID NO: 1000005 - RNA, 22 nt, Human
uucuaacucaaagcuucuuuca

SEQ ID NO: 1000006 - RNA, 22 nt, Human
uucuucugacacugaugcugua

SEQ ID NO: 1000007 - RNA, 19 nt, Human
ggugugccaaaugggaaug

SEQ ID NO: 1000008 - RNA, 22 nt, Human
cuggcugugcuggaguugagga

SEQ ID NO: 1000009 - RNA, 22 nt, Human
aggagguggcugaacuugaggg

SEQ ID NO: 1000010 - RNA, 22 nt, Human
auuauucuugagguguuuauug

SEQ ID NO: 1000011 - RNA, 22 nt, Human
uguacagucaugcuuucuguuc

SEQ ID NO: 1000012 - RNA, 22 nt, Human
ugugccugacuaggugaaucaa

SEQ ID NO: 1000013 - RNA, 22 nt, Human
ugucuguauaucacuuuugucc

SEQ ID NO: 1000014 - RNA, 22 nt, Human
uaacuuuggggacacuucucuu

SEQ ID NO: 1000015 - RNA, 22 nt, Human
uauuaucuaguaacugauagug

SEQ ID NO: 1000016 - RNA, 22 nt, Human
ucuauuuuguuuccagcucuac

SEQ ID NO: 1000017 - RNA, 22 nt, Human
guguggcugccagccaagaggc

SEQ ID NO: 1000018 - RNA, 22 nt, Human
auggcuguguuguuccucugaa

SEQ ID NO: 1000019 - RNA, 22 nt, Human
cuuacagugaucaacacaaaga

SEQ ID NO: 1000020 - RNA, 22 nt, Human
cugcccugcuugaugacagcga

SEQ ID NO: 1000021 - RNA, 22 nt, Human
augcugugccuucucugugcca

SEQ ID NO: 1000022 - RNA, 22 nt, Human
cuucacaggcaagucuguuuuu

SEQ ID NO: 1000023 - RNA, 22 nt, Human
uuucuuguuucauggugucuca

SEQ ID NO: 1000024 - RNA, 22 nt, Human
ugugcucuugucugugacuaac

SEQ ID NO: 1000025 - RNA, 22 nt, Human
acaguauagggcuuauauugua

SEQ ID NO: 1000026 - RNA, 22 nt, Human
gauuaagagaaguuucuuaucg

SEQ ID NO: 1000027 - RNA, 22 nt, Human
uacuguaugaauuauguuauuu

SEQ ID NO: 1000028 - RNA, 22 nt, Human
uuuucuauucauugucuauggu

SEQ ID NO: 1000029 - RNA, 19 nt, Human
ucucuacacuacauuucua

SEQ ID NO: 1000030 - RNA, 19 nt, Human
auggcuguguuccaguaaa

SEQ ID NO: 1000031 - RNA, 22 nt, Human
uaacucuuccaacacuccuucc

SEQ ID NO: 1000032 - RNA, 22 nt, Human
cuguguggacugguugaggccc

SEQ ID NO: 1000033 - RNA, 22 nt, Human
uguggcugacuccuggucccca

SEQ ID NO: 1000034 - RNA, 22 nt, Human
uuuuaguuuggauuucuaaagc

SEQ ID NO: 1000035 - RNA, 22 nt, Human
ucuuuacacaagacaagaauaa

SEQ ID NO: 1000036 - RNA, 22 nt, Human
cucuucuugcuagacugagugc

SEQ ID NO: 1000037 - RNA, 19 nt, Human
ugugacugguugucucgcu

SEQ ID NO: 1000038 - RNA, 22 nt, Human
ucucucugugacagcuuugcug

SEQ ID NO: 1000039 - RNA, 22 nt, Human
gcugugugacccuagccaguag

SEQ ID NO: 1000040 - RNA, 22 nt, Human
aguguaugaguuucaguucuuc

SEQ ID NO: 1000041 - RNA, 22 nt, Human
aguguguaagggaucaaagagu

SEQ ID NO: 1000042 - RNA, 22 nt, Human
guguagcuuuggagugggaggc

SEQ ID NO: 1000043 - RNA, 22 nt, Human
uuucuuuaucauagcaucuuug

SEQ ID NO: 1000044 - RNA, 22 nt, Human
uaguggcugcagggcuguuuga

SEQ ID NO: 1000045 - RNA, 22 nt, Human
uaacuuugagaacuuucuggug

SEQ ID NO: 1000046 - RNA, 22 nt, Human
uauuuucuggggagagugaacc

SEQ ID NO: 1000047 - RNA, 23 nt, Human
aguguguauugcugagggcagcu

SEQ ID NO: 1000048 - RNA, 19 nt, Human
uguuuacauguuucuucag

SEQ ID NO: 1000049 - RNA, 22 nt, Human
cugugcugcagacgcaguagcu

SEQ ID NO: 1000050 - RNA, 22 nt, Human
uuacagaacugcccuaguuggc

SEQ ID NO: 1000051 - RNA, 22 nt, Human
aguaucuucaaguuucuucuag

SEQ ID NO: 1000052 - RNA, 22 nt, Human
gugacugugaacuguuucugau

SEQ ID NO: 1000053 - RNA, 22 nt, Human
uggagguggggcucaggaaucu

SEQ ID NO: 1000054 - RNA, 21 nt, Human
gugugcugauacauuggagaa

SEQ ID NO: 1000055 - RNA, 22 nt, Human
uacauguaguucacugguggca

SEQ ID NO: 1000056 - RNA, 21 nt, Human
ccagcccagcugugucccagc

SEQ ID NO: 1000057 - RNA, 21 nt, Human
augcauguuacaguauaugcc

SEQ ID NO: 1000058 - RNA, 22 nt, Human
uuuucagugggcaaugauguga

SEQ ID NO: 1000059 - RNA, 22 nt, Human
cugugugccuccugugaucagg

SEQ ID NO: 1000060 - RNA, 19 nt, Human
uuugcagugguuccuuugu

SEQ ID NO: 1000061 - RNA, 19 nt, Human
aggcugugaggggaaggaa

SEQ ID NO: 1000062 - RNA, 22 nt, Human
uuucaucuaacacuacauaggg

SEQ ID NO: 1000063 - RNA, 22 nt, Human
cuucuuauuaauccuucucugu

SEQ ID NO: 1000064 - RNA, 22 nt, Human
uggcugagagucauccugugug

SEQ ID NO: 1000065 - RNA, 22 nt, Human
auguguaugagugugcuucuuu

SEQ ID NO: 1000066 - RNA, 22 nt, Human
uuguguggauaauauuacuuga

SEQ ID NO: 1000067 - RNA, 22 nt, Human
ucuaacuuguauguauaguuuu

SEQ ID NO: 1000068 - RNA, 22 nt, Human
cuacaguagaguaggccucuga

SEQ ID NO: 1000069 - RNA, 22 nt, Human
uuucacagcagaauuucugagg

SEQ ID NO: 1000070 - RNA, 22 nt, Human
uuauguuuuauggcuauaucau

SEQ ID NO: 1000071 - RNA, 20 nt, Human
ucuguacacucaucuucugc

SEQ ID NO: 1000072 - RNA, 22 nt, Human
ugugugugacucauacuagaac

SEQ ID NO: 1000073 - RNA, 22 nt, Human
gcaguguggccccaguaucacg

SEQ ID NO: 1000074 - RNA, 22 nt, Human
acuucuuucacaauguuucuag

SEQ ID NO: 1000075 - RNA, 22 nt, Human
cuuucucuucagcacccagccc

SEQ ID NO: 1000076 - RNA, 22 nt, Human
cagccacugaacuccuggcuau

SEQ ID NO: 1000077 - RNA, 22 nt, Human
uucuuauuaugugcucugugaa

SEQ ID NO: 1000078 - RNA, 22 nt, Human
cugcccugagucaugccagaug

SEQ ID NO: 1000079 - RNA, 16 nt, Human
cuguggcucccagguu

SEQ ID NO: 1000080 - RNA, 22 nt, Human
cuggcccccacaccugucaggg

SEQ ID NO: 1000081 - RNA, 22 nt, Human
uaacuuuuacuuaccaucugag

SEQ ID NO: 1000082 - RNA, 22 nt, Human
cugugucuucaauguacuggga

SEQ ID NO: 1000083 - RNA, 22 nt, Human
uuauaguaugugcauaugugug

SEQ ID NO: 1000084 - RNA, 22 nt, Human
cuggcuguuucaggcagugucc

SEQ ID NO: 1000085 - RNA, 22 nt, Human
guguguguguaaaaauccagag

SEQ ID NO: 1000086 - RNA, 22 nt, Human
aucuguguguuauuguuuauca

SEQ ID NO: 1000087 - RNA, 22 nt, Human
uguguagcucauauuaguguua

SEQ ID NO: 1000088 - RNA, 22 nt, Human
guuacagugcauguggcuucug

SEQ ID NO: 1000089 - RNA, 22 nt, Human
cguggcuggggaggucagccag

SEQ ID NO: 1000090 - RNA, 22 nt, Human
uagggcagccacccaggcugcu

SEQ ID NO: 1000091 - RNA, 22 nt, Human
ucuucacaggagccugccugcc

SEQ ID NO: 1000092 - RNA, 22 nt, Human
ugugugccccagaugaguagcu

SEQ ID NO: 1000093 - RNA, 22 nt, Human
gcugugauguggagggugcuga

SEQ ID NO: 1000094 - RNA, 22 nt, Human
aguguggccaaugaggaugggc

SEQ ID NO: 1000095 - RNA, 21 nt, Human
agugugugauaggcaggaaga

SEQ ID NO: 1000096 - RNA, 22 nt, Human
cuucucucggugcaucccucac

SEQ ID NO: 1000097 - RNA, 22 nt, Human
augggcagacagggagcucacg

SEQ ID NO: 1000098 - RNA, 22 nt, Human
ccugcccaggagucucucugug

SEQ ID NO: 1000099 - RNA, 22 nt, Human
cuuguuuaagccgcuguuaagc

SEQ ID NO: 1000100 - RNA, 22 nt, Human
uggcuaugacuucguacugucu

SEQ ID NO: 1000101 - RNA, 22 nt, Human
uuguguauuuuuugauacuaac

SEQ ID NO: 1000102 - RNA, 22 nt, Human
guguuguggagcuugucagggg

SEQ ID NO: 1000103 - RNA, 22 nt, Human
uucuauguuaguaugggucucc

SEQ ID NO: 1000104 - RNA, 22 nt, Human
ugcuguguucuccugacucacc

SEQ ID NO: 1000105 - RNA, 22 nt, Human
guuugugucaaugacuucugca

SEQ ID NO: 1000106 - RNA, 22 nt, Human
acaguaguacacaucuaugucc

SEQ ID NO: 1000107 - RNA, 22 nt, Human
aggagguguagauuuccuguca

SEQ ID NO: 1000108 - RNA, 22 nt, Human
ggcugcugggucaugaugcaga

SEQ ID NO: 1000109 - RNA, 22 nt, Human
ugagcuguagcagaugcuguug

SEQ ID NO: 1000110 - RNA, 22 nt, Human
aggcuguggugcugaaggaggg

SEQ ID NO: 1000111 - RNA, 22 nt, Human
uauuuugcuuuagcugacuguu

SEQ ID NO: 1000112 - RNA, 23 nt, Human
augugugggaggucagagagcca

SEQ ID NO: 1000113 - RNA, 22 nt, Human
auguggcugucacagcauaaug

SEQ ID NO: 1000114 - RNA, 22 nt, Human
cugcagccucaaccuccugagc

SEQ ID NO: 1000115 - RNA, 19 nt, Human
acugugcucgggaaccacu

SEQ ID NO: 1000116 - RNA, 22 nt, Human
ucuuaacugacaguuuaauggg

SEQ ID NO: 1000117 - RNA, 22 nt, Human
gcuguaugaguucauguguaga

SEQ ID NO: 1000118 - RNA, 22 nt, Human
aguggcugauuacaaacugagu

SEQ ID NO: 1000119 - RNA, 22 nt, Human
auucucuggucauugagcauau

SEQ ID NO: 1000120 - RNA, 22 nt, Human
ugguguguacauuuuugcuucu

SEQ ID NO: 1000121 - RNA, 22 nt, Human
cguggcuggggcgacuccacgg

SEQ ID NO: 1000122 - RNA, 22 nt, Human
cugucguguucacuguggccua

SEQ ID NO: 1000123 - RNA, 22 nt, Human
uuguggcuucuacgcccacagg

SEQ ID NO: 1000124 - RNA, 22 nt, Human
cuguggcuccauagaaguugca

SEQ ID NO: 1000125 - RNA, 22 nt, Human
aguguauguccugaggggagaa

SEQ ID NO: 1000126 - RNA, 22 nt, Human
ugggugugaagucuguuggccu

SEQ ID NO: 1000127 - RNA, 22 nt, Human
cugugucugaauaacucugugu

SEQ ID NO: 1000128 - RNA, 22 nt, Human
agcuguguucugguugauucac

SEQ ID NO: 1000129 - RNA, 22 nt, Human
guaugcaugcauguguauguac

SEQ ID NO: 1000130 - RNA, 17 nt, Human
ugcaugcgucugugaua

SEQ ID NO: 1000131 - RNA, 22 nt, Human
cucugugugguaugauugucau

SEQ ID NO: 1000132 - RNA, 22 nt, Human
ucaguauagcuaaaaguuuguc

SEQ ID NO: 1000133 - RNA, 20 nt, Human
uguauauuuucugguguaaa

SEQ ID NO: 1000134 - RNA, 22 nt, Human
guguguggacgucugagcccag

SEQ ID NO: 1000135 - RNA, 22 nt, Human
acuguuuucuuagcucccugcu

SEQ ID NO: 1000136 - RNA, 22 nt, Human
uggcucugucacugugagcuau

SEQ ID NO: 1000137 - RNA, 19 nt, Human
uucucuauuaugucuucuc

SEQ ID NO: 1000138 - RNA, 21 nt, Human
uguuuucuaaagggcggauca

SEQ ID NO: 1000139 - RNA, 22 nt, Human
uucugcucuaauguacaccagc

SEQ ID NO: 1000140 - RNA, 22 nt, Human
ugugugcuaauguaugcucuaa

SEQ ID NO: 1000141 - RNA, 21 nt, Human
ucucuuugggaacauuaauca

SEQ ID NO: 1000142 - RNA, 22 nt, Human
acuuuugugcaggucucuccca

SEQ ID NO: 1000143 - RNA, 22 nt, Human
auuucucuuagcaagacauuac

SEQ ID NO: 1000144 - RNA, 22 nt, Human
uggcucuguuuuaugaguacca

SEQ ID NO: 1000145 - RNA, 22 nt, Human
caguaaauaguggagauguggg

SEQ ID NO: 1000146 - RNA, 22 nt, Human
guuauuuuaucucugagagguu

SEQ ID NO: 1000147 - RNA, 22 nt, Human
ucugcucugagagggccaucag

SEQ ID NO: 1000148 - RNA, 22 nt, Human
cuggcugugcugacugagaggg

SEQ ID NO: 1000149 - RNA, 22 nt, Human
uuacaguaaucgaguguugugg

SEQ ID NO: 1000150 - RNA, 22 nt, Human
guguguggggccuucggguccu

SEQ ID NO: 1000151 - RNA, 22 nt, Human
cuuuacagauggauaauuguuu

SEQ ID NO: 1000152 - RNA, 22 nt, Human
uuuacaguauaguaggacucau

SEQ ID NO: 1000153 - RNA, 22 nt, Human
ugccauggaaguggccagaccu

SEQ ID NO: 1000154 - RNA, 22 nt, Human
cucucuguauguguauauuuau

SEQ ID NO: 1000155 - RNA, 19 nt, Human
gcugugugaccuugggcaa

SEQ ID NO: 1000156 - RNA, 22 nt, Human
cugucccagauguucucagcac

SEQ ID NO: 1000157 - RNA, 22 nt, Human
ucugcgugaauuugcauugugg

SEQ ID NO: 1000158 - RNA, 22 nt, Human
ucuaugugcccuuugugugaug

SEQ ID NO: 1000159 - RNA, 22 nt, Human
cucugcucaccagccaugugau

SEQ ID NO: 1000160 - RNA, 17 nt, Human
ggcugcugugcuggugc

SEQ ID NO: 1000161 - RNA, 22 nt, Human
ugccugugucacagugauguuu

SEQ ID NO: 1000162 - RNA, 22 nt, Human
guuuuuaucuaauagcaguuau

SEQ ID NO: 1000163 - RNA, 22 nt, Human
ucuuugcauggacauguguuuu

SEQ ID NO: 1000164 - RNA, 22 nt, Human
aauuucucaauuguuacaggug

SEQ ID NO: 1000165 - RNA, 22 nt, Human
aguuucucuuaaucuaguaucu

SEQ ID NO: 1000166 - RNA, 22 nt, Human
aggcugugggaguugagagucu

SEQ ID NO: 1000167 - RNA, 23 nt, Human
acagcugcaccuggccgccuggc

SEQ ID NO: 1000168 - RNA, 18 nt, Human
uuaaguuuuacugcuuua

SEQ ID NO: 1000169 - RNA, 22 nt, Human
uucugugucuucuuguucugug

SEQ ID NO: 1000170 - RNA, 22 nt, Human
uguauauucugccuaaaagcuu

SEQ ID NO: 1000171 - RNA, 22 nt, Human
ucuucacauucacguaacauag

SEQ ID NO: 1000172 - RNA, 22 nt, Human
gaugugugcuuuucgcaguguc

SEQ ID NO: 1000173 - RNA, 22 nt, Human
gguguguagcauguuuaagacc

SEQ ID NO: 1000174 - RNA, 22 nt, Human
aaacuuuugguccucauggguu

SEQ ID NO: 1000175 - RNA, 22 nt, Human
ucuccucugugccacagcuugg

SEQ ID NO: 1000176 - RNA, 19 nt, Human
uaugugugcauuugugcau

SEQ ID NO: 1000177 - RNA, 22 nt, Human
ccucucuuuccuacaccuugga

SEQ ID NO: 1000178 - RNA, 22 nt, Human
ucuuugugccaugcagugaggc

SEQ ID NO: 1000179 - RNA, 22 nt, Human
aggcaguuguagagagggcucu

SEQ ID NO: 1000180 - RNA, 22 nt, Human
acuaguauucuuggucuuguau

SEQ ID NO: 1000181 - RNA, 22 nt, Human
gugcccaggggccagcugccgg

SEQ ID NO: 1000182 - RNA, 22 nt, Human
augugugugcauuucucucccu

SEQ ID NO: 1000183 - RNA, 22 nt, Human
aggcugugacagggucauggag

SEQ ID NO: 1000184 - RNA, 22 nt, Human
gcagcugcaagcacuucuggca

SEQ ID NO: 1000185 - RNA, 22 nt, Human
auguggcuuuucuaacccuucc

SEQ ID NO: 1000186 - RNA, 22 nt, Human
gcucugugaccuuaggcaaguu

SEQ ID NO: 1000187 - RNA, 22 nt, Human
uuuacgagugcuaaugauauug

SEQ ID NO: 1000188 - RNA, 22 nt, Human
uugacuuuaaagcuuugucucu

SEQ ID NO: 1000189 - RNA, 22 nt, Human
ucuuuucuggacucugcaugga

SEQ ID NO: 1000190 - RNA, 22 nt, Human
ucuuugcaggccaaauuguuaa

SEQ ID NO: 1000191 - RNA, 22 nt, Human
gcucuguguaaauguagggucc

SEQ ID NO: 1000192 - RNA, 22 nt, Human
gauauuuuuaggugaugcaggc

SEQ ID NO: 1000193 - RNA, 22 nt, Human
gcagcccaggucucucucacuc

SEQ ID NO: 1000194 - RNA, 22 nt, Human
cuguggcugaacucugaagagg

SEQ ID NO: 1000195 - RNA, 22 nt, Human
uacauauagacaguuacucuag

SEQ ID NO: 1000196 - RNA, 22 nt, Human
ccugaggacacacgcugcagga

SEQ ID NO: 1000197 - RNA, 22 nt, Human
ccucucuuggccgcagucuucu

SEQ ID NO: 1000198 - RNA, 18 nt, Human
gcugugugcaccugauaa

SEQ ID NO: 1000199 - RNA, 22 nt, Human
uacagcauugcauuuuccuuug

SEQ ID NO: 1000200 - RNA, 22 nt, Human
cugugugcauaguugugcucaa

SEQ ID NO: 1000201 - RNA, 22 nt, Human
uuuacagucuauguugaauuaa

SEQ ID NO: 1000202 - RNA, 22 nt, Human
uuaacugugacaguuucucaga

SEQ ID NO: 1000203 - RNA, 22 nt, Human
uuuacagucucuauagucaaaa

SEQ ID NO: 1000204 - RNA, 22 nt, Human
uaggaagcugagcagcauuccu

SEQ ID NO: 1000205 - RNA, 22 nt, Human
aggcuguguggucaugguggcu

SEQ ID NO: 1000206 - RNA, 22 nt, Human
uauguuucuuccuuuucauaca

SEQ ID NO: 1000207 - RNA, 22 nt, Human
ugguugugcugaguuuagugca

SEQ ID NO: 1000208 - RNA, 22 nt, Human
gcuguguaggauccuguuguau

SEQ ID NO: 1000209 - RNA, 22 nt, Human
uuucaucuuauuugucuacauc

SEQ ID NO: 1000210 - RNA, 22 nt, Human
acuuuuuaguuuccucaaacau

SEQ ID NO: 1000211 - RNA, 22 nt, Human
cuggcugugugcccccggcacc

SEQ ID NO: 1000212 - RNA, 22 nt, Human
aaacuuuucuuggggaccugcc

SEQ ID NO: 1000213 - RNA, 22 nt, Human
uuucacucagcucucauugucu

SEQ ID NO: 1000214 - RNA, 22 nt, Human
gaagggugugauuugccugaga

SEQ ID NO: 1000215 - RNA, 22 nt, Human
ccugucugcaugaucccugcca

SEQ ID NO: 1000216 - RNA, 20 nt, Human
ucuguagucuguggcaagac

SEQ ID NO: 1000217 - RNA, 20 nt, Human
uucuucucuaguuaucuuca

SEQ ID NO: 1000218 - RNA, 22 nt, Human
guguaugcagaaacaugcaaag

SEQ ID NO: 1000219 - RNA, 22 nt, Human
gugucaugcacacucaguguug

SEQ ID NO: 1000220 - RNA, 22 nt, Human
uauuuuacagacuacuuuagau

SEQ ID NO: 1000221 - RNA, 22 nt, Human
gcugugagcugccugugucaca

SEQ ID NO: 1000222 - RNA, 22 nt, Human
cucuuuaaaguaaaauuugucu

SEQ ID NO: 1000223 - RNA, 22 nt, Human
auauuuguaaaauucugugucu

SEQ ID NO: 1000224 - RNA, 22 nt, Human
uucugucucuguguuuacauua

SEQ ID NO: 1000225 - RNA, 21 nt, Human
caguuauucuugaugugugug

SEQ ID NO: 1000226 - RNA, 22 nt, Human
uuacagauggcaguuucuugag

SEQ ID NO: 1000227 - RNA, 22 nt, Human
auuguucuguagugacauguag

SEQ ID NO: 1000228 - RNA, 22 nt, Human
acauauaugugcacaugugcag

SEQ ID NO: 1000229 - RNA, 22 nt, Human
gcugauguuuaguugauguuac

SEQ ID NO: 1000230 - RNA, 22 nt, Human
ucucuuuagugcuuagacgucu

SEQ ID NO: 1000231 - RNA, 22 nt, Human
gcucucuugacagcuugcuguu

SEQ ID NO: 1000232 - RNA, 22 nt, Human
gucucucucccaagauuggcua

SEQ ID NO: 1000233 - RNA, 20 nt, Human
ucuuugugucagauggacag

SEQ ID NO: 1000234 - RNA, 22 nt, Human
uuauuuauucauucugucuguc

SEQ ID NO: 1000235 - RNA, 20 nt, Human
cuuucucuaauuuauaagua

SEQ ID NO: 1000236 - RNA, 19 nt, Human
aguguguacugaaagcacu

SEQ ID NO: 1000237 - RNA, 22 nt, Human
agucuauuuccccuucucuuga

SEQ ID NO: 1000238 - RNA, 19 nt, Human
aguguauuuuuuucuguag

SEQ ID NO: 1000239 - RNA, 22 nt, Human
guggccugggguuuguucugag

SEQ ID NO: 1000240 - RNA, 22 nt, Human
ucugagugaguguaggccugac

SEQ ID NO: 1000241 - RNA, 22 nt, Human
gggcugugugcaguacgggucc

SEQ ID NO: 1000242 - RNA, 22 nt, Human
uguguauaagugagaaugcugu

SEQ ID NO: 1000243 - RNA, 16 nt, Human
uggagguguuucuagu

SEQ ID NO: 1000244 - RNA, 22 nt, Human
cugguguggcggcgcccuguag

SEQ ID NO: 1000245 - RNA, 22 nt, Human
cagccacuggugccaggcuguu

SEQ ID NO: 1000246 - RNA, 22 nt, Human
guuuggcucugggugccugugc

SEQ ID NO: 1000247 - RNA, 22 nt, Human
uuuucuuggaguggcuguccuu

SEQ ID NO: 1000248 - RNA, 22 nt, Human
cacugugucuggagugagcugg

SEQ ID NO: 1000249 - RNA, 22 nt, Human
cuguggcucugcagucccaaca

SEQ ID NO: 1000250 - RNA, 22 nt, Human
cuucugugcaauuguggaggag

SEQ ID NO: 1000251 - RNA, 22 nt, Human
uguguggcguugcguggcuagg

SEQ ID NO: 1000252 - RNA, 16 nt, Human
caguuuuaaggcccaa

SEQ ID NO: 1000253 - RNA, 22 nt, Human
uuacaguuagaaucugaugaaa

SEQ ID NO: 1000254 - RNA, 22 nt, Human
agcuguguagggaaucagagaa

SEQ ID NO: 1000255 - RNA, 22 nt, Human
caguauuuuuaagcugcuuugu

SEQ ID NO: 1000256 - RNA, 22 nt, Human
cugugugucauuugucaauccu

SEQ ID NO: 1000257 - RNA, 22 nt, Human
auguggcuuuuccuggguuccu

SEQ ID NO: 1000258 - RNA, 22 nt, Human
uacuuucuuucugauccuuaug

SEQ ID NO: 1000259 - RNA, 22 nt, Human
uauacaguuaaguuucuucagu

SEQ ID NO: 1000260 - RNA, 22 nt, Human
cugugccugccuuguucacuga

SEQ ID NO: 1000261 - RNA, 21 nt, Human
uguggcugacacccuuuggga

SEQ ID NO: 1000262 - RNA, 22 nt, Human
ugugucugaacaugcuuuguaa

SEQ ID NO: 1000263 - RNA, 22 nt, Human
uuuagaguaaaaacugugaccu

SEQ ID NO: 1000264 - RNA, 22 nt, Human
uuuacaguaagguggaugguac

SEQ ID NO: 1000265 - RNA, 22 nt, Human
auuuacucgugucuccagugcu

SEQ ID NO: 1000266 - RNA, 22 nt, Human
accuuuuuguucuguucucagc

SEQ ID NO: 1000267 - RNA, 22 nt, Human
gugcucuccuggcugcccugac

SEQ ID NO: 1000268 - RNA, 22 nt, Human
uucucuccuacccaguauccau

SEQ ID NO: 1000269 - RNA, 22 nt, Human
cuguggcuucuagguccccgau

SEQ ID NO: 1000270 - RNA, 22 nt, Human
cuguggcucaauugccuacuga

SEQ ID NO: 1000271 - RNA, 22 nt, Human
cuuugcagcaauuucuguuaaa

SEQ ID NO: 1000272 - RNA, 22 nt, Human
uauguuucauucuuuucuggua

SEQ ID NO: 1000273 - RNA, 22 nt, Human
gugcugugcgcuuuuucuguau

SEQ ID NO: 1000274 - RNA, 22 nt, Human
uaugcuguauucuguauguuag

SEQ ID NO: 1000275 - RNA, 22 nt, Human
guauaguuugcgauuugugguu

SEQ ID NO: 1000276 - RNA, 19 nt, Human
cugugagucuuguggccuc

SEQ ID NO: 1000277 - RNA, 22 nt, Human
uucuacagacuauaacugugau

SEQ ID NO: 1000278 - RNA, 22 nt, Human
ccugugugguagccagcggugc

SEQ ID NO: 1000279 - RNA, 22 nt, Human
aguuuucuuucaucuaucagca

SEQ ID NO: 1000280 - RNA, 22 nt, Human
uuacaguccuuuguauuguuua

SEQ ID NO: 1000281 - RNA, 21 nt, Human
uucacaguggauaacuuucug

SEQ ID NO: 1000282 - RNA, 19 nt, Human
ugaguguguguuucucuaa

SEQ ID NO: 1000283 - RNA, 22 nt, Human
auuacaguaggauuggaaagga

SEQ ID NO: 1000284 - RNA, 22 nt, Human
uuugcagugucagcuucugugu

SEQ ID NO: 1000285 - RNA, 22 nt, Human
cagcucccaguggcagcuccuu

SEQ ID NO: 1000286 - RNA, 22 nt, Human
acugugugggccgcucacuggg

SEQ ID NO: 1000287 - RNA, 22 nt, Human
gcauguguugguuuaugcaugu

SEQ ID NO: 1000288 - RNA, 22 nt, Human
uacagucaacauugaugaugau

SEQ ID NO: 1000289 - RNA, 22 nt, Human
ugccuguggaaaggcuggugcu

SEQ ID NO: 1000290 - RNA, 22 nt, Human
uccucuuuaaaugcuuuuaucu

SEQ ID NO: 1000291 - RNA, 22 nt, Human
caguaauagauuugagaguggu

SEQ ID NO: 1000292 - RNA, 22 nt, Human
acuuguuucaacuguacucuca

SEQ ID NO: 1000293 - RNA, 22 nt, Human
guuuguguaacaugaugaugau

SEQ ID NO: 1000294 - RNA, 22 nt, Human
ggcugugauugguggaugugaa

SEQ ID NO: 1000295 - RNA, 22 nt, Human
ugugugcacaggaguguuugaa

SEQ ID NO: 1000296 - RNA, 23 nt, Human
uacagcugcagaaucaggcuaag

SEQ ID NO: 1000297 - RNA, 22 nt, Human
cuucucucccuggcacucagac

SEQ ID NO: 1000298 - RNA, 22 nt, Human
cauuauauuuuacugcauggga

SEQ ID NO: 1000299 - RNA, 18 nt, Human
gggcugugagaugggaag

SEQ ID NO: 1000300 - RNA, 21 nt, Human
gcccccuggacuccucaucca

SEQ ID NO: 1000301 - RNA, 22 nt, Human
acucuuuuauaaagcaucuuga

SEQ ID NO: 1000302 - RNA, 22 nt, Human
gcuguguaucagaugccacggg

SEQ ID NO: 1000303 - RNA, 22 nt, Human
uucaacuuuggagauuuaauaa

SEQ ID NO: 1000304 - RNA, 22 nt, Human
aacuguuucagaaauauuguug

SEQ ID NO: 1000305 - RNA, 22 nt, Human
acagaauaagguuuaucucucc

SEQ ID NO: 1000306 - RNA, 22 nt, Human
acuuucuuggucccauguuuga

SEQ ID NO: 1000307 - RNA, 22 nt, Human
uuuuuuauagcaaugaacccac

SEQ ID NO: 1000308 - RNA, 22 nt, Human
uuugcucuuaugaacaaggugg

SEQ ID NO: 1000309 - RNA, 22 nt, Human
uuuuauugggaguccucuacug

SEQ ID NO: 1000310 - RNA, 22 nt, Human
ucauuacagagauauaaucuac

SEQ ID NO: 1000311 - RNA, 22 nt, Human
uucucuacuugagauuuuaaug

SEQ ID NO: 1000312 - RNA, 22 nt, Human
uuguaacuguggguugauuaga

SEQ ID NO: 1000313 - RNA, 18 nt, Human
gguggcuggggacggaca

SEQ ID NO: 1000314 - RNA, 22 nt, Human
uuugucugccuugcuggacugu

SEQ ID NO: 1000315 - RNA, 22 nt, Human
uacagugacuggacuuugucau

SEQ ID NO: 1000316 - RNA, 22 nt, Human
uuucucugugggcuuuaugcau

SEQ ID NO: 1000317 - RNA, 22 nt, Human
cugcugugggcaggguagcugg

SEQ ID NO: 1000318 - RNA, 22 nt, Human
aacaguuuggguagguauguag

SEQ ID NO: 1000319 - RNA, 22 nt, Human
ucaguauaauugcuggcacuga

SEQ ID NO: 1000320 - RNA, 22 nt, Human
aagcugccugccacgcuagaua

SEQ ID NO: 1000321 - RNA, 22 nt, Human
uggcugcuuguuuuagugaggc

SEQ ID NO: 1000322 - RNA, 22 nt, Human
gcugugaguggaguucugugcu

SEQ ID NO: 1000323 - RNA, 22 nt, Human
uguguguagaaagggcccuggu

SEQ ID NO: 1000324 - RNA, 22 nt, Human
uacagugaaugaauggcugugc

SEQ ID NO: 1000325 - RNA, 22 nt, Human
auuuucaucauggguuuaacau

SEQ ID NO: 1000326 - RNA, 22 nt, Human
gugugagccaugauguguccag

SEQ ID NO: 1000327 - RNA, 17 nt, Human
uuccucucacauuuuuu

SEQ ID NO: 1000328 - RNA, 22 nt, Human
aguguguacauaauuguacgcc

SEQ ID NO: 1000329 - RNA, 22 nt, Human
ggcuguguuccaagugucagga

SEQ ID NO: 1000330 - RNA, 22 nt, Human
uucucuauguguguuguaguuu

SEQ ID NO: 1000331 - RNA, 22 nt, Human
cucuguuuuucaauaguucuug

SEQ ID NO: 1000332 - RNA, 22 nt, Human
uguauguguggauagauguaua

SEQ ID NO: 1000333 - RNA, 22 nt, Human
auuuacagguagaauuuuaagu

SEQ ID NO: 1000334 - RNA, 22 nt, Human
uuucucuguucucuaacuguaa

SEQ ID NO: 1000335 - RNA, 22 nt, Human
gcuguguggcaaagggauuaca

SEQ ID NO: 1000336 - RNA, 22 nt, Human
uaacaguagccuuauguggucu

SEQ ID NO: 1000337 - RNA, 22 nt, Human
ugcccagcacccagcaugaugc

SEQ ID NO: 1000338 - RNA, 22 nt, Human
auguggcuaguggacacaguau

SEQ ID NO: 1000339 - RNA, 21 nt, Human
uucaguaugcgucaugcuguu

SEQ ID NO: 1000340 - RNA, 20 nt, Human
cucucucuccauucccaggg

SEQ ID NO: 1000341 - RNA, 22 nt, Human
uggccuggaaaaaugcagaugg

SEQ ID NO: 1000342 - RNA, 22 nt, Human
cugggguggaggagcuccccug

SEQ ID NO: 1000343 - RNA, 18 nt, Human
guguggcugagaugaggc

SEQ ID NO: 1000344 - RNA, 22 nt, Human
uacuuuucaagcagcugguuau

SEQ ID NO: 1000345 - RNA, 22 nt, Human
cuguggcucucugcaggguccc

SEQ ID NO: 1000346 - RNA, 22 nt, Human
auguguguguauauacacacau

SEQ ID NO: 1000347 - RNA, 22 nt, Human
ucuuuagaaacuuuucuucaug

SEQ ID NO: 1000348 - RNA, 22 nt, Human
guguggguguacuguucuagau

SEQ ID NO: 1000349 - RNA, 23 nt, Human
cucucucuaccaugugaggacac

SEQ ID NO: 1000350 - RNA, 22 nt, Human
aaaguauauuuacuuacuguga

SEQ ID NO: 1000351 - RNA, 22 nt, Human
ggcagccaugugggcagcgagu

SEQ ID NO: 1000352 - RNA, 22 nt, Human
guuuucucaggaugguguguac

SEQ ID NO: 1000353 - RNA, 22 nt, Human
ccugcucugccaaguccucuuu

SEQ ID NO: 1000354 - RNA, 22 nt, Human
augugugguuuguaaaugauuu

SEQ ID NO: 1000355 - RNA, 22 nt, Human
cuggagggauguaggguguauu

SEQ ID NO: 1000356 - RNA, 19 nt, Human
uggcuguggggaaaugcuu

SEQ ID NO: 1000357 - RNA, 22 nt, Human
cuuuacaaagcaauuuugucuc

SEQ ID NO: 1000358 - RNA, 22 nt, Human
cuguggcuaggauuauuccuga

SEQ ID NO: 1000359 - RNA, 22 nt, Human
uggcucugcgucuguucguggg

SEQ ID NO: 1000360 - RNA, 22 nt, Human
uggccugggccugccggugcaa

SEQ ID NO: 1000361 - RNA, 20 nt, Human
uuauguguaccugugcuccc

SEQ ID NO: 1000362 - RNA, 22 nt, Human
uuacagcacagugcuuuuacug

SEQ ID NO: 1000363 - RNA, 22 nt, Human
caguuuuacccaagcuuauuuu

SEQ ID NO: 1000364 - RNA, 22 nt, Human
guauuuucaagagcaguaguau

SEQ ID NO: 1000365 - RNA, 22 nt, Human
uuacaguaccuguauggccacu

SEQ ID NO: 1000366 - RNA, 22 nt, Human
uugacaguugcaauggugaucu

SEQ ID NO: 1000367 - RNA, 22 nt, Human
caucugugccggguguuuguca

SEQ ID NO: 1000368 - RNA, 22 nt, Human
uuucacagcagugugcugcuuu

SEQ ID NO: 1000369 - RNA, 22 nt, Human
ucugcugucuuuucugggugag

SEQ ID NO: 1000370 - RNA, 22 nt, Human
cuggcugucuuggaggaaggag

SEQ ID NO: 1000371 - RNA, 22 nt, Human
uguauuuugaguccaaucuccu

SEQ ID NO: 1000372 - RNA, 22 nt, Human
cagggguguuuuuggccaggag

SEQ ID NO: 1000373 - RNA, 22 nt, Human
uacaaguagcucagguuuucug

SEQ ID NO: 1000374 - RNA, 22 nt, Human
uggcuguggacucagauggcuc

SEQ ID NO: 1000375 - RNA, 22 nt, Human
uacaguguauguauuuguaggu

SEQ ID NO: 1000376 - RNA, 22 nt, Human
uacugugucuuaggauguggaa

SEQ ID NO: 1000377 - RNA, 22 nt, Human
auucucuggucauugaguauaa

SEQ ID NO: 1000378 - RNA, 22 nt, Human
auauucucugcugcuuuugugu

SEQ ID NO: 1000379 - RNA, 20 nt, Human
auucucugcucaaguggcac

SEQ ID NO: 1000380 - RNA, 22 nt, Human
aguguggcugcguagggcucuc

SEQ ID NO: 1000381 - RNA, 22 nt, Human
cucucuguuaugcuuucaugaa

SEQ ID NO: 1000382 - RNA, 22 nt, Human
ucugccgugcgaggucccacca

SEQ ID NO: 1000383 - RNA, 22 nt, Human
uuucucaucuggaaacagugcu

SEQ ID NO: 1000384 - RNA, 20 nt, Human
gcuguggcaaagcuuugugu

SEQ ID NO: 1000385 - RNA, 22 nt, Human
gcugucugcugugcacugagca

SEQ ID NO: 1000386 - RNA, 22 nt, Human
auauuauucuagcucuugugug

SEQ ID NO: 1000387 - RNA, 22 nt, Human
uaguauauuuuguugcaauuca

SEQ ID NO: 1000388 - RNA, 22 nt, Human
guggaggguuugcaaugugcag

SEQ ID NO: 1000389 - RNA, 22 nt, Human
uauguguauugagcauuguuac

SEQ ID NO: 1000390 - RNA, 22 nt, Human
ugagcugucugaauggugagga

SEQ ID NO: 1000391 - RNA, 22 nt, Human
ggcuguagguuggugcuggaca

SEQ ID NO: 1000392 - RNA, 22 nt, Human
gaauauuuguaauuacuguuga

SEQ ID NO: 1000393 - RNA, 22 nt, Human
augugugugaugggcgccgcca

SEQ ID NO: 1000394 - RNA, 22 nt, Human
cucuuuucaaaauuucacugca

SEQ ID NO: 1000395 - RNA, 22 nt, Human
ucucaucucggaucagaaguga

SEQ ID NO: 1000396 - RNA, 22 nt, Human
cucuuugccuaacuguuuucaa

SEQ ID NO: 1000397 - RNA, 22 nt, Human
uacagugauuucuacugguguu

SEQ ID NO: 1000398 - RNA, 22 nt, Human
ugugugauuccacuuauauggg

SEQ ID NO: 1000399 - RNA, 22 nt, Human
uuuuauguaauaaacuguacac

SEQ ID NO: 1000400 - RNA, 22 nt, Human
gcuuuacagagaaaguuugccu

SEQ ID NO: 1000401 - RNA, 22 nt, Human
uaauuuuccacucuguuuaucu

SEQ ID NO: 1000402 - RNA, 22 nt, Human
ugcccagcaauaaaccagaaga

SEQ ID NO: 1000403 - RNA, 22 nt, Human
acaguaaagccuucugguugac

SEQ ID NO: 1000404 - RNA, 22 nt, Human
ucuguguuuaaaagauaugucc

SEQ ID NO: 1000405 - RNA, 22 nt, Human
uggcugugugccaggcugucug

SEQ ID NO: 1000406 - RNA, 22 nt, Human
uucugugugcugucuuggcuuu

SEQ ID NO: 1000407 - RNA, 22 nt, Human
uguguggguacagaugauuguu

SEQ ID NO: 1000408 - RNA, 22 nt, Human
uauuuccuguggauacuuuuag

SEQ ID NO: 1000409 - RNA, 22 nt, Human
auaucuucuuuauuuugugagg

SEQ ID NO: 1000410 - RNA, 22 nt, Human
guaguauuuucugugauguagg

SEQ ID NO: 1000411 - RNA, 22 nt, Human
acuuuucugcagaugaucucuu

SEQ ID NO: 1000412 - RNA, 22 nt, Human
uacuuucuuguuccuuucauaa

SEQ ID NO: 1000413 - RNA, 22 nt, Human
ucuuuacauaguguggacuacu

SEQ ID NO: 1000414 - RNA, 22 nt, Human
uaacguuugauaacuucuguuc

SEQ ID NO: 1000415 - RNA, 22 nt, Human
acaguauaaacuccuaaaagcc

SEQ ID NO: 1000416 - RNA, 22 nt, Human
uggcauguggcaauguugggau

SEQ ID NO: 1000417 - RNA, 22 nt, Human
acuuuucucccuccugccuuca

SEQ ID NO: 1000418 - RNA, 21 nt, Human
uggcugagccaggugugugga

SEQ ID NO: 1000419 - RNA, 22 nt, Human
aguggcuguaucagucaacccu

SEQ ID NO: 1000420 - RNA, 22 nt, Human
uguucucucuccuuuugaagug

SEQ ID NO: 1000421 - RNA, 22 nt, Human
cuguggcuggccugucugacau

SEQ ID NO: 1000422 - RNA, 22 nt, Human
ugacaggaugaugagcaggggg

SEQ ID NO: 1000423 - RNA, 22 nt, Human
gaguauaugacuuucuuuugca

SEQ ID NO: 1000424 - RNA, 22 nt, Human
uacagguagcaaaaccuuuccu

SEQ ID NO: 1000425 - RNA, 22 nt, Human
auuacaguagcaaaagaccgga

SEQ ID NO: 1000426 - RNA, 22 nt, Human
aguggcuggucuaaggucacag

SEQ ID NO: 1000427 - RNA, 22 nt, Human
uacuuuuugucucuuugaaugu

SEQ ID NO: 1000428 - RNA, 22 nt, Human
acagucauagcagccuuuguua

SEQ ID NO: 1000429 - RNA, 22 nt, Human
ucugugguggagugggcaugag

SEQ ID NO: 1000430 - RNA, 22 nt, Human
cuguggcuuugugucuauugua

SEQ ID NO: 1000431 - RNA, 22 nt, Human
gcugcccugcaucugugccuuc

SEQ ID NO: 1000432 - RNA, 22 nt, Human
gaagucugcugcucaggaguuu

SEQ ID NO: 1000433 - RNA, 22 nt, Human
cucuguuucucagccuauuucc

SEQ ID NO: 1000434 - RNA, 22 nt, Human
uacuuuucuguguggcagucac

SEQ ID NO: 1000435 - RNA, 22 nt, Human
cuuuuuacaaagccugucuucu

SEQ ID NO: 1000436 - RNA, 22 nt, Human
uuacagugacaguugcuaugau

SEQ ID NO: 1000437 - RNA, 22 nt, Human
auguuucuaaaacuugcauggc

SEQ ID NO: 1000438 - RNA, 22 nt, Human
ugcuguguuacugagauccggc

SEQ ID NO: 1000439 - RNA, 22 nt, Human
gagcugugccaaucugucuggg

SEQ ID NO: 1000440 - RNA, 22 nt, Human
ucuggcuggcagugauggugug

SEQ ID NO: 1000441 - RNA, 22 nt, Human
uggcucugcagcagugugcgug

SEQ ID NO: 1000442 - RNA, 22 nt, Human
gguggcugcuuccucaagagga

SEQ ID NO: 1000443 - RNA, 22 nt, Human
uguguggccuccauaggguacu

SEQ ID NO: 1000444 - RNA, 22 nt, Human
caugugugagugagcagucuuc

SEQ ID NO: 1000445 - RNA, 17 nt, Human
gugccuguuguccugga

SEQ ID NO: 1000446 - RNA, 22 nt, Human
auguguguacacacgugacucu

SEQ ID NO: 1000447 - RNA, 22 nt, Human
aacaguuugagcuuugaauuuc

SEQ ID NO: 1000448 - RNA, 22 nt, Human
ugugugagacaauuggcugugg

SEQ ID NO: 1000449 - RNA, 22 nt, Human
acuuuuugcuggucucuuccau

SEQ ID NO: 1000450 - RNA, 22 nt, Human
ccugcccagagccccuuucacu

SEQ ID NO: 1000451 - RNA, 22 nt, Human
auguuucuguccuacgagauaa

SEQ ID NO: 1000452 - RNA, 17 nt, Human
uuguguguaguucugau

SEQ ID NO: 1000453 - RNA, 22 nt, Human
ggcagugugcaucuguguggcc

SEQ ID NO: 1000454 - RNA, 22 nt, Human
ucugcuuuagaauccaguagcu

SEQ ID NO: 1000455 - RNA, 22 nt, Human
auauuuucuggaacuaugccug

SEQ ID NO: 1000456 - RNA, 22 nt, Human
guguaugcuuagccagagauuu

SEQ ID NO: 1000457 - RNA, 22 nt, Human
uuuucugccugcguguuuagga

SEQ ID NO: 1000458 - RNA, 22 nt, Human
aucuuuucuguuugcuaugucu

SEQ ID NO: 1000459 - RNA, 22 nt, Human
auguggcugguaguugacaacu

SEQ ID NO: 1000460 - RNA, 22 nt, Human
gaguguguucuuuaugcuguga

SEQ ID NO: 1000461 - RNA, 22 nt, Human
guaucuuugucuucauguugga

SEQ ID NO: 1000462 - RNA, 22 nt, Human
cucuguguuaaauuggguuuuu

SEQ ID NO: 1000463 - RNA, 19 nt, Human
uuuagcuuacguuucauug

SEQ ID NO: 1000464 - RNA, 22 nt, Human
uauguucuaaccuugucuuucc

SEQ ID NO: 1000465 - RNA, 22 nt, Human
gauauuuucagucuccuuucaa

SEQ ID NO: 1000466 - RNA, 22 nt, Human
ugccgcugucgccaccauggcu

SEQ ID NO: 1000467 - RNA, 22 nt, Human
acuuuacagaugguuuccugac

SEQ ID NO: 1000468 - RNA, 22 nt, Human
auguguauacuugugcuuacuc

SEQ ID NO: 1000469 - RNA, 22 nt, Human
aaguauauacuaaauguuaauc

SEQ ID NO: 1000470 - RNA, 18 nt, Human
ggccagccccaggccagc

SEQ ID NO: 1000471 - RNA, 20 nt, Human
uucuuuacgaccuuucugca

SEQ ID NO: 1000472 - RNA, 22 nt, Human
ugugugucagucuuguuuaggg

SEQ ID NO: 1000473 - RNA, 22 nt, Human
ugugucugcccuuaguacaucu

SEQ ID NO: 1000474 - RNA, 22 nt, Human
gugcuguaacaacagagugucu

SEQ ID NO: 1000475 - RNA, 22 nt, Human
auguggcucauuguuugcuuac

SEQ ID NO: 1000476 - RNA, 22 nt, Human
uuuauucuaacuugcugcucua

SEQ ID NO: 1000477 - RNA, 22 nt, Human
uuucuacuaagaaaguugauua

SEQ ID NO: 1000478 - RNA, 22 nt, Human
aacuguuuuucacgugucucau

SEQ ID NO: 1000479 - RNA, 22 nt, Human
gcuuuacagggcacaaagggag

SEQ ID NO: 1000480 - RNA, 22 nt, Human
cuggcucuuuccuagcuaggcu

SEQ ID NO: 1000481 - RNA, 22 nt, Human
auguguauuacccuuucauucc

SEQ ID NO: 1000482 - RNA, 22 nt, Human
uugacuuuauguguauguuuac

SEQ ID NO: 1000483 - RNA, 22 nt, Human
cuuucaguuaguaccuaguggc

SEQ ID NO: 1000484 - RNA, 22 nt, Human
uggccguguuagauguuuggcu

SEQ ID NO: 1000485 - RNA, 22 nt, Human
aguguguaauucagugcccagc

SEQ ID NO: 1000486 - RNA, 22 nt, Human
ucuaacuuagggaauacuuuag

SEQ ID NO: 1000487 - RNA, 22 nt, Human
ucuuugcaaauguuauuaucuu

SEQ ID NO: 1000488 - RNA, 18 nt, Human
auguuucucuuggcucug

SEQ ID NO: 1000489 - RNA, 22 nt, Human
auguguaugcaugcacuaagau

SEQ ID NO: 1000490 - RNA, 22 nt, Human
uauugucuucaacucuacuuuu

SEQ ID NO: 1000491 - RNA, 22 nt, Human
gcugaggauauagcaggaacaa

SEQ ID NO: 1000492 - RNA, 22 nt, Human
ucuacuuucacucauacuuauu

SEQ ID NO: 1000493 - RNA, 19 nt, Human
uguguggguuuagaguagu

SEQ ID NO: 1000494 - RNA, 22 nt, Human
uucucucauucaaauuaaagug

SEQ ID NO: 1000495 - RNA, 22 nt, Human
uuccucuccucccaccagguga

SEQ ID NO: 1000496 - RNA, 19 nt, Human
uaucuuuaugcaguggugg

SEQ ID NO: 1000497 - RNA, 22 nt, Human
guguggcugaaaucaaggcagg

SEQ ID NO: 1000498 - RNA, 22 nt, Human
cacaguaucuuuugaguaagca

SEQ ID NO: 1000499 - RNA, 22 nt, Human
ggagggguggucaccuggcagg

SEQ ID NO: 1000500 - RNA, 22 nt, Human
aaguauauuuuuugaagcauau

SEQ ID NO: 1000501 - RNA, 22 nt, Human
uuuaucugcuaucugcugugcu

SEQ ID NO: 1000502 - RNA, 22 nt, Human
auuacaguucuacacauccuuu

SEQ ID NO: 1000503 - RNA, 22 nt, Human
ggccuggagcagagacuaggga

SEQ ID NO: 1000504 - RNA, 22 nt, Human
uucugcugagugggcaggugca

SEQ ID NO: 1000505 - RNA, 22 nt, Human
ggugugccacuucacugagcag

SEQ ID NO: 1000506 - RNA, 23 nt, Human
ugugcgugaugcuuuguugaagg

SEQ ID NO: 1000507 - RNA, 22 nt, Human
ucuuuccaaguaauacuuccca

SEQ ID NO: 1000508 - RNA, 22 nt, Human
gcucucugaggugcuggcagag

SEQ ID NO: 1000509 - RNA, 22 nt, Human
uggcauguuugcuugugcauau

SEQ ID NO: 1000510 - RNA, 22 nt, Human
ucucucuucaacccuuaacuag

SEQ ID NO: 1000511 - RNA, 22 nt, Human
uuuauuguugggucuuaagcug

SEQ ID NO: 1000512 - RNA, 22 nt, Human
uuuucucuuguuaauguacuga

SEQ ID NO: 1000513 - RNA, 22 nt, Human
gcguguaugcaggucugugcag

SEQ ID NO: 1000514 - RNA, 22 nt, Human
acguguguuggucagggggccc

SEQ ID NO: 1000515 - RNA, 22 nt, Human
uguaugcagggcuuguaugcag

SEQ ID NO: 1000516 - RNA, 20 nt, Human
cagggacagcaguggguuuu

SEQ ID NO: 1000517 - RNA, 22 nt, Human
gaggaaaauaacaacuaagggc

SEQ ID NO: 1000518 - RNA, 22 nt, Human
aguauauugguguuauuccuca

SEQ ID NO: 1000519 - RNA, 22 nt, Human
uuucaucuauuugcuuugugaa

SEQ ID NO: 1000520 - RNA, 22 nt, Human
guguggcuugggugaggcgccu

SEQ ID NO: 1000521 - RNA, 22 nt, Human
ggccaggagcaagccaggcucu

SEQ ID NO: 1000522 - RNA, 22 nt, Human
gcugcuguuaugauguuacuuu

SEQ ID NO: 1000523 - RNA, 22 nt, Human
ugugccugaguuggcugaguac

SEQ ID NO: 1000524 - RNA, 22 nt, Human
aguggcuggacgacaaggguga

SEQ ID NO: 1000525 - RNA, 20 nt, Human
uuauuucucauucuccuacu

SEQ ID NO: 1000526 - RNA, 22 nt, Human
uauuuaucgagugucuacuaug

SEQ ID NO: 1000527 - RNA, 22 nt, Human
cuuuacagugaacuugcuuguc

SEQ ID NO: 1000528 - RNA, 21 nt, Human
uguauacacacauauauguac

SEQ ID NO: 1000529 - RNA, 22 nt, Human
aacuuuguuuuauucacugcug

SEQ ID NO: 1000530 - RNA, 19 nt, Human
ugugugcaugcgcacgugu

SEQ ID NO: 1000531 - RNA, 21 nt, Human
auuuucauuaauucagugugg

SEQ ID NO: 1000532 - RNA, 22 nt, Human
uaucucuuuauugacaauaaaa

SEQ ID NO: 1000533 - RNA, 20 nt, Human
cuguggcucaugcaucugcc

SEQ ID NO: 1000534 - RNA, 21 nt, Human
guuauuuuaagugagcuuugc

SEQ ID NO: 1000535 - RNA, 22 nt, Human
ggccuggacaccugaggucuua

SEQ ID NO: 1000536 - RNA, 22 nt, Human
uucucugccucuagcuauauuc

SEQ ID NO: 1000537 - RNA, 22 nt, Human
ucuucuuuggaugaaagaauau

SEQ ID NO: 1000538 - RNA, 22 nt, Human
acaguauacauugauuaggacc

SEQ ID NO: 1000539 - RNA, 18 nt, Human
ggcaugugagugcugagg

SEQ ID NO: 1000540 - RNA, 22 nt, Human
aggaggugcuguuuguccugga

SEQ ID NO: 1000541 - RNA, 22 nt, Human
ugugugacacauugauaugugc

SEQ ID NO: 1000542 - RNA, 22 nt, Human
aggcugugauggauguaaagga

SEQ ID NO: 1000543 - RNA, 22 nt, Human
auggcugugcagagauugggaa

SEQ ID NO: 1000544 - RNA, 22 nt, Human
uauguguggcagcugggagugu

SEQ ID NO: 1000545 - RNA, 22 nt, Human
ucuuuuuauauugacaaaaggu

SEQ ID NO: 1000546 - RNA, 22 nt, Human
uguuuacauggagguuuucagc

SEQ ID NO: 1000547 - RNA, 22 nt, Human
auuuacaggacagcuuggcauu

SEQ ID NO: 1000548 - RNA, 21 nt, Human
ucuuuccaauauucaugucuc

SEQ ID NO: 1000549 - RNA, 22 nt, Human
cuuaacuugaugucucucugcu

SEQ ID NO: 1000550 - RNA, 22 nt, Human
ucuuugcaugcauuuucccuua

SEQ ID NO: 1000551 - RNA, 22 nt, Human
aacaguuuaucaaguuuuuaca

SEQ ID NO: 1000552 - RNA, 22 nt, Human
caacuuuugacacgugugcuaa

SEQ ID NO: 1000553 - RNA, 22 nt, Human
ugucuguggcaauuguggguaa

SEQ ID NO: 1000554 - RNA, 22 nt, Human
auuuuuucccaguuagccagga

SEQ ID NO: 1000555 - RNA, 22 nt, Human
acaguagauugguaugauguca

SEQ ID NO: 1000556 - RNA, 22 nt, Human
cucucucuaugcguuguuccua

SEQ ID NO: 1000557 - RNA, 22 nt, Human
cuggcugugaaauggcaguguc

SEQ ID NO: 1000558 - RNA, 21 nt, Human
gugugucuaauguaguggaaa

SEQ ID NO: 1000559 - RNA, 22 nt, Human
uuucucugggcuguuggcagcc

SEQ ID NO: 1000560 - RNA, 22 nt, Human
gguggcugguuuuauaagaggu

SEQ ID NO: 1000561 - RNA, 18 nt, Human
uguuuauuuuucucuuac

SEQ ID NO: 1000562 - RNA, 22 nt, Human
caucucuugccaaaguuugacc

SEQ ID NO: 1000563 - RNA, 22 nt, Human
uucuguguggguagcuccuguu

SEQ ID NO: 1000564 - RNA, 19 nt, Human
agucauauuguucaucuug

SEQ ID NO: 1000565 - RNA, 22 nt, Human
ucauuuucaaguuugaacagga

SEQ ID NO: 1000566 - RNA, 22 nt, Human
ugauauuuuucacuggccucug

SEQ ID NO: 1000567 - RNA, 15 nt, Human
uguggcuggcuccug

SEQ ID NO: 1000568 - RNA, 22 nt, Human
uaggaagcuaugggagauguga

SEQ ID NO: 1000569 - RNA, 22 nt, Human
acuuguuugccuaaaauuuuga

SEQ ID NO: 1000570 - RNA, 21 nt, Human
uuucuuucuggcucucacagu

SEQ ID NO: 1000571 - RNA, 22 nt, Human
ugucuuuagccagcagucuucu

SEQ ID NO: 1000572 - RNA, 22 nt, Human
gcuggcccagugacccacagug

SEQ ID NO: 1000573 - RNA, 22 nt, Human
acuuuguucuaauaguaucucu

SEQ ID NO: 1000574 - RNA, 21 nt, Human
caguauuuuaagcagugaguu

SEQ ID NO: 1000575 - RNA, 22 nt, Human
cagccacucucagacaguccca

SEQ ID NO: 1000576 - RNA, 22 nt, Human
uucugugugcuuacugguguuc

SEQ ID NO: 1000577 - RNA, 22 nt, Human
uuucucucuacaguacuuucau

SEQ ID NO: 1000578 - RNA, 22 nt, Human
guacaguaaucccguucuucug

SEQ ID NO: 1000579 - RNA, 22 nt, Human
uuuuaugugucaaagcaguggu

SEQ ID NO: 1000580 - RNA, 19 nt, Human
ccugugugggguagagauc

SEQ ID NO: 1000581 - RNA, 18 nt, Human
auuguucugugacauguc

SEQ ID NO: 1000582 - RNA, 22 nt, Human
auauuuguauuucgugugugua

SEQ ID NO: 1000583 - RNA, 22 nt, Human
uguuuacaaggaguuuauauug

SEQ ID NO: 1000584 - RNA, 22 nt, Human
uuggcugugcagaucuugccua

SEQ ID NO: 1000585 - RNA, 22 nt, Human
gcugucgugugcaagugacaga

SEQ ID NO: 1000586 - RNA, 22 nt, Human
gcuuuacaugagaugaggacaa

SEQ ID NO: 1000587 - RNA, 22 nt, Human
uuuuuuauaucaacugaagucu

SEQ ID NO: 1000588 - RNA, 22 nt, Human
auguguauccaucugucuauuu

SEQ ID NO: 1000589 - RNA, 22 nt, Human
uuuuacagucagucaaacucag

SEQ ID NO: 1000590 - RNA, 22 nt, Human
uaugugugcuuuuuccaugcau

SEQ ID NO: 1000591 - RNA, 22 nt, Human
ugugccuguugguguagacaua

SEQ ID NO: 1000592 - RNA, 22 nt, Human
cuggcuguauuaguuugauccu

SEQ ID NO: 1000593 - RNA, 22 nt, Human
ggcugcuggauuguguaucugu

SEQ ID NO: 1000594 - RNA, 20 nt, Human
acguggccaccaguggcuua

SEQ ID NO: 1000595 - RNA, 21 nt, Human
uuagacuuggguuuuuccugg

SEQ ID NO: 1000596 - RNA, 22 nt, Human
gucaugugaauaaguguggggu

SEQ ID NO: 1000597 - RNA, 22 nt, Human
ucuccucuauuucuguauguau

SEQ ID NO: 1000598 - RNA, 19 nt, Human
ucauuuacgguuuugauga

SEQ ID NO: 1000599 - RNA, 22 nt, Human
gcuuuacauaaacauuuauuau

SEQ ID NO: 1000600 - RNA, 22 nt, Human
ucacaguacaugauucaguggu

SEQ ID NO: 1000601 - RNA, 22 nt, Human
ucugugcugagcucugagaugu

SEQ ID NO: 1000602 - RNA, 22 nt, Human
uguggguuuguaguuaaguucu

SEQ ID NO: 1000603 - RNA, 22 nt, Human
aggaagccaugguggacgucua

SEQ ID NO: 1000604 - RNA, 22 nt, Human
cucuuuaacucccauucugucc

SEQ ID NO: 1000605 - RNA, 22 nt, Human
auauuuucacugaaccaaagua

SEQ ID NO: 1000606 - RNA, 22 nt, Human
auguauguaugcugugcuugca

SEQ ID NO: 1000607 - RNA, 23 nt, Human
aguggcuggacagacuuuccugg

SEQ ID NO: 1000608 - RNA, 22 nt, Human
uuucccucucaucucuauuauu

SEQ ID NO: 1000609 - RNA, 22 nt, Human
uggcucuguugagguauggauu

SEQ ID NO: 1000610 - RNA, 22 nt, Human
uauguguauaucuguaugugca

SEQ ID NO: 1000611 - RNA, 22 nt, Human
augcauguaacaguguuaugaa

SEQ ID NO: 1000612 - RNA, 22 nt, Human
acaguagugcucaaucaguguu

SEQ ID NO: 1000613 - RNA, 22 nt, Human
gcauguguuauuuuauguauga

SEQ ID NO: 1000614 - RNA, 22 nt, Human
ugugugauugcaggagaugugg

SEQ ID NO: 1000615 - RNA, 22 nt, Human
uaauuucuucaucucugcagcu

SEQ ID NO: 1000616 - RNA, 23 nt, Human
cuuguuauaagaagacugucugg

SEQ ID NO: 1000617 - RNA, 23 nt, Human
aguguguaagguacuuugcugcu

SEQ ID NO: 1000618 - RNA, 21 nt, Human
uacuguauagauguguucuug

SEQ ID NO: 1000619 - RNA, 22 nt, Human
uucucugccucacaggucuaag

SEQ ID NO: 1000620 - RNA, 22 nt, Human
auacaguaaccacauucuauag

SEQ ID NO: 1000621 - RNA, 22 nt, Human
aguggcuguucauuuuacacaa

SEQ ID NO: 1000622 - RNA, 22 nt, Human
uuaucuguuuucugugcguuuc

SEQ ID NO: 1000623 - RNA, 22 nt, Human
uauauucugauuccaucugugu

SEQ ID NO: 1000624 - RNA, 23 nt, Human
uauguauguauguuuguauggaa

SEQ ID NO: 1000625 - RNA, 21 nt, Human
uuuuuucuugcgugaggccug

SEQ ID NO: 1000626 - RNA, 21 nt, Human
ccuuuacaauuuugcauuccu

SEQ ID NO: 1000627 - RNA, 22 nt, Human
guguguaaugcuuauugugcuu

SEQ ID NO: 1000628 - RNA, 22 nt, Human
ucuuucagaaacuuugucugcg

SEQ ID NO: 1000629 - RNA, 22 nt, Human
gcugcuguguuggccacugcuu

SEQ ID NO: 1000630 - RNA, 22 nt, Human
agguauauguucauguaugugu

SEQ ID NO: 1000631 - RNA, 20 nt, Human
uuugucuguuaaguguuucu

SEQ ID NO: 1000632 - RNA, 22 nt, Human
aagcugccagcugagcugaggc

SEQ ID NO: 1000633 - RNA, 22 nt, Human
ugugguggcuauucuggucuca

SEQ ID NO: 1000634 - RNA, 22 nt, Human
gugcucuccagccccacgugga

SEQ ID NO: 1000635 - RNA, 22 nt, Human
uguguaugucuguaugcacaca

SEQ ID NO: 1000636 - RNA, 22 nt, Human
uuuggcugagaaguugugcuuu

SEQ ID NO: 1000637 - RNA, 22 nt, Human
gaggaaaauauucagggagguu

SEQ ID NO: 1000638 - RNA, 22 nt, Human
cuguggcucauaucuguaaucu

SEQ ID NO: 1000639 - RNA, 22 nt, Human
uuuucucuauauugucugugaa

SEQ ID NO: 1000640 - RNA, 22 nt, Human
acaguaguccuuuauuuugguu

SEQ ID NO: 1000641 - RNA, 22 nt, Human
guggcaugaaagcaucugugau

SEQ ID NO: 1000642 - RNA, 22 nt, Human
cugugccuccagucucgcuucu

SEQ ID NO: 1000643 - RNA, 22 nt, Human
ggcugcuggcagauguaguuua

SEQ ID NO: 1000644 - RNA, 22 nt, Human
uacaauauguggccuuuuguga

SEQ ID NO: 1000645 - RNA, 22 nt, Human
gugggugucaguaucuuuaacg

SEQ ID NO: 1000646 - RNA, 22 nt, Human
ucuuauacagaagauguuuaau

SEQ ID NO: 1000647 - RNA, 22 nt, Human
gaagggugugugugagggacac

SEQ ID NO: 1000648 - RNA, 22 nt, Human
auguguauauuuggugucaaua

SEQ ID NO: 1000649 - RNA, 22 nt, Human
gccaccucucucuugacucgag

SEQ ID NO: 1000650 - RNA, 22 nt, Human
uaacuuuaugacaugucuugcu

SEQ ID NO: 1000651 - RNA, 22 nt, Human
gucuguggaguugcuugcugga

SEQ ID NO: 1000652 - RNA, 22 nt, Human
cggcugugucuucacaggagcc

SEQ ID NO: 1000653 - RNA, 22 nt, Human
ucuucucuccugcuuggcagaa

SEQ ID NO: 1000654 - RNA, 22 nt, Human
uuucacagcaacacugucugca

SEQ ID NO: 1000655 - RNA, 22 nt, Human
aguauaaugaaaugugucagua

SEQ ID NO: 1000656 - RNA, 22 nt, Human
gagcugcccugagcuuugcaug

SEQ ID NO: 1000657 - RNA, 22 nt, Human
aauuuucuaaggugaugaucug

SEQ ID NO: 1000658 - RNA, 22 nt, Human
ugugcguggauuccuguacuca

SEQ ID NO: 1000659 - RNA, 22 nt, Human
gaaaguuuucauauauaccaaa

SEQ ID NO: 1000660 - RNA, 21 nt, Human
ucuuuacauuugccucuugca

SEQ ID NO: 1000661 - RNA, 22 nt, Human
uacaauaugugaacuuuggugu

SEQ ID NO: 1000662 - RNA, 22 nt, Human
uuacagguacuugcugcugaaa

SEQ ID NO: 1000663 - RNA, 22 nt, Human
gcagugugucuggaguacaugg

SEQ ID NO: 1000664 - RNA, 22 nt, Human
ugugccugcuagaugguugucg

SEQ ID NO: 1000665 - RNA, 22 nt, Human
ucagugugucucugcauuuggg

SEQ ID NO: 1000666 - RNA, 22 nt, Human
ucucucuuuuuaaucauguaau

SEQ ID NO: 1000667 - RNA, 22 nt, Human
cuuuaacaaaugacucuugucu

SEQ ID NO: 1000668 - RNA, 22 nt, Human
cuuucacacacauacauuugga

SEQ ID NO: 1000669 - RNA, 22 nt, Human
ucuguguaagaccagugcuggg

SEQ ID NO: 1000670 - RNA, 22 nt, Human
ugucuguaagguguuuauguua

SEQ ID NO: 1000671 - RNA, 22 nt, Human
auguguaugucuuauucaaaga

SEQ ID NO: 1000672 - RNA, 20 nt, Human
uuuaucugugggaguggaga

SEQ ID NO: 1000673 - RNA, 22 nt, Human
acaguacaggacgaguuuuccu

SEQ ID NO: 1000674 - RNA, 22 nt, Human
guggccugccgugugguauggg

SEQ ID NO: 1000675 - RNA, 22 nt, Human
cugugugcaggugcuggguacc

SEQ ID NO: 1000676 - RNA, 22 nt, Human
gugucgugcuugccauggguac

SEQ ID NO: 1000677 - RNA, 22 nt, Human
auacaguaauugcccugcaaug

SEQ ID NO: 1000678 - RNA, 22 nt, Human
uuuuucauauuccccucucugg

SEQ ID NO: 1000679 - RNA, 22 nt, Human
cuuuacagauaggaacuacuca

SEQ ID NO: 1000680 - RNA, 22 nt, Human
uucuuuguggcagugagcuggg

SEQ ID NO: 1000681 - RNA, 22 nt, Human
uuauuuuuaaaaguucacacag

SEQ ID NO: 1000682 - RNA, 22 nt, Human
uuucucuggccucaguuuaaca

SEQ ID NO: 1000683 - RNA, 22 nt, Human
ucucauuugccucaucuauaaa

SEQ ID NO: 1000684 - RNA, 22 nt, Human
cuguguguccucggacgaguuu

SEQ ID NO: 1000685 - RNA, 22 nt, Human
caguuuauaguuguuaugugug

SEQ ID NO: 1000686 - RNA, 22 nt, Human
uuauacagggaguuucccugca

SEQ ID NO: 1000687 - RNA, 22 nt, Human
uaucucuuucauuuuagaguca

SEQ ID NO: 1000688 - RNA, 18 nt, Human
gucuguguggcuugggga

SEQ ID NO: 1000689 - RNA, 22 nt, Human
ggcuauguguguccaguguauu

SEQ ID NO: 1000690 - RNA, 22 nt, Human
uggcugugucaucauagcugug

SEQ ID NO: 1000691 - RNA, 22 nt, Human
ucauuacaguguuuauaugucu

SEQ ID NO: 1000692 - RNA, 22 nt, Human
gcuguggcuccaauggugagcc

SEQ ID NO: 1000693 - RNA, 22 nt, Human
ugugugcucuaaugccuaguac

SEQ ID NO: 1000694 - RNA, 22 nt, Human
uacaguuacugcauuucuaaua

SEQ ID NO: 1000695 - RNA, 22 nt, Human
ucuguguacgcaggcgugcgcg

SEQ ID NO: 1000696 - RNA, 22 nt, Human
aggcuguggcaucacaucagga

SEQ ID NO: 1000697 - RNA, 22 nt, Human
auuugucuaaugaguguguacu

SEQ ID NO: 1000698 - RNA, 22 nt, Human
acauauaugcugggacugugac

SEQ ID NO: 1000699 - RNA, 20 nt, Human
ugugugaauuagggcauguu

SEQ ID NO: 1000700 - RNA, 22 nt, Human
uuuaagcuguggcauuaauucu

SEQ ID NO: 1000701 - RNA, 22 nt, Human
agaggugacauaggagaggcuc

SEQ ID NO: 1000702 - RNA, 22 nt, Human
cucugugugguagauuccauua

SEQ ID NO: 1000703 - RNA, 22 nt, Human
ugcagucuuccagcugcacaaa

SEQ ID NO: 1000704 - RNA, 22 nt, Human
aguauauaguggcgcuguaugc

SEQ ID NO: 1000705 - RNA, 20 nt, Human
aggggugaucgggugacacu

SEQ ID NO: 1000706 - RNA, 23 nt, Human
ugaguguguucccugugagauuu

SEQ ID NO: 1000707 - RNA, 22 nt, Human
gcagcugcaauaggcaucaagc

SEQ ID NO: 1000708 - RNA, 23 nt, Human
caugugugacaguaucacuguuu

SEQ ID NO: 1000709 - RNA, 22 nt, Human
uacaguagucgucuuauuuuga

SEQ ID NO: 1000710 - RNA, 22 nt, Human
uguguguaaggaagcuuuaugg

SEQ ID NO: 1000711 - RNA, 22 nt, Human
guucucucagcgauagugaugg

SEQ ID NO: 1000712 - RNA, 22 nt, Human
cuucuuuaccaagagauagagu

SEQ ID NO: 1000713 - RNA, 22 nt, Human
ggaagcugugcucucaggccuc

SEQ ID NO: 1000714 - RNA, 22 nt, Human
uuuacagggaauauuuuggcuu

SEQ ID NO: 1000715 - RNA, 19 nt, Human
ugggugugaccaucucugc

SEQ ID NO: 1000716 - RNA, 22 nt, Human
uuuguguguauauccuuccaga

SEQ ID NO: 1000717 - RNA, 22 nt, Human
ggagguggcagagggacauucu

SEQ ID NO: 1000718 - RNA, 22 nt, Human
acaguguauauuguuuaucugg

SEQ ID NO: 1000719 - RNA, 22 nt, Human
acaguagagcauuuguuuugau

SEQ ID NO: 1000720 - RNA, 22 nt, Human
gguggcugggauuaguagccca

SEQ ID NO: 1000721 - RNA, 22 nt, Human
uucauuuuauaaacccugcuga

SEQ ID NO: 1000722 - RNA, 22 nt, Human
uguggcugucuguucuccuagg

SEQ ID NO: 1000723 - RNA, 22 nt, Human
ccuuuacaguaugguuguauca

SEQ ID NO: 1000724 - RNA, 22 nt, Human
auucucucauuuaucuguccua

SEQ ID NO: 1000725 - RNA, 22 nt, Human
aucaguauccugcaguuucuau

SEQ ID NO: 1000726 - RNA, 22 nt, Human
ugugacuguggacuuuuguggg

SEQ ID NO: 1000727 - RNA, 19 nt, Human
uauauauuuugggguugug

SEQ ID NO: 1000728 - RNA, 22 nt, Human
ucagcugcucaaauuuauguca

SEQ ID NO: 1000729 - RNA, 22 nt, Human
uguggcauacacaugagguggu

SEQ ID NO: 1000730 - RNA, 22 nt, Human
cugugucuaaucuuauacauca

SEQ ID NO: 1000731 - RNA, 22 nt, Human
uucuuuaccacuacucuuccaa

SEQ ID NO: 1000732 - RNA, 22 nt, Human
uaggagggcccugaaaauggca

SEQ ID NO: 1000733 - RNA, 22 nt, Human
cuggcugugcagucuuccagaa

SEQ ID NO: 1000734 - RNA, 22 nt, Human
uguauguggcuacuuuucuugc

SEQ ID NO: 1000735 - RNA, 23 nt, Human
ugaguguggggacagugguuugc

SEQ ID NO: 1000736 - RNA, 22 nt, Human
acagaauagucagcuguaggcc

SEQ ID NO: 1000737 - RNA, 22 nt, Human
cuucucuugguaguucuuguug

SEQ ID NO: 1000738 - RNA, 22 nt, Human
ucucucauaagaugaguacuua

SEQ ID NO: 1000739 - RNA, 22 nt, Human
uaucuuuauuaugucuaucugc

SEQ ID NO: 1000740 - RNA, 22 nt, Human
uauuugcuccuuaggcauauuu

SEQ ID NO: 1000741 - RNA, 22 nt, Human
uauguucuuagaagaggcagca

SEQ ID NO: 1000742 - RNA, 20 nt, Human
uuauuugcucuuuaucugca

SEQ ID NO: 1000743 - RNA, 22 nt, Human
uacuuuuuaugauaagaacuga

SEQ ID NO: 1000744 - RNA, 22 nt, Human
uguggcucggccagcugcugaa

SEQ ID NO: 1000745 - RNA, 23 nt, Human
uucugucuugcugucagcuuucu

SEQ ID NO: 1000746 - RNA, 22 nt, Human
caggcauuucgcaaaggcugag

SEQ ID NO: 1000747 - RNA, 22 nt, Human
cugcugugacagcugccguguu

SEQ ID NO: 1000748 - RNA, 22 nt, Human
ucuggcugcugcgugagugcuu

SEQ ID NO: 1000749 - RNA, 20 nt, Human
uguguguguacuucuaaaua

SEQ ID NO: 1000750 - RNA, 22 nt, Human
uuuccucuuuguaccuugacua

SEQ ID NO: 1000751 - RNA, 20 nt, Human
guggccuguccuguuguggg

SEQ ID NO: 1000752 - RNA, 22 nt, Human
cuguggcugcgccaucgaaaac

SEQ ID NO: 1000753 - RNA, 22 nt, Human
ucuuuuauagugaauuuucuug

SEQ ID NO: 1000754 - RNA, 22 nt, Human
auuucucugccucagcuucugc

SEQ ID NO: 1000755 - RNA, 22 nt, Human
aggaagcugggaaacugacauu

SEQ ID NO: 1000756 - RNA, 17 nt, Human
aguguguaacuugugua

SEQ ID NO: 1000757 - RNA, 22 nt, Human
uggagguguauaagguagcuuc

SEQ ID NO: 1000758 - RNA, 22 nt, Human
aguggcugaauauauuuuacua

SEQ ID NO: 1000759 - RNA, 22 nt, Human
gccagccccagacauccuaucg

SEQ ID NO: 1000760 - RNA, 22 nt, Human
uuuuucauugcagccucucucc

SEQ ID NO: 1000761 - RNA, 22 nt, Human
uuuccuguucuaguuguugcca

SEQ ID NO: 1000762 - RNA, 23 nt, Human
uuugacagcgugguuucuguggg

SEQ ID NO: 1000763 - RNA, 22 nt, Human
auuuuaucugcuuacuuucagg

SEQ ID NO: 1000764 - RNA, 22 nt, Human
uaacuuuuacauuuggcucacu

SEQ ID NO: 1000765 - RNA, 22 nt, Human
uuguguauuuccugaagguaag

SEQ ID NO: 1000766 - RNA, 18 nt, Human
uuuuacucauagcaggcc

SEQ ID NO: 1000767 - RNA, 22 nt, Human
cuguggcucuccaauggaggga

SEQ ID NO: 1000768 - RNA, 18 nt, Human
guggaggguucucagaau

SEQ ID NO: 1000769 - RNA, 22 nt, Human
uuguauuuuguuaugcuacugc

SEQ ID NO: 1000770 - RNA, 22 nt, Human
ucugugauagguggcauaguga

SEQ ID NO: 1000771 - RNA, 22 nt, Human
cagauauaguggcuugccuggg

SEQ ID NO: 1000772 - RNA, 22 nt, Human
gugugcgcgcucauaggugugu

SEQ ID NO: 1000773 - RNA, 22 nt, Human
ugucucuucugccuccagcugu

SEQ ID NO: 1000774 - RNA, 22 nt, Human
uguguguuaacuuauuuaaugu

SEQ ID NO: 1000775 - RNA, 22 nt, Human
cuggcugugcugcaggcuuugg

SEQ ID NO: 1000776 - RNA, 22 nt, Human
cauguguguggacgagcguggc

SEQ ID NO: 1000777 - RNA, 22 nt, Human
gugugggugggacaucaucuuu

SEQ ID NO: 1000778 - RNA, 22 nt, Human
auacaguaauuuguaacucauc

SEQ ID NO: 1000779 - RNA, 22 nt, Human
guuacagugcuuggcaauaagu

SEQ ID NO: 1000780 - RNA, 22 nt, Human
ugugucugaacuaguugcucuc

SEQ ID NO: 1000781 - RNA, 23 nt, Human
caguauaauguauggauggggca

SEQ ID NO: 1000782 - RNA, 22 nt, Human
aggcuguggugaugauuggguc

SEQ ID NO: 1000783 - RNA, 22 nt, Human
uuguauuucuccacuuucuguu

SEQ ID NO: 1000784 - RNA, 22 nt, Human
gcucucugggugugucuagaua

SEQ ID NO: 1000785 - RNA, 22 nt, Human
agagggguuaagugcuaguccg

SEQ ID NO: 1000786 - RNA, 22 nt, Human
uuucucucuggcccugauuguc

SEQ ID NO: 1000787 - RNA, 22 nt, Human
aguauauugcucuuaaucauag

SEQ ID NO: 1000788 - RNA, 22 nt, Human
ucuuuacaaucuaagcauaguu

SEQ ID NO: 1000789 - RNA, 22 nt, Human
gcuuuacaacaaauugaauaug

SEQ ID NO: 1000790 - RNA, 19 nt, Human
uauauuugagugugcaugc

SEQ ID NO: 1000791 - RNA, 22 nt, Human
ucugcugugucccuggucuccu

SEQ ID NO: 1000792 - RNA, 22 nt, Human
auuucucuaagcauccguuugc

SEQ ID NO: 1000793 - RNA, 22 nt, Human
ucagugugaggggcuggguccu

SEQ ID NO: 1000794 - RNA, 20 nt, Human
ugauauuucuggaaguggag

SEQ ID NO: 1000795 - RNA, 22 nt, Human
cacaguauucacugggcagauu

SEQ ID NO: 1000796 - RNA, 22 nt, Human
gugcaccagucacaugggcaga

SEQ ID NO: 1000797 - RNA, 22 nt, Human
ugucuguacaaauuuucugugu

SEQ ID NO: 1000798 - RNA, 21 nt, Human
uuagcaguuguugauuuccag

SEQ ID NO: 1000799 - RNA, 22 nt, Human
aaguuuuucacauugcuguugu

SEQ ID NO: 1000800 - RNA, 19 nt, Human
ucagugugugggagguggu

SEQ ID NO: 1000801 - RNA, 22 nt, Human
caguauguccuuccucguuggc

SEQ ID NO: 1000802 - RNA, 21 nt, Human
acaguacuugagaucuuuuga

SEQ ID NO: 1000803 - RNA, 22 nt, Human
gcucucuuuaaacugcauggcu

SEQ ID NO: 1000804 - RNA, 22 nt, Human
ccuuuacaaaguucuucauggg

SEQ ID NO: 1000805 - RNA, 22 nt, Human
gcugauguuucaaguauagcuu

SEQ ID NO: 1000806 - RNA, 22 nt, Human
uuaacuucaacacucucuugua

SEQ ID NO: 1000807 - RNA, 22 nt, Human
agcuguguguuugucaugggcg

SEQ ID NO: 1000808 - RNA, 22 nt, Human
auauauuuacucuccuguugca

SEQ ID NO: 1000809 - RNA, 22 nt, Human
uuauuauugugguugcauuauc

SEQ ID NO: 1000810 - RNA, 22 nt, Human
ugcugugucuuucugugaaaag

SEQ ID NO: 1000811 - RNA, 22 nt, Human
uuuccugucuuuugugaaggau

SEQ ID NO: 1000812 - RNA, 22 nt, Human
aauuuucugguguguaaugaag

SEQ ID NO: 1000813 - RNA, 22 nt, Human
uggcugugaacaaagagaauaa

SEQ ID NO: 1000814 - RNA, 22 nt, Human
acaguagucuuaauuucaugua

SEQ ID NO: 1000815 - RNA, 22 nt, Human
gcugugugaaaacugggccugg

SEQ ID NO: 1000816 - RNA, 22 nt, Human
uauuuuguuaauaauccagucc

SEQ ID NO: 1000817 - RNA, 22 nt, Human
guuagguagaaguuuacuuuga

SEQ ID NO: 1000818 - RNA, 21 nt, Human
gugugaguagcaugugucuca

SEQ ID NO: 1000819 - RNA, 22 nt, Human
uuuuucucuaugccaggggccu

SEQ ID NO: 1000820 - RNA, 22 nt, Human
gugaaugcaaacuguuucugau

SEQ ID NO: 1000821 - RNA, 22 nt, Human
uucuuuauugagacuucauugu

SEQ ID NO: 1000822 - RNA, 22 nt, Human
ugugugugcaggagagcaggug

SEQ ID NO: 1000823 - RNA, 22 nt, Human
uuauguucagcaucugcuuuau

SEQ ID NO: 1000824 - RNA, 22 nt, Human
ucucucucagccauuacagaac

SEQ ID NO: 1000825 - RNA, 23 nt, Human
ucuuuuuaagagaucuagugacg

SEQ ID NO: 1000826 - RNA, 22 nt, Human
gauauuuuuaguauuucugccu

SEQ ID NO: 1000827 - RNA, 22 nt, Human
gcucucuuugugccacuuaagg

SEQ ID NO: 1000828 - RNA, 22 nt, Human
uuauuguuuacuaguuugcaga

SEQ ID NO: 1000829 - RNA, 22 nt, Human
acuguguggaaauuugugaggg

SEQ ID NO: 1000830 - RNA, 22 nt, Human
uucuaacucuguuauguguuuc

SEQ ID NO: 1000831 - RNA, 22 nt, Human
aguuuucugcuaaaccagcuaa

SEQ ID NO: 1000832 - RNA, 21 nt, Human
cucuguguugaggguguugag

SEQ ID NO: 1000833 - RNA, 22 nt, Human
ccuacucugagcgccuccgcau

SEQ ID NO: 1000834 - RNA, 22 nt, Human
uguguguguaaaagcauuuaua

SEQ ID NO: 1000835 - RNA, 20 nt, Human
uuucuugucggcuguugcug

SEQ ID NO: 1000836 - RNA, 22 nt, Human
acuuguuucaacuguacucucc

SEQ ID NO: 1000837 - RNA, 22 nt, Human
ucauuuucccacugaagcuguc

SEQ ID NO: 1000838 - RNA, 22 nt, Human
cagggauucagcugaaggaggc

SEQ ID NO: 1000839 - RNA, 22 nt, Human
uuuaaucucccacucucagccu

SEQ ID NO: 1000840 - RNA, 22 nt, Human
uagggcaggggaggaaucugaa

SEQ ID NO: 1000841 - RNA, 22 nt, Human
uucuguguucugugcaaugagc

SEQ ID NO: 1000842 - RNA, 22 nt, Human
uucugugugucucagcaagcug

SEQ ID NO: 1000843 - RNA, 22 nt, Human
auguggcuaguccaauuaauga

SEQ ID NO: 1000844 - RNA, 22 nt, Human
uguguuggcuugccuguuaggc

SEQ ID NO: 1000845 - RNA, 22 nt, Human
auucucuguggugaugcuggug

SEQ ID NO: 1000846 - RNA, 22 nt, Human
uucuucucggcugucagauagu

SEQ ID NO: 1000847 - RNA, 22 nt, Human
gugguuguuuaggucguggauc

SEQ ID NO: 1000848 - RNA, 22 nt, Human
cagccacugacaggaauggucc

SEQ ID NO: 1000849 - RNA, 22 nt, Human
caacuuuucugugaauuuaagu

SEQ ID NO: 1000850 - RNA, 22 nt, Human
gguguguguggauuagcaugcc

SEQ ID NO: 1000851 - RNA, 22 nt, Human
uggcuaugguauugauggguuu

SEQ ID NO: 1000852 - RNA, 22 nt, Human
uaguuucuagucaaucuucuuu

SEQ ID NO: 1000853 - RNA, 22 nt, Human
cuguggcuuucucugccuccuu

SEQ ID NO: 1000854 - RNA, 22 nt, Human
aggcugugcucagccaauggga

SEQ ID NO: 1000855 - RNA, 22 nt, Human
uuuuauguuccucuuuaugcga

SEQ ID NO: 1000856 - RNA, 22 nt, Human
uaguuucuggguuggcuucuac

SEQ ID NO: 1000857 - RNA, 22 nt, Human
aggcugugaucucaugauuugu

SEQ ID NO: 1000858 - RNA, 22 nt, Human
auggcugugugcuucuccccau

SEQ ID NO: 1000859 - RNA, 21 nt, Human
uggcucugaaagagugcugca

SEQ ID NO: 1000860 - RNA, 22 nt, Human
cuacaguaugaaaccuuuacuc

SEQ ID NO: 1000861 - RNA, 22 nt, Human
auguggcuaguccucugcggca

SEQ ID NO: 1000862 - RNA, 22 nt, Human
uuuccagugaauuagucuguuu

SEQ ID NO: 1000863 - RNA, 22 nt, Human
uguguauguuuugagguugcua

SEQ ID NO: 1000864 - RNA, 22 nt, Human
gcugucuguucgagcguguguu

SEQ ID NO: 1000865 - RNA, 20 nt, Human
ucuguagucuaugaggcuua

SEQ ID NO: 1000866 - RNA, 22 nt, Human
gcagcugcagacccucagugcu

SEQ ID NO: 1000867 - RNA, 19 nt, Human
ucaguauauaauuacacca

SEQ ID NO: 1000868 - RNA, 22 nt, Human
uacaguauauacuguguguaga

SEQ ID NO: 1000869 - RNA, 22 nt, Human
uuagcaguucauugauuaucgu

SEQ ID NO: 1000870 - RNA, 22 nt, Human
auucgcgggccuggaggguggg

SEQ ID NO: 1000871 - RNA, 22 nt, Human
uuuaucaguagcaaaguuuuaa

SEQ ID NO: 1000872 - RNA, 22 nt, Human
ucucugugggcuuuggacuuga

SEQ ID NO: 1000873 - RNA, 22 nt, Human
agaauauugaaaguucuugaca

SEQ ID NO: 1000874 - RNA, 20 nt, Human
auguggcuuuuugaccugcu

SEQ ID NO: 1000875 - RNA, 22 nt, Human
uauuacagcuuugauuaucugg

SEQ ID NO: 1000876 - RNA, 22 nt, Human
uuauauuucugguagccuucag

SEQ ID NO: 1000877 - RNA, 22 nt, Human
aagccacuuucagcugucucag

SEQ ID NO: 1000878 - RNA, 22 nt, Human
ccugugugaagguuaggcaggu

SEQ ID NO: 1000879 - RNA, 22 nt, Human
uuuauaguagcaugauuuauaa

SEQ ID NO: 1000880 - RNA, 23 nt, Human
ucucuuaccugagacauuuccua

SEQ ID NO: 1000881 - RNA, 22 nt, Human
agugugugcuguuccccggagg

SEQ ID NO: 1000882 - RNA, 21 nt, Human
auuuucugugauagcugucuc

SEQ ID NO: 1000883 - RNA, 22 nt, Human
uauuugcuuugcuuuauagaga

SEQ ID NO: 1000884 - RNA, 22 nt, Human
ugccgcagugcggggagggccc

SEQ ID NO: 1000885 - RNA, 22 nt, Human
cuggagggugagccucaucucu

SEQ ID NO: 1000886 - RNA, 22 nt, Human
aguauguugacuuauucuugga

SEQ ID NO: 1000887 - RNA, 20 nt, Human
uuacagaaaugauguuauuu

SEQ ID NO: 1000888 - RNA, 22 nt, Human
cugucgccugguccucucugga

SEQ ID NO: 1000889 - RNA, 22 nt, Human
uuuacauuucccucugucaguu

SEQ ID NO: 1000890 - RNA, 22 nt, Human
cuguauguuccguuuugucacu

SEQ ID NO: 1000891 - RNA, 20 nt, Human
ucuguguuucagcugcuuga

SEQ ID NO: 1000892 - RNA, 22 nt, Human
cagcccuccuuucacucccagg

SEQ ID NO: 1000893 - RNA, 22 nt, Human
augcauguauucaugugugaca

SEQ ID NO: 1000894 - RNA, 22 nt, Human
ugcuguguggaugugaagaauc

SEQ ID NO: 1000895 - RNA, 22 nt, Human
uuuucuccagggaacaagguga

SEQ ID NO: 1000896 - RNA, 22 nt, Human
caguuuuaaauuuugaaugucu

SEQ ID NO: 1000897 - RNA, 19 nt, Human
auuuuucuuccucugugca

SEQ ID NO: 1000898 - RNA, 22 nt, Human
agcugugugcccaugguggagg

SEQ ID NO: 1000899 - RNA, 22 nt, Human
aguuucucuagagucuuugaaa

SEQ ID NO: 1000900 - RNA, 22 nt, Human
guguggcuuucuggguuuaauu

SEQ ID NO: 1000901 - RNA, 22 nt, Human
uuacaguauuggucacguuugu

SEQ ID NO: 1000902 - RNA, 22 nt, Human
cuaacuuuagcuuagauuauca

SEQ ID NO: 1000903 - RNA, 22 nt, Human
ucagcugcugugguauguacau

SEQ ID NO: 1000904 - RNA, 19 nt, Human
ggugugugcuggggccugu

SEQ ID NO: 1000905 - RNA, 22 nt, Human
gcucucuuucacagagguagga

SEQ ID NO: 1000906 - RNA, 22 nt, Human
acucucugguguagaaagaccu

SEQ ID NO: 1000907 - RNA, 22 nt, Human
aguuauauaacuaucuagaugc

SEQ ID NO: 1000908 - RNA, 22 nt, Human
uuuacaauugguuuucucuaau

SEQ ID NO: 1000909 - RNA, 19 nt, Human
acuguguggaagugugauu

SEQ ID NO: 1000910 - RNA, 22 nt, Human
cuuuuuacucuguugucucagc

SEQ ID NO: 1000911 - RNA, 22 nt, Human
ucucucuaggcaucuauuuuca

SEQ ID NO: 1000912 - RNA, 22 nt, Human
ucucugugucucauguuccuau

SEQ ID NO: 1000913 - RNA, 22 nt, Human
aguuuucuucauuuuguggcca

SEQ ID NO: 1000914 - RNA, 22 nt, Human
auguaugcaugcuacaguuuuc

SEQ ID NO: 1000915 - RNA, 22 nt, Human
uuucacaggaugcuguuuuaua

SEQ ID NO: 1000916 - RNA, 22 nt, Human
aguguguacauuuggugcaguu

SEQ ID NO: 1000917 - RNA, 22 nt, Human
cagauauauuuuauuuggucaa

SEQ ID NO: 1000918 - RNA, 22 nt, Human
ucugagugucuuaauaggcucu

SEQ ID NO: 1000919 - RNA, 22 nt, Human
acaguaaauaaugcauguugau

SEQ ID NO: 1000920 - RNA, 17 nt, Human
agucauauugugcaguu

SEQ ID NO: 1000921 - RNA, 22 nt, Human
auguggcucagcaggcucccgu

SEQ ID NO: 1000922 - RNA, 22 nt, Human
uuucugcuaaucuuuuacugag

SEQ ID NO: 1000923 - RNA, 22 nt, Human
uuucacagcgucuuucucuugc

SEQ ID NO: 1000924 - RNA, 22 nt, Human
ggugugugguuuugauacaguc

SEQ ID NO: 1000925 - RNA, 22 nt, Human
cuguggcuccagugaaccaaug

SEQ ID NO: 1000926 - RNA, 22 nt, Human
cccuggccccucacuccgaggc

SEQ ID NO: 1000927 - RNA, 22 nt, Human
agucauauguggcauuuucuaa

SEQ ID NO: 1000928 - RNA, 22 nt, Human
gugugugcaagagguuuauuga

SEQ ID NO: 1000929 - RNA, 22 nt, Human
cuuacaguacuucuaauaugau

SEQ ID NO: 1000930 - RNA, 22 nt, Human
uacuuucuguccuucuguuaaa

SEQ ID NO: 1000931 - RNA, 22 nt, Human
uguaggcugaagaugaagugga

SEQ ID NO: 1000932 - RNA, 22 nt, Human
uguguguuaucuuaguucaucu

SEQ ID NO: 1000933 - RNA, 21 nt, Human
ucuuuucucagcuuugugguu

SEQ ID NO: 1000934 - RNA, 22 nt, Human
acaguauauaugguuaucugau

SEQ ID NO: 1000935 - RNA, 22 nt, Human
cuuucuuucgaagacgugauua

SEQ ID NO: 1000936 - RNA, 22 nt, Human
gucucucugacugguccacacc

SEQ ID NO: 1000937 - RNA, 23 nt, Human
uguguauguaucuaugcauaggu

SEQ ID NO: 1000938 - RNA, 22 nt, Human
cuuuacauuaauuucuacugau

SEQ ID NO: 1000939 - RNA, 22 nt, Human
ugugugaacucucugauguaca

SEQ ID NO: 1000940 - RNA, 22 nt, Human
aagcuuuuuggauuugcuucag

SEQ ID NO: 1000941 - RNA, 22 nt, Human
aauuucucauggauucaguuau

SEQ ID NO: 1000942 - RNA, 22 nt, Human
uggcauguaguaggugcuauaa

SEQ ID NO: 1000943 - RNA, 22 nt, Human
uugugugucuucuucacugccc

SEQ ID NO: 1000944 - RNA, 22 nt, Human
cuuuucucugcaccauguguga

SEQ ID NO: 1000945 - RNA, 22 nt, Human
gugcuguacuucuguguugaag

SEQ ID NO: 1000946 - RNA, 20 nt, Human
acagaauaugcugguugugg

SEQ ID NO: 1000947 - RNA, 20 nt, Human
uaacuuucuaugcuuucagc

SEQ ID NO: 1000948 - RNA, 22 nt, Human
uccuuacaacuuguuauuuuuc

SEQ ID NO: 1000949 - RNA, 22 nt, Human
cugugugcaacuugcaguuuug

SEQ ID NO: 1000950 - RNA, 22 nt, Human
cuguggcucaggccuguaagcc

SEQ ID NO: 1000951 - RNA, 22 nt, Human
ucaucucuccccagugucuuua

SEQ ID NO: 1000952 - RNA, 22 nt, Human
cugugcuggauucugaggcuac

SEQ ID NO: 1000953 - RNA, 22 nt, Human
uggcucugucgccguuuggaau

SEQ ID NO: 1000954 - RNA, 22 nt, Human
caguuuuagcuagagcaaacca

SEQ ID NO: 1000955 - RNA, 22 nt, Human
cugugugugucugcagcauacu

SEQ ID NO: 1000956 - RNA, 19 nt, Human
uggcagugugggguaugaa

SEQ ID NO: 1000957 - RNA, 23 nt, Human
agcuguguggccuugggcaaguu

SEQ ID NO: 1000958 - RNA, 22 nt, Human
auucuucuaauaugaucguguu

SEQ ID NO: 1000959 - RNA, 22 nt, Human
ggcuguguuucuguuugacauu

SEQ ID NO: 1000960 - RNA, 22 nt, Human
caguuuuaugucgaauguauac

SEQ ID NO: 1000961 - RNA, 22 nt, Human
cuuuuaaugagcauugcugucu

SEQ ID NO: 1000962 - RNA, 22 nt, Human
aucucucuaugcacugaggacu

SEQ ID NO: 1000963 - RNA, 22 nt, Human
cucuauuuauggcaucuuuaug

SEQ ID NO: 1000964 - RNA, 22 nt, Human
cuucacagucacccugcugugu

SEQ ID NO: 1000965 - RNA, 23 nt, Human
gcagugugaauccaguguuucag

SEQ ID NO: 1000966 - RNA, 22 nt, Human
gcguggcuuagagugggguacc

SEQ ID NO: 1000967 - RNA, 22 nt, Human
auacaguaauugcauaggcuuc

SEQ ID NO: 1000968 - RNA, 22 nt, Human
agguggaguuaagugugaacug

SEQ ID NO: 1000969 - RNA, 22 nt, Human
uggcuguggguggaaggaaacc

SEQ ID NO: 1000970 - RNA, 22 nt, Human
uaacaguauccccauuugcaag

SEQ ID NO: 1000971 - RNA, 22 nt, Human
uuguaugcugaugacaccaccu

SEQ ID NO: 1000972 - RNA, 22 nt, Human
cuguggcugccucaccuacagg

SEQ ID NO: 1000973 - RNA, 22 nt, Human
cuguggcugcguaggucuggca

SEQ ID NO: 1000974 - RNA, 22 nt, Human
cugugugugaacacagcccagc

SEQ ID NO: 1000975 - RNA, 22 nt, Human
uuucuuugagucucaguuugcu

SEQ ID NO: 1000976 - RNA, 22 nt, Human
gucuguguuuucaggccuuugu

SEQ ID NO: 1000977 - RNA, 22 nt, Human
gccagcccauuaaccccugucc

SEQ ID NO: 1000978 - RNA, 22 nt, Human
cuggcuguggucacagguaacu

SEQ ID NO: 1000979 - RNA, 22 nt, Human
uacuguauaugcuuguaucuga

SEQ ID NO: 1000980 - RNA, 22 nt, Human
auaguuuuauagauauugugua

SEQ ID NO: 1000981 - RNA, 22 nt, Human
ugcguggcgcagcgugugggau

SEQ ID NO: 1000982 - RNA, 22 nt, Human
aguuuauuguauaugguaguuu

SEQ ID NO: 1000983 - RNA, 19 nt, Human
auucucugguuugcuggcu

SEQ ID NO: 1000984 - RNA, 22 nt, Human
cgcuguguuuacaucauugcug

SEQ ID NO: 1000985 - RNA, 22 nt, Human
caggacagguguucuagaucag

SEQ ID NO: 1000986 - RNA, 22 nt, Human
uggcugugcggccucgggcaga

SEQ ID NO: 1000987 - RNA, 22 nt, Human
auggcugugaaaugguaggugg

SEQ ID NO: 1000988 - RNA, 22 nt, Human
ccugugugccuggccgcgggag

SEQ ID NO: 1000989 - RNA, 22 nt, Human
uguguauauguaaauauaguug

SEQ ID NO: 1000990 - RNA, 22 nt, Human
ccugaggauuguuggugcuucc

SEQ ID NO: 1000991 - RNA, 22 nt, Human
guguguauuuaaaggauaguug

SEQ ID NO: 1000992 - RNA, 22 nt, Human
auuuucuauucugcugguuuag

SEQ ID NO: 1000993 - RNA, 22 nt, Human
acagucuacaaagugaugugug

SEQ ID NO: 1000994 - RNA, 20 nt, Human
uuucugugcccaggucuguu

SEQ ID NO: 1000995 - RNA, 22 nt, Human
uuacaguuacugguacuguuaa

SEQ ID NO: 1000996 - RNA, 22 nt, Human
caugugugaaucuugugaucau

SEQ ID NO: 1000997 - RNA, 22 nt, Human
caguaauagaggcuuugagucu

SEQ ID NO: 1000998 - RNA, 22 nt, Human
uuugugugaaaauauuuaaguu

SEQ ID NO: 1000999 - RNA, 23 nt, Human
ucuuuacauacugaugaguucuc

SEQ ID NO: 1001000 - RNA, 22 nt, Human
uuuagagucauuuuauauugac

SEQ ID NO: 1001001 - RNA, 22 nt, Human
uuauuauugauucgcucucaaa

SEQ ID NO: 1001002 - RNA, 22 nt, Human
ugugugaauagcaguggcuggu

SEQ ID NO: 1001003 - RNA, 22 nt, Human
uucuucugugaggugugugccu

SEQ ID NO: 1001004 - RNA, 22 nt, Human
ugcuguguuaaauacaagcaug

SEQ ID NO: 1001005 - RNA, 22 nt, Human
cuguaugugaaaaugucaagug

SEQ ID NO: 1001006 - RNA, 22 nt, Human
ugugaauguauaguuuguauau

SEQ ID NO: 1001007 - RNA, 22 nt, Human
uuugugugcgucuggccugggg

SEQ ID NO: 1001008 - RNA, 22 nt, Human
auuuugcuacaguugguggaaa

SEQ ID NO: 1001009 - RNA, 22 nt, Human
uuugugugcaacgcauggaguc

SEQ ID NO: 1001010 - RNA, 22 nt, Human
uuaaguauauccauuugacugg

SEQ ID NO: 1001011 - RNA, 22 nt, Human
auguggcuuucaugauuaagca

SEQ ID NO: 1001012 - RNA, 22 nt, Human
auuuacagccuugaaaacagca

SEQ ID NO: 1001013 - RNA, 22 nt, Human
ccugaggaccagcacccaucug

SEQ ID NO: 1001014 - RNA, 22 nt, Human
uuuucuguggucagagcuugag

SEQ ID NO: 1001015 - RNA, 22 nt, Human
acagugauuucauccuucuggg

SEQ ID NO: 1001016 - RNA, 22 nt, Human
ugugugcacugccuuuugugga

SEQ ID NO: 1001017 - RNA, 20 nt, Human
uucucuuuggguccagagaa

SEQ ID NO: 1001018 - RNA, 22 nt, Human
uucccucuuuuccaacaguugu

SEQ ID NO: 1001019 - RNA, 22 nt, Human
aggcugugaaauguggcaagga

SEQ ID NO: 1001020 - RNA, 22 nt, Human
ucugugugaccauaagccagcu

SEQ ID NO: 1001021 - RNA, 22 nt, Human
uggcugagcucccuguguguug

SEQ ID NO: 1001022 - RNA, 22 nt, Human
gggggugaggacaggagcacug

SEQ ID NO: 1001023 - RNA, 22 nt, Human
guauuauuggguaguaugguaa

SEQ ID NO: 1001024 - RNA, 22 nt, Human
ucugugugcccuaaagccugcu

SEQ ID NO: 1001025 - RNA, 22 nt, Human
aaugcaguuucauuuguagaau

SEQ ID NO: 1001026 - RNA, 22 nt, Human
uuucucugcugccugugucgau

SEQ ID NO: 1001027 - RNA, 22 nt, Human
cugcuguguugccagugucacc

SEQ ID NO: 1001028 - RNA, 22 nt, Human
aguauauuuguuaagauuauuc

SEQ ID NO: 1001029 - RNA, 22 nt, Human
aaguuuuauuggcuauagcacu

SEQ ID NO: 1001030 - RNA, 21 nt, Human
cuuuuacauucagucaugaug

SEQ ID NO: 1001031 - RNA, 22 nt, Human
cugcccuggccacugugcccag

SEQ ID NO: 1001032 - RNA, 22 nt, Human
uuuacaaggcagaacugauuaa

SEQ ID NO: 1001033 - RNA, 22 nt, Human
guuuacagagacagaaaguagu

SEQ ID NO: 1001034 - RNA, 22 nt, Human
cuauauuuggugagggaugucu

SEQ ID NO: 1001035 - RNA, 22 nt, Human
uacaguaacuggaauucuucuu

SEQ ID NO: 1001036 - RNA, 18 nt, Human
cugucuuuuuucucucca

SEQ ID NO: 1001037 - RNA, 17 nt, Human
uuccugugguuugaucu

SEQ ID NO: 1001038 - RNA, 22 nt, Human
uucugcuguaguugcaucuguu

SEQ ID NO: 1001039 - RNA, 20 nt, Human
agcugcccuuuucacauguu

SEQ ID NO: 1001040 - RNA, 22 nt, Human
uauauauucuuaaguaguguag

SEQ ID NO: 1001041 - RNA, 21 nt, Human
ggcuguguucagggcaugcgg

SEQ ID NO: 1001042 - RNA, 22 nt, Human
auggcuguugugaggaucaaau

SEQ ID NO: 1001043 - RNA, 17 nt, Human
ugcgaugucuguguuug

SEQ ID NO: 1001044 - RNA, 22 nt, Human
cuguggcugcagccuugguccu

SEQ ID NO: 1001045 - RNA, 22 nt, Human
gggcuguguaucaguuaucuau

SEQ ID NO: 1001046 - RNA, 22 nt, Human
uguauguaaaggucuucauguu

SEQ ID NO: 1001047 - RNA, 22 nt, Human
ucuuuacaagucacauuuucug

SEQ ID NO: 1001048 - RNA, 22 nt, Human
aagcuuuucucaguguccuugg

SEQ ID NO: 1001049 - RNA, 22 nt, Human
uaggggugaggccaggcaucag

SEQ ID NO: 1001050 - RNA, 22 nt, Human
cuggguguucaggagcugggcu

SEQ ID NO: 1001051 - RNA, 17 nt, Human
cauguguaugugggagu

SEQ ID NO: 1001052 - RNA, 22 nt, Human
ucucucuucaugcuuuuagaau

SEQ ID NO: 1001053 - RNA, 20 nt, Human
ucucuauucccacgaggaaa

SEQ ID NO: 1001054 - RNA, 22 nt, Human
gcucugugaaggguguugcuca

SEQ ID NO: 1001055 - RNA, 22 nt, Human
acuguguguuugucuagcacag

SEQ ID NO: 1001056 - RNA, 22 nt, Human
uuacauguacugguuugacuua

SEQ ID NO: 1001057 - RNA, 22 nt, Human
ugggacaggaggccucuggaga

SEQ ID NO: 1001058 - RNA, 22 nt, Human
auuuucucucaaaccuuaaaau

SEQ ID NO: 1001059 - RNA, 20 nt, Human
ucuuuagauuuaucuuaugu

SEQ ID NO: 1001060 - RNA, 22 nt, Human
ucauuuacuugguuuuaaucuu

SEQ ID NO: 1001061 - RNA, 22 nt, Human
aucuuucuccauauacaucuuu

SEQ ID NO: 1001062 - RNA, 22 nt, Human
uacauguaggugacauuuuaau

SEQ ID NO: 1001063 - RNA, 22 nt, Human
ucugugugcccaccugacaccu

SEQ ID NO: 1001064 - RNA, 23 nt, Human
cuguggcugaguccuguuggagu

SEQ ID NO: 1001065 - RNA, 22 nt, Human
guguaugcaauugagucauaga

SEQ ID NO: 1001066 - RNA, 22 nt, Human
ucucaucuccauuauagcauca

SEQ ID NO: 1001067 - RNA, 22 nt, Human
gcugugcuugcaugagugucug

SEQ ID NO: 1001068 - RNA, 19 nt, Human
caguuuaugcuuuggggac

SEQ ID NO: 1001069 - RNA, 22 nt, Human
uuuucuguaagaggacuuuaau

SEQ ID NO: 1001070 - RNA, 22 nt, Human
ucaguguguacacugagcauuu

SEQ ID NO: 1001071 - RNA, 22 nt, Human
ucuuuaucaagucuguucuuug

SEQ ID NO: 1001072 - RNA, 22 nt, Human
acugugugaggcugggugaguc

SEQ ID NO: 1001073 - RNA, 22 nt, Human
cuguggcucuuuaguugagcac

SEQ ID NO: 1001074 - RNA, 22 nt, Human
uuucuucuaugugugauauuuu

SEQ ID NO: 1001075 - RNA, 22 nt, Human
gugugccucccauuagggugua

SEQ ID NO: 1001076 - RNA, 21 nt, Human
auuaacuuguuaaccuaaagu

SEQ ID NO: 1001077 - RNA, 18 nt, Human
gaacuuuuggcuuugugu

SEQ ID NO: 1001078 - RNA, 19 nt, Human
cucugcuugguccauaugc

SEQ ID NO: 1001079 - RNA, 22 nt, Human
gcugugugccaggggaaggcug

SEQ ID NO: 1001080 - RNA, 22 nt, Human
uuuuaucugcuucauuaguuga

SEQ ID NO: 1001081 - RNA, 22 nt, Human
cuucacagaauaaacucauuau

SEQ ID NO: 1001082 - RNA, 22 nt, Human
cucuccuuucacuaaauauucu

SEQ ID NO: 1001083 - RNA, 22 nt, Human
acagugauugggguaucugcag

SEQ ID NO: 1001084 - RNA, 22 nt, Human
cuccucuucugaguaccaggga

SEQ ID NO: 1001085 - RNA, 22 nt, Human
uagggguggagcuaagaguccc

SEQ ID NO: 1001086 - RNA, 22 nt, Human
cgcccagcugaaaucuccaggc

SEQ ID NO: 1001087 - RNA, 22 nt, Human
cuggcuguuuucaauguugaug

SEQ ID NO: 1001088 - RNA, 22 nt, Human
gcugugagcacugcugggugga

SEQ ID NO: 1001089 - RNA, 22 nt, Human
uuacagcuuacauuuuaccuug

SEQ ID NO: 1001090 - RNA, 22 nt, Human
cucuuuucaaaccuguuuaugg

SEQ ID NO: 1001091 - RNA, 22 nt, Human
cuguggcuggaauaauaaaugu

SEQ ID NO: 1001092 - RNA, 19 nt, Human
uguggcugagcacuccuua

SEQ ID NO: 1001093 - RNA, 22 nt, Human
uuuaucugggauuuugcagucu

SEQ ID NO: 1001094 - RNA, 22 nt, Human
uguuacagaaauauugcuucuu

SEQ ID NO: 1001095 - RNA, 22 nt, Human
uuuagcagagcauaugauaucc

SEQ ID NO: 1001096 - RNA, 22 nt, Human
auuugucugcuugcugccuucc

SEQ ID NO: 1001097 - RNA, 22 nt, Human
acuguauaguauuuauucuuag

SEQ ID NO: 1001098 - RNA, 19 nt, Human
ucuauguggcagugauggc

SEQ ID NO: 1001099 - RNA, 22 nt, Human
uacaguuacuguuauaugugcu

SEQ ID NO: 1001100 - RNA, 22 nt, Human
aggcugugcgaggucucagagu

SEQ ID NO: 1001101 - RNA, 22 nt, Human
uguguguguccucauuugcaga

SEQ ID NO: 1001102 - RNA, 23 nt, Human
ucugcucugaaguucggcugagc

SEQ ID NO: 1001103 - RNA, 22 nt, Human
cuuugcagauuuguuuagugcu

SEQ ID NO: 1001104 - RNA, 22 nt, Human
gcuguguccaggugggggugac

SEQ ID NO: 1001105 - RNA, 22 nt, Human
uuuuaucuaccuaugcucauuu

SEQ ID NO: 1001106 - RNA, 22 nt, Human
uuugcagucuggccugcuuugg

SEQ ID NO: 1001107 - RNA, 22 nt, Human
uuuguuuucaaugugucauuca

SEQ ID NO: 1001108 - RNA, 23 nt, Human
uuucacagcuuuuauucugcauc

SEQ ID NO: 1001109 - RNA, 22 nt, Human
cacaguauuuguuuuucugagu

SEQ ID NO: 1001110 - RNA, 22 nt, Human
caguauaugcucuuucaucaaa

SEQ ID NO: 1001111 - RNA, 22 nt, Human
uguggcuggucuccgagcgucg

SEQ ID NO: 1001112 - RNA, 22 nt, Human
cuggcuguguccacagaguaag

SEQ ID NO: 1001113 - RNA, 19 nt, Human
cauauuuuugggcuggcau

SEQ ID NO: 1001114 - RNA, 22 nt, Human
uaguauauuaauucucacgguu

SEQ ID NO: 1001115 - RNA, 22 nt, Human
auauuuuggcaaaugucuagau

SEQ ID NO: 1001116 - RNA, 22 nt, Human
caugugugacaaacugccugca

SEQ ID NO: 1001117 - RNA, 22 nt, Human
uuacagauucaagcucuuugaa

SEQ ID NO: 1001118 - RNA, 22 nt, Human
aacaguauugguugaacucaag

SEQ ID NO: 1001119 - RNA, 22 nt, Human
uuuaacuccuaguguguauuag

SEQ ID NO: 1001120 - RNA, 22 nt, Human
uuacagauacauuucuuuuguu

SEQ ID NO: 1001121 - RNA, 22 nt, Human
uuuacagaaugucaauuucuau

SEQ ID NO: 1001122 - RNA, 20 nt, Human
agccccacccuuguccuggc

SEQ ID NO: 1001123 - RNA, 22 nt, Human
uuuuucucuucuguaaaguggu

SEQ ID NO: 1001124 - RNA, 22 nt, Human
aagcuggauguaggaucccccu

SEQ ID NO: 1001125 - RNA, 16 nt, Human
ccucucuuauuccucc

SEQ ID NO: 1001126 - RNA, 22 nt, Human
ggccuguggcaaggugagaaug

SEQ ID NO: 1001127 - RNA, 22 nt, Human
aaacuuuuuuagguucauaggc

SEQ ID NO: 1001128 - RNA, 22 nt, Human
gcugugugaccugggcaagucu

SEQ ID NO: 1001129 - RNA, 20 nt, Human
aacuuguuuuguuuucuaau

SEQ ID NO: 1001130 - RNA, 23 nt, Human
uuacagcuaacugcuguuauuag

SEQ ID NO: 1001131 - RNA, 22 nt, Human
uucucucuguuauggauuuuac

SEQ ID NO: 1001132 - RNA, 23 nt, Human
uuacaaguucugaaauuuccuuc

SEQ ID NO: 1001133 - RNA, 22 nt, Human
uguggccugggaaaugaguguu

SEQ ID NO: 1001134 - RNA, 22 nt, Human
uuguaugcugaucaaaagcuuc

SEQ ID NO: 1001135 - RNA, 22 nt, Human
aguuauuuggcuauagauggua

SEQ ID NO: 1001136 - RNA, 22 nt, Human
aagccacugagauuucacugca

SEQ ID NO: 1001137 - RNA, 22 nt, Human
auuuucucacaauccuaugggg

SEQ ID NO: 1001138 - RNA, 22 nt, Human
uuccugugaagaucugggugcu

SEQ ID NO: 1001139 - RNA, 22 nt, Human
uaacuuguguuacauuacucuu

SEQ ID NO: 1001140 - RNA, 22 nt, Human
ucugugucacugaggccugugu

SEQ ID NO: 1001141 - RNA, 23 nt, Human
uuuauauuccuaaugucuugagc

SEQ ID NO: 1001142 - RNA, 22 nt, Human
cucuguguauccaaguucaggu

SEQ ID NO: 1001143 - RNA, 22 nt, Human
cucucuauggaugcaguuuuuc

SEQ ID NO: 1001144 - RNA, 22 nt, Human
uguaugugcaauguuuauaugu

SEQ ID NO: 1001145 - RNA, 22 nt, Human
uacaaguauauucuagugauau

SEQ ID NO: 1001146 - RNA, 22 nt, Human
ucacaguaucagguggagugga

SEQ ID NO: 1001147 - RNA, 22 nt, Human
cuggaggggccauccacagucu

SEQ ID NO: 1001148 - RNA, 22 nt, Human
uaguuucugguucuugcucugg

SEQ ID NO: 1001149 - RNA, 22 nt, Human
ucugcguggcgugguucugugc

SEQ ID NO: 1001150 - RNA, 22 nt, Human
gucuggcuguuccugccuguga

SEQ ID NO: 1001151 - RNA, 21 nt, Human
uauuugcugccaucuuugagg

SEQ ID NO: 1001152 - RNA, 22 nt, Human
ugucuguguccaaauuuccucu

SEQ ID NO: 1001153 - RNA, 22 nt, Human
caucucuucauuagcauuauug

SEQ ID NO: 1001154 - RNA, 22 nt, Human
uaacauuugcugucuccuaugu

SEQ ID NO: 1001155 - RNA, 23 nt, Human
aucuguguguggguagggaugau

SEQ ID NO: 1001156 - RNA, 22 nt, Human
uggcagugaagcugucuuuagg

SEQ ID NO: 1001157 - RNA, 22 nt, Human
uccucugcucagcauuccucac

SEQ ID NO: 1001158 - RNA, 22 nt, Human
uauaauuuuucuguggccaguu

SEQ ID NO: 1001159 - RNA, 19 nt, Human
uauuuucguggaggccuau

SEQ ID NO: 1001160 - RNA, 22 nt, Human
cuuuguaucuaaauaucuugaa

SEQ ID NO: 1001161 - RNA, 22 nt, Human
uccaguaucaaaguccuagucc

SEQ ID NO: 1001162 - RNA, 22 nt, Human
uuuagaguugaguauucauugg

SEQ ID NO: 1001163 - RNA, 22 nt, Human
cugcucuagguuccugcauaug

SEQ ID NO: 1001164 - RNA, 22 nt, Human
gcucucuggcuaguccaucggg

SEQ ID NO: 1001165 - RNA, 22 nt, Human
acaguacugcuguucuuguccu

SEQ ID NO: 1001166 - RNA, 22 nt, Human
uguguauagaugcaugcauaua

SEQ ID NO: 1001167 - RNA, 18 nt, Human
auuucucuggggugauuc

SEQ ID NO: 1001168 - RNA, 22 nt, Human
uucuuuucuuggcaggaguaga

SEQ ID NO: 1001169 - RNA, 22 nt, Human
auuuucugagcacgugacagca

SEQ ID NO: 1001170 - RNA, 22 nt, Human
ugagugugcuaggugucucggu

SEQ ID NO: 1001171 - RNA, 22 nt, Human
uuuucaguugugcucucuaguu

SEQ ID NO: 1001172 - RNA, 22 nt, Human
uuuacacugccauucugaauac

SEQ ID NO: 1001173 - RNA, 22 nt, Human
uugucucugggacaugguauua

SEQ ID NO: 1001174 - RNA, 22 nt, Human
uguguaugcauacacacauaga

SEQ ID NO: 1001175 - RNA, 22 nt, Human
uugugugugagccuucaccaca

SEQ ID NO: 1001176 - RNA, 22 nt, Human
uuuaucagagauauguguggac

SEQ ID NO: 1001177 - RNA, 20 nt, Human
auguauauuacuggcuguga

SEQ ID NO: 1001178 - RNA, 22 nt, Human
uuuuguaugagaagugcuuuac

SEQ ID NO: 1001179 - RNA, 22 nt, Human
auguguaugauaccuuugcuga

SEQ ID NO: 1001180 - RNA, 22 nt, Human
ugugugggcaugcuuuuaauuu

SEQ ID NO: 1001181 - RNA, 22 nt, Human
gugugugugcaucucuuuuauu

SEQ ID NO: 1001182 - RNA, 20 nt, Human
gggcugugccuccucguggu

SEQ ID NO: 1001183 - RNA, 22 nt, Human
uagcugccagaccauucuuacu

SEQ ID NO: 1001184 - RNA, 22 nt, Human
auuacaguuaauuuaccuucuu

SEQ ID NO: 1001185 - RNA, 22 nt, Human
uuuccagugauugcugcucuca

SEQ ID NO: 1001186 - RNA, 22 nt, Human
aguagauucucauugaucuggu

SEQ ID NO: 1001187 - RNA, 22 nt, Human
cuuguacacucaguacuucuag

SEQ ID NO: 1001188 - RNA, 22 nt, Human
gguggcugcaauggcuaacuuc

SEQ ID NO: 1001189 - RNA, 22 nt, Human
uuucucuccuccaaaccaaaga

SEQ ID NO: 1001190 - RNA, 22 nt, Human
gcugcuguugauuuaguccaau

SEQ ID NO: 1001191 - RNA, 20 nt, Human
uggagguggucugcuguccu

SEQ ID NO: 1001192 - RNA, 22 nt, Human
auguguguaugugccuauaucu

SEQ ID NO: 1001193 - RNA, 22 nt, Human
cuguggcuaugguguacauacu

SEQ ID NO: 1001194 - RNA, 22 nt, Human
ggcagccagagggcagcuggau

SEQ ID NO: 1001195 - RNA, 22 nt, Human
aggcgguggccaaggagcggga

SEQ ID NO: 1001196 - RNA, 22 nt, Human
cauuuucucaaugaacccucuu

SEQ ID NO: 1001197 - RNA, 22 nt, Human
gcugcuguacuuggggggugcu

SEQ ID NO: 1001198 - RNA, 22 nt, Human
uacagguagagucucuaguuua

SEQ ID NO: 1001199 - RNA, 22 nt, Human
uuaggaggucuauggacauccu

SEQ ID NO: 1001200 - RNA, 22 nt, Human
cugugccugcaggccacaucaa

SEQ ID NO: 1001201 - RNA, 22 nt, Human
uguaugcuugaguguguauacu

SEQ ID NO: 1001202 - RNA, 22 nt, Human
uagacuuuccagccugcugcuu

SEQ ID NO: 1001203 - RNA, 22 nt, Human
caguaguaguuaaacuguguau

SEQ ID NO: 1001204 - RNA, 22 nt, Human
auauauuugagaauauucauga

SEQ ID NO: 1001205 - RNA, 22 nt, Human
ugcuugugacagaacugugucc

SEQ ID NO: 1001206 - RNA, 22 nt, Human
uuuucugugcccugcuagcugg

SEQ ID NO: 1001207 - RNA, 22 nt, Human
uguacaguggaaaauggauucg

SEQ ID NO: 1001208 - RNA, 22 nt, Human
uguggcugcuccugggugguca

SEQ ID NO: 1001209 - RNA, 22 nt, Human
gcugucugagaacaugguggaa

SEQ ID NO: 1001210 - RNA, 22 nt, Human
cuagugugucuaugucuguucc

SEQ ID NO: 1001211 - RNA, 22 nt, Human
agcuggccuucggugucacugg

SEQ ID NO: 1001212 - RNA, 22 nt, Human
cugucuuuuacuaucauuuacu

SEQ ID NO: 1001213 - RNA, 22 nt, Human
cuggcuguggauuaucacaggc

SEQ ID NO: 1001214 - RNA, 22 nt, Human
acucucugucuaaaugcaguuu

SEQ ID NO: 1001215 - RNA, 22 nt, Human
gggcugugcugaguaggaggug

SEQ ID NO: 1001216 - RNA, 22 nt, Human
uaacauuuaaauuuuucacaua

SEQ ID NO: 1001217 - RNA, 22 nt, Human
uccucacauggugagccacaca

SEQ ID NO: 1001218 - RNA, 18 nt, Human
uauauucugugcccuggu

SEQ ID NO: 1001219 - RNA, 22 nt, Human
uggcugugggauaugugacuga

SEQ ID NO: 1001220 - RNA, 22 nt, Human
uucaguaugcugaaugauuuuu

SEQ ID NO: 1001221 - RNA, 22 nt, Human
uucucuuugacauuauucaggu

SEQ ID NO: 1001222 - RNA, 22 nt, Human
aguggcuggaauugcaggugcg

SEQ ID NO: 1001223 - RNA, 22 nt, Human
uguauauuguucugucucuuca

SEQ ID NO: 1001224 - RNA, 22 nt, Human
aggcugugggacaguuaggaga

SEQ ID NO: 1001225 - RNA, 22 nt, Human
uuucuauuggcgucacuguugu

SEQ ID NO: 1001226 - RNA, 22 nt, Human
gcaggauugggcugaaggagug

SEQ ID NO: 1001227 - RNA, 22 nt, Human
gugugucagguacugugcuagg

SEQ ID NO: 1001228 - RNA, 22 nt, Human
ucauguguguuucauguaugga

SEQ ID NO: 1001229 - RNA, 22 nt, Human
uguguguaauguuucucucuuc

SEQ ID NO: 1001230 - RNA, 22 nt, Human
gugggugucucaagaauggggg

SEQ ID NO: 1001231 - RNA, 22 nt, Human
auuucucugcaguguucggaau

SEQ ID NO: 1001232 - RNA, 22 nt, Human
uuguggcucgugagauguuagg

SEQ ID NO: 1001233 - RNA, 22 nt, Human
ucugcuguucucaugcugauuu

SEQ ID NO: 1001234 - RNA, 22 nt, Human
ugugugauugcacuuauaugag

SEQ ID NO: 1001235 - RNA, 22 nt, Human
ggguggcugacuguuuugugga

SEQ ID NO: 1001236 - RNA, 22 nt, Human
auauuugugguuuuuggcuccu

SEQ ID NO: 1001237 - RNA, 22 nt, Human
guaguguguaggcacugugcuc

SEQ ID NO: 1001238 - RNA, 22 nt, Human
cuguggcugugaaacuucucag

SEQ ID NO: 1001239 - RNA, 22 nt, Human
caguaaauuuuauuugugggug

SEQ ID NO: 1001240 - RNA, 22 nt, Human
cagguauaacgugcauguugua

SEQ ID NO: 1001241 - RNA, 22 nt, Human
auguguauauuuauuguaguuu

SEQ ID NO: 1001242 - RNA, 22 nt, Human
cacugugucagaguaugaugau

SEQ ID NO: 1001243 - RNA, 22 nt, Human
auaacuuucuucacccuugcug

SEQ ID NO: 1001244 - RNA, 22 nt, Human
uuuuucucuaaguagucccaaa

SEQ ID NO: 1001245 - RNA, 22 nt, Human
gauuaagauuacauauuuaagu

SEQ ID NO: 1001246 - RNA, 22 nt, Human
acucuuuaacagacuuugaucu

SEQ ID NO: 1001247 - RNA, 22 nt, Human
caggauuaaggugaggggagua

SEQ ID NO: 1001248 - RNA, 22 nt, Human
gugauauuucaagaguggggca

SEQ ID NO: 1001249 - RNA, 22 nt, Human
auggcuguuggcaggaggccuc

SEQ ID NO: 1001250 - RNA, 22 nt, Human
agucuauuuuugguucuucggg

SEQ ID NO: 1001251 - RNA, 22 nt, Human
cuguggcuggccuuauugcugc

SEQ ID NO: 1001252 - RNA, 22 nt, Human
uauguguauguucauucaugca

SEQ ID NO: 1001253 - RNA, 22 nt, Human
cucugcaggcacccaggguggg

SEQ ID NO: 1001254 - RNA, 22 nt, Human
ugucuauguauacauguguaua

SEQ ID NO: 1001255 - RNA, 22 nt, Human
uuggcugucacugucaguucag

SEQ ID NO: 1001256 - RNA, 16 nt, Human
guucucucacuguacc

SEQ ID NO: 1001257 - RNA, 22 nt, Human
gcugugcuauaucucugagugu

SEQ ID NO: 1001258 - RNA, 22 nt, Human
ugcuguguucaccaauaugugu

SEQ ID NO: 1001259 - RNA, 22 nt, Human
uuuacuguuuuauauuguccag

SEQ ID NO: 1001260 - RNA, 22 nt, Human
cuguggcugaguuccuuauguu

SEQ ID NO: 1001261 - RNA, 22 nt, Human
gcugugugcucacguaguggaa

SEQ ID NO: 1001262 - RNA, 18 nt, Human
auguguggcuuggggucc

SEQ ID NO: 1001263 - RNA, 23 nt, Human
gccauggcugccccacaggccuc

SEQ ID NO: 1001264 - RNA, 21 nt, Human
agcugcccagaguagggaagg

SEQ ID NO: 1001265 - RNA, 22 nt, Human
acuuuuaaaugaguuucaguug

SEQ ID NO: 1001266 - RNA, 22 nt, Human
ccuuuacaguagcccuuuugaa

SEQ ID NO: 1001267 - RNA, 22 nt, Human
acuuuauuuccuauugcaucca

SEQ ID NO: 1001268 - RNA, 22 nt, Human
uauguucuuuacaucugugcaa

SEQ ID NO: 1001269 - RNA, 22 nt, Human
aggcuguguggaugagucuuac

SEQ ID NO: 1001270 - RNA, 22 nt, Human
uuacaguuagguguguaguggu

SEQ ID NO: 1001271 - RNA, 22 nt, Human
uuuccucugucaugacagcuga

SEQ ID NO: 1001272 - RNA, 22 nt, Human
cuuuacuguucuucugugggaa

SEQ ID NO: 1001273 - RNA, 22 nt, Human
uuacagcuagccaauuauuuag

SEQ ID NO: 1001274 - RNA, 22 nt, Human
cuaacuuuuacagucauguugc

SEQ ID NO: 1001275 - RNA, 22 nt, Human
cugugucuaaucaggucaguca

SEQ ID NO: 1001276 - RNA, 22 nt, Human
uuucucauggaacaucguuuag

SEQ ID NO: 1001277 - RNA, 22 nt, Human
auguguauuaguuaguuuaaug

SEQ ID NO: 1001278 - RNA, 22 nt, Human
uguguguggggaggcagcagau

SEQ ID NO: 1001279 - RNA, 22 nt, Human
agguauaugcuauuacuucugc

SEQ ID NO: 1001280 - RNA, 22 nt, Human
uucugucuucucgguuguuuac

SEQ ID NO: 1001281 - RNA, 22 nt, Human
uuuuacaggugaaaaaugaaga

SEQ ID NO: 1001282 - RNA, 19 nt, Human
gagcugccuuuugaagacc

SEQ ID NO: 1001283 - RNA, 22 nt, Human
uucuuuaccagugaaauguuau

SEQ ID NO: 1001284 - RNA, 23 nt, Human
ccucucuuuuuaggugguguuug

SEQ ID NO: 1001285 - RNA, 22 nt, Human
acauuauagcuuugaguuugga

SEQ ID NO: 1001286 - RNA, 20 nt, Human
cguguguggcuauuuugggu

SEQ ID NO: 1001287 - RNA, 22 nt, Human
uuucucccuccacuacaggcuc

SEQ ID NO: 1001288 - RNA, 22 nt, Human
uuucuucuugauuuaaacaggg

SEQ ID NO: 1001289 - RNA, 22 nt, Human
ugcuguguuccucaguuucaug

SEQ ID NO: 1001290 - RNA, 18 nt, Human
uacaguauuuucucgccu

SEQ ID NO: 1001291 - RNA, 19 nt, Human
uauguguguguauuuacau

SEQ ID NO: 1001292 - RNA, 22 nt, Human
ucuguguauuugugaccuguau

SEQ ID NO: 1001293 - RNA, 22 nt, Human
uguauauucacugagcaagggg

SEQ ID NO: 1001294 - RNA, 22 nt, Human
auguguauuuuguacuauuggg

SEQ ID NO: 1001295 - RNA, 22 nt, Human
uucuucuuuccaauuacauggu

SEQ ID NO: 1001296 - RNA, 22 nt, Human
gcugauguauauagugauugag

SEQ ID NO: 1001297 - RNA, 22 nt, Human
ugugugucugcacauguauaau

SEQ ID NO: 1001298 - RNA, 22 nt, Human
gccuggccgcuccgagcuccgc

SEQ ID NO: 1001299 - RNA, 22 nt, Human
uacagauagaauuagugaguua

SEQ ID NO: 1001300 - RNA, 22 nt, Human
guuaacuuccccaugucugcau

SEQ ID NO: 1001301 - RNA, 22 nt, Human
ucucucauagagaaaaauauau

SEQ ID NO: 1001302 - RNA, 22 nt, Human
ucucuuuaaaaauagugaaaua

SEQ ID NO: 1001303 - RNA, 22 nt, Human
uugugugguagcuucauugaac

SEQ ID NO: 1001304 - RNA, 22 nt, Human
uuucucauggcccuuggcuuuu

SEQ ID NO: 1001305 - RNA, 22 nt, Human
uucucugugagggugcuggauu

SEQ ID NO: 1001306 - RNA, 22 nt, Human
uguauacaugucugugugcaca

SEQ ID NO: 1001307 - RNA, 18 nt, Human
ccugucugggguccccac

SEQ ID NO: 1001308 - RNA, 22 nt, Human
guuauuuucauuggcucagacu

SEQ ID NO: 1001309 - RNA, 22 nt, Human
gcucugugccacaugcaguguu

SEQ ID NO: 1001310 - RNA, 22 nt, Human
gugacugugagucgcugugaca

SEQ ID NO: 1001311 - RNA, 22 nt, Human
guguugcucuguuuggggguug

SEQ ID NO: 1001312 - RNA, 22 nt, Human
gucuggggguccgggugccugc

SEQ ID NO: 1001313 - RNA, 22 nt, Human
uguguuugaguccucacagugc

SEQ ID NO: 1001314 - RNA, 22 nt, Human
uuaaaguaaucugugugaauuu

SEQ ID NO: 1001315 - RNA, 22 nt, Human
uuacaguacagaaaauaacaga

SEQ ID NO: 1001316 - RNA, 22 nt, Human
guguaucaguaacuguggacag

SEQ ID NO: 1001317 - RNA, 23 nt, Human
auuuacagguuaaaugaaaucag

SEQ ID NO: 1001318 - RNA, 22 nt, Human
auuuucaugacuaccuuaaaua

SEQ ID NO: 1001319 - RNA, 22 nt, Human
acaguuuaugguguuuuauaua

SEQ ID NO: 1001320 - RNA, 22 nt, Human
auguggcuuucugcguuuucuc

SEQ ID NO: 1001321 - RNA, 22 nt, Human
ugugucuaggcucaugcuugcu

SEQ ID NO: 1001322 - RNA, 22 nt, Human
ucaguguguaauucuuuguuuc

SEQ ID NO: 1001323 - RNA, 22 nt, Human
uguacaguacauguguagugau

SEQ ID NO: 1001324 - RNA, 22 nt, Human
uuacaguauuguuaaacucuuu

SEQ ID NO: 1001325 - RNA, 22 nt, Human
uuugaacugauaaucuucuguu

SEQ ID NO: 1001326 - RNA, 22 nt, Human
uucucucuguggucccauuuug

SEQ ID NO: 1001327 - RNA, 17 nt, Human
aguguggcccugguuaa

SEQ ID NO: 1001328 - RNA, 22 nt, Human
ucacaguauagaguuauuuugg

SEQ ID NO: 1001329 - RNA, 22 nt, Human
agcugugugguuugggcaaauu

SEQ ID NO: 1001330 - RNA, 22 nt, Human
cuuuccagcauuuccuugugaa

SEQ ID NO: 1001331 - RNA, 22 nt, Human
cucugugugguccucuguauug

SEQ ID NO: 1001332 - RNA, 22 nt, Human
guguggcugauugacaugguca

SEQ ID NO: 1001333 - RNA, 22 nt, Human
uuuauuauucuguucucucuac

SEQ ID NO: 1001334 - RNA, 22 nt, Human
acuuuucuaagcaauggucuug

SEQ ID NO: 1001335 - RNA, 22 nt, Human
ucuugacauucaaucauguaua

SEQ ID NO: 1001336 - RNA, 22 nt, Human
aggcugugaacucuaugcugaa

SEQ ID NO: 1001337 - RNA, 22 nt, Human
auuuacucgugcuucauugaau

SEQ ID NO: 1001338 - RNA, 22 nt, Human
agcuauauagaugguguguuug

SEQ ID NO: 1001339 - RNA, 22 nt, Human
uuucucuggcauuagguauaaa

SEQ ID NO: 1001340 - RNA, 22 nt, Human
auuuucugugugcagauaaaua

SEQ ID NO: 1001341 - RNA, 22 nt, Human
ucucugugucuuagugaaggga

SEQ ID NO: 1001342 - RNA, 22 nt, Human
uuguggcucaucuucagcuccc

SEQ ID NO: 1001343 - RNA, 22 nt, Human
uuguggcucuugaggcucucgu

SEQ ID NO: 1001344 - RNA, 22 nt, Human
uguggcuguugaggaccccaag

SEQ ID NO: 1001345 - RNA, 22 nt, Human
uuuuuauaccaccucucacuua

SEQ ID NO: 1001346 - RNA, 22 nt, Human
auguggcugccaccugccugaa

SEQ ID NO: 1001347 - RNA, 22 nt, Human
uuacaaguucagauuuucucau

SEQ ID NO: 1001348 - RNA, 22 nt, Human
cuuuucucugcgggucuuucau

SEQ ID NO: 1001349 - RNA, 22 nt, Human
cugugagucuucagcaaguguu

SEQ ID NO: 1001350 - RNA, 22 nt, Human
gcaggauugggcagagggugaa

SEQ ID NO: 1001351 - RNA, 21 nt, Human
ggaagcuguguccaugcuccu

SEQ ID NO: 1001352 - RNA, 22 nt, Human
aacuuuuacaaauugucaucau

SEQ ID NO: 1001353 - RNA, 22 nt, Human
gcugugugcucuggucuuucuu

SEQ ID NO: 1001354 - RNA, 22 nt, Human
guucucucucuugccugggugg

SEQ ID NO: 1001355 - RNA, 22 nt, Human
uuagcuuucagccuuucucacc

SEQ ID NO: 1001356 - RNA, 23 nt, Human
cugcuguguuggucucgauggga

SEQ ID NO: 1001357 - RNA, 22 nt, Human
auuugucuagugguauucacgu

SEQ ID NO: 1001358 - RNA, 22 nt, Human
cugugucuucacauuugugugc

SEQ ID NO: 1001359 - RNA, 22 nt, Human
uacauguauguguuaauaucug

SEQ ID NO: 1001360 - RNA, 22 nt, Human
aguggcuguccuggcucuaacu

SEQ ID NO: 1001361 - RNA, 22 nt, Human
auguggcuggugacugccguac

SEQ ID NO: 1001362 - RNA, 22 nt, Human
uuuucucagcugcacuguauua

SEQ ID NO: 1001363 - RNA, 22 nt, Human
acucucuugggggagagcagag

SEQ ID NO: 1001364 - RNA, 22 nt, Human
cuuuacacaaugauuuucuuua

SEQ ID NO: 1001365 - RNA, 22 nt, Human
uuacuuuccagcucuagcuuca

SEQ ID NO: 1001366 - RNA, 22 nt, Human
acuuuguuuccauauuuguagc

SEQ ID NO: 1001367 - RNA, 22 nt, Human
uaacuuuugugaucugucgauu

SEQ ID NO: 1001368 - RNA, 22 nt, Human
guguguuuagcauuagcagggg

SEQ ID NO: 1001369 - RNA, 22 nt, Human
uucucuguggauugggugagag

SEQ ID NO: 1001370 - RNA, 22 nt, Human
cuggagggaguuaggacccgga

SEQ ID NO: 1001371 - RNA, 18 nt, Human
ugugccucugcaggacgu

SEQ ID NO: 1001372 - RNA, 22 nt, Human
agugugugccuuuggauaccug

SEQ ID NO: 1001373 - RNA, 22 nt, Human
ugucucuccacacagccagugc

SEQ ID NO: 1001374 - RNA, 22 nt, Human
aguggcugcuucugguugcucc

SEQ ID NO: 1001375 - RNA, 22 nt, Human
ucucugugacauuucugagccu

SEQ ID NO: 1001376 - RNA, 22 nt, Human
cguggcugguggaccugagggc

SEQ ID NO: 1001377 - RNA, 22 nt, Human
cuccucuuuggggauuuacaca

SEQ ID NO: 1001378 - RNA, 22 nt, Human
aggcuguguuucuugcguuuuc

SEQ ID NO: 1001379 - RNA, 18 nt, Human
uguguaugucucagggaa

SEQ ID NO: 1001380 - RNA, 22 nt, Human
guuuaugcacuugguuuguguc

SEQ ID NO: 1001381 - RNA, 18 nt, Human
gacagcuguccugagccc

SEQ ID NO: 1001382 - RNA, 22 nt, Human
auguuucugaaguuuacagaua

SEQ ID NO: 1001383 - RNA, 22 nt, Human
uuuucuuuaaucugguggggug

SEQ ID NO: 1001384 - RNA, 22 nt, Human
acuguuuaaaggcuuccuuucu

SEQ ID NO: 1001385 - RNA, 22 nt, Human
uucuaguguccuuggacuugcu

SEQ ID NO: 1001386 - RNA, 22 nt, Human
cucuggggaagcagccagcugg

SEQ ID NO: 1001387 - RNA, 22 nt, Human
uguuaggacuccccagaagcug

SEQ ID NO: 1001388 - RNA, 22 nt, Human
agugugugaccuuuuaauuuaa

SEQ ID NO: 1001389 - RNA, 22 nt, Human
auguguauguguauacacacag

SEQ ID NO: 1001390 - RNA, 22 nt, Human
uuucuauuguaagucuccuaua

SEQ ID NO: 1001391 - RNA, 22 nt, Human
ucuuuauuuuaugcuugugcaa

SEQ ID NO: 1001392 - RNA, 22 nt, Human
cugugugcugaaaugcagugag

SEQ ID NO: 1001393 - RNA, 19 nt, Human
uuugucucugaauaauauu

SEQ ID NO: 1001394 - RNA, 22 nt, Human
cuguguggccucaagccagccu

SEQ ID NO: 1001395 - RNA, 22 nt, Human
uguauuuuuagaccuuuagacc

SEQ ID NO: 1001396 - RNA, 22 nt, Human
cugugauguuagcucuguguua

SEQ ID NO: 1001397 - RNA, 22 nt, Human
ugugccuggaucucugugacaa

SEQ ID NO: 1001398 - RNA, 22 nt, Human
caguuuuagggcaaugugaaga

SEQ ID NO: 1001399 - RNA, 22 nt, Human
acagcuaucugacuuugacuca

SEQ ID NO: 1001400 - RNA, 22 nt, Human
acucuuuuaugcauuccuucag

SEQ ID NO: 1001401 - RNA, 22 nt, Human
aacaguauaugaaauguuagga

SEQ ID NO: 1001402 - RNA, 22 nt, Human
ucguaugcucucuguguccugu

SEQ ID NO: 1001403 - RNA, 22 nt, Human
ucauauuucaaaauggcuggag

SEQ ID NO: 1001404 - RNA, 22 nt, Human
uguuuucugauucucguguggu

SEQ ID NO: 1001405 - RNA, 22 nt, Human
uuucuugucuuuaguaucuggc

SEQ ID NO: 1001406 - RNA, 17 nt, Human
gaacuuuuauuaaauuc

SEQ ID NO: 1001407 - RNA, 22 nt, Human
uuuacagugucuuguugacugu

SEQ ID NO: 1001408 - RNA, 20 nt, Human
uuucacagucccuguuuccu

SEQ ID NO: 1001409 - RNA, 23 nt, Human
uuucaacuccugccauuauuucu

SEQ ID NO: 1001410 - RNA, 23 nt, Human
uacuguauauuacuguguuauac

SEQ ID NO: 1001411 - RNA, 22 nt, Human
guggcuguucuugccccaugcu

SEQ ID NO: 1001412 - RNA, 22 nt, Human
gggcugugggacccggcacuuu

SEQ ID NO: 1001413 - RNA, 22 nt, Human
cuuucucuuacccaaggaucug

SEQ ID NO: 1001414 - RNA, 22 nt, Human
uauacaguuugaguucuugcau

SEQ ID NO: 1001415 - RNA, 22 nt, Human
gugugcugagugacugucauca

SEQ ID NO: 1001416 - RNA, 21 nt, Human
aggauauuaggugauuugggu

SEQ ID NO: 1001417 - RNA, 22 nt, Human
aguguguagcacaugguaagca

SEQ ID NO: 1001418 - RNA, 22 nt, Human
aguuuucugccucuggaugcgu

SEQ ID NO: 1001419 - RNA, 22 nt, Human
gugcugccggcauagcagugaa

SEQ ID NO: 1001420 - RNA, 22 nt, Human
cuuuucucuuacauuccacugg

SEQ ID NO: 1001421 - RNA, 22 nt, Human
uucugucucccugauguagagc

SEQ ID NO: 1001422 - RNA, 22 nt, Human
augugugugugcgcgcgcagga

SEQ ID NO: 1001423 - RNA, 17 nt, Human
augugucugaguguccu

SEQ ID NO: 1001424 - RNA, 22 nt, Human
uuaaucuucagggacucuugcu

SEQ ID NO: 1001425 - RNA, 22 nt, Human
cuguggcucucagaggcugcug

SEQ ID NO: 1001426 - RNA, 22 nt, Human
ucugggugcccuuugcucuguu

SEQ ID NO: 1001427 - RNA, 22 nt, Human
cugagagaaacaugacucagga

SEQ ID NO: 1001428 - RNA, 22 nt, Human
ucucuugugguuuuguaguuga

SEQ ID NO: 1001429 - RNA, 22 nt, Human
uuuuuaucuacagauucucagc

SEQ ID NO: 1001430 - RNA, 22 nt, Human
ucagugugauuaggcuaucuga

SEQ ID NO: 1001431 - RNA, 22 nt, Human
uaacuguugugcgggucucugg

SEQ ID NO: 1001432 - RNA, 22 nt, Human
aacuguuuggaacucuuccaca

SEQ ID NO: 1001433 - RNA, 22 nt, Human
uacuguaugauuucauguauau

SEQ ID NO: 1001434 - RNA, 22 nt, Human
gcagcugcuggaaguuccugcc

SEQ ID NO: 1001435 - RNA, 22 nt, Human
uucacaguauagguuuccagcg

SEQ ID NO: 1001436 - RNA, 17 nt, Human
gguguauggggagggaa

SEQ ID NO: 1001437 - RNA, 22 nt, Human
ggcuguauauacuguauacagu

SEQ ID NO: 1001438 - RNA, 22 nt, Human
aggcuguguuuaagugguaaug

SEQ ID NO: 1001439 - RNA, 22 nt, Human
cuuuccaggcugaguuugcuug

SEQ ID NO: 1001440 - RNA, 22 nt, Human
uggucuguucaagguggcugau

SEQ ID NO: 1001441 - RNA, 20 nt, Human
uggauucuggagcugcccuc

SEQ ID NO: 1001442 - RNA, 22 nt, Human
cucugugucugaagcccuauuu

SEQ ID NO: 1001443 - RNA, 19 nt, Human
ccuggcccugcugcgcggg

SEQ ID NO: 1001444 - RNA, 21 nt, Human
uuguaugcauacauacacaca

SEQ ID NO: 1001445 - RNA, 22 nt, Human
gaguauauauagacaugucaca

SEQ ID NO: 1001446 - RNA, 22 nt, Human
gcucuaacuauuaagaggucau

SEQ ID NO: 1001447 - RNA, 22 nt, Human
cuucugugguaaacuuuguugu

SEQ ID NO: 1001448 - RNA, 22 nt, Human
aggcugugaguaguucuuguug

SEQ ID NO: 1001449 - RNA, 22 nt, Human
ugugugugcacaugcauauaca

SEQ ID NO: 1001450 - RNA, 22 nt, Human
aguggcugauguaggcaguggg

SEQ ID NO: 1001451 - RNA, 22 nt, Human
acuuuugaacaaacuccucugu

SEQ ID NO: 1001452 - RNA, 22 nt, Human
aucuguguccuuauaagagaca

SEQ ID NO: 1001453 - RNA, 22 nt, Human
guuuuauuuccaugagagaccg

SEQ ID NO: 1001454 - RNA, 22 nt, Human
cuuuuuauaccgugccaguuga

SEQ ID NO: 1001455 - RNA, 22 nt, Human
ggcuggguacagggcagugugc

SEQ ID NO: 1001456 - RNA, 22 nt, Human
ucuauuacuuaccacuaauuca

SEQ ID NO: 1001457 - RNA, 21 nt, Human
aguguguguggaaugagaaua

SEQ ID NO: 1001458 - RNA, 22 nt, Human
acuuucuuauccaugaucucac

SEQ ID NO: 1001459 - RNA, 22 nt, Human
uuucuaucugagaagauaucua

SEQ ID NO: 1001460 - RNA, 22 nt, Human
uuucucugccaguuauuuuccu

SEQ ID NO: 1001461 - RNA, 22 nt, Human
uuccuguguguugguggcagaa

SEQ ID NO: 1001462 - RNA, 22 nt, Human
guguguggcauguccuauuuug

SEQ ID NO: 1001463 - RNA, 22 nt, Human
ggcuguaguuaccugaugaaau

SEQ ID NO: 1001464 - RNA, 22 nt, Human
gcugucuggcauggcguggcug

SEQ ID NO: 1001465 - RNA, 22 nt, Human
acugugugacuguuauuacugu

SEQ ID NO: 1001466 - RNA, 22 nt, Human
cuggccugugggcugucuccgg

SEQ ID NO: 1001467 - RNA, 20 nt, Human
aacuuguucuaccuguuuca

SEQ ID NO: 1001468 - RNA, 21 nt, Human
auguggcucccuuccucagga

SEQ ID NO: 1001469 - RNA, 22 nt, Human
cuuuacagccccacuuccgggc

SEQ ID NO: 1001470 - RNA, 22 nt, Human
uucugcucuuggcuuugcuggu

SEQ ID NO: 1001471 - RNA, 22 nt, Human
guguguauguagaacuauguau

SEQ ID NO: 1001472 - RNA, 22 nt, Human
ucugugugugccuguuaauauu

SEQ ID NO: 1001473 - RNA, 22 nt, Human
cuucuguggauguuggaugcau

SEQ ID NO: 1001474 - RNA, 23 nt, Human
aguacauucgaaaaauucuguga

SEQ ID NO: 1001475 - RNA, 22 nt, Human
uauuugucuaagaggcugacag

SEQ ID NO: 1001476 - RNA, 22 nt, Human
gcugcccucucuggccccacac

SEQ ID NO: 1001477 - RNA, 22 nt, Human
aggcugugacuacgcagggaag

SEQ ID NO: 1001478 - RNA, 22 nt, Human
auuuacaguuuagcauuucaag

SEQ ID NO: 1001479 - RNA, 22 nt, Human
guguguguacucuguauauaaa

SEQ ID NO: 1001480 - RNA, 22 nt, Human
ccuuuacacauggaaugggucu

SEQ ID NO: 1001481 - RNA, 22 nt, Human
aggcugugggaauggcugcuug

SEQ ID NO: 1001482 - RNA, 22 nt, Human
agcugcccaauccugcagggcg

SEQ ID NO: 1001483 - RNA, 22 nt, Human
uuuacauugcauuagguauuau

SEQ ID NO: 1001484 - RNA, 22 nt, Human
uaucuucuugccaggcuggugu

SEQ ID NO: 1001485 - RNA, 22 nt, Human
uauguucuagacuuuugcugug

SEQ ID NO: 1001486 - RNA, 22 nt, Human
uucucuucccacuuucuguauu

SEQ ID NO: 1001487 - RNA, 22 nt, Human
uacaguauagaauguguauuaa

SEQ ID NO: 1001488 - RNA, 23 nt, Human
uuacaguaggaguuggaaaacca

SEQ ID NO: 1001489 - RNA, 22 nt, Human
cagcuauauuguuuucuacugu

SEQ ID NO: 1001490 - RNA, 23 nt, Human
acuccccagucucuucuugccaa

SEQ ID NO: 1001491 - RNA, 22 nt, Human
gucacaggccuggaugaggggc

SEQ ID NO: 1001492 - RNA, 22 nt, Human
cucucuccuuagcugcagacca

SEQ ID NO: 1001493 - RNA, 22 nt, Human
uggcaucuccgacagucuugau

SEQ ID NO: 1001494 - RNA, 23 nt, Human
aguguugguugggaagccaagca

SEQ ID NO: 1001495 - RNA, 22 nt, Human
ccuggcagacugugagggcagg

SEQ ID NO: 1001496 - RNA, 22 nt, Human
uccacccugcuuuugucuuuga

SEQ ID NO: 1001497 - RNA, 22 nt, Human
uuccuggccccaccccuggaga

SEQ ID NO: 1001498 - RNA, 22 nt, Human
gagaaagauguaggcugggagg

SEQ ID NO: 1001499 - RNA, 22 nt, Human
ggagccugaaaagucugcauuu

SEQ ID NO: 1001500 - RNA, 22 nt, Human
cggcuggugucgggcacagcaa

SEQ ID NO: 1001501 - RNA, 23 nt, Human
uuggagagggugaguagugucag

SEQ ID NO: 1001502 - RNA, 22 nt, Human
cugccugccuuggccuccagga

SEQ ID NO: 1001503 - RNA, 22 nt, Human
ucuggcagcuauccucuggcca

SEQ ID NO: 1001504 - RNA, 22 nt, Human
ccuggcagcgccgaagcuggcc

SEQ ID NO: 1001505 - RNA, 22 nt, Human
cuggcaguuugccaggagcucg

SEQ ID NO: 1001506 - RNA, 22 nt, Human
gaggagcucugcuccauccuuc

SEQ ID NO: 1001507 - RNA, 22 nt, Human
uguggggaagaguaugacuugg

SEQ ID NO: 1001508 - RNA, 20 nt, Human
gcuccaggucagagaggacg

SEQ ID NO: 1001509 - RNA, 21 nt, Human
ccuagccucuuacccagcuuu

SEQ ID NO: 1001510 - RNA, 22 nt, Human
ucuggcaggaccaugaagcgua

SEQ ID NO: 1001511 - RNA, 22 nt, Human
gccuccuguuaugccaugugcc

SEQ ID NO: 1001512 - RNA, 22 nt, Human
cuccugaggaaaagcuugguca

SEQ ID NO: 1001513 - RNA, 22 nt, Human
cuggcaguuggcauuggcaucu

SEQ ID NO: 1001514 - RNA, 22 nt, Human
ccuggcagcuccguggccuucc

SEQ ID NO: 1001515 - RNA, 22 nt, Human
cuggcaguauuaagagaaguga

SEQ ID NO: 1001516 - RNA, 22 nt, Human
cccugagcucaggcccuugggg

SEQ ID NO: 1001517 - RNA, 22 nt, Human
cccagccugugacagccguccu

SEQ ID NO: 1001518 - RNA, 22 nt, Human
gcagggacagggcagggccuuu

SEQ ID NO: 1001519 - RNA, 22 nt, Human
ucccaccccggucaagggcuga

SEQ ID NO: 1001520 - RNA, 21 nt, Human
ucuggcaggaagacggauggg

SEQ ID NO: 1001521 - RNA, 22 nt, Human
gcuggcaggagaaacggggugc

SEQ ID NO: 1001522 - RNA, 22 nt, Human
accugccucagugcagcuggau

SEQ ID NO: 1001523 - RNA, 22 nt, Human
ggugccaggcuguagucagggu

SEQ ID NO: 1001524 - RNA, 22 nt, Human
gcuccaggaggaugaccuuccu

SEQ ID NO: 1001525 - RNA, 22 nt, Human
agcacaggaacauggagauggg

SEQ ID NO: 1001526 - RNA, 22 nt, Human
cuccuggcuuucccagaccagg

SEQ ID NO: 1001527 - RNA, 22 nt, Human
gccuggcacaggaauuaggagg

SEQ ID NO: 1001528 - RNA, 22 nt, Human
guggcagugaaggucauagcau

SEQ ID NO: 1001529 - RNA, 17 nt, Human
uugggagagaaagguau

SEQ ID NO: 1001530 - RNA, 22 nt, Human
gagccugaugaaacaggcagac

SEQ ID NO: 1001531 - RNA, 22 nt, Human
ccugaccuauuuuucucagcug

SEQ ID NO: 1001532 - RNA, 22 nt, Human
gacaaaaguguuuugaacaagg

SEQ ID NO: 1001533 - RNA, 22 nt, Human
guccuggcccacuggcaggcug

SEQ ID NO: 1001534 - RNA, 22 nt, Human
ccuggcagcuaagugcuuugag

SEQ ID NO: 1001535 - RNA, 22 nt, Human
ggccucucagggcagagacccu

SEQ ID NO: 1001536 - RNA, 22 nt, Human
ccuggcaguggugaagaagagg

SEQ ID NO: 1001537 - RNA, 19 nt, Human
uggcagguagugagcaguc

SEQ ID NO: 1001538 - RNA, 20 nt, Human
agggcugagaagggacuagc

SEQ ID NO: 1001539 - RNA, 22 nt, Human
uccaggcuuuuucaugcugucu

SEQ ID NO: 1001540 - RNA, 20 nt, Human
aaaagagugcuucaacugcu

SEQ ID NO: 1001541 - RNA, 22 nt, Human
cugccucuauaggaguccacca

SEQ ID NO: 1001542 - RNA, 22 nt, Human
caggaguggugugagggacucc

SEQ ID NO: 1001543 - RNA, 22 nt, Human
uccaggccauugacugcauccu

SEQ ID NO: 1001544 - RNA, 22 nt, Human
cccagccuacucugccauagca

SEQ ID NO: 1001545 - RNA, 22 nt, Human
ccuggcagacagcacugaagcu

SEQ ID NO: 1001546 - RNA, 22 nt, Human
cugccugcaggacaccucgcua

SEQ ID NO: 1001547 - RNA, 22 nt, Human
gccuggcauauaguaguugugc

SEQ ID NO: 1001548 - RNA, 22 nt, Human
aggaggcugggcacaguggccu

SEQ ID NO: 1001549 - RNA, 23 nt, Human
uugggaaauaguuaagacaugag

SEQ ID NO: 1001550 - RNA, 22 nt, Human
gaaagacuuccuuugagaguac

SEQ ID NO: 1001551 - RNA, 22 nt, Human
guggcagugggaugcuaucagg

SEQ ID NO: 1001552 - RNA, 22 nt, Human
ucccagccuuccagucugguuu

SEQ ID NO: 1001553 - RNA, 21 nt, Human
ucuggcagcaguuuguugagu

SEQ ID NO: 1001554 - RNA, 22 nt, Human
uggccucugugggagcugagca

SEQ ID NO: 1001555 - RNA, 19 nt, Human
acuggcagggcugcggugg

SEQ ID NO: 1001556 - RNA, 22 nt, Human
uccuggcaaagauguugguguu

SEQ ID NO: 1001557 - RNA, 22 nt, Human
gucaggacucugacccgucccg

SEQ ID NO: 1001558 - RNA, 22 nt, Human
ucuggcagggucagggcccagg

SEQ ID NO: 1001559 - RNA, 22 nt, Human
uccugagcuacaguaguaugau

SEQ ID NO: 1001560 - RNA, 22 nt, Human
ugccagccagggaagcucaccc

SEQ ID NO: 1001561 - RNA, 22 nt, Human
ggagagaauuccauggacaugu

SEQ ID NO: 1001562 - RNA, 22 nt, Human
uggcagggugccaguugcgagu

SEQ ID NO: 1001563 - RNA, 20 nt, Human
acuggcagccugccugcugu

SEQ ID NO: 1001564 - RNA, 22 nt, Human
ucuggcagagugauaggauaag

SEQ ID NO: 1001565 - RNA, 22 nt, Human
gccuggcaggccuguuggggcu

SEQ ID NO: 1001566 - RNA, 22 nt, Human
ggcacagggggcugaggacuag

SEQ ID NO: 1001567 - RNA, 22 nt, Human
aggaaagauggaaggaggauaa

SEQ ID NO: 1001568 - RNA, 22 nt, Human
cagguugguauucaucuccaca

SEQ ID NO: 1001569 - RNA, 22 nt, Human
aacaaaagccgaaguagguguc

SEQ ID NO: 1001570 - RNA, 22 nt, Human
acuggcagaggauagcacuaau

SEQ ID NO: 1001571 - RNA, 21 nt, Human
ucacguggucacaugagcuuu

SEQ ID NO: 1001572 - RNA, 23 nt, Human
ugagggacaugguggcuucugag

SEQ ID NO: 1001573 - RNA, 22 nt, Human
gguguugggcucacugguccuu

SEQ ID NO: 1001574 - RNA, 22 nt, Human
ccuggcagaauauuaaagugca

SEQ ID NO: 1001575 - RNA, 22 nt, Human
gccuccggagucacagugucuu

SEQ ID NO: 1001576 - RNA, 22 nt, Human
cccagccuuccacccuggacua

SEQ ID NO: 1001577 - RNA, 21 nt, Human
gggagggauggaaaugauguu

SEQ ID NO: 1001578 - RNA, 22 nt, Human
ccuggcagguagcauugaggag

SEQ ID NO: 1001579 - RNA, 22 nt, Human
uggccuccccuaacagccucuu

SEQ ID NO: 1001580 - RNA, 22 nt, Human
aaagaucacgucccaggacucg

SEQ ID NO: 1001581 - RNA, 22 nt, Human
guccacagagggcugggcaggc

SEQ ID NO: 1001582 - RNA, 22 nt, Human
ccuggcagccucagccaauucu

SEQ ID NO: 1001583 - RNA, 22 nt, Human
cuggccucuguguucaccauag

SEQ ID NO: 1001584 - RNA, 22 nt, Human
gcuggcagguaaagccccgggg

SEQ ID NO: 1001585 - RNA, 22 nt, Human
gaugccuggcacccagcaagga

SEQ ID NO: 1001586 - RNA, 22 nt, Human
gacucugggcugagccagggcc

SEQ ID NO: 1001587 - RNA, 18 nt, Human
cuccuggcugauggugag

SEQ ID NO: 1001588 - RNA, 22 nt, Human
cccugagcgugaggaggaagua

SEQ ID NO: 1001589 - RNA, 22 nt, Human
ucuggcagggguucugcacuug

SEQ ID NO: 1001590 - RNA, 22 nt, Human
ucccuccccacuucugagcuuu

SEQ ID NO: 1001591 - RNA, 22 nt, Human
agguagggaagaaggcaugaaa

SEQ ID NO: 1001592 - RNA, 22 nt, Human
caggucccugcgccccggccuc

SEQ ID NO: 1001593 - RNA, 22 nt, Human
aggaggcugaacuagggucugg

SEQ ID NO: 1001594 - RNA, 22 nt, Human
aagucguggcaggcuugcacga

SEQ ID NO: 1001595 - RNA, 22 nt, Human
ucuggcaguuugagaaaggcua

SEQ ID NO: 1001596 - RNA, 22 nt, Human
uuccaggcucccuuggaggugu

SEQ ID NO: 1001597 - RNA, 22 nt, Human
uggcaguagauccagucucucu

SEQ ID NO: 1001598 - RNA, 22 nt, Human
cuccuggcaggcugagugaaau

SEQ ID NO: 1001599 - RNA, 22 nt, Human
ucccagccacaguuuccaccug

SEQ ID NO: 1001600 - RNA, 22 nt, Human
ccuggcaggacuguuguaagaa

SEQ ID NO: 1001601 - RNA, 18 nt, Human
gccugcucugcucucccc

SEQ ID NO: 1001602 - RNA, 22 nt, Human
ugcuccagugccugccccacag

SEQ ID NO: 1001603 - RNA, 22 nt, Human
guugggaaggcaagaaguagaa

SEQ ID NO: 1001604 - RNA, 22 nt, Human
ucuggcagaagugcugucagua

SEQ ID NO: 1001605 - RNA, 22 nt, Human
aggccuccagccacaugccagu

SEQ ID NO: 1001606 - RNA, 22 nt, Human
acccacccuacuagcagugucc

SEQ ID NO: 1001607 - RNA, 22 nt, Human
ucuggcagcgaagcguguacuu

SEQ ID NO: 1001608 - RNA, 22 nt, Human
gggccccuuguaucucuggcuc

SEQ ID NO: 1001609 - RNA, 22 nt, Human
aaagagucuggcacuguaccag

SEQ ID NO: 1001610 - RNA, 22 nt, Human
gguggcagaggugcaucagccc

SEQ ID NO: 1001611 - RNA, 22 nt, Human
agggccccauagucacugcccg

SEQ ID NO: 1001612 - RNA, 22 nt, Human
aggaggcugcaacccugaggcc

SEQ ID NO: 1001613 - RNA, 19 nt, Human
gcuggcagauguggccgug

SEQ ID NO: 1001614 - RNA, 22 nt, Human
cccaggccuggucugggccagu

SEQ ID NO: 1001615 - RNA, 22 nt, Human
gcuccaggcagcauaguggaug

SEQ ID NO: 1001616 - RNA, 22 nt, Human
ucuggcagagucagugcacaca

SEQ ID NO: 1001617 - RNA, 22 nt, Human
gaggcugcuuugaugacaggag

SEQ ID NO: 1001618 - RNA, 22 nt, Human
uccaggcuaauuuugcauuguu

SEQ ID NO: 1001619 - RNA, 22 nt, Human
ccuggcagggcugcaguaaugg

SEQ ID NO: 1001620 - RNA, 22 nt, Human
gacuguggggggcggacacaag

SEQ ID NO: 1001621 - RNA, 22 nt, Human
cuccaggccauggcugcggagg

SEQ ID NO: 1001622 - RNA, 22 nt, Human
aggaagaacagauaauggacgc

SEQ ID NO: 1001623 - RNA, 22 nt, Human
ucuggcaguaauaggggagaga

SEQ ID NO: 1001624 - RNA, 22 nt, Human
gaggacucugggcguguauggg

SEQ ID NO: 1001625 - RNA, 22 nt, Human
gcugcgccggaucccacguucc

SEQ ID NO: 1001626 - RNA, 22 nt, Human
acaagagcauugcagguguguu

SEQ ID NO: 1001627 - RNA, 22 nt, Human
uccugagcugccgcaucagcag

SEQ ID NO: 1001628 - RNA, 22 nt, Human
ccuggcagcagcacaugccuuc

SEQ ID NO: 1001629 - RNA, 19 nt, Human
ugccuggcaccagcuccac

SEQ ID NO: 1001630 - RNA, 22 nt, Human
ccuccccaugacccggugcugg

SEQ ID NO: 1001631 - RNA, 22 nt, Human
ggugccagaguggcccaggggc

SEQ ID NO: 1001632 - RNA, 22 nt, Human
gccucaggccgcccugcugcuc

SEQ ID NO: 1001633 - RNA, 22 nt, Human
ccuggcagguggcgcccucggc

SEQ ID NO: 1001634 - RNA, 22 nt, Human
acuggcagccacaacuggcagg

SEQ ID NO: 1001635 - RNA, 22 nt, Human
ucuggcaguggaugagggcagc

SEQ ID NO: 1001636 - RNA, 19 nt, Human
guccuggcgccgccacacc

SEQ ID NO: 1001637 - RNA, 19 nt, Human
acuggcagcuguagucugu

SEQ ID NO: 1001638 - RNA, 22 nt, Human
caccagggccccaggcugugcc

SEQ ID NO: 1001639 - RNA, 22 nt, Human
gagacacacauucuggagagaa

SEQ ID NO: 1001640 - RNA, 19 nt, Human
gcuggcagaauuuugaacc

SEQ ID NO: 1001641 - RNA, 22 nt, Human
ccucuccuugcacccgucccgc

SEQ ID NO: 1001642 - RNA, 20 nt, Human
aagagucuuuacugagcuaa

SEQ ID NO: 1001643 - RNA, 22 nt, Human
uggccugccacugccacgccac

SEQ ID NO: 1001644 - RNA, 22 nt, Human
gcuggcaguguauuguuagcug

SEQ ID NO: 1001645 - RNA, 18 nt, Human
ggcagggaaaagauaggg

SEQ ID NO: 1001646 - RNA, 22 nt, Human
uccuggcacccuuggguuggag

SEQ ID NO: 1001647 - RNA, 22 nt, Human
gcuggcaggguucucacugaaa

SEQ ID NO: 1001648 - RNA, 22 nt, Human
cuccaggccccuggccuucugc

SEQ ID NO: 1001649 - RNA, 22 nt, Human
caggagggcccgagacucuucc

SEQ ID NO: 1001650 - RNA, 22 nt, Human
gcuggcagaagagcugguucaa

SEQ ID NO: 1001651 - RNA, 22 nt, Human
uuccaggcugaugggccacagg

SEQ ID NO: 1001652 - RNA, 22 nt, Human
acuggcagguccaucgcccuuu

SEQ ID NO: 1001653 - RNA, 22 nt, Human
ucuggcagcaagucuguuucuc

SEQ ID NO: 1001654 - RNA, 17 nt, Human
ugcuggcaacauacaaa

SEQ ID NO: 1001655 - RNA, 22 nt, Human
gccccaccuugagagcagaaac

SEQ ID NO: 1001656 - RNA, 22 nt, Human
ccagccucacuggcaucaccua

SEQ ID NO: 1001657 - RNA, 22 nt, Human
gccuggcaaggcccuguugacu

SEQ ID NO: 1001658 - RNA, 22 nt, Human
ccuggcagcauugguagagauu

SEQ ID NO: 1001659 - RNA, 19 nt, Human
gggagcugaggucuuuggu

SEQ ID NO: 1001660 - RNA, 22 nt, Human
cugccugccacguucagcugua

SEQ ID NO: 1001661 - RNA, 21 nt, Human
agugccaguagguauggagga

SEQ ID NO: 1001662 - RNA, 22 nt, Human
acuggcaguuugagaaugcauu

SEQ ID NO: 1001663 - RNA, 21 nt, Human
ucuggcaggcacgggcccagc

SEQ ID NO: 1001664 - RNA, 22 nt, Human
cagguggguguaugaaugcaaa

SEQ ID NO: 1001665 - RNA, 22 nt, Human
uccacccugcuuucuuaucucc

SEQ ID NO: 1001666 - RNA, 22 nt, Human
ccuggcagcaggugggcccgug

SEQ ID NO: 1001667 - RNA, 22 nt, Human
gcuggcagugugaaugacaagc

SEQ ID NO: 1001668 - RNA, 22 nt, Human
uuccaggcuucucuggggcguc

SEQ ID NO: 1001669 - RNA, 22 nt, Human
agaggccuccgaaaggugggcu

SEQ ID NO: 1001670 - RNA, 17 nt, Human
gccuucucugcccucac

SEQ ID NO: 1001671 - RNA, 22 nt, Human
cuuggcaguuucggaaggauga

SEQ ID NO: 1001672 - RNA, 22 nt, Human
ccagguccuguuuucaccacag

SEQ ID NO: 1001673 - RNA, 19 nt, Human
ucuggcagguaauuaggga

SEQ ID NO: 1001674 - RNA, 22 nt, Human
ggcagagguagcuggaaccagg

SEQ ID NO: 1001675 - RNA, 22 nt, Human
ugaccaggauacugcagggaug

SEQ ID NO: 1001676 - RNA, 22 nt, Human
ucaggcccuucucccaggacuc

SEQ ID NO: 1001677 - RNA, 22 nt, Human
uccaggcaaaaaccaacuacag

SEQ ID NO: 1001678 - RNA, 22 nt, Human
gcacucuccuggcugccacagu

SEQ ID NO: 1001679 - RNA, 22 nt, Human
uccugugccaucucuagagacu

SEQ ID NO: 1001680 - RNA, 22 nt, Human
uccugagcccuguaggacccug

SEQ ID NO: 1001681 - RNA, 21 nt, Human
cccuugccugcacuccucggc

SEQ ID NO: 1001682 - RNA, 22 nt, Human
uugggaagaauggaggugguua

SEQ ID NO: 1001683 - RNA, 20 nt, Human
aaagagcccuuggagcaggc

SEQ ID NO: 1001684 - RNA, 22 nt, Human
caggauggucucgaucuccuga

SEQ ID NO: 1001685 - RNA, 22 nt, Human
uccugagccugacaaucaccau

SEQ ID NO: 1001686 - RNA, 19 nt, Human
guccucucaacaacccggg

SEQ ID NO: 1001687 - RNA, 18 nt, Human
acucugcggaggccccag

SEQ ID NO: 1001688 - RNA, 17 nt, Human
gcccacccuuaggagcu

SEQ ID NO: 1001689 - RNA, 22 nt, Human
gaagagaaaggcaaggaguuuu

SEQ ID NO: 1001690 - RNA, 22 nt, Human
ugcuggcacguggaccaggaga

SEQ ID NO: 1001691 - RNA, 22 nt, Human
gguuccuucugaggucccugua

SEQ ID NO: 1001692 - RNA, 22 nt, Human
gcuggcagucccaucagcuggg

SEQ ID NO: 1001693 - RNA, 22 nt, Human
agacaagaaacugggagucucu

SEQ ID NO: 1001694 - RNA, 18 nt, Human
gacaaaaguacagacaga

SEQ ID NO: 1001695 - RNA, 22 nt, Human
ucuggcaggucaaucauucuuu

SEQ ID NO: 1001696 - RNA, 22 nt, Human
aggccacaguacuuugcagacc

SEQ ID NO: 1001697 - RNA, 22 nt, Human
aggaagaaccuaagaaagucuc

SEQ ID NO: 1001698 - RNA, 22 nt, Human
uccugagcaacacagcuaagug

SEQ ID NO: 1001699 - RNA, 22 nt, Human
aggcacaggaggugguaagaag

SEQ ID NO: 1001700 - RNA, 22 nt, Human
cccuuccuugauuuuaacugga

SEQ ID NO: 1001701 - RNA, 22 nt, Human
uucuuucaauagcuggcauaug

SEQ ID NO: 1001702 - RNA, 22 nt, Human
cugccugcuuaccaugcaucag

SEQ ID NO: 1001703 - RNA, 17 nt, Human
uuaagguggaucagcac

SEQ ID NO: 1001704 - RNA, 22 nt, Human
uccugagcacagagacaaggaa

SEQ ID NO: 1001705 - RNA, 22 nt, Human
cuccuggcucgcccccagcuga

SEQ ID NO: 1001706 - RNA, 22 nt, Human
acagguggcuuauuggcugauu

SEQ ID NO: 1001707 - RNA, 22 nt, Human
uuccuggcucacagcagugggg

SEQ ID NO: 1001708 - RNA, 22 nt, Human
cccagccucuguuugcuccucu

SEQ ID NO: 1001709 - RNA, 22 nt, Human
aaaagagugacugauaaguaua

SEQ ID NO: 1001710 - RNA, 22 nt, Human
ggccucagagaaggcugugcgg

SEQ ID NO: 1001711 - RNA, 22 nt, Human
ggagaagaggagcuggaagccu

SEQ ID NO: 1001712 - RNA, 22 nt, Human
guggcagucgcugacagauaca

SEQ ID NO: 1001713 - RNA, 22 nt, Human
ccugccucccagagguccucua

SEQ ID NO: 1001714 - RNA, 22 nt, Human
uggcaguggcucagagugcaga

SEQ ID NO: 1001715 - RNA, 22 nt, Human
aggacaagcuaaaggacuuccu

SEQ ID NO: 1001716 - RNA, 22 nt, Human
uggaaagagguagaggaucugg

SEQ ID NO: 1001717 - RNA, 22 nt, Human
gccacagguacuaugggagaga

SEQ ID NO: 1001718 - RNA, 22 nt, Human
ggcaaggggucaggcugagaca

SEQ ID NO: 1001719 - RNA, 18 nt, Human
cuccuccacagccccugc

SEQ ID NO: 1001720 - RNA, 22 nt, Human
ucuuuuucugcacacguguccc

SEQ ID NO: 1001721 - RNA, 22 nt, Human
aagagccagcuagugaagaggc

SEQ ID NO: 1001722 - RNA, 22 nt, Human
ccuggcagguggagguugcagu

SEQ ID NO: 1001723 - RNA, 22 nt, Human
gcccucucuucugcagccucca

SEQ ID NO: 1001724 - RNA, 21 nt, Human
agaugcugaugcugcaggucc

SEQ ID NO: 1001725 - RNA, 22 nt, Human
cccacccugggaagcuaggcag

SEQ ID NO: 1001726 - RNA, 22 nt, Human
cccuuccuugugacuggugggg

SEQ ID NO: 1001727 - RNA, 22 nt, Human
uggaaagaggaagugcccagca

SEQ ID NO: 1001728 - RNA, 22 nt, Human
acuggcaggcugcuggccggcg

SEQ ID NO: 1001729 - RNA, 22 nt, Human
gccuggcacucaaucaucugcu

SEQ ID NO: 1001730 - RNA, 22 nt, Human
cccacccucaagggugucuaua

SEQ ID NO: 1001731 - RNA, 22 nt, Human
aggcuggauuuauggggacuuc

SEQ ID NO: 1001732 - RNA, 22 nt, Human
agcacaggcuuuggugugaggg

SEQ ID NO: 1001733 - RNA, 22 nt, Human
aaagaaucagaagucucaaaca

SEQ ID NO: 1001734 - RNA, 22 nt, Human
cccuuccucccaggcuucugug

SEQ ID NO: 1001735 - RNA, 22 nt, Human
ggagucugcucccagacaugau

SEQ ID NO: 1001736 - RNA, 22 nt, Human
uuggagagauuuaggucucagu

SEQ ID NO: 1001737 - RNA, 22 nt, Human
caggacaaagcccuuugagaaa

SEQ ID NO: 1001738 - RNA, 22 nt, Human
aagagcacuaacagagcugaua

SEQ ID NO: 1001739 - RNA, 22 nt, Human
aggaggcuuuugcaggugccac

SEQ ID NO: 1001740 - RNA, 22 nt, Human
augacugcucugggcucccaug

SEQ ID NO: 1001741 - RNA, 22 nt, Human
uggcagugguaccggcucucag

SEQ ID NO: 1001742 - RNA, 22 nt, Human
ggagacucggguucuagccuug

SEQ ID NO: 1001743 - RNA, 22 nt, Human
acuggcagagguuggacaccau

SEQ ID NO: 1001744 - RNA, 22 nt, Human
ucuggcagugaagucaugaggu

SEQ ID NO: 1001745 - RNA, 22 nt, Human
gaccugccugagcugccucugc

SEQ ID NO: 1001746 - RNA, 22 nt, Human
gcuggcagacugggggcagaac

SEQ ID NO: 1001747 - RNA, 22 nt, Human
acuggcagcuguaggaugcaug

SEQ ID NO: 1001748 - RNA, 22 nt, Human
ccaggcccaggguacugaccaa

SEQ ID NO: 1001749 - RNA, 22 nt, Human
uccuggcagagggcggccucga

SEQ ID NO: 1001750 - RNA, 22 nt, Human
gcagccucaaacuccccagcuc

SEQ ID NO: 1001751 - RNA, 22 nt, Human
acaggugguaaaauggacuguc

SEQ ID NO: 1001752 - RNA, 22 nt, Human
uuccugccccugagagcuccca

SEQ ID NO: 1001753 - RNA, 22 nt, Human
acuggcagaacuggugauuguc

SEQ ID NO: 1001754 - RNA, 22 nt, Human
auggccugcagugcugccacag

SEQ ID NO: 1001755 - RNA, 22 nt, Human
ugguaagaacccaucagagaag

SEQ ID NO: 1001756 - RNA, 22 nt, Human
acagguggccccgagggagugg

SEQ ID NO: 1001757 - RNA, 22 nt, Human
ggcaagagggcagauggagugc

SEQ ID NO: 1001758 - RNA, 22 nt, Human
ucuggcagcaagauaacaaugg

SEQ ID NO: 1001759 - RNA, 22 nt, Human
ccugccuucagcccugaagucu

SEQ ID NO: 1001760 - RNA, 22 nt, Human
aaaaagucugcaaaggagguug

SEQ ID NO: 1001761 - RNA, 22 nt, Human
gauggccuggguccccuuccgg

SEQ ID NO: 1001762 - RNA, 22 nt, Human
uccaggcaagggaggagcaugg

SEQ ID NO: 1001763 - RNA, 22 nt, Human
ccucccuucaguagagcccaau

SEQ ID NO: 1001764 - RNA, 22 nt, Human
cagccaggauggagaacuguug

SEQ ID NO: 1001765 - RNA, 22 nt, Human
ggggcugagucagugggaagag

SEQ ID NO: 1001766 - RNA, 22 nt, Human
cccaggccagaacuugguugcu

SEQ ID NO: 1001767 - RNA, 22 nt, Human
gcuggcaggagccuuucccuuu

SEQ ID NO: 1001768 - RNA, 22 nt, Human
ccagcccuugcugaaggguggc

SEQ ID NO: 1001769 - RNA, 22 nt, Human
acagguggggcacuuggagccu

SEQ ID NO: 1001770 - RNA, 22 nt, Human
aaagagucguguuccagguuug

SEQ ID NO: 1001771 - RNA, 22 nt, Human
gaggagcucaugaaagcggugu

SEQ ID NO: 1001772 - RNA, 22 nt, Human
ucuggcaggcaaucggcucugg

SEQ ID NO: 1001773 - RNA, 22 nt, Human
gcuggcaguaaaggguuuggca

SEQ ID NO: 1001774 - RNA, 23 nt, Human
uccaggagcaugcuggcuggcga

SEQ ID NO: 1001775 - RNA, 22 nt, Human
aaaagagucuuaggcagucaua

SEQ ID NO: 1001776 - RNA, 22 nt, Human
cccuuccugggugucccggagu

SEQ ID NO: 1001777 - RNA, 22 nt, Human
aggcaggggagcuggaagggua

SEQ ID NO: 1001778 - RNA, 22 nt, Human
cccugccucugaagcugcucag

SEQ ID NO: 1001779 - RNA, 22 nt, Human
cugagccagggccacacaugga

SEQ ID NO: 1001780 - RNA, 22 nt, Human
acuggcaguagagggagcgcau

SEQ ID NO: 1001781 - RNA, 22 nt, Human
gccuggcacaguagggacccaa

SEQ ID NO: 1001782 - RNA, 18 nt, Human
uccuggcagucagagagg

SEQ ID NO: 1001783 - RNA, 22 nt, Human
ccagcccugccagagagagcug

SEQ ID NO: 1001784 - RNA, 22 nt, Human
ccaggcugggcggggaaccugg

SEQ ID NO: 1001785 - RNA, 22 nt, Human
uccaggcucccucaggaugcac

SEQ ID NO: 1001786 - RNA, 22 nt, Human
ucccacccccuccaaggaggaa

SEQ ID NO: 1001787 - RNA, 20 nt, Human
ccuggcaggcggguuacuua

SEQ ID NO: 1001788 - RNA, 22 nt, Human
cuggcagucugguggaaggccu

SEQ ID NO: 1001789 - RNA, 22 nt, Human
accugccuucucaaggacauga

SEQ ID NO: 1001790 - RNA, 22 nt, Human
uugggaucucaaauccagcuau

SEQ ID NO: 1001791 - RNA, 22 nt, Human
aagugccaucauagcauggcug

SEQ ID NO: 1001792 - RNA, 22 nt, Human
cuguccagcuuggcuccugggg

SEQ ID NO: 1001793 - RNA, 22 nt, Human
uuccaggcuauccggugaaggg

SEQ ID NO: 1001794 - RNA, 19 nt, Human
agaggccucagcagcuggc

SEQ ID NO: 1001795 - RNA, 22 nt, Human
cuuacaaauacacuuaggagag

SEQ ID NO: 1001796 - RNA, 22 nt, Human
uguuggaauuaggauacagagg

SEQ ID NO: 1001797 - RNA, 22 nt, Human
ccucagcugcuucccuggagcc

SEQ ID NO: 1001798 - RNA, 22 nt, Human
uuccuggccuaagguaggugac

SEQ ID NO: 1001799 - RNA, 22 nt, Human
ugccucucuaacccaugcccaa

SEQ ID NO: 1001800 - RNA, 22 nt, Human
gcuggcagggugguugagagag

SEQ ID NO: 1001801 - RNA, 22 nt, Human
uucaguuccauuucaggugggu

SEQ ID NO: 1001802 - RNA, 22 nt, Human
ccuggcagcccagagcgccgcu

SEQ ID NO: 1001803 - RNA, 22 nt, Human
acuggcagcagcagcccuuggg

SEQ ID NO: 1001804 - RNA, 22 nt, Human
uccuggcagcccgcaggugcug

SEQ ID NO: 1001805 - RNA, 22 nt, Human
aguguggcaggaaugacuagaa

SEQ ID NO: 1001806 - RNA, 22 nt, Human
gcacaggaugauggguugaggg

SEQ ID NO: 1001807 - RNA, 18 nt, Human
acaggcugugggaauggu

SEQ ID NO: 1001808 - RNA, 22 nt, Human
agcacagggacaaugccaggug

SEQ ID NO: 1001809 - RNA, 22 nt, Human
ucccugccugacagcacccacc

SEQ ID NO: 1001810 - RNA, 18 nt, Human
ccuggcagccaugcgcgc

SEQ ID NO: 1001811 - RNA, 22 nt, Human
cucucugggcccaguuggcacc

SEQ ID NO: 1001812 - RNA, 22 nt, Human
cagaaagaccugggcucaagag

SEQ ID NO: 1001813 - RNA, 22 nt, Human
ucuggcagaggaaggaggccug

SEQ ID NO: 1001814 - RNA, 22 nt, Human
uauuacagaaucaggcauaacu

SEQ ID NO: 1001815 - RNA, 22 nt, Human
auccuggcccagguguggaggg

SEQ ID NO: 1001816 - RNA, 22 nt, Human
agggcugacagugaggagucaa

SEQ ID NO: 1001817 - RNA, 22 nt, Human
gcuggcaguuuccucaccgagg

SEQ ID NO: 1001818 - RNA, 22 nt, Human
ccagcccugucaccaacuggag

SEQ ID NO: 1001819 - RNA, 22 nt, Human
gaggcuguuaggagggacucug

SEQ ID NO: 1001820 - RNA, 22 nt, Human
ucccugccuccuggcagugcca

SEQ ID NO: 1001821 - RNA, 22 nt, Human
uuggaaaguuuuuacugaagac

SEQ ID NO: 1001822 - RNA, 22 nt, Human
cacaaaaguaggaggcaggcgg

SEQ ID NO: 1001823 - RNA, 22 nt, Human
aguugggaguuauagacucuau

SEQ ID NO: 1001824 - RNA, 22 nt, Human
ugggagaaacugucucucccac

SEQ ID NO: 1001825 - RNA, 22 nt, Human
auccaggcgaaugcagaaggcc

SEQ ID NO: 1001826 - RNA, 17 nt, Human
ugccagccugucccagg

SEQ ID NO: 1001827 - RNA, 22 nt, Human
ggagcugaguucuucagccggg

SEQ ID NO: 1001828 - RNA, 22 nt, Human
ggagcugaaccccaucgugcug

SEQ ID NO: 1001829 - RNA, 22 nt, Human
ggagcugaaggggugggcucag

SEQ ID NO: 1001830 - RNA, 22 nt, Human
ggcugaguugagaggauuacuu

SEQ ID NO: 1001831 - RNA, 22 nt, Human
aggccccaaagcagugcaagua

SEQ ID NO: 1001832 - RNA, 22 nt, Human
agacacagucugucuggaggag

SEQ ID NO: 1001833 - RNA, 22 nt, Human
ccuggcagcgugccgagcugcg

SEQ ID NO: 1001834 - RNA, 22 nt, Human
acaggugguagaguggaaagag

SEQ ID NO: 1001835 - RNA, 22 nt, Human
cuggcaugaaauggcaucucau

SEQ ID NO: 1001836 - RNA, 22 nt, Human
ccuggcugguggcagcgacaag

SEQ ID NO: 1001837 - RNA, 22 nt, Human
gagagaaaagggggaauugauu

SEQ ID NO: 1001838 - RNA, 22 nt, Human
ucaggcccagagucacggaucc

SEQ ID NO: 1001839 - RNA, 22 nt, Human
gguucccggaucuccgaguccc

SEQ ID NO: 1001840 - RNA, 22 nt, Human
ugggacucacucuuuuggccag

SEQ ID NO: 1001841 - RNA, 22 nt, Human
guugggaaggugaacaugaugc

SEQ ID NO: 1001842 - RNA, 22 nt, Human
ucccuccuggccgucaccgcug

SEQ ID NO: 1001843 - RNA, 22 nt, Human
agagcacagaagaauaggugcu

SEQ ID NO: 1001844 - RNA, 22 nt, Human
agugccccaugggugccugggg

SEQ ID NO: 1001845 - RNA, 21 nt, Human
uccacccucucugcucccagu

SEQ ID NO: 1001846 - RNA, 22 nt, Human
gcuccaggagagggaagcagau

SEQ ID NO: 1001847 - RNA, 22 nt, Human
gcuggcagggacagcugcgugu

SEQ ID NO: 1001848 - RNA, 22 nt, Human
ccuggcagucaggggaguccuu

SEQ ID NO: 1001849 - RNA, 22 nt, Human
cucuccagaauaugccgccgug

SEQ ID NO: 1001850 - RNA, 22 nt, Human
agaggccugugugcuccagugg

SEQ ID NO: 1001851 - RNA, 20 nt, Human
ugccuggccuuucucugccc

SEQ ID NO: 1001852 - RNA, 19 nt, Human
uccuggcauuuguaggaaa

SEQ ID NO: 1001853 - RNA, 22 nt, Human
agucuagggugggguccacagg

SEQ ID NO: 1001854 - RNA, 22 nt, Human
cagugggggggccaugcugcag

SEQ ID NO: 1001855 - RNA, 22 nt, Human
gagauggccagugccaggacaa

SEQ ID NO: 1001856 - RNA, 22 nt, Human
ccagcccuuagauaaaccuggc

SEQ ID NO: 1001857 - RNA, 22 nt, Human
agcacaggaccaaggaagcugu

SEQ ID NO: 1001858 - RNA, 23 nt, Human
uccuuccuuugagaggcuccauc

SEQ ID NO: 1001859 - RNA, 22 nt, Human
gaggagcugggacccugucauc

SEQ ID NO: 1001860 - RNA, 22 nt, Human
cagguuggucggcaaguacaca

SEQ ID NO: 1001861 - RNA, 22 nt, Human
ucuggcaggauaucgaagugaa

SEQ ID NO: 1001862 - RNA, 22 nt, Human
ccuggcaggcuggggacagugc

SEQ ID NO: 1001863 - RNA, 22 nt, Human
uuccuggcgccacggagccggu

SEQ ID NO: 1001864 - RNA, 22 nt, Human
uggcagugucuuaucaggagug

SEQ ID NO: 1001865 - RNA, 22 nt, Human
agggcugaagggaggugcucau

SEQ ID NO: 1001866 - RNA, 22 nt, Human
ucuggcagaaggcagaaauuca

SEQ ID NO: 1001867 - RNA, 22 nt, Human
uuggaacaugccgggguccagg

SEQ ID NO: 1001868 - RNA, 22 nt, Human
uggcacucacucucagagucug

SEQ ID NO: 1001869 - RNA, 22 nt, Human
ucuggcagagauauccauccca

SEQ ID NO: 1001870 - RNA, 20 nt, Human
gagucacagaagaagcugaa

SEQ ID NO: 1001871 - RNA, 22 nt, Human
uccuggcauccgugggucugug

SEQ ID NO: 1001872 - RNA, 22 nt, Human
aaagagucaaaggcaugucucu

SEQ ID NO: 1001873 - RNA, 22 nt, Human
ccagugcccagcugcccaggca

SEQ ID NO: 1001874 - RNA, 22 nt, Human
cucuccagccuuuagcccacgc

SEQ ID NO: 1001875 - RNA, 22 nt, Human
uggucucugcaggccaggcuca

SEQ ID NO: 1001876 - RNA, 22 nt, Human
gccuccggaguugcagugucuu

SEQ ID NO: 1001877 - RNA, 22 nt, Human
ccuggcagaaagaguuacaccu

SEQ ID NO: 1001878 - RNA, 22 nt, Human
uccaggcuugagaccaggcucu

SEQ ID NO: 1001879 - RNA, 22 nt, Human
ccauucauacaauuuuguucua

SEQ ID NO: 1001880 - RNA, 22 nt, Human
gagaaagauuguccuucagggg

SEQ ID NO: 1001881 - RNA, 22 nt, Human
ccucucccgggugccgcugggc

SEQ ID NO: 1001882 - RNA, 22 nt, Human
gaggcacauauauacagagccc

SEQ ID NO: 1001883 - RNA, 22 nt, Human
gaggagcugcagggggagucua

SEQ ID NO: 1001884 - RNA, 22 nt, Human
gugggagaaauuagcucuaguu

SEQ ID NO: 1001885 - RNA, 22 nt, Human
gcuggcagagcucugggcuggg

SEQ ID NO: 1001886 - RNA, 22 nt, Human
gccgggaccaaggccacggagc

SEQ ID NO: 1001887 - RNA, 22 nt, Human
uccuggcacuuugggggcucgc

SEQ ID NO: 1001888 - RNA, 22 nt, Human
uggcaguggauaggggagcggu

SEQ ID NO: 1001889 - RNA, 22 nt, Human
acuggcagugucguuuacauga

SEQ ID NO: 1001890 - RNA, 22 nt, Human
ccuggcagcuccuccccggcgg

SEQ ID NO: 1001891 - RNA, 22 nt, Human
gcuggcagaauuucuucuugcu

SEQ ID NO: 1001892 - RNA, 22 nt, Human
ccacaaaacugugugucaaaga

SEQ ID NO: 1001893 - RNA, 20 nt, Human
uggccucugagaugccacgg

SEQ ID NO: 1001894 - RNA, 22 nt, Human
ucaggagcucuucccuggugug

SEQ ID NO: 1001895 - RNA, 22 nt, Human
gaggcacagucccgaggcaagg

SEQ ID NO: 1001896 - RNA, 22 nt, Human
acuggcagaacgugaugcgggu

SEQ ID NO: 1001897 - RNA, 22 nt, Human
uuccuggccaagcagaguggaa

SEQ ID NO: 1001898 - RNA, 22 nt, Human
cuugccucccucagcucacagc

SEQ ID NO: 1001899 - RNA, 22 nt, Human
cuggcacgcccacguaggcacu

SEQ ID NO: 1001900 - RNA, 22 nt, Human
uacaaaaggaagagggaucuua

SEQ ID NO: 1001901 - RNA, 22 nt, Human
cugccugcugcccuccagagcc

SEQ ID NO: 1001902 - RNA, 22 nt, Human
ccucucagcgauuccucuugga

SEQ ID NO: 1001903 - RNA, 22 nt, Human
cccugccuugggguccacaccg

SEQ ID NO: 1001904 - RNA, 22 nt, Human
ccaggcccugcuccucacacca

SEQ ID NO: 1001905 - RNA, 22 nt, Human
ugacaggaggcuugaggccagg

SEQ ID NO: 1001906 - RNA, 22 nt, Human
uuccuggcagaggccccgacag

SEQ ID NO: 1001907 - RNA, 22 nt, Human
cuggcaggagcauucacagagg

SEQ ID NO: 1001908 - RNA, 22 nt, Human
auggccuggggauuccugagca

SEQ ID NO: 1001909 - RNA, 22 nt, Human
aaagaucaauagauaaagcuac

SEQ ID NO: 1001910 - RNA, 20 nt, Human
cccagccccuaccuguugcc

SEQ ID NO: 1001911 - RNA, 22 nt, Human
aguguugggucuuuagaauuua

SEQ ID NO: 1001912 - RNA, 22 nt, Human
aggaggcuguggagcacuccau

SEQ ID NO: 1001913 - RNA, 22 nt, Human
cuccaggcucguccaagaucga

SEQ ID NO: 1001914 - RNA, 22 nt, Human
accugccuaucagcugccugcu

SEQ ID NO: 1001915 - RNA, 21 nt, Human
aggcugcuggcucaggguccu

SEQ ID NO: 1001916 - RNA, 22 nt, Human
gccuccuggaagucacauguuu

SEQ ID NO: 1001917 - RNA, 22 nt, Human
cuuggcaggguggaggaugcag

SEQ ID NO: 1001918 - RNA, 22 nt, Human
auggccugaugcaccuguccca

SEQ ID NO: 1001919 - RNA, 22 nt, Human
uccaggaggaggaaggcugcca

SEQ ID NO: 1001920 - RNA, 22 nt, Human
gaaagaagcuuuagauggcuau

SEQ ID NO: 1001921 - RNA, 22 nt, Human
agggagacacaugaggaaguca

SEQ ID NO: 1001922 - RNA, 21 nt, Human
agagucugagugugcaagggc

SEQ ID NO: 1001923 - RNA, 22 nt, Human
gaggcugcggggaggagccugc

SEQ ID NO: 1001924 - RNA, 22 nt, Human
uucauugcaguucuucagguua

SEQ ID NO: 1001925 - RNA, 22 nt, Human
acuggcagaauugaauaguugu

SEQ ID NO: 1001926 - RNA, 22 nt, Human
agacacagcugcaggagguggg

SEQ ID NO: 1001927 - RNA, 22 nt, Human
cagguuggggacuuaggaugac

SEQ ID NO: 1001928 - RNA, 22 nt, Human
gugugggaaggcuaggaugcug

SEQ ID NO: 1001929 - RNA, 22 nt, Human
uccuggcagaaauggggcugug

SEQ ID NO: 1001930 - RNA, 22 nt, Human
ucccaccccuugacucuuuaag

SEQ ID NO: 1001931 - RNA, 22 nt, Human
ugcacaggaggcuguggagaag

SEQ ID NO: 1001932 - RNA, 22 nt, Human
caggcuggagugcaauggcaca

SEQ ID NO: 1001933 - RNA, 22 nt, Human
gcuggcaggauaacuucuaagc

SEQ ID NO: 1001934 - RNA, 22 nt, Human
gguggcauaagaacacuaaaga

SEQ ID NO: 1001935 - RNA, 22 nt, Human
guccuggcaccucacuggcuac

SEQ ID NO: 1001936 - RNA, 22 nt, Human
cugcaggagcaaagccucugcu

SEQ ID NO: 1001937 - RNA, 19 nt, Human
acuggcaguuucugcaugg

SEQ ID NO: 1001938 - RNA, 22 nt, Human
ugccugccucuggcagcccugc

SEQ ID NO: 1001939 - RNA, 22 nt, Human
cugagcagugguucuugagcgc

SEQ ID NO: 1001940 - RNA, 17 nt, Human
agccugccccaugcugc

SEQ ID NO: 1001941 - RNA, 22 nt, Human
ccucugccaccucccacgaggc

SEQ ID NO: 1001942 - RNA, 22 nt, Human
acuggcagagggaaaaccauuc

SEQ ID NO: 1001943 - RNA, 18 nt, Human
uccugccugugccccagg

SEQ ID NO: 1001944 - RNA, 22 nt, Human
aaagaucaaguaggcauggccu

SEQ ID NO: 1001945 - RNA, 22 nt, Human
cucaccccacuaccccuuggug

SEQ ID NO: 1001946 - RNA, 22 nt, Human
uacaaaaguaauuacgguuuuu

SEQ ID NO: 1001947 - RNA, 22 nt, Human
gcuggcagcuggaaguugggcu

SEQ ID NO: 1001948 - RNA, 22 nt, Human
ucuggcaguugccgcuucaguc

SEQ ID NO: 1001949 - RNA, 22 nt, Human
gcaguguuuguguucucacaug

SEQ ID NO: 1001950 - RNA, 20 nt, Human
ucuggcaggugaacgagcug

SEQ ID NO: 1001951 - RNA, 22 nt, Human
aagaggucauaccagauaaggg

SEQ ID NO: 1001952 - RNA, 22 nt, Human
cuugggaaugcuaacagaugac

SEQ ID NO: 1001953 - RNA, 22 nt, Human
ugccugccaugcagaaagcuga

SEQ ID NO: 1001954 - RNA, 22 nt, Human
gccuggcaggggccugggagug

SEQ ID NO: 1001955 - RNA, 23 nt, Human
ccuggcagcaaacgaggagguua

SEQ ID NO: 1001956 - RNA, 22 nt, Human
gaaaagaguccugugugaggag

SEQ ID NO: 1001957 - RNA, 22 nt, Human
ccuggcaguucaucaaauggca

SEQ ID NO: 1001958 - RNA, 22 nt, Human
ggccucucugagagcagacguu

SEQ ID NO: 1001959 - RNA, 22 nt, Human
ucuggcagcucaguucaggucu

SEQ ID NO: 1001960 - RNA, 22 nt, Human
gcuggcagagagcuggugagga

SEQ ID NO: 1001961 - RNA, 22 nt, Human
gcuggcagcauuagacccuggg

SEQ ID NO: 1001962 - RNA, 22 nt, Human
guuaggaacacuggagccuaaa

SEQ ID NO: 1001963 - RNA, 22 nt, Human
ucuggcagguucccauguuaug

SEQ ID NO: 1001964 - RNA, 22 nt, Human
ccaggccucuggcugcuuaguc

SEQ ID NO: 1001965 - RNA, 22 nt, Human
ccacccuaacaauccuuacugu

SEQ ID NO: 1001966 - RNA, 22 nt, Human
gucuggaaggaggagauggagc

SEQ ID NO: 1001967 - RNA, 22 nt, Human
agagggugcuggagagacauug

SEQ ID NO: 1001968 - RNA, 20 nt, Human
agaggcuuccuugggaggag

SEQ ID NO: 1001969 - RNA, 22 nt, Human
guccuggcccaggaguacacau

SEQ ID NO: 1001970 - RNA, 22 nt, Human
gggccccuugcugcucugcugg

SEQ ID NO: 1001971 - RNA, 22 nt, Human
ccuggcaguuuugcccaggauu

SEQ ID NO: 1001972 - RNA, 23 nt, Human
cauccaggagcugagucugacug

SEQ ID NO: 1001973 - RNA, 18 nt, Human
aggaaagaaaggcaggug

SEQ ID NO: 1001974 - RNA, 22 nt, Human
cagggacaauggcagagccuga

SEQ ID NO: 1001975 - RNA, 22 nt, Human
aggagcugcagauucugccuug

SEQ ID NO: 1001976 - RNA, 19 nt, Human
ccagucccauacaggagau

SEQ ID NO: 1001977 - RNA, 22 nt, Human
ccugccuguacuagagacccag

SEQ ID NO: 1001978 - RNA, 19 nt, Human
cagcccucuuaccacugug

SEQ ID NO: 1001979 - RNA, 22 nt, Human
agaaagaggaugcagaucucau

SEQ ID NO: 1001980 - RNA, 19 nt, Human
ccuugccugucccugcagc

SEQ ID NO: 1001981 - RNA, 22 nt, Human
guccuggcugguucuguggggc

SEQ ID NO: 1001982 - RNA, 22 nt, Human
acuccugggugcugaccagcgu

SEQ ID NO: 1001983 - RNA, 22 nt, Human
uccaggcuagguuuacaggaca

SEQ ID NO: 1001984 - RNA, 22 nt, Human
cccagcccaucucaaaggucua

SEQ ID NO: 1001985 - RNA, 22 nt, Human
ggaggacacuggcucugccuuc

SEQ ID NO: 1001986 - RNA, 22 nt, Human
uuccaggcaugucagacauagg

SEQ ID NO: 1001987 - RNA, 20 nt, Human
ucccucccuccagcucuggg

SEQ ID NO: 1001988 - RNA, 22 nt, Human
aggcaguggagcuggaauaggc

SEQ ID NO: 1001989 - RNA, 17 nt, Human
cccaggccgccgggagc

SEQ ID NO: 1001990 - RNA, 22 nt, Human
acuggcagagacccugauggcc

SEQ ID NO: 1001991 - RNA, 22 nt, Human
cugccugcucaccagggcucug

SEQ ID NO: 1001992 - RNA, 22 nt, Human
gcuugggaagggcccuguguac

SEQ ID NO: 1001993 - RNA, 22 nt, Human
cugccugcucuauccaggccug

SEQ ID NO: 1001994 - RNA, 22 nt, Human
cuuggcagagggcugggcucag

SEQ ID NO: 1001995 - RNA, 22 nt, Human
uugggaagaaacauguccauca

SEQ ID NO: 1001996 - RNA, 22 nt, Human
aggcaguguguagcuggaagag

SEQ ID NO: 1001997 - RNA, 21 nt, Human
uccugccuuaguccagagcag

SEQ ID NO: 1001998 - RNA, 22 nt, Human
gcuccaggugucccagguaaaa

SEQ ID NO: 1001999 - RNA, 22 nt, Human
ucuggcagcagcaucaguggcu

SEQ ID NO: 1002000 - RNA, 22 nt, Human
ggugccagugggucucaggaua

SEQ ID NO: 1002001 - RNA, 22 nt, Human
gcuggcaggauagaagucuaau

SEQ ID NO: 1002002 - RNA, 22 nt, Human
ggccucucaugcccagagccaa

SEQ ID NO: 1002003 - RNA, 22 nt, Human
cugcaggacgaccgccucaucu

SEQ ID NO: 1002004 - RNA, 22 nt, Human
ggaggacaggggcugcagcaca

SEQ ID NO: 1002005 - RNA, 20 nt, Human
acaaagacuggaaaagcaag

SEQ ID NO: 1002006 - RNA, 22 nt, Human
uggccucugggaaagcagauuc

SEQ ID NO: 1002007 - RNA, 22 nt, Human
caugagauaauuuuucuccagu

SEQ ID NO: 1002008 - RNA, 22 nt, Human
acagaguccuagcugcaaagaa

SEQ ID NO: 1002009 - RNA, 22 nt, Human
cccuggcagagggggcaggugc

SEQ ID NO: 1002010 - RNA, 22 nt, Human
gccuggcaauggccucaggaag

SEQ ID NO: 1002011 - RNA, 22 nt, Human
cuccugaggacuucuauugggu

SEQ ID NO: 1002012 - RNA, 22 nt, Human
accugccuauggagccacaugg

SEQ ID NO: 1002013 - RNA, 22 nt, Human
uccuggcauugugcagggugug

SEQ ID NO: 1002014 - RNA, 22 nt, Human
agggacucccugggccgacacg

SEQ ID NO: 1002015 - RNA, 22 nt, Human
ucuggcagugagcaacuugaca

SEQ ID NO: 1002016 - RNA, 22 nt, Human
acagguggaggcuuuaggaggu

SEQ ID NO: 1002017 - RNA, 22 nt, Human
ugcacaggugagacucaggaag

SEQ ID NO: 1002018 - RNA, 22 nt, Human
uccaaggcuccggcccuggcgu

SEQ ID NO: 1002019 - RNA, 17 nt, Human
uccaggcagcaacugag

SEQ ID NO: 1002020 - RNA, 22 nt, Human
ucuggcagcucuccucggcgga

SEQ ID NO: 1002021 - RNA, 22 nt, Human
uccuggcaguaauuugauguug

SEQ ID NO: 1002022 - RNA, 22 nt, Human
gcuggcaggagaccauacccua

SEQ ID NO: 1002023 - RNA, 22 nt, Human
uggcagugggaauggacaaaca

SEQ ID NO: 1002024 - RNA, 22 nt, Human
uccaggcuccccugcgugcucc

SEQ ID NO: 1002025 - RNA, 22 nt, Human
ggagcugaggcugaggccucac

SEQ ID NO: 1002026 - RNA, 22 nt, Human
agggaagaagcugguaguaggu

SEQ ID NO: 1002027 - RNA, 22 nt, Human
gaggggcuggguagggcaaccc

SEQ ID NO: 1002028 - RNA, 22 nt, Human
ucccagccuuucuuuucugcug

SEQ ID NO: 1002029 - RNA, 22 nt, Human
gcuggcagguccaagauagagc

SEQ ID NO: 1002030 - RNA, 22 nt, Human
gagaggcuggcagugccagguu

SEQ ID NO: 1002031 - RNA, 23 nt, Human
uuccaggcagagcagggauuaga

SEQ ID NO: 1002032 - RNA, 22 nt, Human
gaggagcuguucccucaccucu

SEQ ID NO: 1002033 - RNA, 22 nt, Human
ucaggauggagggaagcacaga

SEQ ID NO: 1002034 - RNA, 22 nt, Human
agucacaguuucccugagagag

SEQ ID NO: 1002035 - RNA, 22 nt, Human
uugggaaguuuaaugacagacu

SEQ ID NO: 1002036 - RNA, 20 nt, Human
cugcuccacccggcucucag

SEQ ID NO: 1002037 - RNA, 22 nt, Human
ccccacccaccuaagagaaacu

SEQ ID NO: 1002038 - RNA, 22 nt, Human
ugagggacucccggcccugcca

SEQ ID NO: 1002039 - RNA, 22 nt, Human
uccugcagccacugcaggcaga

SEQ ID NO: 1002040 - RNA, 22 nt, Human
ccuggcagguuacaaccaguua

SEQ ID NO: 1002041 - RNA, 22 nt, Human
ucuggcaggacaugcugaccau

SEQ ID NO: 1002042 - RNA, 22 nt, Human
agaggcuuggaggugcaagguu

SEQ ID NO: 1002043 - RNA, 22 nt, Human
ccuggcaggccccuccuggauu

SEQ ID NO: 1002044 - RNA, 22 nt, Human
ugccugacugcugccaccacua

SEQ ID NO: 1002045 - RNA, 20 nt, Human
gcuggcagaugucuugagau

SEQ ID NO: 1002046 - RNA, 22 nt, Human
agccagggucucucgcucuguu

SEQ ID NO: 1002047 - RNA, 22 nt, Human
ccuccuggcuuuucccauugaa

SEQ ID NO: 1002048 - RNA, 22 nt, Human
gaggagcuggcagcgucuccgc

SEQ ID NO: 1002049 - RNA, 23 nt, Human
gcccacccucagcguccucacgg

SEQ ID NO: 1002050 - RNA, 22 nt, Human
guugggaagcagauggaugagc

SEQ ID NO: 1002051 - RNA, 22 nt, Human
aggguagggcccggagacagac

SEQ ID NO: 1002052 - RNA, 22 nt, Human
ccccacccucgcuccauuucgg

SEQ ID NO: 1002053 - RNA, 22 nt, Human
uuccuggcauagagagggcaca

SEQ ID NO: 1002054 - RNA, 22 nt, Human
aggcugcuucagcugcagggag

SEQ ID NO: 1002055 - RNA, 22 nt, Human
acuggcaguggcagcagaaaga

SEQ ID NO: 1002056 - RNA, 22 nt, Human
ucuggcaggccuugucaaucug

SEQ ID NO: 1002057 - RNA, 22 nt, Human
auccaggccccaagaccccgac

SEQ ID NO: 1002058 - RNA, 22 nt, Human
cccgagugucuacucacuccca

SEQ ID NO: 1002059 - RNA, 22 nt, Human
gcuggcagagacaagaagacua

SEQ ID NO: 1002060 - RNA, 21 nt, Human
ccuggcagaagccugauaugc

SEQ ID NO: 1002061 - RNA, 22 nt, Human
cuggcagguuuggugucuggug

SEQ ID NO: 1002062 - RNA, 22 nt, Human
uccuggcagggucuaggucuag

SEQ ID NO: 1002063 - RNA, 22 nt, Human
gagaaagacguaggcugggagg

SEQ ID NO: 1002064 - RNA, 22 nt, Human
gccagguugcugacgacgaucu

SEQ ID NO: 1002065 - RNA, 22 nt, Human
ccaggcuguaagagugauguug

SEQ ID NO: 1002066 - RNA, 22 nt, Human
uccuggcagugcuuguuuugga

SEQ ID NO: 1002067 - RNA, 22 nt, Human
guggcaguuuugacaucacaaa

SEQ ID NO: 1002068 - RNA, 22 nt, Human
cccagccuuugcuuccugguuc

SEQ ID NO: 1002069 - RNA, 22 nt, Human
agaggcuucucggauggggcag

SEQ ID NO: 1002070 - RNA, 22 nt, Human
uccugccuguuuaccuguacuu

SEQ ID NO: 1002071 - RNA, 22 nt, Human
ccuccagcgcgauccacuccgg

SEQ ID NO: 1002072 - RNA, 19 nt, Human
uccuggcacaguggaacca

SEQ ID NO: 1002073 - RNA, 22 nt, Human
gcuggcagccaagugaagaggg

SEQ ID NO: 1002074 - RNA, 22 nt, Human
gucacaggcaguaacuaggacc

SEQ ID NO: 1002075 - RNA, 22 nt, Human
ccuggcaggcaagaggaaggga

SEQ ID NO: 1002076 - RNA, 19 nt, Human
ccuuccuccccagggccau

SEQ ID NO: 1002077 - RNA, 22 nt, Human
uccucuccaugucucacgccac

SEQ ID NO: 1002078 - RNA, 22 nt, Human
cuggccucauagccaagcugug

SEQ ID NO: 1002079 - RNA, 22 nt, Human
cuccuggcacugucuugaccca

SEQ ID NO: 1002080 - RNA, 22 nt, Human
acuggcagggggagccccgaga

SEQ ID NO: 1002081 - RNA, 22 nt, Human
ucuccugggaggacaaggaagg

SEQ ID NO: 1002082 - RNA, 21 nt, Human
ucuggcaguggucuuucaaau

SEQ ID NO: 1002083 - RNA, 21 nt, Human
aaagagcccgcugagagguuc

SEQ ID NO: 1002084 - RNA, 22 nt, Human
uccuucccaggugucgccgccu

SEQ ID NO: 1002085 - RNA, 22 nt, Human
ucuggcaggguguguauuuaca

SEQ ID NO: 1002086 - RNA, 22 nt, Human
uggcaggaaaguaacagagcac

SEQ ID NO: 1002087 - RNA, 22 nt, Human
cuccuggcaguuccccuuguca

SEQ ID NO: 1002088 - RNA, 22 nt, Human
agggcugacaaauggcagugac

SEQ ID NO: 1002089 - RNA, 22 nt, Human
ucuggcagaucuucccacguuu

SEQ ID NO: 1002090 - RNA, 22 nt, Human
ccuggcagcuguuuggcuuggc

SEQ ID NO: 1002091 - RNA, 22 nt, Human
ucuggcagugauuucugugauc

SEQ ID NO: 1002092 - RNA, 22 nt, Human
ccuucucucugaagaccccaaa

SEQ ID NO: 1002093 - RNA, 18 nt, Human
ccuagccuccaagcucau

SEQ ID NO: 1002094 - RNA, 22 nt, Human
aggggugugcauccuggaggau

SEQ ID NO: 1002095 - RNA, 22 nt, Human
cucugagcagaggccguggcua

SEQ ID NO: 1002096 - RNA, 22 nt, Human
agcagguugugauacacucaga

SEQ ID NO: 1002097 - RNA, 22 nt, Human
ucccugcccucagugcacccgg

SEQ ID NO: 1002098 - RNA, 22 nt, Human
ucccacccauccugcaucucuu

SEQ ID NO: 1002099 - RNA, 22 nt, Human
uccaggcucuaggcugcucucc

SEQ ID NO: 1002100 - RNA, 22 nt, Human
cccagcccacgguccugggugg

SEQ ID NO: 1002101 - RNA, 22 nt, Human
ucccagccaggcucuaccacuu

SEQ ID NO: 1002102 - RNA, 22 nt, Human
gaggagcugagccacguccugg

SEQ ID NO: 1002103 - RNA, 22 nt, Human
ucaggcccuuugcugcugcccc

SEQ ID NO: 1002104 - RNA, 22 nt, Human
ucuggcaguuccuuguugauau

SEQ ID NO: 1002105 - RNA, 22 nt, Human
gagaaagaugaagaguggcguu

SEQ ID NO: 1002106 - RNA, 22 nt, Human
ucuugggauagugucucauggc

SEQ ID NO: 1002107 - RNA, 22 nt, Human
uccccaccuaagauacccaucu

SEQ ID NO: 1002108 - RNA, 22 nt, Human
gacugccucaguuucccugcag

SEQ ID NO: 1002109 - RNA, 22 nt, Human
uuccaggccgggcaggaaacac

SEQ ID NO: 1002110 - RNA, 22 nt, Human
gagggugucugcguaacuggca

SEQ ID NO: 1002111 - RNA, 22 nt, Human
cuccuggcacucaguguggaag

SEQ ID NO: 1002112 - RNA, 22 nt, Human
gauggccuuguuuucucccuuc

SEQ ID NO: 1002113 - RNA, 22 nt, Human
acaucccacagaaacauacaua

SEQ ID NO: 1002114 - RNA, 22 nt, Human
ucagcuuucucaaagaagcugg

SEQ ID NO: 1002115 - RNA, 22 nt, Human
ggcuuuauuuugcaugaaugcu

SEQ ID NO: 1002116 - RNA, 22 nt, Human
cagggcucaccacugggauccu

SEQ ID NO: 1002117 - RNA, 22 nt, Human
gaggagcuggcagcgucuccgc

SEQ ID NO: 1002118 - RNA, 22 nt, Human
augaaaaguucgaucuagaagg

SEQ ID NO: 1002119 - RNA, 22 nt, Human
cuggaaaggguccucauucugu

SEQ ID NO: 1002120 - RNA, 22 nt, Human
ugcagagagauccucaggguuu

SEQ ID NO: 1002121 - RNA, 22 nt, Human
cucugcagauucaucccuucac

SEQ ID NO: 1002122 - RNA, 22 nt, Human
ucagagagugcaaaauauagcu

SEQ ID NO: 1002123 - RNA, 22 nt, Human
ucugggcuugguuagggcuguu

SEQ ID NO: 1002124 - RNA, 22 nt, Human
cugagcagugguucuugagcgc

SEQ ID NO: 1002125 - RNA, 22 nt, Human
uagauacaggcucucugagccu

SEQ ID NO: 1002126 - RNA, 22 nt, Human
aaacaccagucccaguauacac

SEQ ID NO: 1002127 - RNA, 22 nt, Human
acauuuagaguucuuuacucca

SEQ ID NO: 1002128 - RNA, 22 nt, Human
uucccaguuagucauuuuuaca

SEQ ID NO: 1002129 - RNA, 22 nt, Human
ugauucacagacuucacaaggc

SEQ ID NO: 1002130 - RNA, 22 nt, Human
caaauacuacgauucuugcagu

SEQ ID NO: 1002131 - RNA, 19 nt, Human
uuugugaagaaaaugaugc

SEQ ID NO: 1002132 - RNA, 22 nt, Human
caggagggcccgagacucuucc

SEQ ID NO: 1002133 - RNA, 22 nt, Human
ucuggcagagauauccauccca

SEQ ID NO: 1002134 - RNA, 22 nt, Human
cagcucagucuggagagaugca

SEQ ID NO: 1002135 - RNA, 21 nt, Human
caugaagccgguucccuguuu

SEQ ID NO: 1002136 - RNA, 23 nt, Human
uuggagagggugaguagugucag

SEQ ID NO: 1002137 - RNA, 22 nt, Human
gcacacaguauaugcucauuaa

SEQ ID NO: 1002138 - RNA, 22 nt, Human
ccaggcucacugacuaccacau

SEQ ID NO: 1002139 - RNA, 22 nt, Human
agagcaucuaacacauaagccu

SEQ ID NO: 1002140 - RNA, 22 nt, Human
uugauuucuuacucuuccaagg

SEQ ID NO: 1002141 - RNA, 22 nt, Human
cagggcucuucaucacacagua

SEQ ID NO: 1002142 - RNA, 22 nt, Human
acagagagaauuggguuuacag

SEQ ID NO: 1002143 - RNA, 22 nt, Human
cacacagaugguaagggaggga

SEQ ID NO: 1002144 - RNA, 22 nt, Human
aaaauccuuagccgagugaggu

SEQ ID NO: 1002145 - RNA, 22 nt, Human
cccacccucaagggugucuaua

SEQ ID NO: 1002146 - RNA, 22 nt, Human
ugaaaucaaugucuucugucuc

SEQ ID NO: 1002147 - RNA, 22 nt, Human
uugaaauacugcauuguucagu

SEQ ID NO: 1002148 - RNA, 22 nt, Human
gguguugggcucacugguccuu

SEQ ID NO: 1002149 - RNA, 22 nt, Human
cugggcugcggugguagguugu

SEQ ID NO: 1002150 - RNA, 22 nt, Human
cuugccucccucagcucacagc

SEQ ID NO: 1002151 - RNA, 22 nt, Human
cucugggcugccuuuuagcucu

SEQ ID NO: 1002152 - RNA, 22 nt, Human
augaacugcaguauaaacuugg

SEQ ID NO: 1002153 - RNA, 22 nt, Human
uccaggcaagggaggagcaugg

SEQ ID NO: 1002154 - RNA, 20 nt, Human
caccacagaauuggggacag

SEQ ID NO: 1002155 - RNA, 22 nt, Human
gcaggcucagagcagauuagca

SEQ ID NO: 1002156 - RNA, 22 nt, Human
cacacacaguuuuguauucugu

SEQ ID NO: 1002157 - RNA, 22 nt, Human
uggaagagaaaauccacccuua

SEQ ID NO: 1002158 - RNA, 22 nt, Human
ugggcuccaauuuguccuuuca

SEQ ID NO: 1002159 - RNA, 22 nt, Human
cuguggcucauucuugguggca

SEQ ID NO: 1002160 - RNA, 22 nt, Human
ccuggcagcauugguagagauu

SEQ ID NO: 1002161 - RNA, 22 nt, Human
acacacaugguauuguucagaa

SEQ ID NO: 1002162 - RNA, 22 nt, Human
auacaaauuuauagaugcauuu

SEQ ID NO: 1002163 - RNA, 22 nt, Human
acaggcucgugcgcgcacgugu

SEQ ID NO: 1002164 - RNA, 19 nt, Human
gggagcugaggucuuuggu

SEQ ID NO: 1002165 - RNA, 22 nt, Human
auuauuaggugcucucugacaa

SEQ ID NO: 1002166 - RNA, 22 nt, Human
uuuucauuuuuguagaugcaag

SEQ ID NO: 1002167 - RNA, 22 nt, Human
cagggcucaggaaaucagacgu

SEQ ID NO: 1002168 - RNA, 22 nt, Human
auacaugacucacacauucugc

SEQ ID NO: 1002169 - RNA, 22 nt, Human
cuggcagguuuggugucuggug

SEQ ID NO: 1002170 - RNA, 22 nt, Human
auuuucauuuugcagggugaga

SEQ ID NO: 1002171 - RNA, 22 nt, Human
aaaaguauuuauggcuauguaa

SEQ ID NO: 1002172 - RNA, 22 nt, Human
cuguuauuucugccaggugagu

SEQ ID NO: 1002173 - RNA, 22 nt, Human
ggcuccacccugcuuccagaag

SEQ ID NO: 1002174 - RNA, 22 nt, Human
gagcuuuaggagaaggagguca

SEQ ID NO: 1002175 - RNA, 22 nt, Human
cccaggcaucccauuaaggagc

SEQ ID NO: 1002176 - RNA, 22 nt, Human
uauucccagccucuuucuaucu

SEQ ID NO: 1002177 - RNA, 22 nt, Human
gcuucuggaggagcugggcuga

SEQ ID NO: 1002178 - RNA, 22 nt, Human
acauuuagcuguacaaucuaug

SEQ ID NO: 1002179 - RNA, 22 nt, Human
cuuucucaaugccggaaggcac

SEQ ID NO: 1002180 - RNA, 22 nt, Human
ugcuucugggccugguguuccc

SEQ ID NO: 1002181 - RNA, 22 nt, Human
uauuaggguuuugaagguuugu

SEQ ID NO: 1002182 - RNA, 22 nt, Human
gaaaagaguccugugugaggag

SEQ ID NO: 1002183 - RNA, 22 nt, Human
aaacacagggauauauauucca

SEQ ID NO: 1002184 - RNA, 22 nt, Human
cagaagucacccucagaauaac

SEQ ID NO: 1002185 - RNA, 22 nt, Human
uaggaagcugagcagcauuccu

SEQ ID NO: 1002186 - RNA, 22 nt, Human
accaagcuucguggaggaaguu

SEQ ID NO: 1002187 - RNA, 20 nt, Human
ucccucccuccagcucuggg

SEQ ID NO: 1002188 - RNA, 22 nt, Human
uggaaauauacaaugugucucu

SEQ ID NO: 1002189 - RNA, 21 nt, Human
ucuagaauccuguauaagacu

SEQ ID NO: 1002190 - RNA, 22 nt, Human
gguggccaggccagcucuggcc

SEQ ID NO: 1002191 - RNA, 18 nt, Human
uuucacagauucaugacu

SEQ ID NO: 1002192 - RNA, 22 nt, Human
uggcagugggaauggacaaaca

SEQ ID NO: 1002193 - RNA, 22 nt, Human
ccacccuaacaauccuuacugu

SEQ ID NO: 1002194 - RNA, 22 nt, Human
acuggcagaauugaauaguugu

SEQ ID NO: 1002195 - RNA, 22 nt, Human
ucagcucuguuuugaguggaac

SEQ ID NO: 1002196 - RNA, 22 nt, Human
cgcaggcucgguucacagagca

SEQ ID NO: 1002197 - RNA, 22 nt, Human
cccagccucuguuugcuccucu

SEQ ID NO: 1002198 - RNA, 22 nt, Human
ugcauacacaugugcacauacg

SEQ ID NO: 1002199 - RNA, 22 nt, Human
uugcaacaucugaacauuuauc

SEQ ID NO: 1002200 - RNA, 22 nt, Human
cauuuguaguuaaaaaugucuc

SEQ ID NO: 1002201 - RNA, 20 nt, Human
uuaucugucaaucugucuca

SEQ ID NO: 1002202 - RNA, 22 nt, Human
ccaccccaaaugaagaccucuc

SEQ ID NO: 1002203 - RNA, 22 nt, Human
ugcagggaaaacccaggaugcu

SEQ ID NO: 1002204 - RNA, 22 nt, Human
aauuugauuuucuuaaaccaua

SEQ ID NO: 1002205 - RNA, 22 nt, Human
ucuugggauagugucucauggc

SEQ ID NO: 1002206 - RNA, 22 nt, Human
cugccugcaggacaccucgcua

SEQ ID NO: 1002207 - RNA, 22 nt, Human
gcagggacgcagcacucuccgu

SEQ ID NO: 1002208 - RNA, 22 nt, Human
ucugugacugauggaggcuuuu

SEQ ID NO: 1002209 - RNA, 22 nt, Human
ccacaaaacugugugucaaaga

SEQ ID NO: 1002210 - RNA, 22 nt, Human
gcacccagagggcagggucucc

SEQ ID NO: 1002211 - RNA, 20 nt, Human
uggccucugagaugccacgg

SEQ ID NO: 1002212 - RNA, 22 nt, Human
gguggccugaauuagcucaggg

SEQ ID NO: 1002213 - RNA, 22 nt, Human
auaaaguuuaaaagucaauagu

SEQ ID NO: 1002214 - RNA, 22 nt, Human
cacaucagggcugcuugggggu

SEQ ID NO: 1002215 - RNA, 22 nt, Human
uagaauucauguuacuguuagc

SEQ ID NO: 1002216 - RNA, 22 nt, Human
cucugagcagaggccguggcua

SEQ ID NO: 1002217 - RNA, 23 nt, Human
aaauuauugcucuucaauugccu

SEQ ID NO: 1002218 - RNA, 22 nt, Human
uggaacacaucuaaggaagcag

SEQ ID NO: 1002219 - RNA, 22 nt, Human
aaggcuuuuaacuacuguuuua

SEQ ID NO: 1002220 - RNA, 22 nt, Human
agcauucauugcuagaauguaa

SEQ ID NO: 1002221 - RNA, 22 nt, Human
cagagcugcuucccaguuugug

SEQ ID NO: 1002222 - RNA, 22 nt, Human
cagugaggugcccagccugccc

SEQ ID NO: 1002223 - RNA, 22 nt, Human
gaaucauuuagcucugcaugga

SEQ ID NO: 1002224 - RNA, 22 nt, Human
cacaggcuuccaguccccagcu

SEQ ID NO: 1002225 - RNA, 22 nt, Human
uguacaaagguacuuugauguu

SEQ ID NO: 1002226 - RNA, 22 nt, Human
gagaaagaugaagaguggcguu

SEQ ID NO: 1002227 - RNA, 22 nt, Human
auaauucagguuuucuggcaca

SEQ ID NO: 1002228 - RNA, 22 nt, Human
cuuagggagaaugccucugcag

SEQ ID NO: 1002229 - RNA, 22 nt, Human
ugucuucaucuccaugcacaga

SEQ ID NO: 1002230 - RNA, 22 nt, Human
ccuggcagcuaagugcuuugag

SEQ ID NO: 1002231 - RNA, 22 nt, Human
acaggugguaaaauggacuguc

SEQ ID NO: 1002232 - RNA, 22 nt, Human
ccugaccuauuuuucucagcug

SEQ ID NO: 1002233 - RNA, 22 nt, Human
uuguauuucuccacuuucuguu

SEQ ID NO: 1002234 - RNA, 22 nt, Human
cuccugcaagccuccccaagca

SEQ ID NO: 1002235 - RNA, 22 nt, Human
agcuuuaugaggagaccuuagu

SEQ ID NO: 1002236 - RNA, 19 nt, Human
guccaguguuuuccaguca

SEQ ID NO: 1002237 - RNA, 17 nt, Human
gccugcaggcccgcaga

SEQ ID NO: 1002238 - RNA, 22 nt, Human
cuuccaagaugaacagcaagcg

SEQ ID NO: 1002239 - RNA, 20 nt, Human
ucccaaggaugccugggugu

SEQ ID NO: 1002240 - RNA, 22 nt, Human
gaagcacugcauuucaagauca

SEQ ID NO: 1002241 - RNA, 22 nt, Human
ucgggcucgcucuccuagcgga

SEQ ID NO: 1002242 - RNA, 22 nt, Human
agagugaaaagcuagagcagua

SEQ ID NO: 1002243 - RNA, 22 nt, Human
gcuccaggugucccagguaaaa

SEQ ID NO: 1002244 - RNA, 22 nt, Human
gaauacauuggaaaucagaaua

SEQ ID NO: 1002245 - RNA, 22 nt, Human
ucccucuaaacuguaagauucu

SEQ ID NO: 1002246 - RNA, 22 nt, Human
cugcaggguuuuucaaggacaa

SEQ ID NO: 1002247 - RNA, 22 nt, Human
guccucugggcagcugccccac

SEQ ID NO: 1002248 - RNA, 22 nt, Human
gaaacaauuuuuguugucuaag

SEQ ID NO: 1002249 - RNA, 22 nt, Human
ugcuucugauucaugguuauug

SEQ ID NO: 1002250 - RNA, 22 nt, Human
uucacaguggcugugccauuug

SEQ ID NO: 1002251 - RNA, 22 nt, Human
uacacacagaggccaugggauu

SEQ ID NO: 1002252 - RNA, 22 nt, Human
agcucccagcagagcuggccac

SEQ ID NO: 1002253 - RNA, 22 nt, Human
ucagcuuuuuggauugcccaag

SEQ ID NO: 1002254 - RNA, 22 nt, Human
guuagggaagcgcuguguucuu

SEQ ID NO: 1002255 - RNA, 22 nt, Human
ccacacuaaacugcucaaacca

SEQ ID NO: 1002256 - RNA, 22 nt, Human
acuggcagcagcagcccuuggg

SEQ ID NO: 1002257 - RNA, 20 nt, Human
gcuccaggucagagaggacg

SEQ ID NO: 1002258 - RNA, 22 nt, Human
cagggcucccaaauaucucuuc

SEQ ID NO: 1002259 - RNA, 22 nt, Human
gacaggcuuccuaagugccaga

SEQ ID NO: 1002260 - RNA, 22 nt, Human
acauaugugcuuauauccauga

SEQ ID NO: 1002261 - RNA, 18 nt, Human
cuccuccacagccccugc

SEQ ID NO: 1002262 - RNA, 22 nt, Human
uuuguacauccuaauucugagu

SEQ ID NO: 1002263 - RNA, 22 nt, Human
aacaguaaaaaucauuuaguug

SEQ ID NO: 1002264 - RNA, 22 nt, Human
uacccagcuucaagucaggacu

SEQ ID NO: 1002265 - RNA, 22 nt, Human
uuccaaguguugagauuagagg

SEQ ID NO: 1002266 - RNA, 21 nt, Human
uagggcucucugugucaggug

SEQ ID NO: 1002267 - RNA, 22 nt, Human
gguuucaacuaaaucaagaagg

SEQ ID NO: 1002268 - RNA, 22 nt, Human
acacacuguugcucauccaggc

SEQ ID NO: 1002269 - RNA, 22 nt, Human
ggcauccaguucugaucaacaa

SEQ ID NO: 1002270 - RNA, 22 nt, Human
agcagcuccugccaugagugcu

SEQ ID NO: 1002271 - RNA, 22 nt, Human
uaacuacauuucacugcaauua

SEQ ID NO: 1002272 - RNA, 17 nt, Human
gcuucuggagcuucugu

SEQ ID NO: 1002273 - RNA, 21 nt, Human
ugggaccuauuucaacuggau

SEQ ID NO: 1002274 - RNA, 22 nt, Human
gacccaggguggucaccugaaa

SEQ ID NO: 1002275 - RNA, 17 nt, Human
gccuucucugcccucac

SEQ ID NO: 1002276 - RNA, 22 nt, Human
cuuacaaaggagaggagauagg

SEQ ID NO: 1002277 - RNA, 21 nt, Human
uccugccuuaguccagagcag

SEQ ID NO: 1002278 - RNA, 22 nt, Human
caguguggugugcacagcuuag

SEQ ID NO: 1002279 - RNA, 23 nt, Human
uuuauuuauuuaggcugagggau

SEQ ID NO: 1002280 - RNA, 22 nt, Human
uccaagcuuuccaugcccucac

SEQ ID NO: 1002281 - RNA, 22 nt, Human
cagguuuagguggacgugcagg

SEQ ID NO: 1002282 - RNA, 22 nt, Human
ugaggccagugacauauauuaa

SEQ ID NO: 1002283 - RNA, 22 nt, Human
uagggcucuggugggcucuguu

SEQ ID NO: 1002284 - RNA, 22 nt, Human
uacacaucacuguaucuuucag

SEQ ID NO: 1002285 - RNA, 22 nt, Human
ucuggcaguaauaggggagaga

SEQ ID NO: 1002286 - RNA, 22 nt, Human
aaaguuguucaguaagaaacuc

SEQ ID NO: 1002287 - RNA, 22 nt, Human
cuucuggguauuccagauaccu

SEQ ID NO: 1002288 - RNA, 22 nt, Human
gauucacucauauuuuacguuu

SEQ ID NO: 1002289 - RNA, 21 nt, Human
auucugucaucccagcuacuu

SEQ ID NO: 1002290 - RNA, 22 nt, Human
acuguccauucacucauauuca

SEQ ID NO: 1002291 - RNA, 22 nt, Human
ugcacagcuggcucuccuuuuc

SEQ ID NO: 1002292 - RNA, 22 nt, Human
aggaccugaaauucuugcuuuu

SEQ ID NO: 1002293 - RNA, 22 nt, Human
ucuccaggaagcccucccugac

SEQ ID NO: 1002294 - RNA, 22 nt, Human
ugcuucugacauguucuugguu

SEQ ID NO: 1002295 - RNA, 22 nt, Human
cccccaaaguuugcacggauaa

SEQ ID NO: 1002296 - RNA, 22 nt, Human
aaagaauagccuuuguccaaau

SEQ ID NO: 1002297 - RNA, 22 nt, Human
uccaggaggugaggggaccaaa

SEQ ID NO: 1002298 - RNA, 20 nt, Human
ucacuguaauugccuacauu

SEQ ID NO: 1002299 - RNA, 22 nt, Human
ugcaggcugcuggcaguagcuu

SEQ ID NO: 1002300 - RNA, 22 nt, Human
uuaacacauauuuaucaauugc

SEQ ID NO: 1002301 - RNA, 22 nt, Human
aaagaucaauagauaaagcuac

SEQ ID NO: 1002302 - RNA, 23 nt, Human
aguguugguugggaagccaagca

SEQ ID NO: 1002303 - RNA, 22 nt, Human
cacccagcacagagggaggcga

SEQ ID NO: 1002304 - RNA, 22 nt, Human
guccucuguagggcugggccac

SEQ ID NO: 1002305 - RNA, 22 nt, Human
auguuagaaucucugaaugugg

SEQ ID NO: 1002306 - RNA, 18 nt, Human
ucuggaacaacuucaugu

SEQ ID NO: 1002307 - RNA, 22 nt, Human
caggcucuuuugguggcaagga

SEQ ID NO: 1002308 - RNA, 21 nt, Human
aggcugcuggcucaggguccu

SEQ ID NO: 1002309 - RNA, 22 nt, Human
aucagagaaauggagggcgcuu

SEQ ID NO: 1002310 - RNA, 22 nt, Human
cauaauauacuacauugaugaa

SEQ ID NO: 1002311 - RNA, 22 nt, Human
aggcugugggaguugagagucu

SEQ ID NO: 1002312 - RNA, 22 nt, Human
ugggcugaguggcagccagagu

SEQ ID NO: 1002313 - RNA, 22 nt, Human
agaggcuuggaggugcaagguu

SEQ ID NO: 1002314 - RNA, 22 nt, Human
aaggaccuauauugucagagga

SEQ ID NO: 1002315 - RNA, 17 nt, Human
accaggcaacacgccca

SEQ ID NO: 1002316 - RNA, 22 nt, Human
acagagcaugcucaguguguga

SEQ ID NO: 1002317 - RNA, 22 nt, Human
gggcugacuccuauuggaugaa

SEQ ID NO: 1002318 - RNA, 22 nt, Human
uccuaguucucugccagucgcu

SEQ ID NO: 1002319 - RNA, 22 nt, Human
uuuucuuauggugaagcacaaa

SEQ ID NO: 1002320 - RNA, 22 nt, Human
uucacacacagcuuccuauugu

SEQ ID NO: 1002321 - RNA, 22 nt, Human
aagagcauauuaauaguggaga

SEQ ID NO: 1002322 - RNA, 22 nt, Human
acugggcuuaugcuguggagua

SEQ ID NO: 1002323 - RNA, 22 nt, Human
acaaauuuauugaagggcauau

SEQ ID NO: 1002324 - RNA, 22 nt, Human
uccaugagacagauacuguaag

SEQ ID NO: 1002325 - RNA, 22 nt, Human
auguccagggcacacagcagug

SEQ ID NO: 1002326 - RNA, 16 nt, Human
uguaugaacgucucca

SEQ ID NO: 1002327 - RNA, 22 nt, Human
acagcuuuucaauucugcugag

SEQ ID NO: 1002328 - RNA, 22 nt, Human
agcucccaauugacuugaacua

SEQ ID NO: 1002329 - RNA, 21 nt, Human
uccugcaggaggccugagagg

SEQ ID NO: 1002330 - RNA, 22 nt, Human
ccacaucauggauacaguuaug

SEQ ID NO: 1002331 - RNA, 22 nt, Human
ccaggcucugagaggaauguga

SEQ ID NO: 1002332 - RNA, 22 nt, Human
gcugccacauuuucaggacuaa

SEQ ID NO: 1002333 - RNA, 22 nt, Human
gcccggcagucacacacccagg

SEQ ID NO: 1002334 - RNA, 22 nt, Human
acaugauucuugauaggcauug

SEQ ID NO: 1002335 - RNA, 22 nt, Human
ucaucacauguguagucauccc

SEQ ID NO: 1002336 - RNA, 22 nt, Human
uucacuuaacaucauaucauga

SEQ ID NO: 1002337 - RNA, 22 nt, Human
auuuggcaacauuaauugaauc

SEQ ID NO: 1002338 - RNA, 22 nt, Human
gcugcaggcggccgugguggcg

SEQ ID NO: 1002339 - RNA, 18 nt, Human
uaaauauauuucccccuu

SEQ ID NO: 1002340 - RNA, 22 nt, Human
aaacaucauaggcaugcaugau

SEQ ID NO: 1002341 - RNA, 22 nt, Human
aaguauuucuggccugugaaag

SEQ ID NO: 1002342 - RNA, 22 nt, Human
cccugccucugaagcugcucag

SEQ ID NO: 1002343 - RNA, 22 nt, Human
gccugcagauauauaggauggu

SEQ ID NO: 1002344 - RNA, 21 nt, Human
uccuguaagcuuggguggcuc

SEQ ID NO: 1002345 - RNA, 22 nt, Human
auacacacugcuauccuuuuuu

SEQ ID NO: 1002346 - RNA, 22 nt, Human
aagacauugucauuuuauaauu

SEQ ID NO: 1002347 - RNA, 22 nt, Human
agaggcuuggccucaguucugu

SEQ ID NO: 1002348 - RNA, 22 nt, Human
gacccagcuuaagucacauguu

SEQ ID NO: 1002349 - RNA, 22 nt, Human
cauauguauuucucauaauuag

SEQ ID NO: 1002350 - RNA, 19 nt, Human
aggcuuggcuagauuuacu

SEQ ID NO: 1002351 - RNA, 22 nt, Human
gcugggcuugguuucccugcuu

SEQ ID NO: 1002352 - RNA, 22 nt, Human
gccugcaguucugugcuaggca

SEQ ID NO: 1002353 - RNA, 21 nt, Human
acagauauuucauugaacauu

SEQ ID NO: 1002354 - RNA, 18 nt, Human
ccuggcagccaugcgcgc

SEQ ID NO: 1002355 - RNA, 22 nt, Human
ucucuuaauuuuggaauagugu

SEQ ID NO: 1002356 - RNA, 22 nt, Human
gagggcuccauuccccgugccc

SEQ ID NO: 1002357 - RNA, 22 nt, Human
gggcugaccccaccccucacuc

SEQ ID NO: 1002358 - RNA, 22 nt, Human
gccaggcagcugggagggugcc

SEQ ID NO: 1002359 - RNA, 22 nt, Human
uugugaaauguuucaaaauagu

SEQ ID NO: 1002360 - RNA, 22 nt, Human
gaggcacauauauacagagccc

SEQ ID NO: 1002361 - RNA, 22 nt, Human
cuuauuagugucugucugaguu

SEQ ID NO: 1002362 - RNA, 22 nt, Human
auauuagggucucuaaauucua

SEQ ID NO: 1002363 - RNA, 20 nt, Human
cucuuuugacucuuugcaag

SEQ ID NO: 1002364 - RNA, 22 nt, Human
cacauacugagaaucacaccca

SEQ ID NO: 1002365 - RNA, 22 nt, Human
agggggucguccggaagaccug

SEQ ID NO: 1002366 - RNA, 22 nt, Human
acccaggcugcuucucaguggc

SEQ ID NO: 1002367 - RNA, 23 nt, Human
uauuagggccaggacuggcaaau

SEQ ID NO: 1002368 - RNA, 20 nt, Human
uccaggcagacagcuauggg

SEQ ID NO: 1002369 - RNA, 22 nt, Human
cucugauuuccuuauucuguca

SEQ ID NO: 1002370 - RNA, 22 nt, Human
ccaguguucauaauuuuacacu

SEQ ID NO: 1002371 - RNA, 22 nt, Human
ucaaggagcccacagucuaaug

SEQ ID NO: 1002372 - RNA, 22 nt, Human
cacauaaucaccaaguccuuuc

SEQ ID NO: 1002373 - RNA, 22 nt, Human
gcucacagccggcuggcagggg

SEQ ID NO: 1002374 - RNA, 22 nt, Human
uaugucaaaguuaagaaauagg

SEQ ID NO: 1002375 - RNA, 22 nt, Human
uguacauagaucuugaaaauua

SEQ ID NO: 1002376 - RNA, 22 nt, Human
cagcauuuagaauuugaagugu

SEQ ID NO: 1002377 - RNA, 22 nt, Human
cugggaggcagucucucuagaa

SEQ ID NO: 1002378 - RNA, 22 nt, Human
auuuauuauugugguuacuucu

SEQ ID NO: 1002379 - RNA, 22 nt, Human
guagggacaugccauuaucuca

SEQ ID NO: 1002380 - RNA, 22 nt, Human
gugagagggcugggcucaugau

SEQ ID NO: 1002381 - RNA, 22 nt, Human
gcagggaccucacuacccccag

SEQ ID NO: 1002382 - RNA, 22 nt, Human
agugcuccuauggaucaguugu

SEQ ID NO: 1002383 - RNA, 22 nt, Human
acacaucuuagacugaaauaug

SEQ ID NO: 1002384 - RNA, 19 nt, Human
uucuggggccuggccuugg

SEQ ID NO: 1002385 - RNA, 22 nt, Human
ucuggggaauguucauuucuga

SEQ ID NO: 1002386 - RNA, 22 nt, Human
cugcucuaacugcauuaguuuu

SEQ ID NO: 1002387 - RNA, 22 nt, Human
uuccuggcgccacggagccggu

SEQ ID NO: 1002388 - RNA, 22 nt, Human
aauguauuccucaugcaagagu

SEQ ID NO: 1002389 - RNA, 22 nt, Human
ugcuagaaaucugaaacuagca

SEQ ID NO: 1002390 - RNA, 22 nt, Human
aggaagaacagauaauggacgc

SEQ ID NO: 1002391 - RNA, 22 nt, Human
uggaacacugaucauugccuuu

SEQ ID NO: 1002392 - RNA, 22 nt, Human
uagcuuuagaaauauucucaga

SEQ ID NO: 1002393 - RNA, 22 nt, Human
cuucugggauuuuugaagacuc

SEQ ID NO: 1002394 - RNA, 22 nt, Human
cagggcucugccuugagggaug

SEQ ID NO: 1002395 - RNA, 22 nt, Human
cuguggcuucugcuugggccuc

SEQ ID NO: 1002396 - RNA, 22 nt, Human
ugcaggcucaccugccagggcc

SEQ ID NO: 1002397 - RNA, 22 nt, Human
uccaggcauaagccuugagugu

SEQ ID NO: 1002398 - RNA, 22 nt, Human
aaccugcauguuucuaaaagca

SEQ ID NO: 1002399 - RNA, 22 nt, Human
aaaugcuagggagaaacucucc

SEQ ID NO: 1002400 - RNA, 22 nt, Human
uacauucagaagaauggacacg

SEQ ID NO: 1002401 - RNA, 22 nt, Human
gauauguauugaaugaucauuu

SEQ ID NO: 1002402 - RNA, 22 nt, Human
uccugcagcugcagaccugggg

SEQ ID NO: 1002403 - RNA, 22 nt, Human
gacccauauaggacccuccaaa

SEQ ID NO: 1002404 - RNA, 23 nt, Human
ugccaaaguuuaccuaacacugg

SEQ ID NO: 1002405 - RNA, 22 nt, Human
ggcucugcagugacuugagggg

SEQ ID NO: 1002406 - RNA, 22 nt, Human
auuauuagauucuuaauuguaa

SEQ ID NO: 1002407 - RNA, 22 nt, Human
gccaggcauuuguuaggugcug

SEQ ID NO: 1002408 - RNA, 22 nt, Human
ccagagagggcgccaccuggag

SEQ ID NO: 1002409 - RNA, 22 nt, Human
ccagagaguaaacauuuuccgg

SEQ ID NO: 1002410 - RNA, 22 nt, Human
agcaggcugggcaauaugggca

SEQ ID NO: 1002411 - RNA, 22 nt, Human
agcuuuaugcuuccuacaagcu

SEQ ID NO: 1002412 - RNA, 22 nt, Human
gagcauuugguuauaguaauuu

SEQ ID NO: 1002413 - RNA, 22 nt, Human
aggcuccauaccaucuccggag

SEQ ID NO: 1002414 - RNA, 22 nt, Human
uacaaaguagaaauucaguaaa

SEQ ID NO: 1002415 - RNA, 22 nt, Human
uuauuuaaaagugguaagauuc

SEQ ID NO: 1002416 - RNA, 22 nt, Human
uagaacauaagucauucauuug

SEQ ID NO: 1002417 - RNA, 22 nt, Human
gacccagaaggagugcccuaga

SEQ ID NO: 1002418 - RNA, 22 nt, Human
auaugauuccacuauuguaugg

SEQ ID NO: 1002419 - RNA, 23 nt, Human
gggcuccagucucugcucaguug

SEQ ID NO: 1002420 - RNA, 22 nt, Human
agcagguggacagaggaagaaa

SEQ ID NO: 1002421 - RNA, 22 nt, Human
ucccaccccuugacucuuuaag

SEQ ID NO: 1002422 - RNA, 22 nt, Human
gccuccggaguugcagugucuu

SEQ ID NO: 1002423 - RNA, 19 nt, Human
gcuggcagauguggccgug

SEQ ID NO: 1002424 - RNA, 22 nt, Human
cccaggcagucuggcucuaaag

SEQ ID NO: 1002425 - RNA, 22 nt, Human
ugcagggauuauguagggguug

SEQ ID NO: 1002426 - RNA, 22 nt, Human
gcuggggagggcgucaaggcca

SEQ ID NO: 1002427 - RNA, 22 nt, Human
gacccagccugguuuuuauagg

SEQ ID NO: 1002428 - RNA, 22 nt, Human
gcagggaccuugcccacccucc

SEQ ID NO: 1002429 - RNA, 22 nt, Human
auuaaauuuucacuaggcuccc

SEQ ID NO: 1002430 - RNA, 19 nt, Human
ccagucccauacaggagau

SEQ ID NO: 1002431 - RNA, 22 nt, Human
gcacccagggacuuggcuggcc

SEQ ID NO: 1002432 - RNA, 22 nt, Human
gaaagacuuccuuugagaguac

SEQ ID NO: 1002433 - RNA, 22 nt, Human
ugcagggaaugcuugcagcaug

SEQ ID NO: 1002434 - RNA, 22 nt, Human
ggcaggcugcuugggucauguc

SEQ ID NO: 1002435 - RNA, 22 nt, Human
cagauuuaccuaacuccaaguu

SEQ ID NO: 1002436 - RNA, 22 nt, Human
caguaaaagauggaaauagaau

SEQ ID NO: 1002437 - RNA, 22 nt, Human
aggaaacuguccccucauccua

SEQ ID NO: 1002438 - RNA, 22 nt, Human
cuuuucauuguuuguacaugca

SEQ ID NO: 1002439 - RNA, 22 nt, Human
cuggcagggugggcuuugcuuu

SEQ ID NO: 1002440 - RNA, 22 nt, Human
uuucuacauucaaaaacuacca

SEQ ID NO: 1002441 - RNA, 22 nt, Human
auuucacaaagaacagaugcag

SEQ ID NO: 1002442 - RNA, 18 nt, Human
uuucacaaccuccagagg

SEQ ID NO: 1002443 - RNA, 22 nt, Human
gccugcagugagugcagaaggu

SEQ ID NO: 1002444 - RNA, 22 nt, Human
agucuagggugggguccacagg

SEQ ID NO: 1002445 - RNA, 22 nt, Human
gccugcagggugaugggcugcc

SEQ ID NO: 1002446 - RNA, 17 nt, Human
gcauccaguaacaugcc

SEQ ID NO: 1002447 - RNA, 22 nt, Human
cagguuggggacuuaggaugac

SEQ ID NO: 1002448 - RNA, 22 nt, Human
aaacuucauggauaauauaaag

SEQ ID NO: 1002449 - RNA, 22 nt, Human
agagggcaugcuugguggccug

SEQ ID NO: 1002450 - RNA, 23 nt, Human
agcuuuggugaugugacagauaa

SEQ ID NO: 1002451 - RNA, 22 nt, Human
uuauuuuuaaaaguucacacag

SEQ ID NO: 1002452 - RNA, 22 nt, Human
aaugaagccagcugggaugcga

SEQ ID NO: 1002453 - RNA, 22 nt, Human
gccugcagccagggaguucucu

SEQ ID NO: 1002454 - RNA, 22 nt, Human
aaucuucauuuugacaagauuc

SEQ ID NO: 1002455 - RNA, 22 nt, Human
aucucccagccacagcauucuu

SEQ ID NO: 1002456 - RNA, 22 nt, Human
ucacauaaauuuaccagaugau

SEQ ID NO: 1002457 - RNA, 22 nt, Human
acacagccgugaaucugcuucu

SEQ ID NO: 1002458 - RNA, 22 nt, Human
acaccauacucauguugguucc

SEQ ID NO: 1002459 - RNA, 22 nt, Human
gcuucugggcaccugaacagga

SEQ ID NO: 1002460 - RNA, 22 nt, Human
cauucacaaagcugauugaugg

SEQ ID NO: 1002461 - RNA, 22 nt, Human
uguuuauugagugccuacuaua

SEQ ID NO: 1002462 - RNA, 21 nt, Human
auucagaaagggaauaaacuc

SEQ ID NO: 1002463 - RNA, 22 nt, Human
cuuacacagucuggcacuucuu

SEQ ID NO: 1002464 - RNA, 22 nt, Human
uuucagauuaucucaacuuugg

SEQ ID NO: 1002465 - RNA, 22 nt, Human
cuuggcaggguggaggaugcag

SEQ ID NO: 1002466 - RNA, 22 nt, Human
auguccagaguaaagcacauuc

SEQ ID NO: 1002467 - RNA, 22 nt, Human
aaauauacuagaugaugaccca

SEQ ID NO: 1002468 - RNA, 22 nt, Human
ugugaaaagcguguguucuagg

SEQ ID NO: 1002469 - RNA, 22 nt, Human
aaacaaacauagguuugaaagu

SEQ ID NO: 1002470 - RNA, 22 nt, Human
uacauugacuuggauuguuaga

SEQ ID NO: 1002471 - RNA, 22 nt, Human
uagacauuucugguuauugaca

SEQ ID NO: 1002472 - RNA, 22 nt, Human
cuagguauucauguuucguggc

SEQ ID NO: 1002473 - RNA, 22 nt, Human
ucauuuauaaggaugcaauuaa

SEQ ID NO: 1002474 - RNA, 22 nt, Human
ucuuuauuucugaaucccccau

SEQ ID NO: 1002475 - RNA, 22 nt, Human
gaaugaauucagcacauggaau

SEQ ID NO: 1002476 - RNA, 22 nt, Human
uauggaaacuaauucauuuuuc

SEQ ID NO: 1002477 - RNA, 22 nt, Human
uuaaauuagucaagcuucucug

SEQ ID NO: 1002478 - RNA, 20 nt, Human
acuccagguggcaugaggac

SEQ ID NO: 1002479 - RNA, 22 nt, Human
acagcucugcauggcaguuauu

SEQ ID NO: 1002480 - RNA, 22 nt, Human
augcuuuauuauuuugcaggga

SEQ ID NO: 1002481 - RNA, 23 nt, Human
uuccaggcagagcagggauuaga

SEQ ID NO: 1002482 - RNA, 22 nt, Human
acaagguauccacauuaaaugu

SEQ ID NO: 1002483 - RNA, 22 nt, Human
augaagcugaaaaaggcauaua

SEQ ID NO: 1002484 - RNA, 22 nt, Human
ucagcucuaaguuuuaugcaaa

SEQ ID NO: 1002485 - RNA, 22 nt, Human
augaaaauguacauguguauaa

SEQ ID NO: 1002486 - RNA, 22 nt, Human
ccccacacucuuuacauucaua

SEQ ID NO: 1002487 - RNA, 22 nt, Human
ccuggcaggccccuccuggauu

SEQ ID NO: 1002488 - RNA, 22 nt, Human
accaggcaaaaccacaggagca

SEQ ID NO: 1002489 - RNA, 22 nt, Human
aguaugaauugcuuugccugua

SEQ ID NO: 1002490 - RNA, 21 nt, Human
acagauuuuauaucucugcug

SEQ ID NO: 1002491 - RNA, 22 nt, Human
cauuagggacugaggaauaagg

SEQ ID NO: 1002492 - RNA, 22 nt, Human
cuggccuggggggacacauccc

SEQ ID NO: 1002493 - RNA, 22 nt, Human
ccagcccugucaccaacuggag

SEQ ID NO: 1002494 - RNA, 21 nt, Human
uggaccuguccuucucgcugu

SEQ ID NO: 1002495 - RNA, 22 nt, Human
ccaggcugggcggggaaccugg

SEQ ID NO: 1002496 - RNA, 22 nt, Human
ugaccugcguaggugguuucug

SEQ ID NO: 1002497 - RNA, 22 nt, Human
aacacaaagaagcugcaggauc

SEQ ID NO: 1002498 - RNA, 21 nt, Human
ucagcuuugcaacugcacauc

SEQ ID NO: 1002499 - RNA, 19 nt, Human
agugcagggagcacccuca

SEQ ID NO: 1002500 - RNA, 22 nt, Human
caggcccugggcaggcacagag

SEQ ID NO: 1002501 - RNA, 22 nt, Human
acacacuggcccccaguacuga

SEQ ID NO: 1002502 - RNA, 22 nt, Human
acacaucagaaauaugaaugag

SEQ ID NO: 1002503 - RNA, 22 nt, Human
gggcugacaccacccaggcgca

SEQ ID NO: 1002504 - RNA, 20 nt, Human
gauuacaaaaugaaaugcau

SEQ ID NO: 1002505 - RNA, 22 nt, Human
gugugaaaaugugcacaauaug

SEQ ID NO: 1002506 - RNA, 22 nt, Human
ggcaggcuagcacugauguccu

SEQ ID NO: 1002507 - RNA, 22 nt, Human
agggcuccaaggaaguguagcu

SEQ ID NO: 1002508 - RNA, 22 nt, Human
uuuguaaaggccugaauuucag

SEQ ID NO: 1002509 - RNA, 22 nt, Human
gcuuggccagcagccgggaugc

SEQ ID NO: 1002510 - RNA, 22 nt, Human
gucacaggccuggaugaggggc

SEQ ID NO: 1002511 - RNA, 22 nt, Human
auccugucaucauaguacuuga

SEQ ID NO: 1002512 - RNA, 22 nt, Human
cuguugcaucauggcucuuaau

SEQ ID NO: 1002513 - RNA, 22 nt, Human
ucugauuagagcauucuugagu

SEQ ID NO: 1002514 - RNA, 22 nt, Human
uuuauuagugcuuguaucacug

SEQ ID NO: 1002515 - RNA, 22 nt, Human
uggaccugagccuggcccugcc

SEQ ID NO: 1002516 - RNA, 17 nt, Human
aggccucccuccaggcc

SEQ ID NO: 1002517 - RNA, 22 nt, Human
cagcauuuucuuaauguaggug

SEQ ID NO: 1002518 - RNA, 22 nt, Human
gccaggcaggugucggagcccu

SEQ ID NO: 1002519 - RNA, 22 nt, Human
gagcuuuaagggcacuggucuu

SEQ ID NO: 1002520 - RNA, 22 nt, Human
cccaggcacauccacucuguga

SEQ ID NO: 1002521 - RNA, 22 nt, Human
guccagagauggacgagcagau

SEQ ID NO: 1002522 - RNA, 22 nt, Human
cuccucuggguccugguggcca

SEQ ID NO: 1002523 - RNA, 22 nt, Human
ucuuugaaguugaaguaguugg

SEQ ID NO: 1002524 - RNA, 22 nt, Human
gcccucucuucugcagccucca

SEQ ID NO: 1002525 - RNA, 22 nt, Human
caugaguucaucugcuucucuu

SEQ ID NO: 1002526 - RNA, 22 nt, Human
ggaccugaacauaaaacgaggc

SEQ ID NO: 1002527 - RNA, 19 nt, Human
guagggacagugguucuga

SEQ ID NO: 1002528 - RNA, 22 nt, Human
uuaguuuucccaucuuuauggu

SEQ ID NO: 1002529 - RNA, 22 nt, Human
gaauaguucuauggcugcaggg

SEQ ID NO: 1002530 - RNA, 22 nt, Human
ucauauaaguuuaaaacuaucu

SEQ ID NO: 1002531 - RNA, 23 nt, Human
agaccugcaucugauaggcccug

SEQ ID NO: 1002532 - RNA, 22 nt, Human
gaccaccagagguccgugggua

SEQ ID NO: 1002533 - RNA, 22 nt, Human
uagaauucaagauucaacaggc

SEQ ID NO: 1002534 - RNA, 22 nt, Human
uuccagagaaaagguuuauuuc

SEQ ID NO: 1002535 - RNA, 22 nt, Human
cauaauuugauaugcuugaugg

SEQ ID NO: 1002536 - RNA, 16 nt, Human
ugggaccuguggccaa

SEQ ID NO: 1002537 - RNA, 22 nt, Human
agcaggcuuguuaugucugaga

SEQ ID NO: 1002538 - RNA, 22 nt, Human
uuaacacaucccugcucuaccc

SEQ ID NO: 1002539 - RNA, 22 nt, Human
auggccuggggauuccugagca

SEQ ID NO: 1002540 - RNA, 22 nt, Human
uggggaccagauuagaccaugg

SEQ ID NO: 1002541 - RNA, 22 nt, Human
ugggcugaguguggaacuaguu

SEQ ID NO: 1002542 - RNA, 22 nt, Human
acauccagaucucagcauggcu

SEQ ID NO: 1002543 - RNA, 19 nt, Human
uggccagguacugucugcu

SEQ ID NO: 1002544 - RNA, 22 nt, Human
aaucacuuuucucuaauguagc

SEQ ID NO: 1002545 - RNA, 22 nt, Human
uuccaggccgggcaggaaacac

SEQ ID NO: 1002546 - RNA, 22 nt, Human
uccaggcagggcagccaucaag

SEQ ID NO: 1002547 - RNA, 22 nt, Human
agaauaugaucggaauacagau

SEQ ID NO: 1002548 - RNA, 22 nt, Human
uuuucauuagaaugacugagaa

SEQ ID NO: 1002549 - RNA, 22 nt, Human
cuucugggcauggcagagccug

SEQ ID NO: 1002550 - RNA, 22 nt, Human
auacuuuggucacuauuauugg

SEQ ID NO: 1002551 - RNA, 22 nt, Human
uggaccugggguggccuccucu

SEQ ID NO: 1002552 - RNA, 22 nt, Human
agggcugacaaauggcagugac

SEQ ID NO: 1002553 - RNA, 22 nt, Human
accaugaugggaagcucagggc

SEQ ID NO: 1002554 - RNA, 17 nt, Human
ugcuucuguauugcugg

SEQ ID NO: 1002555 - RNA, 22 nt, Human
cacuguccaugcuugcuaaccc

SEQ ID NO: 1002556 - RNA, 22 nt, Human
cccaggaguaagugacauuguu

SEQ ID NO: 1002557 - RNA, 22 nt, Human
auaaaauuugcuacuguuaaau

SEQ ID NO: 1002558 - RNA, 22 nt, Human
uccaggcagagcaacaaaauau

SEQ ID NO: 1002559 - RNA, 22 nt, Human
cgaggcucagagagggugacuu

SEQ ID NO: 1002560 - RNA, 22 nt, Human
uccuggcagggucuaggucuag

SEQ ID NO: 1002561 - RNA, 22 nt, Human
uccugcagaccucagucagguc

SEQ ID NO: 1002562 - RNA, 22 nt, Human
uucugucacuuuuuuggaaucu

SEQ ID NO: 1002563 - RNA, 22 nt, Human
gggacaauggaggccucucucc

SEQ ID NO: 1002564 - RNA, 22 nt, Human
ggggcugagaauucagucucgg

SEQ ID NO: 1002565 - RNA, 22 nt, Human
ugaccuuauuugaaaauagaga

SEQ ID NO: 1002566 - RNA, 22 nt, Human
gcuaggaaucggacccaggaag

SEQ ID NO: 1002567 - RNA, 22 nt, Human
ccugggcucaagugaugguccc

SEQ ID NO: 1002568 - RNA, 20 nt, Human
cccacacccuucccacuugg

SEQ ID NO: 1002569 - RNA, 22 nt, Human
gaacuguaguuaauacuacaca

SEQ ID NO: 1002570 - RNA, 20 nt, Human
ccuggcaggcggguuacuua

SEQ ID NO: 1002571 - RNA, 22 nt, Human
aaaagagugacugauaaguaua

SEQ ID NO: 1002572 - RNA, 22 nt, Human
ccagugcauaaucaauacagcc

SEQ ID NO: 1002573 - RNA, 22 nt, Human
gccaggcaggccacgcuguguu

SEQ ID NO: 1002574 - RNA, 17 nt, Human
aaguccagaguugagca

SEQ ID NO: 1002575 - RNA, 22 nt, Human
ccaggcucuguuccccgaggag

SEQ ID NO: 1002576 - RNA, 22 nt, Human
uccugggguuuuggccgcagcu

SEQ ID NO: 1002577 - RNA, 22 nt, Human
cccaguuucaacuuuccagugg

SEQ ID NO: 1002578 - RNA, 22 nt, Human
gcucugagaggaugcugagcag

SEQ ID NO: 1002579 - RNA, 22 nt, Human
uggcaguagauccagucucucu

SEQ ID NO: 1002580 - RNA, 22 nt, Human
uaaucuguauuccuacuuugca

SEQ ID NO: 1002581 - RNA, 22 nt, Human
augaacuuauuucugaacuuuu

SEQ ID NO: 1002582 - RNA, 15 nt, Human
ccaggcucugcacuc

SEQ ID NO: 1002583 - RNA, 22 nt, Human
gacccaggcccaaggcugccag

SEQ ID NO: 1002584 - RNA, 22 nt, Human
uacacaucucugucaguaguga

SEQ ID NO: 1002585 - RNA, 22 nt, Human
ugagagucuguuccucuugcag

SEQ ID NO: 1002586 - RNA, 22 nt, Human
ugccaggcacgugagaguggcc

SEQ ID NO: 1002587 - RNA, 22 nt, Human
uccugagcaacacagcuaagug

SEQ ID NO: 1002588 - RNA, 22 nt, Human
acccagcuguuucccgugucau

SEQ ID NO: 1002589 - RNA, 19 nt, Human
cagguggcgcucuacaggg

SEQ ID NO: 1002590 - RNA, 22 nt, Human
gagggcucacugagaaagcagu

SEQ ID NO: 1002591 - RNA, 22 nt, Human
gaaauauuacaguggaggggau

SEQ ID NO: 1002592 - RNA, 19 nt, Human
gcugggcuuggguuuguag

SEQ ID NO: 1002593 - RNA, 22 nt, Human
cuauuagguaugugguugcuau

SEQ ID NO: 1002594 - RNA, 22 nt, Human
uagaaacagaaaacuguaauag

SEQ ID NO: 1002595 - RNA, 22 nt, Human
cgaggcagggaagcugcaaaag

SEQ ID NO: 1002596 - RNA, 22 nt, Human
ugaguguauaucaggagagagc

SEQ ID NO: 1002597 - RNA, 22 nt, Human
uuuaccaguguuaaacaccagc

SEQ ID NO: 1002598 - RNA, 22 nt, Human
ccugggcugggcgucucauggg

SEQ ID NO: 1002599 - RNA, 22 nt, Human
gaggagcuguucccucaccucu

SEQ ID NO: 1002600 - RNA, 22 nt, Human
cacacagacagcucucugaaga

SEQ ID NO: 1002601 - RNA, 22 nt, Human
ggccucagagaaggcugugcgg

SEQ ID NO: 1002602 - RNA, 22 nt, Human
ggguaccaagcugcuugggggc

SEQ ID NO: 1002603 - RNA, 21 nt, Human
ucuggcaguggucuuucaaau

SEQ ID NO: 1002604 - RNA, 22 nt, Human
gagcuuuaagggauaaaaugau

SEQ ID NO: 1002605 - RNA, 22 nt, Human
ugccucucuaacccaugcccaa

SEQ ID NO: 1002606 - RNA, 22 nt, Human
auacuguacgucccagauagga

SEQ ID NO: 1002607 - RNA, 22 nt, Human
uccaggcuagguuuacaggaca

SEQ ID NO: 1002608 - RNA, 22 nt, Human
gaaauauugggacucagagcuu

SEQ ID NO: 1002609 - RNA, 22 nt, Human
cccugcagcauucucuaacugg

SEQ ID NO: 1002610 - RNA, 22 nt, Human
aggaccugacauuguguuuucu

SEQ ID NO: 1002611 - RNA, 22 nt, Human
augaaacagugaauuagucaag

SEQ ID NO: 1002612 - RNA, 22 nt, Human
uaaguuuuaagcaaucugauaa

SEQ ID NO: 1002613 - RNA, 22 nt, Human
uucugucaaauuugccauaugg

SEQ ID NO: 1002614 - RNA, 22 nt, Human
uggcaggcaaguucagcuccac

SEQ ID NO: 1002615 - RNA, 22 nt, Human
aauuagggagccaucauaaggu

SEQ ID NO: 1002616 - RNA, 19 nt, Human
auauauguauacaaugugg

SEQ ID NO: 1002617 - RNA, 22 nt, Human
caaaugcagauucaggaguucu

SEQ ID NO: 1002618 - RNA, 22 nt, Human
guuaauuuaguagaguccagau

SEQ ID NO: 1002619 - RNA, 22 nt, Human
agcagguugugauacacucaga

SEQ ID NO: 1002620 - RNA, 22 nt, Human
cccuuccugggugucccggagu

SEQ ID NO: 1002621 - RNA, 22 nt, Human
aaauauuugucugaggcgguug

SEQ ID NO: 1002622 - RNA, 22 nt, Human
ccaggcucugccaggcccuuga

SEQ ID NO: 1002623 - RNA, 22 nt, Human
agcaccaucacagcuguauguc

SEQ ID NO: 1002624 - RNA, 22 nt, Human
aaggccaucuacuuacggaauu

SEQ ID NO: 1002625 - RNA, 22 nt, Human
uuucaaauagaaucuuuccaaa

SEQ ID NO: 1002626 - RNA, 22 nt, Human
cagcacagugaccagacccacu

SEQ ID NO: 1002627 - RNA, 22 nt, Human
cccuuccuccucgccugucaga

SEQ ID NO: 1002628 - RNA, 22 nt, Human
ggauuucuuccuuccucagaag

SEQ ID NO: 1002629 - RNA, 22 nt, Human
cuguuuaucucuaaccuguuua

SEQ ID NO: 1002630 - RNA, 22 nt, Human
cagcuuuguggccuugaccucg

SEQ ID NO: 1002631 - RNA, 22 nt, Human
gagagaaaagggggaauugauu

SEQ ID NO: 1002632 - RNA, 22 nt, Human
cagcucugagacugaggcuaug

SEQ ID NO: 1002633 - RNA, 22 nt, Human
caaagucagccagcuaguaggu

SEQ ID NO: 1002634 - RNA, 22 nt, Human
cuucugggauuaauuuuuccug

SEQ ID NO: 1002635 - RNA, 17 nt, Human
uguuuucauucauugcu

SEQ ID NO: 1002636 - RNA, 22 nt, Human
aacacauauuuauauaugcaca

SEQ ID NO: 1002637 - RNA, 22 nt, Human
uccaggcacagaguuggucagu

SEQ ID NO: 1002638 - RNA, 22 nt, Human
ugaccaggauacugcagggaug

SEQ ID NO: 1002639 - RNA, 22 nt, Human
acaauacuauuuucaguauccu

SEQ ID NO: 1002640 - RNA, 18 nt, Human
ggccucagccuggccgga

SEQ ID NO: 1002641 - RNA, 22 nt, Human
ccagagagcuacaaggcauaaa

SEQ ID NO: 1002642 - RNA, 22 nt, Human
acugauuacacgaguucugacu

SEQ ID NO: 1002643 - RNA, 22 nt, Human
acagauauaaacuauaguagug

SEQ ID NO: 1002644 - RNA, 22 nt, Human
ccagcuuuagguugccugccag

SEQ ID NO: 1002645 - RNA, 22 nt, Human
acacauuucucuuuuuguaagu

SEQ ID NO: 1002646 - RNA, 22 nt, Human
ccaggcucugucuggucagaag

SEQ ID NO: 1002647 - RNA, 22 nt, Human
cuuucauaaaggaaaugaugag

SEQ ID NO: 1002648 - RNA, 21 nt, Human
ggcuuuaugcucacccagccu

SEQ ID NO: 1002649 - RNA, 22 nt, Human
uccaugagggacacuggaugcu

SEQ ID NO: 1002650 - RNA, 22 nt, Human
uccccaccuaagauacccaucu

SEQ ID NO: 1002651 - RNA, 22 nt, Human
ccagagcccagggucaugcagg

SEQ ID NO: 1002652 - RNA, 22 nt, Human
ucuaggagcuuaaaggaggcca

SEQ ID NO: 1002653 - RNA, 22 nt, Human
acugcuuacccggccugacuuc

SEQ ID NO: 1002654 - RNA, 22 nt, Human
caaaguuuuaguaaacauauau

SEQ ID NO: 1002655 - RNA, 22 nt, Human
gcugcgccggaucccacguucc

SEQ ID NO: 1002656 - RNA, 22 nt, Human
ugcaggcuccaggugcacauau

SEQ ID NO: 1002657 - RNA, 20 nt, Human
aacacagauaccaaagguug

SEQ ID NO: 1002658 - RNA, 19 nt, Human
ggcggguggacuggagccc

SEQ ID NO: 1002659 - RNA, 22 nt, Human
cacaaaaguaggaggcaggcgg

SEQ ID NO: 1002660 - RNA, 22 nt, Human
uacaaaaguaauuacgguuuuu

SEQ ID NO: 1002661 - RNA, 22 nt, Human
auggcuagcaccgcguugcugg

SEQ ID NO: 1002662 - RNA, 22 nt, Human
ugcaggcucugguuuauagugc

SEQ ID NO: 1002663 - RNA, 22 nt, Human
uaugacauugcuuuuuagaacu

SEQ ID NO: 1002664 - RNA, 22 nt, Human
uucugucaaacucacaggccga

SEQ ID NO: 1002665 - RNA, 22 nt, Human
agauuuauguggucacacucag

SEQ ID NO: 1002666 - RNA, 22 nt, Human
auuacaauaagguuuauuugua

SEQ ID NO: 1002667 - RNA, 22 nt, Human
gcugggcugcgucggggaagcc

SEQ ID NO: 1002668 - RNA, 18 nt, Human
cucagagaugcccuuauu

SEQ ID NO: 1002669 - RNA, 22 nt, Human
ucacacagcugacagagccuuu

SEQ ID NO: 1002670 - RNA, 22 nt, Human
acugggcuguaaagagaggcaa

SEQ ID NO: 1002671 - RNA, 18 nt, Human
agacccucuaagggcagu

SEQ ID NO: 1002672 - RNA, 22 nt, Human
uuuagggaaauugaggguuaag

SEQ ID NO: 1002673 - RNA, 22 nt, Human
uuucuuagcgaugcuugauaaa

SEQ ID NO: 1002674 - RNA, 22 nt, Human
uagcuuuaggcacguuugaauu

SEQ ID NO: 1002675 - RNA, 22 nt, Human
ugagaauuuucaguuucacuuu

SEQ ID NO: 1002676 - RNA, 22 nt, Human
uaguuaggaaaguccagggagc

SEQ ID NO: 1002677 - RNA, 22 nt, Human
gcagcucugacaaugccuggaa

SEQ ID NO: 1002678 - RNA, 22 nt, Human
ucuggggcaguuacuggggccu

SEQ ID NO: 1002679 - RNA, 22 nt, Human
ucucuuaaaggucuucagcuga

SEQ ID NO: 1002680 - RNA, 22 nt, Human
gccuggaagugugucgugggaa

SEQ ID NO: 1002681 - RNA, 22 nt, Human
guggcagguuccguagacagca

SEQ ID NO: 1002682 - RNA, 22 nt, Human
uggcagaaagaaccaugugcaa

SEQ ID NO: 1002683 - RNA, 22 nt, Human
ccagccuuacugcccuucagug

SEQ ID NO: 1002684 - RNA, 20 nt, Human
acaauauguagaugaauagc

SEQ ID NO: 1002685 - RNA, 22 nt, Human
ucagagaguuacacaaauuguu

SEQ ID NO: 1002686 - RNA, 22 nt, Human
aacccaggguggagguugcagu

SEQ ID NO: 1002687 - RNA, 23 nt, Human
gggaccugguaggaggugauugg

SEQ ID NO: 1002688 - RNA, 22 nt, Human
cugggcuucucccccuggcaga

SEQ ID NO: 1002689 - RNA, 22 nt, Human
agggccucuaccauccaagguu

SEQ ID NO: 1002690 - RNA, 22 nt, Human
aauaucuucuaaggauagaacu

SEQ ID NO: 1002691 - RNA, 22 nt, Human
accugccuauggagccacaugg

SEQ ID NO: 1002692 - RNA, 22 nt, Human
cagaggcagacccuccagggcg

SEQ ID NO: 1002693 - RNA, 17 nt, Human
aguguuuccuuaucauu

SEQ ID NO: 1002694 - RNA, 22 nt, Human
cuucaaaugugauuuuaauaac

SEQ ID NO: 1002695 - RNA, 22 nt, Human
uacagcauguccuuagcaaggc

SEQ ID NO: 1002696 - RNA, 22 nt, Human
ucagcuuucucuucuaucgaua

SEQ ID NO: 1002697 - RNA, 22 nt, Human
gaggagcugcagggggagucua

SEQ ID NO: 1002698 - RNA, 22 nt, Human
aauuucuccaagaaugcuuaga

SEQ ID NO: 1002699 - RNA, 22 nt, Human
ccagcuuucucagaggcuucua

SEQ ID NO: 1002700 - RNA, 19 nt, Human
agaaucaggucaggugaca

SEQ ID NO: 1002701 - RNA, 22 nt, Human
gcacccaguuugucucaggguu

SEQ ID NO: 1002702 - RNA, 22 nt, Human
acauuucacuguucacagcagg

SEQ ID NO: 1002703 - RNA, 22 nt, Human
ucuggcagaggaaggaggccug

SEQ ID NO: 1002704 - RNA, 22 nt, Human
acaaucauuccguucacaacag

SEQ ID NO: 1002705 - RNA, 22 nt, Human
agggcgacaauggagagcguuu

SEQ ID NO: 1002706 - RNA, 22 nt, Human
ggugccagaguggcccaggggc

SEQ ID NO: 1002707 - RNA, 22 nt, Human
ggcaggcuuugagaaagagcau

SEQ ID NO: 1002708 - RNA, 23 nt, Human
ucugcagacgcuguucuauuguc

SEQ ID NO: 1002709 - RNA, 22 nt, Human
cagagcauuuggaagccacgug

SEQ ID NO: 1002710 - RNA, 22 nt, Human
cacugucccuguuuccuggaaa

SEQ ID NO: 1002711 - RNA, 22 nt, Human
cauucccacguguucuuugcuu

SEQ ID NO: 1002712 - RNA, 22 nt, Human
ccugcagaggucaggccagaaa

SEQ ID NO: 1002713 - RNA, 22 nt, Human
aagggcuccauccuuauaaaug

SEQ ID NO: 1002714 - RNA, 22 nt, Human
cuccuggcuuucccagaccagg

SEQ ID NO: 1002715 - RNA, 22 nt, Human
uaauuuuaacugugcuguuugg

SEQ ID NO: 1002716 - RNA, 22 nt, Human
uccugcaguuacaucccagcca

SEQ ID NO: 1002717 - RNA, 22 nt, Human
acaguguuuuagaaaagcuuga

SEQ ID NO: 1002718 - RNA, 22 nt, Human
uggccucugugggagcugagca

SEQ ID NO: 1002719 - RNA, 22 nt, Human
uuuagggacaagggucuggggu

SEQ ID NO: 1002720 - RNA, 22 nt, Human
auggcagaccuccuggccacaa

SEQ ID NO: 1002721 - RNA, 22 nt, Human
guagggacuguucucaccugag

SEQ ID NO: 1002722 - RNA, 22 nt, Human
ggaaccacagcccccagcaggc

SEQ ID NO: 1002723 - RNA, 22 nt, Human
aauuagggaaaauuuacuugua

SEQ ID NO: 1002724 - RNA, 22 nt, Human
aaauuucuugaggcucucuagc

SEQ ID NO: 1002725 - RNA, 22 nt, Human
cuggcuuucauuucaagcacgu

SEQ ID NO: 1002726 - RNA, 16 nt, Human
uucugucacguacggc

SEQ ID NO: 1002727 - RNA, 22 nt, Human
uucuggggccaauugccacugc

SEQ ID NO: 1002728 - RNA, 22 nt, Human
uacuuuuagccuauuugauucu

SEQ ID NO: 1002729 - RNA, 22 nt, Human
ucacauuuuuuacuggacuuaa

SEQ ID NO: 1002730 - RNA, 22 nt, Human
gcacaggaugauggguugaggg

SEQ ID NO: 1002731 - RNA, 22 nt, Human
aggaccugccaggugcaaagca

SEQ ID NO: 1002732 - RNA, 22 nt, Human
uacauauguaaacauguauaaa

SEQ ID NO: 1002733 - RNA, 22 nt, Human
uuuaauuugaaaugaguaaccc

SEQ ID NO: 1002734 - RNA, 22 nt, Human
ugguuuaccccuguccuauauc

SEQ ID NO: 1002735 - RNA, 22 nt, Human
gccaagcucaccuucugaugga

SEQ ID NO: 1002736 - RNA, 22 nt, Human
aaaaauaggucaaccguguaug

SEQ ID NO: 1002737 - RNA, 22 nt, Human
aacuacauuguccuuucugaag

SEQ ID NO: 1002738 - RNA, 22 nt, Human
uccucuccaugucucacgccac

SEQ ID NO: 1002739 - RNA, 22 nt, Human
ugcagggaaucuguggcuggac

SEQ ID NO: 1002740 - RNA, 22 nt, Human
cauuuguacagaacagcuuuau

SEQ ID NO: 1002741 - RNA, 22 nt, Human
aaugaucuacucucauuaucuc

SEQ ID NO: 1002742 - RNA, 22 nt, Human
cagcacaggucaguuuuuuaag

SEQ ID NO: 1002743 - RNA, 22 nt, Human
uccaggcaugucugaguccuuc

SEQ ID NO: 1002744 - RNA, 22 nt, Human
cagacccugggccacagaggag

SEQ ID NO: 1002745 - RNA, 22 nt, Human
cagggcucagaagacagaccuc

SEQ ID NO: 1002746 - RNA, 22 nt, Human
ucaucacaauuuuaugacccuc

SEQ ID NO: 1002747 - RNA, 22 nt, Human
ugcucugcacaucccucacaaa

SEQ ID NO: 1002748 - RNA, 22 nt, Human
acaggcucuggggcaggauggc

SEQ ID NO: 1002749 - RNA, 22 nt, Human
caccuaggguuucgccuuucuu

SEQ ID NO: 1002750 - RNA, 22 nt, Human
uaauuucaauagcuugcauaau

SEQ ID NO: 1002751 - RNA, 22 nt, Human
uguggagacuauagccauaaca

SEQ ID NO: 1002752 - RNA, 22 nt, Human
gcagggcucaacaggacacccc

SEQ ID NO: 1002753 - RNA, 22 nt, Human
ucuccugucuucucagcacccc

SEQ ID NO: 1002754 - RNA, 22 nt, Human
aguaugaauggaaacuaccuau

SEQ ID NO: 1002755 - RNA, 22 nt, Human
uucugggguuaugggugauucu

SEQ ID NO: 1002756 - RNA, 22 nt, Human
cucuuaaagcuuccaguuucaa

SEQ ID NO: 1002757 - RNA, 22 nt, Human
uuucaaaccuacuuguauguuu

SEQ ID NO: 1002758 - RNA, 22 nt, Human
acuggggagagucaugccagca

SEQ ID NO: 1002759 - RNA, 22 nt, Human
uccuggcauccgugggucugug

SEQ ID NO: 1002760 - RNA, 22 nt, Human
uuuucucuuguuaauguacuga

SEQ ID NO: 1002761 - RNA, 22 nt, Human
ggcugcaggcagaggcugucug

SEQ ID NO: 1002762 - RNA, 21 nt, Human
cagaggcaggcucugugugug

SEQ ID NO: 1002763 - RNA, 22 nt, Human
uuucacauaucaacucuauccu

SEQ ID NO: 1002764 - RNA, 22 nt, Human
cuuccucccccacacacucacu

SEQ ID NO: 1002765 - RNA, 22 nt, Human
gccuggaaucaugcagggguua

SEQ ID NO: 1002766 - RNA, 22 nt, Human
caguguggugagauuccaggug

SEQ ID NO: 1002767 - RNA, 22 nt, Human
agcucccaggcagucaugagga

SEQ ID NO: 1002768 - RNA, 22 nt, Human
augugguugaagaauuacaucu

SEQ ID NO: 1002769 - RNA, 20 nt, Human
cauauauaccuagaagugga

SEQ ID NO: 1002770 - RNA, 22 nt, Human
cauaugaaauaugaguugaaca

SEQ ID NO: 1002771 - RNA, 17 nt, Human
uccaggcagcaacugag

SEQ ID NO: 1002772 - RNA, 22 nt, Human
gaaacuuacuuacucacauuuc

SEQ ID NO: 1002773 - RNA, 22 nt, Human
uagcaauagaaacauauaaagu

SEQ ID NO: 1002774 - RNA, 22 nt, Human
auguguuuguaccuuuaaauau

SEQ ID NO: 1002775 - RNA, 22 nt, Human
cugccugcucaccagggcucug

SEQ ID NO: 1002776 - RNA, 21 nt, Human
agcaacucugacuagaugagg

SEQ ID NO: 1002777 - RNA, 22 nt, Human
uuagacauguuugcuaaaauga

SEQ ID NO: 1002778 - RNA, 17 nt, Human
gcuaggagagggaggag

SEQ ID NO: 1002779 - RNA, 22 nt, Human
agcugccaaguuucucaguuua

SEQ ID NO: 1002780 - RNA, 22 nt, Human
aaucuucagugucuaaaaagca

SEQ ID NO: 1002781 - RNA, 22 nt, Human
gggcugaccaaugccuugcuuu

SEQ ID NO: 1002782 - RNA, 22 nt, Human
cagcuuuuuagaaucuagggca

SEQ ID NO: 1002783 - RNA, 22 nt, Human
uuguaaaugaccuuuucuaauu

SEQ ID NO: 1002784 - RNA, 22 nt, Human
agagggugcuggagagacauug

SEQ ID NO: 1002785 - RNA, 22 nt, Human
gcacccaggccggcgacugcag

SEQ ID NO: 1002786 - RNA, 22 nt, Human
uuuacacaaaagauagcacacc

SEQ ID NO: 1002787 - RNA, 22 nt, Human
aguauaaagugguuuucagcac

SEQ ID NO: 1002788 - RNA, 22 nt, Human
ccuggcaguucaucaaauggca

SEQ ID NO: 1002789 - RNA, 22 nt, Human
auuauuucucacucacauaaua

SEQ ID NO: 1002790 - RNA, 22 nt, Human
ccuucaaaacacuaguuuuuga

SEQ ID NO: 1002791 - RNA, 22 nt, Human
gccaaugacagucucaguucug

SEQ ID NO: 1002792 - RNA, 22 nt, Human
gaauauuuuuaaagggacuaau

SEQ ID NO: 1002793 - RNA, 22 nt, Human
uuauucugcacuuuuaaaauau

SEQ ID NO: 1002794 - RNA, 22 nt, Human
caguguuucugaguuccagcuc

SEQ ID NO: 1002795 - RNA, 22 nt, Human
gaggcuccccaugaggccccag

SEQ ID NO: 1002796 - RNA, 22 nt, Human
gcacucuccuggcugccacagu

SEQ ID NO: 1002797 - RNA, 22 nt, Human
aaagcagggaugaggcuagagg

SEQ ID NO: 1002798 - RNA, 22 nt, Human
ucuggcagcuauccucuggcca

SEQ ID NO: 1002799 - RNA, 22 nt, Human
uauucacaguugauuuacaguu

SEQ ID NO: 1002800 - RNA, 22 nt, Human
aaauacauacacuguacguggc

SEQ ID NO: 1002801 - RNA, 22 nt, Human
gcagggguagugucuuccugag

SEQ ID NO: 1002802 - RNA, 22 nt, Human
gacccagcuaaccaggugggga

SEQ ID NO: 1002803 - RNA, 22 nt, Human
gcuucuggcagugcagccacca

SEQ ID NO: 1002804 - RNA, 23 nt, Human
gagggcucugagugcuugggcca

SEQ ID NO: 1002805 - RNA, 22 nt, Human
gaaucauuggaaccacauccaa

SEQ ID NO: 1002806 - RNA, 20 nt, Human
guauuagguguuccucuuuc

SEQ ID NO: 1002807 - RNA, 22 nt, Human
cuugggaggagaacaaagcucc

SEQ ID NO: 1002808 - RNA, 21 nt, Human
auaaaguuuuacaggaaugca

SEQ ID NO: 1002809 - RNA, 22 nt, Human
gcagcuuugaagacuuauuugc

SEQ ID NO: 1002810 - RNA, 22 nt, Human
ucccaaggccaggcaucuagaa

SEQ ID NO: 1002811 - RNA, 22 nt, Human
auguuucaucaguaagguuuug

SEQ ID NO: 1002812 - RNA, 22 nt, Human
guggccaggccgacugccaggc

SEQ ID NO: 1002813 - RNA, 22 nt, Human
cugggcuuaggaccuggugcgg

SEQ ID NO: 1002814 - RNA, 22 nt, Human
uggcagagcccagacuccaguc

SEQ ID NO: 1002815 - RNA, 22 nt, Human
ccugggcucuauccugacccag

SEQ ID NO: 1002816 - RNA, 22 nt, Human
cagggcucccugcagccucugu

SEQ ID NO: 1002817 - RNA, 22 nt, Human
ucagagagaaauaguuuuugac

SEQ ID NO: 1002818 - RNA, 18 nt, Human
ggacaucaucaggugcuu

SEQ ID NO: 1002819 - RNA, 22 nt, Human
uaugaacuagcugauuuaguuu

SEQ ID NO: 1002820 - RNA, 22 nt, Human
ucaaucacguguuccauguucu

SEQ ID NO: 1002821 - RNA, 22 nt, Human
augugaaauagcuggauaugaa

SEQ ID NO: 1002822 - RNA, 22 nt, Human
gguaugaauucacuacuuccaa

SEQ ID NO: 1002823 - RNA, 22 nt, Human
uucaaaauuguucuaagcucug

SEQ ID NO: 1002824 - RNA, 22 nt, Human
aauacuauguugugacacauga

SEQ ID NO: 1002825 - RNA, 22 nt, Human
auuacaguaacagcuacaaugc

SEQ ID NO: 1002826 - RNA, 22 nt, Human
cuggccucuguguucaccauag

SEQ ID NO: 1002827 - RNA, 22 nt, Human
guccuggcaccucacuggcuac

SEQ ID NO: 1002828 - RNA, 22 nt, Human
aucugucagccugggauuaggg

SEQ ID NO: 1002829 - RNA, 23 nt, Human
ugaaacauuuaggguagaauuuc

SEQ ID NO: 1002830 - RNA, 22 nt, Human
cuagaaauauuuuacagucaag

SEQ ID NO: 1002831 - RNA, 22 nt, Human
uguccagguggccucugcugcu

SEQ ID NO: 1002832 - RNA, 22 nt, Human
cugggcugagccugggcugugu

SEQ ID NO: 1002833 - RNA, 22 nt, Human
gacacagauaucucugagauua

SEQ ID NO: 1002834 - RNA, 22 nt, Human
uccagacccaugacccugggga

SEQ ID NO: 1002835 - RNA, 18 nt, Human
gccaggcaggguggggaa

SEQ ID NO: 1002836 - RNA, 22 nt, Human
uuccagcccgcgacuuguucag

SEQ ID NO: 1002837 - RNA, 22 nt, Human
agcaggcuccuuccuucucugg

SEQ ID NO: 1002838 - RNA, 19 nt, Human
ggcauccacgaaugcagag

SEQ ID NO: 1002839 - RNA, 22 nt, Human
uuuaaauucugucugccgcuua

SEQ ID NO: 1002840 - RNA, 22 nt, Human
gugggcuucccuuaagccagag

SEQ ID NO: 1002841 - RNA, 22 nt, Human
acccagcaugacaccugcacau

SEQ ID NO: 1002842 - RNA, 18 nt, Human
gacacauccccaggccuc

SEQ ID NO: 1002843 - RNA, 22 nt, Human
auaaacaguaaaugugagcagu

SEQ ID NO: 1002844 - RNA, 22 nt, Human
cauaauuucuguaucagcacca

SEQ ID NO: 1002845 - RNA, 22 nt, Human
ucacacacauaaucuaagauua

SEQ ID NO: 1002846 - RNA, 21 nt, Human
ugcaggcuguuuaagaggcaa

SEQ ID NO: 1002847 - RNA, 22 nt, Human
acuagauaauuauaaaagguag

SEQ ID NO: 1002848 - RNA, 22 nt, Human
cagggggugcaggcccugugac

SEQ ID NO: 1002849 - RNA, 22 nt, Human
agagagcauggcacagaggggu

SEQ ID NO: 1002850 - RNA, 22 nt, Human
ggcuccaagucucagagugaag

SEQ ID NO: 1002851 - RNA, 22 nt, Human
cuucugggcauucagcugcaca

SEQ ID NO: 1002852 - RNA, 22 nt, Human
ucacauacacuaggauauuuuu

SEQ ID NO: 1002853 - RNA, 22 nt, Human
uuugaaauaugaggcauuauga

SEQ ID NO: 1002854 - RNA, 22 nt, Human
ucuggcagcgaagcguguacuu

SEQ ID NO: 1002855 - RNA, 22 nt, Human
auauuauucuagcucuugugug

SEQ ID NO: 1002856 - RNA, 22 nt, Human
gcuggggaccagcugucucuga

SEQ ID NO: 1002857 - RNA, 22 nt, Human
gcagagaggaaugaagccaucc

SEQ ID NO: 1002858 - RNA, 22 nt, Human
augcuuuuccaggagaaauaua

SEQ ID NO: 1002859 - RNA, 22 nt, Human
cucugagauaguuucuaucaau

SEQ ID NO: 1002860 - RNA, 22 nt, Human
acacagaguuugacacauggga

SEQ ID NO: 1002861 - RNA, 22 nt, Human
cuauugaauuaacuauuaaagu

SEQ ID NO: 1002862 - RNA, 22 nt, Human
cuuaaauucuuaaugcccucau

SEQ ID NO: 1002863 - RNA, 22 nt, Human
guccucugcuucaugcccugau

SEQ ID NO: 1002864 - RNA, 22 nt, Human
ccugggcucaagugauccuccu

SEQ ID NO: 1002865 - RNA, 22 nt, Human
cacaugaagagagucuaguaau

SEQ ID NO: 1002866 - RNA, 22 nt, Human
cugcucuaauaucagauagacu

SEQ ID NO: 1002867 - RNA, 22 nt, Human
aacuuaaacccacucauguaga

SEQ ID NO: 1002868 - RNA, 22 nt, Human
uccaggagguagugcuuaauuu

SEQ ID NO: 1002869 - RNA, 22 nt, Human
aagagcauggaauggagaucca

SEQ ID NO: 1002870 - RNA, 22 nt, Human
agggccucugacgcccccagcc

SEQ ID NO: 1002871 - RNA, 22 nt, Human
cugcagggcagaagggcauaga

SEQ ID NO: 1002872 - RNA, 22 nt, Human
gcagggaccagggccagaucca

SEQ ID NO: 1002873 - RNA, 22 nt, Human
cuguccuccagacgacaguccc

SEQ ID NO: 1002874 - RNA, 22 nt, Human
gccaagcuuauaugaugcuuga

SEQ ID NO: 1002875 - RNA, 22 nt, Human
ucccagccuggacccugccagu

SEQ ID NO: 1002876 - RNA, 22 nt, Human
ugcaggcucugugugugccugg

SEQ ID NO: 1002877 - RNA, 20 nt, Human
cccugcagccaugggagugg

SEQ ID NO: 1002878 - RNA, 22 nt, Human
acacauaagaaacuacaaagag

SEQ ID NO: 1002879 - RNA, 22 nt, Human
ggcaggcuuucagcaucaaguc

SEQ ID NO: 1002880 - RNA, 22 nt, Human
caagauaagaucauuuacacua

SEQ ID NO: 1002881 - RNA, 22 nt, Human
uaauuucuaauucauuuucagu

SEQ ID NO: 1002882 - RNA, 22 nt, Human
aagggcucuguugccauuucag

SEQ ID NO: 1002883 - RNA, 22 nt, Human
ccaggccuucugaggacacucu

SEQ ID NO: 1002884 - RNA, 23 nt, Human
acagugugguggacaaggagcag

SEQ ID NO: 1002885 - RNA, 17 nt, Human
gugaagagucauugaau

SEQ ID NO: 1002886 - RNA, 22 nt, Human
auuaauuuuaccuuuguaaaca

SEQ ID NO: 1002887 - RNA, 22 nt, Human
cugcagggugacguugcccacc

SEQ ID NO: 1002888 - RNA, 22 nt, Human
ugggcugaacuucaucugauga

SEQ ID NO: 1002889 - RNA, 22 nt, Human
augggcuguccuaguccagccc

SEQ ID NO: 1002890 - RNA, 22 nt, Human
ucuucaaagaauuuuaguaauu

SEQ ID NO: 1002891 - RNA, 22 nt, Human
aauguuguuuuucugcaugucu

SEQ ID NO: 1002892 - RNA, 23 nt, Human
uugggcuggcucucgaugccucu

SEQ ID NO: 1002893 - RNA, 22 nt, Human
aauauaauuuuauuccuagagu

SEQ ID NO: 1002894 - RNA, 22 nt, Human
cagagacuggagugcaguggcg

SEQ ID NO: 1002895 - RNA, 22 nt, Human
aaguccagcucuaaauaucuga

SEQ ID NO: 1002896 - RNA, 22 nt, Human
uaacacaugucugggaugugaa

SEQ ID NO: 1002897 - RNA, 22 nt, Human
gaggcucugugaugugccaggc

SEQ ID NO: 1002898 - RNA, 22 nt, Human
uagggcucagaguccaguuucu

SEQ ID NO: 1002899 - RNA, 22 nt, Human
cagagccuuccuagcagacucu

SEQ ID NO: 1002900 - RNA, 22 nt, Human
uaugagaaucugcaguaugcuu

SEQ ID NO: 1002901 - RNA, 22 nt, Human
ccugggcucugaggagggaguc

SEQ ID NO: 1002902 - RNA, 22 nt, Human
aggaggcugggcacaguggccu

SEQ ID NO: 1002903 - RNA, 20 nt, Human
ucagauuuuucuaacuuuga

SEQ ID NO: 1002904 - RNA, 20 nt, Human
cugaacacagaauaagcaca

SEQ ID NO: 1002905 - RNA, 19 nt, Human
ccaggccugcgggcguugg

SEQ ID NO: 1002906 - RNA, 22 nt, Human
ccagccacugggccacugccag

SEQ ID NO: 1002907 - RNA, 22 nt, Human
ucccacccccuccaaggaggaa

SEQ ID NO: 1002908 - RNA, 22 nt, Human
aauuugauucccugcaccuguu

SEQ ID NO: 1002909 - RNA, 22 nt, Human
aggcaccuugagagcaggagcu

SEQ ID NO: 1002910 - RNA, 20 nt, Human
ucccaggcuccacccuagac

SEQ ID NO: 1002911 - RNA, 22 nt, Human
caauuucucgaacucuaaucca

SEQ ID NO: 1002912 - RNA, 22 nt, Human
ucuggggaugagugaugucgua

SEQ ID NO: 1002913 - RNA, 22 nt, Human
ucugggcuggcuuuaugcugac

SEQ ID NO: 1002914 - RNA, 22 nt, Human
uucugucucuguguuuacauua

SEQ ID NO: 1002915 - RNA, 22 nt, Human
uaauaucuggcauucaaacaug

SEQ ID NO: 1002916 - RNA, 22 nt, Human
caaugauugcuauuuacauaaa

SEQ ID NO: 1002917 - RNA, 22 nt, Human
uggcaugggcaaaccagggaaa

SEQ ID NO: 1002918 - RNA, 17 nt, Human
uuaagguggaucagcac

SEQ ID NO: 1002919 - RNA, 22 nt, Human
uucuaccuacccucugcauaca

SEQ ID NO: 1002920 - RNA, 22 nt, Human
uacacagaaccugguguacagu

SEQ ID NO: 1002921 - RNA, 22 nt, Human
ccugcaggcugcaggccaguuc

SEQ ID NO: 1002922 - RNA, 22 nt, Human
guuaacacaggacucucugccu

SEQ ID NO: 1002923 - RNA, 20 nt, Human
gccucagccaacccaugggg

SEQ ID NO: 1002924 - RNA, 22 nt, Human
uuucacauuggcuucuauuucu

SEQ ID NO: 1002925 - RNA, 22 nt, Human
guccucuguuagaaaugugcuu

SEQ ID NO: 1002926 - RNA, 22 nt, Human
gccaagcuguuuuucagagacg

SEQ ID NO: 1002927 - RNA, 22 nt, Human
acaugacuuuucucuuccagag

SEQ ID NO: 1002928 - RNA, 22 nt, Human
cauuuguagcuauuuacuguau

SEQ ID NO: 1002929 - RNA, 22 nt, Human
uuggaaauggcuguaguuauga

SEQ ID NO: 1002930 - RNA, 22 nt, Human
uuucuauugaucuaauaaacau

SEQ ID NO: 1002931 - RNA, 22 nt, Human
ugggaccuguuacauugaguua

SEQ ID NO: 1002932 - RNA, 22 nt, Human
ccagagaguaucauggagagua

SEQ ID NO: 1002933 - RNA, 22 nt, Human
uggaaauacuugccauaaaacu

SEQ ID NO: 1002934 - RNA, 20 nt, Human
ggccucaguguccuuguuug

SEQ ID NO: 1002935 - RNA, 22 nt, Human
uagggcuccacucccagagauu

SEQ ID NO: 1002936 - RNA, 22 nt, Human
uaugaacuguaacccucaccgc

SEQ ID NO: 1002937 - RNA, 18 nt, Human
gaguguggcacugggccc

SEQ ID NO: 1002938 - RNA, 22 nt, Human
auguccaguuucuacacacaua

SEQ ID NO: 1002939 - RNA, 21 nt, Human
acauucacaggauauuaucau

SEQ ID NO: 1002940 - RNA, 22 nt, Human
acagaguccuagcugcaaagaa

SEQ ID NO: 1002941 - RNA, 22 nt, Human
ugggccaggucugugucagcug

SEQ ID NO: 1002942 - RNA, 22 nt, Human
cagcucaggcucuccaugcucc

SEQ ID NO: 1002943 - RNA, 22 nt, Human
ugucagagcaaugagguucagc

SEQ ID NO: 1002944 - RNA, 19 nt, Human
ccaaaagcaauuccaagua

SEQ ID NO: 1002945 - RNA, 22 nt, Human
uuguacaaguauuaugugaaca

SEQ ID NO: 1002946 - RNA, 21 nt, Human
ccuagccucuuacccagcuuu

SEQ ID NO: 1002947 - RNA, 15 nt, Human
uccaggcauucauuc

SEQ ID NO: 1002948 - RNA, 22 nt, Human
gccaggcagcagcgaggauggu

SEQ ID NO: 1002949 - RNA, 22 nt, Human
aauaguauuuauuuggaaaaag

SEQ ID NO: 1002950 - RNA, 22 nt, Human
gcugcuaagcguuucuguucca

SEQ ID NO: 1002951 - RNA, 22 nt, Human
gcuggcagggugguugagagag

SEQ ID NO: 1002952 - RNA, 22 nt, Human
uacuuacagaaggaagcaauug

SEQ ID NO: 1002953 - RNA, 21 nt, Human
ccagcuuucccaagucccuuu

SEQ ID NO: 1002954 - RNA, 22 nt, Human
gcagcuuucugcaaugucaucc

SEQ ID NO: 1002955 - RNA, 22 nt, Human
cuccuggcaguuccccuuguca

SEQ ID NO: 1002956 - RNA, 20 nt, Human
auuuggcaugaaguauugau

SEQ ID NO: 1002957 - RNA, 22 nt, Human
cuccucuguauugauugggacu

SEQ ID NO: 1002958 - RNA, 23 nt, Human
ugagggacaugguggcuucugag

SEQ ID NO: 1002959 - RNA, 22 nt, Human
auagggccuaaaaaguauugcu

SEQ ID NO: 1002960 - RNA, 22 nt, Human
aguggcugccaagagcaaugcu

SEQ ID NO: 1002961 - RNA, 22 nt, Human
acaaaguuugugguauuccaag

SEQ ID NO: 1002962 - RNA, 22 nt, Human
aguccggggucuggacaccugg

SEQ ID NO: 1002963 - RNA, 22 nt, Human
aaauuauuacaagcuaguuggc

SEQ ID NO: 1002964 - RNA, 22 nt, Human
uuuucguuuauuugacauguaa

SEQ ID NO: 1002965 - RNA, 22 nt, Human
cucucugggcccaguuggcacc

SEQ ID NO: 1002966 - RNA, 23 nt, Human
uccaggcacgcauuucuucuagc

SEQ ID NO: 1002967 - RNA, 21 nt, Human
uccaaaucccauucuguaguc

SEQ ID NO: 1002968 - RNA, 22 nt, Human
cacacagaaccgcucgccacuu

SEQ ID NO: 1002969 - RNA, 22 nt, Human
ggaagaaagcacacaaacuuga

SEQ ID NO: 1002970 - RNA, 22 nt, Human
gguuucaaugagaagugcuugu

SEQ ID NO: 1002971 - RNA, 22 nt, Human
accugcaguggccacuccuaau

SEQ ID NO: 1002972 - RNA, 22 nt, Human
aagggcucucugcauugaaauu

SEQ ID NO: 1002973 - RNA, 22 nt, Human
ucagagaguccuggucauuugc

SEQ ID NO: 1002974 - RNA, 20 nt, Human
cagcuuuagaucuuugauua

SEQ ID NO: 1002975 - RNA, 22 nt, Human
gccaggcauuuauugauugaau

SEQ ID NO: 1002976 - RNA, 23 nt, Human
caggcucccggaccaggauccgc

SEQ ID NO: 1002977 - RNA, 22 nt, Human
acuggggagugguuuugggaag

SEQ ID NO: 1002978 - RNA, 22 nt, Human
aaauuucuaagcagccacuucc

SEQ ID NO: 1002979 - RNA, 22 nt, Human
cagugagggcauucagugcugg

SEQ ID NO: 1002980 - RNA, 20 nt, Human
aauuuacucacagaaugaau

SEQ ID NO: 1002981 - RNA, 22 nt, Human
cucauaaugugacuguauuuga

SEQ ID NO: 1002982 - RNA, 22 nt, Human
aaaguuaguuucuuauaugucu

SEQ ID NO: 1002983 - RNA, 22 nt, Human
aaaguaguuagucaugugaaaa

SEQ ID NO: 1002984 - RNA, 22 nt, Human
uucugugcccauuuuaaaaugg

SEQ ID NO: 1002985 - RNA, 22 nt, Human
cagagcucagagcagggcacuc

SEQ ID NO: 1002986 - RNA, 22 nt, Human
aucaaguuuucuuaguugacug

SEQ ID NO: 1002987 - RNA, 22 nt, Human
ugcuucuguucuuucaccuacg

SEQ ID NO: 1002988 - RNA, 22 nt, Human
agguuuaugccuuggagcuggg

SEQ ID NO: 1002989 - RNA, 22 nt, Human
uccuucccaggugucgccgccu

SEQ ID NO: 1002990 - RNA, 22 nt, Human
aacaaacaaacauuuugucauc

SEQ ID NO: 1002991 - RNA, 22 nt, Human
gcaggggcuaaggacacagaga

SEQ ID NO: 1002992 - RNA, 22 nt, Human
ucaauauauuccauguuuucuc

SEQ ID NO: 1002993 - RNA, 22 nt, Human
ccaggcucugacauagauggga

SEQ ID NO: 1002994 - RNA, 23 nt, Human
gaggcagcuccugcagugcccug

SEQ ID NO: 1002995 - RNA, 22 nt, Human
acuggcuugaaguagauucaaa

SEQ ID NO: 1002996 - RNA, 22 nt, Human
uuucacauggaagcucucgaga

SEQ ID NO: 1002997 - RNA, 22 nt, Human
ccaggcucagcgcgcacgucug

SEQ ID NO: 1002998 - RNA, 22 nt, Human
cagggcuccaugcagggacucc

SEQ ID NO: 1002999 - RNA, 22 nt, Human
uuggcaggaauauugcagaggu

SEQ ID NO: 1003000 - RNA, 21 nt, Human
ucuggcaggaagacggauggg

SEQ ID NO: 1003001 - RNA, 22 nt, Human
gccucaggccgcccugcugcuc

SEQ ID NO: 1003002 - RNA, 22 nt, Human
aaagucuuuauuuuguaucuuu

SEQ ID NO: 1003003 - RNA, 22 nt, Human
ugguuccuucugcauuuucagc

SEQ ID NO: 1003004 - RNA, 22 nt, Human
caguuuauagcucuagcagcuu

SEQ ID NO: 1003005 - RNA, 18 nt, Human
ucuaggagaguaccuacc

SEQ ID NO: 1003006 - RNA, 22 nt, Human
gcacacaugcaugcacaggagu

SEQ ID NO: 1003007 - RNA, 22 nt, Human
uggaacacuguggaugagaaga

SEQ ID NO: 1003008 - RNA, 22 nt, Human
gugccaaaagcuauaauuuggu

SEQ ID NO: 1003009 - RNA, 22 nt, Human
acaguucccgucuugcacagcu

SEQ ID NO: 1003010 - RNA, 22 nt, Human
cccugcagaucuaggguccuuc

SEQ ID NO: 1003011 - RNA, 18 nt, Human
uccugccugugccccagg

SEQ ID NO: 1003012 - RNA, 22 nt, Human
ggcuccacugcugaccacucca

SEQ ID NO: 1003013 - RNA, 22 nt, Human
gcacauaacugaccacaucuaa

SEQ ID NO: 1003014 - RNA, 22 nt, Human
cuagaauugcauucuaugaaua

SEQ ID NO: 1003015 - RNA, 22 nt, Human
acccagcuggaugcauggaggc

SEQ ID NO: 1003016 - RNA, 22 nt, Human
ugggcuuuaucaugggucuggu

SEQ ID NO: 1003017 - RNA, 22 nt, Human
aaagcuuuucaguauguucaug

SEQ ID NO: 1003018 - RNA, 22 nt, Human
cagugagguggauggauggccu

SEQ ID NO: 1003019 - RNA, 22 nt, Human
uuugauuuacuggauauucuca

SEQ ID NO: 1003020 - RNA, 22 nt, Human
aagggcuccaagagguagcugg

SEQ ID NO: 1003021 - RNA, 22 nt, Human
cuguaugauauccaaauugaua

SEQ ID NO: 1003022 - RNA, 22 nt, Human
aguuagaaaguaaaucauuuga

SEQ ID NO: 1003023 - RNA, 22 nt, Human
augcuuuuaugucacaugguca

SEQ ID NO: 1003024 - RNA, 22 nt, Human
ccacacagauaaguguuuucua

SEQ ID NO: 1003025 - RNA, 22 nt, Human
acugagagucaagauagcaugg

SEQ ID NO: 1003026 - RNA, 22 nt, Human
auguccaggaucuauccccaga

SEQ ID NO: 1003027 - RNA, 22 nt, Human
agggacuugaugucagggagau

SEQ ID NO: 1003028 - RNA, 22 nt, Human
auaaacagaguaguugcuacug

SEQ ID NO: 1003029 - RNA, 22 nt, Human
ccccacccucgcuccauuucgg

SEQ ID NO: 1003030 - RNA, 22 nt, Human
gaggcagcgggucaggaccgug

SEQ ID NO: 1003031 - RNA, 22 nt, Human
acaggccugagauuuugcauuu

SEQ ID NO: 1003032 - RNA, 22 nt, Human
ugcauuuuuaacaaggcuaauu

SEQ ID NO: 1003033 - RNA, 22 nt, Human
auguagaagcugacagugcugu

SEQ ID NO: 1003034 - RNA, 22 nt, Human
cccugagcucaggcccuugggg

SEQ ID NO: 1003035 - RNA, 22 nt, Human
uaauuucaccguugcuagaaau

SEQ ID NO: 1003036 - RNA, 22 nt, Human
gggacccagguaauccugugcu

SEQ ID NO: 1003037 - RNA, 22 nt, Human
ugaaauuaugcauuguuguacc

SEQ ID NO: 1003038 - RNA, 22 nt, Human
auuagggcuggaugcaaggaaa

SEQ ID NO: 1003039 - RNA, 22 nt, Human
gcagagcacccugcagugguau

SEQ ID NO: 1003040 - RNA, 22 nt, Human
ucugugcauuguaacaacuaaa

SEQ ID NO: 1003041 - RNA, 22 nt, Human
aacauaauguggccaaagucac

SEQ ID NO: 1003042 - RNA, 22 nt, Human
ccuggggagagaaagcccagcc

SEQ ID NO: 1003043 - RNA, 22 nt, Human
guacacacuguuugaucauuuc

SEQ ID NO: 1003044 - RNA, 22 nt, Human
aucugcuuuugagaauuuacuu

SEQ ID NO: 1003045 - RNA, 22 nt, Human
caauuucuuguuaauucucagg

SEQ ID NO: 1003046 - RNA, 22 nt, Human
uacauguuuacuccaagucagg

SEQ ID NO: 1003047 - RNA, 22 nt, Human
uagggacccucccugcucuaac

SEQ ID NO: 1003048 - RNA, 22 nt, Human
aggaagcuuggggcagggcuac

SEQ ID NO: 1003049 - RNA, 22 nt, Human
gaaugaauagguguccagaugg

SEQ ID NO: 1003050 - RNA, 23 nt, Human
ugugaaauuugaggucagugcuu

SEQ ID NO: 1003051 - RNA, 20 nt, Human
ccuuuauuauuuguaugaug

SEQ ID NO: 1003052 - RNA, 22 nt, Human
uuccuggccaagcagaguggaa

SEQ ID NO: 1003053 - RNA, 22 nt, Human
cagcauuuggugaucaucuuaa

SEQ ID NO: 1003054 - RNA, 22 nt, Human
ggagcugaaccccaucgugcug

SEQ ID NO: 1003055 - RNA, 22 nt, Human
ggcuuuauuauguggccaugug

SEQ ID NO: 1003056 - RNA, 23 nt, Human
ccagcccuccaccagcucuaggc

SEQ ID NO: 1003057 - RNA, 22 nt, Human
aaugaagcaagcugcuguguuu

SEQ ID NO: 1003058 - RNA, 22 nt, Human
uuuaaaaucagaugggaguugg

SEQ ID NO: 1003059 - RNA, 22 nt, Human
ggcaggcuugguggcaccgguu

SEQ ID NO: 1003060 - RNA, 22 nt, Human
gccaggcagacaggucaucagg

SEQ ID NO: 1003061 - RNA, 23 nt, Human
uccugcugaaagcuccagcuggc

SEQ ID NO: 1003062 - RNA, 22 nt, Human
uucugucauccuuucuagaugu

SEQ ID NO: 1003063 - RNA, 22 nt, Human
uggccagguugggcuuugcagc

SEQ ID NO: 1003064 - RNA, 22 nt, Human
ccaggcccugcuccucacacca

SEQ ID NO: 1003065 - RNA, 21 nt, Human
guuuucaugauagagucugua

SEQ ID NO: 1003066 - RNA, 22 nt, Human
ccuucucucugaagaccccaaa

SEQ ID NO: 1003067 - RNA, 22 nt, Human
aucugucaggagcaaggacuac

SEQ ID NO: 1003068 - RNA, 22 nt, Human
ggggucccugcaccagcauguc

SEQ ID NO: 1003069 - RNA, 22 nt, Human
acauacacaugaauauauuuuu

SEQ ID NO: 1003070 - RNA, 22 nt, Human
accugcaggcacaggugugcgc

SEQ ID NO: 1003071 - RNA, 22 nt, Human
ugccugccucuggcagcccugc

SEQ ID NO: 1003072 - RNA, 22 nt, Human
ugcuucugggcaaaugugugug

SEQ ID NO: 1003073 - RNA, 22 nt, Human
agggcuccgggccaccggccug

SEQ ID NO: 1003074 - RNA, 22 nt, Human
uggcuagguagcuuucugcugu

SEQ ID NO: 1003075 - RNA, 22 nt, Human
cagagaaagaagcccauucauu

SEQ ID NO: 1003076 - RNA, 22 nt, Human
uuaaauuuuagaaacagacucu

SEQ ID NO: 1003077 - RNA, 22 nt, Human
cagagcaugaauaaaaguuaca

SEQ ID NO: 1003078 - RNA, 22 nt, Human
gggcaaaaccugggcaucauga

SEQ ID NO: 1003079 - RNA, 21 nt, Human
gccugcagaccccaccaggcu

SEQ ID NO: 1003080 - RNA, 22 nt, Human
aggaggcuuuugcaggugccac

SEQ ID NO: 1003081 - RNA, 22 nt, Human
gcagggacaucuucagaucacu

SEQ ID NO: 1003082 - RNA, 22 nt, Human
gagaccucuugguaucgcuagg

SEQ ID NO: 1003083 - RNA, 22 nt, Human
aggcagcaauugaaaucauugu

SEQ ID NO: 1003084 - RNA, 22 nt, Human
cagcucuuugaguauuccauuu

SEQ ID NO: 1003085 - RNA, 22 nt, Human
ucuccaagaaaagaucucagcu

SEQ ID NO: 1003086 - RNA, 22 nt, Human
aauauguugagucuaucuuuau

SEQ ID NO: 1003087 - RNA, 22 nt, Human
ugggacucacucuuuuggccag

SEQ ID NO: 1003088 - RNA, 22 nt, Human
gugugagggacagagaaagggg

SEQ ID NO: 1003089 - RNA, 22 nt, Human
caagcuuguuucuccugggggu

SEQ ID NO: 1003090 - RNA, 22 nt, Human
ucaugaacauggaauaucuuuu

SEQ ID NO: 1003091 - RNA, 22 nt, Human
ggcagggaagcuggcaucacgg

SEQ ID NO: 1003092 - RNA, 22 nt, Human
gcuucuggaagcauaugcaaga

SEQ ID NO: 1003093 - RNA, 22 nt, Human
auguuucaugacugagcaaaau

SEQ ID NO: 1003094 - RNA, 23 nt, Human
ucagagagcuguugagagcugcc

SEQ ID NO: 1003095 - RNA, 22 nt, Human
auuuagacuucccagcacugug

SEQ ID NO: 1003096 - RNA, 22 nt, Human
aauuaugauuggucuaaaccag

SEQ ID NO: 1003097 - RNA, 22 nt, Human
cagacagagucuucccaucagu

SEQ ID NO: 1003098 - RNA, 22 nt, Human
auccuggcccagguguggaggg

SEQ ID NO: 1003099 - RNA, 22 nt, Human
uuuucauuuacauuagggaaga

SEQ ID NO: 1003100 - RNA, 22 nt, Human
ucaggauggagggaagcacaga

SEQ ID NO: 1003101 - RNA, 22 nt, Human
gggggcucugacucccucagcu

SEQ ID NO: 1003102 - RNA, 22 nt, Human
uuccaggcugaugggccacagg

SEQ ID NO: 1003103 - RNA, 22 nt, Human
uaauuucuucaucucugcagcu

SEQ ID NO: 1003104 - RNA, 22 nt, Human
gugggcuuuggccucuuucucc

SEQ ID NO: 1003105 - RNA, 23 nt, Human
ucuguacaauugagaagagaaca

SEQ ID NO: 1003106 - RNA, 22 nt, Human
gaauauuuucaguacagauggu

SEQ ID NO: 1003107 - RNA, 21 nt, Human
aggcucccagaaaugggcauc

SEQ ID NO: 1003108 - RNA, 19 nt, Human
aaacacagauuucuuacca

SEQ ID NO: 1003109 - RNA, 21 nt, Human
ugggaccuagcuuugcacagg

SEQ ID NO: 1003110 - RNA, 22 nt, Human
ucuggucaguaauaagaagugg

SEQ ID NO: 1003111 - RNA, 22 nt, Human
uuuguucaugccuauauucuca

SEQ ID NO: 1003112 - RNA, 22 nt, Human
gagcuuuagcugagaccugcuu

SEQ ID NO: 1003113 - RNA, 22 nt, Human
ucagagagguuggugauaagaa

SEQ ID NO: 1003114 - RNA, 22 nt, Human
gcacacaguagggauucaauga

SEQ ID NO: 1003115 - RNA, 22 nt, Human
ucugaacauccagcaaugcaca

SEQ ID NO: 1003116 - RNA, 22 nt, Human
ccuccagcgcgauccacuccgg

SEQ ID NO: 1003117 - RNA, 22 nt, Human
uuucugaagggcagcagacucu

SEQ ID NO: 1003118 - RNA, 22 nt, Human
ucagcuuuggucacauugaguu

SEQ ID NO: 1003119 - RNA, 22 nt, Human
gaggagcucaugaaagcggugu

SEQ ID NO: 1003120 - RNA, 22 nt, Human
ggcaggcugggugucauggagu

SEQ ID NO: 1003121 - RNA, 22 nt, Human
ccaggcagagggaauagcaagu

SEQ ID NO: 1003122 - RNA, 22 nt, Human
ucuauuuuauacucaaaucuuc

SEQ ID NO: 1003123 - RNA, 22 nt, Human
uggcaggaaaguaacagagcac

SEQ ID NO: 1003124 - RNA, 22 nt, Human
uucuggggacauaacaguaagc

SEQ ID NO: 1003125 - RNA, 23 nt, Human
ccaggccucucagagggugugcc

SEQ ID NO: 1003126 - RNA, 22 nt, Human
accugcagcugagaaaaugacu

SEQ ID NO: 1003127 - RNA, 22 nt, Human
agcuagaaguacagccauauga

SEQ ID NO: 1003128 - RNA, 22 nt, Human
cacaucccuggaguuacccagu

SEQ ID NO: 1003129 - RNA, 22 nt, Human
uacaaaguaauguauaauaucg

SEQ ID NO: 1003130 - RNA, 21 nt, Human
acaggcucuggggaugcuggg

SEQ ID NO: 1003131 - RNA, 22 nt, Human
cagcuuuaguaacccacugcuc

SEQ ID NO: 1003132 - RNA, 17 nt, Human
cagugaggccuuuccuc

SEQ ID NO: 1003133 - RNA, 22 nt, Human
ggggcugacgggcauguggcuu

SEQ ID NO: 1003134 - RNA, 22 nt, Human
gagccucguggcggccacugcg

SEQ ID NO: 1003135 - RNA, 22 nt, Human
uucaugaaacuuaacuguuggg

SEQ ID NO: 1003136 - RNA, 22 nt, Human
auugaaaaauucacaauucugg

SEQ ID NO: 1003137 - RNA, 20 nt, Human
gaggccucagccucagcucc

SEQ ID NO: 1003138 - RNA, 22 nt, Human
caacuuuaugauugguuuguca

SEQ ID NO: 1003139 - RNA, 22 nt, Human
guuguuuuuguucucuauagcu

SEQ ID NO: 1003140 - RNA, 21 nt, Human
ggcuaggaugcugggguuucc

SEQ ID NO: 1003141 - RNA, 20 nt, Human
aguguacagacacuagaaau

SEQ ID NO: 1003142 - RNA, 22 nt, Human
auguuagaaggaauguuaaaag

SEQ ID NO: 1003143 - RNA, 22 nt, Human
cagugggggggccaugcugcag

SEQ ID NO: 1003144 - RNA, 22 nt, Human
gcuucugggguucuggcaugcu

SEQ ID NO: 1003145 - RNA, 22 nt, Human
cccagcccacgguccugggugg

SEQ ID NO: 1003146 - RNA, 22 nt, Human
aaaguuugcaauuuauguuaau

SEQ ID NO: 1003147 - RNA, 22 nt, Human
uucaguuccauuucaggugggu

SEQ ID NO: 1003148 - RNA, 22 nt, Human
uaugacaagguggaguaugagu

SEQ ID NO: 1003149 - RNA, 22 nt, Human
ucuuuauuuaagucuguuguaa

SEQ ID NO: 1003150 - RNA, 22 nt, Human
agguagggaagaaggcaugaaa

SEQ ID NO: 1003151 - RNA, 22 nt, Human
uccaggcaggguuaaggguccu

SEQ ID NO: 1003152 - RNA, 22 nt, Human
acaguuugcccugacauucucc

SEQ ID NO: 1003153 - RNA, 20 nt, Human
uauuuacaacuuagagccuc

SEQ ID NO: 1003154 - RNA, 22 nt, Human
ggcaggguuuacaauagcaaua

SEQ ID NO: 1003155 - RNA, 22 nt, Human
uggaacacuggcuuuccacugu

SEQ ID NO: 1003156 - RNA, 22 nt, Human
acuggcaguggcagcagaaaga

SEQ ID NO: 1003157 - RNA, 20 nt, Human
ucauuacagugcuaagaugu

SEQ ID NO: 1003158 - RNA, 18 nt, Human
cuguccaguagacucugc

SEQ ID NO: 1003159 - RNA, 22 nt, Human
uaaucuguguaccuucaucgga

SEQ ID NO: 1003160 - RNA, 20 nt, Human
uccugcagucgcuagcgccc

SEQ ID NO: 1003161 - RNA, 22 nt, Human
uuggagagauuuaggucucagu

SEQ ID NO: 1003162 - RNA, 18 nt, Human
ggccucuggacuggcagc

SEQ ID NO: 1003163 - RNA, 22 nt, Human
ccacuguagagauuugaaugcc

SEQ ID NO: 1003164 - RNA, 22 nt, Human
uaugaacuuuugaugugacaug

SEQ ID NO: 1003165 - RNA, 22 nt, Human
ugcuucugacuaagcugcauga

SEQ ID NO: 1003166 - RNA, 22 nt, Human
uccaagcuacugaagguuuggg

SEQ ID NO: 1003167 - RNA, 22 nt, Human
ucuccaggccuuucccaucuua

SEQ ID NO: 1003168 - RNA, 22 nt, Human
ccuggcagcuccguggccuucc

SEQ ID NO: 1003169 - RNA, 22 nt, Human
auguuauggcucaaacauuugg

SEQ ID NO: 1003170 - RNA, 22 nt, Human
aguaugaaccuggguucuggau

SEQ ID NO: 1003171 - RNA, 22 nt, Human
aaacauuguaauuuuagcaugg

SEQ ID NO: 1003172 - RNA, 22 nt, Human
uguggggaagaguaugacuugg

SEQ ID NO: 1003173 - RNA, 22 nt, Human
uagggacaaagagcugaggccu

SEQ ID NO: 1003174 - RNA, 22 nt, Human
cccuggcagagggggcaggugc

SEQ ID NO: 1003175 - RNA, 22 nt, Human
ucauuugugugagugauuugac

SEQ ID NO: 1003176 - RNA, 22 nt, Human
agcaggcuaagggaccuguuua

SEQ ID NO: 1003177 - RNA, 22 nt, Human
ucuggggauaagacccagguau

SEQ ID NO: 1003178 - RNA, 22 nt, Human
agcaggugggaucaagcuggca

SEQ ID NO: 1003179 - RNA, 22 nt, Human
acugggcugcuugagugccuuc

SEQ ID NO: 1003180 - RNA, 22 nt, Human
aaagagucguguuccagguuug

SEQ ID NO: 1003181 - RNA, 22 nt, Human
ugcuucugaaaugcaggucuuc

SEQ ID NO: 1003182 - RNA, 22 nt, Human
agagacaggguuuugucguguu

SEQ ID NO: 1003183 - RNA, 22 nt, Human
ucacaauacucacucaauggcu

SEQ ID NO: 1003184 - RNA, 22 nt, Human
cagcuuauucaguaagcacaua

SEQ ID NO: 1003185 - RNA, 22 nt, Human
uucuuaaaacuuauggacaggu

SEQ ID NO: 1003186 - RNA, 22 nt, Human
auuagggaaacugacuugucuc

SEQ ID NO: 1003187 - RNA, 22 nt, Human
ugcccccugguggccagagccg

SEQ ID NO: 1003188 - RNA, 22 nt, Human
gagggugucugcguaacuggca

SEQ ID NO: 1003189 - RNA, 22 nt, Human
gggcugacgaaggccaugugug

SEQ ID NO: 1003190 - RNA, 22 nt, Human
gaauuucuggacccuuugagaa

SEQ ID NO: 1003191 - RNA, 23 nt, Human
uagaaugucauucaaugauaugg

SEQ ID NO: 1003192 - RNA, 22 nt, Human
cuccaggccccuggccuucugc

SEQ ID NO: 1003193 - RNA, 20 nt, Human
uuuacauuuugaaacaguga

SEQ ID NO: 1003194 - RNA, 22 nt, Human
aacagccacugauacugaauag

SEQ ID NO: 1003195 - RNA, 22 nt, Human
uguugauuaguguuuagacuua

SEQ ID NO: 1003196 - RNA, 22 nt, Human
auguagaauggugauuggcagg

SEQ ID NO: 1003197 - RNA, 22 nt, Human
auuuauuaagcaucugcuaugu

SEQ ID NO: 1003198 - RNA, 22 nt, Human
cuguaugaggaucagacuggac

SEQ ID NO: 1003199 - RNA, 22 nt, Human
aauuaugagguagauaucacau

SEQ ID NO: 1003200 - RNA, 22 nt, Human
ugugcauguauugauuuguacc

SEQ ID NO: 1003201 - RNA, 22 nt, Human
ugcuucugcauucaauguugga

SEQ ID NO: 1003202 - RNA, 22 nt, Human
ugcuuuauuaagagagaaauuu

SEQ ID NO: 1003203 - RNA, 22 nt, Human
gcugggcuguaguuugcugacc

SEQ ID NO: 1003204 - RNA, 22 nt, Human
cacacaguaggcacucauuaau

SEQ ID NO: 1003205 - RNA, 22 nt, Human
cuuaauuuaagccuagaaugca

SEQ ID NO: 1003206 - RNA, 22 nt, Human
agacccucuccaugcccacugc

SEQ ID NO: 1003207 - RNA, 22 nt, Human
ugcaggcugaggcuggcucaac

SEQ ID NO: 1003208 - RNA, 22 nt, Human
ucuauaaauuaugcagucucag

SEQ ID NO: 1003209 - RNA, 22 nt, Human
aagggcucugugcuugucccau

SEQ ID NO: 1003210 - RNA, 22 nt, Human
cucugguuucgcaggaaauaga

SEQ ID NO: 1003211 - RNA, 22 nt, Human
ccugggcuuugagggcaggaug

SEQ ID NO: 1003212 - RNA, 22 nt, Human
ggcuuucuaugaacucaaaggc

SEQ ID NO: 1003213 - RNA, 22 nt, Human
gcuggggagcuagaccucagca

SEQ ID NO: 1003214 - RNA, 22 nt, Human
aguaugaagcugaaugauuuua

SEQ ID NO: 1003215 - RNA, 22 nt, Human
ucucugaaggggagcuguuuaa

SEQ ID NO: 1003216 - RNA, 21 nt, Human
ugcuuuaugggaaaaauguca

SEQ ID NO: 1003217 - RNA, 22 nt, Human
uuaguuagucccugguaccuuu

SEQ ID NO: 1003218 - RNA, 22 nt, Human
aggacuuagaacauuauguacu

SEQ ID NO: 1003219 - RNA, 22 nt, Human
aggcaguggagcuggaauaggc

SEQ ID NO: 1003220 - RNA, 22 nt, Human
uaguauuuaaucacuuuugucu

SEQ ID NO: 1003221 - RNA, 22 nt, Human
gcuuggaaguaggauugggaga

SEQ ID NO: 1003222 - RNA, 22 nt, Human
caguguuuaaucauugugaauu

SEQ ID NO: 1003223 - RNA, 22 nt, Human
ucuccugcucagaacagccuca

SEQ ID NO: 1003224 - RNA, 22 nt, Human
uccuuucccuuuccauccuggc

SEQ ID NO: 1003225 - RNA, 22 nt, Human
uggccuccccuaacagccucuu

SEQ ID NO: 1003226 - RNA, 22 nt, Human
ucuggggagucaaagagaccug

SEQ ID NO: 1003227 - RNA, 22 nt, Human
cauuuauucucagauccuuguc

SEQ ID NO: 1003228 - RNA, 22 nt, Human
caucacagguccugaugacauu

SEQ ID NO: 1003229 - RNA, 22 nt, Human
augcuacauuuugguuuauaaa

SEQ ID NO: 1003230 - RNA, 19 nt, Human
gacuccaacuuuaagcaug

SEQ ID NO: 1003231 - RNA, 18 nt, Human
ggcaggcucucuggguca

SEQ ID NO: 1003232 - RNA, 22 nt, Human
aagggcucugugugccucccca

SEQ ID NO: 1003233 - RNA, 22 nt, Human
aucugucaucagcaccacaggu

SEQ ID NO: 1003234 - RNA, 22 nt, Human
aaagaucacgucccaggacucg

SEQ ID NO: 1003235 - RNA, 22 nt, Human
caggcagcccugcaccaagugu

SEQ ID NO: 1003236 - RNA, 22 nt, Human
acagguccucaagucagcuggg

SEQ ID NO: 1003237 - RNA, 22 nt, Human
ucuggcagguucccauguuaug

SEQ ID NO: 1003238 - RNA, 21 nt, Human
ugcaggcugugcgcuccugcc

SEQ ID NO: 1003239 - RNA, 22 nt, Human
auuuguagugaagugaaaauaa

SEQ ID NO: 1003240 - RNA, 22 nt, Human
guuaggaacacuggagccuaaa

SEQ ID NO: 1003241 - RNA, 22 nt, Human
guaugcaucgacucaagucuga

SEQ ID NO: 1003242 - RNA, 22 nt, Human
agaauauugaaaguucuugaca

SEQ ID NO: 1003243 - RNA, 22 nt, Human
caggcccugccuugagggaccu

SEQ ID NO: 1003244 - RNA, 22 nt, Human
acauauuuugaaagcuuucuaa

SEQ ID NO: 1003245 - RNA, 22 nt, Human
aaauuagucgguuuaggaauuu

SEQ ID NO: 1003246 - RNA, 22 nt, Human
agaauaauacugaaaugcugaa

SEQ ID NO: 1003247 - RNA, 22 nt, Human
uuugucaucccuuuugaaacug

SEQ ID NO: 1003248 - RNA, 22 nt, Human
gcaggcuccaggccggccccuu

SEQ ID NO: 1003249 - RNA, 19 nt, Human
auguaugaggucuucugcu

SEQ ID NO: 1003250 - RNA, 22 nt, Human
acaggacauguaccaggugguc

SEQ ID NO: 1003251 - RNA, 22 nt, Human
aaauuaguacauugcaaagucc

SEQ ID NO: 1003252 - RNA, 22 nt, Human
gucaggacucugacccgucccg

SEQ ID NO: 1003253 - RNA, 22 nt, Human
caaugaaaauuuaaguugcagc

SEQ ID NO: 1003254 - RNA, 22 nt, Human
gcacauacugcaaagauuacua

SEQ ID NO: 1003255 - RNA, 22 nt, Human
gaugaagcuaaaucuaagguuu

SEQ ID NO: 1003256 - RNA, 22 nt, Human
cugggcuuugguacugugauua

SEQ ID NO: 1003257 - RNA, 22 nt, Human
cagcuugaaauauuaggagaug

SEQ ID NO: 1003258 - RNA, 22 nt, Human
uaugaagcugauaaucacugau

SEQ ID NO: 1003259 - RNA, 22 nt, Human
gccaggcauguccucugcagaa

SEQ ID NO: 1003260 - RNA, 22 nt, Human
gugggcuucuguuagggaggcu

SEQ ID NO: 1003261 - RNA, 23 nt, Human
uccuuuaaugcuggaauggcuag

SEQ ID NO: 1003262 - RNA, 22 nt, Human
ugcuucuguuucauugaucuua

SEQ ID NO: 1003263 - RNA, 22 nt, Human
ucuaggaguaaugagcuagcac

SEQ ID NO: 1003264 - RNA, 21 nt, Human
cagcccagcccauugacagug

SEQ ID NO: 1003265 - RNA, 22 nt, Human
acagauauuuggggaaagacgu

SEQ ID NO: 1003266 - RNA, 22 nt, Human
guguaugaggggagaauguuuu

SEQ ID NO: 1003267 - RNA, 22 nt, Human
uuaucacuuaugagcuuuuugc

SEQ ID NO: 1003268 - RNA, 22 nt, Human
auccucuguggauuacaccuag

SEQ ID NO: 1003269 - RNA, 22 nt, Human
guuuuauaugucucugcugaca

SEQ ID NO: 1003270 - RNA, 22 nt, Human
ccagggggcuuggugaggccau

SEQ ID NO: 1003271 - RNA, 22 nt, Human
uauuugauagagauaaaugaua

SEQ ID NO: 1003272 - RNA, 22 nt, Human
cucagagagggcaccagggcca

SEQ ID NO: 1003273 - RNA, 22 nt, Human
cuggcaguuugccaggagcucg

SEQ ID NO: 1003274 - RNA, 22 nt, Human
ugucuuuagccagcagucuucu

SEQ ID NO: 1003275 - RNA, 22 nt, Human
gugauaaaauucaaauagcucu

SEQ ID NO: 1003276 - RNA, 22 nt, Human
cagguggguguaugaaugcaaa

SEQ ID NO: 1003277 - RNA, 22 nt, Human
auuuucaugacuaccuuaaaua

SEQ ID NO: 1003278 - RNA, 22 nt, Human
ggcuucuguccucuggaucugu

SEQ ID NO: 1003279 - RNA, 22 nt, Human
gauuuuucaguauaaaauauau

SEQ ID NO: 1003280 - RNA, 22 nt, Human
acuuuacaagcuuauagccuag

SEQ ID NO: 1003281 - RNA, 22 nt, Human
agcucccagaagccagagucgg

SEQ ID NO: 1003282 - RNA, 22 nt, Human
augccaaauucucagccucuuu

SEQ ID NO: 1003283 - RNA, 22 nt, Human
accuggagaaagccucucccug

SEQ ID NO: 1003284 - RNA, 23 nt, Human
gagugcagaauagacaugcagug

SEQ ID NO: 1003285 - RNA, 22 nt, Human
ugaaguuguuaagguugccauu

SEQ ID NO: 1003286 - RNA, 22 nt, Human
uuucauaaccucaagcuacagu

SEQ ID NO: 1003287 - RNA, 22 nt, Human
agcaggcuccaggcuggccauc

SEQ ID NO: 1003288 - RNA, 22 nt, Human
uaucaauacauguuaucagugu

SEQ ID NO: 1003289 - RNA, 22 nt, Human
uucaagauggcaccagugagug

SEQ ID NO: 1003290 - RNA, 22 nt, Human
aggugaguugguaggaaguuug

SEQ ID NO: 1003291 - RNA, 22 nt, Human
agccuccaucucccaucuguga

SEQ ID NO: 1003292 - RNA, 22 nt, Human
gagggcucugaaaggaggucac

SEQ ID NO: 1003293 - RNA, 17 nt, Human
ucgguuugccaggcuuc

SEQ ID NO: 1003294 - RNA, 22 nt, Human
ccacccagaccagggaucuggg

SEQ ID NO: 1003295 - RNA, 22 nt, Human
acaagauagcuuagaagauuca

SEQ ID NO: 1003296 - RNA, 22 nt, Human
ggcugaguugagaggauuacuu

SEQ ID NO: 1003297 - RNA, 22 nt, Human
ucuggcagugagcaacuugaca

SEQ ID NO: 1003298 - RNA, 22 nt, Human
ugcuuaaacccugaucaugugu

SEQ ID NO: 1003299 - RNA, 22 nt, Human
cucugggcaaguuucuucauga

SEQ ID NO: 1003300 - RNA, 22 nt, Human
ugauugacuuuagaauagcacu

SEQ ID NO: 1003301 - RNA, 22 nt, Human
gaaacauaguugagacacugcu

SEQ ID NO: 1003302 - RNA, 22 nt, Human
ccucagcugcuucccuggagcc

SEQ ID NO: 1003303 - RNA, 22 nt, Human
uccugcagagucccacugauuu

SEQ ID NO: 1003304 - RNA, 22 nt, Human
ccagcccuugcugaaggguggc

SEQ ID NO: 1003305 - RNA, 22 nt, Human
aaaguucuggggguguuucugg

SEQ ID NO: 1003306 - RNA, 22 nt, Human
caccagggccccaggcugugcc

SEQ ID NO: 1003307 - RNA, 18 nt, Human
aguuccuuaaauuggugu

SEQ ID NO: 1003308 - RNA, 22 nt, Human
acacacagguaaaggagccugg

SEQ ID NO: 1003309 - RNA, 22 nt, Human
uuuccuaagguagugauaauuu

SEQ ID NO: 1003310 - RNA, 22 nt, Human
cauaauuuuuuuaagucagaac

SEQ ID NO: 1003311 - RNA, 22 nt, Human
cuggcaggagcauucacagagg

SEQ ID NO: 1003312 - RNA, 22 nt, Human
ugcuagaauuagguuaaacaaa

SEQ ID NO: 1003313 - RNA, 21 nt, Human
ugacugaggcuucuucacaca

SEQ ID NO: 1003314 - RNA, 22 nt, Human
ccaggcuccucaugaucuuguu

SEQ ID NO: 1003315 - RNA, 22 nt, Human
agacaaguucugugggucaccu

SEQ ID NO: 1003316 - RNA, 17 nt, Human
ugcuggcaacauacaaa

SEQ ID NO: 1003317 - RNA, 22 nt, Human
uuccugccccugagagcuccca

SEQ ID NO: 1003318 - RNA, 22 nt, Human
acagugugugcuuucccuuacg

SEQ ID NO: 1003319 - RNA, 22 nt, Human
gcagcuuucugggacagaaagg

SEQ ID NO: 1003320 - RNA, 22 nt, Human
aaauccuaaaaguuugacuuaa

SEQ ID NO: 1003321 - RNA, 22 nt, Human
uuacuucuuacaaaagaaauau

SEQ ID NO: 1003322 - RNA, 22 nt, Human
caugagauuugggaggggccag

SEQ ID NO: 1003323 - RNA, 22 nt, Human
ugcucuguauucuauggcaguu

SEQ ID NO: 1003324 - RNA, 22 nt, Human
gcuucuggaagcugcuucugcc

SEQ ID NO: 1003325 - RNA, 19 nt, Human
ugcuucuggaaugcaaggc

SEQ ID NO: 1003326 - RNA, 22 nt, Human
uuaggaaguguguccagaagcg

SEQ ID NO: 1003327 - RNA, 21 nt, Human
uaaaucucuguauucuucagu

SEQ ID NO: 1003328 - RNA, 22 nt, Human
gugggcuuguuuugaugagauc

SEQ ID NO: 1003329 - RNA, 22 nt, Human
ccugggcugcaugauggcauuu

SEQ ID NO: 1003330 - RNA, 17 nt, Human
ugccagccugucccagg

SEQ ID NO: 1003331 - RNA, 22 nt, Human
aaauccuaaugacaaguuuagu

SEQ ID NO: 1003332 - RNA, 22 nt, Human
caggccuccacuccacgcagac

SEQ ID NO: 1003333 - RNA, 22 nt, Human
guuaaauucgaugauggauaaa

SEQ ID NO: 1003334 - RNA, 22 nt, Human
acuggcagccacaacuggcagg

SEQ ID NO: 1003335 - RNA, 22 nt, Human
ccaggcucugcaaaaucaggcu

SEQ ID NO: 1003336 - RNA, 22 nt, Human
ugguuccucaagcgcuggcggc

SEQ ID NO: 1003337 - RNA, 22 nt, Human
ccacauacaaauggggugcugu

SEQ ID NO: 1003338 - RNA, 22 nt, Human
auacuucuuugauguucacagg

SEQ ID NO: 1003339 - RNA, 22 nt, Human
acauaugauauugaggaucuca

SEQ ID NO: 1003340 - RNA, 22 nt, Human
ggcuuuaugcagggauagaaau

SEQ ID NO: 1003341 - RNA, 22 nt, Human
cuuggcagagggcugggcucag

SEQ ID NO: 1003342 - RNA, 22 nt, Human
gguuuccugcauugggaaauuu

SEQ ID NO: 1003343 - RNA, 22 nt, Human
aagauaauauucauuaacuaga

SEQ ID NO: 1003344 - RNA, 20 nt, Human
ugcaggcuucgcucuaggag

SEQ ID NO: 1003345 - RNA, 22 nt, Human
agggcucccgugaggugacugc

SEQ ID NO: 1003346 - RNA, 23 nt, Human
ggccucagcgcacagaaacugcu

SEQ ID NO: 1003347 - RNA, 22 nt, Human
cugugggaacacugaggacuuc

SEQ ID NO: 1003348 - RNA, 21 nt, Human
cauuagggcagaagcaggaag

SEQ ID NO: 1003349 - RNA, 20 nt, Human
agcuuugguuaagccagugg

SEQ ID NO: 1003350 - RNA, 22 nt, Human
cccagccuacucugccauagca

SEQ ID NO: 1003351 - RNA, 22 nt, Human
cagcuugugcaaagguccuggg

SEQ ID NO: 1003352 - RNA, 22 nt, Human
agacaucaaugaucagagguag

SEQ ID NO: 1003353 - RNA, 22 nt, Human
acaggcacugucaagucaugaa

SEQ ID NO: 1003354 - RNA, 22 nt, Human
uugugcaauuuaaaaucuuccu

SEQ ID NO: 1003355 - RNA, 22 nt, Human
gcaggcucccuugcagagcagg

SEQ ID NO: 1003356 - RNA, 22 nt, Human
ggagcugaaggggugggcucag

SEQ ID NO: 1003357 - RNA, 20 nt, Human
cagcccuccaguggaggcag

SEQ ID NO: 1003358 - RNA, 22 nt, Human
gcccagcuuuucacuuccacac

SEQ ID NO: 1003359 - RNA, 22 nt, Human
ccaaggcaggggaucaaaguuu

SEQ ID NO: 1003360 - RNA, 22 nt, Human
gaaacauauuaauccagugaaa

SEQ ID NO: 1003361 - RNA, 22 nt, Human
accugccucagugcagcuggau

SEQ ID NO: 1003362 - RNA, 22 nt, Human
ucuaggagcaugaagggaaggc

SEQ ID NO: 1003363 - RNA, 22 nt, Human
agguauauauucugguccuuau

SEQ ID NO: 1003364 - RNA, 22 nt, Human
ggggcugauggaacucaggccu

SEQ ID NO: 1003365 - RNA, 22 nt, Human
acgugcaggaucugguuggcga

SEQ ID NO: 1003366 - RNA, 22 nt, Human
uccaguggcaccuuggcccuca

SEQ ID NO: 1003367 - RNA, 22 nt, Human
acagguggccccgagggagugg

SEQ ID NO: 1003368 - RNA, 22 nt, Human
ucuuugaaaagauauuccuccu

SEQ ID NO: 1003369 - RNA, 22 nt, Human
ucuggcaguuccuuguugauau

SEQ ID NO: 1003370 - RNA, 22 nt, Human
agaggcucugccgccucaggua

SEQ ID NO: 1003371 - RNA, 21 nt, Human
agaaaaacacgauauaagccc

SEQ ID NO: 1003372 - RNA, 22 nt, Human
uuagggacagcucuguagguga

SEQ ID NO: 1003373 - RNA, 22 nt, Human
aguaugaagaauacauagauga

SEQ ID NO: 1003374 - RNA, 22 nt, Human
gaugaagccccaguguaaguaa

SEQ ID NO: 1003375 - RNA, 22 nt, Human
cuggccucagagggucauggug

SEQ ID NO: 1003376 - RNA, 19 nt, Human
cgcaggcuucgggucgcuc

SEQ ID NO: 1003377 - RNA, 22 nt, Human
uauucccauuccacuuaucaag

SEQ ID NO: 1003378 - RNA, 22 nt, Human
acccagcuaacccuacccugga

SEQ ID NO: 1003379 - RNA, 22 nt, Human
ccuggcagcaggugggcccgug

SEQ ID NO: 1003380 - RNA, 22 nt, Human
ccugcagaaaggguccccagga

SEQ ID NO: 1003381 - RNA, 22 nt, Human
guacacacuauuuaaaguguuu

SEQ ID NO: 1003382 - RNA, 22 nt, Human
acaucacacgccuuccaggagg

SEQ ID NO: 1003383 - RNA, 21 nt, Human
ucacacacguuuccaagggca

SEQ ID NO: 1003384 - RNA, 22 nt, Human
gacccggcuccaggcccagcag

SEQ ID NO: 1003385 - RNA, 22 nt, Human
ucugggcugcugugcagugacc

SEQ ID NO: 1003386 - RNA, 22 nt, Human
uuaugacaggaaaaucacagaa

SEQ ID NO: 1003387 - RNA, 22 nt, Human
gauggccuuguuuucucccuuc

SEQ ID NO: 1003388 - RNA, 22 nt, Human
augauugcagcccuacagcugu

SEQ ID NO: 1003389 - RNA, 22 nt, Human
ccugggcucaggcuugggcagc

SEQ ID NO: 1003390 - RNA, 20 nt, Human
agggcugagaagggacuagc

SEQ ID NO: 1003391 - RNA, 22 nt, Human
uguaaacauaccagagccaagu

SEQ ID NO: 1003392 - RNA, 22 nt, Human
gucuucuguucugugaggcuuc

SEQ ID NO: 1003393 - RNA, 23 nt, Human
acauacauggagauaaagugaug

SEQ ID NO: 1003394 - RNA, 22 nt, Human
gucugucacucaggggcuggag

SEQ ID NO: 1003395 - RNA, 22 nt, Human
cagagagcuuagugugcugcau

SEQ ID NO: 1003396 - RNA, 22 nt, Human
ucagcuuucucucgccaucagg

SEQ ID NO: 1003397 - RNA, 22 nt, Human
uaaauucugaucaaguuccuuc

SEQ ID NO: 1003398 - RNA, 22 nt, Human
ucacauacugaaaguccaguga

SEQ ID NO: 1003399 - RNA, 22 nt, Human
uucugucaaaugccaguagaga

SEQ ID NO: 1003400 - RNA, 22 nt, Human
uguaugaauauguauuuucaua

SEQ ID NO: 1003401 - RNA, 22 nt, Human
uccaaguugauguuucuuaaau

SEQ ID NO: 1003402 - RNA, 22 nt, Human
gacacuucaccuuucccagccu

SEQ ID NO: 1003403 - RNA, 22 nt, Human
uacacagacucuucaauucaga

SEQ ID NO: 1003404 - RNA, 22 nt, Human
cuguccagcuuggcuccugggg

SEQ ID NO: 1003405 - RNA, 21 nt, Human
aauuacagauggaauuacaga

SEQ ID NO: 1003406 - RNA, 22 nt, Human
acuggcagagguuggacaccau

SEQ ID NO: 1003407 - RNA, 17 nt, Human
uuauuuuuugggcugag

SEQ ID NO: 1003408 - RNA, 22 nt, Human
cuucuuaaucccuuauauauuu

SEQ ID NO: 1003409 - RNA, 22 nt, Human
uugggaaguuuaaugacagacu

SEQ ID NO: 1003410 - RNA, 22 nt, Human
auaugagaauuggaaaauauca

SEQ ID NO: 1003411 - RNA, 22 nt, Human
gcagagaccccgcagugaggcc

SEQ ID NO: 1003412 - RNA, 22 nt, Human
gcuccaagguauccaccagggu

SEQ ID NO: 1003413 - RNA, 22 nt, Human
ggccucagaggaggugugaguc

SEQ ID NO: 1003414 - RNA, 22 nt, Human
ccucugugucuugguuucaaga

SEQ ID NO: 1003415 - RNA, 22 nt, Human
caaauauuccagguacaucccu

SEQ ID NO: 1003416 - RNA, 22 nt, Human
cauuuguaucugggcugcugug

SEQ ID NO: 1003417 - RNA, 22 nt, Human
ucacacacauggauaguauuuu

SEQ ID NO: 1003418 - RNA, 22 nt, Human
uacauugcuuucuaauacaucu

SEQ ID NO: 1003419 - RNA, 22 nt, Human
agucacaguuucccugagagag

SEQ ID NO: 1003420 - RNA, 22 nt, Human
gugcagggcuggcaccggaggc

SEQ ID NO: 1003421 - RNA, 22 nt, Human
aaauuacagaucaccaaugcau

SEQ ID NO: 1003422 - RNA, 22 nt, Human
ugcuuaaaauaguucauuuuug

SEQ ID NO: 1003423 - RNA, 22 nt, Human
auaugagaguaaaugccgaucu

SEQ ID NO: 1003424 - RNA, 22 nt, Human
gugcaggguagcgacggcagga

SEQ ID NO: 1003425 - RNA, 22 nt, Human
ucacuguauuuggaagggaugg

SEQ ID NO: 1003426 - RNA, 22 nt, Human
ugaaacuuauaagaauaugaau

SEQ ID NO: 1003427 - RNA, 22 nt, Human
uccccacagcagaagaucugag

SEQ ID NO: 1003428 - RNA, 22 nt, Human
agggcacccucucugcaguacc

SEQ ID NO: 1003429 - RNA, 22 nt, Human
uccgccaggacugagggcccau

SEQ ID NO: 1003430 - RNA, 22 nt, Human
ccugggcuuugcuggcaaggcc

SEQ ID NO: 1003431 - RNA, 22 nt, Human
ccuggcagaaagaguuacaccu

SEQ ID NO: 1003432 - RNA, 22 nt, Human
agcuuugggcagaagaggauuc

SEQ ID NO: 1003433 - RNA, 22 nt, Human
uggcacaguccugggugccugc

SEQ ID NO: 1003434 - RNA, 22 nt, Human
ucuucauauauaaaguggaaua

SEQ ID NO: 1003435 - RNA, 22 nt, Human
ugcaguggaaagacucagacuu

SEQ ID NO: 1003436 - RNA, 22 nt, Human
cuuguuaaaaugcagauuccaa

SEQ ID NO: 1003437 - RNA, 22 nt, Human
augcuucagugcuaccuucaaa

SEQ ID NO: 1003438 - RNA, 22 nt, Human
uguuagaauauuguaauauucg

SEQ ID NO: 1003439 - RNA, 22 nt, Human
caggccucuuccaugcagcagc

SEQ ID NO: 1003440 - RNA, 22 nt, Human
ugcuucuguauuuugggcuuga

SEQ ID NO: 1003441 - RNA, 22 nt, Human
gcacauacccacugucaagcac

SEQ ID NO: 1003442 - RNA, 23 nt, Human
ccucucucccuguuuggcaaaua

SEQ ID NO: 1003443 - RNA, 22 nt, Human
aagagcaucuauuucacagugg

SEQ ID NO: 1003444 - RNA, 20 nt, Human
gagucacagaagaagcugaa

SEQ ID NO: 1003445 - RNA, 22 nt, Human
aguguugggucuuuagaauuua

SEQ ID NO: 1003446 - RNA, 22 nt, Human
auguagaaauuaggaugauagu

SEQ ID NO: 1003447 - RNA, 22 nt, Human
uuccaggcuucucuggggcguc

SEQ ID NO: 1003448 - RNA, 22 nt, Human
ccucugcaaagaauuugucucc

SEQ ID NO: 1003449 - RNA, 20 nt, Human
auguccagugacuggaccau

SEQ ID NO: 1003450 - RNA, 22 nt, Human
aguuuucuguucuacaauuuga

SEQ ID NO: 1003451 - RNA, 23 nt, Human
cugggcugcuugagucccuggcu

SEQ ID NO: 1003452 - RNA, 22 nt, Human
gccaggcagcuagcaaccccug

SEQ ID NO: 1003453 - RNA, 22 nt, Human
uccuggcacccuuggguuggag

SEQ ID NO: 1003454 - RNA, 22 nt, Human
acacucuguaaugucacacucc

SEQ ID NO: 1003455 - RNA, 22 nt, Human
cacaccagagguuaccugcaaa

SEQ ID NO: 1003456 - RNA, 22 nt, Human
acugggcucaagugauuguccu

SEQ ID NO: 1003457 - RNA, 22 nt, Human
uugcagcuuagugauguuaucu

SEQ ID NO: 1003458 - RNA, 22 nt, Human
gcccaggcuggagugcaguagc

SEQ ID NO: 1003459 - RNA, 22 nt, Human
cugggagaggaaccucgagggu

SEQ ID NO: 1003460 - RNA, 22 nt, Human
gggaccugaggagggguuucag

SEQ ID NO: 1003461 - RNA, 21 nt, Human
caauaaacugcacauugagac

SEQ ID NO: 1003462 - RNA, 22 nt, Human
cucagagauauagucccugcuu

SEQ ID NO: 1003463 - RNA, 22 nt, Human
guguaugagccuccagcugggc

SEQ ID NO: 1003464 - RNA, 22 nt, Human
agcccaggucuggcccagccug

SEQ ID NO: 1003465 - RNA, 22 nt, Human
aagaugcagcuuuacaauaagg

SEQ ID NO: 1003466 - RNA, 22 nt, Human
ucccacauuacccugacugaca

SEQ ID NO: 1003467 - RNA, 22 nt, Human
cagaguuuuaucauacguggau

SEQ ID NO: 1003468 - RNA, 22 nt, Human
acuucacagauauuuauuuggu

SEQ ID NO: 1003469 - RNA, 22 nt, Human
cauguuuuguguacagaauauu

SEQ ID NO: 1003470 - RNA, 22 nt, Human
agggcccuaaggaaggcacaca

SEQ ID NO: 1003471 - RNA, 23 nt, Human
cccagagcacagccuccagaugc

SEQ ID NO: 1003472 - RNA, 19 nt, Human
acuggcagcuguagucugu

SEQ ID NO: 1003473 - RNA, 22 nt, Human
uagaaacauguucuguucuguu

SEQ ID NO: 1003474 - RNA, 22 nt, Human
ccagcucucagcgggagacuca

SEQ ID NO: 1003475 - RNA, 23 nt, Human
uguaaacaucacccccuggaguu

SEQ ID NO: 1003476 - RNA, 22 nt, Human
uaugaaaugguaguaggaaggg

SEQ ID NO: 1003477 - RNA, 22 nt, Human
agaggccuccgaaaggugggcu

SEQ ID NO: 1003478 - RNA, 23 nt, Human
ccuggcagcaaacgaggagguua

SEQ ID NO: 1003479 - RNA, 22 nt, Human
uuuagggaagaagcccauggcc

SEQ ID NO: 1003480 - RNA, 22 nt, Human
uuuuucauauuccccucucugg

SEQ ID NO: 1003481 - RNA, 22 nt, Human
ucuucacaugaccuucaugucu

SEQ ID NO: 1003482 - RNA, 23 nt, Human
gcccacccucagcguccucacgg

SEQ ID NO: 1003483 - RNA, 22 nt, Human
gccaggcaaauuaaggaaugca

SEQ ID NO: 1003484 - RNA, 22 nt, Human
ccugggcuuucggcggcuuccu

SEQ ID NO: 1003485 - RNA, 22 nt, Human
ggcuuuaugcacagcagauggu

SEQ ID NO: 1003486 - RNA, 22 nt, Human
gaggccagaaugagcugaaugc

SEQ ID NO: 1003487 - RNA, 22 nt, Human
uucuugaaucacuuuagagaua

SEQ ID NO: 1003488 - RNA, 22 nt, Human
cagcuuugccaaguaaggucuu

SEQ ID NO: 1003489 - RNA, 22 nt, Human
acaguguucacuuaacaaugga

SEQ ID NO: 1003490 - RNA, 22 nt, Human
gaacacauguccuccuuggauu

SEQ ID NO: 1003491 - RNA, 22 nt, Human
uuauuuucuccucagaaagugg

SEQ ID NO: 1003492 - RNA, 19 nt, Human
ugcuucuggggcuucucca

SEQ ID NO: 1003493 - RNA, 22 nt, Human
uaccugcagcgggaauccauua

SEQ ID NO: 1003494 - RNA, 22 nt, Human
aucaguuauuuuuaagcuauaa

SEQ ID NO: 1003495 - RNA, 22 nt, Human
ccaggccucaccugcccaccua

SEQ ID NO: 1003496 - RNA, 22 nt, Human
cauaauuuuccaugguuugcua

SEQ ID NO: 1003497 - RNA, 22 nt, Human
auaugaaguuacagguaagaaa

SEQ ID NO: 1003498 - RNA, 22 nt, Human
cccagcccaucucaaaggucua

SEQ ID NO: 1003499 - RNA, 22 nt, Human
uuagaauuauuguuuccuucua

SEQ ID NO: 1003500 - RNA, 18 nt, Human
uguuuauuuuucucuuac

SEQ ID NO: 1003501 - RNA, 22 nt, Human
uucagagaagcaaaggcagauu

SEQ ID NO: 1003502 - RNA, 22 nt, Human
ucuaggagaaccaucagggagg

SEQ ID NO: 1003503 - RNA, 22 nt, Human
aagggcucgguagcaguccuga

SEQ ID NO: 1003504 - RNA, 22 nt, Human
acacauuugcauaauaccucau

SEQ ID NO: 1003505 - RNA, 22 nt, Human
ucauggcacuuagcacaguccu

SEQ ID NO: 1003506 - RNA, 22 nt, Human
gaagcacugccauaauucagac

SEQ ID NO: 1003507 - RNA, 22 nt, Human
uuuuauuaucuuugaaugggac

SEQ ID NO: 1003508 - RNA, 22 nt, Human
ggaccaggccagccucccugcg

SEQ ID NO: 1003509 - RNA, 22 nt, Human
cuggaaagaccugcuugcuuuu

SEQ ID NO: 1003510 - RNA, 22 nt, Human
gcuggcaggagaccauacccua

SEQ ID NO: 1003511 - RNA, 22 nt, Human
gaagccucaacaucucugcguc

SEQ ID NO: 1003512 - RNA, 22 nt, Human
uagggcucugagaguucagccu

SEQ ID NO: 1003513 - RNA, 22 nt, Human
cagcuuuaggacucauaauaaa

SEQ ID NO: 1003514 - RNA, 22 nt, Human
cacagcuucccaaaguggaccu

SEQ ID NO: 1003515 - RNA, 22 nt, Human
gaaguucuuagucucauuugca

SEQ ID NO: 1003516 - RNA, 22 nt, Human
ccagcucugcauguuucccuug

SEQ ID NO: 1003517 - RNA, 22 nt, Human
guccuggcccacuggcaggcug

SEQ ID NO: 1003518 - RNA, 22 nt, Human
uaauaguuucauaaugugcuuc

SEQ ID NO: 1003519 - RNA, 22 nt, Human
agggccccauagucacugcccg

SEQ ID NO: 1003520 - RNA, 22 nt, Human
ccuagaugggauggcggccggg

SEQ ID NO: 1003521 - RNA, 22 nt, Human
gccugcaggcuguaguuuguga

SEQ ID NO: 1003522 - RNA, 22 nt, Human
aggugaguuacaggaggagguc

SEQ ID NO: 1003523 - RNA, 20 nt, Human
ucuguacacucaucuucugc

SEQ ID NO: 1003524 - RNA, 22 nt, Human
acagagagguaaaauauauagu

SEQ ID NO: 1003525 - RNA, 22 nt, Human
uuguaaacugcugcaggagugc

SEQ ID NO: 1003526 - RNA, 22 nt, Human
ugcuuuauagacaaggaaguag

SEQ ID NO: 1003527 - RNA, 22 nt, Human
gaacacaucacauuuuacagug

SEQ ID NO: 1003528 - RNA, 22 nt, Human
uuagaacuuaaacuucagaaag

SEQ ID NO: 1003529 - RNA, 22 nt, Human
cuucugggagagcuuuugcuuc

SEQ ID NO: 1003530 - RNA, 22 nt, Human
cccugcagaucagugagaacuu

SEQ ID NO: 1003531 - RNA, 22 nt, Human
agcuuuaucuucaccugggaau

SEQ ID NO: 1003532 - RNA, 22 nt, Human
caggucuguuuccaucagugcu

SEQ ID NO: 1003533 - RNA, 22 nt, Human
acuauaaaaggauaaaccagaa

SEQ ID NO: 1003534 - RNA, 22 nt, Human
guggagcaggacuagcugagaa

SEQ ID NO: 1003535 - RNA, 22 nt, Human
gaaagauauuuauuggcaacag

SEQ ID NO: 1003536 - RNA, 22 nt, Human
uucacauuucauaccacagcuu

SEQ ID NO: 1003537 - RNA, 22 nt, Human
aggcucccaagcacugacccca

SEQ ID NO: 1003538 - RNA, 22 nt, Human
uguuagaaauuauuaguaauau

SEQ ID NO: 1003539 - RNA, 22 nt, Human
gcuggcagccaagugaagaggg

SEQ ID NO: 1003540 - RNA, 22 nt, Human
aaagagucaaaggcaugucucu

SEQ ID NO: 1003541 - RNA, 22 nt, Human
uguaugaaguuacugagccucu

SEQ ID NO: 1003542 - RNA, 22 nt, Human
ucccagccuccugacaguuuug

SEQ ID NO: 1003543 - RNA, 22 nt, Human
uggccaggaggcugcuucugac

SEQ ID NO: 1003544 - RNA, 22 nt, Human
ugcuccagugccugccccacag

SEQ ID NO: 1003545 - RNA, 22 nt, Human
ccuggcagcagcacaugccuuc

SEQ ID NO: 1003546 - RNA, 22 nt, Human
ggcuuuauuaacucauccguaa

SEQ ID NO: 1003547 - RNA, 22 nt, Human
aaggccacacuugcuggccagc

SEQ ID NO: 1003548 - RNA, 22 nt, Human
gguuucaacuucaaccucucca

SEQ ID NO: 1003549 - RNA, 21 nt, Human
ucagagagucacagugaacug

SEQ ID NO: 1003550 - RNA, 22 nt, Human
cacaucagguagaccuacagag

SEQ ID NO: 1003551 - RNA, 22 nt, Human
uugugaaacauucauggauuug

SEQ ID NO: 1003552 - RNA, 22 nt, Human
ugcuuuauguggcugauacuca

SEQ ID NO: 1003553 - RNA, 22 nt, Human
uuacauuuugggguaaggauaa

SEQ ID NO: 1003554 - RNA, 22 nt, Human
aaaguugugaaaccgaacaugu

SEQ ID NO: 1003555 - RNA, 22 nt, Human
aauucugugcaggcagagcuau

SEQ ID NO: 1003556 - RNA, 22 nt, Human
cccugcagaaccacagacaaac

SEQ ID NO: 1003557 - RNA, 23 nt, Human
aaaguuugaagcaacaguaguug

SEQ ID NO: 1003558 - RNA, 22 nt, Human
augcauugucugguuucauuuu

SEQ ID NO: 1003559 - RNA, 20 nt, Human
cugcuccacccggcucucag

SEQ ID NO: 1003560 - RNA, 22 nt, Human
caggcugccuggaagaggacug

SEQ ID NO: 1003561 - RNA, 22 nt, Human
aagggcucccugccugaggugg

SEQ ID NO: 1003562 - RNA, 22 nt, Human
uacauaaugagcuaguuaaguu

SEQ ID NO: 1003563 - RNA, 22 nt, Human
cagagcagggguuucccagguu

SEQ ID NO: 1003564 - RNA, 22 nt, Human
acuuggcaaguaucuauaaagu

SEQ ID NO: 1003565 - RNA, 22 nt, Human
cuuucacagcacaagccugccu

SEQ ID NO: 1003566 - RNA, 22 nt, Human
cccugcagggaggauucugaag

SEQ ID NO: 1003567 - RNA, 22 nt, Human
ccuggcagacagcacugaagcu

SEQ ID NO: 1003568 - RNA, 22 nt, Human
ugauucuauggaaggcauaagg

SEQ ID NO: 1003569 - RNA, 22 nt, Human
ggccucagugggccgcugcagg

SEQ ID NO: 1003570 - RNA, 22 nt, Human
gguuccuucugaggucccugua

SEQ ID NO: 1003571 - RNA, 22 nt, Human
ugaaccacaugcaaagugaaua

SEQ ID NO: 1003572 - RNA, 22 nt, Human
gugggcuggauuugcuugcaga

SEQ ID NO: 1003573 - RNA, 22 nt, Human
ggccucucagggcagagacccu

SEQ ID NO: 1003574 - RNA, 22 nt, Human
augggcuggggaagcucacucc

SEQ ID NO: 1003575 - RNA, 22 nt, Human
augcauaauguauguauugacu

SEQ ID NO: 1003576 - RNA, 22 nt, Human
auucucaauggcuacuuucaua

SEQ ID NO: 1003577 - RNA, 22 nt, Human
aagcaacucccuccucauuuuu

SEQ ID NO: 1003578 - RNA, 22 nt, Human
uccugcagccuugggcuggagc

SEQ ID NO: 1003579 - RNA, 22 nt, Human
acaauguaggauauguacuugu

SEQ ID NO: 1003580 - RNA, 16 nt, Human
gcagggguggguggag

SEQ ID NO: 1003581 - RNA, 22 nt, Human
aaauaguucagccacggugacu

SEQ ID NO: 1003582 - RNA, 22 nt, Human
uggcuaggaauccaugacucuc

SEQ ID NO: 1003583 - RNA, 22 nt, Human
cccuuccuugugacuggugggg

SEQ ID NO: 1003584 - RNA, 22 nt, Human
accaggcagcugggggugaugu

SEQ ID NO: 1003585 - RNA, 22 nt, Human
aaggcucccucuucucgagugu

SEQ ID NO: 1003586 - RNA, 22 nt, Human
acacucacccucccacugccug

SEQ ID NO: 1003587 - RNA, 22 nt, Human
acugggcuccaaggaccuggag

SEQ ID NO: 1003588 - RNA, 22 nt, Human
gcagcuuugucacggagugucg

SEQ ID NO: 1003589 - RNA, 22 nt, Human
uuugugcagauguauauuugug

SEQ ID NO: 1003590 - RNA, 22 nt, Human
cuggauuuaauuaacuguugcu

SEQ ID NO: 1003591 - RNA, 22 nt, Human
guuaaccaaggcaccaagugua

SEQ ID NO: 1003592 - RNA, 22 nt, Human
ucccaggccauaaaacucagag

SEQ ID NO: 1003593 - RNA, 22 nt, Human
auauuaggcaaggagauuauuu

SEQ ID NO: 1003594 - RNA, 22 nt, Human
ugcuucugggucccagccuggc

SEQ ID NO: 1003595 - RNA, 22 nt, Human
cagguugguauucaucuccaca

SEQ ID NO: 1003596 - RNA, 22 nt, Human
gguggcauaagaacacuaaaga

SEQ ID NO: 1003597 - RNA, 22 nt, Human
ugucaacacaccuaucucaauu

SEQ ID NO: 1003598 - RNA, 22 nt, Human
acauuuuaauaugcuuagugug

SEQ ID NO: 1003599 - RNA, 22 nt, Human
gcaaggaccuuugagcgugcca

SEQ ID NO: 1003600 - RNA, 22 nt, Human
ugcuuuauuuauaaaauagcaa

SEQ ID NO: 1003601 - RNA, 22 nt, Human
ggcuuugggcccucaagucucc

SEQ ID NO: 1003602 - RNA, 22 nt, Human
uacagagaguacagcauccaca

SEQ ID NO: 1003603 - RNA, 22 nt, Human
auaaucuuucuuuuccagauag

SEQ ID NO: 1003604 - RNA, 22 nt, Human
gcagggacaacugugcaccuga

SEQ ID NO: 1003605 - RNA, 22 nt, Human
uauguaaaaauucaucaggcug

SEQ ID NO: 1003606 - RNA, 22 nt, Human
cugggcucaccuguggcuggca

SEQ ID NO: 1003607 - RNA, 22 nt, Human
gacauaauccuccucaccuacu

SEQ ID NO: 1003608 - RNA, 19 nt, Human
ccaggccuccugggagguc

SEQ ID NO: 1003609 - RNA, 22 nt, Human
accaggcacucuuguggcagug

SEQ ID NO: 1003610 - RNA, 22 nt, Human
uuaggaaaaucaugagagauga

SEQ ID NO: 1003611 - RNA, 22 nt, Human
acuggggaguugaagcacuuuc

SEQ ID NO: 1003612 - RNA, 22 nt, Human
cuguaugaaauuaaguaaacag

SEQ ID NO: 1003613 - RNA, 20 nt, Human
ccagagaguagguuagugau

SEQ ID NO: 1003614 - RNA, 22 nt, Human
ucauuuguugcuguuaccugag

SEQ ID NO: 1003615 - RNA, 22 nt, Human
cccaggacucuucacugcagcc

SEQ ID NO: 1003616 - RNA, 22 nt, Human
agauuucucuuucccuggcuga

SEQ ID NO: 1003617 - RNA, 22 nt, Human
ugggcugagcacugaggaagga

SEQ ID NO: 1003618 - RNA, 22 nt, Human
ucauuguuucugcuuuucauga

SEQ ID NO: 1003619 - RNA, 22 nt, Human
aguaugaaaguuaaucaauuua

SEQ ID NO: 1003620 - RNA, 22 nt, Human
aucagagauuguaguaugugca

SEQ ID NO: 1003621 - RNA, 20 nt, Human
cucuuaaauguaaaguaggc

SEQ ID NO: 1003622 - RNA, 22 nt, Human
uugauaaaaugauaucuucuuu

SEQ ID NO: 1003623 - RNA, 22 nt, Human
uauuuguauguguguacauaua

SEQ ID NO: 1003624 - RNA, 22 nt, Human
uucuuaaagaggcaaaacacag

SEQ ID NO: 1003625 - RNA, 22 nt, Human
cuuccuccgaagaaguugcugg

SEQ ID NO: 1003626 - RNA, 22 nt, Human
uuauuaggaaaaggucagaugu

SEQ ID NO: 1003627 - RNA, 22 nt, Human
uauucacaugaaaacaaauuuu

SEQ ID NO: 1003628 - RNA, 22 nt, Human
cacccagccuucacacaggagu

SEQ ID NO: 1003629 - RNA, 22 nt, Human
uguuugaaacuuugaucacuaa

SEQ ID NO: 1003630 - RNA, 22 nt, Human
acuaaauacacacauuuguuca

SEQ ID NO: 1003631 - RNA, 22 nt, Human
uuguaugaucccauuuagugaa

SEQ ID NO: 1003632 - RNA, 22 nt, Human
cuaggaaucaccaagauucuag

SEQ ID NO: 1003633 - RNA, 22 nt, Human
uccuggcagugcuuguuuugga

SEQ ID NO: 1003634 - RNA, 22 nt, Human
gcuggcaggagaaacggggugc

SEQ ID NO: 1003635 - RNA, 22 nt, Human
cuggggacugaaggauguugcu

SEQ ID NO: 1003636 - RNA, 22 nt, Human
ucagcauaucuugagcuucaug

SEQ ID NO: 1003637 - RNA, 22 nt, Human
auccaagucagggauaguuuga

SEQ ID NO: 1003638 - RNA, 22 nt, Human
cugggcugcaguuccugguccu

SEQ ID NO: 1003639 - RNA, 22 nt, Human
uacauuccuguuagcaucuaag

SEQ ID NO: 1003640 - RNA, 22 nt, Human
agcuuuauagaaaggaucagug

SEQ ID NO: 1003641 - RNA, 22 nt, Human
cuucauuaaugucuauaaguuu

SEQ ID NO: 1003642 - RNA, 22 nt, Human
uuguucaugguuguaaguuuga

SEQ ID NO: 1003643 - RNA, 22 nt, Human
ucuucaaauccuacagugucug

SEQ ID NO: 1003644 - RNA, 22 nt, Human
uuagaacuuaagaauacugucu

SEQ ID NO: 1003645 - RNA, 22 nt, Human
uuucauaaacaguagaagacua

SEQ ID NO: 1003646 - RNA, 22 nt, Human
cuuagggaaucuuagagcugga

SEQ ID NO: 1003647 - RNA, 22 nt, Human
gccuggcaaggcccuguugacu

SEQ ID NO: 1003648 - RNA, 22 nt, Human
cauuacaaccccaaauuacaaa

SEQ ID NO: 1003649 - RNA, 22 nt, Human
uuucugaagauacagcuuugcu

SEQ ID NO: 1003650 - RNA, 22 nt, Human
gugcaguggcagauccuagcuc

SEQ ID NO: 1003651 - RNA, 22 nt, Human
ucucacagugcaggucugucuc

SEQ ID NO: 1003652 - RNA, 22 nt, Human
uuuucauuguuccucgagcauu

SEQ ID NO: 1003653 - RNA, 21 nt, Human
ucauuugugaucugauuucca

SEQ ID NO: 1003654 - RNA, 22 nt, Human
uucugucacuugcaaucaagag

SEQ ID NO: 1003655 - RNA, 22 nt, Human
ugcuuuauuggaaccucauccu

SEQ ID NO: 1003656 - RNA, 22 nt, Human
acuggcagggggagccccgaga

SEQ ID NO: 1003657 - RNA, 22 nt, Human
aaaguucuuucucuuauuuggu

SEQ ID NO: 1003658 - RNA, 22 nt, Human
agaggcuucucggauggggcag

SEQ ID NO: 1003659 - RNA, 22 nt, Human
uuauuaggaacucaggauuuuu

SEQ ID NO: 1003660 - RNA, 19 nt, Human
gugggacagacauuacaua

SEQ ID NO: 1003661 - RNA, 22 nt, Human
uuguuaaagaugcagauuccau

SEQ ID NO: 1003662 - RNA, 22 nt, Human
uggcagagucaucacaucugga

SEQ ID NO: 1003663 - RNA, 22 nt, Human
cucagagaaaugucacaacaau

SEQ ID NO: 1003664 - RNA, 22 nt, Human
agggaccuugauggguuuggga

SEQ ID NO: 1003665 - RNA, 22 nt, Human
accugcagcuaaagauguaggg

SEQ ID NO: 1003666 - RNA, 22 nt, Human
acauaaugagcucuuuauaaau

SEQ ID NO: 1003667 - RNA, 22 nt, Human
ugcuagaauuugcagaagcaua

SEQ ID NO: 1003668 - RNA, 22 nt, Human
auuauaaaccuuugaggguggg

SEQ ID NO: 1003669 - RNA, 22 nt, Human
aaacuucagugaaugacuuaug

SEQ ID NO: 1003670 - RNA, 22 nt, Human
agcaggcuaggaaccucacugc

SEQ ID NO: 1003671 - RNA, 22 nt, Human
gguucccggaucuccgaguccc

SEQ ID NO: 1003672 - RNA, 22 nt, Human
uggucucugcaggccaggcuca

SEQ ID NO: 1003673 - RNA, 22 nt, Human
aggaggcugcaacccugaggcc

SEQ ID NO: 1003674 - RNA, 22 nt, Human
augacacuuggugauacuuugu

SEQ ID NO: 1003675 - RNA, 22 nt, Human
aacaguaacgagauguccuaac

SEQ ID NO: 1003676 - RNA, 21 nt, Human
gggcagaggggccuccugggu

SEQ ID NO: 1003677 - RNA, 22 nt, Human
ccacacagucaguuuccaagaa

SEQ ID NO: 1003678 - RNA, 22 nt, Human
cuguagaacgauccaggcauuu

SEQ ID NO: 1003679 - RNA, 22 nt, Human
uaauuuuacuuccugagcaccu

SEQ ID NO: 1003680 - RNA, 22 nt, Human
uucccacauucuuuacauucau

SEQ ID NO: 1003681 - RNA, 22 nt, Human
ucuggggagggagccacagguc

SEQ ID NO: 1003682 - RNA, 22 nt, Human
uacccagcuccucagaagacca

SEQ ID NO: 1003683 - RNA, 22 nt, Human
caggcagcugcgacaagagagc

SEQ ID NO: 1003684 - RNA, 22 nt, Human
accugcagguguuuccacacuu

SEQ ID NO: 1003685 - RNA, 22 nt, Human
gccacauagaggaggauauuaa

SEQ ID NO: 1003686 - RNA, 22 nt, Human
gaacacaugauuauaaaugcua

SEQ ID NO: 1003687 - RNA, 19 nt, Human
uggaccugugcccauggcu

SEQ ID NO: 1003688 - RNA, 22 nt, Human
ugcuuuauaacuuaguuuaugg

SEQ ID NO: 1003689 - RNA, 19 nt, Human
gcuggggaauggauauuga

SEQ ID NO: 1003690 - RNA, 22 nt, Human
aauuuagauugauaaacaugga

SEQ ID NO: 1003691 - RNA, 22 nt, Human
ccuugcucaagcuagugacggg

SEQ ID NO: 1003692 - RNA, 22 nt, Human
auuuaaaugcuuaagaggguuu

SEQ ID NO: 1003693 - RNA, 22 nt, Human
uagcuuuaccauagaagaguau

SEQ ID NO: 1003694 - RNA, 22 nt, Human
uuauuagguuuacauaaagguu

SEQ ID NO: 1003695 - RNA, 22 nt, Human
ugcaggcuguuugguggaucuc

SEQ ID NO: 1003696 - RNA, 22 nt, Human
cugcagggaccacaagcagguu

SEQ ID NO: 1003697 - RNA, 22 nt, Human
auguccagaguguccuggaaag

SEQ ID NO: 1003698 - RNA, 22 nt, Human
guccaagagucaagaagggggc

SEQ ID NO: 1003699 - RNA, 22 nt, Human
guaaacaugcuguguacucagc

SEQ ID NO: 1003700 - RNA, 22 nt, Human
uuccuugaaugagucauggaaa

SEQ ID NO: 1003701 - RNA, 22 nt, Human
cccaggcagagagcuggugagc

SEQ ID NO: 1003702 - RNA, 22 nt, Human
ggcucugcaugugagugggugg

SEQ ID NO: 1003703 - RNA, 22 nt, Human
cuguccagaaagggggcaacaa

SEQ ID NO: 1003704 - RNA, 22 nt, Human
cccaggcaggagugugguggcu

SEQ ID NO: 1003705 - RNA, 22 nt, Human
uuccuggccccaccccuggaga

SEQ ID NO: 1003706 - RNA, 22 nt, Human
uggcagggugccaguugcgagu

SEQ ID NO: 1003707 - RNA, 17 nt, Human
cucuggggacaguucua

SEQ ID NO: 1003708 - RNA, 22 nt, Human
uagaaacaaugacaugcuugua

SEQ ID NO: 1003709 - RNA, 22 nt, Human
ugucauaacuuagugacaaauc

SEQ ID NO: 1003710 - RNA, 22 nt, Human
uauuuaaaaagaggccagcugg

SEQ ID NO: 1003711 - RNA, 22 nt, Human
uagcauuaucugucuuaucauu

SEQ ID NO: 1003712 - RNA, 22 nt, Human
aaauaguucagcuuguaaaccc

SEQ ID NO: 1003713 - RNA, 16 nt, Human
ccugggcucuguugga

SEQ ID NO: 1003714 - RNA, 22 nt, Human
cagcucuguucauagauggugc

SEQ ID NO: 1003715 - RNA, 22 nt, Human
gcauacagagaggauguggcau

SEQ ID NO: 1003716 - RNA, 18 nt, Human
acucugcggaggccccag

SEQ ID NO: 1003717 - RNA, 22 nt, Human
acaauucugaugguuucccagu

SEQ ID NO: 1003718 - RNA, 22 nt, Human
acucugaaugugcauguaaauc

SEQ ID NO: 1003719 - RNA, 22 nt, Human
gaaagaagcuuuagauggcuau

SEQ ID NO: 1003720 - RNA, 22 nt, Human
uagggcucacugagaugaauau

SEQ ID NO: 1003721 - RNA, 22 nt, Human
cugggccugucagggcuuuuug

SEQ ID NO: 1003722 - RNA, 22 nt, Human
uuucugaauaacucuaugauau

SEQ ID NO: 1003723 - RNA, 22 nt, Human
uuaauuuuuauguauagugugu

SEQ ID NO: 1003724 - RNA, 22 nt, Human
ugagaauuuuuugucaugcauu

SEQ ID NO: 1003725 - RNA, 22 nt, Human
acacauaagccuaaucaucucc

SEQ ID NO: 1003726 - RNA, 22 nt, Human
ucacaggcuugugaacauugca

SEQ ID NO: 1003727 - RNA, 22 nt, Human
gaugaagccugacuucucggug

SEQ ID NO: 1003728 - RNA, 22 nt, Human
uuccugggugguccugguagag

SEQ ID NO: 1003729 - RNA, 22 nt, Human
cacacaucuuaucccaguuauu

SEQ ID NO: 1003730 - RNA, 21 nt, Human
uaacacauuuugguacuuugg

SEQ ID NO: 1003731 - RNA, 22 nt, Human
ugcuuaaacauacuauuuauau

SEQ ID NO: 1003732 - RNA, 22 nt, Human
gguuucaaaguggacaguuagu

SEQ ID NO: 1003733 - RNA, 18 nt, Human
ccuagccuccaagcucau

SEQ ID NO: 1003734 - RNA, 22 nt, Human
ucccagccacaguuuccaccug

SEQ ID NO: 1003735 - RNA, 22 nt, Human
gacaaaaguguuuugaacaagg

SEQ ID NO: 1003736 - RNA, 20 nt, Human
gcuccccuucucugggccuc

SEQ ID NO: 1003737 - RNA, 22 nt, Human
uggguaggggacguggaagaaa

SEQ ID NO: 1003738 - RNA, 22 nt, Human
ggcuccaaagggcagugugagg

SEQ ID NO: 1003739 - RNA, 23 nt, Human
uguaugaauaugccacaguuuaa

SEQ ID NO: 1003740 - RNA, 22 nt, Human
uuucuacagcuggugcaacuuu

SEQ ID NO: 1003741 - RNA, 22 nt, Human
gcuggcaguaaaggguuuggca

SEQ ID NO: 1003742 - RNA, 22 nt, Human
aggcacaggaggugguaagaag

SEQ ID NO: 1003743 - RNA, 22 nt, Human
acagauuuuauuauucagguau

SEQ ID NO: 1003744 - RNA, 22 nt, Human
guuaugaaauaaauauagauca

SEQ ID NO: 1003745 - RNA, 22 nt, Human
ggggcucaguucggacagccug

SEQ ID NO: 1003746 - RNA, 22 nt, Human
guccucugaaagaugaaccaug

SEQ ID NO: 1003747 - RNA, 22 nt, Human
gggcucucaugaguguguggua

SEQ ID NO: 1003748 - RNA, 22 nt, Human
ugaaugaugcaguauaaugaua

SEQ ID NO: 1003749 - RNA, 22 nt, Human
gacagccaucagcacacgcugc

SEQ ID NO: 1003750 - RNA, 22 nt, Human
cuguaugauuccauuucuauaa

SEQ ID NO: 1003751 - RNA, 22 nt, Human
ucuggcagugauuucugugauc

SEQ ID NO: 1003752 - RNA, 22 nt, Human
cauuuguaguaucuguuuauau

SEQ ID NO: 1003753 - RNA, 22 nt, Human
cuguacaaguccuucaucaggg

SEQ ID NO: 1003754 - RNA, 22 nt, Human
cuuagggaauugggaggaugcc

SEQ ID NO: 1003755 - RNA, 22 nt, Human
cuggcaugaaauggcaucucau

SEQ ID NO: 1003756 - RNA, 22 nt, Human
uaugaacugugagugugauggg

SEQ ID NO: 1003757 - RNA, 22 nt, Human
accaugaugcauccuuaaggaa

SEQ ID NO: 1003758 - RNA, 22 nt, Human
acagauuugacugguaccuggc

SEQ ID NO: 1003759 - RNA, 22 nt, Human
ccagcuuuggaguguuguugcu

SEQ ID NO: 1003760 - RNA, 22 nt, Human
gccuggcacaguagggacccaa

SEQ ID NO: 1003761 - RNA, 22 nt, Human
gagccugaugaaacaggcagac

SEQ ID NO: 1003762 - RNA, 22 nt, Human
gggcaaguccggugcccagagc

SEQ ID NO: 1003763 - RNA, 22 nt, Human
gcagggacagggcagggccuuu

SEQ ID NO: 1003764 - RNA, 22 nt, Human
ucuggcagggguucugcacuug

SEQ ID NO: 1003765 - RNA, 22 nt, Human
cccaggcacaccccgaacggaa

SEQ ID NO: 1003766 - RNA, 22 nt, Human
cuacauggagaagaaaauucuu

SEQ ID NO: 1003767 - RNA, 22 nt, Human
agagggcugcugcacagugcuc

SEQ ID NO: 1003768 - RNA, 22 nt, Human
cuuuucaugagucuguuauggg

SEQ ID NO: 1003769 - RNA, 22 nt, Human
gggcugacauauuuggugcucu

SEQ ID NO: 1003770 - RNA, 22 nt, Human
uuuaacaugugaauuuuggaag

SEQ ID NO: 1003771 - RNA, 22 nt, Human
ugaagccauaggacagaggaua

SEQ ID NO: 1003772 - RNA, 22 nt, Human
gcaguguuguuaaaagauuaga

SEQ ID NO: 1003773 - RNA, 22 nt, Human
caggcccucgcccgcagcgacc

SEQ ID NO: 1003774 - RNA, 22 nt, Human
aagugauuucugccugcauguu

SEQ ID NO: 1003775 - RNA, 22 nt, Human
cccagcuucugagggggccuug

SEQ ID NO: 1003776 - RNA, 22 nt, Human
caauuucugggccucacacaag

SEQ ID NO: 1003777 - RNA, 22 nt, Human
cagugagggcccccuuccaggu

SEQ ID NO: 1003778 - RNA, 22 nt, Human
uacagccacaggugacucucau

SEQ ID NO: 1003779 - RNA, 22 nt, Human
uggaaagaggaagugcccagca

SEQ ID NO: 1003780 - RNA, 22 nt, Human
aucccacaccccuacaacauau

SEQ ID NO: 1003781 - RNA, 18 nt, Human
cuccuggcugauggugag

SEQ ID NO: 1003782 - RNA, 22 nt, Human
ccucugccaccucccacgaggc

SEQ ID NO: 1003783 - RNA, 22 nt, Human
cucucuggaagggggagcugau

SEQ ID NO: 1003784 - RNA, 22 nt, Human
uuugacaaauccuucagcaaug

SEQ ID NO: 1003785 - RNA, 20 nt, Human
ggcaggcuuuauauggaggg

SEQ ID NO: 1003786 - RNA, 22 nt, Human
gcagcucuccucugugaggaac

SEQ ID NO: 1003787 - RNA, 22 nt, Human
aaagaaucagaagucucaaaca

SEQ ID NO: 1003788 - RNA, 22 nt, Human
ccaggcuccgcauagaccccac

SEQ ID NO: 1003789 - RNA, 22 nt, Human
caccugcagggggagucaagag

SEQ ID NO: 1003790 - RNA, 22 nt, Human
gcagcuuuguggagaggcccau

SEQ ID NO: 1003791 - RNA, 22 nt, Human
ugcuucuggcagauugagugag

SEQ ID NO: 1003792 - RNA, 23 nt, Human
ucagagaggcccccugcagagau

SEQ ID NO: 1003793 - RNA, 22 nt, Human
cuccagugagcgcggggcaugg

SEQ ID NO: 1003794 - RNA, 22 nt, Human
ccuggcagcccagagcgccgcu

SEQ ID NO: 1003795 - RNA, 22 nt, Human
uacauaugaacuuuauaacuug

SEQ ID NO: 1003796 - RNA, 22 nt, Human
acuggagcugagagcaugggua

SEQ ID NO: 1003797 - RNA, 22 nt, Human
uccaagcucucuaugccaugau

SEQ ID NO: 1003798 - RNA, 22 nt, Human
ccaggcucaggugcgagagaca

SEQ ID NO: 1003799 - RNA, 22 nt, Human
augggcugcuucuccagcaccu

SEQ ID NO: 1003800 - RNA, 22 nt, Human
gccccacagccugcggucucag

SEQ ID NO: 1003801 - RNA, 20 nt, Human
agggucugaugugguggccc

SEQ ID NO: 1003802 - RNA, 22 nt, Human
uauuacagaaucaggcauaacu

SEQ ID NO: 1003803 - RNA, 22 nt, Human
acaguaaaucaacagaauaucu

SEQ ID NO: 1003804 - RNA, 22 nt, Human
aguucacauaucuguuuuauuu

SEQ ID NO: 1003805 - RNA, 22 nt, Human
uauucacaggcacgaaauauug

SEQ ID NO: 1003806 - RNA, 22 nt, Human
acagcuuuucugauagauccug

SEQ ID NO: 1003807 - RNA, 22 nt, Human
aucagagacaaaaccagcacuu

SEQ ID NO: 1003808 - RNA, 22 nt, Human
aggcuggauuuauggggacuuc

SEQ ID NO: 1003809 - RNA, 22 nt, Human
aaaagguuuugaguacaaauau

SEQ ID NO: 1003810 - RNA, 21 nt, Human
aauguauguuuaucucacagu

SEQ ID NO: 1003811 - RNA, 22 nt, Human
cuuaggaacgcucugccuagug

SEQ ID NO: 1003812 - RNA, 22 nt, Human
cagggcucacucggcuggcguc

SEQ ID NO: 1003813 - RNA, 22 nt, Human
ugcagggaaaguguuggcagca

SEQ ID NO: 1003814 - RNA, 22 nt, Human
accaggcaugauguggagcaca

SEQ ID NO: 1003815 - RNA, 22 nt, Human
gcagcuuuaaacauuggaaaua

SEQ ID NO: 1003816 - RNA, 22 nt, Human
ggagucugcucccagacaugau

SEQ ID NO: 1003817 - RNA, 22 nt, Human
gugaaacagaagcuccuggaau

SEQ ID NO: 1003818 - RNA, 22 nt, Human
cagaguggcgacccccucagcu

SEQ ID NO: 1003819 - RNA, 22 nt, Human
uaugaccuuaggaagcaagaag

SEQ ID NO: 1003820 - RNA, 22 nt, Human
uauauguaaauaagucuaaugu

SEQ ID NO: 1003821 - RNA, 23 nt, Human
agggcuccuuguugauuagcauu

SEQ ID NO: 1003822 - RNA, 22 nt, Human
gaggcuguuaggagggacucug

SEQ ID NO: 1003823 - RNA, 22 nt, Human
accaggcagucaccguccagga

SEQ ID NO: 1003824 - RNA, 22 nt, Human
ucccugcccucagugcacccgg

SEQ ID NO: 1003825 - RNA, 22 nt, Human
cagccucugacaccacagucgu

SEQ ID NO: 1003826 - RNA, 22 nt, Human
agucccagcuucccccaugcag

SEQ ID NO: 1003827 - RNA, 22 nt, Human
gccaggcacaguucuaggugcu

SEQ ID NO: 1003828 - RNA, 22 nt, Human
gccccaccuugagagcagaaac

SEQ ID NO: 1003829 - RNA, 20 nt, Human
uccugcaguuccuaggaggg

SEQ ID NO: 1003830 - RNA, 22 nt, Human
aauguaugagcgugaaagcacu

SEQ ID NO: 1003831 - RNA, 22 nt, Human
ccugcagggugcugccacagau

SEQ ID NO: 1003832 - RNA, 22 nt, Human
uuuuccuucuagagcagauuuc

SEQ ID NO: 1003833 - RNA, 22 nt, Human
ccuggcaguggugaagaagagg

SEQ ID NO: 1003834 - RNA, 22 nt, Human
uggcagagaacacacaugauuc

SEQ ID NO: 1003835 - RNA, 22 nt, Human
gcagcuuuagaaacaagggcug

SEQ ID NO: 1003836 - RNA, 22 nt, Human
ugccugacugcugccaccacua

SEQ ID NO: 1003837 - RNA, 20 nt, Human
aggcucugccugcaggccca

SEQ ID NO: 1003838 - RNA, 22 nt, Human
uggaaagagguagaggaucugg

SEQ ID NO: 1003839 - RNA, 22 nt, Human
auuuucauggcuucugcucagu

SEQ ID NO: 1003840 - RNA, 22 nt, Human
ugauguucuguauaucauauag

SEQ ID NO: 1003841 - RNA, 22 nt, Human
accugccuaucagcugccugcu

SEQ ID NO: 1003842 - RNA, 22 nt, Human
agaccugcagggccaggccugc

SEQ ID NO: 1003843 - RNA, 22 nt, Human
gagacugcauagauggccacaa

SEQ ID NO: 1003844 - RNA, 22 nt, Human
aucuagcaguguuauaauugga

SEQ ID NO: 1003845 - RNA, 22 nt, Human
cuccaagucggcugcagcugga

SEQ ID NO: 1003846 - RNA, 20 nt, Human
ucuggggaugaggucuagga

SEQ ID NO: 1003847 - RNA, 22 nt, Human
ucugucaucucuaaaauagaaa

SEQ ID NO: 1003848 - RNA, 22 nt, Human
uuuaaauuuagaagaaacacug

SEQ ID NO: 1003849 - RNA, 22 nt, Human
ugcaggcuuggaucacaucucc

SEQ ID NO: 1003850 - RNA, 22 nt, Human
aaguccaguuucauuugagguc

SEQ ID NO: 1003851 - RNA, 22 nt, Human
aacaaccaaaaagaugaaugua

SEQ ID NO: 1003852 - RNA, 22 nt, Human
cccaggcagggacgugcucugg

SEQ ID NO: 1003853 - RNA, 22 nt, Human
auggccugcagugcugccacag

SEQ ID NO: 1003854 - RNA, 21 nt, Human
gcaaguacuaucaucauuauc

SEQ ID NO: 1003855 - RNA, 22 nt, Human
agguauaagaagauuauuuaua

SEQ ID NO: 1003856 - RNA, 17 nt, Human
ugaauucaaucugcacu

SEQ ID NO: 1003857 - RNA, 22 nt, Human
acuggcaguuugagaaugcauu

SEQ ID NO: 1003858 - RNA, 22 nt, Human
gcuggcaggagccuuucccuuu

SEQ ID NO: 1003859 - RNA, 22 nt, Human
ucugggcuuuuccaugccugug

SEQ ID NO: 1003860 - RNA, 22 nt, Human
cacccagcauuggcuaagagag

SEQ ID NO: 1003861 - RNA, 22 nt, Human
gcagcuuuguaaaguaugaagc

SEQ ID NO: 1003862 - RNA, 17 nt, Human
agguauaaaaugguagc

SEQ ID NO: 1003863 - RNA, 22 nt, Human
ccugggcuuucaaaaccagccu

SEQ ID NO: 1003864 - RNA, 22 nt, Human
cuccuggcucgcccccagcuga

SEQ ID NO: 1003865 - RNA, 22 nt, Human
uuuaauuuguauuucuagaggg

SEQ ID NO: 1003866 - RNA, 22 nt, Human
uucacuuauagggauguuauug

SEQ ID NO: 1003867 - RNA, 22 nt, Human
ucauuuguucucauucucuacu

SEQ ID NO: 1003868 - RNA, 22 nt, Human
ggagugugggauggagcucagg

SEQ ID NO: 1003869 - RNA, 22 nt, Human
gcacacaggggaguucucagaa

SEQ ID NO: 1003870 - RNA, 22 nt, Human
ugaagcacaggcauacacaacc

SEQ ID NO: 1003871 - RNA, 22 nt, Human
acuggcaggcugcuggccggcg

SEQ ID NO: 1003872 - RNA, 22 nt, Human
aacccagccguguagcugccgc

SEQ ID NO: 1003873 - RNA, 20 nt, Human
auacacauauucuugcaacu

SEQ ID NO: 1003874 - RNA, 22 nt, Human
gcaggcucaaaagcugguagga

SEQ ID NO: 1003875 - RNA, 22 nt, Human
ucauuuguugaacuuuagugcg

SEQ ID NO: 1003876 - RNA, 22 nt, Human
uaacacauuuuccucauacgga

SEQ ID NO: 1003877 - RNA, 18 nt, Human
cucugucauaagugucau

SEQ ID NO: 1003878 - RNA, 22 nt, Human
cccaggccagaacuugguugcu

SEQ ID NO: 1003879 - RNA, 22 nt, Human
aggcuuuggaaucagaguucug

SEQ ID NO: 1003880 - RNA, 22 nt, Human
cugcagagcagccaguccccca

SEQ ID NO: 1003881 - RNA, 22 nt, Human
cugggcuuucaggcccuaaggc

SEQ ID NO: 1003882 - RNA, 18 nt, Human
acauuucuccuucugacc

SEQ ID NO: 1003883 - RNA, 22 nt, Human
guucacaagaguuacagacaga

SEQ ID NO: 1003884 - RNA, 22 nt, Human
guugggaaggcaagaaguagaa

SEQ ID NO: 1003885 - RNA, 22 nt, Human
ggagcugaggcugaggccucac

SEQ ID NO: 1003886 - RNA, 22 nt, Human
ccaggccuuccaguacgcagaa

SEQ ID NO: 1003887 - RNA, 22 nt, Human
ccagcuuuuggggugacaauuu

SEQ ID NO: 1003888 - RNA, 22 nt, Human
ccucucccgggugccgcugggc

SEQ ID NO: 1003889 - RNA, 20 nt, Human
agccugccagcuggcccaga

SEQ ID NO: 1003890 - RNA, 22 nt, Human
uguguaaagcuuguuccagaaa

SEQ ID NO: 1003891 - RNA, 22 nt, Human
gaaauauuucucuugagccccu

SEQ ID NO: 1003892 - RNA, 22 nt, Human
ucccacacagcccgcucaccgg

SEQ ID NO: 1003893 - RNA, 22 nt, Human
uggccaggccucuuggugccca

SEQ ID NO: 1003894 - RNA, 22 nt, Human
gucugucauacggcuuauguaa

SEQ ID NO: 1003895 - RNA, 22 nt, Human
ugcuucuggggacaggcugccu

SEQ ID NO: 1003896 - RNA, 22 nt, Human
acaggcaggcuucggccagagc

SEQ ID NO: 1003897 - RNA, 22 nt, Human
uaaguuuucuggaauaacuugg

SEQ ID NO: 1003898 - RNA, 22 nt, Human
ggcugcagagcugggugggccu

SEQ ID NO: 1003899 - RNA, 18 nt, Human
acuggcuuuagcaucaga

SEQ ID NO: 1003900 - RNA, 22 nt, Human
acuuaaaaccagacagcgucau

SEQ ID NO: 1003901 - RNA, 22 nt, Human
uacacacuuacuggagaugaag

SEQ ID NO: 1003902 - RNA, 21 nt, Human
uuuagggaggauauuuaacuu

SEQ ID NO: 1003903 - RNA, 22 nt, Human
gagcacugauuuauuuuugucu

SEQ ID NO: 1003904 - RNA, 22 nt, Human
aaagauucgagcgauguauaaa

SEQ ID NO: 1003905 - RNA, 22 nt, Human
ccaggcaggcgauggugcagug

SEQ ID NO: 1003906 - RNA, 22 nt, Human
uuccaaguccagccaggccaaa

SEQ ID NO: 1003907 - RNA, 22 nt, Human
aaagaguucuaugaucuuucca

SEQ ID NO: 1003908 - RNA, 22 nt, Human
ucccugccugacagcacccacc

SEQ ID NO: 1003909 - RNA, 23 nt, Human
cucccuggcccuugggagaccug

SEQ ID NO: 1003910 - RNA, 22 nt, Human
uccaggaggaggaaggcugcca

SEQ ID NO: 1003911 - RNA, 22 nt, Human
aagggcucccaacucaucuuuu

SEQ ID NO: 1003912 - RNA, 22 nt, Human
uucucuuuucaccaguugcuaa

SEQ ID NO: 1003913 - RNA, 20 nt, Human
gauacacagcacagagggcc

SEQ ID NO: 1003914 - RNA, 22 nt, Human
gacuacucaaacuuucucuaua

SEQ ID NO: 1003915 - RNA, 22 nt, Human
auguuaaaugguuuauuauuaa

SEQ ID NO: 1003916 - RNA, 22 nt, Human
uguaggaauguuuuuaaguugg

SEQ ID NO: 1003917 - RNA, 22 nt, Human
uccaggcagucauuaaucucua

SEQ ID NO: 1003918 - RNA, 23 nt, Human
uaaauuaccuuuccagugcaggg

SEQ ID NO: 1003919 - RNA, 22 nt, Human
aucugcuugaguuugaagucag

SEQ ID NO: 1003920 - RNA, 22 nt, Human
ugacaaaacugcaauuacuuuu

SEQ ID NO: 1003921 - RNA, 22 nt, Human
cauuuacuuaaaucuuuacaag

SEQ ID NO: 1003922 - RNA, 22 nt, Human
augggcugggaauacacagggg

SEQ ID NO: 1003923 - RNA, 22 nt, Human
ugcagggaauccagucuagggu

SEQ ID NO: 1003924 - RNA, 22 nt, Human
ucagcuuugaucucaggcaauc

SEQ ID NO: 1003925 - RNA, 22 nt, Human
cuucuuaacuguauauacuaug

SEQ ID NO: 1003926 - RNA, 22 nt, Human
accaggcaacugugaaugggcu

SEQ ID NO: 1003927 - RNA, 22 nt, Human
acuggcagguccaucgcccuuu

SEQ ID NO: 1003928 - RNA, 22 nt, Human
uuggaagacagugaaacagcac

SEQ ID NO: 1003929 - RNA, 22 nt, Human
ucucuuaauuguaaugguuccu

SEQ ID NO: 1003930 - RNA, 19 nt, Human
cucagagaggggcagugcc

SEQ ID NO: 1003931 - RNA, 19 nt, Human
uuagggacaugaauucuag

SEQ ID NO: 1003932 - RNA, 20 nt, Human
gccugcagguuggaugggau

SEQ ID NO: 1003933 - RNA, 22 nt, Human
ucugugcaggaagucauuauga

SEQ ID NO: 1003934 - RNA, 22 nt, Human
uccaaggcuccggcccuggcgu

SEQ ID NO: 1003935 - RNA, 22 nt, Human
uacauucccccaauuaccaaug

SEQ ID NO: 1003936 - RNA, 22 nt, Human
cccaggcacacugaagugacau

SEQ ID NO: 1003937 - RNA, 22 nt, Human
uaucauuguguuauuucuucca

SEQ ID NO: 1003938 - RNA, 22 nt, Human
uccaagcuguauguuccuagag

SEQ ID NO: 1003939 - RNA, 22 nt, Human
ggagagaauuccauggacaugu

SEQ ID NO: 1003940 - RNA, 22 nt, Human
acacacuuuaaauuaaaccucu

SEQ ID NO: 1003941 - RNA, 22 nt, Human
cagccucuguggcugccacacc

SEQ ID NO: 1003942 - RNA, 22 nt, Human
uacacaucccagacucccagga

SEQ ID NO: 1003943 - RNA, 22 nt, Human
cuucauuaaccaaaaugcaaua

SEQ ID NO: 1003944 - RNA, 19 nt, Human
gccugcagaaaaggcaggg

SEQ ID NO: 1003945 - RNA, 22 nt, Human
aaggcuuuugggaauuuucaac

SEQ ID NO: 1003946 - RNA, 22 nt, Human
gggacccugggaggcuggcgca

SEQ ID NO: 1003947 - RNA, 22 nt, Human
ucauacaauucaaucucugauu

SEQ ID NO: 1003948 - RNA, 22 nt, Human
gagggguccaggaggcacuuac

SEQ ID NO: 1003949 - RNA, 22 nt, Human
ugggcuccguugccuggggcag

SEQ ID NO: 1003950 - RNA, 22 nt, Human
agguaugagauaaaucaaugaa

SEQ ID NO: 1003951 - RNA, 22 nt, Human
gcagcuuucuacuuccuacagc

SEQ ID NO: 1003952 - RNA, 22 nt, Human
cucuggggaagcagccagcugg

SEQ ID NO: 1003953 - RNA, 22 nt, Human
cucaucaccacauauaacaaag

SEQ ID NO: 1003954 - RNA, 22 nt, Human
guauuagguuggugcaaaauug

SEQ ID NO: 1003955 - RNA, 22 nt, Human
gacacagaaggucacauguuca

SEQ ID NO: 1003956 - RNA, 22 nt, Human
augugaaagagguguucagugg

SEQ ID NO: 1003957 - RNA, 22 nt, Human
cuccaaguccgagggcucucaa

SEQ ID NO: 1003958 - RNA, 22 nt, Human
uuaugaaggaucagguacuugg

SEQ ID NO: 1003959 - RNA, 22 nt, Human
ccagccacagcuuccagcuccu

SEQ ID NO: 1003960 - RNA, 21 nt, Human
caguguggugaccagggucuc

SEQ ID NO: 1003961 - RNA, 22 nt, Human
cgcaggcugcagccaagaagag

SEQ ID NO: 1003962 - RNA, 22 nt, Human
augauugaaaaugacauugcca

SEQ ID NO: 1003963 - RNA, 22 nt, Human
ccauaaucuggcuuugagagag

SEQ ID NO: 1003964 - RNA, 22 nt, Human
uucagagacagcaaccaggaca

SEQ ID NO: 1003965 - RNA, 22 nt, Human
ccaggccucuggcugcuuaguc

SEQ ID NO: 1003966 - RNA, 20 nt, Human
uauaaauucagagcuuuggu

SEQ ID NO: 1003967 - RNA, 22 nt, Human
uaugaaacauucauacaaauaa

SEQ ID NO: 1003968 - RNA, 22 nt, Human
ugaaacauugcacuguaugaau

SEQ ID NO: 1003969 - RNA, 22 nt, Human
ccugaggggcugcaggccagcu

SEQ ID NO: 1003970 - RNA, 22 nt, Human
uaacacauauuucaagaguagu

SEQ ID NO: 1003971 - RNA, 22 nt, Human
auuguugggucucacuccuaga

SEQ ID NO: 1003972 - RNA, 22 nt, Human
ugcuucuggaaacaguggcugu

SEQ ID NO: 1003973 - RNA, 19 nt, Human
agacaaguuuccagaagcc

SEQ ID NO: 1003974 - RNA, 22 nt, Human
uguuucuuuguagauauucuuu

SEQ ID NO: 1003975 - RNA, 22 nt, Human
cuuuauuccuacaagauuuucu

SEQ ID NO: 1003976 - RNA, 22 nt, Human
gccaggcagccacccucugcga

SEQ ID NO: 1003977 - RNA, 22 nt, Human
gagacagaguuucacucuuguu

SEQ ID NO: 1003978 - RNA, 22 nt, Human
uuuuccuguccaggcaauuauu

SEQ ID NO: 1003979 - RNA, 22 nt, Human
ugggcuccuugggagcaaguga

SEQ ID NO: 1003980 - RNA, 22 nt, Human
uccugcagguggaugauucucu

SEQ ID NO: 1003981 - RNA, 22 nt, Human
ucauuuguaccauuuuuuaaga

SEQ ID NO: 1003982 - RNA, 22 nt, Human
uucauacacgaaaaugcaugca

SEQ ID NO: 1003983 - RNA, 22 nt, Human
acuuuauuuccuauugcaucca

SEQ ID NO: 1003984 - RNA, 19 nt, Human
cccucuugcacaaagcaaa

SEQ ID NO: 1003985 - RNA, 19 nt, Human
ugcuagaaauucugugacu

SEQ ID NO: 1003986 - RNA, 22 nt, Human
gcacacacaugugaguacaugc

SEQ ID NO: 1003987 - RNA, 22 nt, Human
uucauacaaugggauauuauga

SEQ ID NO: 1003988 - RNA, 22 nt, Human
agcaggugggcaugaaagcuga

SEQ ID NO: 1003989 - RNA, 22 nt, Human
cagaugagaguggccaggguuc

SEQ ID NO: 1003990 - RNA, 20 nt, Human
uauuuguauuugggaaaguu

SEQ ID NO: 1003991 - RNA, 22 nt, Human
acaauauuguacccagaaguuu

SEQ ID NO: 1003992 - RNA, 22 nt, Human
uccaggcuuuuucaugcugucu

SEQ ID NO: 1003993 - RNA, 22 nt, Human
gggucaggcucagcagggcagc

SEQ ID NO: 1003994 - RNA, 22 nt, Human
aucugucaagauagacucugca

SEQ ID NO: 1003995 - RNA, 22 nt, Human
uaaacaucugucauguguuuau

SEQ ID NO: 1003996 - RNA, 22 nt, Human
ucagagaguuagugucuuagcu

SEQ ID NO: 1003997 - RNA, 22 nt, Human
augcuacagaguuugaauaugu

SEQ ID NO: 1003998 - RNA, 22 nt, Human
aucauuuuuaagagacucuucu

SEQ ID NO: 1003999 - RNA, 22 nt, Human
uuccaaguagaagcauuugcau

SEQ ID NO: 1004000 - RNA, 22 nt, Human
uccugagcacagagacaaggaa

SEQ ID NO: 1004001 - RNA, 19 nt, Human
agcaggcuaggcugccucu

SEQ ID NO: 1004002 - RNA, 22 nt, Human
gcagggguuuucugacuugagu

SEQ ID NO: 1004003 - RNA, 23 nt, Human
ugcaggcuaggaagagagccuuc

SEQ ID NO: 1004004 - RNA, 22 nt, Human
ugaagcuugagugucaguuccu

SEQ ID NO: 1004005 - RNA, 22 nt, Human
uguaaagguaggugcaaaauga

SEQ ID NO: 1004006 - RNA, 22 nt, Human
uucugucaaagacuuuuucagg

SEQ ID NO: 1004007 - RNA, 22 nt, Human
augggcugacccagucguggca

SEQ ID NO: 1004008 - RNA, 22 nt, Human
cagcuuguuuuauuuggggacc

SEQ ID NO: 1004009 - RNA, 20 nt, Human
ccugggcucaaagcauccuc

SEQ ID NO: 1004010 - RNA, 22 nt, Human
ugucagaugcgauaaacuagug

SEQ ID NO: 1004011 - RNA, 21 nt, Human
aacacauccagaguauuugac

SEQ ID NO: 1004012 - RNA, 22 nt, Human
ugcagggccuucuagaccaugg

SEQ ID NO: 1004013 - RNA, 22 nt, Human
gagcuuuacuucugacuggugc

SEQ ID NO: 1004014 - RNA, 22 nt, Human
acaggcucaguucacuggauuu

SEQ ID NO: 1004015 - RNA, 22 nt, Human
ugucuuuagagucacaaaacca

SEQ ID NO: 1004016 - RNA, 22 nt, Human
cccugcagccggccagcucauu

SEQ ID NO: 1004017 - RNA, 22 nt, Human
uguagaaccuguuuauuauaga

SEQ ID NO: 1004018 - RNA, 22 nt, Human
uaacacauaagcugagaccaug

SEQ ID NO: 1004019 - RNA, 22 nt, Human
ccaggcagggcucaaggaaccu

SEQ ID NO: 1004020 - RNA, 22 nt, Human
ggcaggcuccguguuccauucc

SEQ ID NO: 1004021 - RNA, 22 nt, Human
accaggcaguauggugcugcaa

SEQ ID NO: 1004022 - RNA, 22 nt, Human
acuggcagugucguuuacauga

SEQ ID NO: 1004023 - RNA, 22 nt, Human
uaggaaauggcucaguuacugc

SEQ ID NO: 1004024 - RNA, 19 nt, Human
ugcauaaauuauauacuuu

SEQ ID NO: 1004025 - RNA, 22 nt, Human
uuccaggcuauccggugaaggg

SEQ ID NO: 1004026 - RNA, 22 nt, Human
guuuuauaauugcuucauaaga

SEQ ID NO: 1004027 - RNA, 22 nt, Human
aggaccuggaucacagagaucu

SEQ ID NO: 1004028 - RNA, 22 nt, Human
auaucauucugauguauaucuu

SEQ ID NO: 1004029 - RNA, 22 nt, Human
uucagagauggaaggcagaaug

SEQ ID NO: 1004030 - RNA, 22 nt, Human
aauuagggagagguagcuaggu

SEQ ID NO: 1004031 - RNA, 22 nt, Human
acuggcagcuguaggaugcaug

SEQ ID NO: 1004032 - RNA, 21 nt, Human
ucuggcagcaguuuguugagu

SEQ ID NO: 1004033 - RNA, 22 nt, Human
agcaguccaacugagguggcau

SEQ ID NO: 1004034 - RNA, 22 nt, Human
uauuucccagggagcaacaagc

SEQ ID NO: 1004035 - RNA, 22 nt, Human
cacccacauggaaauucacagu

SEQ ID NO: 1004036 - RNA, 22 nt, Human
cagcauuuggaggagaggcuuu

SEQ ID NO: 1004037 - RNA, 23 nt, Human
auauuagggagauuagcccucua

SEQ ID NO: 1004038 - RNA, 19 nt, Human
ccuuccuccccagggccau

SEQ ID NO: 1004039 - RNA, 22 nt, Human
ccaggccuagccccugagggua

SEQ ID NO: 1004040 - RNA, 22 nt, Human
ucagagagccucaggcacugcc

SEQ ID NO: 1004041 - RNA, 22 nt, Human
gcauaugaucacgugugucggu

SEQ ID NO: 1004042 - RNA, 22 nt, Human
agggaccugucaaugacaguua

SEQ ID NO: 1004043 - RNA, 22 nt, Human
uuucauaauauccagagauuuu

SEQ ID NO: 1004044 - RNA, 22 nt, Human
ucaggcucuggguacaccugac

SEQ ID NO: 1004045 - RNA, 22 nt, Human
uguaugaauauguuggggaggu

SEQ ID NO: 1004046 - RNA, 22 nt, Human
ucuggcagcagcaucaguggcu

SEQ ID NO: 1004047 - RNA, 22 nt, Human
uuaauuuuaaccuguuuguguc

SEQ ID NO: 1004048 - RNA, 22 nt, Human
auauauuugagaauauucauga

SEQ ID NO: 1004049 - RNA, 22 nt, Human
ugcuucuggcacuugagggggu

SEQ ID NO: 1004050 - RNA, 22 nt, Human
gccuccuggccuuugcuccuca

SEQ ID NO: 1004051 - RNA, 22 nt, Human
auuuuccucaagccucuggaag

SEQ ID NO: 1004052 - RNA, 19 nt, Human
cuuauuagagugagagcuu

SEQ ID NO: 1004053 - RNA, 22 nt, Human
ugcauaaacagauacuucaugu

SEQ ID NO: 1004054 - RNA, 22 nt, Human
gacaggcuuugagucccagaac

SEQ ID NO: 1004055 - RNA, 22 nt, Human
ccagcuuuaucaagucugagcu

SEQ ID NO: 1004056 - RNA, 22 nt, Human
cagaggcugcucuggguggcau

SEQ ID NO: 1004057 - RNA, 22 nt, Human
auaguguuacccuucuuaaagu

SEQ ID NO: 1004058 - RNA, 22 nt, Human
ucaggcucaaagggccggauga

SEQ ID NO: 1004059 - RNA, 22 nt, Human
cauuuauuggcauguaguaggu

SEQ ID NO: 1004060 - RNA, 22 nt, Human
agagcagauggagcuggaagag

SEQ ID NO: 1004061 - RNA, 22 nt, Human
uuuguuagagugugggaggcug

SEQ ID NO: 1004062 - RNA, 22 nt, Human
acacacaugcaugcuugccauu

SEQ ID NO: 1004063 - RNA, 22 nt, Human
ucuccacacuuucucucccagg

SEQ ID NO: 1004064 - RNA, 22 nt, Human
uucucuuagcuguaaagucaau

SEQ ID NO: 1004065 - RNA, 22 nt, Human
uucugggggccaggacaguggu

SEQ ID NO: 1004066 - RNA, 22 nt, Human
uccaggcaguuuuccagguugu

SEQ ID NO: 1004067 - RNA, 23 nt, Human
uuuuccuguggagacaugacugg

SEQ ID NO: 1004068 - RNA, 22 nt, Human
ucacauuucugauuauaccaaa

SEQ ID NO: 1004069 - RNA, 22 nt, Human
cccagcuugcgggcggcaggag

SEQ ID NO: 1004070 - RNA, 22 nt, Human
uauuccuauuucuaaacauaug

SEQ ID NO: 1004071 - RNA, 22 nt, Human
gcugggcuucucaaugcugccu

SEQ ID NO: 1004072 - RNA, 22 nt, Human
uauguacaugauuucauuugcu

SEQ ID NO: 1004073 - RNA, 22 nt, Human
cuucuggggauggagcccagaa

SEQ ID NO: 1004074 - RNA, 22 nt, Human
uuaacauuguccuuagcagauu

SEQ ID NO: 1004075 - RNA, 22 nt, Human
agagaguugaggaagcaacacu

SEQ ID NO: 1004076 - RNA, 22 nt, Human
ggaggacaggggcugcagcaca

SEQ ID NO: 1004077 - RNA, 22 nt, Human
cacuguccaauagauacauaau

SEQ ID NO: 1004078 - RNA, 22 nt, Human
ugcuccagugagcuggccaucc

SEQ ID NO: 1004079 - RNA, 22 nt, Human
augggcuggcagccugaacagc

SEQ ID NO: 1004080 - RNA, 22 nt, Human
uuucauaauacuguacaugaaa

SEQ ID NO: 1004081 - RNA, 22 nt, Human
uuagggaaggcugcugucagcu

SEQ ID NO: 1004082 - RNA, 22 nt, Human
uaugacauuggccaaguucugu

SEQ ID NO: 1004083 - RNA, 22 nt, Human
cagcuuuaccuuuaggaguaac

SEQ ID NO: 1004084 - RNA, 22 nt, Human
aacacauaggcagagcaugaca

SEQ ID NO: 1004085 - RNA, 22 nt, Human
ccugcagagccacgugccagcg

SEQ ID NO: 1004086 - RNA, 20 nt, Human
uuccagagaucugcauuuua

SEQ ID NO: 1004087 - RNA, 22 nt, Human
ccaaugauggugcccacgauga

SEQ ID NO: 1004088 - RNA, 22 nt, Human
ucugggcuuuugcacuggccau

SEQ ID NO: 1004089 - RNA, 23 nt, Human
cuguaugauguuaaguggaaagc

SEQ ID NO: 1004090 - RNA, 22 nt, Human
ugggccagcaauugcugcucag

SEQ ID NO: 1004091 - RNA, 22 nt, Human
augcugucgaaaccaaacaucu

SEQ ID NO: 1004092 - RNA, 20 nt, Human
uuccacaucuuugcacaugc

SEQ ID NO: 1004093 - RNA, 21 nt, Human
uccagaccucccucuccuagc

SEQ ID NO: 1004094 - RNA, 22 nt, Human
uguagaaauuaguaagaucaac

SEQ ID NO: 1004095 - RNA, 22 nt, Human
cccaaguuaauuuguagcugaa

SEQ ID NO: 1004096 - RNA, 22 nt, Human
agaugguuuugucuuuaugauu

SEQ ID NO: 1004097 - RNA, 22 nt, Human
aaauaguuacuucugcugucuu

SEQ ID NO: 1004098 - RNA, 22 nt, Human
uuucuugacugcuuaggaaugc

SEQ ID NO: 1004099 - RNA, 22 nt, Human
cagugaggcucugcugagcggu

SEQ ID NO: 1004100 - RNA, 20 nt, Human
ucacacaugguaagcuauga

SEQ ID NO: 1004101 - RNA, 22 nt, Human
acacacacaagcagguugugga

SEQ ID NO: 1004102 - RNA, 22 nt, Human
agggcccaggacagcaucaggg

SEQ ID NO: 1004103 - RNA, 22 nt, Human
cccagcucugcagaccugcccu

SEQ ID NO: 1004104 - RNA, 22 nt, Human
aacuuucaggcaaugaauauuu

SEQ ID NO: 1004105 - RNA, 22 nt, Human
ugcaggcugcagucucaggugg

SEQ ID NO: 1004106 - RNA, 22 nt, Human
uauugaaauucuucauguccuc

SEQ ID NO: 1004107 - RNA, 22 nt, Human
aaugaagccagguagaagagaa

SEQ ID NO: 1004108 - RNA, 22 nt, Human
uaugaacucuggagucugagug

SEQ ID NO: 1004109 - RNA, 22 nt, Human
agcuuuaucacaauauuggcua

SEQ ID NO: 1004110 - RNA, 22 nt, Human
cccacacacauuuaugauagga

SEQ ID NO: 1004111 - RNA, 19 nt, Human
uucuaccuuacuguaggcu

SEQ ID NO: 1004112 - RNA, 22 nt, Human
cccaggcaguagaaagaagagg

SEQ ID NO: 1004113 - RNA, 22 nt, Human
gaugaagcuuugaagucuaauc

SEQ ID NO: 1004114 - RNA, 22 nt, Human
guuuucauuacugcugugauuu

SEQ ID NO: 1004115 - RNA, 22 nt, Human
caggcauggugagaacucagcc

SEQ ID NO: 1004116 - RNA, 19 nt, Human
cccagcuugaccaccugcu

SEQ ID NO: 1004117 - RNA, 22 nt, Human
cauuuguaucauauguaucuua

SEQ ID NO: 1004118 - RNA, 22 nt, Human
aucucuguaaaccauaaauuga

SEQ ID NO: 1004119 - RNA, 22 nt, Human
uacugacacaaagccaaucccu

SEQ ID NO: 1004120 - RNA, 22 nt, Human
uagggcucugcucaucaguugu

SEQ ID NO: 1004121 - RNA, 22 nt, Human
ucacuguagugagcagaauaua

SEQ ID NO: 1004122 - RNA, 22 nt, Human
uuuuggaaugaggaacauccag

SEQ ID NO: 1004123 - RNA, 18 nt, Human
ucagcuuuugaaaaccaa

SEQ ID NO: 1004124 - RNA, 22 nt, Human
gccuccuggguucaugccauuc

SEQ ID NO: 1004125 - RNA, 23 nt, Human
cuucacaaucaaaaucaguucug

SEQ ID NO: 1004126 - RNA, 22 nt, Human
ugugaagauuuggcaugcagaa

SEQ ID NO: 1004127 - RNA, 22 nt, Human
cuagggaccucagcuccuggag

SEQ ID NO: 1004128 - RNA, 22 nt, Human
ggcaggcuguucaccugcuuuu

SEQ ID NO: 1004129 - RNA, 22 nt, Human
auugacuuccauagcuaccugg

SEQ ID NO: 1004130 - RNA, 22 nt, Human
aaugauugcaaacauugagaac

SEQ ID NO: 1004131 - RNA, 22 nt, Human
uuuagacauggcuugcucacuu

SEQ ID NO: 1004132 - RNA, 22 nt, Human
acagauuuaggacuguagcgau

SEQ ID NO: 1004133 - RNA, 22 nt, Human
cucagccccaauucuccccauu

SEQ ID NO: 1004134 - RNA, 22 nt, Human
gucuggaaggaggagauggagc

SEQ ID NO: 1004135 - RNA, 22 nt, Human
uccugcagcauccgucgucugu

SEQ ID NO: 1004136 - RNA, 22 nt, Human
caguagacacauuaauauggaa

SEQ ID NO: 1004137 - RNA, 22 nt, Human
agcaggggcuccuccacagcca

SEQ ID NO: 1004138 - RNA, 22 nt, Human
acacacaugccuuuccuaagua

SEQ ID NO: 1004139 - RNA, 22 nt, Human
ccagagagguagcuuacccucu

SEQ ID NO: 1004140 - RNA, 22 nt, Human
acaggcaggcgggacagcccga

SEQ ID NO: 1004141 - RNA, 22 nt, Human
ggccucaguuucuccauggguu

SEQ ID NO: 1004142 - RNA, 22 nt, Human
uaacacaugguucugucaggaa

SEQ ID NO: 1004143 - RNA, 22 nt, Human
gccuggggaacuugauccuguc

SEQ ID NO: 1004144 - RNA, 22 nt, Human
guuuuuaucuaauagcaguuau

SEQ ID NO: 1004145 - RNA, 22 nt, Human
augucaaaucaguuuuaucaga

SEQ ID NO: 1004146 - RNA, 22 nt, Human
ccuccccaugacccggugcugg

SEQ ID NO: 1004147 - RNA, 22 nt, Human
ugaguagagaauucagcuaagg

SEQ ID NO: 1004148 - RNA, 21 nt, Human
ccacucaugacuccacucacc

SEQ ID NO: 1004149 - RNA, 22 nt, Human
cccugcagccuugcaugccuuc

SEQ ID NO: 1004150 - RNA, 20 nt, Human
cuguuaaaagguaugaauuc

SEQ ID NO: 1004151 - RNA, 22 nt, Human
cuggaaagugucuccauccugg

SEQ ID NO: 1004152 - RNA, 22 nt, Human
cagagcaucgcgcagagagccu

SEQ ID NO: 1004153 - RNA, 18 nt, Human
ugcuuuaugcuuauauaa

SEQ ID NO: 1004154 - RNA, 22 nt, Human
gccugcagaggugcugcuagcu

SEQ ID NO: 1004155 - RNA, 22 nt, Human
ccuggggaauagagucaagggg

SEQ ID NO: 1004156 - RNA, 22 nt, Human
agagucagcuuaugacacaguc

SEQ ID NO: 1004157 - RNA, 22 nt, Human
augggcugugggacccuggacc

SEQ ID NO: 1004158 - RNA, 22 nt, Human
aauguaugacaguucuaguggu

SEQ ID NO: 1004159 - RNA, 21 nt, Human
ccuuuacaauuuugcauuccu

SEQ ID NO: 1004160 - RNA, 22 nt, Human
uuauuagguuauucucuguacu

SEQ ID NO: 1004161 - RNA, 18 nt, Human
uuuuacucauagcaggcc

SEQ ID NO: 1004162 - RNA, 22 nt, Human
auguaugaagcuuuguuuggga

SEQ ID NO: 1004163 - RNA, 21 nt, Human
gaauaguucuguggcagcagu

SEQ ID NO: 1004164 - RNA, 22 nt, Human
accugcagccacuucucuccuu

SEQ ID NO: 1004165 - RNA, 22 nt, Human
uguagaaagcucuucugaaauc

SEQ ID NO: 1004166 - RNA, 22 nt, Human
gaauauuuguaauuacuguuga

SEQ ID NO: 1004167 - RNA, 22 nt, Human
auaacuuucuucacccuugcug

SEQ ID NO: 1004168 - RNA, 22 nt, Human
aaaguuuguugcuuacaaagaa

SEQ ID NO: 1004169 - RNA, 22 nt, Human
cccagggaagggcuaccugagg

SEQ ID NO: 1004170 - RNA, 22 nt, Human
uacauaauaaggggcauggugu

SEQ ID NO: 1004171 - RNA, 22 nt, Human
aaauccuaaggagaauaugauu

SEQ ID NO: 1004172 - RNA, 22 nt, Human
uuguaugaguaugguguauagg

SEQ ID NO: 1004173 - RNA, 22 nt, Human
acagcuuuaucucagggaucag

SEQ ID NO: 1004174 - RNA, 22 nt, Human
aagagagagugcgcucacagaa

SEQ ID NO: 1004175 - RNA, 22 nt, Human
gcccacacagcagauccuuugg

SEQ ID NO: 1004176 - RNA, 22 nt, Human
auuuagcaaaaaaugaugaagc

SEQ ID NO: 1004177 - RNA, 22 nt, Human
gcagcucucuggccugcccugg

SEQ ID NO: 1004178 - RNA, 22 nt, Human
ucccagccuuucuuuucugcug

SEQ ID NO: 1004179 - RNA, 22 nt, Human
auguggcugguaguugacaacu

SEQ ID NO: 1004180 - RNA, 22 nt, Human
acaugauuuuuaaagagauaau

SEQ ID NO: 1004181 - RNA, 22 nt, Human
uuggaaauugcaagugauuugc

SEQ ID NO: 1004182 - RNA, 18 nt, Human
acaaaugugucacaggaa

SEQ ID NO: 1004183 - RNA, 22 nt, Human
uguaugaagacuucuucugugu

SEQ ID NO: 1004184 - RNA, 20 nt, Human
cugcaggguuagaggcucca

SEQ ID NO: 1004185 - RNA, 22 nt, Human
caucacagaaauaaacauaccu

SEQ ID NO: 1004186 - RNA, 22 nt, Human
cuggggacuuugguucuccaug

SEQ ID NO: 1004187 - RNA, 22 nt, Human
gcagcuuucuaagcuuuauugc

SEQ ID NO: 1004188 - RNA, 22 nt, Human
aggcuguguggaugagucuuac

SEQ ID NO: 1004189 - RNA, 22 nt, Human
uucacauuugaaaggaaagaua

SEQ ID NO: 1004190 - RNA, 22 nt, Human
ucauuuugggguuugucaucuu

SEQ ID NO: 1004191 - RNA, 22 nt, Human
acacauauauacauauuugugc

SEQ ID NO: 1004192 - RNA, 22 nt, Human
ugcuucugcugauauuuuguga

SEQ ID NO: 1004193 - RNA, 21 nt, Human
aaagagcccgcugagagguuc

SEQ ID NO: 1004194 - RNA, 22 nt, Human
uuuguuuucaaugugucauuca

SEQ ID NO: 1004195 - RNA, 22 nt, Human
acccagccacagcauugaggga

SEQ ID NO: 1004196 - RNA, 22 nt, Human
ucagagaguuggaaagaauuaa

SEQ ID NO: 1004197 - RNA, 22 nt, Human
uaugcacauucacacaaaaaug

SEQ ID NO: 1004198 - RNA, 20 nt, Human
uuuuccuucugaguauguug

SEQ ID NO: 1004199 - RNA, 22 nt, Human
ccuggcagggcugcaguaaugg

SEQ ID NO: 1004200 - RNA, 22 nt, Human
cccaggcagugugugcaugcgu

SEQ ID NO: 1004201 - RNA, 22 nt, Human
ggaccugcucucccaguucucu

SEQ ID NO: 1004202 - RNA, 22 nt, Human
aaaccaucagauaauucauacu

SEQ ID NO: 1004203 - RNA, 21 nt, Human
ccaggcugggagggcaguucc

SEQ ID NO: 1004204 - RNA, 22 nt, Human
agagcauccaucggccaggacc

SEQ ID NO: 1004205 - RNA, 22 nt, Human
aauugucaaacacaaauaagag

SEQ ID NO: 1004206 - RNA, 22 nt, Human
uguaugaaccuuuaauauagug

SEQ ID NO: 1004207 - RNA, 22 nt, Human
aaauacagauuccagggucuua

SEQ ID NO: 1004208 - RNA, 22 nt, Human
ggcaaggggucaggcugagaca

SEQ ID NO: 1004209 - RNA, 22 nt, Human
acaggcucucuauugagugcag

SEQ ID NO: 1004210 - RNA, 19 nt, Human
aauuagggagucgguuaag

SEQ ID NO: 1004211 - RNA, 22 nt, Human
ucugggcugcuaugaggcagag

SEQ ID NO: 1004212 - RNA, 19 nt, Human
acauuuagaauguacuugc

SEQ ID NO: 1004213 - RNA, 22 nt, Human
caugaagcacagcucucuuuuu

SEQ ID NO: 1004214 - RNA, 22 nt, Human
ggcuuuauuugcagccauuguu

SEQ ID NO: 1004215 - RNA, 22 nt, Human
cagaagagaugaaauaguauua

SEQ ID NO: 1004216 - RNA, 21 nt, Human
uagcuuuaauauucccacauu

SEQ ID NO: 1004217 - RNA, 22 nt, Human
auguuauuaaaguacagauucu

SEQ ID NO: 1004218 - RNA, 22 nt, Human
cacauaauaaauguuccugaug

SEQ ID NO: 1004219 - RNA, 22 nt, Human
gacccugccaugagugacaggg

SEQ ID NO: 1004220 - RNA, 22 nt, Human
uuuaugaacuacagauauaacu

SEQ ID NO: 1004221 - RNA, 22 nt, Human
cacccagggcugugccugccca

SEQ ID NO: 1004222 - RNA, 22 nt, Human
cagggacccgcacagguagcau

SEQ ID NO: 1004223 - RNA, 22 nt, Human
acuggcagagggaaaaccauuc

SEQ ID NO: 1004224 - RNA, 22 nt, Human
auguuucaaauauauagaguug

SEQ ID NO: 1004225 - RNA, 22 nt, Human
uggcuggagcauuccuugucuu

SEQ ID NO: 1004226 - RNA, 22 nt, Human
agauauauuuaagguaauaagu

SEQ ID NO: 1004227 - RNA, 22 nt, Human
uuucaugauuaacuuagugaau

SEQ ID NO: 1004228 - RNA, 23 nt, Human
uccaggagcaugcuggcuggcga

SEQ ID NO: 1004229 - RNA, 22 nt, Human
agggaccucauguaaguggauu

SEQ ID NO: 1004230 - RNA, 22 nt, Human
uacauaauuaaucuuuaaguuc

SEQ ID NO: 1004231 - RNA, 22 nt, Human
auaacuuagaguaggcaaaagu

SEQ ID NO: 1004232 - RNA, 22 nt, Human
uccugcagacauuuacaccuuu

SEQ ID NO: 1004233 - RNA, 22 nt, Human
aggggugugcauccuggaggau

SEQ ID NO: 1004234 - RNA, 22 nt, Human
gaacugaguuuucugccuggac

SEQ ID NO: 1004235 - RNA, 22 nt, Human
auauuaggugcucaauacaugc

SEQ ID NO: 1004236 - RNA, 22 nt, Human
uaacacaugguuaguacacaau

SEQ ID NO: 1004237 - RNA, 22 nt, Human
cugcaggcccccuuccuggagu

SEQ ID NO: 1004238 - RNA, 22 nt, Human
agagccaggugcugcuguuuga

SEQ ID NO: 1004239 - RNA, 22 nt, Human
ccuggcagacugugagggcagg

SEQ ID NO: 1004240 - RNA, 22 nt, Human
agcuuuauggugccucacuuga

SEQ ID NO: 1004241 - RNA, 22 nt, Human
acagcuuuguguuaaugggaag

SEQ ID NO: 1004242 - RNA, 22 nt, Human
uagcuagaaugcuucgugauau

SEQ ID NO: 1004243 - RNA, 22 nt, Human
ggcugccacgucgaggguccaa

SEQ ID NO: 1004244 - RNA, 22 nt, Human
aguuagaauauaauuauguuaa

SEQ ID NO: 1004245 - RNA, 22 nt, Human
cugagccagggccacacaugga

SEQ ID NO: 1004246 - RNA, 22 nt, Human
ggcagagguagcuggaaccagg

SEQ ID NO: 1004247 - RNA, 22 nt, Human
ucaggagcucuucccuggugug

SEQ ID NO: 1004248 - RNA, 22 nt, Human
uuauuugcccauguuuagcaga

SEQ ID NO: 1004249 - RNA, 22 nt, Human
auacauucaaaggaaggauaga

SEQ ID NO: 1004250 - RNA, 18 nt, Human
acaggcugugggaauggu

SEQ ID NO: 1004251 - RNA, 22 nt, Human
ucccacacuugaaacaaggcug

SEQ ID NO: 1004252 - RNA, 22 nt, Human
cauuguuauagcauuacacacc

SEQ ID NO: 1004253 - RNA, 22 nt, Human
cccaggcagccugcagggaagg

SEQ ID NO: 1004254 - RNA, 22 nt, Human
cacauaagaaaugaauaugaga

SEQ ID NO: 1004255 - RNA, 22 nt, Human
gagggcucugucuggaagggaa

SEQ ID NO: 1004256 - RNA, 22 nt, Human
caaauaguaugagcaaugauuc

SEQ ID NO: 1004257 - RNA, 22 nt, Human
cugccuggccacaacccagggu

SEQ ID NO: 1004258 - RNA, 18 nt, Human
ugaggcagucagugaugg

SEQ ID NO: 1004259 - RNA, 22 nt, Human
ggcuuuauguuuuucauguggu

SEQ ID NO: 1004260 - RNA, 22 nt, Human
aagguuaaauagguauuuucca

SEQ ID NO: 1004261 - RNA, 22 nt, Human
agcucugcuucuugggaagaug

SEQ ID NO: 1004262 - RNA, 22 nt, Human
cugcaggggcuggaguuggcuu

SEQ ID NO: 1004263 - RNA, 22 nt, Human
ugcuuuauaaccauuucugugg

SEQ ID NO: 1004264 - RNA, 22 nt, Human
caguggugaagagcaggggcuc

SEQ ID NO: 1004265 - RNA, 22 nt, Human
aauguaugcugugguaucuucu

SEQ ID NO: 1004266 - RNA, 22 nt, Human
ugggaccugcucuuggaaugag

SEQ ID NO: 1004267 - RNA, 22 nt, Human
aguaugaacggaaggccuggga

SEQ ID NO: 1004268 - RNA, 22 nt, Human
uuaacacagggggagacaaagu

SEQ ID NO: 1004269 - RNA, 22 nt, Human
cagccucuuuccacaucaggca

SEQ ID NO: 1004270 - RNA, 22 nt, Human
ucacacagcuccuuuccuuagu

SEQ ID NO: 1004271 - RNA, 22 nt, Human
cagcuuuauuucacguguuugu

SEQ ID NO: 1004272 - RNA, 22 nt, Human
cgcaggcuggcgcggaguggca

SEQ ID NO: 1004273 - RNA, 22 nt, Human
acccagccuacaaagcucaccu

SEQ ID NO: 1004274 - RNA, 22 nt, Human
acuggaaaacacuacuacaugc

SEQ ID NO: 1004275 - RNA, 20 nt, Human
ucuggcaggugaacgagcug

SEQ ID NO: 1004276 - RNA, 22 nt, Human
accaggcagcaccaaagccggu

SEQ ID NO: 1004277 - RNA, 22 nt, Human
auaugugaaguggguuauuuug

SEQ ID NO: 1004278 - RNA, 22 nt, Human
guaguuuucugaaaauuacuuu

SEQ ID NO: 1004279 - RNA, 22 nt, Human
ugcuuuaucaaagcuauaguga

SEQ ID NO: 1004280 - RNA, 22 nt, Human
agcuuuaucccuugcccaucga

SEQ ID NO: 1004281 - RNA, 22 nt, Human
cccaggcagcggggucuccuug

SEQ ID NO: 1004282 - RNA, 22 nt, Human
aauaaucucccuuuuuguaugu

SEQ ID NO: 1004283 - RNA, 22 nt, Human
gagugaugucuguagugaagaa

SEQ ID NO: 1004284 - RNA, 22 nt, Human
ucagcuuugcaaguuagaaaau

SEQ ID NO: 1004285 - RNA, 22 nt, Human
gugggguagaucuuucucagga

SEQ ID NO: 1004286 - RNA, 22 nt, Human
agugugagccuacaggccaaag

SEQ ID NO: 1004287 - RNA, 22 nt, Human
ucccaggcugggggccugaagu

SEQ ID NO: 1004288 - RNA, 22 nt, Human
cacccaggacaggccagaugug

SEQ ID NO: 1004289 - RNA, 22 nt, Human
auccccacgauauagccaaagc

SEQ ID NO: 1004290 - RNA, 22 nt, Human
aagcuuuaugacuuggagacag

SEQ ID NO: 1004291 - RNA, 22 nt, Human
uucucuuuuagaggcuccauga

SEQ ID NO: 1004292 - RNA, 17 nt, Human
gggcugacaguggccuc

SEQ ID NO: 1004293 - RNA, 22 nt, Human
gccgggaccaaggccacggagc

SEQ ID NO: 1004294 - RNA, 22 nt, Human
ggcagugagaggucuccugguc

SEQ ID NO: 1004295 - RNA, 22 nt, Human
ugcaggcucucugcugccagau

SEQ ID NO: 1004296 - RNA, 22 nt, Human
cugguggagagugggcucugga

SEQ ID NO: 1004297 - RNA, 22 nt, Human
ccaucuccaaauaccaucacau

SEQ ID NO: 1004298 - RNA, 22 nt, Human
agcuuuauuaacucuccaggug

SEQ ID NO: 1004299 - RNA, 22 nt, Human
aggcuuuguaccuggggucuua

SEQ ID NO: 1004300 - RNA, 22 nt, Human
ggcaggcugggagucaucagag

SEQ ID NO: 1004301 - RNA, 20 nt, Human
uuucacaucugucccuuuaa

SEQ ID NO: 1004302 - RNA, 22 nt, Human
uuuagggaugucagaacaggga

SEQ ID NO: 1004303 - RNA, 20 nt, Human
auacacauucauagaaaaau

SEQ ID NO: 1004304 - RNA, 22 nt, Human
gacuguggggggcggacacaag

SEQ ID NO: 1004305 - RNA, 22 nt, Human
gagauggccagugccaggacaa

SEQ ID NO: 1004306 - RNA, 22 nt, Human
agggcucccgcgguguccggga

SEQ ID NO: 1004307 - RNA, 22 nt, Human
guacccaggcacgccuugcuga

SEQ ID NO: 1004308 - RNA, 22 nt, Human
ggcugcagggcagcuggugugg

SEQ ID NO: 1004309 - RNA, 22 nt, Human
uuugaaaauuagacacaggcua

SEQ ID NO: 1004310 - RNA, 22 nt, Human
aaauuucuggaagugucagagu

SEQ ID NO: 1004311 - RNA, 22 nt, Human
acauuucucuugaugucucuau

SEQ ID NO: 1004312 - RNA, 22 nt, Human
acagcuuuguuuucccugcuga

SEQ ID NO: 1004313 - RNA, 22 nt, Human
uucaaauuaccacauuugcuua

SEQ ID NO: 1004314 - RNA, 19 nt, Human
ccagagacauuggcaucuu

SEQ ID NO: 1004315 - RNA, 22 nt, Human
uguaugaaugggaaaaggaaac

SEQ ID NO: 1004316 - RNA, 22 nt, Human
gugugggaaggcuaggaugcug

SEQ ID NO: 1004317 - RNA, 22 nt, Human
ugggccagcugaagugccgccc

SEQ ID NO: 1004318 - RNA, 22 nt, Human
aaaaaucuaugacugcuucucc

SEQ ID NO: 1004319 - RNA, 21 nt, Human
gggagggauggaaaugauguu

SEQ ID NO: 1004320 - RNA, 22 nt, Human
cccagcaugcacgcugacacuc

SEQ ID NO: 1004321 - RNA, 22 nt, Human
gagacacacauucuggagagaa

SEQ ID NO: 1004322 - RNA, 22 nt, Human
cauuuguauagugcuuagacca

SEQ ID NO: 1004323 - RNA, 22 nt, Human
gcaaggacucccugggucauuc

SEQ ID NO: 1004324 - RNA, 22 nt, Human
ugcaggcucaucucaagaguag

SEQ ID NO: 1004325 - RNA, 22 nt, Human
ugacuagaccuauaucuuuuug

SEQ ID NO: 1004326 - RNA, 22 nt, Human
uuuaguagaaugauacagggca

SEQ ID NO: 1004327 - RNA, 22 nt, Human
accaggcagcacuuuccuugca

SEQ ID NO: 1004328 - RNA, 22 nt, Human
auugcuuaucuaucuuuaaguc

SEQ ID NO: 1004329 - RNA, 22 nt, Human
agaggccugugugcuccagugg

SEQ ID NO: 1004330 - RNA, 22 nt, Human
ugagcagagucgcuccagagug

SEQ ID NO: 1004331 - RNA, 22 nt, Human
aagggcuccacuugaaucacac

SEQ ID NO: 1004332 - RNA, 22 nt, Human
agggcuccuaugaugcucugcc

SEQ ID NO: 1004333 - RNA, 22 nt, Human
guccaagucuuccuucccaaac

SEQ ID NO: 1004334 - RNA, 23 nt, Human
uuucacaaugagcauuacagaau

SEQ ID NO: 1004335 - RNA, 22 nt, Human
ucaggcccuuugcugcugcccc

SEQ ID NO: 1004336 - RNA, 22 nt, Human
ugaaugauuugggugcauucag

SEQ ID NO: 1004337 - RNA, 22 nt, Human
acugggcugccugguucuucua

SEQ ID NO: 1004338 - RNA, 22 nt, Human
ccugggcucaccaugccuugga

SEQ ID NO: 1004339 - RNA, 19 nt, Human
gagggcucauuugaacaau

SEQ ID NO: 1004340 - RNA, 22 nt, Human
gggcucucgauuagacccuggg

SEQ ID NO: 1004341 - RNA, 22 nt, Human
gggcugacucugcacugagcca

SEQ ID NO: 1004342 - RNA, 22 nt, Human
uuacaagauaaccugaugcugu

SEQ ID NO: 1004343 - RNA, 22 nt, Human
cugagagaucaagccacaggau

SEQ ID NO: 1004344 - RNA, 22 nt, Human
gcaggcuccaaggccugggaga

SEQ ID NO: 1004345 - RNA, 22 nt, Human
ccugggcuucugucuagauguu

SEQ ID NO: 1004346 - RNA, 22 nt, Human
aucacagagcucccuuccacug

SEQ ID NO: 1004347 - RNA, 22 nt, Human
caguguuugcuuaaguuauaug

SEQ ID NO: 1004348 - RNA, 22 nt, Human
ucccugccuccuggcagugcca

SEQ ID NO: 1004349 - RNA, 22 nt, Human
caggacaaagcccuuugagaaa

SEQ ID NO: 1004350 - RNA, 22 nt, Human
ccaaguacucucaccaaagcuu

SEQ ID NO: 1004351 - RNA, 22 nt, Human
auuucccuccagggaaagcuua

SEQ ID NO: 1004352 - RNA, 22 nt, Human
cuuggcaguuucggaaggauga

SEQ ID NO: 1004353 - RNA, 22 nt, Human
acauacacaagcguacaugaac

SEQ ID NO: 1004354 - RNA, 22 nt, Human
uauuagggaacugcaagacuaa

SEQ ID NO: 1004355 - RNA, 22 nt, Human
gcuaggagauugagcucugaag

SEQ ID NO: 1004356 - RNA, 22 nt, Human
ucauuuguggaagugauugugg

SEQ ID NO: 1004357 - RNA, 22 nt, Human
ugaauaugugacuuugauuuca

SEQ ID NO: 1004358 - RNA, 22 nt, Human
ugcagggcuaagucagagccug

SEQ ID NO: 1004359 - RNA, 22 nt, Human
cccugcagaccaaugccauaga

SEQ ID NO: 1004360 - RNA, 22 nt, Human
uaucaauugggccaaaugguac

SEQ ID NO: 1004361 - RNA, 22 nt, Human
guccucugcccaggucaagguu

SEQ ID NO: 1004362 - RNA, 23 nt, Human
acucacaaagcaggaucauguug

SEQ ID NO: 1004363 - RNA, 19 nt, Human
gggaccugacuaauuggca

SEQ ID NO: 1004364 - RNA, 21 nt, Human
agugccaguagguauggagga

SEQ ID NO: 1004365 - RNA, 22 nt, Human
uacauucagcaaaagaaugguu

SEQ ID NO: 1004366 - RNA, 22 nt, Human
aggccucugcuggaaagaguug

SEQ ID NO: 1004367 - RNA, 22 nt, Human
gagccaccuucaacucaggaau

SEQ ID NO: 1004368 - RNA, 22 nt, Human
agauaugugcgucuuagauuga

SEQ ID NO: 1004369 - RNA, 22 nt, Human
cacccagcagcacuuaagacua

SEQ ID NO: 1004370 - RNA, 22 nt, Human
uugugcucuguguuauuuaagg

SEQ ID NO: 1004371 - RNA, 22 nt, Human
guauuagggccaaaggcaggaa

SEQ ID NO: 1004372 - RNA, 19 nt, Human
guuucauuaagauaggaaa

SEQ ID NO: 1004373 - RNA, 22 nt, Human
cugggcuuugaagccaggcugc

SEQ ID NO: 1004374 - RNA, 22 nt, Human
cacacacuggagcaaggagaug

SEQ ID NO: 1004375 - RNA, 22 nt, Human
cagguacauucguagacccauu

SEQ ID NO: 1004376 - RNA, 22 nt, Human
agucacccuccaacucuccacu

SEQ ID NO: 1004377 - RNA, 22 nt, Human
ugcugagcgcauccggcggccg

SEQ ID NO: 1004378 - RNA, 22 nt, Human
uauguacacacacaugcaugua

SEQ ID NO: 1004379 - RNA, 22 nt, Human
auaugcaagcacauagaauacu

SEQ ID NO: 1004380 - RNA, 22 nt, Human
cugccugccuuggccuccagga

SEQ ID NO: 1004381 - RNA, 22 nt, Human
cauuuauugaguggccacagug

SEQ ID NO: 1004382 - RNA, 22 nt, Human
aggugaguccugggcacaggua

SEQ ID NO: 1004383 - RNA, 22 nt, Human
ggcuucugagugcucugcuguu

SEQ ID NO: 1004384 - RNA, 22 nt, Human
gccaaaucuugcacacucuugu

SEQ ID NO: 1004385 - RNA, 22 nt, Human
gacacagagggcaccagauaug

SEQ ID NO: 1004386 - RNA, 16 nt, Human
cagcuuuaugucagug

SEQ ID NO: 1004387 - RNA, 22 nt, Human
guaugaaguaagauauuguuca

SEQ ID NO: 1004388 - RNA, 22 nt, Human
ugagugugcagggaaguggcgg

SEQ ID NO: 1004389 - RNA, 22 nt, Human
ggcacagagcuuugucccaguu

SEQ ID NO: 1004390 - RNA, 22 nt, Human
auguaugaugcuaggcucucag

SEQ ID NO: 1004391 - RNA, 22 nt, Human
gaggccugucgcuaggccucug

SEQ ID NO: 1004392 - RNA, 22 nt, Human
uuuuucaugagacuagaaguca

SEQ ID NO: 1004393 - RNA, 22 nt, Human
uuucacaagacagcuacuguug

SEQ ID NO: 1004394 - RNA, 22 nt, Human
guggcagugaaggucauagcau

SEQ ID NO: 1004395 - RNA, 22 nt, Human
aaaguuuguuauaugauaagga

SEQ ID NO: 1004396 - RNA, 20 nt, Human
ccagcuuucccugcagcauc

SEQ ID NO: 1004397 - RNA, 22 nt, Human
acuggcagaacgugaugcgggu

SEQ ID NO: 1004398 - RNA, 22 nt, Human
gcacacaggcaguuuccagcca

SEQ ID NO: 1004399 - RNA, 22 nt, Human
uguaacacucaaucuguuuaac

SEQ ID NO: 1004400 - RNA, 22 nt, Human
ggagcugaguucuucagccggg

SEQ ID NO: 1004401 - RNA, 22 nt, Human
uuccuggcagaggccccgacag

SEQ ID NO: 1004402 - RNA, 22 nt, Human
cagggacccuacuagcucacac

SEQ ID NO: 1004403 - RNA, 22 nt, Human
ucacuguaccuuccauuucauu

SEQ ID NO: 1004404 - RNA, 22 nt, Human
ccuggcaggcuggggacagugc

SEQ ID NO: 1004405 - RNA, 22 nt, Human
gauuuauuuuuaaucagcaggg

SEQ ID NO: 1004406 - RNA, 22 nt, Human
ucccagccuuccuuguggugaa

SEQ ID NO: 1004407 - RNA, 22 nt, Human
ccagagaggccuuggcaagaca

SEQ ID NO: 1004408 - RNA, 22 nt, Human
ugcuucuggaguaacaggguga

SEQ ID NO: 1004409 - RNA, 22 nt, Human
ugaaauaucauuuucaucuccc

SEQ ID NO: 1004410 - RNA, 22 nt, Human
ugcuuuaucugacuuggcgcug

SEQ ID NO: 1004411 - RNA, 22 nt, Human
ccuggcagguagcauugaggag

SEQ ID NO: 1004412 - RNA, 22 nt, Human
cugccugcucuauccaggccug

SEQ ID NO: 1004413 - RNA, 22 nt, Human
cccgagugucuacucacuccca

SEQ ID NO: 1004414 - RNA, 22 nt, Human
acuguccaagcaugccuggcuu

SEQ ID NO: 1004415 - RNA, 22 nt, Human
ucuaugaaaagucuauucauuc

SEQ ID NO: 1004416 - RNA, 22 nt, Human
cuuuggaauauuuuauugagaa

SEQ ID NO: 1004417 - RNA, 22 nt, Human
auaugaagaaucuaggauaggc

SEQ ID NO: 1004418 - RNA, 23 nt, Human
uccugcagauaagcugguugaca

SEQ ID NO: 1004419 - RNA, 22 nt, Human
augggcugaaagaguaagcugu

SEQ ID NO: 1004420 - RNA, 20 nt, Human
agcaggcugcagggugaaau

SEQ ID NO: 1004421 - RNA, 22 nt, Human
cugggcuguucugccccugggu

SEQ ID NO: 1004422 - RNA, 22 nt, Human
ucaaagagcuauucaguugugg

SEQ ID NO: 1004423 - RNA, 22 nt, Human
uagggacacugcucaugaguuc

SEQ ID NO: 1004424 - RNA, 22 nt, Human
uaacacauagauauuuuaacuu

SEQ ID NO: 1004425 - RNA, 22 nt, Human
agcuuuauuugucauucacggc

SEQ ID NO: 1004426 - RNA, 22 nt, Human
ugcagagaagaggacaguucua

SEQ ID NO: 1004427 - RNA, 18 nt, Human
auccuugaugagaggucu

SEQ ID NO: 1004428 - RNA, 22 nt, Human
uccaagaugguugguguggugg

SEQ ID NO: 1004429 - RNA, 22 nt, Human
ugcagccccugaaaauggcagc

SEQ ID NO: 1004430 - RNA, 22 nt, Human
acuuaaaaacagauccagcagg

SEQ ID NO: 1004431 - RNA, 22 nt, Human
uccagaccuagggcaccccagu

SEQ ID NO: 1004432 - RNA, 22 nt, Human
ucccacauaugcaauccugaau

SEQ ID NO: 1004433 - RNA, 22 nt, Human
ccugccugucuuuauccccugu

SEQ ID NO: 1004434 - RNA, 22 nt, Human
auggcagauggcuggagcaggu

SEQ ID NO: 1004435 - RNA, 22 nt, Human
uacaauauguggccuuuuguga

SEQ ID NO: 1004436 - RNA, 22 nt, Human
auauuucaugggguuccauacu

SEQ ID NO: 1004437 - RNA, 22 nt, Human
ccacuguaaguuugaaaauaac

SEQ ID NO: 1004438 - RNA, 23 nt, Human
caggacaugggaggaaguauggc

SEQ ID NO: 1004439 - RNA, 22 nt, Human
ucaagagauugaauaauaacug

SEQ ID NO: 1004440 - RNA, 21 nt, Human
uccacccucucugcucccagu

SEQ ID NO: 1004441 - RNA, 22 nt, Human
ccuggcagguggagguugcagu

SEQ ID NO: 1004442 - RNA, 20 nt, Human
uccaugaguuagagacuaua

SEQ ID NO: 1004443 - RNA, 22 nt, Human
cagcucuggguaggaggaaucu

SEQ ID NO: 1004444 - RNA, 22 nt, Human
agcaggcuaaauaauaauacau

SEQ ID NO: 1004445 - RNA, 22 nt, Human
cucccaagcugugcugaacugu

SEQ ID NO: 1004446 - RNA, 22 nt, Human
aagaacuuccuaauauauuuuc

SEQ ID NO: 1004447 - RNA, 22 nt, Human
ggcaggcuccaagcauccuaug

SEQ ID NO: 1004448 - RNA, 22 nt, Human
ucauaaaugcagugucauaaau

SEQ ID NO: 1004449 - RNA, 22 nt, Human
uuccaagugcugaggacaguag

SEQ ID NO: 1004450 - RNA, 22 nt, Human
uaauuuuaugacaguguauuuu

SEQ ID NO: 1004451 - RNA, 23 nt, Human
cauccaggagcugagucugacug

SEQ ID NO: 1004452 - RNA, 22 nt, Human
gggucuccauguuaacaucacu

SEQ ID NO: 1004453 - RNA, 22 nt, Human
gcugucugccgcaggcugccac

SEQ ID NO: 1004454 - RNA, 22 nt, Human
ccuccuggcuuuucccauugaa

SEQ ID NO: 1004455 - RNA, 22 nt, Human
aguaugaaucuuucagaccgua

SEQ ID NO: 1004456 - RNA, 22 nt, Human
ucuggcaggccuugucaaucug

SEQ ID NO: 1004457 - RNA, 22 nt, Human
uccugcagccauuagaggucaa

SEQ ID NO: 1004458 - RNA, 22 nt, Human
caagcucugggauagcagagag

SEQ ID NO: 1004459 - RNA, 22 nt, Human
uguaaacagccccauggagagc

SEQ ID NO: 1004460 - RNA, 22 nt, Human
uuuaugagcaaugcugagggga

SEQ ID NO: 1004461 - RNA, 22 nt, Human
gagggcuccucacauucucuau

SEQ ID NO: 1004462 - RNA, 22 nt, Human
ugugugaaggagccacuguuca

SEQ ID NO: 1004463 - RNA, 22 nt, Human
guggcagucgcugacagauaca

SEQ ID NO: 1004464 - RNA, 22 nt, Human
ccuggcagccucagccaauucu

SEQ ID NO: 1004465 - RNA, 22 nt, Human
uuagcauuucaguacacauguu

SEQ ID NO: 1004466 - RNA, 22 nt, Human
cucugucagaguguugucccca

SEQ ID NO: 1004467 - RNA, 22 nt, Human
guccucugggcuuugagcaguc

SEQ ID NO: 1004468 - RNA, 22 nt, Human
acaaauccagugaacuccagug

SEQ ID NO: 1004469 - RNA, 22 nt, Human
acacagaugcauuacacaucua

SEQ ID NO: 1004470 - RNA, 22 nt, Human
aaaaagucugcaaaggagguug

SEQ ID NO: 1004471 - RNA, 22 nt, Human
gaggcugcggggaggagccugc

SEQ ID NO: 1004472 - RNA, 22 nt, Human
uggcagugguaccggcucucag

SEQ ID NO: 1004473 - RNA, 22 nt, Human
uuaugaaguuccuguuacagug

SEQ ID NO: 1004474 - RNA, 22 nt, Human
uugguuccuucugaaaguauug

SEQ ID NO: 1004475 - RNA, 22 nt, Human
ucagagagcuggugggcagagg

SEQ ID NO: 1004476 - RNA, 22 nt, Human
augggcugugagguccggcagg

SEQ ID NO: 1004477 - RNA, 22 nt, Human
agcaggcugccuuccaaagccu

SEQ ID NO: 1004478 - RNA, 22 nt, Human
cacaauuuuaauacacagucaa

SEQ ID NO: 1004479 - RNA, 22 nt, Human
ucaggcucugagcugaugcuaa

SEQ ID NO: 1004480 - RNA, 22 nt, Human
uuagacauagaauauugucuag

SEQ ID NO: 1004481 - RNA, 22 nt, Human
acuuugcagggcuugauaucca

SEQ ID NO: 1004482 - RNA, 22 nt, Human
aaauggauggaauugacauuua

SEQ ID NO: 1004483 - RNA, 22 nt, Human
uccugcagaucaaagccuuuga

SEQ ID NO: 1004484 - RNA, 22 nt, Human
gccaggggugcccacccaagga

SEQ ID NO: 1004485 - RNA, 21 nt, Human
cccuugccugcacuccucggc

SEQ ID NO: 1004486 - RNA, 22 nt, Human
guuuauuauacaacaaaagcua

SEQ ID NO: 1004487 - RNA, 19 nt, Human
ccaggccucuggggccugu

SEQ ID NO: 1004488 - RNA, 23 nt, Human
aucuguucaucugacacagauuc

SEQ ID NO: 1004489 - RNA, 22 nt, Human
gcuggcagcauuagacccuggg

SEQ ID NO: 1004490 - RNA, 22 nt, Human
aaauuucaguuggaaugagcuc

SEQ ID NO: 1004491 - RNA, 22 nt, Human
uaacacauuuuaagccauuuua

SEQ ID NO: 1004492 - RNA, 17 nt, Human
ucugggcuucagugguc

SEQ ID NO: 1004493 - RNA, 22 nt, Human
gcuggcagaauuucuucuugcu

SEQ ID NO: 1004494 - RNA, 22 nt, Human
cauacauuuauacacaucuaug

SEQ ID NO: 1004495 - RNA, 22 nt, Human
uauaauuuggggaaaguggugu

SEQ ID NO: 1004496 - RNA, 22 nt, Human
ccugcaguuuguugugaccccg

SEQ ID NO: 1004497 - RNA, 22 nt, Human
accugccuucucaaggacauga

SEQ ID NO: 1004498 - RNA, 22 nt, Human
cagaggcauacucccagucuug

SEQ ID NO: 1004499 - RNA, 22 nt, Human
ccuggcagcgccgaagcuggcc

SEQ ID NO: 1004500 - RNA, 22 nt, Human
ccagagagaguacugggcucug

SEQ ID NO: 1004501 - RNA, 22 nt, Human
uauauauucuuaaguaguguag

SEQ ID NO: 1004502 - RNA, 22 nt, Human
auaugaagucagacaaacuggg

SEQ ID NO: 1004503 - RNA, 22 nt, Human
cuuaauuucaaacugcuaguga

SEQ ID NO: 1004504 - RNA, 22 nt, Human
uauuagguaaaggacuugcagg

SEQ ID NO: 1004505 - RNA, 21 nt, Human
agaugcugaugcugcaggucc

SEQ ID NO: 1004506 - RNA, 22 nt, Human
guggcagguggagccuccugca

SEQ ID NO: 1004507 - RNA, 22 nt, Human
cucugaaagaguuuaguauuau

SEQ ID NO: 1004508 - RNA, 22 nt, Human
cugggcugcuguccacuagggu

SEQ ID NO: 1004509 - RNA, 22 nt, Human
uacacagauuucaguaucauca

SEQ ID NO: 1004510 - RNA, 22 nt, Human
ucagccuccgaaagugcuggga

SEQ ID NO: 1004511 - RNA, 22 nt, Human
ucacuguaauagguuugaagau

SEQ ID NO: 1004512 - RNA, 22 nt, Human
gaccugccugagcugccucugc

SEQ ID NO: 1004513 - RNA, 22 nt, Human
ucauuucuguugugcaucacug

SEQ ID NO: 1004514 - RNA, 22 nt, Human
gccuccuggaagucacauguuu

SEQ ID NO: 1004515 - RNA, 22 nt, Human
aaucacaugugcucaauuuuaa

SEQ ID NO: 1004516 - RNA, 22 nt, Human
ucuggggaccauggcaucuaaa

SEQ ID NO: 1004517 - RNA, 22 nt, Human
aaguguuuggggaucauuuuaa

SEQ ID NO: 1004518 - RNA, 22 nt, Human
cccacacauuuuucacuuaccg

SEQ ID NO: 1004519 - RNA, 22 nt, Human
uuucagaugugugucucugaag

SEQ ID NO: 1004520 - RNA, 22 nt, Human
gucugucaucugagauggagug

SEQ ID NO: 1004521 - RNA, 22 nt, Human
uccagaccaugugagaggcgca

SEQ ID NO: 1004522 - RNA, 22 nt, Human
auaugcauuuaccuggcauaua

SEQ ID NO: 1004523 - RNA, 22 nt, Human
aaaauuuugcccuauccuucau

SEQ ID NO: 1004524 - RNA, 22 nt, Human
ucuggcaggguguguauuuaca

SEQ ID NO: 1004525 - RNA, 22 nt, Human
aaaguuguaauggaagaaaugc

SEQ ID NO: 1004526 - RNA, 22 nt, Human
gauaauauuagaagauacaaau

SEQ ID NO: 1004527 - RNA, 22 nt, Human
gagccagguuugaaucucaguc

SEQ ID NO: 1004528 - RNA, 21 nt, Human
uccaagcucaacucccuuccu

SEQ ID NO: 1004529 - RNA, 22 nt, Human
aggaaagauggaaggaggauaa

SEQ ID NO: 1004530 - RNA, 22 nt, Human
ccugggcucacagccaaggcuc

SEQ ID NO: 1004531 - RNA, 22 nt, Human
acaucacaguaguuaagccaga

SEQ ID NO: 1004532 - RNA, 20 nt, Human
uaguauuugcauaaggauag

SEQ ID NO: 1004533 - RNA, 22 nt, Human
ucuggggacggggcccagcaau

SEQ ID NO: 1004534 - RNA, 22 nt, Human
cagcucagucuugaagcacugg

SEQ ID NO: 1004535 - RNA, 22 nt, Human
uagcauuucccaaaugcauuug

SEQ ID NO: 1004536 - RNA, 22 nt, Human
acccacccuacuagcagugucc

SEQ ID NO: 1004537 - RNA, 20 nt, Human
agaaauauugaguucagagg

SEQ ID NO: 1004538 - RNA, 22 nt, Human
ucuggggaugagguccagugau

SEQ ID NO: 1004539 - RNA, 22 nt, Human
gggaccuggcaccuuugcucug

SEQ ID NO: 1004540 - RNA, 22 nt, Human
aauucuguaacuuuacugaauu

SEQ ID NO: 1004541 - RNA, 22 nt, Human
agggcuccugaggcccuucugg

SEQ ID NO: 1004542 - RNA, 22 nt, Human
agggcucugagcuggaccaccu

SEQ ID NO: 1004543 - RNA, 22 nt, Human
aggcuccugcaggugaggugcu

SEQ ID NO: 1004544 - RNA, 22 nt, Human
gcagccucaaacuccccagcuc

SEQ ID NO: 1004545 - RNA, 21 nt, Human
agagucugagugugcaagggc

SEQ ID NO: 1004546 - RNA, 22 nt, Human
agccauccuacuaccucagcau

SEQ ID NO: 1004547 - RNA, 22 nt, Human
cacacacugacaccuuaucuug

SEQ ID NO: 1004548 - RNA, 21 nt, Human
acugggcuagccugacuucug

SEQ ID NO: 1004549 - RNA, 22 nt, Human
ccugggcucugucagaauuggg

SEQ ID NO: 1004550 - RNA, 22 nt, Human
ugcuucugaguugcaggacuug

SEQ ID NO: 1004551 - RNA, 22 nt, Human
ucucuuucuauugcaccaugcu

SEQ ID NO: 1004552 - RNA, 22 nt, Human
uccacccugcuuucuuaucucc

SEQ ID NO: 1004553 - RNA, 22 nt, Human
ugcauacacaagcauacaugua

SEQ ID NO: 1004554 - RNA, 22 nt, Human
cccaggccuggucugggccagu

SEQ ID NO: 1004555 - RNA, 22 nt, Human
uuucaaauaccauaaaccuaau

SEQ ID NO: 1004556 - RNA, 22 nt, Human
uucugucagcugcuuugucuca

SEQ ID NO: 1004557 - RNA, 22 nt, Human
cagcuuugugcaaugcagucuc

SEQ ID NO: 1004558 - RNA, 22 nt, Human
uuucacauaugguuguugauug

SEQ ID NO: 1004559 - RNA, 22 nt, Human
caggacugauguuccuccagcc

SEQ ID NO: 1004560 - RNA, 23 nt, Human
gaauaguuuuagaaauuggagaa

SEQ ID NO: 1004561 - RNA, 22 nt, Human
gccaggcaauguguuagaagcg

SEQ ID NO: 1004562 - RNA, 22 nt, Human
gcacacauucggauucuuaacc

SEQ ID NO: 1004563 - RNA, 22 nt, Human
guggccagccccauggacaguu

SEQ ID NO: 1004564 - RNA, 22 nt, Human
ccacuguauuuuggaagcagau

SEQ ID NO: 1004565 - RNA, 22 nt, Human
aagugugggaaguugcuaaaau

SEQ ID NO: 1004566 - RNA, 23 nt, Human
cagugugacgaggugaggcaggc

SEQ ID NO: 1004567 - RNA, 22 nt, Human
guaaacaucgacccaacagggg

SEQ ID NO: 1004568 - RNA, 21 nt, Human
uggccaaaaccauauuauuaa

SEQ ID NO: 1004569 - RNA, 22 nt, Human
uauucauaguaaacaaaagugg

SEQ ID NO: 1004570 - RNA, 22 nt, Human
uucacaauaggagcaugcaaau

SEQ ID NO: 1004571 - RNA, 22 nt, Human
ugaacuuagugggaauaucucu

SEQ ID NO: 1004572 - RNA, 22 nt, Human
uccaggcaaaaggaacugcuug

SEQ ID NO: 1004573 - RNA, 22 nt, Human
agcucccagaaggcccugcgcc

SEQ ID NO: 1004574 - RNA, 22 nt, Human
gaugggcguggcgcguuuggug

SEQ ID NO: 1004575 - RNA, 22 nt, Human
cuuauaaaguccaucugaacaa

SEQ ID NO: 1004576 - RNA, 22 nt, Human
gcccagccuccaagcuccaagg

SEQ ID NO: 1004577 - RNA, 22 nt, Human
uaucuguuaugggcugaauugc

SEQ ID NO: 1004578 - RNA, 22 nt, Human
cacccaggcagguggcugagaa

SEQ ID NO: 1004579 - RNA, 19 nt, Human
acauauguggauauacaug

SEQ ID NO: 1004580 - RNA, 22 nt, Human
ugaguacucggagugcuuugga

SEQ ID NO: 1004581 - RNA, 22 nt, Human
auguagaagugggcauuauaga

SEQ ID NO: 1004582 - RNA, 22 nt, Human
cagcuucuucaguccuggagcu

SEQ ID NO: 1004583 - RNA, 22 nt, Human
aaggcucuggguuucauaggug

SEQ ID NO: 1004584 - RNA, 20 nt, Human
ugcuuuaugcuauacuuugu

SEQ ID NO: 1004585 - RNA, 21 nt, Human
uuuaauuugcauguaugacgc

SEQ ID NO: 1004586 - RNA, 22 nt, Human
cccugcaguccuuucuuggcuc

SEQ ID NO: 1004587 - RNA, 22 nt, Human
aagugccaucauagcauggcug

SEQ ID NO: 1004588 - RNA, 21 nt, Human
acaggcucacgauccauuucu

SEQ ID NO: 1004589 - RNA, 17 nt, Human
uugggagagaaagguau

SEQ ID NO: 1004590 - RNA, 22 nt, Human
gaagagaaaggcaaggaguuuu

SEQ ID NO: 1004591 - RNA, 22 nt, Human
aaaacaggugucagcaaacuau

SEQ ID NO: 1004592 - RNA, 22 nt, Human
ccuggcagaauauuaaagugca

SEQ ID NO: 1004593 - RNA, 22 nt, Human
gccuggcacaggaauuaggagg

SEQ ID NO: 1004594 - RNA, 22 nt, Human
caucacagggggcuagaagucu

SEQ ID NO: 1004595 - RNA, 22 nt, Human
ugcagggacaggcucuggggau

SEQ ID NO: 1004596 - RNA, 22 nt, Human
aaauccuaagcagaggaauuua

SEQ ID NO: 1004597 - RNA, 22 nt, Human
cccugcagagccagcccugacc

SEQ ID NO: 1004598 - RNA, 22 nt, Human
augaccagccgagauaaacaga

SEQ ID NO: 1004599 - RNA, 22 nt, Human
ugcaggcuuuagccccauggcu

SEQ ID NO: 1004600 - RNA, 22 nt, Human
gcaggcucguuggaaguccccu

SEQ ID NO: 1004601 - RNA, 22 nt, Human
ugugaaauauuuauauacucaa

SEQ ID NO: 1004602 - RNA, 22 nt, Human
cugggcugcaggaguggggcaa

SEQ ID NO: 1004603 - RNA, 22 nt, Human
aaauuugauaagccauuguuac

SEQ ID NO: 1004604 - RNA, 21 nt, Human
acagugugcuucucucccucc

SEQ ID NO: 1004605 - RNA, 22 nt, Human
aaauggaucuguggaauacauu

SEQ ID NO: 1004606 - RNA, 22 nt, Human
cuccaggccauggcugcggagg

SEQ ID NO: 1004607 - RNA, 22 nt, Human
ucccacaggaaaguagacauug

SEQ ID NO: 1004608 - RNA, 22 nt, Human
agcuuuauucaugauuucaggg

SEQ ID NO: 1004609 - RNA, 22 nt, Human
cuguaugaaauugucauuuuua

SEQ ID NO: 1004610 - RNA, 22 nt, Human
agggcuccuaugccccauggac

SEQ ID NO: 1004611 - RNA, 22 nt, Human
ggcaggcucagcagccaaggag

SEQ ID NO: 1004612 - RNA, 22 nt, Human
accugcaggggugcucucuggg

SEQ ID NO: 1004613 - RNA, 22 nt, Human
cauguuaauaugcauugaguac

SEQ ID NO: 1004614 - RNA, 23 nt, Human
acagaaaguucugcuggacagag

SEQ ID NO: 1004615 - RNA, 22 nt, Human
guccuggcccaggaguacacau

SEQ ID NO: 1004616 - RNA, 22 nt, Human
uccugcagcugauaaauacagu

SEQ ID NO: 1004617 - RNA, 23 nt, Human
ucacauaauccuucauccacagg

SEQ ID NO: 1004618 - RNA, 22 nt, Human
augggcugacaagacaugcaua

SEQ ID NO: 1004619 - RNA, 22 nt, Human
guuaauuugcagcuuucgagcu

SEQ ID NO: 1004620 - RNA, 20 nt, Human
agaggcuuccuugggaggag

SEQ ID NO: 1004621 - RNA, 22 nt, Human
uccuggcagcccgcaggugcug

SEQ ID NO: 1004622 - RNA, 22 nt, Human
uuggagagcaguaaaccacacu

SEQ ID NO: 1004623 - RNA, 22 nt, Human
guacacacaaucucuggucagu

SEQ ID NO: 1004624 - RNA, 22 nt, Human
cauuuguaauacugacuugcag

SEQ ID NO: 1004625 - RNA, 22 nt, Human
cugggcuugaguuccugcucgu

SEQ ID NO: 1004626 - RNA, 22 nt, Human
ucugaacagaaaagaugcacaa

SEQ ID NO: 1004627 - RNA, 22 nt, Human
aaugaucuggcucaggauauca

SEQ ID NO: 1004628 - RNA, 22 nt, Human
acuggcaguagagggagcgcau

SEQ ID NO: 1004629 - RNA, 22 nt, Human
uuggcaggaggcuucaguuccu

SEQ ID NO: 1004630 - RNA, 22 nt, Human
gcaaaucaccaccuagcuggau

SEQ ID NO: 1004631 - RNA, 22 nt, Human
guggccagcaagugcugccucu

SEQ ID NO: 1004632 - RNA, 22 nt, Human
cuuccucuagccuaguaaugcc

SEQ ID NO: 1004633 - RNA, 22 nt, Human
uuaaagaugcagcuuuagagaa

SEQ ID NO: 1004634 - RNA, 22 nt, Human
uuggaaaguuuuuacugaagac

SEQ ID NO: 1004635 - RNA, 22 nt, Human
agcuuuaccugccuuggggcac

SEQ ID NO: 1004636 - RNA, 22 nt, Human
cauuuauucaugaucuguagcu

SEQ ID NO: 1004637 - RNA, 22 nt, Human
ugcaggcuggcagauaucucau

SEQ ID NO: 1004638 - RNA, 21 nt, Human
acacagaggcaucaucacuuu

SEQ ID NO: 1004639 - RNA, 22 nt, Human
cuggggaccgagcaagcucugg

SEQ ID NO: 1004640 - RNA, 22 nt, Human
agaauccuguuuuacuucauca

SEQ ID NO: 1004641 - RNA, 22 nt, Human
ugcuuuauaucucucuucuuag

SEQ ID NO: 1004642 - RNA, 22 nt, Human
aggacaagcuaaaggacuuccu

SEQ ID NO: 1004643 - RNA, 22 nt, Human
auuucauugaaguuaauucuuc

SEQ ID NO: 1004644 - RNA, 22 nt, Human
ucaggagcuugguagugugauu

SEQ ID NO: 1004645 - RNA, 22 nt, Human
uggggacccggacuccuggguc

SEQ ID NO: 1004646 - RNA, 21 nt, Human
cuugggcuuguagauggugga

SEQ ID NO: 1004647 - RNA, 22 nt, Human
uuaguuaguggggcugucaguc

SEQ ID NO: 1004648 - RNA, 22 nt, Human
gccuggcaggggccugggagug

SEQ ID NO: 1004649 - RNA, 22 nt, Human
gcacacagcuagauuaccauuc

SEQ ID NO: 1004650 - RNA, 22 nt, Human
cuauuaggcuuccauuucaugc

SEQ ID NO: 1004651 - RNA, 22 nt, Human
guccucugggagccuugagccu

SEQ ID NO: 1004652 - RNA, 22 nt, Human
auaugcauguacgugugcacaa

SEQ ID NO: 1004653 - RNA, 22 nt, Human
uucucuuaucuggcauuauugg

SEQ ID NO: 1004654 - RNA, 22 nt, Human
gcugggcucaccaggccacuag

SEQ ID NO: 1004655 - RNA, 22 nt, Human
uggccugccacugccacgccac

SEQ ID NO: 1004656 - RNA, 22 nt, Human
auguaugauauuuccaguauca

SEQ ID NO: 1004657 - RNA, 22 nt, Human
cucuccagaauaugccgccgug

SEQ ID NO: 1004658 - RNA, 22 nt, Human
guccucugucccuggggcacgg

SEQ ID NO: 1004659 - RNA, 22 nt, Human
uggcuaggacucauccuguuuc

SEQ ID NO: 1004660 - RNA, 22 nt, Human
auuuauuaccucggaguuucug

SEQ ID NO: 1004661 - RNA, 22 nt, Human
agggcuccuccccggccuccac

SEQ ID NO: 1004662 - RNA, 22 nt, Human
cacaauguauauguauaucaaa

SEQ ID NO: 1004663 - RNA, 22 nt, Human
uuguuucaaauauuucagaaua

SEQ ID NO: 1004664 - RNA, 23 nt, Human
cccugcagucagggugagauggu

SEQ ID NO: 1004665 - RNA, 22 nt, Human
ucccaaggugcucggcaacagg

SEQ ID NO: 1004666 - RNA, 21 nt, Human
agaauaaugguaucauuugcu

SEQ ID NO: 1004667 - RNA, 22 nt, Human
aagcuuccugaaugcucauuua

SEQ ID NO: 1004668 - RNA, 22 nt, Human
auuaaauuggacgcugggggaa

SEQ ID NO: 1004669 - RNA, 19 nt, Human
aaaguuuuauucucauuug

SEQ ID NO: 1004670 - RNA, 22 nt, Human
agcacagggacaaugccaggug

SEQ ID NO: 1004671 - RNA, 22 nt, Human
uguaaacauauguauguaugua

SEQ ID NO: 1004672 - RNA, 22 nt, Human
ugcuuuaucugugagaaccuga

SEQ ID NO: 1004673 - RNA, 22 nt, Human
ugcuucugcaggagcuccugau

SEQ ID NO: 1004674 - RNA, 22 nt, Human
uacauguuauuucacuauuggu

SEQ ID NO: 1004675 - RNA, 22 nt, Human
aacaaaagccgaaguagguguc

SEQ ID NO: 1004676 - RNA, 22 nt, Human
uuaugcaacaggugagcagaca

SEQ ID NO: 1004677 - RNA, 22 nt, Human
ugcagggaaagggcacugggcu

SEQ ID NO: 1004678 - RNA, 23 nt, Human
ccuggggagcuguauccagagug

SEQ ID NO: 1004679 - RNA, 22 nt, Human
uaauacuguauacugcaaauuu

SEQ ID NO: 1004680 - RNA, 22 nt, Human
gaggugagaagggggucagaug

SEQ ID NO: 1004681 - RNA, 22 nt, Human
cgcauacauagaaacacacaga

SEQ ID NO: 1004682 - RNA, 22 nt, Human
auaauggccgggggcugaaugc

SEQ ID NO: 1004683 - RNA, 22 nt, Human
uuucacaaucaaauggugaaau

SEQ ID NO: 1004684 - RNA, 22 nt, Human
uacaaagucagaauaacaggug

SEQ ID NO: 1004685 - RNA, 22 nt, Human
uggcagugucuuaucaggagug

SEQ ID NO: 1004686 - RNA, 22 nt, Human
aaaguuugagugauuugacaca

SEQ ID NO: 1004687 - RNA, 22 nt, Human
acuggcagagacccugauggcc

SEQ ID NO: 1004688 - RNA, 22 nt, Human
agcaggcugaugggcaugcuug

SEQ ID NO: 1004689 - RNA, 22 nt, Human
auccacagucuuagccaucaaa

SEQ ID NO: 1004690 - RNA, 22 nt, Human
uuaauuuucucaucugugaaau

SEQ ID NO: 1004691 - RNA, 22 nt, Human
cauaauaucuccgauuacuugc

SEQ ID NO: 1004692 - RNA, 22 nt, Human
uccaaguccauuaugguggucu

SEQ ID NO: 1004693 - RNA, 22 nt, Human
auucugucuuuuuaaaauaaua

SEQ ID NO: 1004694 - RNA, 22 nt, Human
uggaccugcguaggugcugggc

SEQ ID NO: 1004695 - RNA, 22 nt, Human
acagagagcugugauugaguua

SEQ ID NO: 1004696 - RNA, 22 nt, Human
aguguuugucccguuagaaaug

SEQ ID NO: 1004697 - RNA, 22 nt, Human
uguuucaggaccuaucuuuuag

SEQ ID NO: 1004698 - RNA, 21 nt, Human
acacacucugagucuucuauu

SEQ ID NO: 1004699 - RNA, 22 nt, Human
ugcuucugcuuuacuugguuca

SEQ ID NO: 1004700 - RNA, 22 nt, Human
cugagggucaacuugauuguau

SEQ ID NO: 1004701 - RNA, 22 nt, Human
cccaggcacucuuggucauuuu

SEQ ID NO: 1004702 - RNA, 22 nt, Human
gcuucuggugaggccucaggaa

SEQ ID NO: 1004703 - RNA, 23 nt, Human
agcaggcugcuucuccacagcug

SEQ ID NO: 1004704 - RNA, 22 nt, Human
ggcuuuauaggguagaggauca

SEQ ID NO: 1004705 - RNA, 22 nt, Human
guugggaaggugaacaugaugc

SEQ ID NO: 1004706 - RNA, 22 nt, Human
aauuaguaaccuaauuccaucu

SEQ ID NO: 1004707 - RNA, 20 nt, Human
uuucacaaugaacaugucuc

SEQ ID NO: 1004708 - RNA, 22 nt, Human
cagagcauaauugacaugaggu

SEQ ID NO: 1004709 - RNA, 22 nt, Human
aaagaucaaguaggcauggccu

SEQ ID NO: 1004710 - RNA, 22 nt, Human
ugcaggcuauaucuuauuugac

SEQ ID NO: 1004711 - RNA, 19 nt, Human
acauucccaucagcaaugu

SEQ ID NO: 1004712 - RNA, 22 nt, Human
agacaagaaacugggagucucu

SEQ ID NO: 1004713 - RNA, 22 nt, Human
ucagccucagguguucagauuu

SEQ ID NO: 1004714 - RNA, 23 nt, Human
acugggcugaaauuuuucauggc

SEQ ID NO: 1004715 - RNA, 22 nt, Human
guaaaauucuagcaucugaaag

SEQ ID NO: 1004716 - RNA, 21 nt, Human
aguuugaugcaauuucugaga

SEQ ID NO: 1004717 - RNA, 22 nt, Human
ggcuuuggggugugcagagaug

SEQ ID NO: 1004718 - RNA, 20 nt, Human
cagggcucugggccuggccu

SEQ ID NO: 1004719 - RNA, 22 nt, Human
ucugaaauagaagugucuuucu

SEQ ID NO: 1004720 - RNA, 22 nt, Human
uccuccuccucacagucaccug

SEQ ID NO: 1004721 - RNA, 22 nt, Human
gggaccugggccagaggacagu

SEQ ID NO: 1004722 - RNA, 22 nt, Human
gguuucaacuuuugugaggaau

SEQ ID NO: 1004723 - RNA, 22 nt, Human
ccaggcuguaagagugauguug

SEQ ID NO: 1004724 - RNA, 22 nt, Human
uuaaaacugcaaauccuacuga

SEQ ID NO: 1004725 - RNA, 17 nt, Human
ugcaggcuguuauagcc

SEQ ID NO: 1004726 - RNA, 22 nt, Human
uuucucauagucaugccucuua

SEQ ID NO: 1004727 - RNA, 19 nt, Human
acacauuugcacaauccac

SEQ ID NO: 1004728 - RNA, 17 nt, Human
uauauguaugccucucc

SEQ ID NO: 1004729 - RNA, 22 nt, Human
uuucacaucagagguagauuag

SEQ ID NO: 1004730 - RNA, 22 nt, Human
ccagcuuuuagugggcuuauua

SEQ ID NO: 1004731 - RNA, 22 nt, Human
aacaaagucguugccuagaaga

SEQ ID NO: 1004732 - RNA, 16 nt, Human
gcacacacaucaauga

SEQ ID NO: 1004733 - RNA, 22 nt, Human
ugcaggcuccacguuguugucc

SEQ ID NO: 1004734 - RNA, 19 nt, Human
cucuuaaauugucucuugc

SEQ ID NO: 1004735 - RNA, 22 nt, Human
uagcuuuaauaagcugcugaau

SEQ ID NO: 1004736 - RNA, 22 nt, Human
ccuggggagccgccugagcccc

SEQ ID NO: 1004737 - RNA, 21 nt, Human
guagggacagagaguugguga

SEQ ID NO: 1004738 - RNA, 22 nt, Human
aacacagcuaauuucugucaau

SEQ ID NO: 1004739 - RNA, 22 nt, Human
ucagcuuucucagaggccuaac

SEQ ID NO: 1004740 - RNA, 18 nt, Human
ucagagagaauaguaauu

SEQ ID NO: 1004741 - RNA, 22 nt, Human
aagcuuuaugaucucucagcua

SEQ ID NO: 1004742 - RNA, 22 nt, Human
gcuugggaagggcccuguguac

SEQ ID NO: 1004743 - RNA, 22 nt, Human
ggcucccacccauagggcgagu

SEQ ID NO: 1004744 - RNA, 22 nt, Human
gccaggcacugcucuaagcccu

SEQ ID NO: 1004745 - RNA, 22 nt, Human
aaacacauuuuaggaaaaucua

SEQ ID NO: 1004746 - RNA, 18 nt, Human
gacccagcagaugggcuu

SEQ ID NO: 1004747 - RNA, 22 nt, Human
aggccacaguacuuugcagacc

SEQ ID NO: 1004748 - RNA, 22 nt, Human
gcuggcagagacaagaagacua

SEQ ID NO: 1004749 - RNA, 22 nt, Human
auguaaacaagguuauugucca

SEQ ID NO: 1004750 - RNA, 22 nt, Human
ugaacacauaaggcuuuccugu

SEQ ID NO: 1004751 - RNA, 22 nt, Human
cauaauuugugguaguggggga

SEQ ID NO: 1004752 - RNA, 22 nt, Human
cccagccuuccacccuggacua

SEQ ID NO: 1004753 - RNA, 22 nt, Human
cuuuucaugccagcccaucaca

SEQ ID NO: 1004754 - RNA, 22 nt, Human
cuucugggugccugugaguguu

SEQ ID NO: 1004755 - RNA, 22 nt, Human
uucauaguguuuccuuccagug

SEQ ID NO: 1004756 - RNA, 22 nt, Human
guuuauuagaguuuucugucug

SEQ ID NO: 1004757 - RNA, 22 nt, Human
cccaggcagaauuaguguuuca

SEQ ID NO: 1004758 - RNA, 22 nt, Human
agucagugaaaacuagaauguu

SEQ ID NO: 1004759 - RNA, 22 nt, Human
guggccagccagggugcugaug

SEQ ID NO: 1004760 - RNA, 22 nt, Human
ugcaggcugcaccccugcccug

SEQ ID NO: 1004761 - RNA, 22 nt, Human
cccugcagagagugcuuuugug

SEQ ID NO: 1004762 - RNA, 17 nt, Human
ugcaggcuccugucccu

SEQ ID NO: 1004763 - RNA, 22 nt, Human
ggcuucugaaccaggcccugga

SEQ ID NO: 1004764 - RNA, 22 nt, Human
augggcugggaucugaguguca

SEQ ID NO: 1004765 - RNA, 22 nt, Human
ggccucucaugcccagagccaa

SEQ ID NO: 1004766 - RNA, 22 nt, Human
cacauacauacguauguauaca

SEQ ID NO: 1004767 - RNA, 22 nt, Human
gccaaaguaccuagcccucugc

SEQ ID NO: 1004768 - RNA, 22 nt, Human
acagauuuguucuuuugggcua

SEQ ID NO: 1004769 - RNA, 22 nt, Human
ccaggcuccccaggaggcccuu

SEQ ID NO: 1004770 - RNA, 21 nt, Human
ugcaggcuacuucugacucua

SEQ ID NO: 1004771 - RNA, 22 nt, Human
cuggggcuggugaggcaggcuc

SEQ ID NO: 1004772 - RNA, 22 nt, Human
uaaaucuccuguuuuucaucua

SEQ ID NO: 1004773 - RNA, 22 nt, Human
cuggggacuugcagacacaauu

SEQ ID NO: 1004774 - RNA, 22 nt, Human
accauuugacucucuaaggaua

SEQ ID NO: 1004775 - RNA, 22 nt, Human
caggcccucaggcaagggcucu

SEQ ID NO: 1004776 - RNA, 22 nt, Human
cacccagcuuuugcauccuccg

SEQ ID NO: 1004777 - RNA, 22 nt, Human
acagagagaaacaaucagcagc

SEQ ID NO: 1004778 - RNA, 22 nt, Human
uacauguauguguacgugcaug

SEQ ID NO: 1004779 - RNA, 22 nt, Human
cgugagcaaaauggacacuccc

SEQ ID NO: 1004780 - RNA, 22 nt, Human
uuauuuugguaaauguuugccu

SEQ ID NO: 1004781 - RNA, 22 nt, Human
acuucacagaaauuuuaugagg

SEQ ID NO: 1004782 - RNA, 20 nt, Human
cuaggaacuauggucuggcu

SEQ ID NO: 1004783 - RNA, 20 nt, Human
ugcagggcugccucccagcu

SEQ ID NO: 1004784 - RNA, 22 nt, Human
caugaagcccucaucagucuga

SEQ ID NO: 1004785 - RNA, 22 nt, Human
ucagcuuuuuacaugugaaaua

SEQ ID NO: 1004786 - RNA, 22 nt, Human
uuguaugaggauagcaagaagc

SEQ ID NO: 1004787 - RNA, 22 nt, Human
guggcaggggcgggcuguuccg

SEQ ID NO: 1004788 - RNA, 22 nt, Human
ccagagagaaauggauuugagu

SEQ ID NO: 1004789 - RNA, 22 nt, Human
cauacuuuugcccugacauucu

SEQ ID NO: 1004790 - RNA, 22 nt, Human
ugggcugcuucuauuggugguc

SEQ ID NO: 1004791 - RNA, 22 nt, Human
gcagccuccgcacugcgagucc

SEQ ID NO: 1004792 - RNA, 22 nt, Human
cagaggcucagauggcccuggc

SEQ ID NO: 1004793 - RNA, 22 nt, Human
cagcuuguuaccgagggagggu

SEQ ID NO: 1004794 - RNA, 22 nt, Human
ucugggcuuggauuggcucugc

SEQ ID NO: 1004795 - RNA, 22 nt, Human
aguuauuucaguaacauaauag

SEQ ID NO: 1004796 - RNA, 22 nt, Human
uuuugcuuuuguaacacagugu

SEQ ID NO: 1004797 - RNA, 22 nt, Human
uccugcaggccagaggggugag

SEQ ID NO: 1004798 - RNA, 22 nt, Human
uugcagcuucuaccacuguuuc

SEQ ID NO: 1004799 - RNA, 21 nt, Human
agcaggcuuuggaguggggcu

SEQ ID NO: 1004800 - RNA, 22 nt, Human
auuauuagugauguuguuacug

SEQ ID NO: 1004801 - RNA, 22 nt, Human
uuacaauaccacaucaccucau

SEQ ID NO: 1004802 - RNA, 22 nt, Human
cauccagggcagccauggccug

SEQ ID NO: 1004803 - RNA, 22 nt, Human
cauccaggcaccacaaccagcu

SEQ ID NO: 1004804 - RNA, 22 nt, Human
uuccuggcauagagagggcaca

SEQ ID NO: 1004805 - RNA, 22 nt, Human
cugagggagcugcuggccuugg

SEQ ID NO: 1004806 - RNA, 22 nt, Human
cuuucuuauaccugucagggcc

SEQ ID NO: 1004807 - RNA, 22 nt, Human
gcuggcagguccaagauagagc

SEQ ID NO: 1004808 - RNA, 22 nt, Human
ugcuucuguuuguuucugucau

SEQ ID NO: 1004809 - RNA, 22 nt, Human
augugaaacugaagcauccaua

SEQ ID NO: 1004810 - RNA, 22 nt, Human
gcuggcaggauaacuucuaagc

SEQ ID NO: 1004811 - RNA, 22 nt, Human
uggcagggccuaccccaauauc

SEQ ID NO: 1004812 - RNA, 22 nt, Human
ucuggcagcucuccucggcgga

SEQ ID NO: 1004813 - RNA, 22 nt, Human
gcagcuuucuugcccuaaucuu

SEQ ID NO: 1004814 - RNA, 22 nt, Human
aaugauuuggcaaaggaaucca

SEQ ID NO: 1004815 - RNA, 22 nt, Human
gguaugaaaugauuccauguua

SEQ ID NO: 1004816 - RNA, 22 nt, Human
uuuuccuuucaucaggacaaag

SEQ ID NO: 1004817 - RNA, 22 nt, Human
uucacauugugcagauuauggu

SEQ ID NO: 1004818 - RNA, 22 nt, Human
agguauaagucucauuucuguu

SEQ ID NO: 1004819 - RNA, 20 nt, Human
aaaagagugcuucaacugcu

SEQ ID NO: 1004820 - RNA, 22 nt, Human
aguaaaauuucugcugaggaga

SEQ ID NO: 1004821 - RNA, 23 nt, Human
gccaggcacaugguggacacgca

SEQ ID NO: 1004822 - RNA, 22 nt, Human
uuccuggcucacagcagugggg

SEQ ID NO: 1004823 - RNA, 22 nt, Human
cuuuucacaggaggauaagccc

SEQ ID NO: 1004824 - RNA, 22 nt, Human
ucuucuuaugugccauuaucuc

SEQ ID NO: 1004825 - RNA, 20 nt, Human
aguuuauuccaggagaacug

SEQ ID NO: 1004826 - RNA, 22 nt, Human
uaagaacaguagaacaguaggu

SEQ ID NO: 1004827 - RNA, 22 nt, Human
cucuccagccuuuagcccacgc

SEQ ID NO: 1004828 - RNA, 22 nt, Human
gacugccucaguuucccugcag

SEQ ID NO: 1004829 - RNA, 22 nt, Human
cccagccugugacagccguccu

SEQ ID NO: 1004830 - RNA, 22 nt, Human
auagauauuugaguuguuucca

SEQ ID NO: 1004831 - RNA, 22 nt, Human
aggcaggggagcuggaagggua

SEQ ID NO: 1004832 - RNA, 22 nt, Human
ucaggcucucagaccaacagca

SEQ ID NO: 1004833 - RNA, 22 nt, Human
uuugacaaaggaaaaaugcaca

SEQ ID NO: 1004834 - RNA, 22 nt, Human
auuuucaucauggguuuaacau

SEQ ID NO: 1004835 - RNA, 22 nt, Human
acaaguaccaaaugcucaagua

SEQ ID NO: 1004836 - RNA, 22 nt, Human
gcccagcuggcuuccagcacau

SEQ ID NO: 1004837 - RNA, 22 nt, Human
aagauauagauaaaacuaugca

SEQ ID NO: 1004838 - RNA, 22 nt, Human
aauuugcaugaugagaacaaua

SEQ ID NO: 1004839 - RNA, 22 nt, Human
ucccuccccacuucugagcuuu

SEQ ID NO: 1004840 - RNA, 22 nt, Human
ccuucuucuguguggcccaaga

SEQ ID NO: 1004841 - RNA, 22 nt, Human
aagcuuuaaggaauuuuaugga

SEQ ID NO: 1004842 - RNA, 22 nt, Human
uggcacagggcuuggucgcuca

SEQ ID NO: 1004843 - RNA, 22 nt, Human
uccugcagagccgcccucaggu

SEQ ID NO: 1004844 - RNA, 22 nt, Human
ucuggggauggucuacuuucug

SEQ ID NO: 1004845 - RNA, 22 nt, Human
ggcuuugguagacacagauuga

SEQ ID NO: 1004846 - RNA, 22 nt, Human
uucccacagagauuacauugaa

SEQ ID NO: 1004847 - RNA, 22 nt, Human
cagucccaugagcccagaacau

SEQ ID NO: 1004848 - RNA, 22 nt, Human
cucuugcagauaccuugaagga

SEQ ID NO: 1004849 - RNA, 22 nt, Human
uuucacacugcagcaucagaga

SEQ ID NO: 1004850 - RNA, 22 nt, Human
agagggcuuugauucucaguuc

SEQ ID NO: 1004851 - RNA, 22 nt, Human
aaauaguuagcccugcauauau

SEQ ID NO: 1004852 - RNA, 23 nt, Human
auggaagucacuguuuucuuguc

SEQ ID NO: 1004853 - RNA, 22 nt, Human
ucauaaaucauacuccauuugc

SEQ ID NO: 1004854 - RNA, 22 nt, Human
gcaguguuaggaauaaaaauga

SEQ ID NO: 1004855 - RNA, 22 nt, Human
auauaauuguucugaaguguuu

SEQ ID NO: 1004856 - RNA, 22 nt, Human
agcagguguauauaaggcugag

SEQ ID NO: 1004857 - RNA, 22 nt, Human
aagaauacguaucaacaauggu

SEQ ID NO: 1004858 - RNA, 22 nt, Human
cagccucuugcacuuugaaggc

SEQ ID NO: 1004859 - RNA, 22 nt, Human
aauguaugggugagaaaguuga

SEQ ID NO: 1004860 - RNA, 21 nt, Human
aggucccagguuugggcagca

SEQ ID NO: 1004861 - RNA, 22 nt, Human
auggccugaugcaccuguccca

SEQ ID NO: 1004862 - RNA, 22 nt, Human
uccaagcuugcuuuagccacag

SEQ ID NO: 1004863 - RNA, 22 nt, Human
ugcuucugcaacuugaauguac

SEQ ID NO: 1004864 - RNA, 20 nt, Human
ucagagagagggugccacuu

SEQ ID NO: 1004865 - RNA, 22 nt, Human
ccagagagucgaugggggacac

SEQ ID NO: 1004866 - RNA, 20 nt, Human
guguuucaugugauacaaug

SEQ ID NO: 1004867 - RNA, 22 nt, Human
gggaccugccauugcucacagg

SEQ ID NO: 1004868 - RNA, 22 nt, Human
aaguuucaugauguaauuauug

SEQ ID NO: 1004869 - RNA, 22 nt, Human
aucuccagauugugaucaucag

SEQ ID NO: 1004870 - RNA, 22 nt, Human
cagcuuuccagagaccugcccc

SEQ ID NO: 1004871 - RNA, 22 nt, Human
cccaggcagugcugaucccuca

SEQ ID NO: 1004872 - RNA, 22 nt, Human
agacacagucugucuggaggag

SEQ ID NO: 1004873 - RNA, 22 nt, Human
aaguuuaacuugaauucuuucu

SEQ ID NO: 1004874 - RNA, 23 nt, Human
cuuucauugugguuucacagagc

SEQ ID NO: 1004875 - RNA, 22 nt, Human
ucuggcagcaagauaacaaugg

SEQ ID NO: 1004876 - RNA, 22 nt, Human
aggcuuuaaguggccuacagcu

SEQ ID NO: 1004877 - RNA, 22 nt, Human
cucuuaaauaacaucauugcuu

SEQ ID NO: 1004878 - RNA, 22 nt, Human
gcuggcaguuuccucaccgagg

SEQ ID NO: 1004879 - RNA, 22 nt, Human
cuguaugaacccauauacuuau

SEQ ID NO: 1004880 - RNA, 23 nt, Human
uggccaggguacuacacccaccc

SEQ ID NO: 1004881 - RNA, 22 nt, Human
cagucucuuuauccaccaagcc

SEQ ID NO: 1004882 - RNA, 22 nt, Human
ggcaggcuugauauggggggac

SEQ ID NO: 1004883 - RNA, 22 nt, Human
guccucugagggggcugcacgc

SEQ ID NO: 1004884 - RNA, 22 nt, Human
aucacagagauugcuuuuaaaa

SEQ ID NO: 1004885 - RNA, 20 nt, Human
cccagccccuaccuguugcc

SEQ ID NO: 1004886 - RNA, 22 nt, Human
ggcaggcuccagagcccucucc

SEQ ID NO: 1004887 - RNA, 22 nt, Human
ucaauaaaauuguuuuccuauc

SEQ ID NO: 1004888 - RNA, 22 nt, Human
gcuaggaguggugggucaagga

SEQ ID NO: 1004889 - RNA, 23 nt, Human
uugugggcagauuccauggggag

SEQ ID NO: 1004890 - RNA, 22 nt, Human
uguauaaacuuaagcaggaacc

SEQ ID NO: 1004891 - RNA, 22 nt, Human
cucugggcacuguauggguucu

SEQ ID NO: 1004892 - RNA, 22 nt, Human
acuaaagaagccaaaguuuucu

SEQ ID NO: 1004893 - RNA, 22 nt, Human
uuuauacuccacucugcaagcg

SEQ ID NO: 1004894 - RNA, 22 nt, Human
aggaccuguagggccugcaucc

SEQ ID NO: 1004895 - RNA, 20 nt, Human
uucuuaaagaccucacuuug

SEQ ID NO: 1004896 - RNA, 22 nt, Human
acacauacauggggaagaugag

SEQ ID NO: 1004897 - RNA, 22 nt, Human
ccugggcuuccacgagcagagg

SEQ ID NO: 1004898 - RNA, 22 nt, Human
accagugggaaguggaaaauga

SEQ ID NO: 1004899 - RNA, 22 nt, Human
aaugaaugaaccacauauaaca

SEQ ID NO: 1004900 - RNA, 19 nt, Human
ucuggcagguaauuaggga

SEQ ID NO: 1004901 - RNA, 22 nt, Human
auguuucagauacagaucaaau

SEQ ID NO: 1004902 - RNA, 22 nt, Human
augacugcucugggcucccaug

SEQ ID NO: 1004903 - RNA, 22 nt, Human
ugcuauaaguagacauucaaca

SEQ ID NO: 1004904 - RNA, 22 nt, Human
ugaccugcagucaagaggggaa

SEQ ID NO: 1004905 - RNA, 19 nt, Human
acuggcaguuucugcaugg

SEQ ID NO: 1004906 - RNA, 22 nt, Human
aaaaugacauuccagugauauu

SEQ ID NO: 1004907 - RNA, 22 nt, Human
gcauuauuaauagcugcaugag

SEQ ID NO: 1004908 - RNA, 18 nt, Human
ugagaggcuauuuuuugc

SEQ ID NO: 1004909 - RNA, 22 nt, Human
ccuggggagaagagcuuccccc

SEQ ID NO: 1004910 - RNA, 22 nt, Human
ccagcuuuccaggguugacugg

SEQ ID NO: 1004911 - RNA, 22 nt, Human
aggaggcugaacuagggucugg

SEQ ID NO: 1004912 - RNA, 22 nt, Human
ccuggggaccugccucagcccu

SEQ ID NO: 1004913 - RNA, 22 nt, Human
guuucuuagguaaauucuuuga

SEQ ID NO: 1004914 - RNA, 22 nt, Human
aaguaugaaucaaagacuaucu

SEQ ID NO: 1004915 - RNA, 22 nt, Human
aguccaguguguucuggcagca

SEQ ID NO: 1004916 - RNA, 22 nt, Human
cugcagggaugugaggcccguu

SEQ ID NO: 1004917 - RNA, 22 nt, Human
gacacagacaguuagagguaau

SEQ ID NO: 1004918 - RNA, 22 nt, Human
ugggaccugcccuggccccauc

SEQ ID NO: 1004919 - RNA, 22 nt, Human
ccagauagaaaagaaggcagga

SEQ ID NO: 1004920 - RNA, 22 nt, Human
aguccagugucaaggugccauu

SEQ ID NO: 1004921 - RNA, 22 nt, Human
ggccucagaccggagcuggcca

SEQ ID NO: 1004922 - RNA, 22 nt, Human
uuccaagugucagaucagauuu

SEQ ID NO: 1004923 - RNA, 22 nt, Human
aauguauggauucaugucugug

SEQ ID NO: 1004924 - RNA, 22 nt, Human
agagggcugccucagucagcua

SEQ ID NO: 1004925 - RNA, 22 nt, Human
ucaggcucccugcugggcucug

SEQ ID NO: 1004926 - RNA, 22 nt, Human
auuuguuccacacauauuuacu

SEQ ID NO: 1004927 - RNA, 20 nt, Human
ggcugcaggacucauuggcu

SEQ ID NO: 1004928 - RNA, 22 nt, Human
uuucauugucuacauaugacau

SEQ ID NO: 1004929 - RNA, 22 nt, Human
uuguaauuugcaaauguauugu

SEQ ID NO: 1004930 - RNA, 22 nt, Human
uuuauucugugcuacaugaaga

SEQ ID NO: 1004931 - RNA, 22 nt, Human
cugcagccacgagucacagccc

SEQ ID NO: 1004932 - RNA, 22 nt, Human
aguccagucucacucuuggcag

SEQ ID NO: 1004933 - RNA, 22 nt, Human
uguagaaacuacacaugcaaca

SEQ ID NO: 1004934 - RNA, 22 nt, Human
uacaaaaggaagagggaucuua

SEQ ID NO: 1004935 - RNA, 22 nt, Human
ugguauaaaacuuuuuauugaa

SEQ ID NO: 1004936 - RNA, 22 nt, Human
cagcccagccuugucucuuuau

SEQ ID NO: 1004937 - RNA, 22 nt, Human
uuaucauugucgcagucuaauu

SEQ ID NO: 1004938 - RNA, 22 nt, Human
aaucaagaaaaugaggauucuu

SEQ ID NO: 1004939 - RNA, 22 nt, Human
ucaguuaacaacuauuuauuga

SEQ ID NO: 1004940 - RNA, 22 nt, Human
cagaaagaccugggcucaagag

SEQ ID NO: 1004941 - RNA, 22 nt, Human
guauuaggaaauaugaagaaag

SEQ ID NO: 1004942 - RNA, 22 nt, Human
gcaggugaugugaugugagcau

SEQ ID NO: 1004943 - RNA, 22 nt, Human
ugagcaucuuuuuacagguuua

SEQ ID NO: 1004944 - RNA, 22 nt, Human
uccaggcauaaugcccaguggu

SEQ ID NO: 1004945 - RNA, 22 nt, Human
ccaggcaggcuagaauguaaau

SEQ ID NO: 1004946 - RNA, 22 nt, Human
ccaggccucccuuuuccagcca

SEQ ID NO: 1004947 - RNA, 22 nt, Human
aauacugccugugagguaacuc

SEQ ID NO: 1004948 - RNA, 22 nt, Human
cuauuagguaugcagccuauuu

SEQ ID NO: 1004949 - RNA, 22 nt, Human
ugugaaaagcaggcuacuuucu

SEQ ID NO: 1004950 - RNA, 22 nt, Human
augggcugaggugggauagaag

SEQ ID NO: 1004951 - RNA, 22 nt, Human
ucugucaaaaguuuucaauaaa

SEQ ID NO: 1004952 - RNA, 22 nt, Human
acaggcagagaacucagccaga

SEQ ID NO: 1004953 - RNA, 20 nt, Human
uagggcucauuaugaucucc

SEQ ID NO: 1004954 - RNA, 20 nt, Human
aagagucuuuacugagcuaa

SEQ ID NO: 1004955 - RNA, 22 nt, Human
gccaggcauuauuccgaucccu

SEQ ID NO: 1004956 - RNA, 22 nt, Human
agcaggcuaaucuugcugaaca

SEQ ID NO: 1004957 - RNA, 20 nt, Human
ucccaggcugggcuccagcu

SEQ ID NO: 1004958 - RNA, 22 nt, Human
uuucaaacuuuacucuugaauc

SEQ ID NO: 1004959 - RNA, 22 nt, Human
ugucaagucucugaaugaaaug

SEQ ID NO: 1004960 - RNA, 22 nt, Human
aaauaguuguuuggaucaauaa

SEQ ID NO: 1004961 - RNA, 19 nt, Human
ccacacagugugcaauuua

SEQ ID NO: 1004962 - RNA, 22 nt, Human
caauaguucgguccugaaggcc

SEQ ID NO: 1004963 - RNA, 22 nt, Human
uuuauuagauuaucaaagaggu

SEQ ID NO: 1004964 - RNA, 22 nt, Human
cccugccuugggguccacaccg

SEQ ID NO: 1004965 - RNA, 22 nt, Human
ucaggcccuucucccaggacuc

SEQ ID NO: 1004966 - RNA, 22 nt, Human
aggagcugcagauucugccuug

SEQ ID NO: 1004967 - RNA, 22 nt, Human
gggcugacucaaccuugcaaag

SEQ ID NO: 1004968 - RNA, 23 nt, Human
ugaaauauucuuuugcaugagcu

SEQ ID NO: 1004969 - RNA, 22 nt, Human
ugcuuuauucgacaucugguag

SEQ ID NO: 1004970 - RNA, 22 nt, Human
cugccugcugcccuccagagcc

SEQ ID NO: 1004971 - RNA, 22 nt, Human
ugaacacugccauauuuaagaa

SEQ ID NO: 1004972 - RNA, 22 nt, Human
aauauuucuguagcuauguucu

SEQ ID NO: 1004973 - RNA, 22 nt, Human
aggguagggcccggagacagac

SEQ ID NO: 1004974 - RNA, 22 nt, Human
aauaacuuuuaaaagacccugg

SEQ ID NO: 1004975 - RNA, 22 nt, Human
cagggcucaucugugugaccag

SEQ ID NO: 1004976 - RNA, 21 nt, Human
cuguccaguaauuccuggcac

SEQ ID NO: 1004977 - RNA, 22 nt, Human
agauacaaaagauaagauuuag

SEQ ID NO: 1004978 - RNA, 22 nt, Human
ccucucagcgauuccucuugga

SEQ ID NO: 1004979 - RNA, 18 nt, Human
agcagguggcgucugcag

SEQ ID NO: 1004980 - RNA, 22 nt, Human
gcaguccaaaguggcucucacc

SEQ ID NO: 1004981 - RNA, 22 nt, Human
agagggaucacccuguuucugg

SEQ ID NO: 1004982 - RNA, 22 nt, Human
uagcuuuacaaagugcugcacc

SEQ ID NO: 1004983 - RNA, 22 nt, Human
agccagggucucucgcucuguu

SEQ ID NO: 1004984 - RNA, 22 nt, Human
cugccugccacguucagcugua

SEQ ID NO: 1004985 - RNA, 22 nt, Human
ccugggcugaagucaagugugg

SEQ ID NO: 1004986 - RNA, 22 nt, Human
ugguccugccccgugcacagag

SEQ ID NO: 1004987 - RNA, 22 nt, Human
cuggggacgucgggcaguguuc

SEQ ID NO: 1004988 - RNA, 22 nt, Human
ugcuucuguuacauaccagaac

SEQ ID NO: 1004989 - RNA, 22 nt, Human
ccagcccugccagagagagcug

SEQ ID NO: 1004990 - RNA, 22 nt, Human
gggaccuggacaugugugugcu

SEQ ID NO: 1004991 - RNA, 22 nt, Human
uucacaauggcaaaccauuaaa

SEQ ID NO: 1004992 - RNA, 22 nt, Human
ucacauuuucuacuacuguacg

SEQ ID NO: 1004993 - RNA, 22 nt, Human
guuacucuuccccggggucugg

SEQ ID NO: 1004994 - RNA, 22 nt, Human
ccuaggaacccccaggcuucug

SEQ ID NO: 1004995 - RNA, 22 nt, Human
uuguaaauaguaguaagaugcc

SEQ ID NO: 1004996 - RNA, 22 nt, Human
agauuugcggcuuuacuuugca

SEQ ID NO: 1004997 - RNA, 22 nt, Human
agcaggcuacuccuguguucgu

SEQ ID NO: 1004998 - RNA, 22 nt, Human
uacacagauaugugaucaauca

SEQ ID NO: 1004999 - RNA, 22 nt, Human
uggccaggcuggucuggaacgc

SEQ ID NO: 1005000 - RNA, 22 nt, Human
uggcagagagagugcagucgac

SEQ ID NO: 1005001 - RNA, 22 nt, Human
ugucaaagccugaaucacauag

SEQ ID NO: 1005002 - RNA, 22 nt, Human
accaagcuagaacauuacaggc

SEQ ID NO: 1005003 - RNA, 22 nt, Human
caauuucuggaacuaauucuga

SEQ ID NO: 1005004 - RNA, 22 nt, Human
guauuaggagguggagccuuug

SEQ ID NO: 1005005 - RNA, 22 nt, Human
ccuggcagucaggggaguccuu

SEQ ID NO: 1005006 - RNA, 22 nt, Human
uuucaaaugcaugucuuuccuc

SEQ ID NO: 1005007 - RNA, 22 nt, Human
gcacccagaggucagcagugcu

SEQ ID NO: 1005008 - RNA, 22 nt, Human
aucagagaaguuucacuggcau

SEQ ID NO: 1005009 - RNA, 22 nt, Human
uaccugcaaaguuccuuuugcc

SEQ ID NO: 1005010 - RNA, 22 nt, Human
ugcuucugaaguggaugggugc

SEQ ID NO: 1005011 - RNA, 22 nt, Human
cuuugaaaggaagccacacagc

SEQ ID NO: 1005012 - RNA, 22 nt, Human
aacaugauuuaguauaaugcag

SEQ ID NO: 1005013 - RNA, 22 nt, Human
uauggaaagcucuuuuugauug

SEQ ID NO: 1005014 - RNA, 22 nt, Human
gcuuucuugguucugcaggggc

SEQ ID NO: 1005015 - RNA, 22 nt, Human
gcuucugguagaauucaauaga

SEQ ID NO: 1005016 - RNA, 22 nt, Human
cagcauuuaaugcagugcuucc

SEQ ID NO: 1005017 - RNA, 22 nt, Human
uuauuucauguaaaauuuaugu

SEQ ID NO: 1005018 - RNA, 22 nt, Human
gccuggcaauggccucaggaag

SEQ ID NO: 1005019 - RNA, 22 nt, Human
auuucauagauuguaaaucccu

SEQ ID NO: 1005020 - RNA, 22 nt, Human
ucagagagguuaaauaucuugu

SEQ ID NO: 1005021 - RNA, 22 nt, Human
uccuggcacuuugggggcucgc

SEQ ID NO: 1005022 - RNA, 22 nt, Human
acaguaaaaagccuuagaauuu

SEQ ID NO: 1005023 - RNA, 22 nt, Human
ggcccaaacggguccagugaaa

SEQ ID NO: 1005024 - RNA, 22 nt, Human
aaauauagcaauuaugccuacu

SEQ ID NO: 1005025 - RNA, 22 nt, Human
guccucugacucagccuuggga

SEQ ID NO: 1005026 - RNA, 22 nt, Human
uuuaaauuauaguuaaugucug

SEQ ID NO: 1005027 - RNA, 22 nt, Human
gggaccuggucuagcacugagc

SEQ ID NO: 1005028 - RNA, 22 nt, Human
agcuagaauauugaucugaaau

SEQ ID NO: 1005029 - RNA, 22 nt, Human
aauguaugugcaucauuuacau

SEQ ID NO: 1005030 - RNA, 22 nt, Human
uggacuggaaugcugauccucu

SEQ ID NO: 1005031 - RNA, 22 nt, Human
ccaggccuggccaggggaugcc

SEQ ID NO: 1005032 - RNA, 22 nt, Human
uagucaaaccucagaauacccc

SEQ ID NO: 1005033 - RNA, 22 nt, Human
caggcuggagugcaauggcaca

SEQ ID NO: 1005034 - RNA, 22 nt, Human
caggcugccgugaagcaggccu

SEQ ID NO: 1005035 - RNA, 22 nt, Human
agccagaguugaaugugagucu

SEQ ID NO: 1005036 - RNA, 22 nt, Human
cuaucauuuuacaugguuggug

SEQ ID NO: 1005037 - RNA, 22 nt, Human
guuuucaugucuauugggcaua

SEQ ID NO: 1005038 - RNA, 22 nt, Human
cagcccaggucucucuuccagu

SEQ ID NO: 1005039 - RNA, 22 nt, Human
ucaggcucaggaauguguuuau

SEQ ID NO: 1005040 - RNA, 22 nt, Human
aggacagugguguucuggagug

SEQ ID NO: 1005041 - RNA, 22 nt, Human
cccugcaggcucagacuggagu

SEQ ID NO: 1005042 - RNA, 22 nt, Human
agacaucagcuugugugcaggg

SEQ ID NO: 1005043 - RNA, 22 nt, Human
aagcacauuguacauuugugcu

SEQ ID NO: 1005044 - RNA, 22 nt, Human
uguuugaauuuugcuaacgugu

SEQ ID NO: 1005045 - RNA, 22 nt, Human
auuuauuaugggauuuggcaca

SEQ ID NO: 1005046 - RNA, 22 nt, Human
ucugucaauauaugugcugcag

SEQ ID NO: 1005047 - RNA, 22 nt, Human
cccagcccccgagugucuggaa

SEQ ID NO: 1005048 - RNA, 22 nt, Human
uuugucauaucacacaauuuug

SEQ ID NO: 1005049 - RNA, 22 nt, Human
aucugcuuccugggcuccauga

SEQ ID NO: 1005050 - RNA, 19 nt, Human
cuccaaguuaagagggagg

SEQ ID NO: 1005051 - RNA, 17 nt, Human
cagcuuuaugcuacugu

SEQ ID NO: 1005052 - RNA, 22 nt, Human
cuccaaguauguuaaaaucuaa

SEQ ID NO: 1005053 - RNA, 22 nt, Human
cccacacacuggcugcugccaa

SEQ ID NO: 1005054 - RNA, 22 nt, Human
uccauucuaugcuuacauuuau

SEQ ID NO: 1005055 - RNA, 22 nt, Human
aaacacagauuucuuuguccca

SEQ ID NO: 1005056 - RNA, 22 nt, Human
cccagcuugcaaauggguugcu

SEQ ID NO: 1005057 - RNA, 22 nt, Human
ggccucagaaauagaguaaaau

SEQ ID NO: 1005058 - RNA, 22 nt, Human
uagcuuuaagacauggugaaug

SEQ ID NO: 1005059 - RNA, 22 nt, Human
uugcagcugcaguaaauguuca

SEQ ID NO: 1005060 - RNA, 22 nt, Human
uuuccacaauguuuuugcagga

SEQ ID NO: 1005061 - RNA, 20 nt, Human
acccagcucugugcccuggg

SEQ ID NO: 1005062 - RNA, 22 nt, Human
acccacacaucucuaauucagu

SEQ ID NO: 1005063 - RNA, 22 nt, Human
uaacacaugaaagcaccuucuu

SEQ ID NO: 1005064 - RNA, 22 nt, Human
ucuuuauugcuacugguuuguc

SEQ ID NO: 1005065 - RNA, 22 nt, Human
ggggaccuuuccauuucugaga

SEQ ID NO: 1005066 - RNA, 22 nt, Human
cagggcuagugacaccccaguc

SEQ ID NO: 1005067 - RNA, 22 nt, Human
uccugcaggcuugaguccucag

SEQ ID NO: 1005068 - RNA, 22 nt, Human
agcaggcugagcacccaggggg

SEQ ID NO: 1005069 - RNA, 22 nt, Human
ccagcccugaacccugcugcau

SEQ ID NO: 1005070 - RNA, 22 nt, Human
guuauuaguaagacucgcacau

SEQ ID NO: 1005071 - RNA, 22 nt, Human
cccucucucaggcugacagccu

SEQ ID NO: 1005072 - RNA, 22 nt, Human
ugcagggagcucuggggugcag

SEQ ID NO: 1005073 - RNA, 22 nt, Human
ucccaccccggucaagggcuga

SEQ ID NO: 1005074 - RNA, 22 nt, Human
agucuacaaagaaaaguuauug

SEQ ID NO: 1005075 - RNA, 22 nt, Human
uuguaugaauguauccuaauuu

SEQ ID NO: 1005076 - RNA, 22 nt, Human
gagggcucuacucaccacccug

SEQ ID NO: 1005077 - RNA, 22 nt, Human
cuucugggccauggccuuccuc

SEQ ID NO: 1005078 - RNA, 22 nt, Human
gugggagaaauuagcucuaguu

SEQ ID NO: 1005079 - RNA, 22 nt, Human
aagucguggcaggcuugcacga

SEQ ID NO: 1005080 - RNA, 18 nt, Human
ucauuuguuuugcaugaa

SEQ ID NO: 1005081 - RNA, 22 nt, Human
ucaggcccagagucacggaucc

SEQ ID NO: 1005082 - RNA, 20 nt, Human
gcugggcuaccacuggcccu

SEQ ID NO: 1005083 - RNA, 22 nt, Human
cacagagacagaagcacuuaug

SEQ ID NO: 1005084 - RNA, 22 nt, Human
ucuuugaaaagggagauagaaa

SEQ ID NO: 1005085 - RNA, 21 nt, Human
aggcucucauccagggaccca

SEQ ID NO: 1005086 - RNA, 22 nt, Human
uccaggcauguugggaagauga

SEQ ID NO: 1005087 - RNA, 22 nt, Human
caggcuccuucccagggauggu

SEQ ID NO: 1005088 - RNA, 22 nt, Human
uccugccuguuuaccuguacuu

SEQ ID NO: 1005089 - RNA, 22 nt, Human
gaggguggggaauagacugcua

SEQ ID NO: 1005090 - RNA, 22 nt, Human
uuucacauuuguuuuaagaagu

SEQ ID NO: 1005091 - RNA, 17 nt, Human
cucugggcagccugggg

SEQ ID NO: 1005092 - RNA, 22 nt, Human
agcccggcuuccccgguugcua

SEQ ID NO: 1005093 - RNA, 22 nt, Human
cuucugggcagaaguuuugaga

SEQ ID NO: 1005094 - RNA, 22 nt, Human
ucuggcaguuugagaaaggcua

SEQ ID NO: 1005095 - RNA, 21 nt, Human
uucucuccauaugcccagccc

SEQ ID NO: 1005096 - RNA, 22 nt, Human
ugcuuuauucccuucugaugug

SEQ ID NO: 1005097 - RNA, 22 nt, Human
ggcacagggggcugaggacuag

SEQ ID NO: 1005098 - RNA, 22 nt, Human
ugaaacaaugugaaguugcuga

SEQ ID NO: 1005099 - RNA, 22 nt, Human
aagggacccuggaucaaaugga

SEQ ID NO: 1005100 - RNA, 22 nt, Human
gaaaacacuuugaucugaaagu

SEQ ID NO: 1005101 - RNA, 22 nt, Human
uguaugaaaaggaauagauuga

SEQ ID NO: 1005102 - RNA, 22 nt, Human
auauuaggaguuaaauguauua

SEQ ID NO: 1005103 - RNA, 22 nt, Human
guguaugaacgaaagaauggau

SEQ ID NO: 1005104 - RNA, 23 nt, Human
cgcccagccucagugaccugggc

SEQ ID NO: 1005105 - RNA, 22 nt, Human
gccuggcacucaaucaucugcu

SEQ ID NO: 1005106 - RNA, 22 nt, Human
uguccaggucagcagcagggac

SEQ ID NO: 1005107 - RNA, 22 nt, Human
gcccacacaccagcucaggagg

SEQ ID NO: 1005108 - RNA, 22 nt, Human
ggggaccuaggcucugucucuu

SEQ ID NO: 1005109 - RNA, 22 nt, Human
guagggacaauauguuauuaga

SEQ ID NO: 1005110 - RNA, 18 nt, Human
gcuuuauuucuuggggaa

SEQ ID NO: 1005111 - RNA, 22 nt, Human
gggcucucaaggcagggcccca

SEQ ID NO: 1005112 - RNA, 22 nt, Human
ggggaccuucccagagcaguug

SEQ ID NO: 1005113 - RNA, 22 nt, Human
gcuggcagagagcuggugagga

SEQ ID NO: 1005114 - RNA, 22 nt, Human
uucauugcaguucuucagguua

SEQ ID NO: 1005115 - RNA, 22 nt, Human
cacauugcagcuucuuuuggcu

SEQ ID NO: 1005116 - RNA, 22 nt, Human
cuucacauguuggaguccuuug

SEQ ID NO: 1005117 - RNA, 22 nt, Human
guacacacuauguauuguacac

SEQ ID NO: 1005118 - RNA, 22 nt, Human
ggcaggcucuuggccuuaugag

SEQ ID NO: 1005119 - RNA, 22 nt, Human
cuuucacacacauacauuugga

SEQ ID NO: 1005120 - RNA, 22 nt, Human
ucagggacgugagcucagaguc

SEQ ID NO: 1005121 - RNA, 22 nt, Human
aaugaagcaguuuucaucaagu

SEQ ID NO: 1005122 - RNA, 22 nt, Human
aucuguuccccuaugcucucua

SEQ ID NO: 1005123 - RNA, 22 nt, Human
ugcaggcuauccuuugcugcaa

SEQ ID NO: 1005124 - RNA, 22 nt, Human
guccacagagggcugggcaggc

SEQ ID NO: 1005125 - RNA, 22 nt, Human
ucucuuaaaagauuuuaaugac

SEQ ID NO: 1005126 - RNA, 22 nt, Human
agaaaauuagauuuuacugugu

SEQ ID NO: 1005127 - RNA, 22 nt, Human
uccaggcuugagaccaggcucu

SEQ ID NO: 1005128 - RNA, 22 nt, Human
ucuggcaguugccgcuucaguc

SEQ ID NO: 1005129 - RNA, 22 nt, Human
uccaggaggccucauuuccugu

SEQ ID NO: 1005130 - RNA, 22 nt, Human
ugagagcacacagaaauauuuu

SEQ ID NO: 1005131 - RNA, 22 nt, Human
uguaaaaccaaaucaaucuagu

SEQ ID NO: 1005132 - RNA, 22 nt, Human
guuucgucaggcuuauucuauc

SEQ ID NO: 1005133 - RNA, 22 nt, Human
ccaggcucagggcagacuuuca

SEQ ID NO: 1005134 - RNA, 22 nt, Human
ggcaggcuggcuuuguuccagg

SEQ ID NO: 1005135 - RNA, 22 nt, Human
auuaaauuggaucugcauaguu

SEQ ID NO: 1005136 - RNA, 22 nt, Human
aaauacugcugcuauuccuuuu

SEQ ID NO: 1005137 - RNA, 22 nt, Human
gccagguugcugacgacgaucu

SEQ ID NO: 1005138 - RNA, 22 nt, Human
acagcuuugggcaaugcuauga

SEQ ID NO: 1005139 - RNA, 22 nt, Human
cuacugaguccuucagcugcca

SEQ ID NO: 1005140 - RNA, 22 nt, Human
ccaggccugugcaaggagggag

SEQ ID NO: 1005141 - RNA, 22 nt, Human
gagaacucagacgcaggucaug

SEQ ID NO: 1005142 - RNA, 22 nt, Human
gggaccuggggacuccuuguuc

SEQ ID NO: 1005143 - RNA, 22 nt, Human
accaggcacuccugaggucuga

SEQ ID NO: 1005144 - RNA, 21 nt, Human
ccagagagagggaaguggguu

SEQ ID NO: 1005145 - RNA, 22 nt, Human
cugccugcuuaccaugcaucag

SEQ ID NO: 1005146 - RNA, 22 nt, Human
cugugggaugggaccucagcug

SEQ ID NO: 1005147 - RNA, 22 nt, Human
cuucuggguguggagugaggac

SEQ ID NO: 1005148 - RNA, 22 nt, Human
ucccacaugugaauccucaggu

SEQ ID NO: 1005149 - RNA, 22 nt, Human
guuagggagggugcauaugugu

SEQ ID NO: 1005150 - RNA, 22 nt, Human
auuucucacucacaguccaugu

SEQ ID NO: 1005151 - RNA, 22 nt, Human
auuucucaguuccuacuguuua

SEQ ID NO: 1005152 - RNA, 22 nt, Human
agaagaaaugaggccguucugc

SEQ ID NO: 1005153 - RNA, 22 nt, Human
agaaaauauucauugagaggcu

SEQ ID NO: 1005154 - RNA, 22 nt, Human
agggagacacaugaggaaguca

SEQ ID NO: 1005155 - RNA, 22 nt, Human
ugguaagaacccaucagagaag

SEQ ID NO: 1005156 - RNA, 22 nt, Human
gaacacauuagucugaguuggc

SEQ ID NO: 1005157 - RNA, 22 nt, Human
ugcagagaaaacuccuggguac

SEQ ID NO: 1005158 - RNA, 22 nt, Human
acaggcucucagccaguuggca

SEQ ID NO: 1005159 - RNA, 22 nt, Human
ugucagagagcaggcaguagaa

SEQ ID NO: 1005160 - RNA, 22 nt, Human
uaccugcacagccagccaugug

SEQ ID NO: 1005161 - RNA, 22 nt, Human
auucagugugagguuuucaagu

SEQ ID NO: 1005162 - RNA, 18 nt, Human
cuccagggaacucaguca

SEQ ID NO: 1005163 - RNA, 22 nt, Human
cugaaccaucucuguucuguau

SEQ ID NO: 1005164 - RNA, 22 nt, Human
acugggcuguuuuuugagugga

SEQ ID NO: 1005165 - RNA, 22 nt, Human
acugggcuagaguggaagcugg

SEQ ID NO: 1005166 - RNA, 21 nt, Human
cccugcaggccagggcugagc

SEQ ID NO: 1005167 - RNA, 22 nt, Human
cuguggcugcguaggucuggca

SEQ ID NO: 1005168 - RNA, 19 nt, Human
aggcugugagggaggacuc

SEQ ID NO: 1005169 - RNA, 22 nt, Human
cauuuguaggaugcuucuuguu

SEQ ID NO: 1005170 - RNA, 22 nt, Human
uccuggcauugugcagggugug

SEQ ID NO: 1005171 - RNA, 22 nt, Human
uagcauuucacugaucuucacu

SEQ ID NO: 1005172 - RNA, 22 nt, Human
aaaguguugauaugugacaucc

SEQ ID NO: 1005173 - RNA, 22 nt, Human
auguauuucuauguagugaaga

SEQ ID NO: 1005174 - RNA, 22 nt, Human
guccaaguacauguguguacau

SEQ ID NO: 1005175 - RNA, 22 nt, Human
ccaucacaguccccaucgugau

SEQ ID NO: 1005176 - RNA, 17 nt, Human
gagccacccugugcgag

SEQ ID NO: 1005177 - RNA, 23 nt, Human
ggacacauuuauuucagaauuca

SEQ ID NO: 1005178 - RNA, 22 nt, Human
gcugggcuggaaggccaaggca

SEQ ID NO: 1005179 - RNA, 22 nt, Human
ucaggcucagguuaggggccaa

SEQ ID NO: 1005180 - RNA, 22 nt, Human
guccucuggaagaugaguucuu

SEQ ID NO: 1005181 - RNA, 18 nt, Human
guuaauuuugaaguucau

SEQ ID NO: 1005182 - RNA, 22 nt, Human
uggcacucacucucagagucug

SEQ ID NO: 1005183 - RNA, 22 nt, Human
cagccaggauggagaacuguug

SEQ ID NO: 1005184 - RNA, 22 nt, Human
cacauuccuggugcucagcagc

SEQ ID NO: 1005185 - RNA, 19 nt, Human
accugcaguaauaauuccu

SEQ ID NO: 1005186 - RNA, 22 nt, Human
acccacaccuccguauaucacu

SEQ ID NO: 1005187 - RNA, 22 nt, Human
ugagagucucagaccuccuggu

SEQ ID NO: 1005188 - RNA, 22 nt, Human
gccaagcuggaugaagagguug

SEQ ID NO: 1005189 - RNA, 22 nt, Human
uggcaggcgggagccauagagg

SEQ ID NO: 1005190 - RNA, 22 nt, Human
uuuaucuuuaggacuuugcaga

SEQ ID NO: 1005191 - RNA, 19 nt, Human
uccugcagaccagaccugu

SEQ ID NO: 1005192 - RNA, 22 nt, Human
uuguaugaccacaaucugacgu

SEQ ID NO: 1005193 - RNA, 21 nt, Human
aauuagggugccucuuauaau

SEQ ID NO: 1005194 - RNA, 22 nt, Human
agugaaccaggcugcgucccug

SEQ ID NO: 1005195 - RNA, 22 nt, Human
uauacacaaggugugcauuugu

SEQ ID NO: 1005196 - RNA, 22 nt, Human
guuagggagucagguggcucuu

SEQ ID NO: 1005197 - RNA, 22 nt, Human
ugcagggagggcccagcaaucu

SEQ ID NO: 1005198 - RNA, 22 nt, Human
acagauuuauugaagcugcugc

SEQ ID NO: 1005199 - RNA, 22 nt, Human
uguaggcugaagaugaagugga

SEQ ID NO: 1005200 - RNA, 22 nt, Human
uaugcacacauguaugcaugug

SEQ ID NO: 1005201 - RNA, 22 nt, Human
cagcccucaucucagcuucuuu

SEQ ID NO: 1005202 - RNA, 19 nt, Human
guccucucaacaacccggg

SEQ ID NO: 1005203 - RNA, 22 nt, Human
acuccaggcaucugcuucugcu

SEQ ID NO: 1005204 - RNA, 22 nt, Human
cagguuggucggcaaguacaca

SEQ ID NO: 1005205 - RNA, 22 nt, Human
uucuuuuacauuaagauuucag

SEQ ID NO: 1005206 - RNA, 22 nt, Human
cagcauuuaucuuguagcagga

SEQ ID NO: 1005207 - RNA, 22 nt, Human
aauacauauggaauuccauguu

SEQ ID NO: 1005208 - RNA, 22 nt, Human
aauaacuuaagaaauuucccca

SEQ ID NO: 1005209 - RNA, 22 nt, Human
ggugccagugggucucaggaua

SEQ ID NO: 1005210 - RNA, 22 nt, Human
ccuacucugagcgccuccgcau

SEQ ID NO: 1005211 - RNA, 22 nt, Human
agagcaauggcauccagcugau

SEQ ID NO: 1005212 - RNA, 22 nt, Human
ucacuguauuugcugaugcaua

SEQ ID NO: 1005213 - RNA, 22 nt, Human
ccagcuuuuccucucauugcuu

SEQ ID NO: 1005214 - RNA, 22 nt, Human
auuucuacaguacacaugcauu

SEQ ID NO: 1005215 - RNA, 22 nt, Human
gagggcucuaccaaguaacucu

SEQ ID NO: 1005216 - RNA, 22 nt, Human
uuuacauugcauuagguauuau

SEQ ID NO: 1005217 - RNA, 19 nt, Human
uuaugaaggcuggggggag

SEQ ID NO: 1005218 - RNA, 22 nt, Human
uccccacaucucugcaucaggc

SEQ ID NO: 1005219 - RNA, 22 nt, Human
cccagccuuugcuuccugguuc

SEQ ID NO: 1005220 - RNA, 22 nt, Human
uuuaauauucugcauucuccuu

SEQ ID NO: 1005221 - RNA, 22 nt, Human
ucagaaagaacacaggcaguag

SEQ ID NO: 1005222 - RNA, 22 nt, Human
uccccacacuuucacuccuggc

SEQ ID NO: 1005223 - RNA, 22 nt, Human
uggaacacaagucauugagggg

SEQ ID NO: 1005224 - RNA, 20 nt, Human
cacaacuguccacaugcucc

SEQ ID NO: 1005225 - RNA, 22 nt, Human
agacacauaggaccacacugug

SEQ ID NO: 1005226 - RNA, 22 nt, Human
ccucccuucaguagagcccaau

SEQ ID NO: 1005227 - RNA, 20 nt, Human
gcaggcuccgggcuugggag

SEQ ID NO: 1005228 - RNA, 22 nt, Human
aacccaggagacagguugcagu

SEQ ID NO: 1005229 - RNA, 21 nt, Human
uccccacauuucuaaacagac

SEQ ID NO: 1005230 - RNA, 22 nt, Human
cccugcagacgucuugaugccu

SEQ ID NO: 1005231 - RNA, 22 nt, Human
ugggcugagcagugaagcucau

SEQ ID NO: 1005232 - RNA, 22 nt, Human
uccuggcagaaauggggcugug

SEQ ID NO: 1005233 - RNA, 22 nt, Human
ggagccugaaaagucugcauuu

SEQ ID NO: 1005234 - RNA, 22 nt, Human
uccaggcaugucccaagccgga

SEQ ID NO: 1005235 - RNA, 22 nt, Human
uucuacaauaugaauaaugaag

SEQ ID NO: 1005236 - RNA, 22 nt, Human
cagcaaucgggugauaugcaau

SEQ ID NO: 1005237 - RNA, 22 nt, Human
uguucauaucauuuugaaagcu

SEQ ID NO: 1005238 - RNA, 22 nt, Human
uccuggcaguaauuugauguug

SEQ ID NO: 1005239 - RNA, 22 nt, Human
ugggcuccagcaccugugcucu

SEQ ID NO: 1005240 - RNA, 22 nt, Human
ugggccaggcaugugaucagca

SEQ ID NO: 1005241 - RNA, 22 nt, Human
gaggagcugggacccugucauc

SEQ ID NO: 1005242 - RNA, 22 nt, Human
ucagcuuuccuugcuuuagauu

SEQ ID NO: 1005243 - RNA, 22 nt, Human
augggcugaggaagcuccugag

SEQ ID NO: 1005244 - RNA, 22 nt, Human
ggcaggcaggucuucauggccc

SEQ ID NO: 1005245 - RNA, 21 nt, Human
uccagcucuuauguucaugaa

SEQ ID NO: 1005246 - RNA, 20 nt, Human
augugaaagaucaguugucu

SEQ ID NO: 1005247 - RNA, 22 nt, Human
uuguuucauggggauguuuauu

SEQ ID NO: 1005248 - RNA, 22 nt, Human
guaugaaggcgagagcccacua

SEQ ID NO: 1005249 - RNA, 18 nt, Human
cccagcuuagcgccccuc

SEQ ID NO: 1005250 - RNA, 18 nt, Human
uccucucuuuccccaggg

SEQ ID NO: 1005251 - RNA, 22 nt, Human
cagaagaggacuggguagcuca

SEQ ID NO: 1005252 - RNA, 22 nt, Human
ccugccucccagagguccucua

SEQ ID NO: 1005253 - RNA, 22 nt, Human
uuucugaaaucucuuuugagga

SEQ ID NO: 1005254 - RNA, 22 nt, Human
ucaaaguuacuugugguuuucu

SEQ ID NO: 1005255 - RNA, 22 nt, Human
uagaauaugauuaauuuucuua

SEQ ID NO: 1005256 - RNA, 22 nt, Human
aggcaguguguagcuggaagag

SEQ ID NO: 1005257 - RNA, 22 nt, Human
uaaaauagcaugugcagugaaa

SEQ ID NO: 1005258 - RNA, 22 nt, Human
ucugggcuuuaguuuguuaucu

SEQ ID NO: 1005259 - RNA, 22 nt, Human
ccucuccuugcacccgucccgc

SEQ ID NO: 1005260 - RNA, 22 nt, Human
aaacacauuagcccuguggaaa

SEQ ID NO: 1005261 - RNA, 22 nt, Human
cccuuccuugauuuuaacugga

SEQ ID NO: 1005262 - RNA, 22 nt, Human
acuggaaaugagaugauaucag

SEQ ID NO: 1005263 - RNA, 20 nt, Human
ccaggccugggccugcucua

SEQ ID NO: 1005264 - RNA, 22 nt, Human
cauuuucagcacccaucugaaa

SEQ ID NO: 1005265 - RNA, 22 nt, Human
uauaauuuuagaagagauggaa

SEQ ID NO: 1005266 - RNA, 22 nt, Human
uuuaaaauuuagaccucuccac

SEQ ID NO: 1005267 - RNA, 22 nt, Human
gugcaggggccuccccuugcug

SEQ ID NO: 1005268 - RNA, 22 nt, Human
aaauccuaauaaugcacuagug

SEQ ID NO: 1005269 - RNA, 22 nt, Human
uucucauggugucuuuauacau

SEQ ID NO: 1005270 - RNA, 22 nt, Human
caguguuuguauagaauaugca

SEQ ID NO: 1005271 - RNA, 22 nt, Human
cugcaggggccucgagcacagg

SEQ ID NO: 1005272 - RNA, 22 nt, Human
uccaggcuccccugcgugcucc

SEQ ID NO: 1005273 - RNA, 22 nt, Human
gguggcagaggugcaucagccc

SEQ ID NO: 1005274 - RNA, 22 nt, Human
ucugcagaaggaaucagcugag

SEQ ID NO: 1005275 - RNA, 19 nt, Human
acuggcagggcugcggugg

SEQ ID NO: 1005276 - RNA, 22 nt, Human
uauaauuuaucaugucacaguu

SEQ ID NO: 1005277 - RNA, 22 nt, Human
cagcuucuggcguggagccuga

SEQ ID NO: 1005278 - RNA, 22 nt, Human
ggccucaggguugggcccauua

SEQ ID NO: 1005279 - RNA, 22 nt, Human
ccuacauucucugaguuuuccu

SEQ ID NO: 1005280 - RNA, 22 nt, Human
ugggcugagaguaccuuauaaa

SEQ ID NO: 1005281 - RNA, 22 nt, Human
gcacccagccagcaucucagag

SEQ ID NO: 1005282 - RNA, 22 nt, Human
ggguuucaugguucucacaaug

SEQ ID NO: 1005283 - RNA, 22 nt, Human
ucuacuauguuucuuaaauaga

SEQ ID NO: 1005284 - RNA, 22 nt, Human
gcaguguuuguguucucacaug

SEQ ID NO: 1005285 - RNA, 22 nt, Human
gcguccagggaaggcccagcug

SEQ ID NO: 1005286 - RNA, 22 nt, Human
gcuccugggcccugggcuaacu

SEQ ID NO: 1005287 - RNA, 22 nt, Human
gcuggcaggauagaagucuaau

SEQ ID NO: 1005288 - RNA, 22 nt, Human
ucccaggcaaaggcagcucauu

SEQ ID NO: 1005289 - RNA, 22 nt, Human
ccccacaccugccgggcagcag

SEQ ID NO: 1005290 - RNA, 22 nt, Human
ugcauaaacuucucugguguga

SEQ ID NO: 1005291 - RNA, 22 nt, Human
uuccagccaugguuucccuaug

SEQ ID NO: 1005292 - RNA, 22 nt, Human
ccaggcucugcgcuggacaugg

SEQ ID NO: 1005293 - RNA, 22 nt, Human
auucugucuuuuuauacaucua

SEQ ID NO: 1005294 - RNA, 23 nt, Human
uuaggcacuuaguagggccagag

SEQ ID NO: 1005295 - RNA, 22 nt, Human
ugaauccagagcuauuucgucc

SEQ ID NO: 1005296 - RNA, 22 nt, Human
gacacauaugcguauaguuuag

SEQ ID NO: 1005297 - RNA, 22 nt, Human
aauauuuguuaguguuuuaaug

SEQ ID NO: 1005298 - RNA, 22 nt, Human
uuuccuuugcccaauacauguc

SEQ ID NO: 1005299 - RNA, 22 nt, Human
ugcuuuauguuaucagaagggu

SEQ ID NO: 1005300 - RNA, 22 nt, Human
augaaugcugggacaaauauau

SEQ ID NO: 1005301 - RNA, 21 nt, Human
uggccaaacuggagcauuuga

SEQ ID NO: 1005302 - RNA, 22 nt, Human
agaaagaggaugcagaucucau

SEQ ID NO: 1005303 - RNA, 22 nt, Human
aaguaugacauuuaagacaauu

SEQ ID NO: 1005304 - RNA, 22 nt, Human
ugucagaggcucagggucucag

SEQ ID NO: 1005305 - RNA, 21 nt, Human
ucuggcaggcacgggcccagc

SEQ ID NO: 1005306 - RNA, 22 nt, Human
ucauuuaauugguuuugcucgu

SEQ ID NO: 1005307 - RNA, 22 nt, Human
ugauuucuuccuugucauuaga

SEQ ID NO: 1005308 - RNA, 22 nt, Human
gcuccaggcagcauaguggaug

SEQ ID NO: 1005309 - RNA, 22 nt, Human
uccaggcagcccuuccugacuc

SEQ ID NO: 1005310 - RNA, 22 nt, Human
ccaggcucagcuauuaagaaac

SEQ ID NO: 1005311 - RNA, 22 nt, Human
uauguacuacacuagaacauuu

SEQ ID NO: 1005312 - RNA, 22 nt, Human
ccuggcaggacuguuguaagaa

SEQ ID NO: 1005313 - RNA, 22 nt, Human
agaauaugaugguuggagaauu

SEQ ID NO: 1005314 - RNA, 21 nt, Human
uucaaaguuugccuaaagauu

SEQ ID NO: 1005315 - RNA, 22 nt, Human
ucagcuuuugucagaaauugua

SEQ ID NO: 1005316 - RNA, 22 nt, Human
gccaggcagagccccgugcagc

SEQ ID NO: 1005317 - RNA, 22 nt, Human
acaauacuuaccaauguuuuug

SEQ ID NO: 1005318 - RNA, 22 nt, Human
uggccucugggaaagcagauuc

SEQ ID NO: 1005319 - RNA, 22 nt, Human
uuagccauguugaagauuuaga

SEQ ID NO: 1005320 - RNA, 22 nt, Human
uucauaaugagguccuagaggc

SEQ ID NO: 1005321 - RNA, 21 nt, Human
augugaaauaucaucagagca

SEQ ID NO: 1005322 - RNA, 22 nt, Human
acacucucagcuuuucaacuua

SEQ ID NO: 1005323 - RNA, 22 nt, Human
auguccagagccggccugcuga

SEQ ID NO: 1005324 - RNA, 22 nt, Human
ccaggcucugagccucacucuu

SEQ ID NO: 1005325 - RNA, 22 nt, Human
cuauuacauuucuggacauuca

SEQ ID NO: 1005326 - RNA, 22 nt, Human
ucuguuuaggcaaaauagcuac

SEQ ID NO: 1005327 - RNA, 22 nt, Human
gccugcagccucaagggcugag

SEQ ID NO: 1005328 - RNA, 22 nt, Human
gauuuucugagccuucaaauuu

SEQ ID NO: 1005329 - RNA, 22 nt, Human
agggcuccgggcaggcgaugga

SEQ ID NO: 1005330 - RNA, 22 nt, Human
acuccugggugcugaccagcgu

SEQ ID NO: 1005331 - RNA, 20 nt, Human
augggcugguuaggaagugu

SEQ ID NO: 1005332 - RNA, 22 nt, Human
auuucucagugaaaugacaggc

SEQ ID NO: 1005333 - RNA, 22 nt, Human
uuuucauugagcaccugaguaa

SEQ ID NO: 1005334 - RNA, 22 nt, Human
gcuggcagugugaaugacaagc

SEQ ID NO: 1005335 - RNA, 22 nt, Human
uccaggcacuauauauacuuuu

SEQ ID NO: 1005336 - RNA, 22 nt, Human
ucuggcagagucagugcacaca

SEQ ID NO: 1005337 - RNA, 22 nt, Human
auuaaauuaaguggcuaauuua

SEQ ID NO: 1005338 - RNA, 19 nt, Human
ucugcagaaggcauacaug

SEQ ID NO: 1005339 - RNA, 22 nt, Human
cuccaggcucguccaagaucga

SEQ ID NO: 1005340 - RNA, 22 nt, Human
uuaauacaagcauaugcacaca

SEQ ID NO: 1005341 - RNA, 22 nt, Human
caggagcaaggagcagugggau

SEQ ID NO: 1005342 - RNA, 21 nt, Human
uugaccaagggugcgugcucc

SEQ ID NO: 1005343 - RNA, 22 nt, Human
caugaagcuugaagcaguccac

SEQ ID NO: 1005344 - RNA, 22 nt, Human
ccagagaggccaaggucguggu

SEQ ID NO: 1005345 - RNA, 21 nt, Human
ugcauaaagaaauacaaauac

SEQ ID NO: 1005346 - RNA, 22 nt, Human
aucacuguuaucuagaagcaca

SEQ ID NO: 1005347 - RNA, 22 nt, Human
cauguuaaaauauacauucuga

SEQ ID NO: 1005348 - RNA, 22 nt, Human
ucagcucuguguacaguuagca

SEQ ID NO: 1005349 - RNA, 21 nt, Human
aaauuucugcaagccucaacu

SEQ ID NO: 1005350 - RNA, 22 nt, Human
uucugucauuuagcauugucau

SEQ ID NO: 1005351 - RNA, 22 nt, Human
cauuugcagagggugacacucu

SEQ ID NO: 1005352 - RNA, 23 nt, Human
cuuuucauugccuuagcgcagag

SEQ ID NO: 1005353 - RNA, 22 nt, Human
uguuuucauuugauguaacaaa

SEQ ID NO: 1005354 - RNA, 22 nt, Human
augauuucuauauaaacuuaaa

SEQ ID NO: 1005355 - RNA, 22 nt, Human
guagggacuuguuuuacuagua

SEQ ID NO: 1005356 - RNA, 22 nt, Human
ucagggaccccucugaguggag

SEQ ID NO: 1005357 - RNA, 22 nt, Human
acagcuuuuuacuaauagauug

SEQ ID NO: 1005358 - RNA, 18 nt, Human
ggcagggaaaagauaggg

SEQ ID NO: 1005359 - RNA, 22 nt, Human
uguuaggguccugugcaggggc

SEQ ID NO: 1005360 - RNA, 22 nt, Human
uugcagcuucgagucuaucugu

SEQ ID NO: 1005361 - RNA, 22 nt, Human
cuggcacgcccacguaggcacu

SEQ ID NO: 1005362 - RNA, 22 nt, Human
uaaacauuuguuauucuuguuu

SEQ ID NO: 1005363 - RNA, 22 nt, Human
ccuggcuccugccucugcaggg

SEQ ID NO: 1005364 - RNA, 22 nt, Human
ccagagaggggaagggcuugcc

SEQ ID NO: 1005365 - RNA, 22 nt, Human
aagagagaacucccuucgccag

SEQ ID NO: 1005366 - RNA, 22 nt, Human
uuggguaggagaaagaacagau

SEQ ID NO: 1005367 - RNA, 20 nt, Human
guauuaggagguaaauguaa

SEQ ID NO: 1005368 - RNA, 22 nt, Human
ggaccugccagaacucaggcua

SEQ ID NO: 1005369 - RNA, 22 nt, Human
cccaaggccuucaagccagcuc

SEQ ID NO: 1005370 - RNA, 22 nt, Human
gagugcaggccugagcaccauc

SEQ ID NO: 1005371 - RNA, 22 nt, Human
aaugaagcaguccaucugcucu

SEQ ID NO: 1005372 - RNA, 22 nt, Human
agggacccugaugacugaggag

SEQ ID NO: 1005373 - RNA, 22 nt, Human
uucugucacuuaggaggucaua

SEQ ID NO: 1005374 - RNA, 20 nt, Human
uggaaguucuguugcauugg

SEQ ID NO: 1005375 - RNA, 22 nt, Human
ugugaaauucuugaaaugcaca

SEQ ID NO: 1005376 - RNA, 22 nt, Human
gucacacagggccuccaaauca

SEQ ID NO: 1005377 - RNA, 22 nt, Human
guccucuguuuccaucugacuu

SEQ ID NO: 1005378 - RNA, 22 nt, Human
gguuucaaauuaaagucuuaag

SEQ ID NO: 1005379 - RNA, 22 nt, Human
cguaugaaauuuuugacauuug

SEQ ID NO: 1005380 - RNA, 22 nt, Human
aaacagauaaugcuauaaaugg

SEQ ID NO: 1005381 - RNA, 22 nt, Human
guuucauuuacaucuguaggua

SEQ ID NO: 1005382 - RNA, 22 nt, Human
gcagcuuuaaaggaggcucuga

SEQ ID NO: 1005383 - RNA, 22 nt, Human
aggccuuaccauagcuguagca

SEQ ID NO: 1005384 - RNA, 22 nt, Human
augugaaaaauuucuuauuaca

SEQ ID NO: 1005385 - RNA, 22 nt, Human
ggcccagccucagacaugcccu

SEQ ID NO: 1005386 - RNA, 22 nt, Human
uaauaguuaugguugguucuca

SEQ ID NO: 1005387 - RNA, 22 nt, Human
uguguuuugaacucaucuacug

SEQ ID NO: 1005388 - RNA, 22 nt, Human
aaaauccugcugacucgagaug

SEQ ID NO: 1005389 - RNA, 22 nt, Human
ucacacaugcuaagccagagau

SEQ ID NO: 1005390 - RNA, 22 nt, Human
aaaguguggucguucauuuugu

SEQ ID NO: 1005391 - RNA, 22 nt, Human
ugcuuaaaaugaugauuauuuu

SEQ ID NO: 1005392 - RNA, 22 nt, Human
ccuggcugguggcagcgacaag

SEQ ID NO: 1005393 - RNA, 22 nt, Human
ccacccagcagaggaggcaaga

SEQ ID NO: 1005394 - RNA, 22 nt, Human
agggaccucuucuugcagcuga

SEQ ID NO: 1005395 - RNA, 22 nt, Human
uggguacuccuauuaguucagu

SEQ ID NO: 1005396 - RNA, 22 nt, Human
auuagggaaggauuuggccuga

SEQ ID NO: 1005397 - RNA, 22 nt, Human
uaugaagcucucacuguguguc

SEQ ID NO: 1005398 - RNA, 17 nt, Human
gaauuucuuggucaaaa

SEQ ID NO: 1005399 - RNA, 22 nt, Human
ucaagagaaggggaaauagacu

SEQ ID NO: 1005400 - RNA, 22 nt, Human
ugcaggcuccaugaggacaggc

SEQ ID NO: 1005401 - RNA, 22 nt, Human
gcuccaggaggaugaccuuccu

SEQ ID NO: 1005402 - RNA, 22 nt, Human
uuguaugaucaaaagaaaugua

SEQ ID NO: 1005403 - RNA, 22 nt, Human
cacauacaaggcacacuggagg

SEQ ID NO: 1005404 - RNA, 22 nt, Human
ucccaggcuaggccucugcguu

SEQ ID NO: 1005405 - RNA, 22 nt, Human
uuggaaauacagcaguuacuuu

SEQ ID NO: 1005406 - RNA, 22 nt, Human
ccugcagguugcagaggcggaa

SEQ ID NO: 1005407 - RNA, 22 nt, Human
ugcuucugucucuuaugccuug

SEQ ID NO: 1005408 - RNA, 22 nt, Human
uuagaacugaagaagauuaagg

SEQ ID NO: 1005409 - RNA, 22 nt, Human
aucagagaccggucaagucaug

SEQ ID NO: 1005410 - RNA, 22 nt, Human
uuucacauguggaaugccaggu

SEQ ID NO: 1005411 - RNA, 22 nt, Human
cuccagggaugagacagaguag

SEQ ID NO: 1005412 - RNA, 22 nt, Human
cugcagccuccuccagcuacgu

SEQ ID NO: 1005413 - RNA, 22 nt, Human
uccaggcucuaggcugcucucc

SEQ ID NO: 1005414 - RNA, 20 nt, Human
guggcaggcagugaaggagc

SEQ ID NO: 1005415 - RNA, 22 nt, Human
cacuuagucucaccaguucagu

SEQ ID NO: 1005416 - RNA, 22 nt, Human
auucugucauuucaagaaaaac

SEQ ID NO: 1005417 - RNA, 19 nt, Human
uggcagguagugagcaguc

SEQ ID NO: 1005418 - RNA, 22 nt, Human
agcccagcuuugaaccauauca

SEQ ID NO: 1005419 - RNA, 23 nt, Human
gcugacugugaaauucuggagcu

SEQ ID NO: 1005420 - RNA, 21 nt, Human
ucacguggucacaugagcuuu

SEQ ID NO: 1005421 - RNA, 17 nt, Human
uuuagaauacaauguuu

SEQ ID NO: 1005422 - RNA, 22 nt, Human
uguauacaggauuacucauagc

SEQ ID NO: 1005423 - RNA, 22 nt, Human
auguccagccaaccacuggauu

SEQ ID NO: 1005424 - RNA, 22 nt, Human
cucauuaaaggaaaucaccugc

SEQ ID NO: 1005425 - RNA, 22 nt, Human
uucugucagcgucagaaauucu

SEQ ID NO: 1005426 - RNA, 22 nt, Human
gcugggcugagcuagacuuggc

SEQ ID NO: 1005427 - RNA, 22 nt, Human
uaugaacauguucauugacuua

SEQ ID NO: 1005428 - RNA, 23 nt, Human
acugggcuuaugaggaggcuugu

SEQ ID NO: 1005429 - RNA, 22 nt, Human
auuucauacuaaggcucaaaaa

SEQ ID NO: 1005430 - RNA, 22 nt, Human
auccaggcgaaugcagaaggcc

SEQ ID NO: 1005431 - RNA, 22 nt, Human
cuggcaguauuaagagaaguga

SEQ ID NO: 1005432 - RNA, 22 nt, Human
ucaucaguguccuuaucacuua

SEQ ID NO: 1005433 - RNA, 22 nt, Human
augcuacagcaucucucaucag

SEQ ID NO: 1005434 - RNA, 22 nt, Human
gaggguggccuuuagagcccau

SEQ ID NO: 1005435 - RNA, 22 nt, Human
agcaggcuuaugguugaaggga

SEQ ID NO: 1005436 - RNA, 22 nt, Human
ccagcccuuagauaaaccuggc

SEQ ID NO: 1005437 - RNA, 22 nt, Human
ucaggcucugccaccuagauua

SEQ ID NO: 1005438 - RNA, 22 nt, Human
acccagcaaagauaaacuuaug

SEQ ID NO: 1005439 - RNA, 19 nt, Human
gcaucagagcagaaggggu

SEQ ID NO: 1005440 - RNA, 22 nt, Human
gcuuuauuuugugagggauuac

SEQ ID NO: 1005441 - RNA, 22 nt, Human
gucacaggcaguaacuaggacc

SEQ ID NO: 1005442 - RNA, 22 nt, Human
uguuagaaguuaaucacuaauu

SEQ ID NO: 1005443 - RNA, 21 nt, Human
ccaggcuccugaggcugguca

SEQ ID NO: 1005444 - RNA, 22 nt, Human
ucccacaccugucuauuccuag

SEQ ID NO: 1005445 - RNA, 22 nt, Human
uccacacacauuucuaugugca

SEQ ID NO: 1005446 - RNA, 22 nt, Human
guccucuggagguuuuuaggug

SEQ ID NO: 1005447 - RNA, 22 nt, Human
uagggcucgggcacaggacagg

SEQ ID NO: 1005448 - RNA, 22 nt, Human
cguguggucccggcaaggcaag

SEQ ID NO: 1005449 - RNA, 22 nt, Human
aaacacaccuuuggaacuguga

SEQ ID NO: 1005450 - RNA, 22 nt, Human
ccugccuguacuagagacccag

SEQ ID NO: 1005451 - RNA, 22 nt, Human
uagggcucagagaaguggggcc

SEQ ID NO: 1005452 - RNA, 22 nt, Human
aauguaugugauuauuccucua

SEQ ID NO: 1005453 - RNA, 22 nt, Human
acucacuuuccauucaagcacc

SEQ ID NO: 1005454 - RNA, 22 nt, Human
gggcuguaggagcuggaauggg

SEQ ID NO: 1005455 - RNA, 22 nt, Human
uguacuaaggcuguguagaugu

SEQ ID NO: 1005456 - RNA, 22 nt, Human
ccugggcuugguuguugagaac

SEQ ID NO: 1005457 - RNA, 22 nt, Human
augacucuuagcuaaagguaag

SEQ ID NO: 1005458 - RNA, 23 nt, Human
ucugggcugagacuuggaagguc

SEQ ID NO: 1005459 - RNA, 22 nt, Human
augcagcuucaggauuaugaug

SEQ ID NO: 1005460 - RNA, 23 nt, Human
gcugggcuuacucuuucagugag

SEQ ID NO: 1005461 - RNA, 22 nt, Human
ugucuuuaaaauuaaacacauc

SEQ ID NO: 1005462 - RNA, 22 nt, Human
uacacaacugacaaccauucug

SEQ ID NO: 1005463 - RNA, 22 nt, Human
uugggaagaauggaggugguua

SEQ ID NO: 1005464 - RNA, 22 nt, Human
uccugagcugccgcaucagcag

SEQ ID NO: 1005465 - RNA, 22 nt, Human
cucugucaggcugcagaugcuc

SEQ ID NO: 1005466 - RNA, 22 nt, Human
ugcagggaggccccgcagcccu

SEQ ID NO: 1005467 - RNA, 22 nt, Human
gucacuguauccagguuccagc

SEQ ID NO: 1005468 - RNA, 22 nt, Human
auugguggugaggacaugccag

SEQ ID NO: 1005469 - RNA, 23 nt, Human
guccucuggagagaaaggcagua

SEQ ID NO: 1005470 - RNA, 22 nt, Human
cagaagaguagcugaacaaguu

SEQ ID NO: 1005471 - RNA, 22 nt, Human
gcuaggagccgcugcacuaggu

SEQ ID NO: 1005472 - RNA, 22 nt, Human
guucuuaagaccacaauaaaaa

SEQ ID NO: 1005473 - RNA, 22 nt, Human
aauugcaacagguagacuuuuc

SEQ ID NO: 1005474 - RNA, 22 nt, Human
aauuagggaaguauuuaguagu

SEQ ID NO: 1005475 - RNA, 22 nt, Human
uggaaacaucucugccuuuauu

SEQ ID NO: 1005476 - RNA, 22 nt, Human
cauucacaucuuguuccaucac

SEQ ID NO: 1005477 - RNA, 22 nt, Human
cugaaccacuaauauuuugauu

SEQ ID NO: 1005478 - RNA, 22 nt, Human
uuccacauuccuuacauucaua

SEQ ID NO: 1005479 - RNA, 22 nt, Human
ucuucaaacugaaaauuuagaa

SEQ ID NO: 1005480 - RNA, 22 nt, Human
cuggggacucauucagagcaua

SEQ ID NO: 1005481 - RNA, 21 nt, Human
uauuugcugccaucuuugagg

SEQ ID NO: 1005482 - RNA, 22 nt, Human
aaucugucguaguaaaaagcag

SEQ ID NO: 1005483 - RNA, 22 nt, Human
cucuuaaagaauguuccagcug

SEQ ID NO: 1005484 - RNA, 22 nt, Human
cuuauuagaaagaaaagacaug

SEQ ID NO: 1005485 - RNA, 22 nt, Human
uccugcagcugaagcucaugug

SEQ ID NO: 1005486 - RNA, 22 nt, Human
ucucuuaauaaguaaauacuga

SEQ ID NO: 1005487 - RNA, 22 nt, Human
ggagacucggguucuagccuug

SEQ ID NO: 1005488 - RNA, 22 nt, Human
cuuauuagaguuguguucuguu

SEQ ID NO: 1005489 - RNA, 22 nt, Human
gguuuauuaaugugaacuguau

SEQ ID NO: 1005490 - RNA, 22 nt, Human
acaggugguagaguggaaagag

SEQ ID NO: 1005491 - RNA, 19 nt, Human
agcauuuggaauucuacac

SEQ ID NO: 1005492 - RNA, 22 nt, Human
guguauaaugcuguuuguacau

SEQ ID NO: 1005493 - RNA, 22 nt, Human
ugcuuuauaggggauugcaggc

SEQ ID NO: 1005494 - RNA, 21 nt, Human
gcccccuggacuccucaucca

SEQ ID NO: 1005495 - RNA, 22 nt, Human
aagggcucugggcuacgcacug

SEQ ID NO: 1005496 - RNA, 18 nt, Human
ucucugaauauuuuaugu

SEQ ID NO: 1005497 - RNA, 22 nt, Human
ggugccaggcuguagucagggu

SEQ ID NO: 1005498 - RNA, 22 nt, Human
agcaggcuuucaagagucuucu

SEQ ID NO: 1005499 - RNA, 22 nt, Human
ccugggcuugcaucugugcugg

SEQ ID NO: 1005500 - RNA, 22 nt, Human
cugccucuauaggaguccacca

SEQ ID NO: 1005501 - RNA, 22 nt, Human
cugguggaggugccaggauuug

SEQ ID NO: 1005502 - RNA, 22 nt, Human
acaggacaggcugggcuagacu

SEQ ID NO: 1005503 - RNA, 22 nt, Human
agcuuuauauuuaaugaauucu

SEQ ID NO: 1005504 - RNA, 22 nt, Human
uucugcaucugaauuuaaguac

SEQ ID NO: 1005505 - RNA, 16 nt, Human
uccaggcauaucugag

SEQ ID NO: 1005506 - RNA, 22 nt, Human
cagggccagagagggcuggcug

SEQ ID NO: 1005507 - RNA, 22 nt, Human
uacauuccuucguuuagagauu

SEQ ID NO: 1005508 - RNA, 22 nt, Human
uaugaacuguacuguacuaagc

SEQ ID NO: 1005509 - RNA, 22 nt, Human
gggcugacaguuuccccugaaa

SEQ ID NO: 1005510 - RNA, 22 nt, Human
cagggccagcgcccaggcccag

SEQ ID NO: 1005511 - RNA, 17 nt, Human
agccugccccaugcugc

SEQ ID NO: 1005512 - RNA, 22 nt, Human
uuccaggcaugucagacauagg

SEQ ID NO: 1005513 - RNA, 22 nt, Human
aguguggcaggaaugacuagaa

SEQ ID NO: 1005514 - RNA, 22 nt, Human
caguguggcugagacagaggcu

SEQ ID NO: 1005515 - RNA, 22 nt, Human
gacacagaauuuacucccgaua

SEQ ID NO: 1005516 - RNA, 22 nt, Human
cagcuuuauuaaugauugucuu

SEQ ID NO: 1005517 - RNA, 22 nt, Human
augcagcugugggcaagaaaug

SEQ ID NO: 1005518 - RNA, 22 nt, Human
ccugggcuguaccugugcgcgg

SEQ ID NO: 1005519 - RNA, 22 nt, Human
cugggcuggauaauucuuugcu

SEQ ID NO: 1005520 - RNA, 22 nt, Human
uuccaagucacccuuaggguca

SEQ ID NO: 1005521 - RNA, 22 nt, Human
uaugcauacaaugagauauucc

SEQ ID NO: 1005522 - RNA, 22 nt, Human
gacacauagaucuaucucacuc

SEQ ID NO: 1005523 - RNA, 17 nt, Human
uuucagauucacuuucu

SEQ ID NO: 1005524 - RNA, 22 nt, Human
cuggccagagguuccucugccc

SEQ ID NO: 1005525 - RNA, 22 nt, Human
caggucuuuucuacugguggag

SEQ ID NO: 1005526 - RNA, 22 nt, Human
ccagcuuucauaucaugaggua

SEQ ID NO: 1005527 - RNA, 22 nt, Human
ugaaugauacagaauuauguag

SEQ ID NO: 1005528 - RNA, 22 nt, Human
ugggcugaggggccuugaugac

SEQ ID NO: 1005529 - RNA, 22 nt, Human
ccagagaccagaacauggggau

SEQ ID NO: 1005530 - RNA, 17 nt, Human
uccaggcauaucuccua

SEQ ID NO: 1005531 - RNA, 22 nt, Human
cauuuauugguuaggccagcag

SEQ ID NO: 1005532 - RNA, 22 nt, Human
aauacugucuuucacagauauu

SEQ ID NO: 1005533 - RNA, 22 nt, Human
ccugggcuuuggaacaguacuu

SEQ ID NO: 1005534 - RNA, 22 nt, Human
accacccauucagaaacacuga

SEQ ID NO: 1005535 - RNA, 23 nt, Human
aauguauguuaguaucuuagaga

SEQ ID NO: 1005536 - RNA, 21 nt, Human
cagcuucuucugugaccuggu

SEQ ID NO: 1005537 - RNA, 22 nt, Human
gaaaacuauuggccuagaacaa

SEQ ID NO: 1005538 - RNA, 22 nt, Human
auguuugaaauuguaaguauau

SEQ ID NO: 1005539 - RNA, 22 nt, Human
cuagggacugggaccuuaguua

SEQ ID NO: 1005540 - RNA, 22 nt, Human
ucuggcaggaccaugaagcgua

SEQ ID NO: 1005541 - RNA, 22 nt, Human
caugaaauugcuccuuuggugc

SEQ ID NO: 1005542 - RNA, 22 nt, Human
guggggacgggauggcucacug

SEQ ID NO: 1005543 - RNA, 22 nt, Human
gcuucuauuauuuggagcugag

SEQ ID NO: 1005544 - RNA, 22 nt, Human
guaugaaguuggacuguauaaa

SEQ ID NO: 1005545 - RNA, 22 nt, Human
uccaggcauguggccaguacuc

SEQ ID NO: 1005546 - RNA, 22 nt, Human
uacauaauugucuuuguccuca

SEQ ID NO: 1005547 - RNA, 23 nt, Human
uggaccugaaccagugccucugu

SEQ ID NO: 1005548 - RNA, 22 nt, Human
aauggcagaggcaaagauggua

SEQ ID NO: 1005549 - RNA, 22 nt, Human
ccagguccuguuuucaccacag

SEQ ID NO: 1005550 - RNA, 22 nt, Human
uggaacacagugauugauagcg

SEQ ID NO: 1005551 - RNA, 22 nt, Human
gggcugacaaccaucugacaag

SEQ ID NO: 1005552 - RNA, 22 nt, Human
gggaccuggcgagggucacaca

SEQ ID NO: 1005553 - RNA, 22 nt, Human
aacaugauggggaagaacaaga

SEQ ID NO: 1005554 - RNA, 22 nt, Human
uuccaaguuaggcgagcuggug

SEQ ID NO: 1005555 - RNA, 22 nt, Human
cagugagggaagaucucagcac

SEQ ID NO: 1005556 - RNA, 22 nt, Human
aggcugugacagggucauggag

SEQ ID NO: 1005557 - RNA, 19 nt, Human
aggugagugugggaaaggg

SEQ ID NO: 1005558 - RNA, 22 nt, Human
ccacacagggggaugaguuauu

SEQ ID NO: 1005559 - RNA, 22 nt, Human
gagaggcuggcagugccagguu

SEQ ID NO: 1005560 - RNA, 22 nt, Human
ucuggcagaucuucccacguuu

SEQ ID NO: 1005561 - RNA, 22 nt, Human
ccugccuucagcccugaagucu

SEQ ID NO: 1005562 - RNA, 21 nt, Human
agaaaauggcguuuuagauuu

SEQ ID NO: 1005563 - RNA, 22 nt, Human
ugcagagagaccccugggccag

SEQ ID NO: 1005564 - RNA, 22 nt, Human
caaagagcuguucagugucgcu

SEQ ID NO: 1005565 - RNA, 22 nt, Human
auacacauauguguguauaugu

SEQ ID NO: 1005566 - RNA, 22 nt, Human
uuuauugacccaaagcgagagu

SEQ ID NO: 1005567 - RNA, 22 nt, Human
uuaaacauuuauggaggcagca

SEQ ID NO: 1005568 - RNA, 22 nt, Human
agcaaucaccaccucuauauuu

SEQ ID NO: 1005569 - RNA, 22 nt, Human
aggacacacagaauacaaaucc

SEQ ID NO: 1005570 - RNA, 22 nt, Human
cuuaaauuggaugaguuaaguu

SEQ ID NO: 1005571 - RNA, 22 nt, Human
ccagagagaaaauggagggcca

SEQ ID NO: 1005572 - RNA, 22 nt, Human
aaguuucaaauguugauuaugc

SEQ ID NO: 1005573 - RNA, 22 nt, Human
guugggaagcagauggaugagc

SEQ ID NO: 1005574 - RNA, 22 nt, Human
ucacaauauuuaucuuccaauu

SEQ ID NO: 1005575 - RNA, 22 nt, Human
caucuuuucagaagccauucug

SEQ ID NO: 1005576 - RNA, 17 nt, Human
ccagagaguaguuagga

SEQ ID NO: 1005577 - RNA, 22 nt, Human
ucaucacauaugucaugauuug

SEQ ID NO: 1005578 - RNA, 22 nt, Human
gcccacaccauuuauucuuugu

SEQ ID NO: 1005579 - RNA, 22 nt, Human
uuuaauuuucugggcccagcag

SEQ ID NO: 1005580 - RNA, 22 nt, Human
uccaggcaaggauaauaaacau

SEQ ID NO: 1005581 - RNA, 22 nt, Human
ucuggcagggucagggcccagg

SEQ ID NO: 1005582 - RNA, 22 nt, Human
gagacaucauaaugaaguuucc

SEQ ID NO: 1005583 - RNA, 22 nt, Human
ugcuucuguauugaaauuguua

SEQ ID NO: 1005584 - RNA, 22 nt, Human
cagaguuuugugaacaacuugg

SEQ ID NO: 1005585 - RNA, 22 nt, Human
acacacucaauugcauaagcac

SEQ ID NO: 1005586 - RNA, 22 nt, Human
agggacccauagagagaccagu

SEQ ID NO: 1005587 - RNA, 22 nt, Human
ugggcuucugauguugagugcu

SEQ ID NO: 1005588 - RNA, 22 nt, Human
cuugggcucagacuugaggaca

SEQ ID NO: 1005589 - RNA, 22 nt, Human
gccuggcaggccuguuggggcu

SEQ ID NO: 1005590 - RNA, 22 nt, Human
gugggcuuuugacagugccugg

SEQ ID NO: 1005591 - RNA, 22 nt, Human
auauuagguuggugcaaaagua

SEQ ID NO: 1005592 - RNA, 22 nt, Human
caugaaugcuggguucauguaa

SEQ ID NO: 1005593 - RNA, 22 nt, Human
uacccagcaaucccuagagguu

SEQ ID NO: 1005594 - RNA, 22 nt, Human
aauugcaauuuucuuaaggucu

SEQ ID NO: 1005595 - RNA, 22 nt, Human
ggggcuccagucuucacauuuu

SEQ ID NO: 1005596 - RNA, 22 nt, Human
ugccagccagggaagcucaccc

SEQ ID NO: 1005597 - RNA, 22 nt, Human
gcuggcagucccaucagcuggg

SEQ ID NO: 1005598 - RNA, 22 nt, Human
ucugauuagcaguuuagggaaa

SEQ ID NO: 1005599 - RNA, 22 nt, Human
guccucuguguaggcugcagac

SEQ ID NO: 1005600 - RNA, 18 nt, Human
ucaggcucucuggcuaga

SEQ ID NO: 1005601 - RNA, 22 nt, Human
gugcuaaaggguuaugaacaag

SEQ ID NO: 1005602 - RNA, 20 nt, Human
aaaggaauauaugaaguaua

SEQ ID NO: 1005603 - RNA, 22 nt, Human
acacacagcgccuaccaugugc

SEQ ID NO: 1005604 - RNA, 22 nt, Human
uuguaugagcuccaggaacuca

SEQ ID NO: 1005605 - RNA, 22 nt, Human
uagcuuuagugaaaaauaucag

SEQ ID NO: 1005606 - RNA, 22 nt, Human
agggcugaagggaggugcucau

SEQ ID NO: 1005607 - RNA, 22 nt, Human
uucagagagaaaccagugggaa

SEQ ID NO: 1005608 - RNA, 22 nt, Human
ugcaggcuggaggagggacuaa

SEQ ID NO: 1005609 - RNA, 22 nt, Human
ucccagccuuccagucugguuu

SEQ ID NO: 1005610 - RNA, 20 nt, Human
cuggggacagcaauggcugu

SEQ ID NO: 1005611 - RNA, 22 nt, Human
cccagcuugcccaggacugagg

SEQ ID NO: 1005612 - RNA, 22 nt, Human
gugugaaagcuuguccucugua

SEQ ID NO: 1005613 - RNA, 22 nt, Human
ggcuuuauuaagcaggguaagu

SEQ ID NO: 1005614 - RNA, 22 nt, Human
cagaugaggggcauauaacaau

SEQ ID NO: 1005615 - RNA, 22 nt, Human
ugagaaaugggucugcugaaga

SEQ ID NO: 1005616 - RNA, 22 nt, Human
cagccucugagccuuggcagau

SEQ ID NO: 1005617 - RNA, 22 nt, Human
uggcgucucucauaaguaugug

SEQ ID NO: 1005618 - RNA, 22 nt, Human
ccagccucacuggcaucaccua

SEQ ID NO: 1005619 - RNA, 22 nt, Human
uucugucacagugcugguauca

SEQ ID NO: 1005620 - RNA, 22 nt, Human
uguaggaaaaacaaugaucugc

SEQ ID NO: 1005621 - RNA, 22 nt, Human
uuucauaauagugcaguuuguu

SEQ ID NO: 1005622 - RNA, 22 nt, Human
uccccaccccagaacuacuagg

SEQ ID NO: 1005623 - RNA, 22 nt, Human
gugauaaagacgugucauaauu

SEQ ID NO: 1005624 - RNA, 22 nt, Human
uaacuuucacaucacacugacu

SEQ ID NO: 1005625 - RNA, 20 nt, Human
cugcagggugagugggcgau

SEQ ID NO: 1005626 - RNA, 22 nt, Human
gccuccuguuaugccaugugcc

SEQ ID NO: 1005627 - RNA, 22 nt, Human
guucugggaagguggaccuguu

SEQ ID NO: 1005628 - RNA, 22 nt, Human
uaggccauucuuggagcuuacu

SEQ ID NO: 1005629 - RNA, 22 nt, Human
cucccagguuccgacgccucuu

SEQ ID NO: 1005630 - RNA, 22 nt, Human
cuaggaaugguaccucuuacaa

SEQ ID NO: 1005631 - RNA, 22 nt, Human
ugcuuuauggauuuguguccug

SEQ ID NO: 1005632 - RNA, 22 nt, Human
ccuuuauucaauuaguccuaau

SEQ ID NO: 1005633 - RNA, 22 nt, Human
acagcuuuuaugggaccagcca

SEQ ID NO: 1005634 - RNA, 22 nt, Human
gcaaguacaaacgcaucggcug

SEQ ID NO: 1005635 - RNA, 22 nt, Human
ccugggcuggaguacagcagug

SEQ ID NO: 1005636 - RNA, 22 nt, Human
gccugcagaacugugaggcaau

SEQ ID NO: 1005637 - RNA, 19 nt, Human
uccaggcauccuucaggcu

SEQ ID NO: 1005638 - RNA, 22 nt, Human
agagugaaguucaucgugcagc

SEQ ID NO: 1005639 - RNA, 22 nt, Human
ucagggacugcagagggaagcu

SEQ ID NO: 1005640 - RNA, 22 nt, Human
ucuggcaggcaaucggcucugg

SEQ ID NO: 1005641 - RNA, 22 nt, Human
uauuaaauuauggauuuaggag

SEQ ID NO: 1005642 - RNA, 22 nt, Human
aggacaguccgggguccuccac

SEQ ID NO: 1005643 - RNA, 22 nt, Human
uauguaaaguagauggcaggua

SEQ ID NO: 1005644 - RNA, 22 nt, Human
acugccaaugguaguuugaugg

SEQ ID NO: 1005645 - RNA, 22 nt, Human
cacaggccugucucuuucuaac

SEQ ID NO: 1005646 - RNA, 22 nt, Human
auguaugagagauucuuuuauu

SEQ ID NO: 1005647 - RNA, 22 nt, Human
uuguuucaggaugguuuguuac

SEQ ID NO: 1005648 - RNA, 22 nt, Human
aucugggggagcugcucaugga

SEQ ID NO: 1005649 - RNA, 22 nt, Human
ucuuugaugugguuaauuauga

SEQ ID NO: 1005650 - RNA, 19 nt, Human
uccugcagguggcuugcag

SEQ ID NO: 1005651 - RNA, 22 nt, Human
gcacccaggcuugggcagcaac

SEQ ID NO: 1005652 - RNA, 22 nt, Human
ccugggcucaagcgaucuuguc

SEQ ID NO: 1005653 - RNA, 22 nt, Human
cucaaauauaagcuaaaugugg

SEQ ID NO: 1005654 - RNA, 22 nt, Human
ccugggcuccacuccaagagca

SEQ ID NO: 1005655 - RNA, 22 nt, Human
cacaugcaucugucauguuugg

SEQ ID NO: 1005656 - RNA, 22 nt, Human
aauuacuuaagagaaacuuuga

SEQ ID NO: 1005657 - RNA, 22 nt, Human
auuuauuaugggauuuggcuca

SEQ ID NO: 1005658 - RNA, 22 nt, Human
gccugcagccucagagaauuuu

SEQ ID NO: 1005659 - RNA, 22 nt, Human
gugaaacacccuccaaugcaca

SEQ ID NO: 1005660 - RNA, 22 nt, Human
uuccaagugcccauauuucauc

SEQ ID NO: 1005661 - RNA, 22 nt, Human
uccugagccugacaaucaccau

SEQ ID NO: 1005662 - RNA, 22 nt, Human
uuaaauuccagccucauaauag

SEQ ID NO: 1005663 - RNA, 22 nt, Human
ucugcucugggccagcuauuaa

SEQ ID NO: 1005664 - RNA, 22 nt, Human
cuuaauuuuuguaguagaugga

SEQ ID NO: 1005665 - RNA, 22 nt, Human
agcucugacugaagagaugcaa

SEQ ID NO: 1005666 - RNA, 22 nt, Human
ugucuucaguaaaauacacuau

SEQ ID NO: 1005667 - RNA, 22 nt, Human
auucacaugugcuucuuaucac

SEQ ID NO: 1005668 - RNA, 22 nt, Human
aaauuauuaugccccucuauaa

SEQ ID NO: 1005669 - RNA, 22 nt, Human
caggaguggugugagggacucc

SEQ ID NO: 1005670 - RNA, 17 nt, Human
ucugcagaggcaaaccu

SEQ ID NO: 1005671 - RNA, 22 nt, Human
aguuagaauagucagauuguag

SEQ ID NO: 1005672 - RNA, 22 nt, Human
cuucuggguaauucuucuucau

SEQ ID NO: 1005673 - RNA, 22 nt, Human
gcugggcucugucaugccuucc

SEQ ID NO: 1005674 - RNA, 22 nt, Human
cgggcuccgggucuuugcaguc

SEQ ID NO: 1005675 - RNA, 22 nt, Human
aaauccuaccaagaaauucccu

SEQ ID NO: 1005676 - RNA, 22 nt, Human
uacuuacacagcuguagaaggu

SEQ ID NO: 1005677 - RNA, 22 nt, Human
uuuacucuugcuacacaacugu

SEQ ID NO: 1005678 - RNA, 22 nt, Human
guguuuuaucagacaaaguaua

SEQ ID NO: 1005679 - RNA, 22 nt, Human
ccaggaccuggagcucuaugaa

SEQ ID NO: 1005680 - RNA, 22 nt, Human
ggcucccaggagggccuggagg

SEQ ID NO: 1005681 - RNA, 22 nt, Human
guccucuggugaaagcauuccc

SEQ ID NO: 1005682 - RNA, 22 nt, Human
gacacagagcucacagucuccu

SEQ ID NO: 1005683 - RNA, 21 nt, Human
uaaauaauaaguugcugagau

SEQ ID NO: 1005684 - RNA, 20 nt, Human
aaagagcccuuggagcaggc

SEQ ID NO: 1005685 - RNA, 22 nt, Human
auucucaguucacuaguuucuu

SEQ ID NO: 1005686 - RNA, 22 nt, Human
gccaaaucuggauuuagcaaga

SEQ ID NO: 1005687 - RNA, 22 nt, Human
ucuuaaaccacaaaauucagag

SEQ ID NO: 1005688 - RNA, 22 nt, Human
ugcuucuggcuuaucucgugcc

SEQ ID NO: 1005689 - RNA, 20 nt, Human
cccaggcagagcuagcggca

SEQ ID NO: 1005690 - RNA, 22 nt, Human
aaguguuuauuuauaacgaucu

SEQ ID NO: 1005691 - RNA, 22 nt, Human
aaaguucuaaaacucuuuguga

SEQ ID NO: 1005692 - RNA, 22 nt, Human
uacaaagucacauugaaaugaa

SEQ ID NO: 1005693 - RNA, 22 nt, Human
ucaggguugcugugaucagucc

SEQ ID NO: 1005694 - RNA, 22 nt, Human
caugaaaucugaguauguuucc

SEQ ID NO: 1005695 - RNA, 22 nt, Human
agccauccucccaccucagccu

SEQ ID NO: 1005696 - RNA, 22 nt, Human
aggacaguguggaagagggugc

SEQ ID NO: 1005697 - RNA, 22 nt, Human
aauagauacuacuuagauguag

SEQ ID NO: 1005698 - RNA, 22 nt, Human
gaaacaugucugacaauuuacc

SEQ ID NO: 1005699 - RNA, 22 nt, Human
acagacuggccugucucgcacc

SEQ ID NO: 1005700 - RNA, 22 nt, Human
gagggcucaacuacuacuaggc

SEQ ID NO: 1005701 - RNA, 22 nt, Human
cagagaaagggugaauuccuuc

SEQ ID NO: 1005702 - RNA, 23 nt, Human
cacacccaucacuaagagcuccu

SEQ ID NO: 1005703 - RNA, 22 nt, Human
acagcucuguugccagaucugc

SEQ ID NO: 1005704 - RNA, 19 nt, Human
ccugccugagcugucccuc

SEQ ID NO: 1005705 - RNA, 22 nt, Human
cuacccagcaccuaggcugccu

SEQ ID NO: 1005706 - RNA, 22 nt, Human
cagcuuuggcccagucgggagg

SEQ ID NO: 1005707 - RNA, 22 nt, Human
uuauucagucugucuagggagu

SEQ ID NO: 1005708 - RNA, 22 nt, Human
cuccugaggacuucuauugggu

SEQ ID NO: 1005709 - RNA, 22 nt, Human
guaaaauugcaauuacuuuugc

SEQ ID NO: 1005710 - RNA, 22 nt, Human
cucuccaggacuuuggcccaau

SEQ ID NO: 1005711 - RNA, 22 nt, Human
gggguggccaaggacucugacc

SEQ ID NO: 1005712 - RNA, 22 nt, Human
gauggccuggguccccuuccgg

SEQ ID NO: 1005713 - RNA, 22 nt, Human
gaaauauucuugucuuguuuuc

SEQ ID NO: 1005714 - RNA, 22 nt, Human
ccccuguguuguucaaggguca

SEQ ID NO: 1005715 - RNA, 22 nt, Human
cuuucauuugauaagaaugcca

SEQ ID NO: 1005716 - RNA, 22 nt, Human
agcuuuauauaaaagaguacau

SEQ ID NO: 1005717 - RNA, 22 nt, Human
uaaaguuuggcagacaauaaca

SEQ ID NO: 1005718 - RNA, 22 nt, Human
caggauggucucgaucuccuga

SEQ ID NO: 1005719 - RNA, 22 nt, Human
uauacaaugaguacauucuggg

SEQ ID NO: 1005720 - RNA, 22 nt, Human
uacccagcccaugccuaccuca

SEQ ID NO: 1005721 - RNA, 22 nt, Human
auuauuagacuuauaugguagu

SEQ ID NO: 1005722 - RNA, 22 nt, Human
gcucucagaugcuccagcagcc

SEQ ID NO: 1005723 - RNA, 22 nt, Human
uuuucauuguaaaucaggaaac

SEQ ID NO: 1005724 - RNA, 22 nt, Human
cugcagggagaggggacagccu

SEQ ID NO: 1005725 - RNA, 22 nt, Human
accaugaucugcucugguguuu

SEQ ID NO: 1005726 - RNA, 22 nt, Human
ugucuuuagaaagaagcagaca

SEQ ID NO: 1005727 - RNA, 22 nt, Human
cgcugauaaacgucacguuccc

SEQ ID NO: 1005728 - RNA, 22 nt, Human
cuccagugagugagcaggcgac

SEQ ID NO: 1005729 - RNA, 22 nt, Human
gaggagggagcuggaagcucuu

SEQ ID NO: 1005730 - RNA, 22 nt, Human
uccaggcaaagugcugggcugc

SEQ ID NO: 1005731 - RNA, 22 nt, Human
auauauuuacucuccuguugca

SEQ ID NO: 1005732 - RNA, 22 nt, Human
uuccaagugaaaguagcuuugu

SEQ ID NO: 1005733 - RNA, 19 nt, Human
ccuugccugucccugcagc

SEQ ID NO: 1005734 - RNA, 22 nt, Human
uaacacauaucuacaacaugug

SEQ ID NO: 1005735 - RNA, 22 nt, Human
uuucuuauacuauauugucauc

SEQ ID NO: 1005736 - RNA, 22 nt, Human
aggccccaaagcagugcaagua

SEQ ID NO: 1005737 - RNA, 22 nt, Human
ucccaggcuggcaggcagcagu

SEQ ID NO: 1005738 - RNA, 22 nt, Human
acagguggaggcuuuaggaggu

SEQ ID NO: 1005739 - RNA, 22 nt, Human
ucacuguaaaguaauacuguca

SEQ ID NO: 1005740 - RNA, 21 nt, Human
cagacccucuagaggccaccu

SEQ ID NO: 1005741 - RNA, 22 nt, Human
uucaagauggccccagugagcc

SEQ ID NO: 1005742 - RNA, 22 nt, Human
uucuggggccccaguguccucg

SEQ ID NO: 1005743 - RNA, 22 nt, Human
ugcauguuaagaaaauauugag

SEQ ID NO: 1005744 - RNA, 22 nt, Human
uguuccaauaaggaguugaaau

SEQ ID NO: 1005745 - RNA, 22 nt, Human
uuggcuucuugugaaaucugag

SEQ ID NO: 1005746 - RNA, 22 nt, Human
ucccugugagaaaugaagcagg

SEQ ID NO: 1005747 - RNA, 22 nt, Human
aaguuucauuguucauguaaca

SEQ ID NO: 1005748 - RNA, 22 nt, Human
cagcccaggccgacaguuccuc

SEQ ID NO: 1005749 - RNA, 22 nt, Human
uucuuugcccuuaaugaaauaa

SEQ ID NO: 1005750 - RNA, 22 nt, Human
ggggaccuggccacccauccuu

SEQ ID NO: 1005751 - RNA, 22 nt, Human
uccaggcaaaaaccaacuacag

SEQ ID NO: 1005752 - RNA, 22 nt, Human
uccaggcauuggagagauaaug

SEQ ID NO: 1005753 - RNA, 19 nt, Human
uuuacucuccaaggugagu

SEQ ID NO: 1005754 - RNA, 22 nt, Human
cucugaauggacacuccagugu

SEQ ID NO: 1005755 - RNA, 22 nt, Human
uccugcagccacugcaggcaga

SEQ ID NO: 1005756 - RNA, 21 nt, Human
acacacugaguuuuccacugu

SEQ ID NO: 1005757 - RNA, 22 nt, Human
ccagcucucaaggcucccuggg

SEQ ID NO: 1005758 - RNA, 23 nt, Human
aaacaugcagcacaugaaugcua

SEQ ID NO: 1005759 - RNA, 22 nt, Human
ucccuccuggccgucaccgcug

SEQ ID NO: 1005760 - RNA, 22 nt, Human
guggcagggcuuugcuguucuu

SEQ ID NO: 1005761 - RNA, 19 nt, Human
cacacccaugcuugccaag

SEQ ID NO: 1005762 - RNA, 22 nt, Human
ugggcuccucgucacucgcugu

SEQ ID NO: 1005763 - RNA, 22 nt, Human
agauauguuuguauauauuugu

SEQ ID NO: 1005764 - RNA, 22 nt, Human
auucacaguuuccucauauucu

SEQ ID NO: 1005765 - RNA, 22 nt, Human
ccuggggauucugacacggagu

SEQ ID NO: 1005766 - RNA, 22 nt, Human
uuccaagucuaaguuauaaauc

SEQ ID NO: 1005767 - RNA, 22 nt, Human
uagauauguguuuauuaugcug

SEQ ID NO: 1005768 - RNA, 22 nt, Human
accaggcagagcugggccuuaa

SEQ ID NO: 1005769 - RNA, 22 nt, Human
acagagagaggcccgaggcugc

SEQ ID NO: 1005770 - RNA, 22 nt, Human
acugggcuuauuucuugugaac

SEQ ID NO: 1005771 - RNA, 22 nt, Human
uuuuucuuaaauguggguuggc

SEQ ID NO: 1005772 - RNA, 22 nt, Human
caggcagcugacugucagauau

SEQ ID NO: 1005773 - RNA, 18 nt, Human
cccucuugcacaaagcaa

SEQ ID NO: 1005774 - RNA, 22 nt, Human
uugucaaguaaggcugacauuu

SEQ ID NO: 1005775 - RNA, 22 nt, Human
uccaggagaggccugaccaggu

SEQ ID NO: 1005776 - RNA, 22 nt, Human
ucagcuuugggggucucaggag

SEQ ID NO: 1005777 - RNA, 20 nt, Human
cccagagccauagccagaca

SEQ ID NO: 1005778 - RNA, 22 nt, Human
aaguaugugauacauguuaauu

SEQ ID NO: 1005779 - RNA, 18 nt, Human
cuacauucauaggaaagg

SEQ ID NO: 1005780 - RNA, 22 nt, Human
agacuucuuugugagcauuuuc

SEQ ID NO: 1005781 - RNA, 22 nt, Human
uuaaauauuuucagcaggguca

SEQ ID NO: 1005782 - RNA, 22 nt, Human
uuucacauaaauauuaugccua

SEQ ID NO: 1005783 - RNA, 22 nt, Human
acccaggguagaaccucagagc

SEQ ID NO: 1005784 - RNA, 21 nt, Human
guacacacagguggaugggcu

SEQ ID NO: 1005785 - RNA, 22 nt, Human
aaauuucuguuguuuugagcca

SEQ ID NO: 1005786 - RNA, 22 nt, Human
gggcuaggcuuggccagcacug

SEQ ID NO: 1005787 - RNA, 22 nt, Human
ugggcagggagcuggaaccaca

SEQ ID NO: 1005788 - RNA, 23 nt, Human
acaggcucuuaaucagugcuccu

SEQ ID NO: 1005789 - RNA, 22 nt, Human
ugcaggcuggcagugcugaaau

SEQ ID NO: 1005790 - RNA, 20 nt, Human
agcauuugaaauaugacuau

SEQ ID NO: 1005791 - RNA, 22 nt, Human
aaguauuucguucugaaaaagu

SEQ ID NO: 1005792 - RNA, 22 nt, Human
uuugcuuguucaagauuucugu

SEQ ID NO: 1005793 - RNA, 20 nt, Human
auacacaugcagacagaugc

SEQ ID NO: 1005794 - RNA, 22 nt, Human
ucugggcugaaaugaaggccuu

SEQ ID NO: 1005795 - RNA, 22 nt, Human
uagcuuuaaugaguugguaaga

SEQ ID NO: 1005796 - RNA, 22 nt, Human
cccugcagugugaccucaccua

SEQ ID NO: 1005797 - RNA, 22 nt, Human
ucugcagauuuaucagcagcug

SEQ ID NO: 1005798 - RNA, 22 nt, Human
gaggagcucugcuccauccuuc

SEQ ID NO: 1005799 - RNA, 22 nt, Human
ccugggcugcucauggggauga

SEQ ID NO: 1005800 - RNA, 22 nt, Human
cagagggcucggcggccgcucc

SEQ ID NO: 1005801 - RNA, 17 nt, Human
gcaucacagauaacacg

SEQ ID NO: 1005802 - RNA, 19 nt, Human
cagcccucuuaccacugug

SEQ ID NO: 1005803 - RNA, 22 nt, Human
cuguaaauaugaagaauauaug

SEQ ID NO: 1005804 - RNA, 20 nt, Human
gccugcagagaaggucagag

SEQ ID NO: 1005805 - RNA, 22 nt, Human
gcacccagcccagggcgugaug

SEQ ID NO: 1005806 - RNA, 22 nt, Human
auggcagacgaggcagcagggg

SEQ ID NO: 1005807 - RNA, 22 nt, Human
gggccccuuguaucucuggcuc

SEQ ID NO: 1005808 - RNA, 22 nt, Human
augggcugagaaucaagaauau

SEQ ID NO: 1005809 - RNA, 22 nt, Human
uuaggaauauuuucugaguagu

SEQ ID NO: 1005810 - RNA, 18 nt, Human
uccuggcagucagagagg

SEQ ID NO: 1005811 - RNA, 23 nt, Human
ugcagggcaaguuagagacccca

SEQ ID NO: 1005812 - RNA, 22 nt, Human
acacacagaaggaagccccacu

SEQ ID NO: 1005813 - RNA, 22 nt, Human
cagauuuagaguggggcuugga

SEQ ID NO: 1005814 - RNA, 22 nt, Human
cuccaggguuccccgauccacu

SEQ ID NO: 1005815 - RNA, 22 nt, Human
ugcuuuauugcaucaguguggg

SEQ ID NO: 1005816 - RNA, 22 nt, Human
aaaguuugucacuuggcuagaa

SEQ ID NO: 1005817 - RNA, 22 nt, Human
ccaggcccaggguacugaccaa

SEQ ID NO: 1005818 - RNA, 22 nt, Human
ugcuuuauucagucucugccau

SEQ ID NO: 1005819 - RNA, 22 nt, Human
ccuggcaguuuugcccaggauu

SEQ ID NO: 1005820 - RNA, 22 nt, Human
uauauguaagcuauguaagagu

SEQ ID NO: 1005821 - RNA, 22 nt, Human
ugugaaaagggcuuuguacaaa

SEQ ID NO: 1005822 - RNA, 22 nt, Human
cacauacuuguguguacauaug

SEQ ID NO: 1005823 - RNA, 22 nt, Human
auuaagggccaauccuccagcc

SEQ ID NO: 1005824 - RNA, 21 nt, Human
ugucagagcuuguaggacauu

SEQ ID NO: 1005825 - RNA, 22 nt, Human
acagcuuuaguguggguggugc

SEQ ID NO: 1005826 - RNA, 22 nt, Human
cauaauuucccaagagauugaa

SEQ ID NO: 1005827 - RNA, 22 nt, Human
cagggcuccccgcaccgcagcc

SEQ ID NO: 1005828 - RNA, 22 nt, Human
ccccacccaccuaagagaaacu

SEQ ID NO: 1005829 - RNA, 21 nt, Human
uccugcagaaugccuuccuac

SEQ ID NO: 1005830 - RNA, 22 nt, Human
cucagagaaaaggagcaagggu

SEQ ID NO: 1005831 - RNA, 22 nt, Human
acauacuuaugcuaaaaauaua

SEQ ID NO: 1005832 - RNA, 22 nt, Human
cagagcauuaaaaccagcucug

SEQ ID NO: 1005833 - RNA, 22 nt, Human
cuggcagucugguggaaggccu

SEQ ID NO: 1005834 - RNA, 22 nt, Human
uacauguuugguaaaugauggc

SEQ ID NO: 1005835 - RNA, 22 nt, Human
uuuaauuuuccugguaggccug

SEQ ID NO: 1005836 - RNA, 22 nt, Human
ucagagaguuuucacuagggug

SEQ ID NO: 1005837 - RNA, 22 nt, Human
gagaggcugaaaucacaggagc

SEQ ID NO: 1005838 - RNA, 22 nt, Human
caguguggagggagagagccug

SEQ ID NO: 1005839 - RNA, 22 nt, Human
ugcaggcuguaaucugaggcua

SEQ ID NO: 1005840 - RNA, 22 nt, Human
ugcaaaauaaugaacgauuuuu

SEQ ID NO: 1005841 - RNA, 22 nt, Human
ugggaccucucuugagagagca

SEQ ID NO: 1005842 - RNA, 22 nt, Human
caguuuauuuccaagaugacaa

SEQ ID NO: 1005843 - RNA, 17 nt, Human
cccaggccgccgggagc

SEQ ID NO: 1005844 - RNA, 22 nt, Human
augacaugaccugguagagaca

SEQ ID NO: 1005845 - RNA, 22 nt, Human
cccagcuugucugauucagccu

SEQ ID NO: 1005846 - RNA, 22 nt, Human
guuucauuaccugacccaugag

SEQ ID NO: 1005847 - RNA, 22 nt, Human
uacccagggcuuuucugaugca

SEQ ID NO: 1005848 - RNA, 22 nt, Human
aaacaucaccauuuuaccuaau

SEQ ID NO: 1005849 - RNA, 22 nt, Human
ucuccgaucacagguuuucaau

SEQ ID NO: 1005850 - RNA, 22 nt, Human
cggcuggugucgggcacagcaa

SEQ ID NO: 1005851 - RNA, 22 nt, Human
uauaauuuuaagugguaaauua

SEQ ID NO: 1005852 - RNA, 22 nt, Human
uugaaaaaauugguagaggaug

SEQ ID NO: 1005853 - RNA, 22 nt, Human
ucccacccauccugcaucucuu

SEQ ID NO: 1005854 - RNA, 22 nt, Human
aacagcaugcuggguaacauug

SEQ ID NO: 1005855 - RNA, 20 nt, Human
ccugggcuccaggagccccg

SEQ ID NO: 1005856 - RNA, 22 nt, Human
auguagaaaguucauagaugcg

SEQ ID NO: 1005857 - RNA, 22 nt, Human
acugggcugguuaguuuuacua

SEQ ID NO: 1005858 - RNA, 22 nt, Human
ucuuuuucugcacacguguccc

SEQ ID NO: 1005859 - RNA, 22 nt, Human
ucaucccuaaggacagcucugc

SEQ ID NO: 1005860 - RNA, 22 nt, Human
aggcugcuucagcugcagggag

SEQ ID NO: 1005861 - RNA, 22 nt, Human
ucagcuuucuauguugcuaaac

SEQ ID NO: 1005862 - RNA, 22 nt, Human
uguaugaagguuuaccugcugu

SEQ ID NO: 1005863 - RNA, 22 nt, Human
auauuugucaauucacuguuca

SEQ ID NO: 1005864 - RNA, 22 nt, Human
acaucacagagcccagauaaag

SEQ ID NO: 1005865 - RNA, 22 nt, Human
aggcuuuaauuaucuacaggag

SEQ ID NO: 1005866 - RNA, 22 nt, Human
aacaggcaggagaauucugccu

SEQ ID NO: 1005867 - RNA, 22 nt, Human
auguaauuugcccucaaguuaa

SEQ ID NO: 1005868 - RNA, 22 nt, Human
gaggcugcuuugaugacaggag

SEQ ID NO: 1005869 - RNA, 22 nt, Human
ucugcagaauucgaggaagaaa

SEQ ID NO: 1005870 - RNA, 22 nt, Human
cagggcucccucuggcucccag

SEQ ID NO: 1005871 - RNA, 22 nt, Human
cucuuaaaaacuugauauauuu

SEQ ID NO: 1005872 - RNA, 22 nt, Human
cccacccugggcuacacaucca

SEQ ID NO: 1005873 - RNA, 22 nt, Human
gggcugcaaugcuucaguuguu

SEQ ID NO: 1005874 - RNA, 22 nt, Human
acaugauauuaaugucuuauuu

SEQ ID NO: 1005875 - RNA, 22 nt, Human
gcauguuuugcaacaagugacc

SEQ ID NO: 1005876 - RNA, 22 nt, Human
gguggcagagaggagguaguuu

SEQ ID NO: 1005877 - RNA, 22 nt, Human
uaacacauuaguucuccuagau

SEQ ID NO: 1005878 - RNA, 22 nt, Human
cauguuaaugaauuuuugcagu

SEQ ID NO: 1005879 - RNA, 22 nt, Human
cugcucuagagagcauuaguca

SEQ ID NO: 1005880 - RNA, 22 nt, Human
auauacuuggagacuaucauug

SEQ ID NO: 1005881 - RNA, 20 nt, Human
ccccacacuauugagcacuu

SEQ ID NO: 1005882 - RNA, 22 nt, Human
uacagagacuuuauggcacaaa

SEQ ID NO: 1005883 - RNA, 22 nt, Human
cgacccuacagacagugcugag

SEQ ID NO: 1005884 - RNA, 22 nt, Human
ggaaucagaauuaggauuugaa

SEQ ID NO: 1005885 - RNA, 22 nt, Human
ggcauccaaauaccaagaugua

SEQ ID NO: 1005886 - RNA, 22 nt, Human
ccuggggaagucacuucucuuu

SEQ ID NO: 1005887 - RNA, 22 nt, Human
ucuggcaggacaugcugaccau

SEQ ID NO: 1005888 - RNA, 22 nt, Human
auccaggccccaagaccccgac

SEQ ID NO: 1005889 - RNA, 22 nt, Human
ggcucccugccuguccucaguc

SEQ ID NO: 1005890 - RNA, 22 nt, Human
aagagcaucaaugacucgcagu

SEQ ID NO: 1005891 - RNA, 22 nt, Human
ucucugaagauauuuauuauua

SEQ ID NO: 1005892 - RNA, 22 nt, Human
guuuauuauucaacuucauguu

SEQ ID NO: 1005893 - RNA, 22 nt, Human
cagagcauugagggucugccaa

SEQ ID NO: 1005894 - RNA, 22 nt, Human
auuucucagcacuuccuaucuc

SEQ ID NO: 1005895 - RNA, 22 nt, Human
ggguuccuccaguuccuagagc

SEQ ID NO: 1005896 - RNA, 22 nt, Human
cacaggcugcccgcagcuggga

SEQ ID NO: 1005897 - RNA, 22 nt, Human
ucuggcaguggaugagggcagc

SEQ ID NO: 1005898 - RNA, 22 nt, Human
aaccugcaguuuuuauucugag

SEQ ID NO: 1005899 - RNA, 22 nt, Human
auugaaaaaugacuauugcuua

SEQ ID NO: 1005900 - RNA, 22 nt, Human
agagcacagaagaauaggugcu

SEQ ID NO: 1005901 - RNA, 22 nt, Human
ccuggcagguuacaaccaguua

SEQ ID NO: 1005902 - RNA, 23 nt, Human
uccaggcaugagcucuggaugga

SEQ ID NO: 1005903 - RNA, 22 nt, Human
agggcccuagggaaugagacau

SEQ ID NO: 1005904 - RNA, 22 nt, Human
ccccaggcagggccuaacagag

SEQ ID NO: 1005905 - RNA, 20 nt, Human
uccaggcagcucagaguguc

SEQ ID NO: 1005906 - RNA, 22 nt, Human
gccaggcagcaggaagccagug

SEQ ID NO: 1005907 - RNA, 17 nt, Human
uauacacagacagacug

SEQ ID NO: 1005908 - RNA, 21 nt, Human
ccacuguagacucauucugag

SEQ ID NO: 1005909 - RNA, 22 nt, Human
aauuauguagccauaugaaaca

SEQ ID NO: 1005910 - RNA, 22 nt, Human
ugcccccuuuucuuguuacacu

SEQ ID NO: 1005911 - RNA, 19 nt, Human
ugcuucuggaaccaugauc

SEQ ID NO: 1005912 - RNA, 22 nt, Human
aaccccgcucaggcugggugag

SEQ ID NO: 1005913 - RNA, 22 nt, Human
uccaggcauagaaggcacgcac

SEQ ID NO: 1005914 - RNA, 22 nt, Human
gcagcuuucuuuuugcaugucu

SEQ ID NO: 1005915 - RNA, 22 nt, Human
acacacagaguuuauacaggca

SEQ ID NO: 1005916 - RNA, 19 nt, Human
ccagagagcuagguacaga

SEQ ID NO: 1005917 - RNA, 22 nt, Human
aauauaaugcuguuuuaugcca

SEQ ID NO: 1005918 - RNA, 22 nt, Human
acagugugguuugagcacuggg

SEQ ID NO: 1005919 - RNA, 22 nt, Human
ccagcuuuucuuaucauuauaa

SEQ ID NO: 1005920 - RNA, 22 nt, Human
augggcugcuuggcuuccaccc

SEQ ID NO: 1005921 - RNA, 22 nt, Human
ugccugccaugcagaaagcuga

SEQ ID NO: 1005922 - RNA, 22 nt, Human
cuaggaauccuuuuagaguugg

SEQ ID NO: 1005923 - RNA, 22 nt, Human
gccaagcuuugcaggaguguug

SEQ ID NO: 1005924 - RNA, 22 nt, Human
aagagccagcuagugaagaggc

SEQ ID NO: 1005925 - RNA, 22 nt, Human
aagggcucuucuauuuauggcc

SEQ ID NO: 1005926 - RNA, 22 nt, Human
cuccagggggcauccacacagc

SEQ ID NO: 1005927 - RNA, 22 nt, Human
gcuggggacuccccaccauagc

SEQ ID NO: 1005928 - RNA, 22 nt, Human
uaacacauauuugcaguaagca

SEQ ID NO: 1005929 - RNA, 19 nt, Human
uugaaauuguuugauaugg

SEQ ID NO: 1005930 - RNA, 18 nt, Human
cauaauuuucuuucuuua

SEQ ID NO: 1005931 - RNA, 22 nt, Human
ugaaacuucuaauaugaauagu

SEQ ID NO: 1005932 - RNA, 18 nt, Human
gccugcucugcucucccc

SEQ ID NO: 1005933 - RNA, 22 nt, Human
agguauuauuagcaucucuauu

SEQ ID NO: 1005934 - RNA, 18 nt, Human
ugaccugcgcuucacggu

SEQ ID NO: 1005935 - RNA, 22 nt, Human
ccaggcucaccuggagccccug

SEQ ID NO: 1005936 - RNA, 22 nt, Human
auuguuaugaaaauaagauguu

SEQ ID NO: 1005937 - RNA, 22 nt, Human
gcuggggagcaagaguagugag

SEQ ID NO: 1005938 - RNA, 22 nt, Human
gcaaauacauguugagcaccua

SEQ ID NO: 1005939 - RNA, 22 nt, Human
cauuagggucucucagcugaau

SEQ ID NO: 1005940 - RNA, 19 nt, Human
agcaacaccguuuauuucc

SEQ ID NO: 1005941 - RNA, 22 nt, Human
uguaugaaagaacaagggcuua

SEQ ID NO: 1005942 - RNA, 22 nt, Human
gacccaggguauccagagcugc

SEQ ID NO: 1005943 - RNA, 22 nt, Human
uucugucagaagcuagcuccug

SEQ ID NO: 1005944 - RNA, 22 nt, Human
gcaggcucuucuuucugcccag

SEQ ID NO: 1005945 - RNA, 22 nt, Human
ugggcuuaggucggaggcggcc

SEQ ID NO: 1005946 - RNA, 20 nt, Human
gcugggcuuugacugacaca

SEQ ID NO: 1005947 - RNA, 22 nt, Human
gccaggcaguucaaguacacca

SEQ ID NO: 1005948 - RNA, 22 nt, Human
guggcagugggaugcuaucagg

SEQ ID NO: 1005949 - RNA, 22 nt, Human
cagcuuugcaggcuggucagug

SEQ ID NO: 1005950 - RNA, 22 nt, Human
uauaaaguuucgaaagauguau

SEQ ID NO: 1005951 - RNA, 22 nt, Human
cacucuccagcacaccccauuu

SEQ ID NO: 1005952 - RNA, 22 nt, Human
ggaccugcauuuuaacaagauc

SEQ ID NO: 1005953 - RNA, 22 nt, Human
uaauuucuagggacuaaggugc

SEQ ID NO: 1005954 - RNA, 22 nt, Human
auuuaugauuagccuauuguug

SEQ ID NO: 1005955 - RNA, 22 nt, Human
gccugcagacguguuuuccuca

SEQ ID NO: 1005956 - RNA, 22 nt, Human
cccacacaaaucauggggagaa

SEQ ID NO: 1005957 - RNA, 22 nt, Human
uccugcagagacagaggccuca

SEQ ID NO: 1005958 - RNA, 22 nt, Human
ugcuggcacguggaccaggaga

SEQ ID NO: 1005959 - RNA, 18 nt, Human
gggcucacacaggucauc

SEQ ID NO: 1005960 - RNA, 22 nt, Human
aaaauauuuuagggccaggaga

SEQ ID NO: 1005961 - RNA, 22 nt, Human
ccaggcucaggccugcucguug

SEQ ID NO: 1005962 - RNA, 22 nt, Human
ucuggcaggucaaucauucuuu

SEQ ID NO: 1005963 - RNA, 22 nt, Human
aggaccauccuaagguaggcaa

SEQ ID NO: 1005964 - RNA, 22 nt, Human
caacacauugaagcuaugauga

SEQ ID NO: 1005965 - RNA, 22 nt, Human
aaagacuuggcuuaugauuugc

SEQ ID NO: 1005966 - RNA, 22 nt, Human
aauaacuucauguaacauuuaa

SEQ ID NO: 1005967 - RNA, 22 nt, Human
auuccacagcuacaucaaucua

SEQ ID NO: 1005968 - RNA, 22 nt, Human
uugaagcagagaaauacuugaa

SEQ ID NO: 1005969 - RNA, 22 nt, Human
uccugaggcacaauccuagaau

SEQ ID NO: 1005970 - RNA, 22 nt, Human
uugggaagaaacauguccauca

SEQ ID NO: 1005971 - RNA, 20 nt, Human
ugccuggccuuucucugccc

SEQ ID NO: 1005972 - RNA, 22 nt, Human
guauuaggaggaacacaggccu

SEQ ID NO: 1005973 - RNA, 22 nt, Human
ucuggcaggauaucgaagugaa

SEQ ID NO: 1005974 - RNA, 22 nt, Human
uuauucagauuggcuacaggau

SEQ ID NO: 1005975 - RNA, 20 nt, Human
gagggcucguggauggauaa

SEQ ID NO: 1005976 - RNA, 22 nt, Human
ucugggcugggagcguguggac

SEQ ID NO: 1005977 - RNA, 22 nt, Human
ggaccugcccuggcucagaugc

SEQ ID NO: 1005978 - RNA, 22 nt, Human
uccaggccauugacugcauccu

SEQ ID NO: 1005979 - RNA, 22 nt, Human
acaugauuuuaguaucauaaua

SEQ ID NO: 1005980 - RNA, 22 nt, Human
guuuuacacaccuaugaaagac

SEQ ID NO: 1005981 - RNA, 22 nt, Human
auuaauuuccaggcacugugcu

SEQ ID NO: 1005982 - RNA, 22 nt, Human
aaggcuuuuguuccuauuuagu

SEQ ID NO: 1005983 - RNA, 22 nt, Human
ccagcuuuauagcuucaaagga

SEQ ID NO: 1005984 - RNA, 22 nt, Human
aacacagaucaaaauauuuccu

SEQ ID NO: 1005985 - RNA, 22 nt, Human
uaacuuucuucauaugugaacc

SEQ ID NO: 1005986 - RNA, 22 nt, Human
uuauauaucuugauuuguucca

SEQ ID NO: 1005987 - RNA, 22 nt, Human
aaugucauugguaaagauuagg

SEQ ID NO: 1005988 - RNA, 22 nt, Human
uuuagggaauagaagaucugaa

SEQ ID NO: 1005989 - RNA, 22 nt, Human
agggcuacugccugccuucagg

SEQ ID NO: 1005990 - RNA, 20 nt, Human
acaaagacuggaaaagcaag

SEQ ID NO: 1005991 - RNA, 22 nt, Human
gcagcuuuaaucugaauaagua

SEQ ID NO: 1005992 - RNA, 23 nt, Human
uuccaagugcuuuacuuaauccu

SEQ ID NO: 1005993 - RNA, 22 nt, Human
aaauauguaagauuagcacuag

SEQ ID NO: 1005994 - RNA, 22 nt, Human
ccuuuaaagacugcauaacuuc

SEQ ID NO: 1005995 - RNA, 22 nt, Human
cucccaagauaaauaaggcagu

SEQ ID NO: 1005996 - RNA, 19 nt, Human
ggcaggcuggauagagagg

SEQ ID NO: 1005997 - RNA, 22 nt, Human
uucagugucaauuuuuaaauau

SEQ ID NO: 1005998 - RNA, 22 nt, Human
acaugauuaaaagauuuuaaag

SEQ ID NO: 1005999 - RNA, 22 nt, Human
ucauauaacuggauauuuucaa

SEQ ID NO: 1006000 - RNA, 21 nt, Human
uccugcagggcagcagagugg

SEQ ID NO: 1006001 - RNA, 22 nt, Human
ugcaggcugugucauuuaguga

SEQ ID NO: 1006002 - RNA, 22 nt, Human
uaugaagcuuugaaaagcuuac

SEQ ID NO: 1006003 - RNA, 18 nt, Human
uagggcucuagggaguga

SEQ ID NO: 1006004 - RNA, 22 nt, Human
ugaagccaaucugccaggcaga

SEQ ID NO: 1006005 - RNA, 22 nt, Human
ggcuuuauauuguuugagcaga

SEQ ID NO: 1006006 - RNA, 18 nt, Human
ugcaggcugggguuccuc

SEQ ID NO: 1006007 - RNA, 22 nt, Human
agggacuauuuacccaucucac

SEQ ID NO: 1006008 - RNA, 22 nt, Human
aaugaagccacugaagacaauc

SEQ ID NO: 1006009 - RNA, 22 nt, Human
ggcagaccucuccagccccaca

SEQ ID NO: 1006010 - RNA, 22 nt, Human
acuggcagaacuggugauuguc

SEQ ID NO: 1006011 - RNA, 22 nt, Human
gguuucaacucagcuaguaagg

SEQ ID NO: 1006012 - RNA, 22 nt, Human
ggaggugggcuaaggacucucu

SEQ ID NO: 1006013 - RNA, 22 nt, Human
gaggagcugagccacguccugg

SEQ ID NO: 1006014 - RNA, 22 nt, Human
guauuaggugguggaauuguag

SEQ ID NO: 1006015 - RNA, 22 nt, Human
caauacugaguuuacauucauc

SEQ ID NO: 1006016 - RNA, 22 nt, Human
uccuggcagagggcggccucga

SEQ ID NO: 1006017 - RNA, 22 nt, Human
gaaaacuaacggaaaaguuagg

SEQ ID NO: 1006018 - RNA, 19 nt, Human
ccagcccacagugacuuuc

SEQ ID NO: 1006019 - RNA, 22 nt, Human
ucuggggaugaggaccuagaug

SEQ ID NO: 1006020 - RNA, 22 nt, Human
agacacagcugcaggagguggg

SEQ ID NO: 1006021 - RNA, 22 nt, Human
cuuaaauuuucaucuacaagaa

SEQ ID NO: 1006022 - RNA, 20 nt, Human
ucaggcuccgcauuaacuua

SEQ ID NO: 1006023 - RNA, 22 nt, Human
gcuggcagacugggggcagaac

SEQ ID NO: 1006024 - RNA, 22 nt, Human
ggccucagggucacucuguaga

SEQ ID NO: 1006025 - RNA, 22 nt, Human
ucaugaacaucucaaauaacca

SEQ ID NO: 1006026 - RNA, 22 nt, Human
uguacauacauagauauacaca

SEQ ID NO: 1006027 - RNA, 22 nt, Human
aaaguuagacagcaucauuucu

SEQ ID NO: 1006028 - RNA, 22 nt, Human
cuacauaaucuggauuugucug

SEQ ID NO: 1006029 - RNA, 22 nt, Human
gggguggcccuacccucuggaa

SEQ ID NO: 1006030 - RNA, 22 nt, Human
aacagcauaaguauuuauuuca

SEQ ID NO: 1006031 - RNA, 22 nt, Human
ucuggcagaaggcagaaauuca

SEQ ID NO: 1006032 - RNA, 22 nt, Human
ucuggcagagugauaggauaag

SEQ ID NO: 1006033 - RNA, 22 nt, Human
auucugucuaagcuggcuacgu

SEQ ID NO: 1006034 - RNA, 22 nt, Human
gagcuuuaccuuagguucuguu

SEQ ID NO: 1006035 - RNA, 22 nt, Human
ugcaggcugcucaagacuuagu

SEQ ID NO: 1006036 - RNA, 22 nt, Human
uuucugaacaaagccauuauca

SEQ ID NO: 1006037 - RNA, 22 nt, Human
cuggggaccagugucuguuugu

SEQ ID NO: 1006038 - RNA, 22 nt, Human
cuggccucauagccaagcugug

SEQ ID NO: 1006039 - RNA, 22 nt, Human
guacccagaggcaugaucccag

SEQ ID NO: 1006040 - RNA, 22 nt, Human
ucuccugggaggacaaggaagg

SEQ ID NO: 1006041 - RNA, 20 nt, Human
uucugucagauuauauggga

SEQ ID NO: 1006042 - RNA, 22 nt, Human
uguaaaauaauucuccauguuu

SEQ ID NO: 1006043 - RNA, 22 nt, Human
caauuucucuuuauaucucaca

SEQ ID NO: 1006044 - RNA, 22 nt, Human
guggcuuggaccagucacagug

SEQ ID NO: 1006045 - RNA, 22 nt, Human
augggcugacuaaugguaaacu

SEQ ID NO: 1006046 - RNA, 22 nt, Human
aauacuuuccuauauaaggugc

SEQ ID NO: 1006047 - RNA, 22 nt, Human
aagcuuuagagaugaguuccuu

SEQ ID NO: 1006048 - RNA, 22 nt, Human
ccccuuccuuccucagacagcc

SEQ ID NO: 1006049 - RNA, 22 nt, Human
uaugacauuauaaaggauuauu

SEQ ID NO: 1006050 - RNA, 22 nt, Human
uccccacacagauacagaguag

SEQ ID NO: 1006051 - RNA, 22 nt, Human
ugcuuuauggagcccaucucau

SEQ ID NO: 1006052 - RNA, 22 nt, Human
uucugggggaauacagcuauga

SEQ ID NO: 1006053 - RNA, 22 nt, Human
augggcuggccuuucccgcucu

SEQ ID NO: 1006054 - RNA, 22 nt, Human
ccagcuuuccugcgaguugauu

SEQ ID NO: 1006055 - RNA, 22 nt, Human
ccacaggcugcugcaggucccg

SEQ ID NO: 1006056 - RNA, 22 nt, Human
gcuuuuaauuaguugcuuccau

SEQ ID NO: 1006057 - RNA, 22 nt, Human
ucuggggagugccuaaguggaa

SEQ ID NO: 1006058 - RNA, 22 nt, Human
cacacacuguuaauguaggagu

SEQ ID NO: 1006059 - RNA, 22 nt, Human
uuccaaguugagcgauuuuccu

SEQ ID NO: 1006060 - RNA, 22 nt, Human
cgcaggcuuuagaaucugcuac

SEQ ID NO: 1006061 - RNA, 22 nt, Human
agaggccggccgagcccauggg

SEQ ID NO: 1006062 - RNA, 23 nt, Human
ccaggcucuuucaccugcuauuc

SEQ ID NO: 1006063 - RNA, 22 nt, Human
ucuccaagcagggcugcaaggc

SEQ ID NO: 1006064 - RNA, 22 nt, Human
ugaaagauugugauucaauaug

SEQ ID NO: 1006065 - RNA, 22 nt, Human
uucacauaaugauacaaagcuu

SEQ ID NO: 1006066 - RNA, 22 nt, Human
uugggcucaggaguuugagacc

SEQ ID NO: 1006067 - RNA, 19 nt, Human
uccuggcauuuguaggaaa

SEQ ID NO: 1006068 - RNA, 22 nt, Human
accaagcuguauauuauugguu

SEQ ID NO: 1006069 - RNA, 22 nt, Human
acagcuuuugaaaaauuacugg

SEQ ID NO: 1006070 - RNA, 22 nt, Human
uagaacacuugaccacugcucc

SEQ ID NO: 1006071 - RNA, 22 nt, Human
cagagagcaugggaggcccgag

SEQ ID NO: 1006072 - RNA, 22 nt, Human
cacacaucaaccuagacauugu

SEQ ID NO: 1006073 - RNA, 22 nt, Human
agguuuauguuuggugcaggag

SEQ ID NO: 1006074 - RNA, 22 nt, Human
uauacaauggcugaaucaucca

SEQ ID NO: 1006075 - RNA, 22 nt, Human
aauacuauguagccaaaauaau

SEQ ID NO: 1006076 - RNA, 22 nt, Human
acaucugaggagaccagccucu

SEQ ID NO: 1006077 - RNA, 22 nt, Human
uguuugaacugaauaacauagu

SEQ ID NO: 1006078 - RNA, 23 nt, Human
acuccccagucucuucuugccaa

SEQ ID NO: 1006079 - RNA, 22 nt, Human
agcucccauuaucuucugaaac

SEQ ID NO: 1006080 - RNA, 20 nt, Human
uggaccugucucuuuaggga

SEQ ID NO: 1006081 - RNA, 21 nt, Human
agccugcaauguagguaccgg

SEQ ID NO: 1006082 - RNA, 22 nt, Human
cccaggcagccccagaagcuug

SEQ ID NO: 1006083 - RNA, 22 nt, Human
ucauguuauugacucauaauau

SEQ ID NO: 1006084 - RNA, 22 nt, Human
uggaacacuuuguugaaaugca

SEQ ID NO: 1006085 - RNA, 22 nt, Human
ucauuuguucaucugcucuucu

SEQ ID NO: 1006086 - RNA, 22 nt, Human
gcaggcuccaacuggaggaguu

SEQ ID NO: 1006087 - RNA, 22 nt, Human
agcacaggaccaaggaagcugu

SEQ ID NO: 1006088 - RNA, 22 nt, Human
gcuaggaggaagaaugugaauu

SEQ ID NO: 1006089 - RNA, 22 nt, Human
uauuaggguaaauuugacaugc

SEQ ID NO: 1006090 - RNA, 22 nt, Human
cuuaauuuaaaauaguucaggc

SEQ ID NO: 1006091 - RNA, 22 nt, Human
ccacagaccuuggcuuccaccu

SEQ ID NO: 1006092 - RNA, 22 nt, Human
cgcaggcuccggggugcccugg

SEQ ID NO: 1006093 - RNA, 22 nt, Human
uauguacuaacuuucauucuag

SEQ ID NO: 1006094 - RNA, 22 nt, Human
ccaggcucacagcaucccagga

SEQ ID NO: 1006095 - RNA, 22 nt, Human
ugcuucugaacucagcaugugg

SEQ ID NO: 1006096 - RNA, 22 nt, Human
aguaugaauacagauuuucucu

SEQ ID NO: 1006097 - RNA, 22 nt, Human
auggcagagggauugaacagcu

SEQ ID NO: 1006098 - RNA, 22 nt, Human
gggaccugcgccacucacuguc

SEQ ID NO: 1006099 - RNA, 22 nt, Human
aaacagcaggaacaucuugcca

SEQ ID NO: 1006100 - RNA, 22 nt, Human
uuauuuaggagaaggaacccug

SEQ ID NO: 1006101 - RNA, 22 nt, Human
agcucugacauugauucucagc

SEQ ID NO: 1006102 - RNA, 17 nt, Human
ggagaucuggcagaggg

SEQ ID NO: 1006103 - RNA, 22 nt, Human
guuuuccugaaacugauggugu

SEQ ID NO: 1006104 - RNA, 22 nt, Human
uagggaccuuagaauuguaugu

SEQ ID NO: 1006105 - RNA, 22 nt, Human
uuuaauuuuccucuuccuggag

SEQ ID NO: 1006106 - RNA, 22 nt, Human
cugggcugaaaguguuccuuga

SEQ ID NO: 1006107 - RNA, 22 nt, Human
aucacaauguacguuaaaaugu

SEQ ID NO: 1006108 - RNA, 22 nt, Human
uugggaucucaaauccagcuau

SEQ ID NO: 1006109 - RNA, 22 nt, Human
ugggagaaacugucucucccac

SEQ ID NO: 1006110 - RNA, 22 nt, Human
caugaagcucuugcaccucuag

SEQ ID NO: 1006111 - RNA, 22 nt, Human
ggcccagcgaggccaccuacag

SEQ ID NO: 1006112 - RNA, 22 nt, Human
ccuggggaaucuugcaggggaa

SEQ ID NO: 1006113 - RNA, 22 nt, Human
uuuuacuuaauucuuggucaug

SEQ ID NO: 1006114 - RNA, 22 nt, Human
cccugagcgugaggaggaagua

SEQ ID NO: 1006115 - RNA, 19 nt, Human
cacaucagcagggcugugg

SEQ ID NO: 1006116 - RNA, 22 nt, Human
ccuggcagguggcgcccucggc

SEQ ID NO: 1006117 - RNA, 22 nt, Human
uguaugaagccagaaucuguuu

SEQ ID NO: 1006118 - RNA, 22 nt, Human
ggacuccucuagaaguugaggc

SEQ ID NO: 1006119 - RNA, 22 nt, Human
uccaggcaucuguauuuuuuaa

SEQ ID NO: 1006120 - RNA, 22 nt, Human
ggcagggaguggagacucccua

SEQ ID NO: 1006121 - RNA, 22 nt, Human
cuccaguggcaaguccgggcgg

SEQ ID NO: 1006122 - RNA, 22 nt, Human
uguaaagaaagacgcagaguua

SEQ ID NO: 1006123 - RNA, 22 nt, Human
uuucucuugcgauaugcuacac

SEQ ID NO: 1006124 - RNA, 22 nt, Human
cugcagggaacugaggcccaga

SEQ ID NO: 1006125 - RNA, 22 nt, Human
ccagagaguaggaggcauuauu

SEQ ID NO: 1006126 - RNA, 22 nt, Human
uuugauaagagcugcugaaacu

SEQ ID NO: 1006127 - RNA, 22 nt, Human
aaauacauaaagguuguaccag

SEQ ID NO: 1006128 - RNA, 22 nt, Human
gagaaagacguaggcugggagg

SEQ ID NO: 1006129 - RNA, 22 nt, Human
uucaauaucauuguuuagucuc

SEQ ID NO: 1006130 - RNA, 22 nt, Human
agugccccaugggugccugggg

SEQ ID NO: 1006131 - RNA, 23 nt, Human
ugggaccuguuugcccacagaug

SEQ ID NO: 1006132 - RNA, 22 nt, Human
uccaggcaaagccuuguagacg

SEQ ID NO: 1006133 - RNA, 22 nt, Human
acaagagcauugcagguguguu

SEQ ID NO: 1006134 - RNA, 22 nt, Human
ccuggcaggcaagaggaaggga

SEQ ID NO: 1006135 - RNA, 22 nt, Human
gcuucuggagucuucagaggaa

SEQ ID NO: 1006136 - RNA, 22 nt, Human
gccaagcucuuuaaaggccaaa

SEQ ID NO: 1006137 - RNA, 22 nt, Human
uaugacuuauuucaucaguucu

SEQ ID NO: 1006138 - RNA, 23 nt, Human
aacagccaacuuuagcggguggc

SEQ ID NO: 1006139 - RNA, 22 nt, Human
cugcuuuagacaacugcuggga

SEQ ID NO: 1006140 - RNA, 22 nt, Human
aauaauuauuugagagcagacc

SEQ ID NO: 1006141 - RNA, 22 nt, Human
guuagguagaaguuuacuuuga

SEQ ID NO: 1006142 - RNA, 22 nt, Human
auucaagagcccauguuuccug

SEQ ID NO: 1006143 - RNA, 22 nt, Human
aagagcacuaacagagcugaua

SEQ ID NO: 1006144 - RNA, 22 nt, Human
auguagaauuccuucuacuuug

SEQ ID NO: 1006145 - RNA, 22 nt, Human
uugaauuagacuuugcuacagg

SEQ ID NO: 1006146 - RNA, 22 nt, Human
aauauguuccacuuaaagcugg

SEQ ID NO: 1006147 - RNA, 22 nt, Human
acagagagggagugauaaaucc

SEQ ID NO: 1006148 - RNA, 22 nt, Human
caugaagcauguuuugucauga

SEQ ID NO: 1006149 - RNA, 22 nt, Human
cagggcacggagaagucacccc

SEQ ID NO: 1006150 - RNA, 22 nt, Human
aauuaggggaggacguaucaua

SEQ ID NO: 1006151 - RNA, 22 nt, Human
ucuggcagcaagucuguuucuc

SEQ ID NO: 1006152 - RNA, 22 nt, Human
uugauacaggccuucuagauga

SEQ ID NO: 1006153 - RNA, 22 nt, Human
ucagagagcagaacuuuuuuac

SEQ ID NO: 1006154 - RNA, 22 nt, Human
ccaggcucugugugggcuagag

SEQ ID NO: 1006155 - RNA, 22 nt, Human
cucaccccacuaccccuuggug

SEQ ID NO: 1006156 - RNA, 22 nt, Human
gcuccuggguguggcugccccu

SEQ ID NO: 1006157 - RNA, 22 nt, Human
agagucccagggacacuccaga

SEQ ID NO: 1006158 - RNA, 22 nt, Human
acagauuuuaaaugacacuccc

SEQ ID NO: 1006159 - RNA, 20 nt, Human
gccaggcacuguucucaaua

SEQ ID NO: 1006160 - RNA, 22 nt, Human
uuucuugaccacuauguugaua

SEQ ID NO: 1006161 - RNA, 22 nt, Human
ccuggcagcuguuuggcuuggc

SEQ ID NO: 1006162 - RNA, 22 nt, Human
uucacaauagcuggcaucaucu

SEQ ID NO: 1006163 - RNA, 22 nt, Human
auuacaaucgagagaaacaaau

SEQ ID NO: 1006164 - RNA, 22 nt, Human
acacaucucaggggacacucuc

SEQ ID NO: 1006165 - RNA, 22 nt, Human
cuccagugcacccagaggauuu

SEQ ID NO: 1006166 - RNA, 22 nt, Human
cagcuuuagagaaaacauauuu

SEQ ID NO: 1006167 - RNA, 19 nt, Human
uuuuccuucuauauguuuc

SEQ ID NO: 1006168 - RNA, 22 nt, Human
cagucacauagguauacacaua

SEQ ID NO: 1006169 - RNA, 22 nt, Human
uagcuuuaagaugagaugugga

SEQ ID NO: 1006170 - RNA, 22 nt, Human
ccagagacgucggucagggcgc

SEQ ID NO: 1006171 - RNA, 22 nt, Human
ggccagggggcuucagacucca

SEQ ID NO: 1006172 - RNA, 22 nt, Human
ucaaauauuggcuauuucacau

SEQ ID NO: 1006173 - RNA, 22 nt, Human
gcuggggagaauuggguuaucu

SEQ ID NO: 1006174 - RNA, 22 nt, Human
ugcuucugacugggucaguuga

SEQ ID NO: 1006175 - RNA, 22 nt, Human
ccagcuuucugggugguuucug

SEQ ID NO: 1006176 - RNA, 22 nt, Human
ccccuuccacagugcuuccuaa

SEQ ID NO: 1006177 - RNA, 22 nt, Human
augugcaaauccaaugugaaug

SEQ ID NO: 1006178 - RNA, 22 nt, Human
cccaggcacagauuaucccaau

SEQ ID NO: 1006179 - RNA, 22 nt, Human
uagggcucagcucuagcuccug

SEQ ID NO: 1006180 - RNA, 23 nt, Human
uggccagguagaggagguaguga

SEQ ID NO: 1006181 - RNA, 22 nt, Human
uuccuggccuaagguaggugac

SEQ ID NO: 1006182 - RNA, 22 nt, Human
gccagggaaacugcagaccagc

SEQ ID NO: 1006183 - RNA, 22 nt, Human
gccugcagcugcuuccacacac

SEQ ID NO: 1006184 - RNA, 22 nt, Human
ugggggcugugcacaggcucac

SEQ ID NO: 1006185 - RNA, 22 nt, Human
cuccuggcaggcugagugaaau

SEQ ID NO: 1006186 - RNA, 22 nt, Human
uuuguacauauauaaaaucugu

SEQ ID NO: 1006187 - RNA, 22 nt, Human
cuacaaugacagaauugaguag

SEQ ID NO: 1006188 - RNA, 22 nt, Human
auuuucaucgcuagguuggccu

SEQ ID NO: 1006189 - RNA, 22 nt, Human
ucuagaauuuugccauauagcu

SEQ ID NO: 1006190 - RNA, 22 nt, Human
aguaugaagauuauaauuuuuc

SEQ ID NO: 1006191 - RNA, 22 nt, Human
auuauuaggacuacugggguug

SEQ ID NO: 1006192 - RNA, 22 nt, Human
uccugcagugugucuccugcac

SEQ ID NO: 1006193 - RNA, 22 nt, Human
ucagcuuuccugcagcuaaggg

SEQ ID NO: 1006194 - RNA, 22 nt, Human
uuuaaaaaacuagucugagucu

SEQ ID NO: 1006195 - RNA, 22 nt, Human
cccaggcagcccuucugacgca

SEQ ID NO: 1006196 - RNA, 22 nt, Human
gcacacacuguuuuccucacau

SEQ ID NO: 1006197 - RNA, 21 nt, Human
ccagcccagcugugucccagc

SEQ ID NO: 1006198 - RNA, 22 nt, Human
agcaggcuuuccacagaaggag

SEQ ID NO: 1006199 - RNA, 22 nt, Human
uggcagagaacacggcugaucu

SEQ ID NO: 1006200 - RNA, 22 nt, Human
uccaggcaaagggacuagcagg

SEQ ID NO: 1006201 - RNA, 23 nt, Human
cugcagagaacugagggacagcc

SEQ ID NO: 1006202 - RNA, 22 nt, Human
cagugaggaguccagggcagag

SEQ ID NO: 1006203 - RNA, 22 nt, Human
ugggaccugaagcagguuggca

SEQ ID NO: 1006204 - RNA, 22 nt, Human
gccacagguacuaugggagaga

SEQ ID NO: 1006205 - RNA, 22 nt, Human
uuggcagggccaggcucucucu

SEQ ID NO: 1006206 - RNA, 22 nt, Human
ccuggcagcuccuccccggcgg

SEQ ID NO: 1006207 - RNA, 22 nt, Human
uuauucuucuucucuugccagg

SEQ ID NO: 1006208 - RNA, 22 nt, Human
gcuggcagagcucugggcuggg

SEQ ID NO: 1006209 - RNA, 22 nt, Human
uuggaaagauuauuauuaugaa

SEQ ID NO: 1006210 - RNA, 22 nt, Human
aaggcuuuaugugaccaaaaga

SEQ ID NO: 1006211 - RNA, 22 nt, Human
aaaauccucuaauucuagaaua

SEQ ID NO: 1006212 - RNA, 22 nt, Human
uucuaucauacuugaauacauu

SEQ ID NO: 1006213 - RNA, 22 nt, Human
ugggcucucaaagugcggcuug

SEQ ID NO: 1006214 - RNA, 22 nt, Human
gagggcuccacacgggcccagc

SEQ ID NO: 1006215 - RNA, 22 nt, Human
aggaggcuguggagcacuccau

SEQ ID NO: 1006216 - RNA, 22 nt, Human
aaacucuguagcuaaacauaau

SEQ ID NO: 1006217 - RNA, 22 nt, Human
augcaacaaaugcuacgaaucg

SEQ ID NO: 1006218 - RNA, 22 nt, Human
aaucuuagguuuggcuucaucu

SEQ ID NO: 1006219 - RNA, 22 nt, Human
aaucuuucccuauuaaaugugg

SEQ ID NO: 1006220 - RNA, 22 nt, Human
acacacaauuaguuuuaugcuu

SEQ ID NO: 1006221 - RNA, 22 nt, Human
caggucccugcgccccggccuc

SEQ ID NO: 1006222 - RNA, 22 nt, Human
ugggcuucauaauugguccuag

SEQ ID NO: 1006223 - RNA, 22 nt, Human
ucagagaggcaauacuguuuaa

SEQ ID NO: 1006224 - RNA, 22 nt, Human
ccagcucucuuugaagcauaaa

SEQ ID NO: 1006225 - RNA, 22 nt, Human
gaacaucagucauaauuuaacg

SEQ ID NO: 1006226 - RNA, 19 nt, Human
gucuucugaauguggcugc

SEQ ID NO: 1006227 - RNA, 22 nt, Human
cugcaggacgaccgccucaucu

SEQ ID NO: 1006228 - RNA, 22 nt, Human
cagggagcuggugccagccgac

SEQ ID NO: 1006229 - RNA, 22 nt, Human
gagggaccccaggcuggcccuu

SEQ ID NO: 1006230 - RNA, 22 nt, Human
ccaaguacagauuccuccacug

SEQ ID NO: 1006231 - RNA, 22 nt, Human
ucuggcagaagugcugucagua

SEQ ID NO: 1006232 - RNA, 22 nt, Human
augugagggaaaucagucagaa

SEQ ID NO: 1006233 - RNA, 22 nt, Human
uacccaggggcugagcagaggu

SEQ ID NO: 1006234 - RNA, 20 nt, Human
acuggcagccugccugcugu

SEQ ID NO: 1006235 - RNA, 21 nt, Human
cagugagguccccagccuagg

SEQ ID NO: 1006236 - RNA, 22 nt, Human
uucugucaugcucauguaauug

SEQ ID NO: 1006237 - RNA, 22 nt, Human
auuucacaucuaucucagauuu

SEQ ID NO: 1006238 - RNA, 22 nt, Human
gccagccuucuguggccugcaa

SEQ ID NO: 1006239 - RNA, 18 nt, Human
ugucauaauauaucaccu

SEQ ID NO: 1006240 - RNA, 22 nt, Human
gcagagaguugggcugcgccag

SEQ ID NO: 1006241 - RNA, 22 nt, Human
aggaccugcuaaugugccaagu

SEQ ID NO: 1006242 - RNA, 22 nt, Human
agggaagaagcugguaguaggu

SEQ ID NO: 1006243 - RNA, 22 nt, Human
gccugcagcaugcuaggucuug

SEQ ID NO: 1006244 - RNA, 22 nt, Human
gagguggcuccuucagggaaua

SEQ ID NO: 1006245 - RNA, 22 nt, Human
guccuggcugguucuguggggc

SEQ ID NO: 1006246 - RNA, 22 nt, Human
ggaggacacuggcucugccuuc

SEQ ID NO: 1006247 - RNA, 22 nt, Human
agcaggcugcuggcguugaagu

SEQ ID NO: 1006248 - RNA, 22 nt, Human
cagggcucagggacugcagaaa

SEQ ID NO: 1006249 - RNA, 22 nt, Human
agguggcucugacagcucuggu

SEQ ID NO: 1006250 - RNA, 22 nt, Human
aacaaucaaguuucuaaaugac

SEQ ID NO: 1006251 - RNA, 21 nt, Human
uuucugaaggcaacaucuauc

SEQ ID NO: 1006252 - RNA, 22 nt, Human
caauguaucaaccagaaaguuc

SEQ ID NO: 1006253 - RNA, 22 nt, Human
cuaauguaucauggcucucagc

SEQ ID NO: 1006254 - RNA, 22 nt, Human
gcauagucaguaggauucucaa

SEQ ID NO: 1006255 - RNA, 21 nt, Human
ccugggcugugguuuggagac

SEQ ID NO: 1006256 - RNA, 22 nt, Human
cauuuacacuucuaaccacaag

SEQ ID NO: 1006257 - RNA, 22 nt, Human
auucauuuagguauucacuuac

SEQ ID NO: 1006258 - RNA, 18 nt, Human
ucagagagcagcuuuauu

SEQ ID NO: 1006259 - RNA, 22 nt, Human
gcacauaaagggcaugggaggu

SEQ ID NO: 1006260 - RNA, 22 nt, Human
ucaggcucuacacuugacacac

SEQ ID NO: 1006261 - RNA, 22 nt, Human
agcacaggaacauggagauggg

SEQ ID NO: 1006262 - RNA, 22 nt, Human
aguguggcugcguagggcucuc

SEQ ID NO: 1006263 - RNA, 20 nt, Human
uuaagaaaagcacauccugc

SEQ ID NO: 1006264 - RNA, 22 nt, Human
uuuauuuggcauccagggagaa

SEQ ID NO: 1006265 - RNA, 22 nt, Human
ucauuacaguguuuauaugucu

SEQ ID NO: 1006266 - RNA, 22 nt, Human
uucaaauacauucuuugccacu

SEQ ID NO: 1006267 - RNA, 22 nt, Human
agggaccugcucacugccuggc

SEQ ID NO: 1006268 - RNA, 22 nt, Human
auguuggagucguaaggcaugg

SEQ ID NO: 1006269 - RNA, 22 nt, Human
aaaagagucuuaggcagucaua

SEQ ID NO: 1006270 - RNA, 22 nt, Human
agggcugacagugaggagucaa

SEQ ID NO: 1006271 - RNA, 22 nt, Human
uuuuucaucugauugauaacuc

SEQ ID NO: 1006272 - RNA, 22 nt, Human
cagcuauuuucucauuaaggau

SEQ ID NO: 1006273 - RNA, 22 nt, Human
uuuuaccugaaccacacaguau

SEQ ID NO: 1006274 - RNA, 22 nt, Human
uacacacaugcauuugccuuau

SEQ ID NO: 1006275 - RNA, 22 nt, Human
aaaguuugaaugauauauuagu

SEQ ID NO: 1006276 - RNA, 22 nt, Human
ggcuuuauuucacuguaccaua

SEQ ID NO: 1006277 - RNA, 22 nt, Human
uauugacaauuugugaaacuau

SEQ ID NO: 1006278 - RNA, 22 nt, Human
cuagggacagaaagaggguaga

SEQ ID NO: 1006279 - RNA, 22 nt, Human
acaggcucacagucauuucauu

SEQ ID NO: 1006280 - RNA, 22 nt, Human
guggcagggugcucaucaugca

SEQ ID NO: 1006281 - RNA, 19 nt, Human
cugagagaugcuucacaca

SEQ ID NO: 1006282 - RNA, 22 nt, Human
ucacacacauuugcugucugau

SEQ ID NO: 1006283 - RNA, 22 nt, Human
caggaguccagagugucauuuu

SEQ ID NO: 1006284 - RNA, 22 nt, Human
uaguuaggguucugcagagaca

SEQ ID NO: 1006285 - RNA, 22 nt, Human
ccaggcucuaucccuccuucuu

SEQ ID NO: 1006286 - RNA, 22 nt, Human
guccaguguguuuaucuuggau

SEQ ID NO: 1006287 - RNA, 22 nt, Human
uucuggggcuaauacagagguc

SEQ ID NO: 1006288 - RNA, 22 nt, Human
uacaacauguaaagugguuuaa

SEQ ID NO: 1006289 - RNA, 22 nt, Human
guauuagguuggugcaaaagua

SEQ ID NO: 1006290 - RNA, 22 nt, Human
auuccacacaguaauacucaau

SEQ ID NO: 1006291 - RNA, 22 nt, Human
ucaccagggcuccagccagccu

SEQ ID NO: 1006292 - RNA, 21 nt, Human
guccagagagccggcuccuga

SEQ ID NO: 1006293 - RNA, 22 nt, Human
cagggagcuuucccaggacccu

SEQ ID NO: 1006294 - RNA, 22 nt, Human
cacacugucagguaaauaacac

SEQ ID NO: 1006295 - RNA, 22 nt, Human
ccaggccugcaucugcugcgca

SEQ ID NO: 1006296 - RNA, 22 nt, Human
caguauagaaaguuuuaaauug

SEQ ID NO: 1006297 - RNA, 22 nt, Human
aggaccuguaccucagcaucua

SEQ ID NO: 1006298 - RNA, 22 nt, Human
uuauuagcugggcuucagggug

SEQ ID NO: 1006299 - RNA, 22 nt, Human
cucagagaaccuaagcggagga

SEQ ID NO: 1006300 - RNA, 22 nt, Human
uuccaagugggggaagcugagu

SEQ ID NO: 1006301 - RNA, 22 nt, Human
gagcucagccugaggccuggcu

SEQ ID NO: 1006302 - RNA, 22 nt, Human
acugggcucccaggcuugucau

SEQ ID NO: 1006303 - RNA, 22 nt, Human
caguauuuauggcuugaguauu

SEQ ID NO: 1006304 - RNA, 22 nt, Human
uccaggcuaauuuugcauuguu

SEQ ID NO: 1006305 - RNA, 22 nt, Human
uccaggcaucccccaggacaga

SEQ ID NO: 1006306 - RNA, 18 nt, Human
cccacacagcaguagcuc

SEQ ID NO: 1006307 - RNA, 22 nt, Human
cuuccucccggcccaugcucug

SEQ ID NO: 1006308 - RNA, 22 nt, Human
agccuauuccaggaugagcuca

SEQ ID NO: 1006309 - RNA, 22 nt, Human
cagcucugcugggaggaugcag

SEQ ID NO: 1006310 - RNA, 22 nt, Human
gaaacauacgauuuaggagaaa

SEQ ID NO: 1006311 - RNA, 22 nt, Human
ucuggcagugaagucaugaggu

SEQ ID NO: 1006312 - RNA, 22 nt, Human
gaugccuggcacccagcaagga

SEQ ID NO: 1006313 - RNA, 22 nt, Human
ucacauuuuauaucucugguuu

SEQ ID NO: 1006314 - RNA, 22 nt, Human
aaccucaggcucucuggacaau

SEQ ID NO: 1006315 - RNA, 22 nt, Human
auuucucaucaagugccaacuc

SEQ ID NO: 1006316 - RNA, 23 nt, Human
agagcaucaugaugcuaagucug

SEQ ID NO: 1006317 - RNA, 22 nt, Human
ucccacacuacacgguuguugg

SEQ ID NO: 1006318 - RNA, 20 nt, Human
uuucuggguacucucccucu

SEQ ID NO: 1006319 - RNA, 22 nt, Human
aucuacauaaaacgaauacaua

SEQ ID NO: 1006320 - RNA, 22 nt, Human
ccuggcagcgugccgagcugcg

SEQ ID NO: 1006321 - RNA, 22 nt, Human
gcuggcagggacagcugcgugu

SEQ ID NO: 1006322 - RNA, 22 nt, Human
cccaggcauuuucaacuuuagu

SEQ ID NO: 1006323 - RNA, 17 nt, Human
acaggccugcuugcacu

SEQ ID NO: 1006324 - RNA, 22 nt, Human
cccugcaggggaccugcagccu

SEQ ID NO: 1006325 - RNA, 22 nt, Human
uuccagcuaacucacaucccuu

SEQ ID NO: 1006326 - RNA, 22 nt, Human
ccugcagggaaucgaggcagaa

SEQ ID NO: 1006327 - RNA, 22 nt, Human
uuuguaaauagcaguacucaug

SEQ ID NO: 1006328 - RNA, 22 nt, Human
uccugcagccaagggucaucga

SEQ ID NO: 1006329 - RNA, 22 nt, Human
aagcgccaugguuccugcgcag

SEQ ID NO: 1006330 - RNA, 22 nt, Human
uaauuucacugauaugaaguca

SEQ ID NO: 1006331 - RNA, 19 nt, Human
guccuggcgccgccacacc

SEQ ID NO: 1006332 - RNA, 22 nt, Human
uuucacauucagauauagacuu

SEQ ID NO: 1006333 - RNA, 22 nt, Human
cacaacuuuaggaaccacauuc

SEQ ID NO: 1006334 - RNA, 22 nt, Human
uucauauaaauggaaucagaau

SEQ ID NO: 1006335 - RNA, 22 nt, Human
auuauucuuaugucaucauggc

SEQ ID NO: 1006336 - RNA, 22 nt, Human
gaaauauuguacuggagauguu

SEQ ID NO: 1006337 - RNA, 22 nt, Human
aucuguaaaugcaaauguagcu

SEQ ID NO: 1006338 - RNA, 22 nt, Human
uuucagauggagguuuaggaca

SEQ ID NO: 1006339 - RNA, 20 nt, Human
gcuggcagaugucuugagau

SEQ ID NO: 1006340 - RNA, 22 nt, Human
ggggccuuuucugaauguggaa

SEQ ID NO: 1006341 - RNA, 22 nt, Human
guuuuauaggcuguugcuauau

SEQ ID NO: 1006342 - RNA, 22 nt, Human
agcaggcuuacuuucugauuag

SEQ ID NO: 1006343 - RNA, 22 nt, Human
uauaauguuuuccauggacuga

SEQ ID NO: 1006344 - RNA, 22 nt, Human
agggcugaaguuauggcugagc

SEQ ID NO: 1006345 - RNA, 22 nt, Human
uacccaggaggaaacugaggcu

SEQ ID NO: 1006346 - RNA, 21 nt, Human
ucuggggaagacaucuaggau

SEQ ID NO: 1006347 - RNA, 22 nt, Human
gcuaggagugggauggaagucg

SEQ ID NO: 1006348 - RNA, 22 nt, Human
uaaaggguagguuuuacuguaa

SEQ ID NO: 1006349 - RNA, 22 nt, Human
acagguggggcacuuggagccu

SEQ ID NO: 1006350 - RNA, 22 nt, Human
gaccucagugaauggucaugua

SEQ ID NO: 1006351 - RNA, 22 nt, Human
aguaugaaucucuuuauucugc

SEQ ID NO: 1006352 - RNA, 23 nt, Human
acacugucucauggauagacugc

SEQ ID NO: 1006353 - RNA, 22 nt, Human
agacaggcuuugcuguauauca

SEQ ID NO: 1006354 - RNA, 22 nt, Human
auaaagauuucuuuuucucuac

SEQ ID NO: 1006355 - RNA, 22 nt, Human
gagcucagcaaaggucugugug

SEQ ID NO: 1006356 - RNA, 22 nt, Human
ugaaaaaccucaguccgcuuua

SEQ ID NO: 1006357 - RNA, 22 nt, Human
agcacaggcuuuggugugaggg

SEQ ID NO: 1006358 - RNA, 23 nt, Human
cagcuuucagggcuuuagggaag

SEQ ID NO: 1006359 - RNA, 22 nt, Human
aggcccaaaagaaaccacuggg

SEQ ID NO: 1006360 - RNA, 22 nt, Human
agugauuugggugucagaaagu

SEQ ID NO: 1006361 - RNA, 19 nt, Human
gcagagugggguggagggu

SEQ ID NO: 1006362 - RNA, 22 nt, Human
uguaugaaucucauuuguuuaa

SEQ ID NO: 1006363 - RNA, 22 nt, Human
cacauacauucauguuacucua

SEQ ID NO: 1006364 - RNA, 18 nt, Human
uguagagccagguuugcc

SEQ ID NO: 1006365 - RNA, 22 nt, Human
ccacacugucuaacaaggcaua

SEQ ID NO: 1006366 - RNA, 22 nt, Human
cuauuagguuggugcaaaagua

SEQ ID NO: 1006367 - RNA, 22 nt, Human
auaugugaaugauaucacuuug

SEQ ID NO: 1006368 - RNA, 22 nt, Human
augucaaacacaacaccagugg

SEQ ID NO: 1006369 - RNA, 22 nt, Human
cacucugaugguuucuguucaa

SEQ ID NO: 1006370 - RNA, 22 nt, Human
uccugcagcucugagaagcauc

SEQ ID NO: 1006371 - RNA, 22 nt, Human
gagcucagacucgggccugggg

SEQ ID NO: 1006372 - RNA, 23 nt, Human
uccuuccuuugagaggcuccauc

SEQ ID NO: 1006373 - RNA, 22 nt, Human
ucccagccaggcucuaccacuu

SEQ ID NO: 1006374 - RNA, 22 nt, Human
gagaagcaaucaguggccaccc

SEQ ID NO: 1006375 - RNA, 22 nt, Human
gucaaaaaguagucauuucugu

SEQ ID NO: 1006376 - RNA, 22 nt, Human
cagcuuuauugagguauaauug

SEQ ID NO: 1006377 - RNA, 22 nt, Human
acagaccaaguuuccagcaggu

SEQ ID NO: 1006378 - RNA, 22 nt, Human
cuacauaaauauuuaugugucu

SEQ ID NO: 1006379 - RNA, 23 nt, Human
acuuuauugaccccaggucaguu

SEQ ID NO: 1006380 - RNA, 22 nt, Human
gccugcagggcccuuguggguc

SEQ ID NO: 1006381 - RNA, 22 nt, Human
gaauuugaaaagugaugggaau

SEQ ID NO: 1006382 - RNA, 23 nt, Human
ugagcaucacaggagaaccaggc

SEQ ID NO: 1006383 - RNA, 22 nt, Human
gccaagcuuggaaggaucaugg

SEQ ID NO: 1006384 - RNA, 22 nt, Human
uaauauuucuacccugcugccu

SEQ ID NO: 1006385 - RNA, 22 nt, Human
cuaugagaagaaaacaagauua

SEQ ID NO: 1006386 - RNA, 22 nt, Human
uggcaucuccgacagucuugau

SEQ ID NO: 1006387 - RNA, 22 nt, Human
uguuggaauuaggauacagagg

SEQ ID NO: 1006388 - RNA, 22 nt, Human
uguuuauuacaguucuuggaau

SEQ ID NO: 1006389 - RNA, 22 nt, Human
gggagcuguaagggacagguag

SEQ ID NO: 1006390 - RNA, 22 nt, Human
gccaggcaugggcuucugggcg

SEQ ID NO: 1006391 - RNA, 22 nt, Human
agcacugugauuuauaacauuu

SEQ ID NO: 1006392 - RNA, 22 nt, Human
cagcccaaagccccaggcuaga

SEQ ID NO: 1006393 - RNA, 22 nt, Human
aaucuuuuaggggauccugagg

SEQ ID NO: 1006394 - RNA, 22 nt, Human
agaauccucuucaguaaauucu

SEQ ID NO: 1006395 - RNA, 18 nt, Human
ccaaggccccugcugggg

SEQ ID NO: 1006396 - RNA, 21 nt, Human
auuuucauuuccaggggagga

SEQ ID NO: 1006397 - RNA, 22 nt, Human
ucuggggagcagcccuggugag

SEQ ID NO: 1006398 - RNA, 22 nt, Human
ugcaggcugccuucacagagcc

SEQ ID NO: 1006399 - RNA, 22 nt, Human
caggggccaaggguccagaccu

SEQ ID NO: 1006400 - RNA, 22 nt, Human
auaauauaauccuacuucccau

SEQ ID NO: 1006401 - RNA, 22 nt, Human
ucacacauuucucaaguguagg

SEQ ID NO: 1006402 - RNA, 22 nt, Human
acccaggccugagagacaggag

SEQ ID NO: 1006403 - RNA, 22 nt, Human
ugggcuccggcggccucaggcu

SEQ ID NO: 1006404 - RNA, 22 nt, Human
gagcacccuuugcacaucaguc

SEQ ID NO: 1006405 - RNA, 22 nt, Human
uuucacauuuaggcgugaauug

SEQ ID NO: 1006406 - RNA, 23 nt, Human
auguaucucauccaaggaagcuc

SEQ ID NO: 1006407 - RNA, 22 nt, Human
ugcaggcuggggaggcagacuu

SEQ ID NO: 1006408 - RNA, 22 nt, Human
ugcuuuauucaggguuuacccc

SEQ ID NO: 1006409 - RNA, 22 nt, Human
guccucugauuucuagguauau

SEQ ID NO: 1006410 - RNA, 18 nt, Human
gaugaagcugcuggggau

SEQ ID NO: 1006411 - RNA, 23 nt, Human
agcuuugugaaagcagacauggg

SEQ ID NO: 1006412 - RNA, 22 nt, Human
uguauaaaccauggacagcuuu

SEQ ID NO: 1006413 - RNA, 23 nt, Human
ucuuuucaaugguucuuuaugug

SEQ ID NO: 1006414 - RNA, 20 nt, Human
cugaaccaaggcuuucucag

SEQ ID NO: 1006415 - RNA, 22 nt, Human
aggccuccuggcuccaggccuu

SEQ ID NO: 1006416 - RNA, 22 nt, Human
acuggggauuagggacucagug

SEQ ID NO: 1006417 - RNA, 22 nt, Human
ucacacaugaguaaauacaggg

SEQ ID NO: 1006418 - RNA, 22 nt, Human
aucacauugccagugauuaccc

SEQ ID NO: 1006419 - RNA, 22 nt, Human
ucuguggaaauuuccugaggca

SEQ ID NO: 1006420 - RNA, 22 nt, Human
uuuuucuugugcuggaucuaau

SEQ ID NO: 1006421 - RNA, 21 nt, Human
acagagcauaaugguguggca

SEQ ID NO: 1006422 - RNA, 22 nt, Human
uucacaaaacacuauuuucugg

SEQ ID NO: 1006423 - RNA, 22 nt, Human
gauggcagguaguggucucauc

SEQ ID NO: 1006424 - RNA, 20 nt, Human
gcucugaccauaucaagaca

SEQ ID NO: 1006425 - RNA, 19 nt, Human
gcuggcagaauuuugaacc

SEQ ID NO: 1006426 - RNA, 22 nt, Human
ugggcuuccuggagccugugcu

SEQ ID NO: 1006427 - RNA, 22 nt, Human
cagggcucgcucgcucgcucgc

SEQ ID NO: 1006428 - RNA, 22 nt, Human
cucugucacuucuccagcugag

SEQ ID NO: 1006429 - RNA, 22 nt, Human
cugggcuguuuguucuggucuc

SEQ ID NO: 1006430 - RNA, 22 nt, Human
gccugcagggccugggccuacc

SEQ ID NO: 1006431 - RNA, 22 nt, Human
gugggcuuugcuggauccuucc

SEQ ID NO: 1006432 - RNA, 22 nt, Human
ucuccaggagcaagucacccag

SEQ ID NO: 1006433 - RNA, 22 nt, Human
aagaggucauaccagauaaggg

SEQ ID NO: 1006434 - RNA, 20 nt, Human
auaaaauaacugccacaaga

SEQ ID NO: 1006435 - RNA, 19 nt, Human
agaggccucagcagcuggc

SEQ ID NO: 1006436 - RNA, 22 nt, Human
ugguccuggaagguccugaggg

SEQ ID NO: 1006437 - RNA, 22 nt, Human
gguauaaaugaucagaucgcug

SEQ ID NO: 1006438 - RNA, 20 nt, Human
uucaugggagcaaagaggcc

SEQ ID NO: 1006439 - RNA, 22 nt, Human
gcuggcaguguauuguuagcug

SEQ ID NO: 1006440 - RNA, 22 nt, Human
gccaggcagauaugugagcuua

SEQ ID NO: 1006441 - RNA, 19 nt, Human
cuuuucaucaacagccaau

SEQ ID NO: 1006442 - RNA, 22 nt, Human
caucaaauaggaauauuuggca

SEQ ID NO: 1006443 - RNA, 22 nt, Human
uucccacaguguugaauccucu

SEQ ID NO: 1006444 - RNA, 22 nt, Human
aaacaugagcauuucuguuuaa

SEQ ID NO: 1006445 - RNA, 22 nt, Human
gcagagaggauauuauugucca

SEQ ID NO: 1006446 - RNA, 22 nt, Human
ugcuucugaugugagcagcccc

SEQ ID NO: 1006447 - RNA, 22 nt, Human
ugccaaauugcccuauaaauga

SEQ ID NO: 1006448 - RNA, 22 nt, Human
uaaauuguuuucuagaaguugu

SEQ ID NO: 1006449 - RNA, 22 nt, Human
uccuggcaaagauguugguguu

SEQ ID NO: 1006450 - RNA, 22 nt, Human
agccagagcagggaauuggaca

SEQ ID NO: 1006451 - RNA, 22 nt, Human
gaggcacagucccgaggcaagg

SEQ ID NO: 1006452 - RNA, 22 nt, Human
gacauaauaaucugaccuagau

SEQ ID NO: 1006453 - RNA, 22 nt, Human
ugaauaaucuuggguauuaaua

SEQ ID NO: 1006454 - RNA, 20 nt, Human
ugggcugaggaucaggugcc

SEQ ID NO: 1006455 - RNA, 22 nt, Human
ugagcagaacacgggauccaug

SEQ ID NO: 1006456 - RNA, 22 nt, Human
aaagagucuggcacuguaccag

SEQ ID NO: 1006457 - RNA, 22 nt, Human
ucuagggaacaugggucaagcu

SEQ ID NO: 1006458 - RNA, 18 nt, Human
uccugcagcuucuaugua

SEQ ID NO: 1006459 - RNA, 22 nt, Human
gagcauuuuugucugcauuuua

SEQ ID NO: 1006460 - RNA, 22 nt, Human
guccaggucuggacccugagcc

SEQ ID NO: 1006461 - RNA, 22 nt, Human
cauuagggccaccauaacaaaa

SEQ ID NO: 1006462 - RNA, 22 nt, Human
gccuccggagucacagugucuu

SEQ ID NO: 1006463 - RNA, 18 nt, Human
ugcaggcuguugaaacug

SEQ ID NO: 1006464 - RNA, 22 nt, Human
uuaugggagcaauuggggaggu

SEQ ID NO: 1006465 - RNA, 22 nt, Human
cuugggcucugugggccuuagu

SEQ ID NO: 1006466 - RNA, 22 nt, Human
cuuacaaauacacuuaggagag

SEQ ID NO: 1006467 - RNA, 22 nt, Human
ccacuguaguuaugaugaaguu

SEQ ID NO: 1006468 - RNA, 22 nt, Human
uguauaaauuuaaauuccugcu

SEQ ID NO: 1006469 - RNA, 22 nt, Human
acuuaaaaagaaucuuuucacg

SEQ ID NO: 1006470 - RNA, 22 nt, Human
auguuugacugaguuuggcaga

SEQ ID NO: 1006471 - RNA, 22 nt, Human
cauguacaaaaggcaaaugccu

SEQ ID NO: 1006472 - RNA, 22 nt, Human
aauguaugaagguuccaguuuc

SEQ ID NO: 1006473 - RNA, 22 nt, Human
cuucuuaaauuggauugcuauu

SEQ ID NO: 1006474 - RNA, 22 nt, Human
auucagcaaugagcuuggauuu

SEQ ID NO: 1006475 - RNA, 22 nt, Human
aggaccuguguuuuccuugaau

SEQ ID NO: 1006476 - RNA, 22 nt, Human
ugugucaauuuucauuccuacu

SEQ ID NO: 1006477 - RNA, 22 nt, Human
uggcaguggauaggggagcggu

SEQ ID NO: 1006478 - RNA, 22 nt, Human
aucugucuugccuugcauauuu

SEQ ID NO: 1006479 - RNA, 22 nt, Human
gaugaagcuauuugguuggcac

SEQ ID NO: 1006480 - RNA, 22 nt, Human
uuggaacaugccgggguccagg

SEQ ID NO: 1006481 - RNA, 22 nt, Human
gccuggcauauaguaguugugc

SEQ ID NO: 1006482 - RNA, 23 nt, Human
uugggaaauaguuaagacaugag

SEQ ID NO: 1006483 - RNA, 22 nt, Human
uuucuuuguuguuaucacauca

SEQ ID NO: 1006484 - RNA, 22 nt, Human
auuacucugucugccucugacc

SEQ ID NO: 1006485 - RNA, 22 nt, Human
cugggcugucaguuuuguuuua

SEQ ID NO: 1006486 - RNA, 22 nt, Human
ugcaggcuggauuugcuuuugu

SEQ ID NO: 1006487 - RNA, 22 nt, Human
cacagucacauaucuaugugug

SEQ ID NO: 1006488 - RNA, 22 nt, Human
ugagggacucccggcccugcca

SEQ ID NO: 1006489 - RNA, 16 nt, Human
cuacccagugagaagg

SEQ ID NO: 1006490 - RNA, 22 nt, Human
cacacacucuuccuggcaccua

SEQ ID NO: 1006491 - RNA, 22 nt, Human
ggccucaguuucuucaacugua

SEQ ID NO: 1006492 - RNA, 22 nt, Human
gagggaccuuuacacagacauu

SEQ ID NO: 1006493 - RNA, 22 nt, Human
acagugugaugggccugccuga

SEQ ID NO: 1006494 - RNA, 22 nt, Human
auuucucaguguacauuauguu

SEQ ID NO: 1006495 - RNA, 22 nt, Human
ggcggguguaaguaggacagcg

SEQ ID NO: 1006496 - RNA, 22 nt, Human
uuggaaaaacacgauagugguu

SEQ ID NO: 1006497 - RNA, 21 nt, Human
ggccucagccaccuggcucug

SEQ ID NO: 1006498 - RNA, 22 nt, Human
ugcuagaagauagcuagaagau

SEQ ID NO: 1006499 - RNA, 22 nt, Human
ucucaaaucaaacuuugagcuu

SEQ ID NO: 1006500 - RNA, 22 nt, Human
cuggcaguuggcauuggcaucu

SEQ ID NO: 1006501 - RNA, 22 nt, Human
uccaggcacgaggcccugugca

SEQ ID NO: 1006502 - RNA, 22 nt, Human
guuuauuaacugucaagugauu

SEQ ID NO: 1006503 - RNA, 18 nt, Human
acacugcagcagucugcu

SEQ ID NO: 1006504 - RNA, 22 nt, Human
aggaagaaccuaagaaagucuc

SEQ ID NO: 1006505 - RNA, 22 nt, Human
uccugcaggggcugaggaacca

SEQ ID NO: 1006506 - RNA, 22 nt, Human
cuuaaaaucuggcaguuagcua

SEQ ID NO: 1006507 - RNA, 22 nt, Human
ugcaggcucacccuggagcuga

SEQ ID NO: 1006508 - RNA, 22 nt, Human
agggcuccaggggaccaucagu

SEQ ID NO: 1006509 - RNA, 22 nt, Human
auuuugcuggucugaauuacuu

SEQ ID NO: 1006510 - RNA, 22 nt, Human
auaugaagaauuccaauuugga

SEQ ID NO: 1006511 - RNA, 22 nt, Human
gggcuccaccuagggacacugg

SEQ ID NO: 1006512 - RNA, 22 nt, Human
gacuuuggcaucuagacauugu

SEQ ID NO: 1006513 - RNA, 22 nt, Human
uccacccugcuuuugucuuuga

SEQ ID NO: 1006514 - RNA, 16 nt, Human
ucacauacuuccuugc

SEQ ID NO: 1006515 - RNA, 22 nt, Human
gccugcagccccucugcaguag

SEQ ID NO: 1006516 - RNA, 22 nt, Human
aaugauuggcacuagauacaca

SEQ ID NO: 1006517 - RNA, 22 nt, Human
cagguggcuucucccuaggcca

SEQ ID NO: 1006518 - RNA, 23 nt, Human
uuuuaauuuggacauaagaagau

SEQ ID NO: 1006519 - RNA, 22 nt, Human
aauuagggaggacaaagguaca

SEQ ID NO: 1006520 - RNA, 19 nt, Human
cauuuagaaguacauauua

SEQ ID NO: 1006521 - RNA, 21 nt, Human
auuuucauuaauucagugugg

SEQ ID NO: 1006522 - RNA, 22 nt, Human
ucugucaaaugagcaaguaacu

SEQ ID NO: 1006523 - RNA, 22 nt, Human
gggaccugccaaggccacccag

SEQ ID NO: 1006524 - RNA, 22 nt, Human
agacaucauguuacagauuaag

SEQ ID NO: 1006525 - RNA, 20 nt, Human
ugccaggcacggagugcaug

SEQ ID NO: 1006526 - RNA, 22 nt, Human
cuucccacuaguaucacagagc

SEQ ID NO: 1006527 - RNA, 22 nt, Human
ucaucaguuuagaaaaaauaug

SEQ ID NO: 1006528 - RNA, 22 nt, Human
ugcaggcugggaagagggacaa

SEQ ID NO: 1006529 - RNA, 22 nt, Human
uuuaaagugcugcuccuauccu

SEQ ID NO: 1006530 - RNA, 22 nt, Human
cacauaauacauguuccacuua

SEQ ID NO: 1006531 - RNA, 20 nt, Human
agacccucuggacugggccc

SEQ ID NO: 1006532 - RNA, 19 nt, Human
cugcagggaugugcagagu

SEQ ID NO: 1006533 - RNA, 19 nt, Human
ucuuuucacgcauuuugaa

SEQ ID NO: 1006534 - RNA, 22 nt, Human
gugcauuugugcaugcacaugu

SEQ ID NO: 1006535 - RNA, 22 nt, Human
ugcacaggaggcuguggagaag

SEQ ID NO: 1006536 - RNA, 22 nt, Human
auccugugcaaugacugcaucu

SEQ ID NO: 1006537 - RNA, 21 nt, Human
gaugaagcaaucuuucuguug

SEQ ID NO: 1006538 - RNA, 22 nt, Human
uccugcagucugcacucugccu

SEQ ID NO: 1006539 - RNA, 20 nt, Human
gcauccagacacccagcugc

SEQ ID NO: 1006540 - RNA, 22 nt, Human
cuguaaaacacuguaguaucug

SEQ ID NO: 1006541 - RNA, 23 nt, Human
aguaugaauucauuguuuuaguu

SEQ ID NO: 1006542 - RNA, 22 nt, Human
ccagugcccagcugcccaggca

SEQ ID NO: 1006543 - RNA, 22 nt, Human
caccugcaaggagcuuucauuu

SEQ ID NO: 1006544 - RNA, 22 nt, Human
cuucuggguugcaggucuuggc

SEQ ID NO: 1006545 - RNA, 22 nt, Human
aaguguuuacuuaaagucaugg

SEQ ID NO: 1006546 - RNA, 19 nt, Human
uccuggcacaguggaacca

SEQ ID NO: 1006547 - RNA, 22 nt, Human
aucuuuuacauuacugcccaga

SEQ ID NO: 1006548 - RNA, 22 nt, Human
uacaaaugaguuguaugaacca

SEQ ID NO: 1006549 - RNA, 22 nt, Human
gcccaggccggagagcagugcu

SEQ ID NO: 1006550 - RNA, 22 nt, Human
auuauaaagaacaugugugugg

SEQ ID NO: 1006551 - RNA, 22 nt, Human
augugaaaauccaauggcagca

SEQ ID NO: 1006552 - RNA, 22 nt, Human
uacauugcuagaaauguauuuu

SEQ ID NO: 1006553 - RNA, 22 nt, Human
uacagcauauacagaaugaaca

SEQ ID NO: 1006554 - RNA, 22 nt, Human
uuauuauagauuaugcaagauu

SEQ ID NO: 1006555 - RNA, 22 nt, Human
uggcagagagacucuccuugau

SEQ ID NO: 1006556 - RNA, 22 nt, Human
aggaccugacuggcuccugcuu

SEQ ID NO: 1006557 - RNA, 22 nt, Human
ggagaagaggagcuggaagccu

SEQ ID NO: 1006558 - RNA, 22 nt, Human
ugaaugauguauaauauugaga

SEQ ID NO: 1006559 - RNA, 22 nt, Human
cauuuguauguuccuccuuagg

SEQ ID NO: 1006560 - RNA, 22 nt, Human
augcuauacauaugacaucaca

SEQ ID NO: 1006561 - RNA, 22 nt, Human
cauaauuucacugucguauggc

SEQ ID NO: 1006562 - RNA, 22 nt, Human
uuugaaaagaaccaucgccuua

SEQ ID NO: 1006563 - RNA, 22 nt, Human
cagggcucaggcucugggauuc

SEQ ID NO: 1006564 - RNA, 23 nt, Human
uguggcugagaaauugacaacuu

SEQ ID NO: 1006565 - RNA, 22 nt, Human
cuguaugaguugggaauagaau

SEQ ID NO: 1006566 - RNA, 21 nt, Human
gaaaagcaagggaguagaaca

SEQ ID NO: 1006567 - RNA, 22 nt, Human
cuuucauucuuagauauuagug

SEQ ID NO: 1006568 - RNA, 22 nt, Human
uagauauggccgucuguuuuaa

SEQ ID NO: 1006569 - RNA, 22 nt, Human
ucuggcagcucaguucaggucu

SEQ ID NO: 1006570 - RNA, 22 nt, Human
caguuuauaugucagagcugua

SEQ ID NO: 1006571 - RNA, 22 nt, Human
caguauuuguucccuaucaaug

SEQ ID NO: 1006572 - RNA, 22 nt, Human
acacuaauuaagcugcuuuacu

SEQ ID NO: 1006573 - RNA, 22 nt, Human
aaacacaucauucaugucguca

SEQ ID NO: 1006574 - RNA, 21 nt, Human
aaaaagcuggggcaugcaugc

SEQ ID NO: 1006575 - RNA, 22 nt, Human
gggcugacagcacgccuucugu

SEQ ID NO: 1006576 - RNA, 22 nt, Human
accauugccuagaaaaauuccu

SEQ ID NO: 1006577 - RNA, 22 nt, Human
guccucuggccuuucccaggac

SEQ ID NO: 1006578 - RNA, 22 nt, Human
cauacaagcguucaauagaugu

SEQ ID NO: 1006579 - RNA, 22 nt, Human
gaauccaggguuguuugagcua

SEQ ID NO: 1006580 - RNA, 22 nt, Human
ccagcuuuugcacuggacuggg

SEQ ID NO: 1006581 - RNA, 22 nt, Human
gagcucagauucuggugucaga

SEQ ID NO: 1006582 - RNA, 22 nt, Human
gacugccagaaugugaggccug

SEQ ID NO: 1006583 - RNA, 22 nt, Human
gaggggucacaugggcuggcuu

SEQ ID NO: 1006584 - RNA, 22 nt, Human
ggggcugaaccuggaggugguc

SEQ ID NO: 1006585 - RNA, 22 nt, Human
ucacauaaauuauacaauuuca

SEQ ID NO: 1006586 - RNA, 22 nt, Human
uggaccugcuggaugggcaggu

SEQ ID NO: 1006587 - RNA, 22 nt, Human
aacauucaaaacccaguucagu

SEQ ID NO: 1006588 - RNA, 22 nt, Human
aggcaauccccugaggauacuu

SEQ ID NO: 1006589 - RNA, 22 nt, Human
uacauugaauuuuuuagcaugu

SEQ ID NO: 1006590 - RNA, 22 nt, Human
aagcuuuaagugucagucagcc

SEQ ID NO: 1006591 - RNA, 21 nt, Human
uagggcucuauuuuuauuuca

SEQ ID NO: 1006592 - RNA, 22 nt, Human
agucacaguuccuacccaguaa

SEQ ID NO: 1006593 - RNA, 17 nt, Human
agcaggcugcagaggcc

SEQ ID NO: 1006594 - RNA, 22 nt, Human
cuaaaauuaucaagauaauucc

SEQ ID NO: 1006595 - RNA, 22 nt, Human
gagccuccuccuggugugccga

SEQ ID NO: 1006596 - RNA, 18 nt, Human
cucucuuuccacucuuug

SEQ ID NO: 1006597 - RNA, 22 nt, Human
acagcucuguguauugucaucu

SEQ ID NO: 1006598 - RNA, 22 nt, Human
agcuuuaugggagcuuagauaa

SEQ ID NO: 1006599 - RNA, 22 nt, Human
uaggaaaugcuccauugcauaa

SEQ ID NO: 1006600 - RNA, 22 nt, Human
aaacaucaauugcaucucccaa

SEQ ID NO: 1006601 - RNA, 22 nt, Human
uuauuagggugguuuauguucu

SEQ ID NO: 1006602 - RNA, 22 nt, Human
ggcuucugcucagccugcacgc

SEQ ID NO: 1006603 - RNA, 22 nt, Human
cccugcagagggaugggggcag

SEQ ID NO: 1006604 - RNA, 22 nt, Human
uuuuauuaguggcuagaugggg

SEQ ID NO: 1006605 - RNA, 22 nt, Human
uaauaguugugacuuuguaaag

SEQ ID NO: 1006606 - RNA, 22 nt, Human
cugggcuuagcagcuccugguc

SEQ ID NO: 1006607 - RNA, 22 nt, Human
cacaugaugguggaagccauag

SEQ ID NO: 1006608 - RNA, 23 nt, Human
auguuauuauuagcagucuugcc

SEQ ID NO: 1006609 - RNA, 21 nt, Human
uaugaacaugaccaauagucc

SEQ ID NO: 1006610 - RNA, 22 nt, Human
gccagaagggguggauccaggc

SEQ ID NO: 1006611 - RNA, 22 nt, Human
guccucugaaguugugcaaugc

SEQ ID NO: 1006612 - RNA, 22 nt, Human
uuuugagauggagucuugcucu

SEQ ID NO: 1006613 - RNA, 22 nt, Human
cugguggagggacaggcuuagc

SEQ ID NO: 1006614 - RNA, 22 nt, Human
aaacaugcauucaagaaaaucu

SEQ ID NO: 1006615 - RNA, 19 nt, Human
ugccuggcaccagcuccac

SEQ ID NO: 1006616 - RNA, 22 nt, Human
gacucugggcugagccagggcc

SEQ ID NO: 1006617 - RNA, 22 nt, Human
ugacaggaggcuugaggccagg

SEQ ID NO: 1006618 - RNA, 22 nt, Human
agaaaguuuugugcuauauaug

SEQ ID NO: 1006619 - RNA, 22 nt, Human
uagcuuuaggaugguucucuug

SEQ ID NO: 1006620 - RNA, 22 nt, Human
uguuuuucaaauauugcucugu

SEQ ID NO: 1006621 - RNA, 22 nt, Human
auaucauuauguuaugagcaca

SEQ ID NO: 1006622 - RNA, 22 nt, Human
ugggcugaaaugcuguggacua

SEQ ID NO: 1006623 - RNA, 22 nt, Human
auuaauuuuucugacagccaca

SEQ ID NO: 1006624 - RNA, 22 nt, Human
ucugggcugguugugcuugcuu

SEQ ID NO: 1006625 - RNA, 22 nt, Human
aaggcuuucagcuaacuugauu

SEQ ID NO: 1006626 - RNA, 18 nt, Human
gccugcaggcacgggggu

SEQ ID NO: 1006627 - RNA, 22 nt, Human
cuaaaauuaccuaccaguuuag

SEQ ID NO: 1006628 - RNA, 22 nt, Human
uaguuaggaauagcagcgacuc

SEQ ID NO: 1006629 - RNA, 22 nt, Human
uuugcaaauauguguuucuauu

SEQ ID NO: 1006630 - RNA, 22 nt, Human
agcuuuaucagaggagucucua

SEQ ID NO: 1006631 - RNA, 23 nt, Human
accaugaugggagugcaaauaag

SEQ ID NO: 1006632 - RNA, 22 nt, Human
gcuggcagcuggaaguugggcu

SEQ ID NO: 1006633 - RNA, 22 nt, Human
ccauacacacaccaaauuugua

SEQ ID NO: 1006634 - RNA, 22 nt, Human
ucugggcuuuguaaugggaggu

SEQ ID NO: 1006635 - RNA, 22 nt, Human
gaggacucugggcguguauggg

SEQ ID NO: 1006636 - RNA, 22 nt, Human
ugucagagcaaggccaggccag

SEQ ID NO: 1006637 - RNA, 22 nt, Human
acaguguguucugggaccucca

SEQ ID NO: 1006638 - RNA, 22 nt, Human
gcauccaaaccauucaucagcc

SEQ ID NO: 1006639 - RNA, 22 nt, Human
aggccuccagccacaugccagu

SEQ ID NO: 1006640 - RNA, 22 nt, Human
agggacucccugggccgacacg

SEQ ID NO: 1006641 - RNA, 22 nt, Human
agccaccuucuccaaggccuag

SEQ ID NO: 1006642 - RNA, 22 nt, Human
cugggagggguagccaauccua

SEQ ID NO: 1006643 - RNA, 22 nt, Human
caggacauugauccauuggcac

SEQ ID NO: 1006644 - RNA, 22 nt, Human
ugcauaaagugccauaguauua

SEQ ID NO: 1006645 - RNA, 22 nt, Human
aggcuuuggggcauucuguguu

SEQ ID NO: 1006646 - RNA, 22 nt, Human
gauucuuacuucuaagcaagcu

SEQ ID NO: 1006647 - RNA, 22 nt, Human
ugcacaggugagacucaggaag

SEQ ID NO: 1006648 - RNA, 22 nt, Human
ugggaccugcuccuggaaugag

SEQ ID NO: 1006649 - RNA, 22 nt, Human
gcagcuuuggagguggaacucu

SEQ ID NO: 1006650 - RNA, 22 nt, Human
aagagcaucgguggagccccca

SEQ ID NO: 1006651 - RNA, 22 nt, Human
aaauauguauggaguucaugaa

SEQ ID NO: 1006652 - RNA, 22 nt, Human
auuuaaauuuucugauggagag

SEQ ID NO: 1006653 - RNA, 19 nt, Human
uccaggaggcugccauuga

SEQ ID NO: 1006654 - RNA, 22 nt, Human
uuacaguuuaguccaagccaga

SEQ ID NO: 1006655 - RNA, 22 nt, Human
ugcuucugcucagcuuccuacu

SEQ ID NO: 1006656 - RNA, 22 nt, Human
ucugcucuguggcuucagcuaa

SEQ ID NO: 1006657 - RNA, 22 nt, Human
uccaggaggguuuucugccuuc

SEQ ID NO: 1006658 - RNA, 22 nt, Human
cauuaggguaauugaacacuua

SEQ ID NO: 1006659 - RNA, 21 nt, Human
uuacaaagcaagugcuguguc

SEQ ID NO: 1006660 - RNA, 22 nt, Human
agcuugauuucucugcagugug

SEQ ID NO: 1006661 - RNA, 22 nt, Human
cacccacauuccaucacucugc

SEQ ID NO: 1006662 - RNA, 22 nt, Human
ugcagggauuguuggcauccau

SEQ ID NO: 1006663 - RNA, 22 nt, Human
gccuggaaugcaaugugacgaa

SEQ ID NO: 1006664 - RNA, 22 nt, Human
ugugugaaggaauauauacuca

SEQ ID NO: 1006665 - RNA, 22 nt, Human
uccugugccaucucuagagacu

SEQ ID NO: 1006666 - RNA, 22 nt, Human
cgcuaggauuaggauuaauccu

SEQ ID NO: 1006667 - RNA, 22 nt, Human
auuaaaauuccaagguaugcca

SEQ ID NO: 1006668 - RNA, 22 nt, Human
gagaaagauguaggcugggagg

SEQ ID NO: 1006669 - RNA, 22 nt, Human
gcuggcagaagagcugguucaa

SEQ ID NO: 1006670 - RNA, 22 nt, Human
aguugggaguuauagacucuau

SEQ ID NO: 1006671 - RNA, 22 nt, Human
uuccaggcucccuuggaggugu

SEQ ID NO: 1006672 - RNA, 20 nt, Human
cagagaccaggccagguguc

SEQ ID NO: 1006673 - RNA, 22 nt, Human
aauucuguuacuaaugugaugu

SEQ ID NO: 1006674 - RNA, 22 nt, Human
ucaggagcugcacugggcccac

SEQ ID NO: 1006675 - RNA, 22 nt, Human
cccacccugggaagcuaggcag

SEQ ID NO: 1006676 - RNA, 22 nt, Human
auuaaauuagcaaacugugaaa

SEQ ID NO: 1006677 - RNA, 15 nt, Human
cacacagacagcuug

SEQ ID NO: 1006678 - RNA, 23 nt, Human
acaagauagggauaaaaagauaa

SEQ ID NO: 1006679 - RNA, 22 nt, Human
auguagaacagguuaaugacag

SEQ ID NO: 1006680 - RNA, 22 nt, Human
acaggccuuggcaggcauguga

SEQ ID NO: 1006681 - RNA, 22 nt, Human
gcuggcagguaaagccccgggg

SEQ ID NO: 1006682 - RNA, 22 nt, Human
uccugagcccuguaggacccug

SEQ ID NO: 1006683 - RNA, 22 nt, Human
gggaccugaggcccugcuccac

SEQ ID NO: 1006684 - RNA, 22 nt, Human
uaauuucuggagggagaaagag

SEQ ID NO: 1006685 - RNA, 22 nt, Human
aggaccugagaguuggaaaucc

SEQ ID NO: 1006686 - RNA, 22 nt, Human
cuuuauuagauguagacuuucu

SEQ ID NO: 1006687 - RNA, 22 nt, Human
guccagugacaaguagcuggcc

SEQ ID NO: 1006688 - RNA, 22 nt, Human
gccaaaucacagggccaaaagc

SEQ ID NO: 1006689 - RNA, 22 nt, Human
ccugggcucgcgcacuucaccc

SEQ ID NO: 1006690 - RNA, 22 nt, Human
guggcaguuuugacaucacaaa

SEQ ID NO: 1006691 - RNA, 17 nt, Human
ccauacugacauauuga

SEQ ID NO: 1006692 - RNA, 22 nt, Human
uggaccugaagaauaggaagua

SEQ ID NO: 1006693 - RNA, 22 nt, Human
ugucuuuauauauuuggaaaau

SEQ ID NO: 1006694 - RNA, 22 nt, Human
uuuucauuguuacuaugagcua

SEQ ID NO: 1006695 - RNA, 22 nt, Human
aucucauaacucauuugaagac

SEQ ID NO: 1006696 - RNA, 22 nt, Human
acauuuuuauucaucaaagcag

SEQ ID NO: 1006697 - RNA, 22 nt, Human
cagggcuccccagagagccucu

SEQ ID NO: 1006698 - RNA, 22 nt, Human
gcaguguuuacauauuagaaac

SEQ ID NO: 1006699 - RNA, 22 nt, Human
cagucuggaggucagcuggcuu

SEQ ID NO: 1006700 - RNA, 22 nt, Human
ucagcuuuuaaaaacaagaagu

SEQ ID NO: 1006701 - RNA, 22 nt, Human
uuuaaauuuguguuuagagggu

SEQ ID NO: 1006702 - RNA, 22 nt, Human
uccaggcucccucaggaugcac

SEQ ID NO: 1006703 - RNA, 22 nt, Human
accaagcucucuucccggcucu

SEQ ID NO: 1006704 - RNA, 22 nt, Human
ugcuacaauucacaucuggaua

SEQ ID NO: 1006705 - RNA, 22 nt, Human
uggguaggaccagaaaugcacu

SEQ ID NO: 1006706 - RNA, 22 nt, Human
ucagcuuugccaccagcuguaa

SEQ ID NO: 1006707 - RNA, 22 nt, Human
ccacccagccagaugcaggaag

SEQ ID NO: 1006708 - RNA, 22 nt, Human
auuugcuuuuacuauguuaaaa

SEQ ID NO: 1006709 - RNA, 21 nt, Human
aaaugaaugugguagugcaag

SEQ ID NO: 1006710 - RNA, 22 nt, Human
acacacuguaaggacuaucacu

SEQ ID NO: 1006711 - RNA, 22 nt, Human
gaacacauuucucugacuguag

SEQ ID NO: 1006712 - RNA, 22 nt, Human
auucacagaauaguuuuaccag

SEQ ID NO: 1006713 - RNA, 22 nt, Human
gaggggcuggguagggcaaccc

SEQ ID NO: 1006714 - RNA, 22 nt, Human
acaggcagguccugucccagcu

SEQ ID NO: 1006715 - RNA, 22 nt, Human
uggcaguggcucagagugcaga

SEQ ID NO: 1006716 - RNA, 22 nt, Human
cugccugcaugcugccauagcu

SEQ ID NO: 1006717 - RNA, 22 nt, Human
cccuuccucccaggcuucugug

SEQ ID NO: 1006718 - RNA, 23 nt, Human
agcuucauugaccuccgcagggg

SEQ ID NO: 1006719 - RNA, 22 nt, Human
ucuuuauuuuaugcuugugcaa

SEQ ID NO: 1006720 - RNA, 22 nt, Human
ugcagugguugagagcccagac

SEQ ID NO: 1006721 - RNA, 22 nt, Human
cacauaauugaacgugaugagu

SEQ ID NO: 1006722 - RNA, 22 nt, Human
uuguacaaaggauuuggaagag

SEQ ID NO: 1006723 - RNA, 22 nt, Human
guuuagaacacggaaauacuga

SEQ ID NO: 1006724 - RNA, 22 nt, Human
ggggaccugggcuucaaggguu

SEQ ID NO: 1006725 - RNA, 22 nt, Human
cacacauuucagaugcuacaau

SEQ ID NO: 1006726 - RNA, 22 nt, Human
gcuucuaucccuccacugcacu

SEQ ID NO: 1006727 - RNA, 20 nt, Human
aucugcuugccuguccucgg

SEQ ID NO: 1006728 - RNA, 22 nt, Human
agucccuucucaaagugugcgg

SEQ ID NO: 1006729 - RNA, 22 nt, Human
uuauuacacugaaagaauugcg

SEQ ID NO: 1006730 - RNA, 22 nt, Human
cagcuuuaccaauauuuggaaa

SEQ ID NO: 1006731 - RNA, 22 nt, Human
ccagagagagaggucaauggca

SEQ ID NO: 1006732 - RNA, 17 nt, Human
acaggcagaucaccuga

SEQ ID NO: 1006733 - RNA, 22 nt, Human
uccaggcaugguguaauuuugc

SEQ ID NO: 1006734 - RNA, 22 nt, Human
cagggcucuuccggagcaggga

SEQ ID NO: 1006735 - RNA, 22 nt, Human
acaguguguuggaggagacugu

SEQ ID NO: 1006736 - RNA, 22 nt, Human
aagucuguuugagugucacacu

SEQ ID NO: 1006737 - RNA, 22 nt, Human
aaguccuuggagaauagaaagg

SEQ ID NO: 1006738 - RNA, 22 nt, Human
ccuggggaaaagcaggcauuua

SEQ ID NO: 1006739 - RNA, 22 nt, Human
cccugcagcuuuugcauaguca

SEQ ID NO: 1006740 - RNA, 17 nt, Human
aggcauggucuggggug

SEQ ID NO: 1006741 - RNA, 22 nt, Human
uagacacaucuucauccacaau

SEQ ID NO: 1006742 - RNA, 22 nt, Human
acuggcagaggauagcacuaau

SEQ ID NO: 1006743 - RNA, 21 nt, Human
gccugcaguuuugaagcccuu

SEQ ID NO: 1006744 - RNA, 22 nt, Human
aauaacuucaguucuuacauua

SEQ ID NO: 1006745 - RNA, 22 nt, Human
ucagggacagggugcugcugcg

SEQ ID NO: 1006746 - RNA, 21 nt, Human
acauacauaccuuaccaccuu

SEQ ID NO: 1006747 - RNA, 22 nt, Human
uuuuucauugcagccucucucc

SEQ ID NO: 1006748 - RNA, 22 nt, Human
ggcuuuaucaaaugagacccug

SEQ ID NO: 1006749 - RNA, 20 nt, Human
ucugugcaccugcuacaagg

SEQ ID NO: 1006750 - RNA, 22 nt, Human
cucugaccauucccuugauuuu

SEQ ID NO: 1006751 - RNA, 19 nt, Human
gggguggcuggggcuccag

SEQ ID NO: 1006752 - RNA, 22 nt, Human
auuagagguacaaaccuucacu

SEQ ID NO: 1006753 - RNA, 22 nt, Human
cuugggaaugcuaacagaugac

SEQ ID NO: 1006754 - RNA, 22 nt, Human
gcccaagcuggacugcaguggc

SEQ ID NO: 1006755 - RNA, 17 nt, Human
ccaggcuccaucacugu

SEQ ID NO: 1006756 - RNA, 22 nt, Human
uacacauccauguuuugacuuu

SEQ ID NO: 1006757 - RNA, 22 nt, Human
uuucuuucaauucuccuaaugc

SEQ ID NO: 1006758 - RNA, 22 nt, Human
aaagcagguugcaauuacagug

SEQ ID NO: 1006759 - RNA, 22 nt, Human
ugccuacauuccuugcuuaugg

SEQ ID NO: 1006760 - RNA, 22 nt, Human
ccagacccugcucuggggcucu

SEQ ID NO: 1006761 - RNA, 22 nt, Human
cuguccagucuuuagcaagcug

SEQ ID NO: 1006762 - RNA, 19 nt, Human
ccaggccuggcgucuccgc

SEQ ID NO: 1006763 - RNA, 21 nt, Human
cacacagugaucuauccacau

SEQ ID NO: 1006764 - RNA, 22 nt, Human
aauguauguguauaucaaauca

SEQ ID NO: 1006765 - RNA, 22 nt, Human
ccugggcuguugcaucauccuu

SEQ ID NO: 1006766 - RNA, 21 nt, Human
augugaaaccuuccacgcuga

SEQ ID NO: 1006767 - RNA, 22 nt, Human
uacaaguaaauuguagauacca

SEQ ID NO: 1006768 - RNA, 22 nt, Human
agcuuuggagacugacuccauc

SEQ ID NO: 1006769 - RNA, 22 nt, Human
cagggcucgcucuugcccuucg

SEQ ID NO: 1006770 - RNA, 22 nt, Human
cagccaagaaccacagacccag

SEQ ID NO: 1006771 - RNA, 22 nt, Human
uguuuauucauggcuaaugaaa

SEQ ID NO: 1006772 - RNA, 22 nt, Human
caggcagcugcuggguucagcc

SEQ ID NO: 1006773 - RNA, 22 nt, Human
gcuggcaggguucucacugaaa

SEQ ID NO: 1006774 - RNA, 22 nt, Human
agucuacaaucuuaaaugaacu

SEQ ID NO: 1006775 - RNA, 22 nt, Human
aucagagauggcuccagugcuc

SEQ ID NO: 1006776 - RNA, 22 nt, Human
acagguggcuuauuggcugauu

SEQ ID NO: 1006777 - RNA, 22 nt, Human
aagggcucugcugucucucccc

SEQ ID NO: 1006778 - RNA, 22 nt, Human
cagagccucagaauccugugga

SEQ ID NO: 1006779 - RNA, 22 nt, Human
uucucagugaaguuuagaacau

SEQ ID NO: 1006780 - RNA, 23 nt, Human
aaauaugucugagggcaaagaau

SEQ ID NO: 1006781 - RNA, 22 nt, Human
cuccugaggaaaagcuugguca

SEQ ID NO: 1006782 - RNA, 20 nt, Human
agguuccuuuguggagaauu

SEQ ID NO: 1006783 - RNA, 22 nt, Human
agggcuccaggggcugggugac

SEQ ID NO: 1006784 - RNA, 18 nt, Human
acacacacaccuguguau

SEQ ID NO: 1006785 - RNA, 22 nt, Human
ggcaagagggcagauggagugc

SEQ ID NO: 1006786 - RNA, 22 nt, Human
ugcuuuauuuuaaauaugccau

SEQ ID NO: 1006787 - RNA, 22 nt, Human
aacagcauaccaauguacauau

SEQ ID NO: 1006788 - RNA, 21 nt, Human
uucauaaaccauucucaugca

SEQ ID NO: 1006789 - RNA, 22 nt, Human
aauaauuuuagcucagaguugu

SEQ ID NO: 1006790 - RNA, 22 nt, Human
cugaaaauguuacacaggaaga

SEQ ID NO: 1006791 - RNA, 22 nt, Human
ccagagagauugcuucuaaaga

SEQ ID NO: 1006792 - RNA, 22 nt, Human
gagaaagauuguccuucagggg

SEQ ID NO: 1006793 - RNA, 22 nt, Human
ugcuucuggguaggccucagga

SEQ ID NO: 1006794 - RNA, 22 nt, Human
uuucacaugguacugccuguuu

SEQ ID NO: 1006795 - RNA, 22 nt, Human
gggccccuugcugcucugcugg

SEQ ID NO: 1006796 - RNA, 22 nt, Human
ugcagggauuagaggccgggga

SEQ ID NO: 1006797 - RNA, 18 nt, Human
aggaaagaaaggcaggug

SEQ ID NO: 1006798 - RNA, 21 nt, Human
uuuagggaccaggucauaggc

SEQ ID NO: 1006799 - RNA, 22 nt, Human
ggcuucuggugggagcaugacu

SEQ ID NO: 1006800 - RNA, 22 nt, Human
cauuuauucauuugcuagggcu

SEQ ID NO: 1006801 - RNA, 22 nt, Human
gugcuaggauuacaggcauggg

SEQ ID NO: 1006802 - RNA, 22 nt, Human
cagggcucgcugccagcuucag

SEQ ID NO: 1006803 - RNA, 19 nt, Human
ggcauccagaacuaccagu

SEQ ID NO: 1006804 - RNA, 22 nt, Human
ccagagaggcaaaacuccuucc

SEQ ID NO: 1006805 - RNA, 22 nt, Human
cagggcucccuugcaaggaggg

SEQ ID NO: 1006806 - RNA, 22 nt, Human
uuucaaacauagaucugaauau

SEQ ID NO: 1006807 - RNA, 22 nt, Human
agcaggcuugguccccagccuc

SEQ ID NO: 1006808 - RNA, 22 nt, Human
cauuguuaccaucuuuuaccua

SEQ ID NO: 1006809 - RNA, 18 nt, Human
gcagcuuuugauucaccc

SEQ ID NO: 1006810 - RNA, 22 nt, Human
acacccaggcuggcgugcagug

SEQ ID NO: 1006811 - RNA, 22 nt, Human
auugaaaauauaauucuaggag

SEQ ID NO: 1006812 - RNA, 20 nt, Human
gcaaaauaggcucuguuggu

SEQ ID NO: 1006813 - RNA, 19 nt, Human
caggucuucuuggaggacu

SEQ ID NO: 1006814 - RNA, 22 nt, Human
cagggacaauggcagagccuga

SEQ ID NO: 1006815 - RNA, 19 nt, Human
cuccaagugccaaggacag

SEQ ID NO: 1006816 - RNA, 22 nt, Human
ugaagccacuuuccagaaucac

SEQ ID NO: 1006817 - RNA, 22 nt, Human
uagcuuuaaaaaucaucaaagc

SEQ ID NO: 1006818 - RNA, 22 nt, Human
uuaugcaaaggggccucuuccu

SEQ ID NO: 1006819 - RNA, 22 nt, Human
gggcugacaaucucuuuacuua

SEQ ID NO: 1006820 - RNA, 22 nt, Human
uuucauugaugggugauagaaa

SEQ ID NO: 1006821 - RNA, 22 nt, Human
ugcagggaagcaaggguggcuc

SEQ ID NO: 1006822 - RNA, 22 nt, Human
ggggcugagucagugggaagag

SEQ ID NO: 1006823 - RNA, 22 nt, Human
caugagauaauuuuucuccagu

SEQ ID NO: 1006824 - RNA, 22 nt, Human
ccauucauacaauuuuguucua

SEQ ID NO: 1006825 - RNA, 22 nt, Human
ccugggcuuacgaccucugacu

SEQ ID NO: 1006826 - RNA, 22 nt, Human
gcagcuuuuuggaugucaguua

SEQ ID NO: 1006827 - RNA, 22 nt, Human
aaaguucuggcauuuucugucu

SEQ ID NO: 1006828 - RNA, 22 nt, Human
cuccuggcacucaguguggaag

SEQ ID NO: 1006829 - RNA, 22 nt, Human
guguaugauuucaaauggcuag

SEQ ID NO: 1006830 - RNA, 22 nt, Human
ggccucucugagagcagacguu

SEQ ID NO: 1006831 - RNA, 20 nt, Human
uaacuuucuaugcuuucagc

SEQ ID NO: 1006832 - RNA, 22 nt, Human
guuauuagaagugaaggauugu

SEQ ID NO: 1006833 - RNA, 22 nt, Human
ugggcucagucugcuugguccu

SEQ ID NO: 1006834 - RNA, 22 nt, Human
cucagcucugacaggaggcauc

SEQ ID NO: 1006835 - RNA, 22 nt, Human
uuuuccuucugauacuccauuu

SEQ ID NO: 1006836 - RNA, 23 nt, Human
cuggggcuuucaaaucugggcag

SEQ ID NO: 1006837 - RNA, 22 nt, Human
gccaggcauucuagaaguagug

SEQ ID NO: 1006838 - RNA, 22 nt, Human
cccacacucugagaaaugcuga

SEQ ID NO: 1006839 - RNA, 22 nt, Human
acacaucaugccaaguuucacc

SEQ ID NO: 1006840 - RNA, 22 nt, Human
gcuggggaggcagcagagaaca

SEQ ID NO: 1006841 - RNA, 22 nt, Human
uccagaccauggauggcugcaa

SEQ ID NO: 1006842 - RNA, 22 nt, Human
uugaauuauaagugugucuacu

SEQ ID NO: 1006843 - RNA, 22 nt, Human
uucagagagaccaaguggcgug

SEQ ID NO: 1006844 - RNA, 22 nt, Human
uuuugagauggugucucgcucc

SEQ ID NO: 1006845 - RNA, 22 nt, Human
gcagcucuuuucuuaaagagau

SEQ ID NO: 1006846 - RNA, 22 nt, Human
cagaggcugccagccaugugca

SEQ ID NO: 1006847 - RNA, 22 nt, Human
ugggcuucuggaguggggcaga

SEQ ID NO: 1006848 - RNA, 22 nt, Human
agcuuuguggcuuugcaagacu

SEQ ID NO: 1006849 - RNA, 22 nt, Human
gcucugagacaguagagauggc

SEQ ID NO: 1006850 - RNA, 22 nt, Human
aucaaauauaauaauuuucgcu

SEQ ID NO: 1006851 - RNA, 22 nt, Human
aagggcucacccaacucacuuc

SEQ ID NO: 1006852 - RNA, 22 nt, Human
gauuuauugucccuguccugcu

SEQ ID NO: 1006853 - RNA, 22 nt, Human
agaaucucuacucaaguacuug

SEQ ID NO: 1006854 - RNA, 22 nt, Human
ccaggccuggaccaugccaggg

SEQ ID NO: 1006855 - RNA, 22 nt, Human
agucucuuuaaucacagugucu

SEQ ID NO: 1006856 - RNA, 22 nt, Human
gcuccaggagagggaagcagau

SEQ ID NO: 1006857 - RNA, 22 nt, Human
gcaggcucacucuguuuggcuc

SEQ ID NO: 1006858 - RNA, 17 nt, Human
gcccacccuuaggagcu

SEQ ID NO: 1006859 - RNA, 22 nt, Human
cucucuccuuagcugcagacca

SEQ ID NO: 1006860 - RNA, 22 nt, Human
acuggggaauggaacugggaau

SEQ ID NO: 1006861 - RNA, 22 nt, Human
uucuuucaauagcuggcauaug

SEQ ID NO: 1006862 - RNA, 20 nt, Human
accccacagaguccauugca

SEQ ID NO: 1006863 - RNA, 22 nt, Human
uagcauuuauuccagauuugga

SEQ ID NO: 1006864 - RNA, 23 nt, Human
ucagggacaugaugugucauauc

SEQ ID NO: 1006865 - RNA, 22 nt, Human
aaauaguuuagcucucauuuca

SEQ ID NO: 1006866 - RNA, 22 nt, Human
agcuuuauauguuguuucucca

SEQ ID NO: 1006867 - RNA, 23 nt, Human
aaacuacauuuauaguuuuucuc

SEQ ID NO: 1006868 - RNA, 22 nt, Human
guaugaaaauuguaaaguucuu

SEQ ID NO: 1006869 - RNA, 22 nt, Human
guuagggaucaggaacaagagc

SEQ ID NO: 1006870 - RNA, 22 nt, Human
guagggacccacagucuauauu

SEQ ID NO: 1006871 - RNA, 22 nt, Human
aguaugaagaugaugaaaaaua

SEQ ID NO: 1006872 - RNA, 22 nt, Human
ucccagggcacucacccucccu

SEQ ID NO: 1006873 - RNA, 18 nt, Human
gacaaaaguacagacaga

SEQ ID NO: 1006874 - RNA, 22 nt, Human
guuucauucggcagcucauaag

SEQ ID NO: 1006875 - RNA, 22 nt, Human
cacacucauuagucauuucucu

SEQ ID NO: 1006876 - RNA, 22 nt, Human
uucugucuguaaacuucucaau

SEQ ID NO: 1006877 - RNA, 22 nt, Human
ccagcuuuucagaaucugccug

SEQ ID NO: 1006878 - RNA, 22 nt, Human
uccugcaggccuguucccagua

SEQ ID NO: 1006879 - RNA, 22 nt, Human
uuauuuacaacucuucucuucc

SEQ ID NO: 1006880 - RNA, 22 nt, Human
aauuagggaaaacauuugcuuu

SEQ ID NO: 1006881 - RNA, 22 nt, Human
uuagggacaaauuugcagaacc

SEQ ID NO: 1006882 - RNA, 22 nt, Human
uauugaggaucuccugcuaauu

SEQ ID NO: 1006883 - RNA, 22 nt, Human
cugcaggagcaaagccucugcu

SEQ ID NO: 1006884 - RNA, 22 nt, Human
auauucuuccaaaacaucauuu

SEQ ID NO: 1006885 - RNA, 22 nt, Human
uccaggcauuccagccauucca

SEQ ID NO: 1006886 - RNA, 22 nt, Human
uccugagcuacaguaguaugau

SEQ ID NO: 1006887 - RNA, 21 nt, Human
ccuggcagaagccugauaugc

SEQ ID NO: 1006888 - RNA, 22 nt, Human
cccugcagagaccacugaccuu

SEQ ID NO: 1006889 - RNA, 22 nt, Human
cagguggccaguacucaaggau

SEQ ID NO: 1006890 - RNA, 22 nt, Human
ucagagaggauuuuaauaagug

SEQ ID NO: 1006891 - RNA, 22 nt, Human
cuccuggcacugucuugaccca

SEQ ID NO: 1006892 - RNA, 22 nt, Human
ucauuguuucugcuuuucauga

SEQ ID NO: 1006893 - RNA, 22 nt, Human
auguuugaaauuguaaguauau

SEQ ID NO: 1006894 - RNA, 22 nt, Human
aauaaguacuuggggauaacuu

SEQ ID NO: 1006895 - RNA, 22 nt, Human
ugauuugaaaccuuuggcaaga

SEQ ID NO: 1006896 - RNA, 22 nt, Human
cuucauuucaggcugaagaaua

SEQ ID NO: 1006897 - RNA, 18 nt, Human
ucagggaaucuuggccuu

SEQ ID NO: 1006898 - RNA, 22 nt, Human
uugacuauacucuggcggaaaa

SEQ ID NO: 1006899 - RNA, 22 nt, Human
uuuuguguugccauguuaagca

SEQ ID NO: 1006900 - RNA, 22 nt, Human
cucuaaauguggucugcagaua

SEQ ID NO: 1006901 - RNA, 22 nt, Human
ugaaagaagccucccuuuggag

SEQ ID NO: 1006902 - RNA, 22 nt, Human
uacaaagugauuuuggaauuga

SEQ ID NO: 1006903 - RNA, 22 nt, Human
uguguuuuggaaggaacaugca

SEQ ID NO: 1006904 - RNA, 22 nt, Human
agugaaaaccuaaucaugcagu

SEQ ID NO: 1006905 - RNA, 21 nt, Human
uaagaacauuaucuucuuccu

SEQ ID NO: 1006906 - RNA, 22 nt, Human
cuauuuucccauaugguugaca

SEQ ID NO: 1006907 - RNA, 22 nt, Human
gaaaccuuugccgauggggucc

SEQ ID NO: 1006908 - RNA, 22 nt, Human
uuggaggaagcucaugggggau

SEQ ID NO: 1006909 - RNA, 22 nt, Human
auuuacagacguggauuagugc

SEQ ID NO: 1006910 - RNA, 22 nt, Human
uccugaaaauaauuucacaaga

SEQ ID NO: 1006911 - RNA, 23 nt, Human
acacauguuuaugcuugggggca

SEQ ID NO: 1006912 - RNA, 22 nt, Human
ucuuccagauacuuccugacuu

SEQ ID NO: 1006913 - RNA, 22 nt, Human
agagcaauuagcuuagguaaaa

SEQ ID NO: 1006914 - RNA, 22 nt, Human
gaauaauugugaugcuugaagu

SEQ ID NO: 1006915 - RNA, 20 nt, Human
uuugauugccccucugacuu

SEQ ID NO: 1006916 - RNA, 22 nt, Human
uuuucaguuccaucucugcucu

SEQ ID NO: 1006917 - RNA, 22 nt, Human
acaaucagcacugaguuuaucu

SEQ ID NO: 1006918 - RNA, 22 nt, Human
uguguggcaagcuguaugcuag

SEQ ID NO: 1006919 - RNA, 22 nt, Human
ugaauaaucuuggguauuaaua

SEQ ID NO: 1006920 - RNA, 22 nt, Human
cacauuuaaagguugaagcuga

SEQ ID NO: 1006921 - RNA, 23 nt, Human
uuaagacuggcugaacuuaguag

SEQ ID NO: 1006922 - RNA, 22 nt, Human
aauucaaggaucuguuaaaucu

SEQ ID NO: 1006923 - RNA, 22 nt, Human
uuuuccuucugauacuccauuu

SEQ ID NO: 1006924 - RNA, 22 nt, Human
augauugaaaaugacauugcca

SEQ ID NO: 1006925 - RNA, 22 nt, Human
acugauuucagggaugagaaga

SEQ ID NO: 1006926 - RNA, 22 nt, Human
guuuuguucaugaacauugggu

SEQ ID NO: 1006927 - RNA, 22 nt, Human
acuuccagaaaugauuuaauuu

SEQ ID NO: 1006928 - RNA, 22 nt, Human
aauuauguuugcuuuagaugga

SEQ ID NO: 1006929 - RNA, 22 nt, Human
guauuaugaaugccgaggcggc

SEQ ID NO: 1006930 - RNA, 22 nt, Human
uuuggauugcuuggaugcuucg

SEQ ID NO: 1006931 - RNA, 22 nt, Human
auguuguugaacucuuugcaug

SEQ ID NO: 1006932 - RNA, 21 nt, Human
uucugagacucauuugaacuc

SEQ ID NO: 1006933 - RNA, 22 nt, Human
aaagaugucauacacauuaaga

SEQ ID NO: 1006934 - RNA, 22 nt, Human
cauaaauuguacccauuccaac

SEQ ID NO: 1006935 - RNA, 22 nt, Human
cugcaucaguggauaugauggu

SEQ ID NO: 1006936 - RNA, 22 nt, Human
uaugaaggauacaccucugauu

SEQ ID NO: 1006937 - RNA, 22 nt, Human
augcaauaguaauucuagucug

SEQ ID NO: 1006938 - RNA, 22 nt, Human
gauacuuuguggaauccuggau

SEQ ID NO: 1006939 - RNA, 22 nt, Human
gucuguggaguugcuugcugga

SEQ ID NO: 1006940 - RNA, 22 nt, Human
uccuuucugucuuuacucugga

SEQ ID NO: 1006941 - RNA, 22 nt, Human
aaucaggagugugcacuuugau

SEQ ID NO: 1006942 - RNA, 22 nt, Human
uuuuccuuaacagagggagaaa

SEQ ID NO: 1006943 - RNA, 22 nt, Human
uagcauuucacugaucuucacu

SEQ ID NO: 1006944 - RNA, 22 nt, Human
auuauugcaagcagugaaggga

SEQ ID NO: 1006945 - RNA, 22 nt, Human
ucuguucagaagaggugaaagu

SEQ ID NO: 1006946 - RNA, 22 nt, Human
uuguaagacuguagaaugcaaa

SEQ ID NO: 1006947 - RNA, 22 nt, Human
guuguuuuugaacggugguggc

SEQ ID NO: 1006948 - RNA, 22 nt, Human
gauucugaaauuaacagacugg

SEQ ID NO: 1006949 - RNA, 22 nt, Human
aaauugaauuugggaaacauug

SEQ ID NO: 1006950 - RNA, 22 nt, Human
uugcuauuuugagagucauagu

SEQ ID NO: 1006951 - RNA, 21 nt, Human
caaaagagacugauucuugga

SEQ ID NO: 1006952 - RNA, 22 nt, Human
uucacagcucauacuguucuca

SEQ ID NO: 1006953 - RNA, 22 nt, Human
aucaucaucuaaauugugucgc

SEQ ID NO: 1006954 - RNA, 22 nt, Human
uggcccgggaguuuugaagagu

SEQ ID NO: 1006955 - RNA, 22 nt, Human
ucugugggcauuuauaaucugg

SEQ ID NO: 1006956 - RNA, 22 nt, Human
uugaagcauuugcuauagcauu

SEQ ID NO: 1006957 - RNA, 22 nt, Human
augcuuucucuuaguucauuga

SEQ ID NO: 1006958 - RNA, 22 nt, Human
caagcagauauuuuagucaaga

SEQ ID NO: 1006959 - RNA, 22 nt, Human
ugcaucauuaagguacaguugg

SEQ ID NO: 1006960 - RNA, 22 nt, Human
auauuuguuuggcagaguucag

SEQ ID NO: 1006961 - RNA, 22 nt, Human
cucucuguuaugcuuucaugaa

SEQ ID NO: 1006962 - RNA, 23 nt, Human
cauuugauccucacaauaaaugg

SEQ ID NO: 1006963 - RNA, 22 nt, Human
aacagauuguaaccugauagcc

SEQ ID NO: 1006964 - RNA, 22 nt, Human
augcuugcccauguuucugaag

SEQ ID NO: 1006965 - RNA, 22 nt, Human
uugcucuauguuuguaaacaga

SEQ ID NO: 1006966 - RNA, 22 nt, Human
auuuggucuacauuuuccaaau

SEQ ID NO: 1006967 - RNA, 22 nt, Human
aaaugcacaauaaaguaaaggc

SEQ ID NO: 1006968 - RNA, 22 nt, Human
ugcucuguucaguguaucuugu

SEQ ID NO: 1006969 - RNA, 22 nt, Human
uuguuuguaaggcucuuagaau

SEQ ID NO: 1006970 - RNA, 18 nt, Human
uggggggcuugucugaag

SEQ ID NO: 1006971 - RNA, 22 nt, Human
gucuccuuguggaucucaagga

SEQ ID NO: 1006972 - RNA, 22 nt, Human
cucacucaguuuuuaguucauc

SEQ ID NO: 1006973 - RNA, 22 nt, Human
uacuuugagaugaugcugaucg

SEQ ID NO: 1006974 - RNA, 20 nt, Human
caacacugcccauuguuugc

SEQ ID NO: 1006975 - RNA, 22 nt, Human
auacuucuuuagcauauugaac

SEQ ID NO: 1006976 - RNA, 22 nt, Human
uguuaguauuggcaaauuuguu

SEQ ID NO: 1006977 - RNA, 22 nt, Human
augcauaucuccuaucuccuca

SEQ ID NO: 1006978 - RNA, 22 nt, Human
gcuagaaacuguuuaaucucuu

SEQ ID NO: 1006979 - RNA, 22 nt, Human
ucuaauuuuggcauuuuaaccu

SEQ ID NO: 1006980 - RNA, 22 nt, Human
cagcuuguuuacaugcuuauuc

SEQ ID NO: 1006981 - RNA, 22 nt, Human
cuccagagagaaaggaggccgc

SEQ ID NO: 1006982 - RNA, 23 nt, Human
uuguucuuggaucuuccugaagc

SEQ ID NO: 1006983 - RNA, 22 nt, Human
gaacaguuucccuguagaaaau

SEQ ID NO: 1006984 - RNA, 22 nt, Human
uuccuggugguggugacagcac

SEQ ID NO: 1006985 - RNA, 21 nt, Human
ugagcaccagcugcaugcccc

SEQ ID NO: 1006986 - RNA, 22 nt, Human
aagugcuuccauguuugagugu

SEQ ID NO: 1006987 - RNA, 19 nt, Human
uuugauagggcauaauaua

SEQ ID NO: 1006988 - RNA, 22 nt, Human
uuuugaauaauucagaaacagc

SEQ ID NO: 1006989 - RNA, 22 nt, Human
guguaucaaagcacagacuuca

SEQ ID NO: 1006990 - RNA, 22 nt, Human
aaguuugucucauuugaucuuc

SEQ ID NO: 1006991 - RNA, 20 nt, Human
aaagauacuuuuuguaaugg

SEQ ID NO: 1006992 - RNA, 22 nt, Human
gguguuguacauucuguggauu

SEQ ID NO: 1006993 - RNA, 22 nt, Human
cauuguguauuucuguaguacu

SEQ ID NO: 1006994 - RNA, 22 nt, Human
cacugguugccucuuucuguuc

SEQ ID NO: 1006995 - RNA, 22 nt, Human
uuauuuaaaagugguaagauuc

SEQ ID NO: 1006996 - RNA, 22 nt, Human
augaauaaaacauuuuaaucag

SEQ ID NO: 1006997 - RNA, 22 nt, Human
ucuuggcaguucuugugcuuuu

SEQ ID NO: 1006998 - RNA, 22 nt, Human
uauuuggugaaucuauggucag

SEQ ID NO: 1006999 - RNA, 22 nt, Human
ucaagaaagggcuucaccagga

SEQ ID NO: 1007000 - RNA, 22 nt, Human
ugguggcacugacaucagacac

SEQ ID NO: 1007001 - RNA, 22 nt, Human
aaaacauuuuacugccaucuca

SEQ ID NO: 1007002 - RNA, 22 nt, Human
cagcuauuguucuguauaauga

SEQ ID NO: 1007003 - RNA, 22 nt, Human
uuguccuuaccucaaucuggaa

SEQ ID NO: 1007004 - RNA, 22 nt, Human
caguuaaacagauugaguguua

SEQ ID NO: 1007005 - RNA, 22 nt, Human
augcaucaccgaguugcccacc

SEQ ID NO: 1007006 - RNA, 22 nt, Human
aagaugauuauguagauuggga

SEQ ID NO: 1007007 - RNA, 22 nt, Human
uuuucuaacaucuaguaauuug

SEQ ID NO: 1007008 - RNA, 22 nt, Human
ccugaaaugaguucugcucacu

SEQ ID NO: 1007009 - RNA, 22 nt, Human
acuagaaacuaauggauuauua

SEQ ID NO: 1007010 - RNA, 22 nt, Human
aacaugaugacauuguaagcuu

SEQ ID NO: 1007011 - RNA, 23 nt, Human
cuguuauauggguguuaugugcu

SEQ ID NO: 1007012 - RNA, 22 nt, Human
uuccaaguuaggcgagcuggug

SEQ ID NO: 1007013 - RNA, 18 nt, Human
ucugaaggaaugauucca

SEQ ID NO: 1007014 - RNA, 22 nt, Human
auuaaauuggacgcugggggaa

SEQ ID NO: 1007015 - RNA, 22 nt, Human
uccacagugguggaauuguuca

SEQ ID NO: 1007016 - RNA, 22 nt, Human
uuuccaaggaugugucucucua

SEQ ID NO: 1007017 - RNA, 20 nt, Human
acuagaaagucacugggggg

SEQ ID NO: 1007018 - RNA, 22 nt, Human
agcuggugugccaguuccaguu

SEQ ID NO: 1007019 - RNA, 22 nt, Human
acaauuucuaauauagaucuua

SEQ ID NO: 1007020 - RNA, 22 nt, Human
acugguuuuggaaaucaguaca

SEQ ID NO: 1007021 - RNA, 22 nt, Human
cauuuuccucugcugguguuca

SEQ ID NO: 1007022 - RNA, 22 nt, Human
cauaacauccuugcuacuuuga

SEQ ID NO: 1007023 - RNA, 20 nt, Human
auacuuguuuucaggcuuuu

SEQ ID NO: 1007024 - RNA, 22 nt, Human
cuacuucuguggcucuaagaga

SEQ ID NO: 1007025 - RNA, 22 nt, Human
aaaucaugguggaagaaacaga

SEQ ID NO: 1007026 - RNA, 22 nt, Human
guaauucugugugaaucuauua

SEQ ID NO: 1007027 - RNA, 22 nt, Human
uucuucauucccuuacuuccga

SEQ ID NO: 1007028 - RNA, 22 nt, Human
gugguuguuuccagguuugaaa

SEQ ID NO: 1007029 - RNA, 22 nt, Human
aaggauuuuuggaaugagaugg

SEQ ID NO: 1007030 - RNA, 22 nt, Human
aggggaauggguagacuguuga

SEQ ID NO: 1007031 - RNA, 22 nt, Human
guuuccuuuuggaauuagagcu

SEQ ID NO: 1007032 - RNA, 22 nt, Human
ugcuugcugaaaggcauuuaga

SEQ ID NO: 1007033 - RNA, 22 nt, Human
uuaguguccagaguuuuuauua

SEQ ID NO: 1007034 - RNA, 22 nt, Human
aguaacagguguacagacuauc

SEQ ID NO: 1007035 - RNA, 22 nt, Human
uagcauuuagaacaccuugaga

SEQ ID NO: 1007036 - RNA, 22 nt, Human
aagaauaagaggauuuagaaca

SEQ ID NO: 1007037 - RNA, 22 nt, Human
aaaugcaugugcuauagaugug

SEQ ID NO: 1007038 - RNA, 22 nt, Human
auacaacagaaaaugauuauuc

SEQ ID NO: 1007039 - RNA, 22 nt, Human
guuauucuauuaaugugauugu

SEQ ID NO: 1007040 - RNA, 22 nt, Human
ucagcacaggucuugcaaaaca

SEQ ID NO: 1007041 - RNA, 22 nt, Human
gaaacauuuguugaguacuugc

SEQ ID NO: 1007042 - RNA, 22 nt, Human
gaucuguccuggcaguuaacac

SEQ ID NO: 1007043 - RNA, 22 nt, Human
agaauaagccugacgaaaccua

SEQ ID NO: 1007044 - RNA, 22 nt, Human
uucacagugguagugcauuuag

SEQ ID NO: 1007045 - RNA, 23 nt, Human
augccaggcugccuggccagccu

SEQ ID NO: 1007046 - RNA, 22 nt, Human
gucuugcacuuaccuaagaacu

SEQ ID NO: 1007047 - RNA, 22 nt, Human
cauucauaggaggagaugauua

SEQ ID NO: 1007048 - RNA, 22 nt, Human
gggaggaaggcuugggugagua

SEQ ID NO: 1007049 - RNA, 22 nt, Human
ugguggggccagacuucagcuc

SEQ ID NO: 1007050 - RNA, 22 nt, Human
aaauucuguccugaaugccauu

SEQ ID NO: 1007051 - RNA, 22 nt, Human
ucugaauucuuagaauuaaagg

SEQ ID NO: 1007052 - RNA, 19 nt, Human
uaugacaaguacuaguucu

SEQ ID NO: 1007053 - RNA, 22 nt, Human
cuugugaaaugccagauaaucu

SEQ ID NO: 1007054 - RNA, 22 nt, Human
uuguguacucaccagcacauac

SEQ ID NO: 1007055 - RNA, 21 nt, Human
cuagaaagaauguugucgucu

SEQ ID NO: 1007056 - RNA, 22 nt, Human
aaacaucuucucuugauucuuu

SEQ ID NO: 1007057 - RNA, 22 nt, Human
uuccuucuucauuguguuacag

SEQ ID NO: 1007058 - RNA, 18 nt, Human
gcugaaauucuaaacaaa

SEQ ID NO: 1007059 - RNA, 22 nt, Human
augauuuguuaacagacuuaau

SEQ ID NO: 1007060 - RNA, 22 nt, Human
aaauugcaaaaguacuuuuagg

SEQ ID NO: 1007061 - RNA, 22 nt, Human
uuuugucagugagaacagaguu

SEQ ID NO: 1007062 - RNA, 22 nt, Human
guucuucaaagugacaacuaaa

SEQ ID NO: 1007063 - RNA, 22 nt, Human
aaugcuuuuugcgaaaugugca

SEQ ID NO: 1007064 - RNA, 22 nt, Human
uuccaauaaaauguuauuugca

SEQ ID NO: 1007065 - RNA, 22 nt, Human
uuuaauuauaucugggcaguua

SEQ ID NO: 1007066 - RNA, 22 nt, Human
gggagaguagcuggaagguucu

SEQ ID NO: 1007067 - RNA, 22 nt, Human
uuuccuguccugguacuuggca

SEQ ID NO: 1007068 - RNA, 22 nt, Human
uuccuuaguuauuugguccccu

SEQ ID NO: 1007069 - RNA, 22 nt, Human
aggcaguggcuuuuguuguguu

SEQ ID NO: 1007070 - RNA, 22 nt, Human
uuuaauuuucugggcccagcag

SEQ ID NO: 1007071 - RNA, 22 nt, Human
guuucuuauuucaacuggaaca

SEQ ID NO: 1007072 - RNA, 22 nt, Human
ugugcuugucguggagccaggc

SEQ ID NO: 1007073 - RNA, 23 nt, Human
cagcugguugugggaguggcugc

SEQ ID NO: 1007074 - RNA, 22 nt, Human
ugccugugggugaugauuugau

SEQ ID NO: 1007075 - RNA, 22 nt, Human
gagaacuugaacuuuuccucug

SEQ ID NO: 1007076 - RNA, 21 nt, Human
gacauugagcgugucgcagug

SEQ ID NO: 1007077 - RNA, 22 nt, Human
cauuguuggcagagggacagag

SEQ ID NO: 1007078 - RNA, 22 nt, Human
uuugagaaacagacgaaagaca

SEQ ID NO: 1007079 - RNA, 22 nt, Human
uggaauuaucugaagugauuug

SEQ ID NO: 1007080 - RNA, 22 nt, Human
augaucaagaauuuuguauucc

SEQ ID NO: 1007081 - RNA, 22 nt, Human
uguguacauguaucaacuaucg

SEQ ID NO: 1007082 - RNA, 20 nt, Human
caauaauuuacuucccuauu

SEQ ID NO: 1007083 - RNA, 22 nt, Human
uucaacaacuugguucaaaugg

SEQ ID NO: 1007084 - RNA, 22 nt, Human
ugaauaugugacuuugauuuca

SEQ ID NO: 1007085 - RNA, 22 nt, Human
guucuucaggcugugcucuaga

SEQ ID NO: 1007086 - RNA, 22 nt, Human
uaucuuaaaaaucgaagcagau

SEQ ID NO: 1007087 - RNA, 22 nt, Human
aaugaguuuguucuauuauuug

SEQ ID NO: 1007088 - RNA, 23 nt, Human
cguuuuuuccucagauguucugg

SEQ ID NO: 1007089 - RNA, 22 nt, Human
uguucaguuugcuaucauaauc

SEQ ID NO: 1007090 - RNA, 22 nt, Human
augcuacauuuugguuuauaaa

SEQ ID NO: 1007091 - RNA, 22 nt, Human
agugaauuagccuauuuguaaa

SEQ ID NO: 1007092 - RNA, 19 nt, Human
agcagccaucgaccaugga

SEQ ID NO: 1007093 - RNA, 22 nt, Human
ggcuuccuccuuccugcuguca

SEQ ID NO: 1007094 - RNA, 22 nt, Human
cuucauguacaguuauuggaga

SEQ ID NO: 1007095 - RNA, 22 nt, Human
aucuaaagugucauaaguagcu

SEQ ID NO: 1007096 - RNA, 22 nt, Human
uaauucuagauugacauuuuga

SEQ ID NO: 1007097 - RNA, 22 nt, Human
cugaaagcaaaguaauucuuaa

SEQ ID NO: 1007098 - RNA, 22 nt, Human
uuuccaguuguucuagaaagcu

SEQ ID NO: 1007099 - RNA, 22 nt, Human
uuauuuaaaauguagguuggga

SEQ ID NO: 1007100 - RNA, 22 nt, Human
uuucauguuggauacuguuuca

SEQ ID NO: 1007101 - RNA, 22 nt, Human
uuuguguuguacuucugugcau

SEQ ID NO: 1007102 - RNA, 22 nt, Human
guaguucuuucucaauguucaa

SEQ ID NO: 1007103 - RNA, 22 nt, Human
uagauuaucccugauuugucca

SEQ ID NO: 1007104 - RNA, 22 nt, Human
uaggauaugcauuuuuauacau

SEQ ID NO: 1007105 - RNA, 22 nt, Human
auuguugacuugauuacucaac

SEQ ID NO: 1007106 - RNA, 18 nt, Human
gaacagcaauuucauguu

SEQ ID NO: 1007107 - RNA, 22 nt, Human
uaaucuuagacauguauuuuuc

SEQ ID NO: 1007108 - RNA, 22 nt, Human
cuuguauuaggaagaaugcuuu

SEQ ID NO: 1007109 - RNA, 22 nt, Human
guucucucagcgauagugaugg

SEQ ID NO: 1007110 - RNA, 22 nt, Human
aauuagaagcuguuagcaaaau

SEQ ID NO: 1007111 - RNA, 22 nt, Human
auucuugauauagauaguuaau

SEQ ID NO: 1007112 - RNA, 19 nt, Human
gcuuccagcacugcaggag

SEQ ID NO: 1007113 - RNA, 22 nt, Human
ugaaucaaugaauugcacuuca

SEQ ID NO: 1007114 - RNA, 22 nt, Human
ccuuccaguucuugguuguaau

SEQ ID NO: 1007115 - RNA, 22 nt, Human
uuuccagucucugccuccaagg

SEQ ID NO: 1007116 - RNA, 20 nt, Human
aaaaacaguaaugcugaaga

SEQ ID NO: 1007117 - RNA, 22 nt, Human
uaucuguuuuuacagugucuuu

SEQ ID NO: 1007118 - RNA, 23 nt, Human
aguguucagcauguaguaaauac

SEQ ID NO: 1007119 - RNA, 22 nt, Human
aagucaauuaguaaacuuggaa

SEQ ID NO: 1007120 - RNA, 21 nt, Human
aucuuaaaaggucuuaacuuu

SEQ ID NO: 1007121 - RNA, 22 nt, Human
aaauugcuugagauuagucucc

SEQ ID NO: 1007122 - RNA, 22 nt, Human
ucucaagaucucaagauggccc

SEQ ID NO: 1007123 - RNA, 22 nt, Human
uuacaauuacuugaucucagcu

SEQ ID NO: 1007124 - RNA, 21 nt, Human
acuguauuguuuucaaggauc

SEQ ID NO: 1007125 - RNA, 20 nt, Human
acagagauccucucuuuauc

SEQ ID NO: 1007126 - RNA, 22 nt, Human
cauugcugugggcauuugcugc

SEQ ID NO: 1007127 - RNA, 22 nt, Human
auucagaaauagaaaauuugau

SEQ ID NO: 1007128 - RNA, 22 nt, Human
cgauuuccgcuugaucugaucu

SEQ ID NO: 1007129 - RNA, 21 nt, Human
uggagagugauuucagugugg

SEQ ID NO: 1007130 - RNA, 22 nt, Human
auucccuuugacgaucccuagg

SEQ ID NO: 1007131 - RNA, 22 nt, Human
cugcaucacagcaggaggcaca

SEQ ID NO: 1007132 - RNA, 22 nt, Human
uugauguaauacuuugcaacca

SEQ ID NO: 1007133 - RNA, 22 nt, Human
acaugacagugacuuuauaaga

SEQ ID NO: 1007134 - RNA, 22 nt, Human
ucuucaugucaugguauauuga

SEQ ID NO: 1007135 - RNA, 21 nt, Human
uuuguucaggggcaaaguuaa

SEQ ID NO: 1007136 - RNA, 22 nt, Human
auuuugacauugcggcauugcu

SEQ ID NO: 1007137 - RNA, 22 nt, Human
uuugaaaggagcuuuauccaga

SEQ ID NO: 1007138 - RNA, 22 nt, Human
ugaacagugugagggugugacc

SEQ ID NO: 1007139 - RNA, 21 nt, Human
uuucaagggacccuggggauc

SEQ ID NO: 1007140 - RNA, 22 nt, Human
cuccagaggcgacuugcaucac

SEQ ID NO: 1007141 - RNA, 22 nt, Human
uuugacaugugcuuauaacuuu

SEQ ID NO: 1007142 - RNA, 22 nt, Human
gagaauguuaauguugaaguau

SEQ ID NO: 1007143 - RNA, 22 nt, Human
caugugaauuccaaagcuaggu

SEQ ID NO: 1007144 - RNA, 22 nt, Human
aguguuugaguuugcggcauug

SEQ ID NO: 1007145 - RNA, 22 nt, Human
uuugaacuucuaccugucauau

SEQ ID NO: 1007146 - RNA, 22 nt, Human
auugaagacuugguauccgugg

SEQ ID NO: 1007147 - RNA, 22 nt, Human
aagcauuuuagauaaagcauca

SEQ ID NO: 1007148 - RNA, 22 nt, Human
caauaauugcuuuccagaguua

SEQ ID NO: 1007149 - RNA, 22 nt, Human
auacaugugugugcauacaugu

SEQ ID NO: 1007150 - RNA, 22 nt, Human
aaggaucauguauauguuuaag

SEQ ID NO: 1007151 - RNA, 22 nt, Human
uaaagugaaguucagaauggcu

SEQ ID NO: 1007152 - RNA, 22 nt, Human
uaauccaaaacugaaucugugg

SEQ ID NO: 1007153 - RNA, 22 nt, Human
aaugagaauguaagugaagaga

SEQ ID NO: 1007154 - RNA, 22 nt, Human
cagagcugagucuucaagguug

SEQ ID NO: 1007155 - RNA, 22 nt, Human
gucauuuuugacuuugaaguga

SEQ ID NO: 1007156 - RNA, 22 nt, Human
uugcugugucauuuguuuaauc

SEQ ID NO: 1007157 - RNA, 22 nt, Human
guucuuaaagauucaucaagca

SEQ ID NO: 1007158 - RNA, 22 nt, Human
ugaguguuguaaccauaugauu

SEQ ID NO: 1007159 - RNA, 22 nt, Human
ugccuguguccccuucuuggca

SEQ ID NO: 1007160 - RNA, 22 nt, Human
aaucuguugucaggaauccaca

SEQ ID NO: 1007161 - RNA, 22 nt, Human
uuucauuauaaaaaguuggcuu

SEQ ID NO: 1007162 - RNA, 19 nt, Human
uuuaaugugugcugcaauc

SEQ ID NO: 1007163 - RNA, 22 nt, Human
guaaaucagugucauuuuagaa

SEQ ID NO: 1007164 - RNA, 22 nt, Human
cuucuuaaaguugucacagcug

SEQ ID NO: 1007165 - RNA, 22 nt, Human
ucuucaugaaauugauugcuua

SEQ ID NO: 1007166 - RNA, 20 nt, Human
uaugauaauuacaaaauagu

SEQ ID NO: 1007167 - RNA, 22 nt, Human
aggauaauaauaaucucguuua

SEQ ID NO: 1007168 - RNA, 22 nt, Human
auagucuuagaaucuugagugu

SEQ ID NO: 1007169 - RNA, 22 nt, Human
acaaguuucauuguuuagaacc

SEQ ID NO: 1007170 - RNA, 22 nt, Human
auuguauacaagcuuaauuguu

SEQ ID NO: 1007171 - RNA, 22 nt, Human
uuugaauauacuucaaacaaag

SEQ ID NO: 1007172 - RNA, 22 nt, Human
uuuuuaagagucuggaaauagu

SEQ ID NO: 1007173 - RNA, 22 nt, Human
cauugcuuugugcauauuuaaa

SEQ ID NO: 1007174 - RNA, 22 nt, Human
gucccucugccugugguucucu

SEQ ID NO: 1007175 - RNA, 22 nt, Human
ugucuucuaccuugacagcauu

SEQ ID NO: 1007176 - RNA, 22 nt, Human
augcacaagguagauuauuauu

SEQ ID NO: 1007177 - RNA, 19 nt, Human
caggucuucuuggaggacu

SEQ ID NO: 1007178 - RNA, 20 nt, Human
uuucacaaugaacaugucuc

SEQ ID NO: 1007179 - RNA, 22 nt, Human
cauuguccucugaugccuuccc

SEQ ID NO: 1007180 - RNA, 22 nt, Human
ugugugaacucucugauguaca

SEQ ID NO: 1007181 - RNA, 22 nt, Human
guucuucagauuccauuucagu

SEQ ID NO: 1007182 - RNA, 22 nt, Human
uugcaucagcaggcauaauugg

SEQ ID NO: 1007183 - RNA, 22 nt, Human
aucauugaguaaaaugaauaca

SEQ ID NO: 1007184 - RNA, 22 nt, Human
acauuguugagccucuuguuca

SEQ ID NO: 1007185 - RNA, 22 nt, Human
uggaaaauauuuaggugaauga

SEQ ID NO: 1007186 - RNA, 22 nt, Human
ucacaugcucaccuaagccaca

SEQ ID NO: 1007187 - RNA, 22 nt, Human
gcagucauggguagaacucaag

SEQ ID NO: 1007188 - RNA, 22 nt, Human
cagcuuuugcagacuucuugcc

SEQ ID NO: 1007189 - RNA, 22 nt, Human
uuucaugauuaacuuagugaau

SEQ ID NO: 1007190 - RNA, 22 nt, Human
cuuccagugcauagguagauca

SEQ ID NO: 1007191 - RNA, 22 nt, Human
uuaaggaacuugucuuucucuu

SEQ ID NO: 1007192 - RNA, 22 nt, Human
agguuuggguucauugcuggcu

SEQ ID NO: 1007193 - RNA, 22 nt, Human
uaaguauguuagaaaaucaagu

SEQ ID NO: 1007194 - RNA, 22 nt, Human
cuguuccuccaccucaacaaac

SEQ ID NO: 1007195 - RNA, 22 nt, Human
ucaguaaaugagcaaaaauuuc

SEQ ID NO: 1007196 - RNA, 22 nt, Human
gaggcaaagcauguggcucagg

SEQ ID NO: 1007197 - RNA, 22 nt, Human
ugcuuuggcccaacauugaugc

SEQ ID NO: 1007198 - RNA, 22 nt, Human
uaguauuuccuguaagcuauag

SEQ ID NO: 1007199 - RNA, 22 nt, Human
agaugguucagaauuauaaaga

SEQ ID NO: 1007200 - RNA, 22 nt, Human
aauugcuuuacaagccguuuaa

SEQ ID NO: 1007201 - RNA, 22 nt, Human
gaguggggcccacugcugggug

SEQ ID NO: 1007202 - RNA, 21 nt, Human
gcucuguguuacaaguugggg

SEQ ID NO: 1007203 - RNA, 22 nt, Human
ugucuucauuccccaugaaguc

SEQ ID NO: 1007204 - RNA, 22 nt, Human
ucugaaauuuuaguuauagaaa

SEQ ID NO: 1007205 - RNA, 22 nt, Human
gagccacaguggauugauucca

SEQ ID NO: 1007206 - RNA, 22 nt, Human
gucuuuuuuacaccuuacauca

SEQ ID NO: 1007207 - RNA, 22 nt, Human
aaucuguuuuaaaguuugugcc

SEQ ID NO: 1007208 - RNA, 22 nt, Human
uuagcacugucugguuaucuug

SEQ ID NO: 1007209 - RNA, 22 nt, Human
caguuuuucaaaauuacaugau

SEQ ID NO: 1007210 - RNA, 22 nt, Human
aauacagauggcaugugaagau

SEQ ID NO: 1007211 - RNA, 22 nt, Human
cuggagggcugcagcgaggcug

SEQ ID NO: 1007212 - RNA, 22 nt, Human
uucugauuguuggaggaugcuu

SEQ ID NO: 1007213 - RNA, 22 nt, Human
ugcauguuucuguauguuaaug

SEQ ID NO: 1007214 - RNA, 22 nt, Human
uaacauuucggugacaguggga

SEQ ID NO: 1007215 - RNA, 22 nt, Human
gauuuucauuauagcuaguuuc

SEQ ID NO: 1007216 - RNA, 22 nt, Human
uggauguuugaaguugcaugug

SEQ ID NO: 1007217 - RNA, 22 nt, Human
uuugggcuguacaauuucugua

SEQ ID NO: 1007218 - RNA, 22 nt, Human
uaaaaucaugacagauugacau

SEQ ID NO: 1007219 - RNA, 22 nt, Human
uucucucaguuaaacuuuguga

SEQ ID NO: 1007220 - RNA, 22 nt, Human
cuuauuggucccaggaggagaa

SEQ ID NO: 1007221 - RNA, 22 nt, Human
aauucauacucuauauugcuuu

SEQ ID NO: 1007222 - RNA, 22 nt, Human
aacaguaugugagauuuacaca

SEQ ID NO: 1007223 - RNA, 22 nt, Human
cuagagaaaaagcuuagguacg

SEQ ID NO: 1007224 - RNA, 22 nt, Human
uaaguugauuauaaccacugga

SEQ ID NO: 1007225 - RNA, 22 nt, Human
gugauuucagguuuuucauacu

SEQ ID NO: 1007226 - RNA, 22 nt, Human
cuuucugaggagacgggcuuug

SEQ ID NO: 1007227 - RNA, 22 nt, Human
guuuccaagucucucaacaccc

SEQ ID NO: 1007228 - RNA, 22 nt, Human
aauugguuugaauaaauaaaga

SEQ ID NO: 1007229 - RNA, 22 nt, Human
agucaacauuugagaugcaaug

SEQ ID NO: 1007230 - RNA, 22 nt, Human
uuucucuuucaaucugcaguac

SEQ ID NO: 1007231 - RNA, 23 nt, Human
cuuuccuuucuuugacacccagc

SEQ ID NO: 1007232 - RNA, 21 nt, Human
agauuguauggaggugagagg

SEQ ID NO: 1007233 - RNA, 21 nt, Human
guucaauagcucuuugaaugc

SEQ ID NO: 1007234 - RNA, 22 nt, Human
ucccaaguagaugggaauacag

SEQ ID NO: 1007235 - RNA, 22 nt, Human
aguguugucaaacggcucagca

SEQ ID NO: 1007236 - RNA, 22 nt, Human
caagauauguccuguuacuaag

SEQ ID NO: 1007237 - RNA, 22 nt, Human
caaucaaugcugcuaguuccuu

SEQ ID NO: 1007238 - RNA, 22 nt, Human
ggacauggaaguauggagugga

SEQ ID NO: 1007239 - RNA, 22 nt, Human
uguucuuagguauuugacaguc

SEQ ID NO: 1007240 - RNA, 22 nt, Human
acucauuugcaugaugugcuau

SEQ ID NO: 1007241 - RNA, 22 nt, Human
guugcaaaugggaagaugguua

SEQ ID NO: 1007242 - RNA, 22 nt, Human
acauauuuugaaagcuuucuaa

SEQ ID NO: 1007243 - RNA, 22 nt, Human
uuugaaauguaucaguauaggu

SEQ ID NO: 1007244 - RNA, 22 nt, Human
gcuguggcuccaauggugagcc

SEQ ID NO: 1007245 - RNA, 22 nt, Human
uaauuuugucacagugacaugc

SEQ ID NO: 1007246 - RNA, 22 nt, Human
uaaguauuggccuauagcuaga

SEQ ID NO: 1007247 - RNA, 22 nt, Human
ugucuuaugcugcauagacuau

SEQ ID NO: 1007248 - RNA, 22 nt, Human
uuacacaacaucuguauuauua

SEQ ID NO: 1007249 - RNA, 20 nt, Human
caucaacaccuugucagccu

SEQ ID NO: 1007250 - RNA, 22 nt, Human
auuugugggacuauaaugcagg

SEQ ID NO: 1007251 - RNA, 22 nt, Human
uugaugcugucuuucagaauca

SEQ ID NO: 1007252 - RNA, 22 nt, Human
ggcagccagagggcagcuggau

SEQ ID NO: 1007253 - RNA, 22 nt, Human
ucuuuuaucuguuguguaacaa

SEQ ID NO: 1007254 - RNA, 22 nt, Human
augaauuguccgauguugugca

SEQ ID NO: 1007255 - RNA, 22 nt, Marburg virus
ugaagagcaccgaagcauccag

SEQ ID NO: 1007256 - RNA, 22 nt, Marburg virus
ggagcacauguuugauucuucg

SEQ ID NO: 1007257 - RNA, 22 nt, Marburg virus
ugaagagcaccgaagcauccag

SEQ ID NO: 1007258 - RNA, 22 nt, Marburg virus
ucaucaucauuguuugggucug

SEQ ID NO: 1007259 - RNA, 22 nt, Marburg virus
ggagcacauguuugauucuucg

SEQ ID NO: 1007260 - RNA, 22 nt, Marburg virus
gacccugaaccggauguuauga

SEQ ID NO: 1007261 - RNA, 22 nt, Human
acuuugugcccaacagaaagaa

SEQ ID NO: 1007262 - RNA, 22 nt, Human
gauucugagcugguguuuuacg

SEQ ID NO: 1007263 - RNA, 22 nt, Human
uuccauaauaaccugagagaaa

SEQ ID NO: 1007264 - RNA, 19 nt, Human
gcugugccucucuccugcu

SEQ ID NO: 1007265 - RNA, 23 nt, Human
gggaccugguaggaggugauugg

SEQ ID NO: 1007266 - RNA, 18 nt, Human
aagaggaggagcagguug

SEQ ID NO: 1007267 - RNA, 22 nt, Human
cacaugcauaaggauaauuacu

SEQ ID NO: 1007268 - RNA, 22 nt, Human
ucauuacagagauauaaucuac

SEQ ID NO: 1007269 - RNA, 22 nt, Human
gcucugagucucagcuaccaca

SEQ ID NO: 1007270 - RNA, 21 nt, Human
aaggaaaagcuuggucucuga

SEQ ID NO: 1007271 - RNA, 21 nt, Human
aucagcaaaugccugucuccc

SEQ ID NO: 1007272 - RNA, 22 nt, Human
uuuucucuacaaaauaaccagc

SEQ ID NO: 1007273 - RNA, 22 nt, Human
ucugggagacguguguugucag

SEQ ID NO: 1007274 - RNA, 22 nt, Human
ggccagaggccauccuccugcu

SEQ ID NO: 1007275 - RNA, 22 nt, Human
agguggguccuggcucugccau

SEQ ID NO: 1007276 - RNA, 22 nt, Human
uguauuagaucugagaacuucu

SEQ ID NO: 1007277 - RNA, 22 nt, Human
cugggaguugacgaggcuugua

SEQ ID NO: 1007278 - RNA, 22 nt, Human
cccaggagagaggccaguuggc

SEQ ID NO: 1007279 - RNA, 22 nt, Human
agaagcugacagaugcagcagg

SEQ ID NO: 1007280 - RNA, 22 nt, Human
augaaacagugaauuagucaag

SEQ ID NO: 1007281 - RNA, 22 nt, Human
aggacuucuccgauaagucaga

SEQ ID NO: 1007282 - RNA, 22 nt, Human
ccagcccugaacccugcugcau

SEQ ID NO: 1007283 - RNA, 22 nt, Human
uguccacaucacucacuuguca

SEQ ID NO: 1007284 - RNA, 22 nt, Human
cuacauaaucuggauuugucug

SEQ ID NO: 1007285 - RNA, 19 nt, Human
auagaaaggguuaaagaca

SEQ ID NO: 1007286 - RNA, 22 nt, Human
cccuggaggucagaggccuggg

SEQ ID NO: 1007287 - RNA, 22 nt, Human
caagcccaggauuccccaguua

SEQ ID NO: 1007288 - RNA, 22 nt, Human
uggggccugagguggagcugca

SEQ ID NO: 1007289 - RNA, 22 nt, Human
cccucugccucugaguaggaca

SEQ ID NO: 1007290 - RNA, 22 nt, Human
ccuuggagcggucagcacuggu

SEQ ID NO: 1007291 - RNA, 22 nt, Human
uuugcauuaguuuagauuucaa

SEQ ID NO: 1007292 - RNA, 22 nt, Human
cucauaaugugacuguauuuga

SEQ ID NO: 1007293 - RNA, 22 nt, Human
ccuugggauuucucaugccaau

SEQ ID NO: 1007294 - RNA, 22 nt, Human
ggccucacccaucggugccuuu

SEQ ID NO: 1007295 - RNA, 22 nt, Human
gagcacagccaaaguaagaagg

SEQ ID NO: 1007296 - RNA, 22 nt, Human
agagucagcuuaugacacaguc

SEQ ID NO: 1007297 - RNA, 20 nt, Human
uguuaaaggacacuugcuuu

SEQ ID NO: 1007298 - RNA, 18 nt, Human
gguggccuugacuucucu

SEQ ID NO: 1007299 - RNA, 22 nt, Human
gcucugcuugcaucaugacugc

SEQ ID NO: 1007300 - RNA, 22 nt, Human
gucccugcccuccugggacuca

SEQ ID NO: 1007301 - RNA, 22 nt, Human
cauuagaagaacaguuauauua

SEQ ID NO: 1007302 - RNA, 22 nt, Human
uaggaaaaauacagaauuauau

SEQ ID NO: 1007303 - RNA, 22 nt, Human
aucauguuccagaaacagugau

SEQ ID NO: 1007304 - RNA, 22 nt, Human
uucacaaaacacuauuuucugg

SEQ ID NO: 1007305 - RNA, 22 nt, Human
agguuauaugucauacugaagu

SEQ ID NO: 1007306 - RNA, 18 nt, Human
ggaaaaggagugucuagc

SEQ ID NO: 1007307 - RNA, 22 nt, Human
agaacuuaggaacaacagcuua

SEQ ID NO: 1007308 - RNA, 22 nt, Human
caagggcuucaaguggccaaga

SEQ ID NO: 1007309 - RNA, 22 nt, Human
uggagccaaggccaguucucag

SEQ ID NO: 1007310 - RNA, 22 nt, Human
agagcugauuugauuacagugc

SEQ ID NO: 1007311 - RNA, 22 nt, Human
gguguccuacagggccgcaggc

SEQ ID NO: 1007312 - RNA, 22 nt, Human
ucugucuccugccagugccucu

SEQ ID NO: 1007313 - RNA, 22 nt, Human
ugaaaugaaacagaacauauca

SEQ ID NO: 1007314 - RNA, 21 nt, Human
agcuuccugcagugggagguc

SEQ ID NO: 1007315 - RNA, 19 nt, Human
uuuggcacucugaaguguu

SEQ ID NO: 1007316 - RNA, 23 nt, Human
gggcugcuccaggccaaggcugg

SEQ ID NO: 1007317 - RNA, 22 nt, Human
agaaaugaauauguagugguua

SEQ ID NO: 1007318 - RNA, 22 nt, Human
ccugagacaugaaccaggcucc

SEQ ID NO: 1007319 - RNA, 22 nt, Human
agccuguccagaggacagggcu

SEQ ID NO: 1007320 - RNA, 20 nt, Human
cagaaggucuaagcuuuaga

SEQ ID NO: 1007321 - RNA, 19 nt, Human
cagaguacaccagauagga

SEQ ID NO: 1007322 - RNA, 22 nt, Human
agggagccagaguugggagcuc

SEQ ID NO: 1007323 - RNA, 22 nt, Human
ugcaggugcguuuucaagccuc

SEQ ID NO: 1007324 - RNA, 22 nt, Human
uugcauuucccauugaguaaug

SEQ ID NO: 1007325 - RNA, 22 nt, Human
gggaguggauuauguggaccca

SEQ ID NO: 1007326 - RNA, 22 nt, Human
acagagcuuaggaugacuccca

SEQ ID NO: 1007327 - RNA, 18 nt, Human
auccuugaugagaggucu

SEQ ID NO: 1007328 - RNA, 22 nt, Human
acacaaugcauauuuuuccaga

SEQ ID NO: 1007329 - RNA, 22 nt, Human
uagcacauacauaauagauaga

SEQ ID NO: 1007330 - RNA, 22 nt, Human
ucaggcugcccguucagggcuc

SEQ ID NO: 1007331 - RNA, 22 nt, Human
ucagagucauugcaaguagaag

SEQ ID NO: 1007332 - RNA, 22 nt, Human
ggaggcucccacgcagcucaca

SEQ ID NO: 1007333 - RNA, 22 nt, Human
gcauagucaguaggauucucaa

SEQ ID NO: 1007334 - RNA, 22 nt, Human
ucucugguuauuaacuaacucc

SEQ ID NO: 1007335 - RNA, 22 nt, Human
uguggcuguguccaccugcugc

SEQ ID NO: 1007336 - RNA, 22 nt, Human
ccuguguggaaaccgcaugacg

SEQ ID NO: 1007337 - RNA, 22 nt, Human
ugcaguggaaucuggagagcag

SEQ ID NO: 1007338 - RNA, 22 nt, Human
caagauggaguccgggaaugug

SEQ ID NO: 1007339 - RNA, 22 nt, Human
auucuucaucacuaccuuguga

SEQ ID NO: 1007340 - RNA, 18 nt, Human
uggguggcuagggaguuu

SEQ ID NO: 1007341 - RNA, 22 nt, Human
ugggccuggcccuguggaggag

SEQ ID NO: 1007342 - RNA, 22 nt, Human
ggucccugguucccucugagcu

SEQ ID NO: 1007343 - RNA, 22 nt, Human
ugcagcuucuccaucuccuugu

SEQ ID NO: 1007344 - RNA, 17 nt, Human
gccucugcuugugucau

SEQ ID NO: 1007345 - RNA, 22 nt, Human
uccucagaaaccccugugaggu

SEQ ID NO: 1007346 - RNA, 20 nt, Human
gcugccuuguccugcuuggu

SEQ ID NO: 1007347 - RNA, 22 nt, Human
uuuauuauguacaggcacuaua

SEQ ID NO: 1007348 - RNA, 22 nt, Human
ccucuggguaucuguggaagua

SEQ ID NO: 1007349 - RNA, 22 nt, Human
agcugccacauggugucacugu

SEQ ID NO: 1007350 - RNA, 22 nt, Human
ugcugccaugcagagcaacaga

SEQ ID NO: 1007351 - RNA, 22 nt, Human
ucauugcagugauguuguaugu

SEQ ID NO: 1007352 - RNA, 22 nt, Human
uugaauuagacuuugcuacagg

SEQ ID NO: 1007353 - RNA, 22 nt, Human
ugggccuguugggguugaguua

SEQ ID NO: 1007354 - RNA, 22 nt, Human
uugugucccccuuugagagcca

SEQ ID NO: 1007355 - RNA, 22 nt, Human
cccaggagguggagguugcagu

SEQ ID NO: 1007356 - RNA, 22 nt, Human
aaauguguuuagaugguuuauu

SEQ ID NO: 1007357 - RNA, 22 nt, Human
ggccucucuggcauggcugccc

SEQ ID NO: 1007358 - RNA, 22 nt, Human
gaggccugaaaggggaccuaug

SEQ ID NO: 1007359 - RNA, 18 nt, Human
acauuucuaggugaaagc

SEQ ID NO: 1007360 - RNA, 22 nt, Human
gcacugaaugccaaaguguagg

SEQ ID NO: 1007361 - RNA, 22 nt, Human
cagcucccagagugaccagcag

SEQ ID NO: 1007362 - RNA, 22 nt, Human
gauauguauugaaugaucauuu

SEQ ID NO: 1007363 - RNA, 22 nt, Human
cugugcugauucagcacaggcc

SEQ ID NO: 1007364 - RNA, 22 nt, Human
cacauuucucuaccucacacaa

SEQ ID NO: 1007365 - RNA, 22 nt, Human
cuggccuuggaagggagcccgu

SEQ ID NO: 1007366 - RNA, 20 nt, Human
cuaucuccuggcgugccuuc

SEQ ID NO: 1007367 - RNA, 19 nt, Human
ccuggaggugaagguucuc

SEQ ID NO: 1007368 - RNA, 22 nt, Human
ugagccagccucagaagucacg

SEQ ID NO: 1007369 - RNA, 22 nt, Human
agagcuuagaauuucagaugau

SEQ ID NO: 1007370 - RNA, 22 nt, Human
cugccacuuucacccagugcuc

SEQ ID NO: 1007371 - RNA, 22 nt, Human
caggcagcugggucaccguccc

SEQ ID NO: 1007372 - RNA, 19 nt, Human
ccuguucaugacucugucc

SEQ ID NO: 1007373 - RNA, 22 nt, Human
gcugcccaguucugcugcugcc

SEQ ID NO: 1007374 - RNA, 22 nt, Human
uuuguuaauucuuauguuagag

SEQ ID NO: 1007375 - RNA, 22 nt, Human
gggacaggcugagacuugagcu

SEQ ID NO: 1007376 - RNA, 16 nt, Human
agcagccagcacugga

SEQ ID NO: 1007377 - RNA, 22 nt, Human
ugccuguguccccuucuuggca

SEQ ID NO: 1007378 - RNA, 22 nt, Human
uuagagucaagcugcauguucu

SEQ ID NO: 1007379 - RNA, 20 nt, Human
gcccacucuaauccacuguc

SEQ ID NO: 1007380 - RNA, 22 nt, Human
agucuccuuggccucaaugccu

SEQ ID NO: 1007381 - RNA, 22 nt, Human
ccaaaguccuuucuccaccugc

SEQ ID NO: 1007382 - RNA, 22 nt, Human
aguuagaauagucagauuguag

SEQ ID NO: 1007383 - RNA, 22 nt, Human
gccagugugcaagaggccacca

SEQ ID NO: 1007384 - RNA, 22 nt, Human
acugcuuuuagaaaucuauaga

SEQ ID NO: 1007385 - RNA, 20 nt, Human
gucucagaauggauuugcau

SEQ ID NO: 1007386 - RNA, 22 nt, Human
ccugcuguucuguuuagugaac

SEQ ID NO: 1007387 - RNA, 22 nt, Human
ggcuccuguccuccuggagcuc

SEQ ID NO: 1007388 - RNA, 22 nt, Human
uaaaugcaguuaguacuugcca

SEQ ID NO: 1007389 - RNA, 22 nt, Human
uagcccagagucccaauuccag

SEQ ID NO: 1007390 - RNA, 22 nt, Human
agcccaagcauaggagggaggc

SEQ ID NO: 1007391 - RNA, 22 nt, Human
uauguaaaaauucaucaggcug

SEQ ID NO: 1007392 - RNA, 21 nt, Human
gcaggcuggucaaaccucagu

SEQ ID NO: 1007393 - RNA, 22 nt, Human
acagagagguaaaauauauagu

SEQ ID NO: 1007394 - RNA, 22 nt, Human
uccaggucuggccugcuaggca

SEQ ID NO: 1007395 - RNA, 22 nt, Human
guagggacuuguuuuacuagua

SEQ ID NO: 1007396 - RNA, 22 nt, Human
acugaaggaagcgggcaggggu

SEQ ID NO: 1007397 - RNA, 22 nt, Human
gaugagcauuguuucauguguu

SEQ ID NO: 1007398 - RNA, 22 nt, Human
aaacacagauuucuuuguccca

SEQ ID NO: 1007399 - RNA, 22 nt, Human
aaaguguagagacuuuggaacc

SEQ ID NO: 1007400 - RNA, 22 nt, Human
agccuucaguaaauccacugug

SEQ ID NO: 1007401 - RNA, 22 nt, Human
acacauauucauauguacuuac

SEQ ID NO: 1007402 - RNA, 22 nt, Human
cauugaaauauggaaacugaug

SEQ ID NO: 1007403 - RNA, 22 nt, Human
uugaaaggcacaggcaccuggg

SEQ ID NO: 1007404 - RNA, 20 nt, Human
gugaccagaagacagugggu

SEQ ID NO: 1007405 - RNA, 23 nt, Human
aaaguuugaagcaacaguaguug

SEQ ID NO: 1007406 - RNA, 22 nt, Human
uccuucagauuccugcuucugg

SEQ ID NO: 1007407 - RNA, 22 nt, Human
auacaucuugucagauucaugu

SEQ ID NO: 1007408 - RNA, 22 nt, Human
gcagcacauauaaacaaagaga

SEQ ID NO: 1007409 - RNA, 22 nt, Human
auguuacagaaagcaaagauga

SEQ ID NO: 1007410 - RNA, 22 nt, Human
auguaacuucugugaaucugac

SEQ ID NO: 1007411 - RNA, 22 nt, Human
acauuucuuccacaugcugcug

SEQ ID NO: 1007412 - RNA, 22 nt, Human
ggcuucucgugccgaagcaaga

SEQ ID NO: 1007413 - RNA, 22 nt, Human
ucacugcugcugccaugaugga

SEQ ID NO: 1007414 - RNA, 22 nt, Human
ugaugaauaaacuugagaguca

SEQ ID NO: 1007415 - RNA, 22 nt, Human
ugggcagaguagcucagaagaa

SEQ ID NO: 1007416 - RNA, 20 nt, Human
uaaggcuguuuuguauuccu

SEQ ID NO: 1007417 - RNA, 22 nt, Human
ugugcaguuucuauguugucca

SEQ ID NO: 1007418 - RNA, 22 nt, Human
ggccagagaagucagacccuug

SEQ ID NO: 1007419 - RNA, 22 nt, Human
cugcuaaaccucucugagagcu

SEQ ID NO: 1007420 - RNA, 22 nt, Human
guuuuaguggguggccacugau

SEQ ID NO: 1007421 - RNA, 22 nt, Human
uguagaaacuacacaugcaaca

SEQ ID NO: 1007422 - RNA, 22 nt, Human
uggagacucugcaucugugaca

SEQ ID NO: 1007423 - RNA, 22 nt, Human
uucuaugccauguucagcuacu

SEQ ID NO: 1007424 - RNA, 22 nt, Human
aagcugccuagaguugaauguc

SEQ ID NO: 1007425 - RNA, 22 nt, Human
gcagugccuugcuucucugucu

SEQ ID NO: 1007426 - RNA, 22 nt, Human
ccugggaggcugugggucugcu

SEQ ID NO: 1007427 - RNA, 22 nt, Human
ccaggaaugaaauguagauaaa

SEQ ID NO: 1007428 - RNA, 22 nt, Human
guggaggagaggcgccuugcgg

SEQ ID NO: 1007429 - RNA, 22 nt, Human
aucacaaaggcugcuucaugau

SEQ ID NO: 1007430 - RNA, 22 nt, Human
gccuggcccagggcuccgcagg

SEQ ID NO: 1007431 - RNA, 22 nt, Human
uggaguucucaggugagggcuu

SEQ ID NO: 1007432 - RNA, 22 nt, Human
gugacagaguuuuagaucucau

SEQ ID NO: 1007433 - RNA, 22 nt, Human
acccagcuaacccuacccugga

SEQ ID NO: 1007434 - RNA, 23 nt, Human
ugucacauuuaguuggcauuguu

SEQ ID NO: 1007435 - RNA, 22 nt, Human
gguuucaaaguggacaguuagu

SEQ ID NO: 1007436 - RNA, 22 nt, Human
uagccggguguugugucaugca

SEQ ID NO: 1007437 - RNA, 22 nt, Human
cauggccugccuccuccuggug

SEQ ID NO: 1007438 - RNA, 22 nt, Human
gcucugagauugagccuuuggu

SEQ ID NO: 1007439 - RNA, 22 nt, Human
aggccugacuugaauuuagggc

SEQ ID NO: 1007440 - RNA, 22 nt, Human
aauggccagcaacaggagugaa

SEQ ID NO: 1007441 - RNA, 22 nt, Human
cagaaguaagauuacugugagu

SEQ ID NO: 1007442 - RNA, 22 nt, Human
aaggguggauuucugagcucua

SEQ ID NO: 1007443 - RNA, 22 nt, Human
acucaggaaaaauguagugaua

SEQ ID NO: 1007444 - RNA, 22 nt, Human
uguguguauaugcauuuaucua

SEQ ID NO: 1007445 - RNA, 22 nt, Human
gugauuucagguuuuucauacu

SEQ ID NO: 1007446 - RNA, 21 nt, Human
ggcuuuaugcucacccagccu

SEQ ID NO: 1007447 - RNA, 22 nt, Human
acuggcugaaguuuacuuuuug

SEQ ID NO: 1007448 - RNA, 22 nt, Human
gggaagagaccguacccuggcc

SEQ ID NO: 1007449 - RNA, 19 nt, Human
cagagcagugguuccugaa

SEQ ID NO: 1007450 - RNA, 22 nt, Human
ucugggcccuaaaccagcucua

SEQ ID NO: 1007451 - RNA, 22 nt, Human
uuguuucaugaguguaaaggga

SEQ ID NO: 1007452 - RNA, 22 nt, Human
cagcagcugauggggaagugau

SEQ ID NO: 1007453 - RNA, 19 nt, Human
agggaguuuauauuugcac

SEQ ID NO: 1007454 - RNA, 22 nt, Human
auagugguuggauaugucagag

SEQ ID NO: 1007455 - RNA, 22 nt, Human
gccuggcuccuaaggacuggcu

SEQ ID NO: 1007456 - RNA, 21 nt, Human
ucucuacacuuucacuaggcu

SEQ ID NO: 1007457 - RNA, 22 nt, Human
ccagaccacccuggccaugcac

SEQ ID NO: 1007458 - RNA, 22 nt, Human
ucaaaagucugcauucuucaca

SEQ ID NO: 1007459 - RNA, 23 nt, Human
ugcuguccaacagacuggccaug

SEQ ID NO: 1007460 - RNA, 22 nt, Human
aaggaggaauuucagggugaau

SEQ ID NO: 1007461 - RNA, 22 nt, Human
gguacaaggagugaagguuugg

SEQ ID NO: 1007462 - RNA, 22 nt, Human
uggcagggaguugcaggauuuc

SEQ ID NO: 1007463 - RNA, 22 nt, Human
uaugucaaaguuaagaaauagg

SEQ ID NO: 1007464 - RNA, 22 nt, Human
ccuggcagcuguuuggcuuggc

SEQ ID NO: 1007465 - RNA, 22 nt, Human
ugcagcugcuggcccaggugcu

SEQ ID NO: 1007466 - RNA, 20 nt, Human
ugcuugucaugcacucaggc

SEQ ID NO: 1007467 - RNA, 22 nt, Human
uucaaagugcauguuccucaga

SEQ ID NO: 1007468 - RNA, 22 nt, Human
agggcucccgugaggugacugc

SEQ ID NO: 1007469 - RNA, 18 nt, Human
ggagagugacagagucgu

SEQ ID NO: 1007470 - RNA, 22 nt, Human
cucccaggcacagggaggagcc

SEQ ID NO: 1007471 - RNA, 22 nt, Human
aaacaucauaggcaugcaugau

SEQ ID NO: 1007472 - RNA, 22 nt, Human
gcaugcugcaccagagccucuc

SEQ ID NO: 1007473 - RNA, 22 nt, Human
ugagcaguaggucugaauagug

SEQ ID NO: 1007474 - RNA, 22 nt, Human
uccaagaucuacagcaguuuag

SEQ ID NO: 1007475 - RNA, 22 nt, Human
ucagcagggaggcucugugccc

SEQ ID NO: 1007476 - RNA, 22 nt, Human
guuuucaugucuauugggcaua

SEQ ID NO: 1007477 - RNA, 22 nt, Human
cuccagggagcuuggaaagacc

SEQ ID NO: 1007478 - RNA, 22 nt, Human
cagucccagcugcucagaaggc

SEQ ID NO: 1007479 - RNA, 22 nt, Human
agagccugugauugucaucacc

SEQ ID NO: 1007480 - RNA, 22 nt, Human
uuccucucaacaugccugccgg

SEQ ID NO: 1007481 - RNA, 22 nt, Human
aaagcuuuucaguauguucaug

SEQ ID NO: 1007482 - RNA, 22 nt, Human
acaaagguggaccauguggcuu

SEQ ID NO: 1007483 - RNA, 22 nt, Human
gccaccaggagcccaguccaaa

SEQ ID NO: 1007484 - RNA, 22 nt, Human
cagagccaggugguguuggggc

SEQ ID NO: 1007485 - RNA, 22 nt, Human
uugucccaggacuugcauagau

SEQ ID NO: 1007486 - RNA, 22 nt, Human
cucucuguuaugcuuucaugaa

SEQ ID NO: 1007487 - RNA, 22 nt, Human
cucaggauuaaggaaucuaaau

SEQ ID NO: 1007488 - RNA, 21 nt, Human
ugcugccauagaccugaggga

SEQ ID NO: 1007489 - RNA, 19 nt, Human
gcccugcaggagguggggc

SEQ ID NO: 1007490 - RNA, 22 nt, Human
uggagggcaugcuguccauggg

SEQ ID NO: 1007491 - RNA, 22 nt, Human
ucuguucagacacuuuacaugu

SEQ ID NO: 1007492 - RNA, 22 nt, Human
aaaccaucagauaauucauacu

SEQ ID NO: 1007493 - RNA, 22 nt, Human
ggugaggcuaagugacacaggg

SEQ ID NO: 1007494 - RNA, 22 nt, Human
ugacccauggucugaucauagg

SEQ ID NO: 1007495 - RNA, 22 nt, Human
agugucugaaccaccggggcau

SEQ ID NO: 1007496 - RNA, 22 nt, Human
uaacacaugaaagcaccuucuu

SEQ ID NO: 1007497 - RNA, 22 nt, Human
uucuucaaaacaacacuggccu

SEQ ID NO: 1007498 - RNA, 22 nt, Human
ucauuuguucucauucucuacu

SEQ ID NO: 1007499 - RNA, 22 nt, Human
gaaacuguauguaguuuuuggg

SEQ ID NO: 1007500 - RNA, 22 nt, Human
auguuauggcucaaacauuugg

SEQ ID NO: 1007501 - RNA, 22 nt, Human
ccaggaggcagaaguugcagug

SEQ ID NO: 1007502 - RNA, 22 nt, Human
cgugagcaaaauggacacuccc

SEQ ID NO: 1007503 - RNA, 22 nt, Human
cuguuuaucuaggaguugcagg

SEQ ID NO: 1007504 - RNA, 19 nt, Human
gggaaauucacuugcuucc

SEQ ID NO: 1007505 - RNA, 22 nt, Human
acagcuggaggccccauugucc

SEQ ID NO: 1007506 - RNA, 22 nt, Human
cugguacaaaaugcugauauca

SEQ ID NO: 1007507 - RNA, 22 nt, Human
acaucucaugaaugauaaauca

SEQ ID NO: 1007508 - RNA, 17 nt, Human
cagcuuuaugcuacugu

SEQ ID NO: 1007509 - RNA, 21 nt, Human
gggccacaccuucugcagacc

SEQ ID NO: 1007510 - RNA, 21 nt, Human
acuguucauuugaugaacugg

SEQ ID NO: 1007511 - RNA, 22 nt, Human
ucugucacugagcucaggauuc

SEQ ID NO: 1007512 - RNA, 22 nt, Human
uuauuuaggagaaggaacccug

SEQ ID NO: 1007513 - RNA, 22 nt, Human
cccugccugugggcaucaacau

SEQ ID NO: 1007514 - RNA, 22 nt, Human
ugggggugaaagucuggacagu

SEQ ID NO: 1007515 - RNA, 22 nt, Human
cagauggccagaggcagcugca

SEQ ID NO: 1007516 - RNA, 22 nt, Human
aucaggauagucuguaaauugu

SEQ ID NO: 1007517 - RNA, 22 nt, Human
aauuaguaaccuaauuccaucu

SEQ ID NO: 1007518 - RNA, 22 nt, Human
aguguggguuuuauggagcccu

SEQ ID NO: 1007519 - RNA, 22 nt, Human
caucagcaggcaacacucuugg

SEQ ID NO: 1007520 - RNA, 22 nt, Human
gggaggcuggcucuggccacag

SEQ ID NO: 1007521 - RNA, 22 nt, Human
ugucaccaugccagcuucugcc

SEQ ID NO: 1007522 - RNA, 22 nt, Human
guggccugucagaagccguggg

SEQ ID NO: 1007523 - RNA, 22 nt, Human
gcaggaaagguugagacuuugc

SEQ ID NO: 1007524 - RNA, 22 nt, Human
gcaagcaguuguggcuucugag

SEQ ID NO: 1007525 - RNA, 22 nt, Human
ugucuuuagccagcagucuucu

SEQ ID NO: 1007526 - RNA, 22 nt, Human
ccagcucuggcuucuugcuggg

SEQ ID NO: 1007527 - RNA, 22 nt, Human
ucuggcucauaggaaggccauu

SEQ ID NO: 1007528 - RNA, 22 nt, Human
cugcucugcagcuuggacuccc

SEQ ID NO: 1007529 - RNA, 22 nt, Human
acauauauuacuaguaaagaca

SEQ ID NO: 1007530 - RNA, 22 nt, Human
acacaugagaaacaucaguugu

SEQ ID NO: 1007531 - RNA, 22 nt, Human
aguuauauuccauagauucaga

SEQ ID NO: 1007532 - RNA, 22 nt, Human
gcaaagucugcaucuggaucag

SEQ ID NO: 1007533 - RNA, 22 nt, Human
cauagagugauguaagguaugu

SEQ ID NO: 1007534 - RNA, 22 nt, Human
cugagagugcucuuugauguca

SEQ ID NO: 1007535 - RNA, 22 nt, Human
ugggcugcacccucagccucug

SEQ ID NO: 1007536 - RNA, 22 nt, Human
ugcauuguugaugaguugaaua

SEQ ID NO: 1007537 - RNA, 22 nt, Human
aaguucaaucagaugaaaaagc

SEQ ID NO: 1007538 - RNA, 22 nt, Human
gagcugucucuauaugaaugcu

SEQ ID NO: 1007539 - RNA, 22 nt, Human
ccaggccaaauucagucagcag

SEQ ID NO: 1007540 - RNA, 22 nt, Human
gggugggaacaggaugccagga

SEQ ID NO: 1007541 - RNA, 22 nt, Human
uuacaagauaaccugaugcugu

SEQ ID NO: 1007542 - RNA, 22 nt, Human
ggaaagaccugagauaggaaua

SEQ ID NO: 1007543 - RNA, 22 nt, Human
uagcagcuuccagagagggcag

SEQ ID NO: 1007544 - RNA, 23 nt, Human
acagcaagaggaccagaugugag

SEQ ID NO: 1007545 - RNA, 22 nt, Human
caggaugggauguagugggccc

SEQ ID NO: 1007546 - RNA, 22 nt, Human
uuuggaauuggcauucuauucu

SEQ ID NO: 1007547 - RNA, 22 nt, Human
uacaaagccugguagauaucug

SEQ ID NO: 1007548 - RNA, 23 nt, Human
uccuuccuuugagaggcuccauc

SEQ ID NO: 1007549 - RNA, 18 nt, Human
uacaugcauaaaugaagc

SEQ ID NO: 1007550 - RNA, 22 nt, Human
cccugggcagucugcacuucag

SEQ ID NO: 1007551 - RNA, 22 nt, Human
uggcagagguauauugggagga

SEQ ID NO: 1007552 - RNA, 22 nt, Human
cauugaaaaacguugacugagu

SEQ ID NO: 1007553 - RNA, 22 nt, Human
agugugcugcuuaaacaguugu

SEQ ID NO: 1007554 - RNA, 22 nt, Human
cugccacuagcuuucacaucuu

SEQ ID NO: 1007555 - RNA, 22 nt, Human
uggcaguguauagguggcuccu

SEQ ID NO: 1007556 - RNA, 20 nt, Human
aaguuuucuccaaauacagu

SEQ ID NO: 1007557 - RNA, 19 nt, Human
uguuggugcggauguggag

SEQ ID NO: 1007558 - RNA, 22 nt, Human
auguacacaugcaugcaugugc

SEQ ID NO: 1007559 - RNA, 22 nt, Human
uucacaggcuuggagguggggg

SEQ ID NO: 1007560 - RNA, 22 nt, Human
gcugggagcccuggucugcucc

SEQ ID NO: 1007561 - RNA, 22 nt, Human
agggcagagcacugaauuggga

SEQ ID NO: 1007562 - RNA, 21 nt, Human
uggagcugaauuuuuggcauc

SEQ ID NO: 1007563 - RNA, 22 nt, Human
acagaguaggugcugucgacug

SEQ ID NO: 1007564 - RNA, 22 nt, Human
uuauuuauuguguaccuacugu

SEQ ID NO: 1007565 - RNA, 22 nt, Human
aaaugugugcacaaagacagcu

SEQ ID NO: 1007566 - RNA, 22 nt, Human
aaguuacuggcaagggcugcag

SEQ ID NO: 1007567 - RNA, 22 nt, Human
agugaaauggaugcugcuacug

SEQ ID NO: 1007568 - RNA, 22 nt, Human
uuuguaugugauaagacuauuc

SEQ ID NO: 1007569 - RNA, 21 nt, Human
ugcccacagcaaaugcagagg

SEQ ID NO: 1007570 - RNA, 22 nt, Human
agggcugcugaggaagccuugc

SEQ ID NO: 1007571 - RNA, 19 nt, Human
acccucucagugccugagg

SEQ ID NO: 1007572 - RNA, 22 nt, Human
ugaaggaaaugacggcagaaga

SEQ ID NO: 1007573 - RNA, 22 nt, Human
cucuggcuuugcucaugcaucc

SEQ ID NO: 1007574 - RNA, 22 nt, Human
ggccucucauguccugggcuuc

SEQ ID NO: 1007575 - RNA, 22 nt, Human
ugggagagcacugcagccccgg

SEQ ID NO: 1007576 - RNA, 22 nt, Human
cuguccccgcgaguccagagcu

SEQ ID NO: 1007577 - RNA, 22 nt, Human
aggccuggccugggcggcauug

SEQ ID NO: 1007578 - RNA, 22 nt, Human
cugggagucaccaggagcaagg

SEQ ID NO: 1007579 - RNA, 22 nt, Human
aaacuucagugaaugacuuaug

SEQ ID NO: 1007580 - RNA, 22 nt, Human
agcaggaaagaaaaaucugugu

SEQ ID NO: 1007581 - RNA, 22 nt, Human
aacacagcuaauuucugucaau

SEQ ID NO: 1007582 - RNA, 22 nt, Human
cucuuucaguucugauagucuc

SEQ ID NO: 1007583 - RNA, 22 nt, Human
uucacaggaggguggaugcaug

SEQ ID NO: 1007584 - RNA, 22 nt, Human
agucucugugagcucccaaugg

SEQ ID NO: 1007585 - RNA, 22 nt, Human
ucuggcuccaccuccuuuacua

SEQ ID NO: 1007586 - RNA, 20 nt, Human
agccugccagcuggcccaga

SEQ ID NO: 1007587 - RNA, 22 nt, Human
agaaaguucugugaguuguuca

SEQ ID NO: 1007588 - RNA, 22 nt, Human
gaaacugugaucguguucuggg

SEQ ID NO: 1007589 - RNA, 22 nt, Human
uaacagaaguuguucauugugg

SEQ ID NO: 1007590 - RNA, 22 nt, Human
aguuuuuccguggcuacgauaa

SEQ ID NO: 1007591 - RNA, 22 nt, Human
gggagccaugcuggucuucuuu

SEQ ID NO: 1007592 - RNA, 22 nt, Human
ugcagcaggagccaggccuggu

SEQ ID NO: 1007593 - RNA, 22 nt, Human
gagaggaguaggcugauggugc

SEQ ID NO: 1007594 - RNA, 22 nt, Human
cugcugggucuaugcaagugga

SEQ ID NO: 1007595 - RNA, 22 nt, Human
cagcaauaagccagguuagaca

SEQ ID NO: 1007596 - RNA, 22 nt, Human
uuauuugcccauguuuagcaga

SEQ ID NO: 1007597 - RNA, 22 nt, Human
ccugggagugugccaucucugu

SEQ ID NO: 1007598 - RNA, 22 nt, Human
uauucacauguacauaugcuca

SEQ ID NO: 1007599 - RNA, 22 nt, Human
gcucugcucuugacuuaccagg

SEQ ID NO: 1007600 - RNA, 22 nt, Human
gagagucuaggaaccucauaua

SEQ ID NO: 1007601 - RNA, 22 nt, Human
cugaggcugcccagggccaggu

SEQ ID NO: 1007602 - RNA, 22 nt, Human
gacaugcaacaauuuggcauuu

SEQ ID NO: 1007603 - RNA, 22 nt, Human
auugcuguaaauuaucuuauua

SEQ ID NO: 1007604 - RNA, 22 nt, Human
agggcugccauuucuggcccaa

SEQ ID NO: 1007605 - RNA, 22 nt, Human
gugcaggggccuccccuugcug

SEQ ID NO: 1007606 - RNA, 22 nt, Human
agaugcugugaggaagcuagga

SEQ ID NO: 1007607 - RNA, 22 nt, Human
gcaaagguagccaaggagcuca

SEQ ID NO: 1007608 - RNA, 21 nt, Human
uccagaccucccucuccuagc

SEQ ID NO: 1007609 - RNA, 22 nt, Human
ugcauuuuuaacaaggcuaauu

SEQ ID NO: 1007610 - RNA, 22 nt, Human
cucacagaugcugugggucagg

SEQ ID NO: 1007611 - RNA, 22 nt, Human
gcugcccaggguggagccggcu

SEQ ID NO: 1007612 - RNA, 22 nt, Human
gggcucugcgcucagcuccagc

SEQ ID NO: 1007613 - RNA, 22 nt, Human
ugcuggcuacugauggcaggcc

SEQ ID NO: 1007614 - RNA, 22 nt, Human
aaaauccucuaauucuagaaua

SEQ ID NO: 1007615 - RNA, 22 nt, Human
caaauacuggguaaguuaauuu

SEQ ID NO: 1007616 - RNA, 22 nt, Human
gggcuugcugauuugggcagga

SEQ ID NO: 1007617 - RNA, 22 nt, Human
agugugcuauugcaccaucaua

SEQ ID NO: 1007618 - RNA, 22 nt, Human
uuugacagcuuguuacaaaguu

SEQ ID NO: 1007619 - RNA, 22 nt, Human
uggccugaggcucggcaugggu

SEQ ID NO: 1007620 - RNA, 22 nt, Human
ugcagaggagucagccugggca

SEQ ID NO: 1007621 - RNA, 22 nt, Human
cccagcccaucucaaaggucua

SEQ ID NO: 1007622 - RNA, 22 nt, Human
gcugccugccuugccuggagga

SEQ ID NO: 1007623 - RNA, 22 nt, Human
aggaccuguagggccugcaucc

SEQ ID NO: 1007624 - RNA, 22 nt, Human
acaggcuuuuuuagaaugacau

SEQ ID NO: 1007625 - RNA, 22 nt, Human
gaggucaggggagaggcugaug

SEQ ID NO: 1007626 - RNA, 22 nt, Human
acaggcagggaccuuggcuaag

SEQ ID NO: 1007627 - RNA, 22 nt, Human
ccucccacuucuugcugagguc

SEQ ID NO: 1007628 - RNA, 22 nt, Human
cuggcugcuuguagacucgacu

SEQ ID NO: 1007629 - RNA, 22 nt, Human
ucccuggagauaacuucuggga

SEQ ID NO: 1007630 - RNA, 22 nt, Human
acauacauauguuuaaaugcau

SEQ ID NO: 1007631 - RNA, 22 nt, Human
acuguucauuuggauuucucug

SEQ ID NO: 1007632 - RNA, 22 nt, Human
caguccuggggaccaggcugag

SEQ ID NO: 1007633 - RNA, 22 nt, Human
caucaucaaaagugacagagaa

SEQ ID NO: 1007634 - RNA, 22 nt, Human
cugaggugcuagggucccugcu

SEQ ID NO: 1007635 - RNA, 22 nt, Human
uucuucucucauagauuaaggu

SEQ ID NO: 1007636 - RNA, 22 nt, Human
ggcagccaugucccagggcuuc

SEQ ID NO: 1007637 - RNA, 22 nt, Human
caggaaggcccaccuguccugu

SEQ ID NO: 1007638 - RNA, 22 nt, Human
auuucauagauuguaaaucccu

SEQ ID NO: 1007639 - RNA, 22 nt, Human
ucugucaaaugagcaaguaacu

SEQ ID NO: 1007640 - RNA, 21 nt, Human
auacuuugaauuacagccuug

SEQ ID NO: 1007641 - RNA, 22 nt, Human
cccugcaggggaccugcagccu

SEQ ID NO: 1007642 - RNA, 22 nt, Human
ggcagccagagggcagcuggau

SEQ ID NO: 1007643 - RNA, 22 nt, Human
guccucuggugaaagcauuccc

SEQ ID NO: 1007644 - RNA, 22 nt, Human
ggccucucuccuuggcuugcag

SEQ ID NO: 1007645 - RNA, 22 nt, Human
aaggugucacugggacaggaaa

SEQ ID NO: 1007646 - RNA, 22 nt, Human
ugaaggcccuaucuccauauac

SEQ ID NO: 1007647 - RNA, 22 nt, Human
gcaggagcccuggcauguucuu

SEQ ID NO: 1007648 - RNA, 22 nt, Human
cuccagaagacccauccucaug

SEQ ID NO: 1007649 - RNA, 21 nt, Human
uccauuguuuucccaggguuu

SEQ ID NO: 1007650 - RNA, 20 nt, Human
uccagcugggaacagcugau

SEQ ID NO: 1007651 - RNA, 19 nt, Human
cccuggcaggcaagccugg

SEQ ID NO: 1007652 - RNA, 22 nt, Human
cuugccuucuuuuccuauagaa

SEQ ID NO: 1007653 - RNA, 22 nt, Human
guucuucaggcugugcucuaga

SEQ ID NO: 1007654 - RNA, 22 nt, Human
acuugggagggugugggcagcu

SEQ ID NO: 1007655 - RNA, 22 nt, Human
auguccuucuccucuuaccugc

SEQ ID NO: 1007656 - RNA, 22 nt, Human
aaggcacucauucaaggagaua

SEQ ID NO: 1007657 - RNA, 22 nt, Human
cucuccuggggagcacacacac

SEQ ID NO: 1007658 - RNA, 22 nt, Human
cuggccuggagccucugggugg

SEQ ID NO: 1007659 - RNA, 22 nt, Human
agaaguaggcagggcuguauca

SEQ ID NO: 1007660 - RNA, 22 nt, Human
aggcugcaggucugggucaugu

SEQ ID NO: 1007661 - RNA, 22 nt, Human
gcuguggguccggaccccacgg

SEQ ID NO: 1007662 - RNA, 22 nt, Human
gagcucagauucuggugucaga

SEQ ID NO: 1007663 - RNA, 22 nt, Human
augaaaaguucgaucuagaagg

SEQ ID NO: 1007664 - RNA, 22 nt, Human
cccaggaugucgaggcugcagu

SEQ ID NO: 1007665 - RNA, 22 nt, Human
uccauguggccagacacuggca

SEQ ID NO: 1007666 - RNA, 22 nt, Human
gaaggaaaacagaucugccuga

SEQ ID NO: 1007667 - RNA, 22 nt, Human
cucacuguccaacaggcuuuac

SEQ ID NO: 1007668 - RNA, 22 nt, Human
uucaacuagauuuauacaauuc

SEQ ID NO: 1007669 - RNA, 22 nt, Human
ucuugccucuuccccuuuccau

SEQ ID NO: 1007670 - RNA, 22 nt, Human
gcagaagcccggucagcgcacg

SEQ ID NO: 1007671 - RNA, 22 nt, Human
aauuuggcagugucuugaagua

SEQ ID NO: 1007672 - RNA, 19 nt, Human
cugaggcccauguaccaug

SEQ ID NO: 1007673 - RNA, 22 nt, Human
cuucauuaaugucuauaaguuu

SEQ ID NO: 1007674 - RNA, 22 nt, Human
uguaggaaaaacaaugaucugc

SEQ ID NO: 1007675 - RNA, 17 nt, Human
ccuguguuugcuccuuc

SEQ ID NO: 1007676 - RNA, 22 nt, Human
gugguaauuuaauccuacacug

SEQ ID NO: 1007677 - RNA, 22 nt, Human
aggcugucaucuuugcaggcag

SEQ ID NO: 1007678 - RNA, 22 nt, Human
auugaaagauuuugggcucaug

SEQ ID NO: 1007679 - RNA, 22 nt, Human
cacagguguaugaauaugucca

SEQ ID NO: 1007680 - RNA, 22 nt, Human
gagaaguuucugguuugcauag

SEQ ID NO: 1007681 - RNA, 18 nt, Human
uuaagagcugaaagggga

SEQ ID NO: 1007682 - RNA, 22 nt, Human
gaaaucugaacaacagcuguca

SEQ ID NO: 1007683 - RNA, 22 nt, Human
ccuucugcucccuggccagggc

SEQ ID NO: 1007684 - RNA, 22 nt, Human
ugaagcaggcauugacugauga

SEQ ID NO: 1007685 - RNA, 22 nt, Human
cacugcagaucagaggcugaga

SEQ ID NO: 1007686 - RNA, 22 nt, Human
uggcagcuccggguaggggcug

SEQ ID NO: 1007687 - RNA, 22 nt, Human
guauuaggaaauaugaagaaag

SEQ ID NO: 1007688 - RNA, 22 nt, Human
ucuuagcacagcuauauaaguu

SEQ ID NO: 1007689 - RNA, 22 nt, Human
caggaaaaaugccaggagucag

SEQ ID NO: 1007690 - RNA, 22 nt, Human
ccagcuggucugugcucauguu

SEQ ID NO: 1007691 - RNA, 22 nt, Human
ccucagagccuccagaaggaau

SEQ ID NO: 1007692 - RNA, 22 nt, Human
cagccuguagaauacaguaaau

SEQ ID NO: 1007693 - RNA, 22 nt, Human
uccuucagaaaaccucagucuu

SEQ ID NO: 1007694 - RNA, 22 nt, Human
ugucucugugagaucugacgau

SEQ ID NO: 1007695 - RNA, 22 nt, Human
gagggcugauaaaugcgcaugg

SEQ ID NO: 1007696 - RNA, 22 nt, Human
caggaaagggaugggcugccac

SEQ ID NO: 1007697 - RNA, 22 nt, Human
gagcuucccucugcagucccug

SEQ ID NO: 1007698 - RNA, 22 nt, Human
ucucagagggaaaggccaauuu

SEQ ID NO: 1007699 - RNA, 22 nt, Human
agaaugcauuuuguguagcuau

SEQ ID NO: 1007700 - RNA, 20 nt, Human
cugagagucugugcuuaguc

SEQ ID NO: 1007701 - RNA, 22 nt, Human
uucacaauagcuggcaucaucu

SEQ ID NO: 1007702 - RNA, 22 nt, Human
cugcugcugcuaucuacccagg

SEQ ID NO: 1007703 - RNA, 19 nt, Human
acacugaauguagaauugg

SEQ ID NO: 1007704 - RNA, 22 nt, Human
aguggcagccgagcaggagaug

SEQ ID NO: 1007705 - RNA, 22 nt, Human
gcagggcucugcuguaguccua

SEQ ID NO: 1007706 - RNA, 22 nt, Human
aaucaguucuacaucuuaucca

SEQ ID NO: 1007707 - RNA, 22 nt, Human
uggccugguuguugcugccguu

SEQ ID NO: 1007708 - RNA, 22 nt, Human
aaagaacaucggagugggcggg

SEQ ID NO: 1007709 - RNA, 22 nt, Human
agggagaaugaccaagguauau

SEQ ID NO: 1007710 - RNA, 22 nt, Human
uggcucagugcauucacaguaa

SEQ ID NO: 1007711 - RNA, 22 nt, Human
ucagaguguuuuacuaaacaag

SEQ ID NO: 1007712 - RNA, 22 nt, Human
uaaacauuuguuauucuuguuu

SEQ ID NO: 1007713 - RNA, 22 nt, Human
cccauucauccucgcuuccuuc

SEQ ID NO: 1007714 - RNA, 22 nt, Human
cugccuggcauggagaagagaa

SEQ ID NO: 1007715 - RNA, 22 nt, Human
uacuacauuaauaaaacauuca

SEQ ID NO: 1007716 - RNA, 22 nt, Human
acauucaugucccacuucuagc

SEQ ID NO: 1007717 - RNA, 22 nt, Human
ugaaggaaugagggaguggguc

SEQ ID NO: 1007718 - RNA, 22 nt, Human
aucuaggauuugaaugcacagu

SEQ ID NO: 1007719 - RNA, 22 nt, Human
cugugauuguuaguuccuauac

SEQ ID NO: 1007720 - RNA, 22 nt, Human
uuucagaaagcugaacauauga

SEQ ID NO: 1007721 - RNA, 18 nt, Human
gggcucacacaggucauc

SEQ ID NO: 1007722 - RNA, 22 nt, Human
caggcacuggccagucagcaca

SEQ ID NO: 1007723 - RNA, 22 nt, Human
cuuguccccagcagguugguuu

SEQ ID NO: 1007724 - RNA, 22 nt, Human
ugaaaggugacauuucuuggau

SEQ ID NO: 1007725 - RNA, 21 nt, Human
guggcccugccgcagugucca

SEQ ID NO: 1007726 - RNA, 22 nt, Human
ucugcuggccuuagcaggucua

SEQ ID NO: 1007727 - RNA, 22 nt, Human
cuggacagaaagggcugcugug

SEQ ID NO: 1007728 - RNA, 22 nt, Human
aggccagacagcuagaaacagg

SEQ ID NO: 1007729 - RNA, 22 nt, Human
ugcaauaaggaguaauaguaaa

SEQ ID NO: 1007730 - RNA, 22 nt, Human
ccuugcaggggaacaggcagug

SEQ ID NO: 1007731 - RNA, 22 nt, Human
uggagcucaaaggccuguggga

SEQ ID NO: 1007732 - RNA, 22 nt, Human
caggcagcaggagcccugcucg

SEQ ID NO: 1007733 - RNA, 22 nt, Human
gccugcagauauauaggauggu

SEQ ID NO: 1007734 - RNA, 22 nt, Human
gaggcugcaggcaaugcugccc

SEQ ID NO: 1007735 - RNA, 22 nt, Human
aaacaucaauugcaucucccaa

SEQ ID NO: 1007736 - RNA, 21 nt, Human
aaauuucugcaagccucaacu

SEQ ID NO: 1007737 - RNA, 22 nt, Human
gaccagagaaaggcacuggaag

SEQ ID NO: 1007738 - RNA, 22 nt, Human
acguuuucuagagaauaugcag

SEQ ID NO: 1007739 - RNA, 22 nt, Human
ucacaaauauuuuaacaguagg

SEQ ID NO: 1007740 - RNA, 22 nt, Human
uuuccuucaucaucugagagcu

SEQ ID NO: 1007741 - RNA, 22 nt, Human
agggccagcacuccuggcagga

SEQ ID NO: 1007742 - RNA, 21 nt, Human
augucaaaugcuuuauuuuau

SEQ ID NO: 1007743 - RNA, 22 nt, Human
auaauuuacuaagcucuaccuu

SEQ ID NO: 1007744 - RNA, 22 nt, Human
augcacagacccaaaggccauc

SEQ ID NO: 1007745 - RNA, 22 nt, Human
aagggcagcuauuaucgucauc

SEQ ID NO: 1007746 - RNA, 22 nt, Human
caaauauuccagguacaucccu

SEQ ID NO: 1007747 - RNA, 22 nt, Human
uggcacugaccccaggccugug

SEQ ID NO: 1007748 - RNA, 19 nt, Human
ucccaggaagcaaauguca

SEQ ID NO: 1007749 - RNA, 22 nt, Human
cagcugcccauccugggaaaug

SEQ ID NO: 1007750 - RNA, 22 nt, Human
cagaggcugccagccaugugca

SEQ ID NO: 1007751 - RNA, 22 nt, Human
auugcacaaacacagucagacu

SEQ ID NO: 1007752 - RNA, 22 nt, Human
ugccagaagugcuuuauaagug

SEQ ID NO: 1007753 - RNA, 22 nt, Human
gugccaggugcuaagcugugcu

SEQ ID NO: 1007754 - RNA, 22 nt, Human
uaaaucccuacaucuguguuuu

SEQ ID NO: 1007755 - RNA, 22 nt, Human
gagcugccggcccacaguacua

SEQ ID NO: 1007756 - RNA, 22 nt, Human
agccuggcacugaggcagggcg

SEQ ID NO: 1007757 - RNA, 22 nt, Human
gccuggcaggaaucucagugcu

SEQ ID NO: 1007758 - RNA, 22 nt, Human
acucccacuccagaguagaagc

SEQ ID NO: 1007759 - RNA, 22 nt, Human
uuuuucauauuccccucucugg

SEQ ID NO: 1007760 - RNA, 20 nt, Human
caucaucacaugagccaauu

SEQ ID NO: 1007761 - RNA, 22 nt, Human
cacugugucaguuugguuagac

SEQ ID NO: 1007762 - RNA, 22 nt, Human
uaaggcauucucaugcugugaa

SEQ ID NO: 1007763 - RNA, 22 nt, Human
aauucaugaguagaaucuauau

SEQ ID NO: 1007764 - RNA, 22 nt, Human
aacagaaugcaggggaugcugc

SEQ ID NO: 1007765 - RNA, 22 nt, Human
ccugggagggcaagugcugaug

SEQ ID NO: 1007766 - RNA, 22 nt, Human
gaggcugcuguuagcccugggc

SEQ ID NO: 1007767 - RNA, 22 nt, Human
aggacaguccgggguccuccac

SEQ ID NO: 1007768 - RNA, 22 nt, Human
acuauacauugaauguuaaggu

SEQ ID NO: 1007769 - RNA, 19 nt, Human
caaggguugggucugucau

SEQ ID NO: 1007770 - RNA, 22 nt, Human
gggagcaggacauaauagcaau

SEQ ID NO: 1007771 - RNA, 22 nt, Human
ggcuuuauuugcagccauuguu

SEQ ID NO: 1007772 - RNA, 22 nt, Human
cugcagcuuuggaaaccuguuu

SEQ ID NO: 1007773 - RNA, 22 nt, Human
cagcccuuuccuucucagcuuu

SEQ ID NO: 1007774 - RNA, 22 nt, Human
gcaggccuccccugcuggagcu

SEQ ID NO: 1007775 - RNA, 22 nt, Human
ccagagcugcauccagcagguu

SEQ ID NO: 1007776 - RNA, 22 nt, Human
ucucuucauagugacacccauc

SEQ ID NO: 1007777 - RNA, 22 nt, Human
agagccugaggcccugagaggg

SEQ ID NO: 1007778 - RNA, 22 nt, Human
gggguggauuccuacaggucca

SEQ ID NO: 1007779 - RNA, 22 nt, Human
cuucaagauccauagauauugc

SEQ ID NO: 1007780 - RNA, 22 nt, Human
aguaaaaucaccaucucuuugu

SEQ ID NO: 1007781 - RNA, 22 nt, Human
uuucauaaacaguagaagacua

SEQ ID NO: 1007782 - RNA, 22 nt, Human
caggcacucagucuggaucccu

SEQ ID NO: 1007783 - RNA, 22 nt, Human
cagagacagaaaauggaucuag

SEQ ID NO: 1007784 - RNA, 22 nt, Human
agcagcuccugccaugagugcu

SEQ ID NO: 1007785 - RNA, 22 nt, Human
aaaugguauuuacucuguauua

SEQ ID NO: 1007786 - RNA, 22 nt, Human
agccccaguccgcugcgggcgg

SEQ ID NO: 1007787 - RNA, 22 nt, Human
aggcugugggaauggcugcuug

SEQ ID NO: 1007788 - RNA, 22 nt, Human
ugccugucuccucugcagggug

SEQ ID NO: 1007789 - RNA, 22 nt, Human
gagggugguggcuuaaggugcu

SEQ ID NO: 1007790 - RNA, 22 nt, Human
agucagugaaaacuagaauguu

SEQ ID NO: 1007791 - RNA, 22 nt, Human
cagcugcuguucaguuuuguuu

SEQ ID NO: 1007792 - RNA, 22 nt, Human
uuugaaagcaggugugggaggg

SEQ ID NO: 1007793 - RNA, 22 nt, Human
ccucugcagcagagagccagag

SEQ ID NO: 1007794 - RNA, 22 nt, Human
uccagccuaauguucuucccac

SEQ ID NO: 1007795 - RNA, 21 nt, Human
uggaccuguccuucucgcugu

SEQ ID NO: 1007796 - RNA, 22 nt, Human
gggcaaguccggugcccagagc

SEQ ID NO: 1007797 - RNA, 20 nt, Human
agcagcuguguuuucauccu

SEQ ID NO: 1007798 - RNA, 22 nt, Human
uccagccaacugccuagggagc

SEQ ID NO: 1007799 - RNA, 22 nt, Human
gguucacauauugagaguauuc

SEQ ID NO: 1007800 - RNA, 22 nt, Human
gcauaauauacaugcuugaucc

SEQ ID NO: 1007801 - RNA, 20 nt, Human
acauguacuaaugaauacag

SEQ ID NO: 1007802 - RNA, 22 nt, Human
ugaggcuggcaaggcugguauu

SEQ ID NO: 1007803 - RNA, 21 nt, Human
gaaaggucuuaacuuacagag

SEQ ID NO: 1007804 - RNA, 22 nt, Human
ggcagcagggcugucucccuac

SEQ ID NO: 1007805 - RNA, 23 nt, Human
cagagcuggcucagagcugccug

SEQ ID NO: 1007806 - RNA, 22 nt, Human
ugaaggugucuuugugaacauc

SEQ ID NO: 1007807 - RNA, 22 nt, Human
gcuuuccuggcccugucccugc

SEQ ID NO: 1007808 - RNA, 22 nt, Human
uguggaaaagaauaagggagau

SEQ ID NO: 1007809 - RNA, 22 nt, Human
ugucacauaauuuaucuguagg

SEQ ID NO: 1007810 - RNA, 22 nt, Human
ccagggcagaaaaagagggaau

SEQ ID NO: 1007811 - RNA, 22 nt, Human
aaguuacaggagaaagagauca

SEQ ID NO: 1007812 - RNA, 22 nt, Human
cugggcugcgggcgccccucca

SEQ ID NO: 1007813 - RNA, 19 nt, Human
caaggccaccauuucuccg

SEQ ID NO: 1007814 - RNA, 22 nt, Human
uccuuggcagcagggagcauga

SEQ ID NO: 1007815 - RNA, 23 nt, Human
cuggcucauccugguugcagugg

SEQ ID NO: 1007816 - RNA, 22 nt, Human
gaacacauuucucugacuguag

SEQ ID NO: 1007817 - RNA, 22 nt, Human
ucagcagcagcucagcauguuu

SEQ ID NO: 1007818 - RNA, 22 nt, Human
uccucugcucagcauuccucac

SEQ ID NO: 1007819 - RNA, 22 nt, Human
uugaaaggguuaaagugguaaa

SEQ ID NO: 1007820 - RNA, 21 nt, Human
uaauaauuccacuacagagua

SEQ ID NO: 1007821 - RNA, 22 nt, Human
gagaaggaguagcugaccuggg

SEQ ID NO: 1007822 - RNA, 22 nt, Human
uugcauugugauuacagaggug

SEQ ID NO: 1007823 - RNA, 22 nt, Human
ugcucuguaacaaauugacaug

SEQ ID NO: 1007824 - RNA, 22 nt, Human
ugggcagaauugugguaguuaa

SEQ ID NO: 1007825 - RNA, 22 nt, Human
ccuggcagcagcacaugccuuc

SEQ ID NO: 1007826 - RNA, 22 nt, Human
cuggagccggcgagccccagcc

SEQ ID NO: 1007827 - RNA, 20 nt, Human
aggagaaauucgggacaccu

SEQ ID NO: 1007828 - RNA, 22 nt, Human
agagaaaacucauugagguguc

SEQ ID NO: 1007829 - RNA, 23 nt, Human
cuggcuccgaagacuccaggauc

SEQ ID NO: 1007830 - RNA, 22 nt, Human
caguacuugggaaugcugggga

SEQ ID NO: 1007831 - RNA, 22 nt, Human
ccagagcccagggucaugcagg

SEQ ID NO: 1007832 - RNA, 22 nt, Human
gcuggagcugcagccugggccu

SEQ ID NO: 1007833 - RNA, 22 nt, Human
cagucucuugcuucauuaguug

SEQ ID NO: 1007834 - RNA, 22 nt, Human
agccucugacugucagcaaggu

SEQ ID NO: 1007835 - RNA, 22 nt, Human
cugcucugacccuuucaccuuc

SEQ ID NO: 1007836 - RNA, 22 nt, Human
ggggacugccuuccacagacac

SEQ ID NO: 1007837 - RNA, 22 nt, Human
ugucucugaacagcuuacuaaa

SEQ ID NO: 1007838 - RNA, 22 nt, Human
cugggcugcagcgggagcgacg

SEQ ID NO: 1007839 - RNA, 22 nt, Human
ucagaaauagucuuuaaaauga

SEQ ID NO: 1007840 - RNA, 18 nt, Human
ugggauggagaguaacug

SEQ ID NO: 1007841 - RNA, 22 nt, Human
uugcugaaaucuaugacauccu

SEQ ID NO: 1007842 - RNA, 22 nt, Human
auaugugugccauuucagcagu

SEQ ID NO: 1007843 - RNA, 22 nt, Human
uguccucuaauuggccucuugc

SEQ ID NO: 1007844 - RNA, 21 nt, Human
ggugggcacaggagagcagag

SEQ ID NO: 1007845 - RNA, 17 nt, Human
ucugggcuucagugguc

SEQ ID NO: 1007846 - RNA, 22 nt, Human
gaaagauauuuauuggcaacag

SEQ ID NO: 1007847 - RNA, 22 nt, Human
ggccuguccagccugccuggcu

SEQ ID NO: 1007848 - RNA, 22 nt, Human
ugccagaagauucucuaucaga

SEQ ID NO: 1007849 - RNA, 22 nt, Human
ugggccugaguuugggaacugg

SEQ ID NO: 1007850 - RNA, 22 nt, Human
ccugagagcgaguggccucaug

SEQ ID NO: 1007851 - RNA, 22 nt, Human
ucugucacucccugaugaugaa

SEQ ID NO: 1007852 - RNA, 22 nt, Human
cagugaggaguccagggcagag

SEQ ID NO: 1007853 - RNA, 18 nt, Human
agucuucugauccauuuu

SEQ ID NO: 1007854 - RNA, 22 nt, Human
ugggagccauuuuagaggcugc

SEQ ID NO: 1007855 - RNA, 22 nt, Human
ggccuugggauguggcugcagc

SEQ ID NO: 1007856 - RNA, 22 nt, Human
cccagguggcagaagcugcagu

SEQ ID NO: 1007857 - RNA, 22 nt, Human
ucaccacugaacagaccuuugg

SEQ ID NO: 1007858 - RNA, 22 nt, Human
gaaugugugacucuauugagca

SEQ ID NO: 1007859 - RNA, 22 nt, Human
ucuggagagucacagugccaga

SEQ ID NO: 1007860 - RNA, 22 nt, Human
aggcccuggucaggucuggcug

SEQ ID NO: 1007861 - RNA, 22 nt, Human
ucccagagccaagcuauggaug

SEQ ID NO: 1007862 - RNA, 22 nt, Human
caguugaugggacucauguggg

SEQ ID NO: 1007863 - RNA, 22 nt, Human
gagcagagacaguacaacuggc

SEQ ID NO: 1007864 - RNA, 20 nt, Human
ucucuucuggggagauaaaa

SEQ ID NO: 1007865 - RNA, 22 nt, Human
uacuaucucuucuaacuucaga

SEQ ID NO: 1007866 - RNA, 22 nt, Human
auuguguaauuuucagcucaua

SEQ ID NO: 1007867 - RNA, 22 nt, Human
uuugaaaggguuaugagacuga

SEQ ID NO: 1007868 - RNA, 22 nt, Human
aggugccagugcuguggucccc

SEQ ID NO: 1007869 - RNA, 22 nt, Human
cagugagggcccccuuccaggu

SEQ ID NO: 1007870 - RNA, 22 nt, Human
uccaugagcuagggauucauca

SEQ ID NO: 1007871 - RNA, 22 nt, Human
cugagguguugaugaccuaugc

SEQ ID NO: 1007872 - RNA, 22 nt, Human
guaggcagauaggagugcagcc

SEQ ID NO: 1007873 - RNA, 22 nt, Human
aguaugaagauuauaauuuuuc

SEQ ID NO: 1007874 - RNA, 22 nt, Human
cugugggcugaaagugcucccg

SEQ ID NO: 1007875 - RNA, 22 nt, Human
auguaucagaaauagcauuggc

SEQ ID NO: 1007876 - RNA, 22 nt, Human
ugaaaucaauugcaauguuuau

SEQ ID NO: 1007877 - RNA, 22 nt, Human
ugugucaauuuucauuccuacu

SEQ ID NO: 1007878 - RNA, 22 nt, Human
auacuuuggggguuaguguaga

SEQ ID NO: 1007879 - RNA, 22 nt, Human
cucugcagaauuugagcugcuc

SEQ ID NO: 1007880 - RNA, 22 nt, Human
cugaaggacacgugaggagcca

SEQ ID NO: 1007881 - RNA, 22 nt, Human
ugugcuucagguugucgccacg

SEQ ID NO: 1007882 - RNA, 22 nt, Human
uccaguggagugugggggugaa

SEQ ID NO: 1007883 - RNA, 22 nt, Human
gaaaauguuagcuucauaguca

SEQ ID NO: 1007884 - RNA, 22 nt, Human
uggcuguguuaccacuucaugu

SEQ ID NO: 1007885 - RNA, 22 nt, Human
agggcugcccagugugagagcu

SEQ ID NO: 1007886 - RNA, 22 nt, Human
uuuaaauucugucugccgcuua

SEQ ID NO: 1007887 - RNA, 22 nt, Human
caaaugauaccuauuacuaggc

SEQ ID NO: 1007888 - RNA, 22 nt, Human
ccagggugggaggcugaaggcg

SEQ ID NO: 1007889 - RNA, 22 nt, Human
acuucuucuucagcugggggau

SEQ ID NO: 1007890 - RNA, 22 nt, Human
aguuuuucugcuggucucacua

SEQ ID NO: 1007891 - RNA, 22 nt, Human
gcacugugacccagagcaggug

SEQ ID NO: 1007892 - RNA, 22 nt, Human
cugugucucuccuuacaagacu

SEQ ID NO: 1007893 - RNA, 22 nt, Human
uggcucugggcaccguguccac

SEQ ID NO: 1007894 - RNA, 22 nt, Human
cauuuguuggucagauuguagu

SEQ ID NO: 1007895 - RNA, 22 nt, Human
cacagaaguuucauagucucga

SEQ ID NO: 1007896 - RNA, 22 nt, Human
ccacugucugcaggccucagca

SEQ ID NO: 1007897 - RNA, 22 nt, Human
uccuugaaugaagagaggugac

SEQ ID NO: 1007898 - RNA, 17 nt, Human
agaacuguaguagcucc

SEQ ID NO: 1007899 - RNA, 22 nt, Human
ggcagcuuuuaucccugacaga

SEQ ID NO: 1007900 - RNA, 19 nt, Human
ugcaagcuuuuucuuguua

SEQ ID NO: 1007901 - RNA, 22 nt, Human
ucacugggagaugugggaaggg

SEQ ID NO: 1007902 - RNA, 22 nt, Human
aggcacuguggaagacaugguu

SEQ ID NO: 1007903 - RNA, 19 nt, Human
ccucugcgcuguccugcuc

SEQ ID NO: 1007904 - RNA, 22 nt, Human
gccuggagccucagcaaggagg

SEQ ID NO: 1007905 - RNA, 22 nt, Human
aagcacagaaaaggagcaugga

SEQ ID NO: 1007906 - RNA, 22 nt, Human
gccugagcuacuagggagucug

SEQ ID NO: 1007907 - RNA, 21 nt, Human
uucuucuuggacuguuuuggc

SEQ ID NO: 1007908 - RNA, 18 nt, Human
cagaaguccuucaaggcc

SEQ ID NO: 1007909 - RNA, 22 nt, Human
caaugugguggcagaugucagu

SEQ ID NO: 1007910 - RNA, 19 nt, Human
agcauccagucaugggauc

SEQ ID NO: 1007911 - RNA, 22 nt, Human
cacauauuugaugaagcuuugu

SEQ ID NO: 1007912 - RNA, 22 nt, Human
gaauauuuguaauuacuguuga

SEQ ID NO: 1007913 - RNA, 22 nt, Human
ccagcugcugugaggaccacag

SEQ ID NO: 1007914 - RNA, 22 nt, Human
ggaucauuaacacauccaucac

SEQ ID NO: 1007915 - RNA, 22 nt, Human
gggcacuguggggcccaugcug

SEQ ID NO: 1007916 - RNA, 22 nt, Human
gagguagccacagauagagacu

SEQ ID NO: 1007917 - RNA, 22 nt, Human
ugcagaagaaaacagcugugug

SEQ ID NO: 1007918 - RNA, 22 nt, Human
uuucuuauacuauauugucauc

SEQ ID NO: 1007919 - RNA, 22 nt, Human
gcacacagccagcugagggcua

SEQ ID NO: 1007920 - RNA, 22 nt, Human
gcauuccuacaggcugcuauga

SEQ ID NO: 1007921 - RNA, 20 nt, Human
uuugagaccagucugcccaa

SEQ ID NO: 1007922 - RNA, 22 nt, Human
cagguggggagaguguggagca

SEQ ID NO: 1007923 - RNA, 22 nt, Human
ugaagcaacuggacaaguuggc

SEQ ID NO: 1007924 - RNA, 22 nt, Human
ugguuucccauuaucugcagga

SEQ ID NO: 1007925 - RNA, 22 nt, Human
auuuguacaaauuuauguuagu

SEQ ID NO: 1007926 - RNA, 22 nt, Human
ucagccagugccuugaucuugc

SEQ ID NO: 1007927 - RNA, 22 nt, Human
uucucuggaacugaaacaagau

SEQ ID NO: 1007928 - RNA, 22 nt, Human
gauuucaaaaguagauccauca

SEQ ID NO: 1007929 - RNA, 20 nt, Human
acauugauuauguuuguaga

SEQ ID NO: 1007930 - RNA, 22 nt, Human
gucacuguuuccuauuauauuu

SEQ ID NO: 1007931 - RNA, 22 nt, Human
guucuucaaagugacaacuaaa

SEQ ID NO: 1007932 - RNA, 22 nt, Human
augcuguguggccaccuccaug

SEQ ID NO: 1007933 - RNA, 18 nt, Human
gguggcucagucaugggg

SEQ ID NO: 1007934 - RNA, 22 nt, Human
cccuugcaucccauguguggcc

SEQ ID NO: 1007935 - RNA, 22 nt, Human
uggaccugcguaggugcugggc

SEQ ID NO: 1007936 - RNA, 22 nt, Human
agggccagggaagcuguauuuu

SEQ ID NO: 1007937 - RNA, 22 nt, Human
gccggggcuggggagagacaug

SEQ ID NO: 1007938 - RNA, 18 nt, Human
aaugcacacauuuacucc

SEQ ID NO: 1007939 - RNA, 22 nt, Human
cuggcagucugccucuucacug

SEQ ID NO: 1007940 - RNA, 22 nt, Human
ggucaugcugugaaucagugcu

SEQ ID NO: 1007941 - RNA, 22 nt, Human
aggcagaggaaggguggauuug

SEQ ID NO: 1007942 - RNA, 23 nt, Human
uggcucucucagugcugcagagg

SEQ ID NO: 1007943 - RNA, 22 nt, Human
auugaaaguccuaucuaaggga

SEQ ID NO: 1007944 - RNA, 22 nt, Human
ggcuuuaugcagggauagaaau

SEQ ID NO: 1007945 - RNA, 22 nt, Human
aagcuggaacaucuugaggaag

SEQ ID NO: 1007946 - RNA, 22 nt, Human
ggugaagggccuuaggagacag

SEQ ID NO: 1007947 - RNA, 22 nt, Human
aaugggagagaacacaaagucc

SEQ ID NO: 1007948 - RNA, 22 nt, Human
uacaaaguauauuucuagcugu

SEQ ID NO: 1007949 - RNA, 22 nt, Human
cucuugaagcaggggccaguuc

SEQ ID NO: 1007950 - RNA, 22 nt, Human
gcugugcuggaaggggaccugc

SEQ ID NO: 1007951 - RNA, 22 nt, Human
uguacacaauucuuaacauaca

SEQ ID NO: 1007952 - RNA, 20 nt, Human
ugagugauggaggcggguca

SEQ ID NO: 1007953 - RNA, 22 nt, Human
uuggaaggugagucccuggguu

SEQ ID NO: 1007954 - RNA, 22 nt, Human
uuuucagugggcaaugauguga

SEQ ID NO: 1007955 - RNA, 22 nt, Human
aggcacuguucccaguuauccu

SEQ ID NO: 1007956 - RNA, 22 nt, Human
cccaggcagugcugaucccuca

SEQ ID NO: 1007957 - RNA, 22 nt, Human
gaagcagcgaaguggaagggac

SEQ ID NO: 1007958 - RNA, 22 nt, Human
cgcagaagagguugucuagucc

SEQ ID NO: 1007959 - RNA, 22 nt, Human
gucacaggccuggaugaggggc

SEQ ID NO: 1007960 - RNA, 22 nt, Human
ccucuccaguuuuaacgugacc

SEQ ID NO: 1007961 - RNA, 21 nt, Human
aggugccaaggagaagcaggc

SEQ ID NO: 1007962 - RNA, 22 nt, Human
cauuuguuaaccaguguggauu

SEQ ID NO: 1007963 - RNA, 20 nt, Human
aguuauaguaucuagccaug

SEQ ID NO: 1007964 - RNA, 22 nt, Human
gcugugcuugggaagaaucucu

SEQ ID NO: 1007965 - RNA, 22 nt, Human
ugccuggcaacuguggugggcu

SEQ ID NO: 1007966 - RNA, 22 nt, Human
gcauuuauuucuuuacugcauc

SEQ ID NO: 1007967 - RNA, 22 nt, Human
uguggcccagaugagugugcua

SEQ ID NO: 1007968 - RNA, 22 nt, Human
gagguauguaugcuacauucuu

SEQ ID NO: 1007969 - RNA, 22 nt, Human
cucagggacguuagaggacagg

SEQ ID NO: 1007970 - RNA, 22 nt, Human
uuccuccacgugacaggagcca

SEQ ID NO: 1007971 - RNA, 22 nt, Human
uugcagcuucuaccacuguuuc

SEQ ID NO: 1007972 - RNA, 19 nt, Human
cauuuagaaguacauauua

SEQ ID NO: 1007973 - RNA, 22 nt, Human
uccucagggaagaugagccuca

SEQ ID NO: 1007974 - RNA, 22 nt, Human
ucucagagggaggauuacugcc

SEQ ID NO: 1007975 - RNA, 22 nt, Human
cuccugggcucaagugauccuc

SEQ ID NO: 1007976 - RNA, 22 nt, Human
ucugagaggauuccugucccga

SEQ ID NO: 1007977 - RNA, 22 nt, Human
aauuugauucccugcaccuguu

SEQ ID NO: 1007978 - RNA, 22 nt, Human
gcauguguggaggagaugugcu

SEQ ID NO: 1007979 - RNA, 22 nt, Human
guucauauuacuuugagugcag

SEQ ID NO: 1007980 - RNA, 22 nt, Human
uagcauuuauggucaugugucc

SEQ ID NO: 1007981 - RNA, 22 nt, Human
uuccuugguagagagaauauuu

SEQ ID NO: 1007982 - RNA, 22 nt, Human
ucucuguaguugggcagcugcu

SEQ ID NO: 1007983 - RNA, 22 nt, Human
agugugggugagggaggcccuc

SEQ ID NO: 1007984 - RNA, 22 nt, Human
aauuagggaaaauuuacuugua

SEQ ID NO: 1007985 - RNA, 22 nt, Human
guuauguaaucuaacacucagu

SEQ ID NO: 1007986 - RNA, 22 nt, Human
cuggccuggcaggggaccucua

SEQ ID NO: 1007987 - RNA, 22 nt, Human
aagagcuggagcugcuacagga

SEQ ID NO: 1007988 - RNA, 22 nt, Human
gcuggccaguguggugaccacc

SEQ ID NO: 1007989 - RNA, 22 nt, Human
ucagcagaggggaaggcaucug

SEQ ID NO: 1007990 - RNA, 18 nt, Human
agugugugcccuuucagg

SEQ ID NO: 1007991 - RNA, 22 nt, Human
gcuggccugcgagggcaggcug

SEQ ID NO: 1007992 - RNA, 22 nt, Human
accaaggagccacauacaaccu

SEQ ID NO: 1007993 - RNA, 22 nt, Human
ggcucaggacugcagcguagag

SEQ ID NO: 1007994 - RNA, 22 nt, Human
caaaagauacuugcaucuaacu

SEQ ID NO: 1007995 - RNA, 22 nt, Human
ucucagaggugcccuggcaucu

SEQ ID NO: 1007996 - RNA, 22 nt, Human
uuccuguauucuaaagggaaag

SEQ ID NO: 1007997 - RNA, 22 nt, Human
cagagggcucaguccugcugga

SEQ ID NO: 1007998 - RNA, 22 nt, Human
aaauauaguaaaugcauaguuc

SEQ ID NO: 1007999 - RNA, 22 nt, Human
cacccagggcugugccugccca

SEQ ID NO: 1008000 - RNA, 22 nt, Human
gggagggaucugcuaggcaaug

SEQ ID NO: 1008001 - RNA, 22 nt, Human
cagggcuggcuguggcaaucuc

SEQ ID NO: 1008002 - RNA, 22 nt, Human
cacagcuuaugccacugauugg

SEQ ID NO: 1008003 - RNA, 22 nt, Human
gcaugucaugucauguaggaau

SEQ ID NO: 1008004 - RNA, 22 nt, Human
auguggaggaaaugaguguaca

SEQ ID NO: 1008005 - RNA, 23 nt, Human
agcacagacuagaaaggucuuuc

SEQ ID NO: 1008006 - RNA, 22 nt, Human
gcacacccucucaccagcacug

SEQ ID NO: 1008007 - RNA, 22 nt, Human
agacaugucaccaauucuuacu

SEQ ID NO: 1008008 - RNA, 22 nt, Human
acaggggcuccgaaggugaggg

SEQ ID NO: 1008009 - RNA, 22 nt, Human
uuugaauaucacaaacuuucaa

SEQ ID NO: 1008010 - RNA, 22 nt, Human
aggcagagcugauguucuguga

SEQ ID NO: 1008011 - RNA, 22 nt, Human
uccugggaagagaccugagcau

SEQ ID NO: 1008012 - RNA, 22 nt, Human
caggugggccaugaaaaaugac

SEQ ID NO: 1008013 - RNA, 22 nt, Human
acccucccauuuccauguagca

SEQ ID NO: 1008014 - RNA, 19 nt, Human
cuucuucuuggcagccaag

SEQ ID NO: 1008015 - RNA, 22 nt, Human
agaggcugaaugaugucaucau

SEQ ID NO: 1008016 - RNA, 19 nt, Human
acaagggcaggcaagguga

SEQ ID NO: 1008017 - RNA, 22 nt, Human
agaguguuucagucuuccuaga

SEQ ID NO: 1008018 - RNA, 22 nt, Human
accaaggaagagauucucaguu

SEQ ID NO: 1008019 - RNA, 22 nt, Human
agucagcagccuggccaggaga

SEQ ID NO: 1008020 - RNA, 22 nt, Human
agacaaguucugugggucaccu

SEQ ID NO: 1008021 - RNA, 22 nt, Human
gaugaagccugacuucucggug

SEQ ID NO: 1008022 - RNA, 22 nt, Human
ccagggucucugcugccugaga

SEQ ID NO: 1008023 - RNA, 21 nt, Human
cuccugggcuaagauauagug

SEQ ID NO: 1008024 - RNA, 20 nt, Human
ucccaaggaugccugggugu

SEQ ID NO: 1008025 - RNA, 17 nt, Human
uuccuggaagucauucc

SEQ ID NO: 1008026 - RNA, 22 nt, Human
ugcaccauuaauuuaugugaga

SEQ ID NO: 1008027 - RNA, 22 nt, Human
agggcugguauguccaugaaag

SEQ ID NO: 1008028 - RNA, 22 nt, Human
ggcugcuguuucagagacuguu

SEQ ID NO: 1008029 - RNA, 22 nt, Human
ccucaggaaccacauugcugcu

SEQ ID NO: 1008030 - RNA, 22 nt, Human
uuuuccuauaugcaaagaaugc

SEQ ID NO: 1008031 - RNA, 22 nt, Human
agggccagaaucccucagucua

SEQ ID NO: 1008032 - RNA, 22 nt, Human
uccucugcuccaggcuggacuu

SEQ ID NO: 1008033 - RNA, 22 nt, Human
cuggagagaaaugacaaagcua

SEQ ID NO: 1008034 - RNA, 22 nt, Human
aaagauaauguuuccuuauucu

SEQ ID NO: 1008035 - RNA, 22 nt, Human
agcagggccaacaguaaacacc

SEQ ID NO: 1008036 - RNA, 22 nt, Human
ugcugcacgauaaauaauuucu

SEQ ID NO: 1008037 - RNA, 18 nt, Human
cuuucagauggauaugcu

SEQ ID NO: 1008038 - RNA, 22 nt, Human
ccugucuguauugguuugcuau

SEQ ID NO: 1008039 - RNA, 19 nt, Human
ggucacagggguuacaagg

SEQ ID NO: 1008040 - RNA, 22 nt, Human
gucuucaacaauaacuaccacu

SEQ ID NO: 1008041 - RNA, 22 nt, Human
gcagcugagagaagaacagggc

SEQ ID NO: 1008042 - RNA, 22 nt, Human
uccauucauucauugaugaaca

SEQ ID NO: 1008043 - RNA, 22 nt, Human
ugccagcacuucuggcugucug

SEQ ID NO: 1008044 - RNA, 21 nt, Human
uuagaaagcucacuacaguua

SEQ ID NO: 1008045 - RNA, 22 nt, Human
aucuugcauuugcuaaaaugca

SEQ ID NO: 1008046 - RNA, 19 nt, Human
agucuuucccacucgucuu

SEQ ID NO: 1008047 - RNA, 22 nt, Human
cuggccagcauuuuugcuuuag

SEQ ID NO: 1008048 - RNA, 22 nt, Human
agagggcugcugcacagugcuc

SEQ ID NO: 1008049 - RNA, 22 nt, Human
uccugucugucuuuggucccuu

SEQ ID NO: 1008050 - RNA, 22 nt, Human
gguuugcauucugaaaggcuca

SEQ ID NO: 1008051 - RNA, 22 nt, Human
cuguuuauuacacuggauagca

SEQ ID NO: 1008052 - RNA, 22 nt, Human
gggugggguguaucggauccua

SEQ ID NO: 1008053 - RNA, 22 nt, Human
agcagcugcagggagggucugc

SEQ ID NO: 1008054 - RNA, 22 nt, Human
agccauccuacuaccucagcau

SEQ ID NO: 1008055 - RNA, 22 nt, Human
cuggcaggcggcagagcccagg

SEQ ID NO: 1008056 - RNA, 22 nt, Human
guuuagaauucuaacuuuaagg

SEQ ID NO: 1008057 - RNA, 22 nt, Human
aauucuauaggcaagcuauuuu

SEQ ID NO: 1008058 - RNA, 22 nt, Human
aagaacagguucuagaaccauu

SEQ ID NO: 1008059 - RNA, 22 nt, Human
acuagauaauuauaaaagguag

SEQ ID NO: 1008060 - RNA, 22 nt, Human
caaaugcauagaaagaugaaac

SEQ ID NO: 1008061 - RNA, 22 nt, Human
ugggcagagaucuggaucaaac

SEQ ID NO: 1008062 - RNA, 22 nt, Human
caaagggcucuagacucagcag

SEQ ID NO: 1008063 - RNA, 22 nt, Human
gccagcccagcuccaggggaaa

SEQ ID NO: 1008064 - RNA, 22 nt, Human
aaguuaugaaauuuggacagcu

SEQ ID NO: 1008065 - RNA, 22 nt, Human
ucuguucuauuggucuaugugu

SEQ ID NO: 1008066 - RNA, 22 nt, Human
ugagcccuaagggucaagcagg

SEQ ID NO: 1008067 - RNA, 22 nt, Human
ggcagcuggguuggccagaaac

SEQ ID NO: 1008068 - RNA, 22 nt, Human
uucugucacuugcaaucaagag

SEQ ID NO: 1008069 - RNA, 22 nt, Human
uucugugcccauuuuaaaaugg

SEQ ID NO: 1008070 - RNA, 22 nt, Human
gagguacaugaggauacacagg

SEQ ID NO: 1008071 - RNA, 21 nt, Human
uuugaaagcccuauguuuuca

SEQ ID NO: 1008072 - RNA, 22 nt, Human
cagucuuuguucccauuacuga

SEQ ID NO: 1008073 - RNA, 19 nt, Human
gggaugggcccucacccuc

SEQ ID NO: 1008074 - RNA, 22 nt, Human
aacuagucagugauucucagaa

SEQ ID NO: 1008075 - RNA, 22 nt, Human
ugccuggcaaugccagaagcca

SEQ ID NO: 1008076 - RNA, 22 nt, Human
agagggcccauguugggcugcu

SEQ ID NO: 1008077 - RNA, 22 nt, Human
uguguacucaauugagccauuu

SEQ ID NO: 1008078 - RNA, 22 nt, Human
uucacagauguauuggaacucc

SEQ ID NO: 1008079 - RNA, 22 nt, Human
aucaggaugacaacugcugggu

SEQ ID NO: 1008080 - RNA, 22 nt, Human
gggggucccaagcugggcugcu

SEQ ID NO: 1008081 - RNA, 22 nt, Human
agagccagcauuugggcccugc

SEQ ID NO: 1008082 - RNA, 18 nt, Human
ucuuuggacaacuacugg

SEQ ID NO: 1008083 - RNA, 22 nt, Human
uuucacauuagauaugucauuu

SEQ ID NO: 1008084 - RNA, 22 nt, Human
agagccuguaacaucuuucuua

SEQ ID NO: 1008085 - RNA, 22 nt, Human
gccuuggccuuccuaggccuga

SEQ ID NO: 1008086 - RNA, 22 nt, Human
uggcagcuacagacagagguga

SEQ ID NO: 1008087 - RNA, 22 nt, Human
aggaaacuguccccucauccua

SEQ ID NO: 1008088 - RNA, 22 nt, Human
aaauaugaaugauaagaguuau

SEQ ID NO: 1008089 - RNA, 22 nt, Human
ggcugccuugacccuggcuccg

SEQ ID NO: 1008090 - RNA, 22 nt, Human
cuuauuagaguuguguucuguu

SEQ ID NO: 1008091 - RNA, 22 nt, Human
uucaggaugacaccauguccag

SEQ ID NO: 1008092 - RNA, 22 nt, Human
aguagaaagaaggcacugggcc

SEQ ID NO: 1008093 - RNA, 18 nt, Human
guucaaggucaagagaga

SEQ ID NO: 1008094 - RNA, 22 nt, Human
agcagccaagguaaccugugcu

SEQ ID NO: 1008095 - RNA, 22 nt, Human
cccauggggacaccaugaagga

SEQ ID NO: 1008096 - RNA, 22 nt, Human
ucagcagauggguuguguuggc

SEQ ID NO: 1008097 - RNA, 22 nt, Human
ccugggcucaagugauccuccu

SEQ ID NO: 1008098 - RNA, 22 nt, Human
auuucuguugcuuauaaauuac

SEQ ID NO: 1008099 - RNA, 22 nt, Human
acauuugagaugccuuuuaggu

SEQ ID NO: 1008100 - RNA, 22 nt, Human
ugcacacaaaugugaacgugcc

SEQ ID NO: 1008101 - RNA, 22 nt, Human
caggguggcacaucacagcauu

SEQ ID NO: 1008102 - RNA, 22 nt, Human
cuguccuuacugcuucuggcuu

SEQ ID NO: 1008103 - RNA, 22 nt, Human
cugggccugucagggcuuuuug

SEQ ID NO: 1008104 - RNA, 22 nt, Human
uggaagcacuuggguuuuguug

SEQ ID NO: 1008105 - RNA, 22 nt, Human
gaggcugcacuggcuaaaggcu

SEQ ID NO: 1008106 - RNA, 22 nt, Human
aacagacagaaaaaugugaucu

SEQ ID NO: 1008107 - RNA, 22 nt, Human
aaaggagacuucagaucuccuu

SEQ ID NO: 1008108 - RNA, 22 nt, Human
ccagggugagugucauggguua

SEQ ID NO: 1008109 - RNA, 22 nt, Human
gcacagccacugagugagaacc

SEQ ID NO: 1008110 - RNA, 22 nt, Human
acagguggcauaggcaguuuga

SEQ ID NO: 1008111 - RNA, 22 nt, Human
ucagggcagccuaaggcaccuc

SEQ ID NO: 1008112 - RNA, 23 nt, Human
agucuucauuguauuuccagacc

SEQ ID NO: 1008113 - RNA, 22 nt, Human
uugaaaguccuucuugaguuac

SEQ ID NO: 1008114 - RNA, 19 nt, Human
cugugcaggccgggcugag

SEQ ID NO: 1008115 - RNA, 22 nt, Human
ugcagcagcagggaggaggcuc

SEQ ID NO: 1008116 - RNA, 22 nt, Human
acaauacuuaccaauguuuuug

SEQ ID NO: 1008117 - RNA, 22 nt, Human
cccugagagugagugccaccuu

SEQ ID NO: 1008118 - RNA, 22 nt, Human
uuuucguuuauuugacauguaa

SEQ ID NO: 1008119 - RNA, 22 nt, Human
guaaaucccauccuuucucugg

SEQ ID NO: 1008120 - RNA, 22 nt, Human
agaaauguuuauggcugccuau

SEQ ID NO: 1008121 - RNA, 22 nt, Human
gaggccuggcugggaggaggug

SEQ ID NO: 1008122 - RNA, 22 nt, Human
aguuuccaaagcauguucacac

SEQ ID NO: 1008123 - RNA, 22 nt, Human
gggacuggaguagaggccggug

SEQ ID NO: 1008124 - RNA, 22 nt, Human
uuucuguaaggacuuaaugcaa

SEQ ID NO: 1008125 - RNA, 22 nt, Human
cugaggugagcuucccugggcu

SEQ ID NO: 1008126 - RNA, 22 nt, Human
cucuggccugcuuccucaggua

SEQ ID NO: 1008127 - RNA, 22 nt, Human
agcuucucaggagucugaggca

SEQ ID NO: 1008128 - RNA, 22 nt, Human
guguaugagccuccagcugggc

SEQ ID NO: 1008129 - RNA, 22 nt, Human
uucauguguauggaacauuuuu

SEQ ID NO: 1008130 - RNA, 22 nt, Human
auguagcagauauuugugcaca

SEQ ID NO: 1008131 - RNA, 22 nt, Human
cuucagaggggacucaaaguca

SEQ ID NO: 1008132 - RNA, 22 nt, Human
cagguggaucucuaaggacuga

SEQ ID NO: 1008133 - RNA, 22 nt, Human
ccuggcucuucagagguuccua

SEQ ID NO: 1008134 - RNA, 22 nt, Human
cuguucauggaaaaauaguugg

SEQ ID NO: 1008135 - RNA, 22 nt, Human
aggcacugaagaacucuuuuug

SEQ ID NO: 1008136 - RNA, 22 nt, Human
aagggccauaacuugcaguguu

SEQ ID NO: 1008137 - RNA, 22 nt, Human
cuggcucuucagugcuugguuc

SEQ ID NO: 1008138 - RNA, 22 nt, Human
cagagaccccuggcaugguggu

SEQ ID NO: 1008139 - RNA, 22 nt, Human
auguaacaggugaagcucugag

SEQ ID NO: 1008140 - RNA, 18 nt, Human
gggcucugauccuucacc

SEQ ID NO: 1008141 - RNA, 22 nt, Human
gcagcuuuuuggaugucaguua

SEQ ID NO: 1008142 - RNA, 22 nt, Human
gaggccugcagcguggucccug

SEQ ID NO: 1008143 - RNA, 22 nt, Human
cccuggugguacggcacuggca

SEQ ID NO: 1008144 - RNA, 22 nt, Human
gaaacauauuaauccagugaaa

SEQ ID NO: 1008145 - RNA, 22 nt, Human
ggcagugaaaaaguauguuucc

SEQ ID NO: 1008146 - RNA, 22 nt, Human
cacugaaucucaaggggagggu

SEQ ID NO: 1008147 - RNA, 21 nt, Human
aaaggccauaaucacggagca

SEQ ID NO: 1008148 - RNA, 17 nt, Human
uggcuucccugggccac

SEQ ID NO: 1008149 - RNA, 22 nt, Human
ucuggcucucucaucacccaau

SEQ ID NO: 1008150 - RNA, 17 nt, Human
cauuuguugaucaguug

SEQ ID NO: 1008151 - RNA, 22 nt, Human
acagggccaggugagaggugcu

SEQ ID NO: 1008152 - RNA, 22 nt, Human
cccaaggcauggcaugguggca

SEQ ID NO: 1008153 - RNA, 22 nt, Human
ucuguagcaagugagaggcauu

SEQ ID NO: 1008154 - RNA, 22 nt, Human
cagaaauggaauuuuccaucac

SEQ ID NO: 1008155 - RNA, 22 nt, Human
uugauuucuuacucuuccaagg

SEQ ID NO: 1008156 - RNA, 22 nt, Human
aagaacagauucagccugaacu

SEQ ID NO: 1008157 - RNA, 22 nt, Human
ccugggagguggagguugcagu

SEQ ID NO: 1008158 - RNA, 22 nt, Human
cagcuucucagaaagcugaggu

SEQ ID NO: 1008159 - RNA, 22 nt, Human
ugucauugaggaaaacuaggug

SEQ ID NO: 1008160 - RNA, 22 nt, Human
acagccagggcauugucgccga

SEQ ID NO: 1008161 - RNA, 22 nt, Human
agagaagagcaaugauaaauuu

SEQ ID NO: 1008162 - RNA, 22 nt, Human
gugcucacugugagacguccug

SEQ ID NO: 1008163 - RNA, 22 nt, Human
ggaugcugacuuuggagcaugg

SEQ ID NO: 1008164 - RNA, 22 nt, Human
uucagugugugauaccugcugu

SEQ ID NO: 1008165 - RNA, 22 nt, Human
gcuggcucccauugguccuucc

SEQ ID NO: 1008166 - RNA, 22 nt, Human
uggaagccaggcccgcuccuaa

SEQ ID NO: 1008167 - RNA, 22 nt, Human
uccagaccauggauggcugcaa

SEQ ID NO: 1008168 - RNA, 22 nt, Human
ggcauguuucaucacaucaaga

SEQ ID NO: 1008169 - RNA, 22 nt, Human
ggaagaagggucauuggcagcc

SEQ ID NO: 1008170 - RNA, 20 nt, Human
uuucugugagaaacacuguu

SEQ ID NO: 1008171 - RNA, 22 nt, Human
uacaguaaccagucuacuuaga

SEQ ID NO: 1008172 - RNA, 22 nt, Human
ccacacagggggaugaguuauu

SEQ ID NO: 1008173 - RNA, 22 nt, Human
ucacaucuuauuagaguaucuc

SEQ ID NO: 1008174 - RNA, 22 nt, Human
agccucucuguuagucacuggg

SEQ ID NO: 1008175 - RNA, 22 nt, Human
agcaggcuuguuaugucugaga

SEQ ID NO: 1008176 - RNA, 22 nt, Human
uacuuagagcgauaauuuauac

SEQ ID NO: 1008177 - RNA, 22 nt, Human
agauuucccaaauacuuguuau

SEQ ID NO: 1008178 - RNA, 22 nt, Human
cagcuggcagcccuggcccugc

SEQ ID NO: 1008179 - RNA, 22 nt, Human
uccugccucuuuucuuauucca

SEQ ID NO: 1008180 - RNA, 19 nt, Human
aaaugugaugguacaauuc

SEQ ID NO: 1008181 - RNA, 22 nt, Human
cauuuguaucauauguaucuua

SEQ ID NO: 1008182 - RNA, 22 nt, Human
ggagccagaggcugcugcugug

SEQ ID NO: 1008183 - RNA, 22 nt, Human
cuaaaauuaccuaccaguuuag

SEQ ID NO: 1008184 - RNA, 22 nt, Human
uucucugagauagacuaagugg

SEQ ID NO: 1008185 - RNA, 23 nt, Human
auauuagggagauuagcccucua

SEQ ID NO: 1008186 - RNA, 22 nt, Human
uggggugccgacagggagggca

SEQ ID NO: 1008187 - RNA, 20 nt, Human
ugcagggcucugcuucucuc

SEQ ID NO: 1008188 - RNA, 22 nt, Human
uuuaacagaugugaaauuuuca

SEQ ID NO: 1008189 - RNA, 22 nt, Human
gcuggggagcuagaccucagca

SEQ ID NO: 1008190 - RNA, 22 nt, Human
ggagcugaaggggugggcucag

SEQ ID NO: 1008191 - RNA, 17 nt, Human
aaucuguuuacagucag

SEQ ID NO: 1008192 - RNA, 22 nt, Human
uuaaacagucccagaggcugac

SEQ ID NO: 1008193 - RNA, 22 nt, Human
gcuggcucuucaguggagauag

SEQ ID NO: 1008194 - RNA, 22 nt, Human
uuccaugaaauguguuaugcuu

SEQ ID NO: 1008195 - RNA, 17 nt, Human
aaggccauuuccaccca

SEQ ID NO: 1008196 - RNA, 22 nt, Human
gggaccugcgccacucacuguc

SEQ ID NO: 1008197 - RNA, 22 nt, Human
cccuggaggaccccaauguggc

SEQ ID NO: 1008198 - RNA, 22 nt, Human
cagauggaacacagaaaggaga

SEQ ID NO: 1008199 - RNA, 22 nt, Human
gaucuucucuuuaguagaaaca

SEQ ID NO: 1008200 - RNA, 22 nt, Human
aaucaguuagaaggaagagaau

SEQ ID NO: 1008201 - RNA, 22 nt, Human
cagaggccuuucuacagugaua

SEQ ID NO: 1008202 - RNA, 22 nt, Human
ggaugcuggggaccaaucucug

SEQ ID NO: 1008203 - RNA, 22 nt, Human
aacaaacaaacauuuugucauc

SEQ ID NO: 1008204 - RNA, 22 nt, Human
uuuccagagcaugucugcucag

SEQ ID NO: 1008205 - RNA, 22 nt, Human
ucacuugccuagcccaguucag

SEQ ID NO: 1008206 - RNA, 19 nt, Human
caggaugaucccaugacac

SEQ ID NO: 1008207 - RNA, 22 nt, Human
cagaagccugccucagaugcac

SEQ ID NO: 1008208 - RNA, 22 nt, Human
gccugaagaacagcugugagga

SEQ ID NO: 1008209 - RNA, 22 nt, Human
ucuucucuacaccagcagcccc

SEQ ID NO: 1008210 - RNA, 22 nt, Human
ggcaugggguguauguggcacg

SEQ ID NO: 1008211 - RNA, 22 nt, Human
cugggagcugaggcugacgcug

SEQ ID NO: 1008212 - RNA, 22 nt, Human
uuucaucuuccuuggcauaggu

SEQ ID NO: 1008213 - RNA, 22 nt, Human
ugguauaaaacuuuuuauugaa

SEQ ID NO: 1008214 - RNA, 21 nt, Human
ugaaaugagaaugcugagcac

SEQ ID NO: 1008215 - RNA, 22 nt, Human
acagaaagaagguguauuugag

SEQ ID NO: 1008216 - RNA, 22 nt, Human
cugaggagagaucacguggugu

SEQ ID NO: 1008217 - RNA, 22 nt, Human
gcugucuggguugagggcccug

SEQ ID NO: 1008218 - RNA, 22 nt, Human
ggcagggaaacagcugauccca

SEQ ID NO: 1008219 - RNA, 22 nt, Human
agcugcagucaagcugggccac

SEQ ID NO: 1008220 - RNA, 22 nt, Human
uuccucaugggguuccuucaga

SEQ ID NO: 1008221 - RNA, 22 nt, Human
gagcagcuagauaaagcccuuc

SEQ ID NO: 1008222 - RNA, 22 nt, Human
ugcacacaaguuggagaaugaa

SEQ ID NO: 1008223 - RNA, 22 nt, Human
ggugugccuggggcuuagcugc

SEQ ID NO: 1008224 - RNA, 22 nt, Human
gcugcugugccuggcguccugu

SEQ ID NO: 1008225 - RNA, 22 nt, Human
uuuaugagcaaugcugagggga

SEQ ID NO: 1008226 - RNA, 22 nt, Human
ggcuccuggggaggugagcuug

SEQ ID NO: 1008227 - RNA, 22 nt, Human
guccuggggaauacagaagccg

SEQ ID NO: 1008228 - RNA, 22 nt, Human
uacaguauuaugagugauugaa

SEQ ID NO: 1008229 - RNA, 22 nt, Human
ucaggcagcuccaggaauggua

SEQ ID NO: 1008230 - RNA, 22 nt, Human
agccagagcugaugucauucuc

SEQ ID NO: 1008231 - RNA, 18 nt, Human
gaucgggggcgccccaag

SEQ ID NO: 1008232 - RNA, 22 nt, Human
auuauaaagaacaugugugugg

SEQ ID NO: 1008233 - RNA, 22 nt, Human
aaucuucauuuugacaagauuc

SEQ ID NO: 1008234 - RNA, 22 nt, Human
gccaggcaggugucggagcccu

SEQ ID NO: 1008235 - RNA, 22 nt, Human
ugguccaggguguaguacagag

SEQ ID NO: 1008236 - RNA, 22 nt, Human
ucaagaaagggcuucaccagga

SEQ ID NO: 1008237 - RNA, 19 nt, Human
gccugggaugggcagaacu

SEQ ID NO: 1008238 - RNA, 23 nt, Human
ucucaagaggaagcagggcucau

SEQ ID NO: 1008239 - RNA, 22 nt, Human
gagcuuuaagggcacuggucuu

SEQ ID NO: 1008240 - RNA, 22 nt, Human
gaaacugugaggaucuuaacuu

SEQ ID NO: 1008241 - RNA, 22 nt, Human
ucuagaaaaaaacugcugugga

SEQ ID NO: 1008242 - RNA, 22 nt, Human
aaaguuuguugcuuacaaagaa

SEQ ID NO: 1008243 - RNA, 22 nt, Human
cccagcacuuugaauaugucac

SEQ ID NO: 1008244 - RNA, 22 nt, Human
acagagagggagugauaaaucc

SEQ ID NO: 1008245 - RNA, 22 nt, Human
ccagggcagugggagaaggugc

SEQ ID NO: 1008246 - RNA, 22 nt, Human
gucacacuagggccaaguggag

SEQ ID NO: 1008247 - RNA, 22 nt, Human
cagagcuggacuuaaauauauu

SEQ ID NO: 1008248 - RNA, 20 nt, Human
gggaguggugguagccugug

SEQ ID NO: 1008249 - RNA, 22 nt, Human
uauugaggaucuccugcuaauu

SEQ ID NO: 1008250 - RNA, 22 nt, Human
aguaaugucccuuaaauguggu

SEQ ID NO: 1008251 - RNA, 21 nt, Human
uucagcaguccucuagagaua

SEQ ID NO: 1008252 - RNA, 22 nt, Human
uggccuggcagagcaaggccug

SEQ ID NO: 1008253 - RNA, 22 nt, Human
cucaggauucucgacacucaca

SEQ ID NO: 1008254 - RNA, 22 nt, Human
uuuacauuucccucugucaguu

SEQ ID NO: 1008255 - RNA, 17 nt, Human
agaaagaggauccacag

SEQ ID NO: 1008256 - RNA, 22 nt, Human
acagaauauugguuacuguugc

SEQ ID NO: 1008257 - RNA, 22 nt, Human
aauuagagaucaguucuuugac

SEQ ID NO: 1008258 - RNA, 22 nt, Human
uggugguuaugcgcuuuguggg

SEQ ID NO: 1008259 - RNA, 22 nt, Human
ccacagcaugcaggccugacac

SEQ ID NO: 1008260 - RNA, 22 nt, Human
caaaguuuuaguaaacauauau

SEQ ID NO: 1008261 - RNA, 18 nt, Human
aagccagagaccacugcc

SEQ ID NO: 1008262 - RNA, 22 nt, Human
cccaggcauuuucaacuuuagu

SEQ ID NO: 1008263 - RNA, 22 nt, Human
ccaggcugccgaggaaagaaag

SEQ ID NO: 1008264 - RNA, 19 nt, Human
accugcaguaauaauuccu

SEQ ID NO: 1008265 - RNA, 22 nt, Human
uggggguguccuggugcacaca

SEQ ID NO: 1008266 - RNA, 22 nt, Human
uuaguaauguguuaauaugaau

SEQ ID NO: 1008267 - RNA, 22 nt, Human
guccucugaaguugugcaaugc

SEQ ID NO: 1008268 - RNA, 22 nt, Human
gauuuauuggucuuucauuggu

SEQ ID NO: 1008269 - RNA, 22 nt, Human
ugcagaagaaugagcuuggagu

SEQ ID NO: 1008270 - RNA, 22 nt, Human
cagggagaucuuggcuccuggu

SEQ ID NO: 1008271 - RNA, 22 nt, Human
cagggccauaucuugugcacca

SEQ ID NO: 1008272 - RNA, 22 nt, Human
accagcagaguugaggaggaca

SEQ ID NO: 1008273 - RNA, 23 nt, Human
ugcucccaggugacgcugcuguu

SEQ ID NO: 1008274 - RNA, 22 nt, Human
ucugagagagggucagaugcua

SEQ ID NO: 1008275 - RNA, 22 nt, Human
cuuaaaaucuggcaguuagcua

SEQ ID NO: 1008276 - RNA, 22 nt, Human
uggcagcaauuagcuagagcug

SEQ ID NO: 1008277 - RNA, 22 nt, Human
cuccuguauguugggcuucaca

SEQ ID NO: 1008278 - RNA, 22 nt, Human
auuagggcuggaugcaaggaaa

SEQ ID NO: 1008279 - RNA, 22 nt, Human
uugaggagcaggaugggaggcu

SEQ ID NO: 1008280 - RNA, 23 nt, Human
ggucccaguggagaggccucacc

SEQ ID NO: 1008281 - RNA, 22 nt, Human
ccagcuugaagaugugcugguu

SEQ ID NO: 1008282 - RNA, 18 nt, Human
gaugggagcaagagaaga

SEQ ID NO: 1008283 - RNA, 22 nt, Human
augcuuuuaugucacaugguca

SEQ ID NO: 1008284 - RNA, 22 nt, Human
agcugguucauucauucauggu

SEQ ID NO: 1008285 - RNA, 22 nt, Human
uggcagagagacucuccuugau

SEQ ID NO: 1008286 - RNA, 22 nt, Human
guggccuggauagacuccaucu

SEQ ID NO: 1008287 - RNA, 22 nt, Human
augucuuucgcaucaguagcua

SEQ ID NO: 1008288 - RNA, 22 nt, Human
uuuauguaguuacggacuauca

SEQ ID NO: 1008289 - RNA, 22 nt, Human
uugcaggggaaggagcagagcu

SEQ ID NO: 1008290 - RNA, 22 nt, Human
agcagccaaaugaagauuuuac

SEQ ID NO: 1008291 - RNA, 22 nt, Human
gcuggccacauugugccguccu

SEQ ID NO: 1008292 - RNA, 22 nt, Human
uuacuuuggguccugcuuauaa

SEQ ID NO: 1008293 - RNA, 22 nt, Human
gagagucuagugcaccuaguuu

SEQ ID NO: 1008294 - RNA, 22 nt, Human
ggagugacucucggggccacua

SEQ ID NO: 1008295 - RNA, 22 nt, Human
cugccagcacugccuccugagg

SEQ ID NO: 1008296 - RNA, 22 nt, Human
uggagcugggaguccugggcug

SEQ ID NO: 1008297 - RNA, 22 nt, Human
uccccagccgugaaggagagga

SEQ ID NO: 1008298 - RNA, 22 nt, Human
aucuggcuuacgaagcacuggu

SEQ ID NO: 1008299 - RNA, 22 nt, Human
uuugucagucaugucugcuuuu

SEQ ID NO: 1008300 - RNA, 22 nt, Human
aauucuugguccuaguguauaa

SEQ ID NO: 1008301 - RNA, 22 nt, Human
gcuggcuguaucaccuggccag

SEQ ID NO: 1008302 - RNA, 22 nt, Human
gcuggccauggggagugaggag

SEQ ID NO: 1008303 - RNA, 22 nt, Human
cuguagccagaagcagaaggcc

SEQ ID NO: 1008304 - RNA, 22 nt, Human
acagcuguggggacucuugccc

SEQ ID NO: 1008305 - RNA, 22 nt, Human
ucccaggcugggggccugaagu

SEQ ID NO: 1008306 - RNA, 22 nt, Human
gaacaauagugguaacaaagcc

SEQ ID NO: 1008307 - RNA, 22 nt, Human
uagagcugauaaugaggccaag

SEQ ID NO: 1008308 - RNA, 22 nt, Human
aagggcaggaaaagauggaugu

SEQ ID NO: 1008309 - RNA, 22 nt, Human
cuggggcucucuggaaugcuug

SEQ ID NO: 1008310 - RNA, 22 nt, Human
uuuuaucuaccuaugcucauuu

SEQ ID NO: 1008311 - RNA, 22 nt, Human
caucuucagguucauggucaua

SEQ ID NO: 1008312 - RNA, 22 nt, Human
acagaauuaaaguguuugugga

SEQ ID NO: 1008313 - RNA, 22 nt, Human
aucuucucauguguaaugaggu

SEQ ID NO: 1008314 - RNA, 22 nt, Human
uagggcaggugaagaaaagcua

SEQ ID NO: 1008315 - RNA, 22 nt, Human
gauuucaaagguucugcaugcc

SEQ ID NO: 1008316 - RNA, 21 nt, Human
aaauacagaaacuuguuuuca

SEQ ID NO: 1008317 - RNA, 22 nt, Human
agaugcugccucuccucacaag

SEQ ID NO: 1008318 - RNA, 22 nt, Human
uuauuccauagaagucaaggaa

SEQ ID NO: 1008319 - RNA, 22 nt, Human
cacaggcuuccaguccccagcu

SEQ ID NO: 1008320 - RNA, 22 nt, Human
uuguuuugcuaaagggucauca

SEQ ID NO: 1008321 - RNA, 22 nt, Human
ugucuuccucuuggcuugagcu

SEQ ID NO: 1008322 - RNA, 23 nt, Human
uuccagaguccacaucugccacc

SEQ ID NO: 1008323 - RNA, 22 nt, Human
acaaugcaccagcaucuucacc

SEQ ID NO: 1008324 - RNA, 22 nt, Human
gggccugucucacucccugguu

SEQ ID NO: 1008325 - RNA, 22 nt, Human
ucccugggcaucacguugcuuc

SEQ ID NO: 1008326 - RNA, 22 nt, Human
ggccucuguucugcauuccucc

SEQ ID NO: 1008327 - RNA, 22 nt, Human
uucaauucuaaacuaauauucu

SEQ ID NO: 1008328 - RNA, 22 nt, Human
ccagcugauucgguggugguug

SEQ ID NO: 1008329 - RNA, 22 nt, Human
caggacugauguuccuccagcc

SEQ ID NO: 1008330 - RNA, 22 nt, Human
ucaagugcuugugagguauuug

SEQ ID NO: 1008331 - RNA, 22 nt, Human
gcagggcucauucuaguacaau

SEQ ID NO: 1008332 - RNA, 23 nt, Human
ggccuccuggucuaggcuagacu

SEQ ID NO: 1008333 - RNA, 22 nt, Human
ccagaagaccccguccaccucc

SEQ ID NO: 1008334 - RNA, 22 nt, Human
acaggcugcugagccauuugcu

SEQ ID NO: 1008335 - RNA, 22 nt, Human
gaugcagggcuggcaggagcuu

SEQ ID NO: 1008336 - RNA, 22 nt, Human
ucaguuuuuaagaguuaugcga

SEQ ID NO: 1008337 - RNA, 22 nt, Human
agggccugggauguccuccuag

SEQ ID NO: 1008338 - RNA, 22 nt, Human
uuugugcagauguauauuugug

SEQ ID NO: 1008339 - RNA, 22 nt, Human
acaaagugaauugcaucgaguu

SEQ ID NO: 1008340 - RNA, 22 nt, Human
uaucuguuguccaugcagaaag

SEQ ID NO: 1008341 - RNA, 22 nt, Human
gaaaugcauaaucuuaguagau

SEQ ID NO: 1008342 - RNA, 21 nt, Human
gagacagcccagugccagggc

SEQ ID NO: 1008343 - RNA, 22 nt, Human
uuugcaaagaaauuauugcugu

SEQ ID NO: 1008344 - RNA, 22 nt, Human
gggggcuguccugugcauugua

SEQ ID NO: 1008345 - RNA, 22 nt, Human
gcuccagaugaaaggccagagg

SEQ ID NO: 1008346 - RNA, 22 nt, Human
gcauuguccugcuucugagugu

SEQ ID NO: 1008347 - RNA, 22 nt, Human
gggccaggucggugaaugguca

SEQ ID NO: 1008348 - RNA, 22 nt, Human
gauuuauugucccuguccugcu

SEQ ID NO: 1008349 - RNA, 21 nt, Human
gccacguuucagucuucucag

SEQ ID NO: 1008350 - RNA, 22 nt, Human
aagcugccugccacgcuagaua

SEQ ID NO: 1008351 - RNA, 22 nt, Human
ucagagaaaugaaguagggauu

SEQ ID NO: 1008352 - RNA, 23 nt, Human
aaauuauugcucuucaauugccu

SEQ ID NO: 1008353 - RNA, 22 nt, Human
ugggauaguggccaggaccccc

SEQ ID NO: 1008354 - RNA, 22 nt, Human
aggccuggguguucaccagaag

SEQ ID NO: 1008355 - RNA, 22 nt, Human
ggaggccaucagggagggcauu

SEQ ID NO: 1008356 - RNA, 22 nt, Human
ucugccugcggcugcagguggc

SEQ ID NO: 1008357 - RNA, 22 nt, Human
cuguaugaguugggaauagaau

SEQ ID NO: 1008358 - RNA, 22 nt, Human
cagugaggugcccagccugccc

SEQ ID NO: 1008359 - RNA, 22 nt, Human
ucaggccacuucacaggugauu

SEQ ID NO: 1008360 - RNA, 22 nt, Human
cagucucagaggugggaguggg

SEQ ID NO: 1008361 - RNA, 22 nt, Human
cugcccugagggccuguguguu

SEQ ID NO: 1008362 - RNA, 22 nt, Human
ccagcccugucaccaacuggag

SEQ ID NO: 1008363 - RNA, 22 nt, Human
cauuuacacuucuaaccacaag

SEQ ID NO: 1008364 - RNA, 22 nt, Human
ucagagugcagggaguagcagc

SEQ ID NO: 1008365 - RNA, 22 nt, Human
gagggcugccacguugggcgag

SEQ ID NO: 1008366 - RNA, 22 nt, Human
aaaggccaauaaagacaagcug

SEQ ID NO: 1008367 - RNA, 22 nt, Human
aagugagauuauauguacggga

SEQ ID NO: 1008368 - RNA, 22 nt, Human
gagccagccgcaagagcuguga

SEQ ID NO: 1008369 - RNA, 22 nt, Human
cgggcuccgggucuuugcaguc

SEQ ID NO: 1008370 - RNA, 22 nt, Human
cuuguacauagagaagaagccu

SEQ ID NO: 1008371 - RNA, 22 nt, Human
ucagggacugcagagggaagcu

SEQ ID NO: 1008372 - RNA, 22 nt, Human
aaaucacuaaguuauagugugg

SEQ ID NO: 1008373 - RNA, 22 nt, Human
ugggcugcuucuauuggugguc

SEQ ID NO: 1008374 - RNA, 22 nt, Human
ucugucugacaggguaugaacu

SEQ ID NO: 1008375 - RNA, 22 nt, Human
aguuauauaacuaucuagaugc

SEQ ID NO: 1008376 - RNA, 22 nt, Human
ccucacugaagaggugacauuu

SEQ ID NO: 1008377 - RNA, 22 nt, Human
cuacauuuugugauuaugaaau

SEQ ID NO: 1008378 - RNA, 22 nt, Human
ugggccuggacaaggccacuag

SEQ ID NO: 1008379 - RNA, 22 nt, Human
agugucugccaacugcaugguc

SEQ ID NO: 1008380 - RNA, 22 nt, Human
uuauucugcacuuuuaaaauau

SEQ ID NO: 1008381 - RNA, 22 nt, Human
aacagcaugcuggguaacauug

SEQ ID NO: 1008382 - RNA, 22 nt, Human
ccagggcagggaccacgugucu

SEQ ID NO: 1008383 - RNA, 22 nt, Human
cugcucuggcuguguacuucag

SEQ ID NO: 1008384 - RNA, 22 nt, Human
ggccucucucccuggcuugcag

SEQ ID NO: 1008385 - RNA, 22 nt, Human
cugggggcaagcagacagcugu

SEQ ID NO: 1008386 - RNA, 22 nt, Human
aauuaguauugcgauucauuag

SEQ ID NO: 1008387 - RNA, 22 nt, Human
gggauggcuuuguggcugacuc

SEQ ID NO: 1008388 - RNA, 22 nt, Human
agaaacuucagcuauucuuuug

SEQ ID NO: 1008389 - RNA, 22 nt, Human
aagaaauauugggccuuauaaa

SEQ ID NO: 1008390 - RNA, 22 nt, Human
caagagcucaccggagagcauu

SEQ ID NO: 1008391 - RNA, 22 nt, Human
uugaagcagcucaggaggcuua

SEQ ID NO: 1008392 - RNA, 22 nt, Human
aagaugauguuguguuuucacu

SEQ ID NO: 1008393 - RNA, 22 nt, Human
aacucaguucuuuccacaaugc

SEQ ID NO: 1008394 - RNA, 23 nt, Human
ucuuuacauacugaugaguucuc

SEQ ID NO: 1008395 - RNA, 22 nt, Human
ucaguuuuuaaaugauauaauu

SEQ ID NO: 1008396 - RNA, 22 nt, Human
acauccagaucucagcauggcu

SEQ ID NO: 1008397 - RNA, 22 nt, Human
agaaacauuuagauuauauguc

SEQ ID NO: 1008398 - RNA, 22 nt, Human
gccugagccgccugagcggcgg

SEQ ID NO: 1008399 - RNA, 22 nt, Human
augcaguaaaauaggagguaau

SEQ ID NO: 1008400 - RNA, 22 nt, Human
ugucagggcaugcgguccagcc

SEQ ID NO: 1008401 - RNA, 22 nt, Human
augucccaagauacagcuagag

SEQ ID NO: 1008402 - RNA, 20 nt, Human
guauuagguguuccucuuuc

SEQ ID NO: 1008403 - RNA, 22 nt, Human
uccugcaggcuugaguccucag

SEQ ID NO: 1008404 - RNA, 22 nt, Human
cagugcaguugguggcaggggu

SEQ ID NO: 1008405 - RNA, 22 nt, Human
ucaucuaagagucuuacauuua

SEQ ID NO: 1008406 - RNA, 22 nt, Human
uauguagaagcugcucaaagaa

SEQ ID NO: 1008407 - RNA, 20 nt, Human
uucugucagauuauauggga

SEQ ID NO: 1008408 - RNA, 23 nt, Human
uuugaaaguaucaacucgccuga

SEQ ID NO: 1008409 - RNA, 22 nt, Human
agaugauggccauguccucucc

SEQ ID NO: 1008410 - RNA, 22 nt, Human
ucuguucaguuguaccuucccc

SEQ ID NO: 1008411 - RNA, 22 nt, Human
ggcaggaggugaguggcgggug

SEQ ID NO: 1008412 - RNA, 22 nt, Human
uggcucugccacuaacuuggua

SEQ ID NO: 1008413 - RNA, 22 nt, Human
cccacaggcuagggguagggca

SEQ ID NO: 1008414 - RNA, 22 nt, Human
caugcuccaaaaacaagagaau

SEQ ID NO: 1008415 - RNA, 22 nt, Human
cuguuucaagugaagucagaca

SEQ ID NO: 1008416 - RNA, 22 nt, Human
ccagucccaggcagaaauccag

SEQ ID NO: 1008417 - RNA, 22 nt, Human
caugggagcuaucuccaucacu

SEQ ID NO: 1008418 - RNA, 21 nt, Human
auucugucaucccagcuacuu

SEQ ID NO: 1008419 - RNA, 21 nt, Human
ccagaggccucucuuggccac

SEQ ID NO: 1008420 - RNA, 22 nt, Human
ucagcuuuccuugcuuuagauu

SEQ ID NO: 1008421 - RNA, 22 nt, Human
uuugaguugcuuauuuaauagg

SEQ ID NO: 1008422 - RNA, 22 nt, Human
gcuggccugggcagaggcuaug

SEQ ID NO: 1008423 - RNA, 22 nt, Human
aaaggcuaugagauagaagaua

SEQ ID NO: 1008424 - RNA, 22 nt, Human
agggguggccugccuuacuccc

SEQ ID NO: 1008425 - RNA, 22 nt, Human
cacuggaauucaagauacugag

SEQ ID NO: 1008426 - RNA, 22 nt, Human
aagggcugaaugaaggguugaa

SEQ ID NO: 1008427 - RNA, 22 nt, Human
gccaggaguucagaugcauguu

SEQ ID NO: 1008428 - RNA, 22 nt, Human
ggauggagaugaccauggugac

SEQ ID NO: 1008429 - RNA, 22 nt, Human
cagaggccuggcuuggacaccu

SEQ ID NO: 1008430 - RNA, 22 nt, Human
gauuucaaguaucuugggcgag

SEQ ID NO: 1008431 - RNA, 22 nt, Human
augcuguggaugccuugcccca

SEQ ID NO: 1008432 - RNA, 22 nt, Human
aaaacaguuuaggcaucacagu

SEQ ID NO: 1008433 - RNA, 22 nt, Human
ugcauuguaggauguuuagcag

SEQ ID NO: 1008434 - RNA, 22 nt, Human
cucagaaguucagccuagagua

SEQ ID NO: 1008435 - RNA, 17 nt, Human
agaggcagauacuugga

SEQ ID NO: 1008436 - RNA, 22 nt, Human
cuucuucagcacaauauugaug

SEQ ID NO: 1008437 - RNA, 20 nt, Human
gaguuccccauuucuccugg

SEQ ID NO: 1008438 - RNA, 22 nt, Human
gccuggaggaauguagcugagg

SEQ ID NO: 1008439 - RNA, 22 nt, Human
gucaggauuggggucaugaguc

SEQ ID NO: 1008440 - RNA, 22 nt, Human
uuaauuuuuauguauagugugu

SEQ ID NO: 1008441 - RNA, 22 nt, Human
gagauggggaauaggagcaagc

SEQ ID NO: 1008442 - RNA, 22 nt, Human
uccuguuuaucugugugacucg

SEQ ID NO: 1008443 - RNA, 22 nt, Human
ugucaugccaccguuucccaga

SEQ ID NO: 1008444 - RNA, 22 nt, Human
aaguccaugaucaagauguggc

SEQ ID NO: 1008445 - RNA, 22 nt, Human
cagccagagaaagggcacugcc

SEQ ID NO: 1008446 - RNA, 22 nt, Human
ggcuggcacucuguccaguguc

SEQ ID NO: 1008447 - RNA, 22 nt, Human
aguggggagguccaggccaccc

SEQ ID NO: 1008448 - RNA, 23 nt, Human
gugcaugugucuuuacaguagca

SEQ ID NO: 1008449 - RNA, 22 nt, Human
cacagccugcugcacucaagaa

SEQ ID NO: 1008450 - RNA, 22 nt, Human
auguuucaccagcaaauuaccu

SEQ ID NO: 1008451 - RNA, 22 nt, Human
ucaguucuuuauuucacaguga

SEQ ID NO: 1008452 - RNA, 23 nt, Human
cccuggccuuggggcacaggcug

SEQ ID NO: 1008453 - RNA, 22 nt, Human
cugucauugagccugucagggc

SEQ ID NO: 1008454 - RNA, 22 nt, Human
uggagcugauacagcuggcuuu

SEQ ID NO: 1008455 - RNA, 22 nt, Human
aggcacugcuucuaaguaggaa

SEQ ID NO: 1008456 - RNA, 22 nt, Human
caauuucuuguuaauucucagg

SEQ ID NO: 1008457 - RNA, 17 nt, Human
ucauuuguugugacuag

SEQ ID NO: 1008458 - RNA, 22 nt, Human
acauuuuuauucaucaaagcag

SEQ ID NO: 1008459 - RNA, 22 nt, Human
ccaggacuucgaggcuacagug

SEQ ID NO: 1008460 - RNA, 22 nt, Human
auugucuguacuuuaaaaaugu

SEQ ID NO: 1008461 - RNA, 22 nt, Human
ccagcucuuggugcacuuacau

SEQ ID NO: 1008462 - RNA, 17 nt, Human
gauuuccugaaguucuu

SEQ ID NO: 1008463 - RNA, 22 nt, Human
auauauuuugcggucacguggc

SEQ ID NO: 1008464 - RNA, 22 nt, Human
gaaacaugucugacaauuuacc

SEQ ID NO: 1008465 - RNA, 22 nt, Human
ggcagagaugugggucagaauc

SEQ ID NO: 1008466 - RNA, 18 nt, Human
uggcagcaggaagccauu

SEQ ID NO: 1008467 - RNA, 22 nt, Human
cugcagggaacugaggcccaga

SEQ ID NO: 1008468 - RNA, 22 nt, Human
uccucugccccagaugaaauuu

SEQ ID NO: 1008469 - RNA, 22 nt, Human
ccagggcauccucacaucgcag

SEQ ID NO: 1008470 - RNA, 22 nt, Human
uacagaaaucacaucgcuuuga

SEQ ID NO: 1008471 - RNA, 21 nt, Human
aggcagcucaggcccagagag

SEQ ID NO: 1008472 - RNA, 19 nt, Human
ggcccaaguacugagugcc

SEQ ID NO: 1008473 - RNA, 22 nt, Human
agcagggguaacagaaggaaag

SEQ ID NO: 1008474 - RNA, 22 nt, Human
cacccaggcagguggcugagaa

SEQ ID NO: 1008475 - RNA, 22 nt, Human
ugcuucagaggaaaggcaaaag

SEQ ID NO: 1008476 - RNA, 22 nt, Human
ugcuuuaucugugagaaccuga

SEQ ID NO: 1008477 - RNA, 22 nt, Human
gagagguccauuccccugucag

SEQ ID NO: 1008478 - RNA, 22 nt, Human
uucacauuagugguucuauaua

SEQ ID NO: 1008479 - RNA, 22 nt, Human
gcaggcaguugcaguuuucuag

SEQ ID NO: 1008480 - RNA, 22 nt, Human
uacuuucuguccuucuguuaaa

SEQ ID NO: 1008481 - RNA, 22 nt, Human
uauaucaccaaaaacaguucug

SEQ ID NO: 1008482 - RNA, 22 nt, Human
ugggcuggcugaggcauucacu

SEQ ID NO: 1008483 - RNA, 22 nt, Human
uggcagagcccagaacugagca

SEQ ID NO: 1008484 - RNA, 22 nt, Human
gcuggagguuucaccugaguuu

SEQ ID NO: 1008485 - RNA, 22 nt, Human
gagaaagacguaggcugggagg

SEQ ID NO: 1008486 - RNA, 21 nt, Human
ccuccaggagcagagcccuga

SEQ ID NO: 1008487 - RNA, 22 nt, Human
gugccuggcacacagaaggcaa

SEQ ID NO: 1008488 - RNA, 21 nt, Human
ugcagccauucagcccuaugc

SEQ ID NO: 1008489 - RNA, 22 nt, Human
agcugcccccagggcugugcuu

SEQ ID NO: 1008490 - RNA, 22 nt, Human
uauagccauuuccaguggcauc

SEQ ID NO: 1008491 - RNA, 22 nt, Human
augggcugugagguccggcagg

SEQ ID NO: 1008492 - RNA, 22 nt, Human
acuuucucaaaucagacuuuaa

SEQ ID NO: 1008493 - RNA, 22 nt, Human
ugguuuugcuccaguauaaaua

SEQ ID NO: 1008494 - RNA, 22 nt, Human
uagaaacaaugacaugcuugua

SEQ ID NO: 1008495 - RNA, 22 nt, Human
agguaaagacagugaaagaggg

SEQ ID NO: 1008496 - RNA, 22 nt, Human
ccagggcauguaacuaauggug

SEQ ID NO: 1008497 - RNA, 22 nt, Human
ggagccaguuuagaccucaguu

SEQ ID NO: 1008498 - RNA, 22 nt, Human
gucccagaaacauauugcuggu

SEQ ID NO: 1008499 - RNA, 22 nt, Human
acauuuaaugauccuacuguga

SEQ ID NO: 1008500 - RNA, 22 nt, Human
gguagcacauugcauuaggaga

SEQ ID NO: 1008501 - RNA, 22 nt, Human
ugaaaugacagucuuaagcucu

SEQ ID NO: 1008502 - RNA, 22 nt, Human
aaccccgcucaggcugggugag

SEQ ID NO: 1008503 - RNA, 22 nt, Human
uagauuucucauucauagauug

SEQ ID NO: 1008504 - RNA, 22 nt, Human
ugcugccagccaggccauggag

SEQ ID NO: 1008505 - RNA, 22 nt, Human
ggucccagaauugguuagcaca

SEQ ID NO: 1008506 - RNA, 22 nt, Human
ggccuguguccuccuugcccug

SEQ ID NO: 1008507 - RNA, 22 nt, Human
agcacagaguugcagagagcgu

SEQ ID NO: 1008508 - RNA, 22 nt, Human
caggugggagccacagcguaca

SEQ ID NO: 1008509 - RNA, 22 nt, Human
ccugccuggaucagccauccug

SEQ ID NO: 1008510 - RNA, 22 nt, Human
caggaacauuuaaccacagggu

SEQ ID NO: 1008511 - RNA, 22 nt, Human
acaaagucaaauugcagccgcc

SEQ ID NO: 1008512 - RNA, 22 nt, Human
gcagggcaugggcccugucugc

SEQ ID NO: 1008513 - RNA, 22 nt, Human
cagcuugcaguacuuguuuuug

SEQ ID NO: 1008514 - RNA, 22 nt, Human
aguauugugacucaaguauucu

SEQ ID NO: 1008515 - RNA, 22 nt, Human
ucauuguuucugcuuuucauga

SEQ ID NO: 1008516 - RNA, 22 nt, Human
cacuugggagcauugcacaugu

SEQ ID NO: 1008517 - RNA, 22 nt, Human
cucaaauauaagcuaaaugugg

SEQ ID NO: 1008518 - RNA, 22 nt, Human
uggcuggacagugggcagugga

SEQ ID NO: 1008519 - RNA, 22 nt, Human
uuuaauuugaaaugaguaaccc

SEQ ID NO: 1008520 - RNA, 22 nt, Human
auucuucauuguugauucaugu

SEQ ID NO: 1008521 - RNA, 22 nt, Human
cagugcaugaaacaauaugcag

SEQ ID NO: 1008522 - RNA, 22 nt, Human
auaugauuccacuauuguaugg

SEQ ID NO: 1008523 - RNA, 22 nt, Human
caguuuauaugucagagcugua

SEQ ID NO: 1008524 - RNA, 22 nt, Human
auucacaaaaugauauagauac

SEQ ID NO: 1008525 - RNA, 18 nt, Human
uugagggaggggcagagu

SEQ ID NO: 1008526 - RNA, 22 nt, Human
gucccaggugggcuccaccucu

SEQ ID NO: 1008527 - RNA, 22 nt, Human
auuguggcuagacagucacaau

SEQ ID NO: 1008528 - RNA, 17 nt, Human
ugagacagggcaggccc

SEQ ID NO: 1008529 - RNA, 22 nt, Human
acauuuaggauguuuugagaga

SEQ ID NO: 1008530 - RNA, 22 nt, Human
acucaggaagaaagcagcuggu

SEQ ID NO: 1008531 - RNA, 23 nt, Human
agucucagcuggaaacauguguc

SEQ ID NO: 1008532 - RNA, 22 nt, Human
aaacaaguguaaacuagucugu

SEQ ID NO: 1008533 - RNA, 22 nt, Human
caaaggagguaaugggugugag

SEQ ID NO: 1008534 - RNA, 22 nt, Human
ggcagcugaccuagcaccaucc

SEQ ID NO: 1008535 - RNA, 22 nt, Human
caggaggcccaaagggcgcaga

SEQ ID NO: 1008536 - RNA, 22 nt, Human
auuuugaugcuaucuaaugaau

SEQ ID NO: 1008537 - RNA, 22 nt, Human
uuuuagaaauacugauuuagug

SEQ ID NO: 1008538 - RNA, 22 nt, Human
ggcacugagaggcucuuccuaa

SEQ ID NO: 1008539 - RNA, 20 nt, Human
uuuuccagaaaguaucauug

SEQ ID NO: 1008540 - RNA, 22 nt, Human
aggcccuggcccccagagauuc

SEQ ID NO: 1008541 - RNA, 22 nt, Human
auccuucaaggggcugacagcu

SEQ ID NO: 1008542 - RNA, 22 nt, Human
uaauacuguauacugcaaauuu

SEQ ID NO: 1008543 - RNA, 22 nt, Human
ugcuggccaauggcagaggcgg

SEQ ID NO: 1008544 - RNA, 22 nt, Human
ucugggaagcugguccuguucu

SEQ ID NO: 1008545 - RNA, 18 nt, Human
ugcuuggagcauuuacca

SEQ ID NO: 1008546 - RNA, 20 nt, Human
cagagacccaggcuucagcu

SEQ ID NO: 1008547 - RNA, 17 nt, Human
ggaaaaggaugauacag

SEQ ID NO: 1008548 - RNA, 22 nt, Human
aauuaacagagggcuuauuacu

SEQ ID NO: 1008549 - RNA, 22 nt, Human
gugcaggguagcgacggcagga

SEQ ID NO: 1008550 - RNA, 22 nt, Human
ugucucaggggcauugaaauaa

SEQ ID NO: 1008551 - RNA, 22 nt, Human
aguggaccagaagacugaagcu

SEQ ID NO: 1008552 - RNA, 22 nt, Human
uaugacauuggccaaguucugu

SEQ ID NO: 1008553 - RNA, 22 nt, Human
agaggccuaauugcuacccuuu

SEQ ID NO: 1008554 - RNA, 22 nt, Human
aaaaaaucagaucuuugguuaa

SEQ ID NO: 1008555 - RNA, 20 nt, Human
uggucuggagccagugagga

SEQ ID NO: 1008556 - RNA, 22 nt, Human
uuuuuaguagagguggguuuca

SEQ ID NO: 1008557 - RNA, 22 nt, Human
acugcagccuugaacucugggc

SEQ ID NO: 1008558 - RNA, 22 nt, Human
agagcagugcugaagaguaggg

SEQ ID NO: 1008559 - RNA, 22 nt, Human
ucauuucuguugugcaucacug

SEQ ID NO: 1008560 - RNA, 22 nt, Human
uggagccuguguuucugcccag

SEQ ID NO: 1008561 - RNA, 22 nt, Human
ucaaauaaugccauucaucauc

SEQ ID NO: 1008562 - RNA, 22 nt, Human
aacauucaaaacccaguucagu

SEQ ID NO: 1008563 - RNA, 22 nt, Human
gcugucuugcucacucuugcag

SEQ ID NO: 1008564 - RNA, 22 nt, Human
uuauuuuuaaaaguucacacag

SEQ ID NO: 1008565 - RNA, 22 nt, Human
gcugucuucacuuccugguuuc

SEQ ID NO: 1008566 - RNA, 22 nt, Human
gggagagaugcugauugccaau

SEQ ID NO: 1008567 - RNA, 22 nt, Human
ucagggcauucaagaggccugg

SEQ ID NO: 1008568 - RNA, 22 nt, Human
ucuucuuccuccacagggccca

SEQ ID NO: 1008569 - RNA, 22 nt, Human
gcugcagcagcugcaggguugu

SEQ ID NO: 1008570 - RNA, 22 nt, Human
guuucauucggcagcucauaag

SEQ ID NO: 1008571 - RNA, 22 nt, Human
uggcucaguggcagccgcagcu

SEQ ID NO: 1008572 - RNA, 22 nt, Human
ucugcucuaguugcuuccugcc

SEQ ID NO: 1008573 - RNA, 22 nt, Human
uugaaagggauauaucuuucug

SEQ ID NO: 1008574 - RNA, 22 nt, Human
cugggacacccaaggaaagagc

SEQ ID NO: 1008575 - RNA, 22 nt, Human
agcuuuauagaaaggaucagug

SEQ ID NO: 1008576 - RNA, 22 nt, Human
aucauaaagugcuaucugauug

SEQ ID NO: 1008577 - RNA, 22 nt, Human
ugaguuuuuucaacauaugaag

SEQ ID NO: 1008578 - RNA, 22 nt, Human
uauuucugggaguucagaaauu

SEQ ID NO: 1008579 - RNA, 19 nt, Human
cagcugcaccgugaccauc

SEQ ID NO: 1008580 - RNA, 18 nt, Human
gaagggagcuggaaugca

SEQ ID NO: 1008581 - RNA, 22 nt, Human
accugccuauggagccacaugg

SEQ ID NO: 1008582 - RNA, 22 nt, Human
ccagcagagcauggggaggaag

SEQ ID NO: 1008583 - RNA, 22 nt, Human
agcugcucccuauccuuuccuu

SEQ ID NO: 1008584 - RNA, 22 nt, Human
aaaaaugaaacggcugguuggc

SEQ ID NO: 1008585 - RNA, 22 nt, Human
aaagaauuuguacacccuacua

SEQ ID NO: 1008586 - RNA, 16 nt, Human
uguaugaacgucucca

SEQ ID NO: 1008587 - RNA, 22 nt, Human
ggcuuggaaaugguaaugagcu

SEQ ID NO: 1008588 - RNA, 22 nt, Human
cugcugggaaggucugcucagu

SEQ ID NO: 1008589 - RNA, 22 nt, Human
gcacugugaucaaggcuaagca

SEQ ID NO: 1008590 - RNA, 22 nt, Human
aaaaucugguaauuugaaugug

SEQ ID NO: 1008591 - RNA, 22 nt, Human
acaauacaggcuucuggacuua

SEQ ID NO: 1008592 - RNA, 22 nt, Human
cagugcauaaucuaaauggggg

SEQ ID NO: 1008593 - RNA, 22 nt, Human
uccucuggauauaagccucacc

SEQ ID NO: 1008594 - RNA, 22 nt, Human
uugaaaguagcagcugcauaug

SEQ ID NO: 1008595 - RNA, 21 nt, Human
aacaaagggaugcucaucuuu

SEQ ID NO: 1008596 - RNA, 22 nt, Human
ugucucugauaaguaguucagu

SEQ ID NO: 1008597 - RNA, 22 nt, Human
guguuuggucagacguccgggg

SEQ ID NO: 1008598 - RNA, 22 nt, Human
acuuaguauuuuucagcuuuga

SEQ ID NO: 1008599 - RNA, 22 nt, Human
acagaaggcggggacaaggcgg

SEQ ID NO: 1008600 - RNA, 21 nt, Human
cagaggcagguccugggacgg

SEQ ID NO: 1008601 - RNA, 22 nt, Human
cacagcuaggaggaaagcagag

SEQ ID NO: 1008602 - RNA, 22 nt, Human
cuguaaaacacuguaguaucug

SEQ ID NO: 1008603 - RNA, 22 nt, Human
uccagggaagagcagaggcuac

SEQ ID NO: 1008604 - RNA, 22 nt, Human
ccagagccggcucccucagcuu

SEQ ID NO: 1008605 - RNA, 22 nt, Human
cagagugaaaacugagcucaaa

SEQ ID NO: 1008606 - RNA, 22 nt, Human
ccugugucuuccccacuggugu

SEQ ID NO: 1008607 - RNA, 22 nt, Human
cucccagggccaucgagucacu

SEQ ID NO: 1008608 - RNA, 22 nt, Human
ccaggacuuuaaguccagcacu

SEQ ID NO: 1008609 - RNA, 22 nt, Human
cagcccagcagucuuagccugc

SEQ ID NO: 1008610 - RNA, 22 nt, Human
cucaguuucugacauuaaaauc

SEQ ID NO: 1008611 - RNA, 22 nt, Human
acaggcagcacuaaucucuggu

SEQ ID NO: 1008612 - RNA, 22 nt, Human
gagcucagcccaaagagcagug

SEQ ID NO: 1008613 - RNA, 22 nt, Human
cugucucagcaggaagucauca

SEQ ID NO: 1008614 - RNA, 22 nt, Human
aaucgguugaacccaggaagug

SEQ ID NO: 1008615 - RNA, 22 nt, Human
uuugcuauaaaagggucacacg

SEQ ID NO: 1008616 - RNA, 22 nt, Human
aggcccugaccugggagaucua

SEQ ID NO: 1008617 - RNA, 22 nt, Human
cucacuguuuaauagcuggauc

SEQ ID NO: 1008618 - RNA, 22 nt, Human
gggaggugauggcaagcagcgg

SEQ ID NO: 1008619 - RNA, 22 nt, Human
gaguguuccagaaacuggcccu

SEQ ID NO: 1008620 - RNA, 22 nt, Human
uaugcacacauuagcacagggu

SEQ ID NO: 1008621 - RNA, 22 nt, Human
uguggcugacuccuggucccca

SEQ ID NO: 1008622 - RNA, 22 nt, Human
cuucuuaaucccuuauauauuu

SEQ ID NO: 1008623 - RNA, 22 nt, Human
auacaguauuaccuguucagga

SEQ ID NO: 1008624 - RNA, 22 nt, Human
aggccugucuggggcucagcca

SEQ ID NO: 1008625 - RNA, 22 nt, Human
auucucaguucacuaguuucuu

SEQ ID NO: 1008626 - RNA, 22 nt, Human
uguaugaagacuucuucugugu

SEQ ID NO: 1008627 - RNA, 18 nt, Human
ugagaggcuauuuuuugc

SEQ ID NO: 1008628 - RNA, 18 nt, Human
cuucagugacagucuggc

SEQ ID NO: 1008629 - RNA, 22 nt, Human
aaaguaguuagucaugugaaaa

SEQ ID NO: 1008630 - RNA, 22 nt, Human
ucugaacauccagcaaugcaca

SEQ ID NO: 1008631 - RNA, 22 nt, Human
ggguccaggucuucaggcagag

SEQ ID NO: 1008632 - RNA, 22 nt, Human
uccaggcacuauauauacuuuu

SEQ ID NO: 1008633 - RNA, 22 nt, Human
aacagaauugcugcugccaaug

SEQ ID NO: 1008634 - RNA, 22 nt, Human
uuuccuuugcccaauacauguc

SEQ ID NO: 1008635 - RNA, 23 nt, Human
acagggcauugcuggccucgagg

SEQ ID NO: 1008636 - RNA, 22 nt, Human
ggcuccugauaggagaaugcgg

SEQ ID NO: 1008637 - RNA, 18 nt, Human
ucugagggugcgggagcu

SEQ ID NO: 1008638 - RNA, 22 nt, Human
uccauuuucaucucauguauaa

SEQ ID NO: 1008639 - RNA, 22 nt, Human
cagcaguggaacuacccaggga

SEQ ID NO: 1008640 - RNA, 22 nt, Human
aagacugucuuuucugagugac

SEQ ID NO: 1008641 - RNA, 22 nt, Human
cuucccagacgggguggcagcc

SEQ ID NO: 1008642 - RNA, 22 nt, Human
gcccagcuuuuugaggcaggca

SEQ ID NO: 1008643 - RNA, 22 nt, Human
augcacaagaggcuagaaaaga

SEQ ID NO: 1008644 - RNA, 22 nt, Human
auucugaguccaugggggcagg

SEQ ID NO: 1008645 - RNA, 22 nt, Human
gcccagcaccucucucaggguu

SEQ ID NO: 1008646 - RNA, 18 nt, Human
caggucagccuggccuca

SEQ ID NO: 1008647 - RNA, 22 nt, Human
agagccuggcucccagcuaccg

SEQ ID NO: 1008648 - RNA, 22 nt, Human
gauuuuauuagcccaaacuuug

SEQ ID NO: 1008649 - RNA, 22 nt, Human
agggcuggcuaggugcguuccc

SEQ ID NO: 1008650 - RNA, 22 nt, Human
ugcuuagacgucaaguacagcc

SEQ ID NO: 1008651 - RNA, 22 nt, Human
uggggugggcaugcgcuguccu

SEQ ID NO: 1008652 - RNA, 22 nt, Human
ucugggcuugguuagggcuguu

SEQ ID NO: 1008653 - RNA, 18 nt, Human
cucagggcaucagucugg

SEQ ID NO: 1008654 - RNA, 22 nt, Human
agaggccggccgagcccauggg

SEQ ID NO: 1008655 - RNA, 22 nt, Human
aguuggagugaacaugagauug

SEQ ID NO: 1008656 - RNA, 22 nt, Human
ggagagcagggaggcugcucug

SEQ ID NO: 1008657 - RNA, 22 nt, Human
ggcccugagcugaaguacugug

SEQ ID NO: 1008658 - RNA, 19 nt, Human
gggcuccuugggccucucu

SEQ ID NO: 1008659 - RNA, 21 nt, Human
agcagaggggacauguuugau

SEQ ID NO: 1008660 - RNA, 22 nt, Human
aaagaacagauguguggugcau

SEQ ID NO: 1008661 - RNA, 22 nt, Human
uccuucagucuucugagccaua

SEQ ID NO: 1008662 - RNA, 22 nt, Human
cccaaggccuucaagccagcuc

SEQ ID NO: 1008663 - RNA, 22 nt, Human
ucauaacagcuaagucccuuuc

SEQ ID NO: 1008664 - RNA, 22 nt, Human
acagaauacuacagacugguua

SEQ ID NO: 1008665 - RNA, 22 nt, Human
acuccugggugcugaccagcgu

SEQ ID NO: 1008666 - RNA, 20 nt, Human
acugagcugcauggagagga

SEQ ID NO: 1008667 - RNA, 22 nt, Human
augaaggcuguguggagccccc

SEQ ID NO: 1008668 - RNA, 22 nt, Human
cauuugaaccuggauguucuua

SEQ ID NO: 1008669 - RNA, 22 nt, Human
uccagcagaaaagagguaggga

SEQ ID NO: 1008670 - RNA, 22 nt, Human
aaaggccacuugaaggauuuuu

SEQ ID NO: 1008671 - RNA, 22 nt, Human
acagagcuguacaugugccaug

SEQ ID NO: 1008672 - RNA, 22 nt, Human
gaggugggagggcagucccuaa

SEQ ID NO: 1008673 - RNA, 22 nt, Human
caccugagugucaguauucuca

SEQ ID NO: 1008674 - RNA, 22 nt, Human
agugaccaacaaugcugagaag

SEQ ID NO: 1008675 - RNA, 22 nt, Human
uuggccuucccuaccugggcca

SEQ ID NO: 1008676 - RNA, 22 nt, Human
agacagaacagaauaauuguug

SEQ ID NO: 1008677 - RNA, 22 nt, Human
ucuggcucacuucaggcuucac

SEQ ID NO: 1008678 - RNA, 20 nt, Human
cacaagagaauacacacugg

SEQ ID NO: 1008679 - RNA, 23 nt, Human
gaagcagaugucugaguaggcag

SEQ ID NO: 1008680 - RNA, 22 nt, Human
uauugacaauaggcaacugagg

SEQ ID NO: 1008681 - RNA, 22 nt, Human
uacauuaacuuacguccacaug

SEQ ID NO: 1008682 - RNA, 22 nt, Human
agauggagaccuuggaugaacu

SEQ ID NO: 1008683 - RNA, 22 nt, Human
uuuauguuugacaaugaucugg

SEQ ID NO: 1008684 - RNA, 22 nt, Human
gggcagcagaggaucccuuaau

SEQ ID NO: 1008685 - RNA, 22 nt, Human
agggacacacuccaguguuauu

SEQ ID NO: 1008686 - RNA, 21 nt, Human
accaggcuugugggagggagc

SEQ ID NO: 1008687 - RNA, 22 nt, Human
aaugcugcucucauaauuauag

SEQ ID NO: 1008688 - RNA, 21 nt, Human
ccugcagcaccagaaggagau

SEQ ID NO: 1008689 - RNA, 20 nt, Human
ccuuuauuauuuguaugaug

SEQ ID NO: 1008690 - RNA, 22 nt, Human
ucacaauuuggauacagcuaug

SEQ ID NO: 1008691 - RNA, 22 nt, Human
cuggcagcguguuuaugaacau

SEQ ID NO: 1008692 - RNA, 22 nt, Human
ugagccagaggaggcugugugg

SEQ ID NO: 1008693 - RNA, 22 nt, Human
agcccuucaaccugccuacucc

SEQ ID NO: 1008694 - RNA, 22 nt, Human
aagggcagaaagggacgcuuug

SEQ ID NO: 1008695 - RNA, 21 nt, Human
ucuguucaaggaacuacggau

SEQ ID NO: 1008696 - RNA, 22 nt, Human
cccagcucaucaggagccgccc

SEQ ID NO: 1008697 - RNA, 22 nt, Human
cgcugggggaacagcgagggug

SEQ ID NO: 1008698 - RNA, 22 nt, Human
ccugugcauccgguggucauug

SEQ ID NO: 1008699 - RNA, 22 nt, Human
cauguaaaacacucagaacagu

SEQ ID NO: 1008700 - RNA, 21 nt, Human
guagggacagagaguugguga

SEQ ID NO: 1008701 - RNA, 22 nt, Human
cuuuggcaacacaugugggaca

SEQ ID NO: 1008702 - RNA, 22 nt, Human
ucucagucagccuugauguccc

SEQ ID NO: 1008703 - RNA, 22 nt, Human
auguccagaguguccuggaaag

SEQ ID NO: 1008704 - RNA, 22 nt, Human
aggccuggugaaugaaguaucu

SEQ ID NO: 1008705 - RNA, 22 nt, Human
ggcacugagcgggcucugagcg

SEQ ID NO: 1008706 - RNA, 22 nt, Human
ugcugccuugaccuccugggcu

SEQ ID NO: 1008707 - RNA, 22 nt, Human
gcugucacaaauauuucucagc

SEQ ID NO: 1008708 - RNA, 22 nt, Human
uauacagaaccgccugaagucu

SEQ ID NO: 1008709 - RNA, 22 nt, Human
cugacucuccucaagcauaaau

SEQ ID NO: 1008710 - RNA, 22 nt, Human
uguaaaaccaaaucaaucuagu

SEQ ID NO: 1008711 - RNA, 22 nt, Human
auagcuguuagauuggggucga

SEQ ID NO: 1008712 - RNA, 22 nt, Human
ccuggugccacuagagaauguc

SEQ ID NO: 1008713 - RNA, 22 nt, Human
ucucugcugagaagggcuggca

SEQ ID NO: 1008714 - RNA, 20 nt, Human
cuguggcucaugcaucugcc

SEQ ID NO: 1008715 - RNA, 22 nt, Human
gugggacucuucuuuggcagug

SEQ ID NO: 1008716 - RNA, 22 nt, Human
aguuagaauauaauuauguuaa

SEQ ID NO: 1008717 - RNA, 22 nt, Human
cacaccuguaauaccagcuacu

SEQ ID NO: 1008718 - RNA, 22 nt, Human
agcuucuguucaucuuccaggc

SEQ ID NO: 1008719 - RNA, 22 nt, Human
auucuucacuguuucagaauga

SEQ ID NO: 1008720 - RNA, 22 nt, Human
ggugcagaaggaagggagcugg

SEQ ID NO: 1008721 - RNA, 22 nt, Human
cacugaagccugggaguaagac

SEQ ID NO: 1008722 - RNA, 22 nt, Human
gccucuggggcagcugagucau

SEQ ID NO: 1008723 - RNA, 22 nt, Human
gagagcuguccggcugagcagc

SEQ ID NO: 1008724 - RNA, 21 nt, Human
agaggccuuacaggauagacc

SEQ ID NO: 1008725 - RNA, 22 nt, Human
agauacauauagaaaacaucaa

SEQ ID NO: 1008726 - RNA, 22 nt, Human
ugguaaaguguacugaauauga

SEQ ID NO: 1008727 - RNA, 23 nt, Human
uucaaaacuggaaaaucagaugc

SEQ ID NO: 1008728 - RNA, 22 nt, Human
uuguuucauggggauguuuauu

SEQ ID NO: 1008729 - RNA, 22 nt, Human
gacagggcauggugcagaguuc

SEQ ID NO: 1008730 - RNA, 22 nt, Human
ggcagauggagaagcagcaggu

SEQ ID NO: 1008731 - RNA, 22 nt, Human
cacagagagcuacgugcagcgu

SEQ ID NO: 1008732 - RNA, 19 nt, Human
cugugcuuuaaacuccuau

SEQ ID NO: 1008733 - RNA, 22 nt, Human
cugccuggaaggagcaagggga

SEQ ID NO: 1008734 - RNA, 22 nt, Human
auguaucaauuaucugucugca

SEQ ID NO: 1008735 - RNA, 22 nt, Human
uggagcagcaucacuuugagcu

SEQ ID NO: 1008736 - RNA, 22 nt, Human
gcucucugucguuaugcuucau

SEQ ID NO: 1008737 - RNA, 18 nt, Human
cguuuuuccgggauugca

SEQ ID NO: 1008738 - RNA, 22 nt, Human
ggagagcaggguccugagauac

SEQ ID NO: 1008739 - RNA, 19 nt, Human
cauuuuaagcauccccagu

SEQ ID NO: 1008740 - RNA, 22 nt, Human
acauuucuaauuuaauguaaca

SEQ ID NO: 1008741 - RNA, 22 nt, Human
uggcacugccuggcagggcccc

SEQ ID NO: 1008742 - RNA, 22 nt, Human
gacauguugaagaauauuugga

SEQ ID NO: 1008743 - RNA, 21 nt, Human
ugcaggcaggcagagaugcug

SEQ ID NO: 1008744 - RNA, 22 nt, Human
ucagcagucacauguuguccca

SEQ ID NO: 1008745 - RNA, 22 nt, Human
ggcagagguagcuggaaccagg

SEQ ID NO: 1008746 - RNA, 22 nt, Human
ucuucagacuccaaauguuuua

SEQ ID NO: 1008747 - RNA, 23 nt, Human
ucacagggcacuggcugggguug

SEQ ID NO: 1008748 - RNA, 22 nt, Human
uggcugcuagccagagcuucag

SEQ ID NO: 1008749 - RNA, 22 nt, Human
cauaauauacuacauugaugaa

SEQ ID NO: 1008750 - RNA, 22 nt, Human
aagcugccaccagcccagggca

SEQ ID NO: 1008751 - RNA, 22 nt, Human
gggugggccugucuggccaugu

SEQ ID NO: 1008752 - RNA, 22 nt, Human
gagggggagaugugcacacacu

SEQ ID NO: 1008753 - RNA, 20 nt, Human
acuuucucgguuucucaccu

SEQ ID NO: 1008754 - RNA, 22 nt, Human
agucaguggcuccgagccuggu

SEQ ID NO: 1008755 - RNA, 22 nt, Human
ggguaccaagcugcuugggggc

SEQ ID NO: 1008756 - RNA, 22 nt, Human
uuauguacaauguuaauguaaa

SEQ ID NO: 1008757 - RNA, 22 nt, Human
agagccagagaccuggguucac

SEQ ID NO: 1008758 - RNA, 22 nt, Human
accuuggggugaugcugaaaga

SEQ ID NO: 1008759 - RNA, 22 nt, Human
acauugaugaaaagguaucauu

SEQ ID NO: 1008760 - RNA, 22 nt, Human
gaagagcuguagccugcucuuu

SEQ ID NO: 1008761 - RNA, 22 nt, Human
auggcagcaaaugucuggcugg

SEQ ID NO: 1008762 - RNA, 22 nt, Human
ugcauuaugcuugugcuguaua

SEQ ID NO: 1008763 - RNA, 23 nt, Human
cugcuguuuucuguaccugaagc

SEQ ID NO: 1008764 - RNA, 22 nt, Human
cagggcaggacagauacauuac

SEQ ID NO: 1008765 - RNA, 22 nt, Human
uuugaacuucuccauucugaug

SEQ ID NO: 1008766 - RNA, 22 nt, Human
gauuauauaauggaagcucuug

SEQ ID NO: 1008767 - RNA, 22 nt, Human
augcacgccccacacuggugug

SEQ ID NO: 1008768 - RNA, 22 nt, Human
cauuuguaguaucuguuuauau

SEQ ID NO: 1008769 - RNA, 18 nt, Human
aggaagcaggaggaaggc

SEQ ID NO: 1008770 - RNA, 22 nt, Human
ucauccagaaaaaugucuuagc

SEQ ID NO: 1008771 - RNA, 22 nt, Human
ggaccugcccuggcucagaugc

SEQ ID NO: 1008772 - RNA, 22 nt, Human
ucuggagcuuguuucagauggu

SEQ ID NO: 1008773 - RNA, 22 nt, Human
acagcagagacacucaggaggc

SEQ ID NO: 1008774 - RNA, 22 nt, Human
caguuucuauggcugggcucug

SEQ ID NO: 1008775 - RNA, 22 nt, Human
uuaaagggccgauuuccaggcc

SEQ ID NO: 1008776 - RNA, 22 nt, Human
ugucauguguucuuaaauacau

SEQ ID NO: 1008777 - RNA, 22 nt, Human
acagaaauuagcagugaguuua

SEQ ID NO: 1008778 - RNA, 22 nt, Human
uuucuuuguuguuaucacauca

SEQ ID NO: 1008779 - RNA, 22 nt, Human
acacugaauguuuaagaacuug

SEQ ID NO: 1008780 - RNA, 22 nt, Human
gguuucaacuaaaucaagaagg

SEQ ID NO: 1008781 - RNA, 22 nt, Human
cuggcagcagcuucuggaucga

SEQ ID NO: 1008782 - RNA, 22 nt, Human
ccagagcugauuccugggacuu

SEQ ID NO: 1008783 - RNA, 22 nt, Human
aacagaauaguugauguacagu

SEQ ID NO: 1008784 - RNA, 23 nt, Human
agggcugaugccauugcagcucu

SEQ ID NO: 1008785 - RNA, 22 nt, Human
cacugcuuuaaggcugaguaac

SEQ ID NO: 1008786 - RNA, 22 nt, Human
ucccagggcacucacccucccu

SEQ ID NO: 1008787 - RNA, 22 nt, Human
ucagagccccuccgcuguccca

SEQ ID NO: 1008788 - RNA, 22 nt, Human
guuucgucaggcuuauucuauc

SEQ ID NO: 1008789 - RNA, 22 nt, Human
cugccuggccugaucuccacgc

SEQ ID NO: 1008790 - RNA, 22 nt, Human
gagcauuuuugucugcauuuua

SEQ ID NO: 1008791 - RNA, 22 nt, Human
gccuccugagaagccacaggcu

SEQ ID NO: 1008792 - RNA, 22 nt, Human
uucuguguggguagcuccuguu

SEQ ID NO: 1008793 - RNA, 22 nt, Human
uggccaguagauaggcaggcaa

SEQ ID NO: 1008794 - RNA, 20 nt, Human
ugggagcuggugaggucuca

SEQ ID NO: 1008795 - RNA, 23 nt, Human
aggcagagccaaggucaaaaccc

SEQ ID NO: 1008796 - RNA, 22 nt, Human
cggcuggguagaggugccgggu

SEQ ID NO: 1008797 - RNA, 22 nt, Human
uccugcagcauccgucgucugu

SEQ ID NO: 1008798 - RNA, 22 nt, Human
gugauuuugagaccuauauagu

SEQ ID NO: 1008799 - RNA, 22 nt, Human
ggccccacgggggaguccuagu

SEQ ID NO: 1008800 - RNA, 22 nt, Human
aauguauaaaguguuaauaacu

SEQ ID NO: 1008801 - RNA, 22 nt, Human
accugcagcuaaagauguaggg

SEQ ID NO: 1008802 - RNA, 22 nt, Human
cagcacugcugcuguacacaca

SEQ ID NO: 1008803 - RNA, 22 nt, Human
aggcucugucaggcggagcagc

SEQ ID NO: 1008804 - RNA, 22 nt, Human
acuuuugguucuguaacuguga

SEQ ID NO: 1008805 - RNA, 22 nt, Human
uucuggaggccccuuccuucuc

SEQ ID NO: 1008806 - RNA, 22 nt, Human
agauggggcagaauggagccau

SEQ ID NO: 1008807 - RNA, 20 nt, Human
augcuuucuugugugcugcu

SEQ ID NO: 1008808 - RNA, 22 nt, Human
cagggcucccaaauaucucuuc

SEQ ID NO: 1008809 - RNA, 22 nt, Human
cuuucucugugugguaaagggc

SEQ ID NO: 1008810 - RNA, 22 nt, Human
cagcugcuuuaguuuuccaucc

SEQ ID NO: 1008811 - RNA, 22 nt, Human
cuggcucucugagauauugagu

SEQ ID NO: 1008812 - RNA, 22 nt, Human
cagagcuggguuugggaaaccu

SEQ ID NO: 1008813 - RNA, 22 nt, Human
uccuuuuuaagucguuguggua

SEQ ID NO: 1008814 - RNA, 22 nt, Human
cuggggacuugcagacacaauu

SEQ ID NO: 1008815 - RNA, 22 nt, Human
auucuucagcaggggacacuau

SEQ ID NO: 1008816 - RNA, 22 nt, Human
agccuguggaucccugcacugg

SEQ ID NO: 1008817 - RNA, 22 nt, Human
cuuauaguaugauguugagaau

SEQ ID NO: 1008818 - RNA, 22 nt, Human
cuguccauuuucgugccuccuu

SEQ ID NO: 1008819 - RNA, 22 nt, Human
auacagauguugaauguuauau

SEQ ID NO: 1008820 - RNA, 22 nt, Human
gaaacauaguugagacacugcu

SEQ ID NO: 1008821 - RNA, 22 nt, Human
ggccucucuccagucagugcag

SEQ ID NO: 1008822 - RNA, 22 nt, Human
uuuuaauacugcuauuguagga

SEQ ID NO: 1008823 - RNA, 20 nt, Human
ggccuuggguuucgccuguu

SEQ ID NO: 1008824 - RNA, 22 nt, Human
gugcucuccuggcugcccugac

SEQ ID NO: 1008825 - RNA, 22 nt, Human
cagagcagggguuucccagguu

SEQ ID NO: 1008826 - RNA, 22 nt, Human
uuucauaugggcauuggcaaua

SEQ ID NO: 1008827 - RNA, 22 nt, Human
uugggcaaaguguuucuggagc

SEQ ID NO: 1008828 - RNA, 23 nt, Human
uugcauagacauccucauagauu

SEQ ID NO: 1008829 - RNA, 22 nt, Human
ccccuuccuuccucagacagcc

SEQ ID NO: 1008830 - RNA, 18 nt, Human
ugucucugaauuccagug

SEQ ID NO: 1008831 - RNA, 22 nt, Human
caguacuuuucaaccaguauga

SEQ ID NO: 1008832 - RNA, 22 nt, Human
uuuaaauuuagaagaaacacug

SEQ ID NO: 1008833 - RNA, 22 nt, Human
ugcagaaggccugacauugcac

SEQ ID NO: 1008834 - RNA, 22 nt, Human
aggagagaauguuccaggcuug

SEQ ID NO: 1008835 - RNA, 22 nt, Human
gcugggagacagacuuggaacc

SEQ ID NO: 1008836 - RNA, 22 nt, Human
caguacuuggucaaggaagcag

SEQ ID NO: 1008837 - RNA, 22 nt, Human
cagcuccccucuguggggcagu

SEQ ID NO: 1008838 - RNA, 22 nt, Human
agccuucacugggaccuuggau

SEQ ID NO: 1008839 - RNA, 22 nt, Human
aguccaaagcagaugagggcca

SEQ ID NO: 1008840 - RNA, 22 nt, Human
cuucuucacacuggucugaagc

SEQ ID NO: 1008841 - RNA, 22 nt, Human
cuggcugugcugcaggcuuugg

SEQ ID NO: 1008842 - RNA, 22 nt, Human
gccagguggcugagugacugag

SEQ ID NO: 1008843 - RNA, 21 nt, Human
uggcugccuacaugcugcagg

SEQ ID NO: 1008844 - RNA, 22 nt, Human
ggcagcugggucacaccgaucu

SEQ ID NO: 1008845 - RNA, 20 nt, Human
ucuggcaggugaacgagcug

SEQ ID NO: 1008846 - RNA, 22 nt, Human
augugacaauauuuggucuuau

SEQ ID NO: 1008847 - RNA, 22 nt, Human
accaggcaaaaccacaggagca

SEQ ID NO: 1008848 - RNA, 22 nt, Human
cuagaaaaauacuuuauuguga

SEQ ID NO: 1008849 - RNA, 22 nt, Human
caggauggucuucauuuggcuc

SEQ ID NO: 1008850 - RNA, 23 nt, Human
ccaggcaguagcuauugaaguga

SEQ ID NO: 1008851 - RNA, 22 nt, Human
gggcucuggauggagccugcag

SEQ ID NO: 1008852 - RNA, 22 nt, Human
aucuacaggauuuuacagaguu

SEQ ID NO: 1008853 - RNA, 22 nt, Human
cccuggaggagcuuagagcuug

SEQ ID NO: 1008854 - RNA, 21 nt, Human
agcugccacccuagcuucuga

SEQ ID NO: 1008855 - RNA, 22 nt, Human
gcugucaguuuuacccacagac

SEQ ID NO: 1008856 - RNA, 22 nt, Human
acagaacugcaggaggaaaagc

SEQ ID NO: 1008857 - RNA, 22 nt, Human
cuggcuccacucccugccugac

SEQ ID NO: 1008858 - RNA, 21 nt, Human
uccugccuuaguccagagcag

SEQ ID NO: 1008859 - RNA, 22 nt, Human
aagugauuucugccugcauguu

SEQ ID NO: 1008860 - RNA, 22 nt, Human
cugucaguucuuccagauagag

SEQ ID NO: 1008861 - RNA, 22 nt, Human
gggacagaaggaagugagcaca

SEQ ID NO: 1008862 - RNA, 21 nt, Human
uucucagaucgaguagugaga

SEQ ID NO: 1008863 - RNA, 22 nt, Human
auuacaauaagguuuauuugua

SEQ ID NO: 1008864 - RNA, 22 nt, Human
ugcauuauacuuuuagaaauuu

SEQ ID NO: 1008865 - RNA, 20 nt, Human
aggagccauugacugcagca

SEQ ID NO: 1008866 - RNA, 22 nt, Human
auguuucaccaguuuuauaaga

SEQ ID NO: 1008867 - RNA, 22 nt, Human
ccuccuggugggcgcuucuggc

SEQ ID NO: 1008868 - RNA, 22 nt, Human
agacccugucaguguuaggaaa

SEQ ID NO: 1008869 - RNA, 22 nt, Human
uggccugccuucgcugagcuga

SEQ ID NO: 1008870 - RNA, 22 nt, Human
cccucugccugggaccaagucc

SEQ ID NO: 1008871 - RNA, 22 nt, Human
aaacauuguaauuuuagcaugg

SEQ ID NO: 1008872 - RNA, 22 nt, Human
ugcagcuguuacggacccuguc

SEQ ID NO: 1008873 - RNA, 22 nt, Human
ugaaagauugugauucaauaug

SEQ ID NO: 1008874 - RNA, 19 nt, Human
agcuuccauauucucuagu

SEQ ID NO: 1008875 - RNA, 22 nt, Human
gaagcagccacggggagacaga

SEQ ID NO: 1008876 - RNA, 22 nt, Human
gcccaugcucucaggcgggccu

SEQ ID NO: 1008877 - RNA, 21 nt, Human
auaaaguuuuacaggaaugca

SEQ ID NO: 1008878 - RNA, 22 nt, Human
acacugaaugcuguuuagaaau

SEQ ID NO: 1008879 - RNA, 19 nt, Human
ggugaccaccuggucagug

SEQ ID NO: 1008880 - RNA, 22 nt, Human
acaaaugcaaguuuuaugucaa

SEQ ID NO: 1008881 - RNA, 22 nt, Human
uuccaggaggagguacuagagg

SEQ ID NO: 1008882 - RNA, 22 nt, Human
gcugccugccuaguuccacagu

SEQ ID NO: 1008883 - RNA, 22 nt, Human
agccacagucugaugccugaga

SEQ ID NO: 1008884 - RNA, 22 nt, Human
aagcuggagaguuaggugaaua

SEQ ID NO: 1008885 - RNA, 22 nt, Human
auucuucacaaauauauagaag

SEQ ID NO: 1008886 - RNA, 22 nt, Human
ccuggcagacagcacugaagcu

SEQ ID NO: 1008887 - RNA, 22 nt, Human
accugaggcuguuagucuaggu

SEQ ID NO: 1008888 - RNA, 22 nt, Human
agccacagggggugagggacaa

SEQ ID NO: 1008889 - RNA, 22 nt, Human
aggagcugagucagcccgacag

SEQ ID NO: 1008890 - RNA, 22 nt, Human
ugcauuaugcuacccagaagcu

SEQ ID NO: 1008891 - RNA, 22 nt, Human
uuucaaagguggaagagugaau

SEQ ID NO: 1008892 - RNA, 16 nt, Human
ccagaggccuggccuc

SEQ ID NO: 1008893 - RNA, 22 nt, Human
gagcagcucgagaaggaagcag

SEQ ID NO: 1008894 - RNA, 22 nt, Human
gggagcugguuccugcccucca

SEQ ID NO: 1008895 - RNA, 22 nt, Human
uuaugaaagacauuucuguugg

SEQ ID NO: 1008896 - RNA, 22 nt, Human
augcuguguuugagaaccuagg

SEQ ID NO: 1008897 - RNA, 21 nt, Human
uccuucaguucugcacuuucu

SEQ ID NO: 1008898 - RNA, 22 nt, Human
caguucuuaauaccaugugguu

SEQ ID NO: 1008899 - RNA, 22 nt, Human
ccugggcuggaguacagcagug

SEQ ID NO: 1008900 - RNA, 22 nt, Human
cagcauugaucccaggcugugg

SEQ ID NO: 1008901 - RNA, 22 nt, Human
gcugcaggggggucuggacuug

SEQ ID NO: 1008902 - RNA, 22 nt, Human
aagugacacauggcacuucuau

SEQ ID NO: 1008903 - RNA, 22 nt, Human
ccugccagucacuaugucaccu

SEQ ID NO: 1008904 - RNA, 19 nt, Human
auuugaaagcugugcuugc

SEQ ID NO: 1008905 - RNA, 22 nt, Human
gcagggagguuugcugaccugg

SEQ ID NO: 1008906 - RNA, 22 nt, Human
cugcccugggaguaccuguccu

SEQ ID NO: 1008907 - RNA, 22 nt, Human
cagggccucuccuccaggaacu

SEQ ID NO: 1008908 - RNA, 22 nt, Human
gaauagcuuccuuuuuuccaaa

SEQ ID NO: 1008909 - RNA, 16 nt, Human
cuuccucuucacuggc

SEQ ID NO: 1008910 - RNA, 22 nt, Human
gaaaacuauuggccuagaacaa

SEQ ID NO: 1008911 - RNA, 22 nt, Human
aagcuuuaagugucagucagcc

SEQ ID NO: 1008912 - RNA, 22 nt, Human
cacagcuucuccuugauaucgc

SEQ ID NO: 1008913 - RNA, 22 nt, Human
gugggacagcuggagggucccu

SEQ ID NO: 1008914 - RNA, 22 nt, Human
ggaggccaaggugggcggauca

SEQ ID NO: 1008915 - RNA, 22 nt, Human
aagggcugcuguagaagcagag

SEQ ID NO: 1008916 - RNA, 22 nt, Human
ucugggcucugucagcaccucu

SEQ ID NO: 1008917 - RNA, 22 nt, Human
acuggcagagacccugauggcc

SEQ ID NO: 1008918 - RNA, 22 nt, Human
agggcagaaguacagacacuua

SEQ ID NO: 1008919 - RNA, 22 nt, Human
gggcguggauggucagugcagg

SEQ ID NO: 1008920 - RNA, 22 nt, Human
gccaagagaaugugagagaaau

SEQ ID NO: 1008921 - RNA, 22 nt, Human
uuuuccagauuggacuuagucc

SEQ ID NO: 1008922 - RNA, 22 nt, Human
ucucuggaauuggcugaggcaa

SEQ ID NO: 1008923 - RNA, 22 nt, Human
uccagaccuagggcaccccagu

SEQ ID NO: 1008924 - RNA, 22 nt, Human
cucucugggcccaguuggcacc

SEQ ID NO: 1008925 - RNA, 22 nt, Human
ucccaaggcacagggcagggac

SEQ ID NO: 1008926 - RNA, 22 nt, Human
auguagaagugggcauuauaga

SEQ ID NO: 1008927 - RNA, 22 nt, Human
auucagcauaaucaguagcuug

SEQ ID NO: 1008928 - RNA, 22 nt, Human
cccuguccuuggcugugaggcu

SEQ ID NO: 1008929 - RNA, 22 nt, Human
cauggcagaaaccugagcugcu

SEQ ID NO: 1008930 - RNA, 22 nt, Human
uggaaagacauucagccgcugg

SEQ ID NO: 1008931 - RNA, 22 nt, Human
acauucuuaacaguuaaaaacu

SEQ ID NO: 1008932 - RNA, 22 nt, Human
aauugcaauuuucuuaaggucu

SEQ ID NO: 1008933 - RNA, 19 nt, Human
gggcucuggccucaguggg

SEQ ID NO: 1008934 - RNA, 22 nt, Human
uuucuucauucaccuucacccc

SEQ ID NO: 1008935 - RNA, 19 nt, Human
cccagagcauccugaacuu

SEQ ID NO: 1008936 - RNA, 19 nt, Human
ugcuagaaauucugugacu

SEQ ID NO: 1008937 - RNA, 22 nt, Human
gccacaugcaauugcagcacgu

SEQ ID NO: 1008938 - RNA, 22 nt, Human
gagcaggcauucuaguggcuga

SEQ ID NO: 1008939 - RNA, 22 nt, Human
uucaggaugcagagguuguagu

SEQ ID NO: 1008940 - RNA, 22 nt, Human
gcccuuccuuagacagcaggau

SEQ ID NO: 1008941 - RNA, 22 nt, Human
uggcucaggauaauuuucccaa

SEQ ID NO: 1008942 - RNA, 22 nt, Human
ccagagcccgggaccuggacuu

SEQ ID NO: 1008943 - RNA, 22 nt, Human
ggaaccaguggaaugauaugcu

SEQ ID NO: 1008944 - RNA, 22 nt, Human
guuugcauuuauuagucuucug

SEQ ID NO: 1008945 - RNA, 22 nt, Human
acagauuuuauuauucagguau

SEQ ID NO: 1008946 - RNA, 22 nt, Human
acagauuuauugaagcugcugc

SEQ ID NO: 1008947 - RNA, 22 nt, Human
agggacuauuuacccaucucac

SEQ ID NO: 1008948 - RNA, 22 nt, Human
cagcuuuaccaauauuuggaaa

SEQ ID NO: 1008949 - RNA, 22 nt, Human
aagcagaaguugaucuaccaua

SEQ ID NO: 1008950 - RNA, 23 nt, Human
acucacaaagcaggaucauguug

SEQ ID NO: 1008951 - RNA, 22 nt, Human
agccucugucaagcuuuucaaa

SEQ ID NO: 1008952 - RNA, 22 nt, Human
uuggagcccugaggaucuggau

SEQ ID NO: 1008953 - RNA, 22 nt, Human
gcuggaccaggugugcacaggc

SEQ ID NO: 1008954 - RNA, 21 nt, Human
aaggcagaagcauggaaugag

SEQ ID NO: 1008955 - RNA, 22 nt, Human
ugggaugggaucucgcuguguc

SEQ ID NO: 1008956 - RNA, 22 nt, Human
ccuggcaguggugaagaagagg

SEQ ID NO: 1008957 - RNA, 22 nt, Human
ucugcugcacaaauucaucucu

SEQ ID NO: 1008958 - RNA, 22 nt, Human
agugcuguuagguuaauauagu

SEQ ID NO: 1008959 - RNA, 22 nt, Human
agcugggccugagcuggaagcu

SEQ ID NO: 1008960 - RNA, 22 nt, Human
gccaggcugaggcucuggaaga

SEQ ID NO: 1008961 - RNA, 22 nt, Human
cauuuguaucugggcugcugug

SEQ ID NO: 1008962 - RNA, 22 nt, Human
ucugagccaauuucugugucca

SEQ ID NO: 1008963 - RNA, 22 nt, Human
augggaggguggaaaggcucug

SEQ ID NO: 1008964 - RNA, 22 nt, Human
cagcugagcucccaggccauca

SEQ ID NO: 1008965 - RNA, 19 nt, Human
uuucuuaggccuuuggccu

SEQ ID NO: 1008966 - RNA, 22 nt, Human
aagggcuccacuugaaucacac

SEQ ID NO: 1008967 - RNA, 22 nt, Human
ugggagcagcagggagaugcgg

SEQ ID NO: 1008968 - RNA, 22 nt, Human
gugaggugggcuggccagagac

SEQ ID NO: 1008969 - RNA, 22 nt, Human
caggaagagaacauggaggcug

SEQ ID NO: 1008970 - RNA, 21 nt, Human
gcaaguacuaucaucauuauc

SEQ ID NO: 1008971 - RNA, 22 nt, Human
aggcugccucgugagcucgcug

SEQ ID NO: 1008972 - RNA, 22 nt, Human
cugggcugagccugggcugugu

SEQ ID NO: 1008973 - RNA, 22 nt, Human
ggcaggcaggagcgugcuuggg

SEQ ID NO: 1008974 - RNA, 21 nt, Human
auccuugaucagaagagugcu

SEQ ID NO: 1008975 - RNA, 22 nt, Human
gcucaggauuucauccaugugu

SEQ ID NO: 1008976 - RNA, 22 nt, Human
agaugcuucaguguuuaauuua

SEQ ID NO: 1008977 - RNA, 22 nt, Human
agggcugcuccuccuucaggcc

SEQ ID NO: 1008978 - RNA, 22 nt, Human
uggcucuguucgccaucaggag

SEQ ID NO: 1008979 - RNA, 22 nt, Human
ccuugggacagccagcuucaga

SEQ ID NO: 1008980 - RNA, 22 nt, Human
uuaugcuaagugcaacaagcca

SEQ ID NO: 1008981 - RNA, 22 nt, Human
uuucaugauuaacuuagugaau

SEQ ID NO: 1008982 - RNA, 22 nt, Human
ucauggcacuuagcacaguccu

SEQ ID NO: 1008983 - RNA, 22 nt, Human
aacauauaaacucuuaaguuca

SEQ ID NO: 1008984 - RNA, 22 nt, Human
cugucccuucauuauucacuac

SEQ ID NO: 1008985 - RNA, 22 nt, Human
uauauagaaaagcagauguugg

SEQ ID NO: 1008986 - RNA, 22 nt, Human
ugugaaggcagcagcucugucc

SEQ ID NO: 1008987 - RNA, 22 nt, Human
cccaggcacaccccgaacggaa

SEQ ID NO: 1008988 - RNA, 22 nt, Human
ugggcuacucugggagccuaac

SEQ ID NO: 1008989 - RNA, 22 nt, Human
cagaaauucccauuucagauuc

SEQ ID NO: 1008990 - RNA, 22 nt, Human
agcagggccucuggcacugguc

SEQ ID NO: 1008991 - RNA, 22 nt, Human
ucccaaagcuacucuucugacu

SEQ ID NO: 1008992 - RNA, 22 nt, Human
gagcucugggaaacaaagugua

SEQ ID NO: 1008993 - RNA, 22 nt, Human
uugcuuccaguccaagucuguu

SEQ ID NO: 1008994 - RNA, 22 nt, Human
ucugaaaguaucuggaucuuuu

SEQ ID NO: 1008995 - RNA, 22 nt, Human
ccugucuggccaccagggcgau

SEQ ID NO: 1008996 - RNA, 22 nt, Human
uucaagauggccccagugagcc

SEQ ID NO: 1008997 - RNA, 22 nt, Human
uugugugguagcuucauugaac

SEQ ID NO: 1008998 - RNA, 20 nt, Human
gaggaaaagcugccaggccu

SEQ ID NO: 1008999 - RNA, 22 nt, Human
ggucucagcuggaguccuuggu

SEQ ID NO: 1009000 - RNA, 18 nt, Human
gcaggagauggguggggu

SEQ ID NO: 1009001 - RNA, 22 nt, Human
ccugggcauaaaucacuccaag

SEQ ID NO: 1009002 - RNA, 22 nt, Human
cauggcaggugugggguuuuau

SEQ ID NO: 1009003 - RNA, 20 nt, Human
cccugagacaaaggaggggc

SEQ ID NO: 1009004 - RNA, 22 nt, Human
ccuccagguguuacauaugacu

SEQ ID NO: 1009005 - RNA, 22 nt, Human
aagggcaggugggcauuucugg

SEQ ID NO: 1009006 - RNA, 22 nt, Human
aacaugaaguuuucuauaguga

SEQ ID NO: 1009007 - RNA, 22 nt, Human
aaggcagccucugccagccggg

SEQ ID NO: 1009008 - RNA, 23 nt, Human
aggaggaaaaguuaucugcugag

SEQ ID NO: 1009009 - RNA, 22 nt, Human
aaggcagagggcuggaucagag

SEQ ID NO: 1009010 - RNA, 22 nt, Human
ccuugcguuuuacagcuucuag

SEQ ID NO: 1009011 - RNA, 21 nt, Human
ugcuucucuagaucaacuacu

SEQ ID NO: 1009012 - RNA, 22 nt, Human
ccugggugacccgugagcgucc

SEQ ID NO: 1009013 - RNA, 21 nt, Human
aggaaguggccagauugggaa

SEQ ID NO: 1009014 - RNA, 20 nt, Human
gcagagcuguucugugggga

SEQ ID NO: 1009015 - RNA, 22 nt, Human
gguucccggaucuccgaguccc

SEQ ID NO: 1009016 - RNA, 22 nt, Human
ucauugcaagcucauuuaucug

SEQ ID NO: 1009017 - RNA, 17 nt, Human
cccaugagcccacuccc

SEQ ID NO: 1009018 - RNA, 22 nt, Human
agauuuccaucuuuuucaugug

SEQ ID NO: 1009019 - RNA, 22 nt, Human
gcccagcacauugcugaggacc

SEQ ID NO: 1009020 - RNA, 22 nt, Human
uauucacaugaaaacaaauuuu

SEQ ID NO: 1009021 - RNA, 22 nt, Human
uuugaauagaggccccucagaa

SEQ ID NO: 1009022 - RNA, 22 nt, Human
aauucugugcaggcagagcuau

SEQ ID NO: 1009023 - RNA, 22 nt, Human
cagcaauaaugucuacaaaucu

SEQ ID NO: 1009024 - RNA, 22 nt, Human
ccucccucuuucagucccacag

SEQ ID NO: 1009025 - RNA, 22 nt, Human
cuucagaacuauaaaaaguacu

SEQ ID NO: 1009026 - RNA, 22 nt, Human
ccauuguaaauucuguggaagu

SEQ ID NO: 1009027 - RNA, 22 nt, Human
cugccugugccaccgccucauu

SEQ ID NO: 1009028 - RNA, 22 nt, Human
guggauggauuuugaggaaugg

SEQ ID NO: 1009029 - RNA, 22 nt, Human
ucucagagagcuguguuuuccu

SEQ ID NO: 1009030 - RNA, 18 nt, Human
gggcauggaugcagcauc

SEQ ID NO: 1009031 - RNA, 22 nt, Human
acauacuuaugcuaaaaauaua

SEQ ID NO: 1009032 - RNA, 22 nt, Human
cugccgagugggucaugaggca

SEQ ID NO: 1009033 - RNA, 22 nt, Human
cagauuuaccuaacuccaaguu

SEQ ID NO: 1009034 - RNA, 22 nt, Human
uacaugcuccacuuucuccugu

SEQ ID NO: 1009035 - RNA, 21 nt, Human
auuauuauuucuguguccagc

SEQ ID NO: 1009036 - RNA, 18 nt, Human
acauuucucucugcguga

SEQ ID NO: 1009037 - RNA, 22 nt, Human
ucauuuaauagcuuuugucuuu

SEQ ID NO: 1009038 - RNA, 22 nt, Human
agccuggaggccaggagacagu

SEQ ID NO: 1009039 - RNA, 22 nt, Human
ggcugagccuggagcaucuggu

SEQ ID NO: 1009040 - RNA, 22 nt, Human
cagaagaggacuggguagcuca

SEQ ID NO: 1009041 - RNA, 22 nt, Human
aucaguuuggaacauucaggcc

SEQ ID NO: 1009042 - RNA, 22 nt, Human
ucagggcacauucugcaguggc

SEQ ID NO: 1009043 - RNA, 22 nt, Human
ucugggagguacugggaggugu

SEQ ID NO: 1009044 - RNA, 22 nt, Human
ggcugccuucagacuccagcuu

SEQ ID NO: 1009045 - RNA, 18 nt, Human
cugaaggauccaggugua

SEQ ID NO: 1009046 - RNA, 22 nt, Human
gaggcagagugcaccccaggag

SEQ ID NO: 1009047 - RNA, 22 nt, Human
gcucccagcuggagccucaaca

SEQ ID NO: 1009048 - RNA, 22 nt, Human
ucccaggacuuccaguuggagg

SEQ ID NO: 1009049 - RNA, 22 nt, Human
cacaagagagugcgcguugcaa

SEQ ID NO: 1009050 - RNA, 22 nt, Human
agcagugggggaguguuaguuu

SEQ ID NO: 1009051 - RNA, 22 nt, Human
cgcagcagccccgugguaggug

SEQ ID NO: 1009052 - RNA, 19 nt, Human
guccaguguuuuccaguca

SEQ ID NO: 1009053 - RNA, 22 nt, Human
cugagccaugagccugcgccca

SEQ ID NO: 1009054 - RNA, 22 nt, Human
aggcccugcaggaguggggaca

SEQ ID NO: 1009055 - RNA, 22 nt, Human
agcccagcaaagggagguucag

SEQ ID NO: 1009056 - RNA, 22 nt, Human
cuugcuuuguccagaaauucag

SEQ ID NO: 1009057 - RNA, 22 nt, Human
cuggcuccaucacugggugaug

SEQ ID NO: 1009058 - RNA, 22 nt, Human
ccagcucugccaagcgucagcu

SEQ ID NO: 1009059 - RNA, 22 nt, Human
cucagaguucuccugggaggug

SEQ ID NO: 1009060 - RNA, 22 nt, Human
aggccuggccccaguugcuagg

SEQ ID NO: 1009061 - RNA, 22 nt, Human
cuuauggcuguagucuggaagu

SEQ ID NO: 1009062 - RNA, 21 nt, Human
aaacugaccuugccugagaca

SEQ ID NO: 1009063 - RNA, 22 nt, Human
ggccuuggugccauggccaguu

SEQ ID NO: 1009064 - RNA, 19 nt, Human
augucccaccgccccugag

SEQ ID NO: 1009065 - RNA, 22 nt, Human
cagcuccugaggacugcuggga

SEQ ID NO: 1009066 - RNA, 22 nt, Human
ucaguuuuuacggucacaggga

SEQ ID NO: 1009067 - RNA, 22 nt, Human
cauuuauugguuaggccagcag

SEQ ID NO: 1009068 - RNA, 22 nt, Human
aaucaguuguucacucugaaaa

SEQ ID NO: 1009069 - RNA, 20 nt, Human
gugggcagaugugugcaugg

SEQ ID NO: 1009070 - RNA, 19 nt, Human
aauacaguguuauagaauu

SEQ ID NO: 1009071 - RNA, 22 nt, Human
ugcagcucauugguguccuggu

SEQ ID NO: 1009072 - RNA, 22 nt, Human
gacaggcuuugagucccagaac

SEQ ID NO: 1009073 - RNA, 22 nt, Human
cuugccuguggcuaguuggcuc

SEQ ID NO: 1009074 - RNA, 18 nt, Human
agagaugguguagaguuu

SEQ ID NO: 1009075 - RNA, 21 nt, Human
acagaguaguugaaacagaga

SEQ ID NO: 1009076 - RNA, 22 nt, Human
ggccugaggcgucccagcugug

SEQ ID NO: 1009077 - RNA, 22 nt, Human
gggcagagaaauggacaguugg

SEQ ID NO: 1009078 - RNA, 19 nt, Human
cuggccaggccaggggccc

SEQ ID NO: 1009079 - RNA, 19 nt, Human
cagagccucagagcuagaa

SEQ ID NO: 1009080 - RNA, 20 nt, Human
aaaaacaguaaugcugaaga

SEQ ID NO: 1009081 - RNA, 22 nt, Human
uugaaaacuuucuagaccaaga

SEQ ID NO: 1009082 - RNA, 22 nt, Human
ugcugaugcuguucuguuagga

SEQ ID NO: 1009083 - RNA, 22 nt, Human
gagagaagaauguuccgaggcc

SEQ ID NO: 1009084 - RNA, 22 nt, Human
agcugacugaugaagaggccuu

SEQ ID NO: 1009085 - RNA, 22 nt, Human
ccagagaggcaaaacuccuucc

SEQ ID NO: 1009086 - RNA, 22 nt, Human
cuuucacacacauacauuugga

SEQ ID NO: 1009087 - RNA, 22 nt, Human
aguggacucuucccagugcuug

SEQ ID NO: 1009088 - RNA, 22 nt, Human
ccagccaguccagcauuggugu

SEQ ID NO: 1009089 - RNA, 22 nt, Human
aagaugcagcuuccacuuuugc

SEQ ID NO: 1009090 - RNA, 22 nt, Human
aaaggccaugguuggaguguuu

SEQ ID NO: 1009091 - RNA, 22 nt, Human
cucacuggcaagacuacaggug

SEQ ID NO: 1009092 - RNA, 22 nt, Human
ucaucacuguaucauugauaga

SEQ ID NO: 1009093 - RNA, 22 nt, Human
ucuggccugggccugccggugc

SEQ ID NO: 1009094 - RNA, 22 nt, Human
cugggcagcuaccaccacugcu

SEQ ID NO: 1009095 - RNA, 22 nt, Human
aaaucuguaagcaauugcucag

SEQ ID NO: 1009096 - RNA, 22 nt, Human
uccagaggcuccaaagggagau

SEQ ID NO: 1009097 - RNA, 22 nt, Human
cacauaauaaauguuccugaug

SEQ ID NO: 1009098 - RNA, 22 nt, Human
aggugcuuggcucgugcacaca

SEQ ID NO: 1009099 - RNA, 22 nt, Human
agaguguuauuugcucuguauu

SEQ ID NO: 1009100 - RNA, 22 nt, Human
cauugucacccaaagcucauag

SEQ ID NO: 1009101 - RNA, 22 nt, Human
gcagggaccucacuacccccag

SEQ ID NO: 1009102 - RNA, 19 nt, Human
gcaggcaguggcauucgga

SEQ ID NO: 1009103 - RNA, 22 nt, Human
ugcuuccuugagcucuccaauc

SEQ ID NO: 1009104 - RNA, 22 nt, Human
cagcaguguacaaggugucaga

SEQ ID NO: 1009105 - RNA, 21 nt, Human
uucauaaaccauucucaugca

SEQ ID NO: 1009106 - RNA, 22 nt, Human
aggcacaggaaugucauccagu

SEQ ID NO: 1009107 - RNA, 22 nt, Human
acucugaggcaggucagggcag

SEQ ID NO: 1009108 - RNA, 22 nt, Human
aaaugcaggaaauuaugcuuuu

SEQ ID NO: 1009109 - RNA, 22 nt, Human
uuuauucaucaucuguucauau

SEQ ID NO: 1009110 - RNA, 22 nt, Human
uucauucuuugaaucugaggua

SEQ ID NO: 1009111 - RNA, 22 nt, Human
aaucauucuuauuucacagcaa

SEQ ID NO: 1009112 - RNA, 22 nt, Human
uacacacagaggccaugggauu

SEQ ID NO: 1009113 - RNA, 22 nt, Human
aaugauugcaaacauugagaac

SEQ ID NO: 1009114 - RNA, 22 nt, Human
uuagaaacccagacucuuaggu

SEQ ID NO: 1009115 - RNA, 22 nt, Human
uuucccagagguaugaauaagu

SEQ ID NO: 1009116 - RNA, 23 nt, Human
cucccuggaguuucuggaagaug

SEQ ID NO: 1009117 - RNA, 22 nt, Human
cagucccagacccagaaggugg

SEQ ID NO: 1009118 - RNA, 22 nt, Human
cucaggaugaaagucaugguga

SEQ ID NO: 1009119 - RNA, 22 nt, Human
uugacaauguccuuugaauuuc

SEQ ID NO: 1009120 - RNA, 22 nt, Human
cagcagcuuugccaagucagcc

SEQ ID NO: 1009121 - RNA, 22 nt, Human
cacaaaugugcagaaaugugag

SEQ ID NO: 1009122 - RNA, 22 nt, Human
caagaacauugugaucacuuca

SEQ ID NO: 1009123 - RNA, 22 nt, Human
caguguacuuggaauguaacag

SEQ ID NO: 1009124 - RNA, 22 nt, Human
cuuacagagaagaaaauguagu

SEQ ID NO: 1009125 - RNA, 22 nt, Human
agaacagaugugggcagaccug

SEQ ID NO: 1009126 - RNA, 21 nt, Human
aagagcuggaucaaggauaag

SEQ ID NO: 1009127 - RNA, 22 nt, Human
augaggcaaucaugguccaguu

SEQ ID NO: 1009128 - RNA, 22 nt, Human
ucaaaugcuguauuguaguaau

SEQ ID NO: 1009129 - RNA, 22 nt, Human
gcagcuggugcaaaugucacuc

SEQ ID NO: 1009130 - RNA, 22 nt, Human
uuucuguuaggcaucauuuuaa

SEQ ID NO: 1009131 - RNA, 22 nt, Human
cccaggcuggagugcaauggca

SEQ ID NO: 1009132 - RNA, 22 nt, Human
ugcagggaauccagucuagggu

SEQ ID NO: 1009133 - RNA, 22 nt, Human
ugagccugcaauaagcacagcc

SEQ ID NO: 1009134 - RNA, 22 nt, Human
ucuuucagccacuuaccugucu

SEQ ID NO: 1009135 - RNA, 22 nt, Human
gaaccaaguaggauacaaggag

SEQ ID NO: 1009136 - RNA, 22 nt, Human
cagagcagaaaccugggugauu

SEQ ID NO: 1009137 - RNA, 22 nt, Human
uaugaacuuuugaugugacaug

SEQ ID NO: 1009138 - RNA, 22 nt, Human
uucagagagaccaaguggcgug

SEQ ID NO: 1009139 - RNA, 22 nt, Human
gcuccacuugcagcuaggcuug

SEQ ID NO: 1009140 - RNA, 22 nt, Human
uauguacuaacuuucauucuag

SEQ ID NO: 1009141 - RNA, 22 nt, Human
cuucucaaaguugugaaucagg

SEQ ID NO: 1009142 - RNA, 22 nt, Human
ugagccuggcggaagcagcgug

SEQ ID NO: 1009143 - RNA, 22 nt, Human
auaucaguaucuauguauuugu

SEQ ID NO: 1009144 - RNA, 22 nt, Human
gcugagcugggacaguccuggg

SEQ ID NO: 1009145 - RNA, 20 nt, Human
gaagcagcuucauguagaca

SEQ ID NO: 1009146 - RNA, 22 nt, Human
uucaggauucuuucagacuggg

SEQ ID NO: 1009147 - RNA, 22 nt, Human
uuucaaugacacaaaagagaaa

SEQ ID NO: 1009148 - RNA, 22 nt, Human
gggccacauugaagggugggua

SEQ ID NO: 1009149 - RNA, 22 nt, Human
gcuggugccuuguuguuguuac

SEQ ID NO: 1009150 - RNA, 22 nt, Human
uagggacaaagagcugaggccu

SEQ ID NO: 1009151 - RNA, 22 nt, Human
auggucuguuaggagcuacuuu

SEQ ID NO: 1009152 - RNA, 22 nt, Human
cuggagcugucuucacaggccu

SEQ ID NO: 1009153 - RNA, 22 nt, Human
gcuguccagagcaugggagcaa

SEQ ID NO: 1009154 - RNA, 22 nt, Human
caaaugauagagccgauuauca

SEQ ID NO: 1009155 - RNA, 21 nt, Human
uuucuuaggcucuaaaaugac

SEQ ID NO: 1009156 - RNA, 22 nt, Human
agucucugcaugaugcagcaca

SEQ ID NO: 1009157 - RNA, 22 nt, Human
ccugggugaaaucucuccugca

SEQ ID NO: 1009158 - RNA, 22 nt, Human
aggagcugcuuaaaugguuggu

SEQ ID NO: 1009159 - RNA, 23 nt, Human
cccuggaguaaauucuuggaagg

SEQ ID NO: 1009160 - RNA, 22 nt, Human
accugaggccuccccagcagac

SEQ ID NO: 1009161 - RNA, 20 nt, Human
ugggcagcacugcuggcugg

SEQ ID NO: 1009162 - RNA, 22 nt, Human
aaccauuugcaguuacugagac

SEQ ID NO: 1009163 - RNA, 22 nt, Human
ucaaaccaccuuguuacugggg

SEQ ID NO: 1009164 - RNA, 22 nt, Human
uuugaaagacagaauauuuuug

SEQ ID NO: 1009165 - RNA, 22 nt, Human
gcagcuggggccacacuuaggc

SEQ ID NO: 1009166 - RNA, 21 nt, Human
ccaggcuccugaggcugguca

SEQ ID NO: 1009167 - RNA, 20 nt, Human
ugcugcaguuucaugggacu

SEQ ID NO: 1009168 - RNA, 22 nt, Human
uugcagcugcaguaaauguuca

SEQ ID NO: 1009169 - RNA, 22 nt, Human
gcagcccagagcgcaggacccc

SEQ ID NO: 1009170 - RNA, 22 nt, Human
auuaagggccaauccuccagcc

SEQ ID NO: 1009171 - RNA, 22 nt, Human
cagcccuggccccagguggucu

SEQ ID NO: 1009172 - RNA, 22 nt, Human
auuaaauuagcaaacugugaaa

SEQ ID NO: 1009173 - RNA, 22 nt, Human
ucagcugagcuccagcucauag

SEQ ID NO: 1009174 - RNA, 22 nt, Human
cugcucugaguauuaacggagg

SEQ ID NO: 1009175 - RNA, 22 nt, Human
aggagucacucagggcuucauc

SEQ ID NO: 1009176 - RNA, 21 nt, Human
agcagcugggcaacauggagg

SEQ ID NO: 1009177 - RNA, 22 nt, Human
agcagcaacuuauuuuucuuau

SEQ ID NO: 1009178 - RNA, 22 nt, Human
uuuuccuucuagagcagauuuc

SEQ ID NO: 1009179 - RNA, 18 nt, Human
cugccuguugcugagagg

SEQ ID NO: 1009180 - RNA, 22 nt, Human
ugccaggcccagcuccagagcu

SEQ ID NO: 1009181 - RNA, 22 nt, Human
ucaguuuuaagguuugagaauu

SEQ ID NO: 1009182 - RNA, 22 nt, Human
cugaagccacgauagcuuccua

SEQ ID NO: 1009183 - RNA, 22 nt, Human
uacacauguuuggcaaguaugu

SEQ ID NO: 1009184 - RNA, 23 nt, Human
aaaugcagggucgcagguuacag

SEQ ID NO: 1009185 - RNA, 22 nt, Human
cuacauggagaagaaaauucuu

SEQ ID NO: 1009186 - RNA, 23 nt, Human
aaauaugucugagggcaaagaau

SEQ ID NO: 1009187 - RNA, 22 nt, Human
gagaaagcuucuuucccacagg

SEQ ID NO: 1009188 - RNA, 22 nt, Human
ccaggcccugcuccucacacca

SEQ ID NO: 1009189 - RNA, 22 nt, Human
uucucuuuugugaugugagaug

SEQ ID NO: 1009190 - RNA, 22 nt, Human
cagagagaggccacugcuauua

SEQ ID NO: 1009191 - RNA, 22 nt, Human
guggguggaggcgucgagggca

SEQ ID NO: 1009192 - RNA, 22 nt, Human
auguaucaacaaauuguacagu

SEQ ID NO: 1009193 - RNA, 22 nt, Human
cauuuguauagugcuuagacca

SEQ ID NO: 1009194 - RNA, 22 nt, Human
agcagagccaggucucucugua

SEQ ID NO: 1009195 - RNA, 22 nt, Human
auauaaguuaguggucauguuu

SEQ ID NO: 1009196 - RNA, 21 nt, Human
uggcagggguaguaguacagc

SEQ ID NO: 1009197 - RNA, 22 nt, Human
acccagagccagggucaggagc

SEQ ID NO: 1009198 - RNA, 22 nt, Human
ugggggugacuaucucgggaau

SEQ ID NO: 1009199 - RNA, 22 nt, Human
gcuucauuacugacagucugug

SEQ ID NO: 1009200 - RNA, 22 nt, Human
ggcugccaggagaagcucagug

SEQ ID NO: 1009201 - RNA, 17 nt, Human
agguggcugcugcgccu

SEQ ID NO: 1009202 - RNA, 22 nt, Human
ugaaaugacaaagguuuuucuu

SEQ ID NO: 1009203 - RNA, 22 nt, Human
ggcacgugccuaaggagcaggc

SEQ ID NO: 1009204 - RNA, 23 nt, Human
gggagaauaugaggaugauggug

SEQ ID NO: 1009205 - RNA, 22 nt, Human
agcagagcuauucuugugcaau

SEQ ID NO: 1009206 - RNA, 22 nt, Human
uuaaaguucauuaaaugagcca

SEQ ID NO: 1009207 - RNA, 22 nt, Human
cuggcucagugccuucagaagu

SEQ ID NO: 1009208 - RNA, 22 nt, Human
cugggagcucagcccuggggug

SEQ ID NO: 1009209 - RNA, 22 nt, Human
aggcucagagaugaguaagcac

SEQ ID NO: 1009210 - RNA, 17 nt, Human
uggacccuugggccucc

SEQ ID NO: 1009211 - RNA, 22 nt, Human
ccagcgcuucccaucagggagg

SEQ ID NO: 1009212 - RNA, 22 nt, Human
ugcagggaagcaaggguggcuc

SEQ ID NO: 1009213 - RNA, 22 nt, Human
cagccccucccucaggcaggug

SEQ ID NO: 1009214 - RNA, 22 nt, Human
uccuucagcucucuauuuagau

SEQ ID NO: 1009215 - RNA, 22 nt, Human
cuuacauugugugcaugagggg

SEQ ID NO: 1009216 - RNA, 22 nt, Human
ggucagguuuuuaggagugacc

SEQ ID NO: 1009217 - RNA, 22 nt, Human
uuaacagagaacauagaaguag

SEQ ID NO: 1009218 - RNA, 22 nt, Human
ugcaagaggaauucuagaagca

SEQ ID NO: 1009219 - RNA, 22 nt, Human
uuugauuuacuggauauucuca

SEQ ID NO: 1009220 - RNA, 22 nt, Human
gcagaggcauuucugacgcugc

SEQ ID NO: 1009221 - RNA, 22 nt, Human
cuuauuagugucugucugaguu

SEQ ID NO: 1009222 - RNA, 22 nt, Human
ucagaaauguaagcugaugacu

SEQ ID NO: 1009223 - RNA, 22 nt, Human
uaacagaauccuguuauugcca

SEQ ID NO: 1009224 - RNA, 22 nt, Human
aggaccuguguuuuccuugaau

SEQ ID NO: 1009225 - RNA, 22 nt, Human
cauuguuaauugguaucuuaca

SEQ ID NO: 1009226 - RNA, 22 nt, Human
guuuuauaugucucugcugaca

SEQ ID NO: 1009227 - RNA, 22 nt, Human
cagacuggccacaucugcacug

SEQ ID NO: 1009228 - RNA, 22 nt, Human
auauaaaguguuuagaaagcug

SEQ ID NO: 1009229 - RNA, 22 nt, Human
cucuuaaagcuuccaguuucaa

SEQ ID NO: 1009230 - RNA, 22 nt, Human
gagcuuggugaugccuccuggu

SEQ ID NO: 1009231 - RNA, 21 nt, Human
gugcucugggcagcagagggc

SEQ ID NO: 1009232 - RNA, 22 nt, Human
ucagugugaguaccaugcucag

SEQ ID NO: 1009233 - RNA, 21 nt, Human
ucccacucuaaauggacugaa

SEQ ID NO: 1009234 - RNA, 22 nt, Human
aggcaguuuaggcagcgauuua

SEQ ID NO: 1009235 - RNA, 21 nt, Human
ggcugcugggagagcugcgug

SEQ ID NO: 1009236 - RNA, 22 nt, Human
gcugcagccaaauucauuguca

SEQ ID NO: 1009237 - RNA, 22 nt, Human
ccaugagccaggcugaggaagc

SEQ ID NO: 1009238 - RNA, 22 nt, Human
ugccuacauuccuugcuuaugg

SEQ ID NO: 1009239 - RNA, 22 nt, Human
cagcugccacaggacuuucuga

SEQ ID NO: 1009240 - RNA, 22 nt, Human
uuugcauugcauuaaguauucu

SEQ ID NO: 1009241 - RNA, 22 nt, Human
uaaggccauuauggugggcccg

SEQ ID NO: 1009242 - RNA, 22 nt, Human
ugcuucaggagaugucaccaug

SEQ ID NO: 1009243 - RNA, 22 nt, Human
uuauucuuuaaacauauauguu

SEQ ID NO: 1009244 - RNA, 22 nt, Human
aucaggaucugcaucauaagaa

SEQ ID NO: 1009245 - RNA, 22 nt, Human
gaggcccugguaggucagagug

SEQ ID NO: 1009246 - RNA, 22 nt, Human
ucccagcauaacaaacugcccg

SEQ ID NO: 1009247 - RNA, 22 nt, Human
cugccuccugccgugcagcuuc

SEQ ID NO: 1009248 - RNA, 23 nt, Human
aggugccaacugagagcugagag

SEQ ID NO: 1009249 - RNA, 22 nt, Human
aggcuggguaccugucauaugc

SEQ ID NO: 1009250 - RNA, 18 nt, Human
ugcuggcaacuacuauug

SEQ ID NO: 1009251 - RNA, 19 nt, Human
ucugcuggcagaauucccu

SEQ ID NO: 1009252 - RNA, 22 nt, Human
uauugaaauccauuacguucuu

SEQ ID NO: 1009253 - RNA, 22 nt, Human
gaagccccaaacccucgccauc

SEQ ID NO: 1009254 - RNA, 22 nt, Human
agcauuuaauuacaguuuaauu

SEQ ID NO: 1009255 - RNA, 22 nt, Human
ucuggcuccguguccgcuccca

SEQ ID NO: 1009256 - RNA, 22 nt, Human
caagggaccugagauggucucu

SEQ ID NO: 1009257 - RNA, 22 nt, Human
aaguaugugauacauguuaauu

SEQ ID NO: 1009258 - RNA, 22 nt, Human
auauuagguuggugcaaaagua

SEQ ID NO: 1009259 - RNA, 22 nt, Human
agagcucaagacgcucacagua

SEQ ID NO: 1009260 - RNA, 22 nt, Human
ucuggaguccagauccauuugg

SEQ ID NO: 1009261 - RNA, 22 nt, Human
caagaacaguuugccaaauugg

SEQ ID NO: 1009262 - RNA, 22 nt, Human
gucugagaaucuugcauaucau

SEQ ID NO: 1009263 - RNA, 22 nt, Human
ucuuugcagaauuuaacuuugc

SEQ ID NO: 1009264 - RNA, 22 nt, Human
ggugaggcccagugaucugugu

SEQ ID NO: 1009265 - RNA, 22 nt, Human
ccagcagcgauagggugagugc

SEQ ID NO: 1009266 - RNA, 22 nt, Human
acaacauuauacauagaaagcu

SEQ ID NO: 1009267 - RNA, 22 nt, Human
agggccuggcgcguggccgccg

SEQ ID NO: 1009268 - RNA, 22 nt, Human
acacuuuguuguggcauauacg

SEQ ID NO: 1009269 - RNA, 22 nt, Human
uccucugccaaagggaguugcc

SEQ ID NO: 1009270 - RNA, 22 nt, Human
augcuguguggucaaguuaauu

SEQ ID NO: 1009271 - RNA, 22 nt, Human
agagagcccgggccagggcaca

SEQ ID NO: 1009272 - RNA, 22 nt, Human
caugcacuuaccugaaauucaa

SEQ ID NO: 1009273 - RNA, 22 nt, Human
agacaggagagggaacugccgg

SEQ ID NO: 1009274 - RNA, 22 nt, Human
caggggcuguuugccucaggcc

SEQ ID NO: 1009275 - RNA, 18 nt, Human
gccaggcaggguggggaa

SEQ ID NO: 1009276 - RNA, 22 nt, Human
agccacgucccugucaggguca

SEQ ID NO: 1009277 - RNA, 22 nt, Human
aucaggaucugggagccugaaa

SEQ ID NO: 1009278 - RNA, 22 nt, Human
gccugagauucccggagccgug

SEQ ID NO: 1009279 - RNA, 18 nt, Human
auggucucauacugggag

SEQ ID NO: 1009280 - RNA, 22 nt, Human
cagcaggcugcgauugcucauu

SEQ ID NO: 1009281 - RNA, 22 nt, Human
caggauccuggcugcauggacg

SEQ ID NO: 1009282 - RNA, 20 nt, Human
gaaaugugaccucuucugug

SEQ ID NO: 1009283 - RNA, 22 nt, Human
aggcaaaauuacaaaguuauua

SEQ ID NO: 1009284 - RNA, 23 nt, Human
uggcucugugucacauacaggau

SEQ ID NO: 1009285 - RNA, 22 nt, Human
gcagccugaugaucuggguugu

SEQ ID NO: 1009286 - RNA, 22 nt, Human
gggcuggucuggcuuagucagg

SEQ ID NO: 1009287 - RNA, 22 nt, Human
aagacccacaaggcugaauguu

SEQ ID NO: 1009288 - RNA, 20 nt, Human
ucauuacagugcuaagaugu

SEQ ID NO: 1009289 - RNA, 22 nt, Human
ugugccuuaugaauucuuucug

SEQ ID NO: 1009290 - RNA, 22 nt, Human
ucuggcuccacucugugcaugc

SEQ ID NO: 1009291 - RNA, 22 nt, Human
caauaauauccugugcuguuug

SEQ ID NO: 1009292 - RNA, 22 nt, Human
agaauaugaugguuggagaauu

SEQ ID NO: 1009293 - RNA, 23 nt, Human
uauggcaugguacuuccagcaga

SEQ ID NO: 1009294 - RNA, 22 nt, Human
cauuuguaggaugcuucuuguu

SEQ ID NO: 1009295 - RNA, 22 nt, Human
uacauuuauaaggcuucucugu

SEQ ID NO: 1009296 - RNA, 20 nt, Human
gcucccagccugcagucccc

SEQ ID NO: 1009297 - RNA, 22 nt, Human
uaagauaaguggguugagaugg

SEQ ID NO: 1009298 - RNA, 22 nt, Human
cuggggccacaacggcgcacgc

SEQ ID NO: 1009299 - RNA, 20 nt, Human
cuuggccuacuuagcuuugu

SEQ ID NO: 1009300 - RNA, 22 nt, Human
ucagaacagaagcuggcuauaa

SEQ ID NO: 1009301 - RNA, 22 nt, Human
ugaaccaggaggcagccagcac

SEQ ID NO: 1009302 - RNA, 22 nt, Human
agaggcaggagguugacuugag

SEQ ID NO: 1009303 - RNA, 22 nt, Human
agggcacagccuaaagccuaug

SEQ ID NO: 1009304 - RNA, 22 nt, Human
ucaggggacagccagcuggagg

SEQ ID NO: 1009305 - RNA, 22 nt, Human
ugcuuuaucaaagcuauaguga

SEQ ID NO: 1009306 - RNA, 22 nt, Human
gcacugcagccucagauggugg

SEQ ID NO: 1009307 - RNA, 22 nt, Human
agccaacuaggagauuaaggua

SEQ ID NO: 1009308 - RNA, 22 nt, Human
aauagguagccagauauauaaa

SEQ ID NO: 1009309 - RNA, 22 nt, Human
agggagguaggagcuucuagcu

SEQ ID NO: 1009310 - RNA, 22 nt, Human
uuagauauguuuuugcuaaugc

SEQ ID NO: 1009311 - RNA, 22 nt, Human
agccagaguugaaugugagucu

SEQ ID NO: 1009312 - RNA, 19 nt, Human
cccagcuugaccaccugcu

SEQ ID NO: 1009313 - RNA, 22 nt, Human
uuuuauuaguggcuagaugggg

SEQ ID NO: 1009314 - RNA, 22 nt, Human
acagagcuucccagccugagca

SEQ ID NO: 1009315 - RNA, 19 nt, Human
agacagagcucaguggguu

SEQ ID NO: 1009316 - RNA, 22 nt, Human
cuagagggauguuaggauagca

SEQ ID NO: 1009317 - RNA, 22 nt, Human
uuuccucuuauacaguguuuau

SEQ ID NO: 1009318 - RNA, 22 nt, Human
cagccagggucaggcagcuucu

SEQ ID NO: 1009319 - RNA, 22 nt, Human
ggggacccucaggacugcgucu

SEQ ID NO: 1009320 - RNA, 23 nt, Human
aggaggccugaaacugaggcuga

SEQ ID NO: 1009321 - RNA, 22 nt, Human
ccucugaggucauggacuuggc

SEQ ID NO: 1009322 - RNA, 22 nt, Human
caggugcccagcuccugcugug

SEQ ID NO: 1009323 - RNA, 22 nt, Human
uucuuuccacagaggggaugau

SEQ ID NO: 1009324 - RNA, 20 nt, Human
gccugagcuccgccuccugu

SEQ ID NO: 1009325 - RNA, 17 nt, Human
uuagcaaaauagcacuu

SEQ ID NO: 1009326 - RNA, 22 nt, Human
aguguccccuccaagggccugg

SEQ ID NO: 1009327 - RNA, 22 nt, Human
cuggggcucacuuuggucaggc

SEQ ID NO: 1009328 - RNA, 22 nt, Human
uccucaggcggugaggaggggc

SEQ ID NO: 1009329 - RNA, 19 nt, Human
ucaaagucugagucacuuu

SEQ ID NO: 1009330 - RNA, 22 nt, Human
uuagaaaggaaucuucauuuca

SEQ ID NO: 1009331 - RNA, 22 nt, Human
cuguguccucccgcugcaccca

SEQ ID NO: 1009332 - RNA, 21 nt, Human
uuacuuuugcaccaaccuaau

SEQ ID NO: 1009333 - RNA, 22 nt, Human
cucaggaugcaggucacaggac

SEQ ID NO: 1009334 - RNA, 22 nt, Human
cuggagcucuguguguuccuga

SEQ ID NO: 1009335 - RNA, 22 nt, Human
uguacauuuagagcucaauaga

SEQ ID NO: 1009336 - RNA, 22 nt, Human
uauucaaaguaccuucauugcc

SEQ ID NO: 1009337 - RNA, 22 nt, Human
uccucuucugcccaucagaggc

SEQ ID NO: 1009338 - RNA, 22 nt, Human
ugcuguguucuccugacucacc

SEQ ID NO: 1009339 - RNA, 22 nt, Human
agccacagagcaggagaccuuu

SEQ ID NO: 1009340 - RNA, 22 nt, Human
ggcaggcuggcuuuguuccagg

SEQ ID NO: 1009341 - RNA, 22 nt, Human
ccagggucuuggagaggagugc

SEQ ID NO: 1009342 - RNA, 22 nt, Human
ccccagccagcaggaccucuga

SEQ ID NO: 1009343 - RNA, 22 nt, Human
cugucuccuccacugcauggga

SEQ ID NO: 1009344 - RNA, 22 nt, Human
ugaacuuagugggaauaucucu

SEQ ID NO: 1009345 - RNA, 22 nt, Human
ccugagcuggaagagcuugugc

SEQ ID NO: 1009346 - RNA, 22 nt, Human
ggccuggaaugcuuuccuacca

SEQ ID NO: 1009347 - RNA, 22 nt, Human
gagcugccaagauuacaaucag

SEQ ID NO: 1009348 - RNA, 22 nt, Human
cuuuggcacagucucauuugau

SEQ ID NO: 1009349 - RNA, 22 nt, Human
uuuuuggguccaggcuguaucu

SEQ ID NO: 1009350 - RNA, 22 nt, Human
ugagaauuacaaaugagucaca

SEQ ID NO: 1009351 - RNA, 20 nt, Human
caaugcacacagcugcuucu

SEQ ID NO: 1009352 - RNA, 22 nt, Human
gcugccuuugugagccaagggg

SEQ ID NO: 1009353 - RNA, 22 nt, Human
cagaacauuccaugugcccugc

SEQ ID NO: 1009354 - RNA, 21 nt, Human
cagcuucuucugugaccuggu

SEQ ID NO: 1009355 - RNA, 22 nt, Human
uuucuuaguccuagagugauuu

SEQ ID NO: 1009356 - RNA, 22 nt, Human
cauugcacucuggcuggaacgg

SEQ ID NO: 1009357 - RNA, 22 nt, Human
gcagauggacuguaugaccuga

SEQ ID NO: 1009358 - RNA, 22 nt, Human
cacuucaauuaacuucagcauu

SEQ ID NO: 1009359 - RNA, 22 nt, Human
gcugugagggcuucugaggcau

SEQ ID NO: 1009360 - RNA, 22 nt, Human
uaaaaugaucucucauguucuu

SEQ ID NO: 1009361 - RNA, 22 nt, Human
cauacauaugcauguguguaua

SEQ ID NO: 1009362 - RNA, 22 nt, Human
uaggccauucuuggagcuuacu

SEQ ID NO: 1009363 - RNA, 22 nt, Human
gggcuucucuuuagugagcuga

SEQ ID NO: 1009364 - RNA, 22 nt, Human
gcagagcuaucuucuggauuug

SEQ ID NO: 1009365 - RNA, 22 nt, Human
ugaaaucaaugucuucugucuc

SEQ ID NO: 1009366 - RNA, 22 nt, Human
gcucucugaggugcuggcagag

SEQ ID NO: 1009367 - RNA, 22 nt, Human
gaaggccacuuuguguugagaa

SEQ ID NO: 1009368 - RNA, 22 nt, Human
auaguguguaaagugcagugau

SEQ ID NO: 1009369 - RNA, 22 nt, Human
uguaggaauguuuuuaaguugg

SEQ ID NO: 1009370 - RNA, 22 nt, Human
aaguguguugacugaauugggg

SEQ ID NO: 1009371 - RNA, 22 nt, Human
gcagaacauuucacaguaucuu

SEQ ID NO: 1009372 - RNA, 22 nt, Human
uuucccaguucccugcucuaua

SEQ ID NO: 1009373 - RNA, 22 nt, Human
agguggggaggagugucucuuu

SEQ ID NO: 1009374 - RNA, 22 nt, Human
auucuuauuauaguaaaacagu

SEQ ID NO: 1009375 - RNA, 21 nt, Human
aagaaguuuggauuuuguccu

SEQ ID NO: 1009376 - RNA, 22 nt, Human
acugagcucuugacugggaguu

SEQ ID NO: 1009377 - RNA, 22 nt, Human
ucugucacuuuuauuuacugaa

SEQ ID NO: 1009378 - RNA, 22 nt, Human
cagguggggcagcugugggagc

SEQ ID NO: 1009379 - RNA, 22 nt, Human
cuggagccaugucuugacugcu

SEQ ID NO: 1009380 - RNA, 22 nt, Human
gggcuggaggaccggccucgga

SEQ ID NO: 1009381 - RNA, 22 nt, Human
ucacaaaugaggaaaucgagca

SEQ ID NO: 1009382 - RNA, 22 nt, Human
cccugagcccauaguugacauu

SEQ ID NO: 1009383 - RNA, 22 nt, Human
auuuuucucuccacuccauuaa

SEQ ID NO: 1009384 - RNA, 23 nt, Human
ucugucaccuauggcugcucuuc

SEQ ID NO: 1009385 - RNA, 22 nt, Human
uauuuccaggccccacucuaga

SEQ ID NO: 1009386 - RNA, 20 nt, Human
ugcuggggacauacagggug

SEQ ID NO: 1009387 - RNA, 22 nt, Human
gaagccaacauuccaaguagaa

SEQ ID NO: 1009388 - RNA, 22 nt, Human
gaguaagagcuggcuuuggugu

SEQ ID NO: 1009389 - RNA, 21 nt, Human
ccuauugaauauaggaagauu

SEQ ID NO: 1009390 - RNA, 22 nt, Human
uguggccagcagguggcugugu

SEQ ID NO: 1009391 - RNA, 22 nt, Human
ggcugcagaaguacuuccggau

SEQ ID NO: 1009392 - RNA, 22 nt, Human
ccaggaggcggaagguacagug

SEQ ID NO: 1009393 - RNA, 22 nt, Human
uacaguucacaguaucauaaau

SEQ ID NO: 1009394 - RNA, 22 nt, Human
acagauuuguucuuuugggcua

SEQ ID NO: 1009395 - RNA, 22 nt, Human
ucaaugauaucagcaggaugug

SEQ ID NO: 1009396 - RNA, 22 nt, Human
cccuggcauaaaacuucuccag

SEQ ID NO: 1009397 - RNA, 22 nt, Human
gcuggccugaccugaggcuggg

SEQ ID NO: 1009398 - RNA, 22 nt, Human
ugugugaaggagccacuguuca

SEQ ID NO: 1009399 - RNA, 22 nt, Human
ccagucugaggccuggugaggg

SEQ ID NO: 1009400 - RNA, 22 nt, Human
aaguaacaaugcuguugaauug

SEQ ID NO: 1009401 - RNA, 22 nt, Human
cucaccacagagccuguccagc

SEQ ID NO: 1009402 - RNA, 22 nt, Human
gccuugggggugaaagaggcua

SEQ ID NO: 1009403 - RNA, 22 nt, Human
cagcuucugucugauuagcaag

SEQ ID NO: 1009404 - RNA, 22 nt, Human
cagagcagaagcgguccucaca

SEQ ID NO: 1009405 - RNA, 22 nt, Human
cauuucugcagaauugcucuuc

SEQ ID NO: 1009406 - RNA, 22 nt, Human
acuggcagcagcagcccuuggg

SEQ ID NO: 1009407 - RNA, 22 nt, Human
aaaucaguuggaacacaagcag

SEQ ID NO: 1009408 - RNA, 22 nt, Human
ggcugccuacuuucccagaguu

SEQ ID NO: 1009409 - RNA, 22 nt, Human
cugcccagaaucacucacucga

SEQ ID NO: 1009410 - RNA, 22 nt, Human
acaugcaugucuaugggcaggu

SEQ ID NO: 1009411 - RNA, 22 nt, Human
gacuuuggcaucuagacauugu

SEQ ID NO: 1009412 - RNA, 22 nt, Human
gcccauggcagaacugugagca

SEQ ID NO: 1009413 - RNA, 22 nt, Human
cacaggcuugucagcaugaggc

SEQ ID NO: 1009414 - RNA, 22 nt, Human
ugcuuuauuaagagagaaauuu

SEQ ID NO: 1009415 - RNA, 22 nt, Human
gugaccaucagagaauaacaaa

SEQ ID NO: 1009416 - RNA, 22 nt, Human
accagagcgcucaagccuuccc

SEQ ID NO: 1009417 - RNA, 22 nt, Human
caagacaagaucuaagcaugcu

SEQ ID NO: 1009418 - RNA, 18 nt, Human
ugugguggagcugccuuc

SEQ ID NO: 1009419 - RNA, 22 nt, Human
ucucuggagcugcagauccagg

SEQ ID NO: 1009420 - RNA, 22 nt, Human
guuauguacuuuuuaaaucuug

SEQ ID NO: 1009421 - RNA, 22 nt, Human
uggcucaguuuagcagcucagu

SEQ ID NO: 1009422 - RNA, 22 nt, Human
acccagcucuuugauggucuug

SEQ ID NO: 1009423 - RNA, 22 nt, Human
caggcaggagccagggauucca

SEQ ID NO: 1009424 - RNA, 22 nt, Human
agaggccugugugcuccagugg

SEQ ID NO: 1009425 - RNA, 21 nt, Human
augugaaauaucaucagagca

SEQ ID NO: 1009426 - RNA, 22 nt, Human
aggcuggcuuggcucuccugug

SEQ ID NO: 1009427 - RNA, 22 nt, Human
uuucucauagucaugccucuua

SEQ ID NO: 1009428 - RNA, 22 nt, Human
auagucuuagaucagauaaagu

SEQ ID NO: 1009429 - RNA, 22 nt, Human
uagccuucucaagacaaaguug

SEQ ID NO: 1009430 - RNA, 22 nt, Human
gcccagugguaaaagcaggccu

SEQ ID NO: 1009431 - RNA, 22 nt, Human
ugcacagcgggugucugucagg

SEQ ID NO: 1009432 - RNA, 22 nt, Human
ucccagaggcuccagucucuau

SEQ ID NO: 1009433 - RNA, 18 nt, Human
ugaggcagucagugaugg

SEQ ID NO: 1009434 - RNA, 22 nt, Human
cagcaucuuucucuucuggagu

SEQ ID NO: 1009435 - RNA, 20 nt, Human
agugucugggccucaggccc

SEQ ID NO: 1009436 - RNA, 22 nt, Human
uugcugugucugauggcugaga

SEQ ID NO: 1009437 - RNA, 23 nt, Human
cugaggccugcugcguucagguu

SEQ ID NO: 1009438 - RNA, 22 nt, Human
uauuaggguuuugaagguuugu

SEQ ID NO: 1009439 - RNA, 22 nt, Human
gccugguggacacugggcauca

SEQ ID NO: 1009440 - RNA, 23 nt, Human
gccaggcuccggucuguggccac

SEQ ID NO: 1009441 - RNA, 21 nt, Human
ugggacagugauggcuccucc

SEQ ID NO: 1009442 - RNA, 21 nt, Human
aggugggagaccauguagguc

SEQ ID NO: 1009443 - RNA, 22 nt, Human
aaugauguauuaguacaacaca

SEQ ID NO: 1009444 - RNA, 22 nt, Human
uggguggcggccugguucugag

SEQ ID NO: 1009445 - RNA, 22 nt, Human
auaucacaaacaagucuguacu

SEQ ID NO: 1009446 - RNA, 22 nt, Human
agaggcaggaagagcugauuuu

SEQ ID NO: 1009447 - RNA, 22 nt, Human
agggugccuggaagccacucac

SEQ ID NO: 1009448 - RNA, 22 nt, Human
cugcccuggucccauggcugau

SEQ ID NO: 1009449 - RNA, 22 nt, Human
cauggacucugguuuggggagc

SEQ ID NO: 1009450 - RNA, 22 nt, Human
ccucucaucauuaucgcuuugu

SEQ ID NO: 1009451 - RNA, 22 nt, Human
ugcuccuuccucauccugugca

SEQ ID NO: 1009452 - RNA, 22 nt, Human
acuuugcaauacuuaauacaaa

SEQ ID NO: 1009453 - RNA, 23 nt, Human
gggugggccaaauuagguagccu

SEQ ID NO: 1009454 - RNA, 22 nt, Human
caggcuugggagcagagccacu

SEQ ID NO: 1009455 - RNA, 22 nt, Human
uaauuauuugaagacauuagag

SEQ ID NO: 1009456 - RNA, 22 nt, Human
gcaguguuuacauauuagaaac

SEQ ID NO: 1009457 - RNA, 22 nt, Human
acugcuuuagaccuagagcucu

SEQ ID NO: 1009458 - RNA, 22 nt, Human
gccacguugccacccgggugac

SEQ ID NO: 1009459 - RNA, 22 nt, Human
acagagaugcaaguguguauuu

SEQ ID NO: 1009460 - RNA, 22 nt, Human
ccaggaugacccccacuuuccu

SEQ ID NO: 1009461 - RNA, 20 nt, Human
ccuccuggucaggugugcag

SEQ ID NO: 1009462 - RNA, 22 nt, Human
cagugcagaacacauggaaaau

SEQ ID NO: 1009463 - RNA, 22 nt, Human
ggucucagaucuuuauuaaggc

SEQ ID NO: 1009464 - RNA, 22 nt, Human
cccugcagagccagcccugacc

SEQ ID NO: 1009465 - RNA, 22 nt, Human
cacaggggcaaacuguagggga

SEQ ID NO: 1009466 - RNA, 22 nt, Human
uagccaggcgaggucagugucg

SEQ ID NO: 1009467 - RNA, 22 nt, Human
gugugaaaaugugcacaauaug

SEQ ID NO: 1009468 - RNA, 22 nt, Human
gaaugaauagguguccagaugg

SEQ ID NO: 1009469 - RNA, 22 nt, Human
ugagcuuacgugggaacagacu

SEQ ID NO: 1009470 - RNA, 22 nt, Human
augcugugccuggaaagcggcu

SEQ ID NO: 1009471 - RNA, 18 nt, Human
acaaaugugucacaggaa

SEQ ID NO: 1009472 - RNA, 22 nt, Human
agcauuuaggagaauuugagaa

SEQ ID NO: 1009473 - RNA, 22 nt, Human
cggagccugcuuguugcagcug

SEQ ID NO: 1009474 - RNA, 22 nt, Human
cccagcccugaccuauuggaaa

SEQ ID NO: 1009475 - RNA, 22 nt, Human
agaggcugucccuugcuauucc

SEQ ID NO: 1009476 - RNA, 22 nt, Human
cuggggcugcagcgaucuucau

SEQ ID NO: 1009477 - RNA, 22 nt, Human
cagcucccgccaucgggaggca

SEQ ID NO: 1009478 - RNA, 22 nt, Human
uuuuaacuuaaaauacauagau

SEQ ID NO: 1009479 - RNA, 22 nt, Human
ucagcuuugaucucaggcaauc

SEQ ID NO: 1009480 - RNA, 22 nt, Human
ggcccaaggcccaggucgagcu

SEQ ID NO: 1009481 - RNA, 22 nt, Human
ugcauauuuguaugauguuuag

SEQ ID NO: 1009482 - RNA, 19 nt, Human
ucuggcuccgccucuuagu

SEQ ID NO: 1009483 - RNA, 22 nt, Human
gugccugcagcaauccauggca

SEQ ID NO: 1009484 - RNA, 22 nt, Human
ugcaggccucacaccuggcacc

SEQ ID NO: 1009485 - RNA, 22 nt, Human
gcucagagcaucccagugaaug

SEQ ID NO: 1009486 - RNA, 22 nt, Human
uggugagcucuuuagacuggga

SEQ ID NO: 1009487 - RNA, 22 nt, Human
uucucuuaucuggcauuauugg

SEQ ID NO: 1009488 - RNA, 22 nt, Human
uucaaugagcccggggccauag

SEQ ID NO: 1009489 - RNA, 22 nt, Human
uggggcugucccgguuuggcga

SEQ ID NO: 1009490 - RNA, 22 nt, Human
gucccuggggaaucagcuggag

SEQ ID NO: 1009491 - RNA, 22 nt, Human
auuccaggcagaccagagagau

SEQ ID NO: 1009492 - RNA, 20 nt, Human
ugggccugagccugugggcu

SEQ ID NO: 1009493 - RNA, 22 nt, Human
guaaaguucuacuagaaucaac

SEQ ID NO: 1009494 - RNA, 22 nt, Human
uucaugaauggaaucaaugcuc

SEQ ID NO: 1009495 - RNA, 22 nt, Human
uucaagauaauaggaaugaaaa

SEQ ID NO: 1009496 - RNA, 22 nt, Human
cuaggaggcgggggcugcagua

SEQ ID NO: 1009497 - RNA, 22 nt, Human
caagauggguguugugaugguu

SEQ ID NO: 1009498 - RNA, 22 nt, Human
gucauugcaguggcaaaucaca

SEQ ID NO: 1009499 - RNA, 22 nt, Human
aagaaaagaaaccugaggcuuu

SEQ ID NO: 1009500 - RNA, 22 nt, Human
ccuguucauuuguauuugucuu

SEQ ID NO: 1009501 - RNA, 22 nt, Human
uacuguauuugauaagugaagu

SEQ ID NO: 1009502 - RNA, 22 nt, Human
auguuugaaauuguaaguauau

SEQ ID NO: 1009503 - RNA, 22 nt, Human
cagaaugcaaauuuuauaauau

SEQ ID NO: 1009504 - RNA, 20 nt, Human
aggcucugccauugucccug

SEQ ID NO: 1009505 - RNA, 22 nt, Human
augcccugcaucaagugacacu

SEQ ID NO: 1009506 - RNA, 22 nt, Human
uuuucauuguaaaucaggaaac

SEQ ID NO: 1009507 - RNA, 22 nt, Human
ugaagccaucccucagauggcc

SEQ ID NO: 1009508 - RNA, 20 nt, Human
aggcucagagcaguaguaca

SEQ ID NO: 1009509 - RNA, 22 nt, Human
cuguaauucacuagggucagcg

SEQ ID NO: 1009510 - RNA, 22 nt, Human
ucccagagucuucuccuguaau

SEQ ID NO: 1009511 - RNA, 21 nt, Human
uuuaauuugcauguaugacgc

SEQ ID NO: 1009512 - RNA, 22 nt, Human
aagauuuccauuucuagcucau

SEQ ID NO: 1009513 - RNA, 17 nt, Human
ggcagcugccacuuuuu

SEQ ID NO: 1009514 - RNA, 19 nt, Human
augucuggguaacagcugc

SEQ ID NO: 1009515 - RNA, 22 nt, Human
ugucaaaaauaagagagauugu

SEQ ID NO: 1009516 - RNA, 22 nt, Human
ugccucagagugggcuugcuau

SEQ ID NO: 1009517 - RNA, 22 nt, Human
cuguggaauugaugcuuagugu

SEQ ID NO: 1009518 - RNA, 22 nt, Human
caaagguaguauauauauuguu

SEQ ID NO: 1009519 - RNA, 22 nt, Human
gugcucaggaagcuguuccugc

SEQ ID NO: 1009520 - RNA, 18 nt, Human
ucucagaggccauccuag

SEQ ID NO: 1009521 - RNA, 22 nt, Human
ccucugagaccagcucugcacc

SEQ ID NO: 1009522 - RNA, 22 nt, Human
cagggguggcugcagcagaggu

SEQ ID NO: 1009523 - RNA, 22 nt, Human
ucucaguguguuuucucucaga

SEQ ID NO: 1009524 - RNA, 22 nt, Human
gccaggcauuauuccgaucccu

SEQ ID NO: 1009525 - RNA, 22 nt, Human
ccucaggggcuuuucguuguug

SEQ ID NO: 1009526 - RNA, 22 nt, Human
gcuguucacauuuugggccaaa

SEQ ID NO: 1009527 - RNA, 22 nt, Human
gucauucuuaacaacucaguag

SEQ ID NO: 1009528 - RNA, 22 nt, Human
ucuacuguagugaugcugcagu

SEQ ID NO: 1009529 - RNA, 22 nt, Human
caaagcaaggcucaguuugaac

SEQ ID NO: 1009530 - RNA, 22 nt, Human
uuuuccucaggaaugcuaagcu

SEQ ID NO: 1009531 - RNA, 22 nt, Human
cugcaggcaucuaacugugggc

SEQ ID NO: 1009532 - RNA, 23 nt, Human
acagagguccaaacaguauaagc

SEQ ID NO: 1009533 - RNA, 22 nt, Human
ucaaugaugcugaagguagcgu

SEQ ID NO: 1009534 - RNA, 22 nt, Human
uccuggaggggacagcaugggc

SEQ ID NO: 1009535 - RNA, 22 nt, Human
agcagaacauuuucagggcugu

SEQ ID NO: 1009536 - RNA, 22 nt, Human
gugauuucuaaucaucugaaug

SEQ ID NO: 1009537 - RNA, 22 nt, Human
agucugucugucacuucugcag

SEQ ID NO: 1009538 - RNA, 22 nt, Human
uugaaaggaauacagaggccua

SEQ ID NO: 1009539 - RNA, 22 nt, Human
uacauuccauguguguguauuc

SEQ ID NO: 1009540 - RNA, 22 nt, Human
uucacauuugcccuuaugugug

SEQ ID NO: 1009541 - RNA, 22 nt, Human
ggcuucuguccucuggaucugu

SEQ ID NO: 1009542 - RNA, 22 nt, Human
auugucuucuggucuuaucuuu

SEQ ID NO: 1009543 - RNA, 18 nt, Human
gcugcugguggagggagc

SEQ ID NO: 1009544 - RNA, 22 nt, Human
aggugcagcugacaccaugugg

SEQ ID NO: 1009545 - RNA, 22 nt, Human
agccugguguggggcugcagag

SEQ ID NO: 1009546 - RNA, 19 nt, Human
uguagcaguuuaaaacaac

SEQ ID NO: 1009547 - RNA, 22 nt, Human
uuauuagguuauucucuguacu

SEQ ID NO: 1009548 - RNA, 20 nt, Human
cagcccuccaguggaggcag

SEQ ID NO: 1009549 - RNA, 22 nt, Human
gagcuuccacucuagaaggagu

SEQ ID NO: 1009550 - RNA, 22 nt, Human
gaguguucccacaccccaguug

SEQ ID NO: 1009551 - RNA, 22 nt, Human
cccugcagcuuuugcauaguca

SEQ ID NO: 1009552 - RNA, 22 nt, Human
ugucaguguauacauacaguau

SEQ ID NO: 1009553 - RNA, 22 nt, Human
aguaucaaggaucuccagcacc

SEQ ID NO: 1009554 - RNA, 21 nt, Human
agaaauguaucauucuuuucc

SEQ ID NO: 1009555 - RNA, 22 nt, Human
ccuggcuggauggagccccugg

SEQ ID NO: 1009556 - RNA, 22 nt, Human
gagcagcuccagccgcaugacu

SEQ ID NO: 1009557 - RNA, 22 nt, Human
ugcagcugguuuagaacuagau

SEQ ID NO: 1009558 - RNA, 22 nt, Human
uagacauuucugguuauugaca

SEQ ID NO: 1009559 - RNA, 22 nt, Human
ugccugggagugaccaagacuc

SEQ ID NO: 1009560 - RNA, 22 nt, Human
ggagcagagcucuucaucugca

SEQ ID NO: 1009561 - RNA, 22 nt, Human
aaagaucagucugaagcaacau

SEQ ID NO: 1009562 - RNA, 20 nt, Human
uugcagcagugaggugaagg

SEQ ID NO: 1009563 - RNA, 21 nt, Human
ugaaaguuggagucaaaugua

SEQ ID NO: 1009564 - RNA, 22 nt, Human
uguguacagcaggauuucucaa

SEQ ID NO: 1009565 - RNA, 22 nt, Human
cuuugcaaacgauuaccacaug

SEQ ID NO: 1009566 - RNA, 18 nt, Human
ugcucuggucucacuugg

SEQ ID NO: 1009567 - RNA, 22 nt, Human
uggcacugaagcuggaaagccu

SEQ ID NO: 1009568 - RNA, 22 nt, Human
cuggagcagguuuaggaguccc

SEQ ID NO: 1009569 - RNA, 23 nt, Human
cacacccaucacuaagagcuccu

SEQ ID NO: 1009570 - RNA, 19 nt, Human
uggcauugguccagauaaa

SEQ ID NO: 1009571 - RNA, 22 nt, Human
ccucaggggugcccacagcugc

SEQ ID NO: 1009572 - RNA, 22 nt, Human
cagauggcauuuccuuucuggc

SEQ ID NO: 1009573 - RNA, 22 nt, Human
uuccagaaaucuuucagcucaa

SEQ ID NO: 1009574 - RNA, 22 nt, Human
cauugacaucaggcuuggccaa

SEQ ID NO: 1009575 - RNA, 22 nt, Human
gggcagagguucaacuucaaca

SEQ ID NO: 1009576 - RNA, 22 nt, Human
aauuucaagucuugaagaagua

SEQ ID NO: 1009577 - RNA, 22 nt, Human
gcacccagccagcaucucagag

SEQ ID NO: 1009578 - RNA, 22 nt, Human
cugggcacauuuugacuagugu

SEQ ID NO: 1009579 - RNA, 22 nt, Human
agcuucuuggcucagcacuugg

SEQ ID NO: 1009580 - RNA, 19 nt, Human
cagagcugcuggccucguc

SEQ ID NO: 1009581 - RNA, 21 nt, Human
ucuggagcccuaagcugagaa

SEQ ID NO: 1009582 - RNA, 22 nt, Human
ugccucuguugagccuuggcug

SEQ ID NO: 1009583 - RNA, 22 nt, Human
uaauacuuuugccuuguauuca

SEQ ID NO: 1009584 - RNA, 22 nt, Human
uaaaaguuuuaguuguacauaa

SEQ ID NO: 1009585 - RNA, 22 nt, Human
uucaaaacagcuagauauugga

SEQ ID NO: 1009586 - RNA, 22 nt, Human
cuucaucaacucuaacaaaugu

SEQ ID NO: 1009587 - RNA, 22 nt, Human
uggcgagccccgacugaguguu

SEQ ID NO: 1009588 - RNA, 22 nt, Human
gcccaggaguugaaugcagcag

SEQ ID NO: 1009589 - RNA, 20 nt, Human
ucauuguguugccaauuccc

SEQ ID NO: 1009590 - RNA, 22 nt, Human
uggccuuguguuuuagagaaag

SEQ ID NO: 1009591 - RNA, 22 nt, Human
ccuguucaaguugcagggcugg

SEQ ID NO: 1009592 - RNA, 22 nt, Human
acaaaagugagugugucucaga

SEQ ID NO: 1009593 - RNA, 22 nt, Human
auuuaagauugcguauucaugu

SEQ ID NO: 1009594 - RNA, 22 nt, Human
ggaggggcagccauggaacucc

SEQ ID NO: 1009595 - RNA, 22 nt, Human
aaaugcagguaguauuuauuuu

SEQ ID NO: 1009596 - RNA, 22 nt, Human
uucugcaucugaauuuaaguac

SEQ ID NO: 1009597 - RNA, 22 nt, Human
cugcagggcagaagggcauaga

SEQ ID NO: 1009598 - RNA, 22 nt, Human
cauuuauugaguggccacagug

SEQ ID NO: 1009599 - RNA, 22 nt, Human
cugcaggcucgaagacacggau

SEQ ID NO: 1009600 - RNA, 22 nt, Human
gccagagcaugcacugccugca

SEQ ID NO: 1009601 - RNA, 22 nt, Human
ucagcuuuugucagaaauugua

SEQ ID NO: 1009602 - RNA, 22 nt, Human
aggcuggcgacaucuggcgggc

SEQ ID NO: 1009603 - RNA, 22 nt, Human
guuagguagaaguuuacuuuga

SEQ ID NO: 1009604 - RNA, 22 nt, Human
uggcucaggggucuggcucugu

SEQ ID NO: 1009605 - RNA, 22 nt, Human
cugggguggaggagcuccccug

SEQ ID NO: 1009606 - RNA, 22 nt, Human
acaugcauacaagcacauguag

SEQ ID NO: 1009607 - RNA, 22 nt, Human
aagggcucccugccugaggugg

SEQ ID NO: 1009608 - RNA, 22 nt, Human
agccagagagccccagguucua

SEQ ID NO: 1009609 - RNA, 22 nt, Human
agacagggucuugaucagagcu

SEQ ID NO: 1009610 - RNA, 22 nt, Human
uuuuccucugagcuuugaauaa

SEQ ID NO: 1009611 - RNA, 22 nt, Human
aaaucaguuagugguaggauug

SEQ ID NO: 1009612 - RNA, 22 nt, Human
ucccaguguggcaggccaugga

SEQ ID NO: 1009613 - RNA, 18 nt, Human
auuuugaacaaugcugua

SEQ ID NO: 1009614 - RNA, 17 nt, Human
ccagagcuacugagacu

SEQ ID NO: 1009615 - RNA, 22 nt, Human
cauguuaaaauauacauucuga

SEQ ID NO: 1009616 - RNA, 22 nt, Human
caggggacauuaaagcuccaua

SEQ ID NO: 1009617 - RNA, 22 nt, Human
uagugcacacgcauguagcagu

SEQ ID NO: 1009618 - RNA, 22 nt, Human
ccuucagaccuagacaggaauc

SEQ ID NO: 1009619 - RNA, 22 nt, Human
ugcaaucucggcacuuugggag

SEQ ID NO: 1009620 - RNA, 22 nt, Human
uagcagagcagggaucagagcc

SEQ ID NO: 1009621 - RNA, 22 nt, Human
agggcagcuaaggugcugacug

SEQ ID NO: 1009622 - RNA, 22 nt, Human
uuugugaaaugaagucacaacu

SEQ ID NO: 1009623 - RNA, 22 nt, Human
aggaaaaauaaggcagcagggc

SEQ ID NO: 1009624 - RNA, 22 nt, Human
aaacuguaagagaauaaacuac

SEQ ID NO: 1009625 - RNA, 22 nt, Human
gggaagggagggaccucagucu

SEQ ID NO: 1009626 - RNA, 22 nt, Human
acagcuugcaauggcuuucaac

SEQ ID NO: 1009627 - RNA, 22 nt, Human
ccaggaggcagagguuacagug

SEQ ID NO: 1009628 - RNA, 22 nt, Human
uguguuuugaacucaucuacug

SEQ ID NO: 1009629 - RNA, 22 nt, Human
gcugucacaucaaggcacuaaa

SEQ ID NO: 1009630 - RNA, 21 nt, Human
aggagcuguguuagcuggucg

SEQ ID NO: 1009631 - RNA, 22 nt, Human
uucuucuuuaucucaguauccu

SEQ ID NO: 1009632 - RNA, 22 nt, Human
agauguaguagugggucuuuua

SEQ ID NO: 1009633 - RNA, 22 nt, Human
uuugcagugauucuugcaguga

SEQ ID NO: 1009634 - RNA, 22 nt, Human
acauuucuuucuauucaguagc

SEQ ID NO: 1009635 - RNA, 22 nt, Human
accacugggcgggcagccugcu

SEQ ID NO: 1009636 - RNA, 22 nt, Human
uggcucagaugcucuuccagug

SEQ ID NO: 1009637 - RNA, 22 nt, Human
ugucccagacauaaguggacau

SEQ ID NO: 1009638 - RNA, 22 nt, Human
uaugcauauagaugcacacaca

SEQ ID NO: 1009639 - RNA, 22 nt, Human
ugcuuaaaauaguucauuuuug

SEQ ID NO: 1009640 - RNA, 22 nt, Human
cugagccauaagggaggcuggg

SEQ ID NO: 1009641 - RNA, 22 nt, Human
gguggggcccuggcacugguau

SEQ ID NO: 1009642 - RNA, 22 nt, Human
cauauuuauagaucuggcauuu

SEQ ID NO: 1009643 - RNA, 22 nt, Human
cagggcucgcugccagcuucag

SEQ ID NO: 1009644 - RNA, 22 nt, Human
uuuagggaagaagcccauggcc

SEQ ID NO: 1009645 - RNA, 22 nt, Human
ggaaggagggcggcaaugauga

SEQ ID NO: 1009646 - RNA, 22 nt, Human
gggagguucuguucgcacuuga

SEQ ID NO: 1009647 - RNA, 23 nt, Human
ggcuggcccggggcugcuccuga

SEQ ID NO: 1009648 - RNA, 22 nt, Human
ccuggcuguggcggugcucuca

SEQ ID NO: 1009649 - RNA, 22 nt, Human
cagucccaccaggaucgcucuu

SEQ ID NO: 1009650 - RNA, 22 nt, Human
uauguguaggaggaggacaggg

SEQ ID NO: 1009651 - RNA, 22 nt, Human
aagagcaucgguggagccccca

SEQ ID NO: 1009652 - RNA, 22 nt, Human
guuagaaagugucugcuugggu

SEQ ID NO: 1009653 - RNA, 22 nt, Human
agcugagcauuugauccaccuc

SEQ ID NO: 1009654 - RNA, 22 nt, Human
aggcuauuuccacucuucucau

SEQ ID NO: 1009655 - RNA, 21 nt, Human
uuugaaagcuacaucuauagc

SEQ ID NO: 1009656 - RNA, 22 nt, Human
acuuggagagcauugcugggga

SEQ ID NO: 1009657 - RNA, 22 nt, Human
ucugggaaugaauaagaccugu

SEQ ID NO: 1009658 - RNA, 19 nt, Human
ggcugcugguuacagaggc

SEQ ID NO: 1009659 - RNA, 22 nt, Human
uacagcauauacagaaugaaca

SEQ ID NO: 1009660 - RNA, 22 nt, Human
uagaagcaguaauagaaauagg

SEQ ID NO: 1009661 - RNA, 23 nt, Human
gggagccaggaccucgcgcccca

SEQ ID NO: 1009662 - RNA, 22 nt, Human
gaacagcccuguuaagucuguu

SEQ ID NO: 1009663 - RNA, 22 nt, Human
ccagggugcucuguggcgucgc

SEQ ID NO: 1009664 - RNA, 19 nt, Human
gcauaaaaugucaaugugu

SEQ ID NO: 1009665 - RNA, 20 nt, Human
accccagccccucuaucuga

SEQ ID NO: 1009666 - RNA, 22 nt, Human
cagcaggguuaagugacucacc

SEQ ID NO: 1009667 - RNA, 22 nt, Human
gccagcaguccugcugugugcc

SEQ ID NO: 1009668 - RNA, 22 nt, Human
gugcagcugugugagagcucca

SEQ ID NO: 1009669 - RNA, 22 nt, Human
gcagggacaucuucagaucacu

SEQ ID NO: 1009670 - RNA, 22 nt, Human
accucccagcucugagcuuggg

SEQ ID NO: 1009671 - RNA, 22 nt, Human
ucucuuccaguaagagucuuua

SEQ ID NO: 1009672 - RNA, 22 nt, Human
gcuguguuuuauguuagguuaa

SEQ ID NO: 1009673 - RNA, 22 nt, Human
ugugaaaggggucacagggaaa

SEQ ID NO: 1009674 - RNA, 22 nt, Human
gaagcagcaaaucugcaguauc

SEQ ID NO: 1009675 - RNA, 22 nt, Human
gugaaacagaagcuccuggaau

SEQ ID NO: 1009676 - RNA, 22 nt, Human
cccaggcagccccagaagcuug

SEQ ID NO: 1009677 - RNA, 22 nt, Human
gaagcagcucagauugacugaa

SEQ ID NO: 1009678 - RNA, 21 nt, Human
gccaccccuggcacaggugcu

SEQ ID NO: 1009679 - RNA, 22 nt, Human
uggcacccugaaguuggucacu

SEQ ID NO: 1009680 - RNA, 22 nt, Human
uaacauuagguagacauaagcc

SEQ ID NO: 1009681 - RNA, 22 nt, Human
gcagaggccuagguggaaggcc

SEQ ID NO: 1009682 - RNA, 22 nt, Human
ggagcagacauaaccuuacaga

SEQ ID NO: 1009683 - RNA, 22 nt, Human
cagggagaagucuggucagucc

SEQ ID NO: 1009684 - RNA, 20 nt, Human
accaauguuagcuuaguacu

SEQ ID NO: 1009685 - RNA, 23 nt, Human
cccugcagucagggugagauggu

SEQ ID NO: 1009686 - RNA, 22 nt, Human
agguacagaugaaagucuaguu

SEQ ID NO: 1009687 - RNA, 22 nt, Human
gccagcucagaugcaggaagga

SEQ ID NO: 1009688 - RNA, 22 nt, Human
caguggcaugguugacugcagu

SEQ ID NO: 1009689 - RNA, 22 nt, Human
aggaggccccuccuggguugcu

SEQ ID NO: 1009690 - RNA, 22 nt, Human
ucccagagcugauaagccuuua

SEQ ID NO: 1009691 - RNA, 22 nt, Human
agagcugggugaagugccauca

SEQ ID NO: 1009692 - RNA, 19 nt, Human
guucaaacacugauucagc

SEQ ID NO: 1009693 - RNA, 22 nt, Human
auuuuucucucacacuuaccag

SEQ ID NO: 1009694 - RNA, 19 nt, Human
gugauuucuuuccacaagc

SEQ ID NO: 1009695 - RNA, 19 nt, Human
cuggggcuuugguacugcc

SEQ ID NO: 1009696 - RNA, 22 nt, Human
auuugcuuuaagguauaaaagg

SEQ ID NO: 1009697 - RNA, 22 nt, Human
auuauguauuugguauaguuug

SEQ ID NO: 1009698 - RNA, 22 nt, Human
caguaaaagauggaaauagaau

SEQ ID NO: 1009699 - RNA, 22 nt, Human
cucagagcaaugaacaugcaaa

SEQ ID NO: 1009700 - RNA, 20 nt, Human
agaagcugauacugauggaa

SEQ ID NO: 1009701 - RNA, 22 nt, Human
ugcagcugaggccagcuaugcc

SEQ ID NO: 1009702 - RNA, 22 nt, Human
uugaagcagagaaauacuugaa

SEQ ID NO: 1009703 - RNA, 22 nt, Human
agauauauuuaagguaauaagu

SEQ ID NO: 1009704 - RNA, 22 nt, Human
augcccugcugcuggggcagug

SEQ ID NO: 1009705 - RNA, 22 nt, Human
acagucucuccacacugcaggg

SEQ ID NO: 1009706 - RNA, 22 nt, Human
aguaugaagaauacauagauga

SEQ ID NO: 1009707 - RNA, 22 nt, Human
ggcagcaggagccaucugguag

SEQ ID NO: 1009708 - RNA, 22 nt, Human
ccagcuccucuucccaguguca

SEQ ID NO: 1009709 - RNA, 22 nt, Human
uggcucagcugacucggcuucu

SEQ ID NO: 1009710 - RNA, 22 nt, Human
gcugccagccaacuugcugugc

SEQ ID NO: 1009711 - RNA, 22 nt, Human
ccucagccuuggccccaggcag

SEQ ID NO: 1009712 - RNA, 22 nt, Human
ugcaccauguaaguggccacgu

SEQ ID NO: 1009713 - RNA, 22 nt, Human
uccaggcugggcugaagggugc

SEQ ID NO: 1009714 - RNA, 22 nt, Human
aacaguaaagacagaauuuauc

SEQ ID NO: 1009715 - RNA, 22 nt, Human
ccugggcauucuuugaguucuc

SEQ ID NO: 1009716 - RNA, 19 nt, Human
ggccuggauuuagggcucc

SEQ ID NO: 1009717 - RNA, 20 nt, Human
aagauucauuguaauuaggg

SEQ ID NO: 1009718 - RNA, 22 nt, Human
ucaggcaggcagagggcaaaug

SEQ ID NO: 1009719 - RNA, 22 nt, Human
gcuggucacucugggagcugcu

SEQ ID NO: 1009720 - RNA, 22 nt, Human
uguuucaggaccuaucuuuuag

SEQ ID NO: 1009721 - RNA, 20 nt, Human
ccucaagcagacugacagcu

SEQ ID NO: 1009722 - RNA, 22 nt, Human
uaagaacaagcuggggguucca

SEQ ID NO: 1009723 - RNA, 22 nt, Human
ggcagccuccagggcacuggug

SEQ ID NO: 1009724 - RNA, 20 nt, Human
gcauggcauguagugaagug

SEQ ID NO: 1009725 - RNA, 22 nt, Human
aucaggaucaugcuggguggga

SEQ ID NO: 1009726 - RNA, 22 nt, Human
uucucuuuucaccaguugcuaa

SEQ ID NO: 1009727 - RNA, 22 nt, Human
aggaaacuccccuacaucucaa

SEQ ID NO: 1009728 - RNA, 22 nt, Human
cucaggauugugccuagggaga

SEQ ID NO: 1009729 - RNA, 22 nt, Human
aucagagaccggucaagucaug

SEQ ID NO: 1009730 - RNA, 22 nt, Human
agaugaagacucaggagcaggu

SEQ ID NO: 1009731 - RNA, 22 nt, Human
cagcuugggucaggugccugcu

SEQ ID NO: 1009732 - RNA, 22 nt, Human
ggggcagauggaacagagcaca

SEQ ID NO: 1009733 - RNA, 22 nt, Human
gcugaagagagaugcguccagc

SEQ ID NO: 1009734 - RNA, 22 nt, Human
ccauaagguugaaaacuguaca

SEQ ID NO: 1009735 - RNA, 22 nt, Human
agagcugugcuuugcaccacgu

SEQ ID NO: 1009736 - RNA, 22 nt, Human
agggggcaucagguccuggcuc

SEQ ID NO: 1009737 - RNA, 22 nt, Human
ggcaaaaaccacaauuacuuuu

SEQ ID NO: 1009738 - RNA, 22 nt, Human
gcagaggccaucaacuuugcca

SEQ ID NO: 1009739 - RNA, 18 nt, Human
ccgggcuuuggugacaca

SEQ ID NO: 1009740 - RNA, 22 nt, Human
ugcuggggucauggggcgcccg

SEQ ID NO: 1009741 - RNA, 21 nt, Human
aauguauguuuaucucacagu

SEQ ID NO: 1009742 - RNA, 22 nt, Human
caguuuauagcucuagcagcuu

SEQ ID NO: 1009743 - RNA, 22 nt, Human
ggcucccaggagggccuggagg

SEQ ID NO: 1009744 - RNA, 22 nt, Human
uaaggcacccgugagcugccag

SEQ ID NO: 1009745 - RNA, 22 nt, Human
gcugggagccguaccugucacg

SEQ ID NO: 1009746 - RNA, 17 nt, Human
ccagagaguaguuagga

SEQ ID NO: 1009747 - RNA, 22 nt, Human
ggauggcauguugggcucuguu

SEQ ID NO: 1009748 - RNA, 22 nt, Human
aaucuucacagagaaaauuagg

SEQ ID NO: 1009749 - RNA, 20 nt, Human
gggguuggcuggcacaggga

SEQ ID NO: 1009750 - RNA, 22 nt, Human
cuauuagguaugcagccuauuu

SEQ ID NO: 1009751 - RNA, 22 nt, Human
uugcauugauguuccuucuugc

SEQ ID NO: 1009752 - RNA, 22 nt, Human
aggguggagggagucccugagc

SEQ ID NO: 1009753 - RNA, 22 nt, Human
cacugaaggaaggacuacugca

SEQ ID NO: 1009754 - RNA, 22 nt, Human
agcagcuguggaaaaguaacua

SEQ ID NO: 1009755 - RNA, 22 nt, Human
uuagauaacaguagaauaucaa

SEQ ID NO: 1009756 - RNA, 22 nt, Human
ggagugaguacuggaguagcug

SEQ ID NO: 1009757 - RNA, 22 nt, Human
gccugccugcugucaucugccu

SEQ ID NO: 1009758 - RNA, 19 nt, Human
aggugaugugacucuagaa

SEQ ID NO: 1009759 - RNA, 22 nt, Human
uacuuuuagccuauuugauucu

SEQ ID NO: 1009760 - RNA, 23 nt, Human
agcuggguggccugcgugaagcu

SEQ ID NO: 1009761 - RNA, 22 nt, Human
agaacuguccuuggaggagagu

SEQ ID NO: 1009762 - RNA, 22 nt, Human
augugucaauuuucaaaugcuu

SEQ ID NO: 1009763 - RNA, 22 nt, Human
agucuucucauuucacaugcuu

SEQ ID NO: 1009764 - RNA, 22 nt, Human
gagccagguuggaggcugcagu

SEQ ID NO: 1009765 - RNA, 22 nt, Human
gugucacaagagcccaggaaac

SEQ ID NO: 1009766 - RNA, 22 nt, Human
cugcuuuggacaacuauucuug

SEQ ID NO: 1009767 - RNA, 17 nt, Human
gcuuccucaugcaguuc

SEQ ID NO: 1009768 - RNA, 22 nt, Human
agaggggcucauauccugucau

SEQ ID NO: 1009769 - RNA, 22 nt, Human
cccagccucuguuugcuccucu

SEQ ID NO: 1009770 - RNA, 22 nt, Human
caggccugcaggaaaggcuccc

SEQ ID NO: 1009771 - RNA, 22 nt, Human
ccagccuggagggcaguggugg

SEQ ID NO: 1009772 - RNA, 22 nt, Human
agaagccagcuucagcugcccg

SEQ ID NO: 1009773 - RNA, 22 nt, Human
gagauguacaauguguauuaau

SEQ ID NO: 1009774 - RNA, 22 nt, Human
agcaauauuucagcuagcaggu

SEQ ID NO: 1009775 - RNA, 22 nt, Human
ucccugggccacagcugugagc

SEQ ID NO: 1009776 - RNA, 22 nt, Human
ggggcucaguucggacagccug

SEQ ID NO: 1009777 - RNA, 17 nt, Human
accaggcaacacgccca

SEQ ID NO: 1009778 - RNA, 22 nt, Human
aaacucuggagauguuuaugca

SEQ ID NO: 1009779 - RNA, 22 nt, Human
ccccagccuuccaugggaauug

SEQ ID NO: 1009780 - RNA, 20 nt, Human
uucaggauucuagaccacac

SEQ ID NO: 1009781 - RNA, 22 nt, Human
agagugauucuaguuagggaau

SEQ ID NO: 1009782 - RNA, 22 nt, Human
gcuguccucugaucucuggagg

SEQ ID NO: 1009783 - RNA, 22 nt, Human
ucugcuguucauucuuuuagcu

SEQ ID NO: 1009784 - RNA, 22 nt, Human
uagacacaucaaguauaguuaa

SEQ ID NO: 1009785 - RNA, 22 nt, Human
accaggcagcugggggugaugu

SEQ ID NO: 1009786 - RNA, 21 nt, Human
acagcaagccuucacaugagu

SEQ ID NO: 1009787 - RNA, 22 nt, Human
cagggugcgccacucagaugua

SEQ ID NO: 1009788 - RNA, 22 nt, Human
gccucugccaagggggcugcgg

SEQ ID NO: 1009789 - RNA, 22 nt, Human
uuuauuagugcuuguaucacug

SEQ ID NO: 1009790 - RNA, 22 nt, Human
agcaagcuaccuagauagucua

SEQ ID NO: 1009791 - RNA, 18 nt, Human
cugaggcuggcaggagcc

SEQ ID NO: 1009792 - RNA, 22 nt, Human
gcugccuccugaaagcgcucug

SEQ ID NO: 1009793 - RNA, 22 nt, Human
cauggcaggaggcugcuggcag

SEQ ID NO: 1009794 - RNA, 22 nt, Human
ccagggcaauuauuuggagggu

SEQ ID NO: 1009795 - RNA, 22 nt, Human
aucugccuccaaguccaugugu

SEQ ID NO: 1009796 - RNA, 22 nt, Human
gccugugacucgucuugggcca

SEQ ID NO: 1009797 - RNA, 22 nt, Human
cuuuccaaugucacuaugaauc

SEQ ID NO: 1009798 - RNA, 22 nt, Human
ucuggccaggauggcaagacca

SEQ ID NO: 1009799 - RNA, 22 nt, Human
cuuccugguuugaagcucgccg

SEQ ID NO: 1009800 - RNA, 22 nt, Human
acuguguggaaauuugugaggg

SEQ ID NO: 1009801 - RNA, 22 nt, Human
aaccauuugccauuaucuuaag

SEQ ID NO: 1009802 - RNA, 22 nt, Human
uaagaacagugacagccaacau

SEQ ID NO: 1009803 - RNA, 22 nt, Human
ccugagugaauucccucacugu

SEQ ID NO: 1009804 - RNA, 22 nt, Human
ucuuuauuucugaaucccccau

SEQ ID NO: 1009805 - RNA, 22 nt, Human
gaacacauuagucugaguuggc

SEQ ID NO: 1009806 - RNA, 22 nt, Human
gcugccucaggcaccuccuggc

SEQ ID NO: 1009807 - RNA, 22 nt, Human
agccucucuccagcuuggcaga

SEQ ID NO: 1009808 - RNA, 22 nt, Human
ccaggcagagggauccccaucc

SEQ ID NO: 1009809 - RNA, 17 nt, Human
cugcuuugugcaacgcu

SEQ ID NO: 1009810 - RNA, 22 nt, Human
cucagggcuugaguguccagga

SEQ ID NO: 1009811 - RNA, 22 nt, Human
aaauguguuccuuugcuacaga

SEQ ID NO: 1009812 - RNA, 21 nt, Human
acaguucaugauaacuccauc

SEQ ID NO: 1009813 - RNA, 22 nt, Human
gccugucaauuuuguguacaau

SEQ ID NO: 1009814 - RNA, 22 nt, Human
caggcagcaucagucugcugua

SEQ ID NO: 1009815 - RNA, 22 nt, Human
uugagcacaacucuuggagagc

SEQ ID NO: 1009816 - RNA, 22 nt, Human
cuaguccagucucaaaaugcua

SEQ ID NO: 1009817 - RNA, 22 nt, Human
ucacaggguaucugggauggau

SEQ ID NO: 1009818 - RNA, 22 nt, Human
gugccugguuuggggaguguuc

SEQ ID NO: 1009819 - RNA, 22 nt, Human
ugcuuuauucccuucugaugug

SEQ ID NO: 1009820 - RNA, 22 nt, Human
cagaaauguucuaaugauucag

SEQ ID NO: 1009821 - RNA, 22 nt, Human
gccuggaguuguggugaagcca

SEQ ID NO: 1009822 - RNA, 22 nt, Human
ugaugguugauuauaaaucagu

SEQ ID NO: 1009823 - RNA, 22 nt, Human
ucucagagaccugaacucccug

SEQ ID NO: 1009824 - RNA, 22 nt, Human
guguuuccucuagaagccaugg

SEQ ID NO: 1009825 - RNA, 22 nt, Human
gccucugcaggugcgguuaucc

SEQ ID NO: 1009826 - RNA, 22 nt, Human
ucuccuggauggaccuucucuu

SEQ ID NO: 1009827 - RNA, 22 nt, Human
ucacaggguuuggaagccuccu

SEQ ID NO: 1009828 - RNA, 19 nt, Human
agauggggaagagugugag

SEQ ID NO: 1009829 - RNA, 22 nt, Human
ugcucauuggcgaucugaggga

SEQ ID NO: 1009830 - RNA, 22 nt, Human
aagagcugauuaagucaugagg

SEQ ID NO: 1009831 - RNA, 22 nt, Human
cccagcuugcccaggacugagg

SEQ ID NO: 1009832 - RNA, 22 nt, Human
gccuggaguucagccaaguccc

SEQ ID NO: 1009833 - RNA, 18 nt, Human
cacaggcucccagugagg

SEQ ID NO: 1009834 - RNA, 22 nt, Human
gcccaggcuagcguagagugca

SEQ ID NO: 1009835 - RNA, 20 nt, Human
cugccuggaggccucuaccu

SEQ ID NO: 1009836 - RNA, 17 nt, Human
gccugcaggcccgcaga

SEQ ID NO: 1009837 - RNA, 22 nt, Human
ucaugaacauggaauaucuuuu

SEQ ID NO: 1009838 - RNA, 22 nt, Human
caugcacaaagguaagaugcgu

SEQ ID NO: 1009839 - RNA, 22 nt, Human
gcagcaggagaguuuguccugc

SEQ ID NO: 1009840 - RNA, 22 nt, Human
aauaucuucuaaggauagaacu

SEQ ID NO: 1009841 - RNA, 21 nt, Human
agguggggcugcaccucugcu

SEQ ID NO: 1009842 - RNA, 22 nt, Human
uaucuugagagacaacacagca

SEQ ID NO: 1009843 - RNA, 23 nt, Human
cugcugugaaacaugguuuuggu

SEQ ID NO: 1009844 - RNA, 22 nt, Human
agggucugacaaugugacuuag

SEQ ID NO: 1009845 - RNA, 19 nt, Human
uccucaggggcucacagac

SEQ ID NO: 1009846 - RNA, 22 nt, Human
ggcccugggaugcucagcagug

SEQ ID NO: 1009847 - RNA, 22 nt, Human
cucucugaggaaggagcaucug

SEQ ID NO: 1009848 - RNA, 22 nt, Human
aaaggccauuacuugcuuuuag

SEQ ID NO: 1009849 - RNA, 22 nt, Human
cacagcugaaguagccaugugg

SEQ ID NO: 1009850 - RNA, 20 nt, Human
auauguguacguguauacau

SEQ ID NO: 1009851 - RNA, 22 nt, Human
cuggccuuuaaaaugaccuuau

SEQ ID NO: 1009852 - RNA, 22 nt, Human
ggaggagacccugugucaguuu

SEQ ID NO: 1009853 - RNA, 22 nt, Human
cagcauuuucuuaauguaggug

SEQ ID NO: 1009854 - RNA, 22 nt, Human
cuguagcaaguuauucaauaaa

SEQ ID NO: 1009855 - RNA, 22 nt, Human
guuaucaugcuucaucaucacu

SEQ ID NO: 1009856 - RNA, 22 nt, Human
gucaugccuggcuucuuagaca

SEQ ID NO: 1009857 - RNA, 22 nt, Human
ucugcugugauuugcuaccugu

SEQ ID NO: 1009858 - RNA, 22 nt, Human
cagagcauugagggucugccaa

SEQ ID NO: 1009859 - RNA, 22 nt, Human
ugcccaagcagaggagugauuc

SEQ ID NO: 1009860 - RNA, 22 nt, Human
uuccucuccucccaccagguga

SEQ ID NO: 1009861 - RNA, 22 nt, Human
uccugagauguggagcuccaug

SEQ ID NO: 1009862 - RNA, 22 nt, Human
uacugccuggagcauuggugcu

SEQ ID NO: 1009863 - RNA, 23 nt, Human
gcaggugguucgaacagaaguuu

SEQ ID NO: 1009864 - RNA, 22 nt, Human
ggggaugguggcauuuguaaaa

SEQ ID NO: 1009865 - RNA, 22 nt, Human
gccaggcauuuguuaggugcug

SEQ ID NO: 1009866 - RNA, 20 nt, Human
cagggcucugggccuggccu

SEQ ID NO: 1009867 - RNA, 22 nt, Human
uuaacauacaucaugaacaaug

SEQ ID NO: 1009868 - RNA, 22 nt, Human
cuuaacagcaagaucuguguca

SEQ ID NO: 1009869 - RNA, 22 nt, Human
ggucccugaagaggccuggggu

SEQ ID NO: 1009870 - RNA, 22 nt, Human
cuccccagguucaggagguggg

SEQ ID NO: 1009871 - RNA, 22 nt, Human
cugaggccuguguuggggcagu

SEQ ID NO: 1009872 - RNA, 22 nt, Human
cugggacagagcagcagugggg

SEQ ID NO: 1009873 - RNA, 22 nt, Human
uggcagcugaauggcuggaugg

SEQ ID NO: 1009874 - RNA, 22 nt, Human
cagugcagccaaggacaggcac

SEQ ID NO: 1009875 - RNA, 22 nt, Human
aaucacaauuacuuuugcacca

SEQ ID NO: 1009876 - RNA, 22 nt, Human
ucugccuucgcugcucccugaa

SEQ ID NO: 1009877 - RNA, 22 nt, Human
aaugugaaaccgcacagaauaa

SEQ ID NO: 1009878 - RNA, 22 nt, Human
accugccuaguugguucugccc

SEQ ID NO: 1009879 - RNA, 22 nt, Human
uggcccugcagaacuagccugg

SEQ ID NO: 1009880 - RNA, 22 nt, Human
aucucagggcuggagcccugga

SEQ ID NO: 1009881 - RNA, 22 nt, Human
aaaggucagcugccaucguucu

SEQ ID NO: 1009882 - RNA, 22 nt, Human
cagagguauugcaaaagccuag

SEQ ID NO: 1009883 - RNA, 22 nt, Human
ugagguguguccccagggaggu

SEQ ID NO: 1009884 - RNA, 22 nt, Human
aggcuggagggcaauggcaaga

SEQ ID NO: 1009885 - RNA, 22 nt, Human
agucuugcucuugcaucugcuu

SEQ ID NO: 1009886 - RNA, 22 nt, Human
gcuggccucaucacugacuucu

SEQ ID NO: 1009887 - RNA, 22 nt, Human
ucaaauguucccuguacuggcc

SEQ ID NO: 1009888 - RNA, 22 nt, Human
uucauacaguggcugcacucca

SEQ ID NO: 1009889 - RNA, 22 nt, Human
accccagcucugagccacacca

SEQ ID NO: 1009890 - RNA, 22 nt, Human
gcaugguggccuuaggguagcc

SEQ ID NO: 1009891 - RNA, 18 nt, Human
uggcagccagcugcuccu

SEQ ID NO: 1009892 - RNA, 22 nt, Human
gcagggugugucucauacaguu

SEQ ID NO: 1009893 - RNA, 22 nt, Human
gggcagaggcucuggcccaucc

SEQ ID NO: 1009894 - RNA, 22 nt, Human
aggacaguguggaagagggugc

SEQ ID NO: 1009895 - RNA, 22 nt, Human
gaacacaucacauuuuacagug

SEQ ID NO: 1009896 - RNA, 22 nt, Human
auuguaucuugucauuaugcau

SEQ ID NO: 1009897 - RNA, 22 nt, Human
ccagggcuccauugcucauccu

SEQ ID NO: 1009898 - RNA, 22 nt, Human
gccuaauaugcaaaauugauac

SEQ ID NO: 1009899 - RNA, 17 nt, Human
accagccucuccugggg

SEQ ID NO: 1009900 - RNA, 22 nt, Human
aagaugcuuauugcuccugcag

SEQ ID NO: 1009901 - RNA, 22 nt, Human
gagcucugacugcugggugaca

SEQ ID NO: 1009902 - RNA, 22 nt, Human
gcucugugccacaugcaguguu

SEQ ID NO: 1009903 - RNA, 22 nt, Human
ccaggcaucacgggcauguggc

SEQ ID NO: 1009904 - RNA, 22 nt, Human
ucucuggaagcgcagaucuguu

SEQ ID NO: 1009905 - RNA, 22 nt, Human
ggugcugguucaggguggcugu

SEQ ID NO: 1009906 - RNA, 22 nt, Human
gggagcugagcuggaagagaau

SEQ ID NO: 1009907 - RNA, 22 nt, Human
aauaucagcacuuuugugguau

SEQ ID NO: 1009908 - RNA, 22 nt, Human
cauguacaguuuuucuguccug

SEQ ID NO: 1009909 - RNA, 22 nt, Human
ugaugguuuuauuaauaggacc

SEQ ID NO: 1009910 - RNA, 22 nt, Human
ugcuuucaaaggcuuucuagau

SEQ ID NO: 1009911 - RNA, 22 nt, Human
augugcaaauccaaugugaaug

SEQ ID NO: 1009912 - RNA, 22 nt, Human
gcugagcugcuguucauccugc

SEQ ID NO: 1009913 - RNA, 20 nt, Human
agagccuugaggaagaugau

SEQ ID NO: 1009914 - RNA, 22 nt, Human
ccaggaagccucagaugcugag

SEQ ID NO: 1009915 - RNA, 22 nt, Human
aguugacauccagagacauucu

SEQ ID NO: 1009916 - RNA, 22 nt, Human
uucaagaugucuucacaauagu

SEQ ID NO: 1009917 - RNA, 22 nt, Human
uguucauaucauuuugaaagcu

SEQ ID NO: 1009918 - RNA, 22 nt, Human
cugaggaagacagcagcugugu

SEQ ID NO: 1009919 - RNA, 22 nt, Human
gugagcaggauuucauggugua

SEQ ID NO: 1009920 - RNA, 22 nt, Human
gucccaggcuuauguggagcuu

SEQ ID NO: 1009921 - RNA, 22 nt, Human
acugugcaugaaccgaaacaaa

SEQ ID NO: 1009922 - RNA, 22 nt, Human
ucccagaggaaauggcagcuga

SEQ ID NO: 1009923 - RNA, 21 nt, Human
auucagaaagggaauaaacuc

SEQ ID NO: 1009924 - RNA, 22 nt, Human
uaauccacaauagagauuaucu

SEQ ID NO: 1009925 - RNA, 22 nt, Human
ugggagcucagaaagggagguc

SEQ ID NO: 1009926 - RNA, 22 nt, Human
caaggcugcugcgggucgcacc

SEQ ID NO: 1009927 - RNA, 22 nt, Human
ugaagcaggguggccagauugu

SEQ ID NO: 1009928 - RNA, 22 nt, Human
cagugcuccugauguacccuug

SEQ ID NO: 1009929 - RNA, 22 nt, Human
acugcaucugaaacauggguca

SEQ ID NO: 1009930 - RNA, 22 nt, Human
auauuucuugagcaccugguau

SEQ ID NO: 1009931 - RNA, 22 nt, Human
augcugugccuucucugugcca

SEQ ID NO: 1009932 - RNA, 17 nt, Human
ucugccgacugccagcu

SEQ ID NO: 1009933 - RNA, 22 nt, Human
auguaguauuuggaaauguaaa

SEQ ID NO: 1009934 - RNA, 21 nt, Human
gaggcugucugcugcuggccu

SEQ ID NO: 1009935 - RNA, 22 nt, Human
ccuagagcucugcuuuaucuaa

SEQ ID NO: 1009936 - RNA, 22 nt, Human
acucagaagauauaaugacuca

SEQ ID NO: 1009937 - RNA, 22 nt, Human
cugggacaugauagaaacagau

SEQ ID NO: 1009938 - RNA, 22 nt, Human
auaaggcacacauagauagggu

SEQ ID NO: 1009939 - RNA, 22 nt, Human
gaggccugaggcugccuggagc

SEQ ID NO: 1009940 - RNA, 22 nt, Human
cugcuuugacuguuaagaacca

SEQ ID NO: 1009941 - RNA, 22 nt, Human
cagagcuguccaaacccugaca

SEQ ID NO: 1009942 - RNA, 22 nt, Human
auauuguugacuauaagaguaa

SEQ ID NO: 1009943 - RNA, 22 nt, Human
uggcuuccugcauggauccucu

SEQ ID NO: 1009944 - RNA, 22 nt, Human
ugcucuguaaggucagaaaagg

SEQ ID NO: 1009945 - RNA, 22 nt, Human
ugggcucugaagucagucugcu

SEQ ID NO: 1009946 - RNA, 20 nt, Human
ggccuuggccucuuugcagc

SEQ ID NO: 1009947 - RNA, 22 nt, Human
caagaugccccugguagggauc

SEQ ID NO: 1009948 - RNA, 22 nt, Human
gagggucccugcucagggccag

SEQ ID NO: 1009949 - RNA, 21 nt, Human
cacucaggguaugugccaggc

SEQ ID NO: 1009950 - RNA, 22 nt, Human
gacagaagaggaacuuggacag

SEQ ID NO: 1009951 - RNA, 22 nt, Human
caguuuuugccauuaagaguaa

SEQ ID NO: 1009952 - RNA, 22 nt, Human
gccuggagcucuccacuugggg

SEQ ID NO: 1009953 - RNA, 22 nt, Human
uaaagguagugugacauauugu

SEQ ID NO: 1009954 - RNA, 22 nt, Human
aauguguguucggggcccagag

SEQ ID NO: 1009955 - RNA, 22 nt, Human
ugagacaguuuuucuauuucca

SEQ ID NO: 1009956 - RNA, 22 nt, Human
agucccagcucugccacuuacu

SEQ ID NO: 1009957 - RNA, 22 nt, Human
agugcuuucuugcuccaucagu

SEQ ID NO: 1009958 - RNA, 22 nt, Human
ucccaggaagaucccagggacc

SEQ ID NO: 1009959 - RNA, 22 nt, Human
auuuguugcuagcagcacugau

SEQ ID NO: 1009960 - RNA, 22 nt, Human
aucuuguuaaaaugcagaaacu

SEQ ID NO: 1009961 - RNA, 22 nt, Human
uugugguuaaccgcacauuuuu

SEQ ID NO: 1009962 - RNA, 22 nt, Human
ucauccaguucacauggugagu

SEQ ID NO: 1009963 - RNA, 22 nt, Human
aagcuggcaauuaucaaaacug

SEQ ID NO: 1009964 - RNA, 22 nt, Human
uuuaugaacuacagauauaacu

SEQ ID NO: 1009965 - RNA, 22 nt, Human
ccacagggcacaagggagguug

SEQ ID NO: 1009966 - RNA, 22 nt, Human
gcugugagggucuagugaggug

SEQ ID NO: 1009967 - RNA, 20 nt, Human
agugccagggcaggugagag

SEQ ID NO: 1009968 - RNA, 22 nt, Human
ucacauuuguuccucugcacuu

SEQ ID NO: 1009969 - RNA, 22 nt, Human
cugaggcucccucgggucugcu

SEQ ID NO: 1009970 - RNA, 22 nt, Human
cucuggagaacuccuugugucu

SEQ ID NO: 1009971 - RNA, 22 nt, Human
gcagcagagaacacaaugaugg

SEQ ID NO: 1009972 - RNA, 19 nt, Human
gcugcuggcucuggcugga

SEQ ID NO: 1009973 - RNA, 22 nt, Human
ugugaaauauuuauauacucaa

SEQ ID NO: 1009974 - RNA, 22 nt, Human
cuucuuuacuuucuagaaauaa

SEQ ID NO: 1009975 - RNA, 22 nt, Human
gggucuccauguuaacaucacu

SEQ ID NO: 1009976 - RNA, 22 nt, Human
gcccagcaggacagagugguuu

SEQ ID NO: 1009977 - RNA, 22 nt, Human
aagcagccaccucaucuccacu

SEQ ID NO: 1009978 - RNA, 18 nt, Human
ucuggcucaggacugaac

SEQ ID NO: 1009979 - RNA, 22 nt, Human
cucaggagacaguguccacaug

SEQ ID NO: 1009980 - RNA, 22 nt, Human
ggaggguuagcaaaggcacaga

SEQ ID NO: 1009981 - RNA, 22 nt, Human
ccugagagagaagcgaccuggu

SEQ ID NO: 1009982 - RNA, 22 nt, Human
agcucagcuuccucuccaugcu

SEQ ID NO: 1009983 - RNA, 22 nt, Human
agcuuuaugaggagaccuuagu

SEQ ID NO: 1009984 - RNA, 22 nt, Human
gccuccugaaaggaagagcucc

SEQ ID NO: 1009985 - RNA, 22 nt, Human
uuuguuuacucauucauugaug

SEQ ID NO: 1009986 - RNA, 22 nt, Human
ggucccaggagaauaggugcaa

SEQ ID NO: 1009987 - RNA, 22 nt, Human
agccauugaguuuuaugugcua

SEQ ID NO: 1009988 - RNA, 22 nt, Human
auggacaggaacucccuuggca

SEQ ID NO: 1009989 - RNA, 22 nt, Human
ccccagcucagugcagggacau

SEQ ID NO: 1009990 - RNA, 22 nt, Human
guuauguauugggaaauccaag

SEQ ID NO: 1009991 - RNA, 22 nt, Human
gguggccucugcaggccucgac

SEQ ID NO: 1009992 - RNA, 22 nt, Human
ugagaggcagaauggugccugc

SEQ ID NO: 1009993 - RNA, 20 nt, Human
cucucccagcacagcuuccu

SEQ ID NO: 1009994 - RNA, 22 nt, Human
uacccagcccaugccuaccuca

SEQ ID NO: 1009995 - RNA, 22 nt, Human
gccucugcggggcccgagcccg

SEQ ID NO: 1009996 - RNA, 22 nt, Human
aaggcugaguaaaacagagaac

SEQ ID NO: 1009997 - RNA, 22 nt, Human
cuuuggcaaugucauuuucaau

SEQ ID NO: 1009998 - RNA, 22 nt, Human
gccugcaguucugugcuaggca

SEQ ID NO: 1009999 - RNA, 17 nt, Human
ugcugccaagucccaac

SEQ ID NO: 1010000 - RNA, 22 nt, Human
gagccaggucgggccgcggcga

SEQ ID NO: 1010001 - RNA, 22 nt, Human
aaauaguucagccacggugacu

SEQ ID NO: 1010002 - RNA, 22 nt, Human
gaagcagcuaggaucuucauuu

SEQ ID NO: 1010003 - RNA, 22 nt, Human
gccuucccacccugcgaggcug

SEQ ID NO: 1010004 - RNA, 22 nt, Human
cucuucuuggcccccaugaggg

SEQ ID NO: 1010005 - RNA, 22 nt, Human
guucuucaucauuuuagauagg

SEQ ID NO: 1010006 - RNA, 22 nt, Human
gcugucuguucgagcguguguu

SEQ ID NO: 1010007 - RNA, 22 nt, Human
auaguaacuggcauguuuauga

SEQ ID NO: 1010008 - RNA, 20 nt, Human
agagaauucccuuuggagau

SEQ ID NO: 1010009 - RNA, 20 nt, Human
gcuuccuucccagcccccac

SEQ ID NO: 1010010 - RNA, 22 nt, Human
ucuccgaucacagguuuucaau

SEQ ID NO: 1010011 - RNA, 19 nt, Human
ucucuggggacacuuucac

SEQ ID NO: 1010012 - RNA, 22 nt, Human
auuugcagagcucugaauuuug

SEQ ID NO: 1010013 - RNA, 22 nt, Human
gggccccuuguaucucuggcuc

SEQ ID NO: 1010014 - RNA, 22 nt, Human
ucccucuguguugggcaugccu

SEQ ID NO: 1010015 - RNA, 22 nt, Human
cuuagggaaucuuagagcugga

SEQ ID NO: 1010016 - RNA, 22 nt, Human
aaaugcacagguuuuaaauccu

SEQ ID NO: 1010017 - RNA, 22 nt, Human
uaguccaguaaaacagcuaacg

SEQ ID NO: 1010018 - RNA, 22 nt, Human
cuuacaaaggagaggagauagg

SEQ ID NO: 1010019 - RNA, 22 nt, Human
ccucucucuccugcacacacac

SEQ ID NO: 1010020 - RNA, 22 nt, Human
cuggcuggccggaggcaucccu

SEQ ID NO: 1010021 - RNA, 22 nt, Human
acauuuacagugcuagacaauc

SEQ ID NO: 1010022 - RNA, 22 nt, Human
cagcuccacuugaguggggccu

SEQ ID NO: 1010023 - RNA, 22 nt, Human
guccagugacaaguagcuggcc

SEQ ID NO: 1010024 - RNA, 22 nt, Human
caugaaaucugaguauguuucc

SEQ ID NO: 1010025 - RNA, 22 nt, Human
agccuggcuguaaccucauggu

SEQ ID NO: 1010026 - RNA, 22 nt, Human
gcaguggcaccgcuggcucugg

SEQ ID NO: 1010027 - RNA, 22 nt, Human
agagugaagguugacacuucac

SEQ ID NO: 1010028 - RNA, 20 nt, Human
uucuucucuaguuaucuuca

SEQ ID NO: 1010029 - RNA, 22 nt, Human
caggcugagcucuggccugggc

SEQ ID NO: 1010030 - RNA, 22 nt, Human
uuagcugcauuaucaaaguuau

SEQ ID NO: 1010031 - RNA, 22 nt, Human
uucucagaugauucagauaaac

SEQ ID NO: 1010032 - RNA, 22 nt, Human
guccaugauucugugacacccu

SEQ ID NO: 1010033 - RNA, 22 nt, Human
gacuuucucuccucccaggugu

SEQ ID NO: 1010034 - RNA, 22 nt, Human
ucuuugaauuucugacugucuu

SEQ ID NO: 1010035 - RNA, 22 nt, Human
aagcagccacuggccaguuaua

SEQ ID NO: 1010036 - RNA, 18 nt, Human
uguuuauuuuucucuuac

SEQ ID NO: 1010037 - RNA, 23 nt, Human
gcugucaguuguuuuugucucua

SEQ ID NO: 1010038 - RNA, 22 nt, Human
cugccuuugcccuugacacugu

SEQ ID NO: 1010039 - RNA, 22 nt, Human
uuucagaucauuuuuuaaguac

SEQ ID NO: 1010040 - RNA, 22 nt, Human
acaaaguccugguguauggcca

SEQ ID NO: 1010041 - RNA, 22 nt, Human
aaacugaauucccaagggcaug

SEQ ID NO: 1010042 - RNA, 22 nt, Human
ccaaaguccauaguuuacuuua

SEQ ID NO: 1010043 - RNA, 22 nt, Human
uauaacacucagaaagaaucau

SEQ ID NO: 1010044 - RNA, 22 nt, Human
ucaaauaugugauagaagcuaa

SEQ ID NO: 1010045 - RNA, 22 nt, Human
ucacacgugagguucuauccug

SEQ ID NO: 1010046 - RNA, 22 nt, Human
ugugaaagauacuaggcagagg

SEQ ID NO: 1010047 - RNA, 19 nt, Human
ggcugucuggcguguggau

SEQ ID NO: 1010048 - RNA, 22 nt, Human
uaacaauaguguuugcuaguca

SEQ ID NO: 1010049 - RNA, 22 nt, Human
accugccucuaagcagcaggug

SEQ ID NO: 1010050 - RNA, 22 nt, Human
ugcaguggaaagacucagacuu

SEQ ID NO: 1010051 - RNA, 22 nt, Human
gucaggauuuacaaacuucagu

SEQ ID NO: 1010052 - RNA, 22 nt, Human
ucuguucauaguaguguauaug

SEQ ID NO: 1010053 - RNA, 22 nt, Human
gaggugaguggaucacgagguc

SEQ ID NO: 1010054 - RNA, 22 nt, Human
gccuggcucacagagcagccuu

SEQ ID NO: 1010055 - RNA, 22 nt, Human
uggugcaagucucugaggaggg

SEQ ID NO: 1010056 - RNA, 22 nt, Human
ucagauggcacacagagccugc

SEQ ID NO: 1010057 - RNA, 22 nt, Human
cugcccugcuugaugacagcga

SEQ ID NO: 1010058 - RNA, 22 nt, Human
gcugaagcugcagcaggaggaa

SEQ ID NO: 1010059 - RNA, 22 nt, Human
aggaaaugcugaugcuccugga

SEQ ID NO: 1010060 - RNA, 20 nt, Human
gacaggagaguuagguaggu

SEQ ID NO: 1010061 - RNA, 22 nt, Human
gcuguguuugacaguagcagac

SEQ ID NO: 1010062 - RNA, 22 nt, Human
gagccugaugaaacaggcagac

SEQ ID NO: 1010063 - RNA, 22 nt, Human
ccaaggaggccccaggucagcu

SEQ ID NO: 1010064 - RNA, 22 nt, Human
caaggaaaacagaugaucaaca

SEQ ID NO: 1010065 - RNA, 22 nt, Human
cccugaggcaaaggcuagaguu

SEQ ID NO: 1010066 - RNA, 17 nt, Human
gcacugaacaauccugu

SEQ ID NO: 1010067 - RNA, 22 nt, Human
acagugaaugcccaagaaaagu

SEQ ID NO: 1010068 - RNA, 22 nt, Human
aaaugugucauauucaaaguca

SEQ ID NO: 1010069 - RNA, 22 nt, Human
agggcagaggcggacacggaag

SEQ ID NO: 1010070 - RNA, 22 nt, Human
augcugugguagacagcauucc

SEQ ID NO: 1010071 - RNA, 19 nt, Human
uguggccaugguucagcug

SEQ ID NO: 1010072 - RNA, 22 nt, Human
gcuugcuggugccugcaggcuc

SEQ ID NO: 1010073 - RNA, 20 nt, Human
ccagcugagccaaggggaga

SEQ ID NO: 1010074 - RNA, 22 nt, Human
cucagaguccauaguuuacagu

SEQ ID NO: 1010075 - RNA, 22 nt, Human
aaguaugaaucaaagacuaucu

SEQ ID NO: 1010076 - RNA, 22 nt, Human
cacaugugugcugaggacugug

SEQ ID NO: 1010077 - RNA, 22 nt, Human
cacaaugugguuugucaucuuu

SEQ ID NO: 1010078 - RNA, 19 nt, Human
aggucauugauagugcagg

SEQ ID NO: 1010079 - RNA, 22 nt, Human
guuauguaugagggaaugauua

SEQ ID NO: 1010080 - RNA, 22 nt, Human
caggugcuguccugcacauguc

SEQ ID NO: 1010081 - RNA, 22 nt, Human
uuugaaaguccuaggagagucc

SEQ ID NO: 1010082 - RNA, 22 nt, Human
gaagaacaagcagugcuuuccu

SEQ ID NO: 1010083 - RNA, 22 nt, Human
caccuggcuggaagugcuccgg

SEQ ID NO: 1010084 - RNA, 22 nt, Human
cagauggcugccaagaugggcu

SEQ ID NO: 1010085 - RNA, 21 nt, Human
gccucugcugucuuauuguga

SEQ ID NO: 1010086 - RNA, 22 nt, Human
uuugcauuucuaaugagcuccg

SEQ ID NO: 1010087 - RNA, 20 nt, Human
cugcugugugugccucagcc

SEQ ID NO: 1010088 - RNA, 23 nt, Human
aggauccugguacaggagcagag

SEQ ID NO: 1010089 - RNA, 22 nt, Human
uuugcauucuagaaaaauuucu

SEQ ID NO: 1010090 - RNA, 23 nt, Human
cauguacagaguuugauaaagug

SEQ ID NO: 1010091 - RNA, 22 nt, Human
cuugcugucccuugguaugaac

SEQ ID NO: 1010092 - RNA, 22 nt, Human
gcaggaugggagcuucacuuug

SEQ ID NO: 1010093 - RNA, 22 nt, Human
uugaaagugccaaguccuagug

SEQ ID NO: 1010094 - RNA, 22 nt, Human
cuucccuuggugaacagagcau

SEQ ID NO: 1010095 - RNA, 22 nt, Human
ggcaugggagugagcaaccuua

SEQ ID NO: 1010096 - RNA, 22 nt, Human
uguaugcuuuccaaaaaugcug

SEQ ID NO: 1010097 - RNA, 22 nt, Human
ccaccagcuuugccacccugcu

SEQ ID NO: 1010098 - RNA, 22 nt, Human
gagcuuaggccagggacaggga

SEQ ID NO: 1010099 - RNA, 22 nt, Human
ugcuuccugaggccgucuucuc

SEQ ID NO: 1010100 - RNA, 21 nt, Human
ggcagcccgcccucuccuggc

SEQ ID NO: 1010101 - RNA, 22 nt, Human
caggggacaguaugguggauga

SEQ ID NO: 1010102 - RNA, 22 nt, Human
guacauuuugagguuaaaacaa

SEQ ID NO: 1010103 - RNA, 22 nt, Human
uucugucaaauuugccauaugg

SEQ ID NO: 1010104 - RNA, 22 nt, Human
gucccaggcagagucaggaggg

SEQ ID NO: 1010105 - RNA, 22 nt, Human
guaucuuuugguggaaaaauaa

SEQ ID NO: 1010106 - RNA, 22 nt, Human
uaucuguuaugggcugaauugc

SEQ ID NO: 1010107 - RNA, 21 nt, Human
ucuccaguauccuucucugag

SEQ ID NO: 1010108 - RNA, 22 nt, Human
auaguauuuaauaguuagcuca

SEQ ID NO: 1010109 - RNA, 19 nt, Human
gcaggguguugacuguccc

SEQ ID NO: 1010110 - RNA, 22 nt, Human
gccuggcugcuagccagaggca

SEQ ID NO: 1010111 - RNA, 18 nt, Human
uccucucuuuccccaggg

SEQ ID NO: 1010112 - RNA, 22 nt, Human
ggccagaggccacagcuguguc

SEQ ID NO: 1010113 - RNA, 18 nt, Human
ccuggcuuccaucuuggu

SEQ ID NO: 1010114 - RNA, 22 nt, Human
ugcauuuccagauuucuggagu

SEQ ID NO: 1010115 - RNA, 22 nt, Human
gucaggauuuuaaaaucccagu

SEQ ID NO: 1010116 - RNA, 22 nt, Human
aauuucagaacccaaauuagcg

SEQ ID NO: 1010117 - RNA, 22 nt, Human
ugucugguggguugacaggcag

SEQ ID NO: 1010118 - RNA, 22 nt, Human
uaaauucagugaguaauuucug

SEQ ID NO: 1010119 - RNA, 19 nt, Human
gggcagaauggcaucucag

SEQ ID NO: 1010120 - RNA, 22 nt, Human
aggcccaguuauccuacuuguu

SEQ ID NO: 1010121 - RNA, 22 nt, Human
acauagcuuaaaugagaagaua

SEQ ID NO: 1010122 - RNA, 22 nt, Human
cacacaugagucuccccauugg

SEQ ID NO: 1010123 - RNA, 22 nt, Human
augcuauacucaaagaaauuca

SEQ ID NO: 1010124 - RNA, 22 nt, Human
cugggagauugaggccauggug

SEQ ID NO: 1010125 - RNA, 22 nt, Human
ucaugacaucuguuuaucucaa

SEQ ID NO: 1010126 - RNA, 22 nt, Human
uuagcaucugcuguaagcuuau

SEQ ID NO: 1010127 - RNA, 22 nt, Human
cucuuaguuuaucuuugacaaa

SEQ ID NO: 1010128 - RNA, 22 nt, Human
uauaagaaacaaggcaaauuuu

SEQ ID NO: 1010129 - RNA, 22 nt, Human
ugcagagguuuccaggcaaguu

SEQ ID NO: 1010130 - RNA, 22 nt, Human
ccucuggucccagcucugcugc

SEQ ID NO: 1010131 - RNA, 22 nt, Human
ggcacugaauuucuuggcaucu

SEQ ID NO: 1010132 - RNA, 22 nt, Human
ccuggugcuuaccagagcuuuu

SEQ ID NO: 1010133 - RNA, 21 nt, Human
uguaugcacgcacaugcacac

SEQ ID NO: 1010134 - RNA, 17 nt, Human
ucaggcugggugcagug

SEQ ID NO: 1010135 - RNA, 22 nt, Human
gguggguauaguuagggccucu

SEQ ID NO: 1010136 - RNA, 22 nt, Human
gccagccugugggggcucugug

SEQ ID NO: 1010137 - RNA, 22 nt, Human
caugauuuugucuuguguuaau

SEQ ID NO: 1010138 - RNA, 22 nt, Human
guuugcauguauuaagucaaua

SEQ ID NO: 1010139 - RNA, 17 nt, Human
agcuccugcccauggcu

SEQ ID NO: 1010140 - RNA, 22 nt, Human
cugcuguguuucacaccucugg

SEQ ID NO: 1010141 - RNA, 22 nt, Human
ggucucagcaguugcuuugacu

SEQ ID NO: 1010142 - RNA, 22 nt, Human
uagaauucauguuacuguuagc

SEQ ID NO: 1010143 - RNA, 22 nt, Human
ccagcuggaagagugcagaacu

SEQ ID NO: 1010144 - RNA, 22 nt, Human
ucagaggacaagcucccuggug

SEQ ID NO: 1010145 - RNA, 22 nt, Human
uuugaagucagacacugcuuug

SEQ ID NO: 1010146 - RNA, 23 nt, Human
agccuucaggcaaugucaguaga

SEQ ID NO: 1010147 - RNA, 23 nt, Human
uggcuucugccccauucucucca

SEQ ID NO: 1010148 - RNA, 22 nt, Human
ggcugggagcuggacaggccgg

SEQ ID NO: 1010149 - RNA, 19 nt, Human
agagaggcugugugaggga

SEQ ID NO: 1010150 - RNA, 22 nt, Human
aauaaauguuaagauugucuca

SEQ ID NO: 1010151 - RNA, 22 nt, Human
agguacagggugaaaguuuaug

SEQ ID NO: 1010152 - RNA, 22 nt, Human
auguagaacagguuaaugacag

SEQ ID NO: 1010153 - RNA, 22 nt, Human
uguguccauucaggcacugacc

SEQ ID NO: 1010154 - RNA, 22 nt, Human
cucccaagcugugcugaacugu

SEQ ID NO: 1010155 - RNA, 22 nt, Human
gggacuguaaauucauauggcc

SEQ ID NO: 1010156 - RNA, 22 nt, Human
gagaggggcgcgcagcucgcga

SEQ ID NO: 1010157 - RNA, 20 nt, Human
uucuuaaagaccucacuuug

SEQ ID NO: 1010158 - RNA, 22 nt, Human
ugggcugcugucugcacaugcu

SEQ ID NO: 1010159 - RNA, 22 nt, Human
caggaggaggugagguagaacu

SEQ ID NO: 1010160 - RNA, 22 nt, Human
guccuggcuuaguucgcuguaa

SEQ ID NO: 1010161 - RNA, 22 nt, Human
gggcaugguggcaggcaccugu

SEQ ID NO: 1010162 - RNA, 22 nt, Human
aagcuguucucuaaguuucaug

SEQ ID NO: 1010163 - RNA, 22 nt, Human
uggacucagaaguguucuuuua

SEQ ID NO: 1010164 - RNA, 22 nt, Human
uggccagguguggguucucaga

SEQ ID NO: 1010165 - RNA, 22 nt, Human
gcuguccugggaacaggcacua

SEQ ID NO: 1010166 - RNA, 22 nt, Human
agagcaggcauaaagcuuugaa

SEQ ID NO: 1010167 - RNA, 22 nt, Human
aggauccugcgcuuugggggag

SEQ ID NO: 1010168 - RNA, 22 nt, Human
aguggcagagccaaguagagcc

SEQ ID NO: 1010169 - RNA, 22 nt, Human
cccagacauaacagcagagagg

SEQ ID NO: 1010170 - RNA, 22 nt, Human
cuuccugaacaaugccaucaau

SEQ ID NO: 1010171 - RNA, 22 nt, Human
gcuggcccagggucaccuagga

SEQ ID NO: 1010172 - RNA, 17 nt, Human
aguguuuccuuaucauu

SEQ ID NO: 1010173 - RNA, 22 nt, Human
agccaaggacacggagccuccu

SEQ ID NO: 1010174 - RNA, 22 nt, Human
aggcacugauucuguuuuccau

SEQ ID NO: 1010175 - RNA, 22 nt, Human
gcuggcaccugcaccaagcagg

SEQ ID NO: 1010176 - RNA, 19 nt, Human
ugccuggacaaaugugggg

SEQ ID NO: 1010177 - RNA, 22 nt, Human
gcagggcuaauggggcaaguag

SEQ ID NO: 1010178 - RNA, 22 nt, Human
aucaggaucagggcuagcagag

SEQ ID NO: 1010179 - RNA, 17 nt, Human
gcaaucucagucuccuu

SEQ ID NO: 1010180 - RNA, 22 nt, Human
caggcagcugacugucagauau

SEQ ID NO: 1010181 - RNA, 20 nt, Human
ucagugauuaucucugagug

SEQ ID NO: 1010182 - RNA, 22 nt, Human
ucuugggaucucuucaccaccu

SEQ ID NO: 1010183 - RNA, 22 nt, Human
uguuuaaucuauaaaauggaga

SEQ ID NO: 1010184 - RNA, 22 nt, Human
ccuggagccccucuggccagcc

SEQ ID NO: 1010185 - RNA, 22 nt, Human
ugcauccuuaaccagcaucacu

SEQ ID NO: 1010186 - RNA, 22 nt, Human
ggcuucugagugcucugcuguu

SEQ ID NO: 1010187 - RNA, 22 nt, Human
ccugugugucugucacugcaca

SEQ ID NO: 1010188 - RNA, 22 nt, Human
uaugacaagguggaguaugagu

SEQ ID NO: 1010189 - RNA, 22 nt, Human
auaagguaugaaaaguaaaugg

SEQ ID NO: 1010190 - RNA, 18 nt, Human
cauuguacaaugcuuuau

SEQ ID NO: 1010191 - RNA, 22 nt, Human
aucuggcuuaccuagggugccu

SEQ ID NO: 1010192 - RNA, 22 nt, Human
aggucacacaacugucagaggc

SEQ ID NO: 1010193 - RNA, 22 nt, Human
gcagggcuauuggaaggagaug

SEQ ID NO: 1010194 - RNA, 22 nt, Human
ugcagggaggccccgcagcccu

SEQ ID NO: 1010195 - RNA, 22 nt, Human
aucaguuucugugaagaacaca

SEQ ID NO: 1010196 - RNA, 22 nt, Human
uggcucucagcucccagcagcc

SEQ ID NO: 1010197 - RNA, 22 nt, Human
agaaaaaucuuggcgcuugucu

SEQ ID NO: 1010198 - RNA, 22 nt, Human
aagagcuguaugccauaugauu

SEQ ID NO: 1010199 - RNA, 22 nt, Human
ucaggagcagcaugggugagag

SEQ ID NO: 1010200 - RNA, 22 nt, Human
aaaucaaaagacauguguuuua

SEQ ID NO: 1010201 - RNA, 22 nt, Human
uaauuucuggagggagaaagag

SEQ ID NO: 1010202 - RNA, 22 nt, Human
ucucuuaaaagauuuuaaugac

SEQ ID NO: 1010203 - RNA, 20 nt, Human
uuucacagucccuguuuccu

SEQ ID NO: 1010204 - RNA, 19 nt, Human
ggaccagguccugggcagc

SEQ ID NO: 1010205 - RNA, 22 nt, Human
uuucugcugugcuuucuugcgu

SEQ ID NO: 1010206 - RNA, 22 nt, Human
cacaggcugcccgcagcuggga

SEQ ID NO: 1010207 - RNA, 22 nt, Human
cccucagcuucucccugcagcu

SEQ ID NO: 1010208 - RNA, 22 nt, Human
ugaaauauuuagagaguaaguu

SEQ ID NO: 1010209 - RNA, 22 nt, Human
cuuuauuccuacaagauuuucu

SEQ ID NO: 1010210 - RNA, 22 nt, Human
auucugagacaauugccgucag

SEQ ID NO: 1010211 - RNA, 22 nt, Human
agcagaugagccucaugacugg

SEQ ID NO: 1010212 - RNA, 22 nt, Human
uauucauaguaaacaaaagugg

SEQ ID NO: 1010213 - RNA, 22 nt, Human
aagcugccagcugagcugaggc

SEQ ID NO: 1010214 - RNA, 22 nt, Human
aagauaaacucuugauuucuga

SEQ ID NO: 1010215 - RNA, 23 nt, Human
uggcccugugcaugcugcuuccc

SEQ ID NO: 1010216 - RNA, 22 nt, Human
uucuucuugucugcccucacau

SEQ ID NO: 1010217 - RNA, 22 nt, Human
agguacaguagacagacaguua

SEQ ID NO: 1010218 - RNA, 22 nt, Human
ugauuuccaguugcugggugcu

SEQ ID NO: 1010219 - RNA, 22 nt, Human
uaggggugaggccaggcaucag

SEQ ID NO: 1010220 - RNA, 22 nt, Human
agugcuuugaacgaaaggcuga

SEQ ID NO: 1010221 - RNA, 19 nt, Human
uaucuguuuccugcuuguc

SEQ ID NO: 1010222 - RNA, 22 nt, Human
uuggcagugucacuagggagcc

SEQ ID NO: 1010223 - RNA, 22 nt, Human
ugcuggggauccguaccaaccc

SEQ ID NO: 1010224 - RNA, 22 nt, Human
aauguaugggugagaaaguuga

SEQ ID NO: 1010225 - RNA, 22 nt, Human
cugggcacuugcucacagcucu

SEQ ID NO: 1010226 - RNA, 22 nt, Human
cguggccuuugagugagcuccc

SEQ ID NO: 1010227 - RNA, 22 nt, Human
guguuuccaguucagaaagcaa

SEQ ID NO: 1010228 - RNA, 22 nt, Human
uccugcagaccucagucagguc

SEQ ID NO: 1010229 - RNA, 22 nt, Human
cuuaauuuaaaauaguucaggc

SEQ ID NO: 1010230 - RNA, 22 nt, Human
guccaugauucuguguaguaga

SEQ ID NO: 1010231 - RNA, 22 nt, Human
aaaaaucuaugacugcuucucc

SEQ ID NO: 1010232 - RNA, 22 nt, Human
agccucucuuuauucccagcua

SEQ ID NO: 1010233 - RNA, 22 nt, Human
aauggccagcugggagaguuga

SEQ ID NO: 1010234 - RNA, 22 nt, Human
cccuuggggaugcugugucugg

SEQ ID NO: 1010235 - RNA, 22 nt, Human
acuguguguuugucuagcacag

SEQ ID NO: 1010236 - RNA, 22 nt, Human
uaugaacuagcugauuuaguuu

SEQ ID NO: 1010237 - RNA, 22 nt, Human
cagcuuucaucagugacacuca

SEQ ID NO: 1010238 - RNA, 19 nt, Human
uggcagggagaguuugaag

SEQ ID NO: 1010239 - RNA, 22 nt, Human
ggcuuccuuucacuacccucag

SEQ ID NO: 1010240 - RNA, 22 nt, Human
ggagccuguuaguugagugcuc

SEQ ID NO: 1010241 - RNA, 22 nt, Human
augcuguagaucuuagccucua

SEQ ID NO: 1010242 - RNA, 22 nt, Human
gggugggccacugagcagcgug

SEQ ID NO: 1010243 - RNA, 22 nt, Human
aacagaacccgagugugaaucu

SEQ ID NO: 1010244 - RNA, 22 nt, Human
aucaguuuuguucacuacuaua

SEQ ID NO: 1010245 - RNA, 22 nt, Human
uaagaaauuuaguuauagaaug

SEQ ID NO: 1010246 - RNA, 22 nt, Human
guuauguaucuugauugggugg

SEQ ID NO: 1010247 - RNA, 22 nt, Human
aucuggcucaccuggguaaaua

SEQ ID NO: 1010248 - RNA, 22 nt, Human
aguucuuuugugaacauaugcu

SEQ ID NO: 1010249 - RNA, 22 nt, Human
ugcuauaaguagacauucaaca

SEQ ID NO: 1010250 - RNA, 22 nt, Human
aaaacucugcaguuaguuucua

SEQ ID NO: 1010251 - RNA, 22 nt, Human
aagggcuggaucucucugagca

SEQ ID NO: 1010252 - RNA, 22 nt, Human
ggcaggcugcuugggucauguc

SEQ ID NO: 1010253 - RNA, 21 nt, Human
aauuacagauggaauuacaga

SEQ ID NO: 1010254 - RNA, 22 nt, Human
ugauuuccuggcuuuggaguuc

SEQ ID NO: 1010255 - RNA, 22 nt, Human
uguaggaguccaaucaggagac

SEQ ID NO: 1010256 - RNA, 22 nt, Human
agggcacccucucugcaguacc

SEQ ID NO: 1010257 - RNA, 20 nt, Human
gccugcagagaaggucagag

SEQ ID NO: 1010258 - RNA, 22 nt, Human
ucucuuucuauaugugagucuu

SEQ ID NO: 1010259 - RNA, 22 nt, Human
ugaaaguuacaggaaaacagau

SEQ ID NO: 1010260 - RNA, 22 nt, Human
aggcucauucuugccucugagc

SEQ ID NO: 1010261 - RNA, 22 nt, Human
cagggcagggauguugcggcag

SEQ ID NO: 1010262 - RNA, 22 nt, Human
cugugcaagacuuacuuuaaua

SEQ ID NO: 1010263 - RNA, 22 nt, Human
aacagcuuugcuucuggagaca

SEQ ID NO: 1010264 - RNA, 22 nt, Human
gugcaguggcagauccuagcuc

SEQ ID NO: 1010265 - RNA, 22 nt, Human
ugggccugccccaggcuucagc

SEQ ID NO: 1010266 - RNA, 22 nt, Human
aggcugcagugcagguaggauu

SEQ ID NO: 1010267 - RNA, 22 nt, Human
cagaauaugacaagauuuuccu

SEQ ID NO: 1010268 - RNA, 22 nt, Human
ggcuuggaaauugcaggacaca

SEQ ID NO: 1010269 - RNA, 22 nt, Human
agugaggcuaauaggcaauggu

SEQ ID NO: 1010270 - RNA, 22 nt, Human
uagucuuuuuaauaaauaaugc

SEQ ID NO: 1010271 - RNA, 20 nt, Human
gucagugucuucaguaguga

SEQ ID NO: 1010272 - RNA, 21 nt, Human
uggcucuguucaauauaugga

SEQ ID NO: 1010273 - RNA, 22 nt, Human
aaagcagguugcaauuacagug

SEQ ID NO: 1010274 - RNA, 22 nt, Human
ucccagcagggccgaccagccu

SEQ ID NO: 1010275 - RNA, 22 nt, Human
cacaccagagguuaccugcaaa

SEQ ID NO: 1010276 - RNA, 22 nt, Human
uagagugguuaacaguuuagaa

SEQ ID NO: 1010277 - RNA, 22 nt, Human
ccugucuguaucgguucagagu

SEQ ID NO: 1010278 - RNA, 16 nt, Human
gagggcagaggcggaa

SEQ ID NO: 1010279 - RNA, 22 nt, Human
uccuuccucggggacccagauc

SEQ ID NO: 1010280 - RNA, 22 nt, Human
gucuugaucuccugaccuugug

SEQ ID NO: 1010281 - RNA, 22 nt, Human
ugugccagaaaauaugcugagg

SEQ ID NO: 1010282 - RNA, 22 nt, Human
uaaauucugaucaaguuccuuc

SEQ ID NO: 1010283 - RNA, 19 nt, Human
agggcugcucuggccuggg

SEQ ID NO: 1010284 - RNA, 22 nt, Human
cagugggcugugauggauucac

SEQ ID NO: 1010285 - RNA, 22 nt, Human
uuucuucagccuucacaaccug

SEQ ID NO: 1010286 - RNA, 23 nt, Human
uggcagcagaucuuaaagugacc

SEQ ID NO: 1010287 - RNA, 22 nt, Human
ccaugcaauuucuguaaaacca

SEQ ID NO: 1010288 - RNA, 22 nt, Human
uuauuccagcuaagaguccugg

SEQ ID NO: 1010289 - RNA, 22 nt, Human
cacacuagucuauccauuagcu

SEQ ID NO: 1010290 - RNA, 22 nt, Human
ugucucaguucccuucucugga

SEQ ID NO: 1010291 - RNA, 22 nt, Human
cugucaggggcggguggagcgg

SEQ ID NO: 1010292 - RNA, 22 nt, Human
cugggagucuggccucuggucc

SEQ ID NO: 1010293 - RNA, 22 nt, Human
guauuaggugguggaauuguag

SEQ ID NO: 1010294 - RNA, 19 nt, Human
agcaccugugagagccugg

SEQ ID NO: 1010295 - RNA, 22 nt, Human
aaggcagccgugugacugcaug

SEQ ID NO: 1010296 - RNA, 22 nt, Human
uggaaagaaaguaaaggcguau

SEQ ID NO: 1010297 - RNA, 22 nt, Human
ugucucaggcccaagccaguaa

SEQ ID NO: 1010298 - RNA, 22 nt, Human
caggagcccagaguccucagcu

SEQ ID NO: 1010299 - RNA, 22 nt, Human
ccuggcaggcuggggacagugc

SEQ ID NO: 1010300 - RNA, 22 nt, Human
caggaugaagggcaaaggcaag

SEQ ID NO: 1010301 - RNA, 22 nt, Human
uuugcaaauaccaugaaacuug

SEQ ID NO: 1010302 - RNA, 22 nt, Human
ucuggucaguaauaagaagugg

SEQ ID NO: 1010303 - RNA, 22 nt, Human
cagucuggaggucagcuggcuu

SEQ ID NO: 1010304 - RNA, 22 nt, Human
agaauucuuggugguuagaaua

SEQ ID NO: 1010305 - RNA, 22 nt, Human
gcuggcuuugcacugggugcau

SEQ ID NO: 1010306 - RNA, 22 nt, Human
agaauuuuugauuaucuacucg

SEQ ID NO: 1010307 - RNA, 22 nt, Human
uguggccuugcagccuggaggu

SEQ ID NO: 1010308 - RNA, 22 nt, Human
ccugccagggccuuggaagaaa

SEQ ID NO: 1010309 - RNA, 22 nt, Human
uaggcagcugcaaacuucgguc

SEQ ID NO: 1010310 - RNA, 22 nt, Human
aaaggcuccuucucccaugacc

SEQ ID NO: 1010311 - RNA, 22 nt, Human
agcagugaugcaugacagccua

SEQ ID NO: 1010312 - RNA, 22 nt, Human
cagcugccaagaaucuuuucua

SEQ ID NO: 1010313 - RNA, 22 nt, Human
uucuacagacuauaacugugau

SEQ ID NO: 1010314 - RNA, 22 nt, Human
gcugccacgaucucugcuguag

SEQ ID NO: 1010315 - RNA, 22 nt, Human
ccaaggcuggagugcaguggcg

SEQ ID NO: 1010316 - RNA, 22 nt, Human
ucaguuuuucuauacuuuguag

SEQ ID NO: 1010317 - RNA, 22 nt, Human
uuagaaagcuuuccauagucaa

SEQ ID NO: 1010318 - RNA, 22 nt, Human
caguuauuaugaggucauuagg

SEQ ID NO: 1010319 - RNA, 22 nt, Human
ggugccagccuagugcaguggu

SEQ ID NO: 1010320 - RNA, 22 nt, Human
cuggccugaggccgccuucaga

SEQ ID NO: 1010321 - RNA, 22 nt, Human
gaugccucuuuuggcugaauua

SEQ ID NO: 1010322 - RNA, 22 nt, Human
ugggccuggaguuuguccagag

SEQ ID NO: 1010323 - RNA, 22 nt, Human
agcaccugcuaugugucaggga

SEQ ID NO: 1010324 - RNA, 23 nt, Human
aguuuuucugcaugguucuguau

SEQ ID NO: 1010325 - RNA, 22 nt, Human
aggcugcuuccuuacguggcug

SEQ ID NO: 1010326 - RNA, 22 nt, Human
ccaguccagugccaugcauggc

SEQ ID NO: 1010327 - RNA, 22 nt, Human
acagcauugcuccaucucaaga

SEQ ID NO: 1010328 - RNA, 22 nt, Human
agcugacucuggccucuggucc

SEQ ID NO: 1010329 - RNA, 20 nt, Human
agauuauuccuaagauuucu

SEQ ID NO: 1010330 - RNA, 22 nt, Human
uugggcucaggaguuugagacc

SEQ ID NO: 1010331 - RNA, 22 nt, Human
ucagaguggugguuuugccuuc

SEQ ID NO: 1010332 - RNA, 22 nt, Human
ugcagucuggauguccucagau

SEQ ID NO: 1010333 - RNA, 22 nt, Human
ggagcagagcauuucacagccu

SEQ ID NO: 1010334 - RNA, 22 nt, Human
cccuucccuucugggagaucca

SEQ ID NO: 1010335 - RNA, 22 nt, Human
agcuggccuuagugagcaccug

SEQ ID NO: 1010336 - RNA, 22 nt, Human
cagugggaagggcagaggcuuu

SEQ ID NO: 1010337 - RNA, 22 nt, Human
uguguuccugccuggcucuggu

SEQ ID NO: 1010338 - RNA, 22 nt, Human
cucccagagaccaagcugagaa

SEQ ID NO: 1010339 - RNA, 22 nt, Human
guaagcaucugucucuucugca

SEQ ID NO: 1010340 - RNA, 22 nt, Human
gccuucaggaggguuccagaca

SEQ ID NO: 1010341 - RNA, 22 nt, Human
cugaagccaugugcucacuggu

SEQ ID NO: 1010342 - RNA, 22 nt, Human
cagagagcaugggaggcccgag

SEQ ID NO: 1010343 - RNA, 22 nt, Human
aagagcauggaauggagaucca

SEQ ID NO: 1010344 - RNA, 22 nt, Human
uccaggagguagugcuuaauuu

SEQ ID NO: 1010345 - RNA, 21 nt, Human
ugcagagauaucugaagcaga

SEQ ID NO: 1010346 - RNA, 22 nt, Human
cuucuuaacuguauauacuaug

SEQ ID NO: 1010347 - RNA, 20 nt, Human
guggccucucacauucugag

SEQ ID NO: 1010348 - RNA, 22 nt, Human
gaugggggccagggccugcuuu

SEQ ID NO: 1010349 - RNA, 22 nt, Human
uaaagucaucuuuacaucuuug

SEQ ID NO: 1010350 - RNA, 22 nt, Human
ccagcuggagccaagguggacu

SEQ ID NO: 1010351 - RNA, 19 nt, Human
gagcacagcggcauuuggu

SEQ ID NO: 1010352 - RNA, 22 nt, Human
cuccugaguaguagcauuguca

SEQ ID NO: 1010353 - RNA, 22 nt, Human
aauguauguguauaucaaauca

SEQ ID NO: 1010354 - RNA, 22 nt, Human
auauauuugagaauauucauga

SEQ ID NO: 1010355 - RNA, 22 nt, Human
cucucagacugaagggccugug

SEQ ID NO: 1010356 - RNA, 22 nt, Human
agauacaucuugaacuucuaga

SEQ ID NO: 1010357 - RNA, 22 nt, Human
acaaucauuccguucacaacag

SEQ ID NO: 1010358 - RNA, 22 nt, Human
gugggagcuuuggcaucaggcu

SEQ ID NO: 1010359 - RNA, 22 nt, Human
auucuucacaccuguuccuguu

SEQ ID NO: 1010360 - RNA, 20 nt, Human
cugggaggucuuccaaauca

SEQ ID NO: 1010361 - RNA, 23 nt, Human
agccucuuuucuccugcccugca

SEQ ID NO: 1010362 - RNA, 22 nt, Human
ccagacaggaacacacaucucc

SEQ ID NO: 1010363 - RNA, 22 nt, Human
ggcaguggguuccccaaggcac

SEQ ID NO: 1010364 - RNA, 22 nt, Human
ccagccacagcuuccagcuccu

SEQ ID NO: 1010365 - RNA, 22 nt, Human
ugccagugggugugcagagacu

SEQ ID NO: 1010366 - RNA, 22 nt, Human
agaggcaguauacaauccgagc

SEQ ID NO: 1010367 - RNA, 19 nt, Human
uucacaauuaugaaauuag

SEQ ID NO: 1010368 - RNA, 22 nt, Human
acagccagguaaaggcauggca

SEQ ID NO: 1010369 - RNA, 22 nt, Human
caaggccaaagggccacuguca

SEQ ID NO: 1010370 - RNA, 22 nt, Human
aaaggugacacucugccagcug

SEQ ID NO: 1010371 - RNA, 20 nt, Human
agacaggagcccccauucag

SEQ ID NO: 1010372 - RNA, 23 nt, Human
ucagagaggcccccugcagagau

SEQ ID NO: 1010373 - RNA, 22 nt, Human
caucaucaaaacaaauggaguc

SEQ ID NO: 1010374 - RNA, 22 nt, Human
gucauuguguggacauggagaa

SEQ ID NO: 1010375 - RNA, 22 nt, Human
uuucucuugcgauaugcuacac

SEQ ID NO: 1010376 - RNA, 22 nt, Human
aaaugcauuuuuaauuagaccc

SEQ ID NO: 1010377 - RNA, 22 nt, Human
ggccugcuauuggugggcagac

SEQ ID NO: 1010378 - RNA, 22 nt, Human
cuggguggaucgcagccccagg

SEQ ID NO: 1010379 - RNA, 22 nt, Human
cucuggagcauuucaccuacau

SEQ ID NO: 1010380 - RNA, 22 nt, Human
ugcagcugcuugauucaucuug

SEQ ID NO: 1010381 - RNA, 22 nt, Human
agggcuccuaugccccauggac

SEQ ID NO: 1010382 - RNA, 22 nt, Human
gagggcugcaaugagacagaga

SEQ ID NO: 1010383 - RNA, 22 nt, Human
gagauauguuagaaagcuauug

SEQ ID NO: 1010384 - RNA, 22 nt, Human
ggcugagggccagggcuagucu

SEQ ID NO: 1010385 - RNA, 22 nt, Human
uggcucaggguccccaaauggu

SEQ ID NO: 1010386 - RNA, 22 nt, Human
uguuagaauauuguaauauucg

SEQ ID NO: 1010387 - RNA, 22 nt, Human
guuagggagggugcauaugugu

SEQ ID NO: 1010388 - RNA, 22 nt, Human
uuugcauuugcaaauaaugaaa

SEQ ID NO: 1010389 - RNA, 20 nt, Human
gaggccucagccucagcucc

SEQ ID NO: 1010390 - RNA, 22 nt, Human
agauaauuugaguaaauuaauu

SEQ ID NO: 1010391 - RNA, 22 nt, Human
ccaggcaggcgauggugcagug

SEQ ID NO: 1010392 - RNA, 22 nt, Human
auugucugaauccaaagcucug

SEQ ID NO: 1010393 - RNA, 22 nt, Human
gagccagcagccggcaccacca

SEQ ID NO: 1010394 - RNA, 22 nt, Human
cacaggguuguucugaggauuc

SEQ ID NO: 1010395 - RNA, 22 nt, Human
ucucugggauaaacugggccag

SEQ ID NO: 1010396 - RNA, 22 nt, Human
gucaggaucaaauugaaguuau

SEQ ID NO: 1010397 - RNA, 22 nt, Human
caccagcuacagacuacugugu

SEQ ID NO: 1010398 - RNA, 22 nt, Human
ccagggcaauaggaacacuuuu

SEQ ID NO: 1010399 - RNA, 22 nt, Human
aguggcaggcggagauguagga

SEQ ID NO: 1010400 - RNA, 22 nt, Human
ugcaggcuuuagccccauggcu

SEQ ID NO: 1010401 - RNA, 21 nt, Human
ggcagccugacccccagagag

SEQ ID NO: 1010402 - RNA, 22 nt, Human
gccuggcucugagggagcuccu

SEQ ID NO: 1010403 - RNA, 22 nt, Human
cgccuggaaccucuaggaccag

SEQ ID NO: 1010404 - RNA, 22 nt, Human
ggugaggcagguggcugcugag

SEQ ID NO: 1010405 - RNA, 22 nt, Human
uggcuggcccugggagugcaga

SEQ ID NO: 1010406 - RNA, 20 nt, Human
uccaguuuuggagacauucu

SEQ ID NO: 1010407 - RNA, 22 nt, Human
cccuggggcugagggauggccg

SEQ ID NO: 1010408 - RNA, 22 nt, Human
ucagggacagggugcugcugcg

SEQ ID NO: 1010409 - RNA, 22 nt, Human
ccuggcugugcauugccggccc

SEQ ID NO: 1010410 - RNA, 21 nt, Human
uuuagggaggauauuuaacuu

SEQ ID NO: 1010411 - RNA, 22 nt, Human
uggcagucauuaucgcugaguc

SEQ ID NO: 1010412 - RNA, 22 nt, Human
caguagcacuagauaugugugg

SEQ ID NO: 1010413 - RNA, 22 nt, Human
ggagaugguggaagcuggugca

SEQ ID NO: 1010414 - RNA, 22 nt, Human
gagcugggacauggguccucuc

SEQ ID NO: 1010415 - RNA, 22 nt, Human
caaggccagagccagcgauaag

SEQ ID NO: 1010416 - RNA, 23 nt, Human
ucucagaggauuccugggccuug

SEQ ID NO: 1010417 - RNA, 19 nt, Human
gaaggagagcugaguuagg

SEQ ID NO: 1010418 - RNA, 22 nt, Human
cugagcugggaguggauagugg

SEQ ID NO: 1010419 - RNA, 22 nt, Human
acucaggaauggggcugggacu

SEQ ID NO: 1010420 - RNA, 22 nt, Human
uguacuaaggcuguguagaugu

SEQ ID NO: 1010421 - RNA, 22 nt, Human
cugggcugcaggaguggggcaa

SEQ ID NO: 1010422 - RNA, 22 nt, Human
cagagguagccgagugcaaucg

SEQ ID NO: 1010423 - RNA, 21 nt, Human
cugaggcagcacagcuaguca

SEQ ID NO: 1010424 - RNA, 22 nt, Human
aaacacagggauauauauucca

SEQ ID NO: 1010425 - RNA, 22 nt, Human
ucucuucuaauuuucccgagua

SEQ ID NO: 1010426 - RNA, 22 nt, Human
gcagcuggggaggucgugggga

SEQ ID NO: 1010427 - RNA, 22 nt, Human
gagcagugagugaauguugccu

SEQ ID NO: 1010428 - RNA, 22 nt, Human
acauauuuccaugcagcauguc

SEQ ID NO: 1010429 - RNA, 22 nt, Human
auauguguauuugguuagccua

SEQ ID NO: 1010430 - RNA, 20 nt, Human
ugaugguucuuuccggguug

SEQ ID NO: 1010431 - RNA, 22 nt, Human
aagaacaguugggaggugagcc

SEQ ID NO: 1010432 - RNA, 22 nt, Human
gcuggcuguguuccuucugcca

SEQ ID NO: 1010433 - RNA, 22 nt, Human
ccagcuuucauaucaugaggua

SEQ ID NO: 1010434 - RNA, 22 nt, Human
auuauauugaguauaaccagag

SEQ ID NO: 1010435 - RNA, 22 nt, Human
cuauuucugccuaaugaccugu

SEQ ID NO: 1010436 - RNA, 22 nt, Human
ucugccugagggagcugaggaa

SEQ ID NO: 1010437 - RNA, 22 nt, Human
ucacugcaaccucugccuuccg

SEQ ID NO: 1010438 - RNA, 22 nt, Human
aaggucauuuaacaauuuauga

SEQ ID NO: 1010439 - RNA, 22 nt, Human
gauuucaagcccccagagauuc

SEQ ID NO: 1010440 - RNA, 22 nt, Human
ugugauauuugaguauugucaa

SEQ ID NO: 1010441 - RNA, 22 nt, Human
ugcccagggauaagccuagaga

SEQ ID NO: 1010442 - RNA, 22 nt, Human
uuucuuaggcucuaaaaugacu

SEQ ID NO: 1010443 - RNA, 22 nt, Human
ucacugaauacuugucucaucc

SEQ ID NO: 1010444 - RNA, 22 nt, Human
gugauaaagacgugucauaauu

SEQ ID NO: 1010445 - RNA, 22 nt, Human
uccaggcaucccccaggacaga

SEQ ID NO: 1010446 - RNA, 19 nt, Human
ccagcccugucacuucuug

SEQ ID NO: 1010447 - RNA, 22 nt, Human
uaacagaaauagaaaugagagu

SEQ ID NO: 1010448 - RNA, 23 nt, Human
agcaauaagaagggauacaugug

SEQ ID NO: 1010449 - RNA, 22 nt, Human
uccugcaggggcugaggaacca

SEQ ID NO: 1010450 - RNA, 22 nt, Human
ggggacaguuaaagaccaagac

SEQ ID NO: 1010451 - RNA, 22 nt, Human
gucacuguauccagguuccagc

SEQ ID NO: 1010452 - RNA, 22 nt, Human
uuugcacuagcauuuguccaug

SEQ ID NO: 1010453 - RNA, 22 nt, Human
aucaggauccaccuugagccug

SEQ ID NO: 1010454 - RNA, 21 nt, Human
aggcucagcagguguauaaag

SEQ ID NO: 1010455 - RNA, 22 nt, Human
cugccucaugcugccugcagcc

SEQ ID NO: 1010456 - RNA, 22 nt, Human
gagccaggcaccuucuguguug

SEQ ID NO: 1010457 - RNA, 22 nt, Human
uuguacaaaggauuuggaagag

SEQ ID NO: 1010458 - RNA, 22 nt, Human
gcagugcuuuagucuguccuuu

SEQ ID NO: 1010459 - RNA, 22 nt, Human
gcugagugagguccagagcuug

SEQ ID NO: 1010460 - RNA, 22 nt, Human
gcugggcugagcuagacuuggc

SEQ ID NO: 1010461 - RNA, 22 nt, Human
aaacucuguagcuaaacauaau

SEQ ID NO: 1010462 - RNA, 22 nt, Human
uggcaggguuggccaccuuacc

SEQ ID NO: 1010463 - RNA, 22 nt, Human
uccuuggcaugccgucuucucc

SEQ ID NO: 1010464 - RNA, 22 nt, Human
uucuugaaucacuuuagagaua

SEQ ID NO: 1010465 - RNA, 22 nt, Human
cuugcuucauuagugucuuagu

SEQ ID NO: 1010466 - RNA, 22 nt, Human
ugucucuggcccaugagcagag

SEQ ID NO: 1010467 - RNA, 22 nt, Human
gucccagagagcacuaguccau

SEQ ID NO: 1010468 - RNA, 22 nt, Human
cuguuauuucugccaggugagu

SEQ ID NO: 1010469 - RNA, 22 nt, Human
uuuucauuguuacuaugagcua

SEQ ID NO: 1010470 - RNA, 22 nt, Human
aagagcuggucacagguccauu

SEQ ID NO: 1010471 - RNA, 22 nt, Human
uagcagggucucaggagucagg

SEQ ID NO: 1010472 - RNA, 22 nt, Human
ccaggaguuggagguugcagug

SEQ ID NO: 1010473 - RNA, 21 nt, Human
gggugcuguggucaugcagga

SEQ ID NO: 1010474 - RNA, 22 nt, Human
agcucugggccaggaacccuaa

SEQ ID NO: 1010475 - RNA, 22 nt, Human
uauuccaagcacagcaacccag

SEQ ID NO: 1010476 - RNA, 20 nt, Human
ucccucaggucauugggcug

SEQ ID NO: 1010477 - RNA, 22 nt, Human
ucaggagaaucagggcuguccu

SEQ ID NO: 1010478 - RNA, 22 nt, Human
gccccugggagcagagccacca

SEQ ID NO: 1010479 - RNA, 22 nt, Human
caggcuugauuauucagacaau

SEQ ID NO: 1010480 - RNA, 22 nt, Human
aggcacugcagauuacaggcgc

SEQ ID NO: 1010481 - RNA, 22 nt, Human
uccagggagauggcagaggcug

SEQ ID NO: 1010482 - RNA, 22 nt, Human
ugaggcaguucuuacuuguauu

SEQ ID NO: 1010483 - RNA, 22 nt, Human
ccagcuuucucagaggcuucua

SEQ ID NO: 1010484 - RNA, 22 nt, Human
agagacaccgcgcaucauggcu

SEQ ID NO: 1010485 - RNA, 22 nt, Human
agugaaauuuguuuagauaggu

SEQ ID NO: 1010486 - RNA, 22 nt, Human
acucacauuucaucaggccaag

SEQ ID NO: 1010487 - RNA, 22 nt, Human
cagggguguuuuuggccaggag

SEQ ID NO: 1010488 - RNA, 22 nt, Human
ggcaggugugagaucgaggcca

SEQ ID NO: 1010489 - RNA, 22 nt, Human
cccuggagucagguuggccugg

SEQ ID NO: 1010490 - RNA, 22 nt, Human
gccuggagggucccucucugga

SEQ ID NO: 1010491 - RNA, 22 nt, Human
uuacaguauuguuaaacucuuu

SEQ ID NO: 1010492 - RNA, 22 nt, Human
uccugccucaggcucuggagua

SEQ ID NO: 1010493 - RNA, 22 nt, Human
uaauuucaccguugcuagaaau

SEQ ID NO: 1010494 - RNA, 22 nt, Human
uacagcuaggcaaaaaugacau

SEQ ID NO: 1010495 - RNA, 22 nt, Human
cugggcacaaguggcccuggau

SEQ ID NO: 1010496 - RNA, 22 nt, Human
aagaauguucuuguagucauga

SEQ ID NO: 1010497 - RNA, 19 nt, Human
cuccucagucccagagguc

SEQ ID NO: 1010498 - RNA, 22 nt, Human
uguuuauucauggcuaaugaaa

SEQ ID NO: 1010499 - RNA, 22 nt, Human
uggcuucugcuuucaguggagg

SEQ ID NO: 1010500 - RNA, 21 nt, Human
cugugcuuuuuaagugugaug

SEQ ID NO: 1010501 - RNA, 22 nt, Human
uggcagcacaagguggcccaug

SEQ ID NO: 1010502 - RNA, 22 nt, Human
guccacauaggaacccagcuuc

SEQ ID NO: 1010503 - RNA, 22 nt, Human
gcagugguccaguucacaccca

SEQ ID NO: 1010504 - RNA, 22 nt, Human
agagccaggcaggcaauguuga

SEQ ID NO: 1010505 - RNA, 22 nt, Human
caaaugcagauucaggaguucu

SEQ ID NO: 1010506 - RNA, 22 nt, Human
uaggcacuuggcguguuggaga

SEQ ID NO: 1010507 - RNA, 22 nt, Human
agggccuggugaccuggguccu

SEQ ID NO: 1010508 - RNA, 22 nt, Human
acuuguucauugaguacauaug

SEQ ID NO: 1010509 - RNA, 22 nt, Human
caggguggaaaagcuaguugga

SEQ ID NO: 1010510 - RNA, 22 nt, Human
cccugccuuguuggagccuaug

SEQ ID NO: 1010511 - RNA, 22 nt, Human
uagggcagauucgguggaguuu

SEQ ID NO: 1010512 - RNA, 22 nt, Human
auauacuuggagacuaucauug

SEQ ID NO: 1010513 - RNA, 22 nt, Human
cuuguacaggaauccaugguau

SEQ ID NO: 1010514 - RNA, 22 nt, Human
auucuguauggaaaagcacuau

SEQ ID NO: 1010515 - RNA, 22 nt, Human
ucaggcugaggucaucugcauc

SEQ ID NO: 1010516 - RNA, 22 nt, Human
ccuggcagguggagguugcagu

SEQ ID NO: 1010517 - RNA, 22 nt, Human
uagcuuuagaaauauucucaga

SEQ ID NO: 1010518 - RNA, 22 nt, Human
guacaaaguggaccugauagua

SEQ ID NO: 1010519 - RNA, 22 nt, Human
cugggccagggaggugucugua

SEQ ID NO: 1010520 - RNA, 22 nt, Human
uuucauaaccucaagcuacagu

SEQ ID NO: 1010521 - RNA, 20 nt, Human
aucugcuugccuguccucgg

SEQ ID NO: 1010522 - RNA, 22 nt, Human
uauuccuaagucccaacuacau

SEQ ID NO: 1010523 - RNA, 22 nt, Human
gggcaugguggugcacaccugu

SEQ ID NO: 1010524 - RNA, 22 nt, Human
agaggccaggcugcagagggau

SEQ ID NO: 1010525 - RNA, 22 nt, Human
gacccugccaugagugacaggg

SEQ ID NO: 1010526 - RNA, 22 nt, Human
uugaaucauuacaauagauaag

SEQ ID NO: 1010527 - RNA, 22 nt, Human
gcccagcagaucucagugucuc

SEQ ID NO: 1010528 - RNA, 22 nt, Human
uauggcauuuuguaagggcuug

SEQ ID NO: 1010529 - RNA, 22 nt, Human
cugagccagggccacacaugga

SEQ ID NO: 1010530 - RNA, 21 nt, Human
acauccaggguccucacugcc

SEQ ID NO: 1010531 - RNA, 22 nt, Human
cccuuagcuccaagggguuugg

SEQ ID NO: 1010532 - RNA, 22 nt, Human
ggccucugguucacagggagga

SEQ ID NO: 1010533 - RNA, 22 nt, Human
ucucagggccucccucuguuuc

SEQ ID NO: 1010534 - RNA, 22 nt, Human
uacauguaggugacauuuuaau

SEQ ID NO: 1010535 - RNA, 23 nt, Human
uggccucuccccaccuggcagaa

SEQ ID NO: 1010536 - RNA, 22 nt, Human
gcucuguguccacagcuggaaa

SEQ ID NO: 1010537 - RNA, 22 nt, Human
ugccuuccuggagcugaaggcu

SEQ ID NO: 1010538 - RNA, 22 nt, Human
cuggagccacugggucuuguau

SEQ ID NO: 1010539 - RNA, 22 nt, Human
uccacuuuagcaaugauugaau

SEQ ID NO: 1010540 - RNA, 22 nt, Human
uucacacacagcuuccuauugu

SEQ ID NO: 1010541 - RNA, 22 nt, Human
cugcagcuauauuuucccacag

SEQ ID NO: 1010542 - RNA, 22 nt, Human
cccagcacaggcaauuccauac

SEQ ID NO: 1010543 - RNA, 17 nt, Human
cucugcagugcauggcu

SEQ ID NO: 1010544 - RNA, 21 nt, Human
cucaggaucuuauauauuagu

SEQ ID NO: 1010545 - RNA, 22 nt, Human
uauccaauucaccauugauggg

SEQ ID NO: 1010546 - RNA, 22 nt, Human
aaaguuacuaucacaaugaaau

SEQ ID NO: 1010547 - RNA, 22 nt, Human
aagauauucaaagauuuauuag

SEQ ID NO: 1010548 - RNA, 22 nt, Human
uauaauccauucauugauuucu

SEQ ID NO: 1010549 - RNA, 22 nt, Human
ggggcacuuccaggcugaggcu

SEQ ID NO: 1010550 - RNA, 22 nt, Human
ccccaggacacauggaccaagu

SEQ ID NO: 1010551 - RNA, 22 nt, Human
ggagauggcucugcaaggucua

SEQ ID NO: 1010552 - RNA, 22 nt, Human
agccuggauucgugcauccaca

SEQ ID NO: 1010553 - RNA, 18 nt, Human
gagagcugcuaccuagcu

SEQ ID NO: 1010554 - RNA, 22 nt, Human
caaaugcaaaauauaacccugu

SEQ ID NO: 1010555 - RNA, 21 nt, Human
ucccagggccaggugccauca

SEQ ID NO: 1010556 - RNA, 22 nt, Human
ucuggcucaaaauacguacucu

SEQ ID NO: 1010557 - RNA, 23 nt, Human
ugccagaggcagucacaguggug

SEQ ID NO: 1010558 - RNA, 22 nt, Human
gcagcuuuagaaacaagggcug

SEQ ID NO: 1010559 - RNA, 22 nt, Human
aagguacagaaauuaacaagga

SEQ ID NO: 1010560 - RNA, 22 nt, Human
acugucugcaaaacucauacuc

SEQ ID NO: 1010561 - RNA, 22 nt, Human
uagaaacacagaucugguguca

SEQ ID NO: 1010562 - RNA, 22 nt, Human
agaauuguugggguaauaaaag

SEQ ID NO: 1010563 - RNA, 22 nt, Human
uaaguucauaagcuuauucuua

SEQ ID NO: 1010564 - RNA, 22 nt, Human
uagauuuuacuucugucauuac

SEQ ID NO: 1010565 - RNA, 22 nt, Human
auuugcuucugugaaaucaagu

SEQ ID NO: 1010566 - RNA, 22 nt, Human
ucugucccugagagcucaggag

SEQ ID NO: 1010567 - RNA, 22 nt, Human
ugucucugcuuuccuugcaggg

SEQ ID NO: 1010568 - RNA, 22 nt, Human
agauguuccagccaaugggaau

SEQ ID NO: 1010569 - RNA, 19 nt, Human
aggguccagggagcggcuc

SEQ ID NO: 1010570 - RNA, 16 nt, Human
ugggcagaugagaaga

SEQ ID NO: 1010571 - RNA, 22 nt, Human
ugcauugcauuugucaugaaga

SEQ ID NO: 1010572 - RNA, 22 nt, Human
ccuuuauucaauuaguccuaau

SEQ ID NO: 1010573 - RNA, 20 nt, Human
agauggugaaggccagggag

SEQ ID NO: 1010574 - RNA, 22 nt, Human
gcagggacaacugugcaccuga

SEQ ID NO: 1010575 - RNA, 22 nt, Human
uccugcaguuacaucccagcca

SEQ ID NO: 1010576 - RNA, 22 nt, Human
cccaggaggcagagguugcagu

SEQ ID NO: 1010577 - RNA, 22 nt, Human
aggaccugcuaaugugccaagu

SEQ ID NO: 1010578 - RNA, 22 nt, Human
gcaguccucucauuggccuccu

SEQ ID NO: 1010579 - RNA, 22 nt, Human
ucuuugcaaaauacaacaaugg

SEQ ID NO: 1010580 - RNA, 22 nt, Human
uguaauggaagugggauugcau

SEQ ID NO: 1010581 - RNA, 22 nt, Human
caggcugucugaauggaggccc

SEQ ID NO: 1010582 - RNA, 19 nt, Human
uuugugaagaaaaugaugc

SEQ ID NO: 1010583 - RNA, 22 nt, Human
gcuggagcuugagaggacaggg

SEQ ID NO: 1010584 - RNA, 22 nt, Human
acuggcaguggcagcagaaaga

SEQ ID NO: 1010585 - RNA, 22 nt, Human
ugcaccauuuugucaggcuacu

SEQ ID NO: 1010586 - RNA, 22 nt, Human
agagcaucuaacacauaagccu

SEQ ID NO: 1010587 - RNA, 22 nt, Human
aggggccauuguucugcccgcu

SEQ ID NO: 1010588 - RNA, 22 nt, Human
uucaggauggaguaccuuuuau

SEQ ID NO: 1010589 - RNA, 22 nt, Human
cugcagugaaaucaggaagcaa

SEQ ID NO: 1010590 - RNA, 22 nt, Human
aaaagguaguugccaaauaagg

SEQ ID NO: 1010591 - RNA, 22 nt, Human
auacauuagcucauaugauuaa

SEQ ID NO: 1010592 - RNA, 22 nt, Human
gaauacaugauacaugaacugc

SEQ ID NO: 1010593 - RNA, 17 nt, Human
uguuuucauucauugcu

SEQ ID NO: 1010594 - RNA, 22 nt, Human
ccuggaaguuggagguugcagu

SEQ ID NO: 1010595 - RNA, 22 nt, Human
gcaaagucucaagacccaagug

SEQ ID NO: 1010596 - RNA, 22 nt, Human
aaugcaguuucauuuguagaau

SEQ ID NO: 1010597 - RNA, 22 nt, Human
aagauuuaccacuuuauucaag

SEQ ID NO: 1010598 - RNA, 22 nt, Human
auaugugaaguggguuauuuug

SEQ ID NO: 1010599 - RNA, 22 nt, Human
uucaagaugcacaguggcauuc

SEQ ID NO: 1010600 - RNA, 22 nt, Human
gucucagauaacauguauucua

SEQ ID NO: 1010601 - RNA, 22 nt, Human
auuuacagaagcauguaauagc

SEQ ID NO: 1010602 - RNA, 22 nt, Human
cagaaaaccugacucuagaacu

SEQ ID NO: 1010603 - RNA, 22 nt, Human
ggccaugguuggggaagacaug

SEQ ID NO: 1010604 - RNA, 17 nt, Human
agaugcuggccacaugu

SEQ ID NO: 1010605 - RNA, 22 nt, Human
ugugcauguauugauuuguacc

SEQ ID NO: 1010606 - RNA, 22 nt, Human
uggaggagggcuggugucugua

SEQ ID NO: 1010607 - RNA, 22 nt, Human
aggaccugaaauucuugcuuuu

SEQ ID NO: 1010608 - RNA, 22 nt, Human
cucagagaagucuuugcuaaac

SEQ ID NO: 1010609 - RNA, 22 nt, Human
gaggggcugcccuggugucagg

SEQ ID NO: 1010610 - RNA, 22 nt, Human
auucaaguucuucugucuuugc

SEQ ID NO: 1010611 - RNA, 22 nt, Human
cacucugcagcugaagggcugg

SEQ ID NO: 1010612 - RNA, 22 nt, Human
cagaggccccagaacuagcucu

SEQ ID NO: 1010613 - RNA, 22 nt, Human
ucauaaaugcagugucauaaau

SEQ ID NO: 1010614 - RNA, 21 nt, Human
gcugagagguugggaaguuca

SEQ ID NO: 1010615 - RNA, 22 nt, Human
ggauguugauugaauggccauu

SEQ ID NO: 1010616 - RNA, 22 nt, Human
caggagugaguuggggucuaca

SEQ ID NO: 1010617 - RNA, 22 nt, Human
acaaaguuugugguauuccaag

SEQ ID NO: 1010618 - RNA, 22 nt, Human
aggagcugucagagugccagag

SEQ ID NO: 1010619 - RNA, 22 nt, Human
ugaagcagcuucuuucugucaa

SEQ ID NO: 1010620 - RNA, 22 nt, Human
uuucaaagucaauaucauuacc

SEQ ID NO: 1010621 - RNA, 22 nt, Human
cuaugaaaugucagauucugca

SEQ ID NO: 1010622 - RNA, 22 nt, Human
agaagccauguuuaguaggaug

SEQ ID NO: 1010623 - RNA, 22 nt, Human
cuggccuggggccucagcugcu

SEQ ID NO: 1010624 - RNA, 22 nt, Human
uaguuuuacuugcgaugauaau

SEQ ID NO: 1010625 - RNA, 22 nt, Human
uuucaaagaccauuaacuauca

SEQ ID NO: 1010626 - RNA, 22 nt, Human
ccaggguggcguagaugcuggg

SEQ ID NO: 1010627 - RNA, 22 nt, Human
uccagggacagcgcuggagcua

SEQ ID NO: 1010628 - RNA, 22 nt, Human
aagcaccugcaguugacaaaaa

SEQ ID NO: 1010629 - RNA, 19 nt, Human
ucauaaggagagaggaaau

SEQ ID NO: 1010630 - RNA, 23 nt, Human
ugaugggaaggaacgacuaccac

SEQ ID NO: 1010631 - RNA, 22 nt, Human
augccacugacauggacaauuu

SEQ ID NO: 1010632 - RNA, 22 nt, Human
uccauuggucucugugcccagg

SEQ ID NO: 1010633 - RNA, 22 nt, Human
ggucagggggaucugugaggua

SEQ ID NO: 1010634 - RNA, 22 nt, Human
auuaaauuggacgcugggggaa

SEQ ID NO: 1010635 - RNA, 22 nt, Human
gcugauguaagacuuuugguuu

SEQ ID NO: 1010636 - RNA, 22 nt, Human
gcuggcagaagagcugguucaa

SEQ ID NO: 1010637 - RNA, 22 nt, Human
uuaacaugucuugacuucaucu

SEQ ID NO: 1010638 - RNA, 22 nt, Human
gccaucacauccaggcuaccuc

SEQ ID NO: 1010639 - RNA, 20 nt, Human
cucuccuugccgacuuggca

SEQ ID NO: 1010640 - RNA, 22 nt, Human
ucauuucaaugauacuacuaag

SEQ ID NO: 1010641 - RNA, 22 nt, Human
aaaugaacucuuccugcauccc

SEQ ID NO: 1010642 - RNA, 22 nt, Human
uggcucugcaccucaguguacc

SEQ ID NO: 1010643 - RNA, 22 nt, Human
uggcacuggaaucguagccuug

SEQ ID NO: 1010644 - RNA, 22 nt, Human
ucugcagaaguggcugggccac

SEQ ID NO: 1010645 - RNA, 17 nt, Human
ugcauuguaggcuagcc

SEQ ID NO: 1010646 - RNA, 22 nt, Human
aaggcaggaugggaaaagauuu

SEQ ID NO: 1010647 - RNA, 22 nt, Human
agagcugcaggguggacccagg

SEQ ID NO: 1010648 - RNA, 22 nt, Human
gcaggggaguccacucuaugca

SEQ ID NO: 1010649 - RNA, 22 nt, Human
augcugagacuggagcagcugg

SEQ ID NO: 1010650 - RNA, 22 nt, Human
ugcuuuauuggaaccucauccu

SEQ ID NO: 1010651 - RNA, 22 nt, Human
aggguagggcccggagacagac

SEQ ID NO: 1010652 - RNA, 20 nt, Human
ccuggcuuugcaucugugau

SEQ ID NO: 1010653 - RNA, 22 nt, Human
aaaaugugcaguuuuuaagcug

SEQ ID NO: 1010654 - RNA, 22 nt, Human
ccagggagccuggugugucagc

SEQ ID NO: 1010655 - RNA, 22 nt, Human
uuugaaaguguuuacuugggaa

SEQ ID NO: 1010656 - RNA, 17 nt, Human
ggucuggggccauuggc

SEQ ID NO: 1010657 - RNA, 22 nt, Human
uagaacauaagucauucauuug

SEQ ID NO: 1010658 - RNA, 20 nt, Human
acuguucaagggccuggugg

SEQ ID NO: 1010659 - RNA, 22 nt, Human
agugaaauccuggucaacaggu

SEQ ID NO: 1010660 - RNA, 22 nt, Human
gaaaugcaaauucucucucgcu

SEQ ID NO: 1010661 - RNA, 22 nt, Human
ugaaggccacuuccugugagcu

SEQ ID NO: 1010662 - RNA, 22 nt, Human
uccugccucuugccuucuucac

SEQ ID NO: 1010663 - RNA, 22 nt, Human
agggacccugaugacugaggag

SEQ ID NO: 1010664 - RNA, 20 nt, Human
ccucucugaagaggucaucu

SEQ ID NO: 1010665 - RNA, 19 nt, Human
gagaggccugugcuugaag

SEQ ID NO: 1010666 - RNA, 22 nt, Human
cucugucccagacccaccucuc

SEQ ID NO: 1010667 - RNA, 22 nt, Human
cuuuauguuggggugucuuagu

SEQ ID NO: 1010668 - RNA, 22 nt, Human
cuggugugauugagcccaggug

SEQ ID NO: 1010669 - RNA, 22 nt, Human
auuguauaacagcauguauuuu

SEQ ID NO: 1010670 - RNA, 22 nt, Human
cagugcauagauccugaggccu

SEQ ID NO: 1010671 - RNA, 22 nt, Human
gugcuuucugcaugguuccuac

SEQ ID NO: 1010672 - RNA, 22 nt, Human
cuuucacaguccugacugagcg

SEQ ID NO: 1010673 - RNA, 22 nt, Human
cucaggggaccuggcuccgagu

SEQ ID NO: 1010674 - RNA, 22 nt, Human
ucccacucccaggcaggccucu

SEQ ID NO: 1010675 - RNA, 21 nt, Human
ggagucagggucuggcugggg

SEQ ID NO: 1010676 - RNA, 22 nt, Human
gcuccucuauuccccacauuuu

SEQ ID NO: 1010677 - RNA, 22 nt, Human
ggccagaggugguacauagcuu

SEQ ID NO: 1010678 - RNA, 22 nt, Human
ugagaaaugggucugcugaaga

SEQ ID NO: 1010679 - RNA, 22 nt, Human
acagccagaggugguccugggu

SEQ ID NO: 1010680 - RNA, 22 nt, Human
gcugccuuuuaaagccucgcuu

SEQ ID NO: 1010681 - RNA, 22 nt, Human
uuucaaacuuuacucuugaauc

SEQ ID NO: 1010682 - RNA, 22 nt, Human
ugccuggauucgguuguuguca

SEQ ID NO: 1010683 - RNA, 17 nt, Human
uccagagcacagagcuc

SEQ ID NO: 1010684 - RNA, 22 nt, Human
cagguggguguaugaaugcaaa

SEQ ID NO: 1010685 - RNA, 22 nt, Human
ugccagcccaccuuggggccuc

SEQ ID NO: 1010686 - RNA, 22 nt, Human
agugaaaugauucugagcaaga

SEQ ID NO: 1010687 - RNA, 22 nt, Human
cucagaauuacaucccauuuua

SEQ ID NO: 1010688 - RNA, 22 nt, Human
uggcucucaggccugcugcguu

SEQ ID NO: 1010689 - RNA, 18 nt, Human
aggcacuggaauuaaggg

SEQ ID NO: 1010690 - RNA, 22 nt, Human
cccagcaucccagugggcagca

SEQ ID NO: 1010691 - RNA, 23 nt, Human
cugcagucgccggccugggugcc

SEQ ID NO: 1010692 - RNA, 22 nt, Human
ucucagaggcccgacguucucc

SEQ ID NO: 1010693 - RNA, 22 nt, Human
ugggccugugaugcugggcuau

SEQ ID NO: 1010694 - RNA, 22 nt, Human
cuggcagcugcccgagaugccc

SEQ ID NO: 1010695 - RNA, 22 nt, Human
gagggcugaagauuguggcccc

SEQ ID NO: 1010696 - RNA, 22 nt, Human
cuugaaagaagggucuuuuaau

SEQ ID NO: 1010697 - RNA, 21 nt, Human
ccagcuccaggaccuuggauc

SEQ ID NO: 1010698 - RNA, 22 nt, Human
aggcacugacagauucuguguc

SEQ ID NO: 1010699 - RNA, 22 nt, Human
uagggcaggggaggaaucugaa

SEQ ID NO: 1010700 - RNA, 20 nt, Human
uauuuagauucaaguaugga

SEQ ID NO: 1010701 - RNA, 22 nt, Human
gccuguccuggaugcucugcaa

SEQ ID NO: 1010702 - RNA, 19 nt, Human
cuggcucuuggguggagga

SEQ ID NO: 1010703 - RNA, 22 nt, Human
gcuuagucaauuauaaauaggc

SEQ ID NO: 1010704 - RNA, 22 nt, Human
guauuugauagauuucaaagga

SEQ ID NO: 1010705 - RNA, 22 nt, Human
uggccugggccggcagauauac

SEQ ID NO: 1010706 - RNA, 22 nt, Human
caggaugguggcaugaucagaa

SEQ ID NO: 1010707 - RNA, 22 nt, Human
uggguagaggaauugggcuacc

SEQ ID NO: 1010708 - RNA, 22 nt, Human
uaugcacgucuauuuaugaaga

SEQ ID NO: 1010709 - RNA, 22 nt, Human
ucagcuuugccaccagcuguaa

SEQ ID NO: 1010710 - RNA, 22 nt, Human
gcacccaggccggcgacugcag

SEQ ID NO: 1010711 - RNA, 22 nt, Human
aggucccaggcauagcuggucu

SEQ ID NO: 1010712 - RNA, 22 nt, Human
cauucuuacacaauauuuuaau

SEQ ID NO: 1010713 - RNA, 22 nt, Human
uaggagaggugaauggcacacu

SEQ ID NO: 1010714 - RNA, 22 nt, Human
agucagugaaggcauugcucaa

SEQ ID NO: 1010715 - RNA, 22 nt, Human
gagcaguagaguacauggcucc

SEQ ID NO: 1010716 - RNA, 21 nt, Human
cagagcuguccaaacccugac

SEQ ID NO: 1010717 - RNA, 22 nt, Human
cagcuuugccaaguaaggucuu

SEQ ID NO: 1010718 - RNA, 22 nt, Human
cuuucacagcacaagccugccu

SEQ ID NO: 1010719 - RNA, 17 nt, Human
agcugagcuggccaggg

SEQ ID NO: 1010720 - RNA, 22 nt, Human
ccuggcaguuuugcccaggauu

SEQ ID NO: 1010721 - RNA, 22 nt, Human
ucagcaauccucccacaggugg

SEQ ID NO: 1010722 - RNA, 22 nt, Human
cuggcaguuggcagggcugcca

SEQ ID NO: 1010723 - RNA, 22 nt, Human
ggccagaaaguuaagcuguggc

SEQ ID NO: 1010724 - RNA, 22 nt, Human
gccuaggaguacagaaugguuu

SEQ ID NO: 1010725 - RNA, 22 nt, Human
cuggagagggagcccuggcagu

SEQ ID NO: 1010726 - RNA, 22 nt, Human
gcuccaggagagggaagcagau

SEQ ID NO: 1010727 - RNA, 22 nt, Human
uauuccuauggccacugcuacu

SEQ ID NO: 1010728 - RNA, 22 nt, Human
caugcuuucuguccaaauguua

SEQ ID NO: 1010729 - RNA, 22 nt, Human
gauuucuucauucauuagaugg

SEQ ID NO: 1010730 - RNA, 22 nt, Human
guucuuaagaccacaauaaaaa

SEQ ID NO: 1010731 - RNA, 22 nt, Human
ucugccuuuucacugccacuaa

SEQ ID NO: 1010732 - RNA, 19 nt, Human
acauuuagaauguacuugc

SEQ ID NO: 1010733 - RNA, 22 nt, Human
aucagcaagcauuuauugagug

SEQ ID NO: 1010734 - RNA, 22 nt, Human
augcaacaaaugcuacgaaucg

SEQ ID NO: 1010735 - RNA, 22 nt, Human
cugggcagagcuaacaccugag

SEQ ID NO: 1010736 - RNA, 22 nt, Human
uuuuucagccaugaauuacacu

SEQ ID NO: 1010737 - RNA, 22 nt, Human
agggcugggcugcuuguuguca

SEQ ID NO: 1010738 - RNA, 22 nt, Human
gcaggagugacauggaugugga

SEQ ID NO: 1010739 - RNA, 22 nt, Human
ugcauuguugaccaguugugca

SEQ ID NO: 1010740 - RNA, 22 nt, Human
ccuguucacuuugacuucucca

SEQ ID NO: 1010741 - RNA, 22 nt, Human
ccauggcauuuuaugugucuua

SEQ ID NO: 1010742 - RNA, 22 nt, Human
caggcagcugcuggguucagcc

SEQ ID NO: 1010743 - RNA, 19 nt, Human
ucucugcuucucuuggcau

SEQ ID NO: 1010744 - RNA, 22 nt, Human
ucugagagucucugaggcagau

SEQ ID NO: 1010745 - RNA, 22 nt, Human
agcugacuucuugauccaauga

SEQ ID NO: 1010746 - RNA, 22 nt, Human
cucccucugucuuguccagaaa

SEQ ID NO: 1010747 - RNA, 22 nt, Human
ugccugggugcuggcuggucac

SEQ ID NO: 1010748 - RNA, 22 nt, Human
aaggcccuaauagagcacauau

SEQ ID NO: 1010749 - RNA, 22 nt, Human
gagagcuggguucaaguagcug

SEQ ID NO: 1010750 - RNA, 22 nt, Human
ucaggagggugacaggcccugg

SEQ ID NO: 1010751 - RNA, 22 nt, Human
aagugagugguaaggagcaugg

SEQ ID NO: 1010752 - RNA, 18 nt, Human
uccagcgugcuccagggc

SEQ ID NO: 1010753 - RNA, 22 nt, Human
ccuggagcuuuuccauccugga

SEQ ID NO: 1010754 - RNA, 22 nt, Human
ccugucuguccucucaugagcc

SEQ ID NO: 1010755 - RNA, 22 nt, Human
augauacaagcaaaacuaauca

SEQ ID NO: 1010756 - RNA, 22 nt, Human
caguauuuauggcuugaguauu

SEQ ID NO: 1010757 - RNA, 22 nt, Human
uggagccugagucagcggaggc

SEQ ID NO: 1010758 - RNA, 22 nt, Human
uuugggaacucuaucauggaaa

SEQ ID NO: 1010759 - RNA, 22 nt, Human
cuccucugucuaccacgagggu

SEQ ID NO: 1010760 - RNA, 22 nt, Human
ucugucuccucugaggugccag

SEQ ID NO: 1010761 - RNA, 22 nt, Human
uccaagggcagccauagaacuu

SEQ ID NO: 1010762 - RNA, 22 nt, Human
gcagggcaaugaucccgagagg

SEQ ID NO: 1010763 - RNA, 22 nt, Human
cccaggcagucuggcucuaaag

SEQ ID NO: 1010764 - RNA, 19 nt, Human
cugguccugacugaggggu

SEQ ID NO: 1010765 - RNA, 22 nt, Human
gugugccagacaugaugcuaug

SEQ ID NO: 1010766 - RNA, 23 nt, Human
auucuucauuaucuucuagaaaa

SEQ ID NO: 1010767 - RNA, 22 nt, Human
ggguacaaagauuucauaagau

SEQ ID NO: 1010768 - RNA, 23 nt, Human
guggagccacaucacaggcuccu

SEQ ID NO: 1010769 - RNA, 22 nt, Human
cuggcucacaggugagaugcau

SEQ ID NO: 1010770 - RNA, 21 nt, Human
gugucaugguugacuuuggca

SEQ ID NO: 1010771 - RNA, 19 nt, Human
augauggucccauucaccu

SEQ ID NO: 1010772 - RNA, 22 nt, Human
uucuuucagaacacaagugauu

SEQ ID NO: 1010773 - RNA, 22 nt, Human
aguauuuccuggcuuaucugcu

SEQ ID NO: 1010774 - RNA, 22 nt, Human
gccugggagggcagcagugugg

SEQ ID NO: 1010775 - RNA, 22 nt, Human
gcucccagacugaccagaggug

SEQ ID NO: 1010776 - RNA, 22 nt, Human
cagcaguguggaagcugagggg

SEQ ID NO: 1010777 - RNA, 22 nt, Human
ugggcagaguugugaugaacug

SEQ ID NO: 1010778 - RNA, 22 nt, Human
ucuucaaacugaaaauuuagaa

SEQ ID NO: 1010779 - RNA, 22 nt, Human
acacacaauuaguuuuaugcuu

SEQ ID NO: 1010780 - RNA, 22 nt, Human
acauuucucagggaguuuugcu

SEQ ID NO: 1010781 - RNA, 22 nt, Human
acauuucuuugcuagacagcag

SEQ ID NO: 1010782 - RNA, 22 nt, Human
uaggcacuguguuuguaggagu

SEQ ID NO: 1010783 - RNA, 22 nt, Human
auuucucagugaaaugacaggc

SEQ ID NO: 1010784 - RNA, 22 nt, Human
uggcccugucccuggagccugg

SEQ ID NO: 1010785 - RNA, 22 nt, Human
uuucauaaugucacagucaaaa

SEQ ID NO: 1010786 - RNA, 22 nt, Human
uguggugagaaacugguagauu

SEQ ID NO: 1010787 - RNA, 22 nt, Human
cugcuuugaggggcucuguaua

SEQ ID NO: 1010788 - RNA, 23 nt, Human
uggcaccaggcauucuaggggua

SEQ ID NO: 1010789 - RNA, 21 nt, Human
ugcagcagaguaagcagggga

SEQ ID NO: 1010790 - RNA, 22 nt, Human
cauauuugguauaacuuaagca

SEQ ID NO: 1010791 - RNA, 22 nt, Human
cccaggcagcggggucuccuug

SEQ ID NO: 1010792 - RNA, 23 nt, Human
uggcucagggucucuuaugaagu

SEQ ID NO: 1010793 - RNA, 22 nt, Human
agagugaaggccagguuacagu

SEQ ID NO: 1010794 - RNA, 22 nt, Human
ugucccaguuuugcagguuaga

SEQ ID NO: 1010795 - RNA, 23 nt, Human
gucagcuugaccaguggagaguc

SEQ ID NO: 1010796 - RNA, 22 nt, Human
ucucuuaauaaguaaauacuga

SEQ ID NO: 1010797 - RNA, 20 nt, Human
ggcucuggaaucuggugggc

SEQ ID NO: 1010798 - RNA, 19 nt, Human
gcacacccugcaccaccau

SEQ ID NO: 1010799 - RNA, 22 nt, Human
ugggugcuucgucagcucugag

SEQ ID NO: 1010800 - RNA, 22 nt, Human
ucagagaguuuucacuagggug

SEQ ID NO: 1010801 - RNA, 20 nt, Human
cuuuggcaaugagaacaggg

SEQ ID NO: 1010802 - RNA, 22 nt, Human
cagcuuuauuaaugauugucuu

SEQ ID NO: 1010803 - RNA, 22 nt, Human
uuucucaucuggaaacagugcu

SEQ ID NO: 1010804 - RNA, 22 nt, Human
caggcuggaguuaccuuuaggg

SEQ ID NO: 1010805 - RNA, 19 nt, Human
ggcugccuggagcgagggc

SEQ ID NO: 1010806 - RNA, 22 nt, Human
gagcagcugagcuggaaugaga

SEQ ID NO: 1010807 - RNA, 22 nt, Human
agcaauauaaauguuggguaga

SEQ ID NO: 1010808 - RNA, 22 nt, Human
uggcucagaaggcugccuucac

SEQ ID NO: 1010809 - RNA, 22 nt, Human
ugaaaugaagggcuuguucugg

SEQ ID NO: 1010810 - RNA, 22 nt, Human
uugcuuugccaccagaagucua

SEQ ID NO: 1010811 - RNA, 20 nt, Human
ggcagagcuaugucuguugc

SEQ ID NO: 1010812 - RNA, 22 nt, Human
aagcaauaagccagauuuggau

SEQ ID NO: 1010813 - RNA, 17 nt, Human
ucuguccagggagugug

SEQ ID NO: 1010814 - RNA, 22 nt, Human
ucauauaaguuuaaaacuaucu

SEQ ID NO: 1010815 - RNA, 22 nt, Human
ucacaacucuuuccauuuaaua

SEQ ID NO: 1010816 - RNA, 23 nt, Human
ccagcucccaggucugaggacug

SEQ ID NO: 1010817 - RNA, 22 nt, Human
gcagcuggcccugacacgcaga

SEQ ID NO: 1010818 - RNA, 22 nt, Human
aggcaguguauugcuagcggcu

SEQ ID NO: 1010819 - RNA, 22 nt, Human
agcuuuguggcuuugcaagacu

SEQ ID NO: 1010820 - RNA, 22 nt, Human
agggccuggaacugugggcagg

SEQ ID NO: 1010821 - RNA, 22 nt, Human
agacaacaccaaaugcuagugu

SEQ ID NO: 1010822 - RNA, 22 nt, Human
uggcagggccugcucaucaucc

SEQ ID NO: 1010823 - RNA, 21 nt, Human
guggccugauuaugaaugggu

SEQ ID NO: 1010824 - RNA, 22 nt, Human
cagaggcugcucuggguggcau

SEQ ID NO: 1010825 - RNA, 22 nt, Human
ugagagagccugaaucucuuac

SEQ ID NO: 1010826 - RNA, 22 nt, Human
ugaguucucacccauucuucuu

SEQ ID NO: 1010827 - RNA, 23 nt, Human
ccugcagcugcuggggcuccacc

SEQ ID NO: 1010828 - RNA, 22 nt, Human
ccucugccaccucccacgaggc

SEQ ID NO: 1010829 - RNA, 22 nt, Human
ggcaggguggcccuccagugag

SEQ ID NO: 1010830 - RNA, 22 nt, Human
cuccucaguugucccauggaga

SEQ ID NO: 1010831 - RNA, 22 nt, Human
aaucagaaaauucaguggaauu

SEQ ID NO: 1010832 - RNA, 22 nt, Human
cucagugugaaugcucaguaaa

SEQ ID NO: 1010833 - RNA, 22 nt, Human
ucucuguacaguacaugccgug

SEQ ID NO: 1010834 - RNA, 22 nt, Human
agggacacaugugauuauuuau

SEQ ID NO: 1010835 - RNA, 22 nt, Human
cagucccaguuugagacucugg

SEQ ID NO: 1010836 - RNA, 22 nt, Human
uuucacaugguacugccuguuu

SEQ ID NO: 1010837 - RNA, 22 nt, Human
gggaccuggacaugugugugcu

SEQ ID NO: 1010838 - RNA, 22 nt, Human
caagagcucccagaccugggca

SEQ ID NO: 1010839 - RNA, 22 nt, Human
uguucauuuggcccuuuuguau

SEQ ID NO: 1010840 - RNA, 22 nt, Human
auauuccauugguuucccuucu

SEQ ID NO: 1010841 - RNA, 22 nt, Human
uggcuucuuagaccaguggccu

SEQ ID NO: 1010842 - RNA, 22 nt, Human
ccagggccaagagaccucgagg

SEQ ID NO: 1010843 - RNA, 22 nt, Human
gucucccaaccccugugcccag

SEQ ID NO: 1010844 - RNA, 22 nt, Human
uggcaaccagguggucuagggu

SEQ ID NO: 1010845 - RNA, 22 nt, Human
uaaacaugugagugugcauaua

SEQ ID NO: 1010846 - RNA, 22 nt, Human
uacauguuauuucacuauuggu

SEQ ID NO: 1010847 - RNA, 21 nt, Human
ggccugagcaccuguccaccu

SEQ ID NO: 1010848 - RNA, 22 nt, Human
gggaaaggaucagugggaggcu

SEQ ID NO: 1010849 - RNA, 22 nt, Human
guuugaaugcaguaugcauuuu

SEQ ID NO: 1010850 - RNA, 22 nt, Human
aguguccaacucagcuugucaa

SEQ ID NO: 1010851 - RNA, 22 nt, Human
acauuucugucuuagggacugu

SEQ ID NO: 1010852 - RNA, 22 nt, Human
cgggcuggcugcagcugcugga

SEQ ID NO: 1010853 - RNA, 22 nt, Human
agagggcaugcuugguggccug

SEQ ID NO: 1010854 - RNA, 22 nt, Human
aaaguuuguuauaugauaagga

SEQ ID NO: 1010855 - RNA, 22 nt, Human
uuggcugaagguuaagugcugg

SEQ ID NO: 1010856 - RNA, 23 nt, Human
gcagauggccccagagugcugcc

SEQ ID NO: 1010857 - RNA, 22 nt, Human
aauugcaacagguagacuuuuc

SEQ ID NO: 1010858 - RNA, 22 nt, Human
cugccuguuuucugauagauuu

SEQ ID NO: 1010859 - RNA, 22 nt, Human
gaaugcacucacccaucacuca

SEQ ID NO: 1010860 - RNA, 22 nt, Human
cuggggcauugggagaggccug

SEQ ID NO: 1010861 - RNA, 22 nt, Human
uagcuaucuguguccagaucca

SEQ ID NO: 1010862 - RNA, 22 nt, Human
uuguugguggaauugaugcuag

SEQ ID NO: 1010863 - RNA, 22 nt, Human
auugaaucugcacuaguauuuu

SEQ ID NO: 1010864 - RNA, 22 nt, Human
aagaacauuuuguagaaugaca

SEQ ID NO: 1010865 - RNA, 22 nt, Human
acuucauuguaauauuauagca

SEQ ID NO: 1010866 - RNA, 22 nt, Human
uggcucugugucucccagcagc

SEQ ID NO: 1010867 - RNA, 23 nt, Human
aggcccaacucugugagggcugc

SEQ ID NO: 1010868 - RNA, 22 nt, Human
ccagcagagucuaggaaggagg

SEQ ID NO: 1010869 - RNA, 22 nt, Human
auuucuuuucaagagggugcuu

SEQ ID NO: 1010870 - RNA, 22 nt, Human
uaaucacaucaggguaaauggg

SEQ ID NO: 1010871 - RNA, 22 nt, Human
cugcagagaauuguggggcuuc

SEQ ID NO: 1010872 - RNA, 22 nt, Human
agggcucugggguggcagagau

SEQ ID NO: 1010873 - RNA, 22 nt, Human
cagggccaaguuggugccuuuu

SEQ ID NO: 1010874 - RNA, 22 nt, Human
uucuggaguauuccuggcaccu

SEQ ID NO: 1010875 - RNA, 22 nt, Human
auccaaaccuggacaugagugg

SEQ ID NO: 1010876 - RNA, 22 nt, Human
acagccagaggagccaggcugg

SEQ ID NO: 1010877 - RNA, 23 nt, Human
ugcucugggaggcccuggagagc

SEQ ID NO: 1010878 - RNA, 22 nt, Human
gggugcaggcagcccaggcagg

SEQ ID NO: 1010879 - RNA, 22 nt, Human
aaaugcuguguuuuaacauaga

SEQ ID NO: 1010880 - RNA, 22 nt, Human
uuuagaaauugcagagugggug

SEQ ID NO: 1010881 - RNA, 22 nt, Human
gguggccucucaugcaagguag

SEQ ID NO: 1010882 - RNA, 22 nt, Human
gcacagggagcaggucucuggu

SEQ ID NO: 1010883 - RNA, 22 nt, Human
cccagcauuucugggcugcacu

SEQ ID NO: 1010884 - RNA, 22 nt, Human
acugugcacaauucuaaguccu

SEQ ID NO: 1010885 - RNA, 22 nt, Human
gcagggccagguacaagaagca

SEQ ID NO: 1010886 - RNA, 22 nt, Human
cagagccacugucugccaggca

SEQ ID NO: 1010887 - RNA, 22 nt, Human
aauggacaggagagcauaguca

SEQ ID NO: 1010888 - RNA, 22 nt, Human
uggcagagaacacacaugauuc

SEQ ID NO: 1010889 - RNA, 17 nt, Human
gucauucucagaaaaug

SEQ ID NO: 1010890 - RNA, 22 nt, Human
ccugggaggcggagguugcagu

SEQ ID NO: 1010891 - RNA, 22 nt, Human
aggcagagagcaguggccgucu

SEQ ID NO: 1010892 - RNA, 22 nt, Human
ucucaggaagauuagggcuaag

SEQ ID NO: 1010893 - RNA, 22 nt, Human
ucuguuccauguuuuguuccau

SEQ ID NO: 1010894 - RNA, 22 nt, Human
cacucugcgcugggcgccagcg

SEQ ID NO: 1010895 - RNA, 22 nt, Human
uagggacccucccugcucuaac

SEQ ID NO: 1010896 - RNA, 22 nt, Human
ugcuauaagaauuauauuacuc

SEQ ID NO: 1010897 - RNA, 22 nt, Human
gagcccuguagcaagucauguc

SEQ ID NO: 1010898 - RNA, 22 nt, Human
guguaaggccccagguucuuua

SEQ ID NO: 1010899 - RNA, 22 nt, Human
uuugaaagagcugauacaugaa

SEQ ID NO: 1010900 - RNA, 22 nt, Human
uauuagggaacugcaagacuaa

SEQ ID NO: 1010901 - RNA, 22 nt, Human
acagggucaagggugcuacaag

SEQ ID NO: 1010902 - RNA, 22 nt, Human
ucacagacacagggagaagcau

SEQ ID NO: 1010903 - RNA, 22 nt, Human
cagggccugagggcugcucugc

SEQ ID NO: 1010904 - RNA, 22 nt, Human
agcccggcuuccccgguugcua

SEQ ID NO: 1010905 - RNA, 23 nt, Human
gcucagagguuuuucucuggaug

SEQ ID NO: 1010906 - RNA, 22 nt, Human
uagaaaucauuuagaaguauug

SEQ ID NO: 1010907 - RNA, 22 nt, Human
aggcuccaugcaaaggcuguuu

SEQ ID NO: 1010908 - RNA, 17 nt, Human
cagacaggcugucaccc

SEQ ID NO: 1010909 - RNA, 22 nt, Human
aaaucaguuguuauauuaaaga

SEQ ID NO: 1010910 - RNA, 22 nt, Human
uccugcagcugaagcucaugug

SEQ ID NO: 1010911 - RNA, 22 nt, Human
caagagcuacccugugccauau

SEQ ID NO: 1010912 - RNA, 22 nt, Human
aaaagagguuaaccaggugugu

SEQ ID NO: 1010913 - RNA, 22 nt, Human
uauuuguauguguguacauaua

SEQ ID NO: 1010914 - RNA, 22 nt, Human
agcaccugcuuaaugugcagug

SEQ ID NO: 1010915 - RNA, 22 nt, Human
aaaguucuggcauuuucugucu

SEQ ID NO: 1010916 - RNA, 22 nt, Human
cuggggggagcugcguccagca

SEQ ID NO: 1010917 - RNA, 22 nt, Human
uggcucuguugagguauggauu

SEQ ID NO: 1010918 - RNA, 22 nt, Human
uccuuucccuuuccauccuggc

SEQ ID NO: 1010919 - RNA, 22 nt, Human
gccucugcaccaguacugugcc

SEQ ID NO: 1010920 - RNA, 23 nt, Human
uggggagaguuacccuggaagcg

SEQ ID NO: 1010921 - RNA, 22 nt, Human
caguaugagaguugaaucaagg

SEQ ID NO: 1010922 - RNA, 22 nt, Human
agggacugagcuaggaucuagu

SEQ ID NO: 1010923 - RNA, 22 nt, Human
agcuuuauauguuguuucucca

SEQ ID NO: 1010924 - RNA, 22 nt, Human
ugcuuaaacauacuauuuauau

SEQ ID NO: 1010925 - RNA, 22 nt, Human
cuggcucaggaaaguugcugcu

SEQ ID NO: 1010926 - RNA, 22 nt, Human
aaaaccaggcguuuccuauuau

SEQ ID NO: 1010927 - RNA, 22 nt, Human
caggccugucugcacaugaggc

SEQ ID NO: 1010928 - RNA, 18 nt, Human
agagcagcggcaucacac

SEQ ID NO: 1010929 - RNA, 22 nt, Human
augcuguggggagugaggguag

SEQ ID NO: 1010930 - RNA, 22 nt, Human
acaggugguaaaauggacuguc

SEQ ID NO: 1010931 - RNA, 22 nt, Human
gcauucaucuuccuccaugcag

SEQ ID NO: 1010932 - RNA, 22 nt, Human
ggcugaaguguaguggcucacu

SEQ ID NO: 1010933 - RNA, 22 nt, Human
aaaguucuggggguguuucugg

SEQ ID NO: 1010934 - RNA, 23 nt, Human
augcaguauaugucaguaguuua

SEQ ID NO: 1010935 - RNA, 22 nt, Human
ucugucacccagagugcagugg

SEQ ID NO: 1010936 - RNA, 22 nt, Human
auccaugaucaauuuauuacua

SEQ ID NO: 1010937 - RNA, 22 nt, Human
ggccuugggcuggcugcaguau

SEQ ID NO: 1010938 - RNA, 22 nt, Human
agcagcagauccaaaaaaugug

SEQ ID NO: 1010939 - RNA, 22 nt, Human
ugggcagacuaaggucaaagcu

SEQ ID NO: 1010940 - RNA, 22 nt, Human
acagagcauauaaagugcuuug

SEQ ID NO: 1010941 - RNA, 20 nt, Human
gcuuuuucuaauagcagucc

SEQ ID NO: 1010942 - RNA, 23 nt, Human
auguauuuaaauuucagugauga

SEQ ID NO: 1010943 - RNA, 22 nt, Human
gccaggcuccccggaucccugg

SEQ ID NO: 1010944 - RNA, 22 nt, Human
uuucacaacugcuuauuugaga

SEQ ID NO: 1010945 - RNA, 22 nt, Human
ucaguggagcuaagcaugagau

SEQ ID NO: 1010946 - RNA, 22 nt, Human
ucaguaacuuacuuauucaccu

SEQ ID NO: 1010947 - RNA, 22 nt, Human
acugggagggucuugaagaggg

SEQ ID NO: 1010948 - RNA, 22 nt, Human
ucaguguccggagccugagugc

SEQ ID NO: 1010949 - RNA, 22 nt, Human
uaccauuucauucuuuccucau

SEQ ID NO: 1010950 - RNA, 22 nt, Human
guucuucaucuuaaccaucugu

SEQ ID NO: 1010951 - RNA, 23 nt, Human
cauguacacacagcuguacagug

SEQ ID NO: 1010952 - RNA, 22 nt, Human
uuuuaaguuaauauaauugagg

SEQ ID NO: 1010953 - RNA, 22 nt, Human
cacuugggacaaagcuucugcu

SEQ ID NO: 1010954 - RNA, 22 nt, Human
acagaaugcguagugcauguug

SEQ ID NO: 1010955 - RNA, 22 nt, Human
uggccucugcaauggauucacc

SEQ ID NO: 1010956 - RNA, 22 nt, Human
aaaucaguucucccuuucuuca

SEQ ID NO: 1010957 - RNA, 22 nt, Human
cuggcagguggauggggacucc

SEQ ID NO: 1010958 - RNA, 22 nt, Human
cuggugccuccucccugugcuu

SEQ ID NO: 1010959 - RNA, 22 nt, Human
ucaaggagcccacagucuaaug

SEQ ID NO: 1010960 - RNA, 19 nt, Human
ggcauccacgaaugcagag

SEQ ID NO: 1010961 - RNA, 22 nt, Human
ccagagagaaaauggagggcca

SEQ ID NO: 1010962 - RNA, 22 nt, Human
agcaggcuaagggaccuguuua

SEQ ID NO: 1010963 - RNA, 22 nt, Human
ccagagucuuuauauuccugaa

SEQ ID NO: 1010964 - RNA, 22 nt, Human
gcaagcugcuuaagcucauugu

SEQ ID NO: 1010965 - RNA, 22 nt, Human
ucagucucaucaacucuauucc

SEQ ID NO: 1010966 - RNA, 22 nt, Human
gucucagagagcuacucucuua

SEQ ID NO: 1010967 - RNA, 22 nt, Human
acaggcuucucacagaaaaggg

SEQ ID NO: 1010968 - RNA, 21 nt, Human
gaaaagcaagggaguagaaca

SEQ ID NO: 1010969 - RNA, 22 nt, Human
aguuucuaccgguacauucagg

SEQ ID NO: 1010970 - RNA, 22 nt, Human
ugucucugggugauucaguccu

SEQ ID NO: 1010971 - RNA, 22 nt, Human
acuggcagaggauagcacuaau

SEQ ID NO: 1010972 - RNA, 22 nt, Human
uugcuuuguggugguucuucca

SEQ ID NO: 1010973 - RNA, 22 nt, Human
ucaucuucuauuaauagggaga

SEQ ID NO: 1010974 - RNA, 22 nt, Human
auggauaagaacaaauaucuga

SEQ ID NO: 1010975 - RNA, 22 nt, Human
cagccagggagcaaagaguuga

SEQ ID NO: 1010976 - RNA, 22 nt, Human
aagguacaccaaaguucaaguu

SEQ ID NO: 1010977 - RNA, 22 nt, Human
ccagagccccugagcuucccug

SEQ ID NO: 1010978 - RNA, 22 nt, Human
auaaagauuucuuuuucucuac

SEQ ID NO: 1010979 - RNA, 22 nt, Human
gcagagccagaauggccaggac

SEQ ID NO: 1010980 - RNA, 22 nt, Human
ggcagggaguggagacucccua

SEQ ID NO: 1010981 - RNA, 22 nt, Human
guguguccuugggccucugcag

SEQ ID NO: 1010982 - RNA, 22 nt, Human
cagagagagucaaaucuuugcu

SEQ ID NO: 1010983 - RNA, 22 nt, Human
uuucaauguaacauuuccaggc

SEQ ID NO: 1010984 - RNA, 22 nt, Human
uaccaggcagcugcacagaggc

SEQ ID NO: 1010985 - RNA, 22 nt, Human
agacaggcuuugcuguauauca

SEQ ID NO: 1010986 - RNA, 22 nt, Human
uucuuuuacauuaagauuucag

SEQ ID NO: 1010987 - RNA, 22 nt, Human
ucugggagauccaagcagaacu

SEQ ID NO: 1010988 - RNA, 21 nt, Human
ggugucaguuuuggucauuag

SEQ ID NO: 1010989 - RNA, 22 nt, Human
ucaaaaguuucacauagagaua

SEQ ID NO: 1010990 - RNA, 22 nt, Human
uaagcauaacuaaaaaugauuu

SEQ ID NO: 1010991 - RNA, 22 nt, Human
agcaccuguugcacuucauaau

SEQ ID NO: 1010992 - RNA, 22 nt, Human
uuuuccucugcaauaaaagcag

SEQ ID NO: 1010993 - RNA, 22 nt, Human
guggcugggcuccgagcggcuu

SEQ ID NO: 1010994 - RNA, 22 nt, Human
ccuggagcaaaaaucuaaggag

SEQ ID NO: 1010995 - RNA, 22 nt, Human
uuagccauuaaauuacaaggug

SEQ ID NO: 1010996 - RNA, 22 nt, Human
gcucccugcagcugagaguucc

SEQ ID NO: 1010997 - RNA, 22 nt, Human
gaccaggacacaguggcaaggu

SEQ ID NO: 1010998 - RNA, 22 nt, Human
cggcagagcuuccugcucagcg

SEQ ID NO: 1010999 - RNA, 22 nt, Human
uacagauacagaucuagauaca

SEQ ID NO: 1011000 - RNA, 21 nt, Human
aggccucuucauggccaugau

SEQ ID NO: 1011001 - RNA, 22 nt, Human
gggccucucccuucucacgcau

SEQ ID NO: 1011002 - RNA, 21 nt, Human
ggucagggggugccuccaggu

SEQ ID NO: 1011003 - RNA, 22 nt, Human
gaaggaagugcucauacuaguu

SEQ ID NO: 1011004 - RNA, 22 nt, Human
ucccagaaaaaggaggcuauga

SEQ ID NO: 1011005 - RNA, 22 nt, Human
ccaggccuagccccugagggua

SEQ ID NO: 1011006 - RNA, 22 nt, Human
ucagggcaggacaguguaggcc

SEQ ID NO: 1011007 - RNA, 22 nt, Human
agcugucagugcugugccugua

SEQ ID NO: 1011008 - RNA, 22 nt, Human
aucauucugauggucaaugcua

SEQ ID NO: 1011009 - RNA, 22 nt, Human
agguggggaaaccagcgauccc

SEQ ID NO: 1011010 - RNA, 22 nt, Human
agugccuggaccccaugacaua

SEQ ID NO: 1011011 - RNA, 22 nt, Human
gauuucaccugaucuugucauc

SEQ ID NO: 1011012 - RNA, 22 nt, Human
caguucuuuguggggaguucuc

SEQ ID NO: 1011013 - RNA, 22 nt, Human
ucuucagacccuuagcugugau

SEQ ID NO: 1011014 - RNA, 22 nt, Human
aaacaucaccauuuuaccuaau

SEQ ID NO: 1011015 - RNA, 19 nt, Human
agggaaggauucugucauu

SEQ ID NO: 1011016 - RNA, 22 nt, Human
uucauucugcaguucucagcuc

SEQ ID NO: 1011017 - RNA, 19 nt, Human
uagcagcugccaaaggaga

SEQ ID NO: 1011018 - RNA, 22 nt, Human
uuccaggauagcuuucaggaau

SEQ ID NO: 1011019 - RNA, 22 nt, Human
ugaagcuuuccuguggucagga

SEQ ID NO: 1011020 - RNA, 22 nt, Human
uagcagggaaggugugcugagc

SEQ ID NO: 1011021 - RNA, 22 nt, Human
ucaacacucuuuggcacaguua

SEQ ID NO: 1011022 - RNA, 22 nt, Human
gcucugugggugaguagaaucu

SEQ ID NO: 1011023 - RNA, 22 nt, Human
ccaggccuuucuucuuggucug

SEQ ID NO: 1011024 - RNA, 22 nt, Human
cugggacuuuacccuguggccc

SEQ ID NO: 1011025 - RNA, 22 nt, Human
uuagagaaauucugguaaugua

SEQ ID NO: 1011026 - RNA, 22 nt, Human
gcuggagccauuggcuuggccu

SEQ ID NO: 1011027 - RNA, 22 nt, Human
ugaagccuuguguggccucucu

SEQ ID NO: 1011028 - RNA, 22 nt, Human
gagugcaucguggccauuuuaa

SEQ ID NO: 1011029 - RNA, 22 nt, Human
ucauuuccucaaauucaagguu

SEQ ID NO: 1011030 - RNA, 19 nt, Human
gcuggggccugaccagaca

SEQ ID NO: 1011031 - RNA, 22 nt, Human
uggcuccuaggauggugccugg

SEQ ID NO: 1011032 - RNA, 22 nt, Human
aggcacugugcuucuuauaugu

SEQ ID NO: 1011033 - RNA, 22 nt, Human
cugagccuuauucaccagcccu

SEQ ID NO: 1011034 - RNA, 22 nt, Human
ugaaagcucugucaucauuccu

SEQ ID NO: 1011035 - RNA, 22 nt, Human
cacugcaguaacucuaggacug

SEQ ID NO: 1011036 - RNA, 22 nt, Human
auuguggugucaguuauaggca

SEQ ID NO: 1011037 - RNA, 22 nt, Human
cucugcauuuuaacagaugauu

SEQ ID NO: 1011038 - RNA, 22 nt, Human
cagaaugagauaacccagauug

SEQ ID NO: 1011039 - RNA, 22 nt, Human
ucauucuuuaccaaguugucac

SEQ ID NO: 1011040 - RNA, 22 nt, Human
gcagcuuucuugcccuaaucuu

SEQ ID NO: 1011041 - RNA, 22 nt, Human
uuacuuugcuuucucauuacag

SEQ ID NO: 1011042 - RNA, 22 nt, Human
caaggcaggcaguucacuugag

SEQ ID NO: 1011043 - RNA, 22 nt, Human
aaaugcuagggagaaacucucc

SEQ ID NO: 1011044 - RNA, 22 nt, Human
auugaaaaaugacuauugcuua

SEQ ID NO: 1011045 - RNA, 22 nt, Human
ugcagccaccaccucugcugaa

SEQ ID NO: 1011046 - RNA, 22 nt, Human
gggagagagaaaacguggcgca

SEQ ID NO: 1011047 - RNA, 22 nt, Human
uaucauuguguuauuucuucca

SEQ ID NO: 1011048 - RNA, 20 nt, Human
ggucccugcccucugucauc

SEQ ID NO: 1011049 - RNA, 22 nt, Human
ucaaagucucugcuucuguaac

SEQ ID NO: 1011050 - RNA, 22 nt, Human
uccagccuuucuacucacugag

SEQ ID NO: 1011051 - RNA, 22 nt, Human
acacagccgugaaucugcuucu

SEQ ID NO: 1011052 - RNA, 22 nt, Human
uacaagagguauauagaaacag

SEQ ID NO: 1011053 - RNA, 22 nt, Human
ucccuguccugggcaaucccag

SEQ ID NO: 1011054 - RNA, 22 nt, Human
acuuucucccacccacccgucu

SEQ ID NO: 1011055 - RNA, 22 nt, Human
uggcuuccuccagagcaggagg

SEQ ID NO: 1011056 - RNA, 22 nt, Human
cuaauacacccuauugcuuguu

SEQ ID NO: 1011057 - RNA, 22 nt, Human
gcucagccgaacuucagagcag

SEQ ID NO: 1011058 - RNA, 22 nt, Human
gcagcagaguuugggagauggu

SEQ ID NO: 1011059 - RNA, 22 nt, Human
gaggcagcagggcugguuccuu

SEQ ID NO: 1011060 - RNA, 22 nt, Human
uacaaaugaccauagccacuua

SEQ ID NO: 1011061 - RNA, 22 nt, Human
agcaguagugauggccccugag

SEQ ID NO: 1011062 - RNA, 22 nt, Human
ggacucuguuuuccugaucacu

SEQ ID NO: 1011063 - RNA, 22 nt, Human
ucuguuccaguagaaaggugca

SEQ ID NO: 1011064 - RNA, 22 nt, Human
caagagcuagaaauugguuaga

SEQ ID NO: 1011065 - RNA, 22 nt, Human
ugaaaugagauaauuuaagugc

SEQ ID NO: 1011066 - RNA, 22 nt, Human
ugggcugcggauaggccucgga

SEQ ID NO: 1011067 - RNA, 22 nt, Human
cagugggugaugaguccugggg

SEQ ID NO: 1011068 - RNA, 22 nt, Human
aaguaaaagcuuuaccaugcgc

SEQ ID NO: 1011069 - RNA, 22 nt, Human
aggugcagcugguggagucugg

SEQ ID NO: 1011070 - RNA, 22 nt, Human
ucagagaggauuuuaauaagug

SEQ ID NO: 1011071 - RNA, 22 nt, Human
uaguuuuuucaacaaauggugc

SEQ ID NO: 1011072 - RNA, 22 nt, Human
auucugagaaaugcauugucag

SEQ ID NO: 1011073 - RNA, 22 nt, Human
cagagcucuauguucauggagg

SEQ ID NO: 1011074 - RNA, 22 nt, Human
ggcucaggaugagccuucucau

SEQ ID NO: 1011075 - RNA, 22 nt, Human
cugccucucaggucccugagau

SEQ ID NO: 1011076 - RNA, 22 nt, Human
uaugccugauaacugugucucu

SEQ ID NO: 1011077 - RNA, 22 nt, Human
uuccagugaugggcaauuuggu

SEQ ID NO: 1011078 - RNA, 22 nt, Human
ucaaaguuacuugugguuuucu

SEQ ID NO: 1011079 - RNA, 22 nt, Human
ugagaaaagguugagaugauaa

SEQ ID NO: 1011080 - RNA, 22 nt, Human
cccaugccuucugacucacagg

SEQ ID NO: 1011081 - RNA, 21 nt, Human
gacaggacuagaccagagcuc

SEQ ID NO: 1011082 - RNA, 22 nt, Human
aaggccagcuuguagggcuggu

SEQ ID NO: 1011083 - RNA, 22 nt, Human
uugcaccauuucacuuccauua

SEQ ID NO: 1011084 - RNA, 22 nt, Human
agcaccauugcaaauauggcag

SEQ ID NO: 1011085 - RNA, 22 nt, Human
gcaggcagagagggguuuccag

SEQ ID NO: 1011086 - RNA, 22 nt, Human
auguuacacauaggcauaaaug

SEQ ID NO: 1011087 - RNA, 22 nt, Human
aaguucaagcucugccuaaaau

SEQ ID NO: 1011088 - RNA, 21 nt, Human
acauucacaggauauuaucau

SEQ ID NO: 1011089 - RNA, 22 nt, Human
auuucacaaagaacagaugcag

SEQ ID NO: 1011090 - RNA, 22 nt, Human
caggcacugugcugagcucugc

SEQ ID NO: 1011091 - RNA, 22 nt, Human
acaaauuuauugaagggcauau

SEQ ID NO: 1011092 - RNA, 22 nt, Human
gagagugagauccuccugggga

SEQ ID NO: 1011093 - RNA, 22 nt, Human
agcuuuaugcuuccuacaagcu

SEQ ID NO: 1011094 - RNA, 22 nt, Human
uguuuuaaucucccauugcucu

SEQ ID NO: 1011095 - RNA, 22 nt, Human
cagcuccccaugguuccugaag

SEQ ID NO: 1011096 - RNA, 22 nt, Human
cagggcugcuggccgugcccuc

SEQ ID NO: 1011097 - RNA, 22 nt, Human
aguguuguaugggaugacugcu

SEQ ID NO: 1011098 - RNA, 22 nt, Human
gaagcccaggcuuccuuggcuu

SEQ ID NO: 1011099 - RNA, 22 nt, Human
ucacauacacuaggauauuuuu

SEQ ID NO: 1011100 - RNA, 22 nt, Human
uggacaggaucugagacugaga

SEQ ID NO: 1011101 - RNA, 22 nt, Human
ccggcucggcgaccaggcugaa

SEQ ID NO: 1011102 - RNA, 21 nt, Human
cagcaaaucauugggcagacu

SEQ ID NO: 1011103 - RNA, 22 nt, Human
gcugggagugggcaagaugaga

SEQ ID NO: 1011104 - RNA, 22 nt, Human
gcugcccucccagggcaagcuu

SEQ ID NO: 1011105 - RNA, 22 nt, Human
auaugugugaugcauggacuaa

SEQ ID NO: 1011106 - RNA, 17 nt, Human
agauggcaggaggcaga

SEQ ID NO: 1011107 - RNA, 22 nt, Human
auuucccaugugaaucaauugg

SEQ ID NO: 1011108 - RNA, 22 nt, Human
cuguggaaggccuguccugaaa

SEQ ID NO: 1011109 - RNA, 22 nt, Human
agaggccacuuugccugugaug

SEQ ID NO: 1011110 - RNA, 22 nt, Human
gcagguguggaguggggugagc

SEQ ID NO: 1011111 - RNA, 22 nt, Human
uggcagcagacaaaaggccauu

SEQ ID NO: 1011112 - RNA, 22 nt, Human
uuuauuugucuugccauuuagu

SEQ ID NO: 1011113 - RNA, 22 nt, Human
uggguggaauaaaucaguucug

SEQ ID NO: 1011114 - RNA, 22 nt, Human
agguggccggugccagccgggc

SEQ ID NO: 1011115 - RNA, 23 nt, Human
acuauaaaguuguucugauuuac

SEQ ID NO: 1011116 - RNA, 22 nt, Human
gcauacagagaggauguggcau

SEQ ID NO: 1011117 - RNA, 22 nt, Human
aagcugcccaagacugaagcau

SEQ ID NO: 1011118 - RNA, 20 nt, Human
gccaggcacuguucucaaua

SEQ ID NO: 1011119 - RNA, 22 nt, Human
uacaggaggauuaucaaaggau

SEQ ID NO: 1011120 - RNA, 22 nt, Human
caggcagaagaaguggaaggac

SEQ ID NO: 1011121 - RNA, 22 nt, Human
ccaagggcucugacuugccugc

SEQ ID NO: 1011122 - RNA, 22 nt, Human
uguaauauuguagugacaguac

SEQ ID NO: 1011123 - RNA, 21 nt, Human
gcagccagccgagaccaugcc

SEQ ID NO: 1011124 - RNA, 22 nt, Human
aaaguucagauuagacucaaga

SEQ ID NO: 1011125 - RNA, 22 nt, Human
gccagagcugagacacgagucc

SEQ ID NO: 1011126 - RNA, 22 nt, Human
agcagcuguacuuucaucuguu

SEQ ID NO: 1011127 - RNA, 22 nt, Human
ggggccuguagagcuucaggga

SEQ ID NO: 1011128 - RNA, 22 nt, Human
ggaaaguggugguggaaagagg

SEQ ID NO: 1011129 - RNA, 22 nt, Human
uguuugaaacuuugaucacuaa

SEQ ID NO: 1011130 - RNA, 22 nt, Human
acuaaauacacacauuuguuca

SEQ ID NO: 1011131 - RNA, 22 nt, Human
gagccagcugagcugcacuguc

SEQ ID NO: 1011132 - RNA, 22 nt, Human
ccuggagcacauggcaggaggc

SEQ ID NO: 1011133 - RNA, 22 nt, Human
uguauacauuuaacuagauaga

SEQ ID NO: 1011134 - RNA, 22 nt, Human
cauuguauugaggauacuuaag

SEQ ID NO: 1011135 - RNA, 22 nt, Human
aggagaaggaagugcaucacua

SEQ ID NO: 1011136 - RNA, 22 nt, Human
cugaaagaauaagauguuuaca

SEQ ID NO: 1011137 - RNA, 21 nt, Human
guuugcaugaacaagucagcc

SEQ ID NO: 1011138 - RNA, 22 nt, Human
gugcugcucacaucuggaggua

SEQ ID NO: 1011139 - RNA, 22 nt, Human
agagccugcuaccucauuccag

SEQ ID NO: 1011140 - RNA, 22 nt, Human
ugaagccagcuuuggaagacac

SEQ ID NO: 1011141 - RNA, 22 nt, Human
uuuaaagaaauuccucaucuuu

SEQ ID NO: 1011142 - RNA, 22 nt, Human
uccuuagagauacugucuugaa

SEQ ID NO: 1011143 - RNA, 22 nt, Human
caggccugacccugagcuucac

SEQ ID NO: 1011144 - RNA, 22 nt, Human
gucccauaaguagugcaacuug

SEQ ID NO: 1011145 - RNA, 22 nt, Human
caggagcuacucagguuggguu

SEQ ID NO: 1011146 - RNA, 22 nt, Human
ugucccagaucacaggagggga

SEQ ID NO: 1011147 - RNA, 22 nt, Human
cugucccaggagcuguaagaca

SEQ ID NO: 1011148 - RNA, 22 nt, Human
ucugccagaaguucugagagua

SEQ ID NO: 1011149 - RNA, 22 nt, Human
guuugcauuccaauuuagggga

SEQ ID NO: 1011150 - RNA, 22 nt, Human
caagaugaaacuacagggagga

SEQ ID NO: 1011151 - RNA, 22 nt, Human
uucaggauggcggauguugggg

SEQ ID NO: 1011152 - RNA, 22 nt, Human
acauuucuaucauccuguaaug

SEQ ID NO: 1011153 - RNA, 22 nt, Human
cuggcucccguuguccuugaag

SEQ ID NO: 1011154 - RNA, 22 nt, Human
aagucacagcuaaauagcuaag

SEQ ID NO: 1011155 - RNA, 22 nt, Human
ccacugucagaggggcugugcc

SEQ ID NO: 1011156 - RNA, 22 nt, Human
gcucugaggcugugaggugcug

SEQ ID NO: 1011157 - RNA, 22 nt, Human
cugaaggaagcagaagcgaggu

SEQ ID NO: 1011158 - RNA, 18 nt, Human
gagguccugcucuagccc

SEQ ID NO: 1011159 - RNA, 22 nt, Human
uggaaggggagcuggaaagggg

SEQ ID NO: 1011160 - RNA, 22 nt, Human
gacagcagggacauguaggaag

SEQ ID NO: 1011161 - RNA, 22 nt, Human
uucuccucuguuggccuucccu

SEQ ID NO: 1011162 - RNA, 22 nt, Human
guaaaauagaauaacguggcua

SEQ ID NO: 1011163 - RNA, 18 nt, Human
ccugcagcccaggaggcc

SEQ ID NO: 1011164 - RNA, 22 nt, Human
aucaggauucaguaucuccagc

SEQ ID NO: 1011165 - RNA, 22 nt, Human
agugugaccuuauuuggaaaca

SEQ ID NO: 1011166 - RNA, 22 nt, Human
caagggaguuacugagggcggg

SEQ ID NO: 1011167 - RNA, 22 nt, Human
accaggcuggagugcaguggcg

SEQ ID NO: 1011168 - RNA, 22 nt, Human
agauacaaaagauaagauuuag

SEQ ID NO: 1011169 - RNA, 22 nt, Human
acauuucuugaugccucuguga

SEQ ID NO: 1011170 - RNA, 22 nt, Human
ccagagccuggcaucugcauaa

SEQ ID NO: 1011171 - RNA, 22 nt, Human
gggcacugugcuaggugcugag

SEQ ID NO: 1011172 - RNA, 22 nt, Human
cucuggaggccuaaggaagugg

SEQ ID NO: 1011173 - RNA, 22 nt, Human
cauauucuuuaagcaaugcucu

SEQ ID NO: 1011174 - RNA, 22 nt, Human
auuugagaugguaaauaacuuu

SEQ ID NO: 1011175 - RNA, 22 nt, Human
uucaggaugcucagaguagucu

SEQ ID NO: 1011176 - RNA, 22 nt, Human
agcuuuauauuuaaugaauucu

SEQ ID NO: 1011177 - RNA, 22 nt, Human
uugugcucuguguuauuuaagg

SEQ ID NO: 1011178 - RNA, 22 nt, Human
cucucuggaagggggagcugau

SEQ ID NO: 1011179 - RNA, 22 nt, Human
gggcuaggcuuggccagcacug

SEQ ID NO: 1011180 - RNA, 22 nt, Human
ugccuguguugauuacuuuguc

SEQ ID NO: 1011181 - RNA, 22 nt, Human
uggcucagagagggagugugga

SEQ ID NO: 1011182 - RNA, 22 nt, Human
uaaauguguuguggaugaaguu

SEQ ID NO: 1011183 - RNA, 22 nt, Human
ucacuguauuugcugaugcaua

SEQ ID NO: 1011184 - RNA, 22 nt, Human
uagcugccuuugggcuccugcu

SEQ ID NO: 1011185 - RNA, 20 nt, Human
guucucacugaucugcaggg

SEQ ID NO: 1011186 - RNA, 22 nt, Human
agugaaaacacuaguucuugcc

SEQ ID NO: 1011187 - RNA, 22 nt, Human
ccugcaggcugcaggccaguuc

SEQ ID NO: 1011188 - RNA, 22 nt, Human
ucggagcuguagaugaaacccu

SEQ ID NO: 1011189 - RNA, 22 nt, Human
ugacauaauaauccaaacauac

SEQ ID NO: 1011190 - RNA, 22 nt, Human
ggcagcagggucuagauugaug

SEQ ID NO: 1011191 - RNA, 22 nt, Human
ugcagcuucuuguccugugauu

SEQ ID NO: 1011192 - RNA, 22 nt, Human
cucuggaauuaaggaagccugu

SEQ ID NO: 1011193 - RNA, 22 nt, Human
ugucucagauacgccaucaagg

SEQ ID NO: 1011194 - RNA, 22 nt, Human
augagcuucccagacaggaugg

SEQ ID NO: 1011195 - RNA, 22 nt, Human
gcugucacaagcaucuggggca

SEQ ID NO: 1011196 - RNA, 22 nt, Human
gccaccagccccaugcgcugug

SEQ ID NO: 1011197 - RNA, 22 nt, Human
gcugucaggaacaugccuuggu

SEQ ID NO: 1011198 - RNA, 22 nt, Human
ugaaagggguugaguuacagcu

SEQ ID NO: 1011199 - RNA, 18 nt, Human
cugcuugggagacgucag

SEQ ID NO: 1011200 - RNA, 18 nt, Human
gccugggaggaggaaaug

SEQ ID NO: 1011201 - RNA, 22 nt, Human
uuuaacagguaaaguaaaugug

SEQ ID NO: 1011202 - RNA, 22 nt, Human
ccaggcugugguuuagauagag

SEQ ID NO: 1011203 - RNA, 22 nt, Human
agccauccucccaccucagccu

SEQ ID NO: 1011204 - RNA, 22 nt, Human
gucuccugagacugcagucacc

SEQ ID NO: 1011205 - RNA, 22 nt, Human
agaaaugggccuugggacacaa

SEQ ID NO: 1011206 - RNA, 22 nt, Human
guggccugccgugugguauggg

SEQ ID NO: 1011207 - RNA, 22 nt, Human
ucccuggggauguuggccugcc

SEQ ID NO: 1011208 - RNA, 22 nt, Human
ucagcauaucuugagcuucaug

SEQ ID NO: 1011209 - RNA, 22 nt, Human
aagggcaggcagagaucauaua

SEQ ID NO: 1011210 - RNA, 22 nt, Human
ggagggagcauccccuugcuga

SEQ ID NO: 1011211 - RNA, 22 nt, Human
gugcuuaauacaugucaauaac

SEQ ID NO: 1011212 - RNA, 22 nt, Human
gcucuguacgcaggaugagggg

SEQ ID NO: 1011213 - RNA, 22 nt, Human
ggcagcaggcgacuucccuauu

SEQ ID NO: 1011214 - RNA, 22 nt, Human
ucagaggucacacagcaaguuu

SEQ ID NO: 1011215 - RNA, 22 nt, Human
gccuggcaggccucaugagggg

SEQ ID NO: 1011216 - RNA, 22 nt, Human
uacauguauguguacgugcaug

SEQ ID NO: 1011217 - RNA, 22 nt, Human
ugucauuuaguccucugugugu

SEQ ID NO: 1011218 - RNA, 22 nt, Human
ggcugggcugcugggucagagc

SEQ ID NO: 1011219 - RNA, 20 nt, Human
caggccagagguuugauggc

SEQ ID NO: 1011220 - RNA, 22 nt, Human
ggcagcagcaagguuggagcug

SEQ ID NO: 1011221 - RNA, 22 nt, Human
aaaggccuugagcugggugcca

SEQ ID NO: 1011222 - RNA, 22 nt, Human
uuccagaagccuccauauuacu

SEQ ID NO: 1011223 - RNA, 22 nt, Human
ucugagaguccaucuccaagcc

SEQ ID NO: 1011224 - RNA, 22 nt, Human
caggcagccugcggucugcaca

SEQ ID NO: 1011225 - RNA, 22 nt, Human
ccuccuggcccugggccuggaa

SEQ ID NO: 1011226 - RNA, 22 nt, Human
auaucuuuguaugguucagcag

SEQ ID NO: 1011227 - RNA, 22 nt, Human
gggccacacagaaccuccuggu

SEQ ID NO: 1011228 - RNA, 22 nt, Human
aaggcaguacuuuauguccaua

SEQ ID NO: 1011229 - RNA, 22 nt, Human
agaugaagauaucugcaggggc

SEQ ID NO: 1011230 - RNA, 22 nt, Human
ugcagccaucuuucuuggagga

SEQ ID NO: 1011231 - RNA, 20 nt, Human
agcugguuaucuuaauucuu

SEQ ID NO: 1011232 - RNA, 22 nt, Human
cagagacauuaagugccaugau

SEQ ID NO: 1011233 - RNA, 22 nt, Human
uuugcauugcauacaaggaacu

SEQ ID NO: 1011234 - RNA, 22 nt, Human
gggagggaaggaggcgccgugu

SEQ ID NO: 1011235 - RNA, 22 nt, Human
gcacaugagcugcugggauggg

SEQ ID NO: 1011236 - RNA, 22 nt, Human
gccuggcugagguggggaggca

SEQ ID NO: 1011237 - RNA, 22 nt, Human
ggguguguuccuaaggaaacca

SEQ ID NO: 1011238 - RNA, 19 nt, Human
ugcuuccucaccaucuccc

SEQ ID NO: 1011239 - RNA, 23 nt, Human
gugauuucagggaacagaaucag

SEQ ID NO: 1011240 - RNA, 22 nt, Human
gacuguguccaugugcuggauu

SEQ ID NO: 1011241 - RNA, 22 nt, Human
aacuuucaggcaaugaauauuu

SEQ ID NO: 1011242 - RNA, 22 nt, Human
auucuucagaauaucuggcacu

SEQ ID NO: 1011243 - RNA, 22 nt, Human
guguguccaggcgggagucaag

SEQ ID NO: 1011244 - RNA, 18 nt, Human
uccagagguguuggagcc

SEQ ID NO: 1011245 - RNA, 22 nt, Human
uggcaggagguuuucuccagga

SEQ ID NO: 1011246 - RNA, 23 nt, Human
agggccugauggcucccgcuggc

SEQ ID NO: 1011247 - RNA, 21 nt, Human
agauuguauggaggugagagg

SEQ ID NO: 1011248 - RNA, 22 nt, Human
gggagccuugggagugccagcc

SEQ ID NO: 1011249 - RNA, 22 nt, Human
aaggcacuguacuaguuaguua

SEQ ID NO: 1011250 - RNA, 22 nt, Human
ugugugcagccucugucuuugg

SEQ ID NO: 1011251 - RNA, 22 nt, Human
ggcagcugagcauggcuaccuu

SEQ ID NO: 1011252 - RNA, 22 nt, Human
uaugaacuguacuguacuaagc

SEQ ID NO: 1011253 - RNA, 20 nt, Human
uuucuguaaggcauuaaucu

SEQ ID NO: 1011254 - RNA, 22 nt, Human
augaugguuguccuaggugcau

SEQ ID NO: 1011255 - RNA, 22 nt, Human
acaggugaccugcucauaugaa

SEQ ID NO: 1011256 - RNA, 22 nt, Human
aaagaaggaccuggaggaggau

SEQ ID NO: 1011257 - RNA, 22 nt, Human
caguacuuaacuuauaggagag

SEQ ID NO: 1011258 - RNA, 22 nt, Human
aguacuuuacuucuuacaguuu

SEQ ID NO: 1011259 - RNA, 22 nt, Human
gcagagccugggggucugcgga

SEQ ID NO: 1011260 - RNA, 22 nt, Human
uuacuucuuacaaaagaaauau

SEQ ID NO: 1011261 - RNA, 22 nt, Human
cauuagggccaccauaacaaaa

SEQ ID NO: 1011262 - RNA, 22 nt, Human
augucuuucucacagccaguuc

SEQ ID NO: 1011263 - RNA, 22 nt, Human
gcagcuuucuacuuccuacagc

SEQ ID NO: 1011264 - RNA, 22 nt, Human
cugaaggauuuaguucuuugcu

SEQ ID NO: 1011265 - RNA, 22 nt, Human
aaggccaugaccacuugcugug

SEQ ID NO: 1011266 - RNA, 22 nt, Human
accauuuaauaaguauuuccau

SEQ ID NO: 1011267 - RNA, 22 nt, Human
uuuuaccugaaccacacaguau

SEQ ID NO: 1011268 - RNA, 22 nt, Human
gccuccuggauuuuagugccau

SEQ ID NO: 1011269 - RNA, 21 nt, Human
acaugcauagagagauuucug

SEQ ID NO: 1011270 - RNA, 22 nt, Human
uucuacaauaugaauaaugaag

SEQ ID NO: 1011271 - RNA, 22 nt, Human
ucccagccuuccuuguggugaa

SEQ ID NO: 1011272 - RNA, 22 nt, Human
gcugucugcugugcacugagca

SEQ ID NO: 1011273 - RNA, 22 nt, Human
uggcucugaucagauguccagu

SEQ ID NO: 1011274 - RNA, 22 nt, Human
auguguccacaggugugagaga

SEQ ID NO: 1011275 - RNA, 22 nt, Human
uggaaggcaugggaacuguucu

SEQ ID NO: 1011276 - RNA, 22 nt, Human
gggagggacacaaagaguuccc

SEQ ID NO: 1011277 - RNA, 22 nt, Human
auguagaaauuaggaugauagu

SEQ ID NO: 1011278 - RNA, 22 nt, Human
ccagcucccugaagccuggucu

SEQ ID NO: 1011279 - RNA, 22 nt, Human
caguagcauguaauaaagacag

SEQ ID NO: 1011280 - RNA, 22 nt, Human
gcugaaugaauguauuuuaaaa

SEQ ID NO: 1011281 - RNA, 22 nt, Human
ucagguggcuuggagggggacg

SEQ ID NO: 1011282 - RNA, 22 nt, Human
agggcuggcuccguuaccuuga

SEQ ID NO: 1011283 - RNA, 22 nt, Human
ugaaggccagcagagugaaggc

SEQ ID NO: 1011284 - RNA, 22 nt, Human
gccugggugucgaucacuagug

SEQ ID NO: 1011285 - RNA, 23 nt, Human
uuucaacuccugccauuauuucu

SEQ ID NO: 1011286 - RNA, 22 nt, Human
agaaagaacgcacuugugcugc

SEQ ID NO: 1011287 - RNA, 22 nt, Human
ugccuuggugcuucuucaugug

SEQ ID NO: 1011288 - RNA, 20 nt, Human
ccagagaguagguuagugau

SEQ ID NO: 1011289 - RNA, 22 nt, Human
aagcaacucccuccucauuuuu

SEQ ID NO: 1011290 - RNA, 22 nt, Human
guguccacggcugagaaugauu

SEQ ID NO: 1011291 - RNA, 22 nt, Human
aggucacacuuggaucauagaa

SEQ ID NO: 1011292 - RNA, 22 nt, Human
agacucaagacugcagaagacg

SEQ ID NO: 1011293 - RNA, 19 nt, Human
gguaaaagugagcuucagg

SEQ ID NO: 1011294 - RNA, 22 nt, Human
uuuguaaauagcaguacucaug

SEQ ID NO: 1011295 - RNA, 22 nt, Human
ucuguaguagguuguaguucuu

SEQ ID NO: 1011296 - RNA, 22 nt, Human
cuucugcaauaaguuuuggucc

SEQ ID NO: 1011297 - RNA, 20 nt, Human
ugugggcccuuggcuggcaa

SEQ ID NO: 1011298 - RNA, 20 nt, Human
gcugcucuccacggucugca

SEQ ID NO: 1011299 - RNA, 22 nt, Human
cacucugagaaguacaagcucc

SEQ ID NO: 1011300 - RNA, 22 nt, Human
ucucugaguaagugacaguuca

SEQ ID NO: 1011301 - RNA, 22 nt, Human
auuauuucucacucacauaaua

SEQ ID NO: 1011302 - RNA, 22 nt, Human
ggcuggcagaggggagucugug

SEQ ID NO: 1011303 - RNA, 22 nt, Human
agagcugcccacacagcagauu

SEQ ID NO: 1011304 - RNA, 22 nt, Human
acuaagugauucuaagcaucuu

SEQ ID NO: 1011305 - RNA, 19 nt, Human
ugagaggcuuaaggcagcu

SEQ ID NO: 1011306 - RNA, 22 nt, Human
uguuucagucccuguguucaau

SEQ ID NO: 1011307 - RNA, 22 nt, Human
caaugauggcuaggcagcugcu

SEQ ID NO: 1011308 - RNA, 22 nt, Human
gcuggcaggagccuuucccuuu

SEQ ID NO: 1011309 - RNA, 22 nt, Human
ggcccacacugacagcugagcu

SEQ ID NO: 1011310 - RNA, 22 nt, Human
uugcagcuuagugauguuaucu

SEQ ID NO: 1011311 - RNA, 22 nt, Human
cagugguggaaugaggaauugu

SEQ ID NO: 1011312 - RNA, 22 nt, Human
ucaggagcuugguagugugauu

SEQ ID NO: 1011313 - RNA, 22 nt, Human
uuggcuuccaggaucucagcag

SEQ ID NO: 1011314 - RNA, 21 nt, Human
ccagccucagaucagggagcu

SEQ ID NO: 1011315 - RNA, 19 nt, Human
uuacaucugcaacacuggu

SEQ ID NO: 1011316 - RNA, 22 nt, Human
acaaauauuuacugaauccacu

SEQ ID NO: 1011317 - RNA, 22 nt, Human
ccuuucagaugggcauggaccg

SEQ ID NO: 1011318 - RNA, 22 nt, Human
uguuuauuacaguucuuggaau

SEQ ID NO: 1011319 - RNA, 22 nt, Human
ucugcucagugcuuaucucuaa

SEQ ID NO: 1011320 - RNA, 22 nt, Human
uugaaaggugacauuguuagag

SEQ ID NO: 1011321 - RNA, 22 nt, Human
uagggagcucuggcagaaggaa

SEQ ID NO: 1011322 - RNA, 22 nt, Human
aaguuauugcagcaauccaagu

SEQ ID NO: 1011323 - RNA, 20 nt, Human
uuccagagaucugcauuuua

SEQ ID NO: 1011324 - RNA, 22 nt, Human
gaugcacuuucuuuucaacagu

SEQ ID NO: 1011325 - RNA, 22 nt, Human
agucucuuauucccuauugcug

SEQ ID NO: 1011326 - RNA, 22 nt, Human
uagaauaugauuaauuuucuua

SEQ ID NO: 1011327 - RNA, 20 nt, Human
gcugaggucauuaugccuca

SEQ ID NO: 1011328 - RNA, 22 nt, Human
agaugaaaagauaagcagcaau

SEQ ID NO: 1011329 - RNA, 22 nt, Human
acuucacagaaauuuuaugagg

SEQ ID NO: 1011330 - RNA, 22 nt, Human
ccuggaaggugaugguacagca

SEQ ID NO: 1011331 - RNA, 18 nt, Human
caguuuuuauaucuggca

SEQ ID NO: 1011332 - RNA, 22 nt, Human
agucccagaucuacaggaggga

SEQ ID NO: 1011333 - RNA, 22 nt, Human
guuauuaguaagacucgcacau

SEQ ID NO: 1011334 - RNA, 22 nt, Human
agcagcucuggcacuguagcau

SEQ ID NO: 1011335 - RNA, 22 nt, Human
uuuguacauccuaauucugagu

SEQ ID NO: 1011336 - RNA, 22 nt, Human
gugcuaaaggguuaugaacaag

SEQ ID NO: 1011337 - RNA, 20 nt, Human
agugcaagaaagcacagcug

SEQ ID NO: 1011338 - RNA, 22 nt, Human
ggcuggcaggcacaguaugcaa

SEQ ID NO: 1011339 - RNA, 22 nt, Human
acagagcuaauguugcauaggc

SEQ ID NO: 1011340 - RNA, 22 nt, Human
gcugguuagaaaacagagcuca

SEQ ID NO: 1011341 - RNA, 22 nt, Human
agaauuagucacaauuauagga

SEQ ID NO: 1011342 - RNA, 22 nt, Human
ccagcagaagcucccgcugggu

SEQ ID NO: 1011343 - RNA, 22 nt, Human
agugcugaagacuggcuaggga

SEQ ID NO: 1011344 - RNA, 21 nt, Human
uuagcaaagcaaacacaugcu

SEQ ID NO: 1011345 - RNA, 22 nt, Human
augcuguguauuuuacucuuuc

SEQ ID NO: 1011346 - RNA, 22 nt, Human
acagaacugggaaaugcacaua

SEQ ID NO: 1011347 - RNA, 22 nt, Human
ccucagaugucuuaaggcacug

SEQ ID NO: 1011348 - RNA, 22 nt, Human
gccaaaucuugcacacucuugu

SEQ ID NO: 1011349 - RNA, 22 nt, Human
ugaaugaugcaguauaaugaua

SEQ ID NO: 1011350 - RNA, 22 nt, Human
ugaguaauaaacugucuugcuc

SEQ ID NO: 1011351 - RNA, 22 nt, Human
agagcuguagcuuccuagagcc

SEQ ID NO: 1011352 - RNA, 22 nt, Human
auuaaauuaaguggcuaauuua

SEQ ID NO: 1011353 - RNA, 22 nt, Human
cccuugggccccagcucagggc

SEQ ID NO: 1011354 - RNA, 22 nt, Human
aucugguuuggggauccuugug

SEQ ID NO: 1011355 - RNA, 22 nt, Human
aaugcacauguuguaauaaaua

SEQ ID NO: 1011356 - RNA, 22 nt, Human
gagcagcugguaggugaaccca

SEQ ID NO: 1011357 - RNA, 22 nt, Human
uuugaaagggaaauaaacuccu

SEQ ID NO: 1011358 - RNA, 22 nt, Human
ccugaagcaaggguaggcaggu

SEQ ID NO: 1011359 - RNA, 22 nt, Human
gaggccuggugugucucccgcu

SEQ ID NO: 1011360 - RNA, 22 nt, Human
cugcugagcaucagggcugccc

SEQ ID NO: 1011361 - RNA, 22 nt, Human
cagcugagucugagguucuuug

SEQ ID NO: 1011362 - RNA, 22 nt, Human
ugaaaucuuagccauucugccu

SEQ ID NO: 1011363 - RNA, 20 nt, Human
ucugcccaccccggcuccca

SEQ ID NO: 1011364 - RNA, 22 nt, Human
cugaggugcuauggaggauacg

SEQ ID NO: 1011365 - RNA, 22 nt, Human
augaaggauggcuggcugcccu

SEQ ID NO: 1011366 - RNA, 22 nt, Human
ggcuuccuggggccuccugcaa

SEQ ID NO: 1011367 - RNA, 22 nt, Human
uagauauguguuuauuaugcug

SEQ ID NO: 1011368 - RNA, 22 nt, Human
uguggcucucagauccuccaau

SEQ ID NO: 1011369 - RNA, 22 nt, Human
ugucaaauuuuuauugcaguau

SEQ ID NO: 1011370 - RNA, 22 nt, Human
uauuucuuguuauucucguuga

SEQ ID NO: 1011371 - RNA, 22 nt, Human
agcucccagagcucgagaguaa

SEQ ID NO: 1011372 - RNA, 22 nt, Human
gcuggugcauuagcugcaguuc

SEQ ID NO: 1011373 - RNA, 22 nt, Human
aagcacauuguacauuugugcu

SEQ ID NO: 1011374 - RNA, 19 nt, Human
ugaggggcucacagucuca

SEQ ID NO: 1011375 - RNA, 22 nt, Human
ggaaagaggauaguggguaggu

SEQ ID NO: 1011376 - RNA, 19 nt, Human
uggcugggugccaauggcc

SEQ ID NO: 1011377 - RNA, 22 nt, Human
cucuccucugaaguggugaccc

SEQ ID NO: 1011378 - RNA, 22 nt, Human
ucagaggguggcugggagcauc

SEQ ID NO: 1011379 - RNA, 22 nt, Human
cagcugugcuguauuaagcucu

SEQ ID NO: 1011380 - RNA, 22 nt, Human
cccuggagugccggaaucaaga

SEQ ID NO: 1011381 - RNA, 22 nt, Human
uucacagggcagcagcugagcc

SEQ ID NO: 1011382 - RNA, 22 nt, Human
cugacagucucauugauuugcu

SEQ ID NO: 1011383 - RNA, 22 nt, Human
gcaaggcagcgcggaguagcua

SEQ ID NO: 1011384 - RNA, 22 nt, Human
cacagggcagagaccugggugc

SEQ ID NO: 1011385 - RNA, 19 nt, Human
ucccuuccugucgggcucc

SEQ ID NO: 1011386 - RNA, 22 nt, Human
uacccagggcuuuucugaugca

SEQ ID NO: 1011387 - RNA, 21 nt, Human
uccagggaacuucucaggaau

SEQ ID NO: 1011388 - RNA, 22 nt, Human
uuggauccaucucaggcauagg

SEQ ID NO: 1011389 - RNA, 20 nt, Human
agugugcauuuagagucugc

SEQ ID NO: 1011390 - RNA, 22 nt, Human
caaugauugcuauuuacauaaa

SEQ ID NO: 1011391 - RNA, 22 nt, Human
gucauuucuguuucuucagugc

SEQ ID NO: 1011392 - RNA, 22 nt, Human
aggcacuguggguguggccgga

SEQ ID NO: 1011393 - RNA, 22 nt, Human
ugggaggcuuccagaccuugcu

SEQ ID NO: 1011394 - RNA, 19 nt, Human
ucccagagucuagagguug

SEQ ID NO: 1011395 - RNA, 22 nt, Human
gagagaaaugugcaguuugggc

SEQ ID NO: 1011396 - RNA, 22 nt, Human
uccuuugacuucuugcagucca

SEQ ID NO: 1011397 - RNA, 22 nt, Human
uggcucagauuuuuguaggcuu

SEQ ID NO: 1011398 - RNA, 22 nt, Human
ucccaagugucuuggaccaggg

SEQ ID NO: 1011399 - RNA, 18 nt, Human
aaaugcuaggcuacauga

SEQ ID NO: 1011400 - RNA, 22 nt, Human
cagaccucaguccucaguagga

SEQ ID NO: 1011401 - RNA, 23 nt, Human
aggcugcagaagaauagggucau

SEQ ID NO: 1011402 - RNA, 21 nt, Human
uaaauaauaaguugcugagau

SEQ ID NO: 1011403 - RNA, 19 nt, Human
gagcugccuuuugaagacc

SEQ ID NO: 1011404 - RNA, 22 nt, Human
uucacagacauugcagacugaa

SEQ ID NO: 1011405 - RNA, 22 nt, Human
cucugaauggacacuccagugu

SEQ ID NO: 1011406 - RNA, 22 nt, Human
uucucucauucaaauuaaagug

SEQ ID NO: 1011407 - RNA, 22 nt, Human
cuggcagauuggggucagcagu

SEQ ID NO: 1011408 - RNA, 22 nt, Human
uuucuaaaugguggcugcauug

SEQ ID NO: 1011409 - RNA, 22 nt, Human
acauguggucaaucuguguagg

SEQ ID NO: 1011410 - RNA, 22 nt, Human
ucacugcaaggaggcuucucaa

SEQ ID NO: 1011411 - RNA, 22 nt, Human
ggcugcuucucacucauuugca

SEQ ID NO: 1011412 - RNA, 22 nt, Human
aauucuagcauugugaaaauau

SEQ ID NO: 1011413 - RNA, 22 nt, Human
auuucuguaacuuaugaaaguu

SEQ ID NO: 1011414 - RNA, 22 nt, Human
gagcuguccuaccaggaguccu

SEQ ID NO: 1011415 - RNA, 22 nt, Human
auguacauuuuccuaauguuuu

SEQ ID NO: 1011416 - RNA, 22 nt, Human
cucccagguuccgacgccucuu

SEQ ID NO: 1011417 - RNA, 22 nt, Human
caugggcuacagaagcaugcug

SEQ ID NO: 1011418 - RNA, 22 nt, Human
aaauacauacacuguacguggc

SEQ ID NO: 1011419 - RNA, 22 nt, Human
aguaugaagcugaaugauuuua

SEQ ID NO: 1011420 - RNA, 22 nt, Human
agccauugaauuuagugccuuu

SEQ ID NO: 1011421 - RNA, 21 nt, Human
uacugagaccucacagugugc

SEQ ID NO: 1011422 - RNA, 22 nt, Human
agguaaggcuguaagcuaagcc

SEQ ID NO: 1011423 - RNA, 22 nt, Human
acugaaggaaagccuuugcaug

SEQ ID NO: 1011424 - RNA, 22 nt, Human
uucuucaaagaugucuguugga

SEQ ID NO: 1011425 - RNA, 22 nt, Human
ccaggcugggcggggaaccugg

SEQ ID NO: 1011426 - RNA, 22 nt, Human
ugaaggccagggauuugcagcc

SEQ ID NO: 1011427 - RNA, 22 nt, Human
auaauuuaauuuucacaguggu

SEQ ID NO: 1011428 - RNA, 22 nt, Human
cagcuggaugggagaccauguu

SEQ ID NO: 1011429 - RNA, 22 nt, Human
ggagugaaucacuagaugcaga

SEQ ID NO: 1011430 - RNA, 22 nt, Human
uaaauguguaaaccuccauuac

SEQ ID NO: 1011431 - RNA, 22 nt, Human
ucucuucucuagugagcaacug

SEQ ID NO: 1011432 - RNA, 22 nt, Human
augcuacagaguuugaauaugu

SEQ ID NO: 1011433 - RNA, 21 nt, Human
uccaaaucccauucuguaguc

SEQ ID NO: 1011434 - RNA, 22 nt, Human
ccugcagggugcugccacagau

SEQ ID NO: 1011435 - RNA, 22 nt, Human
cuuugaauugccguuucaucug

SEQ ID NO: 1011436 - RNA, 22 nt, Human
ugggaccaagucauuucuuuag

SEQ ID NO: 1011437 - RNA, 22 nt, Human
aagcagcuuaaauuagagccug

SEQ ID NO: 1011438 - RNA, 22 nt, Human
uccaggcagcccuuccugacuc

SEQ ID NO: 1011439 - RNA, 22 nt, Human
cuuugaaagcucccaggacuua

SEQ ID NO: 1011440 - RNA, 18 nt, Human
agucucagcggaggagua

SEQ ID NO: 1011441 - RNA, 22 nt, Human
gcccugucggaacugcgaccuc

SEQ ID NO: 1011442 - RNA, 22 nt, Human
agcugccacugagggugcacag

SEQ ID NO: 1011443 - RNA, 22 nt, Human
ggucagccuuggauuugguagc

SEQ ID NO: 1011444 - RNA, 19 nt, Human
uccugcagaccagaccugu

SEQ ID NO: 1011445 - RNA, 22 nt, Human
auagaaaacagauguccuuaaa

SEQ ID NO: 1011446 - RNA, 22 nt, Human
auuuaagacugacuucaccagu

SEQ ID NO: 1011447 - RNA, 22 nt, Human
gcccugucccuuggcuucuagg

SEQ ID NO: 1011448 - RNA, 22 nt, Human
uuacaucuaaacugugaacaau

SEQ ID NO: 1011449 - RNA, 22 nt, Human
ucucagagauguuagggaagag

SEQ ID NO: 1011450 - RNA, 22 nt, Human
ccacagagcauuagauuucaga

SEQ ID NO: 1011451 - RNA, 22 nt, Human
uccuucuuugacaaguggcaga

SEQ ID NO: 1011452 - RNA, 22 nt, Human
gaggagguuccggguggagaag

SEQ ID NO: 1011453 - RNA, 22 nt, Human
ccugaggacacacgcugcagga

SEQ ID NO: 1011454 - RNA, 22 nt, Human
cuuucauaaaggaaaugaugag

SEQ ID NO: 1011455 - RNA, 22 nt, Human
gaugccuccaaaugagggcaga

SEQ ID NO: 1011456 - RNA, 22 nt, Human
ugccuugcacauaauauacauu

SEQ ID NO: 1011457 - RNA, 22 nt, Human
gagcuggcuaauacugacuuau

SEQ ID NO: 1011458 - RNA, 22 nt, Human
gccuggaggggccaggguggua

SEQ ID NO: 1011459 - RNA, 22 nt, Human
cucauggauauaagaacuguuu

SEQ ID NO: 1011460 - RNA, 23 nt, Human
agcuggaggcugucuacucccaa

SEQ ID NO: 1011461 - RNA, 22 nt, Human
uaaggcagaaauaugagcaggg

SEQ ID NO: 1011462 - RNA, 20 nt, Human
aauuuacucacagaaugaau

SEQ ID NO: 1011463 - RNA, 22 nt, Human
gucagcugucuccccagagugg

SEQ ID NO: 1011464 - RNA, 22 nt, Human
caguggucugugcuucuguaca

SEQ ID NO: 1011465 - RNA, 22 nt, Human
caguguuucugaguuccagcuc

SEQ ID NO: 1011466 - RNA, 22 nt, Human
cugggcaggagggcucuaugga

SEQ ID NO: 1011467 - RNA, 22 nt, Human
uuucucugcugccugugucgau

SEQ ID NO: 1011468 - RNA, 22 nt, Human
aacacugcugcuggguucugug

SEQ ID NO: 1011469 - RNA, 22 nt, Human
ugagcagaacacgggauccaug

SEQ ID NO: 1011470 - RNA, 18 nt, Human
ggcugugcguggaggcug

SEQ ID NO: 1011471 - RNA, 22 nt, Human
uccugccucuccaugcuaacua

SEQ ID NO: 1011472 - RNA, 22 nt, Human
ugggcacaaacaucugccuguu

SEQ ID NO: 1011473 - RNA, 22 nt, Human
gggaccuggcaccuuugcucug

SEQ ID NO: 1011474 - RNA, 22 nt, Human
ugggcuggagcuuguugcuucc

SEQ ID NO: 1011475 - RNA, 22 nt, Human
auuucccuccagggaaagcuua

SEQ ID NO: 1011476 - RNA, 22 nt, Human
gcuccagguauuugcccuuuua

SEQ ID NO: 1011477 - RNA, 22 nt, Human
ugcucuggguccugggccuccu

SEQ ID NO: 1011478 - RNA, 22 nt, Human
caauguguuugcauauuaaaau

SEQ ID NO: 1011479 - RNA, 22 nt, Human
agagccuugaagaucuggaaaa

SEQ ID NO: 1011480 - RNA, 22 nt, Human
augcagcugugggcaagaaaug

SEQ ID NO: 1011481 - RNA, 22 nt, Human
uagagaaauaagcuuugccuug

SEQ ID NO: 1011482 - RNA, 22 nt, Human
ucugccuggaugauggcagggc

SEQ ID NO: 1011483 - RNA, 22 nt, Human
gcagcccagguguagcucuuug

SEQ ID NO: 1011484 - RNA, 22 nt, Human
uuuuuccuagcgauuugucagc

SEQ ID NO: 1011485 - RNA, 22 nt, Human
ucccagggugcgccugcccucg

SEQ ID NO: 1011486 - RNA, 22 nt, Human
cugccagguuggcgcucgcucu

SEQ ID NO: 1011487 - RNA, 20 nt, Human
uggcccuguuuucuccaggc

SEQ ID NO: 1011488 - RNA, 22 nt, Human
uuguaaaugaccuuuucuaauu

SEQ ID NO: 1011489 - RNA, 22 nt, Human
uucacagaugccugaugugugg

SEQ ID NO: 1011490 - RNA, 22 nt, Human
ucccuggcagcuaagggugguc

SEQ ID NO: 1011491 - RNA, 22 nt, Human
cccaggcugaugggaugggcca

SEQ ID NO: 1011492 - RNA, 22 nt, Human
agugaaauagcauuuaugaagc

SEQ ID NO: 1011493 - RNA, 22 nt, Human
ucugagaguacgggcugcgcgc

SEQ ID NO: 1011494 - RNA, 22 nt, Human
aaaguuugaaugauauauuagu

SEQ ID NO: 1011495 - RNA, 22 nt, Human
caccagagugggugagggugau

SEQ ID NO: 1011496 - RNA, 22 nt, Human
uggggcuggcacagucucuauu

SEQ ID NO: 1011497 - RNA, 20 nt, Human
cucugcuuuaggagagucag

SEQ ID NO: 1011498 - RNA, 22 nt, Human
gaugcacugcaguauauacugu

SEQ ID NO: 1011499 - RNA, 22 nt, Human
gccuuugcaccaucagugcaau

SEQ ID NO: 1011500 - RNA, 22 nt, Human
cuggcagcgugagcagcaucca

SEQ ID NO: 1011501 - RNA, 22 nt, Human
ccauuuguucgcccagcuccaa

SEQ ID NO: 1011502 - RNA, 22 nt, Human
uccucuggggcgugguccugga

SEQ ID NO: 1011503 - RNA, 22 nt, Human
gcaggaugaaggcagaggcuga

SEQ ID NO: 1011504 - RNA, 22 nt, Human
ugcuuuauaaccauuucugugg

SEQ ID NO: 1011505 - RNA, 22 nt, Human
cucagagaggcaguggaaguca

SEQ ID NO: 1011506 - RNA, 22 nt, Human
uccaggcacgaggcccugugca

SEQ ID NO: 1011507 - RNA, 22 nt, Human
uagaaacagaaaacuguaauag

SEQ ID NO: 1011508 - RNA, 22 nt, Human
uugauuaaacaggcauauucaa

SEQ ID NO: 1011509 - RNA, 22 nt, Human
uuguuugaggucacugauauuu

SEQ ID NO: 1011510 - RNA, 22 nt, Human
ggcuucugguaaagaccacacc

SEQ ID NO: 1011511 - RNA, 22 nt, Human
ugagcccaggaguaugaggcug

SEQ ID NO: 1011512 - RNA, 22 nt, Human
uggccagguugggcuuugcagc

SEQ ID NO: 1011513 - RNA, 22 nt, Human
acuuucucaggaauucacagac

SEQ ID NO: 1011514 - RNA, 22 nt, Human
agcugccagcaucccggaaggg

SEQ ID NO: 1011515 - RNA, 22 nt, Human
ccuggccuggcacucccucugc

SEQ ID NO: 1011516 - RNA, 22 nt, Human
gcccucagaggacagcugacuu

SEQ ID NO: 1011517 - RNA, 20 nt, Human
cucugcugcccgccggcugc

SEQ ID NO: 1011518 - RNA, 22 nt, Human
cccagcccccgagugucuggaa

SEQ ID NO: 1011519 - RNA, 22 nt, Human
gcagcugguuaaugggagaauu

SEQ ID NO: 1011520 - RNA, 22 nt, Human
ggacagcccauacacaugucug

SEQ ID NO: 1011521 - RNA, 22 nt, Human
cuggggugagcagaaacagggg

SEQ ID NO: 1011522 - RNA, 18 nt, Human
uggagcugagugcugugc

SEQ ID NO: 1011523 - RNA, 22 nt, Human
ccagcuggugacauccccaacc

SEQ ID NO: 1011524 - RNA, 22 nt, Human
acauuguagacuuuucauaugu

SEQ ID NO: 1011525 - RNA, 22 nt, Human
cagcucccaguggcagcuccuu

SEQ ID NO: 1011526 - RNA, 22 nt, Human
cugcagcugucucuacugggca

SEQ ID NO: 1011527 - RNA, 22 nt, Human
gugcaugugcauccauguguac

SEQ ID NO: 1011528 - RNA, 22 nt, Human
uucuccaacacaagcaugaugu

SEQ ID NO: 1011529 - RNA, 22 nt, Human
ggaccagagcucgggcuucuca

SEQ ID NO: 1011530 - RNA, 22 nt, Human
ggccucaguuucuccauggguu

SEQ ID NO: 1011531 - RNA, 22 nt, Human
acagagcacauagauuggaguu

SEQ ID NO: 1011532 - RNA, 22 nt, Human
gagcaggcucugccuguguguc

SEQ ID NO: 1011533 - RNA, 22 nt, Human
uacauguaagacaugagacucu

SEQ ID NO: 1011534 - RNA, 22 nt, Human
cuccaggcuucaagggccggcc

SEQ ID NO: 1011535 - RNA, 22 nt, Human
augcugugcuggcuaaccaugg

SEQ ID NO: 1011536 - RNA, 22 nt, Human
cuuagggaauugggaggaugcc

SEQ ID NO: 1011537 - RNA, 22 nt, Human
ugcaaaauaaugaacgauuuuu

SEQ ID NO: 1011538 - RNA, 22 nt, Human
cggggacacacuggcagcuccu

SEQ ID NO: 1011539 - RNA, 19 nt, Human
ucucagagcccuagaggcc

SEQ ID NO: 1011540 - RNA, 22 nt, Human
gcugccugggcaggaggcgcug

SEQ ID NO: 1011541 - RNA, 20 nt, Human
cagcaguggaugagaguuuu

SEQ ID NO: 1011542 - RNA, 22 nt, Human
ucugagagguuaagcaauuuga

SEQ ID NO: 1011543 - RNA, 21 nt, Human
gcugccaccgcgugcuccagg

SEQ ID NO: 1011544 - RNA, 22 nt, Human
augacaguucuacacuuaaucu

SEQ ID NO: 1011545 - RNA, 22 nt, Human
cauagcaacagcaucaagucaa

SEQ ID NO: 1011546 - RNA, 22 nt, Human
aggggugaaggcccgauaggag

SEQ ID NO: 1011547 - RNA, 22 nt, Human
cugaggaugguguggucuucuc

SEQ ID NO: 1011548 - RNA, 22 nt, Human
gggcaggaugcaguuucagaga

SEQ ID NO: 1011549 - RNA, 22 nt, Human
ggcagaagaaaggcuaagucuc

SEQ ID NO: 1011550 - RNA, 22 nt, Human
uguaugcaccauuguauuaccu

SEQ ID NO: 1011551 - RNA, 22 nt, Human
cagggacagccuugggguggcg

SEQ ID NO: 1011552 - RNA, 22 nt, Human
gccugucucuuggaacuuggua

SEQ ID NO: 1011553 - RNA, 22 nt, Human
uuccuguaguugugcaauguac

SEQ ID NO: 1011554 - RNA, 22 nt, Human
gccuggugugcgccgcgcagcu

SEQ ID NO: 1011555 - RNA, 22 nt, Human
uggggcugugagacuacaggau

SEQ ID NO: 1011556 - RNA, 22 nt, Human
caggcuugcugcuagagcacuu

SEQ ID NO: 1011557 - RNA, 18 nt, Human
ccuggaccugucuccuuu

SEQ ID NO: 1011558 - RNA, 22 nt, Human
uccugccucacaguugaaguuu

SEQ ID NO: 1011559 - RNA, 21 nt, Human
acaggcucuggggaugcuggg

SEQ ID NO: 1011560 - RNA, 22 nt, Human
ugggaccucucuugagagagca

SEQ ID NO: 1011561 - RNA, 22 nt, Human
gccuggguccacugaucaugcu

SEQ ID NO: 1011562 - RNA, 22 nt, Human
ucagcugccccaguggccccag

SEQ ID NO: 1011563 - RNA, 22 nt, Human
gcugucugucucugucccacca

SEQ ID NO: 1011564 - RNA, 22 nt, Human
uuugcaaagugacuauuauaug

SEQ ID NO: 1011565 - RNA, 22 nt, Human
gguggccuuucaguggaucagg

SEQ ID NO: 1011566 - RNA, 22 nt, Human
ucacauuuuccuugguaucugu

SEQ ID NO: 1011567 - RNA, 22 nt, Human
ucacagacauggugagguaaca

SEQ ID NO: 1011568 - RNA, 22 nt, Human
gcugccaauccagcugugggag

SEQ ID NO: 1011569 - RNA, 22 nt, Human
gccagggggucagcaggcacuu

SEQ ID NO: 1011570 - RNA, 22 nt, Human
ugcucugggcaacagccucccu

SEQ ID NO: 1011571 - RNA, 22 nt, Human
caaauguaaauucuuuugaagc

SEQ ID NO: 1011572 - RNA, 23 nt, Human
agggcuccuuguugauuagcauu

SEQ ID NO: 1011573 - RNA, 22 nt, Human
agcuguguguuuccacugagcu

SEQ ID NO: 1011574 - RNA, 22 nt, Human
cucugucaggcugcagaugcuc

SEQ ID NO: 1011575 - RNA, 23 nt, Human
ucaugcccaggcuccagauguca

SEQ ID NO: 1011576 - RNA, 22 nt, Human
auacauacauguaugcacauac

SEQ ID NO: 1011577 - RNA, 22 nt, Human
ggagaaggugcuggucacugug

SEQ ID NO: 1011578 - RNA, 22 nt, Human
ccaggccuggccaggggaugcc

SEQ ID NO: 1011579 - RNA, 22 nt, Human
uggagaagucaaagugaacagg

SEQ ID NO: 1011580 - RNA, 22 nt, Human
uuucacauuuuauacuuaagcc

SEQ ID NO: 1011581 - RNA, 20 nt, Human
caguagcaauaauuagaagc

SEQ ID NO: 1011582 - RNA, 22 nt, Human
ccugucagaugaaguaauugug

SEQ ID NO: 1011583 - RNA, 22 nt, Human
cagaccagcucuaugaacccaa

SEQ ID NO: 1011584 - RNA, 22 nt, Human
cauuaagauuuuuuucuacugg

SEQ ID NO: 1011585 - RNA, 22 nt, Human
cugccagcaaugugaccaugcu

SEQ ID NO: 1011586 - RNA, 22 nt, Human
caguugcuacaguucaagugug

SEQ ID NO: 1011587 - RNA, 22 nt, Human
cugugcuuaccugcccagguga

SEQ ID NO: 1011588 - RNA, 22 nt, Human
ugccagcacaaguuaagagauc

SEQ ID NO: 1011589 - RNA, 22 nt, Human
gauuuccuagacauggggcaga

SEQ ID NO: 1011590 - RNA, 22 nt, Human
acagagcauuugggacagagag

SEQ ID NO: 1011591 - RNA, 22 nt, Human
agcagagcugcaguggccugcu

SEQ ID NO: 1011592 - RNA, 21 nt, Human
agacagaacaacugcucucca

SEQ ID NO: 1011593 - RNA, 22 nt, Human
cuauuucaaggcccagauauga

SEQ ID NO: 1011594 - RNA, 22 nt, Human
gaguggggcguggauccagcgu

SEQ ID NO: 1011595 - RNA, 22 nt, Human
auucuagaugcuguaaguagca

SEQ ID NO: 1011596 - RNA, 22 nt, Human
cugguggggaguccuggucucc

SEQ ID NO: 1011597 - RNA, 20 nt, Human
cagagcuguuauggaugaug

SEQ ID NO: 1011598 - RNA, 22 nt, Human
cagaggcuguguaggcagacug

SEQ ID NO: 1011599 - RNA, 22 nt, Human
uaugcauaugaccccaagcuug

SEQ ID NO: 1011600 - RNA, 22 nt, Human
ccaaggcuccucagcuggucuu

SEQ ID NO: 1011601 - RNA, 22 nt, Human
uuauggcauauuccucauugua

SEQ ID NO: 1011602 - RNA, 22 nt, Human
ugaccaaagaguugcuuguauu

SEQ ID NO: 1011603 - RNA, 18 nt, Human
cagagcagagguggagcg

SEQ ID NO: 1011604 - RNA, 22 nt, Human
augcaguaaauguuaagaaaaa

SEQ ID NO: 1011605 - RNA, 22 nt, Human
agucccagaucuccauucgguc

SEQ ID NO: 1011606 - RNA, 22 nt, Human
gugcuuccugccuggugccuuu

SEQ ID NO: 1011607 - RNA, 22 nt, Human
gcagauggcucagacacugggg

SEQ ID NO: 1011608 - RNA, 22 nt, Human
aggcugggaagguaaaguugua

SEQ ID NO: 1011609 - RNA, 22 nt, Human
acaaaggugcgucccuucagcu

SEQ ID NO: 1011610 - RNA, 22 nt, Human
cuggagccauguauagccuaug

SEQ ID NO: 1011611 - RNA, 18 nt, Human
cccucuccugcuaguggg

SEQ ID NO: 1011612 - RNA, 22 nt, Human
uccugaggcucacuuugaaugu

SEQ ID NO: 1011613 - RNA, 21 nt, Human
ucauccagguccugcuucuuc

SEQ ID NO: 1011614 - RNA, 22 nt, Human
agggcagagggugccucaccug

SEQ ID NO: 1011615 - RNA, 21 nt, Human
uacagaaugcgcuucagucug

SEQ ID NO: 1011616 - RNA, 21 nt, Human
aaguaaaucagagaaauaacc

SEQ ID NO: 1011617 - RNA, 22 nt, Human
cagcuugugcaaagguccuggg

SEQ ID NO: 1011618 - RNA, 22 nt, Human
ugcugcugauggcaccuaggca

SEQ ID NO: 1011619 - RNA, 19 nt, Human
caugagcugcucacuuccc

SEQ ID NO: 1011620 - RNA, 22 nt, Human
ugaacagauggcccagcagagg

SEQ ID NO: 1011621 - RNA, 22 nt, Human
cccugcaggcucagacuggagu

SEQ ID NO: 1011622 - RNA, 22 nt, Human
aucaguuuauacuuauaaaucu

SEQ ID NO: 1011623 - RNA, 18 nt, Human
uagggcucuagggaguga

SEQ ID NO: 1011624 - RNA, 22 nt, Human
guuagggaagcgcuguguucuu

SEQ ID NO: 1011625 - RNA, 22 nt, Human
gccacagggcagaugcgcagag

SEQ ID NO: 1011626 - RNA, 22 nt, Human
agagcccucuucacugccccuu

SEQ ID NO: 1011627 - RNA, 22 nt, Human
ggcaaaguuuucaucucauaac

SEQ ID NO: 1011628 - RNA, 22 nt, Human
ugcagcagguuccaaaggguua

SEQ ID NO: 1011629 - RNA, 22 nt, Human
cccuggccagcucaugucugag

SEQ ID NO: 1011630 - RNA, 22 nt, Human
ucugcagcuugcacaggcaggc

SEQ ID NO: 1011631 - RNA, 22 nt, Human
ggugggcaggcgaggcccaggu

SEQ ID NO: 1011632 - RNA, 22 nt, Human
ucuggcucuguguccucaccca

SEQ ID NO: 1011633 - RNA, 22 nt, Human
gaccauuuguugaaaagauuau

SEQ ID NO: 1011634 - RNA, 22 nt, Human
uucagagacagcaaccaggaca

SEQ ID NO: 1011635 - RNA, 22 nt, Human
ucuguaucuaauuuuacaguag

SEQ ID NO: 1011636 - RNA, 22 nt, Human
cagcucucacacccuccuccca

SEQ ID NO: 1011637 - RNA, 22 nt, Human
agggaggaucugcuccuugucu

SEQ ID NO: 1011638 - RNA, 22 nt, Human
guucuucacauuucauugagga

SEQ ID NO: 1011639 - RNA, 22 nt, Human
acagagcugggaucugaaccca

SEQ ID NO: 1011640 - RNA, 22 nt, Human
cucugggcaaguaugauagaaa

SEQ ID NO: 1011641 - RNA, 22 nt, Human
ggccagaaguuggaaaagagcc

SEQ ID NO: 1011642 - RNA, 22 nt, Human
cagacagaccugcaagggcaca

SEQ ID NO: 1011643 - RNA, 22 nt, Human
aaugcuuuuugcgaaaugugca

SEQ ID NO: 1011644 - RNA, 22 nt, Human
gcucccacugcagcccugagcc

SEQ ID NO: 1011645 - RNA, 22 nt, Human
uggaguucauccaugacagcuu

SEQ ID NO: 1011646 - RNA, 22 nt, Human
uuucacauuuguuuuaagaagu

SEQ ID NO: 1011647 - RNA, 22 nt, Human
gugcuuuccauccucccugcug

SEQ ID NO: 1011648 - RNA, 22 nt, Human
accuuucauuaaagucuguagu

SEQ ID NO: 1011649 - RNA, 22 nt, Human
ugcuucucccaaccagggccug

SEQ ID NO: 1011650 - RNA, 22 nt, Human
acaacaggguaaggcaggccau

SEQ ID NO: 1011651 - RNA, 23 nt, Human
uccucccaaauuucagccucauu

SEQ ID NO: 1011652 - RNA, 22 nt, Human
ccauaaggagccagacauucca

SEQ ID NO: 1011653 - RNA, 18 nt, Human
ggcugccuguuccugaag

SEQ ID NO: 1011654 - RNA, 19 nt, Human
gccugcagaaaaggcaggg

SEQ ID NO: 1011655 - RNA, 22 nt, Human
cagcaugguggagcugcucuuu

SEQ ID NO: 1011656 - RNA, 22 nt, Human
ggcaccuggauguagcagugaa

SEQ ID NO: 1011657 - RNA, 22 nt, Human
aaaguguggucguucauuuugu

SEQ ID NO: 1011658 - RNA, 17 nt, Human
ggugagaccucccacuc

SEQ ID NO: 1011659 - RNA, 22 nt, Human
caugcacaacauacucaagagg

SEQ ID NO: 1011660 - RNA, 22 nt, Human
ucaggugggaccugcuaggaca

SEQ ID NO: 1011661 - RNA, 22 nt, Human
ugucuucaucucagacacaguu

SEQ ID NO: 1011662 - RNA, 22 nt, Human
cagagcuguuacuauucaugaa

SEQ ID NO: 1011663 - RNA, 22 nt, Human
ucugaggcauacccaggccccc

SEQ ID NO: 1011664 - RNA, 22 nt, Human
caggccugagacaucugagaua

SEQ ID NO: 1011665 - RNA, 23 nt, Human
uggacgccgacuuuggaggcgcu

SEQ ID NO: 1011666 - RNA, 22 nt, Human
ccaggguggggcaggcccacug

SEQ ID NO: 1011667 - RNA, 22 nt, Human
ugccaggccucaggagucucca

SEQ ID NO: 1011668 - RNA, 22 nt, Human
uuauuauugugaccugagaaug

SEQ ID NO: 1011669 - RNA, 22 nt, Human
aauuccugucuuaacaguucug

SEQ ID NO: 1011670 - RNA, 22 nt, Human
uuuuauguaauccuuacugucg

SEQ ID NO: 1011671 - RNA, 22 nt, Human
gcugucuguggugucagcugac

SEQ ID NO: 1011672 - RNA, 22 nt, Human
aagcagaaaaacugagcuccaa

SEQ ID NO: 1011673 - RNA, 22 nt, Human
uguuaaauguuccuuuacugga

SEQ ID NO: 1011674 - RNA, 22 nt, Human
caacagaagguguacuacugaa

SEQ ID NO: 1011675 - RNA, 22 nt, Human
ugucucagaggcaggaagagcc

SEQ ID NO: 1011676 - RNA, 22 nt, Human
uccagaaacuuuuccagucuca

SEQ ID NO: 1011677 - RNA, 22 nt, Human
caguauguuugggagacaugac

SEQ ID NO: 1011678 - RNA, 22 nt, Human
augugucuuugagacucugcua

SEQ ID NO: 1011679 - RNA, 22 nt, Human
guugggaaggcaagaaguagaa

SEQ ID NO: 1011680 - RNA, 22 nt, Human
gugccugggguugagcuaugaa

SEQ ID NO: 1011681 - RNA, 22 nt, Human
guccucuguuagaaaugugcuu

SEQ ID NO: 1011682 - RNA, 22 nt, Human
gcugggcacugucccauaggcu

SEQ ID NO: 1011683 - RNA, 22 nt, Human
guccugggcccaggggcugccu

SEQ ID NO: 1011684 - RNA, 22 nt, Human
gcauuccugagaaugcagagug

SEQ ID NO: 1011685 - RNA, 22 nt, Human
ggccugccucacagucagcacc

SEQ ID NO: 1011686 - RNA, 22 nt, Human
uucacauaaugauacaaagcuu

SEQ ID NO: 1011687 - RNA, 22 nt, Human
uuaaauauuauguugucugcaa

SEQ ID NO: 1011688 - RNA, 22 nt, Human
gggcuguggagccgcgagggcu

SEQ ID NO: 1011689 - RNA, 22 nt, Human
agcucccagaguccucugccca

SEQ ID NO: 1011690 - RNA, 22 nt, Human
acuugauuuugaaccuuucuac

SEQ ID NO: 1011691 - RNA, 22 nt, Human
uaugcauaauuggauaaguaga

SEQ ID NO: 1011692 - RNA, 22 nt, Human
uggcagcaaaaccagaaucaga

SEQ ID NO: 1011693 - RNA, 20 nt, Human
gucucaaguaucucacaguc

SEQ ID NO: 1011694 - RNA, 22 nt, Human
ucugggagaagcugaugugaag

SEQ ID NO: 1011695 - RNA, 20 nt, Human
ccacaggaguccagucgacc

SEQ ID NO: 1011696 - RNA, 22 nt, Human
gugcuuucugcugcauuccucu

SEQ ID NO: 1011697 - RNA, 21 nt, Human
agaaaaaccagcauguuuuca

SEQ ID NO: 1011698 - RNA, 19 nt, Human
ggcagcuggacgcuguuca

SEQ ID NO: 1011699 - RNA, 22 nt, Human
uaacacauauuucaagaguagu

SEQ ID NO: 1011700 - RNA, 17 nt, Human
gcugccaccuuuggagc

SEQ ID NO: 1011701 - RNA, 22 nt, Human
auggaaagccaguguuccauca

SEQ ID NO: 1011702 - RNA, 22 nt, Human
ucaguguagcagacuuguagcc

SEQ ID NO: 1011703 - RNA, 22 nt, Human
acagggcccuugccagcacaag

SEQ ID NO: 1011704 - RNA, 22 nt, Human
uggccaggcagguagaacggcc

SEQ ID NO: 1011705 - RNA, 22 nt, Human
ccagagcuaaacacacaggcug

SEQ ID NO: 1011706 - RNA, 22 nt, Human
guguaauuauauaaagaucuac

SEQ ID NO: 1011707 - RNA, 22 nt, Human
uggaaauacuugccauaaaacu

SEQ ID NO: 1011708 - RNA, 22 nt, Human
ccuccuuuccuguuuuccugag

SEQ ID NO: 1011709 - RNA, 22 nt, Human
gcagagcauguccucaggacag

SEQ ID NO: 1011710 - RNA, 22 nt, Human
auugacaagugagcugggcugc

SEQ ID NO: 1011711 - RNA, 22 nt, Human
cagagcauaauugacaugaggu

SEQ ID NO: 1011712 - RNA, 22 nt, Human
gggcugccuuucuucugggagc

SEQ ID NO: 1011713 - RNA, 22 nt, Human
gcagggaccugccacugcuguc

SEQ ID NO: 1011714 - RNA, 22 nt, Human
acagcuuugggcaaugcuauga

SEQ ID NO: 1011715 - RNA, 22 nt, Human
gcagggacaccuuugugaagcu

SEQ ID NO: 1011716 - RNA, 22 nt, Human
ugucagaugcgauaaacuagug

SEQ ID NO: 1011717 - RNA, 22 nt, Human
gcacagggaggcuggccuggcc

SEQ ID NO: 1011718 - RNA, 22 nt, Human
ugacagaacagguugggagcaa

SEQ ID NO: 1011719 - RNA, 22 nt, Human
acuguucauauucuuagaaauu

SEQ ID NO: 1011720 - RNA, 22 nt, Human
gaaacauacgauuuaggagaaa

SEQ ID NO: 1011721 - RNA, 22 nt, Human
cagagcugacccaaggauugaa

SEQ ID NO: 1011722 - RNA, 22 nt, Human
agcgggugcugugucagcccuc

SEQ ID NO: 1011723 - RNA, 22 nt, Human
agcagugggugacagagcugag

SEQ ID NO: 1011724 - RNA, 18 nt, Human
cauaauuuucuuucuuua

SEQ ID NO: 1011725 - RNA, 22 nt, Human
ggagccaguauuuaguggucuu

SEQ ID NO: 1011726 - RNA, 22 nt, Human
cugugcuucgcaacuccaaggu

SEQ ID NO: 1011727 - RNA, 22 nt, Human
ccugagccugaguggugcaggg

SEQ ID NO: 1011728 - RNA, 22 nt, Human
cucaggguaaugaaagacgaau

SEQ ID NO: 1011729 - RNA, 22 nt, Human
auguucuuguucaaaugucagu

SEQ ID NO: 1011730 - RNA, 22 nt, Human
uuuggacuuagccugcagaauu

SEQ ID NO: 1011731 - RNA, 22 nt, Human
caggggcugugggcggagccuc

SEQ ID NO: 1011732 - RNA, 22 nt, Human
gagcccuccauggagccaggca

SEQ ID NO: 1011733 - RNA, 22 nt, Human
cuguccugcaguugggggcagg

SEQ ID NO: 1011734 - RNA, 22 nt, Human
aagggccuccuggggagccugg

SEQ ID NO: 1011735 - RNA, 20 nt, Human
ucucaggguucagcaaagua

SEQ ID NO: 1011736 - RNA, 20 nt, Human
cauuuguuagcuuucuacug

SEQ ID NO: 1011737 - RNA, 22 nt, Human
acauuucucuuagaguuggacu

SEQ ID NO: 1011738 - RNA, 22 nt, Human
aagaggaacugggggcugaguc

SEQ ID NO: 1011739 - RNA, 22 nt, Human
ggugggcagcucuuggcaggca

SEQ ID NO: 1011740 - RNA, 22 nt, Human
ucagggcaaugucccucagaag

SEQ ID NO: 1011741 - RNA, 22 nt, Human
gcagagccuugcgucaugugcc

SEQ ID NO: 1011742 - RNA, 22 nt, Human
agugucugccagcugccaggug

SEQ ID NO: 1011743 - RNA, 22 nt, Human
gucucccacuuucuggccucuu

SEQ ID NO: 1011744 - RNA, 22 nt, Human
aggacaggauugagcugaacug

SEQ ID NO: 1011745 - RNA, 22 nt, Human
caucaaauaggaauauuuggca

SEQ ID NO: 1011746 - RNA, 22 nt, Human
cuucugugauuugguuaggaua

SEQ ID NO: 1011747 - RNA, 23 nt, Human
agaggcaggaguggcuugcccgg

SEQ ID NO: 1011748 - RNA, 22 nt, Human
uuucaucuucccagagaccuug

SEQ ID NO: 1011749 - RNA, 22 nt, Human
cagagccaucccagccuguggu

SEQ ID NO: 1011750 - RNA, 22 nt, Human
ggagaaggaagaaagcuacuau

SEQ ID NO: 1011751 - RNA, 22 nt, Human
cagcccaaagccccaggcuaga

SEQ ID NO: 1011752 - RNA, 22 nt, Human
cugggcagugguggcccuuccc

SEQ ID NO: 1011753 - RNA, 23 nt, Human
auguaucucauccaaggaagcuc

SEQ ID NO: 1011754 - RNA, 22 nt, Human
uccucagggcggccuccgucuu

SEQ ID NO: 1011755 - RNA, 21 nt, Human
gcaggguccuuuccauuccua

SEQ ID NO: 1011756 - RNA, 22 nt, Human
uaucuguuaggaucagagcugg

SEQ ID NO: 1011757 - RNA, 22 nt, Human
aucuaagaguuaacaucaagaa

SEQ ID NO: 1011758 - RNA, 22 nt, Human
gauuuccucacuaacauccauc

SEQ ID NO: 1011759 - RNA, 19 nt, Human
aggccugggguuuugcacu

SEQ ID NO: 1011760 - RNA, 22 nt, Human
uuucaguuacugcuauaucauu

SEQ ID NO: 1011761 - RNA, 22 nt, Human
cugucagcacucuacuacagau

SEQ ID NO: 1011762 - RNA, 22 nt, Human
ucagucucuggggcuucuguuu

SEQ ID NO: 1011763 - RNA, 21 nt, Human
uuucacaaaaguaugugacaa

SEQ ID NO: 1011764 - RNA, 19 nt, Human
augauacaggugaaaauug

SEQ ID NO: 1011765 - RNA, 22 nt, Human
uucucacuauguauguagauug

SEQ ID NO: 1011766 - RNA, 22 nt, Human
guguccagggccguguugucuu

SEQ ID NO: 1011767 - RNA, 19 nt, Human
ugagagugaggaaggcuuc

SEQ ID NO: 1011768 - RNA, 22 nt, Human
guuucaaauagguuucagcaaa

SEQ ID NO: 1011769 - RNA, 22 nt, Human
gucauuccuauccauuugauac

SEQ ID NO: 1011770 - RNA, 22 nt, Human
ccaggcugcucacaagcugccc

SEQ ID NO: 1011771 - RNA, 22 nt, Human
agucucagcuacuugggaggcu

SEQ ID NO: 1011772 - RNA, 22 nt, Human
ugcauuauuugcaugugccugu

SEQ ID NO: 1011773 - RNA, 22 nt, Human
aagcucugcucagcagacuagg

SEQ ID NO: 1011774 - RNA, 22 nt, Human
gcugccagcucacucuccugag

SEQ ID NO: 1011775 - RNA, 22 nt, Human
ugugaaggagaugaagggagug

SEQ ID NO: 1011776 - RNA, 22 nt, Human
cugcagggugacguugcccacc

SEQ ID NO: 1011777 - RNA, 22 nt, Human
cagggcucccugcagccucugu

SEQ ID NO: 1011778 - RNA, 22 nt, Human
ucccagggcagcuguccagaag

SEQ ID NO: 1011779 - RNA, 22 nt, Human
ugcuuuauugcaucaguguggg

SEQ ID NO: 1011780 - RNA, 22 nt, Human
ggcuucuccccuuugagucuuc

SEQ ID NO: 1011781 - RNA, 22 nt, Human
ugcauuucagaagaaaauucgg

SEQ ID NO: 1011782 - RNA, 22 nt, Human
agaccagcugccucccagggcc

SEQ ID NO: 1011783 - RNA, 18 nt, Human
agaguguucucagugaaa

SEQ ID NO: 1011784 - RNA, 22 nt, Human
uggagcagccaugaugacagag

SEQ ID NO: 1011785 - RNA, 22 nt, Human
cugcugugcaacauugcaccua

SEQ ID NO: 1011786 - RNA, 19 nt, Human
uguuuuguuaaagcagucc

SEQ ID NO: 1011787 - RNA, 22 nt, Human
ucccaggcaaaggcagcucauu

SEQ ID NO: 1011788 - RNA, 22 nt, Human
agaggagguggugaugcuuuaa

SEQ ID NO: 1011789 - RNA, 18 nt, Human
acacugcagcagucugcu

SEQ ID NO: 1011790 - RNA, 22 nt, Human
guggcaggucccauuggagcag

SEQ ID NO: 1011791 - RNA, 22 nt, Human
augaguugaagcuacaagaggc

SEQ ID NO: 1011792 - RNA, 22 nt, Human
aguugaauaauuagacauaucu

SEQ ID NO: 1011793 - RNA, 22 nt, Human
ugcugccaagcccgugcuccug

SEQ ID NO: 1011794 - RNA, 22 nt, Human
uggccugauuuugcuaagagaa

SEQ ID NO: 1011795 - RNA, 22 nt, Human
aaauguguuugauaggaauauu

SEQ ID NO: 1011796 - RNA, 22 nt, Human
cuggccuggcagggagggcaug

SEQ ID NO: 1011797 - RNA, 22 nt, Human
agugaaaugacugaaucagaua

SEQ ID NO: 1011798 - RNA, 22 nt, Human
uugacagcuauuuugcuuugau

SEQ ID NO: 1011799 - RNA, 22 nt, Human
ugggagcacccugaggagcuuc

SEQ ID NO: 1011800 - RNA, 22 nt, Human
agccucuguagaaagcagugug

SEQ ID NO: 1011801 - RNA, 22 nt, Human
ccagagccucuuaugaagaucg

SEQ ID NO: 1011802 - RNA, 22 nt, Human
augugaaacugaagcauccaua

SEQ ID NO: 1011803 - RNA, 22 nt, Human
ggccccugcggacugccuagag

SEQ ID NO: 1011804 - RNA, 22 nt, Human
augcucuggaguacgugaaauu

SEQ ID NO: 1011805 - RNA, 22 nt, Human
cccagcucucugcucuuagccu

SEQ ID NO: 1011806 - RNA, 18 nt, Human
acccucuggcuucugagc

SEQ ID NO: 1011807 - RNA, 22 nt, Human
uucauucuugucuuuguauagu

SEQ ID NO: 1011808 - RNA, 22 nt, Human
ugcaaacaggagaguaaguaua

SEQ ID NO: 1011809 - RNA, 22 nt, Human
agcaccaucagaugcaauaucu

SEQ ID NO: 1011810 - RNA, 22 nt, Human
caugcuuuaccaaagcagugau

SEQ ID NO: 1011811 - RNA, 23 nt, Human
agcagccauagggaagcaauaca

SEQ ID NO: 1011812 - RNA, 22 nt, Human
ccaggagcagauauggacauaa

SEQ ID NO: 1011813 - RNA, 17 nt, Human
uagcuguguuucagcua

SEQ ID NO: 1011814 - RNA, 22 nt, Human
ggcuguggggccggguacagug

SEQ ID NO: 1011815 - RNA, 22 nt, Human
agaggcuggauugagcauagac

SEQ ID NO: 1011816 - RNA, 22 nt, Human
cucagagucccuucccucgugg

SEQ ID NO: 1011817 - RNA, 22 nt, Human
uggagccaugccuggccuuucc

SEQ ID NO: 1011818 - RNA, 22 nt, Human
aagauuuacuagcauaauagcu

SEQ ID NO: 1011819 - RNA, 22 nt, Human
cugcugcauuccucuuuaugag

SEQ ID NO: 1011820 - RNA, 22 nt, Human
uucuuaaagaggcaaaacacag

SEQ ID NO: 1011821 - RNA, 22 nt, Human
gggaccaggugggugcauuccg

SEQ ID NO: 1011822 - RNA, 22 nt, Human
gucagcagugucagcucugggg

SEQ ID NO: 1011823 - RNA, 22 nt, Human
gcugucugcaucucuagagcuu

SEQ ID NO: 1011824 - RNA, 22 nt, Human
cugagccagagggagucggguc

SEQ ID NO: 1011825 - RNA, 22 nt, Human
aaggucauggcaaauuacuuuu

SEQ ID NO: 1011826 - RNA, 17 nt, Human
gagccacccugugcgag

SEQ ID NO: 1011827 - RNA, 17 nt, Human
agugacuuggaaagagc

SEQ ID NO: 1011828 - RNA, 22 nt, Human
gaggcagcaaaauauaucauaa

SEQ ID NO: 1011829 - RNA, 22 nt, Human
caggguagacaguaggugucug

SEQ ID NO: 1011830 - RNA, 22 nt, Human
uaauuucuaauucauuuucagu

SEQ ID NO: 1011831 - RNA, 22 nt, Human
gggcaguggguggcugcagccu

SEQ ID NO: 1011832 - RNA, 22 nt, Human
gacagagugcagggcuagaaga

SEQ ID NO: 1011833 - RNA, 22 nt, Human
ggcaguggugggaggcucgcuc

SEQ ID NO: 1011834 - RNA, 22 nt, Human
ucaugaaucguggaaugauuua

SEQ ID NO: 1011835 - RNA, 22 nt, Human
cuguauuuguccucuauuuauu

SEQ ID NO: 1011836 - RNA, 22 nt, Human
caauagcagcuucugaaugcaa

SEQ ID NO: 1011837 - RNA, 22 nt, Human
ucuguucagaaauggaagugcc

SEQ ID NO: 1011838 - RNA, 22 nt, Human
uaagaacuucggacauguuauc

SEQ ID NO: 1011839 - RNA, 22 nt, Human
uugugaguagugccgcaauaaa

SEQ ID NO: 1011840 - RNA, 22 nt, Human
aggcugugaguuuugucucaga

SEQ ID NO: 1011841 - RNA, 22 nt, Human
gggauggggagcuggaaagggg

SEQ ID NO: 1011842 - RNA, 22 nt, Human
cagagcugagaauguugaugcu

SEQ ID NO: 1011843 - RNA, 22 nt, Human
cauuaucucuucuauaugcuag

SEQ ID NO: 1011844 - RNA, 22 nt, Human
aagggacccuggaucaaaugga

SEQ ID NO: 1011845 - RNA, 21 nt, Human
ccacaggggcuccccugucag

SEQ ID NO: 1011846 - RNA, 22 nt, Human
caggugcugcguggcggagcug

SEQ ID NO: 1011847 - RNA, 22 nt, Human
aagggaggccagagguuuugca

SEQ ID NO: 1011848 - RNA, 22 nt, Human
ucuugcuaaagaccaacacauu

SEQ ID NO: 1011849 - RNA, 22 nt, Human
cagaacauucacucauaugugg

SEQ ID NO: 1011850 - RNA, 22 nt, Human
ggcugcugggaauaugccagcu

SEQ ID NO: 1011851 - RNA, 22 nt, Human
gcucacagccggcuggcagggg

SEQ ID NO: 1011852 - RNA, 22 nt, Human
agggcugcaggcaagauauggc

SEQ ID NO: 1011853 - RNA, 22 nt, Human
uucuugauuucaugcaguuaag

SEQ ID NO: 1011854 - RNA, 19 nt, Human
gcucagagggcccugugcu

SEQ ID NO: 1011855 - RNA, 22 nt, Human
gcagcugccuauucagggcuug

SEQ ID NO: 1011856 - RNA, 20 nt, Human
cucuuaaauguaaaguaggc

SEQ ID NO: 1011857 - RNA, 22 nt, Human
cuccuuccugccccagugauaa

SEQ ID NO: 1011858 - RNA, 22 nt, Human
aggaccagaggccagagucagc

SEQ ID NO: 1011859 - RNA, 22 nt, Human
cagcauuuagaauuugaagugu

SEQ ID NO: 1011860 - RNA, 22 nt, Human
cacaggagcuguggggcagugu

SEQ ID NO: 1011861 - RNA, 19 nt, Human
ugcagccacgugagagacu

SEQ ID NO: 1011862 - RNA, 22 nt, Human
cugugcuggcagaccuggaguu

SEQ ID NO: 1011863 - RNA, 22 nt, Human
cugcagggcagggccuccuggc

SEQ ID NO: 1011864 - RNA, 22 nt, Human
cagacaggcuagccagacucac

SEQ ID NO: 1011865 - RNA, 22 nt, Human
aguuugaaauguuggcaauauu

SEQ ID NO: 1011866 - RNA, 22 nt, Human
uuacauuuggcuauguccucua

SEQ ID NO: 1011867 - RNA, 22 nt, Human
gcaaaugaguuguaacauaaaa

SEQ ID NO: 1011868 - RNA, 22 nt, Human
agacagguaaauagagaugcug

SEQ ID NO: 1011869 - RNA, 20 nt, Human
cuuccacacaagaagcacag

SEQ ID NO: 1011870 - RNA, 22 nt, Human
gaaauauuguacuggagauguu

SEQ ID NO: 1011871 - RNA, 22 nt, Human
ucuucagauugcacugagcaag

SEQ ID NO: 1011872 - RNA, 22 nt, Human
gaggggcugggguugacuccaa

SEQ ID NO: 1011873 - RNA, 22 nt, Human
aaauuucaagcaaaguagcuau

SEQ ID NO: 1011874 - RNA, 22 nt, Human
ggaggccaggaaggcucggaga

SEQ ID NO: 1011875 - RNA, 22 nt, Human
caugagcugcugggagccuguc

SEQ ID NO: 1011876 - RNA, 17 nt, Human
acaagcaguggccaugg

SEQ ID NO: 1011877 - RNA, 22 nt, Human
ucucagagcuucaguuauuuuc

SEQ ID NO: 1011878 - RNA, 22 nt, Human
uggccugcagcucucagggaag

SEQ ID NO: 1011879 - RNA, 22 nt, Human
cagguggguacaucacagagac

SEQ ID NO: 1011880 - RNA, 22 nt, Human
ugucagagcaaugagguucagc

SEQ ID NO: 1011881 - RNA, 22 nt, Human
uggccuggccacauccagcagg

SEQ ID NO: 1011882 - RNA, 22 nt, Human
uuauuaggaacucaggauuuuu

SEQ ID NO: 1011883 - RNA, 22 nt, Human
aaauacuagaauucagaguuga

SEQ ID NO: 1011884 - RNA, 20 nt, Human
gccaacgcgcuggggcugcc

SEQ ID NO: 1011885 - RNA, 22 nt, Human
caagauggagaagcagcaaggg

SEQ ID NO: 1011886 - RNA, 22 nt, Human
ucacaggaaccaucagagaaau

SEQ ID NO: 1011887 - RNA, 22 nt, Human
ugcuggcccaguauggacugca

SEQ ID NO: 1011888 - RNA, 22 nt, Human
ccagcugagaaguguaaaguga

SEQ ID NO: 1011889 - RNA, 21 nt, Human
ggcacugagccagauggacuc

SEQ ID NO: 1011890 - RNA, 22 nt, Human
gaggccuggucuaugagauguu

SEQ ID NO: 1011891 - RNA, 22 nt, Human
agagaacaaauuaaaggugguu

SEQ ID NO: 1011892 - RNA, 22 nt, Human
gcuggccucuacaggccggcca

SEQ ID NO: 1011893 - RNA, 21 nt, Human
gcccagcaaggugagaaggcc

SEQ ID NO: 1011894 - RNA, 22 nt, Human
gcugcccauuccacuggauggu

SEQ ID NO: 1011895 - RNA, 22 nt, Human
cccaagggagugccuggucaac

SEQ ID NO: 1011896 - RNA, 22 nt, Human
ucagggacuuacaaaccagaag

SEQ ID NO: 1011897 - RNA, 22 nt, Human
aggcaggggagcuggaagggua

SEQ ID NO: 1011898 - RNA, 22 nt, Human
agcacuuuccuggcaaaugugg

SEQ ID NO: 1011899 - RNA, 20 nt, Human
gucagaggacccuagagcga

SEQ ID NO: 1011900 - RNA, 22 nt, Human
ugcagggccgcuggaggucaug

SEQ ID NO: 1011901 - RNA, 22 nt, Human
gugaaaauaaggcugguucuug

SEQ ID NO: 1011902 - RNA, 22 nt, Human
ccaguguucauaauuuuacacu

SEQ ID NO: 1011903 - RNA, 22 nt, Human
aucuggcuccuacacuugaaga

SEQ ID NO: 1011904 - RNA, 22 nt, Human
uguaugugcuugagaagguggg

SEQ ID NO: 1011905 - RNA, 22 nt, Human
augcaguggcagcuccuggugu

SEQ ID NO: 1011906 - RNA, 22 nt, Human
aggcucugcagugcuggaggac

SEQ ID NO: 1011907 - RNA, 22 nt, Human
uugcucaggcuuagagcuacua

SEQ ID NO: 1011908 - RNA, 21 nt, Human
cugcuguggcccccgacaugc

SEQ ID NO: 1011909 - RNA, 22 nt, Human
aaauggauggaauugacauuua

SEQ ID NO: 1011910 - RNA, 22 nt, Human
ccucacuggccagccaggggug

SEQ ID NO: 1011911 - RNA, 22 nt, Human
ccagccaggcuggcuguggagg

SEQ ID NO: 1011912 - RNA, 22 nt, Human
acacuaaugagaaaggaauuaa

SEQ ID NO: 1011913 - RNA, 22 nt, Human
aauauaugugguauugaccagc

SEQ ID NO: 1011914 - RNA, 22 nt, Human
uugaaagaggcaaaguuugauc

SEQ ID NO: 1011915 - RNA, 22 nt, Human
uccaggaccucccaggcuagag

SEQ ID NO: 1011916 - RNA, 17 nt, Human
ucaugcccaacuauuac

SEQ ID NO: 1011917 - RNA, 22 nt, Human
ucugccuuccccauaaucugau

SEQ ID NO: 1011918 - RNA, 19 nt, Human
uagcugccuguuaccucca

SEQ ID NO: 1011919 - RNA, 22 nt, Human
cucugugccucaguuuucuucu

SEQ ID NO: 1011920 - RNA, 20 nt, Human
uccaggcagacagcuauggg

SEQ ID NO: 1011921 - RNA, 22 nt, Human
acaugcuuucuagguccuucug

SEQ ID NO: 1011922 - RNA, 21 nt, Human
cugguguagcacucaggugcu

SEQ ID NO: 1011923 - RNA, 22 nt, Human
augagcugggccauccagugau

SEQ ID NO: 1011924 - RNA, 22 nt, Human
ugcugccucagcuuccugggcu

SEQ ID NO: 1011925 - RNA, 22 nt, Human
agcucuccacacauaggacuag

SEQ ID NO: 1011926 - RNA, 18 nt, Human
agcuggcccuggcugccg

SEQ ID NO: 1011927 - RNA, 22 nt, Human
ucaacugcaaguuugcuuaguu

SEQ ID NO: 1011928 - RNA, 22 nt, Human
cuucucucccuggcacucagac

SEQ ID NO: 1011929 - RNA, 22 nt, Human
aggagucaggaccaaauggaaa

SEQ ID NO: 1011930 - RNA, 22 nt, Human
uucaagguaugguagcugguca

SEQ ID NO: 1011931 - RNA, 22 nt, Human
aauuucaaacuaauaggaacca

SEQ ID NO: 1011932 - RNA, 22 nt, Human
agucacuguucugucaugucaa

SEQ ID NO: 1011933 - RNA, 22 nt, Human
aaguauaagcuauucuucauga

SEQ ID NO: 1011934 - RNA, 22 nt, Human
uuaggaguccagaugucuuggg

SEQ ID NO: 1011935 - RNA, 22 nt, Human
uuucaaacauagaucugaauau

SEQ ID NO: 1011936 - RNA, 22 nt, Human
gcuggccuccugcuagauggaa

SEQ ID NO: 1011937 - RNA, 22 nt, Human
gcugagggcauguguggcgacu

SEQ ID NO: 1011938 - RNA, 20 nt, Human
auugucagccuucagaggag

SEQ ID NO: 1011939 - RNA, 22 nt, Human
ggcagcucugcuccacaugagu

SEQ ID NO: 1011940 - RNA, 22 nt, Human
caggcagcauuuacucugauga

SEQ ID NO: 1011941 - RNA, 22 nt, Human
aagcaauauacugauaugauua

SEQ ID NO: 1011942 - RNA, 22 nt, Human
ccugccaggcuuugggcuucug

SEQ ID NO: 1011943 - RNA, 23 nt, Human
aguguuccaguugguugagagug

SEQ ID NO: 1011944 - RNA, 22 nt, Human
uggccacaugcgucugugaggc

SEQ ID NO: 1011945 - RNA, 22 nt, Human
uaugagaaucugcaguaugcuu

SEQ ID NO: 1011946 - RNA, 22 nt, Human
uagagcuggccgggacagcugg

SEQ ID NO: 1011947 - RNA, 22 nt, Human
uuccaagaguaaauucaaauug

SEQ ID NO: 1011948 - RNA, 22 nt, Human
caugcacagugauaucugaaga

SEQ ID NO: 1011949 - RNA, 19 nt, Human
ucaaggcucccugagggau

SEQ ID NO: 1011950 - RNA, 22 nt, Human
ucuagaaauuuugccuuguauu

SEQ ID NO: 1011951 - RNA, 20 nt, Human
uggcaucucucaauuguagg

SEQ ID NO: 1011952 - RNA, 22 nt, Human
uauaucauggagauuaacauuc

SEQ ID NO: 1011953 - RNA, 22 nt, Human
uacauguuugguaaaugauggc

SEQ ID NO: 1011954 - RNA, 22 nt, Human
uuggaugaagucuagcuuuagu

SEQ ID NO: 1011955 - RNA, 21 nt, Human
cuugaaagguagagucuacag

SEQ ID NO: 1011956 - RNA, 22 nt, Human
ucauccaguuguggagagggaa

SEQ ID NO: 1011957 - RNA, 22 nt, Human
uuucacauucagauauagacuu

SEQ ID NO: 1011958 - RNA, 22 nt, Human
ucagagaaguaagguggggugc

SEQ ID NO: 1011959 - RNA, 22 nt, Human
auauuugucaauucacuguuca

SEQ ID NO: 1011960 - RNA, 22 nt, Human
auuauguagguuaggugguugu

SEQ ID NO: 1011961 - RNA, 22 nt, Human
ucacuucacacccacuaucaug

SEQ ID NO: 1011962 - RNA, 22 nt, Human
uuugaacaugcugcaugauaau

SEQ ID NO: 1011963 - RNA, 22 nt, Human
caggacagguguucuagaucag

SEQ ID NO: 1011964 - RNA, 22 nt, Human
ccuggagcacucucccuggcug

SEQ ID NO: 1011965 - RNA, 22 nt, Human
agaauucuggaguugggaggaa

SEQ ID NO: 1011966 - RNA, 22 nt, Human
gggcuggcaggaccugggcuga

SEQ ID NO: 1011967 - RNA, 22 nt, Human
ccugcugugaagccaggccugu

SEQ ID NO: 1011968 - RNA, 22 nt, Human
gaguggggcccacugcugggug

SEQ ID NO: 1011969 - RNA, 22 nt, Human
cagcaggguauacagggaauuu

SEQ ID NO: 1011970 - RNA, 22 nt, Human
aggacuucaucaccuguauaaa

SEQ ID NO: 1011971 - RNA, 22 nt, Human
cagcuccugcagcugcugccgu

SEQ ID NO: 1011972 - RNA, 22 nt, Human
uucuuuccucccagccuuugga

SEQ ID NO: 1011973 - RNA, 22 nt, Human
gauuuucugagccuucaaauuu

SEQ ID NO: 1011974 - RNA, 22 nt, Human
uggucaggcugcucugcggcgu

SEQ ID NO: 1011975 - RNA, 21 nt, Human
cagugcucaaucugacagugg

SEQ ID NO: 1011976 - RNA, 22 nt, Human
gcugagucuugagcacugagca

SEQ ID NO: 1011977 - RNA, 22 nt, Human
aaagccuugagauccuauaguu

SEQ ID NO: 1011978 - RNA, 20 nt, Human
gccuggaggcagagauaaag

SEQ ID NO: 1011979 - RNA, 22 nt, Human
ccagggcaggagaaagacucac

SEQ ID NO: 1011980 - RNA, 22 nt, Human
agggcagcagcggcccaggccu

SEQ ID NO: 1011981 - RNA, 17 nt, Human
uggcucugaggcugaau

SEQ ID NO: 1011982 - RNA, 22 nt, Human
ggcugcagauagccagccacca

SEQ ID NO: 1011983 - RNA, 22 nt, Human
ggcucagguugggucacaugac

SEQ ID NO: 1011984 - RNA, 21 nt, Human
ucucugggaggacuugugaga

SEQ ID NO: 1011985 - RNA, 22 nt, Human
ugcauaaacagauacuucaugu

SEQ ID NO: 1011986 - RNA, 22 nt, Human
ucagcuuuuuacaugugaaaua

SEQ ID NO: 1011987 - RNA, 22 nt, Human
ucauuuaauugguuuugcucgu

SEQ ID NO: 1011988 - RNA, 22 nt, Human
ccuuccagaguucagucugccc

SEQ ID NO: 1011989 - RNA, 22 nt, Human
gcugccaccguggagaugagug

SEQ ID NO: 1011990 - RNA, 22 nt, Human
aaggaaccuggaguagagggag

SEQ ID NO: 1011991 - RNA, 22 nt, Human
gccugguguccagaggcgagug

SEQ ID NO: 1011992 - RNA, 22 nt, Human
cauuuguagcuauuuacuguau

SEQ ID NO: 1011993 - RNA, 22 nt, Human
gaugauuuuaugucuugucauu

SEQ ID NO: 1011994 - RNA, 22 nt, Human
cagcccagcacuaaguagauuu

SEQ ID NO: 1011995 - RNA, 22 nt, Human
gggaccugaggagggguuucag

SEQ ID NO: 1011996 - RNA, 22 nt, Human
uauggaaacuaauucauuuuuc

SEQ ID NO: 1011997 - RNA, 22 nt, Human
gcugucaggccaugugggccuu

SEQ ID NO: 1011998 - RNA, 22 nt, Human
uggcagaaagaaccaugugcaa

SEQ ID NO: 1011999 - RNA, 22 nt, Human
cugggcacagcguugggcucuu

SEQ ID NO: 1012000 - RNA, 22 nt, Human
ucuuuccuguaacugcuguuca

SEQ ID NO: 1012001 - RNA, 22 nt, Human
cauaucccauuggccaggacau

SEQ ID NO: 1012002 - RNA, 22 nt, Human
ugguggccaauucacagggcuc

SEQ ID NO: 1012003 - RNA, 22 nt, Human
gacauaauaaucugaccuagau

SEQ ID NO: 1012004 - RNA, 22 nt, Human
auguguuuguaccuuuaaauau

SEQ ID NO: 1012005 - RNA, 22 nt, Human
uagcaauagaaacauauaaagu

SEQ ID NO: 1012006 - RNA, 19 nt, Human
ugcagcucagggcaggggc

SEQ ID NO: 1012007 - RNA, 22 nt, Human
ccagcugguuaaaauagagaaa

SEQ ID NO: 1012008 - RNA, 22 nt, Human
uuaagaauggaaugaggaauuu

SEQ ID NO: 1012009 - RNA, 22 nt, Human
uggcucaggugugagcugaaga

SEQ ID NO: 1012010 - RNA, 22 nt, Human
cuaauguaucauggcucucagc

SEQ ID NO: 1012011 - RNA, 22 nt, Human
caauguaucaaccagaaaguuc

SEQ ID NO: 1012012 - RNA, 22 nt, Human
ucagcuuggacagcuugguuga

SEQ ID NO: 1012013 - RNA, 23 nt, Human
uagggcagcugggagggacaugc

SEQ ID NO: 1012014 - RNA, 22 nt, Human
uccuuccuggggucucugcugc

SEQ ID NO: 1012015 - RNA, 21 nt, Human
uggcucugagccucauggcug

SEQ ID NO: 1012016 - RNA, 22 nt, Human
ccugccuggagcugagugugga

SEQ ID NO: 1012017 - RNA, 22 nt, Human
agucauaugacccuucacaaac

SEQ ID NO: 1012018 - RNA, 22 nt, Human
caagaugggcaccccagcaccu

SEQ ID NO: 1012019 - RNA, 21 nt, Human
ucagcuuugcaacugcacauc

SEQ ID NO: 1012020 - RNA, 21 nt, Human
gagugucuaauccaggcuguc

SEQ ID NO: 1012021 - RNA, 22 nt, Human
caaaaugugagucccaccucaa

SEQ ID NO: 1012022 - RNA, 22 nt, Human
guuugcauggaagacagugagu

SEQ ID NO: 1012023 - RNA, 22 nt, Human
ggcucaggaccugggauugcca

SEQ ID NO: 1012024 - RNA, 18 nt, Human
ggcucaggcuauccuaac

SEQ ID NO: 1012025 - RNA, 22 nt, Human
cuggagggugagccucaucucu

SEQ ID NO: 1012026 - RNA, 22 nt, Human
uaguuaaaauaauggagauguu

SEQ ID NO: 1012027 - RNA, 21 nt, Human
auccauccaucuuggccuaac

SEQ ID NO: 1012028 - RNA, 20 nt, Human
gagacagcaaaagccucucc

SEQ ID NO: 1012029 - RNA, 22 nt, Human
cugcuguguuggcauuggauag

SEQ ID NO: 1012030 - RNA, 22 nt, Human
cuggagccuucaccaggggaaa

SEQ ID NO: 1012031 - RNA, 22 nt, Human
gaugguuugguaaaaguauguu

SEQ ID NO: 1012032 - RNA, 22 nt, Human
aaguccaguuucauuugagguc

SEQ ID NO: 1012033 - RNA, 22 nt, Human
ucugagcuuuuauuaucaaccu

SEQ ID NO: 1012034 - RNA, 22 nt, Human
uugggagcuuggacuuagugug

SEQ ID NO: 1012035 - RNA, 22 nt, Human
cuugaaagcuuugcgucuucua

SEQ ID NO: 1012036 - RNA, 22 nt, Human
ucagaacauugacauucuuauu

SEQ ID NO: 1012037 - RNA, 22 nt, Human
ucagcaguggcucucaugcagu

SEQ ID NO: 1012038 - RNA, 22 nt, Human
cugggaggauacacaagaucag

SEQ ID NO: 1012039 - RNA, 22 nt, Human
cugagaggaugcugcaguggag

SEQ ID NO: 1012040 - RNA, 22 nt, Human
cccagcuugcgggcggcaggag

SEQ ID NO: 1012041 - RNA, 22 nt, Human
ucaaggaggugcuuggcuucac

SEQ ID NO: 1012042 - RNA, 22 nt, Human
auuauuagauucuuaauuguaa

SEQ ID NO: 1012043 - RNA, 22 nt, Human
ccuuccaggugcaggcaagccu

SEQ ID NO: 1012044 - RNA, 22 nt, Human
ugccugcuaggcccugcugggu

SEQ ID NO: 1012045 - RNA, 22 nt, Human
uaacagaagaaaacauauugga

SEQ ID NO: 1012046 - RNA, 18 nt, Human
gggaucaggcugccuagg

SEQ ID NO: 1012047 - RNA, 22 nt, Human
uuuaaaauuuagaccucuccac

SEQ ID NO: 1012048 - RNA, 22 nt, Human
cuggaaauuggagaugauguuu

SEQ ID NO: 1012049 - RNA, 22 nt, Human
agggucccgaaggagacagcaa

SEQ ID NO: 1012050 - RNA, 22 nt, Human
gagcccagguucugcuuccagc

SEQ ID NO: 1012051 - RNA, 22 nt, Human
cagcagggaagcugugcuguuu

SEQ ID NO: 1012052 - RNA, 22 nt, Human
uguguauuucuggaacagacua

SEQ ID NO: 1012053 - RNA, 22 nt, Human
cagaggcauacucccagucuug

SEQ ID NO: 1012054 - RNA, 22 nt, Human
aagcagaauuucccacuaguug

SEQ ID NO: 1012055 - RNA, 22 nt, Human
agucccagugacuuggccagaa

SEQ ID NO: 1012056 - RNA, 22 nt, Human
gggagggauuaguucugccugg

SEQ ID NO: 1012057 - RNA, 22 nt, Human
ugcugccaggucuugcugucca

SEQ ID NO: 1012058 - RNA, 22 nt, Human
ccuggagcuuggucacgcugcg

SEQ ID NO: 1012059 - RNA, 22 nt, Human
gcaggcugaugacuggaguugg

SEQ ID NO: 1012060 - RNA, 22 nt, Human
gaggcugccccuuccucagcug

SEQ ID NO: 1012061 - RNA, 22 nt, Human
uuaguuaguggggcugucaguc

SEQ ID NO: 1012062 - RNA, 20 nt, Human
acccagcucugugcccuggg

SEQ ID NO: 1012063 - RNA, 22 nt, Human
uuacuuugaugaucaaugagcg

SEQ ID NO: 1012064 - RNA, 22 nt, Human
agagacaggguuuugccauguu

SEQ ID NO: 1012065 - RNA, 22 nt, Human
uggcuccuucauucuccugcca

SEQ ID NO: 1012066 - RNA, 22 nt, Human
cagagggagcccuccaggagca

SEQ ID NO: 1012067 - RNA, 22 nt, Human
auuuccaguccuaaugaucugg

SEQ ID NO: 1012068 - RNA, 21 nt, Human
ucacaucuauguuaagcaaac

SEQ ID NO: 1012069 - RNA, 22 nt, Human
acaaaugcagcauaaagugaac

SEQ ID NO: 1012070 - RNA, 22 nt, Human
uaacaucuuuagcagcucgaac

SEQ ID NO: 1012071 - RNA, 22 nt, Human
agcagccaguucucugugguag

SEQ ID NO: 1012072 - RNA, 22 nt, Human
gauuucaaggauguuagaggug

SEQ ID NO: 1012073 - RNA, 22 nt, Human
gaggcugugugucccucuggac

SEQ ID NO: 1012074 - RNA, 22 nt, Human
auggccuccgacccaugacgug

SEQ ID NO: 1012075 - RNA, 22 nt, Human
ccuggcuggcaagaucgugaag

SEQ ID NO: 1012076 - RNA, 22 nt, Human
ccagcuuuuagugggcuuauua

SEQ ID NO: 1012077 - RNA, 22 nt, Human
uucuucuucaagugcugcauuc

SEQ ID NO: 1012078 - RNA, 22 nt, Human
gggcagcugccaagugcaucgc

SEQ ID NO: 1012079 - RNA, 22 nt, Human
aaauuagucgguuuaggaauuu

SEQ ID NO: 1012080 - RNA, 22 nt, Human
aggaagccuggggcugcccucg

SEQ ID NO: 1012081 - RNA, 22 nt, Human
uccucaggaucuaggagugcuu

SEQ ID NO: 1012082 - RNA, 19 nt, Human
aguguguacugaaagcacu

SEQ ID NO: 1012083 - RNA, 21 nt, Human
uucaagauauuuaaaaggugg

SEQ ID NO: 1012084 - RNA, 22 nt, Human
uaucuuguaauagguccacuug

SEQ ID NO: 1012085 - RNA, 20 nt, Human
cuguccccgaggucaccagg

SEQ ID NO: 1012086 - RNA, 22 nt, Human
ugccugggaaccaauccuggcu

SEQ ID NO: 1012087 - RNA, 22 nt, Human
aguguuugucccguuagaaaug

SEQ ID NO: 1012088 - RNA, 22 nt, Human
gaaugcacuuccaacaucuauu

SEQ ID NO: 1012089 - RNA, 22 nt, Human
ggccucugccucaucugggcac

SEQ ID NO: 1012090 - RNA, 22 nt, Human
cguuggagacacuugaggacuu

SEQ ID NO: 1012091 - RNA, 21 nt, Human
auuuucauuuccaggggagga

SEQ ID NO: 1012092 - RNA, 22 nt, Human
ugcugcuccccagcacacagca

SEQ ID NO: 1012093 - RNA, 22 nt, Human
uuagucuucuuccuuauauguu

SEQ ID NO: 1012094 - RNA, 22 nt, Human
ggagagagaugccgccuugcuc

SEQ ID NO: 1012095 - RNA, 22 nt, Human
agcuuuauuugucauucacggc

SEQ ID NO: 1012096 - RNA, 22 nt, Human
uuguuucugaguuuucauguau

SEQ ID NO: 1012097 - RNA, 22 nt, Human
uggcugcugcuuggucuucuuc

SEQ ID NO: 1012098 - RNA, 22 nt, Human
caacugagcaguagcgucugga

SEQ ID NO: 1012099 - RNA, 22 nt, Human
uggacucagugcugccauuccc

SEQ ID NO: 1012100 - RNA, 22 nt, Human
gagccuggauugaagugggugg

SEQ ID NO: 1012101 - RNA, 22 nt, Human
agggccagaggcaccuugcagc

SEQ ID NO: 1012102 - RNA, 22 nt, Human
accagguggccccagcgugguu

SEQ ID NO: 1012103 - RNA, 22 nt, Human
uccuugaauauaauaacaguag

SEQ ID NO: 1012104 - RNA, 22 nt, Human
cugggaggugaacagaaaaacu

SEQ ID NO: 1012105 - RNA, 22 nt, Human
ucuucagagugaaagucuguga

SEQ ID NO: 1012106 - RNA, 22 nt, Human
cugggccauggaagucucugcc

SEQ ID NO: 1012107 - RNA, 22 nt, Human
uuuccuguugccaucaagaaug

SEQ ID NO: 1012108 - RNA, 22 nt, Human
uagcauuaucugucuuaucauu

SEQ ID NO: 1012109 - RNA, 22 nt, Human
agucugucuacuuaaagucugu

SEQ ID NO: 1012110 - RNA, 22 nt, Human
agggacaguuacaucaucagac

SEQ ID NO: 1012111 - RNA, 22 nt, Human
gccagccccuuagggcucuccc

SEQ ID NO: 1012112 - RNA, 20 nt, Human
cugggcugcccagcuauggg

SEQ ID NO: 1012113 - RNA, 22 nt, Human
guccucugcuucaugcccugau

SEQ ID NO: 1012114 - RNA, 22 nt, Human
uuaacacaucccugcucuaccc

SEQ ID NO: 1012115 - RNA, 23 nt, Human
ggacagggcccugcccuauggcc

SEQ ID NO: 1012116 - RNA, 21 nt, Human
ugagagccuccaaccggcuac

SEQ ID NO: 1012117 - RNA, 22 nt, Human
cugggcuacguguugacagcau

SEQ ID NO: 1012118 - RNA, 22 nt, Human
agccagcuguacugccugcuca

SEQ ID NO: 1012119 - RNA, 22 nt, Human
ggauuucuuccuuccucagaag

SEQ ID NO: 1012120 - RNA, 22 nt, Human
cacaugcaucugucauguuugg

SEQ ID NO: 1012121 - RNA, 19 nt, Human
ucucaauguucagaaagcu

SEQ ID NO: 1012122 - RNA, 22 nt, Human
cugccuugaggagguuguggga

SEQ ID NO: 1012123 - RNA, 22 nt, Human
aucaguuuguauaugaaacacu

SEQ ID NO: 1012124 - RNA, 21 nt, Human
ugugucacuaacuagaggcua

SEQ ID NO: 1012125 - RNA, 22 nt, Human
uuauuuacaacucuucucuucc

SEQ ID NO: 1012126 - RNA, 21 nt, Human
acagagccgggcacaaagcug

SEQ ID NO: 1012127 - RNA, 20 nt, Human
ugcuccaucuaaagugauua

SEQ ID NO: 1012128 - RNA, 22 nt, Human
ucaaaguuuuugagaauuacau

SEQ ID NO: 1012129 - RNA, 22 nt, Human
ugagcccaggaguuggagaccg

SEQ ID NO: 1012130 - RNA, 22 nt, Human
agucaauuaucucuaggucauc

SEQ ID NO: 1012131 - RNA, 22 nt, Human
gccaugccugugucuccaggcc

SEQ ID NO: 1012132 - RNA, 22 nt, Human
guuuuauaggugaaauauuacu

SEQ ID NO: 1012133 - RNA, 22 nt, Human
auccaugauuaguaggauaaag

SEQ ID NO: 1012134 - RNA, 22 nt, Human
acugccauuggucaaaugagug

SEQ ID NO: 1012135 - RNA, 22 nt, Human
ggagugucagaaacaguguccu

SEQ ID NO: 1012136 - RNA, 22 nt, Human
auuaaauuuucacuaggcuccc

SEQ ID NO: 1012137 - RNA, 22 nt, Human
gcacugaaugcuuuuacuguaa

SEQ ID NO: 1012138 - RNA, 22 nt, Human
cccauuuaucccaagguuacuc

SEQ ID NO: 1012139 - RNA, 22 nt, Human
uaauuuacuugcaaauaacaau

SEQ ID NO: 1012140 - RNA, 22 nt, Human
aaaauggucucagcuggcacca

SEQ ID NO: 1012141 - RNA, 22 nt, Human
ugugccauuucuauucugcagc

SEQ ID NO: 1012142 - RNA, 22 nt, Human
uuaauuuuaaccuguuuguguc

SEQ ID NO: 1012143 - RNA, 20 nt, Human
cccuggagagaagcuccacg

SEQ ID NO: 1012144 - RNA, 22 nt, Human
gcccugcugucuucagaguaua

SEQ ID NO: 1012145 - RNA, 22 nt, Human
ggcucaggcuggagugcagugg

SEQ ID NO: 1012146 - RNA, 23 nt, Human
gugagucuugccuuugcugugga

SEQ ID NO: 1012147 - RNA, 22 nt, Human
uccauuuucuugcucuagguaa

SEQ ID NO: 1012148 - RNA, 22 nt, Human
agaagccauucccuguaggcuc

SEQ ID NO: 1012149 - RNA, 22 nt, Human
ccaggagcaaagaucacuggga

SEQ ID NO: 1012150 - RNA, 22 nt, Human
gaagagcuuagacagaaucaaa

SEQ ID NO: 1012151 - RNA, 22 nt, Human
cuauaauuaugcucaaaaugua

SEQ ID NO: 1012152 - RNA, 22 nt, Human
ugcugcugaucauuuauagucu

SEQ ID NO: 1012153 - RNA, 22 nt, Human
gccaggcugcuggcugcugucc

SEQ ID NO: 1012154 - RNA, 22 nt, Human
agcuggaggauaacucacuucu

SEQ ID NO: 1012155 - RNA, 22 nt, Human
uaugaacuguaacccucaccgc

SEQ ID NO: 1012156 - RNA, 22 nt, Human
gcacagaagagcuuuggaauga

SEQ ID NO: 1012157 - RNA, 22 nt, Human
acaauauuguacccagaaguuu

SEQ ID NO: 1012158 - RNA, 23 nt, Human
uguaaaaugggguaguguuacca

SEQ ID NO: 1012159 - RNA, 22 nt, Human
gcagcguggggcugagucagcu

SEQ ID NO: 1012160 - RNA, 21 nt, Human
uguucacauggagcagaaugu

SEQ ID NO: 1012161 - RNA, 22 nt, Human
gaggcaggcagauugcuugagg

SEQ ID NO: 1012162 - RNA, 22 nt, Human
ggcuucuccagguacugagcau

SEQ ID NO: 1012163 - RNA, 22 nt, Human
gcaaauauucaagacuuuucca

SEQ ID NO: 1012164 - RNA, 21 nt, Human
acagauauuucauugaacauu

SEQ ID NO: 1012165 - RNA, 22 nt, Human
ucucucagcuuugagaccugcu

SEQ ID NO: 1012166 - RNA, 22 nt, Human
aaaacuaaauacgcuuugccuc

SEQ ID NO: 1012167 - RNA, 20 nt, Human
uggaccugucucuuuaggga

SEQ ID NO: 1012168 - RNA, 22 nt, Human
uacauugugauguuucaauaca

SEQ ID NO: 1012169 - RNA, 22 nt, Human
uguguacauaucuauccuagau

SEQ ID NO: 1012170 - RNA, 23 nt, Human
ugagcccaggaggucaaggcugc

SEQ ID NO: 1012171 - RNA, 22 nt, Human
agcugggagcagagccacagcc

SEQ ID NO: 1012172 - RNA, 22 nt, Human
ugucuucagcaaaugccuuucu

SEQ ID NO: 1012173 - RNA, 22 nt, Human
agaccugcagggccaggccugc

SEQ ID NO: 1012174 - RNA, 22 nt, Human
uaauucagggccagaaucccca

SEQ ID NO: 1012175 - RNA, 22 nt, Human
uuuccucuucuggcaggcaggg

SEQ ID NO: 1012176 - RNA, 22 nt, Human
ccuguggcucucuuuggagguc

SEQ ID NO: 1012177 - RNA, 22 nt, Human
aggcugggcaccguuuugaucc

SEQ ID NO: 1012178 - RNA, 22 nt, Human
gacccagaaggagugcccuaga

SEQ ID NO: 1012179 - RNA, 22 nt, Human
ccagcccuccuccaucagagga

SEQ ID NO: 1012180 - RNA, 22 nt, Human
aaaggucauugaaaaggaggaa

SEQ ID NO: 1012181 - RNA, 20 nt, Human
uggagccacagucagguucc

SEQ ID NO: 1012182 - RNA, 22 nt, Human
uaaggccagccagcaaaucugu

SEQ ID NO: 1012183 - RNA, 22 nt, Human
aaaaguauuuauggcuauguaa

SEQ ID NO: 1012184 - RNA, 22 nt, Human
cugccagcucucuggaggcucu

SEQ ID NO: 1012185 - RNA, 21 nt, Human
gucagcagauccagcacuugu

SEQ ID NO: 1012186 - RNA, 22 nt, Human
ucuuagaaugucaacugauguu

SEQ ID NO: 1012187 - RNA, 19 nt, Human
cugaagucuuuucagcugg

SEQ ID NO: 1012188 - RNA, 22 nt, Human
gcagccacucucauuccacgug

SEQ ID NO: 1012189 - RNA, 20 nt, Human
cccagccccuaccuguugcc

SEQ ID NO: 1012190 - RNA, 22 nt, Human
aauguauuccucaugcaagagu

SEQ ID NO: 1012191 - RNA, 22 nt, Human
aaaaguuuaagacucauucuag

SEQ ID NO: 1012192 - RNA, 22 nt, Human
gucagcaggguccccuugagug

SEQ ID NO: 1012193 - RNA, 22 nt, Human
ugcucuguauucuauggcaguu

SEQ ID NO: 1012194 - RNA, 22 nt, Human
agggcugcugcuccgggcccag

SEQ ID NO: 1012195 - RNA, 22 nt, Human
ugagcuggucuugaguguagcu

SEQ ID NO: 1012196 - RNA, 22 nt, Human
uggccuggcccugaggcccugu

SEQ ID NO: 1012197 - RNA, 16 nt, Human
cuacccagugagaagg

SEQ ID NO: 1012198 - RNA, 22 nt, Human
ggccugagcuugggcagcguau

SEQ ID NO: 1012199 - RNA, 22 nt, Human
ggaggagacaguaaaaagcacg

SEQ ID NO: 1012200 - RNA, 22 nt, Human
gguuugaacagcuuuggagaag

SEQ ID NO: 1012201 - RNA, 22 nt, Human
aaaucugguucaguaaguccuc

SEQ ID NO: 1012202 - RNA, 22 nt, Human
aaguguuuacuuaaagucaugg

SEQ ID NO: 1012203 - RNA, 22 nt, Human
agcuucuugggcuuuacacaaa

SEQ ID NO: 1012204 - RNA, 22 nt, Human
uggguaaacugggucuggagag

SEQ ID NO: 1012205 - RNA, 22 nt, Human
caggcagccaggggaccugucc

SEQ ID NO: 1012206 - RNA, 22 nt, Human
uaauuuauuucaacugccaagg

SEQ ID NO: 1012207 - RNA, 22 nt, Human
aaauguguauaugaaacaugau

SEQ ID NO: 1012208 - RNA, 22 nt, Human
aguggccagugcugcucugggg

SEQ ID NO: 1012209 - RNA, 22 nt, Human
uuuugaauaauucagaaacagc

SEQ ID NO: 1012210 - RNA, 22 nt, Human
gaagcccauuuguacagcacau

SEQ ID NO: 1012211 - RNA, 22 nt, Human
uaaugcacauagaaguacuuag

SEQ ID NO: 1012212 - RNA, 22 nt, Human
cugcugugcauauuuaucuagg

SEQ ID NO: 1012213 - RNA, 22 nt, Human
accaggggaugguuggcacugu

SEQ ID NO: 1012214 - RNA, 22 nt, Human
gcucugggaacugacugccuuc

SEQ ID NO: 1012215 - RNA, 23 nt, Human
uucaagauacgguuuccaggcug

SEQ ID NO: 1012216 - RNA, 22 nt, Human
uugaaaggccuguuuauccagc

SEQ ID NO: 1012217 - RNA, 22 nt, Human
ucuugggaaauguuugcgagcu

SEQ ID NO: 1012218 - RNA, 22 nt, Human
uugaauaguuuuggauagcaua

SEQ ID NO: 1012219 - RNA, 22 nt, Human
gugggugauguacuggaggcca

SEQ ID NO: 1012220 - RNA, 22 nt, Human
cagcugagcaucacuagucugg

SEQ ID NO: 1012221 - RNA, 22 nt, Human
auucaguaggucuagaauaaga

SEQ ID NO: 1012222 - RNA, 22 nt, Human
auugaaaauauaauucuaggag

SEQ ID NO: 1012223 - RNA, 22 nt, Human
ucagcagggagaggagaaugca

SEQ ID NO: 1012224 - RNA, 22 nt, Human
acaggcagcgucauugcugcuc

SEQ ID NO: 1012225 - RNA, 17 nt, Human
cagugcagagcccuuuc

SEQ ID NO: 1012226 - RNA, 22 nt, Human
ccagcagcccacaggcgucccu

SEQ ID NO: 1012227 - RNA, 22 nt, Human
gcagccacacuguuacagaaug

SEQ ID NO: 1012228 - RNA, 22 nt, Human
aaaugccucugcuguacacaau

SEQ ID NO: 1012229 - RNA, 22 nt, Human
cuggagccgcauggagcaggga

SEQ ID NO: 1012230 - RNA, 22 nt, Human
gaggagggagcuggaagcucuu

SEQ ID NO: 1012231 - RNA, 22 nt, Human
cugagcccaggcgggagcugag

SEQ ID NO: 1012232 - RNA, 22 nt, Human
aaacuguaaacacagcaguaca

SEQ ID NO: 1012233 - RNA, 22 nt, Human
ugcugggcuaggguggagcucu

SEQ ID NO: 1012234 - RNA, 22 nt, Human
cuuugcaaacugucacacuuuc

SEQ ID NO: 1012235 - RNA, 22 nt, Human
uuugcuauuuuucugugcagcu

SEQ ID NO: 1012236 - RNA, 22 nt, Human
aggacccagaggcagaggacgu

SEQ ID NO: 1012237 - RNA, 22 nt, Human
uuuaguaaguucacugcaaagc

SEQ ID NO: 1012238 - RNA, 22 nt, Human
ugcaauaacuacuuuaauguug

SEQ ID NO: 1012239 - RNA, 22 nt, Human
uccucaggauguggaguagaau

SEQ ID NO: 1012240 - RNA, 22 nt, Human
uggcucagcuuacuuuugaggg

SEQ ID NO: 1012241 - RNA, 22 nt, Human
ugaagccacagagcaucugccu

SEQ ID NO: 1012242 - RNA, 22 nt, Human
auggaguucuuuaaauucacag

SEQ ID NO: 1012243 - RNA, 22 nt, Human
agagaaggucacuaaggaccca

SEQ ID NO: 1012244 - RNA, 22 nt, Human
ggagccugagcggcccagggcc

SEQ ID NO: 1012245 - RNA, 22 nt, Human
cugggagagaagcgaagcuggg

SEQ ID NO: 1012246 - RNA, 22 nt, Human
ugugccuucucaguccugcuca

SEQ ID NO: 1012247 - RNA, 22 nt, Human
ccagcuuuugcacuggacuggg

SEQ ID NO: 1012248 - RNA, 22 nt, Human
cuuuggcaaugaaacacaagaa

SEQ ID NO: 1012249 - RNA, 22 nt, Human
ccucugccugcacaucauccug

SEQ ID NO: 1012250 - RNA, 22 nt, Human
augggugugaaaauggucaucu

SEQ ID NO: 1012251 - RNA, 22 nt, Human
cauacaagcguucaauagaugu

SEQ ID NO: 1012252 - RNA, 22 nt, Human
gagcccuggcagucugggaugg

SEQ ID NO: 1012253 - RNA, 22 nt, Human
ccuucuucuguguggcccaaga

SEQ ID NO: 1012254 - RNA, 22 nt, Human
aucccugcccucauggagcuua

SEQ ID NO: 1012255 - RNA, 22 nt, Human
agacagagauacuauguuguca

SEQ ID NO: 1012256 - RNA, 22 nt, Human
acagaagagcacauuuaguaug

SEQ ID NO: 1012257 - RNA, 22 nt, Human
gcucagagaugucugcugccuu

SEQ ID NO: 1012258 - RNA, 22 nt, Human
uuuaacagaugcuaugucuacc

SEQ ID NO: 1012259 - RNA, 22 nt, Human
gagguggguguaucacagguca

SEQ ID NO: 1012260 - RNA, 22 nt, Human
agucaguguagaaagcccaggc

SEQ ID NO: 1012261 - RNA, 23 nt, Human
ucuuuccucagcacacaccaaga

SEQ ID NO: 1012262 - RNA, 22 nt, Human
acagaccaaaaaaggauauugg

SEQ ID NO: 1012263 - RNA, 23 nt, Human
agcccagcagagaaccuaggucc

SEQ ID NO: 1012264 - RNA, 22 nt, Human
uuuuugcaccaaccuaauagaa

SEQ ID NO: 1012265 - RNA, 22 nt, Human
uugcauaaaugcuuaaaauuug

SEQ ID NO: 1012266 - RNA, 22 nt, Human
auaaggcagugacuucaucuau

SEQ ID NO: 1012267 - RNA, 22 nt, Human
ucccugggccuccugcuaugca

SEQ ID NO: 1012268 - RNA, 22 nt, Human
acucuucuugcugcucauuaau

SEQ ID NO: 1012269 - RNA, 22 nt, Human
ccagaggcuggcaagggcuccu

SEQ ID NO: 1012270 - RNA, 22 nt, Human
uuuaauuuuccugguaggccug

SEQ ID NO: 1012271 - RNA, 22 nt, Human
acugucuuccaggucuggaggu

SEQ ID NO: 1012272 - RNA, 22 nt, Human
ucccacacagcccgcucaccgg

SEQ ID NO: 1012273 - RNA, 22 nt, Human
ggcagcaguggcugcuauuguc

SEQ ID NO: 1012274 - RNA, 18 nt, Human
uggagccauugccaccau

SEQ ID NO: 1012275 - RNA, 22 nt, Human
guuugucuuaauuaggcaucga

SEQ ID NO: 1012276 - RNA, 22 nt, Human
acagauauuuggggaaagacgu

SEQ ID NO: 1012277 - RNA, 22 nt, Human
acauuucuccuacuuguuauuu

SEQ ID NO: 1012278 - RNA, 22 nt, Human
aggaagcucggagagggcaaau

SEQ ID NO: 1012279 - RNA, 22 nt, Human
gccaggcagcugggagggugcc

SEQ ID NO: 1012280 - RNA, 22 nt, Human
aaugggaggauuuucucucuug

SEQ ID NO: 1012281 - RNA, 22 nt, Human
uuaacaauagaguuucuucagg

SEQ ID NO: 1012282 - RNA, 22 nt, Human
cagggcucgcucgcucgcucgc

SEQ ID NO: 1012283 - RNA, 22 nt, Human
gaaucacgguauucugcacggg

SEQ ID NO: 1012284 - RNA, 22 nt, Human
gcuggccuuugaggaagcugcg

SEQ ID NO: 1012285 - RNA, 20 nt, Human
cugcugugauucccuccucc

SEQ ID NO: 1012286 - RNA, 22 nt, Human
uuugcauugcagugguuuacag

SEQ ID NO: 1012287 - RNA, 22 nt, Human
acauauuuugaaagcuuucuaa

SEQ ID NO: 1012288 - RNA, 20 nt, Human
cugccaugauugauagagug

SEQ ID NO: 1012289 - RNA, 22 nt, Human
acaggccugacacacagagggc

SEQ ID NO: 1012290 - RNA, 22 nt, Human
ugcagaagaauguaggcauaag

SEQ ID NO: 1012291 - RNA, 22 nt, Human
gcauuuccugugcuuggcauau

SEQ ID NO: 1012292 - RNA, 17 nt, Human
cagggcugucugccuag

SEQ ID NO: 1012293 - RNA, 22 nt, Human
ucuuugaugugguuaauuauga

SEQ ID NO: 1012294 - RNA, 22 nt, Human
aaucaguuguccaaaguucaca

SEQ ID NO: 1012295 - RNA, 22 nt, Human
cugccuggagcauucugaaggu

SEQ ID NO: 1012296 - RNA, 22 nt, Human
uacaugaacaaaauagcagaaa

SEQ ID NO: 1012297 - RNA, 22 nt, Human
ucugauuagagcauucuugagu

SEQ ID NO: 1012298 - RNA, 22 nt, Human
cagcugaauucuucagacucca

SEQ ID NO: 1012299 - RNA, 22 nt, Human
augagcugugggauuccagagg

SEQ ID NO: 1012300 - RNA, 22 nt, Human
uucuuuuccuacacagcgauuu

SEQ ID NO: 1012301 - RNA, 22 nt, Human
uaacagaaaagaacugaguuug

SEQ ID NO: 1012302 - RNA, 22 nt, Human
cucuucuugaaagaggaauuca

SEQ ID NO: 1012303 - RNA, 21 nt, Human
gcugcaucaaucuacccaggg

SEQ ID NO: 1012304 - RNA, 22 nt, Human
agcuugauuucucugcagugug

SEQ ID NO: 1012305 - RNA, 20 nt, Human
cacugaagacuucuugcuca

SEQ ID NO: 1012306 - RNA, 22 nt, Human
uuuacagaucuguugauuuguu

SEQ ID NO: 1012307 - RNA, 21 nt, Human
uuccagagauuguuucaccug

SEQ ID NO: 1012308 - RNA, 22 nt, Human
gcucucugccuuucucaaugac

SEQ ID NO: 1012309 - RNA, 22 nt, Human
uccaggcacagaguuggucagu

SEQ ID NO: 1012310 - RNA, 22 nt, Human
aaugucauugguaaagauuagg

SEQ ID NO: 1012311 - RNA, 22 nt, Human
cugcagccuccugggguacaug

SEQ ID NO: 1012312 - RNA, 22 nt, Human
acaaauguggacauggauaaug

SEQ ID NO: 1012313 - RNA, 22 nt, Human
gcagcuuucugggacagaaagg

SEQ ID NO: 1012314 - RNA, 22 nt, Human
gucagagagggcacgugcacac

SEQ ID NO: 1012315 - RNA, 22 nt, Human
aagccagggauuccugagggag

SEQ ID NO: 1012316 - RNA, 22 nt, Human
ggcugccucaaagcucaagcuc

SEQ ID NO: 1012317 - RNA, 22 nt, Human
ucugucacccgagcaggcgaga

SEQ ID NO: 1012318 - RNA, 22 nt, Human
cuacacaguucugccuaauggc

SEQ ID NO: 1012319 - RNA, 22 nt, Human
agagugaaguuuuugaaaguga

SEQ ID NO: 1012320 - RNA, 22 nt, Human
gcuggccugucuagagccuuac

SEQ ID NO: 1012321 - RNA, 20 nt, Human
ccuggaagagcuccccaggc

SEQ ID NO: 1012322 - RNA, 22 nt, Human
agcccaaggcuucccugcuggc

SEQ ID NO: 1012323 - RNA, 22 nt, Human
uuauguacucugcaauguuuga

SEQ ID NO: 1012324 - RNA, 22 nt, Human
uaguaacagauuuauacagucu

SEQ ID NO: 1012325 - RNA, 22 nt, Human
ccagcuuuccaggguugacugg

SEQ ID NO: 1012326 - RNA, 22 nt, Human
acgugcaggaucugguuggcga

SEQ ID NO: 1012327 - RNA, 22 nt, Human
cagcaucaccgccauuucugau

SEQ ID NO: 1012328 - RNA, 22 nt, Human
aacaacugaaaagcuuuuucug

SEQ ID NO: 1012329 - RNA, 22 nt, Human
ccugccaggagcuggugcugca

SEQ ID NO: 1012330 - RNA, 22 nt, Human
ugcagccaucgcagagucugua

SEQ ID NO: 1012331 - RNA, 22 nt, Human
gcaguaaaaaaggauaugugca

SEQ ID NO: 1012332 - RNA, 22 nt, Human
ggaggccaccugaccugcuguu

SEQ ID NO: 1012333 - RNA, 22 nt, Human
ccuggauucaagucuuucuuuc

SEQ ID NO: 1012334 - RNA, 22 nt, Human
gcagcuuuguggagaggcccau

SEQ ID NO: 1012335 - RNA, 22 nt, Human
gggucccaggaaggagcagugu

SEQ ID NO: 1012336 - RNA, 22 nt, Human
gcagcuuggauuucuguaguuu

SEQ ID NO: 1012337 - RNA, 22 nt, Human
agacagugcaagaagagcaggc

SEQ ID NO: 1012338 - RNA, 22 nt, Human
gaaugaauucagcacauggaau

SEQ ID NO: 1012339 - RNA, 22 nt, Human
cccaggcagccugcagggaagg

SEQ ID NO: 1012340 - RNA, 22 nt, Human
ugccaggagagugcaugcaggg

SEQ ID NO: 1012341 - RNA, 22 nt, Human
ucucauguauugcccuggugug

SEQ ID NO: 1012342 - RNA, 21 nt, Human
ucaggcaggcgcagagggaag

SEQ ID NO: 1012343 - RNA, 22 nt, Human
gucaccagugcuaagaggugga

SEQ ID NO: 1012344 - RNA, 22 nt, Human
ccagcugacgaugccuggucuc

SEQ ID NO: 1012345 - RNA, 19 nt, Human
uccugggcugggccagguc

SEQ ID NO: 1012346 - RNA, 23 nt, Human
gccucagagaaacagcugcacac

SEQ ID NO: 1012347 - RNA, 22 nt, Human
agagugaaaagcuagagcagua

SEQ ID NO: 1012348 - RNA, 20 nt, Human
ucuguucaaaucuuaguucc

SEQ ID NO: 1012349 - RNA, 20 nt, Human
acuugcugggcuuuguuacc

SEQ ID NO: 1012350 - RNA, 22 nt, Human
accugagggcccaaacuuggua

SEQ ID NO: 1012351 - RNA, 23 nt, Human
uaguuauuuucucuguaauuugc

SEQ ID NO: 1012352 - RNA, 22 nt, Human
uaauguguugaauauuuguaca

SEQ ID NO: 1012353 - RNA, 22 nt, Human
cauaugaaauaugaguugaaca

SEQ ID NO: 1012354 - RNA, 22 nt, Human
auuucccagcuuugaucaguuu

SEQ ID NO: 1012355 - RNA, 22 nt, Human
guaaaauucuagcaucugaaag

SEQ ID NO: 1012356 - RNA, 22 nt, Human
uuuuaucugcuucauuaguuga

SEQ ID NO: 1012357 - RNA, 19 nt, Human
ccaguagagacagcugcag

SEQ ID NO: 1012358 - RNA, 22 nt, Human
cagcaccaggcagaccuggagc

SEQ ID NO: 1012359 - RNA, 22 nt, Human
aagugguagacaaagauaauug

SEQ ID NO: 1012360 - RNA, 22 nt, Human
auccaguucucagugcuuacag

SEQ ID NO: 1012361 - RNA, 22 nt, Human
accucugcuucccggguucaag

SEQ ID NO: 1012362 - RNA, 22 nt, Human
uauuucuggcuuugagggugau

SEQ ID NO: 1012363 - RNA, 22 nt, Human
gcucccaccuuugcuaucagua

SEQ ID NO: 1012364 - RNA, 22 nt, Human
cucaggaugcaauuccaucaag

SEQ ID NO: 1012365 - RNA, 22 nt, Human
ucuuugcaugcauuuucccuua

SEQ ID NO: 1012366 - RNA, 22 nt, Human
gcuggaaggcuaggcucaguug

SEQ ID NO: 1012367 - RNA, 22 nt, Human
caguggaggcucaagugugcuu

SEQ ID NO: 1012368 - RNA, 22 nt, Human
augacaugaccugguagagaca

SEQ ID NO: 1012369 - RNA, 19 nt, Human
ucuggagcugaugcaggug

SEQ ID NO: 1012370 - RNA, 22 nt, Human
uaugcauacaaugagauauucc

SEQ ID NO: 1012371 - RNA, 22 nt, Human
ugaagcagcaaaugaugggaga

SEQ ID NO: 1012372 - RNA, 20 nt, Human
ucucugcuguccacauuugc

SEQ ID NO: 1012373 - RNA, 22 nt, Human
augaagucugcacaugcaugug

SEQ ID NO: 1012374 - RNA, 22 nt, Human
ugcuuuauuuuaaauaugccau

SEQ ID NO: 1012375 - RNA, 22 nt, Human
agcugguucagaaauuagaugg

SEQ ID NO: 1012376 - RNA, 22 nt, Human
cucuuucugauucgcugggacc

SEQ ID NO: 1012377 - RNA, 22 nt, Human
gcagccagccccucugaccucu

SEQ ID NO: 1012378 - RNA, 22 nt, Human
aggcugggaaauguauuccagc

SEQ ID NO: 1012379 - RNA, 22 nt, Human
guucauuuaugauguaacaugu

SEQ ID NO: 1012380 - RNA, 22 nt, Human
augugaaaaauuucuuauuaca

SEQ ID NO: 1012381 - RNA, 22 nt, Human
aggucacauggauaaugaucag

SEQ ID NO: 1012382 - RNA, 23 nt, Human
gccugggacugguagugugaccu

SEQ ID NO: 1012383 - RNA, 22 nt, Human
ucauaauacaaagaguucugca

SEQ ID NO: 1012384 - RNA, 22 nt, Human
ccaaagucuggagcagcagagc

SEQ ID NO: 1012385 - RNA, 22 nt, Human
uauuucugaauccaaaagguca

SEQ ID NO: 1012386 - RNA, 22 nt, Human
uggggcuccuccuggcaggagg

SEQ ID NO: 1012387 - RNA, 23 nt, Human
gcucugagggcuuaucccuccca

SEQ ID NO: 1012388 - RNA, 22 nt, Human
caagaugugccuaaucagaccu

SEQ ID NO: 1012389 - RNA, 22 nt, Human
uuuugaaagaguccugcuacag

SEQ ID NO: 1012390 - RNA, 22 nt, Human
aacaugaagguaggaugguuuu

SEQ ID NO: 1012391 - RNA, 22 nt, Human
ugguaauuuacgcauuucugua

SEQ ID NO: 1012392 - RNA, 22 nt, Human
auucuccagcucacuguccaua

SEQ ID NO: 1012393 - RNA, 22 nt, Human
gcucaggaaacagcagggcuug

SEQ ID NO: 1012394 - RNA, 22 nt, Human
cuucugaggcagcuauucaguu

SEQ ID NO: 1012395 - RNA, 22 nt, Human
acuuaaaaccagacagcgucau

SEQ ID NO: 1012396 - RNA, 22 nt, Human
ggcuggagugggcuccagaguu

SEQ ID NO: 1012397 - RNA, 22 nt, Human
cccuggaggcggagcuugcagu

SEQ ID NO: 1012398 - RNA, 22 nt, Human
ucacccuugauaauguucuucu

SEQ ID NO: 1012399 - RNA, 22 nt, Human
gcaccugauugauuucacugcu

SEQ ID NO: 1012400 - RNA, 22 nt, Human
ccuggccugugaaucugagagc

SEQ ID NO: 1012401 - RNA, 21 nt, Human
uccacaaguuagaaggaaauu

SEQ ID NO: 1012402 - RNA, 22 nt, Human
ccuggagcccaaggcagugaga

SEQ ID NO: 1012403 - RNA, 22 nt, Human
aggcuucuacguggucccaggg

SEQ ID NO: 1012404 - RNA, 22 nt, Human
ucagcuccacagcuccucugcc

SEQ ID NO: 1012405 - RNA, 22 nt, Human
gccuggaguacuccuugaagug

SEQ ID NO: 1012406 - RNA, 22 nt, Human
gcucccagggcagcgcagaaga

SEQ ID NO: 1012407 - RNA, 22 nt, Human
cugugucccuugucccagagcc

SEQ ID NO: 1012408 - RNA, 22 nt, Human
uacccagcuccucagaagacca

SEQ ID NO: 1012409 - RNA, 22 nt, Human
uaaaugugcacagguuagaagg

SEQ ID NO: 1012410 - RNA, 22 nt, Human
cagucucuaaaucaaucugaau

SEQ ID NO: 1012411 - RNA, 18 nt, Human
ugucucaggcugaaacag

SEQ ID NO: 1012412 - RNA, 22 nt, Human
aaaugcagguucuugagccaag

SEQ ID NO: 1012413 - RNA, 22 nt, Human
aaaguguacuaugucaugaaca

SEQ ID NO: 1012414 - RNA, 21 nt, Human
uugcaccaugauaaauucaga

SEQ ID NO: 1012415 - RNA, 22 nt, Human
guguauaacuaucuaucuagua

SEQ ID NO: 1012416 - RNA, 22 nt, Human
ggccagcagucacagggucaga

SEQ ID NO: 1012417 - RNA, 17 nt, Human
uguggccuucugagcuu

SEQ ID NO: 1012418 - RNA, 22 nt, Human
ugucagaggcucagggucucag

SEQ ID NO: 1012419 - RNA, 22 nt, Human
ucaagagacaggacguguuuca

SEQ ID NO: 1012420 - RNA, 22 nt, Human
gcugagggcuguaacagcagag

SEQ ID NO: 1012421 - RNA, 22 nt, Human
cugaggccagcugcagagcucu

SEQ ID NO: 1012422 - RNA, 22 nt, Human
aucuacaggcugaggugggagg

SEQ ID NO: 1012423 - RNA, 22 nt, Human
uguauuuuuaggaaugcgcuau

SEQ ID NO: 1012424 - RNA, 20 nt, Human
aggcccugccagggacggag

SEQ ID NO: 1012425 - RNA, 22 nt, Human
ccuuucucuaucgacccaucgc

SEQ ID NO: 1012426 - RNA, 22 nt, Human
aaucaguuucuuggcaaguuua

SEQ ID NO: 1012427 - RNA, 22 nt, Human
acacuuuacagcuuccuuugca

SEQ ID NO: 1012428 - RNA, 22 nt, Human
caggaaauaucuccuggcagag

SEQ ID NO: 1012429 - RNA, 22 nt, Human
aagaugauagaucugucaaugu

SEQ ID NO: 1012430 - RNA, 18 nt, Human
gugcugugggcaguggcc

SEQ ID NO: 1012431 - RNA, 22 nt, Human
cugggagacaagagagggcuga

SEQ ID NO: 1012432 - RNA, 22 nt, Human
ucaucugucccaggcuuuuuuc

SEQ ID NO: 1012433 - RNA, 22 nt, Human
ugggcaggaugcguugauucuu

SEQ ID NO: 1012434 - RNA, 22 nt, Human
gugccagggggcacugaacaga

SEQ ID NO: 1012435 - RNA, 22 nt, Human
cuucugggcauucagcugcaca

SEQ ID NO: 1012436 - RNA, 22 nt, Human
acugagcugcuugaagugaacu

SEQ ID NO: 1012437 - RNA, 22 nt, Human
cacucccuucaggagccuagga

SEQ ID NO: 1012438 - RNA, 22 nt, Human
uaucuuugcaaauaucucuaag

SEQ ID NO: 1012439 - RNA, 22 nt, Human
ccuugcugaccaucaccuuuga

SEQ ID NO: 1012440 - RNA, 22 nt, Human
auuuucagagacaucuggacuu

SEQ ID NO: 1012441 - RNA, 17 nt, Human
aggcugcugggccaggg

SEQ ID NO: 1012442 - RNA, 22 nt, Human
ugucccucauugacgcugugcc

SEQ ID NO: 1012443 - RNA, 22 nt, Human
cucaacagcucugccauacucc

SEQ ID NO: 1012444 - RNA, 22 nt, Human
uagaaacauguucuguucuguu

SEQ ID NO: 1012445 - RNA, 22 nt, Human
ggguagcaugugucagaguuug

SEQ ID NO: 1012446 - RNA, 21 nt, Human
ucagaguggaagacaguuuga

SEQ ID NO: 1012447 - RNA, 20 nt, Human
aggagcugaauuagaggguu

SEQ ID NO: 1012448 - RNA, 22 nt, Human
agggaccugucaaugacaguua

SEQ ID NO: 1012449 - RNA, 22 nt, Human
uacccagcaaucccuagagguu

SEQ ID NO: 1012450 - RNA, 22 nt, Human
ugcgcggcucagucaucuccag

SEQ ID NO: 1012451 - RNA, 22 nt, Human
cuuaagauuugcgauaccuaau

SEQ ID NO: 1012452 - RNA, 22 nt, Human
aagggagguaaagcuauuuaaa

SEQ ID NO: 1012453 - RNA, 22 nt, Human
agcccaggcagagggaugcuug

SEQ ID NO: 1012454 - RNA, 22 nt, Human
ugcuucaaguugaaauauucuu

SEQ ID NO: 1012455 - RNA, 22 nt, Human
cuggcugguuacuauuucuggu

SEQ ID NO: 1012456 - RNA, 22 nt, Human
ucucagagagaugaaacuucca

SEQ ID NO: 1012457 - RNA, 22 nt, Human
ugcuguagcccugcacagugca

SEQ ID NO: 1012458 - RNA, 22 nt, Human
uaaguaaauuuauaaugugauu

SEQ ID NO: 1012459 - RNA, 22 nt, Human
acccugagggguauagcagaag

SEQ ID NO: 1012460 - RNA, 22 nt, Human
uucauugugaacacauucugcc

SEQ ID NO: 1012461 - RNA, 22 nt, Human
ggaaaaggccacagggacacau

SEQ ID NO: 1012462 - RNA, 17 nt, Human
ugcauuguuggaaauuu

SEQ ID NO: 1012463 - RNA, 22 nt, Human
caguggcugugaccagggaccu

SEQ ID NO: 1012464 - RNA, 21 nt, Human
uccucugcucucauaccacaa

SEQ ID NO: 1012465 - RNA, 22 nt, Human
ugcagaagugagucaugaggaa

SEQ ID NO: 1012466 - RNA, 22 nt, Human
uagugcuuggcccuaccagaua

SEQ ID NO: 1012467 - RNA, 22 nt, Human
ggguaauuggggccuugcagug

SEQ ID NO: 1012468 - RNA, 19 nt, Human
agugucaucagcuacucag

SEQ ID NO: 1012469 - RNA, 22 nt, Human
ucaguuuuguauguuguaaguc

SEQ ID NO: 1012470 - RNA, 22 nt, Human
uuuaaauaggacuccugggggu

SEQ ID NO: 1012471 - RNA, 22 nt, Human
ucuguucauacagaguauagua

SEQ ID NO: 1012472 - RNA, 22 nt, Human
ggcagaccucuccagccccaca

SEQ ID NO: 1012473 - RNA, 22 nt, Human
ucuccuccuuuuuucaacauag

SEQ ID NO: 1012474 - RNA, 22 nt, Human
cagccugacaccagcuuugggc

SEQ ID NO: 1012475 - RNA, 22 nt, Human
gccaaaucuggauuuagcaaga

SEQ ID NO: 1012476 - RNA, 22 nt, Human
auguagcaucuauccugauaaa

SEQ ID NO: 1012477 - RNA, 22 nt, Human
cccaggagguggagguugcagc

SEQ ID NO: 1012478 - RNA, 22 nt, Human
gcucacugccauucucuagaug

SEQ ID NO: 1012479 - RNA, 22 nt, Human
uagggcuccacucccagagauu

SEQ ID NO: 1012480 - RNA, 22 nt, Human
gcugcugcgcuugucuacuguu

SEQ ID NO: 1012481 - RNA, 22 nt, Human
uagacacaagagaaggguauaa

SEQ ID NO: 1012482 - RNA, 22 nt, Human
aaggcacugacugugcagggga

SEQ ID NO: 1012483 - RNA, 17 nt, Human
gcuggcugacccaugcc

SEQ ID NO: 1012484 - RNA, 22 nt, Human
ucacaggguguacaucaccuau

SEQ ID NO: 1012485 - RNA, 22 nt, Human
ucaguuuugaaaacauugaaug

SEQ ID NO: 1012486 - RNA, 22 nt, Human
gggcugggauggcuugaagauu

SEQ ID NO: 1012487 - RNA, 22 nt, Human
ccucuucuaggacguccuugug

SEQ ID NO: 1012488 - RNA, 20 nt, Human
cccagggaccugagcuccau

SEQ ID NO: 1012489 - RNA, 22 nt, Human
ccuggagguggagguugcagug

SEQ ID NO: 1012490 - RNA, 22 nt, Human
agccacagucuguagccagcuu

SEQ ID NO: 1012491 - RNA, 22 nt, Human
uagcuuuaagaugagaugugga

SEQ ID NO: 1012492 - RNA, 22 nt, Human
augccuggacugacaugcacug

SEQ ID NO: 1012493 - RNA, 22 nt, Human
agggcuggccacaugauuuggu

SEQ ID NO: 1012494 - RNA, 22 nt, Human
uggaccugagccuggcccugcc

SEQ ID NO: 1012495 - RNA, 17 nt, Human
agcagcuggcacaggag

SEQ ID NO: 1012496 - RNA, 22 nt, Human
acaguaauauugaugcucguca

SEQ ID NO: 1012497 - RNA, 20 nt, Human
gccugcagguuggaugggau

SEQ ID NO: 1012498 - RNA, 22 nt, Human
ggacuggccggcgcugaggccc

SEQ ID NO: 1012499 - RNA, 22 nt, Human
uuugcauaaaggagcauuucuc

SEQ ID NO: 1012500 - RNA, 22 nt, Human
auuuaaugucgagcuauuguag

SEQ ID NO: 1012501 - RNA, 22 nt, Human
ggcuggcucagggcuugagaga

SEQ ID NO: 1012502 - RNA, 22 nt, Human
cuuauguauauuuggaacguac

SEQ ID NO: 1012503 - RNA, 22 nt, Human
gcucccagauuucagccuugug

SEQ ID NO: 1012504 - RNA, 22 nt, Human
ugggaggaucgcuugagcccag

SEQ ID NO: 1012505 - RNA, 22 nt, Human
auaauuuaaauuaguaugugau

SEQ ID NO: 1012506 - RNA, 22 nt, Human
augggcagcagcugccauucau

SEQ ID NO: 1012507 - RNA, 22 nt, Human
aagauuauggcagauaacaauu

SEQ ID NO: 1012508 - RNA, 22 nt, Human
acccugggucauauacagugug

SEQ ID NO: 1012509 - RNA, 22 nt, Human
aucagagaaguuucacuggcau

SEQ ID NO: 1012510 - RNA, 22 nt, Human
agcagagcccuuccauggccuu

SEQ ID NO: 1012511 - RNA, 19 nt, Human
aaaaacuuaguccagaaag

SEQ ID NO: 1012512 - RNA, 21 nt, Human
uguaaguuucaucugaauugg

SEQ ID NO: 1012513 - RNA, 22 nt, Human
aagccaggcaugcuuggacagu

SEQ ID NO: 1012514 - RNA, 22 nt, Human
agaaaucacaggaggcagaagg

SEQ ID NO: 1012515 - RNA, 22 nt, Human
gugggcuucuguuagggaggcu

SEQ ID NO: 1012516 - RNA, 22 nt, Human
gaaguucuuagucucauuugca

SEQ ID NO: 1012517 - RNA, 22 nt, Human
cagcuuuaggacucauaauaaa

SEQ ID NO: 1012518 - RNA, 22 nt, Human
ucauccagagcuucauaaguaa

SEQ ID NO: 1012519 - RNA, 18 nt, Human
ugucauugccagggaagc

SEQ ID NO: 1012520 - RNA, 22 nt, Human
uagaaaugcaguguacuguguc

SEQ ID NO: 1012521 - RNA, 22 nt, Human
uugaauaguguuuucaguauac

SEQ ID NO: 1012522 - RNA, 22 nt, Human
agggcucugagugggaaagagg

SEQ ID NO: 1012523 - RNA, 22 nt, Human
aagcugcccuguguuagaguuc

SEQ ID NO: 1012524 - RNA, 22 nt, Human
uagcuuuaggcacguuugaauu

SEQ ID NO: 1012525 - RNA, 22 nt, Human
gggagcuguaguccagauaccg

SEQ ID NO: 1012526 - RNA, 21 nt, Human
uucaaaguuugccuaaagauu

SEQ ID NO: 1012527 - RNA, 22 nt, Human
gcucccugcacucugcagcccu

SEQ ID NO: 1012528 - RNA, 22 nt, Human
augcugaggacaaagagaucaa

SEQ ID NO: 1012529 - RNA, 22 nt, Human
gcugcaggcgccugcggucucu

SEQ ID NO: 1012530 - RNA, 22 nt, Human
uucuccgcuaaguucucugcag

SEQ ID NO: 1012531 - RNA, 22 nt, Human
uguuuuauuucuccaagaggga

SEQ ID NO: 1012532 - RNA, 22 nt, Human
gcuuggaaguaggauugggaga

SEQ ID NO: 1012533 - RNA, 22 nt, Human
aaggcugccucugccagaggag

SEQ ID NO: 1012534 - RNA, 22 nt, Human
acauuuagcuguacaaucuaug

SEQ ID NO: 1012535 - RNA, 22 nt, Human
cugggcagugcagcuauagaac

SEQ ID NO: 1012536 - RNA, 22 nt, Human
agaauaaaucaaauguccugag

SEQ ID NO: 1012537 - RNA, 19 nt, Human
caucuggaugauucuccug

SEQ ID NO: 1012538 - RNA, 21 nt, Human
guauucuuuaugaagugaaaa

SEQ ID NO: 1012539 - RNA, 22 nt, Human
acaguuaucuuugaaauagaga

SEQ ID NO: 1012540 - RNA, 22 nt, Human
auuccaguuggguucuaauaca

SEQ ID NO: 1012541 - RNA, 22 nt, Human
ggccacuccgcugcuacuggaa

SEQ ID NO: 1012542 - RNA, 22 nt, Human
caggguggggaaauagcgcccu

SEQ ID NO: 1012543 - RNA, 22 nt, Human
augaaggcaguuaaacgucauc

SEQ ID NO: 1012544 - RNA, 22 nt, Human
cugccucuguugggcauggucu

SEQ ID NO: 1012545 - RNA, 22 nt, Human
gagccuccuccuggugugccga

SEQ ID NO: 1012546 - RNA, 23 nt, Human
uacaugcuauaauuucacccuca

SEQ ID NO: 1012547 - RNA, 22 nt, Human
cagagccaacgccaccugccca

SEQ ID NO: 1012548 - RNA, 22 nt, Human
aguaacuaugcuugagaaucag

SEQ ID NO: 1012549 - RNA, 22 nt, Human
acuuugaaggggaacauuuuaa

SEQ ID NO: 1012550 - RNA, 22 nt, Human
auguguagaacuguaaugccca

SEQ ID NO: 1012551 - RNA, 23 nt, Human
guggccuccccggaaugccucgc

SEQ ID NO: 1012552 - RNA, 22 nt, Human
gccagagccacuuuugggugau

SEQ ID NO: 1012553 - RNA, 22 nt, Human
aguguuccuugcuuucccagag

SEQ ID NO: 1012554 - RNA, 18 nt, Human
uguacaguuaugagcauu

SEQ ID NO: 1012555 - RNA, 22 nt, Human
ggggauggugggaaggcaaucu

SEQ ID NO: 1012556 - RNA, 22 nt, Human
ccagggugaccagcuggccuag

SEQ ID NO: 1012557 - RNA, 22 nt, Human
acaaaguuaacaguuggauagu

SEQ ID NO: 1012558 - RNA, 22 nt, Human
gagagcccugcuccuaucccag

SEQ ID NO: 1012559 - RNA, 22 nt, Human
gggcuacauugugagagaaguu

SEQ ID NO: 1012560 - RNA, 22 nt, Human
cauuuucaugaguuucuguuca

SEQ ID NO: 1012561 - RNA, 22 nt, Human
ggucccaguccucucccugcua

SEQ ID NO: 1012562 - RNA, 22 nt, Human
caugaaauugcuccuuuggugc

SEQ ID NO: 1012563 - RNA, 22 nt, Human
uccuucagugucccgcucaggu

SEQ ID NO: 1012564 - RNA, 22 nt, Human
uggccacagccucugccaguuc

SEQ ID NO: 1012565 - RNA, 22 nt, Human
ugggguggauagaaagugaugu

SEQ ID NO: 1012566 - RNA, 23 nt, Human
ggagugcaauggcgccaucucgg

SEQ ID NO: 1012567 - RNA, 22 nt, Human
ccugccuggcuuccagaagaga

SEQ ID NO: 1012568 - RNA, 22 nt, Human
aguaugaaccuggguucuggau

SEQ ID NO: 1012569 - RNA, 23 nt, Human
ggguccagagacaggcaugggug

SEQ ID NO: 1012570 - RNA, 23 nt, Human
gggauauggaccuuggaggaguc

SEQ ID NO: 1012571 - RNA, 22 nt, Human
cuuaacagagagaaguguugcu

SEQ ID NO: 1012572 - RNA, 22 nt, Human
gaaucauuuauuuuugacagca

SEQ ID NO: 1012573 - RNA, 22 nt, Human
aggacugggugcagagggcauc

SEQ ID NO: 1012574 - RNA, 22 nt, Human
aggccaggcaacauucugaagu

SEQ ID NO: 1012575 - RNA, 22 nt, Human
uuuugcuugagugcacaaaaug

SEQ ID NO: 1012576 - RNA, 22 nt, Human
cuuaauuuuuguaguagaugga

SEQ ID NO: 1012577 - RNA, 22 nt, Human
ugcauacacaagcauacaugua

SEQ ID NO: 1012578 - RNA, 22 nt, Human
aggcaucugaguuugcaagcuu

SEQ ID NO: 1012579 - RNA, 22 nt, Human
cagggcugguuugucgaagaaa

SEQ ID NO: 1012580 - RNA, 21 nt, Human
cuguccaguaauuccuggcac

SEQ ID NO: 1012581 - RNA, 22 nt, Human
uuuguaaagucuguucugaguu

SEQ ID NO: 1012582 - RNA, 22 nt, Human
cugguccuccuugccuucagau

SEQ ID NO: 1012583 - RNA, 22 nt, Human
gcagcugaaagggaucucuaca

SEQ ID NO: 1012584 - RNA, 22 nt, Human
cucagagucugcauuucuguca

SEQ ID NO: 1012585 - RNA, 22 nt, Human
aggaaaaaagucugugauuaua

SEQ ID NO: 1012586 - RNA, 23 nt, Human
gagcugggauacaggcuuacugc

SEQ ID NO: 1012587 - RNA, 22 nt, Human
augaagcugguuuuggcuuggg

SEQ ID NO: 1012588 - RNA, 22 nt, Human
gcacagccagcaucugagggau

SEQ ID NO: 1012589 - RNA, 22 nt, Human
aucauuccacauguaccacuag

SEQ ID NO: 1012590 - RNA, 22 nt, Human
uuuaaucaggcaaagcauaaua

SEQ ID NO: 1012591 - RNA, 22 nt, Human
aagaugcagcuuuacaauaagg

SEQ ID NO: 1012592 - RNA, 22 nt, Human
ugacagcauaacacuggucuug

SEQ ID NO: 1012593 - RNA, 22 nt, Human
uccagcagggaauuaguagucu

SEQ ID NO: 1012594 - RNA, 22 nt, Human
ccuggccuuaagggcagggagc

SEQ ID NO: 1012595 - RNA, 22 nt, Human
acagcuggcaggggggcaugaa

SEQ ID NO: 1012596 - RNA, 22 nt, Human
ugccucagaguugucccuacca

SEQ ID NO: 1012597 - RNA, 22 nt, Human
cuggguggcgucuggggccagu

SEQ ID NO: 1012598 - RNA, 22 nt, Human
cugcaggcccccuuccuggagu

SEQ ID NO: 1012599 - RNA, 22 nt, Human
cuggggugugcucagagcaggg

SEQ ID NO: 1012600 - RNA, 22 nt, Human
cuggagcaggcuugucccagcu

SEQ ID NO: 1012601 - RNA, 22 nt, Human
ugugucagagguagagauggca

SEQ ID NO: 1012602 - RNA, 22 nt, Human
auuucuguauccugcugucaga

SEQ ID NO: 1012603 - RNA, 22 nt, Human
agccuggagcuugaguuaugag

SEQ ID NO: 1012604 - RNA, 22 nt, Human
uaggaaaugcuccauugcauaa

SEQ ID NO: 1012605 - RNA, 22 nt, Human
agggaauguagcaagaugccaa

SEQ ID NO: 1012606 - RNA, 21 nt, Human
cugcaucucauagaacauguc

SEQ ID NO: 1012607 - RNA, 22 nt, Human
agucucagcaagcauggcuagu

SEQ ID NO: 1012608 - RNA, 22 nt, Human
cacagcugccauggcugcacuu

SEQ ID NO: 1012609 - RNA, 22 nt, Human
uaucaucuuguugucaugcagc

SEQ ID NO: 1012610 - RNA, 22 nt, Human
auaugugaaugauaucacuuug

SEQ ID NO: 1012611 - RNA, 22 nt, Human
ucucaggaucuaauacauggua

SEQ ID NO: 1012612 - RNA, 22 nt, Human
gccuggugguauccuggcaaga

SEQ ID NO: 1012613 - RNA, 22 nt, Human
uuaauacagucuccagaaguaa

SEQ ID NO: 1012614 - RNA, 22 nt, Human
uuagucaauagugaauauagag

SEQ ID NO: 1012615 - RNA, 22 nt, Human
cugccaaggcuggggaggacaa

SEQ ID NO: 1012616 - RNA, 22 nt, Human
cacugcuuaguugguaaaugug

SEQ ID NO: 1012617 - RNA, 21 nt, Human
uauuugcugccaucuuugagg

SEQ ID NO: 1012618 - RNA, 22 nt, Human
ugcugucccccgugucugggcu

SEQ ID NO: 1012619 - RNA, 17 nt, Human
uuuagaauacaauguuu

SEQ ID NO: 1012620 - RNA, 22 nt, Human
gcaggcagucaucuuucauauu

SEQ ID NO: 1012621 - RNA, 22 nt, Human
cagggugccaaagaacaaauau

SEQ ID NO: 1012622 - RNA, 22 nt, Human
aggcacugacaauucuggacug

SEQ ID NO: 1012623 - RNA, 22 nt, Human
ccagaggugcugggagaggucu

SEQ ID NO: 1012624 - RNA, 22 nt, Human
cagggcucaucugugugaccag

SEQ ID NO: 1012625 - RNA, 17 nt, Human
gagagcugcugcuuccg

SEQ ID NO: 1012626 - RNA, 22 nt, Human
cugagucucccggcaguggagg

SEQ ID NO: 1012627 - RNA, 22 nt, Human
auugacaagacaauggcucuua

SEQ ID NO: 1012628 - RNA, 22 nt, Human
cucaggccauucuuccagcugc

SEQ ID NO: 1012629 - RNA, 22 nt, Human
auacagaagaacuauagccacu

SEQ ID NO: 1012630 - RNA, 22 nt, Human
ccugggagguggagguugcagc

SEQ ID NO: 1012631 - RNA, 22 nt, Human
ugcagucuuccagcugcacaaa

SEQ ID NO: 1012632 - RNA, 22 nt, Human
cagaguucaaagccugcuggga

SEQ ID NO: 1012633 - RNA, 22 nt, Human
uggguagagacacagucugggg

SEQ ID NO: 1012634 - RNA, 22 nt, Human
ugcugcucuucaccauggccuc

SEQ ID NO: 1012635 - RNA, 22 nt, Human
agccugcaggaugggcagcacc

SEQ ID NO: 1012636 - RNA, 22 nt, Human
uauggcauauaguccagcauaa

SEQ ID NO: 1012637 - RNA, 22 nt, Human
gccugaaguuucaugccucuau

SEQ ID NO: 1012638 - RNA, 22 nt, Human
gcccucagcuccuggacacaug

SEQ ID NO: 1012639 - RNA, 22 nt, Human
uaccuugggcuauuaucuuuga

SEQ ID NO: 1012640 - RNA, 22 nt, Human
ggaaggaggaugcucuggccuu

SEQ ID NO: 1012641 - RNA, 22 nt, Human
ccugccugcggcccgcggggag

SEQ ID NO: 1012642 - RNA, 22 nt, Human
gagcucauucauucauugccug

SEQ ID NO: 1012643 - RNA, 22 nt, Human
guuagggagucagguggcucuu

SEQ ID NO: 1012644 - RNA, 22 nt, Human
augguguagcaugugauaugac

SEQ ID NO: 1012645 - RNA, 22 nt, Human
ggucagggcucuuccaguggcu

SEQ ID NO: 1012646 - RNA, 22 nt, Human
aaguuuuaacaaguacuuacua

SEQ ID NO: 1012647 - RNA, 21 nt, Human
ccaggguccagcugccauggu

SEQ ID NO: 1012648 - RNA, 19 nt, Human
uccucagugacaaccucag

SEQ ID NO: 1012649 - RNA, 22 nt, Human
uuuuacuuaauucuuggucaug

SEQ ID NO: 1012650 - RNA, 22 nt, Human
aggaccuggaucacagagaucu

SEQ ID NO: 1012651 - RNA, 22 nt, Human
aauucuguuacuaaugugaugu

SEQ ID NO: 1012652 - RNA, 22 nt, Human
aagaaucauccugcaagagucu

SEQ ID NO: 1012653 - RNA, 17 nt, Human
acacagccagguucucc

SEQ ID NO: 1012654 - RNA, 22 nt, Human
ugcuggaggaguuuacuguggc

SEQ ID NO: 1012655 - RNA, 22 nt, Human
gcacuaaaccaacauguaauaa

SEQ ID NO: 1012656 - RNA, 22 nt, Human
guuauauauaguauuucucuga

SEQ ID NO: 1012657 - RNA, 22 nt, Human
ugcuuuauucaggguuuacccc

SEQ ID NO: 1012658 - RNA, 22 nt, Human
ggagcacuauaauagagauuuu

SEQ ID NO: 1012659 - RNA, 22 nt, Human
cugccucuugacagaucguggc

SEQ ID NO: 1012660 - RNA, 22 nt, Human
ucaagauaccaccauuauaugu

SEQ ID NO: 1012661 - RNA, 22 nt, Human
cuucucagcauuuugucagucu

SEQ ID NO: 1012662 - RNA, 22 nt, Human
ugucauuuucuaaucuguuguc

SEQ ID NO: 1012663 - RNA, 17 nt, Human
uagagcugguucaggag

SEQ ID NO: 1012664 - RNA, 22 nt, Human
ggucaggguauaaucaagugag

SEQ ID NO: 1012665 - RNA, 22 nt, Human
aaaugcuguaacugauauucug

SEQ ID NO: 1012666 - RNA, 22 nt, Human
ugaggccagugacauauauuaa

SEQ ID NO: 1012667 - RNA, 22 nt, Human
acugagcugugacaaugcuuaa

SEQ ID NO: 1012668 - RNA, 22 nt, Human
acagagguguguguaggacagu

SEQ ID NO: 1012669 - RNA, 22 nt, Human
cuccucuggcuuccuggaggca

SEQ ID NO: 1012670 - RNA, 22 nt, Human
ucaucaaagcgcuuggaguagg

SEQ ID NO: 1012671 - RNA, 22 nt, Human
uuuuuccuaagcaguggagcug

SEQ ID NO: 1012672 - RNA, 20 nt, Human
agguauaagaaaugugauuu

SEQ ID NO: 1012673 - RNA, 22 nt, Human
ggcauccaguucugaucaacaa

SEQ ID NO: 1012674 - RNA, 22 nt, Human
ccucagagaaagguauggcuga

SEQ ID NO: 1012675 - RNA, 20 nt, Human
ucuguacacucaucuucugc

SEQ ID NO: 1012676 - RNA, 22 nt, Human
uugcuuuguuacugcaguuucc

SEQ ID NO: 1012677 - RNA, 22 nt, Human
agagaugucgccuugcccaggg

SEQ ID NO: 1012678 - RNA, 22 nt, Human
cauugcacuccaucuugggcaa

SEQ ID NO: 1012679 - RNA, 22 nt, Human
ucuguuuaggcaaaauagcuac

SEQ ID NO: 1012680 - RNA, 22 nt, Human
gcuggagccuucugcucuguug

SEQ ID NO: 1012681 - RNA, 22 nt, Human
aaugcuguaaagaugcuaucug

SEQ ID NO: 1012682 - RNA, 20 nt, Human
cacguuuuuccacuagcaaa

SEQ ID NO: 1012683 - RNA, 22 nt, Human
caggauccccaggucgccgucc

SEQ ID NO: 1012684 - RNA, 22 nt, Human
auuauuagugauguuguuacug

SEQ ID NO: 1012685 - RNA, 22 nt, Human
ucaauuaugccauugcaauauu

SEQ ID NO: 1012686 - RNA, 20 nt, Human
gugcuucagaagccauugcu

SEQ ID NO: 1012687 - RNA, 22 nt, Human
acaguaccugcucucaagcaaa

SEQ ID NO: 1012688 - RNA, 23 nt, Human
agagcuuucuaaaauguaaaucu

SEQ ID NO: 1012689 - RNA, 22 nt, Human
gcucacuggccugaagaggacg

SEQ ID NO: 1012690 - RNA, 18 nt, Human
aggcuucuuggcucaguc

SEQ ID NO: 1012691 - RNA, 22 nt, Human
augugcauuaaaugucaauguu

SEQ ID NO: 1012692 - RNA, 23 nt, Human
ucagugauguugaaccuagcagu

SEQ ID NO: 1012693 - RNA, 22 nt, Human
uaugaacauguucauugacuua

SEQ ID NO: 1012694 - RNA, 22 nt, Human
gucuucuuuaaccuacuaaagc

SEQ ID NO: 1012695 - RNA, 19 nt, Human
ccagagagcuagguacaga

SEQ ID NO: 1012696 - RNA, 22 nt, Human
ugcuagugcaggguuuucaguu

SEQ ID NO: 1012697 - RNA, 22 nt, Human
uggcucagccagcccuaggaac

SEQ ID NO: 1012698 - RNA, 22 nt, Human
ggaguucacugugcaggcucug

SEQ ID NO: 1012699 - RNA, 22 nt, Human
uccagacccaugacccugggga

SEQ ID NO: 1012700 - RNA, 21 nt, Human
cauugucgacauuuuccccuc

SEQ ID NO: 1012701 - RNA, 17 nt, Human
cccagagaugcugccuu

SEQ ID NO: 1012702 - RNA, 22 nt, Human
cagcucuggcgucagggagcga

SEQ ID NO: 1012703 - RNA, 22 nt, Human
ggcagaagauaggacagggaau

SEQ ID NO: 1012704 - RNA, 22 nt, Human
auucugucuaagcuggcuacgu

SEQ ID NO: 1012705 - RNA, 22 nt, Human
ccagaggucuccugcacgggau

SEQ ID NO: 1012706 - RNA, 22 nt, Human
ugcauuguuugauaggugaauu

SEQ ID NO: 1012707 - RNA, 21 nt, Human
aaagagcccgcugagagguuc

SEQ ID NO: 1012708 - RNA, 22 nt, Human
uucuuacuaguauguuucagca

SEQ ID NO: 1012709 - RNA, 20 nt, Human
cagcuuuagaucuuugauua

SEQ ID NO: 1012710 - RNA, 22 nt, Human
aagcagggugucuugacccaug

SEQ ID NO: 1012711 - RNA, 22 nt, Human
ggcucuggagcacagacgucug

SEQ ID NO: 1012712 - RNA, 22 nt, Human
agaggcugagaaacccucuucu

SEQ ID NO: 1012713 - RNA, 22 nt, Human
ccagugggugcugggcucugcc

SEQ ID NO: 1012714 - RNA, 22 nt, Human
ccugcugugaaacuggcauaug

SEQ ID NO: 1012715 - RNA, 22 nt, Human
uuguuucaaauauuucagaaua

SEQ ID NO: 1012716 - RNA, 22 nt, Human
agaaaugcucuuccugaccaga

SEQ ID NO: 1012717 - RNA, 22 nt, Human
ggcagcucaccucugguccagg

SEQ ID NO: 1012718 - RNA, 22 nt, Human
uaugcacauucacacaaaaaug

SEQ ID NO: 1012719 - RNA, 22 nt, Human
cagucccacuagugccaauacc

SEQ ID NO: 1012720 - RNA, 23 nt, Human
gggaccagcuagggcugugaccu

SEQ ID NO: 1012721 - RNA, 18 nt, Human
uccuccuuuggccuuuuc

SEQ ID NO: 1012722 - RNA, 22 nt, Human
uaaauuauggcuggcagagcag

SEQ ID NO: 1012723 - RNA, 22 nt, Human
gcguccagggaaggcccagcug

SEQ ID NO: 1012724 - RNA, 22 nt, Human
auacauacguacauacguaugu

SEQ ID NO: 1012725 - RNA, 22 nt, Human
ucugggagcacacgcagugauc

SEQ ID NO: 1012726 - RNA, 22 nt, Human
ucaggaucggccuuuuuuuaag

SEQ ID NO: 1012727 - RNA, 22 nt, Human
gggagggaaagcuugaucuguc

SEQ ID NO: 1012728 - RNA, 22 nt, Human
uccuccagugucuggggccuug

SEQ ID NO: 1012729 - RNA, 22 nt, Human
gcccugcugcuggcagaggcgc

SEQ ID NO: 1012730 - RNA, 22 nt, Human
ugcuuuauuuauaaaauagcaa

SEQ ID NO: 1012731 - RNA, 22 nt, Human
cccucugcaggcuggaccugcc

SEQ ID NO: 1012732 - RNA, 22 nt, Human
ccagaggugccacagaaagagc

SEQ ID NO: 1012733 - RNA, 22 nt, Human
ggcacucagagauucaggcugu

SEQ ID NO: 1012734 - RNA, 22 nt, Human
gaaaacacuuugaucugaaagu

SEQ ID NO: 1012735 - RNA, 22 nt, Human
caggugccucaggaugagacaa

SEQ ID NO: 1012736 - RNA, 22 nt, Human
gggcagaggggcgcuucccucu

SEQ ID NO: 1012737 - RNA, 22 nt, Human
agcuggccuccgggugccuggg

SEQ ID NO: 1012738 - RNA, 23 nt, Human
ugucccagagggagggauaggcu

SEQ ID NO: 1012739 - RNA, 22 nt, Human
cuggccuuuuguuucuggagaa

SEQ ID NO: 1012740 - RNA, 22 nt, Human
uugauacaggcucuauuucauc

SEQ ID NO: 1012741 - RNA, 22 nt, Human
cugaggcuuugugugcaugccu

SEQ ID NO: 1012742 - RNA, 22 nt, Human
acagaguacauucagagacuau

SEQ ID NO: 1012743 - RNA, 22 nt, Human
gugcauuuaggucacaugaugu

SEQ ID NO: 1012744 - RNA, 22 nt, Human
cugggagguggagguugcauug

SEQ ID NO: 1012745 - RNA, 22 nt, Human
gcagcugcaggcaggcuugcug

SEQ ID NO: 1012746 - RNA, 22 nt, Human
uggcuuucucccccagcuucuc

SEQ ID NO: 1012747 - RNA, 22 nt, Human
gagccugcccagcccuguccac

SEQ ID NO: 1012748 - RNA, 22 nt, Human
acagcagccuuguugguuucga

SEQ ID NO: 1012749 - RNA, 22 nt, Human
ccuuaaaagaacuaucucuucu

SEQ ID NO: 1012750 - RNA, 22 nt, Human
gccugccucaaaaucccaguuc

SEQ ID NO: 1012751 - RNA, 22 nt, Human
uuucuacagcuggugcaacuuu

SEQ ID NO: 1012752 - RNA, 22 nt, Human
gcucaggacccaggugugaccu

SEQ ID NO: 1012753 - RNA, 22 nt, Human
uaugcacauauaaccugcacug

SEQ ID NO: 1012754 - RNA, 22 nt, Human
gcagggugauagugaggcucag

SEQ ID NO: 1012755 - RNA, 22 nt, Human
ucagaaagaacacaggcaguag

SEQ ID NO: 1012756 - RNA, 22 nt, Human
uuguguccugauuugacacaau

SEQ ID NO: 1012757 - RNA, 22 nt, Human
ucugagcuggagcccaucaccu

SEQ ID NO: 1012758 - RNA, 22 nt, Human
agaauccugaugaaaaggagag

SEQ ID NO: 1012759 - RNA, 22 nt, Human
ggcagccaugcacgcugccugg

SEQ ID NO: 1012760 - RNA, 18 nt, Human
ccagguggugacagagau

SEQ ID NO: 1012761 - RNA, 22 nt, Human
cagaggcuaagaugagugggug

SEQ ID NO: 1012762 - RNA, 22 nt, Human
agucccagccuaggcugugcug

SEQ ID NO: 1012763 - RNA, 23 nt, Human
cauaaaauauuaguaugguagca

SEQ ID NO: 1012764 - RNA, 22 nt, Human
ucugcucugggccagcuauuaa

SEQ ID NO: 1012765 - RNA, 22 nt, Human
ucccagccggugccuggguccc

SEQ ID NO: 1012766 - RNA, 22 nt, Human
uauguacacauacacuuguaau

SEQ ID NO: 1012767 - RNA, 22 nt, Human
uaauuuaauccaaguguuacau

SEQ ID NO: 1012768 - RNA, 22 nt, Human
aaauuucuugaggcucucuagc

SEQ ID NO: 1012769 - RNA, 16 nt, Human
uucugucacguacggc

SEQ ID NO: 1012770 - RNA, 22 nt, Human
accucugcaaugcaaugucaug

SEQ ID NO: 1012771 - RNA, 22 nt, Human
gccugagaaggauaggaagcga

SEQ ID NO: 1012772 - RNA, 22 nt, Human
cccuugcacauuugucuuuaau

SEQ ID NO: 1012773 - RNA, 22 nt, Human
uauuuuaaagacugccagccua

SEQ ID NO: 1012774 - RNA, 22 nt, Human
uaacacugguauuucauuuagu

SEQ ID NO: 1012775 - RNA, 22 nt, Human
agggcagagcugucuaaauggc

SEQ ID NO: 1012776 - RNA, 22 nt, Human
cagagcuggcucugcauguaca

SEQ ID NO: 1012777 - RNA, 22 nt, Human
gccugcagcaugcuaggucuug

SEQ ID NO: 1012778 - RNA, 22 nt, Human
uccagggaccucccugagagcu

SEQ ID NO: 1012779 - RNA, 22 nt, Human
uugcauuuuuagaugcuucugu

SEQ ID NO: 1012780 - RNA, 22 nt, Human
ggccuggccuccagaugugggc

SEQ ID NO: 1012781 - RNA, 22 nt, Human
gcacccagagggcagggucucc

SEQ ID NO: 1012782 - RNA, 22 nt, Human
caggagugagaugcgaucacuu

SEQ ID NO: 1012783 - RNA, 17 nt, Human
ugauaguucauuuuaag

SEQ ID NO: 1012784 - RNA, 22 nt, Human
agagcuggcugcugcggugcuu

SEQ ID NO: 1012785 - RNA, 22 nt, Human
uuucaaauaccauaaaccuaau

SEQ ID NO: 1012786 - RNA, 22 nt, Human
ggguuucaugguucucacaaug

SEQ ID NO: 1012787 - RNA, 22 nt, Human
ugcccuuggguaacuugcugau

SEQ ID NO: 1012788 - RNA, 18 nt, Human
uccugccugcgggcuccc

SEQ ID NO: 1012789 - RNA, 22 nt, Human
aggaccuguaccucagcaucua

SEQ ID NO: 1012790 - RNA, 22 nt, Human
agggccugagcuggcugaccuc

SEQ ID NO: 1012791 - RNA, 22 nt, Human
ggagcagccuguguagacgggg

SEQ ID NO: 1012792 - RNA, 22 nt, Human
auaauuaauuucaguaaucucc

SEQ ID NO: 1012793 - RNA, 22 nt, Human
gcuucuauuauuuggagcugag

SEQ ID NO: 1012794 - RNA, 22 nt, Human
cuuauguauaauguuccacaua

SEQ ID NO: 1012795 - RNA, 22 nt, Human
gucucagauucagacaucuaca

SEQ ID NO: 1012796 - RNA, 22 nt, Human
ugccucugguuaucugguaccu

SEQ ID NO: 1012797 - RNA, 22 nt, Human
ucauggauggccgggaggugau

SEQ ID NO: 1012798 - RNA, 22 nt, Human
auugcaccuuggguuuugaaag

SEQ ID NO: 1012799 - RNA, 22 nt, Human
ugguaucagagccaucuguauu

SEQ ID NO: 1012800 - RNA, 22 nt, Human
aaucuguuuaguucugcguaug

SEQ ID NO: 1012801 - RNA, 22 nt, Human
acuuuguauaagacaauaaaga

SEQ ID NO: 1012802 - RNA, 22 nt, Human
uagcuuuaccauagaagaguau

SEQ ID NO: 1012803 - RNA, 22 nt, Human
uguacauagaucuugaaaauua

SEQ ID NO: 1012804 - RNA, 22 nt, Human
ucuccaagcagggcugcaaggc

SEQ ID NO: 1012805 - RNA, 22 nt, Human
ccaggccugcaucugcugcgca

SEQ ID NO: 1012806 - RNA, 22 nt, Human
uguuccauaaguggugcuuugu

SEQ ID NO: 1012807 - RNA, 22 nt, Human
cugggcagccucacacaauguu

SEQ ID NO: 1012808 - RNA, 23 nt, Human
ugugaaauuugaggucagugcuu

SEQ ID NO: 1012809 - RNA, 22 nt, Human
agcagaaccugcagaccugucu

SEQ ID NO: 1012810 - RNA, 22 nt, Human
ccucugaguccucccugguugc

SEQ ID NO: 1012811 - RNA, 22 nt, Human
uugaagcauuugcuauagcauu

SEQ ID NO: 1012812 - RNA, 22 nt, Human
acacagggcagagagcuggcuc

SEQ ID NO: 1012813 - RNA, 22 nt, Human
cucugaacucuugggcagcaug

SEQ ID NO: 1012814 - RNA, 22 nt, Human
cauggaaggcaaaagacacaga

SEQ ID NO: 1012815 - RNA, 22 nt, Human
ucagagucucccccaguuuggg

SEQ ID NO: 1012816 - RNA, 22 nt, Human
ggagcauguggggugagcaggg

SEQ ID NO: 1012817 - RNA, 22 nt, Human
ccugccugggcucacuugccag

SEQ ID NO: 1012818 - RNA, 22 nt, Human
agaaagaacguugguuaucuua

SEQ ID NO: 1012819 - RNA, 22 nt, Human
gcugagguaggagguugcagug

SEQ ID NO: 1012820 - RNA, 22 nt, Human
gcucugucuucagcacacagua

SEQ ID NO: 1012821 - RNA, 22 nt, Human
uccuugaacagagggccugggu

SEQ ID NO: 1012822 - RNA, 22 nt, Human
caguggaggccuugggaccuuu

SEQ ID NO: 1012823 - RNA, 22 nt, Human
aagugguaggaagagagcacug

SEQ ID NO: 1012824 - RNA, 22 nt, Human
gacccggcuccaggcccagcag

SEQ ID NO: 1012825 - RNA, 22 nt, Human
auggggcucugcggcugcuccc

SEQ ID NO: 1012826 - RNA, 22 nt, Human
uuguggcucgugagauguuagg

SEQ ID NO: 1012827 - RNA, 22 nt, Human
ugcucugugguccaagauggcu

SEQ ID NO: 1012828 - RNA, 22 nt, Human
ggguuggggcccagcagucugc

SEQ ID NO: 1012829 - RNA, 22 nt, Human
gagcuuccugaugccgaccagu

SEQ ID NO: 1012830 - RNA, 22 nt, Human
uguuccaauaaggaguugaaau

SEQ ID NO: 1012831 - RNA, 22 nt, Human
caauaguucgguccugaaggcc

SEQ ID NO: 1012832 - RNA, 22 nt, Human
aaguuucaugauguaauuauug

SEQ ID NO: 1012833 - RNA, 22 nt, Human
cggagcugccugccaagccugc

SEQ ID NO: 1012834 - RNA, 22 nt, Human
ccuccugguccagcaucucuuu

SEQ ID NO: 1012835 - RNA, 22 nt, Human
auucauucugaccucaagagaa

SEQ ID NO: 1012836 - RNA, 22 nt, Human
guguccaucagcagccacugug

SEQ ID NO: 1012837 - RNA, 22 nt, Human
uagggcucagagaaguggggcc

SEQ ID NO: 1012838 - RNA, 22 nt, Human
ggugggcaacauuuggccugag

SEQ ID NO: 1012839 - RNA, 20 nt, Human
acaauauguagaugaauagc

SEQ ID NO: 1012840 - RNA, 19 nt, Human
cugaggugcaguaagaggc

SEQ ID NO: 1012841 - RNA, 22 nt, Human
ucugggaaaugcuguuccuugu

SEQ ID NO: 1012842 - RNA, 22 nt, Human
gugggcuggacccuccugcucc

SEQ ID NO: 1012843 - RNA, 22 nt, Human
gacugccagaaugugaggccug

SEQ ID NO: 1012844 - RNA, 22 nt, Human
uuuccauguuggugaaaugagg

SEQ ID NO: 1012845 - RNA, 22 nt, Human
uuugaagucaggcuuucuaccc

SEQ ID NO: 1012846 - RNA, 22 nt, Human
cagcaagauuuuuaaagcaagg

SEQ ID NO: 1012847 - RNA, 22 nt, Human
cccagcagaaucugaugagggc

SEQ ID NO: 1012848 - RNA, 22 nt, Human
cccccaaggccaggcugagacc

SEQ ID NO: 1012849 - RNA, 22 nt, Human
ucuccucaccaccagcagcaga

SEQ ID NO: 1012850 - RNA, 22 nt, Human
agccuggccugggcaggcacau

SEQ ID NO: 1012851 - RNA, 22 nt, Human
gcugccugucccaggaugagga

SEQ ID NO: 1012852 - RNA, 22 nt, Human
gcuggccaggugcuuugguucu

SEQ ID NO: 1012853 - RNA, 22 nt, Human
ucacacagauugguagagcuga

SEQ ID NO: 1012854 - RNA, 22 nt, Human
agcuguguagggaaucagagaa

SEQ ID NO: 1012855 - RNA, 22 nt, Human
gcauuucuuccuggugugagcc

SEQ ID NO: 1012856 - RNA, 22 nt, Human
ggagaguggauuccagcuguau

SEQ ID NO: 1012857 - RNA, 22 nt, Human
acacagggcaaugcuuugaccu

SEQ ID NO: 1012858 - RNA, 22 nt, Human
acuguucaaguuuuaugcugga

SEQ ID NO: 1012859 - RNA, 22 nt, Human
uucugucauccuuucuagaugu

SEQ ID NO: 1012860 - RNA, 22 nt, Human
augaaaauguacauguguauaa

SEQ ID NO: 1012861 - RNA, 22 nt, Human
ccuggguggcagagguugcagu

SEQ ID NO: 1012862 - RNA, 21 nt, Human
augacagaugcugcagaucgu

SEQ ID NO: 1012863 - RNA, 22 nt, Human
agaccuggauuccaauccuacc

SEQ ID NO: 1012864 - RNA, 22 nt, Human
auguuucaaauauauagaguug

SEQ ID NO: 1012865 - RNA, 22 nt, Human
agaauucugacaauagaauugg

SEQ ID NO: 1012866 - RNA, 22 nt, Human
uuugcauuucucguaaggaaac

SEQ ID NO: 1012867 - RNA, 22 nt, Human
aguaaaauuguauuggaaaaca

SEQ ID NO: 1012868 - RNA, 22 nt, Human
agccugcuggaccaagcucaug

SEQ ID NO: 1012869 - RNA, 22 nt, Human
gcugucacacaugggaucucag

SEQ ID NO: 1012870 - RNA, 22 nt, Human
uucuuguauauaaaaaucauuu

SEQ ID NO: 1012871 - RNA, 22 nt, Human
gcacagaacuucucuuaguagg

SEQ ID NO: 1012872 - RNA, 22 nt, Human
cacccaggcuggagugcagggg

SEQ ID NO: 1012873 - RNA, 22 nt, Human
gaauauuuuuaaagggacuaau

SEQ ID NO: 1012874 - RNA, 22 nt, Human
uccaggcccauggagcagagcu

SEQ ID NO: 1012875 - RNA, 22 nt, Human
cuggagccuagguugaccuggg

SEQ ID NO: 1012876 - RNA, 22 nt, Human
ggcugggccagggccuguggac

SEQ ID NO: 1012877 - RNA, 22 nt, Human
uagagcugggcagugcucugag

SEQ ID NO: 1012878 - RNA, 22 nt, Human
ugucuuuggaauauuuagcuga

SEQ ID NO: 1012879 - RNA, 22 nt, Human
gcaggaugccagggcagcagcg

SEQ ID NO: 1012880 - RNA, 22 nt, Human
auguacaguuucuagacucaaa

SEQ ID NO: 1012881 - RNA, 19 nt, Human
augucuguugaauuucaua

SEQ ID NO: 1012882 - RNA, 22 nt, Human
aguguauugauuggaacagccu

SEQ ID NO: 1012883 - RNA, 22 nt, Human
agcacagguacggagaugcuac

SEQ ID NO: 1012884 - RNA, 22 nt, Human
agcccagguugaggcugcagug

SEQ ID NO: 1012885 - RNA, 22 nt, Human
gcccucugcacagcucugagca

SEQ ID NO: 1012886 - RNA, 22 nt, Human
acuuugaaacuaaaauucauua

SEQ ID NO: 1012887 - RNA, 22 nt, Human
cugagccagcuggcaugugcua

SEQ ID NO: 1012888 - RNA, 22 nt, Human
cauuuacuguugaaucccuagc

SEQ ID NO: 1012889 - RNA, 22 nt, Human
gcauucuuuuuaggagguuccu

SEQ ID NO: 1012890 - RNA, 22 nt, Human
aaauaauugaguuggucaauau

SEQ ID NO: 1012891 - RNA, 22 nt, Human
ucaggcagaccaccgugggcag

SEQ ID NO: 1012892 - RNA, 22 nt, Human
cagcuuuaccuuuaggaguaac

SEQ ID NO: 1012893 - RNA, 22 nt, Human
ccacccagcagaggaggcaaga

SEQ ID NO: 1012894 - RNA, 22 nt, Human
cauugacaguucuuuaaguugc

SEQ ID NO: 1012895 - RNA, 21 nt, Human
ucucugguuggaguugugcca

SEQ ID NO: 1012896 - RNA, 22 nt, Human
gccaagaguuuccagcugcaag

SEQ ID NO: 1012897 - RNA, 22 nt, Human
cagaacugggcagggagcagag

SEQ ID NO: 1012898 - RNA, 22 nt, Human
ccagguggugaaagugggcccu

SEQ ID NO: 1012899 - RNA, 22 nt, Human
cauugcacugcagcccgggcaa

SEQ ID NO: 1012900 - RNA, 22 nt, Human
aaaauucugucauuaaauugug

SEQ ID NO: 1012901 - RNA, 22 nt, Human
ggcacugaaccaggacacaagc

SEQ ID NO: 1012902 - RNA, 22 nt, Human
cuaaaugccuuuccuaccuaac

SEQ ID NO: 1012903 - RNA, 22 nt, Human
uuccuuaguguuagauucugug

SEQ ID NO: 1012904 - RNA, 22 nt, Human
augcuuuauuauuuugcaggga

SEQ ID NO: 1012905 - RNA, 22 nt, Human
cagagaaagaagcccauucauu

SEQ ID NO: 1012906 - RNA, 22 nt, Human
gcaaggagacuguagggccaag

SEQ ID NO: 1012907 - RNA, 22 nt, Human
uaaaugugcacuuuacuuuuca

SEQ ID NO: 1012908 - RNA, 22 nt, Human
auggcagggcagccucucagag

SEQ ID NO: 1012909 - RNA, 22 nt, Human
gccugagagacccauggggcaa

SEQ ID NO: 1012910 - RNA, 22 nt, Human
gcugugcuauaucucugagugu

SEQ ID NO: 1012911 - RNA, 22 nt, Human
ucucagggugaggaaagaauuu

SEQ ID NO: 1012912 - RNA, 22 nt, Human
ugguaauuaauuugauagguuc

SEQ ID NO: 1012913 - RNA, 22 nt, Human
gggccuccggggugagcugugg

SEQ ID NO: 1012914 - RNA, 22 nt, Human
gcuguucugcgucccaggcugg

SEQ ID NO: 1012915 - RNA, 22 nt, Human
gagggcugaugcuuacuuauuu

SEQ ID NO: 1012916 - RNA, 22 nt, Human
gcagccaccucccauggcgggg

SEQ ID NO: 1012917 - RNA, 22 nt, Human
cccugggacccgcugcagaggc

SEQ ID NO: 1012918 - RNA, 22 nt, Human
gcugccaugguccaggcuccag

SEQ ID NO: 1012919 - RNA, 22 nt, Human
ccaggguggaggcuggauggag

SEQ ID NO: 1012920 - RNA, 22 nt, Human
ucugggaacugagcuccccuag

SEQ ID NO: 1012921 - RNA, 22 nt, Human
aggcagcuggcagcacccaggg

SEQ ID NO: 1012922 - RNA, 22 nt, Human
caugcugugcaucuugaugacc

SEQ ID NO: 1012923 - RNA, 22 nt, Human
uaugcacacaucgcagcaggaa

SEQ ID NO: 1012924 - RNA, 19 nt, Human
uucaggauugacccuacug

SEQ ID NO: 1012925 - RNA, 22 nt, Human
uucugucagcugcuuugucuca

SEQ ID NO: 1012926 - RNA, 21 nt, Human
caguguggugaccagggucuc

SEQ ID NO: 1012927 - RNA, 22 nt, Human
ucuaaagaagaggguucugcgg

SEQ ID NO: 1012928 - RNA, 22 nt, Human
gaaauauugggacucagagcuu

SEQ ID NO: 1012929 - RNA, 22 nt, Human
gagaagccgagucagcugagcc

SEQ ID NO: 1012930 - RNA, 21 nt, Human
uugaaggaucacuucuguacc

SEQ ID NO: 1012931 - RNA, 22 nt, Human
aggcucagcccaagguggagag

SEQ ID NO: 1012932 - RNA, 22 nt, Human
gggcuucuagaccagcagugag

SEQ ID NO: 1012933 - RNA, 22 nt, Human
cccaggcagagagcuggugagc

SEQ ID NO: 1012934 - RNA, 22 nt, Human
uugggcuggcagagguggucuu

SEQ ID NO: 1012935 - RNA, 22 nt, Human
uaacacugauuuguucucaggg

SEQ ID NO: 1012936 - RNA, 22 nt, Human
uccaggaggugaggggaccaaa

SEQ ID NO: 1012937 - RNA, 22 nt, Human
aaaugucuuucaauagagaaau

SEQ ID NO: 1012938 - RNA, 22 nt, Human
ccagcucuuuuggcugagugag

SEQ ID NO: 1012939 - RNA, 22 nt, Human
ggcuccugggaugggacugagc

SEQ ID NO: 1012940 - RNA, 22 nt, Human
ucugggagcagaugaugguaua

SEQ ID NO: 1012941 - RNA, 22 nt, Human
caguucuuauuuggccaguguc

SEQ ID NO: 1012942 - RNA, 23 nt, Human
gccucugcagccuaguuaguguc

SEQ ID NO: 1012943 - RNA, 22 nt, Human
ucugucacccaggcuggagugc

SEQ ID NO: 1012944 - RNA, 22 nt, Human
uccaggagaggccugaccaggu

SEQ ID NO: 1012945 - RNA, 22 nt, Human
ugcuucaggaagaaacgccagg

SEQ ID NO: 1012946 - RNA, 22 nt, Human
ugacagcugagccccaggcaag

SEQ ID NO: 1012947 - RNA, 20 nt, Human
ugacucugcaaccgucucuc

SEQ ID NO: 1012948 - RNA, 22 nt, Human
cagcuuuguggccuugaccucg

SEQ ID NO: 1012949 - RNA, 22 nt, Human
agaucaaagccaugagagauuu

SEQ ID NO: 1012950 - RNA, 22 nt, Human
aucugucagccugggauuaggg

SEQ ID NO: 1012951 - RNA, 18 nt, Human
ucaagacaucaugaaaua

SEQ ID NO: 1012952 - RNA, 22 nt, Human
uaaggccagcaugaaugcagca

SEQ ID NO: 1012953 - RNA, 22 nt, Human
uacaaaguagaaauucaguaaa

SEQ ID NO: 1012954 - RNA, 22 nt, Human
uucacaauggcaaaccauuaaa

SEQ ID NO: 1012955 - RNA, 22 nt, Human
gugucaugggguuuguuauaca

SEQ ID NO: 1012956 - RNA, 22 nt, Human
ugccucugcugcuguggcauca

SEQ ID NO: 1012957 - RNA, 22 nt, Human
uugaagcaaggcgaaucuugug

SEQ ID NO: 1012958 - RNA, 22 nt, Human
uuucugaagauacagcuuugcu

SEQ ID NO: 1012959 - RNA, 22 nt, Human
gcuguguuggugaagcuguagc

SEQ ID NO: 1012960 - RNA, 22 nt, Human
uaauuucuucaucucugcagcu

SEQ ID NO: 1012961 - RNA, 21 nt, Human
cacaggugggucagugaggcc

SEQ ID NO: 1012962 - RNA, 22 nt, Human
agucccagugagaugaaccagg

SEQ ID NO: 1012963 - RNA, 22 nt, Human
cuguccuccggccaccuacagu

SEQ ID NO: 1012964 - RNA, 22 nt, Human
uucaaugauuuuuagggaucau

SEQ ID NO: 1012965 - RNA, 22 nt, Human
ucauacauaacuuguacaguga

SEQ ID NO: 1012966 - RNA, 22 nt, Human
agugcuuucccugaaaccuucc

SEQ ID NO: 1012967 - RNA, 22 nt, Human
agauacauugaguuuccuccug

SEQ ID NO: 1012968 - RNA, 22 nt, Human
ugcaacagacuuuauuaacucu

SEQ ID NO: 1012969 - RNA, 20 nt, Human
gagccuuccccucaccacug

SEQ ID NO: 1012970 - RNA, 22 nt, Human
gcugccugauuuacauagugaa

SEQ ID NO: 1012971 - RNA, 22 nt, Human
gccaggcaauguguuagaagcg

SEQ ID NO: 1012972 - RNA, 22 nt, Human
uuccugagggacuuuugagauu

SEQ ID NO: 1012973 - RNA, 22 nt, Human
ucauuuauaaggaugcaauuaa

SEQ ID NO: 1012974 - RNA, 22 nt, Human
gccuugggaaagugggaggaga

SEQ ID NO: 1012975 - RNA, 19 nt, Human
ccugcagggaugagagguu

SEQ ID NO: 1012976 - RNA, 23 nt, Human
uugauacagaagaaucaguuugu

SEQ ID NO: 1012977 - RNA, 19 nt, Human
ccaggaaccccuagcuacc

SEQ ID NO: 1012978 - RNA, 22 nt, Human
acugcuuuucagagucugccug

SEQ ID NO: 1012979 - RNA, 22 nt, Human
guuuuacacaccuaugaaagac

SEQ ID NO: 1012980 - RNA, 22 nt, Human
agcagccaggaaucugcagagc

SEQ ID NO: 1012981 - RNA, 22 nt, Human
ugggccuguugccugaguccau

SEQ ID NO: 1012982 - RNA, 22 nt, Human
cuggcucacuagcccugcccug

SEQ ID NO: 1012983 - RNA, 22 nt, Human
uaaucuguauuccuacuuugca

SEQ ID NO: 1012984 - RNA, 22 nt, Human
ucuacuuuucccuauacaguuu

SEQ ID NO: 1012985 - RNA, 22 nt, Human
ggaggugaggccguagggugug

SEQ ID NO: 1012986 - RNA, 20 nt, Human
ucucagcauaagaacccuuc

SEQ ID NO: 1012987 - RNA, 22 nt, Human
ugucugugaccucuuuggagcc

SEQ ID NO: 1012988 - RNA, 22 nt, Human
uggccugcagaggcuguggggc

SEQ ID NO: 1012989 - RNA, 18 nt, Human
gccuggcuucggagccgc

SEQ ID NO: 1012990 - RNA, 22 nt, Human
gcagcuggagcaucuucucauc

SEQ ID NO: 1012991 - RNA, 22 nt, Human
guggccugccagcagauggcgc

SEQ ID NO: 1012992 - RNA, 22 nt, Human
acacugaauauacaaugaauau

SEQ ID NO: 1012993 - RNA, 22 nt, Human
ucuguccauucagccauccauc

SEQ ID NO: 1012994 - RNA, 22 nt, Human
uccagagcagguggucagaagg

SEQ ID NO: 1012995 - RNA, 22 nt, Human
gagcacagcuggagguagcauu

SEQ ID NO: 1012996 - RNA, 15 nt, Human
ugauuuccuacuaac

SEQ ID NO: 1012997 - RNA, 23 nt, Human
aaugauuucaugaugauagcagc

SEQ ID NO: 1012998 - RNA, 22 nt, Human
cacaggccugucucuuucuaac

SEQ ID NO: 1012999 - RNA, 22 nt, Human
aaagucuuuauuuuguaucuuu

SEQ ID NO: 1013000 - RNA, 22 nt, Human
aggccuccugcagggaugagug

SEQ ID NO: 1013001 - RNA, 22 nt, Human
cuauugaauuaacuauuaaagu

SEQ ID NO: 1013002 - RNA, 22 nt, Human
uuugaaaguucuucugacacua

SEQ ID NO: 1013003 - RNA, 22 nt, Human
ggaaccaggaguuacacgaguu

SEQ ID NO: 1013004 - RNA, 23 nt, Human
aaacuacauuuauaguuuuucuc

SEQ ID NO: 1013005 - RNA, 22 nt, Human
ggcugcaggcagaggcugucug

SEQ ID NO: 1013006 - RNA, 22 nt, Human
aggguauaaagagcaagcagaa

SEQ ID NO: 1013007 - RNA, 22 nt, Human
gaugaaaaaagacgagcauaua

SEQ ID NO: 1013008 - RNA, 19 nt, Human
aggcugugagggaggacuc

SEQ ID NO: 1013009 - RNA, 22 nt, Human
ccacagggacuguuaaaacccu

SEQ ID NO: 1013010 - RNA, 21 nt, Human
aaggagccuaggaggcucagg

SEQ ID NO: 1013011 - RNA, 22 nt, Human
aaaaauaggucaaccguguaug

SEQ ID NO: 1013012 - RNA, 22 nt, Human
ggcccugggcagaggagugggc

SEQ ID NO: 1013013 - RNA, 22 nt, Human
auuuucaucauggguuuaacau

SEQ ID NO: 1013014 - RNA, 22 nt, Human
cauugaaaccuaacauaggcug

SEQ ID NO: 1013015 - RNA, 22 nt, Human
caggaaagguagucacaaugua

SEQ ID NO: 1013016 - RNA, 22 nt, Human
aaguuugcauagauuaagcauu

SEQ ID NO: 1013017 - RNA, 22 nt, Human
gaggucaggcuugcagcagggu

SEQ ID NO: 1013018 - RNA, 22 nt, Human
caguuucugggcguucacaggu

SEQ ID NO: 1013019 - RNA, 22 nt, Human
ugcaggagcugugcggugaggg

SEQ ID NO: 1013020 - RNA, 22 nt, Human
cuucagaaugggacuguguuug

SEQ ID NO: 1013021 - RNA, 22 nt, Human
cugccuggguucaaguccuguu

SEQ ID NO: 1013022 - RNA, 19 nt, Human
agaaaucucgagauuuguu

SEQ ID NO: 1013023 - RNA, 22 nt, Human
ccagagaguaggaggcauuauu

SEQ ID NO: 1013024 - RNA, 22 nt, Human
aauaucaguauauuguaucagu

SEQ ID NO: 1013025 - RNA, 22 nt, Human
aggccugaggaccuucuggagg

SEQ ID NO: 1013026 - RNA, 22 nt, Human
gaggaugugucuggucugggca

SEQ ID NO: 1013027 - RNA, 22 nt, Human
uagacacauccguggaagcuuc

SEQ ID NO: 1013028 - RNA, 22 nt, Human
uauaguacauggaaucuucaua

SEQ ID NO: 1013029 - RNA, 22 nt, Human
uguguauucagcaagcgaaaca

SEQ ID NO: 1013030 - RNA, 22 nt, Human
aauugucaaacacaaauaagag

SEQ ID NO: 1013031 - RNA, 22 nt, Human
acguguucaauuuccaucugac

SEQ ID NO: 1013032 - RNA, 22 nt, Human
aggccuuuguggagcucauggc

SEQ ID NO: 1013033 - RNA, 22 nt, Human
gugggagcauggucccagugcc

SEQ ID NO: 1013034 - RNA, 22 nt, Human
ugcacacaguucucaggaaaga

SEQ ID NO: 1013035 - RNA, 22 nt, Human
aauguaugaagguuccaguuuc

SEQ ID NO: 1013036 - RNA, 21 nt, Human
uucuucaguuuaauauaaaau

SEQ ID NO: 1013037 - RNA, 22 nt, Human
cuacuuuaauuuucugcagaga

SEQ ID NO: 1013038 - RNA, 22 nt, Human
gccuggcaaggcccuguugacu

SEQ ID NO: 1013039 - RNA, 22 nt, Human
uggcugccuagucccucagccu

SEQ ID NO: 1013040 - RNA, 22 nt, Human
acccagcuggaugcauggaggc

SEQ ID NO: 1013041 - RNA, 18 nt, Human
gagacacaagggccugga

SEQ ID NO: 1013042 - RNA, 22 nt, Human
acugcuuacccggccugacuuc

SEQ ID NO: 1013043 - RNA, 22 nt, Human
gcacugaaauuauaugcauuug

SEQ ID NO: 1013044 - RNA, 22 nt, Human
gcauggcagccaguacauggug

SEQ ID NO: 1013045 - RNA, 22 nt, Human
caggcacuagcagaaugaggcu

SEQ ID NO: 1013046 - RNA, 22 nt, Human
agggccagcccauaaugccaaa

SEQ ID NO: 1013047 - RNA, 22 nt, Human
ugcugggcuagaagcugaggcc

SEQ ID NO: 1013048 - RNA, 22 nt, Human
ggcagggguccugguguugacu

SEQ ID NO: 1013049 - RNA, 22 nt, Human
cacaugaugguggaagccauag

SEQ ID NO: 1013050 - RNA, 22 nt, Human
cuggagagaccgaaagaggcug

SEQ ID NO: 1013051 - RNA, 22 nt, Human
ggagcugcacgcucugaagccu

SEQ ID NO: 1013052 - RNA, 22 nt, Human
agaggcugcacuugcucaugau

SEQ ID NO: 1013053 - RNA, 22 nt, Human
ucugucacuuauuaagauggau

SEQ ID NO: 1013054 - RNA, 22 nt, Human
uauugacagagggucagaagag

SEQ ID NO: 1013055 - RNA, 22 nt, Human
ccaaagucagugcucagucguc

SEQ ID NO: 1013056 - RNA, 22 nt, Human
ccacuugugaaauaaucaaaua

SEQ ID NO: 1013057 - RNA, 22 nt, Human
auuaucuauguagaaugauuuu

SEQ ID NO: 1013058 - RNA, 22 nt, Human
uccugucuaaagaccugcaggc

SEQ ID NO: 1013059 - RNA, 22 nt, Human
agcagggcucuguggagggugg

SEQ ID NO: 1013060 - RNA, 22 nt, Human
uagugcuuaauaaauuucagaa

SEQ ID NO: 1013061 - RNA, 22 nt, Human
cuggcccagagagcagagcuua

SEQ ID NO: 1013062 - RNA, 22 nt, Human
uucucuuagcuguaaagucaau

SEQ ID NO: 1013063 - RNA, 22 nt, Human
uuugaaguguuauuucuaucac

SEQ ID NO: 1013064 - RNA, 22 nt, Human
aggcagcaauugaaaucauugu

SEQ ID NO: 1013065 - RNA, 22 nt, Human
gaggcccaguccugcaagcacg

SEQ ID NO: 1013066 - RNA, 22 nt, Human
aguuuuuccugauuuuacagaa

SEQ ID NO: 1013067 - RNA, 22 nt, Human
gaccaggagauuugagcuaggc

SEQ ID NO: 1013068 - RNA, 22 nt, Human
cagaguguugaccauaagccca

SEQ ID NO: 1013069 - RNA, 22 nt, Human
agauuucacaugcugcucuauu

SEQ ID NO: 1013070 - RNA, 22 nt, Human
ugcauauuguccuugauauuau

SEQ ID NO: 1013071 - RNA, 22 nt, Human
auauucuugugauuauaaagua

SEQ ID NO: 1013072 - RNA, 22 nt, Human
uuuuccucuguauuugaaaugc

SEQ ID NO: 1013073 - RNA, 22 nt, Human
gccaggcuccaggcccuccuga

SEQ ID NO: 1013074 - RNA, 22 nt, Human
auuccaguucuccucucuaaag

SEQ ID NO: 1013075 - RNA, 22 nt, Human
ugaggcuguucuaccagggcca

SEQ ID NO: 1013076 - RNA, 22 nt, Human
aggcccuggcacugccugggag

SEQ ID NO: 1013077 - RNA, 22 nt, Human
cugcucuguucccccaucaucu

SEQ ID NO: 1013078 - RNA, 22 nt, Human
cuuccaaacccaggguaugggc

SEQ ID NO: 1013079 - RNA, 22 nt, Human
aucagcaaucucguguauuagg

SEQ ID NO: 1013080 - RNA, 22 nt, Human
uucccaugccuggccccuaucc

SEQ ID NO: 1013081 - RNA, 22 nt, Human
auauguguacgugcaguauaua

SEQ ID NO: 1013082 - RNA, 22 nt, Human
ugacacagauuagagacauacc

SEQ ID NO: 1013083 - RNA, 22 nt, Human
uaaggccaauuaacaaccaggg

SEQ ID NO: 1013084 - RNA, 22 nt, Human
ccugucucccuggcauggcuca

SEQ ID NO: 1013085 - RNA, 22 nt, Human
aucuacauaaaacgaauacaua

SEQ ID NO: 1013086 - RNA, 22 nt, Human
cuugaaagucagcagaguggau

SEQ ID NO: 1013087 - RNA, 22 nt, Human
ggaugcaggacggcauggaugu

SEQ ID NO: 1013088 - RNA, 22 nt, Human
ccagccagcugcccuuggggcc

SEQ ID NO: 1013089 - RNA, 22 nt, Human
ugcagggaaaguguuggcagca

SEQ ID NO: 1013090 - RNA, 22 nt, Human
ggugcucaagagggcauccucu

SEQ ID NO: 1013091 - RNA, 22 nt, Human
aucaguuugauaauaaggcuug

SEQ ID NO: 1013092 - RNA, 22 nt, Human
ggccugagcagacagcaugaug

SEQ ID NO: 1013093 - RNA, 22 nt, Human
ucucugauguauaucagagaac

SEQ ID NO: 1013094 - RNA, 22 nt, Human
uguucuugggaaucuuacaguu

SEQ ID NO: 1013095 - RNA, 22 nt, Human
ggccuggaagaggacagagaaa

SEQ ID NO: 1013096 - RNA, 17 nt, Human
aaugaaugaauucuuug

SEQ ID NO: 1013097 - RNA, 20 nt, Human
ccaagagcaugcaugaggaa

SEQ ID NO: 1013098 - RNA, 22 nt, Human
guggccagaagacugcaaugcu

SEQ ID NO: 1013099 - RNA, 22 nt, Human
uguggagcacuguuccuggcau

SEQ ID NO: 1013100 - RNA, 22 nt, Human
caggcugaucagggcugggaug

SEQ ID NO: 1013101 - RNA, 22 nt, Human
uuucuuagcgaugcuugauaaa

SEQ ID NO: 1013102 - RNA, 22 nt, Human
uucuuucccuuccagcagcucc

SEQ ID NO: 1013103 - RNA, 22 nt, Human
gggcuccagcccgggaccaggu

SEQ ID NO: 1013104 - RNA, 22 nt, Human
guuuccaaccccaccaaagugc

SEQ ID NO: 1013105 - RNA, 22 nt, Human
uaguuaggaauagcagcgacuc

SEQ ID NO: 1013106 - RNA, 21 nt, Human
ucugucugguuuuagaguggc

SEQ ID NO: 1013107 - RNA, 22 nt, Human
uuugcauuuuagauuuaggccu

SEQ ID NO: 1013108 - RNA, 22 nt, Human
cagagcauuuggaagccacgug

SEQ ID NO: 1013109 - RNA, 22 nt, Human
ucaugcccagagcaguaaauua

SEQ ID NO: 1013110 - RNA, 21 nt, Human
uaagaacauuaucuucuuccu

SEQ ID NO: 1013111 - RNA, 22 nt, Human
agggcucuguccccagaggccc

SEQ ID NO: 1013112 - RNA, 22 nt, Human
agcucccagaaggcccugcgcc

SEQ ID NO: 1013113 - RNA, 21 nt, Human
ucugggcccaugcugccucac

SEQ ID NO: 1013114 - RNA, 22 nt, Human
auugaaagauauacuguucuca

SEQ ID NO: 1013115 - RNA, 22 nt, Human
cccugagaugccucacccuagu

SEQ ID NO: 1013116 - RNA, 22 nt, Human
agggcagaaaucgauuacaccu

SEQ ID NO: 1013117 - RNA, 22 nt, Human
caguuucucucaauaagcaucg

SEQ ID NO: 1013118 - RNA, 22 nt, Human
gcuggccuucugcagaguucug

SEQ ID NO: 1013119 - RNA, 22 nt, Human
agcaggguuuggggauuggcac

SEQ ID NO: 1013120 - RNA, 22 nt, Human
cccuggaguagcacugggucgc

SEQ ID NO: 1013121 - RNA, 22 nt, Human
uccaggcagggcagccaucaag

SEQ ID NO: 1013122 - RNA, 22 nt, Human
cugugucccaguaccuugggua

SEQ ID NO: 1013123 - RNA, 22 nt, Human
cacuacuugaaagaauuacaga

SEQ ID NO: 1013124 - RNA, 22 nt, Human
aaauuguugaucuacaguaagg

SEQ ID NO: 1013125 - RNA, 23 nt, Human
augcucugggcugugggaccugc

SEQ ID NO: 1013126 - RNA, 22 nt, Human
uuggaaagauuauuauuaugaa

SEQ ID NO: 1013127 - RNA, 22 nt, Human
guguacauauugagucugcuga

SEQ ID NO: 1013128 - RNA, 22 nt, Human
agucuacaaagaaaaguuauug

SEQ ID NO: 1013129 - RNA, 22 nt, Human
cugcacagagcagggcagacac

SEQ ID NO: 1013130 - RNA, 22 nt, Human
ccucccagugccuccagagcag

SEQ ID NO: 1013131 - RNA, 22 nt, Human
uugcaacaucugaacauuuauc

SEQ ID NO: 1013132 - RNA, 22 nt, Human
aggccuuccucggagacaggga

SEQ ID NO: 1013133 - RNA, 22 nt, Human
uggcccugcuuaugucucucuu

SEQ ID NO: 1013134 - RNA, 22 nt, Human
uguccucagauaugucuacucu

SEQ ID NO: 1013135 - RNA, 22 nt, Human
ccagggcaucacauccaguguu

SEQ ID NO: 1013136 - RNA, 22 nt, Human
auguguaggugaaucgaggcug

SEQ ID NO: 1013137 - RNA, 22 nt, Human
uauuaucauugguaauaugguc

SEQ ID NO: 1013138 - RNA, 22 nt, Human
gugugcaguagagaaagagcag

SEQ ID NO: 1013139 - RNA, 20 nt, Human
guugaaaguaauaugaugcu

SEQ ID NO: 1013140 - RNA, 22 nt, Human
agcacauucugccuugcuuugc

SEQ ID NO: 1013141 - RNA, 22 nt, Human
gggacagacccaugggccaggu

SEQ ID NO: 1013142 - RNA, 22 nt, Human
ccugaggcccuggcugugcuga

SEQ ID NO: 1013143 - RNA, 22 nt, Human
gguggggccugcuccagcggcc

SEQ ID NO: 1013144 - RNA, 22 nt, Human
ggacuggacucucaggcucaca

SEQ ID NO: 1013145 - RNA, 22 nt, Human
uggcagagcuggcugcggauga

SEQ ID NO: 1013146 - RNA, 22 nt, Human
ugccugcugcuaagcucuuugu

SEQ ID NO: 1013147 - RNA, 22 nt, Human
ccaguugguuucaaugggacag

SEQ ID NO: 1013148 - RNA, 17 nt, Human
cagcucugcaucuuccu

SEQ ID NO: 1013149 - RNA, 22 nt, Human
ucaauaaaauuguuuuccuauc

SEQ ID NO: 1013150 - RNA, 20 nt, Human
agacccucuggacugggccc

SEQ ID NO: 1013151 - RNA, 22 nt, Human
cugucucucuaggacacugggg

SEQ ID NO: 1013152 - RNA, 22 nt, Human
cagugagggcauucagugcugg

SEQ ID NO: 1013153 - RNA, 17 nt, Human
ucaggauccaggguucu

SEQ ID NO: 1013154 - RNA, 18 nt, Human
ugggcacaaugaacagca

SEQ ID NO: 1013155 - RNA, 22 nt, Human
guaucuuuuacaccaggaaauu

SEQ ID NO: 1013156 - RNA, 22 nt, Human
uugcauuguaggauguuagaag

SEQ ID NO: 1013157 - RNA, 22 nt, Human
uucuugcaggucacucacugag

SEQ ID NO: 1013158 - RNA, 20 nt, Human
uugauucaagggcugaugga

SEQ ID NO: 1013159 - RNA, 22 nt, Human
gcaggcugauagaggauuccau

SEQ ID NO: 1013160 - RNA, 22 nt, Human
ggccuuggggaggauggugucc

SEQ ID NO: 1013161 - RNA, 22 nt, Human
agcucccugagaugccacagca

SEQ ID NO: 1013162 - RNA, 22 nt, Human
uugaacaguuuugucagguuca

SEQ ID NO: 1013163 - RNA, 22 nt, Human
guccuggguccccgcaggucag

SEQ ID NO: 1013164 - RNA, 22 nt, Human
gcugccuguccugaggaguccg

SEQ ID NO: 1013165 - RNA, 22 nt, Human
acugccaaugguaguuugaugg

SEQ ID NO: 1013166 - RNA, 22 nt, Human
ucugagccguauggcuuggcua

SEQ ID NO: 1013167 - RNA, 22 nt, Human
aauaacuucauguaacauuuaa

SEQ ID NO: 1013168 - RNA, 22 nt, Human
agagguagagguugcagugagc

SEQ ID NO: 1013169 - RNA, 22 nt, Human
acaugauuuuuaaagagauaau

SEQ ID NO: 1013170 - RNA, 22 nt, Human
uccaugaggcagggaggcuggc

SEQ ID NO: 1013171 - RNA, 22 nt, Human
accucugccacuuucuaacucu

SEQ ID NO: 1013172 - RNA, 22 nt, Human
uccuuggggacgcugacaucgu

SEQ ID NO: 1013173 - RNA, 22 nt, Human
aggagcagaacuguuguggagg

SEQ ID NO: 1013174 - RNA, 22 nt, Human
auaaacaguagagaaagguggu

SEQ ID NO: 1013175 - RNA, 22 nt, Human
ggguccagcuacaucagggugg

SEQ ID NO: 1013176 - RNA, 22 nt, Human
cagcaaaauuugaggauugccu

SEQ ID NO: 1013177 - RNA, 20 nt, Human
uguacacaguacuuuacaau

SEQ ID NO: 1013178 - RNA, 22 nt, Human
augcugugagugugccgcagag

SEQ ID NO: 1013179 - RNA, 22 nt, Human
augauuuccaguuguugcuaag

SEQ ID NO: 1013180 - RNA, 22 nt, Human
uuuagacauggcuugcucacuu

SEQ ID NO: 1013181 - RNA, 22 nt, Human
aggucaccauggcaugcuccac

SEQ ID NO: 1013182 - RNA, 22 nt, Human
cugcagagguugguucuaagau

SEQ ID NO: 1013183 - RNA, 22 nt, Human
aauuuagauugauaaacaugga

SEQ ID NO: 1013184 - RNA, 22 nt, Human
gcaccugggcaaggauucagag

SEQ ID NO: 1013185 - RNA, 22 nt, Human
ugcugccuuagcagccaggcaa

SEQ ID NO: 1013186 - RNA, 22 nt, Human
agaggccuuucuguugagugaa

SEQ ID NO: 1013187 - RNA, 22 nt, Human
aaaugucugagacuucugaacu

SEQ ID NO: 1013188 - RNA, 22 nt, Human
ucuucacaugaccuucaugucu

SEQ ID NO: 1013189 - RNA, 22 nt, Human
agcagcucaaagccugcaagga

SEQ ID NO: 1013190 - RNA, 22 nt, Human
ccagagaggggaagggcuugcc

SEQ ID NO: 1013191 - RNA, 22 nt, Human
cacacauugaauucauucuugu

SEQ ID NO: 1013192 - RNA, 22 nt, Human
auuugucuuuggaccugugaga

SEQ ID NO: 1013193 - RNA, 22 nt, Human
gcuggcagggacagcugcgugu

SEQ ID NO: 1013194 - RNA, 19 nt, Human
ucuuuggcuaaauugggug

SEQ ID NO: 1013195 - RNA, 22 nt, Human
augaguucaauuguuucaguca

SEQ ID NO: 1013196 - RNA, 22 nt, Human
ggccugcugggccccacagucc

SEQ ID NO: 1013197 - RNA, 22 nt, Human
cuccagugagugagcaggcgac

SEQ ID NO: 1013198 - RNA, 22 nt, Human
auuugucugcuugcugccuucc

SEQ ID NO: 1013199 - RNA, 22 nt, Human
agcuugaguuuuggaugaagug

SEQ ID NO: 1013200 - RNA, 22 nt, Human
uaggccagaggagcagcuuugg

SEQ ID NO: 1013201 - RNA, 22 nt, Human
cacaauuuccuugcuucacuuu

SEQ ID NO: 1013202 - RNA, 22 nt, Human
ggucucagcccucgccagcagc

SEQ ID NO: 1013203 - RNA, 22 nt, Human
acugaaauacugcucuuggauu

SEQ ID NO: 1013204 - RNA, 20 nt, Human
aaucagaaagugugagcucu

SEQ ID NO: 1013205 - RNA, 22 nt, Human
auuuucaaaacaucugcugugu

SEQ ID NO: 1013206 - RNA, 22 nt, Human
gcagacaggcccaguggaggga

SEQ ID NO: 1013207 - RNA, 22 nt, Human
agguauauauucugguccuuau

SEQ ID NO: 1013208 - RNA, 22 nt, Human
agugucauuccagggacccucg

SEQ ID NO: 1013209 - RNA, 22 nt, Human
uccaugaguuugaggaaaagag

SEQ ID NO: 1013210 - RNA, 22 nt, Human
agugcuuuagagaaauggugcu

SEQ ID NO: 1013211 - RNA, 22 nt, Human
cccuggcagaaugucucugggc

SEQ ID NO: 1013212 - RNA, 22 nt, Human
gagugcaggccugagcaccauc

SEQ ID NO: 1013213 - RNA, 22 nt, Human
ugcaggugccucuugagcuugu

SEQ ID NO: 1013214 - RNA, 22 nt, Human
gaauucuuuucuuucugaaagu

SEQ ID NO: 1013215 - RNA, 22 nt, Human
ucucacuuuccagacuuuucaa

SEQ ID NO: 1013216 - RNA, 21 nt, Human
aggcacuguuugugguuuggg

SEQ ID NO: 1013217 - RNA, 22 nt, Human
auguguaaaaagugcuuaauau

SEQ ID NO: 1013218 - RNA, 22 nt, Human
acugaaggaaacuuuuguguuu

SEQ ID NO: 1013219 - RNA, 22 nt, Human
gccaggcauguccucugcagaa

SEQ ID NO: 1013220 - RNA, 22 nt, Human
uauacaauggcugaaucaucca

SEQ ID NO: 1013221 - RNA, 18 nt, Human
gaggauggaaggagaugc

SEQ ID NO: 1013222 - RNA, 22 nt, Human
cucugagcugaaacaugagcau

SEQ ID NO: 1013223 - RNA, 22 nt, Human
ugccuugguucucuacuuggag

SEQ ID NO: 1013224 - RNA, 22 nt, Human
aucucccagccacagcauucuu

SEQ ID NO: 1013225 - RNA, 22 nt, Human
ggcucugccugcccagcagcac

SEQ ID NO: 1013226 - RNA, 22 nt, Human
aaugcugcaagaggugaaaaga

SEQ ID NO: 1013227 - RNA, 22 nt, Human
ugcugucugcaacaguacuaca

SEQ ID NO: 1013228 - RNA, 22 nt, Human
aaaaugaugcuguaauuuggca

SEQ ID NO: 1013229 - RNA, 22 nt, Human
gcagaggccugaagguggcggg

SEQ ID NO: 1013230 - RNA, 22 nt, Human
ugggagcaagcuggugcuggag

SEQ ID NO: 1013231 - RNA, 22 nt, Human
gccuucagcggccgcucgcugc

SEQ ID NO: 1013232 - RNA, 22 nt, Human
uuucacaaucaaauggugaaau

SEQ ID NO: 1013233 - RNA, 22 nt, Human
aaagacugguguguuacauaua

SEQ ID NO: 1013234 - RNA, 22 nt, Human
aauuagggaggacaaagguaca

SEQ ID NO: 1013235 - RNA, 22 nt, Human
uuucaaaauuuugcagugguaa

SEQ ID NO: 1013236 - RNA, 22 nt, Human
uccaggcaaagggacuagcagg

SEQ ID NO: 1013237 - RNA, 22 nt, Human
auguuaaaugguuuauuauuaa

SEQ ID NO: 1013238 - RNA, 20 nt, Human
agggccugcucugugguguc

SEQ ID NO: 1013239 - RNA, 22 nt, Human
cugccucugcgucccacagagu

SEQ ID NO: 1013240 - RNA, 22 nt, Human
agcccaggaaucugcaucuuga

SEQ ID NO: 1013241 - RNA, 23 nt, Human
aggcuuccuaucuuagagcuggg

SEQ ID NO: 1013242 - RNA, 22 nt, Human
agaauaguggcaaugacugcac

SEQ ID NO: 1013243 - RNA, 22 nt, Human
gugugcagugagcaaaagaucu

SEQ ID NO: 1013244 - RNA, 22 nt, Human
aagcuuccugaaugcucauuua

SEQ ID NO: 1013245 - RNA, 22 nt, Human
uggcucaggaucuaagcagaau

SEQ ID NO: 1013246 - RNA, 22 nt, Human
cuaaaugacuuccagugguuau

SEQ ID NO: 1013247 - RNA, 22 nt, Human
acaggcacugucaagucaugaa

SEQ ID NO: 1013248 - RNA, 22 nt, Human
cugucuguuuuaccuucuccag

SEQ ID NO: 1013249 - RNA, 22 nt, Human
aaaauuuugcccuauccuucau

SEQ ID NO: 1013250 - RNA, 22 nt, Human
uggcagcuccuggggccagcac

SEQ ID NO: 1013251 - RNA, 22 nt, Human
ucuuaaaccacaaaauucagag

SEQ ID NO: 1013252 - RNA, 22 nt, Human
aguccaaggagagacagcauuu

SEQ ID NO: 1013253 - RNA, 21 nt, Human
cugccuugaaugguacuggga

SEQ ID NO: 1013254 - RNA, 22 nt, Human
uccuucaggguugaggccgacu

SEQ ID NO: 1013255 - RNA, 22 nt, Human
uagcugccuaugugauaagaga

SEQ ID NO: 1013256 - RNA, 22 nt, Human
ucugagggugggagaaggagcu

SEQ ID NO: 1013257 - RNA, 22 nt, Human
ucacuuauugcucaucucaugc

SEQ ID NO: 1013258 - RNA, 22 nt, Human
ggcugcagguugguuggcagcu

SEQ ID NO: 1013259 - RNA, 22 nt, Human
gauuucuugauaauucaaaucc

SEQ ID NO: 1013260 - RNA, 19 nt, Human
ccauggcaaugaucugaug

SEQ ID NO: 1013261 - RNA, 22 nt, Human
gcugucucggggcuuucuccug

SEQ ID NO: 1013262 - RNA, 22 nt, Human
gauguagagggaagauuuuaaa

SEQ ID NO: 1013263 - RNA, 23 nt, Human
acauacauggagauaaagugaug

SEQ ID NO: 1013264 - RNA, 22 nt, Human
auaugccauuagcuagaaauaa

SEQ ID NO: 1013265 - RNA, 22 nt, Human
ggccugcuuuccgagccugcag

SEQ ID NO: 1013266 - RNA, 22 nt, Human
uagcugcccaucuuuccuuuag

SEQ ID NO: 1013267 - RNA, 21 nt, Human
agcuggugucagagcucuggg

SEQ ID NO: 1013268 - RNA, 22 nt, Human
aguccagucucacucuuggcag

SEQ ID NO: 1013269 - RNA, 22 nt, Human
uggcugggccgggccuugugcc

SEQ ID NO: 1013270 - RNA, 22 nt, Human
ucaccaggcuggaaugcagugg

SEQ ID NO: 1013271 - RNA, 18 nt, Human
caugggugacagguggau

SEQ ID NO: 1013272 - RNA, 22 nt, Human
gugucccacucuggaggugaag

SEQ ID NO: 1013273 - RNA, 22 nt, Human
aggagagagaacacuugggucc

SEQ ID NO: 1013274 - RNA, 22 nt, Human
cagugagguggauggauggccu

SEQ ID NO: 1013275 - RNA, 22 nt, Human
uuccaguucccaugaggauuaa

SEQ ID NO: 1013276 - RNA, 23 nt, Human
uuaggcacuuaguagggccagag

SEQ ID NO: 1013277 - RNA, 22 nt, Human
uuucuuccuuaccuuacuagag

SEQ ID NO: 1013278 - RNA, 22 nt, Human
ucucacagugcaggucugucuc

SEQ ID NO: 1013279 - RNA, 22 nt, Human
uuguuuuuaugaacauccagga

SEQ ID NO: 1013280 - RNA, 22 nt, Human
ucaggauggcuucugcaucaaa

SEQ ID NO: 1013281 - RNA, 22 nt, Human
aggagccuccuucucaugugca

SEQ ID NO: 1013282 - RNA, 22 nt, Human
auucuuggagcagucaaagaag

SEQ ID NO: 1013283 - RNA, 22 nt, Human
uuuguuuagaaagagauuggug

SEQ ID NO: 1013284 - RNA, 22 nt, Human
uaauuuuacuuccugagcaccu

SEQ ID NO: 1013285 - RNA, 22 nt, Human
gaaaaugugucaucccuacugu

SEQ ID NO: 1013286 - RNA, 22 nt, Human
ccagguggaaggucugugcucu

SEQ ID NO: 1013287 - RNA, 22 nt, Human
gagcuggugaucagcuggagga

SEQ ID NO: 1013288 - RNA, 18 nt, Human
ccagcaugccagaggcug

SEQ ID NO: 1013289 - RNA, 22 nt, Human
gcucaggaaauaguuuaguguu

SEQ ID NO: 1013290 - RNA, 22 nt, Human
uuggccuuguuaaggaggcccu

SEQ ID NO: 1013291 - RNA, 22 nt, Human
ccuccagcgcgauccacuccgg

SEQ ID NO: 1013292 - RNA, 22 nt, Human
augcugcacaagccacauguag

SEQ ID NO: 1013293 - RNA, 22 nt, Human
gaaucucaaggcuugugaggau

SEQ ID NO: 1013294 - RNA, 22 nt, Human
gggcugacucugcacugagcca

SEQ ID NO: 1013295 - RNA, 22 nt, Human
cagaauuuagcacaauguaugg

SEQ ID NO: 1013296 - RNA, 22 nt, Human
caaggagaguaauugaaugaga

SEQ ID NO: 1013297 - RNA, 22 nt, Human
augccaggccccacgcugggca

SEQ ID NO: 1013298 - RNA, 22 nt, Human
uuuaucuuuggaucuucagaaa

SEQ ID NO: 1013299 - RNA, 22 nt, Human
gcucaggaucagccaccucuuu

SEQ ID NO: 1013300 - RNA, 22 nt, Human
gcacugaacuuuaaucauuucu

SEQ ID NO: 1013301 - RNA, 22 nt, Human
acauuuaaauaugccuuauauu

SEQ ID NO: 1013302 - RNA, 22 nt, Human
agccuggccaggccugcccagg

SEQ ID NO: 1013303 - RNA, 22 nt, Human
gaccauuuuuacagagcauuca

SEQ ID NO: 1013304 - RNA, 22 nt, Human
ucuucagauggccaguuguccc

SEQ ID NO: 1013305 - RNA, 22 nt, Human
caaaaguucucacccagacaug

SEQ ID NO: 1013306 - RNA, 20 nt, Human
aagagcauaguacaggaaga

SEQ ID NO: 1013307 - RNA, 22 nt, Human
uuucuaggucuuccauacugcc

SEQ ID NO: 1013308 - RNA, 22 nt, Human
ucaauucugguccucaggaacu

SEQ ID NO: 1013309 - RNA, 22 nt, Human
agagccaggcggcugggcaccu

SEQ ID NO: 1013310 - RNA, 22 nt, Human
gucccugcaucaccacgggacu

SEQ ID NO: 1013311 - RNA, 22 nt, Human
ucaaauaccagcaauuucaugu

SEQ ID NO: 1013312 - RNA, 22 nt, Human
gggccuggcaugcagccccguu

SEQ ID NO: 1013313 - RNA, 22 nt, Human
gcugccuguggcccuucugggu

SEQ ID NO: 1013314 - RNA, 22 nt, Human
uauuucuguaugcauaaaagga

SEQ ID NO: 1013315 - RNA, 22 nt, Human
ucucuggguuuuuguccuguac

SEQ ID NO: 1013316 - RNA, 22 nt, Human
ucucacuggguauaaaugagua

SEQ ID NO: 1013317 - RNA, 22 nt, Human
auuuagacuucccagcacugug

SEQ ID NO: 1013318 - RNA, 22 nt, Human
uugaagcauuucuuugagcuuc

SEQ ID NO: 1013319 - RNA, 22 nt, Human
ggagucccagcaaagccuuccc

SEQ ID NO: 1013320 - RNA, 22 nt, Human
acagagcaauaacagggagagg

SEQ ID NO: 1013321 - RNA, 22 nt, Human
uuucacauaugguuguugauug

SEQ ID NO: 1013322 - RNA, 22 nt, Human
acagcuguauccccagagcuca

SEQ ID NO: 1013323 - RNA, 18 nt, Human
gguggcaggucagaugcc

SEQ ID NO: 1013324 - RNA, 21 nt, Human
ggagggcagcccagacuggcu

SEQ ID NO: 1013325 - RNA, 22 nt, Human
gggucuggcaugcugagaugga

SEQ ID NO: 1013326 - RNA, 22 nt, Human
uuaggaaauuaugguuucagau

SEQ ID NO: 1013327 - RNA, 22 nt, Human
aaauccuaaggagaauaugauu

SEQ ID NO: 1013328 - RNA, 22 nt, Human
ucuugggaucaccuccuggcuu

SEQ ID NO: 1013329 - RNA, 22 nt, Human
ucaaagucuaucuguaauuacu

SEQ ID NO: 1013330 - RNA, 22 nt, Human
auauuucaugggguuccauacu

SEQ ID NO: 1013331 - RNA, 22 nt, Human
agggcugccugcucugcauuga

SEQ ID NO: 1013332 - RNA, 22 nt, Human
uuugaaagggacaaagucacug

SEQ ID NO: 1013333 - RNA, 23 nt, Human
ucagagaaguuguaggcugggga

SEQ ID NO: 1013334 - RNA, 21 nt, Human
uggcugagccaggugugugga

SEQ ID NO: 1013335 - RNA, 22 nt, Human
ugcauauugugaaaauguagau

SEQ ID NO: 1013336 - RNA, 22 nt, Human
cacaggagguuaggaagugguc

SEQ ID NO: 1013337 - RNA, 22 nt, Human
gucucagaguccuacuuauucc

SEQ ID NO: 1013338 - RNA, 22 nt, Human
cugggaggcagucucucuagaa

SEQ ID NO: 1013339 - RNA, 22 nt, Human
caagaugaucccugaaggcagc

SEQ ID NO: 1013340 - RNA, 22 nt, Human
acagcagcgucaacuuaaaauu

SEQ ID NO: 1013341 - RNA, 22 nt, Human
acagugugaugggccugccuga

SEQ ID NO: 1013342 - RNA, 22 nt, Human
gucuucuguaagaugagguccc

SEQ ID NO: 1013343 - RNA, 22 nt, Human
cagguggcuucucccuaggcca

SEQ ID NO: 1013344 - RNA, 22 nt, Human
accaugaucugcucugguguuu

SEQ ID NO: 1013345 - RNA, 22 nt, Human
auggaaagcuaagccauuuacc

SEQ ID NO: 1013346 - RNA, 22 nt, Human
ucccagagucagagguggggcc

SEQ ID NO: 1013347 - RNA, 22 nt, Human
cagcaaaagccagcauaagcuc

SEQ ID NO: 1013348 - RNA, 19 nt, Human
uagagcugcuuccuggcag

SEQ ID NO: 1013349 - RNA, 22 nt, Human
ucuguucaguugauuagacaga

SEQ ID NO: 1013350 - RNA, 22 nt, Human
uacuuuuuagcacagugugugc

SEQ ID NO: 1013351 - RNA, 22 nt, Human
auuuugaaaagcauuugaguaa

SEQ ID NO: 1013352 - RNA, 22 nt, Human
aguguccccuacagaggcauuc

SEQ ID NO: 1013353 - RNA, 22 nt, Human
agagccaggacugugucucacu

SEQ ID NO: 1013354 - RNA, 22 nt, Human
ugaggccaggaucccaggcucu

SEQ ID NO: 1013355 - RNA, 22 nt, Human
caggggcuuuuccucuauaagg

SEQ ID NO: 1013356 - RNA, 22 nt, Human
ccaggugguucaggucaccaua

SEQ ID NO: 1013357 - RNA, 22 nt, Human
acuguguggaccacucugaggc

SEQ ID NO: 1013358 - RNA, 22 nt, Human
uggcucagaagaaaagguaaac

SEQ ID NO: 1013359 - RNA, 22 nt, Human
aguaaugugccugaaauacuug

SEQ ID NO: 1013360 - RNA, 22 nt, Human
gaugggaggaaccugggucccu

SEQ ID NO: 1013361 - RNA, 22 nt, Human
uugcaauagccuuauuuccaaa

SEQ ID NO: 1013362 - RNA, 18 nt, Human
gcugagguggugucagag

SEQ ID NO: 1013363 - RNA, 22 nt, Human
ggcucugcccagaugaagagga

SEQ ID NO: 1013364 - RNA, 22 nt, Human
gaaauuauugcuagagacugca

SEQ ID NO: 1013365 - RNA, 22 nt, Human
uuugugaagggaacagaagugu

SEQ ID NO: 1013366 - RNA, 22 nt, Human
aagaugcgguugaccauggugu

SEQ ID NO: 1013367 - RNA, 22 nt, Human
aggcacuucucaaauucaugcc

SEQ ID NO: 1013368 - RNA, 22 nt, Human
caggugggccgggguuuguucu

SEQ ID NO: 1013369 - RNA, 22 nt, Human
ucagagccaaucauggugcauu

SEQ ID NO: 1013370 - RNA, 22 nt, Human
caagagagaugcagcucacuca

SEQ ID NO: 1013371 - RNA, 22 nt, Human
aucacgucaugguuugaucugg

SEQ ID NO: 1013372 - RNA, 22 nt, Human
cagaagaauggugucugagcuc

SEQ ID NO: 1013373 - RNA, 18 nt, Human
ugcuggguaacuguaugg

SEQ ID NO: 1013374 - RNA, 22 nt, Human
ugggcaggauaauaucucaugu

SEQ ID NO: 1013375 - RNA, 22 nt, Human
ggggccugcgagguucaacuuc

SEQ ID NO: 1013376 - RNA, 22 nt, Human
cagagcaguccuugucaaucag

SEQ ID NO: 1013377 - RNA, 22 nt, Human
ggagcagcuugcaugcucaggg

SEQ ID NO: 1013378 - RNA, 22 nt, Human
aggcugccuguuccaaucuccu

SEQ ID NO: 1013379 - RNA, 22 nt, Human
gcagggacagggcagggccuuu

SEQ ID NO: 1013380 - RNA, 22 nt, Human
cccagggcuuuucucacuagac

SEQ ID NO: 1013381 - RNA, 22 nt, Human
uggcccgaccucugcucaugca

SEQ ID NO: 1013382 - RNA, 22 nt, Human
cugaggccccucuugugagcau

SEQ ID NO: 1013383 - RNA, 22 nt, Human
acaggcugcugggcuccgugcu

SEQ ID NO: 1013384 - RNA, 22 nt, Human
uuccaguugguagaauguaagg

SEQ ID NO: 1013385 - RNA, 22 nt, Human
ggcagcagaacuggcccuguau

SEQ ID NO: 1013386 - RNA, 22 nt, Human
agcaucuggugagggccuaguu

SEQ ID NO: 1013387 - RNA, 22 nt, Human
ucagagcugcccaugcaagggg

SEQ ID NO: 1013388 - RNA, 22 nt, Human
caaaauguucuggcaccuuuaa

SEQ ID NO: 1013389 - RNA, 22 nt, Human
aaaagaggagugguuuaugaca

SEQ ID NO: 1013390 - RNA, 22 nt, Human
aagcgccaugguuccugcgcag

SEQ ID NO: 1013391 - RNA, 22 nt, Human
gaggacagcuuagggcuuccug

SEQ ID NO: 1013392 - RNA, 22 nt, Human
gcugggagcaaagccaugcaua

SEQ ID NO: 1013393 - RNA, 19 nt, Human
cucuggccucuggaugcug

SEQ ID NO: 1013394 - RNA, 22 nt, Human
uugggcugaacccugcagcuga

SEQ ID NO: 1013395 - RNA, 22 nt, Human
uaaguggaagguuauaugcuaa

SEQ ID NO: 1013396 - RNA, 22 nt, Human
ucacugcucucuaagcaucgcc

SEQ ID NO: 1013397 - RNA, 19 nt, Human
cucugccucuggcuguggc

SEQ ID NO: 1013398 - RNA, 22 nt, Human
uaaaguucagugcaugaaugug

SEQ ID NO: 1013399 - RNA, 22 nt, Human
ugcccaggguggagugcagcgg

SEQ ID NO: 1013400 - RNA, 22 nt, Human
uggagcaggccggaaguggcuu

SEQ ID NO: 1013401 - RNA, 22 nt, Human
ugucaugccauuuaaaauguuu

SEQ ID NO: 1013402 - RNA, 19 nt, Human
auaaggcagugacuuuuuu

SEQ ID NO: 1013403 - RNA, 22 nt, Human
cuggggcugcggacgggagccc

SEQ ID NO: 1013404 - RNA, 22 nt, Human
aaggcacuuaacgugggaggau

SEQ ID NO: 1013405 - RNA, 21 nt, Human
ucccucagaagcucuugguca

SEQ ID NO: 1013406 - RNA, 22 nt, Human
cuggcagcucuacucagagccu

SEQ ID NO: 1013407 - RNA, 22 nt, Human
cuguuuaucucuaaccuguuua

SEQ ID NO: 1013408 - RNA, 22 nt, Human
ugauuuccaauaaggagaaugu

SEQ ID NO: 1013409 - RNA, 22 nt, Human
ucucauucauacccuacaugcu

SEQ ID NO: 1013410 - RNA, 22 nt, Human
cauaauuuuuuuaagucagaac

SEQ ID NO: 1013411 - RNA, 22 nt, Human
agcucauggugcuaucucaggg

SEQ ID NO: 1013412 - RNA, 22 nt, Human
guugaaagaugucuugguuccc

SEQ ID NO: 1013413 - RNA, 22 nt, Human
uggcagagucucuccuuuccag

SEQ ID NO: 1013414 - RNA, 22 nt, Human
aucacauucuuucaaagcaguc

SEQ ID NO: 1013415 - RNA, 22 nt, Human
gauuucuuuaugaaguacagaa

SEQ ID NO: 1013416 - RNA, 22 nt, Human
agccacagagagggagcugcaa

SEQ ID NO: 1013417 - RNA, 22 nt, Human
ucugccuggauuuuggaaagcu

SEQ ID NO: 1013418 - RNA, 22 nt, Human
aucuggcuauuucuggucgggg

SEQ ID NO: 1013419 - RNA, 22 nt, Human
auaauuuacaacugcuuuuaau

SEQ ID NO: 1013420 - RNA, 22 nt, Human
cccaggucuaugccagcucuga

SEQ ID NO: 1013421 - RNA, 22 nt, Human
ugcugccuccaacuccugggcu

SEQ ID NO: 1013422 - RNA, 22 nt, Human
ugaaaguugcacauaagagaau

SEQ ID NO: 1013423 - RNA, 22 nt, Human
acuaaggaauaugacaaacuca

SEQ ID NO: 1013424 - RNA, 22 nt, Human
ugcagaagcagagccgguggcc

SEQ ID NO: 1013425 - RNA, 22 nt, Human
auguguauacuugugcuuacuc

SEQ ID NO: 1013426 - RNA, 22 nt, Human
guguuuuaagaaagaagcucag

SEQ ID NO: 1013427 - RNA, 22 nt, Human
cugaaggacuuggugauaguug

SEQ ID NO: 1013428 - RNA, 22 nt, Human
ugagcaucuuuuuacagguuua

SEQ ID NO: 1013429 - RNA, 22 nt, Human
aaauucuuucauggcuaauaag

SEQ ID NO: 1013430 - RNA, 22 nt, Human
ggcuuccuggagaaggucugag

SEQ ID NO: 1013431 - RNA, 22 nt, Human
aggauccuccuuagaaaagacc

SEQ ID NO: 1013432 - RNA, 22 nt, Human
agcccagccggauucccaguuc

SEQ ID NO: 1013433 - RNA, 22 nt, Human
ccuggagcaggagcugcagagg

SEQ ID NO: 1013434 - RNA, 22 nt, Human
caugugguucaaguacuccaca

SEQ ID NO: 1013435 - RNA, 22 nt, Human
cagcccugagaaggaggaucuc

SEQ ID NO: 1013436 - RNA, 22 nt, Human
aagcaaaagguuacacuucugg

SEQ ID NO: 1013437 - RNA, 22 nt, Human
ugacccugcuucuuggugcagg

SEQ ID NO: 1013438 - RNA, 22 nt, Human
ucucuuaauuuuggaauagugu

SEQ ID NO: 1013439 - RNA, 22 nt, Human
gaugggcguggcgcguuuggug

SEQ ID NO: 1013440 - RNA, 22 nt, Human
uuuguaaaaggaggaagcaugg

SEQ ID NO: 1013441 - RNA, 21 nt, Human
caugaagccgguucccuguuu

SEQ ID NO: 1013442 - RNA, 22 nt, Human
ccagccugaaaugccucauccu

SEQ ID NO: 1013443 - RNA, 22 nt, Human
ugucccagucaaggcugucauc

SEQ ID NO: 1013444 - RNA, 21 nt, Human
gccagagcaguacaaugaggu

SEQ ID NO: 1013445 - RNA, 22 nt, Human
acuguucaucucuuagaaagua

SEQ ID NO: 1013446 - RNA, 21 nt, Human
ugggaccuauuucaacuggau

SEQ ID NO: 1013447 - RNA, 22 nt, Human
ucugauuagcaguuuagggaaa

SEQ ID NO: 1013448 - RNA, 22 nt, Human
ccagcagcccucuuccaagacu

SEQ ID NO: 1013449 - RNA, 22 nt, Human
uaugaaaagguggccaauguag

SEQ ID NO: 1013450 - RNA, 22 nt, Human
uacauugcuuucuaauacaucu

SEQ ID NO: 1013451 - RNA, 22 nt, Human
aguuacaaccaugacacaagca

SEQ ID NO: 1013452 - RNA, 22 nt, Human
gaauauuuucaguacagauggu

SEQ ID NO: 1013453 - RNA, 22 nt, Human
uuucucuaaauagggaggcuua

SEQ ID NO: 1013454 - RNA, 22 nt, Human
cucagaguccccaguggguuug

SEQ ID NO: 1013455 - RNA, 22 nt, Human
ccugacgaaaggcgugcuggag

SEQ ID NO: 1013456 - RNA, 22 nt, Human
ugcccugcagugagugcgucug

SEQ ID NO: 1013457 - RNA, 22 nt, Human
auguccuuugcuucucuggucc

SEQ ID NO: 1013458 - RNA, 22 nt, Human
ccugucuggccuuccacggggg

SEQ ID NO: 1013459 - RNA, 22 nt, Human
ucauuuguacuugugugcuugu

SEQ ID NO: 1013460 - RNA, 22 nt, Human
auuugucuucaguagguucuuc

SEQ ID NO: 1013461 - RNA, 22 nt, Human
cacagugcaugaugggcagaag

SEQ ID NO: 1013462 - RNA, 22 nt, Human
aaguuugagaagcuuauagaua

SEQ ID NO: 1013463 - RNA, 22 nt, Human
uuaguuagucccugguaccuuu

SEQ ID NO: 1013464 - RNA, 22 nt, Human
gccuugggauucuuggaugcuc

SEQ ID NO: 1013465 - RNA, 22 nt, Human
ccaggcugcuuagccuuaucuu

SEQ ID NO: 1013466 - RNA, 22 nt, Human
aaugcacaaaaauuguauguaa

SEQ ID NO: 1013467 - RNA, 22 nt, Human
ugggccuggagcccuggagagu

SEQ ID NO: 1013468 - RNA, 22 nt, Human
ugagccuggguggucgaggcug

SEQ ID NO: 1013469 - RNA, 17 nt, Human
agccccucagcgucacc

SEQ ID NO: 1013470 - RNA, 22 nt, Human
cugcuccacaccuccauuuccu

SEQ ID NO: 1013471 - RNA, 22 nt, Human
aaggcccuggcaggaagcagga

SEQ ID NO: 1013472 - RNA, 20 nt, Human
ucaggaugugcugagugaag

SEQ ID NO: 1013473 - RNA, 22 nt, Human
agggcagauggaacuuccccga

SEQ ID NO: 1013474 - RNA, 22 nt, Human
acaggcugccuaccaaguauca

SEQ ID NO: 1013475 - RNA, 20 nt, Human
ggccugagcauggcuggcag

SEQ ID NO: 1013476 - RNA, 22 nt, Human
agcagcugggcucagagcuggg

SEQ ID NO: 1013477 - RNA, 22 nt, Human
ugucccauggauaccaggcuau

SEQ ID NO: 1013478 - RNA, 22 nt, Human
ccagccuccauguagauagcug

SEQ ID NO: 1013479 - RNA, 23 nt, Human
aucauucuccaaucuggagcagg

SEQ ID NO: 1013480 - RNA, 22 nt, Human
ggcagaguggagugcggccucc

SEQ ID NO: 1013481 - RNA, 22 nt, Human
aggagggugauccgggcugguc

SEQ ID NO: 1013482 - RNA, 22 nt, Human
ugccugucuucaggagugucac

SEQ ID NO: 1013483 - RNA, 22 nt, Human
gccugccuuuuggaggcacauu

SEQ ID NO: 1013484 - RNA, 22 nt, Human
gcugccuguguggccacucacu

SEQ ID NO: 1013485 - RNA, 22 nt, Human
agcagggcagugcuucagcucu

SEQ ID NO: 1013486 - RNA, 22 nt, Human
aggagaguaccauugggccgca

SEQ ID NO: 1013487 - RNA, 22 nt, Human
agguggggccaaaugcuacagu

SEQ ID NO: 1013488 - RNA, 22 nt, Human
agacaggaugcauacucuuggu

SEQ ID NO: 1013489 - RNA, 22 nt, Human
gccagagcagaauagaguggcc

SEQ ID NO: 1013490 - RNA, 22 nt, Human
uucauauauaugcacuacguac

SEQ ID NO: 1013491 - RNA, 22 nt, Human
ugaaggaaagagggaacauccc

SEQ ID NO: 1013492 - RNA, 22 nt, Human
acauuucuuagccuaguuccag

SEQ ID NO: 1013493 - RNA, 22 nt, Human
auuucaaggcuauuaauauaaa

SEQ ID NO: 1013494 - RNA, 22 nt, Human
aagggcucugugcuugucccau

SEQ ID NO: 1013495 - RNA, 22 nt, Human
uucucugaucuugcuagacuga

SEQ ID NO: 1013496 - RNA, 22 nt, Human
aaaucugggucaagguggagug

SEQ ID NO: 1013497 - RNA, 22 nt, Human
uguaugcagcaaaacaauuagu

SEQ ID NO: 1013498 - RNA, 22 nt, Human
agaaugcaguuugaaauaaggu

SEQ ID NO: 1013499 - RNA, 22 nt, Human
uccucccacauaggacaauggg

SEQ ID NO: 1013500 - RNA, 22 nt, Human
uggcucuguugugcugagccag

SEQ ID NO: 1013501 - RNA, 22 nt, Human
ugagauguaagguaugcuuacu

SEQ ID NO: 1013502 - RNA, 22 nt, Human
uccuggagauaauugcagugaa

SEQ ID NO: 1013503 - RNA, 22 nt, Human
auaaugaggauuugcauauuag

SEQ ID NO: 1013504 - RNA, 19 nt, Human
ccagucccauacaggagau

SEQ ID NO: 1013505 - RNA, 22 nt, Human
auguuauuaaaguacagauucu

SEQ ID NO: 1013506 - RNA, 22 nt, Human
agaaaucugacugcugugcaca

SEQ ID NO: 1013507 - RNA, 22 nt, Human
uguaugaauauguauuuucaua

SEQ ID NO: 1013508 - RNA, 21 nt, Human
agccuggcccagggggaggcu

SEQ ID NO: 1013509 - RNA, 22 nt, Human
cagagccccccuucugaucaca

SEQ ID NO: 1013510 - RNA, 22 nt, Human
gugguaaucggauucuuaccgg

SEQ ID NO: 1013511 - RNA, 22 nt, Human
agucucaggcagaggaaggcua

SEQ ID NO: 1013512 - RNA, 22 nt, Human
ccugucaggguuugccucagaa

SEQ ID NO: 1013513 - RNA, 20 nt, Human
gggugagauguaggagaggg

SEQ ID NO: 1013514 - RNA, 22 nt, Human
gccuggagaccugcuccucuac

SEQ ID NO: 1013515 - RNA, 22 nt, Human
guccucagucaguuuggugggg

SEQ ID NO: 1013516 - RNA, 22 nt, Human
ucuucagaggaagucagucuuu

SEQ ID NO: 1013517 - RNA, 22 nt, Human
agggucugacuccucuggcaag

SEQ ID NO: 1013518 - RNA, 22 nt, Human
gccuucugaucgcuggacugac

SEQ ID NO: 1013519 - RNA, 22 nt, Human
aagcuccccgaaacccaccucu

SEQ ID NO: 1013520 - RNA, 22 nt, Human
cagucccagaagagccugggag

SEQ ID NO: 1013521 - RNA, 22 nt, Human
agcuggccuguuagagcugagu

SEQ ID NO: 1013522 - RNA, 22 nt, Human
gcacccaguuugucucaggguu

SEQ ID NO: 1013523 - RNA, 22 nt, Human
cuguucaugcugauucuguaug

SEQ ID NO: 1013524 - RNA, 22 nt, Human
ugucagagcaaggccaggccag

SEQ ID NO: 1013525 - RNA, 22 nt, Human
gcugcuggcaucuagggggugg

SEQ ID NO: 1013526 - RNA, 22 nt, Human
cagggugcagugucgcugcuag

SEQ ID NO: 1013527 - RNA, 22 nt, Human
uuucaagcauaacugggaagag

SEQ ID NO: 1013528 - RNA, 22 nt, Human
ggaaggucgagcugcaucuggc

SEQ ID NO: 1013529 - RNA, 22 nt, Human
agggaaagguagugaggucaca

SEQ ID NO: 1013530 - RNA, 22 nt, Human
guucuucaggccauccucccag

SEQ ID NO: 1013531 - RNA, 19 nt, Human
uuucccagcccuugcugug

SEQ ID NO: 1013532 - RNA, 22 nt, Human
cagcucugcugggaggaugcag

SEQ ID NO: 1013533 - RNA, 22 nt, Human
uauuucagcccuacuacuuggc

SEQ ID NO: 1013534 - RNA, 22 nt, Human
aagugaguggccuggagaggug

SEQ ID NO: 1013535 - RNA, 17 nt, Human
agguggguggaucaccu

SEQ ID NO: 1013536 - RNA, 23 nt, Human
ggccuggcccagggcccugauga

SEQ ID NO: 1013537 - RNA, 23 nt, Human
cauggcagcaagagcucauggcc

SEQ ID NO: 1013538 - RNA, 22 nt, Human
agagccugggcagcuccucugg

SEQ ID NO: 1013539 - RNA, 22 nt, Human
ugggagcaguucagguguggcu

SEQ ID NO: 1013540 - RNA, 22 nt, Human
aggggagccccugguccuggug

SEQ ID NO: 1013541 - RNA, 22 nt, Human
uaaagguacgaagugagggauu

SEQ ID NO: 1013542 - RNA, 22 nt, Human
aaaugcacugaacacauguugu

SEQ ID NO: 1013543 - RNA, 22 nt, Human
ggcugccaggagggaggccagu

SEQ ID NO: 1013544 - RNA, 22 nt, Human
ugcugucaguuggcaggaugag

SEQ ID NO: 1013545 - RNA, 22 nt, Human
gggauggacuuggggacuccag

SEQ ID NO: 1013546 - RNA, 22 nt, Human
cuggugggagcagcaggcagcu

SEQ ID NO: 1013547 - RNA, 17 nt, Human
cgagggcuugcuggcuc

SEQ ID NO: 1013548 - RNA, 22 nt, Human
ucucuucugaaaccugucuuua

SEQ ID NO: 1013549 - RNA, 22 nt, Human
acccaggccugagagacaggag

SEQ ID NO: 1013550 - RNA, 22 nt, Human
agucuuuccugcuugacuguuc

SEQ ID NO: 1013551 - RNA, 22 nt, Human
ucagggcauccauugccuguug

SEQ ID NO: 1013552 - RNA, 22 nt, Human
ggacacaagcuccggggcugca

SEQ ID NO: 1013553 - RNA, 22 nt, Human
cauuuacauuuaagguuaauau

SEQ ID NO: 1013554 - RNA, 20 nt, Human
aggcugccaggucucacauc

SEQ ID NO: 1013555 - RNA, 22 nt, Human
uccugcagccacugcaggcaga

SEQ ID NO: 1013556 - RNA, 22 nt, Human
acuccuggguugcaguccucaa

SEQ ID NO: 1013557 - RNA, 22 nt, Human
uguucuucuagauugccuuuua

SEQ ID NO: 1013558 - RNA, 22 nt, Human
uauuccagguuucuuguuguau

SEQ ID NO: 1013559 - RNA, 18 nt, Human
aggccagcccugcuacug

SEQ ID NO: 1013560 - RNA, 22 nt, Human
gacucugcuacaggccgagguu

SEQ ID NO: 1013561 - RNA, 18 nt, Human
gucauugcaacauacugu

SEQ ID NO: 1013562 - RNA, 22 nt, Human
ugagccuguggggugacaacca

SEQ ID NO: 1013563 - RNA, 22 nt, Human
acugcagccuuugggcucauaa

SEQ ID NO: 1013564 - RNA, 22 nt, Human
cagugccucuuaagugucaccc

SEQ ID NO: 1013565 - RNA, 22 nt, Human
cccaggccccagggcuugucag

SEQ ID NO: 1013566 - RNA, 22 nt, Human
acagccugcugccugcuucuug

SEQ ID NO: 1013567 - RNA, 22 nt, Human
ccugcagacacuuguccagcaa

SEQ ID NO: 1013568 - RNA, 22 nt, Human
uuuggccacuugggaguccagg

SEQ ID NO: 1013569 - RNA, 22 nt, Human
uggaaggcaacggagugagcug

SEQ ID NO: 1013570 - RNA, 22 nt, Human
uuuccucuucuucccaugucau

SEQ ID NO: 1013571 - RNA, 22 nt, Human
cucugggcaccaaagagcagcu

SEQ ID NO: 1013572 - RNA, 22 nt, Human
augggagugacagggccacugg

SEQ ID NO: 1013573 - RNA, 22 nt, Human
gaaaggcaguacagcugagccu

SEQ ID NO: 1013574 - RNA, 22 nt, Human
auugaaagaguuuucugcugca

SEQ ID NO: 1013575 - RNA, 22 nt, Human
aaguuuuccuguguccaagaug

SEQ ID NO: 1013576 - RNA, 22 nt, Human
uuugcauuauauuuauagaaga

SEQ ID NO: 1013577 - RNA, 22 nt, Human
cagucucucagcuuucagcugu

SEQ ID NO: 1013578 - RNA, 22 nt, Human
acaauucugaugguuucccagu

SEQ ID NO: 1013579 - RNA, 22 nt, Human
ugcaagcacucaaugcaaacag

SEQ ID NO: 1013580 - RNA, 22 nt, Human
caauuucucuuuauaucucaca

SEQ ID NO: 1013581 - RNA, 20 nt, Human
aauguauauuuuaugccagg

SEQ ID NO: 1013582 - RNA, 22 nt, Human
gccuggcaggggccugggagug

SEQ ID NO: 1013583 - RNA, 22 nt, Human
guuaugaaauaaauauagauca

SEQ ID NO: 1013584 - RNA, 22 nt, Human
gggcagcagagcccugccgagu

SEQ ID NO: 1013585 - RNA, 22 nt, Human
cagguuuagguggacgugcagg

SEQ ID NO: 1013586 - RNA, 22 nt, Human
guggccugaugccagcccugug

SEQ ID NO: 1013587 - RNA, 17 nt, Human
ggcagcugugugcaugc

SEQ ID NO: 1013588 - RNA, 22 nt, Human
auaacuuucuucacccuugcug

SEQ ID NO: 1013589 - RNA, 22 nt, Human
gaggaaccaaucugugauauuc

SEQ ID NO: 1013590 - RNA, 22 nt, Human
cccaaggcugcagugagcauga

SEQ ID NO: 1013591 - RNA, 22 nt, Human
uggcugaacuaaugugcuguuu

SEQ ID NO: 1013592 - RNA, 22 nt, Human
aagggaggggauguaagccugg

SEQ ID NO: 1013593 - RNA, 20 nt, Human
uggggccuguuucugugguu

SEQ ID NO: 1013594 - RNA, 21 nt, Human
aagcaggacauaugaugcccu

SEQ ID NO: 1013595 - RNA, 22 nt, Human
uaaaauguagcuucuaggcugg

SEQ ID NO: 1013596 - RNA, 22 nt, Human
gcagcccaaaaaagagguagau

SEQ ID NO: 1013597 - RNA, 22 nt, Human
uuugauaagagcugcugaaacu

SEQ ID NO: 1013598 - RNA, 22 nt, Human
gcugcagcagaaguucucagag

SEQ ID NO: 1013599 - RNA, 22 nt, Human
gugcauuugugcaugcacaugu

SEQ ID NO: 1013600 - RNA, 22 nt, Human
aggagaguucacacuggucaga

SEQ ID NO: 1013601 - RNA, 22 nt, Human
gccuggagugguccugcugccc

SEQ ID NO: 1013602 - RNA, 19 nt, Human
gcacccugaggucauggcc

SEQ ID NO: 1013603 - RNA, 17 nt, Human
cugagcauccgugcucu

SEQ ID NO: 1013604 - RNA, 22 nt, Human
gacagcagacagaacuaccugc

SEQ ID NO: 1013605 - RNA, 22 nt, Human
gacacagcacuguacaaggaau

SEQ ID NO: 1013606 - RNA, 22 nt, Human
ucugcugugggucuauauuuua

SEQ ID NO: 1013607 - RNA, 22 nt, Human
caaugauucugcaacugugugc

SEQ ID NO: 1013608 - RNA, 22 nt, Human
uugcauuccaguccccacugug

SEQ ID NO: 1013609 - RNA, 22 nt, Human
ucucagagauuuauggaaaacu

SEQ ID NO: 1013610 - RNA, 22 nt, Human
acugcagcaaagcccgugucuu

SEQ ID NO: 1013611 - RNA, 23 nt, Human
agaggccagccuuuggagacacc

SEQ ID NO: 1013612 - RNA, 22 nt, Human
ucuuuccuacuuuauugugaac

SEQ ID NO: 1013613 - RNA, 20 nt, Human
gcacugaaauucaauguuug

SEQ ID NO: 1013614 - RNA, 22 nt, Human
aaaauguaaagcuugaguguag

SEQ ID NO: 1013615 - RNA, 22 nt, Human
uggcagaggagaauuaagauua

SEQ ID NO: 1013616 - RNA, 22 nt, Human
gcaagcugcucuuauguggagg

SEQ ID NO: 1013617 - RNA, 22 nt, Human
cacaguggauugggugaugccc

SEQ ID NO: 1013618 - RNA, 22 nt, Human
aaggcacuagcaagcugccugg

SEQ ID NO: 1013619 - RNA, 22 nt, Human
auuuucaucgcuagguuggccu

SEQ ID NO: 1013620 - RNA, 22 nt, Human
ucauugcacuccagccugggca

SEQ ID NO: 1013621 - RNA, 22 nt, Human
acuuugcagggcuugauaucca

SEQ ID NO: 1013622 - RNA, 22 nt, Human
auuuucaugacuaccuuaaaua

SEQ ID NO: 1013623 - RNA, 18 nt, Human
ugagagugugugcucuug

SEQ ID NO: 1013624 - RNA, 22 nt, Human
gccagagccggcuucacaggau

SEQ ID NO: 1013625 - RNA, 22 nt, Human
cacagggccuggggcagcugcu

SEQ ID NO: 1013626 - RNA, 22 nt, Human
uaaauuaugucacaugacucug

SEQ ID NO: 1013627 - RNA, 22 nt, Human
gaugcagaaaguagacaccauc

SEQ ID NO: 1013628 - RNA, 22 nt, Human
agccagacauggcuccugcucc

SEQ ID NO: 1013629 - RNA, 22 nt, Human
ugugcagagcccacaggcagcu

SEQ ID NO: 1013630 - RNA, 22 nt, Human
cacagggcagugcugcccacuc

SEQ ID NO: 1013631 - RNA, 22 nt, Human
gaaaugugggucaugacccauu

SEQ ID NO: 1013632 - RNA, 22 nt, Human
cccagcccagcguucgaggggu

SEQ ID NO: 1013633 - RNA, 22 nt, Human
gaggcacugcugggccccugua

SEQ ID NO: 1013634 - RNA, 23 nt, Human
cuggcucuguagguggcauccuu

SEQ ID NO: 1013635 - RNA, 22 nt, Human
uuauagaaggagcauucacuua

SEQ ID NO: 1013636 - RNA, 22 nt, Human
uccagggcugacuugggagagg

SEQ ID NO: 1013637 - RNA, 22 nt, Human
ggagcuggucagccuugagcau

SEQ ID NO: 1013638 - RNA, 22 nt, Human
ugcaagagguaaaaugaaagga

SEQ ID NO: 1013639 - RNA, 22 nt, Human
cccuggguucuggcugggcugc

SEQ ID NO: 1013640 - RNA, 22 nt, Human
aggcacuugaauugaugauguu

SEQ ID NO: 1013641 - RNA, 17 nt, Human
uucucuuccuggauagu

SEQ ID NO: 1013642 - RNA, 20 nt, Human
agucccagaucaaauuucug

SEQ ID NO: 1013643 - RNA, 22 nt, Human
gcucugcuggagggaaagagaa

SEQ ID NO: 1013644 - RNA, 22 nt, Human
ucccagggacugggcuaggcuu

SEQ ID NO: 1013645 - RNA, 22 nt, Human
ugggggagauugugcaucucua

SEQ ID NO: 1013646 - RNA, 22 nt, Human
uaacagaaacagauaaguguaa

SEQ ID NO: 1013647 - RNA, 22 nt, Human
ucugguuagccaauaaugccaa

SEQ ID NO: 1013648 - RNA, 22 nt, Human
cucugcugcccaggccugcuag

SEQ ID NO: 1013649 - RNA, 22 nt, Human
aggcacagagaaugcccuccau

SEQ ID NO: 1013650 - RNA, 22 nt, Human
auggcccaggccuccuguggcu

SEQ ID NO: 1013651 - RNA, 22 nt, Human
agagggaucacccuguuucugg

SEQ ID NO: 1013652 - RNA, 22 nt, Human
aagggcuggcccugggaagagu

SEQ ID NO: 1013653 - RNA, 22 nt, Human
ggcucugcgcgguaaagugacu

SEQ ID NO: 1013654 - RNA, 22 nt, Human
acaguaaugauucugagucucu

SEQ ID NO: 1013655 - RNA, 22 nt, Human
ucagagagguuggugauaagaa

SEQ ID NO: 1013656 - RNA, 22 nt, Human
agcauuuauuucuuagaaauug

SEQ ID NO: 1013657 - RNA, 22 nt, Human
cagcccaggccgacaguuccuc

SEQ ID NO: 1013658 - RNA, 22 nt, Human
gggacuucauagcuaggcacuu

SEQ ID NO: 1013659 - RNA, 22 nt, Human
aggggcuggcuuaucugagagu

SEQ ID NO: 1013660 - RNA, 19 nt, Human
ccagcagacacagcugccc

SEQ ID NO: 1013661 - RNA, 22 nt, Human
ccuggcagcgccgaagcuggcc

SEQ ID NO: 1013662 - RNA, 22 nt, Human
cugcugugcaggugccuaugau

SEQ ID NO: 1013663 - RNA, 22 nt, Human
aaggccaggacaccaggggacu

SEQ ID NO: 1013664 - RNA, 22 nt, Human
cagagcugugauaaauagauau

SEQ ID NO: 1013665 - RNA, 22 nt, Human
uguauuagagcaguagaauuau

SEQ ID NO: 1013666 - RNA, 22 nt, Human
gaagaagcaggaguguguagca

SEQ ID NO: 1013667 - RNA, 22 nt, Human
ggcuuccuaauacucccuacac

SEQ ID NO: 1013668 - RNA, 19 nt, Human
agccagggugagaaggagc

SEQ ID NO: 1013669 - RNA, 22 nt, Human
gcagagaguugggcugcgccag

SEQ ID NO: 1013670 - RNA, 22 nt, Human
ucauugaauuucacagcuuuau

SEQ ID NO: 1013671 - RNA, 22 nt, Human
cugagaaggaagccuccacucu

SEQ ID NO: 1013672 - RNA, 22 nt, Human
auucagugugagguuuucaagu

SEQ ID NO: 1013673 - RNA, 22 nt, Human
ucacagugaugacgugggagca

SEQ ID NO: 1013674 - RNA, 22 nt, Human
ggccugagaaccauggggccaa

SEQ ID NO: 1013675 - RNA, 22 nt, Human
gcuuucucuucacugauguuca

SEQ ID NO: 1013676 - RNA, 20 nt, Human
uuucaguugguuaauggcau

SEQ ID NO: 1013677 - RNA, 20 nt, Human
cugcucugcuuugcaggugg

SEQ ID NO: 1013678 - RNA, 22 nt, Human
ccuucauugcaucuuuaagaga

SEQ ID NO: 1013679 - RNA, 22 nt, Human
gccugcuggcuguccauugcag

SEQ ID NO: 1013680 - RNA, 22 nt, Human
cagaugaggcaaccucauugcu

SEQ ID NO: 1013681 - RNA, 22 nt, Human
aucagcaagauguaauuucuau

SEQ ID NO: 1013682 - RNA, 22 nt, Human
uggacagguuugggugccuguu

SEQ ID NO: 1013683 - RNA, 22 nt, Human
gagcucuggcagggcaggucug

SEQ ID NO: 1013684 - RNA, 22 nt, Human
ggccccuggcaccaggcugauu

SEQ ID NO: 1013685 - RNA, 22 nt, Human
uacagagacuuuauggcacaaa

SEQ ID NO: 1013686 - RNA, 22 nt, Human
gccaggcugcuccagggaggcc

SEQ ID NO: 1013687 - RNA, 22 nt, Human
aacagcauaaguauuuauuuca

SEQ ID NO: 1013688 - RNA, 22 nt, Human
gggcuggaucuccugcaggcag

SEQ ID NO: 1013689 - RNA, 22 nt, Human
cagagcuggggacuguuggaug

SEQ ID NO: 1013690 - RNA, 22 nt, Human
agcaccuggucuccuggcgcug

SEQ ID NO: 1013691 - RNA, 22 nt, Human
acugucugcccugagaugccag

SEQ ID NO: 1013692 - RNA, 22 nt, Human
uacuuacagaaggaagcaauug

SEQ ID NO: 1013693 - RNA, 22 nt, Human
gggccagagcuuggcagcuggg

SEQ ID NO: 1013694 - RNA, 22 nt, Human
acaccauacucauguugguucc

SEQ ID NO: 1013695 - RNA, 22 nt, Human
uugcaccaaaugaguuaaaauu

SEQ ID NO: 1013696 - RNA, 22 nt, Human
gcuguucacaucuggaccauuu

SEQ ID NO: 1013697 - RNA, 19 nt, Human
uggaccugugcccauggcu

SEQ ID NO: 1013698 - RNA, 22 nt, Human
guuucauacagauuauucaugg

SEQ ID NO: 1013699 - RNA, 22 nt, Human
auucuucacauggauaggaucu

SEQ ID NO: 1013700 - RNA, 22 nt, Human
cuguguuggcuuuucucuugua

SEQ ID NO: 1013701 - RNA, 22 nt, Human
cuguuuuugugcugugucuccc

SEQ ID NO: 1013702 - RNA, 22 nt, Human
aauguguagauguugcauuccu

SEQ ID NO: 1013703 - RNA, 22 nt, Human
gcugcccagcaggccccagggg

SEQ ID NO: 1013704 - RNA, 22 nt, Human
agggggaggcugugcugcgucu

SEQ ID NO: 1013705 - RNA, 22 nt, Human
ugcagaccucccauggcugccu

SEQ ID NO: 1013706 - RNA, 18 nt, Human
aaauguacuguccauggc

SEQ ID NO: 1013707 - RNA, 21 nt, Human
cagcuuugucugucuucgggg

SEQ ID NO: 1013708 - RNA, 22 nt, Human
accaaggaguuugguauuuuag

SEQ ID NO: 1013709 - RNA, 22 nt, Human
cacugcuuauaaauucuaggca

SEQ ID NO: 1013710 - RNA, 22 nt, Human
caguguguggauccucccagga

SEQ ID NO: 1013711 - RNA, 22 nt, Human
uuugcauuaucucacuuauaua

SEQ ID NO: 1013712 - RNA, 21 nt, Human
aucacauuggcuguuauuauu

SEQ ID NO: 1013713 - RNA, 22 nt, Human
gcuggccugcaaagcccggcug

SEQ ID NO: 1013714 - RNA, 17 nt, Human
cacaggugugguuugag

SEQ ID NO: 1013715 - RNA, 22 nt, Human
uaaauguguguagccaucugug

SEQ ID NO: 1013716 - RNA, 22 nt, Human
ucaggaguccugccugcagccu

SEQ ID NO: 1013717 - RNA, 22 nt, Human
ccuggaggcucugggagggcag

SEQ ID NO: 1013718 - RNA, 22 nt, Human
cuguacaggugaggagggggcu

SEQ ID NO: 1013719 - RNA, 22 nt, Human
cuguaaauaugaagaauauaug

SEQ ID NO: 1013720 - RNA, 22 nt, Human
uggaggccagagguacugggac

SEQ ID NO: 1013721 - RNA, 19 nt, Human
gcaucagagcagaaggggu

SEQ ID NO: 1013722 - RNA, 23 nt, Human
ugcaggggaggcuuaaagcaggu

SEQ ID NO: 1013723 - RNA, 22 nt, Human
cagcccugccauggagccuccu

SEQ ID NO: 1013724 - RNA, 22 nt, Human
agugacugggcagggcagggcc

SEQ ID NO: 1013725 - RNA, 22 nt, Human
gccugagcccaggugugcagag

SEQ ID NO: 1013726 - RNA, 21 nt, Human
cagagcugaaggguguagugu

SEQ ID NO: 1013727 - RNA, 22 nt, Human
ucucaggaguagugggauccau

SEQ ID NO: 1013728 - RNA, 22 nt, Human
gggcugcuuuuuucuuagcaga

SEQ ID NO: 1013729 - RNA, 22 nt, Human
cccucccagaugggcuugaggu

SEQ ID NO: 1013730 - RNA, 22 nt, Human
aagagguaaccauagcaaccac

SEQ ID NO: 1013731 - RNA, 22 nt, Human
aaacaugagcaucucuucaagc

SEQ ID NO: 1013732 - RNA, 22 nt, Human
agagcagaggcauggccguggg

SEQ ID NO: 1013733 - RNA, 22 nt, Human
cccagcaucuccaggcauggcc

SEQ ID NO: 1013734 - RNA, 22 nt, Human
uuggcaguaaaagaaaaugcuu

SEQ ID NO: 1013735 - RNA, 22 nt, Human
gggcagagagcuggaacuccuu

SEQ ID NO: 1013736 - RNA, 22 nt, Human
aggcagcagggccacuggcuga

SEQ ID NO: 1013737 - RNA, 22 nt, Human
gagacugcauagauggccacaa

SEQ ID NO: 1013738 - RNA, 19 nt, Human
ucucacaucagcuccuagc

SEQ ID NO: 1013739 - RNA, 22 nt, Human
ccacccuggacaggccucugag

SEQ ID NO: 1013740 - RNA, 22 nt, Human
aagagcugcaucuaagccauga

SEQ ID NO: 1013741 - RNA, 23 nt, Human
agaccugcaucugauaggcccug

SEQ ID NO: 1013742 - RNA, 22 nt, Human
aaggcacugagccagccgucuc

SEQ ID NO: 1013743 - RNA, 22 nt, Human
ccugucugaggaggugcucuuu

SEQ ID NO: 1013744 - RNA, 22 nt, Human
aggcucugaucagguggcugug

SEQ ID NO: 1013745 - RNA, 17 nt, Human
gagugcugguggagcuc

SEQ ID NO: 1013746 - RNA, 23 nt, Human
ccugaagggucaggguccucagc

SEQ ID NO: 1013747 - RNA, 22 nt, Human
gcaggcugugaggcucagaugg

SEQ ID NO: 1013748 - RNA, 22 nt, Human
cauaauuucccaagagauugaa

SEQ ID NO: 1013749 - RNA, 22 nt, Human
agaaaagguugaaaguaggauu

SEQ ID NO: 1013750 - RNA, 22 nt, Human
aggagccaguuccaccccagga

SEQ ID NO: 1013751 - RNA, 22 nt, Human
uguuuuuaaauaaugauagaaa

SEQ ID NO: 1013752 - RNA, 22 nt, Human
guucuucagaggggaaagaacc

SEQ ID NO: 1013753 - RNA, 22 nt, Human
cuuaagaauauugaaguugugg

SEQ ID NO: 1013754 - RNA, 22 nt, Human
uuucacauuuaggcgugaauug

SEQ ID NO: 1013755 - RNA, 22 nt, Human
agucucagggccacccggggaa

SEQ ID NO: 1013756 - RNA, 22 nt, Human
ggcagcucacugauuagcaauu

SEQ ID NO: 1013757 - RNA, 22 nt, Human
uauaauuuuaagugguaaauua

SEQ ID NO: 1013758 - RNA, 22 nt, Human
gggcugagucugcugccuguca

SEQ ID NO: 1013759 - RNA, 22 nt, Human
agcugcccuucucuugcccuug

SEQ ID NO: 1013760 - RNA, 22 nt, Human
gacagaggcaagaccagaagcc

SEQ ID NO: 1013761 - RNA, 22 nt, Human
caugaguucaucugcuucucuu

SEQ ID NO: 1013762 - RNA, 22 nt, Human
acaugauucuugauaggcauug

SEQ ID NO: 1013763 - RNA, 22 nt, Human
aagcaggcauuccagagacaau

SEQ ID NO: 1013764 - RNA, 18 nt, Human
gucaccuggaucagauua

SEQ ID NO: 1013765 - RNA, 23 nt, Human
ugauuuccagugagucaguggga

SEQ ID NO: 1013766 - RNA, 21 nt, Human
ugagccaggcugacggcugug

SEQ ID NO: 1013767 - RNA, 22 nt, Human
cacagggcagaggguccguggc

SEQ ID NO: 1013768 - RNA, 22 nt, Human
agagccagcaacucuagcccug

SEQ ID NO: 1013769 - RNA, 22 nt, Human
aagaacugugcuccaggcucca

SEQ ID NO: 1013770 - RNA, 22 nt, Human
aguugaaauuagaguccuggcu

SEQ ID NO: 1013771 - RNA, 21 nt, Human
ccagcagcucaaggaucucuu

SEQ ID NO: 1013772 - RNA, 22 nt, Human
cugccaucugagccaaaagugc

SEQ ID NO: 1013773 - RNA, 22 nt, Human
cagaggcagugggguugcuccu

SEQ ID NO: 1013774 - RNA, 22 nt, Human
guggagcccugccuugcucaug

SEQ ID NO: 1013775 - RNA, 22 nt, Human
ugacacauuaaaugcucacaaa

SEQ ID NO: 1013776 - RNA, 22 nt, Human
cauucuuauauuuacucauuca

SEQ ID NO: 1013777 - RNA, 22 nt, Human
gcaguggauccaaugguaucuu

SEQ ID NO: 1013778 - RNA, 22 nt, Human
ggccugagucacaucaggagag

SEQ ID NO: 1013779 - RNA, 22 nt, Human
cauaauuucacugucguauggc

SEQ ID NO: 1013780 - RNA, 21 nt, Human
gcauggcaggucacuggggca

SEQ ID NO: 1013781 - RNA, 22 nt, Human
uggggcuggggaucuugagccu

SEQ ID NO: 1013782 - RNA, 22 nt, Human
cugccuuggcccuaguucaugg

SEQ ID NO: 1013783 - RNA, 22 nt, Human
uuagauaaauuaagacuuuaca

SEQ ID NO: 1013784 - RNA, 22 nt, Human
gcagcugauggaaguccuauug

SEQ ID NO: 1013785 - RNA, 22 nt, Human
cugccagcagaggccagcgcug

SEQ ID NO: 1013786 - RNA, 22 nt, Human
agcagagcggggccuccggaag

SEQ ID NO: 1013787 - RNA, 22 nt, Human
cccugcaguccuuucuuggcuc

SEQ ID NO: 1013788 - RNA, 22 nt, Human
aucagugcuaaagcaaaugccc

SEQ ID NO: 1013789 - RNA, 22 nt, Human
guggccuggaugagcuucgaca

SEQ ID NO: 1013790 - RNA, 22 nt, Human
ggaugcugcuaucaggcuucga

SEQ ID NO: 1013791 - RNA, 22 nt, Human
ucacaugaguauuauuuuccaa

SEQ ID NO: 1013792 - RNA, 22 nt, Human
cccauuuagauaacaguucaaa

SEQ ID NO: 1013793 - RNA, 22 nt, Human
uuuuccuacugauaaacaguua

SEQ ID NO: 1013794 - RNA, 17 nt, Human
acaggcagaucaccuga

SEQ ID NO: 1013795 - RNA, 22 nt, Human
augcugucgaaaccaaacaucu

SEQ ID NO: 1013796 - RNA, 22 nt, Human
ggagagugggagcaacuguugc

SEQ ID NO: 1013797 - RNA, 22 nt, Human
cuguggagugcuuggcucagug

SEQ ID NO: 1013798 - RNA, 22 nt, Human
gcuuccaaaucuguucaaaaug

SEQ ID NO: 1013799 - RNA, 22 nt, Human
gaacagaagaggcuggugccac

SEQ ID NO: 1013800 - RNA, 22 nt, Human
auucuaggcuugaaacaugaag

SEQ ID NO: 1013801 - RNA, 22 nt, Human
uccugggcccaggcugccaggg

SEQ ID NO: 1013802 - RNA, 22 nt, Human
cuguauuuaguuaaaaugcuaa

SEQ ID NO: 1013803 - RNA, 22 nt, Human
aauguacaauaagacaaagagg

SEQ ID NO: 1013804 - RNA, 22 nt, Human
auuuucauuuugcagggugaga

SEQ ID NO: 1013805 - RNA, 22 nt, Human
aggccaaguagcuagcauugaa

SEQ ID NO: 1013806 - RNA, 23 nt, Human
caggacaugggaggaaguauggc

SEQ ID NO: 1013807 - RNA, 22 nt, Human
ggcuugcuucuuguccaggaau

SEQ ID NO: 1013808 - RNA, 22 nt, Human
cagccaucaguaaagacagcuu

SEQ ID NO: 1013809 - RNA, 22 nt, Human
cccugcagcauucucuaacugg

SEQ ID NO: 1013810 - RNA, 22 nt, Human
agcaaaguagcugcuguucuua

SEQ ID NO: 1013811 - RNA, 21 nt, Human
gcacagugccaggcacacagu

SEQ ID NO: 1013812 - RNA, 22 nt, Human
uucaacuaauguuuauuuuaug

SEQ ID NO: 1013813 - RNA, 22 nt, Human
gaaauaagaguccaugccaggu

SEQ ID NO: 1013814 - RNA, 22 nt, Human
ucugaaggugcuagagaaagcu

SEQ ID NO: 1013815 - RNA, 22 nt, Human
ccagcuccagguagaugggcag

SEQ ID NO: 1013816 - RNA, 22 nt, Human
caaauguguuuuuucuucuaca

SEQ ID NO: 1013817 - RNA, 22 nt, Human
cugcuucugggaugauggagua

SEQ ID NO: 1013818 - RNA, 22 nt, Human
aagccucaccuuuuagaagcua

SEQ ID NO: 1013819 - RNA, 22 nt, Human
cagcuuuaguaacccacugcuc

SEQ ID NO: 1013820 - RNA, 21 nt, Human
uaaaucucuguauucuucagu

SEQ ID NO: 1013821 - RNA, 22 nt, Human
agccccaggcccggacgccucu

SEQ ID NO: 1013822 - RNA, 22 nt, Human
aaaggccaccaacaugaagcau

SEQ ID NO: 1013823 - RNA, 22 nt, Human
acugccuugucucuugccuguu

SEQ ID NO: 1013824 - RNA, 22 nt, Human
ucuggagcuuccucauuuacag

SEQ ID NO: 1013825 - RNA, 22 nt, Human
auuuguaauuucuuaucugugu

SEQ ID NO: 1013826 - RNA, 22 nt, Human
uuuguuaaauauuuauugagug

SEQ ID NO: 1013827 - RNA, 22 nt, Human
uauuugaaaguguacaaaaacu

SEQ ID NO: 1013828 - RNA, 22 nt, Human
ggcucuggguucugcaaugcgu

SEQ ID NO: 1013829 - RNA, 22 nt, Human
aauauuuguuaguguuuuaaug

SEQ ID NO: 1013830 - RNA, 22 nt, Human
cagcaggcucugaguggcugcc

SEQ ID NO: 1013831 - RNA, 22 nt, Human
cugcaggggcuggaguuggcuu

SEQ ID NO: 1013832 - RNA, 22 nt, Human
aggggccugguuggccucuguu

SEQ ID NO: 1013833 - RNA, 22 nt, Human
aaagcucuuauagcagagugug

SEQ ID NO: 1013834 - RNA, 19 nt, Human
acuggcaguuucugcaugg

SEQ ID NO: 1013835 - RNA, 22 nt, Human
aagauggagcacgagcagaagc

SEQ ID NO: 1013836 - RNA, 22 nt, Human
gcugcugucacggugcuaaggg

SEQ ID NO: 1013837 - RNA, 22 nt, Human
uccuugaauugugccacuuacc

SEQ ID NO: 1013838 - RNA, 22 nt, Human
agcccuccucacaucagcgucc

SEQ ID NO: 1013839 - RNA, 22 nt, Human
uucaagaucgaguuuaaaguga

SEQ ID NO: 1013840 - RNA, 22 nt, Human
ugcugaaaacucaaccauugug

SEQ ID NO: 1013841 - RNA, 22 nt, Human
ggcugggcucgcugauuggcug

SEQ ID NO: 1013842 - RNA, 19 nt, Human
uguguguuuauauauguau

SEQ ID NO: 1013843 - RNA, 22 nt, Human
ugcuuaaaaugaugauuauuuu

SEQ ID NO: 1013844 - RNA, 22 nt, Human
agggaguuagaaauccaggaua

SEQ ID NO: 1013845 - RNA, 22 nt, Human
aaaaguguccagauuaugaaga

SEQ ID NO: 1013846 - RNA, 22 nt, Human
gccagacacuccccugggcagg

SEQ ID NO: 1013847 - RNA, 22 nt, Human
cauuuauucauuugcuagggcu

SEQ ID NO: 1013848 - RNA, 22 nt, Human
agaacagaggccuuauguuuca

SEQ ID NO: 1013849 - RNA, 22 nt, Human
uauugaguuacagaaaauacuu

SEQ ID NO: 1013850 - RNA, 23 nt, Human
acuuuagauaaauuaugugcaca

SEQ ID NO: 1013851 - RNA, 21 nt, Human
agagaagggacucuuccaguc

SEQ ID NO: 1013852 - RNA, 19 nt, Human
cucagagaggggcagugcc

SEQ ID NO: 1013853 - RNA, 22 nt, Human
auaugcaagcacauagaauacu

SEQ ID NO: 1013854 - RNA, 22 nt, Human
uccaaggcauagacacagugcc

SEQ ID NO: 1013855 - RNA, 20 nt, Human
gucugaggagcagugggaaa

SEQ ID NO: 1013856 - RNA, 22 nt, Human
ucugucacucuagagauggcag

SEQ ID NO: 1013857 - RNA, 22 nt, Human
ggcuggccuguguggccgccac

SEQ ID NO: 1013858 - RNA, 22 nt, Human
agcugucuuucugccuccugau

SEQ ID NO: 1013859 - RNA, 22 nt, Human
uagaaaugcccagauucugcua

SEQ ID NO: 1013860 - RNA, 22 nt, Human
aagggcucuucuauuuauggcc

SEQ ID NO: 1013861 - RNA, 22 nt, Human
auuguacuuuuauuacauguag

SEQ ID NO: 1013862 - RNA, 21 nt, Human
ugaagccugaggcauagcccc

SEQ ID NO: 1013863 - RNA, 22 nt, Human
ugaggcacaggcagugcccccg

SEQ ID NO: 1013864 - RNA, 22 nt, Human
auguccagagccggccugcuga

SEQ ID NO: 1013865 - RNA, 22 nt, Human
gccaggcagacaggucaucagg

SEQ ID NO: 1013866 - RNA, 20 nt, Human
agaauucuuacccuuugaug

SEQ ID NO: 1013867 - RNA, 22 nt, Human
cuuucauuugauaagaaugcca

SEQ ID NO: 1013868 - RNA, 20 nt, Human
gcaaauggaucccacaagcc

SEQ ID NO: 1013869 - RNA, 20 nt, Human
ucaggcaguggggaaaggca

SEQ ID NO: 1013870 - RNA, 22 nt, Human
uuuccucuucgauuaaguuugg

SEQ ID NO: 1013871 - RNA, 22 nt, Human
acacagggauauuucagguggu

SEQ ID NO: 1013872 - RNA, 22 nt, Human
gugucccaaucuacuuuucccu

SEQ ID NO: 1013873 - RNA, 22 nt, Human
gccaggguggcagaaggcccca

SEQ ID NO: 1013874 - RNA, 22 nt, Human
gcccucuggcagccuuggcugg

SEQ ID NO: 1013875 - RNA, 22 nt, Human
ucucuggggauggaccugggag

SEQ ID NO: 1013876 - RNA, 22 nt, Human
ucacacguccuugcuacuccuc

SEQ ID NO: 1013877 - RNA, 22 nt, Human
aguggggucuccuccagccccc

SEQ ID NO: 1013878 - RNA, 22 nt, Human
auguauuucuauguagugaaga

SEQ ID NO: 1013879 - RNA, 22 nt, Human
caggcugggacugaccccugcu

SEQ ID NO: 1013880 - RNA, 22 nt, Human
agaaaguuuugugcuauauaug

SEQ ID NO: 1013881 - RNA, 22 nt, Human
acuguucauccuuuuugaacaa

SEQ ID NO: 1013882 - RNA, 22 nt, Human
cauugcacuccagcuugggcaa

SEQ ID NO: 1013883 - RNA, 22 nt, Human
ggcugcagagcugggugggccu

SEQ ID NO: 1013884 - RNA, 22 nt, Human
ugagccuggagucguggagggg

SEQ ID NO: 1013885 - RNA, 22 nt, Human
gccucugcgccucagccgaccu

SEQ ID NO: 1013886 - RNA, 23 nt, Human
aauguauguuaguaucuuagaga

SEQ ID NO: 1013887 - RNA, 19 nt, Human
ucaaugcaugaaaucagcc

SEQ ID NO: 1013888 - RNA, 22 nt, Human
ccuccugggacaggcuggcaca

SEQ ID NO: 1013889 - RNA, 22 nt, Human
aggcccugcccagagcuccucg

SEQ ID NO: 1013890 - RNA, 22 nt, Human
aacuuucagcaaguaauucugg

SEQ ID NO: 1013891 - RNA, 22 nt, Human
uagcacaucuucuuggccugca

SEQ ID NO: 1013892 - RNA, 22 nt, Human
gaggcaugucuggccuguccca

SEQ ID NO: 1013893 - RNA, 22 nt, Human
ugcauuguugaauauuucauag

SEQ ID NO: 1013894 - RNA, 22 nt, Human
cuggcagcuggaggcuagaggc

SEQ ID NO: 1013895 - RNA, 17 nt, Human
gccaaaggguuccaauc

SEQ ID NO: 1013896 - RNA, 22 nt, Human
accccaagacaguagaagagaa

SEQ ID NO: 1013897 - RNA, 22 nt, Human
ugaaaucugucccacuuuagcu

SEQ ID NO: 1013898 - RNA, 22 nt, Human
gcugcccuaauaucacauguua

SEQ ID NO: 1013899 - RNA, 22 nt, Human
ugccucuguggaaauggugguc

SEQ ID NO: 1013900 - RNA, 22 nt, Human
gcacugggggcagcagugaggg

SEQ ID NO: 1013901 - RNA, 22 nt, Human
gaggggcucuugggcaugaagg

SEQ ID NO: 1013902 - RNA, 22 nt, Human
ugccuggcaagaggggcuggcu

SEQ ID NO: 1013903 - RNA, 22 nt, Human
gcaaggaccuuugagcgugcca

SEQ ID NO: 1013904 - RNA, 22 nt, Human
agacagcaugauacaugaugcu

SEQ ID NO: 1013905 - RNA, 22 nt, Human
ucuguucacugagcaauggcaa

SEQ ID NO: 1013906 - RNA, 19 nt, Human
uacuuuuucaggacagagu

SEQ ID NO: 1013907 - RNA, 22 nt, Human
ucuuggagacucuuguauauuu

SEQ ID NO: 1013908 - RNA, 22 nt, Human
gcagcuuuaaucugaauaagua

SEQ ID NO: 1013909 - RNA, 22 nt, Human
gauuuccuugcauauugguaau

SEQ ID NO: 1013910 - RNA, 22 nt, Human
gaggaggaaacccuguuccucu

SEQ ID NO: 1013911 - RNA, 22 nt, Human
aggcuggcgucaggggcuguac

SEQ ID NO: 1013912 - RNA, 22 nt, Human
uggcagagaugaagaguuguuu

SEQ ID NO: 1013913 - RNA, 22 nt, Human
ccuggcagucaggggaguccuu

SEQ ID NO: 1013914 - RNA, 22 nt, Human
acagcuuuaguguggguggugc

SEQ ID NO: 1013915 - RNA, 22 nt, Human
gcugugugaaaacugggccugg

SEQ ID NO: 1013916 - RNA, 22 nt, Human
ugaggaugacgauggcaauggc

SEQ ID NO: 1013917 - RNA, 22 nt, Human
ugaggccacuuccccacagccc

SEQ ID NO: 1013918 - RNA, 22 nt, Human
augcuguguuuuaaauggaaau

SEQ ID NO: 1013919 - RNA, 22 nt, Human
ucucagagcucacaccuccugg

SEQ ID NO: 1013920 - RNA, 22 nt, Human
agagccuggucugagauaggac

SEQ ID NO: 1013921 - RNA, 22 nt, Human
ugugaaagucaaauuaauugaa

SEQ ID NO: 1013922 - RNA, 22 nt, Human
cagaggcugggaccucaggcau

SEQ ID NO: 1013923 - RNA, 23 nt, Human
cccuguagcccaggacaggcuuu

SEQ ID NO: 1013924 - RNA, 22 nt, Human
gcuuuguguagaaggaggaugg

SEQ ID NO: 1013925 - RNA, 22 nt, Human
aacaaucaaguuucuaaaugac

SEQ ID NO: 1013926 - RNA, 22 nt, Human
ccugcagguugcagaggcggaa

SEQ ID NO: 1013927 - RNA, 22 nt, Human
uaugaguacaaggacucugucu

SEQ ID NO: 1013928 - RNA, 22 nt, Human
guguguccucaguaguggcaug

SEQ ID NO: 1013929 - RNA, 22 nt, Human
uugcuuccucgaggccagcgug

SEQ ID NO: 1013930 - RNA, 22 nt, Human
uuuugaaagccagguuuguaug

SEQ ID NO: 1013931 - RNA, 22 nt, Human
aacagacaacuccuguggcuca

SEQ ID NO: 1013932 - RNA, 22 nt, Human
auauucuucuuguucagacuau

SEQ ID NO: 1013933 - RNA, 22 nt, Human
cauuuucucaaugaacccucuu

SEQ ID NO: 1013934 - RNA, 22 nt, Human
agccacaccuguccugccagcu

SEQ ID NO: 1013935 - RNA, 22 nt, Human
ccugucagcugauggcuaugua

SEQ ID NO: 1013936 - RNA, 22 nt, Human
aucugucaucagcaccacaggu

SEQ ID NO: 1013937 - RNA, 22 nt, Human
agucuacaaucuuaaaugaacu

SEQ ID NO: 1013938 - RNA, 22 nt, Human
uauguacacacacaugcaugua

SEQ ID NO: 1013939 - RNA, 22 nt, Human
cccagggaagggcuaccugagg

SEQ ID NO: 1013940 - RNA, 22 nt, Human
aaaauaucagcaaagggugaca

SEQ ID NO: 1013941 - RNA, 22 nt, Human
ccagucagccaagcugcagcgg

SEQ ID NO: 1013942 - RNA, 22 nt, Human
uauagaaguaagcauugugaug

SEQ ID NO: 1013943 - RNA, 22 nt, Human
cuuacauuaaguaagagauuga

SEQ ID NO: 1013944 - RNA, 22 nt, Human
uugcagggcaggaccauggaca

SEQ ID NO: 1013945 - RNA, 22 nt, Human
uguccucacaggaaugaacuuu

SEQ ID NO: 1013946 - RNA, 22 nt, Human
ggagggagucagcugauuagaa

SEQ ID NO: 1013947 - RNA, 22 nt, Human
ucucuggaguauaaccagggau

SEQ ID NO: 1013948 - RNA, 22 nt, Human
ggaggccaucuggcuggaggcu

SEQ ID NO: 1013949 - RNA, 19 nt, Human
uccaggcauccuucaggcu

SEQ ID NO: 1013950 - RNA, 19 nt, Human
uuugaaaggauuguuauuu

SEQ ID NO: 1013951 - RNA, 22 nt, Human
cugcccuguggcucugagucau

SEQ ID NO: 1013952 - RNA, 22 nt, Human
gcugucuggaggcucugaggga

SEQ ID NO: 1013953 - RNA, 22 nt, Human
cagcugcaguucaaugcuugcu

SEQ ID NO: 1013954 - RNA, 22 nt, Human
uagauuuccucuuccucauucc

SEQ ID NO: 1013955 - RNA, 22 nt, Human
ugggugagugggaaaagcccag

SEQ ID NO: 1013956 - RNA, 22 nt, Human
guuauaaauaccuaauaggauu

SEQ ID NO: 1013957 - RNA, 22 nt, Human
ccaaguacucucaccaaagcuu

SEQ ID NO: 1013958 - RNA, 22 nt, Human
cagaggaggccaccgcauaggc

SEQ ID NO: 1013959 - RNA, 22 nt, Human
ggcaaaaaguucccaucagugu

SEQ ID NO: 1013960 - RNA, 22 nt, Human
cuggccaggcucucacgugguc

SEQ ID NO: 1013961 - RNA, 22 nt, Human
auacuuucugaccaauuaauug

SEQ ID NO: 1013962 - RNA, 22 nt, Human
uuucuagaggcuccaggggagu

SEQ ID NO: 1013963 - RNA, 22 nt, Human
gccaguuccuguggagucagag

SEQ ID NO: 1013964 - RNA, 22 nt, Human
agccuucaaccuagcuagagca

SEQ ID NO: 1013965 - RNA, 22 nt, Human
agagcuguucaacguagcaaug

SEQ ID NO: 1013966 - RNA, 22 nt, Human
uuacaguuuaguccaagccaga

SEQ ID NO: 1013967 - RNA, 22 nt, Human
uaaguucaaugaacucaguucu

SEQ ID NO: 1013968 - RNA, 22 nt, Human
uucaagaucuuccaaaggauac

SEQ ID NO: 1013969 - RNA, 22 nt, Human
aauacuuuccuauauaaggugc

SEQ ID NO: 1013970 - RNA, 23 nt, Human
uggcucugagcuuccugguggcc

SEQ ID NO: 1013971 - RNA, 22 nt, Human
ugcuguggcaguuuauguauag

SEQ ID NO: 1013972 - RNA, 23 nt, Human
gccugggacucaggaggagcuca

SEQ ID NO: 1013973 - RNA, 22 nt, Human
gcagcuuuaaaggaggcucuga

SEQ ID NO: 1013974 - RNA, 22 nt, Human
uccugggccuguacuccauccg

SEQ ID NO: 1013975 - RNA, 22 nt, Human
cagagacuggagugcaguggcg

SEQ ID NO: 1013976 - RNA, 22 nt, Human
cagcuccucacgagucuugaaa

SEQ ID NO: 1013977 - RNA, 22 nt, Human
cagccagccucucaaccaugca

SEQ ID NO: 1013978 - RNA, 22 nt, Human
uguuccuaaauaugaauggaga

SEQ ID NO: 1013979 - RNA, 22 nt, Human
ugcaggcuguaaucugaggcua

SEQ ID NO: 1013980 - RNA, 22 nt, Human
acuguucacagauuagucgaug

SEQ ID NO: 1013981 - RNA, 22 nt, Human
gcuguauuccugcacuguauag

SEQ ID NO: 1013982 - RNA, 22 nt, Human
gcaaggacucccugggucauuc

SEQ ID NO: 1013983 - RNA, 18 nt, Human
ugagaggcagguagagga

SEQ ID NO: 1013984 - RNA, 22 nt, Human
gcagugacagggcugcugccuu

SEQ ID NO: 1013985 - RNA, 22 nt, Human
uucuacaugguugcucagaggg

SEQ ID NO: 1013986 - RNA, 22 nt, Human
uaguaucuuucuauauuuccca

SEQ ID NO: 1013987 - RNA, 22 nt, Human
ucuugauuacaaauaacaucau

SEQ ID NO: 1013988 - RNA, 22 nt, Human
uuuuucuugugcuggaucuaau

SEQ ID NO: 1013989 - RNA, 22 nt, Human
agcaccugcacaguggaggaaa

SEQ ID NO: 1013990 - RNA, 22 nt, Human
acagaauuaucaggaaauguua

SEQ ID NO: 1013991 - RNA, 22 nt, Human
uccagagccuauauguucaacu

SEQ ID NO: 1013992 - RNA, 20 nt, Human
cauuugaaucuccauucugc

SEQ ID NO: 1013993 - RNA, 22 nt, Human
cugccuuggaaaaugugguaau

SEQ ID NO: 1013994 - RNA, 22 nt, Human
ggcucagaaacuaaaggcgcug

SEQ ID NO: 1013995 - RNA, 22 nt, Human
cacugaagccacuggaagagga

SEQ ID NO: 1013996 - RNA, 19 nt, Human
gaguuauugccagggcaug

SEQ ID NO: 1013997 - RNA, 22 nt, Human
ugggcagaggcagcagaaaccu

SEQ ID NO: 1013998 - RNA, 22 nt, Human
cuguuuucaaagagagagaaug

SEQ ID NO: 1013999 - RNA, 22 nt, Human
uggaguuccuuugaaaggcucu

SEQ ID NO: 1014000 - RNA, 22 nt, Human
ccaggcuggauuuugcaguuca

SEQ ID NO: 1014001 - RNA, 22 nt, Human
uggcacugagcagccgcggcag

SEQ ID NO: 1014002 - RNA, 22 nt, Human
uuagaaaggagcuuauuucuuu

SEQ ID NO: 1014003 - RNA, 22 nt, Human
gcugggcuugguuucccugcuu

SEQ ID NO: 1014004 - RNA, 18 nt, Human
ugcuuuaugcuuauauaa

SEQ ID NO: 1014005 - RNA, 22 nt, Human
auuuucugguugagguuuaaca

SEQ ID NO: 1014006 - RNA, 22 nt, Human
ugcaguggaagagguggagauc

SEQ ID NO: 1014007 - RNA, 22 nt, Human
acauacuaugaauacauguguc

SEQ ID NO: 1014008 - RNA, 21 nt, Human
ucuagaauccuguauaagacu

SEQ ID NO: 1014009 - RNA, 19 nt, Human
uggggcuguguuuugaccc

SEQ ID NO: 1014010 - RNA, 22 nt, Human
ccuggcagcauugguagagauu

SEQ ID NO: 1014011 - RNA, 22 nt, Human
uaacagaauagcagaaacagaa

SEQ ID NO: 1014012 - RNA, 22 nt, Human
aaacacaccuuuggaacuguga

SEQ ID NO: 1014013 - RNA, 22 nt, Human
agagcccuuucuccaggcaccu

SEQ ID NO: 1014014 - RNA, 22 nt, Human
ccuggcacgaagggcugagguu

SEQ ID NO: 1014015 - RNA, 22 nt, Human
uaugaaacauucauacaaauaa

SEQ ID NO: 1014016 - RNA, 22 nt, Human
ucccagauuguugauggcuuaa

SEQ ID NO: 1014017 - RNA, 22 nt, Human
gccugccuggagcuugagguga

SEQ ID NO: 1014018 - RNA, 23 nt, Human
acacaaggguaacugccagccau

SEQ ID NO: 1014019 - RNA, 22 nt, Human
aaaauauuuuagggccaggaga

SEQ ID NO: 1014020 - RNA, 22 nt, Human
augggaggaucacuugaggcca

SEQ ID NO: 1014021 - RNA, 22 nt, Human
aacaaaugauuguugguuggag

SEQ ID NO: 1014022 - RNA, 22 nt, Human
uaaugucaaggugauagauuug

SEQ ID NO: 1014023 - RNA, 22 nt, Human
ucagugucuugggcuugaaugc

SEQ ID NO: 1014024 - RNA, 22 nt, Human
aaagccuugcccgucacuggga

SEQ ID NO: 1014025 - RNA, 22 nt, Human
gcugccuggagcucagccugcc

SEQ ID NO: 1014026 - RNA, 22 nt, Human
aggugaaguugaggaggcagaa

SEQ ID NO: 1014027 - RNA, 22 nt, Human
aucucuguaaaccauaaauuga

SEQ ID NO: 1014028 - RNA, 17 nt, Human
uuucagauucacuuucu

SEQ ID NO: 1014029 - RNA, 22 nt, Human
uuuauucugugcuacaugaaga

SEQ ID NO: 1014030 - RNA, 22 nt, Human
ccagcugcgggcaucgagaguu

SEQ ID NO: 1014031 - RNA, 22 nt, Human
gcagggucuugagaggcagcca

SEQ ID NO: 1014032 - RNA, 22 nt, Human
caugaagcauguuuugucauga

SEQ ID NO: 1014033 - RNA, 21 nt, Human
ggcccugguuacgccuccucu

SEQ ID NO: 1014034 - RNA, 22 nt, Human
cucagagcccaggguacacccg

SEQ ID NO: 1014035 - RNA, 23 nt, Human
gcagacagagcagacuaagacaa

SEQ ID NO: 1014036 - RNA, 22 nt, Human
cuggggcuucaaugcuucggug

SEQ ID NO: 1014037 - RNA, 22 nt, Human
cccagagccucauucuguuggg

SEQ ID NO: 1014038 - RNA, 22 nt, Human
gagcucuggguggcaggugucu

SEQ ID NO: 1014039 - RNA, 21 nt, Human
agggagcuauuuauaguaagc

SEQ ID NO: 1014040 - RNA, 22 nt, Human
aggccucuucagggagcaugga

SEQ ID NO: 1014041 - RNA, 22 nt, Human
uccucaggucaaagcaggagaa

SEQ ID NO: 1014042 - RNA, 22 nt, Human
uauuucugauugcucaugaggc

SEQ ID NO: 1014043 - RNA, 22 nt, Human
cuccagugcacccagaggauuu

SEQ ID NO: 1014044 - RNA, 22 nt, Human
cuucacauguuggaguccuuug

SEQ ID NO: 1014045 - RNA, 20 nt, Human
uuucugugcccaggucuguu

SEQ ID NO: 1014046 - RNA, 22 nt, Human
cagagcucagagcugccaggca

SEQ ID NO: 1014047 - RNA, 22 nt, Human
agggcagaaaccaccuugaugg

SEQ ID NO: 1014048 - RNA, 22 nt, Human
agucucagaaaauaugcuuuuu

SEQ ID NO: 1014049 - RNA, 22 nt, Human
ccugggcagggcuggacucuca

SEQ ID NO: 1014050 - RNA, 22 nt, Human
cugagaggugacagcgugcugg

SEQ ID NO: 1014051 - RNA, 22 nt, Human
cauguuaauaugcauugaguac

SEQ ID NO: 1014052 - RNA, 22 nt, Human
uugaaggaggcuccuuuuuaaa

SEQ ID NO: 1014053 - RNA, 22 nt, Human
ucagggcagguuaacuugggug

SEQ ID NO: 1014054 - RNA, 22 nt, Human
aggcacugguccauuuucugca

SEQ ID NO: 1014055 - RNA, 22 nt, Human
ucagggcaaagggcagaguuug

SEQ ID NO: 1014056 - RNA, 18 nt, Human
gcugucugaggucugagg

SEQ ID NO: 1014057 - RNA, 22 nt, Human
gcaggccucuguugagggccuu

SEQ ID NO: 1014058 - RNA, 22 nt, Human
uuucacaaaugucuuuaacuug

SEQ ID NO: 1014059 - RNA, 22 nt, Human
gcaggcaguuauuuaguagaau

SEQ ID NO: 1014060 - RNA, 22 nt, Human
gccuugccucagccauggaaac

SEQ ID NO: 1014061 - RNA, 22 nt, Human
aauaugugagguauguucagug

SEQ ID NO: 1014062 - RNA, 22 nt, Human
uucucagugaaguuuagaacau

SEQ ID NO: 1014063 - RNA, 22 nt, Human
uccuggguccauggcagccgaa

SEQ ID NO: 1014064 - RNA, 22 nt, Human
ucaggaugagcucauaacuaug

SEQ ID NO: 1014065 - RNA, 22 nt, Human
agggagagguugaaaccucagu

SEQ ID NO: 1014066 - RNA, 22 nt, Human
uauuuagaaugcguguacgugu

SEQ ID NO: 1014067 - RNA, 21 nt, Human
ccaggcagagcugugaguucu

SEQ ID NO: 1014068 - RNA, 22 nt, Human
gauguuucaugcuagcaugugu

SEQ ID NO: 1014069 - RNA, 22 nt, Human
ccaucagcaugggagcaugggc

SEQ ID NO: 1014070 - RNA, 22 nt, Human
cuguggaguuuguggcgcugac

SEQ ID NO: 1014071 - RNA, 22 nt, Human
aguucucaagacaauuaccugu

SEQ ID NO: 1014072 - RNA, 22 nt, Human
uuaaagaugcagcuuuagagaa

SEQ ID NO: 1014073 - RNA, 22 nt, Human
cagggccugcuuccuucuuguu

SEQ ID NO: 1014074 - RNA, 22 nt, Human
agcagcaggagccgugggguga

SEQ ID NO: 1014075 - RNA, 17 nt, Human
ugaaggccaugaccacg

SEQ ID NO: 1014076 - RNA, 22 nt, Human
aucaggauuauuaaaucuggau

SEQ ID NO: 1014077 - RNA, 22 nt, Human
gcucugagcacugugcggcugg

SEQ ID NO: 1014078 - RNA, 22 nt, Human
ccugggagcuguggaaaggcug

SEQ ID NO: 1014079 - RNA, 22 nt, Human
cuucaagagaaugcagggaugu

SEQ ID NO: 1014080 - RNA, 22 nt, Human
gccugccugcugugugcaaguu

SEQ ID NO: 1014081 - RNA, 22 nt, Human
aggcccugagaaaaucccugca

SEQ ID NO: 1014082 - RNA, 22 nt, Human
ugcccagcacugugccagucac

SEQ ID NO: 1014083 - RNA, 22 nt, Human
guagggacaauauguuauuaga

SEQ ID NO: 1014084 - RNA, 22 nt, Human
guacauguugguuguuuccagu

SEQ ID NO: 1014085 - RNA, 22 nt, Human
uuaugcaaaggggccucuuccu

SEQ ID NO: 1014086 - RNA, 22 nt, Human
augucuuuggcuuugacauggc

SEQ ID NO: 1014087 - RNA, 23 nt, Human
ggcacugaagcuacaauggugag

SEQ ID NO: 1014088 - RNA, 22 nt, Human
ccuggcagacugugagggcagg

SEQ ID NO: 1014089 - RNA, 22 nt, Human
cugggcaguuuuacaucauugc

SEQ ID NO: 1014090 - RNA, 22 nt, Human
ugagccuggccugcagagacca

SEQ ID NO: 1014091 - RNA, 22 nt, Human
uacaguagaauuuuuaguaacu

SEQ ID NO: 1014092 - RNA, 22 nt, Human
ccaggccauucccagaguugcu

SEQ ID NO: 1014093 - RNA, 22 nt, Human
guggccagcaagugcugccucu

SEQ ID NO: 1014094 - RNA, 22 nt, Human
ccugcuucagggaugauggcac

SEQ ID NO: 1014095 - RNA, 22 nt, Human
uguagcacagagcuuugacacu

SEQ ID NO: 1014096 - RNA, 22 nt, Human
gccaggcaugggcuucugggcg

SEQ ID NO: 1014097 - RNA, 22 nt, Human
ugccagccagguucugaggcua

SEQ ID NO: 1014098 - RNA, 22 nt, Human
aucugucuugccuugcauauuu

SEQ ID NO: 1014099 - RNA, 22 nt, Human
acaggacuguggaaggaucucu

SEQ ID NO: 1014100 - RNA, 22 nt, Human
cagcuggcuccaccucugggcu

SEQ ID NO: 1014101 - RNA, 22 nt, Human
gauaccagacagggagggagaa

SEQ ID NO: 1014102 - RNA, 19 nt, Human
agucccaggcccgaaagag

SEQ ID NO: 1014103 - RNA, 22 nt, Human
gaccaaggaagaggggagccag

SEQ ID NO: 1014104 - RNA, 22 nt, Human
ccagccuggacugggucuugug

SEQ ID NO: 1014105 - RNA, 22 nt, Human
ucagagaguuggaaagaauuaa

SEQ ID NO: 1014106 - RNA, 22 nt, Human
aaaugcuugcucuugauuauuu

SEQ ID NO: 1014107 - RNA, 22 nt, Human
caucacccggaacugugucugc

SEQ ID NO: 1014108 - RNA, 22 nt, Human
uagcuuuccuuguugccugugc

SEQ ID NO: 1014109 - RNA, 22 nt, Human
ggguccagacacuccagaggaa

SEQ ID NO: 1014110 - RNA, 22 nt, Human
accaucaguacuggaugcugac

SEQ ID NO: 1014111 - RNA, 22 nt, Human
uucuucaaaauccagcaugauu

SEQ ID NO: 1014112 - RNA, 22 nt, Human
guggagacuucuacuagagacc

SEQ ID NO: 1014113 - RNA, 22 nt, Human
gggcugacaccacccaggcgca

SEQ ID NO: 1014114 - RNA, 22 nt, Human
cucuggaguucucaugaggaac

SEQ ID NO: 1014115 - RNA, 19 nt, Human
cagcugccuuuucuuugca

SEQ ID NO: 1014116 - RNA, 22 nt, Human
gaaacuuacuuacucacauuuc

SEQ ID NO: 1014117 - RNA, 22 nt, Human
uuguccuuaccucaaucuggaa

SEQ ID NO: 1014118 - RNA, 22 nt, Human
uaaauucccaacucugcucuuc

SEQ ID NO: 1014119 - RNA, 22 nt, Human
aaaguuguucaguaagaaacuc

SEQ ID NO: 1014120 - RNA, 22 nt, Human
uauguuaaauguuugauguuua

SEQ ID NO: 1014121 - RNA, 22 nt, Human
ugaagcaggugaauggaugucg

SEQ ID NO: 1014122 - RNA, 22 nt, Human
gagcuggcuccgccaugcugcu

SEQ ID NO: 1014123 - RNA, 22 nt, Human
aggcaguggcugagaccagggg

SEQ ID NO: 1014124 - RNA, 22 nt, Human
ggcuucagugacuggugcccuc

SEQ ID NO: 1014125 - RNA, 22 nt, Human
guuaauuugcagcuuucgagcu

SEQ ID NO: 1014126 - RNA, 22 nt, Human
agauggggcucaguguggaggc

SEQ ID NO: 1014127 - RNA, 22 nt, Human
gccaccagguuagauccagccu

SEQ ID NO: 1014128 - RNA, 22 nt, Human
aagaacaacugcuuuaaaagca

SEQ ID NO: 1014129 - RNA, 20 nt, Human
agggucaguagcacagagcu

SEQ ID NO: 1014130 - RNA, 22 nt, Human
ccugggagguggauguugcggu

SEQ ID NO: 1014131 - RNA, 22 nt, Human
cacuggggaaaacaggcuucuu

SEQ ID NO: 1014132 - RNA, 22 nt, Human
gauuuuucaguauaaaauauau

SEQ ID NO: 1014133 - RNA, 22 nt, Human
aucuguuccccuaugcucucua

SEQ ID NO: 1014134 - RNA, 22 nt, Human
uacaacauuguguugcuucaua

SEQ ID NO: 1014135 - RNA, 22 nt, Human
uagcauuuauuccagauuugga

SEQ ID NO: 1014136 - RNA, 22 nt, Human
cuuucauucuuagauauuagug

SEQ ID NO: 1014137 - RNA, 22 nt, Human
ccagcuuuaucaagucugagcu

SEQ ID NO: 1014138 - RNA, 21 nt, Human
ggccugaguauaggacaggcc

SEQ ID NO: 1014139 - RNA, 22 nt, Human
aaggcuaugaucuuuuucauga

SEQ ID NO: 1014140 - RNA, 22 nt, Human
uucauacacgaaaaugcaugca

SEQ ID NO: 1014141 - RNA, 22 nt, Human
agcagagaagacacaggcuuca

SEQ ID NO: 1014142 - RNA, 22 nt, Human
cacuggaauauggcguugaacc

SEQ ID NO: 1014143 - RNA, 23 nt, Human
auggagcugguacuagcuaccuc

SEQ ID NO: 1014144 - RNA, 22 nt, Human
uuucauuuugguuaugccauaa

SEQ ID NO: 1014145 - RNA, 22 nt, Human
gggcugggcaugguguucccuc

SEQ ID NO: 1014146 - RNA, 22 nt, Human
ccagggcagcgccccuccacgc

SEQ ID NO: 1014147 - RNA, 22 nt, Human
cagcauuuggaggagaggcuuu

SEQ ID NO: 1014148 - RNA, 22 nt, Human
ccugugugcugaugacgacaga

SEQ ID NO: 1014149 - RNA, 22 nt, Human
gggaggucagggugccugcugg

SEQ ID NO: 1014150 - RNA, 22 nt, Human
aaugauggucauggcaacuuuu

SEQ ID NO: 1014151 - RNA, 22 nt, Human
cagggcaggaauuugacauugc

SEQ ID NO: 1014152 - RNA, 22 nt, Human
cuggguaaguuccuaaggcuca

SEQ ID NO: 1014153 - RNA, 22 nt, Human
agcuggugcugaagcucuugag

SEQ ID NO: 1014154 - RNA, 22 nt, Human
ucccagagcaguacuccaggag

SEQ ID NO: 1014155 - RNA, 20 nt, Human
aggcacuguugucuguaucc

SEQ ID NO: 1014156 - RNA, 22 nt, Human
aagccaggggcugcuuaggaga

SEQ ID NO: 1014157 - RNA, 22 nt, Human
auuauauaggacuugcccuucc

SEQ ID NO: 1014158 - RNA, 18 nt, Human
aucucccauuggccaagg

SEQ ID NO: 1014159 - RNA, 22 nt, Human
uucaggaugaaagugugcaaca

SEQ ID NO: 1014160 - RNA, 22 nt, Human
aacauuucagcaaauaagaaca

SEQ ID NO: 1014161 - RNA, 22 nt, Human
augcuguggccagaguucaacu

SEQ ID NO: 1014162 - RNA, 22 nt, Human
gcgaaaaauguguaaauauguu

SEQ ID NO: 1014163 - RNA, 22 nt, Human
gcuuccuggagggagagagcug

SEQ ID NO: 1014164 - RNA, 22 nt, Human
cccuuggggcucuuugccaggc

SEQ ID NO: 1014165 - RNA, 22 nt, Human
acugccuuauaugcugugugug

SEQ ID NO: 1014166 - RNA, 22 nt, Human
cuuggcagcuuuuggaggagcc

SEQ ID NO: 1014167 - RNA, 22 nt, Human
augcaccugaacuccaucagcu

SEQ ID NO: 1014168 - RNA, 22 nt, Human
cagcuggcaaguggagcagggu

SEQ ID NO: 1014169 - RNA, 22 nt, Human
uggacagcgaaagugccuggga

SEQ ID NO: 1014170 - RNA, 22 nt, Human
ggcugccuggaccuccucuuuc

SEQ ID NO: 1014171 - RNA, 22 nt, Human
ugaaagcagcaccaauaccauu

SEQ ID NO: 1014172 - RNA, 18 nt, Human
ggagagugagaucaaaca

SEQ ID NO: 1014173 - RNA, 22 nt, Human
agggugccugcugcagguucag

SEQ ID NO: 1014174 - RNA, 22 nt, Human
ucagaagccggaagugcuccuc

SEQ ID NO: 1014175 - RNA, 19 nt, Human
cagucccaaauucuuguca

SEQ ID NO: 1014176 - RNA, 18 nt, Human
cccagcuccacuucccuc

SEQ ID NO: 1014177 - RNA, 22 nt, Human
gcagcuguggguuccaagucua

SEQ ID NO: 1014178 - RNA, 22 nt, Human
gccuguguggaugcgccggugc

SEQ ID NO: 1014179 - RNA, 22 nt, Human
aucagcaagauugugucuugua

SEQ ID NO: 1014180 - RNA, 22 nt, Human
ccagcugguguuccuuaggacc

SEQ ID NO: 1014181 - RNA, 22 nt, Human
gcuagaaaucgacuucagaauu

SEQ ID NO: 1014182 - RNA, 22 nt, Human
ucagugcuucggcgagcaccua

SEQ ID NO: 1014183 - RNA, 22 nt, Human
gguccuggaaauugacggaaag

SEQ ID NO: 1014184 - RNA, 22 nt, Human
cagacagaaggcuccuugaggu

SEQ ID NO: 1014185 - RNA, 22 nt, Human
acagcuuuuuacuaauagauug

SEQ ID NO: 1014186 - RNA, 17 nt, Human
gucugggcuuuagagac

SEQ ID NO: 1014187 - RNA, 22 nt, Human
uuugaauagcauaggauuacau

SEQ ID NO: 1014188 - RNA, 17 nt, Human
agcagaagucagaggga

SEQ ID NO: 1014189 - RNA, 22 nt, Human
aauaacuuuuaaaagacccugg

SEQ ID NO: 1014190 - RNA, 22 nt, Human
ucugucuucaucagcaugugau

SEQ ID NO: 1014191 - RNA, 20 nt, Human
uuuacauuuugaaacaguga

SEQ ID NO: 1014192 - RNA, 22 nt, Human
gcucugugcaguucagggacac

SEQ ID NO: 1014193 - RNA, 22 nt, Human
guggaauguccuugaucauaag

SEQ ID NO: 1014194 - RNA, 22 nt, Human
caggccagguggcaggcaaaac

SEQ ID NO: 1014195 - RNA, 20 nt, Human
cuccucaguuccaugggagg

SEQ ID NO: 1014196 - RNA, 22 nt, Human
cuggccugugggcugucuccgg

SEQ ID NO: 1014197 - RNA, 22 nt, Human
cucaggaugucggugacuauug

SEQ ID NO: 1014198 - RNA, 22 nt, Human
cuugaaucuggcuuugccacuu

SEQ ID NO: 1014199 - RNA, 22 nt, Human
cccuggagugugacgaggcauu

SEQ ID NO: 1014200 - RNA, 22 nt, Human
uuuuauagcugaauaguauucc

SEQ ID NO: 1014201 - RNA, 22 nt, Human
ugccuguccugaggaugagggu

SEQ ID NO: 1014202 - RNA, 22 nt, Human
aaaaauguuaucuacuguccga

SEQ ID NO: 1014203 - RNA, 20 nt, Human
aggaaaaggguggugguaga

SEQ ID NO: 1014204 - RNA, 22 nt, Human
uguaguaagugcgcaauaaaua

SEQ ID NO: 1014205 - RNA, 22 nt, Human
cagcauuuaaugcagugcuucc

SEQ ID NO: 1014206 - RNA, 19 nt, Human
gccugccuggguuucugag

SEQ ID NO: 1014207 - RNA, 22 nt, Human
acaaagucuuuuacaacaguca

SEQ ID NO: 1014208 - RNA, 22 nt, Human
agagcuggaaucagaccucagg

SEQ ID NO: 1014209 - RNA, 22 nt, Human
agugugucugaucacuugugag

SEQ ID NO: 1014210 - RNA, 22 nt, Human
cagcuggcguggagugauugca

SEQ ID NO: 1014211 - RNA, 22 nt, Human
ugcuggcccuggcucagggaac

SEQ ID NO: 1014212 - RNA, 22 nt, Human
gguggccucgguggugcacagg

SEQ ID NO: 1014213 - RNA, 22 nt, Human
acaggccugagauuuugcauuu

SEQ ID NO: 1014214 - RNA, 22 nt, Human
acugauuacacgaguucugacu

SEQ ID NO: 1014215 - RNA, 22 nt, Human
gaggcugauucggggaacagca

SEQ ID NO: 1014216 - RNA, 22 nt, Human
ggcuggcacugaggagagcucu

SEQ ID NO: 1014217 - RNA, 22 nt, Human
aggaccugagaguuggaaaucc

SEQ ID NO: 1014218 - RNA, 22 nt, Human
ggccaagauggaaggagagaug

SEQ ID NO: 1014219 - RNA, 22 nt, Human
ccugcagaccacacucaguccu

SEQ ID NO: 1014220 - RNA, 23 nt, Human
auuucuaggggauuuucuggugc

SEQ ID NO: 1014221 - RNA, 22 nt, Human
auuaauuuuucugacagccaca

SEQ ID NO: 1014222 - RNA, 22 nt, Human
agcaggugaauuccuggaugug

SEQ ID NO: 1014223 - RNA, 22 nt, Human
uagggcucagaguccaguuucu

SEQ ID NO: 1014224 - RNA, 22 nt, Human
uuugaacaagagcuucacauua

SEQ ID NO: 1014225 - RNA, 22 nt, Human
cucugggcaggaccaguggacc

SEQ ID NO: 1014226 - RNA, 22 nt, Human
ugcccaaguguuuggcugaguc

SEQ ID NO: 1014227 - RNA, 22 nt, Human
ggcucagguuaccagucccucc

SEQ ID NO: 1014228 - RNA, 22 nt, Human
ugggggagccuucacaguagcu

SEQ ID NO: 1014229 - RNA, 22 nt, Human
ugaugauguuuaucuugguauu

SEQ ID NO: 1014230 - RNA, 22 nt, Human
ucuggcucagggcucugaggga

SEQ ID NO: 1014231 - RNA, 21 nt, Human
aaaguucaugcuuuaauauuc

SEQ ID NO: 1014232 - RNA, 22 nt, Human
guuuuuccugcugacuuggguc

SEQ ID NO: 1014233 - RNA, 17 nt, Human
aaguccagaguugagca

SEQ ID NO: 1014234 - RNA, 22 nt, Human
accagcucagaagccagaaaga

SEQ ID NO: 1014235 - RNA, 22 nt, Human
uggccucaagucugagggccuu

SEQ ID NO: 1014236 - RNA, 22 nt, Human
ccuuuccuuuuuagugugggag

SEQ ID NO: 1014237 - RNA, 22 nt, Human
uuguuuuaucuuucuacagacu

SEQ ID NO: 1014238 - RNA, 22 nt, Human
gggcugagggguaucucauggg

SEQ ID NO: 1014239 - RNA, 21 nt, Human
agagucugcauuucugacaag

SEQ ID NO: 1014240 - RNA, 22 nt, Human
uggcagcugauuagauggugcc

SEQ ID NO: 1014241 - RNA, 23 nt, Human
gugcucugcggucugcuagucug

SEQ ID NO: 1014242 - RNA, 22 nt, Human
aucaguuugagugcugugucaa

SEQ ID NO: 1014243 - RNA, 22 nt, Human
auguuucagauacagaucaaau

SEQ ID NO: 1014244 - RNA, 19 nt, Human
agacaaguuuccagaagcc

SEQ ID NO: 1014245 - RNA, 22 nt, Human
uaagaacaguagaacaguaggu

SEQ ID NO: 1014246 - RNA, 22 nt, Human
uuuaguagaaugauacagggca

SEQ ID NO: 1014247 - RNA, 22 nt, Human
ugggagaagcagcagccaagug

SEQ ID NO: 1014248 - RNA, 20 nt, Human
ggcugcugugggcagagagg

SEQ ID NO: 1014249 - RNA, 22 nt, Human
aucagcaagcaugguuaggugu

SEQ ID NO: 1014250 - RNA, 22 nt, Human
gccuugggcacaggcagggccc

SEQ ID NO: 1014251 - RNA, 22 nt, Human
auuuuuaugacaaaccauccuc

SEQ ID NO: 1014252 - RNA, 22 nt, Human
ccaggacuuauuacaguauaac

SEQ ID NO: 1014253 - RNA, 22 nt, Human
gcagggacaucuuugucuagua

SEQ ID NO: 1014254 - RNA, 22 nt, Human
uuaagauagaacccaguagucu

SEQ ID NO: 1014255 - RNA, 22 nt, Human
agagccugcaucaggcuugggg

SEQ ID NO: 1014256 - RNA, 22 nt, Human
ucagaggauugccucagcgagc

SEQ ID NO: 1014257 - RNA, 22 nt, Human
ucuaaaaaagucuguucacuug

SEQ ID NO: 1014258 - RNA, 22 nt, Human
uaaauuauguuccauguccuuu

SEQ ID NO: 1014259 - RNA, 22 nt, Human
ucauguaaguauagaaagcagu

SEQ ID NO: 1014260 - RNA, 22 nt, Human
uaauuuuaugacaguguauuuu

SEQ ID NO: 1014261 - RNA, 22 nt, Human
ugcuggcuguauaugugagagu

SEQ ID NO: 1014262 - RNA, 22 nt, Human
aaguuucauuguucauguaaca

SEQ ID NO: 1014263 - RNA, 22 nt, Human
augaaaacggaccagagcuauu

SEQ ID NO: 1014264 - RNA, 22 nt, Human
uccuugaagaaugauucuugga

SEQ ID NO: 1014265 - RNA, 22 nt, Human
aucuuucagagcuccaucaggg

SEQ ID NO: 1014266 - RNA, 20 nt, Human
uacugggcaagcccacagac

SEQ ID NO: 1014267 - RNA, 22 nt, Human
aauguugaggauaucagaaaau

SEQ ID NO: 1014268 - RNA, 22 nt, Human
uaccugcaaaguuccuuuugcc

SEQ ID NO: 1014269 - RNA, 22 nt, Human
gcaugugucuccccaguggagg

SEQ ID NO: 1014270 - RNA, 20 nt, Human
agaaauauugaguucagagg

SEQ ID NO: 1014271 - RNA, 22 nt, Human
uaagacaauucuucagucacaa

SEQ ID NO: 1014272 - RNA, 22 nt, Human
uccugccuguuuaccuguacuu

SEQ ID NO: 1014273 - RNA, 22 nt, Human
auuaaaauuccaagguaugcca

SEQ ID NO: 1014274 - RNA, 22 nt, Human
ggccuugggcagacacgucaca

SEQ ID NO: 1014275 - RNA, 22 nt, Human
gcugugaguggaggaggcugag

SEQ ID NO: 1014276 - RNA, 23 nt, Human
uuuauuuauuuaggcugagggau

SEQ ID NO: 1014277 - RNA, 22 nt, Human
ucuggagccuuggaugggaaag

SEQ ID NO: 1014278 - RNA, 22 nt, Human
agggcuggcaagggauugaaau

SEQ ID NO: 1014279 - RNA, 22 nt, Human
ucugucugcucauuuaccucag

SEQ ID NO: 1014280 - RNA, 22 nt, Human
aaggcacugaaaaauugugugu

SEQ ID NO: 1014281 - RNA, 22 nt, Human
acagcagagugugagauagcca

SEQ ID NO: 1014282 - RNA, 22 nt, Human
uugggagcaaauaggaaagagg

SEQ ID NO: 1014283 - RNA, 22 nt, Human
cauugcuuugugcauauuuaaa

SEQ ID NO: 1014284 - RNA, 22 nt, Human
aaauaguuacuucugcugucuu

SEQ ID NO: 1014285 - RNA, 22 nt, Human
caaauucacaugauugcuucug

SEQ ID NO: 1014286 - RNA, 22 nt, Human
uauuuugacuauuaaaccaaca

SEQ ID NO: 1014287 - RNA, 22 nt, Human
uauucacaaaaugagguccuca

SEQ ID NO: 1014288 - RNA, 22 nt, Human
ucaggggcccuucccucagcag

SEQ ID NO: 1014289 - RNA, 20 nt, Human
ugaaaggugggaauuguggg

SEQ ID NO: 1014290 - RNA, 22 nt, Human
ugaaagguuaaaaguaguauug

SEQ ID NO: 1014291 - RNA, 22 nt, Human
uggcccuguggaggucagugag

SEQ ID NO: 1014292 - RNA, 22 nt, Human
agcuggagaucaugcugauacu

SEQ ID NO: 1014293 - RNA, 22 nt, Human
aucaguuuugggggacauacug

SEQ ID NO: 1014294 - RNA, 22 nt, Human
caacugcugacaccaucacucc

SEQ ID NO: 1014295 - RNA, 22 nt, Human
uugugucugggggagugacauc

SEQ ID NO: 1014296 - RNA, 22 nt, Human
aacagaaaagguagguggcuuu

SEQ ID NO: 1014297 - RNA, 22 nt, Human
uucaggauucugugucugacaa

SEQ ID NO: 1014298 - RNA, 22 nt, Human
ugcagcauucuuggccacuacu

SEQ ID NO: 1014299 - RNA, 22 nt, Human
agcugccaccucugccuuuggg

SEQ ID NO: 1014300 - RNA, 18 nt, Human
acagaaauagcugugccu

SEQ ID NO: 1014301 - RNA, 22 nt, Human
gauuucuuuagguguaauagug

SEQ ID NO: 1014302 - RNA, 22 nt, Human
gaacacauguccuccuuggauu

SEQ ID NO: 1014303 - RNA, 22 nt, Human
gcaggggcuacucugagcuucc

SEQ ID NO: 1014304 - RNA, 22 nt, Human
ccauggcaauggucagucuauu

SEQ ID NO: 1014305 - RNA, 22 nt, Human
gggugggguucaggaaucuuca

SEQ ID NO: 1014306 - RNA, 22 nt, Human
agcagggcagugaucagaaagg

SEQ ID NO: 1014307 - RNA, 22 nt, Human
gaggcugcccaacuggagugga

SEQ ID NO: 1014308 - RNA, 22 nt, Human
gggguugguuuaaaugcuugag

SEQ ID NO: 1014309 - RNA, 22 nt, Human
ggugaggggagagugaaagaaa

SEQ ID NO: 1014310 - RNA, 22 nt, Human
uaccugagcccagugcagcaua

SEQ ID NO: 1014311 - RNA, 20 nt, Human
guccaggacccagcaggagg

SEQ ID NO: 1014312 - RNA, 22 nt, Human
gccagcucccaagugagccccu

SEQ ID NO: 1014313 - RNA, 22 nt, Human
gcccuggccuucaucucagaca

SEQ ID NO: 1014314 - RNA, 22 nt, Human
ccagcuuguuugaagcucguca

SEQ ID NO: 1014315 - RNA, 22 nt, Human
gcaaggcugugcacuuugcauu

SEQ ID NO: 1014316 - RNA, 22 nt, Human
gagcaccgccuccacgaugccc

SEQ ID NO: 1014317 - RNA, 22 nt, Human
caggauggagggagggcuguua

SEQ ID NO: 1014318 - RNA, 22 nt, Human
ugaaaaggguagaucccuaagu

SEQ ID NO: 1014319 - RNA, 22 nt, Human
cagcuuugauucuuucugccau

SEQ ID NO: 1014320 - RNA, 22 nt, Human
uucauaaugagguccuagaggc

SEQ ID NO: 1014321 - RNA, 22 nt, Human
uucauguaauuccauaagguaa

SEQ ID NO: 1014322 - RNA, 22 nt, Human
aggggcucaaagugugcaggga

SEQ ID NO: 1014323 - RNA, 22 nt, Human
guauuagguuggugcaaaagua

SEQ ID NO: 1014324 - RNA, 22 nt, Human
ugucucugugacuccuuccgcc

SEQ ID NO: 1014325 - RNA, 22 nt, Human
cagccaggagccucugcaacua

SEQ ID NO: 1014326 - RNA, 22 nt, Human
cuggccuucagacucggacuga

SEQ ID NO: 1014327 - RNA, 22 nt, Human
agccugagugcuuaggacuguu

SEQ ID NO: 1014328 - RNA, 22 nt, Human
ccaggcucaggugcgagagaca

SEQ ID NO: 1014329 - RNA, 22 nt, Human
auacauuagaaucugguacuca

SEQ ID NO: 1014330 - RNA, 22 nt, Human
uaguaaaaguuuaguugaaagu

SEQ ID NO: 1014331 - RNA, 22 nt, Human
auguucuuccaaaucuguaaca

SEQ ID NO: 1014332 - RNA, 22 nt, Human
ggcucuggaaaguguccuugau

SEQ ID NO: 1014333 - RNA, 17 nt, Human
ugaauucaaucugcacu

SEQ ID NO: 1014334 - RNA, 22 nt, Human
ccugccugcuuucugcuuugca

SEQ ID NO: 1014335 - RNA, 21 nt, Human
uaugaacaugaccaauagucc

SEQ ID NO: 1014336 - RNA, 22 nt, Human
gaaauauuacaguggaggggau

SEQ ID NO: 1014337 - RNA, 22 nt, Human
caaggccauaagagauacaaaa

SEQ ID NO: 1014338 - RNA, 22 nt, Human
uacauauuugucuuuguacugu

SEQ ID NO: 1014339 - RNA, 22 nt, Human
acucucucacagcuuggcugau

SEQ ID NO: 1014340 - RNA, 22 nt, Human
gcagagugagccgaggcugcuc

SEQ ID NO: 1014341 - RNA, 23 nt, Human
gagagcugacugucaagacuguu

SEQ ID NO: 1014342 - RNA, 22 nt, Human
ugaaggccuaacuuccagugcu

SEQ ID NO: 1014343 - RNA, 22 nt, Human
gugcagguguuuuggcugccag

SEQ ID NO: 1014344 - RNA, 17 nt, Human
agcagcugaagcagcca

SEQ ID NO: 1014345 - RNA, 22 nt, Human
aggcaggugggucacuugaguc

SEQ ID NO: 1014346 - RNA, 22 nt, Human
ggaggccaaggaggagcuugcc

SEQ ID NO: 1014347 - RNA, 22 nt, Human
uuagggaaggcugcugucagcu

SEQ ID NO: 1014348 - RNA, 22 nt, Human
gucaaguuuauccgcucauuca

SEQ ID NO: 1014349 - RNA, 22 nt, Human
uggagccagcccaggccccucu

SEQ ID NO: 1014350 - RNA, 22 nt, Human
cagacacagauaugcauauggc

SEQ ID NO: 1014351 - RNA, 22 nt, Human
uguuuucauuugauguaacaaa

SEQ ID NO: 1014352 - RNA, 22 nt, Human
ucuuuacacaagacaagaauaa

SEQ ID NO: 1014353 - RNA, 22 nt, Human
cccucccaggaguggccagaga

SEQ ID NO: 1014354 - RNA, 21 nt, Human
cucacaggaugcaguguuacu

SEQ ID NO: 1014355 - RNA, 23 nt, Human
uugaaagguagcuggcagcuaga

SEQ ID NO: 1014356 - RNA, 22 nt, Human
ccuggcaggccccuccuggauu

SEQ ID NO: 1014357 - RNA, 22 nt, Human
ucauugcaggcauuccccugcc

SEQ ID NO: 1014358 - RNA, 22 nt, Human
gaggagcuggcagcgucuccgc

SEQ ID NO: 1014359 - RNA, 22 nt, Human
uugcugugaaaccaugggaagu

SEQ ID NO: 1014360 - RNA, 22 nt, Human
aauuugcaugaugagaacaaua

SEQ ID NO: 1014361 - RNA, 21 nt, Human
ucucuggaauuagaccauguu

SEQ ID NO: 1014362 - RNA, 22 nt, Human
ggaggcugcugccucacguggg

SEQ ID NO: 1014363 - RNA, 22 nt, Human
cagagccaugguaugggcuugu

SEQ ID NO: 1014364 - RNA, 22 nt, Human
aguccuuugggaaaaaugacua

SEQ ID NO: 1014365 - RNA, 22 nt, Human
uggcacugggacagaugcucuc

SEQ ID NO: 1014366 - RNA, 22 nt, Human
uaaaugugggggccacgggcuu

SEQ ID NO: 1014367 - RNA, 22 nt, Human
ugguacuuggaggcagaaaaau

SEQ ID NO: 1014368 - RNA, 22 nt, Human
ugagggaguuggguguauagga

SEQ ID NO: 1014369 - RNA, 22 nt, Human
gccaggcuggugucacaacucu

SEQ ID NO: 1014370 - RNA, 22 nt, Human
cccugcagggaggauucugaag

SEQ ID NO: 1014371 - RNA, 22 nt, Human
ucuccuuuaagauuuccucagg

SEQ ID NO: 1014372 - RNA, 22 nt, Human
ugagcccaggaguuggaggcug

SEQ ID NO: 1014373 - RNA, 22 nt, Human
gaggguccccaugcagagcuca

SEQ ID NO: 1014374 - RNA, 22 nt, Human
ggcgcuggccacgguggcucug

SEQ ID NO: 1014375 - RNA, 22 nt, Human
auaugaagucagacaaacuggg

SEQ ID NO: 1014376 - RNA, 22 nt, Human
acuguagcugccacuggaugca

SEQ ID NO: 1014377 - RNA, 22 nt, Human
aucauucuagcuguuguguuga

SEQ ID NO: 1014378 - RNA, 22 nt, Human
auaauaaaccaggaugggucug

SEQ ID NO: 1014379 - RNA, 22 nt, Human
acuucuugggacccuggcaccg

SEQ ID NO: 1014380 - RNA, 22 nt, Human
cccagcucaagcagagagcuaa

SEQ ID NO: 1014381 - RNA, 22 nt, Human
aggcucuguuauucuagagggc

SEQ ID NO: 1014382 - RNA, 22 nt, Human
uuuauucuugagagugagaaga

SEQ ID NO: 1014383 - RNA, 22 nt, Human
aauacaguaauuuugaugaguu

SEQ ID NO: 1014384 - RNA, 22 nt, Human
uugaaaaaauugguagaggaug

SEQ ID NO: 1014385 - RNA, 22 nt, Human
cagggccuucguaaguguccgg

SEQ ID NO: 1014386 - RNA, 22 nt, Human
aaaugucuguuagucauaucau

SEQ ID NO: 1014387 - RNA, 22 nt, Human
cacagcuucccaaaguggaccu

SEQ ID NO: 1014388 - RNA, 22 nt, Human
ugccugucuuuccucccucgua

SEQ ID NO: 1014389 - RNA, 22 nt, Human
aaaauccugcugacucgagaug

SEQ ID NO: 1014390 - RNA, 22 nt, Human
aguccaggaguugggugacauu

SEQ ID NO: 1014391 - RNA, 19 nt, Human
ugccagcauuaggcugaag

SEQ ID NO: 1014392 - RNA, 22 nt, Human
aaaggucagacuuaggcugggc

SEQ ID NO: 1014393 - RNA, 22 nt, Human
aggucacccguuugacuaucca

SEQ ID NO: 1014394 - RNA, 22 nt, Human
cuggagagauccuccugaaaaa

SEQ ID NO: 1014395 - RNA, 22 nt, Human
aggagcugaagucucugcacuc

SEQ ID NO: 1014396 - RNA, 22 nt, Human
uuuaaaaaacuagucugagucu

SEQ ID NO: 1014397 - RNA, 22 nt, Human
ggugaagggugucauggcauuu

SEQ ID NO: 1014398 - RNA, 22 nt, Human
aagauaauauucauuaacuaga

SEQ ID NO: 1014399 - RNA, 22 nt, Human
ggcugcuugcuguuucuuggau

SEQ ID NO: 1014400 - RNA, 22 nt, Human
ugaaugaguuuggcugcuguuc

SEQ ID NO: 1014401 - RNA, 22 nt, Human
cuggagcuccagggucuccucu

SEQ ID NO: 1014402 - RNA, 22 nt, Human
ggaccugcauuuuaacaagauc

SEQ ID NO: 1014403 - RNA, 22 nt, Human
accuugggcaaguuggaaacug

SEQ ID NO: 1014404 - RNA, 21 nt, Human
ugcagcugacacugguaugcc

SEQ ID NO: 1014405 - RNA, 22 nt, Human
agugaaauaugcccauugcugu

SEQ ID NO: 1014406 - RNA, 22 nt, Human
aggcugagauagguggaucauu

SEQ ID NO: 1014407 - RNA, 22 nt, Human
cccugcagagggaugggggcag

SEQ ID NO: 1014408 - RNA, 22 nt, Human
ccauggccgccgcugcucagga

SEQ ID NO: 1014409 - RNA, 22 nt, Human
ucugcugucacucauuugcuuc

SEQ ID NO: 1014410 - RNA, 22 nt, Human
ucuagaaacaugacauugaucu

SEQ ID NO: 1014411 - RNA, 22 nt, Human
auggggugagacuaggauuaaa

SEQ ID NO: 1014412 - RNA, 22 nt, Human
agcauccaacaggagggaaggg

SEQ ID NO: 1014413 - RNA, 22 nt, Human
uuuuccuuucaucaggacaaag

SEQ ID NO: 1014414 - RNA, 22 nt, Human
ucugugcauuguaacaacuaaa

SEQ ID NO: 1014415 - RNA, 22 nt, Human
ugggcuguccagcaccugggcu

SEQ ID NO: 1014416 - RNA, 22 nt, Human
cuuacauugucuuaguuuucaa

SEQ ID NO: 1014417 - RNA, 22 nt, Human
gcaagcugaugugauagugaaa

SEQ ID NO: 1014418 - RNA, 22 nt, Human
aguauguauuuuauacuuacag

SEQ ID NO: 1014419 - RNA, 22 nt, Human
agccuggaccaggggccucaga

SEQ ID NO: 1014420 - RNA, 22 nt, Human
aaugcauauguaggcaagcagu

SEQ ID NO: 1014421 - RNA, 22 nt, Human
uguauagaguuggaagaugacu

SEQ ID NO: 1014422 - RNA, 23 nt, Human
aaguucaagucacagccugucuu

SEQ ID NO: 1014423 - RNA, 22 nt, Human
aaggccauuauucugauauauu

SEQ ID NO: 1014424 - RNA, 19 nt, Human
ucacaggcaucuccccaga

SEQ ID NO: 1014425 - RNA, 22 nt, Human
uauacacaaggugugcauuugu

SEQ ID NO: 1014426 - RNA, 22 nt, Human
aggccuagaggaauggccaggg

SEQ ID NO: 1014427 - RNA, 20 nt, Human
ccaccuggccaaggcugugc

SEQ ID NO: 1014428 - RNA, 21 nt, Human
uggcucugaaagagugcugca

SEQ ID NO: 1014429 - RNA, 22 nt, Human
aggguggggugcuacaucuuua

SEQ ID NO: 1014430 - RNA, 22 nt, Human
gaguuauuuguagggauuauau

SEQ ID NO: 1014431 - RNA, 22 nt, Human
aggaccaguaugagagcaucug

SEQ ID NO: 1014432 - RNA, 22 nt, Human
augucacagcucccauuccucc

SEQ ID NO: 1014433 - RNA, 22 nt, Human
uccugcagagccgcccucaggu

SEQ ID NO: 1014434 - RNA, 22 nt, Human
agccacaggaaacagagacagc

SEQ ID NO: 1014435 - RNA, 22 nt, Human
ggagaggcgaugagucacagcc

SEQ ID NO: 1014436 - RNA, 22 nt, Human
auauuaggaguuaaauguauua

SEQ ID NO: 1014437 - RNA, 21 nt, Human
ucauuuuuauugcuaccuugc

SEQ ID NO: 1014438 - RNA, 22 nt, Human
uuguuucagcuguaugcuaugu

SEQ ID NO: 1014439 - RNA, 22 nt, Human
cuucuucaagagaaugggagac

SEQ ID NO: 1014440 - RNA, 22 nt, Human
cucucaggcuugggucguggca

SEQ ID NO: 1014441 - RNA, 22 nt, Human
gccugucugcgucacgcuuauu

SEQ ID NO: 1014442 - RNA, 22 nt, Human
cuccaggccagggaaguggaca

SEQ ID NO: 1014443 - RNA, 21 nt, Human
ggacuuacauagguaaggggu

SEQ ID NO: 1014444 - RNA, 22 nt, Human
agaaaugaaaccaaagccuaga

SEQ ID NO: 1014445 - RNA, 20 nt, Human
aaaauauguauaacucuucu

SEQ ID NO: 1014446 - RNA, 22 nt, Human
gcagggcugcagagggcacugu

SEQ ID NO: 1014447 - RNA, 22 nt, Human
uuauugccugauugaggucauu

SEQ ID NO: 1014448 - RNA, 22 nt, Human
ucaguuuugauuccugguucuc

SEQ ID NO: 1014449 - RNA, 22 nt, Human
accccagaggcggaggcugcag

SEQ ID NO: 1014450 - RNA, 22 nt, Human
ugcucugucaagaaaagaugcc

SEQ ID NO: 1014451 - RNA, 22 nt, Human
aaggccagacaggaccacaucu

SEQ ID NO: 1014452 - RNA, 19 nt, Human
ugaaggagggggauggcca

SEQ ID NO: 1014453 - RNA, 22 nt, Human
ccugucacgaugacugcacucu

SEQ ID NO: 1014454 - RNA, 22 nt, Human
cugggccagucucggccgcucu

SEQ ID NO: 1014455 - RNA, 22 nt, Human
aagauucagccaaauuguucau

SEQ ID NO: 1014456 - RNA, 22 nt, Human
ugaauaaucuuggguauuaaua

SEQ ID NO: 1014457 - RNA, 22 nt, Human
uuuccucugggcccugccaccc

SEQ ID NO: 1014458 - RNA, 22 nt, Human
auguuucaugacugagcaaaau

SEQ ID NO: 1014459 - RNA, 22 nt, Human
ucaggaauccagacagggcaca

SEQ ID NO: 1014460 - RNA, 22 nt, Human
auacaacagaaaaugauuauuc

SEQ ID NO: 1014461 - RNA, 18 nt, Human
guaggucaguaccaagca

SEQ ID NO: 1014462 - RNA, 22 nt, Human
aaaguucagugccuucuauaca

SEQ ID NO: 1014463 - RNA, 22 nt, Human
uccaugagagguaacuuuacaa

SEQ ID NO: 1014464 - RNA, 22 nt, Human
cugcugucuuuauuucacugcu

SEQ ID NO: 1014465 - RNA, 22 nt, Human
aggcugaggcagguggaucacc

SEQ ID NO: 1014466 - RNA, 22 nt, Human
cugcccugucugcagccuggcu

SEQ ID NO: 1014467 - RNA, 22 nt, Human
caaggccaguucaccaagggca

SEQ ID NO: 1014468 - RNA, 22 nt, Human
uuuagggacaagggucuggggu

SEQ ID NO: 1014469 - RNA, 22 nt, Human
gagcccaggcagagguugcagu

SEQ ID NO: 1014470 - RNA, 22 nt, Human
ucugggaagcugcgugccuguu

SEQ ID NO: 1014471 - RNA, 22 nt, Human
cacacaugucucuccaugcucu

SEQ ID NO: 1014472 - RNA, 22 nt, Human
cagguggcaugacugccuacaa

SEQ ID NO: 1014473 - RNA, 22 nt, Human
augggagccaucgcauuugcug

SEQ ID NO: 1014474 - RNA, 22 nt, Human
gguuucaaauuaaagucuuaag

SEQ ID NO: 1014475 - RNA, 22 nt, Human
ugcuacaauucacaucuggaua

SEQ ID NO: 1014476 - RNA, 22 nt, Human
ugcagaggagcuggaaggcugg

SEQ ID NO: 1014477 - RNA, 22 nt, Human
uuccuauuuccaugaaacacaa

SEQ ID NO: 1014478 - RNA, 22 nt, Human
uaugcacagaaguuugcugaau

SEQ ID NO: 1014479 - RNA, 22 nt, Human
ccacaggaccagaggagaucac

SEQ ID NO: 1014480 - RNA, 22 nt, Human
ugacaccacaacuagccauuga

SEQ ID NO: 1014481 - RNA, 22 nt, Human
ggggugggguuacucauugugc

SEQ ID NO: 1014482 - RNA, 22 nt, Human
uagugcuuaacacaaagugauu

SEQ ID NO: 1014483 - RNA, 22 nt, Human
gcuggccagugucccagggauc

SEQ ID NO: 1014484 - RNA, 22 nt, Human
aaaucuggccccuugccuauuu

SEQ ID NO: 1014485 - RNA, 20 nt, Human
agcccaggccugugugaguc

SEQ ID NO: 1014486 - RNA, 22 nt, Human
uuuuucaagacaaccugcaugu

SEQ ID NO: 1014487 - RNA, 22 nt, Human
ucacagggauggaauagaaaua

SEQ ID NO: 1014488 - RNA, 22 nt, Human
aggaggccgggauucuggagau

SEQ ID NO: 1014489 - RNA, 22 nt, Human
uaucuguuccaggcacucagcu

SEQ ID NO: 1014490 - RNA, 23 nt, Human
uugcauguagcccaugaguaacu

SEQ ID NO: 1014491 - RNA, 22 nt, Human
acuggagcccguggaggcgcag

SEQ ID NO: 1014492 - RNA, 22 nt, Human
cacaugggcguaauguccaugg

SEQ ID NO: 1014493 - RNA, 22 nt, Human
ucccuggacagccuugccuggg

SEQ ID NO: 1014494 - RNA, 22 nt, Human
cagcucugaagaaaggugucua

SEQ ID NO: 1014495 - RNA, 22 nt, Human
ccugccugucaucgccugcgcc

SEQ ID NO: 1014496 - RNA, 22 nt, Human
ugaaaucuacccuauucagggu

SEQ ID NO: 1014497 - RNA, 22 nt, Human
auuuuuccaugauacuuaucug

SEQ ID NO: 1014498 - RNA, 21 nt, Human
gagcauggcuuacaucagcag

SEQ ID NO: 1014499 - RNA, 21 nt, Human
uagggcucuauuuuuauuuca

SEQ ID NO: 1014500 - RNA, 22 nt, Human
cacucugacuggcccugcagga

SEQ ID NO: 1014501 - RNA, 22 nt, Human
uucuucaugcuguugcugcuug

SEQ ID NO: 1014502 - RNA, 20 nt, Human
agcuggccuguccuaggccu

SEQ ID NO: 1014503 - RNA, 22 nt, Human
ugggaccugaagcagguuggca

SEQ ID NO: 1014504 - RNA, 22 nt, Human
ucaugcuuauugcauauuugga

SEQ ID NO: 1014505 - RNA, 17 nt, Human
uauauguaugccucucc

SEQ ID NO: 1014506 - RNA, 22 nt, Human
cucaccaggaacagcugcggag

SEQ ID NO: 1014507 - RNA, 22 nt, Human
caaauguguagagcuuuugggg

SEQ ID NO: 1014508 - RNA, 22 nt, Human
ugcaggcaggggaugagcagcc

SEQ ID NO: 1014509 - RNA, 22 nt, Human
cugacccauauaagaguggagg

SEQ ID NO: 1014510 - RNA, 21 nt, Human
gcucucugcaugguggcucag

SEQ ID NO: 1014511 - RNA, 22 nt, Human
agucucugggcaugguugugac

SEQ ID NO: 1014512 - RNA, 22 nt, Human
ccaggggcuggugcugagcugg

SEQ ID NO: 1014513 - RNA, 22 nt, Human
ugcagaguaaaagcagaugcua

SEQ ID NO: 1014514 - RNA, 22 nt, Human
cuuuucaugccagcccaucaca

SEQ ID NO: 1014515 - RNA, 22 nt, Human
uucaggauucucucccauuuac

SEQ ID NO: 1014516 - RNA, 22 nt, Human
uuccaaaggaauggggagcuau

SEQ ID NO: 1014517 - RNA, 22 nt, Human
uuugacauuggcuuauucuguu

SEQ ID NO: 1014518 - RNA, 22 nt, Human
uagagcuagcuucaaaaugcga

SEQ ID NO: 1014519 - RNA, 22 nt, Human
agcacagauucugaagaguccu

SEQ ID NO: 1014520 - RNA, 22 nt, Human
agagacugcgugucagcgcugg

SEQ ID NO: 1014521 - RNA, 16 nt, Human
ugggaccuguggccaa

SEQ ID NO: 1014522 - RNA, 22 nt, Human
uuccuuaguugacugucuuagu

SEQ ID NO: 1014523 - RNA, 22 nt, Human
gggacaggccccucgcuagcuu

SEQ ID NO: 1014524 - RNA, 22 nt, Human
caauacuuccuuguuagaggca

SEQ ID NO: 1014525 - RNA, 22 nt, Human
gcuggcaucacuggcuucggug

SEQ ID NO: 1014526 - RNA, 22 nt, Human
aacaaauguguggcaguguggg

SEQ ID NO: 1014527 - RNA, 22 nt, Human
aaaucagugcucauuugaaagg

SEQ ID NO: 1014528 - RNA, 22 nt, Human
ucuuuguaacugucuauugaga

SEQ ID NO: 1014529 - RNA, 22 nt, Human
aucuggcucacuuagucuagga

SEQ ID NO: 1014530 - RNA, 18 nt, Human
ucugucuguacaaguauc

SEQ ID NO: 1014531 - RNA, 22 nt, Human
ggggcagagcauagcuccaauu

SEQ ID NO: 1014532 - RNA, 22 nt, Human
ucugucaccauucagcuugaau

SEQ ID NO: 1014533 - RNA, 22 nt, Human
guggcccugucccaggccuccu

SEQ ID NO: 1014534 - RNA, 22 nt, Human
agccacagucaaccuguccaua

SEQ ID NO: 1014535 - RNA, 22 nt, Human
agagcuguggauaguccuggau

SEQ ID NO: 1014536 - RNA, 22 nt, Human
gcagagccaggagagacccuug

SEQ ID NO: 1014537 - RNA, 22 nt, Human
uguucuuuggcuucacagcucu

SEQ ID NO: 1014538 - RNA, 22 nt, Human
guacaugucaaaaaaugcauaa

SEQ ID NO: 1014539 - RNA, 22 nt, Human
gaaggccaagaggcuccaagau

SEQ ID NO: 1014540 - RNA, 18 nt, Human
gucuggaggucaggagcu

SEQ ID NO: 1014541 - RNA, 22 nt, Human
agcagcugccagagagaguucc

SEQ ID NO: 1014542 - RNA, 22 nt, Human
uuccaugaaggagacugagaag

SEQ ID NO: 1014543 - RNA, 22 nt, Human
ucugagagccucuagccuaagu

SEQ ID NO: 1014544 - RNA, 22 nt, Human
uggcuggcgccgggcuagccac

SEQ ID NO: 1014545 - RNA, 22 nt, Human
uucaagaugccagggacgcggc

SEQ ID NO: 1014546 - RNA, 22 nt, Human
aaggcugagagucacaguccua

SEQ ID NO: 1014547 - RNA, 21 nt, Human
ugucagaaauaagcaugugau

SEQ ID NO: 1014548 - RNA, 22 nt, Human
uucugucucuguguuuacauua

SEQ ID NO: 1014549 - RNA, 22 nt, Human
uacauaauuaaucuuuaaguuc

SEQ ID NO: 1014550 - RNA, 22 nt, Human
ugcagggcacacgcacgggugu

SEQ ID NO: 1014551 - RNA, 22 nt, Human
ucaaaguaaaaguauagaguuu

SEQ ID NO: 1014552 - RNA, 22 nt, Human
uccagggcuuggcugggacggu

SEQ ID NO: 1014553 - RNA, 22 nt, Human
gcaguucuacuuauccauagac

SEQ ID NO: 1014554 - RNA, 22 nt, Human
cagaggccuauccaguguccau

SEQ ID NO: 1014555 - RNA, 22 nt, Human
ugcacacacaugaaguagcaug

SEQ ID NO: 1014556 - RNA, 22 nt, Human
uggggacacagagccaaacuau

SEQ ID NO: 1014557 - RNA, 22 nt, Human
aaguuucaaauguugauuaugc

SEQ ID NO: 1014558 - RNA, 22 nt, Human
gggacugggagauccuccuggc

SEQ ID NO: 1014559 - RNA, 22 nt, Human
ccaggagccacucaggcccaca

SEQ ID NO: 1014560 - RNA, 22 nt, Human
ccuguucaagggaugauugacc

SEQ ID NO: 1014561 - RNA, 21 nt, Human
ugaaugaggaggauggcauuu

SEQ ID NO: 1014562 - RNA, 22 nt, Human
gagcuuuaagggauaaaaugau

SEQ ID NO: 1014563 - RNA, 22 nt, Human
gacagcaggaugugaggggaug

SEQ ID NO: 1014564 - RNA, 22 nt, Human
uggggcgcgagguccuggcucc

SEQ ID NO: 1014565 - RNA, 22 nt, Human
gcagcugccccgacugugaguc

SEQ ID NO: 1014566 - RNA, 22 nt, Human
aggcucagagagcuguguccau

SEQ ID NO: 1014567 - RNA, 20 nt, Human
gcugucuggauuagaagccu

SEQ ID NO: 1014568 - RNA, 22 nt, Human
augaguaagaccauaauuuuug

SEQ ID NO: 1014569 - RNA, 22 nt, Human
aagcuuucagagcagaauguga

SEQ ID NO: 1014570 - RNA, 22 nt, Human
agugcauauaugaagaguauga

SEQ ID NO: 1014571 - RNA, 22 nt, Human
uauuccagaugaaaucauucag

SEQ ID NO: 1014572 - RNA, 22 nt, Human
caggaaugacugcagauggggc

SEQ ID NO: 1014573 - RNA, 22 nt, Human
caaaucuauauguugauauucu

SEQ ID NO: 1014574 - RNA, 22 nt, Human
gacagggcgcccagccuguuuc

SEQ ID NO: 1014575 - RNA, 22 nt, Human
uaagaauuguguugaauagagu

SEQ ID NO: 1014576 - RNA, 22 nt, Human
uccugccuaccuugcggaggug

SEQ ID NO: 1014577 - RNA, 22 nt, Human
ugaaggagcucaaugaugaugc

SEQ ID NO: 1014578 - RNA, 22 nt, Human
cauuugcagagggugacacucu

SEQ ID NO: 1014579 - RNA, 22 nt, Human
ugugaaaagcaggcuacuuucu

SEQ ID NO: 1014580 - RNA, 22 nt, Human
gcuggcuguuggagguaccugc

SEQ ID NO: 1014581 - RNA, 22 nt, Human
cuuccagagauagggccucaag

SEQ ID NO: 1014582 - RNA, 22 nt, Human
gacccaggguuucugcacaggg

SEQ ID NO: 1014583 - RNA, 22 nt, Human
caauuucuggaacuaauucuga

SEQ ID NO: 1014584 - RNA, 21 nt, Human
ggccuuggcgggggccgaauu

SEQ ID NO: 1014585 - RNA, 22 nt, Human
agaggcagcagucauacuacag

SEQ ID NO: 1014586 - RNA, 22 nt, Human
uccugaggcacaauccuagaau

SEQ ID NO: 1014587 - RNA, 19 nt, Human
ggaggccuggguauuugcc

SEQ ID NO: 1014588 - RNA, 22 nt, Human
gccugcagggccugggccuacc

SEQ ID NO: 1014589 - RNA, 18 nt, Human
acagaggcagacauguau

SEQ ID NO: 1014590 - RNA, 22 nt, Human
uggagcaggaagucuauggcug

SEQ ID NO: 1014591 - RNA, 22 nt, Human
cugcuucuaagaaccugcagcu

SEQ ID NO: 1014592 - RNA, 22 nt, Human
gagcugaguuaccuccagauca

SEQ ID NO: 1014593 - RNA, 22 nt, Human
caguacuuauuucuauuuaggg

SEQ ID NO: 1014594 - RNA, 22 nt, Human
cccaggcucccaggugggacaa

SEQ ID NO: 1014595 - RNA, 22 nt, Human
ccuguucaugaaacugcuuucc

SEQ ID NO: 1014596 - RNA, 22 nt, Human
ucacuuuugaucccuaugcagu

SEQ ID NO: 1014597 - RNA, 20 nt, Human
gccuggcacccggggcuggc

SEQ ID NO: 1014598 - RNA, 22 nt, Human
ugaacaguuucaagaaaacuuu

SEQ ID NO: 1014599 - RNA, 22 nt, Human
gcucugcugcuuacuagauggu

SEQ ID NO: 1014600 - RNA, 21 nt, Human
uugaccaagggugcgugcucc

SEQ ID NO: 1014601 - RNA, 22 nt, Human
acaauucuggguauuuauauag

SEQ ID NO: 1014602 - RNA, 22 nt, Human
uacagaguggugagaucuuuug

SEQ ID NO: 1014603 - RNA, 19 nt, Human
uuagggacaugaauucuag

SEQ ID NO: 1014604 - RNA, 22 nt, Human
cccuggagguggagguugcagg

SEQ ID NO: 1014605 - RNA, 22 nt, Human
cuuagaaauaaugguuucaguu

SEQ ID NO: 1014606 - RNA, 22 nt, Human
ucaggauaaaauguaauggcaa

SEQ ID NO: 1014607 - RNA, 22 nt, Human
aagugaagaaauacaugagaau

SEQ ID NO: 1014608 - RNA, 22 nt, Human
aguacauauaguaauuuagcca

SEQ ID NO: 1014609 - RNA, 22 nt, Human
gaaaagcuaggccaguucagcu

SEQ ID NO: 1014610 - RNA, 22 nt, Human
ccagcuucucucugaugcagcu

SEQ ID NO: 1014611 - RNA, 22 nt, Human
acacauuucucuuuuuguaagu

SEQ ID NO: 1014612 - RNA, 22 nt, Human
cuguccucuguccucagcagga

SEQ ID NO: 1014613 - RNA, 22 nt, Human
cugggcuccuaaccauccaggu

SEQ ID NO: 1014614 - RNA, 22 nt, Human
cuccagggaggagcacggguuc

SEQ ID NO: 1014615 - RNA, 22 nt, Human
ucaguuuucauuucaugagcag

SEQ ID NO: 1014616 - RNA, 22 nt, Human
agaagccacuggagguugagau

SEQ ID NO: 1014617 - RNA, 22 nt, Human
accugccuucucaaggacauga

SEQ ID NO: 1014618 - RNA, 22 nt, Human
guuguauucuucaauaucagag

SEQ ID NO: 1014619 - RNA, 20 nt, Human
aggcagacaaggagucuguu

SEQ ID NO: 1014620 - RNA, 23 nt, Human
ucugagagaacaaugccuccuau

SEQ ID NO: 1014621 - RNA, 22 nt, Human
cagggcaguuuuacuucucucu

SEQ ID NO: 1014622 - RNA, 22 nt, Human
uuagaacuuaaacuucagaaag

SEQ ID NO: 1014623 - RNA, 22 nt, Human
agggacagucuacuguucacug

SEQ ID NO: 1014624 - RNA, 22 nt, Human
acuccuggggcugccaucacag

SEQ ID NO: 1014625 - RNA, 22 nt, Human
ucugggaacagccuggcugugu

SEQ ID NO: 1014626 - RNA, 22 nt, Human
aacagugagaagguggacagga

SEQ ID NO: 1014627 - RNA, 22 nt, Human
ucaugaauauugaaugcuucau

SEQ ID NO: 1014628 - RNA, 22 nt, Human
uggaggcaucagagugcuuggc

SEQ ID NO: 1014629 - RNA, 22 nt, Human
ugcugugcuggcggcagaggcc

SEQ ID NO: 1014630 - RNA, 22 nt, Human
caugggagguuggcuuggcaug

SEQ ID NO: 1014631 - RNA, 22 nt, Human
aaguuugacagaaguuucuaau

SEQ ID NO: 1014632 - RNA, 22 nt, Human
cccaggcagcccuucugacgca

SEQ ID NO: 1014633 - RNA, 22 nt, Human
cuacugaguccuucagcugcca

SEQ ID NO: 1014634 - RNA, 22 nt, Human
uccagaccaugugagaggcgca

SEQ ID NO: 1014635 - RNA, 22 nt, Human
aaggaagacacagaugaaguga

SEQ ID NO: 1014636 - RNA, 22 nt, Human
cugaggcuggggaagggaagug

SEQ ID NO: 1014637 - RNA, 22 nt, Human
uggcucuguuuuaugaguacca

SEQ ID NO: 1014638 - RNA, 20 nt, Human
ccagucccugagcaccaggg

SEQ ID NO: 1014639 - RNA, 22 nt, Human
cuucuucaucuguaaaacuugg

SEQ ID NO: 1014640 - RNA, 22 nt, Human
cuggccagacuacacaugugug

SEQ ID NO: 1014641 - RNA, 22 nt, Human
aggucauuggggacuaucuccg

SEQ ID NO: 1014642 - RNA, 22 nt, Human
ccuggcugggccugauuucuca

SEQ ID NO: 1014643 - RNA, 22 nt, Human
cagagguaccagcagccucugg

SEQ ID NO: 1014644 - RNA, 22 nt, Human
cugcucucuguuccccuggauc

SEQ ID NO: 1014645 - RNA, 22 nt, Human
guacauuuuacuuuguuugaau

SEQ ID NO: 1014646 - RNA, 20 nt, Human
gccagcccugacacaggagc

SEQ ID NO: 1014647 - RNA, 22 nt, Human
ggcaguggguggaucucaggga

SEQ ID NO: 1014648 - RNA, 22 nt, Human
ggcugagcacuuuaggcaggag

SEQ ID NO: 1014649 - RNA, 22 nt, Human
uuugcauuuauaaguuggugga

SEQ ID NO: 1014650 - RNA, 19 nt, Human
auacacauacguaaacuga

SEQ ID NO: 1014651 - RNA, 22 nt, Human
ugcugcucaaugagaugccauc

SEQ ID NO: 1014652 - RNA, 22 nt, Human
aaacacauuagcccuguggaaa

SEQ ID NO: 1014653 - RNA, 22 nt, Human
cagggcacaguuauggaggugg

SEQ ID NO: 1014654 - RNA, 22 nt, Human
ugacuuccugcacucaggugau

SEQ ID NO: 1014655 - RNA, 22 nt, Human
cugcuggagguuggagcaugca

SEQ ID NO: 1014656 - RNA, 22 nt, Human
aaugaacaucaaaugccuacca

SEQ ID NO: 1014657 - RNA, 22 nt, Human
uuugaaagcaccauuugaguag

SEQ ID NO: 1014658 - RNA, 20 nt, Human
uggcuccugcgguggaacca

SEQ ID NO: 1014659 - RNA, 22 nt, Human
gagccaaggguugccauggaga

SEQ ID NO: 1014660 - RNA, 22 nt, Human
cugggagcuuuuagaaaugcag

SEQ ID NO: 1014661 - RNA, 22 nt, Human
cucacagguaccagcacccucc

SEQ ID NO: 1014662 - RNA, 22 nt, Human
gcacuugguaggacuucaguga

SEQ ID NO: 1014663 - RNA, 22 nt, Human
acagggcaaccucugggagacu

SEQ ID NO: 1014664 - RNA, 22 nt, Human
auacuuuggucacuauuauugg

SEQ ID NO: 1014665 - RNA, 22 nt, Human
gauggcagcagcagccagggau

SEQ ID NO: 1014666 - RNA, 22 nt, Human
aaguucaaguguaaucuuuauu

SEQ ID NO: 1014667 - RNA, 22 nt, Human
agggccugggguagcuuacugc

SEQ ID NO: 1014668 - RNA, 22 nt, Human
agagcugggacuuggacucaau

SEQ ID NO: 1014669 - RNA, 22 nt, Human
cuugcugggguaagucugugcu

SEQ ID NO: 1014670 - RNA, 23 nt, Human
agaaaagcuuggacacauggccu

SEQ ID NO: 1014671 - RNA, 22 nt, Human
cugccuuccaaccccagacucc

SEQ ID NO: 1014672 - RNA, 22 nt, Human
aauaucaacaguguccuucuaa

SEQ ID NO: 1014673 - RNA, 22 nt, Human
aucaggaugacuauaaggcugc

SEQ ID NO: 1014674 - RNA, 22 nt, Human
cagcucugugggagcguaugug

SEQ ID NO: 1014675 - RNA, 23 nt, Human
gaggcacucaggaaaugugagug

SEQ ID NO: 1014676 - RNA, 22 nt, Human
acagaaauugggcaaauggaag

SEQ ID NO: 1014677 - RNA, 19 nt, Human
uggaggagaggaaaaguca

SEQ ID NO: 1014678 - RNA, 22 nt, Human
gccacugcacuccagcccaggc

SEQ ID NO: 1014679 - RNA, 22 nt, Human
ucaaaugcugccuuugugugcc

SEQ ID NO: 1014680 - RNA, 21 nt, Human
cucuggagucaagagcuucca

SEQ ID NO: 1014681 - RNA, 22 nt, Human
ccaggcugggcuacaaguugag

SEQ ID NO: 1014682 - RNA, 22 nt, Human
uggcccugacugauguggaggg

SEQ ID NO: 1014683 - RNA, 22 nt, Human
uauuaggguaaauuugacaugc

SEQ ID NO: 1014684 - RNA, 22 nt, Human
ugccucagucuaaagucucuca

SEQ ID NO: 1014685 - RNA, 22 nt, Human
uguaugaaagaacaagggcuua

SEQ ID NO: 1014686 - RNA, 19 nt, Human
gcaggcacagcccugggug

SEQ ID NO: 1014687 - RNA, 22 nt, Human
gagagugaggcaucaggggcag

SEQ ID NO: 1014688 - RNA, 22 nt, Human
ucacauaaauuauacaauuuca

SEQ ID NO: 1014689 - RNA, 21 nt, Human
uggcucaguugcugggcacag

SEQ ID NO: 1014690 - RNA, 23 nt, Human
caugccaguuugugcaggcagau

SEQ ID NO: 1014691 - RNA, 22 nt, Human
aucuucaacuugaucauuugaa

SEQ ID NO: 1014692 - RNA, 22 nt, Human
accugcagccacuucucuccuu

SEQ ID NO: 1014693 - RNA, 22 nt, Human
agaccaagacuauaaugagagg

SEQ ID NO: 1014694 - RNA, 19 nt, Human
uggcaucuguaaaauggug

SEQ ID NO: 1014695 - RNA, 22 nt, Human
uuuuuccaccguacuuccugag

SEQ ID NO: 1014696 - RNA, 22 nt, Human
uuuaagacuuagauuuauuggg

SEQ ID NO: 1014697 - RNA, 22 nt, Human
aagauucucagagugaaagaau

SEQ ID NO: 1014698 - RNA, 22 nt, Human
gagagcugucagcguagcaccg

SEQ ID NO: 1014699 - RNA, 22 nt, Human
cagcagcugggaaggaggcuga

SEQ ID NO: 1014700 - RNA, 22 nt, Human
uguagaaccuguuuauuauaga

SEQ ID NO: 1014701 - RNA, 22 nt, Human
ggcuucucucccccagcuccac

SEQ ID NO: 1014702 - RNA, 22 nt, Human
gcucugagaggugcagcaguaa

SEQ ID NO: 1014703 - RNA, 22 nt, Human
aagcaccucuaugauugcuuuu

SEQ ID NO: 1014704 - RNA, 19 nt, Human
agugaaauggaguauucaa

SEQ ID NO: 1014705 - RNA, 22 nt, Human
agcagccuuugaucaucuggga

SEQ ID NO: 1014706 - RNA, 22 nt, Human
ucuucauauauaaaguggaaua

SEQ ID NO: 1014707 - RNA, 22 nt, Human
uggaaugacagagagucugaau

SEQ ID NO: 1014708 - RNA, 19 nt, Human
acagggcagcaauaggaua

SEQ ID NO: 1014709 - RNA, 22 nt, Human
ggcagcuguaagaugagugaau

SEQ ID NO: 1014710 - RNA, 20 nt, Human
ugcuguaagauuagagagcu

SEQ ID NO: 1014711 - RNA, 22 nt, Human
aucuggcucgcuaggcucuggg

SEQ ID NO: 1014712 - RNA, 17 nt, Human
ucagagggaugagcagg

SEQ ID NO: 1014713 - RNA, 22 nt, Human
cagggcccaagacacaaugagg

SEQ ID NO: 1014714 - RNA, 22 nt, Human
aaccaggacaauuugaauagaa

SEQ ID NO: 1014715 - RNA, 22 nt, Human
ucccagcagcauagcucagaau

SEQ ID NO: 1014716 - RNA, 21 nt, Human
ugcaugcuauguuuuuauuuc

SEQ ID NO: 1014717 - RNA, 22 nt, Human
uccagugguacauggagacacu

SEQ ID NO: 1014718 - RNA, 22 nt, Human
augccagggucacagucauauu

SEQ ID NO: 1014719 - RNA, 19 nt, Human
ucccgcccacugagcgugc

SEQ ID NO: 1014720 - RNA, 22 nt, Human
uuuagggaauagaagaucugaa

SEQ ID NO: 1014721 - RNA, 22 nt, Human
caaggccacugcucagguuucc

SEQ ID NO: 1014722 - RNA, 22 nt, Human
uauucacaggcuggagugaugu

SEQ ID NO: 1014723 - RNA, 22 nt, Human
caggccuggagugcaauggcac

SEQ ID NO: 1014724 - RNA, 22 nt, Human
ugagccagguuaagacaggagc

SEQ ID NO: 1014725 - RNA, 22 nt, Human
gguggcuggaggagcugaugga

SEQ ID NO: 1014726 - RNA, 22 nt, Human
cccugcagccuugcaugccuuc

SEQ ID NO: 1014727 - RNA, 22 nt, Human
acaaaaguguaggaauuccuua

SEQ ID NO: 1014728 - RNA, 22 nt, Human
agaggcucugccgccucaggua

SEQ ID NO: 1014729 - RNA, 22 nt, Human
gccaggcacugcucuaagcccu

SEQ ID NO: 1014730 - RNA, 22 nt, Human
augcaagauguauagaagacuu

SEQ ID NO: 1014731 - RNA, 21 nt, Human
gcugcugccccuagugaggcc

SEQ ID NO: 1014732 - RNA, 22 nt, Human
ggcucagacucccaggcccucu

SEQ ID NO: 1014733 - RNA, 22 nt, Human
uccugcagcugcagaccugggg

SEQ ID NO: 1014734 - RNA, 22 nt, Human
uggcagaguggaccauacucaa

SEQ ID NO: 1014735 - RNA, 22 nt, Human
ucuuugaaagcuguucuagagu

SEQ ID NO: 1014736 - RNA, 22 nt, Human
cagcugggagcuccauuagaua

SEQ ID NO: 1014737 - RNA, 22 nt, Human
gugcugcagagucucgugccgc

SEQ ID NO: 1014738 - RNA, 22 nt, Human
gagccagguuugaaucucaguc

SEQ ID NO: 1014739 - RNA, 22 nt, Human
augaagcugaaaaaggcauaua

SEQ ID NO: 1014740 - RNA, 22 nt, Human
uuccuguaugucagugaagagc

SEQ ID NO: 1014741 - RNA, 22 nt, Human
uuugaacugauaaucuucuguu

SEQ ID NO: 1014742 - RNA, 22 nt, Human
gcagccagaagacucagaacaa

SEQ ID NO: 1014743 - RNA, 22 nt, Human
ccaccagcagugugcaaggauu

SEQ ID NO: 1014744 - RNA, 22 nt, Human
uuugcauuguaauauuuaguuc

SEQ ID NO: 1014745 - RNA, 22 nt, Human
cuuuauguucaguacaaugcuu

SEQ ID NO: 1014746 - RNA, 22 nt, Human
acacugcagaugaaagcauaag

SEQ ID NO: 1014747 - RNA, 22 nt, Human
ucuugggaccauuuacacauac

SEQ ID NO: 1014748 - RNA, 22 nt, Human
guguccagagaaacucacagcu

SEQ ID NO: 1014749 - RNA, 22 nt, Human
caggagaagguuuggagugcag

SEQ ID NO: 1014750 - RNA, 20 nt, Human
ccuaggcaugcugagucucc

SEQ ID NO: 1014751 - RNA, 22 nt, Human
agcagccagaaagggcagucga

SEQ ID NO: 1014752 - RNA, 20 nt, Human
ucagugauuuugaagaggaa

SEQ ID NO: 1014753 - RNA, 22 nt, Human
acauacauaugacaacuuuccu

SEQ ID NO: 1014754 - RNA, 22 nt, Human
uagcuuuaggaugguucucuug

SEQ ID NO: 1014755 - RNA, 22 nt, Human
aagauggaguaguguaaugguu

SEQ ID NO: 1014756 - RNA, 22 nt, Human
agcugccucagcaacacagacc

SEQ ID NO: 1014757 - RNA, 22 nt, Human
guuuacauauuuuaauugguga

SEQ ID NO: 1014758 - RNA, 22 nt, Human
cucuccagaauaugccgccgug

SEQ ID NO: 1014759 - RNA, 22 nt, Human
ugggcuccguugccuggggcag

SEQ ID NO: 1014760 - RNA, 22 nt, Human
gcucagaggaugcuccuuuaug

SEQ ID NO: 1014761 - RNA, 22 nt, Human
ugcagcccuuccuuccucuggg

SEQ ID NO: 1014762 - RNA, 22 nt, Human
accaggcagucaccguccagga

SEQ ID NO: 1014763 - RNA, 18 nt, Human
ugaacagaugaguugaag

SEQ ID NO: 1014764 - RNA, 22 nt, Human
ucagaggaaaggucagauggcu

SEQ ID NO: 1014765 - RNA, 22 nt, Human
ggcuggcaagugucugcucaug

SEQ ID NO: 1014766 - RNA, 22 nt, Human
ggcucuggugggaagguuagau

SEQ ID NO: 1014767 - RNA, 22 nt, Human
ccucagggccaucucugucccu

SEQ ID NO: 1014768 - RNA, 22 nt, Human
ugauuuccccagucuugcugcu

SEQ ID NO: 1014769 - RNA, 22 nt, Human
aaaaaucacuuuuauaggcagc

SEQ ID NO: 1014770 - RNA, 22 nt, Human
aagagguugucugugaugaguu

SEQ ID NO: 1014771 - RNA, 22 nt, Human
gugaggugguacaauauuaacu

SEQ ID NO: 1014772 - RNA, 22 nt, Human
agcaggagcugugggaagaugg

SEQ ID NO: 1014773 - RNA, 19 nt, Human
ugggcuuccccagggcaga

SEQ ID NO: 1014774 - RNA, 22 nt, Human
uuaugacaggaaaaucacagaa

SEQ ID NO: 1014775 - RNA, 22 nt, Human
ccagucacagguguguuuauau

SEQ ID NO: 1014776 - RNA, 22 nt, Human
uaguuaggaaaguccagggagc

SEQ ID NO: 1014777 - RNA, 22 nt, Human
uuucaaagaguuguaaauuacu

SEQ ID NO: 1014778 - RNA, 21 nt, Human
ucauuugugaucugauuucca

SEQ ID NO: 1014779 - RNA, 22 nt, Human
cucuggaauguuuacaugcccu

SEQ ID NO: 1014780 - RNA, 22 nt, Human
cuuaacagauacaucugugguu

SEQ ID NO: 1014781 - RNA, 22 nt, Human
ucaugacaacuauauuauucca

SEQ ID NO: 1014782 - RNA, 22 nt, Human
ccaaaugugccuguuucaacaa

SEQ ID NO: 1014783 - RNA, 22 nt, Human
uuucugaagggcagcagacucu

SEQ ID NO: 1014784 - RNA, 22 nt, Human
gagggcucaacuacuacuaggc

SEQ ID NO: 1014785 - RNA, 22 nt, Human
accaggcaugauguggagcaca

SEQ ID NO: 1014786 - RNA, 22 nt, Human
uuucacauacaguguauaguag

SEQ ID NO: 1014787 - RNA, 19 nt, Human
aauuagggagucgguuaag

SEQ ID NO: 1014788 - RNA, 18 nt, Human
aaacuggcuuggccugug

SEQ ID NO: 1014789 - RNA, 22 nt, Human
cagcugccuaugaccuagccuc

SEQ ID NO: 1014790 - RNA, 20 nt, Human
uacagaaugcaauaaaaugg

SEQ ID NO: 1014791 - RNA, 22 nt, Human
uuccaguuaaggaagcuauucu

SEQ ID NO: 1014792 - RNA, 22 nt, Human
ggcuucccuuuccgagaggaga

SEQ ID NO: 1014793 - RNA, 22 nt, Human
cucaggaggugguagaggcccu

SEQ ID NO: 1014794 - RNA, 22 nt, Human
ucagggcaccaaaaaagaugcc

SEQ ID NO: 1014795 - RNA, 22 nt, Human
cuggagcucuccagagccccgu

SEQ ID NO: 1014796 - RNA, 22 nt, Human
ccaggccagcaggcacaccugc

SEQ ID NO: 1014797 - RNA, 22 nt, Human
uuacaaaguucugaguucaaac

SEQ ID NO: 1014798 - RNA, 22 nt, Human
aaggcucccucuucucgagugu

SEQ ID NO: 1014799 - RNA, 22 nt, Human
uagcuuuaauaagcugcugaau

SEQ ID NO: 1014800 - RNA, 21 nt, Human
gcaaccagaccacagggcagu

SEQ ID NO: 1014801 - RNA, 22 nt, Human
ucugucaggagauuggcagcug

SEQ ID NO: 1014802 - RNA, 22 nt, Human
agauggaguuaguaccagaguc

SEQ ID NO: 1014803 - RNA, 22 nt, Human
ucucucuuuuuaaucauguaau

SEQ ID NO: 1014804 - RNA, 22 nt, Human
guuugcauaaaguggaugcagg

SEQ ID NO: 1014805 - RNA, 22 nt, Human
ucacaugcuacugagccagacc

SEQ ID NO: 1014806 - RNA, 22 nt, Human
cagagcuggagaaguggauuua

SEQ ID NO: 1014807 - RNA, 22 nt, Human
ugauuuccugugcgcccuuagg

SEQ ID NO: 1014808 - RNA, 22 nt, Human
uaugaagacaaugauagcauga

SEQ ID NO: 1014809 - RNA, 21 nt, Human
ccuggcugcacaguugcuggu

SEQ ID NO: 1014810 - RNA, 21 nt, Human
aggcucagagaucaaacagua

SEQ ID NO: 1014811 - RNA, 22 nt, Human
ccaaagucugcauuuuaacaug

SEQ ID NO: 1014812 - RNA, 22 nt, Human
aagccgggccugagaaaugaca

SEQ ID NO: 1014813 - RNA, 20 nt, Human
uuaucugucaaucugucuca

SEQ ID NO: 1014814 - RNA, 22 nt, Human
ugugcuucugcagagacuauuu

SEQ ID NO: 1014815 - RNA, 22 nt, Human
ucucagggccccaaaggcuagu

SEQ ID NO: 1014816 - RNA, 22 nt, Human
auguaguguagagauuagucuc

SEQ ID NO: 1014817 - RNA, 22 nt, Human
uucacaggaauguaggggucuu

SEQ ID NO: 1014818 - RNA, 22 nt, Human
ucacauuuuuuacuggacuuaa

SEQ ID NO: 1014819 - RNA, 22 nt, Human
acaguaauaaguguuggugagg

SEQ ID NO: 1014820 - RNA, 21 nt, Human
agcagcagaucuggugagggc

SEQ ID NO: 1014821 - RNA, 22 nt, Human
caggcugcagugcaguggcuau

SEQ ID NO: 1014822 - RNA, 20 nt, Human
uggaaguucuguugcauugg

SEQ ID NO: 1014823 - RNA, 19 nt, Human
gcuccugggccucacucau

SEQ ID NO: 1014824 - RNA, 22 nt, Human
aguguuccacacaucuggggaa

SEQ ID NO: 1014825 - RNA, 19 nt, Human
accucugcagagauguuua

SEQ ID NO: 1014826 - RNA, 22 nt, Human
uaaagguagcaugaaacugcaa

SEQ ID NO: 1014827 - RNA, 22 nt, Human
ucauugcaguagggagagaccc

SEQ ID NO: 1014828 - RNA, 22 nt, Human
gugucccagccccacaggccug

SEQ ID NO: 1014829 - RNA, 22 nt, Human
cacaggaggaggugcccgggcc

SEQ ID NO: 1014830 - RNA, 22 nt, Human
cugcuguguggauucaauggcu

SEQ ID NO: 1014831 - RNA, 22 nt, Human
gcagcuuuggagguggaacucu

SEQ ID NO: 1014832 - RNA, 22 nt, Human
gcuggcugcgucaucacagggc

SEQ ID NO: 1014833 - RNA, 22 nt, Human
uuugaaagccuggcuuuucucu

SEQ ID NO: 1014834 - RNA, 22 nt, Human
ccagccucacuggcaucaccua

SEQ ID NO: 1014835 - RNA, 22 nt, Human
auuaguaaaacauuguauaugu

SEQ ID NO: 1014836 - RNA, 22 nt, Human
cccagggaaugacucuggccuu

SEQ ID NO: 1014837 - RNA, 22 nt, Human
uucaaucauuagaaucucaggc

SEQ ID NO: 1014838 - RNA, 19 nt, Human
cuuugucagaacaugcuuc

SEQ ID NO: 1014839 - RNA, 22 nt, Human
uuugaaaggaauuaggaugaca

SEQ ID NO: 1014840 - RNA, 22 nt, Human
gaaaucugucuuuguuugaaua

SEQ ID NO: 1014841 - RNA, 22 nt, Human
ccuggcagaauauuaaagugca

SEQ ID NO: 1014842 - RNA, 22 nt, Human
cagggcugagaauuuagagaca

SEQ ID NO: 1014843 - RNA, 22 nt, Human
guaugcaucgacucaagucuga

SEQ ID NO: 1014844 - RNA, 22 nt, Human
uuguaacagcugcuuaauagag

SEQ ID NO: 1014845 - RNA, 22 nt, Human
uucuucaguguagcaacuguau

SEQ ID NO: 1014846 - RNA, 22 nt, Human
caauauucaguggaaaagccau

SEQ ID NO: 1014847 - RNA, 22 nt, Human
uucuucagucccacuagccaca

SEQ ID NO: 1014848 - RNA, 22 nt, Human
uuauuuucuccucagaaagugg

SEQ ID NO: 1014849 - RNA, 22 nt, Human
cugcuguggccagccaggucaa

SEQ ID NO: 1014850 - RNA, 22 nt, Human
ccaggccuucugaggacacucu

SEQ ID NO: 1014851 - RNA, 22 nt, Human
accgaaggaaacuggaaccguu

SEQ ID NO: 1014852 - RNA, 22 nt, Human
cuucccugauaagagccucaga

SEQ ID NO: 1014853 - RNA, 22 nt, Human
uguuuauugagugccuacuaua

SEQ ID NO: 1014854 - RNA, 18 nt, Human
acccaggcucaugguccu

SEQ ID NO: 1014855 - RNA, 22 nt, Human
cugggaggauucauugagguga

SEQ ID NO: 1014856 - RNA, 22 nt, Human
aacugcuguggccuaguacuua

SEQ ID NO: 1014857 - RNA, 18 nt, Human
cugagggcagccccuggg

SEQ ID NO: 1014858 - RNA, 22 nt, Human
gcuguguccucacacagccuuu

SEQ ID NO: 1014859 - RNA, 22 nt, Human
ggacucagcagccaggaguggc

SEQ ID NO: 1014860 - RNA, 22 nt, Human
aaugagcuagaccugcuuccuc

SEQ ID NO: 1014861 - RNA, 22 nt, Human
cauucucaauaguagaugagua

SEQ ID NO: 1014862 - RNA, 22 nt, Human
agagcagauggagcuggaagag

SEQ ID NO: 1014863 - RNA, 22 nt, Human
cagggccaagcugcagcaucug

SEQ ID NO: 1014864 - RNA, 22 nt, Human
ccacaggcugcugcaggucccg

SEQ ID NO: 1014865 - RNA, 22 nt, Human
cuugugcaauugacauugaauc

SEQ ID NO: 1014866 - RNA, 19 nt, Human
caggaaugagguaauggcu

SEQ ID NO: 1014867 - RNA, 22 nt, Human
uuugaaaucuaaucaaggaaca

SEQ ID NO: 1014868 - RNA, 22 nt, Human
cagcccuggaacagcugacuca

SEQ ID NO: 1014869 - RNA, 22 nt, Human
aaggucauuguugcauguucuc

SEQ ID NO: 1014870 - RNA, 22 nt, Human
ggagccuguggccgucacgacu

SEQ ID NO: 1014871 - RNA, 22 nt, Human
ugcuggagaucauuaauguuca

SEQ ID NO: 1014872 - RNA, 22 nt, Human
aauguauggauucaugucugug

SEQ ID NO: 1014873 - RNA, 22 nt, Human
ugacagggcuagaggcaaugca

SEQ ID NO: 1014874 - RNA, 22 nt, Human
uggagcugagagccaggcuggc

SEQ ID NO: 1014875 - RNA, 22 nt, Human
auguacaguggaaacuaacaaa

SEQ ID NO: 1014876 - RNA, 22 nt, Human
uauuccaaaaucccaaacugcc

SEQ ID NO: 1014877 - RNA, 19 nt, Human
ugcaggaggacugagcaga

SEQ ID NO: 1014878 - RNA, 22 nt, Human
aaaugauugucaaaguucuguu

SEQ ID NO: 1014879 - RNA, 22 nt, Human
caggagcucuuaaggaugugau

SEQ ID NO: 1014880 - RNA, 22 nt, Human
ucucaccauggugcuugcuuau

SEQ ID NO: 1014881 - RNA, 22 nt, Human
agcauggggcaaugcaugugcu

SEQ ID NO: 1014882 - RNA, 22 nt, Human
uggcuguggacucagauggcuc

SEQ ID NO: 1014883 - RNA, 22 nt, Human
ucuggcucaggagcuguguuca

SEQ ID NO: 1014884 - RNA, 22 nt, Human
ggugcagcugcagccugggagc

SEQ ID NO: 1014885 - RNA, 22 nt, Human
ucauacaucuuguauaucuauc

SEQ ID NO: 1014886 - RNA, 22 nt, Human
ugcugucuuccaggauggugaa

SEQ ID NO: 1014887 - RNA, 22 nt, Human
uggguacuccuauuaguucagu

SEQ ID NO: 1014888 - RNA, 22 nt, Human
cacaauuuguuuuaucaguauu

SEQ ID NO: 1014889 - RNA, 22 nt, Human
agaaguuaccacauacuucucu

SEQ ID NO: 1014890 - RNA, 22 nt, Human
aacagcaauagcacuauucauu

SEQ ID NO: 1014891 - RNA, 22 nt, Human
cuggcugugcagucuuccagaa

SEQ ID NO: 1014892 - RNA, 21 nt, Human
aacauuucaggauccaaauug

SEQ ID NO: 1014893 - RNA, 22 nt, Human
aguuuaugaaacacagauuuga

SEQ ID NO: 1014894 - RNA, 22 nt, Human
agagccuguuuugugggagaug

SEQ ID NO: 1014895 - RNA, 22 nt, Human
caaagguaaagaucugcugugg

SEQ ID NO: 1014896 - RNA, 22 nt, Human
acagagccacuuuggugccuac

SEQ ID NO: 1014897 - RNA, 22 nt, Human
agaggccagggacacugcucaa

SEQ ID NO: 1014898 - RNA, 22 nt, Human
gaggccugucgcuaggccucug

SEQ ID NO: 1014899 - RNA, 22 nt, Human
agcugcugaaugacacugcaag

SEQ ID NO: 1014900 - RNA, 22 nt, Human
ugcugaggagguggcugugcuu

SEQ ID NO: 1014901 - RNA, 22 nt, Human
uggccugggccugccggugcaa

SEQ ID NO: 1014902 - RNA, 22 nt, Human
cccuggaggaaaaucugaggcu

SEQ ID NO: 1014903 - RNA, 22 nt, Human
ucacaccuguaaucccaggccu

SEQ ID NO: 1014904 - RNA, 22 nt, Human
gcccagcuuuucacuuccacac

SEQ ID NO: 1014905 - RNA, 22 nt, Human
agcucccaggcagucaugagga

SEQ ID NO: 1014906 - RNA, 22 nt, Human
cugccagccaggccagguaggc

SEQ ID NO: 1014907 - RNA, 17 nt, Human
cucagaguugcuuuguc

SEQ ID NO: 1014908 - RNA, 22 nt, Human
agggcagagagaugaaugggau

SEQ ID NO: 1014909 - RNA, 22 nt, Human
gaagcccacguuuggugaugua

SEQ ID NO: 1014910 - RNA, 22 nt, Human
aucugccucuucuucauugcga

SEQ ID NO: 1014911 - RNA, 22 nt, Human
ggggcagagaauaaaaaccuaa

SEQ ID NO: 1014912 - RNA, 22 nt, Human
cacugugggguuuggcuggaac

SEQ ID NO: 1014913 - RNA, 22 nt, Human
uucauaguguuuccuuccagug

SEQ ID NO: 1014914 - RNA, 22 nt, Human
uuucaacaccagagaccaugcg

SEQ ID NO: 1014915 - RNA, 22 nt, Human
caagcagagacuagauagcugu

SEQ ID NO: 1014916 - RNA, 22 nt, Human
uggcacugccaaccugcuaggu

SEQ ID NO: 1014917 - RNA, 22 nt, Human
cugcucuagagagcauuaguca

SEQ ID NO: 1014918 - RNA, 22 nt, Human
ucugccuguucaagucuucuag

SEQ ID NO: 1014919 - RNA, 22 nt, Human
uaaaugcagauuccugagccua

SEQ ID NO: 1014920 - RNA, 23 nt, Human
uccaagggcuacaaacacagacc

SEQ ID NO: 1014921 - RNA, 17 nt, Human
gccuuccuuccuccaca

SEQ ID NO: 1014922 - RNA, 22 nt, Human
cagcuggcgggcagagccgcca

SEQ ID NO: 1014923 - RNA, 22 nt, Human
auucuggauuaucaguccacca

SEQ ID NO: 1014924 - RNA, 22 nt, Human
auuauaggcuugagccaccgug

SEQ ID NO: 1014925 - RNA, 22 nt, Human
cucuggaguggguggccgggag

SEQ ID NO: 1014926 - RNA, 22 nt, Human
aagacuguacauuuuccagucu

SEQ ID NO: 1014927 - RNA, 22 nt, Human
aggcucugugauccacaaugag

SEQ ID NO: 1014928 - RNA, 22 nt, Human
aucuagaaguggcaugaauuac

SEQ ID NO: 1014929 - RNA, 21 nt, Human
caauaaacugcacauugagac

SEQ ID NO: 1014930 - RNA, 22 nt, Human
cugucuguuucugauucaaccu

SEQ ID NO: 1014931 - RNA, 22 nt, Human
guuagaauaaaaggucagagag

SEQ ID NO: 1014932 - RNA, 22 nt, Human
ggcagggucuggacugaaagcu

SEQ ID NO: 1014933 - RNA, 22 nt, Human
acagaauucucucugcagaggc

SEQ ID NO: 1014934 - RNA, 21 nt, Human
uucuucaugaugauuaauggc

SEQ ID NO: 1014935 - RNA, 22 nt, Human
cugaggccucucuccugggcuu

SEQ ID NO: 1014936 - RNA, 22 nt, Human
aauaauuuccagccaacuggaa

SEQ ID NO: 1014937 - RNA, 22 nt, Human
gagaggccaaaaucccugcccc

SEQ ID NO: 1014938 - RNA, 22 nt, Human
cguguacagucuaucuuuuuuc

SEQ ID NO: 1014939 - RNA, 22 nt, Human
aggccugaggaccagauaaaug

SEQ ID NO: 1014940 - RNA, 22 nt, Human
ggagggcaucaaucaggccugg

SEQ ID NO: 1014941 - RNA, 23 nt, Human
agaagcagcuucuggaguaucgg

SEQ ID NO: 1014942 - RNA, 22 nt, Human
cacaauguauauguauaucaaa

SEQ ID NO: 1014943 - RNA, 22 nt, Human
cccagcuccgagcuccgagccg

SEQ ID NO: 1014944 - RNA, 22 nt, Human
agcagccaauuggaggaugaag

SEQ ID NO: 1014945 - RNA, 22 nt, Human
ucacugcagacaaccucaguca

SEQ ID NO: 1014946 - RNA, 22 nt, Human
caguggccugagccaggcuucc

SEQ ID NO: 1014947 - RNA, 22 nt, Human
ugucaaagccugaaucacauag

SEQ ID NO: 1014948 - RNA, 22 nt, Human
auuuauuaagcaucugcuaugu

SEQ ID NO: 1014949 - RNA, 22 nt, Human
ccagcucucagcgggagacuca

SEQ ID NO: 1014950 - RNA, 22 nt, Human
gcuggcagccaagugaagaggg

SEQ ID NO: 1014951 - RNA, 22 nt, Human
uccucaggugacuagguaucuu

SEQ ID NO: 1014952 - RNA, 22 nt, Human
guggcugcuaagucuccuuccu

SEQ ID NO: 1014953 - RNA, 22 nt, Human
gaugugagugguagcugggauu

SEQ ID NO: 1014954 - RNA, 22 nt, Human
agccagggacgcugcaggcuac

SEQ ID NO: 1014955 - RNA, 22 nt, Human
ugggaccugcccuggccccauc

SEQ ID NO: 1014956 - RNA, 22 nt, Human
agaauucuguucuucgggugug

SEQ ID NO: 1014957 - RNA, 22 nt, Human
ugccugugucacagugauguuu

SEQ ID NO: 1014958 - RNA, 21 nt, Human
uauacaugugugcauacgugu

SEQ ID NO: 1014959 - RNA, 22 nt, Human
guucuugccagcauccucaggu

SEQ ID NO: 1014960 - RNA, 22 nt, Human
gcaaggcuuugugaauuuuaaa

SEQ ID NO: 1014961 - RNA, 22 nt, Human
ggcaggagggcggacaaugacc

SEQ ID NO: 1014962 - RNA, 23 nt, Human
ccucccaccuauuucacuuucuu

SEQ ID NO: 1014963 - RNA, 22 nt, Human
gcauccagucuuggcuccugga

SEQ ID NO: 1014964 - RNA, 22 nt, Human
cagcugccccgcuggcugacca

SEQ ID NO: 1014965 - RNA, 22 nt, Human
uacaaagucagaauaacaggug

SEQ ID NO: 1014966 - RNA, 22 nt, Human
caggggcuuaagugacagaagg

SEQ ID NO: 1014967 - RNA, 21 nt, Human
cccuugccugcacuccucggc

SEQ ID NO: 1014968 - RNA, 22 nt, Human
auucuuggcaaggagauuuaaa

SEQ ID NO: 1014969 - RNA, 22 nt, Human
uucacauuucauaccacagcuu

SEQ ID NO: 1014970 - RNA, 21 nt, Human
agaugaggauacugaggccua

SEQ ID NO: 1014971 - RNA, 22 nt, Human
cagaggcaggaagaugggcagu

SEQ ID NO: 1014972 - RNA, 22 nt, Human
uagcagcugugaguaaaagcca

SEQ ID NO: 1014973 - RNA, 22 nt, Human
gggcccacuggcugucugaccc

SEQ ID NO: 1014974 - RNA, 22 nt, Human
gcagcuuugaagacuuauuugc

SEQ ID NO: 1014975 - RNA, 22 nt, Human
gcucuccacugaccacggggca

SEQ ID NO: 1014976 - RNA, 22 nt, Human
aaauuugauaagccauuguuac

SEQ ID NO: 1014977 - RNA, 22 nt, Human
caggaaaggugugucaugaugg

SEQ ID NO: 1014978 - RNA, 22 nt, Human
cugagccauccauaccagcuua

SEQ ID NO: 1014979 - RNA, 22 nt, Human
uucaagauggcugcaaauacuu

SEQ ID NO: 1014980 - RNA, 22 nt, Human
acacaguauuacaauaggugcu

SEQ ID NO: 1014981 - RNA, 22 nt, Human
cucugcagaggcccaaggcuga

SEQ ID NO: 1014982 - RNA, 22 nt, Human
gcagggcugcugaaacuuguuu

SEQ ID NO: 1014983 - RNA, 22 nt, Human
acugaaggcuuaacucuuucau

SEQ ID NO: 1014984 - RNA, 17 nt, Human
auuucacuuagcaugag

SEQ ID NO: 1014985 - RNA, 22 nt, Human
agagcccugaagcagagcuaaa

SEQ ID NO: 1014986 - RNA, 19 nt, Human
ucgagucaagacacuaggc

SEQ ID NO: 1014987 - RNA, 22 nt, Human
ugccuaggaaaccucaugcuuc

SEQ ID NO: 1014988 - RNA, 18 nt, Human
gcccagaggucugggccc

SEQ ID NO: 1014989 - RNA, 22 nt, Human
auggagacgcaagggaccuagg

SEQ ID NO: 1014990 - RNA, 22 nt, Human
cugggccagcaacugcaaugga

SEQ ID NO: 1014991 - RNA, 22 nt, Human
cugcuguguuagcagguuuagu

SEQ ID NO: 1014992 - RNA, 22 nt, Human
ucuccuucgaggcccagcuccc

SEQ ID NO: 1014993 - RNA, 22 nt, Human
ucugaaaugcaaauuugacuga

SEQ ID NO: 1014994 - RNA, 22 nt, Human
aagcagccagccaucaugcccg

SEQ ID NO: 1014995 - RNA, 22 nt, Human
aggcacugaccugcuuccuuga

SEQ ID NO: 1014996 - RNA, 22 nt, Human
aauuucaauuacuuuugcacca

SEQ ID NO: 1014997 - RNA, 22 nt, Human
ccagagucuaugaguccucauu

SEQ ID NO: 1014998 - RNA, 22 nt, Human
cacagggccacuuucccaguaa

SEQ ID NO: 1014999 - RNA, 21 nt, Human
gcacagggacagaucaucaca

SEQ ID NO: 1015000 - RNA, 22 nt, Human
uccaggcaaaaaccaacuacag

SEQ ID NO: 1015001 - RNA, 22 nt, Human
uuccaaagaaauugaccaagac

SEQ ID NO: 1015002 - RNA, 22 nt, Human
cugaggcucaagggcagguggg

SEQ ID NO: 1015003 - RNA, 18 nt, Human
uuucacaaccuccagagg

SEQ ID NO: 1015004 - RNA, 17 nt, Human
aggugcagaggcagagc

SEQ ID NO: 1015005 - RNA, 22 nt, Human
uucuucaaugugcccuguuuuc

SEQ ID NO: 1015006 - RNA, 22 nt, Human
gccugguggugugcucaagugg

SEQ ID NO: 1015007 - RNA, 22 nt, Human
ggcugccucuggaagcuggaga

SEQ ID NO: 1015008 - RNA, 22 nt, Human
uuucagcugguaaaggaguagc

SEQ ID NO: 1015009 - RNA, 22 nt, Human
acagauuugacugguaccuggc

SEQ ID NO: 1015010 - RNA, 22 nt, Human
gggccuggggacaccaccauga

SEQ ID NO: 1015011 - RNA, 22 nt, Human
uccuucuuucccccuagucauu

SEQ ID NO: 1015012 - RNA, 22 nt, Human
uucauugucucuguuugccuuc

SEQ ID NO: 1015013 - RNA, 22 nt, Human
ugagcuguagcagaugcuguug

SEQ ID NO: 1015014 - RNA, 22 nt, Human
aaaagacauaugugggcauucu

SEQ ID NO: 1015015 - RNA, 22 nt, Human
aaaagucagucucuccuagcuc

SEQ ID NO: 1015016 - RNA, 22 nt, Human
uccagcagguccgagacaaguu

SEQ ID NO: 1015017 - RNA, 22 nt, Human
ccuggccacucagguguggggc

SEQ ID NO: 1015018 - RNA, 22 nt, Human
auccaggcgaaugcagaaggcc

SEQ ID NO: 1015019 - RNA, 21 nt, Human
cugcuuuacuucagaggaucu

SEQ ID NO: 1015020 - RNA, 22 nt, Human
aggcuggcccuacuggcugccu

SEQ ID NO: 1015021 - RNA, 22 nt, Human
ucucuucuaauuaggguccaug

SEQ ID NO: 1015022 - RNA, 20 nt, Human
aguguuccggaagacuggca

SEQ ID NO: 1015023 - RNA, 22 nt, Human
ccaggagcuggagggugcagug

SEQ ID NO: 1015024 - RNA, 18 nt, Human
cccucuugcacaaagcaa

SEQ ID NO: 1015025 - RNA, 22 nt, Human
uauuuccagcaguaagaagaca

SEQ ID NO: 1015026 - RNA, 22 nt, Human
ccuggcagcuccuccccggcgg

SEQ ID NO: 1015027 - RNA, 22 nt, Human
gcugaagggagugcugagucug

SEQ ID NO: 1015028 - RNA, 22 nt, Human
ucaggagagaaagaauacaauu

SEQ ID NO: 1015029 - RNA, 22 nt, Human
aaucuucuacuugacaguucuc

SEQ ID NO: 1015030 - RNA, 22 nt, Human
uggauaaacucacuguaaguug

SEQ ID NO: 1015031 - RNA, 22 nt, Human
uaacacauagauauuuuaacuu

SEQ ID NO: 1015032 - RNA, 22 nt, Human
gguggccuccagggcauaggug

SEQ ID NO: 1015033 - RNA, 22 nt, Human
gccuggccugaacuaggaggug

SEQ ID NO: 1015034 - RNA, 21 nt, Human
ugguuugcggccaaaguuaaa

SEQ ID NO: 1015035 - RNA, 22 nt, Human
gaggacugcagaugggugcauc

SEQ ID NO: 1015036 - RNA, 22 nt, Human
ccucucuguaagggucccuccc

SEQ ID NO: 1015037 - RNA, 22 nt, Human
agaaggaguguacaggucaugc

SEQ ID NO: 1015038 - RNA, 22 nt, Human
ucuguggccuguguccaagugc

SEQ ID NO: 1015039 - RNA, 22 nt, Human
uaugaagauauaucugaucucu

SEQ ID NO: 1015040 - RNA, 22 nt, Human
uuaucacuuaugagcuuuuugc

SEQ ID NO: 1015041 - RNA, 22 nt, Human
uggccucuggcugaggacuaac

SEQ ID NO: 1015042 - RNA, 22 nt, Human
gacccagccugguuuuuauagg

SEQ ID NO: 1015043 - RNA, 22 nt, Human
accucugccaagaugugcuccc

SEQ ID NO: 1015044 - RNA, 22 nt, Human
aauucuuguuguuaguauauuu

SEQ ID NO: 1015045 - RNA, 22 nt, Human
uucucagaggagucgggagcug

SEQ ID NO: 1015046 - RNA, 20 nt, Human
agggcagcuugaggagccgg

SEQ ID NO: 1015047 - RNA, 19 nt, Human
cagaacagaggucauggcc

SEQ ID NO: 1015048 - RNA, 22 nt, Human
aauaugcauuaacuguguacau

SEQ ID NO: 1015049 - RNA, 22 nt, Human
ugcuuuauucgacaucugguag

SEQ ID NO: 1015050 - RNA, 17 nt, Human
ggugaguguccaggugg

SEQ ID NO: 1015051 - RNA, 22 nt, Human
aaaauguguuuaugcauuucgu

SEQ ID NO: 1015052 - RNA, 22 nt, Human
gcuuuggagccuguguucugcc

SEQ ID NO: 1015053 - RNA, 22 nt, Human
cagagcugcaaaugccccuccg

SEQ ID NO: 1015054 - RNA, 22 nt, Human
cacaggaggaggccagagcgua

SEQ ID NO: 1015055 - RNA, 22 nt, Human
ggggagaguccuuuccaguucc

SEQ ID NO: 1015056 - RNA, 22 nt, Human
gagcucccuggagguucagaua

SEQ ID NO: 1015057 - RNA, 22 nt, Human
ggccaggcugcccugggagcag

SEQ ID NO: 1015058 - RNA, 22 nt, Human
acacauuuacauguuuacguau

SEQ ID NO: 1015059 - RNA, 22 nt, Human
aaaguguugggaagaaagugca

SEQ ID NO: 1015060 - RNA, 22 nt, Human
ccugugaggucaucugugguaa

SEQ ID NO: 1015061 - RNA, 22 nt, Human
ggccugcacagagguggcucua

SEQ ID NO: 1015062 - RNA, 17 nt, Human
aggcagcucagaacauc

SEQ ID NO: 1015063 - RNA, 22 nt, Human
agauuucaaugugagcauuagu

SEQ ID NO: 1015064 - RNA, 22 nt, Human
cugucaucacaguugagcagcc

SEQ ID NO: 1015065 - RNA, 22 nt, Human
ucaggugguccuaagugccauc

SEQ ID NO: 1015066 - RNA, 22 nt, Human
aucagagacaaaaccagcacuu

SEQ ID NO: 1015067 - RNA, 22 nt, Human
ugucuguacaaauuuucugugu

SEQ ID NO: 1015068 - RNA, 22 nt, Human
acagaaauauucguggugcuug

SEQ ID NO: 1015069 - RNA, 22 nt, Human
uacuuuaaaaacugauaauuca

SEQ ID NO: 1015070 - RNA, 22 nt, Human
agguggggugagcugcagacua

SEQ ID NO: 1015071 - RNA, 22 nt, Human
aguuuauguaaaauuaguaaug

SEQ ID NO: 1015072 - RNA, 20 nt, Human
aacacagauaccaaagguug

SEQ ID NO: 1015073 - RNA, 22 nt, Human
ugcagccaggaaauauuugcug

SEQ ID NO: 1015074 - RNA, 22 nt, Human
ggcuucccagcagagggcgcac

SEQ ID NO: 1015075 - RNA, 22 nt, Human
ccuccaggaacuugagagacac

SEQ ID NO: 1015076 - RNA, 21 nt, Human
uaucuacuggugucuuucaga

SEQ ID NO: 1015077 - RNA, 22 nt, Human
ggagauagacuuggugagccac

SEQ ID NO: 1015078 - RNA, 22 nt, Human
ugggcagaggacagggaagauc

SEQ ID NO: 1015079 - RNA, 23 nt, Human
agggaaaguaguaauggccuuug

SEQ ID NO: 1015080 - RNA, 22 nt, Human
gaaaauguuuguccggagcuga

SEQ ID NO: 1015081 - RNA, 22 nt, Human
gaccuggaggauccucuucuug

SEQ ID NO: 1015082 - RNA, 22 nt, Human
uggcagucggacuucuaucuca

SEQ ID NO: 1015083 - RNA, 22 nt, Human
uggcuuccugcacagugucugc

SEQ ID NO: 1015084 - RNA, 22 nt, Human
aaaggucaaaaucgugacauug

SEQ ID NO: 1015085 - RNA, 22 nt, Human
uggagcaggcaucuuucucucu

SEQ ID NO: 1015086 - RNA, 22 nt, Human
ggaugcaggggcagcagagccu

SEQ ID NO: 1015087 - RNA, 22 nt, Human
cagcucucuaaggucuugcuuu

SEQ ID NO: 1015088 - RNA, 22 nt, Human
gcccacacaccagcucaggagg

SEQ ID NO: 1015089 - RNA, 22 nt, Human
aggccuggccuuuauguucaag

SEQ ID NO: 1015090 - RNA, 22 nt, Human
aaguuuaacuugaauucuuucu

SEQ ID NO: 1015091 - RNA, 22 nt, Human
aggccugagccccagguuuguu

SEQ ID NO: 1015092 - RNA, 22 nt, Human
uaggcacugaguacauauuggu

SEQ ID NO: 1015093 - RNA, 22 nt, Human
ccaaggagcugcaggcacuugu

SEQ ID NO: 1015094 - RNA, 22 nt, Human
ccucucauagucuguauccuuu

SEQ ID NO: 1015095 - RNA, 22 nt, Human
caguuucuuggaugccaauuuc

SEQ ID NO: 1015096 - RNA, 22 nt, Human
gaggcuggugguuaguuccauu

SEQ ID NO: 1015097 - RNA, 22 nt, Human
gcaucuaauccaguccagcauc

SEQ ID NO: 1015098 - RNA, 22 nt, Human
uccaggaggccucauuuccugu

SEQ ID NO: 1015099 - RNA, 22 nt, Human
cccagcauccucagggagcggg

SEQ ID NO: 1015100 - RNA, 22 nt, Human
ccagggcaaaugagaucauagc

SEQ ID NO: 1015101 - RNA, 22 nt, Human
gcaaaucaccaccuagcuggau

SEQ ID NO: 1015102 - RNA, 22 nt, Human
uuauuuaaugugaucugaagag

SEQ ID NO: 1015103 - RNA, 22 nt, Human
guuauuagaagugaaggauugu

SEQ ID NO: 1015104 - RNA, 22 nt, Human
gcagggucgcucuaggagauca

SEQ ID NO: 1015105 - RNA, 22 nt, Human
cuagccugggauuugaacuuau

SEQ ID NO: 1015106 - RNA, 22 nt, Human
uaaagcacauaucuuacaauaa

SEQ ID NO: 1015107 - RNA, 22 nt, Human
aaauacagauuccagggucuua

SEQ ID NO: 1015108 - RNA, 22 nt, Human
auaugcauaugucaaaacuuau

SEQ ID NO: 1015109 - RNA, 22 nt, Human
gcuuuuucaaaugaaagcuggu

SEQ ID NO: 1015110 - RNA, 22 nt, Human
guacauuucauuuaaaugaugu

SEQ ID NO: 1015111 - RNA, 22 nt, Human
cagcuugaaauauuaggagaug

SEQ ID NO: 1015112 - RNA, 22 nt, Human
gaaggaaaaauacucuguaagg

SEQ ID NO: 1015113 - RNA, 17 nt, Human
cuggagccuccaacucc

SEQ ID NO: 1015114 - RNA, 22 nt, Human
ggugggcacccgagacuggauc

SEQ ID NO: 1015115 - RNA, 22 nt, Human
uuuggaaugguaccuucaguug

SEQ ID NO: 1015116 - RNA, 22 nt, Human
ccugagaggcccucucacuguc

SEQ ID NO: 1015117 - RNA, 22 nt, Human
ucugaggcuaagagacagaggc

SEQ ID NO: 1015118 - RNA, 22 nt, Human
uuauucuucuucucuugccagg

SEQ ID NO: 1015119 - RNA, 16 nt, Human
agcagggcgggaagga

SEQ ID NO: 1015120 - RNA, 22 nt, Human
aucaguuuuuauuaauguagcu

SEQ ID NO: 1015121 - RNA, 22 nt, Human
gaacagcugcuagagaucugug

SEQ ID NO: 1015122 - RNA, 22 nt, Human
cugcucuggggaagccagaugu

SEQ ID NO: 1015123 - RNA, 22 nt, Human
ccaaagagcuagaauuauaggc

SEQ ID NO: 1015124 - RNA, 22 nt, Human
cagcuuuauugagguauaauug

SEQ ID NO: 1015125 - RNA, 22 nt, Human
acuucacagauauuuauuuggu

SEQ ID NO: 1015126 - RNA, 22 nt, Human
gaggcucugugaugugccaggc

SEQ ID NO: 1015127 - RNA, 22 nt, Human
aucaggauucaccccagagcug

SEQ ID NO: 1015128 - RNA, 22 nt, Human
uagggacacugcucaugaguuc

SEQ ID NO: 1015129 - RNA, 22 nt, Human
uguauacaggauuacucauagc

SEQ ID NO: 1015130 - RNA, 22 nt, Human
uaacagaaaggggacagaaaua

SEQ ID NO: 1015131 - RNA, 22 nt, Human
gugcaugugucuuuauaguagc

SEQ ID NO: 1015132 - RNA, 20 nt, Human
guaaaauauggucuuugggu

SEQ ID NO: 1015133 - RNA, 22 nt, Human
gugacaguggucacuuguaguu

SEQ ID NO: 1015134 - RNA, 20 nt, Human
cccucccagaugcuucccaa

SEQ ID NO: 1015135 - RNA, 22 nt, Human
cagggcucccuugcaaggaggg

SEQ ID NO: 1015136 - RNA, 22 nt, Human
gaagcacauggcuauagcuauu

SEQ ID NO: 1015137 - RNA, 22 nt, Human
gggugaggagcugccagucaug

SEQ ID NO: 1015138 - RNA, 20 nt, Human
ucccuggaggugguggcauc

SEQ ID NO: 1015139 - RNA, 22 nt, Human
cugggagcuggaugcccugccc

SEQ ID NO: 1015140 - RNA, 19 nt, Human
cuuauuagagugagagcuu

SEQ ID NO: 1015141 - RNA, 22 nt, Human
cagagccagaacuagaccuugu

SEQ ID NO: 1015142 - RNA, 21 nt, Human
ccagacuggccuaugugguag

SEQ ID NO: 1015143 - RNA, 19 nt, Human
aggcugcaagguggugggc

SEQ ID NO: 1015144 - RNA, 22 nt, Human
augaagcuaaacccugcagcca

SEQ ID NO: 1015145 - RNA, 20 nt, Human
aauaaaagaagccuucaccc

SEQ ID NO: 1015146 - RNA, 22 nt, Human
uccagggccaagucauggaacc

SEQ ID NO: 1015147 - RNA, 22 nt, Human
gggcuggaggugagcaggacag

SEQ ID NO: 1015148 - RNA, 22 nt, Human
uacauagcaaggaaaugacaga

SEQ ID NO: 1015149 - RNA, 22 nt, Human
agcugccaggccccugagaacc

SEQ ID NO: 1015150 - RNA, 22 nt, Human
gggccugacugagagcuccuca

SEQ ID NO: 1015151 - RNA, 23 nt, Human
uggggcugauggagacggaccag

SEQ ID NO: 1015152 - RNA, 22 nt, Human
gguggcagcgucuaucugacau

SEQ ID NO: 1015153 - RNA, 18 nt, Human
uggugaaggguggaggag

SEQ ID NO: 1015154 - RNA, 19 nt, Human
ucugucacuggggguauuc

SEQ ID NO: 1015155 - RNA, 22 nt, Human
aucuagcaguguuauaauugga

SEQ ID NO: 1015156 - RNA, 22 nt, Human
ugcugccaccugguggcugaag

SEQ ID NO: 1015157 - RNA, 19 nt, Human
aauccaggauaagccccuu

SEQ ID NO: 1015158 - RNA, 22 nt, Human
aucugcuugaaugagcaacagg

SEQ ID NO: 1015159 - RNA, 22 nt, Human
cuccaggggccagaagccuggc

SEQ ID NO: 1015160 - RNA, 22 nt, Human
uaccuuggguugaguucauucu

SEQ ID NO: 1015161 - RNA, 22 nt, Human
cugggagcccugacuagccugg

SEQ ID NO: 1015162 - RNA, 22 nt, Human
caaauucucacccuguuugauu

SEQ ID NO: 1015163 - RNA, 22 nt, Human
uuggcucaggaccccugugacu

SEQ ID NO: 1015164 - RNA, 22 nt, Human
uagggcagccacccaggcugcu

SEQ ID NO: 1015165 - RNA, 22 nt, Human
acacaguaccccaaggcugggc

SEQ ID NO: 1015166 - RNA, 22 nt, Human
aaucaagaaaaugaggauucuu

SEQ ID NO: 1015167 - RNA, 22 nt, Human
ucugcugcugagcacacuccua

SEQ ID NO: 1015168 - RNA, 22 nt, Human
cagggcucacucggcuggcguc

SEQ ID NO: 1015169 - RNA, 22 nt, Human
agcuuuaccugccuuggggcac

SEQ ID NO: 1015170 - RNA, 22 nt, Human
auccaggcugcgggucucaagu

SEQ ID NO: 1015171 - RNA, 22 nt, Human
guguaugauuucaaauggcuag

SEQ ID NO: 1015172 - RNA, 22 nt, Human
agcaguggcuggauggugugcu

SEQ ID NO: 1015173 - RNA, 22 nt, Human
augucacagucugacucaguga

SEQ ID NO: 1015174 - RNA, 20 nt, Human
ccugccugccucggcucauu

SEQ ID NO: 1015175 - RNA, 22 nt, Human
uggcagcugucuguggggucuc

SEQ ID NO: 1015176 - RNA, 22 nt, Human
uaagcugugggagauuggcaua

SEQ ID NO: 1015177 - RNA, 22 nt, Human
agaaugcuccagagcugaaaga

SEQ ID NO: 1015178 - RNA, 21 nt, Human
uggcacugcuuagcagguucc

SEQ ID NO: 1015179 - RNA, 22 nt, Human
uggcagugccccuugaccagug

SEQ ID NO: 1015180 - RNA, 22 nt, Human
caacugugaauuuuaugauacc

SEQ ID NO: 1015181 - RNA, 22 nt, Human
guaucuuuccacaucuucagua

SEQ ID NO: 1015182 - RNA, 22 nt, Human
ugggagcagccucagcuucggg

SEQ ID NO: 1015183 - RNA, 22 nt, Human
caugggcucuucuggacugcac

SEQ ID NO: 1015184 - RNA, 22 nt, Human
uagcacauuguugaccagaagg

SEQ ID NO: 1015185 - RNA, 22 nt, Human
uggagcauauucuggagcuugg

SEQ ID NO: 1015186 - RNA, 22 nt, Human
ugggcugcagagcccggccuuc

SEQ ID NO: 1015187 - RNA, 22 nt, Human
gaggccugguagccgagcccca

SEQ ID NO: 1015188 - RNA, 22 nt, Human
acugaaagauaaaucaguuagc

SEQ ID NO: 1015189 - RNA, 21 nt, Human
agggcagauuagcuguaagag

SEQ ID NO: 1015190 - RNA, 22 nt, Human
auugaauagaugcauuauacua

SEQ ID NO: 1015191 - RNA, 22 nt, Human
aaggcacuuuuccugagaugau

SEQ ID NO: 1015192 - RNA, 22 nt, Human
agagacaggauaucugcucaug

SEQ ID NO: 1015193 - RNA, 22 nt, Human
ugaugcugagccugggacugac

SEQ ID NO: 1015194 - RNA, 22 nt, Human
ucaggcagaggauggggagcgu

SEQ ID NO: 1015195 - RNA, 22 nt, Human
uaagaacauaaauucauacggg

SEQ ID NO: 1015196 - RNA, 20 nt, Human
agugacagagacuguguggc

SEQ ID NO: 1015197 - RNA, 22 nt, Human
ugagccuggggccugggcagcg

SEQ ID NO: 1015198 - RNA, 22 nt, Human
aguccagugucaaggugccauu

SEQ ID NO: 1015199 - RNA, 19 nt, Human
agccuggcuuugcucugcu

SEQ ID NO: 1015200 - RNA, 22 nt, Human
uggcagcuuccugcucauagga

SEQ ID NO: 1015201 - RNA, 22 nt, Human
cuggggaggcagggcugccccu

SEQ ID NO: 1015202 - RNA, 22 nt, Human
gcaggugggggucggugcaucu

SEQ ID NO: 1015203 - RNA, 22 nt, Human
uaagaagcuucugcuaaugccu

SEQ ID NO: 1015204 - RNA, 22 nt, Human
guggugcaggccagcaggggcg

SEQ ID NO: 1015205 - RNA, 19 nt, Human
agccuggagggcuggucac

SEQ ID NO: 1015206 - RNA, 22 nt, Human
cuucugugcuucacaguugcca

SEQ ID NO: 1015207 - RNA, 22 nt, Human
agcugcccuggcggagcugcuc

SEQ ID NO: 1015208 - RNA, 22 nt, Human
ggccugagucccaccuggcugu

SEQ ID NO: 1015209 - RNA, 22 nt, Human
uuucuguaauuaaaagggcagg

SEQ ID NO: 1015210 - RNA, 22 nt, Human
ccugaggggcugcaggccagcu

SEQ ID NO: 1015211 - RNA, 22 nt, Human
ggcuggcuggcugguagacaag

SEQ ID NO: 1015212 - RNA, 22 nt, Human
uggcagcuggagggcaauggcc

SEQ ID NO: 1015213 - RNA, 22 nt, Human
uugaaauaucaaguuauuagug

SEQ ID NO: 1015214 - RNA, 22 nt, Human
agagcuggguggacuuguaguu

SEQ ID NO: 1015215 - RNA, 22 nt, Human
gucaggauuaaugggaguaugc

SEQ ID NO: 1015216 - RNA, 22 nt, Human
uggcagaguucgcuccuauuca

SEQ ID NO: 1015217 - RNA, 22 nt, Human
uucacagaauggcaaguuaugg

SEQ ID NO: 1015218 - RNA, 22 nt, Human
agaucucaccucuguguauuau

SEQ ID NO: 1015219 - RNA, 22 nt, Human
ucuggcucccuggagcuccaca

SEQ ID NO: 1015220 - RNA, 22 nt, Human
gcagagcccuggggguauggug

SEQ ID NO: 1015221 - RNA, 17 nt, Human
uuuucucucuuggauuc

SEQ ID NO: 1015222 - RNA, 22 nt, Human
gcuguucaagacuaggaaauuu

SEQ ID NO: 1015223 - RNA, 22 nt, Human
uggcucuggggacaguaagucc

SEQ ID NO: 1015224 - RNA, 22 nt, Human
ccaggagcagggcuggcugcac

SEQ ID NO: 1015225 - RNA, 22 nt, Human
agugcauuauauguuucaaugg

SEQ ID NO: 1015226 - RNA, 21 nt, Human
uuuauguacuucauagaguag

SEQ ID NO: 1015227 - RNA, 22 nt, Human
aucagcaaguccuguuaauucu

SEQ ID NO: 1015228 - RNA, 22 nt, Human
cuggagcuaauaauccaucuga

SEQ ID NO: 1015229 - RNA, 22 nt, Human
gcuugggauaugcugauguaaa

SEQ ID NO: 1015230 - RNA, 22 nt, Human
uuagaaaucaccucugaagauc

SEQ ID NO: 1015231 - RNA, 22 nt, Human
gccuuggccaacaccuugcaaa

SEQ ID NO: 1015232 - RNA, 22 nt, Human
caaaugugguuucucagcauuc

SEQ ID NO: 1015233 - RNA, 22 nt, Human
cagagcuguauuuaucuuucca

SEQ ID NO: 1015234 - RNA, 22 nt, Human
agcucccagcagagcuggccac

SEQ ID NO: 1015235 - RNA, 22 nt, Human
auguaugaugcuaggcucucag

SEQ ID NO: 1015236 - RNA, 22 nt, Human
ugauuuccacgugcacccaggu

SEQ ID NO: 1015237 - RNA, 22 nt, Human
aggagaaguaaggcuagaugau

SEQ ID NO: 1015238 - RNA, 22 nt, Human
caggcagggagcuggaaaggau

SEQ ID NO: 1015239 - RNA, 22 nt, Human
ggcacagagcccagcuuccuag

SEQ ID NO: 1015240 - RNA, 22 nt, Human
cagaguguauucugcaguugca

SEQ ID NO: 1015241 - RNA, 22 nt, Human
uccuugaagcaacgugcagaca

SEQ ID NO: 1015242 - RNA, 22 nt, Human
cccaagaucuuucgugcacuaa

SEQ ID NO: 1015243 - RNA, 22 nt, Human
uccuugaaaggggcugcagggc

SEQ ID NO: 1015244 - RNA, 22 nt, Human
uucagagaugacaccugguguu

SEQ ID NO: 1015245 - RNA, 22 nt, Human
ucaggcaguagaauugcuugaa

SEQ ID NO: 1015246 - RNA, 22 nt, Human
ucuuucaaugagcauucuuucc

SEQ ID NO: 1015247 - RNA, 22 nt, Human
aggcacugugcugaugucuuau

SEQ ID NO: 1015248 - RNA, 20 nt, Human
ucagauuuuucuaacuuuga

SEQ ID NO: 1015249 - RNA, 22 nt, Human
gcagaggcacagccccagauga

SEQ ID NO: 1015250 - RNA, 22 nt, Human
aagaauguuaguuucugauaca

SEQ ID NO: 1015251 - RNA, 22 nt, Human
caguuucuacgaaggucaaccc

SEQ ID NO: 1015252 - RNA, 17 nt, Human
aagacagaagccaugag

SEQ ID NO: 1015253 - RNA, 22 nt, Human
uccaugagacagauacuguaag

SEQ ID NO: 1015254 - RNA, 22 nt, Human
agugaaauaaagcugccuaugg

SEQ ID NO: 1015255 - RNA, 22 nt, Human
agaugggcgcccuggacugagg

SEQ ID NO: 1015256 - RNA, 22 nt, Human
guucuucagucacaucacagaa

SEQ ID NO: 1015257 - RNA, 22 nt, Human
ccucccaccauuuagagagagc

SEQ ID NO: 1015258 - RNA, 21 nt, Human
agaugcugugcuccaggagca

SEQ ID NO: 1015259 - RNA, 22 nt, Human
acaugucaauuuaguacucuua

SEQ ID NO: 1015260 - RNA, 22 nt, Human
aaauacagaguugcuuaaaagc

SEQ ID NO: 1015261 - RNA, 22 nt, Human
augauguuauuuucagaaacau

SEQ ID NO: 1015262 - RNA, 22 nt, Human
gggcucucaaggcagggcccca

SEQ ID NO: 1015263 - RNA, 22 nt, Human
cugggcuggcgcauccgacacg

SEQ ID NO: 1015264 - RNA, 22 nt, Human
acacaugcugauaagaauauaa

SEQ ID NO: 1015265 - RNA, 22 nt, Human
ggcaguagccagggacuggcag

SEQ ID NO: 1015266 - RNA, 22 nt, Human
ugggcagauguccucugaagug

SEQ ID NO: 1015267 - RNA, 20 nt, Human
gguagcagcugcugucaucc

SEQ ID NO: 1015268 - RNA, 21 nt, Human
acagaggcauacagcuuaagg

SEQ ID NO: 1015269 - RNA, 22 nt, Human
auuuccagugcacugaauagaa

SEQ ID NO: 1015270 - RNA, 22 nt, Human
acccugagucagacagccugac

SEQ ID NO: 1015271 - RNA, 22 nt, Human
ucaguauccacaaaugcucaaa

SEQ ID NO: 1015272 - RNA, 22 nt, Human
gaggcagcugaaggagugacag

SEQ ID NO: 1015273 - RNA, 23 nt, Human
ccugggcauuggcugcagcuucu

SEQ ID NO: 1015274 - RNA, 22 nt, Human
cuccuuccccuacucagcaucc

SEQ ID NO: 1015275 - RNA, 22 nt, Human
auuugcaaagucguaucuguga

SEQ ID NO: 1015276 - RNA, 22 nt, Human
guuuuauaggcuguugcuauau

SEQ ID NO: 1015277 - RNA, 22 nt, Human
uauuugauagagauaaaugaua

SEQ ID NO: 1015278 - RNA, 22 nt, Human
ccaggagucuggaugagguguc

SEQ ID NO: 1015279 - RNA, 22 nt, Human
agggagcuguggucagcucagu

SEQ ID NO: 1015280 - RNA, 22 nt, Human
ucagagaugcagugccaccuac

SEQ ID NO: 1015281 - RNA, 22 nt, Human
uggagugaaguaaagaggacaa

SEQ ID NO: 1015282 - RNA, 22 nt, Human
guccagagauggacgagcagau

SEQ ID NO: 1015283 - RNA, 22 nt, Human
ugggcaaguaucggacucugag

SEQ ID NO: 1015284 - RNA, 22 nt, Human
gaaggccauuuuuagguagaau

SEQ ID NO: 1015285 - RNA, 22 nt, Human
gcugccugcacagagcugcuuu

SEQ ID NO: 1015286 - RNA, 22 nt, Human
agaggccuaaccaagauguccu

SEQ ID NO: 1015287 - RNA, 22 nt, Human
uagaaguuaaaggaauacagaa

SEQ ID NO: 1015288 - RNA, 22 nt, Human
aaaugcacagaggccagagagg

SEQ ID NO: 1015289 - RNA, 20 nt, Human
ggcugccuccuuccuuuccu

SEQ ID NO: 1015290 - RNA, 22 nt, Human
ugucaugcagguuuguuauaga

SEQ ID NO: 1015291 - RNA, 22 nt, Human
cagggccugccugguuccugga

SEQ ID NO: 1015292 - RNA, 22 nt, Human
ugggcugcuguuacaggggcug

SEQ ID NO: 1015293 - RNA, 22 nt, Human
aggaccugccaggugcaaagca

SEQ ID NO: 1015294 - RNA, 21 nt, Human
acagggcaugcagcuggcugu

SEQ ID NO: 1015295 - RNA, 21 nt, Human
cagaggggcuagccuggcugc

SEQ ID NO: 1015296 - RNA, 22 nt, Human
ugccaggcauauggccucuuug

SEQ ID NO: 1015297 - RNA, 22 nt, Human
cagacacaccaggcccauucug

SEQ ID NO: 1015298 - RNA, 22 nt, Human
ugucucaguacacuccgauguu

SEQ ID NO: 1015299 - RNA, 22 nt, Human
agccccacacucucucugagaa

SEQ ID NO: 1015300 - RNA, 22 nt, Human
aacaguaaugugguguuggguu

SEQ ID NO: 1015301 - RNA, 22 nt, Human
aaaaaguuucaacugccaacuc

SEQ ID NO: 1015302 - RNA, 22 nt, Human
gagaggccauggcugugcagug

SEQ ID NO: 1015303 - RNA, 23 nt, Human
ccagcuccgugagccucgggcuc

SEQ ID NO: 1015304 - RNA, 22 nt, Human
uggcccugcuguaucaucugcu

SEQ ID NO: 1015305 - RNA, 22 nt, Human
cacuggugacuucugagcugga

SEQ ID NO: 1015306 - RNA, 22 nt, Human
ccaggccugugcaaggagggag

SEQ ID NO: 1015307 - RNA, 20 nt, Human
ucucccaggcucagggaaga

SEQ ID NO: 1015308 - RNA, 20 nt, Human
gccugccucagcuagcugag

SEQ ID NO: 1015309 - RNA, 22 nt, Human
gcaaaugcucuccuuggucagg

SEQ ID NO: 1015310 - RNA, 22 nt, Human
ggagcugaugacgucaccaugg

SEQ ID NO: 1015311 - RNA, 22 nt, Human
ugucaugcuuauguuacauacu

SEQ ID NO: 1015312 - RNA, 22 nt, Human
agagugucugguagcugcucug

SEQ ID NO: 1015313 - RNA, 22 nt, Human
ucaguggauauuucuguggcug

SEQ ID NO: 1015314 - RNA, 22 nt, Human
ugugccugaguuggcugaguac

SEQ ID NO: 1015315 - RNA, 22 nt, Human
uuuuuaagagauucuccagucu

SEQ ID NO: 1015316 - RNA, 22 nt, Human
cugccagcucgccacaaugaca

SEQ ID NO: 1015317 - RNA, 22 nt, Human
gcugcuccgucugagcucuggu

SEQ ID NO: 1015318 - RNA, 21 nt, Human
aggcuguccuuugccagcccu

SEQ ID NO: 1015319 - RNA, 22 nt, Human
ggcucuggugcccuggcuccca

SEQ ID NO: 1015320 - RNA, 22 nt, Human
aaaaacugcaauuacuuuuguc

SEQ ID NO: 1015321 - RNA, 22 nt, Human
agcugccagaugacagugcuau

SEQ ID NO: 1015322 - RNA, 22 nt, Human
auucuucaccauggauaauuug

SEQ ID NO: 1015323 - RNA, 22 nt, Human
cuggcucaccuccgcuccagca

SEQ ID NO: 1015324 - RNA, 22 nt, Human
ugguuuaccccuguccuauauc

SEQ ID NO: 1015325 - RNA, 22 nt, Human
augaaaacuuuagccucauuag

SEQ ID NO: 1015326 - RNA, 22 nt, Human
ccagcuuuuggggugacaauuu

SEQ ID NO: 1015327 - RNA, 22 nt, Human
uaugcacaccuggguccuuguc

SEQ ID NO: 1015328 - RNA, 22 nt, Human
uuugcauugccucugacuuaug

SEQ ID NO: 1015329 - RNA, 20 nt, Human
uaacuuucuaugcuuucagc

SEQ ID NO: 1015330 - RNA, 23 nt, Human
aaggccagaauuucaauggugcc

SEQ ID NO: 1015331 - RNA, 22 nt, Human
auucuccacacauccagaccuu

SEQ ID NO: 1015332 - RNA, 22 nt, Human
acucaggaaaugagaggcucuc

SEQ ID NO: 1015333 - RNA, 21 nt, Human
ugcucacagaugugcucagug

SEQ ID NO: 1015334 - RNA, 22 nt, Human
gcuggccugggcagccugucgg

SEQ ID NO: 1015335 - RNA, 19 nt, Human
uggcaggcccaggauggac

SEQ ID NO: 1015336 - RNA, 22 nt, Human
ccugggcaaaugccagagacaa

SEQ ID NO: 1015337 - RNA, 21 nt, Human
gcaggaugcaucuuggugucu

SEQ ID NO: 1015338 - RNA, 19 nt, Human
gcucugugaugcugagggg

SEQ ID NO: 1015339 - RNA, 20 nt, Human
cagggccacgcuccaaggca

SEQ ID NO: 1015340 - RNA, 22 nt, Human
cccuccagccauggacccaggu

SEQ ID NO: 1015341 - RNA, 22 nt, Human
cugcucugcaaggcacagugau

SEQ ID NO: 1015342 - RNA, 22 nt, Human
cagccucucuguaucucaggau

SEQ ID NO: 1015343 - RNA, 22 nt, Human
ggagggcucaauugacuccuga

SEQ ID NO: 1015344 - RNA, 23 nt, Human
ugcuucucugcuugacaguucug

SEQ ID NO: 1015345 - RNA, 22 nt, Human
aucuggcugagcgaggcccaca

SEQ ID NO: 1015346 - RNA, 23 nt, Human
cccagcuuucccacugccgagag

SEQ ID NO: 1015347 - RNA, 22 nt, Human
aggacagaccuaggacuggagc

SEQ ID NO: 1015348 - RNA, 22 nt, Human
aagaggucauaccagauaaggg

SEQ ID NO: 1015349 - RNA, 22 nt, Human
aaucuucagugucuaaaaagca

SEQ ID NO: 1015350 - RNA, 22 nt, Human
ucccagccacagguguagcccu

SEQ ID NO: 1015351 - RNA, 22 nt, Human
acccaggguagaaccucagagc

SEQ ID NO: 1015352 - RNA, 22 nt, Human
gcucuggacccuggaguggcug

SEQ ID NO: 1015353 - RNA, 22 nt, Human
ucauacaauucaaucucugauu

SEQ ID NO: 1015354 - RNA, 22 nt, Human
uggcagaggaggcucagauuga

SEQ ID NO: 1015355 - RNA, 22 nt, Human
agggaggauaguagucaguuua

SEQ ID NO: 1015356 - RNA, 22 nt, Human
uucucagagugaccaagucuuu

SEQ ID NO: 1015357 - RNA, 22 nt, Human
uggcagcugaggggaggcuuug

SEQ ID NO: 1015358 - RNA, 22 nt, Human
uaccugcagcgggaauccauua

SEQ ID NO: 1015359 - RNA, 20 nt, Human
ucugaggcugagcucuacuu

SEQ ID NO: 1015360 - RNA, 22 nt, Human
gugcuuccaucuagagggucac

SEQ ID NO: 1015361 - RNA, 22 nt, Human
ggcuuuaugcacagcagauggu

SEQ ID NO: 1015362 - RNA, 22 nt, Human
aguggggacuuaugccagcauu

SEQ ID NO: 1015363 - RNA, 22 nt, Human
gggcugcugcugccagcgacac

SEQ ID NO: 1015364 - RNA, 22 nt, Human
ucucugaaggggagcuguuuaa

SEQ ID NO: 1015365 - RNA, 15 nt, Human
ugggcagaucacuug

SEQ ID NO: 1015366 - RNA, 22 nt, Human
ggcagagcuuguuccuucuguu

SEQ ID NO: 1015367 - RNA, 22 nt, Human
cacaaugcguacauauaucaaa

SEQ ID NO: 1015368 - RNA, 21 nt, Human
aauuagggugccucuuauaau

SEQ ID NO: 1015369 - RNA, 22 nt, Human
caggucagaggcgcagccccca

SEQ ID NO: 1015370 - RNA, 22 nt, Human
agcaccugccugcauuggcuau

SEQ ID NO: 1015371 - RNA, 22 nt, Human
aggcugcuucagcugcagggag

SEQ ID NO: 1015372 - RNA, 22 nt, Human
auguaacuguuauauuuuguug

SEQ ID NO: 1015373 - RNA, 22 nt, Human
auaugaaaauguuuuagcugua

SEQ ID NO: 1015374 - RNA, 22 nt, Human
cagagcugguguuacaagucca

SEQ ID NO: 1015375 - RNA, 22 nt, Human
gcuugcucaacccccgucucuc

SEQ ID NO: 1015376 - RNA, 22 nt, Human
ugagcagagucgcuccagagug

SEQ ID NO: 1015377 - RNA, 22 nt, Human
uuaauaaacaggugcagcugaa

SEQ ID NO: 1015378 - RNA, 22 nt, Human
ugaacccaggagguugcaguga

SEQ ID NO: 1015379 - RNA, 22 nt, Human
gacagccucaugaggagcaaaa

SEQ ID NO: 1015380 - RNA, 22 nt, Human
uaugcacauugguuuccucauu

SEQ ID NO: 1015381 - RNA, 22 nt, Human
ugugccaggcacuugcccaggc

SEQ ID NO: 1015382 - RNA, 22 nt, Human
guccaagagucaagaagggggc

SEQ ID NO: 1015383 - RNA, 22 nt, Human
caauuucugggccucacacaag

SEQ ID NO: 1015384 - RNA, 22 nt, Human
cuguccagcugaccagagcagc

SEQ ID NO: 1015385 - RNA, 22 nt, Human
ugaggugaagaguggagcucag

SEQ ID NO: 1015386 - RNA, 22 nt, Human
ggaggaccugcuggcccugcaa

SEQ ID NO: 1015387 - RNA, 22 nt, Human
aggggugaaagagggcccucaa

SEQ ID NO: 1015388 - RNA, 22 nt, Human
uggccucuuaggacauccucua

SEQ ID NO: 1015389 - RNA, 17 nt, Human
gcagcagagagacccuc

SEQ ID NO: 1015390 - RNA, 22 nt, Human
ugagccaggcacugcuccugga

SEQ ID NO: 1015391 - RNA, 22 nt, Human
ccuccugggcuccugucugcac

SEQ ID NO: 1015392 - RNA, 22 nt, Human
gcagggcuguucaggagggugg

SEQ ID NO: 1015393 - RNA, 22 nt, Human
cugcuuugggcagcuuuguggc

SEQ ID NO: 1015394 - RNA, 19 nt, Human
uuacuuggcaaagucaguc

SEQ ID NO: 1015395 - RNA, 22 nt, Human
agcucacaguguccuuccucaa

SEQ ID NO: 1015396 - RNA, 22 nt, Human
aaggcacuacgcugcuggggcg

SEQ ID NO: 1015397 - RNA, 23 nt, Human
gacagagugagaccuugucuuac

SEQ ID NO: 1015398 - RNA, 22 nt, Human
gccuggcuccuaagagcacaac

SEQ ID NO: 1015399 - RNA, 22 nt, Human
ggggaggcugaugugggcaaag

SEQ ID NO: 1015400 - RNA, 22 nt, Human
uuucagauuaucucaacuuugg

SEQ ID NO: 1015401 - RNA, 21 nt, Human
cccugcaggccagggcugagc

SEQ ID NO: 1015402 - RNA, 22 nt, Human
cagguacacucccuugugcuga

SEQ ID NO: 1015403 - RNA, 22 nt, Human
uucugggacaucuggacaguuu

SEQ ID NO: 1015404 - RNA, 22 nt, Human
uucauucccuuauauuagcauu

SEQ ID NO: 1015405 - RNA, 22 nt, Human
uccaggaggaggaaggcugcca

SEQ ID NO: 1015406 - RNA, 22 nt, Human
ugggagagugcucaaugugcaa

SEQ ID NO: 1015407 - RNA, 22 nt, Human
agggcagccugagugcuggccc

SEQ ID NO: 1015408 - RNA, 22 nt, Human
ugcuuggcuuucugagcuucug

SEQ ID NO: 1015409 - RNA, 22 nt, Human
ucaaugauaguacaaucagccu

SEQ ID NO: 1015410 - RNA, 22 nt, Human
ucaggaggccaccaggaccugu

SEQ ID NO: 1015411 - RNA, 22 nt, Human
uugaagcaugguacuuguucaa

SEQ ID NO: 1015412 - RNA, 22 nt, Human
aggaguguggccagggcucugg

SEQ ID NO: 1015413 - RNA, 22 nt, Human
cagucccacaagaucuccacaa

SEQ ID NO: 1015414 - RNA, 22 nt, Human
gcucuggguagccacugccugg

SEQ ID NO: 1015415 - RNA, 22 nt, Human
uguucaauccccagguccugaa

SEQ ID NO: 1015416 - RNA, 22 nt, Human
cugagacuuucaugugcuuuua

SEQ ID NO: 1015417 - RNA, 22 nt, Human
uuucaguguaucuuccaaaagc

SEQ ID NO: 1015418 - RNA, 22 nt, Human
agagaauuacagaagaauguca

SEQ ID NO: 1015419 - RNA, 22 nt, Human
caggcagagugagguggucuaa

SEQ ID NO: 1015420 - RNA, 22 nt, Human
uggcugggggugcuauagcugc

SEQ ID NO: 1015421 - RNA, 22 nt, Human
cugcuguguaucauuuuagaug

SEQ ID NO: 1015422 - RNA, 22 nt, Human
caggagcagaggguggucagca

SEQ ID NO: 1015423 - RNA, 22 nt, Human
guguguuuagcauuagcagggg

SEQ ID NO: 1015424 - RNA, 22 nt, Human
uggcugugggaugagagccuca

SEQ ID NO: 1015425 - RNA, 22 nt, Human
gaggaggcuaagugggcucugg

SEQ ID NO: 1015426 - RNA, 22 nt, Human
ggucccugcugaagccuuggug

SEQ ID NO: 1015427 - RNA, 22 nt, Human
cuguggcuaggaagcuguggga

SEQ ID NO: 1015428 - RNA, 22 nt, Human
ucuucucucauguaggagggaa

SEQ ID NO: 1015429 - RNA, 22 nt, Human
cccagguggguuggccucuguc

SEQ ID NO: 1015430 - RNA, 22 nt, Human
agagcuggauggucaagauggc

SEQ ID NO: 1015431 - RNA, 22 nt, Human
ccuggcugccgagugugcagcg

SEQ ID NO: 1015432 - RNA, 22 nt, Human
gcaggccuuggcaaugagccug

SEQ ID NO: 1015433 - RNA, 22 nt, Human
gggcuggcucccagguguugaa

SEQ ID NO: 1015434 - RNA, 22 nt, Human
uauuuagaacagacaauagaaa

SEQ ID NO: 1015435 - RNA, 22 nt, Human
gcucaaggcaggcagacaugag

SEQ ID NO: 1015436 - RNA, 22 nt, Human
aaauucaguuuuaauaaucacu

SEQ ID NO: 1015437 - RNA, 22 nt, Human
ucauucuccucuggaaaaggca

SEQ ID NO: 1015438 - RNA, 22 nt, Human
gcaggagcugcucuccugacga

SEQ ID NO: 1015439 - RNA, 22 nt, Human
uauguacauguuaaagggcaaa

SEQ ID NO: 1015440 - RNA, 22 nt, Human
cacagacccagaagggaugaag

SEQ ID NO: 1015441 - RNA, 22 nt, Human
guguauaaugcuguuuguacau

SEQ ID NO: 1015442 - RNA, 20 nt, Human
ggaagcagagaacuguuuuc

SEQ ID NO: 1015443 - RNA, 22 nt, Human
acagugucugacacauuguagc

SEQ ID NO: 1015444 - RNA, 22 nt, Human
guaggaagcucugaggcuaguu

SEQ ID NO: 1015445 - RNA, 18 nt, Human
cucugcuaaugggcagcu

SEQ ID NO: 1015446 - RNA, 22 nt, Human
uggggccuggucagagcugcac

SEQ ID NO: 1015447 - RNA, 22 nt, Human
uauauguaaauaagucuaaugu

SEQ ID NO: 1015448 - RNA, 22 nt, Human
ucccagcccagauuugugugac

SEQ ID NO: 1015449 - RNA, 22 nt, Human
cuuuguagcugcuucugauuua

SEQ ID NO: 1015450 - RNA, 22 nt, Human
gaggcccaggucaagcagccac

SEQ ID NO: 1015451 - RNA, 22 nt, Human
cagucccuaguggagcucacag

SEQ ID NO: 1015452 - RNA, 20 nt, Human
ugggccuguggcagaagucu

SEQ ID NO: 1015453 - RNA, 22 nt, Human
uggcugcuuguuuuagugaggc

SEQ ID NO: 1015454 - RNA, 18 nt, Human
ugaccugcgcuucacggu

SEQ ID NO: 1015455 - RNA, 22 nt, Human
cuuuauuagauguagacuuucu

SEQ ID NO: 1015456 - RNA, 22 nt, Human
aauguaugugauuauuccucua

SEQ ID NO: 1015457 - RNA, 22 nt, Human
guaaaauugcaauuacuuuugc

SEQ ID NO: 1015458 - RNA, 19 nt, Human
ugaggccaaggucacagau

SEQ ID NO: 1015459 - RNA, 22 nt, Human
ccucccaccguaucucaguggc

SEQ ID NO: 1015460 - RNA, 22 nt, Human
agaauucucuuccauugaaaca

SEQ ID NO: 1015461 - RNA, 22 nt, Human
gaauccaggguuguuugagcua

SEQ ID NO: 1015462 - RNA, 22 nt, Human
aaacagaaauuuccucaugcuc

SEQ ID NO: 1015463 - RNA, 22 nt, Human
cugcugugcacccaggaaggcu

SEQ ID NO: 1015464 - RNA, 22 nt, Human
ucucaaaucaaacuuugagcuu

SEQ ID NO: 1015465 - RNA, 17 nt, Human
ccuuucucuuucaucuc

SEQ ID NO: 1015466 - RNA, 20 nt, Human
uucuggaggcuacaagucug

SEQ ID NO: 1015467 - RNA, 22 nt, Human
ucaggaugaccacgagccucua

SEQ ID NO: 1015468 - RNA, 22 nt, Human
uugcauuguugcaaugaaguau

SEQ ID NO: 1015469 - RNA, 17 nt, Human
acaggccugcuugcacu

SEQ ID NO: 1015470 - RNA, 22 nt, Human
aaaucucaggccucuauuuacu

SEQ ID NO: 1015471 - RNA, 22 nt, Human
caggggaagaugccaagggaga

SEQ ID NO: 1015472 - RNA, 22 nt, Human
ugcaccugagaggucucugagg

SEQ ID NO: 1015473 - RNA, 22 nt, Human
ucaccugggagggcugugguag

SEQ ID NO: 1015474 - RNA, 20 nt, Human
aagagaagaagucuuugaaa

SEQ ID NO: 1015475 - RNA, 22 nt, Human
uuagccauauagaaaaagagcu

SEQ ID NO: 1015476 - RNA, 22 nt, Human
ccugggcuuucaaaaccagccu

SEQ ID NO: 1015477 - RNA, 23 nt, Human
uguagcaucucuuauuucucagc

SEQ ID NO: 1015478 - RNA, 22 nt, Human
uuugacauggaauaacucauuu

SEQ ID NO: 1015479 - RNA, 22 nt, Human
uaagcuauuccugaagaagguu

SEQ ID NO: 1015480 - RNA, 22 nt, Human
ggagagaaauugagguagcaag

SEQ ID NO: 1015481 - RNA, 22 nt, Human
aaggcuuuuaacuacuguuuua

SEQ ID NO: 1015482 - RNA, 22 nt, Human
uguacaaugccgagacuaacuc

SEQ ID NO: 1015483 - RNA, 22 nt, Human
gagcuuuaccuuagguucuguu

SEQ ID NO: 1015484 - RNA, 22 nt, Human
gccagcagguugucaaggagcu

SEQ ID NO: 1015485 - RNA, 22 nt, Human
uggaugcuguaggacacgcucu

SEQ ID NO: 1015486 - RNA, 22 nt, Human
cugaggccucuguucaccagaa

SEQ ID NO: 1015487 - RNA, 22 nt, Human
cuuacauuuaaucaugugucau

SEQ ID NO: 1015488 - RNA, 22 nt, Human
gaaggagcuaaagggagcccug

SEQ ID NO: 1015489 - RNA, 20 nt, Human
uauuuacaacuuagagccuc

SEQ ID NO: 1015490 - RNA, 21 nt, Human
uagggcaggcauuggaagaga

SEQ ID NO: 1015491 - RNA, 22 nt, Human
agcugccagggacugggcaugg

SEQ ID NO: 1015492 - RNA, 22 nt, Human
gcuucuaucccuccacugcacu

SEQ ID NO: 1015493 - RNA, 22 nt, Human
aacaugcugccuuucuacgagu

SEQ ID NO: 1015494 - RNA, 22 nt, Human
ucacagaauagcacuguaagcg

SEQ ID NO: 1015495 - RNA, 22 nt, Human
auccccagaaaauaggugccua

SEQ ID NO: 1015496 - RNA, 22 nt, Human
agcugucuaccugcagaguccu

SEQ ID NO: 1015497 - RNA, 22 nt, Human
uggcagaggcucugugauguug

SEQ ID NO: 1015498 - RNA, 22 nt, Human
uaucuacaggugucagguaaga

SEQ ID NO: 1015499 - RNA, 17 nt, Human
agcugccagggagugug

SEQ ID NO: 1015500 - RNA, 23 nt, Human
cugcagccgcguggggacgugga

SEQ ID NO: 1015501 - RNA, 22 nt, Human
acauguguauagccuguauaga

SEQ ID NO: 1015502 - RNA, 22 nt, Human
cagaccugagguugaguaccag

SEQ ID NO: 1015503 - RNA, 22 nt, Human
cuggaugcuuccucucugcuag

SEQ ID NO: 1015504 - RNA, 22 nt, Human
ccacccugagccgcaagagcag

SEQ ID NO: 1015505 - RNA, 22 nt, Human
uaaggcaccauaauauauuuaa

SEQ ID NO: 1015506 - RNA, 22 nt, Human
gcugagcuagcuaucucagucu

SEQ ID NO: 1015507 - RNA, 22 nt, Human
uccugagggcgauucagcaggu

SEQ ID NO: 1015508 - RNA, 22 nt, Human
gggaucagaaacauagcccuga

SEQ ID NO: 1015509 - RNA, 23 nt, Human
uccaugagaugugggcuucuagu

SEQ ID NO: 1015510 - RNA, 18 nt, Human
accugccuguucuucucu

SEQ ID NO: 1015511 - RNA, 22 nt, Human
aaaaaugcuuggacuuaauaaa

SEQ ID NO: 1015512 - RNA, 22 nt, Human
ugguccuggggaucugcaguga

SEQ ID NO: 1015513 - RNA, 22 nt, Human
aagaguuaagcaacagauacca

SEQ ID NO: 1015514 - RNA, 22 nt, Human
agggccuggcuucacuuucuca

SEQ ID NO: 1015515 - RNA, 22 nt, Human
ugggcugccagcucuccagaug

SEQ ID NO: 1015516 - RNA, 22 nt, Human
uuuccucuccggggccuccagg

SEQ ID NO: 1015517 - RNA, 20 nt, Human
cuguagggugcagcaggcuc

SEQ ID NO: 1015518 - RNA, 22 nt, Human
aaagcucacaguaauacaaggc

SEQ ID NO: 1015519 - RNA, 22 nt, Human
gguuugcacgauauuuccaugg

SEQ ID NO: 1015520 - RNA, 22 nt, Human
gcucucugccauaugaggauac

SEQ ID NO: 1015521 - RNA, 22 nt, Human
acagggcagagugaaaugcuau

SEQ ID NO: 1015522 - RNA, 19 nt, Human
guuucauuaagauaggaaa

SEQ ID NO: 1015523 - RNA, 22 nt, Human
cugcccugccuggccagugugg

SEQ ID NO: 1015524 - RNA, 22 nt, Human
agguaggguuaauggagauaua

SEQ ID NO: 1015525 - RNA, 17 nt, Human
cucacggaggaugaauc

SEQ ID NO: 1015526 - RNA, 22 nt, Human
cuccucagucaggucuaggguc

SEQ ID NO: 1015527 - RNA, 23 nt, Human
cagaagcaccuguugacugcugc

SEQ ID NO: 1015528 - RNA, 22 nt, Human
ggucccaggaagugcggcggcg

SEQ ID NO: 1015529 - RNA, 22 nt, Human
ccagggcacguugggacaguac

SEQ ID NO: 1015530 - RNA, 18 nt, Human
cugcugugucgucugggc

SEQ ID NO: 1015531 - RNA, 22 nt, Human
gaggccuggcucugcccuccug

SEQ ID NO: 1015532 - RNA, 22 nt, Human
uucuuaacucaaauauauaucc

SEQ ID NO: 1015533 - RNA, 22 nt, Human
aagccagauagaagaacucauu

SEQ ID NO: 1015534 - RNA, 22 nt, Human
gagcugcccugagcuuugcaug

SEQ ID NO: 1015535 - RNA, 22 nt, Human
uuuggaauguaguuuaaucauc

SEQ ID NO: 1015536 - RNA, 22 nt, Human
aaguucaagucuccugaguaua

SEQ ID NO: 1015537 - RNA, 22 nt, Human
cuucucagcaugguuacuguga

SEQ ID NO: 1015538 - RNA, 22 nt, Human
auuauuagacuuauaugguagu

SEQ ID NO: 1015539 - RNA, 22 nt, Human
gugcagugacccuggagagcug

SEQ ID NO: 1015540 - RNA, 22 nt, Human
cucucugggggccaugccaaga

SEQ ID NO: 1015541 - RNA, 22 nt, Human
cucagggggaaucaggucacag

SEQ ID NO: 1015542 - RNA, 22 nt, Human
ucuggcucuccagugcucuuag

SEQ ID NO: 1015543 - RNA, 22 nt, Human
gcuuccugauauucauacuguu

SEQ ID NO: 1015544 - RNA, 22 nt, Human
agccuggauccauguggcuacc

SEQ ID NO: 1015545 - RNA, 23 nt, Human
cccagagcacagccuccagaugc

SEQ ID NO: 1015546 - RNA, 22 nt, Human
cagagccuaaaacgacuccacu

SEQ ID NO: 1015547 - RNA, 22 nt, Human
cagcugaggucaaagaagcagg

SEQ ID NO: 1015548 - RNA, 22 nt, Human
uuucuggcagcgggacaggggu

SEQ ID NO: 1015549 - RNA, 22 nt, Human
ucucuggccgagagucccuggg

SEQ ID NO: 1015550 - RNA, 22 nt, Human
uguuuauaccuugguauaacca

SEQ ID NO: 1015551 - RNA, 22 nt, Human
aguaugaaaguuaaucaauuua

SEQ ID NO: 1015552 - RNA, 22 nt, Human
cacaugggugugccuggaggaa

SEQ ID NO: 1015553 - RNA, 22 nt, Human
aaaugcagaucccugaaucuca

SEQ ID NO: 1015554 - RNA, 22 nt, Human
ugggagcaggugugcuagggaa

SEQ ID NO: 1015555 - RNA, 19 nt, Human
gacagugcaguuguaguac

SEQ ID NO: 1015556 - RNA, 21 nt, Human
ggcagcugaccgcgcggugca

SEQ ID NO: 1015557 - RNA, 22 nt, Human
cccugccuacaggguuuucuuu

SEQ ID NO: 1015558 - RNA, 22 nt, Human
caguguggugagauuccaggug

SEQ ID NO: 1015559 - RNA, 22 nt, Human
ugaacagaucaauagaacugac

SEQ ID NO: 1015560 - RNA, 22 nt, Human
ugcacagagagaugagacacgu

SEQ ID NO: 1015561 - RNA, 22 nt, Human
cagggcaggaugcugugauuau

SEQ ID NO: 1015562 - RNA, 22 nt, Human
agggauguaaauucuucuucuu

SEQ ID NO: 1015563 - RNA, 22 nt, Human
aggucaaguuuagauagaguua

SEQ ID NO: 1015564 - RNA, 22 nt, Human
uuaacauuguccuuagcagauu

SEQ ID NO: 1015565 - RNA, 22 nt, Human
acaugauauuaaugucuuauuu

SEQ ID NO: 1015566 - RNA, 22 nt, Human
uuagaacugaagaagauuaagg

SEQ ID NO: 1015567 - RNA, 21 nt, Human
uucuccccagcgaauccucgg

SEQ ID NO: 1015568 - RNA, 22 nt, Human
auuugucuuugagugcccugcu

SEQ ID NO: 1015569 - RNA, 20 nt, Human
ccagaagagaugaucaucca

SEQ ID NO: 1015570 - RNA, 22 nt, Human
ugaaugauuugggugcauucag

SEQ ID NO: 1015571 - RNA, 22 nt, Human
caagggcucuuuugaggaaugu

SEQ ID NO: 1015572 - RNA, 22 nt, Human
cagcaauaacucaaagccauuu

SEQ ID NO: 1015573 - RNA, 22 nt, Human
caaagguauaaguuaauauaca

SEQ ID NO: 1015574 - RNA, 22 nt, Human
caaugguggugucagaagagau

SEQ ID NO: 1015575 - RNA, 22 nt, Human
gggcucucgauuagacccuggg

SEQ ID NO: 1015576 - RNA, 22 nt, Human
cccagccucugggcucacccaa

SEQ ID NO: 1015577 - RNA, 22 nt, Human
uuauguauggauggcugaaagu

SEQ ID NO: 1015578 - RNA, 22 nt, Human
ccuuccuggagcccaugcagau

SEQ ID NO: 1015579 - RNA, 22 nt, Human
agugcuguccaguuucacaggu

SEQ ID NO: 1015580 - RNA, 22 nt, Human
uucuuaaaacuuauggacaggu

SEQ ID NO: 1015581 - RNA, 22 nt, Human
ugaaauuaugcauuguuguacc

SEQ ID NO: 1015582 - RNA, 22 nt, Human
uggcucagaacuacuucuaguu

SEQ ID NO: 1015583 - RNA, 20 nt, Human
gugggcagcaggcauacugg

SEQ ID NO: 1015584 - RNA, 22 nt, Human
ggcugcugugaccucaggugau

SEQ ID NO: 1015585 - RNA, 20 nt, Human
ugccaugguaacagagugug

SEQ ID NO: 1015586 - RNA, 22 nt, Human
uucagaaagugaaucuuguuau

SEQ ID NO: 1015587 - RNA, 22 nt, Human
ugcuguuauacuuagcugguua

SEQ ID NO: 1015588 - RNA, 22 nt, Human
caggggcaagaaugcugucagc

SEQ ID NO: 1015589 - RNA, 22 nt, Human
ucucagggcagcaaggaagcau

SEQ ID NO: 1015590 - RNA, 22 nt, Human
cacugcauggaugauggcugua

SEQ ID NO: 1015591 - RNA, 22 nt, Human
uccuaguucucugccagucgcu

SEQ ID NO: 1015592 - RNA, 22 nt, Human
cagagccugccucuggcugugg

SEQ ID NO: 1015593 - RNA, 17 nt, Human
ugcauguccuuuguucc

SEQ ID NO: 1015594 - RNA, 22 nt, Human
guuuuucuaggaccaugugauu

SEQ ID NO: 1015595 - RNA, 22 nt, Human
ggcagcuccucucagcaaaaga

SEQ ID NO: 1015596 - RNA, 22 nt, Human
ugcugccacugguagucucauu

SEQ ID NO: 1015597 - RNA, 20 nt, Human
ucauugcacauaauggaagc

SEQ ID NO: 1015598 - RNA, 22 nt, Human
gcagagcacccugcagugguau

SEQ ID NO: 1015599 - RNA, 22 nt, Human
ugggaaauguguuucuggacca

SEQ ID NO: 1015600 - RNA, 22 nt, Human
ccugggucuugguucaugcucu

SEQ ID NO: 1015601 - RNA, 22 nt, Human
gacaggcuuccuaagugccaga

SEQ ID NO: 1015602 - RNA, 22 nt, Human
uugggagcuuggccgagaugua

SEQ ID NO: 1015603 - RNA, 22 nt, Human
gcagggccagggcucaggcugu

SEQ ID NO: 1015604 - RNA, 22 nt, Human
gcaggaguguauuugcauguaa

SEQ ID NO: 1015605 - RNA, 19 nt, Human
ccugggagucagcugaagg

SEQ ID NO: 1015606 - RNA, 22 nt, Human
cucaaggaaagucuggagaaga

SEQ ID NO: 1015607 - RNA, 22 nt, Human
ggcagcaguccauggcccaagg

SEQ ID NO: 1015608 - RNA, 22 nt, Human
agacagcauggagcugauaaca

SEQ ID NO: 1015609 - RNA, 22 nt, Human
gggcugcuuuuaagggucucag

SEQ ID NO: 1015610 - RNA, 22 nt, Human
uccaggcaaagugcugggcugc

SEQ ID NO: 1015611 - RNA, 22 nt, Human
ucuucuuaugugccauuaucuc

SEQ ID NO: 1015612 - RNA, 22 nt, Human
ucccagagccucugccacucug

SEQ ID NO: 1015613 - RNA, 22 nt, Human
auugcuuaucuaucuuuaaguc

SEQ ID NO: 1015614 - RNA, 22 nt, Human
gcagagcagugcuugcccagcg

SEQ ID NO: 1015615 - RNA, 19 nt, Human
gcucagcagacccagugcu

SEQ ID NO: 1015616 - RNA, 22 nt, Human
gauuuuaauuauaggagguccu

SEQ ID NO: 1015617 - RNA, 22 nt, Human
gccccucccagucaggagcacu

SEQ ID NO: 1015618 - RNA, 20 nt, Human
cuguuaaaagguaugaauuc

SEQ ID NO: 1015619 - RNA, 22 nt, Human
ucuucucaguuucucuaggaug

SEQ ID NO: 1015620 - RNA, 22 nt, Human
gucccagaggacagggucacau

SEQ ID NO: 1015621 - RNA, 22 nt, Human
aucuggguucaccaugcuccug

SEQ ID NO: 1015622 - RNA, 22 nt, Human
ugcuugggaauguggagucaga

SEQ ID NO: 1015623 - RNA, 22 nt, Human
agucccagcccaguccuguaag

SEQ ID NO: 1015624 - RNA, 22 nt, Human
uauuucagucacuucuucucug

SEQ ID NO: 1015625 - RNA, 22 nt, Human
aaaguuugcaauuuauguuaau

SEQ ID NO: 1015626 - RNA, 22 nt, Human
uaagaacauuuucggaaagaua

SEQ ID NO: 1015627 - RNA, 22 nt, Human
uucaaauuaccacauuugcuua

SEQ ID NO: 1015628 - RNA, 22 nt, Human
aggcacaguggcucacaccugu

SEQ ID NO: 1015629 - RNA, 22 nt, Human
cacaaaaguaggaggcaggcgg

SEQ ID NO: 1015630 - RNA, 22 nt, Human
cagaggccauauuucuucacuc

SEQ ID NO: 1015631 - RNA, 22 nt, Human
uagaaaagaauuuuauuugaua

SEQ ID NO: 1015632 - RNA, 22 nt, Human
caggugggaccaugauagggca

SEQ ID NO: 1015633 - RNA, 22 nt, Human
ucuggaaguuagaggaggaaag

SEQ ID NO: 1015634 - RNA, 22 nt, Human
ccacccagccagaugcaggaag

SEQ ID NO: 1015635 - RNA, 22 nt, Human
uucuuaacuggaaaaugucaga

SEQ ID NO: 1015636 - RNA, 22 nt, Human
agcugagcucaggcugauguaa

SEQ ID NO: 1015637 - RNA, 22 nt, Human
agggaaauuaaugugagcaaug

SEQ ID NO: 1015638 - RNA, 22 nt, Human
gugcugucaauugcuuucagua

SEQ ID NO: 1015639 - RNA, 22 nt, Human
cagauggcaacagcucugugac

SEQ ID NO: 1015640 - RNA, 22 nt, Human
agugaguggacccugcaaggaa

SEQ ID NO: 1015641 - RNA, 22 nt, Human
ggggcagcuaccggaaguaggg

SEQ ID NO: 1015642 - RNA, 22 nt, Human
gaaccucagugaaacuggaggu

SEQ ID NO: 1015643 - RNA, 22 nt, Human
agacaggacacaagcugcauaa

SEQ ID NO: 1015644 - RNA, 22 nt, Human
ucagcaguguaguuuaucauuc

SEQ ID NO: 1015645 - RNA, 22 nt, Human
cauugcacuucugcuuuuccuc

SEQ ID NO: 1015646 - RNA, 22 nt, Human
cgcuggccauagccuccugugu

SEQ ID NO: 1015647 - RNA, 22 nt, Human
caagagcuuuagaaaugcucau

SEQ ID NO: 1015648 - RNA, 22 nt, Human
uagaaagcuugggguguuuaaa

SEQ ID NO: 1015649 - RNA, 22 nt, Human
aucuauuaugcugagaaacugu

SEQ ID NO: 1015650 - RNA, 22 nt, Human
uucaagucaaggaaagaggucu

SEQ ID NO: 1015651 - RNA, 22 nt, Human
cagcauggagacaaagugggca

SEQ ID NO: 1015652 - RNA, 22 nt, Human
aaugauggauuuagacaagcug

SEQ ID NO: 1015653 - RNA, 22 nt, Human
gccuucagcccugacuggccag

SEQ ID NO: 1015654 - RNA, 22 nt, Human
aucacugucgucaucugagauu

SEQ ID NO: 1015655 - RNA, 21 nt, Human
gcaaauguucaggaaaaaaga

SEQ ID NO: 1015656 - RNA, 22 nt, Human
acagauuuaggacuguagcgau

SEQ ID NO: 1015657 - RNA, 22 nt, Human
cagguggagcugacugagggca

SEQ ID NO: 1015658 - RNA, 22 nt, Human
aagcaucucuauguggagagug

SEQ ID NO: 1015659 - RNA, 22 nt, Human
uuccauaauuaaguggagagaa

SEQ ID NO: 1015660 - RNA, 22 nt, Human
uucacauuggugauauguuucu

SEQ ID NO: 1015661 - RNA, 19 nt, Human
uccuccuuacuuccucuug

SEQ ID NO: 1015662 - RNA, 22 nt, Human
cucuggacacuggcaugggguc

SEQ ID NO: 1015663 - RNA, 22 nt, Human
cuggagcuaggaaguccaagau

SEQ ID NO: 1015664 - RNA, 22 nt, Human
ucucagucuuugcaaggaugcu

SEQ ID NO: 1015665 - RNA, 22 nt, Human
cauaauuugauaugcuugaugg

SEQ ID NO: 1015666 - RNA, 22 nt, Human
ccaggcaggcuagaauguaaau

SEQ ID NO: 1015667 - RNA, 22 nt, Human
ugauuucaaguagugacaugcu

SEQ ID NO: 1015668 - RNA, 22 nt, Human
cagccaggagcucccccugcuc

SEQ ID NO: 1015669 - RNA, 22 nt, Human
agggccugugcuuccugagaua

SEQ ID NO: 1015670 - RNA, 22 nt, Human
uaacuuucacaucacacugacu

SEQ ID NO: 1015671 - RNA, 22 nt, Human
agaagcagacucugaggcaagg

SEQ ID NO: 1015672 - RNA, 22 nt, Human
caaauguauucucacuucaggg

SEQ ID NO: 1015673 - RNA, 22 nt, Human
cuuaagaugaggucaugcuaua

SEQ ID NO: 1015674 - RNA, 22 nt, Human
gcucaggagcugacagccucaa

SEQ ID NO: 1015675 - RNA, 22 nt, Human
uuggcagugaugcagcuuguuc

SEQ ID NO: 1015676 - RNA, 22 nt, Human
uuugcagucaaauuugcuaaau

SEQ ID NO: 1015677 - RNA, 22 nt, Human
auuucugugcaguaaaugguga

SEQ ID NO: 1015678 - RNA, 23 nt, Human
ucagcugcuuccuccugccugcc

SEQ ID NO: 1015679 - RNA, 22 nt, Human
ggggaaggauugaguugaccca

SEQ ID NO: 1015680 - RNA, 22 nt, Human
gucuuucuaugaugaacuguug

SEQ ID NO: 1015681 - RNA, 22 nt, Human
ugggcuccucgucacucgcugu

SEQ ID NO: 1015682 - RNA, 22 nt, Human
cauugcacuccacccuaggcaa

SEQ ID NO: 1015683 - RNA, 22 nt, Human
caaggccaguccauuuuggaag

SEQ ID NO: 1015684 - RNA, 22 nt, Human
uggccugguccuugucaaggca

SEQ ID NO: 1015685 - RNA, 22 nt, Human
acagagcaugcucaguguguga

SEQ ID NO: 1015686 - RNA, 22 nt, Human
caguuaaaggcccaauaucugg

SEQ ID NO: 1015687 - RNA, 22 nt, Human
cugugccuaagaugcaugucuc

SEQ ID NO: 1015688 - RNA, 22 nt, Human
cuggccuuuagccccagugucu

SEQ ID NO: 1015689 - RNA, 22 nt, Human
cagacaggguccuguccgucac

SEQ ID NO: 1015690 - RNA, 22 nt, Human
acaugcauaggagaagucuuua

SEQ ID NO: 1015691 - RNA, 22 nt, Human
gcacacaguauaugcucauuaa

SEQ ID NO: 1015692 - RNA, 22 nt, Human
cugccagucuaugcugcucggc

SEQ ID NO: 1015693 - RNA, 22 nt, Human
gcugagcucccagcaguaucug

SEQ ID NO: 1015694 - RNA, 22 nt, Human
aagaacuuccuaauauauuuuc

SEQ ID NO: 1015695 - RNA, 22 nt, Human
agcagccacacgccuccuucuc

SEQ ID NO: 1015696 - RNA, 22 nt, Human
ugcuuuauaggggauugcaggc

SEQ ID NO: 1015697 - RNA, 22 nt, Human
ucugccuuggcaaccacagcuu

SEQ ID NO: 1015698 - RNA, 22 nt, Human
ucccagaggcaguugguaacuu

SEQ ID NO: 1015699 - RNA, 22 nt, Human
uaaaugugucuauggacccgcc

SEQ ID NO: 1015700 - RNA, 22 nt, Human
ucucagagauucagggagaagu

SEQ ID NO: 1015701 - RNA, 22 nt, Human
aguaaacauaauuuaccuguag

SEQ ID NO: 1015702 - RNA, 20 nt, Human
aucagcaacugccacucagu

SEQ ID NO: 1015703 - RNA, 22 nt, Human
ucauucagguugggcaaguguc

SEQ ID NO: 1015704 - RNA, 22 nt, Human
uaauuauuaugacaacaauugc

SEQ ID NO: 1015705 - RNA, 22 nt, Human
uccagggaucuuuagagucuuu

SEQ ID NO: 1015706 - RNA, 22 nt, Human
gcagcugcuguggcaucaagcu

SEQ ID NO: 1015707 - RNA, 22 nt, Human
cugcuuuguggaaucacacugg

SEQ ID NO: 1015708 - RNA, 22 nt, Human
uccagggguaccggccaggcag

SEQ ID NO: 1015709 - RNA, 22 nt, Human
auucuucaccugagucagucua

SEQ ID NO: 1015710 - RNA, 22 nt, Human
ggccuuggugcucuguguugca

SEQ ID NO: 1015711 - RNA, 22 nt, Human
uuagccauuaauguccugugca

SEQ ID NO: 1015712 - RNA, 22 nt, Human
ugggagcugggguuggacgucu

SEQ ID NO: 1015713 - RNA, 22 nt, Human
auccaggccuugaaguaccagu

SEQ ID NO: 1015714 - RNA, 22 nt, Human
uuccaaagucauguugcugaua

SEQ ID NO: 1015715 - RNA, 22 nt, Human
aagaugauaggacuugcuuaag

SEQ ID NO: 1015716 - RNA, 22 nt, Human
ucccccacucuaaaggagccuu

SEQ ID NO: 1015717 - RNA, 22 nt, Human
ucaggggcuugaggugcauguc

SEQ ID NO: 1015718 - RNA, 22 nt, Human
uucuagaugauaaaccagcagc

SEQ ID NO: 1015719 - RNA, 22 nt, Human
cuggcuccauccuugagcucug

SEQ ID NO: 1015720 - RNA, 22 nt, Human
aagcaagacagaaguuacugcc

SEQ ID NO: 1015721 - RNA, 22 nt, Human
aggagucagauaugggaaaguu

SEQ ID NO: 1015722 - RNA, 22 nt, Human
aacaugauuuaguauaaugcag

SEQ ID NO: 1015723 - RNA, 22 nt, Human
ucauuuguggaagugauugugg

SEQ ID NO: 1015724 - RNA, 22 nt, Human
cagaagaguagcugaacaaguu

SEQ ID NO: 1015725 - RNA, 23 nt, Human
cuccucguaacucuguggugggu

SEQ ID NO: 1015726 - RNA, 22 nt, Human
uucuuuccccauggaguucgga

SEQ ID NO: 1015727 - RNA, 22 nt, Human
ggcugaaggaugaaagcugcag

SEQ ID NO: 1015728 - RNA, 22 nt, Human
gagcagaacuacucacauaucg

SEQ ID NO: 1015729 - RNA, 20 nt, Human
agaggccaguuaggagucua

SEQ ID NO: 1015730 - RNA, 22 nt, Human
ggagccagagucugcaguguaa

SEQ ID NO: 1015731 - RNA, 22 nt, Human
gccuucaggaaaucaguccuug

SEQ ID NO: 1015732 - RNA, 22 nt, Human
cugcagccucaaccuccugagc

SEQ ID NO: 1015733 - RNA, 22 nt, Human
uuuuccucuguuauuaguguga

SEQ ID NO: 1015734 - RNA, 22 nt, Human
gcugccucccccauggcuggaa

SEQ ID NO: 1015735 - RNA, 22 nt, Human
ccagagagagaggucaauggca

SEQ ID NO: 1015736 - RNA, 22 nt, Human
gaaggagagagacaucgucccu

SEQ ID NO: 1015737 - RNA, 22 nt, Human
cagcagcccacgcgugcugucc

SEQ ID NO: 1015738 - RNA, 22 nt, Human
aaguccuuggagaauagaaagg

SEQ ID NO: 1015739 - RNA, 22 nt, Human
gaagagcuaaaggcacaggcuu

SEQ ID NO: 1015740 - RNA, 22 nt, Human
agcugaaagugcuuugaggacu

SEQ ID NO: 1015741 - RNA, 19 nt, Human
cuguggcugaccucuggcc

SEQ ID NO: 1015742 - RNA, 22 nt, Human
augcuacagcaucucucaucag

SEQ ID NO: 1015743 - RNA, 18 nt, Human
uggagcagguaggcauga

SEQ ID NO: 1015744 - RNA, 22 nt, Human
cagaaggcuggcagauugagau

SEQ ID NO: 1015745 - RNA, 22 nt, Human
caaggccagggaauuuuucugg

SEQ ID NO: 1015746 - RNA, 22 nt, Human
uaugcacacaggcuuaauucau

SEQ ID NO: 1015747 - RNA, 22 nt, Human
gagguucacaggcuaucacagu

SEQ ID NO: 1015748 - RNA, 22 nt, Human
ucugugaacaucacauugacag

SEQ ID NO: 1015749 - RNA, 22 nt, Human
aggagcugcauggauaccuggu

SEQ ID NO: 1015750 - RNA, 22 nt, Human
uccugccuuagagcaaggaaaa

SEQ ID NO: 1015751 - RNA, 20 nt, Human
aggaaaaauggaaacuggag

SEQ ID NO: 1015752 - RNA, 22 nt, Human
gaucauuugcaggaaacauuaa

SEQ ID NO: 1015753 - RNA, 22 nt, Human
ggacagcauaucagcagggcag

SEQ ID NO: 1015754 - RNA, 22 nt, Human
gcccacagcucguuccucuccu

SEQ ID NO: 1015755 - RNA, 22 nt, Human
uuugacaguaauaaagcacaag

SEQ ID NO: 1015756 - RNA, 22 nt, Human
ggggaccugggcuucaaggguu

SEQ ID NO: 1015757 - RNA, 22 nt, Human
agucucuuuaaucacagugucu

SEQ ID NO: 1015758 - RNA, 22 nt, Human
acaggggaauuuacugucauua

SEQ ID NO: 1015759 - RNA, 22 nt, Human
cagggcucccucuggcucccag

SEQ ID NO: 1015760 - RNA, 22 nt, Human
cuggcugaggucaccaguagcu

SEQ ID NO: 1015761 - RNA, 22 nt, Human
augaguaaaaccacuauuuaca

SEQ ID NO: 1015762 - RNA, 22 nt, Human
cauguuuuguguacagaauauu

SEQ ID NO: 1015763 - RNA, 22 nt, Human
cucaggauuuacuaauuucaag

SEQ ID NO: 1015764 - RNA, 22 nt, Human
agccuggaagaaccugaagucu

SEQ ID NO: 1015765 - RNA, 18 nt, Human
gggcuguguucaugccca

SEQ ID NO: 1015766 - RNA, 22 nt, Human
caugcuguguguuuuagcucca

SEQ ID NO: 1015767 - RNA, 22 nt, Human
auguuuccauuuucuuguauca

SEQ ID NO: 1015768 - RNA, 22 nt, Human
ugaagcaguuacuggguguuaa

SEQ ID NO: 1015769 - RNA, 21 nt, Human
uggaaagauucaaagaccagg

SEQ ID NO: 1015770 - RNA, 22 nt, Human
cugucucugucuuaacucccag

SEQ ID NO: 1015771 - RNA, 22 nt, Human
auuugucuagugguauucacgu

SEQ ID NO: 1015772 - RNA, 22 nt, Human
uauucacauucucaggccuggu

SEQ ID NO: 1015773 - RNA, 22 nt, Human
accagcuguguccuggcugcag

SEQ ID NO: 1015774 - RNA, 22 nt, Human
ugguggcaauguccuggagaag

SEQ ID NO: 1015775 - RNA, 22 nt, Human
ugcauuaucuuuaauguucuca

SEQ ID NO: 1015776 - RNA, 20 nt, Human
uaugaagauaugugaacagc

SEQ ID NO: 1015777 - RNA, 22 nt, Human
aucaggaucacugggagucuug

SEQ ID NO: 1015778 - RNA, 22 nt, Human
acaggugugagaacaugccuug

SEQ ID NO: 1015779 - RNA, 22 nt, Human
uggggcugaggagccucacucu

SEQ ID NO: 1015780 - RNA, 22 nt, Human
gggcaguggcucacgccuguaa

SEQ ID NO: 1015781 - RNA, 22 nt, Human
acuccagggcugaacgaggccc

SEQ ID NO: 1015782 - RNA, 22 nt, Human
cacauccuucagcugagcccag

SEQ ID NO: 1015783 - RNA, 18 nt, Human
ugugaacacauuuuucug

SEQ ID NO: 1015784 - RNA, 16 nt, Human
gggcugggggauucug

SEQ ID NO: 1015785 - RNA, 22 nt, Human
ucaggagauggucuuuauaggc

SEQ ID NO: 1015786 - RNA, 22 nt, Human
gaggaaaagagacagguuauug

SEQ ID NO: 1015787 - RNA, 22 nt, Human
caaggagauaaaauguugagcu

SEQ ID NO: 1015788 - RNA, 22 nt, Human
caggaugagaggcccagggaag

SEQ ID NO: 1015789 - RNA, 17 nt, Human
uguuccauuugaccacc

SEQ ID NO: 1015790 - RNA, 22 nt, Human
gaagcagcuggugagauggagc

SEQ ID NO: 1015791 - RNA, 22 nt, Human
aaagcccauguggaaguacagg

SEQ ID NO: 1015792 - RNA, 22 nt, Human
gucuuuaugguaugaaaacuga

SEQ ID NO: 1015793 - RNA, 22 nt, Human
aauggcucugauguuguuguga

SEQ ID NO: 1015794 - RNA, 21 nt, Human
uccugcagaaugccuuccuac

SEQ ID NO: 1015795 - RNA, 22 nt, Human
ccaggcauccauugcuuccucu

SEQ ID NO: 1015796 - RNA, 22 nt, Human
gcagcucccaucagggcacaga

SEQ ID NO: 1015797 - RNA, 22 nt, Human
ucagggcauacucuucaagguc

SEQ ID NO: 1015798 - RNA, 23 nt, Human
ugcugguguuuuugggaccaggg

SEQ ID NO: 1015799 - RNA, 21 nt, Human
ugccagcauuaaacagucauu

SEQ ID NO: 1015800 - RNA, 22 nt, Human
uuucaaaguugggaauuguaau

SEQ ID NO: 1015801 - RNA, 22 nt, Human
gcacugggugugaggcagcguc

SEQ ID NO: 1015802 - RNA, 22 nt, Human
caauuucucgaacucuaaucca

SEQ ID NO: 1015803 - RNA, 22 nt, Human
cgcugggcgccgaccugcuggc

SEQ ID NO: 1015804 - RNA, 22 nt, Human
ggcuguggucugggugcucccc

SEQ ID NO: 1015805 - RNA, 22 nt, Human
gcuggcuugauaguuucugcuu

SEQ ID NO: 1015806 - RNA, 22 nt, Human
uccaggacuagcauuucugaua

SEQ ID NO: 1015807 - RNA, 22 nt, Human
auacaugucaucauauguuugu

SEQ ID NO: 1015808 - RNA, 22 nt, Human
uuucacaauuuuaaggagcaaa

SEQ ID NO: 1015809 - RNA, 22 nt, Human
uauaguaaaauuuucauuuaug

SEQ ID NO: 1015810 - RNA, 20 nt, Human
uuucaguuaucuugaccuuc

SEQ ID NO: 1015811 - RNA, 22 nt, Human
cauggcagcaauuuuccugacu

SEQ ID NO: 1015812 - RNA, 22 nt, Human
caguuucuucaucaguuaagca

SEQ ID NO: 1015813 - RNA, 22 nt, Human
aauguacaaggguuccaguuuu

SEQ ID NO: 1015814 - RNA, 22 nt, Human
gugccugcugcagagucgcugu

SEQ ID NO: 1015815 - RNA, 22 nt, Human
uuauuuugguaaauguuugccu

SEQ ID NO: 1015816 - RNA, 22 nt, Human
agcagcauuaugauauaucuua

SEQ ID NO: 1015817 - RNA, 22 nt, Human
uugcaaaagccgaggcacucca

SEQ ID NO: 1015818 - RNA, 22 nt, Human
aguggcaggaaaguggaagaga

SEQ ID NO: 1015819 - RNA, 22 nt, Human
auguccagccaaccacuggauu

SEQ ID NO: 1015820 - RNA, 21 nt, Human
agaaaaguagaguuuucagag

SEQ ID NO: 1015821 - RNA, 22 nt, Human
ugacaauacagagagagcaaaa

SEQ ID NO: 1015822 - RNA, 22 nt, Human
agagccagccuucucagcuuac

SEQ ID NO: 1015823 - RNA, 22 nt, Human
gcuguucucuguaacaugcauu

SEQ ID NO: 1015824 - RNA, 22 nt, Human
gucccuggucuaccguggcuuc

SEQ ID NO: 1015825 - RNA, 22 nt, Human
caaaugcuaacuucuuuccaaa

SEQ ID NO: 1015826 - RNA, 22 nt, Human
cugugagcuggguggccaggac

SEQ ID NO: 1015827 - RNA, 22 nt, Human
uggagggcaucuguggucaggc

SEQ ID NO: 1015828 - RNA, 22 nt, Human
gcuuccugucccucagccauga

SEQ ID NO: 1015829 - RNA, 21 nt, Human
gccaccucgucucggagcagc

SEQ ID NO: 1015830 - RNA, 22 nt, Human
auuucauugaaguuaauucuuc

SEQ ID NO: 1015831 - RNA, 22 nt, Human
caggaugggugucggccagcac

SEQ ID NO: 1015832 - RNA, 20 nt, Human
ucuggcucuuugcuccuccc

SEQ ID NO: 1015833 - RNA, 22 nt, Human
ugaugaaacugagguuccaaga

SEQ ID NO: 1015834 - RNA, 22 nt, Human
uguuuuguuuaugagagcacag

SEQ ID NO: 1015835 - RNA, 22 nt, Human
aucuguaaaugcaaauguagcu

SEQ ID NO: 1015836 - RNA, 22 nt, Human
aggcacugaaggaagcuugcgc

SEQ ID NO: 1015837 - RNA, 22 nt, Human
uugggaaggcguggaagcagaa

SEQ ID NO: 1015838 - RNA, 22 nt, Human
uuuauugcauacacaaauguca

SEQ ID NO: 1015839 - RNA, 22 nt, Human
ucugaacagaaaagaugcacaa

SEQ ID NO: 1015840 - RNA, 17 nt, Human
cugaggcccagggccca

SEQ ID NO: 1015841 - RNA, 22 nt, Human
uagcagaaccagcagucaauuu

SEQ ID NO: 1015842 - RNA, 22 nt, Human
ugaaacagucuccagacuugga

SEQ ID NO: 1015843 - RNA, 22 nt, Human
cccugcagaccaaugccauaga

SEQ ID NO: 1015844 - RNA, 22 nt, Human
uuggaaauacagcaguuacuuu

SEQ ID NO: 1015845 - RNA, 22 nt, Human
cauuguuauagcauuacacacc

SEQ ID NO: 1015846 - RNA, 22 nt, Human
uuugacaaauccuucagcaaug

SEQ ID NO: 1015847 - RNA, 22 nt, Human
cagcacuggggccacuggaguu

SEQ ID NO: 1015848 - RNA, 22 nt, Human
ccagaggcauguucaaagcaau

SEQ ID NO: 1015849 - RNA, 22 nt, Human
ccucugcucccuggugucugag

SEQ ID NO: 1015850 - RNA, 21 nt, Human
agugaaaugaaguguaugcuc

SEQ ID NO: 1015851 - RNA, 22 nt, Human
ccagcccucacugaggccucuc

SEQ ID NO: 1015852 - RNA, 22 nt, Human
cuggcaggcagacuucugcaag

SEQ ID NO: 1015853 - RNA, 22 nt, Human
ugagaauuuuuugucaugcauu

SEQ ID NO: 1015854 - RNA, 22 nt, Human
auauaauacaaccugcuaagug

SEQ ID NO: 1015855 - RNA, 22 nt, Human
caggugaccuuuguccuaaguu

SEQ ID NO: 1015856 - RNA, 22 nt, Human
gccugggaagacuaagugggag

SEQ ID NO: 1015857 - RNA, 22 nt, Human
gguggguuuggaagagcaggcu

SEQ ID NO: 1015858 - RNA, 22 nt, Human
gcagcugagcgugaggaagagu

SEQ ID NO: 1015859 - RNA, 22 nt, Human
uacauauacugagugauuugcu

SEQ ID NO: 1015860 - RNA, 22 nt, Human
uccauuuuagagaugaagaaac

SEQ ID NO: 1015861 - RNA, 19 nt, Human
ggucucagugcagcugcag

SEQ ID NO: 1015862 - RNA, 22 nt, Human
auucauaacggcaaaugucacc

SEQ ID NO: 1015863 - RNA, 22 nt, Human
aggcuucccagcugagcucagc

SEQ ID NO: 1015864 - RNA, 22 nt, Human
uagcuagaaugcuucgugauau

SEQ ID NO: 1015865 - RNA, 22 nt, Human
cugcucuguuucuuagcugggu

SEQ ID NO: 1015866 - RNA, 22 nt, Human
aguuagaaaguaaaucauuuga

SEQ ID NO: 1015867 - RNA, 22 nt, Human
ucugcaucauuuuucagagccg

SEQ ID NO: 1015868 - RNA, 22 nt, Human
uugggagcauuuagaaaagacg

SEQ ID NO: 1015869 - RNA, 22 nt, Human
cacugaaggacaguaggaaggg

SEQ ID NO: 1015870 - RNA, 22 nt, Human
acagaggucauggagaguucuc

SEQ ID NO: 1015871 - RNA, 22 nt, Human
cauaaguuggguaauauaauga

SEQ ID NO: 1015872 - RNA, 22 nt, Human
cagcuggggcagccacgugcgg

SEQ ID NO: 1015873 - RNA, 22 nt, Human
ucuuuggauaucgcuagaccgu

SEQ ID NO: 1015874 - RNA, 22 nt, Human
uucuucuccuaaggagaguccu

SEQ ID NO: 1015875 - RNA, 22 nt, Human
uggcucagcagguuagaaacua

SEQ ID NO: 1015876 - RNA, 22 nt, Human
caucacagggggcuagaagucu

SEQ ID NO: 1015877 - RNA, 22 nt, Human
aguguuugagacacauuucacu

SEQ ID NO: 1015878 - RNA, 22 nt, Human
ucacauuuucuacuacuguacg

SEQ ID NO: 1015879 - RNA, 22 nt, Human
gagccugggacugggggucaug

SEQ ID NO: 1015880 - RNA, 22 nt, Human
uccugcagccaagggucaucga

SEQ ID NO: 1015881 - RNA, 22 nt, Human
cuacauaaauauuuaugugucu

SEQ ID NO: 1015882 - RNA, 22 nt, Human
ccugccuguacuagagacccag

SEQ ID NO: 1015883 - RNA, 22 nt, Human
cuggagccugcaguuuucacuu

SEQ ID NO: 1015884 - RNA, 22 nt, Human
aggcccuguccauggugcugaa

SEQ ID NO: 1015885 - RNA, 22 nt, Human
aucaaaguuucccagaaguugu

SEQ ID NO: 1015886 - RNA, 22 nt, Human
ggcugugauugguggaugugaa

SEQ ID NO: 1015887 - RNA, 22 nt, Human
ucucccacuggccuuguaugau

SEQ ID NO: 1015888 - RNA, 22 nt, Human
cagugucuccagaugcuccaau

SEQ ID NO: 1015889 - RNA, 15 nt, Human
cagucccagggaccc

SEQ ID NO: 1015890 - RNA, 22 nt, Human
ccugccugcguccucugagggc

SEQ ID NO: 1015891 - RNA, 22 nt, Human
uggcccugcuaugauccugcaa

SEQ ID NO: 1015892 - RNA, 22 nt, Human
gagggcucugucuggaagggaa

SEQ ID NO: 1015893 - RNA, 22 nt, Human
ugcuggaggggccugaccagga

SEQ ID NO: 1015894 - RNA, 16 nt, Human
uccaggcauaucugag

SEQ ID NO: 1015895 - RNA, 22 nt, Human
gguccccagcaguggcugcuuc

SEQ ID NO: 1015896 - RNA, 23 nt, Human
uggagaugccccacucccugucu

SEQ ID NO: 1015897 - RNA, 22 nt, Human
uuagaaagaacuuuagauauca

SEQ ID NO: 1015898 - RNA, 22 nt, Human
cagugccaugucugagccccua

SEQ ID NO: 1015899 - RNA, 22 nt, Human
gucuuuauuugagauugucauu

SEQ ID NO: 1015900 - RNA, 21 nt, Human
agcucagccgggcacaguggc

SEQ ID NO: 1015901 - RNA, 22 nt, Human
ugaaagguuauuuaggucugcu

SEQ ID NO: 1015902 - RNA, 23 nt, Human
ucuugaaaagccuacagcaguuc

SEQ ID NO: 1015903 - RNA, 19 nt, Human
ccaggccaucccaguuccc

SEQ ID NO: 1015904 - RNA, 22 nt, Human
uaaauguggagacucaggaguc

SEQ ID NO: 1015905 - RNA, 22 nt, Human
gccuggcaggccugggccagca

SEQ ID NO: 1015906 - RNA, 22 nt, Human
gugugcccuuguucagcagagu

SEQ ID NO: 1015907 - RNA, 22 nt, Human
auucccaucgucaacuucacug

SEQ ID NO: 1015908 - RNA, 22 nt, Human
uguccaggucagcagcagggac

SEQ ID NO: 1015909 - RNA, 22 nt, Human
gcucagggaacuuuuugcaggc

SEQ ID NO: 1015910 - RNA, 22 nt, Human
uggaggaaucagggcuuaggcu

SEQ ID NO: 1015911 - RNA, 22 nt, Human
uggagcugggguuugaaucugg

SEQ ID NO: 1015912 - RNA, 22 nt, Human
cagcuuguuaccgagggagggu

SEQ ID NO: 1015913 - RNA, 22 nt, Human
uuguuuucuccacugcaucuua

SEQ ID NO: 1015914 - RNA, 22 nt, Human
uacaaagucacauugaaaugaa

SEQ ID NO: 1015915 - RNA, 17 nt, Human
gcagugaaaagagauca

SEQ ID NO: 1015916 - RNA, 18 nt, Human
ucaaagucuggcuccacu

SEQ ID NO: 1015917 - RNA, 22 nt, Human
aguauaaagugguuuucagcac

SEQ ID NO: 1015918 - RNA, 22 nt, Human
auacacauguguaugugcaugc

SEQ ID NO: 1015919 - RNA, 22 nt, Human
cugcagaggucuugcugauggu

SEQ ID NO: 1015920 - RNA, 22 nt, Human
ccaagaugaucuuuacaguguu

SEQ ID NO: 1015921 - RNA, 22 nt, Human
auuucauacuaaggcucaaaaa

SEQ ID NO: 1015922 - RNA, 22 nt, Human
acuaggggcucaggcccaggga

SEQ ID NO: 1015923 - RNA, 19 nt, Human
uccccagcaccucugaguc

SEQ ID NO: 1015924 - RNA, 22 nt, Human
gugaaacacccuccaaugcaca

SEQ ID NO: 1015925 - RNA, 22 nt, Human
uuugaaguggaaaaggauuuaa

SEQ ID NO: 1015926 - RNA, 21 nt, Human
agagaauugccuuagauguuc

SEQ ID NO: 1015927 - RNA, 22 nt, Human
cacuuaagcaguuaauuuaucu

SEQ ID NO: 1015928 - RNA, 22 nt, Human
caggguacagaguuuucuaaac

SEQ ID NO: 1015929 - RNA, 21 nt, Human
ugcuggccucaagggugacuu

SEQ ID NO: 1015930 - RNA, 22 nt, Human
auaucacaguaguuguuuaguu

SEQ ID NO: 1015931 - RNA, 22 nt, Human
aauuuccagaccccauccacag

SEQ ID NO: 1015932 - RNA, 22 nt, Human
uugcugaagugaagguauguuu

SEQ ID NO: 1015933 - RNA, 22 nt, Human
uggaaagaauuccuaugguuca

SEQ ID NO: 1015934 - RNA, 22 nt, Human
gcucagagcacucagacucagc

SEQ ID NO: 1015935 - RNA, 22 nt, Human
gcuggccauggccugcgccauc

SEQ ID NO: 1015936 - RNA, 22 nt, Human
gacauucacagguaaacauucc

SEQ ID NO: 1015937 - RNA, 19 nt, Human
ggcuccuguggcugcagcc

SEQ ID NO: 1015938 - RNA, 22 nt, Human
cuacauaaauuuaucacagacu

SEQ ID NO: 1015939 - RNA, 22 nt, Human
aaauaguuagcccugcauauau

SEQ ID NO: 1015940 - RNA, 22 nt, Human
auuugcuuucagguauaaaagg

SEQ ID NO: 1015941 - RNA, 22 nt, Human
uuuucagaggccuaagagguuu

SEQ ID NO: 1015942 - RNA, 22 nt, Human
cugagcucuaaugucagccuug

SEQ ID NO: 1015943 - RNA, 22 nt, Human
gaacaguaaauuuaugcagcac

SEQ ID NO: 1015944 - RNA, 22 nt, Human
guaacagaggguuugcagauau

SEQ ID NO: 1015945 - RNA, 22 nt, Human
ugggagcagccaacauggccuu

SEQ ID NO: 1015946 - RNA, 22 nt, Human
gacccaggggcagggagaaagu

SEQ ID NO: 1015947 - RNA, 23 nt, Human
uggaccugaaccagugccucugu

SEQ ID NO: 1015948 - RNA, 22 nt, Human
ugcugcauuuaucuucucaaac

SEQ ID NO: 1015949 - RNA, 22 nt, Human
uaauaguuaugguugguucuca

SEQ ID NO: 1015950 - RNA, 22 nt, Human
cauuuauucaugaucuguagcu

SEQ ID NO: 1015951 - RNA, 22 nt, Human
gagccagccuucuucugagguc

SEQ ID NO: 1015952 - RNA, 22 nt, Human
gcugucugggaggccuccacuu

SEQ ID NO: 1015953 - RNA, 22 nt, Human
ggcuggaaguccaagaucaaga

SEQ ID NO: 1015954 - RNA, 22 nt, Human
gggcugaccaaugccuugcuuu

SEQ ID NO: 1015955 - RNA, 22 nt, Human
caggccucuccuuagucuggca

SEQ ID NO: 1015956 - RNA, 22 nt, Human
auaugaagaauuccaauuugga

SEQ ID NO: 1015957 - RNA, 22 nt, Human
uagcuuuaaugaguugguaaga

SEQ ID NO: 1015958 - RNA, 22 nt, Human
ucaggcacugcuuucugauaug

SEQ ID NO: 1015959 - RNA, 21 nt, Human
aguuugaugcaauuucugaga

SEQ ID NO: 1015960 - RNA, 20 nt, Human
ucagaggcugccagcugggg

SEQ ID NO: 1015961 - RNA, 22 nt, Human
uaaaguucuggugagagguaag

SEQ ID NO: 1015962 - RNA, 22 nt, Human
cauuuagagucuugcaauuuua

SEQ ID NO: 1015963 - RNA, 22 nt, Human
gcacagguugcaaaaguucaca

SEQ ID NO: 1015964 - RNA, 22 nt, Human
acagaauucuaguauguggcuu

SEQ ID NO: 1015965 - RNA, 22 nt, Human
uguaugcagggcuuguaugcag

SEQ ID NO: 1015966 - RNA, 20 nt, Human
auacacauucauagaaaaau

SEQ ID NO: 1015967 - RNA, 22 nt, Human
aaggagucucagcugggccuga

SEQ ID NO: 1015968 - RNA, 22 nt, Human
agaggccaugcuagaggccugg

SEQ ID NO: 1015969 - RNA, 22 nt, Human
aaguuucauguggagguagacu

SEQ ID NO: 1015970 - RNA, 22 nt, Human
cauggcugcgagaagagugggu

SEQ ID NO: 1015971 - RNA, 22 nt, Human
uagaaaugauugguugagcucu

SEQ ID NO: 1015972 - RNA, 22 nt, Human
cucuucuugucucugguuagaa

SEQ ID NO: 1015973 - RNA, 22 nt, Human
ggcugccauaacugauaccaua

SEQ ID NO: 1015974 - RNA, 22 nt, Human
gaaaccucuuagccucucuuug

SEQ ID NO: 1015975 - RNA, 20 nt, Human
acuggagccaucucagccua

SEQ ID NO: 1015976 - RNA, 22 nt, Human
auguaucaugcaggguccauga

SEQ ID NO: 1015977 - RNA, 22 nt, Human
cugagcuuccaguuccuccagg

SEQ ID NO: 1015978 - RNA, 22 nt, Human
ucagagugugacuuggucauga

SEQ ID NO: 1015979 - RNA, 22 nt, Human
cuggaggcugaguugggucucc

SEQ ID NO: 1015980 - RNA, 22 nt, Human
ccagcccuugcugaaggguggc

SEQ ID NO: 1015981 - RNA, 22 nt, Human
aguaaaauuaauggaucagaag

SEQ ID NO: 1015982 - RNA, 22 nt, Human
aaauccuaagcagaggaauuua

SEQ ID NO: 1015983 - RNA, 22 nt, Human
ugcuugaaagggguuucccagu

SEQ ID NO: 1015984 - RNA, 22 nt, Human
ucucauugguauauacaugugu

SEQ ID NO: 1015985 - RNA, 21 nt, Human
aagccucaagcagaagacaga

SEQ ID NO: 1015986 - RNA, 22 nt, Human
uucagaauauuuguuuuacaug

SEQ ID NO: 1015987 - RNA, 22 nt, Human
caggaaccuaaagagacauuac

SEQ ID NO: 1015988 - RNA, 22 nt, Human
aggucauuguuaagucaccaua

SEQ ID NO: 1015989 - RNA, 22 nt, Human
agccaggacguugcucagcucc

SEQ ID NO: 1015990 - RNA, 22 nt, Human
aauauaaugcuguuuuaugcca

SEQ ID NO: 1015991 - RNA, 22 nt, Human
aaguauuucguucugaaaaagu

SEQ ID NO: 1015992 - RNA, 22 nt, Human
acaaaugcuuaguucaccaaaa

SEQ ID NO: 1015993 - RNA, 22 nt, Human
ugcagggauuagaggccgggga

SEQ ID NO: 1015994 - RNA, 22 nt, Human
ccagcccugccagagagagcug

SEQ ID NO: 1015995 - RNA, 22 nt, Human
guucuucagcauuagaagucau

SEQ ID NO: 1015996 - RNA, 22 nt, Human
uccuggaguauuucuguggugu

SEQ ID NO: 1015997 - RNA, 22 nt, Human
uggccucuuacgacauagccuu

SEQ ID NO: 1015998 - RNA, 22 nt, Human
gcaggguccauggaggcagccc

SEQ ID NO: 1015999 - RNA, 22 nt, Human
ugcagcucauugcuggggucug

SEQ ID NO: 1016000 - RNA, 22 nt, Human
cuuggccucuucucaggguggg

SEQ ID NO: 1016001 - RNA, 22 nt, Human
acaagaauuuacauguagugga

SEQ ID NO: 1016002 - RNA, 22 nt, Human
gaaacccaaacuaagacaguag

SEQ ID NO: 1016003 - RNA, 22 nt, Human
ccuggcugggguagaagugagg

SEQ ID NO: 1016004 - RNA, 20 nt, Human
gcccaagguccagaaggggg

SEQ ID NO: 1016005 - RNA, 22 nt, Human
uccucagggggccaacccagcc

SEQ ID NO: 1016006 - RNA, 21 nt, Human
guggcucugccaggacugaaa

SEQ ID NO: 1016007 - RNA, 22 nt, Human
aaagguaguacuucuagaaggg

SEQ ID NO: 1016008 - RNA, 22 nt, Human
uucuucaaccaucuacauaaac

SEQ ID NO: 1016009 - RNA, 22 nt, Human
agccaagcacucaacuccugga

SEQ ID NO: 1016010 - RNA, 22 nt, Human
guaguucugcagugucaccuga

SEQ ID NO: 1016011 - RNA, 22 nt, Human
ccagagcugaugggcccagggu

SEQ ID NO: 1016012 - RNA, 22 nt, Human
gcauuuagcuuuaaaauauuuc

SEQ ID NO: 1016013 - RNA, 22 nt, Human
accaggggugucaacagcauuu

SEQ ID NO: 1016014 - RNA, 22 nt, Human
caagaaauguuuacugagcauc

SEQ ID NO: 1016015 - RNA, 22 nt, Human
cauuuccacuucugaaaacugg

SEQ ID NO: 1016016 - RNA, 22 nt, Human
ucaggaucaggggccuuuccuu

SEQ ID NO: 1016017 - RNA, 22 nt, Human
cagggcugugcccaucuucccc

SEQ ID NO: 1016018 - RNA, 22 nt, Human
aucaguuauuuuuaagcuauaa

SEQ ID NO: 1016019 - RNA, 22 nt, Human
ccucccuuggccauagccagcc

SEQ ID NO: 1016020 - RNA, 22 nt, Human
acauuucucuugaugucucuau

SEQ ID NO: 1016021 - RNA, 22 nt, Human
ucaugucaguuucuucuauaaa

SEQ ID NO: 1016022 - RNA, 22 nt, Human
aagauguaucaguuaagucuuc

SEQ ID NO: 1016023 - RNA, 22 nt, Human
auaaaaacugacccauccuuug

SEQ ID NO: 1016024 - RNA, 21 nt, Human
gcagccagacgggauucaguu

SEQ ID NO: 1016025 - RNA, 22 nt, Human
uggguggcacuucuggggucca

SEQ ID NO: 1016026 - RNA, 22 nt, Human
gcagcuuggugaaaggugaugg

SEQ ID NO: 1016027 - RNA, 21 nt, Human
gaauaguucuguggcagcagu

SEQ ID NO: 1016028 - RNA, 22 nt, Human
aaagagcucacaguccacugga

SEQ ID NO: 1016029 - RNA, 22 nt, Human
cagaugagaguggccaggguuc

SEQ ID NO: 1016030 - RNA, 22 nt, Human
uccugagaugagacagugcugc

SEQ ID NO: 1016031 - RNA, 22 nt, Human
ucucuuuuauguacacccugac

SEQ ID NO: 1016032 - RNA, 22 nt, Human
agaggcccugggcuggugugcu

SEQ ID NO: 1016033 - RNA, 22 nt, Human
agagccuggagguucugcugaa

SEQ ID NO: 1016034 - RNA, 22 nt, Human
agagugauggguugugcugacc

SEQ ID NO: 1016035 - RNA, 22 nt, Human
uggugaagucagcggagcccgg

SEQ ID NO: 1016036 - RNA, 22 nt, Human
uuugcauuuugauaagaucacu

SEQ ID NO: 1016037 - RNA, 23 nt, Human
acugucugauauguuuuccauca

SEQ ID NO: 1016038 - RNA, 22 nt, Human
ugccugcucuuaccacucuccc

SEQ ID NO: 1016039 - RNA, 22 nt, Human
ugccugucucugacugccauua

SEQ ID NO: 1016040 - RNA, 22 nt, Human
gcaggagccaggccgagcuggu

SEQ ID NO: 1016041 - RNA, 18 nt, Human
agcugcagaccaggaggu

SEQ ID NO: 1016042 - RNA, 22 nt, Human
aagagggaggugcgggugcaga

SEQ ID NO: 1016043 - RNA, 22 nt, Human
aauaauguugacgauagucuua

SEQ ID NO: 1016044 - RNA, 22 nt, Human
cagaggcccagugagagggcug

SEQ ID NO: 1016045 - RNA, 23 nt, Human
gaguguucauagcaggcucuugc

SEQ ID NO: 1016046 - RNA, 22 nt, Human
caaaguuuggcucucaugacau

SEQ ID NO: 1016047 - RNA, 23 nt, Human
uuuuaauuuggacauaagaagau

SEQ ID NO: 1016048 - RNA, 22 nt, Human
ucagagagcagaacuuuuuuac

SEQ ID NO: 1016049 - RNA, 22 nt, Human
ucuggagccacaaaccucagcu

SEQ ID NO: 1016050 - RNA, 22 nt, Human
ucccuucacagaugcgauguuu

SEQ ID NO: 1016051 - RNA, 22 nt, Human
gagggcagaaaauuaugcggug

SEQ ID NO: 1016052 - RNA, 19 nt, Human
gcugggagcagacccuccc

SEQ ID NO: 1016053 - RNA, 22 nt, Human
ccucaugguacuuacuguagcu

SEQ ID NO: 1016054 - RNA, 22 nt, Human
ucaaguauaucuagucauuagg

SEQ ID NO: 1016055 - RNA, 22 nt, Human
cugucagguuggucucagagcu

SEQ ID NO: 1016056 - RNA, 23 nt, Human
uggcucuguggaucccucaggag

SEQ ID NO: 1016057 - RNA, 22 nt, Human
uggcuucagacuucugcuacgu

SEQ ID NO: 1016058 - RNA, 21 nt, Human
uucaaugaaaacaaagugagg

SEQ ID NO: 1016059 - RNA, 22 nt, Human
ucagcuccagaguugcacagug

SEQ ID NO: 1016060 - RNA, 22 nt, Human
gcuggccugggcucaagaccag

SEQ ID NO: 1016061 - RNA, 22 nt, Human
ggcacugggagaggugagacgg

SEQ ID NO: 1016062 - RNA, 22 nt, Human
cagacacagcaauucuguguug

SEQ ID NO: 1016063 - RNA, 22 nt, Human
uucauuccugagcccauauuua

SEQ ID NO: 1016064 - RNA, 22 nt, Human
gaacaucagucauaauuuaacg

SEQ ID NO: 1016065 - RNA, 22 nt, Human
augcaguacauacaaacacuga

SEQ ID NO: 1016066 - RNA, 22 nt, Human
gccucugcaucaucacuccagc

SEQ ID NO: 1016067 - RNA, 22 nt, Human
cucagagaaaugucacaacaau

SEQ ID NO: 1016068 - RNA, 22 nt, Human
uucaagaugacccagucacacg

SEQ ID NO: 1016069 - RNA, 22 nt, Human
aggugccaauuuucagugaaca

SEQ ID NO: 1016070 - RNA, 22 nt, Human
uuucagugcuucuguuuaccgg

SEQ ID NO: 1016071 - RNA, 22 nt, Human
gaaggcuugcagcucuguggca

SEQ ID NO: 1016072 - RNA, 22 nt, Human
cauucacucagcgaugccagua

SEQ ID NO: 1016073 - RNA, 22 nt, Human
ucagcugcucuguugagcugaa

SEQ ID NO: 1016074 - RNA, 22 nt, Human
auuuggaaacaauuauauucuu

SEQ ID NO: 1016075 - RNA, 22 nt, Human
acccagaggugucuagcaagcu

SEQ ID NO: 1016076 - RNA, 22 nt, Human
auacaucuuccuuuuaaaaugc

SEQ ID NO: 1016077 - RNA, 22 nt, Human
gguggagcuggaccaggagagg

SEQ ID NO: 1016078 - RNA, 22 nt, Human
agcugccuccauggucaaagau

SEQ ID NO: 1016079 - RNA, 21 nt, Human
gccagccuguuuaccuguggu

SEQ ID NO: 1016080 - RNA, 22 nt, Human
cuuuggcaugguccucacuaua

SEQ ID NO: 1016081 - RNA, 22 nt, Human
ugccaaauugcccuauaaauga

SEQ ID NO: 1016082 - RNA, 17 nt, Human
cauguguaugugggagu

SEQ ID NO: 1016083 - RNA, 22 nt, Human
cucagcuggcaauucuggcucc

SEQ ID NO: 1016084 - RNA, 20 nt, Human
ugcagcuucaccugugucau

SEQ ID NO: 1016085 - RNA, 22 nt, Human
uggcucaguuaggucagaaaca

SEQ ID NO: 1016086 - RNA, 22 nt, Human
aaugucugccagaacugaucau

SEQ ID NO: 1016087 - RNA, 22 nt, Human
accaguccgcggagcuccgggg

SEQ ID NO: 1016088 - RNA, 22 nt, Human
aaaugcuacauacacaucaggg

SEQ ID NO: 1016089 - RNA, 22 nt, Human
cauuuucagcacccaucugaaa

SEQ ID NO: 1016090 - RNA, 22 nt, Human
cugugugugucugcagcauacu

SEQ ID NO: 1016091 - RNA, 22 nt, Human
cuggcagcauuaacagagagca

SEQ ID NO: 1016092 - RNA, 22 nt, Human
cugcagcuccccugagaucaag

SEQ ID NO: 1016093 - RNA, 22 nt, Human
uggcucuggauuaaucuaggaa

SEQ ID NO: 1016094 - RNA, 22 nt, Human
aagggcuccauccuuauaaaug

SEQ ID NO: 1016095 - RNA, 22 nt, Human
ucagggcaagauugguuaauaa

SEQ ID NO: 1016096 - RNA, 22 nt, Human
uuucaugaggggcaaaaucuca

SEQ ID NO: 1016097 - RNA, 22 nt, Human
agggacuugaugucagggagau

SEQ ID NO: 1016098 - RNA, 22 nt, Human
gagcagugaagacagaaguaca

SEQ ID NO: 1016099 - RNA, 22 nt, Human
gcacagcucgagcucaggaggg

SEQ ID NO: 1016100 - RNA, 22 nt, Human
aacucagcauccugcacagaga

SEQ ID NO: 1016101 - RNA, 22 nt, Human
gccuucaguagugucagcugua

SEQ ID NO: 1016102 - RNA, 22 nt, Human
ugcucuccggcuuccguggccu

SEQ ID NO: 1016103 - RNA, 22 nt, Human
uugucuguccaggcaccccaag

SEQ ID NO: 1016104 - RNA, 22 nt, Human
aagagcaucuauuucacagugg

SEQ ID NO: 1016105 - RNA, 22 nt, Human
cagagcugcgcuuuuuccuggu

SEQ ID NO: 1016106 - RNA, 22 nt, Human
gcucuguguugucagaggcacc

SEQ ID NO: 1016107 - RNA, 22 nt, Human
agcugcagauucuaucuagaag

SEQ ID NO: 1016108 - RNA, 22 nt, Human
cagggcucuuccggagcaggga

SEQ ID NO: 1016109 - RNA, 22 nt, Human
ugaggccaaugacccugggcag

SEQ ID NO: 1016110 - RNA, 22 nt, Human
cagaguggcacucugcuggaug

SEQ ID NO: 1016111 - RNA, 20 nt, Human
uccagcugucuuucagagac

SEQ ID NO: 1016112 - RNA, 22 nt, Human
uugaaaggugcugugugcugau

SEQ ID NO: 1016113 - RNA, 22 nt, Human
gaggaaaauggaguguaauuaa

SEQ ID NO: 1016114 - RNA, 22 nt, Human
ggcagagcugcaugagcacuca

SEQ ID NO: 1016115 - RNA, 22 nt, Human
uggcccugcuggccaaaggcua

SEQ ID NO: 1016116 - RNA, 22 nt, Human
ggcagugacuguucagacgucc

SEQ ID NO: 1016117 - RNA, 22 nt, Human
cccagcucucgcacuuacuagc

SEQ ID NO: 1016118 - RNA, 22 nt, Human
ugcagugggccggaggccaggg

SEQ ID NO: 1016119 - RNA, 22 nt, Human
ucugcaggaaaaaagugccugg

SEQ ID NO: 1016120 - RNA, 22 nt, Human
guauuugauacaugaaauggug

SEQ ID NO: 1016121 - RNA, 21 nt, Human
acagcagacaggcuuaggacc

SEQ ID NO: 1016122 - RNA, 22 nt, Human
acagccauagaugcuuauguaa

SEQ ID NO: 1016123 - RNA, 20 nt, Human
cuucaggacccauccucccc

SEQ ID NO: 1016124 - RNA, 22 nt, Human
ugcagaagcugcaggucagugg

SEQ ID NO: 1016125 - RNA, 20 nt, Human
ugcucaggauggagaggugu

SEQ ID NO: 1016126 - RNA, 22 nt, Human
agcaggugcauggcgagcgcgg

SEQ ID NO: 1016127 - RNA, 22 nt, Human
cuggccugagcacagcggcugc

SEQ ID NO: 1016128 - RNA, 22 nt, Human
uuccucuccucacaugagucac

SEQ ID NO: 1016129 - RNA, 22 nt, Human
ucucccacgguacaggauaaac

SEQ ID NO: 1016130 - RNA, 22 nt, Human
cagcuuugugcaaugcagucuc

SEQ ID NO: 1016131 - RNA, 22 nt, Human
agccugccuugggcugcuugag

SEQ ID NO: 1016132 - RNA, 22 nt, Human
aggugauguccacagcuugcag

SEQ ID NO: 1016133 - RNA, 22 nt, Human
uauugaaaugaaugacagugau

SEQ ID NO: 1016134 - RNA, 22 nt, Human
gaggggcucuuuaauaguaaca

SEQ ID NO: 1016135 - RNA, 22 nt, Human
aacaaagucguugccuagaaga

SEQ ID NO: 1016136 - RNA, 22 nt, Human
ugccugaggagucagggcaggu

SEQ ID NO: 1016137 - RNA, 22 nt, Human
ugggcagaaggaagagccaccu

SEQ ID NO: 1016138 - RNA, 22 nt, Human
caggcagcagaggaguguggga

SEQ ID NO: 1016139 - RNA, 22 nt, Human
aaucacaugugcucaauuuuaa

SEQ ID NO: 1016140 - RNA, 22 nt, Human
uucaagaucuggguuuucagcu

SEQ ID NO: 1016141 - RNA, 22 nt, Human
uagauuucaggcuggcuugcgg

SEQ ID NO: 1016142 - RNA, 22 nt, Human
aaaugaccagaauacaggcuuc

SEQ ID NO: 1016143 - RNA, 22 nt, Human
uggcuggggagccccgacuccc

SEQ ID NO: 1016144 - RNA, 22 nt, Human
uuucaguggguuuauuucaugu

SEQ ID NO: 1016145 - RNA, 22 nt, Human
aaaugcacucugcuucugugac

SEQ ID NO: 1016146 - RNA, 22 nt, Human
aagcugccuugcugaggagaaa

SEQ ID NO: 1016147 - RNA, 22 nt, Human
cccuggcaugcaugucccuggc

SEQ ID NO: 1016148 - RNA, 22 nt, Human
uaaguuuaaauguacaugaagc

SEQ ID NO: 1016149 - RNA, 22 nt, Human
ggggauggaggcgugugguccu

SEQ ID NO: 1016150 - RNA, 22 nt, Human
cugugucggacgugggcagcag

SEQ ID NO: 1016151 - RNA, 22 nt, Human
acuguccaagcaugccuggcuu

SEQ ID NO: 1016152 - RNA, 22 nt, Human
uccagccuaggggaacagcugc

SEQ ID NO: 1016153 - RNA, 22 nt, Human
ccugguggacagcagccagcag

SEQ ID NO: 1016154 - RNA, 21 nt, Human
gaggccacuaauaggggcaga

SEQ ID NO: 1016155 - RNA, 22 nt, Human
guuauaaaggugauaaugguca

SEQ ID NO: 1016156 - RNA, 22 nt, Human
aaguguauauaugacuuauaaa

SEQ ID NO: 1016157 - RNA, 22 nt, Human
uuucuugacugcuuaggaaugc

SEQ ID NO: 1016158 - RNA, 22 nt, Human
ccugagguggcugcagcacugc

SEQ ID NO: 1016159 - RNA, 22 nt, Human
ugaagcagagaauuugacaguc

SEQ ID NO: 1016160 - RNA, 19 nt, Human
agcauuuggaauucuacac

SEQ ID NO: 1016161 - RNA, 22 nt, Human
aaugaacacagcccucuacuuu

SEQ ID NO: 1016162 - RNA, 22 nt, Human
ucaucugucauccacaaagcug

SEQ ID NO: 1016163 - RNA, 22 nt, Human
aaagaacaauguggaaucuccu

SEQ ID NO: 1016164 - RNA, 22 nt, Human
augaaacaguguguauagcaaa

SEQ ID NO: 1016165 - RNA, 22 nt, Human
gcucccagcauugcugcugaau

SEQ ID NO: 1016166 - RNA, 22 nt, Human
uuagccauguugaagauuuaga

SEQ ID NO: 1016167 - RNA, 22 nt, Human
ggcugccugaggcugaggcccg

SEQ ID NO: 1016168 - RNA, 19 nt, Human
aagcagcccuggcaagagc

SEQ ID NO: 1016169 - RNA, 20 nt, Human
uugagcuuuuaguacagaca

SEQ ID NO: 1016170 - RNA, 22 nt, Human
cuggcuuccaugcuguaguggc

SEQ ID NO: 1016171 - RNA, 22 nt, Human
gcccugagggguggugucugua

SEQ ID NO: 1016172 - RNA, 22 nt, Human
aagcagccuggacuugggcugg

SEQ ID NO: 1016173 - RNA, 22 nt, Human
gcugucugcaagccaggaaaug

SEQ ID NO: 1016174 - RNA, 22 nt, Human
uguagcauguaaauugguuauu

SEQ ID NO: 1016175 - RNA, 22 nt, Human
gaagaacaccugcugcccagug

SEQ ID NO: 1016176 - RNA, 22 nt, Human
uauuuucuguggaggaccagau

SEQ ID NO: 1016177 - RNA, 22 nt, Human
uucuuuucuuuaggcauugugu

SEQ ID NO: 1016178 - RNA, 22 nt, Human
agaaauguauagugaauuuuuc

SEQ ID NO: 1016179 - RNA, 22 nt, Human
aggcagcccacaggacacagga

SEQ ID NO: 1016180 - RNA, 22 nt, Human
uggcagcaaguucuugggaggu

SEQ ID NO: 1016181 - RNA, 22 nt, Human
aaauccuaaaaguuugacuuaa

SEQ ID NO: 1016182 - RNA, 22 nt, Human
gcugggcaagugccuuggguuu

SEQ ID NO: 1016183 - RNA, 22 nt, Human
ccagggcaacgcugucucagag

SEQ ID NO: 1016184 - RNA, 22 nt, Human
ccugucuggaacauggccuguu

SEQ ID NO: 1016185 - RNA, 22 nt, Human
aacauucuauuuugcuaaaaca

SEQ ID NO: 1016186 - RNA, 22 nt, Human
gccugugcauagcagcggacuc

SEQ ID NO: 1016187 - RNA, 22 nt, Human
gccugggaaaugguggggucag

SEQ ID NO: 1016188 - RNA, 22 nt, Human
agaauaauacugaaaugcugaa

SEQ ID NO: 1016189 - RNA, 22 nt, Human
uucaugcuuuuaccgcuguuaa

SEQ ID NO: 1016190 - RNA, 22 nt, Human
auaaucuuucuuuuccagauag

SEQ ID NO: 1016191 - RNA, 21 nt, Human
cgcagagcgaacuugcggcgc

SEQ ID NO: 1016192 - RNA, 22 nt, Human
agcugccaucagccuuuggaug

SEQ ID NO: 1016193 - RNA, 22 nt, Human
cauuuagacauuugauuugggg

SEQ ID NO: 1016194 - RNA, 22 nt, Human
uuccuaauggcaaaacauguuu

SEQ ID NO: 1016195 - RNA, 22 nt, Human
auuuguagugaagugaaaauaa

SEQ ID NO: 1016196 - RNA, 22 nt, Human
auguagaaaguucauagaugcg

SEQ ID NO: 1016197 - RNA, 22 nt, Human
accaggcaguauggugcugcaa

SEQ ID NO: 1016198 - RNA, 22 nt, Human
ggcugccauaacagaguaccac

SEQ ID NO: 1016199 - RNA, 22 nt, Human
uaugugcaguuugcucuuaaca

SEQ ID NO: 1016200 - RNA, 22 nt, Human
uuugaaaggaaguuaauacuuu

SEQ ID NO: 1016201 - RNA, 22 nt, Human
gagagugaggccugggaaucua

SEQ ID NO: 1016202 - RNA, 22 nt, Human
ugauucacagacuucacaaggc

SEQ ID NO: 1016203 - RNA, 22 nt, Human
ucagcaguuuuauaugcagcuu

SEQ ID NO: 1016204 - RNA, 22 nt, Human
cacauguacagaagcaggcugg

SEQ ID NO: 1016205 - RNA, 22 nt, Human
augugcaugcacuuacaugugu

SEQ ID NO: 1016206 - RNA, 22 nt, Human
ucccagcagucagagcuaugug

SEQ ID NO: 1016207 - RNA, 22 nt, Human
ucacaugcccuguauuuaccag

SEQ ID NO: 1016208 - RNA, 22 nt, Human
ucugggagagcacguggcugac

SEQ ID NO: 1016209 - RNA, 22 nt, Human
aaacauugcuaaauaaugcugc

SEQ ID NO: 1016210 - RNA, 23 nt, Human
ucccuggaggcagguccagggcc

SEQ ID NO: 1016211 - RNA, 22 nt, Human
cugugcaagcccaagauaaaac

SEQ ID NO: 1016212 - RNA, 22 nt, Human
agucucuuccuucaaggcuggu

SEQ ID NO: 1016213 - RNA, 23 nt, Human
ucuguucaaggcuuucuccuuga

SEQ ID NO: 1016214 - RNA, 22 nt, Human
uauuugagcgaagcaguguuuu

SEQ ID NO: 1016215 - RNA, 22 nt, Human
ccugccugucccucaguccaca

SEQ ID NO: 1016216 - RNA, 22 nt, Human
aucuuucaaucaggaaaaaucu

SEQ ID NO: 1016217 - RNA, 22 nt, Human
gggcacagagggucuugaagaa

SEQ ID NO: 1016218 - RNA, 22 nt, Human
cugcuucuccaaaguaggacuu

SEQ ID NO: 1016219 - RNA, 22 nt, Human
acauaugauauugaggaucuca

SEQ ID NO: 1016220 - RNA, 22 nt, Human
ugcagggauuauguagggguug

SEQ ID NO: 1016221 - RNA, 22 nt, Human
ucucaagagggaggcaaucaug

SEQ ID NO: 1016222 - RNA, 22 nt, Human
uguacauugucacucaucaagu

SEQ ID NO: 1016223 - RNA, 22 nt, Human
uggcgugcccuccagacuuggc

SEQ ID NO: 1016224 - RNA, 22 nt, Human
gccuugggccagcugcucugga

SEQ ID NO: 1016225 - RNA, 21 nt, Human
auaagcaugcugauuacauuu

SEQ ID NO: 1016226 - RNA, 22 nt, Human
ggcccuguccuggcugucuccg

SEQ ID NO: 1016227 - RNA, 22 nt, Human
ggccugugucugugccuguccu

SEQ ID NO: 1016228 - RNA, 22 nt, Human
uuuauguaauuucauaggugug

SEQ ID NO: 1016229 - RNA, 22 nt, Human
aaugauuggcacuagauacaca

SEQ ID NO: 1016230 - RNA, 22 nt, Human
ggagaccagaaggaagcuucga

SEQ ID NO: 1016231 - RNA, 22 nt, Human
gccuggagcuacuggacacuga

SEQ ID NO: 1016232 - RNA, 22 nt, Human
uuuauuguuguuagucauaagu

SEQ ID NO: 1016233 - RNA, 22 nt, Human
uucuuguauguaugcaaaauca

SEQ ID NO: 1016234 - RNA, 22 nt, Human
ucugccugcuaacuccugcacc

SEQ ID NO: 1016235 - RNA, 22 nt, Human
guaucuuucccaccaaucacaa

SEQ ID NO: 1016236 - RNA, 22 nt, Human
caagagcucagaaacccuugcu

SEQ ID NO: 1016237 - RNA, 22 nt, Human
uguaucaaggguuuauguaagc

SEQ ID NO: 1016238 - RNA, 22 nt, Human
ggaggggccggcugccugccac

SEQ ID NO: 1016239 - RNA, 19 nt, Human
ugucuuaauuaacucagag

SEQ ID NO: 1016240 - RNA, 22 nt, Human
agggcagaccacgugcaaggau

SEQ ID NO: 1016241 - RNA, 22 nt, Human
gcaggugguccccguggagugg

SEQ ID NO: 1016242 - RNA, 22 nt, Human
agcaacaggaaauagcugauua

SEQ ID NO: 1016243 - RNA, 22 nt, Human
cugggagcuuggagccuuuggu

SEQ ID NO: 1016244 - RNA, 22 nt, Human
cuccagggagcuguggagguuu

SEQ ID NO: 1016245 - RNA, 22 nt, Human
acaggcugcccgcuccccaccu

SEQ ID NO: 1016246 - RNA, 22 nt, Human
aggagcugcaaauauuaguaau

SEQ ID NO: 1016247 - RNA, 23 nt, Human
ggaguuggauuguacuugcugcu

SEQ ID NO: 1016248 - RNA, 23 nt, Human
acagaaaguucugcuggacagag

SEQ ID NO: 1016249 - RNA, 22 nt, Human
aggugccagaugcacagcugaa

SEQ ID NO: 1016250 - RNA, 22 nt, Human
aauauugagaaccagcauguuu

SEQ ID NO: 1016251 - RNA, 19 nt, Human
ucugccucuggucaggcuc

SEQ ID NO: 1016252 - RNA, 22 nt, Human
ggcuccacugcugaccacucca

SEQ ID NO: 1016253 - RNA, 22 nt, Human
aauccagguggcggagguugug

SEQ ID NO: 1016254 - RNA, 22 nt, Human
ugggagcaguugugaagcucag

SEQ ID NO: 1016255 - RNA, 22 nt, Human
uucucuucuguucagugcccaa

SEQ ID NO: 1016256 - RNA, 21 nt, Human
gccugggauaguggccuccgg

SEQ ID NO: 1016257 - RNA, 21 nt, Human
agcagcugcaguuucuaucug

SEQ ID NO: 1016258 - RNA, 22 nt, Human
ugcugggggcuuucuggauacc

SEQ ID NO: 1016259 - RNA, 22 nt, Human
gaggggcuggcuguggucccau

SEQ ID NO: 1016260 - RNA, 22 nt, Human
auuuccuuugcaaagacugugc

SEQ ID NO: 1016261 - RNA, 22 nt, Human
ccugggcaucucaugcaccugc

SEQ ID NO: 1016262 - RNA, 22 nt, Human
aaucaguuaaauauugaguaca

SEQ ID NO: 1016263 - RNA, 22 nt, Human
ggucuuccgagaggccugugcu

SEQ ID NO: 1016264 - RNA, 19 nt, Human
gggaccugacuaauuggca

SEQ ID NO: 1016265 - RNA, 22 nt, Human
caaaugugacuuuugggcuucu

SEQ ID NO: 1016266 - RNA, 21 nt, Human
ugaaaucugaugggacaaaug

SEQ ID NO: 1016267 - RNA, 22 nt, Human
ccucagaguaggucucagcugu

SEQ ID NO: 1016268 - RNA, 22 nt, Human
ugggccugauucuugaauccug

SEQ ID NO: 1016269 - RNA, 22 nt, Human
ucagagugguagccuauuuucu

SEQ ID NO: 1016270 - RNA, 22 nt, Human
uguaucaaaccaaauuaauucu

SEQ ID NO: 1016271 - RNA, 22 nt, Human
guaacugaggcagcuuuuaaga

SEQ ID NO: 1016272 - RNA, 22 nt, Human
gguuucaacucagcuaguaagg

SEQ ID NO: 1016273 - RNA, 22 nt, Human
aggacucaucccugcuugucag

SEQ ID NO: 1016274 - RNA, 22 nt, Human
gagacagaguuucacucuuguu

SEQ ID NO: 1016275 - RNA, 22 nt, Human
gcccagaguucaaggcugcagu

SEQ ID NO: 1016276 - RNA, 22 nt, Human
cacauaaguggguuccauugca

SEQ ID NO: 1016277 - RNA, 22 nt, Human
uuuggaaaguguacaaauuuga

SEQ ID NO: 1016278 - RNA, 22 nt, Human
aggcagaauguuggaaaggaag

SEQ ID NO: 1016279 - RNA, 22 nt, Human
ucacuggggccuuuggucagga

SEQ ID NO: 1016280 - RNA, 22 nt, Human
gagugugggcacgggggccuug

SEQ ID NO: 1016281 - RNA, 22 nt, Human
agccucugguccucccucagcu

SEQ ID NO: 1016282 - RNA, 22 nt, Human
agugacagcugggaaggugaaa

SEQ ID NO: 1016283 - RNA, 22 nt, Human
cuguacauauacauuuuuuucc

SEQ ID NO: 1016284 - RNA, 22 nt, Human
ggaagggcaaaagagaugaacu

SEQ ID NO: 1016285 - RNA, 22 nt, Human
cccagcuccuuacagggccgaa

SEQ ID NO: 1016286 - RNA, 22 nt, Human
uccaggagguuuggaggaagca

SEQ ID NO: 1016287 - RNA, 19 nt, Human
ggaaacaggggccagagga

SEQ ID NO: 1016288 - RNA, 17 nt, Human
uauacacagacagacug

SEQ ID NO: 1016289 - RNA, 18 nt, Human
ccucagggagagagacgc

SEQ ID NO: 1016290 - RNA, 22 nt, Human
agaaauuccuaagguacacaag

SEQ ID NO: 1016291 - RNA, 20 nt, Human
auuuggcaugaaguauugau

SEQ ID NO: 1016292 - RNA, 22 nt, Human
acagagagaggcccgaggcugc

SEQ ID NO: 1016293 - RNA, 22 nt, Human
cuuaacauccugcauuuuucuu

SEQ ID NO: 1016294 - RNA, 22 nt, Human
cacagucacauaucuaugugug

SEQ ID NO: 1016295 - RNA, 23 nt, Human
gccaggcacaugguggacacgca

SEQ ID NO: 1016296 - RNA, 22 nt, Human
cuugauguauaaguugauaugu

SEQ ID NO: 1016297 - RNA, 22 nt, Human
agcagcagaggucagaaaggua

SEQ ID NO: 1016298 - RNA, 22 nt, Human
uugcugaaaacaguggguauug

SEQ ID NO: 1016299 - RNA, 22 nt, Human
agagccugggaauuugcauguu

SEQ ID NO: 1016300 - RNA, 22 nt, Human
ugaaggcauugaugaaggaauc

SEQ ID NO: 1016301 - RNA, 22 nt, Human
aagaguuuucuauaaucuuggc

SEQ ID NO: 1016302 - RNA, 22 nt, Human
cauugcacaucugagaagagau

SEQ ID NO: 1016303 - RNA, 22 nt, Human
uggcucuguuuguuaacuagac

SEQ ID NO: 1016304 - RNA, 22 nt, Human
uaccugcacagccagccaugug

SEQ ID NO: 1016305 - RNA, 22 nt, Human
agugggcagcccaggaggucuu

SEQ ID NO: 1016306 - RNA, 17 nt, Human
auccccagcaucuagaa

SEQ ID NO: 1016307 - RNA, 22 nt, Human
ccagagccucgcccggagccuc

SEQ ID NO: 1016308 - RNA, 22 nt, Human
uucaggauaugugauaucugaa

SEQ ID NO: 1016309 - RNA, 22 nt, Human
gcugggagucgcgucuguggcc

SEQ ID NO: 1016310 - RNA, 22 nt, Human
ggccccaggaccuccacggucc

SEQ ID NO: 1016311 - RNA, 22 nt, Human
cugggcugucaauggcccucug

SEQ ID NO: 1016312 - RNA, 22 nt, Human
ccaggagcuggcauguggagag

SEQ ID NO: 1016313 - RNA, 22 nt, Human
uucagcaagaccaccauguacc

SEQ ID NO: 1016314 - RNA, 22 nt, Human
uuucauaauauccagagauuuu

SEQ ID NO: 1016315 - RNA, 22 nt, Human
uccaggcuagguuuacaggaca

SEQ ID NO: 1016316 - RNA, 22 nt, Human
gugcccugguccccagcauaua

SEQ ID NO: 1016317 - RNA, 19 nt, Human
agcaacaccguuuauuucc

SEQ ID NO: 1016318 - RNA, 22 nt, Human
agaggcuccuagccacuggcuu

SEQ ID NO: 1016319 - RNA, 22 nt, Human
uuuccucugucaugacagcuga

SEQ ID NO: 1016320 - RNA, 22 nt, Human
cacaaauggccguguucaaaga

SEQ ID NO: 1016321 - RNA, 22 nt, Human
acccagccacagcauugaggga

SEQ ID NO: 1016322 - RNA, 18 nt, Human
cucugucauaagugucau

SEQ ID NO: 1016323 - RNA, 22 nt, Human
caggagugaaaugaggcccagg

SEQ ID NO: 1016324 - RNA, 20 nt, Human
gauuacaaaaugaaaugcau

SEQ ID NO: 1016325 - RNA, 22 nt, Human
gggcugcuuccuggggaaugcu

SEQ ID NO: 1016326 - RNA, 22 nt, Human
gcaucuaaauaaacgugggagu

SEQ ID NO: 1016327 - RNA, 22 nt, Human
uggggcacuuaugaugugccac

SEQ ID NO: 1016328 - RNA, 22 nt, Human
gaaaguuucuucauuaagaugu

SEQ ID NO: 1016329 - RNA, 22 nt, Human
ucugaaauagaagugucuuucu

SEQ ID NO: 1016330 - RNA, 22 nt, Human
ggcugccuccugcugggcugga

SEQ ID NO: 1016331 - RNA, 20 nt, Human
uuuuuccuucucuacaggca

SEQ ID NO: 1016332 - RNA, 22 nt, Human
aucauuuuuaagagacucuucu

SEQ ID NO: 1016333 - RNA, 22 nt, Human
cuggcagggugggcuuugcuuu

SEQ ID NO: 1016334 - RNA, 22 nt, Human
aauucuguaacuuuacugaauu

SEQ ID NO: 1016335 - RNA, 22 nt, Human
gcagccacccucaaggcugaau

SEQ ID NO: 1016336 - RNA, 22 nt, Human
ccagcuuuauagcuucaaagga

SEQ ID NO: 1016337 - RNA, 22 nt, Human
caggcagcugcgacaagagagc

SEQ ID NO: 1016338 - RNA, 22 nt, Human
cuguccugauggugccacuggu

SEQ ID NO: 1016339 - RNA, 22 nt, Human
uccugagauaaaucucauguga

SEQ ID NO: 1016340 - RNA, 22 nt, Human
ccagcccugccucucagggccc

SEQ ID NO: 1016341 - RNA, 22 nt, Human
cugagcugaaacuugagaggcu

SEQ ID NO: 1016342 - RNA, 22 nt, Human
ugaaggcccagccacagaaugg

SEQ ID NO: 1016343 - RNA, 22 nt, Human
auuucacucucccugccacuua

SEQ ID NO: 1016344 - RNA, 22 nt, Human
gugcauuggugcgccacuucac

SEQ ID NO: 1016345 - RNA, 22 nt, Human
ugcauguggaccccuggugccu

SEQ ID NO: 1016346 - RNA, 22 nt, Human
aaaucaguucacguucugaggu

SEQ ID NO: 1016347 - RNA, 22 nt, Human
cagggccuccccggcagucuuu

SEQ ID NO: 1016348 - RNA, 22 nt, Human
caaagagcuguucagugucgcu

SEQ ID NO: 1016349 - RNA, 22 nt, Human
ccugugugcacacgaggccaug

SEQ ID NO: 1016350 - RNA, 18 nt, Human
cucagagaugcccuuauu

SEQ ID NO: 1016351 - RNA, 22 nt, Human
uuucuucagccacuccaaacug

SEQ ID NO: 1016352 - RNA, 23 nt, Human
gccugccugaccugugcaaaguc

SEQ ID NO: 1016353 - RNA, 22 nt, Human
auaaauuuauaauuguuuccug

SEQ ID NO: 1016354 - RNA, 22 nt, Human
caggaacagcaccaggagcuag

SEQ ID NO: 1016355 - RNA, 22 nt, Human
ucccuggccauuccucuaggcc

SEQ ID NO: 1016356 - RNA, 22 nt, Human
uggcugggagcuggaacugggc

SEQ ID NO: 1016357 - RNA, 22 nt, Human
cugcugugauugggagaaaccg

SEQ ID NO: 1016358 - RNA, 22 nt, Human
ugcucccaggcucuguggucug

SEQ ID NO: 1016359 - RNA, 22 nt, Human
aggaugggccugggauaugcuu

SEQ ID NO: 1016360 - RNA, 22 nt, Human
uuaauuuauguccaaaccagau

SEQ ID NO: 1016361 - RNA, 22 nt, Human
auccaaaucaugucagaagaac

SEQ ID NO: 1016362 - RNA, 22 nt, Human
uacagaaaaacuggcauugaag

SEQ ID NO: 1016363 - RNA, 22 nt, Human
ucuucucuccugcuuggcagaa

SEQ ID NO: 1016364 - RNA, 22 nt, Human
ucccuggguucccguggaagug

SEQ ID NO: 1016365 - RNA, 22 nt, Human
ggcagggaagcuggcaucacgg

SEQ ID NO: 1016366 - RNA, 22 nt, Human
uauuagguaaaggacuugcagg

SEQ ID NO: 1016367 - RNA, 22 nt, Human
aagagggcugcaaucuuauugc

SEQ ID NO: 1016368 - RNA, 16 nt, Human
ggagagugucugcaaa

SEQ ID NO: 1016369 - RNA, 22 nt, Human
gggcugacgaaggccaugugug

SEQ ID NO: 1016370 - RNA, 22 nt, Human
cacuguguaagaagaugggcuu

SEQ ID NO: 1016371 - RNA, 22 nt, Human
cacuguaucuuuuccaaagucu

SEQ ID NO: 1016372 - RNA, 22 nt, Human
ggaggugggagacauaggcggc

SEQ ID NO: 1016373 - RNA, 22 nt, Human
agaggccagguccagaguuugu

SEQ ID NO: 1016374 - RNA, 22 nt, Human
ggcugccacgucgaggguccaa

SEQ ID NO: 1016375 - RNA, 22 nt, Human
uguugagacugagggagucagc

SEQ ID NO: 1016376 - RNA, 22 nt, Human
uuggcuucuggcagucuggacg

SEQ ID NO: 1016377 - RNA, 22 nt, Human
aaucucuugggaggaaugaauu

SEQ ID NO: 1016378 - RNA, 22 nt, Human
agggugggcuagacucuucccc

SEQ ID NO: 1016379 - RNA, 22 nt, Human
ggcacugaucugauuucccucc

SEQ ID NO: 1016380 - RNA, 22 nt, Human
accugcagguguuuccacacuu

SEQ ID NO: 1016381 - RNA, 22 nt, Human
gcagugugaccgagcuugcuuc

SEQ ID NO: 1016382 - RNA, 22 nt, Human
ugggcugccggcaggcucugcc

SEQ ID NO: 1016383 - RNA, 22 nt, Human
uuauccuggauuauauauguga

SEQ ID NO: 1016384 - RNA, 22 nt, Human
ucagcuccucagagccucaguu

SEQ ID NO: 1016385 - RNA, 22 nt, Human
augaggcaucugcagucacuag

SEQ ID NO: 1016386 - RNA, 22 nt, Human
cuucucagucaccugugagucu

SEQ ID NO: 1016387 - RNA, 22 nt, Human
aggcauggcuuuaggcaggcgu

SEQ ID NO: 1016388 - RNA, 22 nt, Human
ggagccuuccagacugcccaca

SEQ ID NO: 1016389 - RNA, 22 nt, Human
ccugcacuaccuggggcugcug

SEQ ID NO: 1016390 - RNA, 22 nt, Human
aaccugcaguuuuuauucugag

SEQ ID NO: 1016391 - RNA, 22 nt, Human
cauaagaaauaaugaugaugac

SEQ ID NO: 1016392 - RNA, 22 nt, Human
gcaggaguuaggcgucguggau

SEQ ID NO: 1016393 - RNA, 22 nt, Human
agugcuuugagcguuugaaaag

SEQ ID NO: 1016394 - RNA, 22 nt, Human
caaggcaggaagccugucuuau

SEQ ID NO: 1016395 - RNA, 22 nt, Human
uggcagccacaucucguggauu

SEQ ID NO: 1016396 - RNA, 22 nt, Human
auaaggaaugauguaucaguuu

SEQ ID NO: 1016397 - RNA, 22 nt, Human
gaaggagacccugaagaugcug

SEQ ID NO: 1016398 - RNA, 22 nt, Human
agaaaugugaauuucauuuccu

SEQ ID NO: 1016399 - RNA, 22 nt, Human
gcagagaggauauuauugucca

SEQ ID NO: 1016400 - RNA, 22 nt, Human
uuuguguuuguacaaugcacua

SEQ ID NO: 1016401 - RNA, 22 nt, Human
gaaggccacaaaaaaugucaua

SEQ ID NO: 1016402 - RNA, 22 nt, Human
caggcacuguguuaggcacugu

SEQ ID NO: 1016403 - RNA, 22 nt, Human
auggcacuaagagggagcugga

SEQ ID NO: 1016404 - RNA, 22 nt, Human
caggggcuagcacuuaauguuu

SEQ ID NO: 1016405 - RNA, 22 nt, Human
gggagcuguaagggacagguag

SEQ ID NO: 1016406 - RNA, 22 nt, Human
ugagccagauaagggcucacgc

SEQ ID NO: 1016407 - RNA, 19 nt, Human
ggcagaagguguaggggga

SEQ ID NO: 1016408 - RNA, 22 nt, Human
gucugcccucacgccagcuggg

SEQ ID NO: 1016409 - RNA, 22 nt, Human
uagcagcucugauucugggccc

SEQ ID NO: 1016410 - RNA, 22 nt, Human
gccugccuuugugaggaagcgg

SEQ ID NO: 1016411 - RNA, 22 nt, Human
gccucugcggagcuguacauca

SEQ ID NO: 1016412 - RNA, 19 nt, Human
ccaggccuccugggagguc

SEQ ID NO: 1016413 - RNA, 22 nt, Human
aggcagaaaauagucauccaaa

SEQ ID NO: 1016414 - RNA, 22 nt, Human
cugcccugucuuuuucugauga

SEQ ID NO: 1016415 - RNA, 22 nt, Human
agggcccaggacagcaucaggg

SEQ ID NO: 1016416 - RNA, 19 nt, Human
uagucuuuauucuuaauuu

SEQ ID NO: 1016417 - RNA, 21 nt, Human
ucccugcuuucuggcccaguc

SEQ ID NO: 1016418 - RNA, 19 nt, Human
agaggccucagcagcuggc

SEQ ID NO: 1016419 - RNA, 22 nt, Human
aggggcugcuggguccgccccu

SEQ ID NO: 1016420 - RNA, 22 nt, Human
caucacuguccucagcauucca

SEQ ID NO: 1016421 - RNA, 22 nt, Human
uaaaauguguuucuguaugguu

SEQ ID NO: 1016422 - RNA, 22 nt, Human
acaaguaccaaaugcucaagua

SEQ ID NO: 1016423 - RNA, 22 nt, Human
cagccugcccuggaagcccagc

SEQ ID NO: 1016424 - RNA, 22 nt, Human
ggccucugggguccugagccca

SEQ ID NO: 1016425 - RNA, 22 nt, Human
guuugaaaaaagcaguauguaa

SEQ ID NO: 1016426 - RNA, 22 nt, Human
cuggcucaggguggucuggguc

SEQ ID NO: 1016427 - RNA, 22 nt, Human
ccucccuggccagagcagcagc

SEQ ID NO: 1016428 - RNA, 22 nt, Human
cuggugcuggagccuagucccu

SEQ ID NO: 1016429 - RNA, 23 nt, Human
cuuuucauugccuuagcgcagag

SEQ ID NO: 1016430 - RNA, 22 nt, Human
cucuggaguuagugaucugggc

SEQ ID NO: 1016431 - RNA, 22 nt, Human
uggcagcuggcucugcgcaggc

SEQ ID NO: 1016432 - RNA, 22 nt, Human
uguacaauagcuauuaucucca

SEQ ID NO: 1016433 - RNA, 22 nt, Human
gcagacagacugcagugauuuu

SEQ ID NO: 1016434 - RNA, 22 nt, Human
cuccagggagcugcgggagcca

SEQ ID NO: 1016435 - RNA, 22 nt, Human
agggacuggcucucugagcagg

SEQ ID NO: 1016436 - RNA, 22 nt, Human
ucaggggacuuaggagagaagu

SEQ ID NO: 1016437 - RNA, 22 nt, Human
gcagcuggagccagccagacac

SEQ ID NO: 1016438 - RNA, 22 nt, Human
gcugugggugcuggcuccaccc

SEQ ID NO: 1016439 - RNA, 22 nt, Human
aagagcuggcccaaucugagca

SEQ ID NO: 1016440 - RNA, 22 nt, Human
acaguggagaaggcaugaggcu

SEQ ID NO: 1016441 - RNA, 22 nt, Human
aaguguuuggggaucauuuuaa

SEQ ID NO: 1016442 - RNA, 22 nt, Human
gagccuggagcuggaacgaagc

SEQ ID NO: 1016443 - RNA, 22 nt, Human
auaaacagaguaguugcuacug

SEQ ID NO: 1016444 - RNA, 22 nt, Human
uggaaauguauuugggcaugcc

SEQ ID NO: 1016445 - RNA, 22 nt, Human
uggccugcccagagcagcucug

SEQ ID NO: 1016446 - RNA, 22 nt, Human
guccucugcccaggucaagguu

SEQ ID NO: 1016447 - RNA, 22 nt, Human
aagagcuggcucuugcagcagc

SEQ ID NO: 1016448 - RNA, 23 nt, Human
uuagagaugauuaaaaaaucuug

SEQ ID NO: 1016449 - RNA, 22 nt, Human
cugcaggauucucccaguugga

SEQ ID NO: 1016450 - RNA, 22 nt, Human
guuauugcaguauagaggucua

SEQ ID NO: 1016451 - RNA, 22 nt, Human
auacauauaugguacuuccugg

SEQ ID NO: 1016452 - RNA, 22 nt, Human
cucucugguuucagcgaagggg

SEQ ID NO: 1016453 - RNA, 22 nt, Human
uggugagcucuggcagucugug

SEQ ID NO: 1016454 - RNA, 22 nt, Human
uggccuggaaccuggcagggac

SEQ ID NO: 1016455 - RNA, 22 nt, Human
agcugccaucugaagaacugca

SEQ ID NO: 1016456 - RNA, 22 nt, Human
ucagaaaagguagcugugacaa

SEQ ID NO: 1016457 - RNA, 18 nt, Human
uucaccagugugaugggu

SEQ ID NO: 1016458 - RNA, 22 nt, Human
uuccauaauaggcuuaagugaa

SEQ ID NO: 1016459 - RNA, 22 nt, Human
uuuagaaguucacacauuuaaa

SEQ ID NO: 1016460 - RNA, 22 nt, Human
cuguauuuucaugccuacguac

SEQ ID NO: 1016461 - RNA, 22 nt, Human
aaacaccagucccaguauacac

SEQ ID NO: 1016462 - RNA, 22 nt, Human
acagagcuaaauuucaauccca

SEQ ID NO: 1016463 - RNA, 22 nt, Human
uccuugaauccuagcauccuau

SEQ ID NO: 1016464 - RNA, 22 nt, Human
cucccacuccuggcucaccaca

SEQ ID NO: 1016465 - RNA, 22 nt, Human
cugcagagcagccaguccccca

SEQ ID NO: 1016466 - RNA, 22 nt, Human
gcagugaaucuggcaagaauuu

SEQ ID NO: 1016467 - RNA, 22 nt, Human
gagcccugauuugcagcauuug

SEQ ID NO: 1016468 - RNA, 22 nt, Human
ccagacuguggaguuccuggug

SEQ ID NO: 1016469 - RNA, 22 nt, Human
aaagauuugaaauuaggcauca

SEQ ID NO: 1016470 - RNA, 22 nt, Human
uuuucauuagaaugacugagaa

SEQ ID NO: 1016471 - RNA, 22 nt, Human
gcagcugcuggaaguuccugcc

SEQ ID NO: 1016472 - RNA, 22 nt, Human
auguccagggcacacagcagug

SEQ ID NO: 1016473 - RNA, 22 nt, Human
cuguguggccucaagccagccu

SEQ ID NO: 1016474 - RNA, 22 nt, Human
aauuaugauuggucuaaaccag

SEQ ID NO: 1016475 - RNA, 22 nt, Human
gccugggagagggauagugcag

SEQ ID NO: 1016476 - RNA, 22 nt, Human
ucccagagcucugacaccagcu

SEQ ID NO: 1016477 - RNA, 22 nt, Human
ucuggcucccagccugcucuca

SEQ ID NO: 1016478 - RNA, 22 nt, Human
agugcauugcaucucugcuuca

SEQ ID NO: 1016479 - RNA, 22 nt, Human
aaaaguaauugcaauuuuguag

SEQ ID NO: 1016480 - RNA, 22 nt, Human
ccuguucacgguguguuguuag

SEQ ID NO: 1016481 - RNA, 22 nt, Human
gagccuguguuuccuguagcca

SEQ ID NO: 1016482 - RNA, 22 nt, Human
cuagagaggcagauguccugug

SEQ ID NO: 1016483 - RNA, 22 nt, Human
gggcagcucuggcugugggaag

SEQ ID NO: 1016484 - RNA, 22 nt, Human
gggaucagcaagccacugcacc

SEQ ID NO: 1016485 - RNA, 22 nt, Human
gggcacugcuggaggcucccug

SEQ ID NO: 1016486 - RNA, 22 nt, Human
agcagcuuacauguggccuauc

SEQ ID NO: 1016487 - RNA, 22 nt, Human
uugcauguuauuuaaucuguau

SEQ ID NO: 1016488 - RNA, 22 nt, Human
aagcccagaugggagcauuuca

SEQ ID NO: 1016489 - RNA, 22 nt, Human
aaggcacugaacuuaaauucug

SEQ ID NO: 1016490 - RNA, 22 nt, Human
agcagcaugaugacagagucuc

SEQ ID NO: 1016491 - RNA, 22 nt, Human
ggcccagccggcgagucucgcg

SEQ ID NO: 1016492 - RNA, 22 nt, Human
gauuucaauccagcuuucuucu

SEQ ID NO: 1016493 - RNA, 22 nt, Human
acugaaggucucagcaaggaug

SEQ ID NO: 1016494 - RNA, 22 nt, Human
cuuggggcugucacucuggcau

SEQ ID NO: 1016495 - RNA, 17 nt, Human
ugccagccugucccagg

SEQ ID NO: 1016496 - RNA, 22 nt, Human
gcaccuggcugcccagguggag

SEQ ID NO: 1016497 - RNA, 22 nt, Human
gugcccaggcccaaggcaccac

SEQ ID NO: 1016498 - RNA, 22 nt, Human
ugggcuccaauuuguccuuuca

SEQ ID NO: 1016499 - RNA, 22 nt, Human
ggcuucugaaaucucugugcgu

SEQ ID NO: 1016500 - RNA, 22 nt, Human
agcuccugaaaagcgcuugcuu

SEQ ID NO: 1016501 - RNA, 22 nt, Human
uuguauuucuccacuuucuguu

SEQ ID NO: 1016502 - RNA, 22 nt, Human
uuuguucaugccuauauucuca

SEQ ID NO: 1016503 - RNA, 22 nt, Human
uagcugugagcacccaggcugu

SEQ ID NO: 1016504 - RNA, 22 nt, Human
cccaggaggccaagguugcagu

SEQ ID NO: 1016505 - RNA, 18 nt, Human
ccucaggggaccuggcag

SEQ ID NO: 1016506 - RNA, 22 nt, Human
gcagagccaugggagguuuuug

SEQ ID NO: 1016507 - RNA, 22 nt, Human
cagcuucccuuggcugagcaga

SEQ ID NO: 1016508 - RNA, 22 nt, Human
aggggacacggcuucuccaggg

SEQ ID NO: 1016509 - RNA, 23 nt, Human
ccaggccucucagagggugugcc

SEQ ID NO: 1016510 - RNA, 22 nt, Human
caaagaugcugauguuggauca

SEQ ID NO: 1016511 - RNA, 22 nt, Human
uggugugggcguggcaggcaag

SEQ ID NO: 1016512 - RNA, 22 nt, Human
ucucaggggccuggaguccugg

SEQ ID NO: 1016513 - RNA, 22 nt, Human
agcuucuugaccaagccuguaa

SEQ ID NO: 1016514 - RNA, 22 nt, Human
uuccauauguauauagcuguua

SEQ ID NO: 1016515 - RNA, 22 nt, Human
aaaggaagaugccaggacucug

SEQ ID NO: 1016516 - RNA, 22 nt, Human
gucuccugagccuugacugcaa

SEQ ID NO: 1016517 - RNA, 22 nt, Human
uggugcugauaauggcaggauu

SEQ ID NO: 1016518 - RNA, 22 nt, Human
ggagcagagcugggcuuggcug

SEQ ID NO: 1016519 - RNA, 22 nt, Human
ugagcuggucacuccuucugaa

SEQ ID NO: 1016520 - RNA, 22 nt, Human
uuuuucauugcagccucucucc

SEQ ID NO: 1016521 - RNA, 22 nt, Human
acaguguccuuguggucccugu

SEQ ID NO: 1016522 - RNA, 22 nt, Human
agcugcugcggaaagaugccac

SEQ ID NO: 1016523 - RNA, 22 nt, Human
agagccagcauuugacacuggc

SEQ ID NO: 1016524 - RNA, 22 nt, Human
gaggcuccccaugaggccccag

SEQ ID NO: 1016525 - RNA, 19 nt, Human
uggcucugucgaaggcaca

SEQ ID NO: 1016526 - RNA, 22 nt, Human
aggcucugacccaugggaccca

SEQ ID NO: 1016527 - RNA, 22 nt, Human
uauuucuaagagauaucuguac

SEQ ID NO: 1016528 - RNA, 21 nt, Human
agcugagcccagaagacuggu

SEQ ID NO: 1016529 - RNA, 19 nt, Human
aggaaagguggccuuagca

SEQ ID NO: 1016530 - RNA, 22 nt, Human
ugcagcauugcaaagcagucuu

SEQ ID NO: 1016531 - RNA, 21 nt, Human
aggcugcuggcucaggguccu

SEQ ID NO: 1016532 - RNA, 22 nt, Human
cuugggaaugcuaacagaugac

SEQ ID NO: 1016533 - RNA, 22 nt, Human
aguuuguaucaauuugcuuuau

SEQ ID NO: 1016534 - RNA, 22 nt, Human
uccagucaucucccuucacauu

SEQ ID NO: 1016535 - RNA, 22 nt, Human
agccuggccacucagggccuga

SEQ ID NO: 1016536 - RNA, 22 nt, Human
cccagcuugcaaauggguugcu

SEQ ID NO: 1016537 - RNA, 19 nt, Human
aaaguuuuauucucauuug

SEQ ID NO: 1016538 - RNA, 16 nt, Human
auuuccagauuaugca

SEQ ID NO: 1016539 - RNA, 22 nt, Human
aucagcaaggcaaucacugcag

SEQ ID NO: 1016540 - RNA, 20 nt, Human
cagagaccaggccagguguc

SEQ ID NO: 1016541 - RNA, 22 nt, Human
uuggccuuaaccucucugugcc

SEQ ID NO: 1016542 - RNA, 22 nt, Human
guggagcccugguagggacccc

SEQ ID NO: 1016543 - RNA, 22 nt, Human
caguacuuguccucagguguua

SEQ ID NO: 1016544 - RNA, 22 nt, Human
augaugguaaauucaguauccg

SEQ ID NO: 1016545 - RNA, 22 nt, Human
uuuaagaugguauuuuauaaag

SEQ ID NO: 1016546 - RNA, 22 nt, Human
aguauucuggaauucuauguga

SEQ ID NO: 1016547 - RNA, 22 nt, Human
uacaguaaagcugcuaugaauu

SEQ ID NO: 1016548 - RNA, 22 nt, Human
aauuaugagguagauaucacau

SEQ ID NO: 1016549 - RNA, 22 nt, Human
aggugcugccccgagaaggaug

SEQ ID NO: 1016550 - RNA, 22 nt, Human
uaaauguaccuucugccuuacu

SEQ ID NO: 1016551 - RNA, 19 nt, Human
uucauucucuuauuguugu

SEQ ID NO: 1016552 - RNA, 23 nt, Human
ccacuagcaccuguucaacuucu

SEQ ID NO: 1016553 - RNA, 22 nt, Human
aaucugucguaguaaaaagcag

SEQ ID NO: 1016554 - RNA, 22 nt, Human
auacaacuuuacaugcaauucc

SEQ ID NO: 1016555 - RNA, 22 nt, Human
aagaaauguagagccuaguaaa

SEQ ID NO: 1016556 - RNA, 22 nt, Human
aaauguuuugcucccauguggu

SEQ ID NO: 1016557 - RNA, 22 nt, Human
ccuggcagcaggugggcccgug

SEQ ID NO: 1016558 - RNA, 22 nt, Human
auuucucaucaagugccaacuc

SEQ ID NO: 1016559 - RNA, 22 nt, Human
aagaacauguuaaaagauucac

SEQ ID NO: 1016560 - RNA, 22 nt, Human
ugauugaagaggugaggaaguu

SEQ ID NO: 1016561 - RNA, 22 nt, Human
agcuggcaguaugacuggugac

SEQ ID NO: 1016562 - RNA, 22 nt, Human
ugaaaucuuuaguuucuguccc

SEQ ID NO: 1016563 - RNA, 22 nt, Human
aggcucuguuugcugugguacc

SEQ ID NO: 1016564 - RNA, 22 nt, Human
uuugcaauuugugcugcaaaug

SEQ ID NO: 1016565 - RNA, 22 nt, Human
auuguaauuuuagagaaagugg

SEQ ID NO: 1016566 - RNA, 22 nt, Human
auugaaaaauucacaauucugg

SEQ ID NO: 1016567 - RNA, 22 nt, Human
aggcuucuaggguuggcagcgg

SEQ ID NO: 1016568 - RNA, 21 nt, Human
ccugccaggaaacugaguguc

SEQ ID NO: 1016569 - RNA, 22 nt, Human
gggcuggcucugucuagaaagg

SEQ ID NO: 1016570 - RNA, 22 nt, Human
auuuggaaaugcaucucuugag

SEQ ID NO: 1016571 - RNA, 22 nt, Human
gcagaggcagggcccuccucca

SEQ ID NO: 1016572 - RNA, 22 nt, Human
cagcagugcuucagugugagau

SEQ ID NO: 1016573 - RNA, 22 nt, Human
uggagcagagaugggagcccaa

SEQ ID NO: 1016574 - RNA, 22 nt, Human
uuucacauguggaaugccaggu

SEQ ID NO: 1016575 - RNA, 22 nt, Human
cagggcagcuuccuuuguuagg

SEQ ID NO: 1016576 - RNA, 22 nt, Human
ugaacgcagguccacauggcuc

SEQ ID NO: 1016577 - RNA, 22 nt, Human
ucucccacugcaagcccaggcu

SEQ ID NO: 1016578 - RNA, 22 nt, Human
acaggcagagaacucagccaga

SEQ ID NO: 1016579 - RNA, 22 nt, Human
auuuauuaugggauuuggcuca

SEQ ID NO: 1016580 - RNA, 22 nt, Human
caagagcugaggcuggagaggu

SEQ ID NO: 1016581 - RNA, 22 nt, Human
aaugaugggaaggagaaaagca

SEQ ID NO: 1016582 - RNA, 22 nt, Human
gcaguggcaugaugugggcuca

SEQ ID NO: 1016583 - RNA, 22 nt, Human
agcuuuaucccuugcccaucga

SEQ ID NO: 1016584 - RNA, 17 nt, Human
aggaaacauuuucuuuc

SEQ ID NO: 1016585 - RNA, 22 nt, Human
ccagaggaggggggucuuucug

SEQ ID NO: 1016586 - RNA, 22 nt, Human
agucccagccuguaggauuggg

SEQ ID NO: 1016587 - RNA, 22 nt, Human
aaacaugcauucaagaaaaucu

SEQ ID NO: 1016588 - RNA, 22 nt, Human
uggccuggugucugcgaggccu

SEQ ID NO: 1016589 - RNA, 22 nt, Human
agagccagguguagucucggag

SEQ ID NO: 1016590 - RNA, 22 nt, Human
ggaguuggugagcaccaggcuu

SEQ ID NO: 1016591 - RNA, 22 nt, Human
aaaaaugcugugguagcugugu

SEQ ID NO: 1016592 - RNA, 22 nt, Human
ugggccugggucuuugcugcca

SEQ ID NO: 1016593 - RNA, 22 nt, Human
auuuauguaucuguguagauca

SEQ ID NO: 1016594 - RNA, 22 nt, Human
cuucagaauccagaaucagaau

SEQ ID NO: 1016595 - RNA, 22 nt, Human
ggccugcugacccaaguccugu

SEQ ID NO: 1016596 - RNA, 22 nt, Human
gcagugaaacaauaggaucaaa

SEQ ID NO: 1016597 - RNA, 22 nt, Human
uggccucugggaaagcagauuc

SEQ ID NO: 1016598 - RNA, 22 nt, Human
ggcuccuguccccucagcugcu

SEQ ID NO: 1016599 - RNA, 22 nt, Human
cagaaauggagcccaggaaucu

SEQ ID NO: 1016600 - RNA, 22 nt, Human
caggcagcccugcaccaagugu

SEQ ID NO: 1016601 - RNA, 22 nt, Human
ccaguggguaggccauggugag

SEQ ID NO: 1016602 - RNA, 22 nt, Human
uggcuggcuuguucacugacug

SEQ ID NO: 1016603 - RNA, 22 nt, Human
cagggcccauggcucagguagg

SEQ ID NO: 1016604 - RNA, 22 nt, Human
cagaggcaaaagagguggaggu

SEQ ID NO: 1016605 - RNA, 22 nt, Human
uacaguaagaugaaauagcaau

SEQ ID NO: 1016606 - RNA, 17 nt, Human
caaggccagcaucuuca

SEQ ID NO: 1016607 - RNA, 22 nt, Human
gaaaucugcggugaggccugag

SEQ ID NO: 1016608 - RNA, 22 nt, Human
auuacucugucugccucugacc

SEQ ID NO: 1016609 - RNA, 22 nt, Human
uagaggugucacuuugggaagu

SEQ ID NO: 1016610 - RNA, 22 nt, Human
ucugcagcuuuuugguggggug

SEQ ID NO: 1016611 - RNA, 22 nt, Human
cauuccuuaacguggggagucu

SEQ ID NO: 1016612 - RNA, 22 nt, Human
augagcuguaagguggcuuccu

SEQ ID NO: 1016613 - RNA, 22 nt, Human
cucuucucugcagccuuugaag

SEQ ID NO: 1016614 - RNA, 22 nt, Human
uggcucugggaaucuguugcuu

SEQ ID NO: 1016615 - RNA, 22 nt, Human
ugcaguggcgccaucucagcuc

SEQ ID NO: 1016616 - RNA, 22 nt, Human
agguaugagauaaaucaaugaa

SEQ ID NO: 1016617 - RNA, 22 nt, Human
gagucuuugguaaagucugcug

SEQ ID NO: 1016618 - RNA, 22 nt, Human
aaaguugugaaaccgaacaugu

SEQ ID NO: 1016619 - RNA, 22 nt, Human
cagggcuguuagcugcugcucu

SEQ ID NO: 1016620 - RNA, 22 nt, Human
uuucuguagggauuucacaguu

SEQ ID NO: 1016621 - RNA, 22 nt, Human
ccagcuuuagguugccugccag

SEQ ID NO: 1016622 - RNA, 22 nt, Human
uaaguucagaguucucauuugu

SEQ ID NO: 1016623 - RNA, 22 nt, Human
uuaaaaugaauauugauuagca

SEQ ID NO: 1016624 - RNA, 22 nt, Human
gaggcugguaggaaaggaaaca

SEQ ID NO: 1016625 - RNA, 22 nt, Human
aguaaaaucuuaagcacagugg

SEQ ID NO: 1016626 - RNA, 22 nt, Human
ugcagcaggcacaggacggaag

SEQ ID NO: 1016627 - RNA, 22 nt, Human
ggcagcuccuccuagucugccc

SEQ ID NO: 1016628 - RNA, 22 nt, Human
gcucugucauuuugcagacacu

SEQ ID NO: 1016629 - RNA, 22 nt, Human
caguacuuaguucucaugguuu

SEQ ID NO: 1016630 - RNA, 22 nt, Human
ugauacagucagcucacaauug

SEQ ID NO: 1016631 - RNA, 22 nt, Human
agugggcaugaucuggugucug

SEQ ID NO: 1016632 - RNA, 22 nt, Human
aaaguuugagugauuugacaca

SEQ ID NO: 1016633 - RNA, 22 nt, Human
agaagucauuuauguuagauga

SEQ ID NO: 1016634 - RNA, 22 nt, Human
uaaauguguuagucaugguuuu

SEQ ID NO: 1016635 - RNA, 22 nt, Human
uuccagggcuaauuccugugga

SEQ ID NO: 1016636 - RNA, 22 nt, Human
auucugucauuucaagaaaaac

SEQ ID NO: 1016637 - RNA, 22 nt, Human
cacuggcaugugaggcgguggc

SEQ ID NO: 1016638 - RNA, 22 nt, Human
cagggccuccuaaggcaucuaa

SEQ ID NO: 1016639 - RNA, 22 nt, Human
ggcagcugauuagcaucaagga

SEQ ID NO: 1016640 - RNA, 22 nt, Human
aaacagaaggguagguaaacau

SEQ ID NO: 1016641 - RNA, 22 nt, Human
cagccaggccuggugaccaaag

SEQ ID NO: 1016642 - RNA, 22 nt, Human
ugccugagugauguggcagcca

SEQ ID NO: 1016643 - RNA, 22 nt, Human
cauuacauuucaaaauguuucc

SEQ ID NO: 1016644 - RNA, 22 nt, Human
agggagcuuccgaacuacagcu

SEQ ID NO: 1016645 - RNA, 22 nt, Human
ucccacugugaauccaaggccu

SEQ ID NO: 1016646 - RNA, 22 nt, Human
cucugaagggagggccaagccc

SEQ ID NO: 1016647 - RNA, 22 nt, Human
cugggugguuuugaugugaauu

SEQ ID NO: 1016648 - RNA, 22 nt, Human
cugccuugaaaaugaagcuuua

SEQ ID NO: 1016649 - RNA, 22 nt, Human
cacauaauacauguuccacuua

SEQ ID NO: 1016650 - RNA, 22 nt, Human
gguuucaaugagaagugcuugu

SEQ ID NO: 1016651 - RNA, 22 nt, Human
gccucugcccauccaccaucag

SEQ ID NO: 1016652 - RNA, 20 nt, Human
cgugcugugaccuugagcau

SEQ ID NO: 1016653 - RNA, 22 nt, Human
ucucuccuuaucauuguguuua

SEQ ID NO: 1016654 - RNA, 23 nt, Human
aguuccagaaaaaugcucaagca

SEQ ID NO: 1016655 - RNA, 22 nt, Human
uuucucugaggcuggccucccu

SEQ ID NO: 1016656 - RNA, 22 nt, Human
auuuagaacuuuguuugccaau

SEQ ID NO: 1016657 - RNA, 22 nt, Human
gaggugagaagggggucagaug

SEQ ID NO: 1016658 - RNA, 22 nt, Human
gcccucagaguuccccacagug

SEQ ID NO: 1016659 - RNA, 22 nt, Human
cagagccugcucacgucucugu

SEQ ID NO: 1016660 - RNA, 22 nt, Human
cuguuuauaaauagaggggagu

SEQ ID NO: 1016661 - RNA, 22 nt, Human
gccuguccacuaaacagccaag

SEQ ID NO: 1016662 - RNA, 22 nt, Human
aguuuucuguucuacaauuuga

SEQ ID NO: 1016663 - RNA, 22 nt, Human
gcauccagagguagccacugug

SEQ ID NO: 1016664 - RNA, 22 nt, Human
cugaagaugucugagaugcuca

SEQ ID NO: 1016665 - RNA, 22 nt, Human
ugaaguccuagaacuccuggua

SEQ ID NO: 1016666 - RNA, 22 nt, Human
ugcuggggagugauugaccauc

SEQ ID NO: 1016667 - RNA, 22 nt, Human
acugggaggcaaagagcaagga

SEQ ID NO: 1016668 - RNA, 22 nt, Human
auccuugagaaaauaaaugacc

SEQ ID NO: 1016669 - RNA, 22 nt, Human
ccacacugaaccucagugucuu

SEQ ID NO: 1016670 - RNA, 22 nt, Human
cccaggcacacugaagugacau

SEQ ID NO: 1016671 - RNA, 22 nt, Human
acccaggcugcuucucaguggc

SEQ ID NO: 1016672 - RNA, 22 nt, Human
gcugucacacauggccccagcu

SEQ ID NO: 1016673 - RNA, 22 nt, Human
gcauuuguguucuuccuagagc

SEQ ID NO: 1016674 - RNA, 21 nt, Human
gauuucacuuaccuucauuua

SEQ ID NO: 1016675 - RNA, 19 nt, Human
guggccucggagcgcgcgg

SEQ ID NO: 1016676 - RNA, 22 nt, Human
gguuucaacuucaaccucucca

SEQ ID NO: 1016677 - RNA, 22 nt, Human
acauuucucauucuccccuaac

SEQ ID NO: 1016678 - RNA, 22 nt, Human
ucugagggcuugaggggaagua

SEQ ID NO: 1016679 - RNA, 22 nt, Human
aggcugggcuccgcccaacucc

SEQ ID NO: 1016680 - RNA, 22 nt, Human
gcacagaacagagaaauagcca

SEQ ID NO: 1016681 - RNA, 22 nt, Human
aggucauuuuugccuucuauuu

SEQ ID NO: 1016682 - RNA, 22 nt, Human
agccacagcaacaagugcaauu

SEQ ID NO: 1016683 - RNA, 17 nt, Human
ucccaggaacagggaau

SEQ ID NO: 1016684 - RNA, 22 nt, Human
gcaggaagaugagcucagguaa

SEQ ID NO: 1016685 - RNA, 22 nt, Human
gcugaguguaaugauggcagag

SEQ ID NO: 1016686 - RNA, 22 nt, Human
cgagaguuagcuaggagucaca

SEQ ID NO: 1016687 - RNA, 22 nt, Human
gugauuucaaauauagagugag

SEQ ID NO: 1016688 - RNA, 22 nt, Human
agagacagaggcaauauagcuu

SEQ ID NO: 1016689 - RNA, 22 nt, Human
cccagccuuugcuuccugguuc

SEQ ID NO: 1016690 - RNA, 22 nt, Human
uccucuggggucagggcacuac

SEQ ID NO: 1016691 - RNA, 22 nt, Human
cuguauuucccacauucucuau

SEQ ID NO: 1016692 - RNA, 22 nt, Human
uuccucaucugugcaccucacu

SEQ ID NO: 1016693 - RNA, 22 nt, Human
gagcagcuggacaggccucccu

SEQ ID NO: 1016694 - RNA, 22 nt, Human
auugaaagauaggcuacugugg

SEQ ID NO: 1016695 - RNA, 22 nt, Human
acuugggauuucagaugcugug

SEQ ID NO: 1016696 - RNA, 20 nt, Human
gcagcugaaaguaugacacc

SEQ ID NO: 1016697 - RNA, 22 nt, Human
cauacauuuugcauauuuacca

SEQ ID NO: 1016698 - RNA, 22 nt, Human
gccuaggaguggggauggcggu

SEQ ID NO: 1016699 - RNA, 22 nt, Human
agagcuggacgucugagcccua

SEQ ID NO: 1016700 - RNA, 22 nt, Human
gcucuuccauuucucuugaacu

SEQ ID NO: 1016701 - RNA, 22 nt, Human
cagccuccugggacacucaccg

SEQ ID NO: 1016702 - RNA, 22 nt, Human
ggcagcuggggcagugcccugu

SEQ ID NO: 1016703 - RNA, 22 nt, Human
gguggagcuguggacaggaagg

SEQ ID NO: 1016704 - RNA, 22 nt, Human
caguuuauuuccaagaugacaa

SEQ ID NO: 1016705 - RNA, 22 nt, Human
uggcaggggaggugcuugcuua

SEQ ID NO: 1016706 - RNA, 22 nt, Human
uuguuacagcagugauuucaga

SEQ ID NO: 1016707 - RNA, 22 nt, Human
acugugugacuguuauuacugu

SEQ ID NO: 1016708 - RNA, 18 nt, Human
ggccugaggauuucagca

SEQ ID NO: 1016709 - RNA, 22 nt, Human
ucggggucuuugacacgcucug

SEQ ID NO: 1016710 - RNA, 21 nt, Human
uuucuucacuuugccccaugu

SEQ ID NO: 1016711 - RNA, 22 nt, Human
ugucaccagcugcuccucagga

SEQ ID NO: 1016712 - RNA, 22 nt, Human
aguccuucaagaaaucuggaaa

SEQ ID NO: 1016713 - RNA, 22 nt, Human
uuugaaauaugaggcauuauga

SEQ ID NO: 1016714 - RNA, 22 nt, Human
uuccaugaaagugaaauggagc

SEQ ID NO: 1016715 - RNA, 22 nt, Human
uacauaguauucacauuguuuu

SEQ ID NO: 1016716 - RNA, 19 nt, Human
cacagggcaggucucaugu

SEQ ID NO: 1016717 - RNA, 22 nt, Human
cagaggaguucaguacacagcc

SEQ ID NO: 1016718 - RNA, 22 nt, Human
ugcuuuauaucucucuucuuag

SEQ ID NO: 1016719 - RNA, 22 nt, Human
gcacugcaucuacuggcaagua

SEQ ID NO: 1016720 - RNA, 22 nt, Human
agccacagguguuggccagugu

SEQ ID NO: 1016721 - RNA, 22 nt, Human
cucuuaaauaacaucauugcuu

SEQ ID NO: 1016722 - RNA, 22 nt, Human
caccagcuuugcccacugccca

SEQ ID NO: 1016723 - RNA, 22 nt, Human
cuggccuguccugacccagccu

SEQ ID NO: 1016724 - RNA, 22 nt, Human
gagagcugcauucucagacaca

SEQ ID NO: 1016725 - RNA, 22 nt, Human
aagagcuggaagugaagauaac

SEQ ID NO: 1016726 - RNA, 22 nt, Human
ucuuuauugcuacugguuuguc

SEQ ID NO: 1016727 - RNA, 22 nt, Human
ucucagagaucuuucugcaugu

SEQ ID NO: 1016728 - RNA, 23 nt, Human
ugaaacauuuaggguagaauuuc

SEQ ID NO: 1016729 - RNA, 22 nt, Human
aggcaguguguagcuggaagag

SEQ ID NO: 1016730 - RNA, 22 nt, Human
auucuccaucaccacuggcacu

SEQ ID NO: 1016731 - RNA, 22 nt, Human
caggagacuauggcccaaggcc

SEQ ID NO: 1016732 - RNA, 22 nt, Human
uagugcuugagucucuccguac

SEQ ID NO: 1016733 - RNA, 22 nt, Human
gcuguucacggaggaggauggg

SEQ ID NO: 1016734 - RNA, 20 nt, Human
aagagcugacucacaguggu

SEQ ID NO: 1016735 - RNA, 22 nt, Human
uaaaucacuccuaauaaucagu

SEQ ID NO: 1016736 - RNA, 22 nt, Human
agaaaagggcaggagggauaca

SEQ ID NO: 1016737 - RNA, 23 nt, Human
agcuccagaacauagcacaggaa

SEQ ID NO: 1016738 - RNA, 22 nt, Human
ggcuuuauaggguagaggauca

SEQ ID NO: 1016739 - RNA, 22 nt, Human
cagcaucuaaucuucaugccgg

SEQ ID NO: 1016740 - RNA, 22 nt, Human
gcuggcagucccaucagcuggg

SEQ ID NO: 1016741 - RNA, 22 nt, Human
auuucuacaguacacaugcauu

SEQ ID NO: 1016742 - RNA, 22 nt, Human
gaguguggugaacaggagcacc

SEQ ID NO: 1016743 - RNA, 22 nt, Human
ccagcuggcaggagagucaggg

SEQ ID NO: 1016744 - RNA, 22 nt, Human
gcucagaaaagugaggcucagu

SEQ ID NO: 1016745 - RNA, 22 nt, Human
gaaucucaguggaagcaggaag

SEQ ID NO: 1016746 - RNA, 22 nt, Human
uugauacauuuuuaggauaaac

SEQ ID NO: 1016747 - RNA, 22 nt, Human
ccuacucugagcgccuccgcau

SEQ ID NO: 1016748 - RNA, 22 nt, Human
agccacagugcaagagagaaaa

SEQ ID NO: 1016749 - RNA, 22 nt, Human
gcuuccuaaaugcacagggcag

SEQ ID NO: 1016750 - RNA, 22 nt, Human
cagcagcuucuguugaucagaa

SEQ ID NO: 1016751 - RNA, 22 nt, Human
uuacaguaugaucaacuuuuca

SEQ ID NO: 1016752 - RNA, 22 nt, Human
gggcugcugccaaucacagccu

SEQ ID NO: 1016753 - RNA, 20 nt, Human
cuguggaauuuuaccaugcg

SEQ ID NO: 1016754 - RNA, 22 nt, Human
ccagagagaaauggauuugagu

SEQ ID NO: 1016755 - RNA, 22 nt, Human
uuccaggaagauucaacaaaag

SEQ ID NO: 1016756 - RNA, 22 nt, Human
ggaggacaggggcugcagcaca

SEQ ID NO: 1016757 - RNA, 22 nt, Human
uucaaacaguguagaauauaug

SEQ ID NO: 1016758 - RNA, 22 nt, Human
uagcagggccaggcugggaacc

SEQ ID NO: 1016759 - RNA, 22 nt, Human
augauggugagguugagcacag

SEQ ID NO: 1016760 - RNA, 19 nt, Human
gcuggcagauguggccgug

SEQ ID NO: 1016761 - RNA, 22 nt, Human
augucuuuauaaauguauaaug

SEQ ID NO: 1016762 - RNA, 22 nt, Human
cuuccucaugugcaaugcaagc

SEQ ID NO: 1016763 - RNA, 19 nt, Human
ucaguuuuagucaucaguu

SEQ ID NO: 1016764 - RNA, 22 nt, Human
agugcuuugugcucucacugca

SEQ ID NO: 1016765 - RNA, 22 nt, Human
acuccugguuuguguccuggcu

SEQ ID NO: 1016766 - RNA, 22 nt, Human
ugucccaguuuaucugggacug

SEQ ID NO: 1016767 - RNA, 22 nt, Human
gagccaggcccguacuugcugu

SEQ ID NO: 1016768 - RNA, 19 nt, Human
ccugggaggcggagguugc

SEQ ID NO: 1016769 - RNA, 22 nt, Human
ccagcuccaaguuugggcauca

SEQ ID NO: 1016770 - RNA, 22 nt, Human
ugagagugguucagcucagaag

SEQ ID NO: 1016771 - RNA, 22 nt, Human
gcucugcugagauaucugggag

SEQ ID NO: 1016772 - RNA, 22 nt, Human
aagacugugucuauggcuacuc

SEQ ID NO: 1016773 - RNA, 22 nt, Human
gcugguuaggugagggugcgcc

SEQ ID NO: 1016774 - RNA, 22 nt, Human
ugggcucucuggcaggaaggcu

SEQ ID NO: 1016775 - RNA, 22 nt, Human
auugucuuuggugcuuccagga

SEQ ID NO: 1016776 - RNA, 22 nt, Human
ggccuggcucuugcccagccug

SEQ ID NO: 1016777 - RNA, 22 nt, Human
agagcagauggccagggggccu

SEQ ID NO: 1016778 - RNA, 22 nt, Human
aagagcaucaaugacucgcagu

SEQ ID NO: 1016779 - RNA, 17 nt, Human
aggccagaugaggcaag

SEQ ID NO: 1016780 - RNA, 22 nt, Human
agauaugacuagaagcucauuu

SEQ ID NO: 1016781 - RNA, 22 nt, Human
uguacacugcaggaugcauugc

SEQ ID NO: 1016782 - RNA, 22 nt, Human
cagcuugcuaauuuugacuuca

SEQ ID NO: 1016783 - RNA, 22 nt, Human
uaaaugcaaugugcuuuaccag

SEQ ID NO: 1016784 - RNA, 22 nt, Human
agauacaugucaagagacuuau

SEQ ID NO: 1016785 - RNA, 18 nt, Human
cauuaugugguuauagaa

SEQ ID NO: 1016786 - RNA, 22 nt, Human
cugcugucauagccaucccucc

SEQ ID NO: 1016787 - RNA, 22 nt, Human
agucauauguggcauuuucuaa

SEQ ID NO: 1016788 - RNA, 19 nt, Human
caggagagcaugcacuuug

SEQ ID NO: 1016789 - RNA, 22 nt, Human
ucuguucauguugggcuuuucc

SEQ ID NO: 1016790 - RNA, 22 nt, Human
guucuucagauuccauuucagu

SEQ ID NO: 1016791 - RNA, 22 nt, Human
cagggcagccaggccccguggg

SEQ ID NO: 1016792 - RNA, 22 nt, Human
aggugagugugacugcaagaga

SEQ ID NO: 1016793 - RNA, 22 nt, Human
cuuuaagacucugcucuuggug

SEQ ID NO: 1016794 - RNA, 22 nt, Human
ucccuggcuguguucaggugcg

SEQ ID NO: 1016795 - RNA, 22 nt, Human
cccagacugcagagcgggcaga

SEQ ID NO: 1016796 - RNA, 22 nt, Human
cauuucuguacauguuuuggug

SEQ ID NO: 1016797 - RNA, 22 nt, Human
gccugcagccagggaguucucu

SEQ ID NO: 1016798 - RNA, 22 nt, Human
guucuccauucagcuuccugug

SEQ ID NO: 1016799 - RNA, 23 nt, Human
gccagccuugcucuccugcagcc

SEQ ID NO: 1016800 - RNA, 20 nt, Human
uugauucccucuaaacucgc

SEQ ID NO: 1016801 - RNA, 18 nt, Human
caggaugagugaugggga

SEQ ID NO: 1016802 - RNA, 22 nt, Human
gggcccuggauuuaagcaugga

SEQ ID NO: 1016803 - RNA, 22 nt, Human
aacauuuaugguagucauugca

SEQ ID NO: 1016804 - RNA, 22 nt, Human
caggauggucucgaucuccuga

SEQ ID NO: 1016805 - RNA, 22 nt, Human
cuuccugcaggacagccaucug

SEQ ID NO: 1016806 - RNA, 22 nt, Human
cugggcugugguguggcccaaa

SEQ ID NO: 1016807 - RNA, 22 nt, Human
ucccuggguccugcuugcucuc

SEQ ID NO: 1016808 - RNA, 19 nt, Human
agugcagggagcacccuca

SEQ ID NO: 1016809 - RNA, 22 nt, Human
uuguuacacauaauaacauuuu

SEQ ID NO: 1016810 - RNA, 22 nt, Human
aagggcucugugugccucccca

SEQ ID NO: 1016811 - RNA, 22 nt, Human
aaggcugauuagacugauagcu

SEQ ID NO: 1016812 - RNA, 22 nt, Human
ggcagcucugugucugggaagc

SEQ ID NO: 1016813 - RNA, 22 nt, Human
cgaugguucuggcugcuuguau

SEQ ID NO: 1016814 - RNA, 22 nt, Human
gagcacccuuugcacaucaguc

SEQ ID NO: 1016815 - RNA, 21 nt, Human
aggcagaaagagcccaggcug

SEQ ID NO: 1016816 - RNA, 22 nt, Human
gcuuggcauugaccauuaucau

SEQ ID NO: 1016817 - RNA, 22 nt, Human
ccagcuuuucuuaucauuauaa

SEQ ID NO: 1016818 - RNA, 22 nt, Human
ugucccaguucccaggguugcu

SEQ ID NO: 1016819 - RNA, 22 nt, Human
ccaggcagcaaauuuucugaau

SEQ ID NO: 1016820 - RNA, 22 nt, Human
agagcugugaaaaugagguuug

SEQ ID NO: 1016821 - RNA, 22 nt, Human
caaggccaguuucuccuaguca

SEQ ID NO: 1016822 - RNA, 19 nt, Human
uuugcagugguuccuuugu

SEQ ID NO: 1016823 - RNA, 22 nt, Human
cugcagaggguuugagcauccu

SEQ ID NO: 1016824 - RNA, 22 nt, Human
ugagagggcccagagcacacca

SEQ ID NO: 1016825 - RNA, 22 nt, Human
ccuguucaaugcccuggcuuca

SEQ ID NO: 1016826 - RNA, 22 nt, Human
uaauaucuggcauucaaacaug

SEQ ID NO: 1016827 - RNA, 22 nt, Human
uggcagaguuauggguauuuau

SEQ ID NO: 1016828 - RNA, 22 nt, Human
auugacaaucuacuauguucug

SEQ ID NO: 1016829 - RNA, 21 nt, Human
gcugucucuggcuccugggaa

SEQ ID NO: 1016830 - RNA, 22 nt, Human
uuauuaaugaguacaaguuauu

SEQ ID NO: 1016831 - RNA, 22 nt, Human
gccugccugaaggcuguaccag

SEQ ID NO: 1016832 - RNA, 22 nt, Human
agugcagugguuaggagccagg

SEQ ID NO: 1016833 - RNA, 22 nt, Human
auaguggugagcugcauuuaug

SEQ ID NO: 1016834 - RNA, 22 nt, Human
ugcaggccggcccuaggccuca

SEQ ID NO: 1016835 - RNA, 17 nt, Human
gagaguguauuggaugc

SEQ ID NO: 1016836 - RNA, 22 nt, Human
ccugcucagagcgucuugugug

SEQ ID NO: 1016837 - RNA, 22 nt, Human
agggcugccugacuccagagcc

SEQ ID NO: 1016838 - RNA, 22 nt, Human
auugcuguggaaauauaagaug

SEQ ID NO: 1016839 - RNA, 22 nt, Human
aaugcuguauaucuuagcuaau

SEQ ID NO: 1016840 - RNA, 22 nt, Human
gcagagcucaagguguucagcu

SEQ ID NO: 1016841 - RNA, 22 nt, Human
gauccuugcaacucugugaggu

SEQ ID NO: 1016842 - RNA, 22 nt, Human
cugcugugacagcugccguguu

SEQ ID NO: 1016843 - RNA, 22 nt, Human
ucccagacaaucauuggccacc

SEQ ID NO: 1016844 - RNA, 22 nt, Human
ccuggcucuguccucgcgcaaa

SEQ ID NO: 1016845 - RNA, 22 nt, Human
uggcuuccaaaggaaugggccu

SEQ ID NO: 1016846 - RNA, 22 nt, Human
caaagcucaugcucuuagccau

SEQ ID NO: 1016847 - RNA, 21 nt, Human
uccugcagggcagcagagugg

SEQ ID NO: 1016848 - RNA, 22 nt, Human
agugacugacaccuguaauccc

SEQ ID NO: 1016849 - RNA, 22 nt, Human
gcaguggggcgcugggaguugg

SEQ ID NO: 1016850 - RNA, 22 nt, Human
ggggcagagucuggacuguugu

SEQ ID NO: 1016851 - RNA, 22 nt, Human
ugccucagcugaggccgcucca

SEQ ID NO: 1016852 - RNA, 22 nt, Human
ucacugcaaucucugccuucca

SEQ ID NO: 1016853 - RNA, 22 nt, Human
acagugugguuugagcacuggg

SEQ ID NO: 1016854 - RNA, 22 nt, Human
ucacaacuugaagcugauuuaa

SEQ ID NO: 1016855 - RNA, 22 nt, Human
auauuucuccaaauguuuucaa

SEQ ID NO: 1016856 - RNA, 20 nt, Human
ggaccagguggggcgguggc

SEQ ID NO: 1016857 - RNA, 22 nt, Human
agcaguggaccucagugcuauu

SEQ ID NO: 1016858 - RNA, 22 nt, Human
uaauuucuagggacuaaggugc

SEQ ID NO: 1016859 - RNA, 22 nt, Human
uccucugcuccaucuuuacugu

SEQ ID NO: 1016860 - RNA, 22 nt, Human
gaaaggccagcucacagaugag

SEQ ID NO: 1016861 - RNA, 22 nt, Human
ggugacugguuuaucuggcagu

SEQ ID NO: 1016862 - RNA, 22 nt, Human
uuggcuucucuuaacccuaaag

SEQ ID NO: 1016863 - RNA, 22 nt, Human
cucugggcaaagaugccucauc

SEQ ID NO: 1016864 - RNA, 22 nt, Human
gcagaagcugggcagcgaggug

SEQ ID NO: 1016865 - RNA, 22 nt, Human
ccugccugcagaaaguaucucc

SEQ ID NO: 1016866 - RNA, 22 nt, Human
uuuuaagaugcuaguauuucag

SEQ ID NO: 1016867 - RNA, 22 nt, Human
uaacuacauuucacugcaauua

SEQ ID NO: 1016868 - RNA, 22 nt, Human
ggucucaggagacuggagagca

SEQ ID NO: 1016869 - RNA, 22 nt, Human
agaguguuuuucugucaaggac

SEQ ID NO: 1016870 - RNA, 22 nt, Human
cucuugggauuugcaggcucag

SEQ ID NO: 1016871 - RNA, 22 nt, Human
gggagggaggugaugcuuggcu

SEQ ID NO: 1016872 - RNA, 22 nt, Human
ugaaacuucuaauaugaauagu

SEQ ID NO: 1016873 - RNA, 22 nt, Human
auguagcagaagauguuuuccu

SEQ ID NO: 1016874 - RNA, 21 nt, Human
aacauuucugggagaacucac

SEQ ID NO: 1016875 - RNA, 22 nt, Human
ugccuugcgggcguuucuguug

SEQ ID NO: 1016876 - RNA, 22 nt, Human
cuuccucacggugcaacaggaa

SEQ ID NO: 1016877 - RNA, 22 nt, Human
gaguccaguuguucacagaggc

SEQ ID NO: 1016878 - RNA, 22 nt, Human
aaacugcuuuccacaguggcua

SEQ ID NO: 1016879 - RNA, 22 nt, Human
cagagcuguugcggggcuuggc

SEQ ID NO: 1016880 - RNA, 22 nt, Human
ggggggugcugaucaguggagc

SEQ ID NO: 1016881 - RNA, 22 nt, Human
uugaaaguuuauggagucugca

SEQ ID NO: 1016882 - RNA, 22 nt, Human
uccauugucuuugguccuagcc

SEQ ID NO: 1016883 - RNA, 18 nt, Human
ucucuuuuccccucauug

SEQ ID NO: 1016884 - RNA, 22 nt, Human
ugucaaaaugacuuuacuacag

SEQ ID NO: 1016885 - RNA, 22 nt, Human
gcucccaccaggcagaccuacc

SEQ ID NO: 1016886 - RNA, 19 nt, Human
ugcauaaauuauauacuuu

SEQ ID NO: 1016887 - RNA, 22 nt, Human
augaaacaugagaaauggagag

SEQ ID NO: 1016888 - RNA, 20 nt, Human
aggcugggguguuuugccca

SEQ ID NO: 1016889 - RNA, 22 nt, Human
auugugcaaauauuaucuguag

SEQ ID NO: 1016890 - RNA, 21 nt, Human
ggucuuccaaauaaggagaaa

SEQ ID NO: 1016891 - RNA, 22 nt, Human
aggcgcugcgcuggggccagaa

SEQ ID NO: 1016892 - RNA, 22 nt, Human
uugaagcauuguggcuuguauu

SEQ ID NO: 1016893 - RNA, 22 nt, Human
uuagggacaaauuugcagaacc

SEQ ID NO: 1016894 - RNA, 22 nt, Human
ccacccagaccagggaucuggg

SEQ ID NO: 1016895 - RNA, 19 nt, Human
ggcugccuuuccuuaccag

SEQ ID NO: 1016896 - RNA, 20 nt, Human
ucagaugggagugagccauc

SEQ ID NO: 1016897 - RNA, 22 nt, Human
uaauuuaauuccauggauucua

SEQ ID NO: 1016898 - RNA, 22 nt, Human
uggcucagaguucaucuuuuag

SEQ ID NO: 1016899 - RNA, 19 nt, Human
ucaaagcaagcauguucug

SEQ ID NO: 1016900 - RNA, 21 nt, Human
uggagcugccacuuguccucc

SEQ ID NO: 1016901 - RNA, 22 nt, Human
caaggccugccucuggcagaaa

SEQ ID NO: 1016902 - RNA, 22 nt, Human
acagcaagccagcuugucacug

SEQ ID NO: 1016903 - RNA, 20 nt, Human
acaggggcagcacaauaaug

SEQ ID NO: 1016904 - RNA, 22 nt, Human
cacauugaaaugacccaauaau

SEQ ID NO: 1016905 - RNA, 22 nt, Human
auuuugcuggucugaauuacuu

SEQ ID NO: 1016906 - RNA, 22 nt, Human
ucuucaaguuccaaagugcagg

SEQ ID NO: 1016907 - RNA, 22 nt, Human
auuuaugacuggugaauagaac

SEQ ID NO: 1016908 - RNA, 21 nt, Human
agagccugagaucuuccagca

SEQ ID NO: 1016909 - RNA, 22 nt, Human
gagcucuguguagccugagggu

SEQ ID NO: 1016910 - RNA, 22 nt, Human
ggcugggcaggucugcacaggg

SEQ ID NO: 1016911 - RNA, 22 nt, Human
cagcauggugccagugagucca

SEQ ID NO: 1016912 - RNA, 17 nt, Human
ugaaggaaggaugaugu

SEQ ID NO: 1016913 - RNA, 22 nt, Human
cuagaauugcauucuaugaaua

SEQ ID NO: 1016914 - RNA, 22 nt, Human
ccagagcaauucucacagaacu

SEQ ID NO: 1016915 - RNA, 22 nt, Human
cagggcuagugacaccccaguc

SEQ ID NO: 1016916 - RNA, 22 nt, Human
aaggagagagcuuugcuggaac

SEQ ID NO: 1016917 - RNA, 22 nt, Human
aacacaaagaagcugcaggauc

SEQ ID NO: 1016918 - RNA, 22 nt, Human
aaucuggcauuugagaguagga

SEQ ID NO: 1016919 - RNA, 22 nt, Human
ggaccugaacauaaaacgaggc

SEQ ID NO: 1016920 - RNA, 22 nt, Human
gcugccucugcgacucugggcg

SEQ ID NO: 1016921 - RNA, 22 nt, Human
cucuugggagugcucuggagaa

SEQ ID NO: 1016922 - RNA, 22 nt, Human
ucugcaggaggcuggcugcagg

SEQ ID NO: 1016923 - RNA, 22 nt, Human
ucuuugcaggagcccuuugaac

SEQ ID NO: 1016924 - RNA, 22 nt, Human
ugguuuugcuaaaauagaaaga

SEQ ID NO: 1016925 - RNA, 21 nt, Human
gcagacugcccugcugucccc

SEQ ID NO: 1016926 - RNA, 22 nt, Human
aagacagaccacgugacagggc

SEQ ID NO: 1016927 - RNA, 22 nt, Human
uagaaauccccagucucauagu

SEQ ID NO: 1016928 - RNA, 17 nt, Human
acagagguuauacagac

SEQ ID NO: 1016929 - RNA, 22 nt, Human
ggcaccugcucaucuggacuca

SEQ ID NO: 1016930 - RNA, 22 nt, Human
uuaacacauauuuaucaauugc

SEQ ID NO: 1016931 - RNA, 22 nt, Human
aaguauauuuuuugaagcauau

SEQ ID NO: 1016932 - RNA, 22 nt, Human
agcaccaugaccuugccauuga

SEQ ID NO: 1016933 - RNA, 20 nt, Human
aggcacuggggauagguaag

SEQ ID NO: 1016934 - RNA, 22 nt, Human
cuguggaaauaaacaaugcuaa

SEQ ID NO: 1016935 - RNA, 22 nt, Human
uccuugaauggacauuacacug

SEQ ID NO: 1016936 - RNA, 22 nt, Human
uccaggcaaggauaauaaacau

SEQ ID NO: 1016937 - RNA, 22 nt, Human
gucccugggaugcccuucuggg

SEQ ID NO: 1016938 - RNA, 22 nt, Human
gcuguucacagacucugcucug

SEQ ID NO: 1016939 - RNA, 22 nt, Human
cugccagcucaaagcgcagcua

SEQ ID NO: 1016940 - RNA, 22 nt, Human
gcuucucgggccugaugucguc

SEQ ID NO: 1016941 - RNA, 21 nt, Human
aagaagcaauuuauuggaagg

SEQ ID NO: 1016942 - RNA, 22 nt, Human
guacacauuaugcuucucuaaa

SEQ ID NO: 1016943 - RNA, 22 nt, Human
gaaggucaccuccccucucugg

SEQ ID NO: 1016944 - RNA, 22 nt, Human
uucucuuugacauuauucaggu

SEQ ID NO: 1016945 - RNA, 22 nt, Human
ucucagagccuaacuaaccuaa

SEQ ID NO: 1016946 - RNA, 22 nt, Human
aaucuggcauguaagcuuagag

SEQ ID NO: 1016947 - RNA, 22 nt, Human
gaggccugggagccuguccucc

SEQ ID NO: 1016948 - RNA, 22 nt, Human
gcacagggagacagccguggcc

SEQ ID NO: 1016949 - RNA, 22 nt, Human
auaaaaguuuccaaucaugccu

SEQ ID NO: 1016950 - RNA, 22 nt, Human
ucagaaauacuaucagcuuuug

SEQ ID NO: 1016951 - RNA, 22 nt, Human
uuuacaaccucauauucugaug

SEQ ID NO: 1016952 - RNA, 22 nt, Human
auuucuguuugcuacuauaagu

SEQ ID NO: 1016953 - RNA, 22 nt, Human
ucugagaggcagaccuuccuaa

SEQ ID NO: 1016954 - RNA, 22 nt, Human
uggcaucucaaacaggcagauu

SEQ ID NO: 1016955 - RNA, 22 nt, Human
ggccucaguuucuucaacugua

SEQ ID NO: 1016956 - RNA, 22 nt, Human
auuucugauaaacguaagcugc

SEQ ID NO: 1016957 - RNA, 20 nt, Human
gagagcuggggaugaggcug

SEQ ID NO: 1016958 - RNA, 22 nt, Human
cagcugccacuugcucucggcu

SEQ ID NO: 1016959 - RNA, 22 nt, Human
uugucugucccagcuugugcau

SEQ ID NO: 1016960 - RNA, 22 nt, Human
aaauauaauuucugccucaaua

SEQ ID NO: 1016961 - RNA, 22 nt, Human
cugcauuagucaugcuuugcag

SEQ ID NO: 1016962 - RNA, 22 nt, Human
uucagagauggaaggcagaaug

SEQ ID NO: 1016963 - RNA, 22 nt, Human
guggcagcggcccaggccgucu

SEQ ID NO: 1016964 - RNA, 22 nt, Human
ccaagggcugcugaggugucca

SEQ ID NO: 1016965 - RNA, 22 nt, Human
cugggagccuggcaguugcuga

SEQ ID NO: 1016966 - RNA, 22 nt, Human
agggccugucagcgguguccug

SEQ ID NO: 1016967 - RNA, 22 nt, Human
acuguucauuuguccuguaucu

SEQ ID NO: 1016968 - RNA, 22 nt, Human
uuccuuguuuguagcucuggga

SEQ ID NO: 1016969 - RNA, 22 nt, Human
acagcaggauuuggcgauguug

SEQ ID NO: 1016970 - RNA, 22 nt, Human
ugccacagaggugaagcccacu

SEQ ID NO: 1016971 - RNA, 22 nt, Human
cucugggcaaguuucuucauga

SEQ ID NO: 1016972 - RNA, 22 nt, Human
cuucaagaagacagcagagcau

SEQ ID NO: 1016973 - RNA, 22 nt, Human
ucagggacuaggugcugccuga

SEQ ID NO: 1016974 - RNA, 22 nt, Human
cacagcugcccuacuccaugug

SEQ ID NO: 1016975 - RNA, 22 nt, Human
aaggccaugcacauccuaggca

SEQ ID NO: 1016976 - RNA, 22 nt, Human
agcccaagcuaugaggugaccu

SEQ ID NO: 1016977 - RNA, 20 nt, Human
gcagagccucacugcaaggg

SEQ ID NO: 1016978 - RNA, 22 nt, Human
aucuggcucccuuggaauccgu

SEQ ID NO: 1016979 - RNA, 22 nt, Human
cccuugggugccagccacaagu

SEQ ID NO: 1016980 - RNA, 22 nt, Human
ggauggcaggacaaggacccag

SEQ ID NO: 1016981 - RNA, 22 nt, Human
agagugaucagauaucaggugu

SEQ ID NO: 1016982 - RNA, 22 nt, Human
ucuucucccaucuccaggcagg

SEQ ID NO: 1016983 - RNA, 22 nt, Human
cacagaaucugugacuccaaga

SEQ ID NO: 1016984 - RNA, 22 nt, Human
ggcugugcgggcagccguggga

SEQ ID NO: 1016985 - RNA, 22 nt, Human
uuucaguuuccagcuuugucau

SEQ ID NO: 1016986 - RNA, 23 nt, Human
aucaaacuggugagaaugucagu

SEQ ID NO: 1016987 - RNA, 22 nt, Human
cucuggagguggagguugcagu

SEQ ID NO: 1016988 - RNA, 22 nt, Human
ccuuuuucaauauagaauugca

SEQ ID NO: 1016989 - RNA, 22 nt, Human
uugaaggacauccuauuucuag

SEQ ID NO: 1016990 - RNA, 22 nt, Human
guaacaaaguuucuaggugcug

SEQ ID NO: 1016991 - RNA, 22 nt, Human
acucaggaaauugagauaaugg

SEQ ID NO: 1016992 - RNA, 22 nt, Human
auaaacacuucuagggcacaca

SEQ ID NO: 1016993 - RNA, 22 nt, Human
gccagagcugagugagguucuu

SEQ ID NO: 1016994 - RNA, 22 nt, Human
auggggcuguucucugcccugc

SEQ ID NO: 1016995 - RNA, 21 nt, Human
cauuagggcagaagcaggaag

SEQ ID NO: 1016996 - RNA, 22 nt, Human
agcucccagcuccuuugagaga

SEQ ID NO: 1016997 - RNA, 22 nt, Human
aaggaaccauuugugugcaugg

SEQ ID NO: 1016998 - RNA, 19 nt, Human
cacaucagcagggcugugg

SEQ ID NO: 1016999 - RNA, 22 nt, Human
agagucuuccaggcagccugag

SEQ ID NO: 1017000 - RNA, 22 nt, Human
aaggcagcccuggcucagccug

SEQ ID NO: 1017001 - RNA, 22 nt, Human
ccucuggggguccucagagucu

SEQ ID NO: 1017002 - RNA, 22 nt, Human
caggcaggugcagauuccucuu

SEQ ID NO: 1017003 - RNA, 22 nt, Human
gcugaagcccacguggcuugua

SEQ ID NO: 1017004 - RNA, 22 nt, Human
uuccucagagggcgcuggggaa

SEQ ID NO: 1017005 - RNA, 22 nt, Human
cauuguuaccaucuuuuaccua

SEQ ID NO: 1017006 - RNA, 22 nt, Human
gggcuacagacaugcucuaagc

SEQ ID NO: 1017007 - RNA, 22 nt, Human
ggccugcucugcagccucuaca

SEQ ID NO: 1017008 - RNA, 22 nt, Human
aaauugcaaaaguacuuuuagg

SEQ ID NO: 1017009 - RNA, 22 nt, Human
gcugcuguugauuuaguccaau

SEQ ID NO: 1017010 - RNA, 22 nt, Human
cuggcagguccagcuggacuca

SEQ ID NO: 1017011 - RNA, 22 nt, Human
ugaagguggcauaggagagaug

SEQ ID NO: 1017012 - RNA, 22 nt, Human
uacauguaauuuucauaguaag

SEQ ID NO: 1017013 - RNA, 22 nt, Human
acaggcucucagccaguuggca

SEQ ID NO: 1017014 - RNA, 22 nt, Human
uauuucagggagaauaaauuug

SEQ ID NO: 1017015 - RNA, 22 nt, Human
gcaucuucacacaaagccagug

SEQ ID NO: 1017016 - RNA, 22 nt, Human
uacaguaucuucuggcaagcau

SEQ ID NO: 1017017 - RNA, 21 nt, Human
guccagagagccggcuccuga

SEQ ID NO: 1017018 - RNA, 22 nt, Human
caaugugucaggaaaagggcca

SEQ ID NO: 1017019 - RNA, 22 nt, Human
gcagacuggucuucagccuugg

SEQ ID NO: 1017020 - RNA, 22 nt, Human
aggcucagcugguggugaucgc

SEQ ID NO: 1017021 - RNA, 22 nt, Human
agcuuccucaccucagaggucu

SEQ ID NO: 1017022 - RNA, 22 nt, Human
ugcagccaauucauucauucuu

SEQ ID NO: 1017023 - RNA, 23 nt, Human
agagccugaaagacuucuggcac

SEQ ID NO: 1017024 - RNA, 20 nt, Human
agcugaggcaccugagguua

SEQ ID NO: 1017025 - RNA, 22 nt, Human
guccucuguguaggcugcagac

SEQ ID NO: 1017026 - RNA, 22 nt, Human
caggcugcagcagcaguggccc

SEQ ID NO: 1017027 - RNA, 22 nt, Human
aucaaaguggaaguuuacuagg

SEQ ID NO: 1017028 - RNA, 22 nt, Human
ggugaaggcacaagagggcaag

SEQ ID NO: 1017029 - RNA, 22 nt, Human
aaugaugguuaaacacuggagg

SEQ ID NO: 1017030 - RNA, 22 nt, Human
aaaagagucuuaggcagucaua

SEQ ID NO: 1017031 - RNA, 20 nt, Human
uuucacaaugaacaugucuc

SEQ ID NO: 1017032 - RNA, 22 nt, Human
ggugcuggacacguggcacucc

SEQ ID NO: 1017033 - RNA, 20 nt, Human
gccuggaggcaaugggaaga

SEQ ID NO: 1017034 - RNA, 21 nt, Human
aggggacagaguagcuccagg

SEQ ID NO: 1017035 - RNA, 22 nt, Human
gaggcagcuuggggcugugggu

SEQ ID NO: 1017036 - RNA, 22 nt, Human
uauuuaauuagugauuguagag

SEQ ID NO: 1017037 - RNA, 23 nt, Human
caugggagugagaaugccagcuc

SEQ ID NO: 1017038 - RNA, 22 nt, Human
acugugugcccugacgccaggg

SEQ ID NO: 1017039 - RNA, 22 nt, Human
guuauacauauguguuaacaaa

SEQ ID NO: 1017040 - RNA, 22 nt, Human
ucacauucucagcaucuauaca

SEQ ID NO: 1017041 - RNA, 22 nt, Human
gagacagcagggccagggccug

SEQ ID NO: 1017042 - RNA, 22 nt, Human
uugacacaguuuucucauuaag

SEQ ID NO: 1017043 - RNA, 22 nt, Human
gauuucuugaccccugucucag

SEQ ID NO: 1017044 - RNA, 22 nt, Human
gugucauggaaaauugcaaugg

SEQ ID NO: 1017045 - RNA, 22 nt, Human
caaggaaaaagcgagcucgggg

SEQ ID NO: 1017046 - RNA, 22 nt, Human
acugugggagcgcaguggcagc

SEQ ID NO: 1017047 - RNA, 22 nt, Human
aguuuucacacucaccaaaagg

SEQ ID NO: 1017048 - RNA, 22 nt, Human
agcagccacagcagaucugagu

SEQ ID NO: 1017049 - RNA, 20 nt, Human
accuugaacccgccagccau

SEQ ID NO: 1017050 - RNA, 22 nt, Human
ccaccaggacagcccugagggg

SEQ ID NO: 1017051 - RNA, 22 nt, Human
uacauuccacuagugacuggcg

SEQ ID NO: 1017052 - RNA, 22 nt, Human
gggaguggguuuggccuaggcc

SEQ ID NO: 1017053 - RNA, 22 nt, Human
uaaaauagcaugugcagugaaa

SEQ ID NO: 1017054 - RNA, 22 nt, Human
gauggcagucaaccaggugagg

SEQ ID NO: 1017055 - RNA, 22 nt, Human
ucuguccauuuuccauuuuggc

SEQ ID NO: 1017056 - RNA, 22 nt, Human
aagaggaaaugauugacuauau

SEQ ID NO: 1017057 - RNA, 22 nt, Human
gaagcuucguggcucuucaaau

SEQ ID NO: 1017058 - RNA, 23 nt, Human
uggauaaagcugugcugcauagg

SEQ ID NO: 1017059 - RNA, 22 nt, Human
guggccugccgcaccccaauau

SEQ ID NO: 1017060 - RNA, 22 nt, Human
ccagcccuugagauggaaggga

SEQ ID NO: 1017061 - RNA, 22 nt, Human
cacugagaggucucauuuccaa

SEQ ID NO: 1017062 - RNA, 22 nt, Human
uggagccaggagccugggaguc

SEQ ID NO: 1017063 - RNA, 22 nt, Human
guacuucccugggaggcaagca

SEQ ID NO: 1017064 - RNA, 22 nt, Human
ugugugucagagucuccauggu

SEQ ID NO: 1017065 - RNA, 22 nt, Human
gcuggcucagggacuagaguuu

SEQ ID NO: 1017066 - RNA, 22 nt, Human
uauguacaaucagcaguucaua

SEQ ID NO: 1017067 - RNA, 22 nt, Human
ugagcuuacuucuguacacaga

SEQ ID NO: 1017068 - RNA, 20 nt, Human
gugccuggagaagaggcugu

SEQ ID NO: 1017069 - RNA, 22 nt, Human
ucaaaguuuguggcaauuuauu

SEQ ID NO: 1017070 - RNA, 22 nt, Human
agacaaagaaaccguagaagca

SEQ ID NO: 1017071 - RNA, 22 nt, Human
ggugaguugggguucacagguc

SEQ ID NO: 1017072 - RNA, 22 nt, Human
uccaggagagguguggggacug

SEQ ID NO: 1017073 - RNA, 22 nt, Human
uuguuucaggaugguuuguuac

SEQ ID NO: 1017074 - RNA, 22 nt, Human
guucaaagcuccugguacagua

SEQ ID NO: 1017075 - RNA, 22 nt, Human
uuucagauggagguuuaggaca

SEQ ID NO: 1017076 - RNA, 22 nt, Human
acucagaaccauuuacucugag

SEQ ID NO: 1017077 - RNA, 19 nt, Human
gcugugugaccuugggcaa

SEQ ID NO: 1017078 - RNA, 22 nt, Human
gcagccacagaggagggaugca

SEQ ID NO: 1017079 - RNA, 22 nt, Human
aacaaauggaacacaaaucuuu

SEQ ID NO: 1017080 - RNA, 22 nt, Human
gcugucuccauagcuguguguc

SEQ ID NO: 1017081 - RNA, 22 nt, Human
caggaacaauguaagucucauu

SEQ ID NO: 1017082 - RNA, 22 nt, Human
uucaggauccccaccgcguuua

SEQ ID NO: 1017083 - RNA, 22 nt, Human
guggaaugaauagauuugcauu

SEQ ID NO: 1017084 - RNA, 22 nt, Human
uauacuuuccugcaacuuugau

SEQ ID NO: 1017085 - RNA, 22 nt, Human
aauguaugugcaucauuuacau

SEQ ID NO: 1017086 - RNA, 22 nt, Human
ggugccaggcucccagcucagg

SEQ ID NO: 1017087 - RNA, 22 nt, Human
uagaaacugauagucuugugcu

SEQ ID NO: 1017088 - RNA, 22 nt, Human
cacagggcagguacucucagag

SEQ ID NO: 1017089 - RNA, 22 nt, Human
aguggcagagugcacucaggca

SEQ ID NO: 1017090 - RNA, 22 nt, Human
ggaagggccucgggcgugggac

SEQ ID NO: 1017091 - RNA, 22 nt, Human
ggagucaggagcaggcugggcu

SEQ ID NO: 1017092 - RNA, 22 nt, Human
gcacacagauuaggaaacagaa

SEQ ID NO: 1017093 - RNA, 18 nt, Human
aguggucuguuauaucau

SEQ ID NO: 1017094 - RNA, 22 nt, Human
aaaaguucccugguuagaaaag

SEQ ID NO: 1017095 - RNA, 22 nt, Human
uuuuuguagucauuagaagagg

SEQ ID NO: 1017096 - RNA, 22 nt, Human
gcacagggccuggcacauaaga

SEQ ID NO: 1017097 - RNA, 22 nt, Human
uuaaacagacaguaaaugaaac

SEQ ID NO: 1017098 - RNA, 22 nt, Human
gggcagcagcaggaggucucug

SEQ ID NO: 1017099 - RNA, 22 nt, Human
gucauauacacugcauguaauc

SEQ ID NO: 1017100 - RNA, 22 nt, Human
augaugugugcugaucaagcuu

SEQ ID NO: 1017101 - RNA, 22 nt, Human
aggcacugggggaugagcaagg

SEQ ID NO: 1017102 - RNA, 22 nt, Human
gcugccagucuaaugggaaaca

SEQ ID NO: 1017103 - RNA, 22 nt, Human
agccagagcagggaauuggaca

SEQ ID NO: 1017104 - RNA, 22 nt, Human
ucacguuuuacugagugagaua

SEQ ID NO: 1017105 - RNA, 22 nt, Human
ugugugcauucacaugcaugcc

SEQ ID NO: 1017106 - RNA, 22 nt, Human
uacuuacacagcuguagaaggu

SEQ ID NO: 1017107 - RNA, 22 nt, Human
uaucuaaauggaauauuccaga

SEQ ID NO: 1017108 - RNA, 22 nt, Human
aggggcuguggaaaccaacucu

SEQ ID NO: 1017109 - RNA, 22 nt, Human
cauuucugucacguucuuuuau

SEQ ID NO: 1017110 - RNA, 22 nt, Human
auuuagaaguuggagggcaaga

SEQ ID NO: 1017111 - RNA, 22 nt, Human
uucuuauagaagcaaccauugu

SEQ ID NO: 1017112 - RNA, 22 nt, Human
cagacccugggccacagaggag

SEQ ID NO: 1017113 - RNA, 22 nt, Human
uccaugucuucaugugucuaac

SEQ ID NO: 1017114 - RNA, 22 nt, Human
uuaaauuccagccucauaauag

SEQ ID NO: 1017115 - RNA, 22 nt, Human
agugugagcccuggaguggugc

SEQ ID NO: 1017116 - RNA, 22 nt, Human
aggacuccauguguccuggaga

SEQ ID NO: 1017117 - RNA, 22 nt, Human
gccuugcuuugcuucuggacag

SEQ ID NO: 1017118 - RNA, 22 nt, Human
cuagaaauacaggcacgugcca

SEQ ID NO: 1017119 - RNA, 22 nt, Human
gcccagcagcugguggagaagg

SEQ ID NO: 1017120 - RNA, 23 nt, Human
ugggggugcacgggccacaucuu

SEQ ID NO: 1017121 - RNA, 22 nt, Human
ucucagagcuucagaaagcacc

SEQ ID NO: 1017122 - RNA, 22 nt, Human
gucuggggaagucagggcauca

SEQ ID NO: 1017123 - RNA, 22 nt, Human
gccuggagaaaggaagguggga

SEQ ID NO: 1017124 - RNA, 22 nt, Human
aaguauuucuggccugugaaag

SEQ ID NO: 1017125 - RNA, 22 nt, Human
gagcagcucugggugacccagu

SEQ ID NO: 1017126 - RNA, 22 nt, Human
agucucugcaugccugcugugc

SEQ ID NO: 1017127 - RNA, 22 nt, Human
ggcuggaaaagacaaagcuauu

SEQ ID NO: 1017128 - RNA, 22 nt, Human
gugguuuucuccaacccagaac

SEQ ID NO: 1017129 - RNA, 22 nt, Human
ucauugcagcuucagguguuca

SEQ ID NO: 1017130 - RNA, 22 nt, Human
auaugagaguaaaugccgaucu

SEQ ID NO: 1017131 - RNA, 21 nt, Human
gcagagccugagguucuugag

SEQ ID NO: 1017132 - RNA, 22 nt, Human
uguguuccuucgucuucccuuc

SEQ ID NO: 1017133 - RNA, 22 nt, Human
cugcuguggugucaagcaucuc

SEQ ID NO: 1017134 - RNA, 22 nt, Human
ucccaggaucugagggcagaga

SEQ ID NO: 1017135 - RNA, 22 nt, Human
gggccuggggugacguaccccu

SEQ ID NO: 1017136 - RNA, 22 nt, Human
uggccuggugcucaggcaguag

SEQ ID NO: 1017137 - RNA, 22 nt, Human
caggaugugaggaggccauuug

SEQ ID NO: 1017138 - RNA, 22 nt, Human
cuguccuaugaguacucacuag

SEQ ID NO: 1017139 - RNA, 17 nt, Human
uucucugagcuguauug

SEQ ID NO: 1017140 - RNA, 22 nt, Human
acaaaugucuccucuuuuguua

SEQ ID NO: 1017141 - RNA, 22 nt, Human
gccugccuucggugcgcagcgg

SEQ ID NO: 1017142 - RNA, 22 nt, Human
uguguacaagaguguuuacugu

SEQ ID NO: 1017143 - RNA, 22 nt, Human
augauggugggagaugacccag

SEQ ID NO: 1017144 - RNA, 22 nt, Human
gaucauuuacuuguucuggacu

SEQ ID NO: 1017145 - RNA, 22 nt, Human
accagagcuuacaugcuagaaa

SEQ ID NO: 1017146 - RNA, 22 nt, Human
uuucaugugcaauuagcaauau

SEQ ID NO: 1017147 - RNA, 22 nt, Human
auccugucaucauaguacuuga

SEQ ID NO: 1017148 - RNA, 22 nt, Human
uccuuuccaugcuucuagaggc

SEQ ID NO: 1017149 - RNA, 22 nt, Human
gcacugcagguggguggagagg

SEQ ID NO: 1017150 - RNA, 22 nt, Human
ugaaacaaugugaaguugcuga

SEQ ID NO: 1017151 - RNA, 22 nt, Human
cuuagggagaaugccucugcag

SEQ ID NO: 1017152 - RNA, 18 nt, Human
uccugcagcuucuaugua

SEQ ID NO: 1017153 - RNA, 22 nt, Human
uugaaaguuaucuagauucuga

SEQ ID NO: 1017154 - RNA, 22 nt, Human
cagccagguucaaguccuuaua

SEQ ID NO: 1017155 - RNA, 22 nt, Human
uugaaggacaucuuguuucuag

SEQ ID NO: 1017156 - RNA, 22 nt, Human
ugaguucuaguggcugcagauu

SEQ ID NO: 1017157 - RNA, 23 nt, Human
cccagcagagaugaggagggguc

SEQ ID NO: 1017158 - RNA, 22 nt, Human
gccucugcaauuacauugugcc

SEQ ID NO: 1017159 - RNA, 22 nt, Human
gcagagccugugucugagcaaa

SEQ ID NO: 1017160 - RNA, 22 nt, Human
ucagcugaguucuagagcacuc

SEQ ID NO: 1017161 - RNA, 22 nt, Human
cuucucaguugcaagugucaga

SEQ ID NO: 1017162 - RNA, 22 nt, Human
gcucugcuguguuuguucagca

SEQ ID NO: 1017163 - RNA, 18 nt, Human
cagggccccagaauuauc

SEQ ID NO: 1017164 - RNA, 22 nt, Human
gaagcagcaaguauaggacagg

SEQ ID NO: 1017165 - RNA, 22 nt, Human
cacagaauaaauugguaucaga

SEQ ID NO: 1017166 - RNA, 22 nt, Human
aaggcagauauaaagacuagag

SEQ ID NO: 1017167 - RNA, 22 nt, Human
gccuuuuuuguugcucugucac

SEQ ID NO: 1017168 - RNA, 22 nt, Human
uggaggugagugugguacagca

SEQ ID NO: 1017169 - RNA, 22 nt, Human
gucccagaugucuggaacuccc

SEQ ID NO: 1017170 - RNA, 22 nt, Human
auucaagagcccauguuuccug

SEQ ID NO: 1017171 - RNA, 22 nt, Human
gagggcaggggucuugcacggu

SEQ ID NO: 1017172 - RNA, 22 nt, Human
uagcagugccaggauuuugcug

SEQ ID NO: 1017173 - RNA, 22 nt, Human
ucccagggacaccaagcuguuu

SEQ ID NO: 1017174 - RNA, 22 nt, Human
ucccuggcugggggcugccuug

SEQ ID NO: 1017175 - RNA, 22 nt, Human
ucauuguuauguuuugcugucu

SEQ ID NO: 1017176 - RNA, 22 nt, Human
ggagagcugguagcuggcucca

SEQ ID NO: 1017177 - RNA, 22 nt, Human
gccaggcaguucaaguacacca

SEQ ID NO: 1017178 - RNA, 22 nt, Human
cucaggauuuaaaggggcacuc

SEQ ID NO: 1017179 - RNA, 22 nt, Human
uaaugcacagaauugacauggg

SEQ ID NO: 1017180 - RNA, 22 nt, Human
aauuucagagguagagauucua

SEQ ID NO: 1017181 - RNA, 22 nt, Human
uacauacacaaauauacuguuu

SEQ ID NO: 1017182 - RNA, 22 nt, Human
cuggugagacgguugacaggag

SEQ ID NO: 1017183 - RNA, 22 nt, Human
uucauucaucucuaaaaugccu

SEQ ID NO: 1017184 - RNA, 22 nt, Human
ccaggcagccaagugugugugu

SEQ ID NO: 1017185 - RNA, 22 nt, Human
cugcagcuguagaggacagugg

SEQ ID NO: 1017186 - RNA, 22 nt, Human
gaaggccacaagagaaguuaag

SEQ ID NO: 1017187 - RNA, 22 nt, Human
ccagccacugggccacugccag

SEQ ID NO: 1017188 - RNA, 22 nt, Human
gccuaauaacuagcuguguaac

SEQ ID NO: 1017189 - RNA, 22 nt, Human
aucuguucuucaaaauauuaca

SEQ ID NO: 1017190 - RNA, 22 nt, Human
gagaugaauguaaacaaaggca

SEQ ID NO: 1017191 - RNA, 22 nt, Human
acagacauuuucuguauugccu

SEQ ID NO: 1017192 - RNA, 22 nt, Human
ccagcagcuuuauuggcucucc

SEQ ID NO: 1017193 - RNA, 22 nt, Human
gagagcugugguuugaccaggc

SEQ ID NO: 1017194 - RNA, 22 nt, Human
cagcuggcagaaccugcaucca

SEQ ID NO: 1017195 - RNA, 22 nt, Human
auucuucaaagagugucaaagu

SEQ ID NO: 1017196 - RNA, 22 nt, Human
acagggucauuuuaugaucugu

SEQ ID NO: 1017197 - RNA, 22 nt, Human
cugcuguguuccuccugcaucu

SEQ ID NO: 1017198 - RNA, 22 nt, Human
cagcaggcagccauuucacugu

SEQ ID NO: 1017199 - RNA, 22 nt, Human
ugagccagaguggagugugccu

SEQ ID NO: 1017200 - RNA, 22 nt, Human
uucuuucccagaagauauguuu

SEQ ID NO: 1017201 - RNA, 22 nt, Human
ucuucacaggagccugccugcc

SEQ ID NO: 1017202 - RNA, 19 nt, Human
uuagccauccacagugaaa

SEQ ID NO: 1017203 - RNA, 22 nt, Human
guugaaaguggagaaccugguu

SEQ ID NO: 1017204 - RNA, 22 nt, Human
guccugucccccaaggcugugg

SEQ ID NO: 1017205 - RNA, 22 nt, Human
aaggcacucagccuugggacag

SEQ ID NO: 1017206 - RNA, 22 nt, Human
cccaguccuaaagcagacgcca

SEQ ID NO: 1017207 - RNA, 22 nt, Human
ugaaaaggagccuuagguaggu

SEQ ID NO: 1017208 - RNA, 22 nt, Human
cucagagauauagucccugcuu

SEQ ID NO: 1017209 - RNA, 22 nt, Human
cuuuauguccuugaagaguugu

SEQ ID NO: 1017210 - RNA, 22 nt, Human
uucagcaaacacgaugcuuguu

SEQ ID NO: 1017211 - RNA, 22 nt, Human
ugaaaucuucacuaagucucuu

SEQ ID NO: 1017212 - RNA, 22 nt, Human
ucauacaucuguccuggagcuc

SEQ ID NO: 1017213 - RNA, 22 nt, Human
cuggccaacuugcuuguuggca

SEQ ID NO: 1017214 - RNA, 22 nt, Human
ggucccaguugcccaggucagg

SEQ ID NO: 1017215 - RNA, 22 nt, Human
ugaaagaacuagcaucuucaag

SEQ ID NO: 1017216 - RNA, 22 nt, Human
uggcaggguggcaacuuuuggu

SEQ ID NO: 1017217 - RNA, 22 nt, Human
ggcgugggaaguggggcuucug

SEQ ID NO: 1017218 - RNA, 22 nt, Human
aaugauuuggcaaaggaaucca

SEQ ID NO: 1017219 - RNA, 22 nt, Human
uaccuuuugcuuauuaugacac

SEQ ID NO: 1017220 - RNA, 22 nt, Human
uucaugugauaaaugugugacu

SEQ ID NO: 1017221 - RNA, 22 nt, Human
gcugagagcaguguggccuuaa

SEQ ID NO: 1017222 - RNA, 22 nt, Human
cucugugcccuacugcucagcu

SEQ ID NO: 1017223 - RNA, 22 nt, Human
ggugucccaggccagcugugug

SEQ ID NO: 1017224 - RNA, 22 nt, Human
ggcucugcagugacuugagggg

SEQ ID NO: 1017225 - RNA, 22 nt, Human
aauuucaaugcacucaugguug

SEQ ID NO: 1017226 - RNA, 20 nt, Human
aggcacuggauuucuuauau

SEQ ID NO: 1017227 - RNA, 22 nt, Human
cugcacaguuugauuucuugcu

SEQ ID NO: 1017228 - RNA, 22 nt, Human
ugccugaguuuaacccucagag

SEQ ID NO: 1017229 - RNA, 19 nt, Human
gccaggagggcucuggcug

SEQ ID NO: 1017230 - RNA, 22 nt, Human
agcugaugccauguggaacagu

SEQ ID NO: 1017231 - RNA, 22 nt, Human
uacauucagaagaauggacacg

SEQ ID NO: 1017232 - RNA, 22 nt, Human
cugucugcuagaacaucuauac

SEQ ID NO: 1017233 - RNA, 22 nt, Human
acauaucuuucccucuccugaa

SEQ ID NO: 1017234 - RNA, 22 nt, Human
aagcccagcaucccugcaccag

SEQ ID NO: 1017235 - RNA, 19 nt, Human
ccagguggaacugagguag

SEQ ID NO: 1017236 - RNA, 22 nt, Human
guaacauaguuugugcuucauc

SEQ ID NO: 1017237 - RNA, 22 nt, Human
aggagcugaaacuucucauaug

SEQ ID NO: 1017238 - RNA, 20 nt, Human
ccuguucacugcgcaguuuc

SEQ ID NO: 1017239 - RNA, 22 nt, Human
auguuuuauauuuugcagcagu

SEQ ID NO: 1017240 - RNA, 22 nt, Human
gagccucguggcggccacugcg

SEQ ID NO: 1017241 - RNA, 22 nt, Human
acuggaaaugagaugauaucag

SEQ ID NO: 1017242 - RNA, 22 nt, Human
ucuuccucuagaucugaggccc

SEQ ID NO: 1017243 - RNA, 22 nt, Human
ccagccagccuugaucugagua

SEQ ID NO: 1017244 - RNA, 20 nt, Human
gcugccagugccugaugcuu

SEQ ID NO: 1017245 - RNA, 22 nt, Human
agcagccauuuaaaaugaauug

SEQ ID NO: 1017246 - RNA, 22 nt, Human
uguuuaagcugaugagguaucg

SEQ ID NO: 1017247 - RNA, 22 nt, Human
cacccacccacugcucauuggc

SEQ ID NO: 1017248 - RNA, 23 nt, Human
agagcuuagggaauucacaugag

SEQ ID NO: 1017249 - RNA, 23 nt, Human
aaagacugcugagaauuuuagga

SEQ ID NO: 1017250 - RNA, 22 nt, Human
ugggcuccuugggagcaaguga

SEQ ID NO: 1017251 - RNA, 22 nt, Human
uaauacagaaguguauuaaaau

SEQ ID NO: 1017252 - RNA, 22 nt, Human
gucucuggguuaagcagugcau

SEQ ID NO: 1017253 - RNA, 22 nt, Human
ugcuuuauagacaaggaaguag

SEQ ID NO: 1017254 - RNA, 21 nt, Human
ugauuuccagaaaauuggccc

SEQ ID NO: 1017255 - RNA, 22 nt, Human
cagugagggaagaucucagcac

SEQ ID NO: 1017256 - RNA, 22 nt, Human
aaaaugcaugagaaugugcucg

SEQ ID NO: 1017257 - RNA, 22 nt, Human
agccaaggagugcagguggcuu

SEQ ID NO: 1017258 - RNA, 22 nt, Human
cuguacaucccgagagccagua

SEQ ID NO: 1017259 - RNA, 22 nt, Human
gaaguacaguuuuaucuagcca

SEQ ID NO: 1017260 - RNA, 22 nt, Human
aauguuaaaaccuucagugcuu

SEQ ID NO: 1017261 - RNA, 22 nt, Human
gcaguguuaggaauaaaaauga

SEQ ID NO: 1017262 - RNA, 22 nt, Human
ugcuuuggaucuauuugcugag

SEQ ID NO: 1017263 - RNA, 22 nt, Human
cccucaggagaugucagcugga

SEQ ID NO: 1017264 - RNA, 22 nt, Human
cagggcagaacauauagauagu

SEQ ID NO: 1017265 - RNA, 22 nt, Human
ggccucuggucaagacaagcau

SEQ ID NO: 1017266 - RNA, 22 nt, Human
ucaagcaucuuggucuacgauc

SEQ ID NO: 1017267 - RNA, 22 nt, Human
accacugcccauggugaaaacu

SEQ ID NO: 1017268 - RNA, 22 nt, Human
uggcucugcugaaccuagugca

SEQ ID NO: 1017269 - RNA, 22 nt, Human
cucagggccaaggaugcuguug

SEQ ID NO: 1017270 - RNA, 22 nt, Human
agccaggggauucaucagggac

SEQ ID NO: 1017271 - RNA, 22 nt, Human
gcuggugagcaaaggagaagga

SEQ ID NO: 1017272 - RNA, 22 nt, Human
uggcagggccugaaucuuauac

SEQ ID NO: 1017273 - RNA, 22 nt, Human
aaggccuggauuuagguuguga

SEQ ID NO: 1017274 - RNA, 22 nt, Human
cccagggauuauaaaggugaaa

SEQ ID NO: 1017275 - RNA, 22 nt, Human
auugagaauccauuugagauga

SEQ ID NO: 1017276 - RNA, 22 nt, Human
agagccaggugcugcuguuuga

SEQ ID NO: 1017277 - RNA, 22 nt, Human
aagccagccagugccagucuua

SEQ ID NO: 1017278 - RNA, 22 nt, Human
agcagcauucucugguaugggg

SEQ ID NO: 1017279 - RNA, 22 nt, Human
uacccaggaggaaacugaggcu

SEQ ID NO: 1017280 - RNA, 22 nt, Human
gucaggaugagggaugaggagu

SEQ ID NO: 1017281 - RNA, 22 nt, Human
aagagcugcccaaggugaacag

SEQ ID NO: 1017282 - RNA, 22 nt, Human
ccagcuuuggaguguuguugcu

SEQ ID NO: 1017283 - RNA, 22 nt, Human
uggaaagagguagaggaucugg

SEQ ID NO: 1017284 - RNA, 22 nt, Human
cuugcaggauuuugcugcugua

SEQ ID NO: 1017285 - RNA, 22 nt, Human
ccugagggcgccgagcucccag

SEQ ID NO: 1017286 - RNA, 22 nt, Human
cuggugggaggcaagguggaag

SEQ ID NO: 1017287 - RNA, 22 nt, Human
uuuauacuccacucugcaagcg

SEQ ID NO: 1017288 - RNA, 23 nt, Human
caguacuuaguguagcguuaauu

SEQ ID NO: 1017289 - RNA, 22 nt, Human
aauauuucuccuucguuauagc

SEQ ID NO: 1017290 - RNA, 22 nt, Human
aguccaguguguucuggcagca

SEQ ID NO: 1017291 - RNA, 22 nt, Human
gcuggccucgcaggcaggaugu

SEQ ID NO: 1017292 - RNA, 22 nt, Human
aaaggaagauugagcuuuucca

SEQ ID NO: 1017293 - RNA, 23 nt, Human
ugaaggccuggaggacgcguugu

SEQ ID NO: 1017294 - RNA, 22 nt, Human
cagggcucagggacugcagaaa

SEQ ID NO: 1017295 - RNA, 23 nt, Human
ggccauggagacuuagaaugggc

SEQ ID NO: 1017296 - RNA, 22 nt, Human
guguaauugaaauugagaacca

SEQ ID NO: 1017297 - RNA, 22 nt, Human
gggucuggacggcugcaggaag

SEQ ID NO: 1017298 - RNA, 22 nt, Human
uugacaauugggagauauaaag

SEQ ID NO: 1017299 - RNA, 22 nt, Human
cacacucauuagucauuucucu

SEQ ID NO: 1017300 - RNA, 22 nt, Human
aagccaggaagagagccuucac

SEQ ID NO: 1017301 - RNA, 22 nt, Human
agugcuccuauggaucaguugu

SEQ ID NO: 1017302 - RNA, 22 nt, Human
caaaugcuggcccugcuacuua

SEQ ID NO: 1017303 - RNA, 22 nt, Human
gggcagagacucagaaacagaa

SEQ ID NO: 1017304 - RNA, 22 nt, Human
uggcuuccgccgcgggccucgg

SEQ ID NO: 1017305 - RNA, 22 nt, Human
uucacagucacccuucuccaug

SEQ ID NO: 1017306 - RNA, 22 nt, Human
cauggcaggugcagauucugug

SEQ ID NO: 1017307 - RNA, 22 nt, Human
ugcagggccagacuggguugga

SEQ ID NO: 1017308 - RNA, 22 nt, Human
uccauuuucuaaguaucacuua

SEQ ID NO: 1017309 - RNA, 22 nt, Human
gcaccacaucaaugaggggagc

SEQ ID NO: 1017310 - RNA, 22 nt, Human
ccacaggggcccacgagccgcu

SEQ ID NO: 1017311 - RNA, 22 nt, Human
cuccucccugcgauugcucugc

SEQ ID NO: 1017312 - RNA, 22 nt, Human
uugcauguguaauuuuucuaaa

SEQ ID NO: 1017313 - RNA, 22 nt, Human
uggccucugugggagcugagca

SEQ ID NO: 1017314 - RNA, 22 nt, Human
ccaggcagggcucaaggaaccu

SEQ ID NO: 1017315 - RNA, 22 nt, Human
uaaacaucugucauguguuuau

SEQ ID NO: 1017316 - RNA, 22 nt, Human
gcugcaggagcuggagcugugg

SEQ ID NO: 1017317 - RNA, 22 nt, Human
gcucugagagugggugauucug

SEQ ID NO: 1017318 - RNA, 22 nt, Human
guccucagggaauguggcgggu

SEQ ID NO: 1017319 - RNA, 22 nt, Human
cccagcucucucaguucugcuu

SEQ ID NO: 1017320 - RNA, 22 nt, Human
aggccuggugugccggaugcag

SEQ ID NO: 1017321 - RNA, 22 nt, Human
agcuuuauuaacucuccaggug

SEQ ID NO: 1017322 - RNA, 22 nt, Human
gaagagcugugauucaggcuua

SEQ ID NO: 1017323 - RNA, 18 nt, Human
ugggcugccuggccucug

SEQ ID NO: 1017324 - RNA, 22 nt, Human
ugaagcaggaaacuucuuguuu

SEQ ID NO: 1017325 - RNA, 22 nt, Human
agcugccaaguuucucaguuua

SEQ ID NO: 1017326 - RNA, 22 nt, Human
aaaucagucccucuuggaauuu

SEQ ID NO: 1017327 - RNA, 22 nt, Human
cagggagcuuucccaggacccu

SEQ ID NO: 1017328 - RNA, 22 nt, Human
ucagcugcucaaauuuauguca

SEQ ID NO: 1017329 - RNA, 22 nt, Human
auugaaaggcaaaguaggaagc

SEQ ID NO: 1017330 - RNA, 22 nt, Human
ugaauaguccuuggaauaacug

SEQ ID NO: 1017331 - RNA, 22 nt, Human
ucccaggacaggccacauggaa

SEQ ID NO: 1017332 - RNA, 21 nt, Human
aagcuucccugcucuccaggg

SEQ ID NO: 1017333 - RNA, 22 nt, Human
gcugcuucucugauggagucca

SEQ ID NO: 1017334 - RNA, 22 nt, Human
gccagggcucgcggucccucgu

SEQ ID NO: 1017335 - RNA, 22 nt, Human
gugcugugugauccaugcuggc

SEQ ID NO: 1017336 - RNA, 22 nt, Human
ugcauugauagaaaaacaugga

SEQ ID NO: 1017337 - RNA, 22 nt, Human
uccuuucaccaaaaaguguugu

SEQ ID NO: 1017338 - RNA, 22 nt, Human
acagagagaauuggguuuacag

SEQ ID NO: 1017339 - RNA, 22 nt, Human
guuuuguugcugcagagcucaa

SEQ ID NO: 1017340 - RNA, 22 nt, Human
agugaaauacugucguuuuuag

SEQ ID NO: 1017341 - RNA, 22 nt, Human
auuucuucaggucagaaauaga

SEQ ID NO: 1017342 - RNA, 22 nt, Human
ggcucuggugugaagcagccuc

SEQ ID NO: 1017343 - RNA, 22 nt, Human
ggcucccacccauagggcgagu

SEQ ID NO: 1017344 - RNA, 20 nt, Human
ugucagugccugaggcacag

SEQ ID NO: 1017345 - RNA, 22 nt, Human
acugaaggguaaugugggagcc

SEQ ID NO: 1017346 - RNA, 22 nt, Human
cucacaggcaucucaucaggcu

SEQ ID NO: 1017347 - RNA, 22 nt, Human
uuacaugguuguuggaaaugcu

SEQ ID NO: 1017348 - RNA, 22 nt, Human
ugccucugugggccuuccuggc

SEQ ID NO: 1017349 - RNA, 21 nt, Human
ccuucuccacagggucuccgg

SEQ ID NO: 1017350 - RNA, 22 nt, Human
uccaggcaagggaggagcaugg

SEQ ID NO: 1017351 - RNA, 22 nt, Human
ucugucugcaccuaagcacagu

SEQ ID NO: 1017352 - RNA, 22 nt, Human
uucuucaauuauuggaaagaaa

SEQ ID NO: 1017353 - RNA, 22 nt, Human
accaggaggccuggagcacaaa

SEQ ID NO: 1017354 - RNA, 22 nt, Human
gggcugugggacccggcacuuu

SEQ ID NO: 1017355 - RNA, 21 nt, Human
uccucugcagugagguggccu

SEQ ID NO: 1017356 - RNA, 22 nt, Human
ugauucuauggaaggcauaagg

SEQ ID NO: 1017357 - RNA, 22 nt, Human
cagggccagccgcagcauccac

SEQ ID NO: 1017358 - RNA, 22 nt, Human
guccagggcuaaaucagguucc

SEQ ID NO: 1017359 - RNA, 22 nt, Human
uucaggaucauuuguuuuaucu

SEQ ID NO: 1017360 - RNA, 22 nt, Human
gggagggaaggaccuuaugaau

SEQ ID NO: 1017361 - RNA, 22 nt, Human
ugggcucuccuggaggacaaca

SEQ ID NO: 1017362 - RNA, 22 nt, Human
acacaggggaaaguggagcuga

SEQ ID NO: 1017363 - RNA, 22 nt, Human
caggcacugugcuagauccuug

SEQ ID NO: 1017364 - RNA, 22 nt, Human
cuggcucauagagcagcuccaa

SEQ ID NO: 1017365 - RNA, 22 nt, Human
ugcagggauuguuggcauccau

SEQ ID NO: 1017366 - RNA, 22 nt, Human
cgcuggggcuuuuugcuugaga

SEQ ID NO: 1017367 - RNA, 22 nt, Human
gagcugccugaacaagcagcag

SEQ ID NO: 1017368 - RNA, 22 nt, Human
auacaagacucagcacagacgg

SEQ ID NO: 1017369 - RNA, 22 nt, Human
auugacaauguauuuguaucug

SEQ ID NO: 1017370 - RNA, 22 nt, Human
aaaauacacauacuaggggaaa

SEQ ID NO: 1017371 - RNA, 22 nt, Human
augggaugcauggcuguggcca

SEQ ID NO: 1017372 - RNA, 19 nt, Human
auaaggcaggaggaaauuu

SEQ ID NO: 1017373 - RNA, 20 nt, Human
uccaugaguuagagacuaua

SEQ ID NO: 1017374 - RNA, 22 nt, Human
ccugggucacucaggcaggcgg

SEQ ID NO: 1017375 - RNA, 23 nt, Human
auacauacagucuuacugacuuu

SEQ ID NO: 1017376 - RNA, 22 nt, Human
caguguggagggagagagccug

SEQ ID NO: 1017377 - RNA, 22 nt, Human
aguaacaagugccaacguuaga

SEQ ID NO: 1017378 - RNA, 22 nt, Human
auaacuuagaguaggcaaaagu

SEQ ID NO: 1017379 - RNA, 22 nt, Human
uuuuguuguaauauaccuaucc

SEQ ID NO: 1017380 - RNA, 22 nt, Human
uggggagugaugccucggauaa

SEQ ID NO: 1017381 - RNA, 22 nt, Human
ugggagcaggaagcaggaagua

SEQ ID NO: 1017382 - RNA, 17 nt, Human
ugguggcuggagucagg

SEQ ID NO: 1017383 - RNA, 22 nt, Human
ucauuuguucaucugcucuucu

SEQ ID NO: 1017384 - RNA, 22 nt, Human
gcaagcaagcagguagagcuga

SEQ ID NO: 1017385 - RNA, 22 nt, Human
caguggcagagaacagagaccu

SEQ ID NO: 1017386 - RNA, 22 nt, Human
cccuccccacaaagcuucacac

SEQ ID NO: 1017387 - RNA, 22 nt, Human
uguauauucugccuaaaagcuu

SEQ ID NO: 1017388 - RNA, 22 nt, Human
aagcugccugggaggaagggcu

SEQ ID NO: 1017389 - RNA, 22 nt, Human
cagagccaaaccucagggcccg

SEQ ID NO: 1017390 - RNA, 22 nt, Human
gcccuuccaacccagagggcaa

SEQ ID NO: 1017391 - RNA, 22 nt, Human
ucugucacuauuggccagaaca

SEQ ID NO: 1017392 - RNA, 22 nt, Human
uccuugggaaaucacuagcacu

SEQ ID NO: 1017393 - RNA, 20 nt, Human
gcccuggagccuuguccugg

SEQ ID NO: 1017394 - RNA, 22 nt, Human
gaaaucugaacucuguauccuu

SEQ ID NO: 1017395 - RNA, 22 nt, Human
uuucauguuuauggaaaaugag

SEQ ID NO: 1017396 - RNA, 22 nt, Human
uuaguuuucccaucuuuauggu

SEQ ID NO: 1017397 - RNA, 22 nt, Human
auuucaguguugguuagcaagc

SEQ ID NO: 1017398 - RNA, 21 nt, Human
uuacaaagcaagugcuguguc

SEQ ID NO: 1017399 - RNA, 22 nt, Human
aggcucagauucacauuugguu

SEQ ID NO: 1017400 - RNA, 22 nt, Human
aauaacaggcucaucagaugcu

SEQ ID NO: 1017401 - RNA, 22 nt, Human
cagagcaggcccacugcccucc

SEQ ID NO: 1017402 - RNA, 18 nt, Human
cucaccauucugcccaau

SEQ ID NO: 1017403 - RNA, 23 nt, Human
aggcccugccugucccucuuuuu

SEQ ID NO: 1017404 - RNA, 22 nt, Human
gccugcuguuaacugcaggaau

SEQ ID NO: 1017405 - RNA, 18 nt, Human
guccugagcucugcugua

SEQ ID NO: 1017406 - RNA, 22 nt, Human
ugagccuguccugugcauguga

SEQ ID NO: 1017407 - RNA, 19 nt, Human
uucacauuggaagaaguag

SEQ ID NO: 1017408 - RNA, 22 nt, Human
acaguaaaaagccuuagaauuu

SEQ ID NO: 1017409 - RNA, 22 nt, Human
ccucugcugcuguugagcaccg

SEQ ID NO: 1017410 - RNA, 22 nt, Human
uacccaggagaaacagcagggc

SEQ ID NO: 1017411 - RNA, 22 nt, Human
uucuucaacaaggacacuguua

SEQ ID NO: 1017412 - RNA, 22 nt, Human
aucuggcuuucuuaaugacuua

SEQ ID NO: 1017413 - RNA, 22 nt, Human
uccauggguagcccugguugag

SEQ ID NO: 1017414 - RNA, 22 nt, Human
gagggcaguagccucguacccu

SEQ ID NO: 1017415 - RNA, 22 nt, Human
cuugaaagucacaugcagcccu

SEQ ID NO: 1017416 - RNA, 22 nt, Human
uggcucaguuucaguccugguu

SEQ ID NO: 1017417 - RNA, 23 nt, Human
gccuggagaaaagcugcaguuca

SEQ ID NO: 1017418 - RNA, 22 nt, Human
aguaggaggcgggagcaugaag

SEQ ID NO: 1017419 - RNA, 22 nt, Human
ggagcugcauuuagggagccuu

SEQ ID NO: 1017420 - RNA, 22 nt, Human
ggagccagcagggugacacuga

SEQ ID NO: 1017421 - RNA, 22 nt, Human
ucccagagugagccaggggcag

SEQ ID NO: 1017422 - RNA, 22 nt, Human
uccagccacucagcagggauug

SEQ ID NO: 1017423 - RNA, 18 nt, Human
cccacggugcuguagggc

SEQ ID NO: 1017424 - RNA, 19 nt, Human
guggccagggcaggggcug

SEQ ID NO: 1017425 - RNA, 22 nt, Human
cagucccaucucccagguggcu

SEQ ID NO: 1017426 - RNA, 22 nt, Human
cauugcuguuaauugucucuag

SEQ ID NO: 1017427 - RNA, 22 nt, Human
uggcuaggcuccaagagcugga

SEQ ID NO: 1017428 - RNA, 20 nt, Human
caggaggcaaggucaagguc

SEQ ID NO: 1017429 - RNA, 22 nt, Human
aggcacaguuucauccccgggc

SEQ ID NO: 1017430 - RNA, 22 nt, Human
ccugggaggcuguuuccagccu

SEQ ID NO: 1017431 - RNA, 22 nt, Human
cacauuucugugagucaauauu

SEQ ID NO: 1017432 - RNA, 22 nt, Human
uugauuucuauucagauguaga

SEQ ID NO: 1017433 - RNA, 18 nt, Human
aggagccuuugcacugga

SEQ ID NO: 1017434 - RNA, 23 nt, Human
agacagaggcugaggcuggccgc

SEQ ID NO: 1017435 - RNA, 22 nt, Human
ucacugcucagucuguacuaca

SEQ ID NO: 1017436 - RNA, 19 nt, Human
uuugaaagaguuuuauugg

SEQ ID NO: 1017437 - RNA, 22 nt, Human
cagcacuggggggauucggagc

SEQ ID NO: 1017438 - RNA, 22 nt, Human
auugaaagguuuugagcagaua

SEQ ID NO: 1017439 - RNA, 22 nt, Human
agucacaguuccuacccaguaa

SEQ ID NO: 1017440 - RNA, 22 nt, Human
aggagagucuugagucacuggu

SEQ ID NO: 1017441 - RNA, 19 nt, Human
ggcucucuuaaagcuguuu

SEQ ID NO: 1017442 - RNA, 22 nt, Human
aaaaaugucauuauggaacuga

SEQ ID NO: 1017443 - RNA, 22 nt, Human
gcucccagaaccaaggcugggg

SEQ ID NO: 1017444 - RNA, 22 nt, Human
ccucagagguuuucauucugua

SEQ ID NO: 1017445 - RNA, 22 nt, Human
guccucaggaaagcagauaaca

SEQ ID NO: 1017446 - RNA, 22 nt, Human
ggcaguggcuccucucuacucc

SEQ ID NO: 1017447 - RNA, 22 nt, Human
gcagggaggaagagaugcuucc

SEQ ID NO: 1017448 - RNA, 22 nt, Human
uaaaacuuaacuauccagauua

SEQ ID NO: 1017449 - RNA, 22 nt, Human
cuugggagacacaagaagacau

SEQ ID NO: 1017450 - RNA, 22 nt, Human
aagagcauauuaauaguggaga

SEQ ID NO: 1017451 - RNA, 22 nt, Human
ugggcagcagcaaagccagacu

SEQ ID NO: 1017452 - RNA, 22 nt, Human
uucacaggauauaugugcaggg

SEQ ID NO: 1017453 - RNA, 22 nt, Human
aggguggcaguuacuggagcaa

SEQ ID NO: 1017454 - RNA, 22 nt, Human
guaaaguucuauuugaauuuag

SEQ ID NO: 1017455 - RNA, 19 nt, Human
ugccugucaguagaucuca

SEQ ID NO: 1017456 - RNA, 22 nt, Human
uugcucuguaauaaucuggggu

SEQ ID NO: 1017457 - RNA, 22 nt, Human
ucugggagccaugccuuggagu

SEQ ID NO: 1017458 - RNA, 22 nt, Human
guuacacaggaaaacauuagca

SEQ ID NO: 1017459 - RNA, 22 nt, Human
uccaggcauagaaggcacgcac

SEQ ID NO: 1017460 - RNA, 22 nt, Human
uguaugaaaaggaauagauuga

SEQ ID NO: 1017461 - RNA, 18 nt, Human
agcuggggccucuggucc

SEQ ID NO: 1017462 - RNA, 22 nt, Human
gaaagaagcuuuagauggcuau

SEQ ID NO: 1017463 - RNA, 22 nt, Human
cucugggaccauggcaagugcg

SEQ ID NO: 1017464 - RNA, 22 nt, Human
gcagggcucaacaggacacccc

SEQ ID NO: 1017465 - RNA, 22 nt, Human
ugggagcaaaugacugggagau

SEQ ID NO: 1017466 - RNA, 20 nt, Human
ucagagucaucaaagauggu

SEQ ID NO: 1017467 - RNA, 22 nt, Human
ccuguucacugcacaguuuccg

SEQ ID NO: 1017468 - RNA, 20 nt, Human
caagcccucuuuagccugcc

SEQ ID NO: 1017469 - RNA, 19 nt, Human
ccuggcccugcugcgcggg

SEQ ID NO: 1017470 - RNA, 22 nt, Human
agcaccuugcucuuggccuucc

SEQ ID NO: 1017471 - RNA, 22 nt, Human
caucuggcuagcuaucauugug

SEQ ID NO: 1017472 - RNA, 22 nt, Human
ccagggcacuuaggcccagccc

SEQ ID NO: 1017473 - RNA, 22 nt, Human
cacauggggcgcugcauuggcc

SEQ ID NO: 1017474 - RNA, 22 nt, Human
ugggaccugcucuuggaaugag

SEQ ID NO: 1017475 - RNA, 22 nt, Human
ucaaggcuaaacuuucagagua

SEQ ID NO: 1017476 - RNA, 22 nt, Human
gagcugcuucugugugccgggu

SEQ ID NO: 1017477 - RNA, 22 nt, Human
ccaggcugagcaugauuggagc

SEQ ID NO: 1017478 - RNA, 22 nt, Human
ugaaaucugcaugcaaaguccu

SEQ ID NO: 1017479 - RNA, 22 nt, Human
ucugggugcccuuugcucuguu

SEQ ID NO: 1017480 - RNA, 22 nt, Human
aggcuccuugcucacaggcuca

SEQ ID NO: 1017481 - RNA, 22 nt, Human
uucuaucauacuugaauacauu

SEQ ID NO: 1017482 - RNA, 22 nt, Human
ucagaagcugguguccuuugaa

SEQ ID NO: 1017483 - RNA, 21 nt, Human
ccuguucacagaucuguaacu

SEQ ID NO: 1017484 - RNA, 22 nt, Human
acagggccauuaucuguucuag

SEQ ID NO: 1017485 - RNA, 22 nt, Human
aauacuauguugugacacauga

SEQ ID NO: 1017486 - RNA, 22 nt, Human
cccaggcaucccauuaaggagc

SEQ ID NO: 1017487 - RNA, 22 nt, Human
ucagccugcgucauggugacac

SEQ ID NO: 1017488 - RNA, 22 nt, Human
cccagccagccucuucccauau

SEQ ID NO: 1017489 - RNA, 22 nt, Human
uacaaagucaccagcuucuugc

SEQ ID NO: 1017490 - RNA, 19 nt, Human
cugucaggggcuggauguu

SEQ ID NO: 1017491 - RNA, 22 nt, Human
acauuaucccuggcacaacugc

SEQ ID NO: 1017492 - RNA, 22 nt, Human
gaucuucuauguaaugaagugu

SEQ ID NO: 1017493 - RNA, 22 nt, Human
aagauuucagaguuugggggaa

SEQ ID NO: 1017494 - RNA, 22 nt, Human
ugaaagcacucacuucugcucu

SEQ ID NO: 1017495 - RNA, 18 nt, Human
uuucacagauucaugacu

SEQ ID NO: 1017496 - RNA, 22 nt, Human
gcucugagccgggggccugucc

SEQ ID NO: 1017497 - RNA, 22 nt, Human
ggcuuugccuggaauuuccuug

SEQ ID NO: 1017498 - RNA, 22 nt, Human
aagaauacguaucaacaauggu

SEQ ID NO: 1017499 - RNA, 22 nt, Human
uagauaaauuagaaaguuuacu

SEQ ID NO: 1017500 - RNA, 22 nt, Human
guguaucaaagcacagacuuca

SEQ ID NO: 1017501 - RNA, 22 nt, Human
auaacagauacucucugugagg

SEQ ID NO: 1017502 - RNA, 22 nt, Human
cacaggcucuucucacuugauu

SEQ ID NO: 1017503 - RNA, 22 nt, Human
ugggggugugccagggaccucc

SEQ ID NO: 1017504 - RNA, 22 nt, Human
uuccucucucuugccagaaugu

SEQ ID NO: 1017505 - RNA, 22 nt, Human
ucuuuacaaucuaagcauaguu

SEQ ID NO: 1017506 - RNA, 18 nt, Human
gccugccuagagcuugcc

SEQ ID NO: 1017507 - RNA, 22 nt, Human
uauaacaguuuaggugguguca

SEQ ID NO: 1017508 - RNA, 22 nt, Human
uguuagaaauuauuaguaauau

SEQ ID NO: 1017509 - RNA, 22 nt, Human
aucaaaguccaucagaagguag

SEQ ID NO: 1017510 - RNA, 22 nt, Human
ucauccaguaugacuggugucu

SEQ ID NO: 1017511 - RNA, 21 nt, Human
acagugugcuucucucccucc

SEQ ID NO: 1017512 - RNA, 22 nt, Human
ggcuguggcagcuggaaguggu

SEQ ID NO: 1017513 - RNA, 22 nt, Human
guguggcuaccucagaggagca

SEQ ID NO: 1017514 - RNA, 22 nt, Human
acauuucuggaguuucucaaca

SEQ ID NO: 1017515 - RNA, 22 nt, Human
ccucacuuuccuuucuccuggg

SEQ ID NO: 1017516 - RNA, 22 nt, Human
aaguguguauuguuuaugcugc

SEQ ID NO: 1017517 - RNA, 22 nt, Human
uuugacagacauuuacuacauu

SEQ ID NO: 1017518 - RNA, 22 nt, Human
uacauggugguggcacuugacu

SEQ ID NO: 1017519 - RNA, 22 nt, Human
uuucagaaaacuuaucaucagu

SEQ ID NO: 1017520 - RNA, 22 nt, Human
acugucuguccugcucuccgug

SEQ ID NO: 1017521 - RNA, 22 nt, Human
acaaaccagcuuaagcaagaug

SEQ ID NO: 1017522 - RNA, 22 nt, Human
uguggcucucaugcacucccag

SEQ ID NO: 1017523 - RNA, 22 nt, Human
uuugaaaggugucgagaugugu

SEQ ID NO: 1017524 - RNA, 22 nt, Human
uccuucaguuaaagaucucaca

SEQ ID NO: 1017525 - RNA, 22 nt, Human
augcaucuauucccaagggcag

SEQ ID NO: 1017526 - RNA, 22 nt, Human
ugagccaggcuccaugccaccu

SEQ ID NO: 1017527 - RNA, 22 nt, Human
gcuguccucuuggacucagggc

SEQ ID NO: 1017528 - RNA, 22 nt, Human
cccagccuggugcacugugggg

SEQ ID NO: 1017529 - RNA, 22 nt, Human
uaacagaaauuuuaguuagggg

SEQ ID NO: 1017530 - RNA, 22 nt, Human
uggccucucuaccaggcagccu

SEQ ID NO: 1017531 - RNA, 23 nt, Human
uugcuuucaucaugagaugcucc

SEQ ID NO: 1017532 - RNA, 22 nt, Human
ugcuagaauaccuaccuggagg

SEQ ID NO: 1017533 - RNA, 22 nt, Human
ggggcccagcaccccuccucgc

SEQ ID NO: 1017534 - RNA, 22 nt, Human
gcagccccaggagacgcccagg

SEQ ID NO: 1017535 - RNA, 22 nt, Human
cuggccgguauuugccucuggg

SEQ ID NO: 1017536 - RNA, 22 nt, Human
gcagcuuuguaaaguaugaagc

SEQ ID NO: 1017537 - RNA, 22 nt, Human
ggcugcaggcaggguauccacu

SEQ ID NO: 1017538 - RNA, 22 nt, Human
gauuuuauauggcauacugugg

SEQ ID NO: 1017539 - RNA, 22 nt, Human
acaaaguuauucuuucagagga

SEQ ID NO: 1017540 - RNA, 22 nt, Human
uacccaggggcugagcagaggu

SEQ ID NO: 1017541 - RNA, 22 nt, Human
gggcccuggggccugauuugca

SEQ ID NO: 1017542 - RNA, 22 nt, Human
aaguucuacuguggguaaaaug

SEQ ID NO: 1017543 - RNA, 22 nt, Human
ccagggugggguccaggaacca

SEQ ID NO: 1017544 - RNA, 22 nt, Human
aacaugaaaguugcuaagugca

SEQ ID NO: 1017545 - RNA, 22 nt, Human
ucaggagcugcacugggcccac

SEQ ID NO: 1017546 - RNA, 22 nt, Human
gcaaugauauugaagugaugaa

SEQ ID NO: 1017547 - RNA, 22 nt, Human
gccucaggacuggcauacucau

SEQ ID NO: 1017548 - RNA, 22 nt, Human
uguagcucuccagccagcaagg

SEQ ID NO: 1017549 - RNA, 22 nt, Human
uuggaauucaaguuguagcuua

SEQ ID NO: 1017550 - RNA, 22 nt, Human
cagacagggaccucgcuccaga

SEQ ID NO: 1017551 - RNA, 22 nt, Human
ggagcuguugcgcaugcgcucg

SEQ ID NO: 1017552 - RNA, 22 nt, Human
cagagcagguaucuuuggugaa

SEQ ID NO: 1017553 - RNA, 22 nt, Human
gggccccaaaaugccaggcucu

SEQ ID NO: 1017554 - RNA, 22 nt, Human
uucugucaaaugccaguagaga

SEQ ID NO: 1017555 - RNA, 22 nt, Human
aggaggcccuagagcucuagag

SEQ ID NO: 1017556 - RNA, 22 nt, Human
gauaugaaguggcauugugaag

SEQ ID NO: 1017557 - RNA, 22 nt, Human
gcaggagagccagcaggcuucc

SEQ ID NO: 1017558 - RNA, 20 nt, Human
agugucuggugcagggccuc

SEQ ID NO: 1017559 - RNA, 23 nt, Human
gccucuggagccccagugcucag

SEQ ID NO: 1017560 - RNA, 22 nt, Human
augcaguaaauguucuaguuug

SEQ ID NO: 1017561 - RNA, 22 nt, Human
ggcugccugcucaggugcggcg

SEQ ID NO: 1017562 - RNA, 22 nt, Human
aggcccuggguuagggcccacu

SEQ ID NO: 1017563 - RNA, 22 nt, Human
gagugugucggucagcguggcg

SEQ ID NO: 1017564 - RNA, 21 nt, Human
ggggcagagcuaggcccugca

SEQ ID NO: 1017565 - RNA, 22 nt, Human
cugugccuuuguagcugugccu

SEQ ID NO: 1017566 - RNA, 22 nt, Human
auuguauuagcacaauacaauu

SEQ ID NO: 1017567 - RNA, 22 nt, Human
ugccucugaggaagauuguguu

SEQ ID NO: 1017568 - RNA, 22 nt, Human
uacaaguaaauuguagauacca

SEQ ID NO: 1017569 - RNA, 22 nt, Human
agaagaaaugaggccguucugc

SEQ ID NO: 1017570 - RNA, 22 nt, Human
uagccgggugugguggaacucc

SEQ ID NO: 1017571 - RNA, 22 nt, Human
aucuggcugcugugcuuaagcu

SEQ ID NO: 1017572 - RNA, 22 nt, Human
gcaggcuggaggcuguucuggg

SEQ ID NO: 1017573 - RNA, 22 nt, Human
aauuuguuaaaagugagugaca

SEQ ID NO: 1017574 - RNA, 22 nt, Human
ugagccugguugcagugucugg

SEQ ID NO: 1017575 - RNA, 22 nt, Human
aggggccuggacauggacgcgc

SEQ ID NO: 1017576 - RNA, 19 nt, Human
uugaaagauuagcuuucua

SEQ ID NO: 1017577 - RNA, 22 nt, Human
uaaaguuuggcagacaauaaca

SEQ ID NO: 1017578 - RNA, 22 nt, Human
aaguugaaugcguacgugacau

SEQ ID NO: 1017579 - RNA, 22 nt, Human
auauucacugagcauaaagcca

SEQ ID NO: 1017580 - RNA, 22 nt, Human
aaauaaguaguuuaguguugug

SEQ ID NO: 1017581 - RNA, 22 nt, Human
aacauacagugagcaguggacu

SEQ ID NO: 1017582 - RNA, 22 nt, Human
ggaggccaaggcgggcggauca

SEQ ID NO: 1017583 - RNA, 22 nt, Human
ugaugggacugccagcugcuga

SEQ ID NO: 1017584 - RNA, 22 nt, Human
aggccagguuccucaaucuuga

SEQ ID NO: 1017585 - RNA, 22 nt, Human
caugucuggguauaugcauaug

SEQ ID NO: 1017586 - RNA, 22 nt, Human
acauuuuaauaugcuuagugug

SEQ ID NO: 1017587 - RNA, 22 nt, Human
uccucacagucaacacuuugag

SEQ ID NO: 1017588 - RNA, 22 nt, Human
ccaggcagagggaauagcaagu

SEQ ID NO: 1017589 - RNA, 22 nt, Human
agaggccaucugcucugugggg

SEQ ID NO: 1017590 - RNA, 22 nt, Human
ccugguggccuucagcccacaa

SEQ ID NO: 1017591 - RNA, 22 nt, Human
acugcuuacaaaaggaaagaau

SEQ ID NO: 1017592 - RNA, 22 nt, Human
cagcugcuguuacugcuuauua

SEQ ID NO: 1017593 - RNA, 22 nt, Human
gccagcagggcccaaaugcugg

SEQ ID NO: 1017594 - RNA, 22 nt, Human
ucuggcucaggucagacaggga

SEQ ID NO: 1017595 - RNA, 22 nt, Human
acaagagacaagagguucuucu

SEQ ID NO: 1017596 - RNA, 22 nt, Human
gggggcuggaauauccaucaac

SEQ ID NO: 1017597 - RNA, 22 nt, Human
cuggagcuggcuuccuuccacu

SEQ ID NO: 1017598 - RNA, 22 nt, Human
ccuggagauuauuugguccaau

SEQ ID NO: 1017599 - RNA, 22 nt, Human
gccuggaguagcauggcaagcc

SEQ ID NO: 1017600 - RNA, 22 nt, Human
aaagacuuggcuuaugauuugc

SEQ ID NO: 1017601 - RNA, 23 nt, Human
uccaggcaugagcucuggaugga

SEQ ID NO: 1017602 - RNA, 22 nt, Human
ucaggcugagaaaaucuggacc

SEQ ID NO: 1017603 - RNA, 22 nt, Human
cuuggcagagggcugggcucag

SEQ ID NO: 1017604 - RNA, 22 nt, Human
agccuccaaaugucaggucccg

SEQ ID NO: 1017605 - RNA, 22 nt, Human
ggaggccauaguuugggaguca

SEQ ID NO: 1017606 - RNA, 22 nt, Human
gagggagugccagagggccagc

SEQ ID NO: 1017607 - RNA, 22 nt, Human
agcuuuaugggagcuuagauaa

SEQ ID NO: 1017608 - RNA, 22 nt, Human
ucagaacauuuaaaaagugguu

SEQ ID NO: 1017609 - RNA, 22 nt, Human
agcuuuauucaugauuucaggg

SEQ ID NO: 1017610 - RNA, 22 nt, Human
guggccucugugcuccugccua

SEQ ID NO: 1017611 - RNA, 22 nt, Human
uucucuagguuuuagaugaaga

SEQ ID NO: 1017612 - RNA, 22 nt, Human
acugggaguucuccaugucccu

SEQ ID NO: 1017613 - RNA, 22 nt, Human
acacauauauacauauuugugc

SEQ ID NO: 1017614 - RNA, 22 nt, Human
ugcaucuuacguuuugaaaggg

SEQ ID NO: 1017615 - RNA, 23 nt, Human
uggcccugaaucuguccuggagg

SEQ ID NO: 1017616 - RNA, 22 nt, Human
cauuuguauguuccuccuuagg

SEQ ID NO: 1017617 - RNA, 22 nt, Human
agacagcaggggagucugguuu

SEQ ID NO: 1017618 - RNA, 19 nt, Human
gugcuuuuuaagagcucag

SEQ ID NO: 1017619 - RNA, 22 nt, Human
cugggcacaggggagcagaguc

SEQ ID NO: 1017620 - RNA, 22 nt, Human
ggccucuguuuggagccaggau

SEQ ID NO: 1017621 - RNA, 22 nt, Human
uuuaaaaucagaugggaguugg

SEQ ID NO: 1017622 - RNA, 22 nt, Human
gucccagggagguucagggcuu

SEQ ID NO: 1017623 - RNA, 18 nt, Human
acagaacucaggggcacc

SEQ ID NO: 1017624 - RNA, 21 nt, Human
gccugcagaccccaccaggcu

SEQ ID NO: 1017625 - RNA, 19 nt, Human
aggcucugagcuccuggag

SEQ ID NO: 1017626 - RNA, 22 nt, Human
ugccugggggacuaaggccaaa

SEQ ID NO: 1017627 - RNA, 22 nt, Human
ucaggauguccaaaauccagcc

SEQ ID NO: 1017628 - RNA, 22 nt, Human
caggccuggguucaaaucccuu

SEQ ID NO: 1017629 - RNA, 22 nt, Human
ggauggcagucugcaugagaaa

SEQ ID NO: 1017630 - RNA, 22 nt, Human
uuuauuaugauggacaccuucg

SEQ ID NO: 1017631 - RNA, 22 nt, Human
uaggacaggugaggggcugugg

SEQ ID NO: 1017632 - RNA, 22 nt, Human
ugaaacauuugaugaucuuugg

SEQ ID NO: 1017633 - RNA, 22 nt, Human
uaguuaggguucugcagagaca

SEQ ID NO: 1017634 - RNA, 22 nt, Human
gccugccuguuggcugaggugc

SEQ ID NO: 1017635 - RNA, 22 nt, Human
acagggccucagccagggcaga

SEQ ID NO: 1017636 - RNA, 22 nt, Human
gggacuggaacuacuggugcag

SEQ ID NO: 1017637 - RNA, 22 nt, Human
agcuccuccugugccaggccag

SEQ ID NO: 1017638 - RNA, 22 nt, Human
gagacugcauuguccaaggguu

SEQ ID NO: 1017639 - RNA, 22 nt, Human
cuguccuggagggcauaggacg

SEQ ID NO: 1017640 - RNA, 22 nt, Human
agauuucccucuuguauuugca

SEQ ID NO: 1017641 - RNA, 22 nt, Human
ccagggcaggggcuggaguuca

SEQ ID NO: 1017642 - RNA, 22 nt, Human
cacugcagcaccaugcagggcu

SEQ ID NO: 1017643 - RNA, 22 nt, Human
aggcacugagaggcuguguugc

SEQ ID NO: 1017644 - RNA, 22 nt, Human
uuucaaacauaucuucauuacu

SEQ ID NO: 1017645 - RNA, 22 nt, Human
cugagggccuuggcuccugccc

SEQ ID NO: 1017646 - RNA, 22 nt, Human
cugcuguguggugaaacucagu

SEQ ID NO: 1017647 - RNA, 22 nt, Human
cauugcucaggcccagcaggaa

SEQ ID NO: 1017648 - RNA, 22 nt, Human
ugucuucaguaaaauacacuau

SEQ ID NO: 1017649 - RNA, 20 nt, Human
ucugucucugagcuagacuu

SEQ ID NO: 1017650 - RNA, 19 nt, Human
uuuuccuucuauauguuuc

SEQ ID NO: 1017651 - RNA, 19 nt, Human
cugagcagcggcagcacuu

SEQ ID NO: 1017652 - RNA, 22 nt, Human
cagggcaguuugugccuaugag

SEQ ID NO: 1017653 - RNA, 22 nt, Human
ggaggaccccagcagcucccca

SEQ ID NO: 1017654 - RNA, 22 nt, Human
gccugcagcugcuuccacacac

SEQ ID NO: 1017655 - RNA, 22 nt, Human
uguuuucagucauauagcaggu

SEQ ID NO: 1017656 - RNA, 20 nt, Human
augugucuguaaacaacucu

SEQ ID NO: 1017657 - RNA, 22 nt, Human
ggcaaggccugcagcucagugu

SEQ ID NO: 1017658 - RNA, 22 nt, Human
uauaauuuggggaaaguggugu

SEQ ID NO: 1017659 - RNA, 22 nt, Human
cacugcucgcugcagcauggcc

SEQ ID NO: 1017660 - RNA, 22 nt, Human
uaguccagccuuggguguagcc

SEQ ID NO: 1017661 - RNA, 22 nt, Human
ccugugggaggggccuggcgcg

SEQ ID NO: 1017662 - RNA, 22 nt, Human
ucugcagcuucuugccagagag

SEQ ID NO: 1017663 - RNA, 22 nt, Human
caagggcucacggucugcuggg

SEQ ID NO: 1017664 - RNA, 22 nt, Human
ugucucagaauggcucauaaua

SEQ ID NO: 1017665 - RNA, 22 nt, Human
aaaugcagauugucauucagga

SEQ ID NO: 1017666 - RNA, 22 nt, Human
cagaggugcauacaggucauua

SEQ ID NO: 1017667 - RNA, 22 nt, Human
caggccugggcuucggggcuga

SEQ ID NO: 1017668 - RNA, 22 nt, Human
uuaggaaaaucaugagagauga

SEQ ID NO: 1017669 - RNA, 22 nt, Human
cagggcagagggaaacuccuuu

SEQ ID NO: 1017670 - RNA, 22 nt, Human
cuguuuaucccuuuggucagca

SEQ ID NO: 1017671 - RNA, 22 nt, Human
acagaccaaguuuccagcaggu

SEQ ID NO: 1017672 - RNA, 22 nt, Human
ccucuggggugagugggccacu

SEQ ID NO: 1017673 - RNA, 22 nt, Human
ucagagaguuacacaaauuguu

SEQ ID NO: 1017674 - RNA, 22 nt, Human
acuugggucaaguagcucacag

SEQ ID NO: 1017675 - RNA, 22 nt, Human
ccugcccagcuucaccucaggc

SEQ ID NO: 1017676 - RNA, 22 nt, Human
aggucauuccuugucuucuugc

SEQ ID NO: 1017677 - RNA, 22 nt, Human
gcuccucuucucccacugaaug

SEQ ID NO: 1017678 - RNA, 22 nt, Human
gaugccugcauuucaggagagu

SEQ ID NO: 1017679 - RNA, 22 nt, Human
agcccuagagcuggaggucagu

SEQ ID NO: 1017680 - RNA, 22 nt, Human
uuuuuccuagugcuuucuggua

SEQ ID NO: 1017681 - RNA, 22 nt, Human
caccaucagcagcaggugucaa

SEQ ID NO: 1017682 - RNA, 22 nt, Human
uauuuauaaucugccaaagaga

SEQ ID NO: 1017683 - RNA, 22 nt, Human
uuaguaaauaaagucuacuuuc

SEQ ID NO: 1017684 - RNA, 22 nt, Human
ucuggcucauacaagccugcaa

SEQ ID NO: 1017685 - RNA, 20 nt, Human
uuucuugucggcuguugcug

SEQ ID NO: 1017686 - RNA, 22 nt, Human
ugccugucuuggaguccuggcc

SEQ ID NO: 1017687 - RNA, 22 nt, Human
uccuucagccaugggcucucca

SEQ ID NO: 1017688 - RNA, 22 nt, Human
auuugcaugcuucuauugugaa

SEQ ID NO: 1017689 - RNA, 22 nt, Human
aucuuucuccauauacaucuuu

SEQ ID NO: 1017690 - RNA, 22 nt, Human
ucagggcauguauguuucuuua

SEQ ID NO: 1017691 - RNA, 22 nt, Human
gaggggcuggcacgauggcugc

SEQ ID NO: 1017692 - RNA, 22 nt, Human
uauuccaguucaccuuuucauc

SEQ ID NO: 1017693 - RNA, 17 nt, Human
uagcugccccgaaugcu

SEQ ID NO: 1017694 - RNA, 22 nt, Human
uuagauaauguuauuguaauuu

SEQ ID NO: 1017695 - RNA, 22 nt, Human
gucccuggaauggacucugcgc

SEQ ID NO: 1017696 - RNA, 22 nt, Human
gccaggcuggaaagaacagaca

SEQ ID NO: 1017697 - RNA, 22 nt, Human
aaggacagaaacagauugcugg

SEQ ID NO: 1017698 - RNA, 22 nt, Human
ucugggaacacacgucacuuca

SEQ ID NO: 1017699 - RNA, 22 nt, Human
aggguccaucaaggacugcaca

SEQ ID NO: 1017700 - RNA, 22 nt, Human
augcauaauguauguauugacu

SEQ ID NO: 1017701 - RNA, 22 nt, Human
accagagcuggcucugagcacc

SEQ ID NO: 1017702 - RNA, 22 nt, Human
ugcuuuauguggcugauacuca

SEQ ID NO: 1017703 - RNA, 22 nt, Human
cucuccaggacuuuggcccaau

SEQ ID NO: 1017704 - RNA, 22 nt, Human
cagcuggcauaccugggcccgg

SEQ ID NO: 1017705 - RNA, 22 nt, Human
uggcagagucugggcuugggca

SEQ ID NO: 1017706 - RNA, 21 nt, Human
ggcagccucuguggaagggga

SEQ ID NO: 1017707 - RNA, 22 nt, Human
ccagccagucccgcaugaccgc

SEQ ID NO: 1017708 - RNA, 22 nt, Human
cccagcuugucugauucagccu

SEQ ID NO: 1017709 - RNA, 22 nt, Human
ccucuugccaaucagcuacaga

SEQ ID NO: 1017710 - RNA, 22 nt, Human
agccucugugacucacagguca

SEQ ID NO: 1017711 - RNA, 22 nt, Human
cucuggaaaaccacuagcagga

SEQ ID NO: 1017712 - RNA, 22 nt, Human
auuguuaugaaaauaagauguu

SEQ ID NO: 1017713 - RNA, 22 nt, Human
ucaaagcaucagucaauuuagg

SEQ ID NO: 1017714 - RNA, 22 nt, Human
aucuuugaagaggacuugaagu

SEQ ID NO: 1017715 - RNA, 22 nt, Human
guaagagcacugucuccugcug

SEQ ID NO: 1017716 - RNA, 22 nt, Human
aggagcugcagauucugccuug

SEQ ID NO: 1017717 - RNA, 22 nt, Human
cacccugggcugggccuguuaa

SEQ ID NO: 1017718 - RNA, 22 nt, Human
agcagagcgccugcucagaggg

SEQ ID NO: 1017719 - RNA, 22 nt, Human
ccugggcaacauagugagaccu

SEQ ID NO: 1017720 - RNA, 22 nt, Human
cagaauuugaaguaauauucca

SEQ ID NO: 1017721 - RNA, 22 nt, Human
agccuauuccaggaugagcuca

SEQ ID NO: 1017722 - RNA, 22 nt, Human
gacagcauggugucuguucagg

SEQ ID NO: 1017723 - RNA, 22 nt, Human
cugagcugggcucucuugaggg

SEQ ID NO: 1017724 - RNA, 22 nt, Human
uuacuuuggauggucaagaaag

SEQ ID NO: 1017725 - RNA, 22 nt, Human
uggcagcacuagguacugagcu

SEQ ID NO: 1017726 - RNA, 22 nt, Human
uccauggggcccaggaugagag

SEQ ID NO: 1017727 - RNA, 22 nt, Human
uccugcagguggaugauucucu

SEQ ID NO: 1017728 - RNA, 22 nt, Human
ugucuuuagagucacaaaacca

SEQ ID NO: 1017729 - RNA, 22 nt, Human
uuucaguuguccuguuaauagc

SEQ ID NO: 1017730 - RNA, 22 nt, Human
gcugucccgcugacuuccagcu

SEQ ID NO: 1017731 - RNA, 22 nt, Human
ugcucccagggacucuggcugg

SEQ ID NO: 1017732 - RNA, 22 nt, Human
uugacagcaaagauugugccua

SEQ ID NO: 1017733 - RNA, 22 nt, Human
aaaugcagauuuugaugcagca

SEQ ID NO: 1017734 - RNA, 22 nt, Human
cauggcagggcugugggcaggu

SEQ ID NO: 1017735 - RNA, 22 nt, Human
gagggaaagguuaauacaugau

SEQ ID NO: 1017736 - RNA, 22 nt, Human
uaacagaagagcaggcagcccu

SEQ ID NO: 1017737 - RNA, 22 nt, Human
acaggccacaguggagucucug

SEQ ID NO: 1017738 - RNA, 22 nt, Human
cuggcugggagcgagcugcuca

SEQ ID NO: 1017739 - RNA, 22 nt, Human
gcugcucuuuucagagaugaga

SEQ ID NO: 1017740 - RNA, 22 nt, Human
guauccuuugcggaaauuucua

SEQ ID NO: 1017741 - RNA, 22 nt, Human
gcuaggagauugagcucugaag

SEQ ID NO: 1017742 - RNA, 22 nt, Human
ccaggaagcggugagggcugcc

SEQ ID NO: 1017743 - RNA, 22 nt, Human
agcugguguccuccuggagcug

SEQ ID NO: 1017744 - RNA, 22 nt, Human
gugggagcuucaucaagcaguu

SEQ ID NO: 1017745 - RNA, 22 nt, Human
ugcugcuccugccuggcuccca

SEQ ID NO: 1017746 - RNA, 22 nt, Human
ucccagccugacagugcaucaa

SEQ ID NO: 1017747 - RNA, 22 nt, Human
aacucaguguguuucuuaguau

SEQ ID NO: 1017748 - RNA, 22 nt, Human
caguacuuuucuggcuuucuac

SEQ ID NO: 1017749 - RNA, 22 nt, Human
gcagcugccgugagcucacgcc

SEQ ID NO: 1017750 - RNA, 22 nt, Human
caauguguguguuuuucucaac

SEQ ID NO: 1017751 - RNA, 22 nt, Human
cuggagaggccccaagauauuu

SEQ ID NO: 1017752 - RNA, 22 nt, Human
ucugaggcuucagacuguacug

SEQ ID NO: 1017753 - RNA, 22 nt, Human
ccugcugggccugagcaaugag

SEQ ID NO: 1017754 - RNA, 22 nt, Human
acuuguguaacacagaaagaac

SEQ ID NO: 1017755 - RNA, 22 nt, Human
gggcacuguacacugugcaugg

SEQ ID NO: 1017756 - RNA, 22 nt, Human
cuuggcagauccaaaaaugaca

SEQ ID NO: 1017757 - RNA, 22 nt, Human
cccuggcaaaacacucucuuga

SEQ ID NO: 1017758 - RNA, 22 nt, Human
agcaugaaagcauaggacaguc

SEQ ID NO: 1017759 - RNA, 22 nt, Human
aggagcugagggagcgcccuug

SEQ ID NO: 1017760 - RNA, 22 nt, Human
aaaguuagacagcaucauuucu

SEQ ID NO: 1017761 - RNA, 22 nt, Human
uccagugguuugaaaggggugu

SEQ ID NO: 1017762 - RNA, 22 nt, Human
gagaggcuaugagguucugugu

SEQ ID NO: 1017763 - RNA, 23 nt, Human
gaauaguuuuagaaauuggagaa

SEQ ID NO: 1017764 - RNA, 22 nt, Human
gcaggggaguggcaggcccgga

SEQ ID NO: 1017765 - RNA, 22 nt, Human
uaguaucuauuaguaacaagag

SEQ ID NO: 1017766 - RNA, 22 nt, Human
auacuucuuugauguucacagg

SEQ ID NO: 1017767 - RNA, 22 nt, Human
aaaucugggagcagcucggcca

SEQ ID NO: 1017768 - RNA, 22 nt, Human
ccagcagacacacaggcguggg

SEQ ID NO: 1017769 - RNA, 22 nt, Human
gcugggagccccgagccagcgc

SEQ ID NO: 1017770 - RNA, 22 nt, Human
cacaggcuccggccuugcagcc

SEQ ID NO: 1017771 - RNA, 22 nt, Human
aaauuauuacaagcuaguuggc

SEQ ID NO: 1017772 - RNA, 22 nt, Human
caaaugcuacuaauaggcaagu

SEQ ID NO: 1017773 - RNA, 22 nt, Human
accacaggacccaugagucagu

SEQ ID NO: 1017774 - RNA, 19 nt, Human
auagucuuuccaauuauac

SEQ ID NO: 1017775 - RNA, 22 nt, Human
uuaucguacgcuucagaaauuu

SEQ ID NO: 1017776 - RNA, 22 nt, Human
ggaccugcucucccaguucucu

SEQ ID NO: 1017777 - RNA, 22 nt, Human
guuuuccugaaacugauggugu

SEQ ID NO: 1017778 - RNA, 22 nt, Human
uucaaacaaaacuguucccaua

SEQ ID NO: 1017779 - RNA, 22 nt, Human
gacauaauccuccucaccuacu

SEQ ID NO: 1017780 - RNA, 22 nt, Human
ugggggagauuagagcuucuua

SEQ ID NO: 1017781 - RNA, 22 nt, Human
uuuuaaucaugcuucuaugucc

SEQ ID NO: 1017782 - RNA, 22 nt, Human
aggcugccaaagcuucugucuc

SEQ ID NO: 1017783 - RNA, 23 nt, Human
cuguggcugaguccuguuggagu

SEQ ID NO: 1017784 - RNA, 22 nt, Human
uuucuucugagaucagggagaa

SEQ ID NO: 1017785 - RNA, 22 nt, Human
aucagcugaaaaacaggcagca

SEQ ID NO: 1017786 - RNA, 22 nt, Human
gaaaguuuauagguuauauaau

SEQ ID NO: 1017787 - RNA, 22 nt, Human
ucuuccucucuaauugaucaga

SEQ ID NO: 1017788 - RNA, 22 nt, Human
gucugaggaagaugcaggggga

SEQ ID NO: 1017789 - RNA, 22 nt, Human
agucucugccagcuuguccucu

SEQ ID NO: 1017790 - RNA, 22 nt, Human
cacugagcugauagaauuccag

SEQ ID NO: 1017791 - RNA, 23 nt, Human
gcugcagcuguggauguucucag

SEQ ID NO: 1017792 - RNA, 22 nt, Human
gguuggaggugggaauagcuag

SEQ ID NO: 1017793 - RNA, 22 nt, Human
ugggagcaccuugagggcagaa

SEQ ID NO: 1017794 - RNA, 22 nt, Human
gaagcagcugccagagaugucu

SEQ ID NO: 1017795 - RNA, 22 nt, Human
auaaggcagucacuggaauguu

SEQ ID NO: 1017796 - RNA, 22 nt, Human
cauuggaaugcauuugaagaga

SEQ ID NO: 1017797 - RNA, 22 nt, Human
aguugacauccauaacaggaag

SEQ ID NO: 1017798 - RNA, 22 nt, Human
cagugauggauauggagaaguc

SEQ ID NO: 1017799 - RNA, 22 nt, Human
ggagcuguaacgagccauugcu

SEQ ID NO: 1017800 - RNA, 22 nt, Human
cagggacugagauccagacugu

SEQ ID NO: 1017801 - RNA, 22 nt, Human
aaugcacacauuugguacugaa

SEQ ID NO: 1017802 - RNA, 22 nt, Human
auuauaaaccuuugaggguggg

SEQ ID NO: 1017803 - RNA, 22 nt, Human
augcugugucuagcaggaacac

SEQ ID NO: 1017804 - RNA, 22 nt, Human
cugcccugcccaggccuugggc

SEQ ID NO: 1017805 - RNA, 19 nt, Human
uggcagcauugguaccuug

SEQ ID NO: 1017806 - RNA, 22 nt, Human
gaacacaugauuauaaaugcua

SEQ ID NO: 1017807 - RNA, 22 nt, Human
uucagaaugugaccuuauuugg

SEQ ID NO: 1017808 - RNA, 22 nt, Human
cucaggaucgcuugcccuaggg

SEQ ID NO: 1017809 - RNA, 22 nt, Human
guucauuuuacuguaaauagca

SEQ ID NO: 1017810 - RNA, 22 nt, Human
acuggcucagaguuccuagaga

SEQ ID NO: 1017811 - RNA, 22 nt, Human
ccagagccugcugagccccauu

SEQ ID NO: 1017812 - RNA, 22 nt, Human
aacauaauguggccaaagucac

SEQ ID NO: 1017813 - RNA, 22 nt, Human
gcaguguuguuaaaagauuaga

SEQ ID NO: 1017814 - RNA, 22 nt, Human
uuuacauugcauuagguauuau

SEQ ID NO: 1017815 - RNA, 22 nt, Human
uauguacaucguugaauucaaa

SEQ ID NO: 1017816 - RNA, 22 nt, Human
ugcagaagcagagaguugccaa

SEQ ID NO: 1017817 - RNA, 22 nt, Human
uggcucaggccacuucuuuuau

SEQ ID NO: 1017818 - RNA, 22 nt, Human
caagaaauuucuuaagaacuaa

SEQ ID NO: 1017819 - RNA, 22 nt, Human
agcugccacagagccuggccag

SEQ ID NO: 1017820 - RNA, 22 nt, Human
agauggcaggcccugugggggu

SEQ ID NO: 1017821 - RNA, 22 nt, Human
ucucaggcuaccuugcacaagg

SEQ ID NO: 1017822 - RNA, 22 nt, Human
ggcuguggggggagccugcccg

SEQ ID NO: 1017823 - RNA, 22 nt, Human
gaagccaguacugugcucugca

SEQ ID NO: 1017824 - RNA, 22 nt, Human
aggugcuggagucugggcagga

SEQ ID NO: 1017825 - RNA, 22 nt, Human
caggagugucuccacacagcaa

SEQ ID NO: 1017826 - RNA, 23 nt, Human
ggaaagagaggaguugugcauag

SEQ ID NO: 1017827 - RNA, 22 nt, Human
uauuucagcaagaagaaugugg

SEQ ID NO: 1017828 - RNA, 22 nt, Human
aagccaagaguuaacuauuugu

SEQ ID NO: 1017829 - RNA, 22 nt, Human
cuggacuuuggcccaucugcca

SEQ ID NO: 1017830 - RNA, 22 nt, Human
ucauuucuccgaccugcugucc

SEQ ID NO: 1017831 - RNA, 22 nt, Human
aagggcagggaguuugugucua

SEQ ID NO: 1017832 - RNA, 22 nt, Human
cccaagcagggugcagaggcau

SEQ ID NO: 1017833 - RNA, 22 nt, Human
ggcugccuucccugagccccgg

SEQ ID NO: 1017834 - RNA, 22 nt, Human
aucugcuugaguuugaagucag

SEQ ID NO: 1017835 - RNA, 22 nt, Human
cugcucugaagccaggauucug

SEQ ID NO: 1017836 - RNA, 21 nt, Human
cagagguggccugaccucuga

SEQ ID NO: 1017837 - RNA, 22 nt, Human
gcauaugaucacgugugucggu

SEQ ID NO: 1017838 - RNA, 22 nt, Human
agggcugagacuaaggccagau

SEQ ID NO: 1017839 - RNA, 20 nt, Human
aguuuauuccaggagaacug

SEQ ID NO: 1017840 - RNA, 22 nt, Human
agggagcucaguuggaagcggu

SEQ ID NO: 1017841 - RNA, 22 nt, Human
ccaggagucaauaaaggaagcu

SEQ ID NO: 1017842 - RNA, 22 nt, Human
auuaaauuggaucugcauaguu

SEQ ID NO: 1017843 - RNA, 22 nt, Human
uagaaauaaaucugcagcuggg

SEQ ID NO: 1017844 - RNA, 22 nt, Human
augauucagcaauuuuauaucu

SEQ ID NO: 1017845 - RNA, 22 nt, Human
aagcagugcgcucaucuaaggg

SEQ ID NO: 1017846 - RNA, 22 nt, Human
aggcugcucugcgaagucagcu

SEQ ID NO: 1017847 - RNA, 22 nt, Human
agaaauaugcugauuagaugaa

SEQ ID NO: 1017848 - RNA, 20 nt, Human
agagccuggaaaaagacauc

SEQ ID NO: 1017849 - RNA, 22 nt, Human
agcagacaacccagaugaccca

SEQ ID NO: 1017850 - RNA, 21 nt, Human
ccagagccugcugagcccccu

SEQ ID NO: 1017851 - RNA, 22 nt, Human
ucuucaaaaaauauccaucagu

SEQ ID NO: 1017852 - RNA, 22 nt, Human
guauacauagaugaugaacaag

SEQ ID NO: 1017853 - RNA, 20 nt, Human
ucauccaggacaggaguggc

SEQ ID NO: 1017854 - RNA, 22 nt, Human
cugucucuguugccuguaggug

SEQ ID NO: 1017855 - RNA, 22 nt, Human
acucagaaugacugaugcugug

SEQ ID NO: 1017856 - RNA, 22 nt, Human
augguuuguaacccaauacucc

SEQ ID NO: 1017857 - RNA, 22 nt, Human
uucauauaaauggaaucagaau

SEQ ID NO: 1017858 - RNA, 22 nt, Human
ucucagggcgcagugaggcagu

SEQ ID NO: 1017859 - RNA, 22 nt, Human
gggaagaguaacuagcccaugu

SEQ ID NO: 1017860 - RNA, 22 nt, Human
gagaagcaaucaguggccaccc

SEQ ID NO: 1017861 - RNA, 22 nt, Human
acagcacaaucugagucccaga

SEQ ID NO: 1017862 - RNA, 22 nt, Human
agauacaucauuuauaccuuca

SEQ ID NO: 1017863 - RNA, 22 nt, Human
gcucccugacucaguuccugag

SEQ ID NO: 1017864 - RNA, 23 nt, Human
aacaccaaggcucagagagauaa

SEQ ID NO: 1017865 - RNA, 22 nt, Human
ccucuuccacugggccccaucc

SEQ ID NO: 1017866 - RNA, 22 nt, Human
ucagcuuucucagaggccuaac

SEQ ID NO: 1017867 - RNA, 22 nt, Human
uuagggacagcucuguagguga

SEQ ID NO: 1017868 - RNA, 20 nt, Human
ugugugcacacaugacauuc

SEQ ID NO: 1017869 - RNA, 22 nt, Human
gggggcuggacuuucccacaca

SEQ ID NO: 1017870 - RNA, 22 nt, Human
uucacagacuuuccauagauug

SEQ ID NO: 1017871 - RNA, 22 nt, Human
cagggcuccaugcagggacucc

SEQ ID NO: 1017872 - RNA, 22 nt, Human
aguauuucuaguugguucuacu

SEQ ID NO: 1017873 - RNA, 22 nt, Human
uguacaugugucuguauaucuu

SEQ ID NO: 1017874 - RNA, 22 nt, Human
ccucacagggccaggccccuca

SEQ ID NO: 1017875 - RNA, 21 nt, Human
ucuuuccugcccaguugcccu

SEQ ID NO: 1017876 - RNA, 22 nt, Human
uggguagagcaggcuggggcuu

SEQ ID NO: 1017877 - RNA, 22 nt, Human
cagccugcagggcugccuguug

SEQ ID NO: 1017878 - RNA, 22 nt, Human
gcagccacugggagugcuuaua

SEQ ID NO: 1017879 - RNA, 22 nt, Human
uccuugaaaaucuugguuuaga

SEQ ID NO: 1017880 - RNA, 22 nt, Human
ugugccaugaggcucugauaug

SEQ ID NO: 1017881 - RNA, 22 nt, Human
ggcucugcuggauugaggccag

SEQ ID NO: 1017882 - RNA, 22 nt, Human
cacagcagaaaguguaggagga

SEQ ID NO: 1017883 - RNA, 22 nt, Human
ggagcugggacccugucaucug

SEQ ID NO: 1017884 - RNA, 22 nt, Human
aaaguguugauaugugacaucc

SEQ ID NO: 1017885 - RNA, 22 nt, Human
uguggccuccccacuucugggg

SEQ ID NO: 1017886 - RNA, 22 nt, Human
ggagauuuauagcacacuucag

SEQ ID NO: 1017887 - RNA, 22 nt, Human
augcacccagugucuggacuau

SEQ ID NO: 1017888 - RNA, 22 nt, Human
uaugcacaguuacaagaauauc

SEQ ID NO: 1017889 - RNA, 22 nt, Human
agcugccauccgaggugucaga

SEQ ID NO: 1017890 - RNA, 22 nt, Human
gaggcugucuguuagccuggga

SEQ ID NO: 1017891 - RNA, 22 nt, Human
ucugggcugggagcguguggac

SEQ ID NO: 1017892 - RNA, 22 nt, Human
uucuccagaccuugugacuaug

SEQ ID NO: 1017893 - RNA, 22 nt, Human
acagagccuccaggagugcugg

SEQ ID NO: 1017894 - RNA, 22 nt, Human
caggcagcugaggacuuugcua

SEQ ID NO: 1017895 - RNA, 22 nt, Human
uggaagcaucacuucuugccug

SEQ ID NO: 1017896 - RNA, 22 nt, Human
uaggccaggacagagcuuccag

SEQ ID NO: 1017897 - RNA, 22 nt, Human
acuuuuuacaggguguauacca

SEQ ID NO: 1017898 - RNA, 22 nt, Human
gggcacagcugcuacccagugc

SEQ ID NO: 1017899 - RNA, 22 nt, Human
agggcuccgggcaggcgaugga

SEQ ID NO: 1017900 - RNA, 22 nt, Human
ugagccaggcucaagugauccu

SEQ ID NO: 1017901 - RNA, 22 nt, Human
ucucuggaauuuugagagugac

SEQ ID NO: 1017902 - RNA, 22 nt, Human
uggcccugcacccagagcaguu

SEQ ID NO: 1017903 - RNA, 22 nt, Human
augauugcagcccuacagcugu

SEQ ID NO: 1017904 - RNA, 22 nt, Human
gagggcucacugagaaagcagu

SEQ ID NO: 1017905 - RNA, 22 nt, Human
auacagaaaaugaugcagaguu

SEQ ID NO: 1017906 - RNA, 22 nt, Human
gggugcugacuggggccugaaa

SEQ ID NO: 1017907 - RNA, 22 nt, Human
guggagccaggaucuccgcaca

SEQ ID NO: 1017908 - RNA, 22 nt, Human
accaugaugggaagcucagggc

SEQ ID NO: 1017909 - RNA, 20 nt, Human
ccuggcugcauucaggacgg

SEQ ID NO: 1017910 - RNA, 22 nt, Human
agagcaauggcauccagcugau

SEQ ID NO: 1017911 - RNA, 23 nt, Human
cuucucagaagucugugccagga

SEQ ID NO: 1017912 - RNA, 19 nt, Human
ccuuccuccccagggccau

SEQ ID NO: 1017913 - RNA, 22 nt, Human
ucuggagaacuugcaagaggau

SEQ ID NO: 1017914 - RNA, 22 nt, Human
cauuugaaugagauugcuguaa

SEQ ID NO: 1017915 - RNA, 22 nt, Human
gcugccugcucggcuccuggga

SEQ ID NO: 1017916 - RNA, 22 nt, Human
gcucuggagauggagccuugag

SEQ ID NO: 1017917 - RNA, 22 nt, Human
gaaaugcagauucugauucugu

SEQ ID NO: 1017918 - RNA, 22 nt, Human
uaugacauuauaaaggauuauu

SEQ ID NO: 1017919 - RNA, 22 nt, Human
cccaggagguggagcuugcagu

SEQ ID NO: 1017920 - RNA, 22 nt, Human
uggccugguaccacauagauuu

SEQ ID NO: 1017921 - RNA, 22 nt, Human
auuauuauuguugauguuaggg

SEQ ID NO: 1017922 - RNA, 18 nt, Human
acagacaaaauggaaaug

SEQ ID NO: 1017923 - RNA, 22 nt, Human
ugaaaugagagcacagaauaaa

SEQ ID NO: 1017924 - RNA, 22 nt, Human
ugaugcuucacgcugaauaugc

SEQ ID NO: 1017925 - RNA, 21 nt, Human
auuucagagcacacaaguaaa

SEQ ID NO: 1017926 - RNA, 21 nt, Human
gacaggggaagaagcaaggag

SEQ ID NO: 1017927 - RNA, 17 nt, Human
cccugccaccaggaagc

SEQ ID NO: 1017928 - RNA, 22 nt, Human
uguuaacaucuuggacucguga

SEQ ID NO: 1017929 - RNA, 22 nt, Human
gcagcuuucugcaaugucaucc

SEQ ID NO: 1017930 - RNA, 22 nt, Human
agaggcugggaaggguccccgg

SEQ ID NO: 1017931 - RNA, 22 nt, Human
uagaaaagauaacauucugugc

SEQ ID NO: 1017932 - RNA, 22 nt, Human
gaacaguaucaguagugccagu

SEQ ID NO: 1017933 - RNA, 22 nt, Human
ccugcccuagagaugacacaau

SEQ ID NO: 1017934 - RNA, 20 nt, Human
cccuccagcaaccaggacuu

SEQ ID NO: 1017935 - RNA, 22 nt, Human
ugggcagacauugaguuuguuc

SEQ ID NO: 1017936 - RNA, 22 nt, Human
aggcagggucuugcuauguugc

SEQ ID NO: 1017937 - RNA, 21 nt, Human
cagugagguccccagccuagg

SEQ ID NO: 1017938 - RNA, 22 nt, Human
ggcacugauuccauucaugaag

SEQ ID NO: 1017939 - RNA, 20 nt, Human
auacaaagagauugauguau

SEQ ID NO: 1017940 - RNA, 22 nt, Human
gccucugcacuguggcacacca

SEQ ID NO: 1017941 - RNA, 22 nt, Human
ucucagagcaucauuuucuuag

SEQ ID NO: 1017942 - RNA, 22 nt, Human
ugcugccagggcucugcccaca

SEQ ID NO: 1017943 - RNA, 22 nt, Human
uacauucuacuuuuucacuccc

SEQ ID NO: 1017944 - RNA, 22 nt, Human
uuagauaauguagagauaugag

SEQ ID NO: 1017945 - RNA, 22 nt, Human
guagggacaugccauuaucuca

SEQ ID NO: 1017946 - RNA, 22 nt, Human
uuucugugguggguaguucaga

SEQ ID NO: 1017947 - RNA, 22 nt, Human
cccagcaguuguuggugcacau

SEQ ID NO: 1017948 - RNA, 22 nt, Human
ugccugucagggggagugggaa

SEQ ID NO: 1017949 - RNA, 22 nt, Human
ucucagagaggggccgggccuu

SEQ ID NO: 1017950 - RNA, 22 nt, Human
agugugugcaugcauucgugca

SEQ ID NO: 1017951 - RNA, 22 nt, Human
ccacaucucgguccccucuuug

SEQ ID NO: 1017952 - RNA, 22 nt, Human
gccaguggucacugaggaagaa

SEQ ID NO: 1017953 - RNA, 22 nt, Human
cucagcagagaccagggaggaa

SEQ ID NO: 1017954 - RNA, 21 nt, Human
aguguccuugaucuugccuug

SEQ ID NO: 1017955 - RNA, 22 nt, Human
augggaguuuucucugaugcuc

SEQ ID NO: 1017956 - RNA, 22 nt, Human
gccagcucagugccaggccccu

SEQ ID NO: 1017957 - RNA, 22 nt, Human
ugagcuucuuuauuuggccaga

SEQ ID NO: 1017958 - RNA, 22 nt, Human
ucugccuugagguccucagcuc

SEQ ID NO: 1017959 - RNA, 22 nt, Human
gagcagaacaggccggguggga

SEQ ID NO: 1017960 - RNA, 19 nt, Human
ccucccacggauuccuucc

SEQ ID NO: 1017961 - RNA, 22 nt, Human
agugguaacuaaguccugcuua

SEQ ID NO: 1017962 - RNA, 22 nt, Human
gacagacauuuccugauccaau

SEQ ID NO: 1017963 - RNA, 22 nt, Human
gaaaaaugagcugaugucaggg

SEQ ID NO: 1017964 - RNA, 22 nt, Human
ugcauaaagugccauaguauua

SEQ ID NO: 1017965 - RNA, 22 nt, Human
agccugcuucccuuugugcccc

SEQ ID NO: 1017966 - RNA, 22 nt, Human
ccaaggagcaaguuuacaccug

SEQ ID NO: 1017967 - RNA, 22 nt, Human
cuguggcuuucucugccuccuu

SEQ ID NO: 1017968 - RNA, 20 nt, Human
ugcagggcugccucccagcu

SEQ ID NO: 1017969 - RNA, 23 nt, Human
acaagauagggauaaaaagauaa

SEQ ID NO: 1017970 - RNA, 22 nt, Human
gagccugaaauacaggucacug

SEQ ID NO: 1017971 - RNA, 22 nt, Human
ugggcagaucuuugguggcuag

SEQ ID NO: 1017972 - RNA, 22 nt, Human
uugcagcuucgagucuaucugu

SEQ ID NO: 1017973 - RNA, 22 nt, Human
auguccuuccauuuugaucugu

SEQ ID NO: 1017974 - RNA, 22 nt, Human
ggcucugguugaccaugauggc

SEQ ID NO: 1017975 - RNA, 21 nt, Human
agacagagugcagucuacaua

SEQ ID NO: 1017976 - RNA, 17 nt, Human
ggccuguguggcugcag

SEQ ID NO: 1017977 - RNA, 19 nt, Human
gccugagccagccaugcaa

SEQ ID NO: 1017978 - RNA, 22 nt, Human
uggcuagcccuuguggggagag

SEQ ID NO: 1017979 - RNA, 22 nt, Human
ugucugagugugccugggcauu

SEQ ID NO: 1017980 - RNA, 22 nt, Human
aagcagccuggcaugaugcuuu

SEQ ID NO: 1017981 - RNA, 22 nt, Human
auaacaugaccugugcuucaca

SEQ ID NO: 1017982 - RNA, 20 nt, Human
ucccaggcugggcuccagcu

SEQ ID NO: 1017983 - RNA, 22 nt, Human
cuggcagccaagugggauacuc

SEQ ID NO: 1017984 - RNA, 22 nt, Human
guccuggggauuauagaguguu

SEQ ID NO: 1017985 - RNA, 22 nt, Human
cacagcuugggcucugacaaua

SEQ ID NO: 1017986 - RNA, 22 nt, Human
ugaaagcuguccacuaggcugu

SEQ ID NO: 1017987 - RNA, 22 nt, Human
agcaccugucacaagcagaagg

SEQ ID NO: 1017988 - RNA, 22 nt, Human
uauuccagguauucuucaagag

SEQ ID NO: 1017989 - RNA, 22 nt, Human
uccuccuucgggacugcuugac

SEQ ID NO: 1017990 - RNA, 22 nt, Human
uucagugucaauuuuuaaauau

SEQ ID NO: 1017991 - RNA, 22 nt, Human
ugcuuaauauugugauguaaua

SEQ ID NO: 1017992 - RNA, 22 nt, Human
cagggcucaggcucugggauuc

SEQ ID NO: 1017993 - RNA, 20 nt, Human
cccucugcuacacugggagc

SEQ ID NO: 1017994 - RNA, 22 nt, Human
uuaacagauguuuauggagcau

SEQ ID NO: 1017995 - RNA, 22 nt, Human
ccacucugcugugcuccaugau

SEQ ID NO: 1017996 - RNA, 22 nt, Human
agccuccaguagcugaagagac

SEQ ID NO: 1017997 - RNA, 22 nt, Human
uuagaaaucugcugccaugcaa

SEQ ID NO: 1017998 - RNA, 18 nt, Human
uggcucagauggcuuuaa

SEQ ID NO: 1017999 - RNA, 22 nt, Human
auuucucaguguacauuauguu

SEQ ID NO: 1018000 - RNA, 20 nt, Human
gauuucaaagcagaguggcc

SEQ ID NO: 1018001 - RNA, 22 nt, Human
acauuucucccugcaugccugc

SEQ ID NO: 1018002 - RNA, 22 nt, Human
uguaugaaccuuuaauauagug

SEQ ID NO: 1018003 - RNA, 18 nt, Human
gccugcaggcacgggggu

SEQ ID NO: 1018004 - RNA, 22 nt, Human
auggggcugggauucuccucgg

SEQ ID NO: 1018005 - RNA, 22 nt, Human
gaucauuuugaugcccuuuuag

SEQ ID NO: 1018006 - RNA, 22 nt, Human
aaaucaguaaauguucauuaac

SEQ ID NO: 1018007 - RNA, 17 nt, Human
uuccccugaccaagccu

SEQ ID NO: 1018008 - RNA, 22 nt, Human
acagcagcaauagcagugacau

SEQ ID NO: 1018009 - RNA, 22 nt, Human
caguagcacucugucagugaag

SEQ ID NO: 1018010 - RNA, 22 nt, Human
aguccaggucucugagucacaa

SEQ ID NO: 1018011 - RNA, 22 nt, Human
ccagcucugcagggccuggggu

SEQ ID NO: 1018012 - RNA, 22 nt, Human
aggcacugggaauaugcugagg

SEQ ID NO: 1018013 - RNA, 22 nt, Human
ccuuucucauuuuaagcauuag

SEQ ID NO: 1018014 - RNA, 17 nt, Human
gaauuucuuggucaaaa

SEQ ID NO: 1018015 - RNA, 21 nt, Human
ccugagggugguugugaagau

SEQ ID NO: 1018016 - RNA, 22 nt, Human
cucagaguggggcucccugagg

SEQ ID NO: 1018017 - RNA, 22 nt, Human
aaggcacuagcagaauuaguga

SEQ ID NO: 1018018 - RNA, 22 nt, Human
gacagggcaagacucugucuaa

SEQ ID NO: 1018019 - RNA, 18 nt, Human
aggccugggaagcugagg

SEQ ID NO: 1018020 - RNA, 23 nt, Human
ugucauugugacuacagaaccag

SEQ ID NO: 1018021 - RNA, 17 nt, Human
cacccuggcuagucuga

SEQ ID NO: 1018022 - RNA, 22 nt, Human
ccagggugugggcgucggcacg

SEQ ID NO: 1018023 - RNA, 22 nt, Human
agaaaugaagcaggaguuauua

SEQ ID NO: 1018024 - RNA, 22 nt, Human
acugccuugaaagauuguugag

SEQ ID NO: 1018025 - RNA, 23 nt, Human
ugcugggguaguuuguggcacag

SEQ ID NO: 1018026 - RNA, 21 nt, Human
cagaggcaggcucugugugug

SEQ ID NO: 1018027 - RNA, 22 nt, Human
guccucugacucagccuuggga

SEQ ID NO: 1018028 - RNA, 22 nt, Human
caggauggucagaugcauuguc

SEQ ID NO: 1018029 - RNA, 22 nt, Human
ggagugacucacagcugggaca

SEQ ID NO: 1018030 - RNA, 22 nt, Human
gccugggagugcacagugaggu

SEQ ID NO: 1018031 - RNA, 22 nt, Human
uaaaucaguuucucuuauuggu

SEQ ID NO: 1018032 - RNA, 22 nt, Human
cucagaaucugccaaguucagg

SEQ ID NO: 1018033 - RNA, 22 nt, Human
agaguguaauaagggcaagggc

SEQ ID NO: 1018034 - RNA, 22 nt, Human
caggguccaucuuucaucacug

SEQ ID NO: 1018035 - RNA, 22 nt, Human
ggugcagaucuuucucuucagg

SEQ ID NO: 1018036 - RNA, 22 nt, Human
gagagcuguuuaucuucuucaa

SEQ ID NO: 1018037 - RNA, 23 nt, Human
gugugccaagcacugugccagga

SEQ ID NO: 1018038 - RNA, 22 nt, Human
agugauggagcuuccucugcua

SEQ ID NO: 1018039 - RNA, 22 nt, Human
auaaguaggaaaauuugaauau

SEQ ID NO: 1018040 - RNA, 21 nt, Human
gcuccuggugcugcguggcgc

SEQ ID NO: 1018041 - RNA, 22 nt, Human
aaaugcacaauaaaguaaaggc

SEQ ID NO: 1018042 - RNA, 22 nt, Human
uuggaaauggcuguaguuauga

SEQ ID NO: 1018043 - RNA, 22 nt, Human
gggcagugguuacacagcugag

SEQ ID NO: 1018044 - RNA, 22 nt, Human
ggacccugggcuugcuccuggg

SEQ ID NO: 1018045 - RNA, 22 nt, Human
gggcagcugcagggauggugac

SEQ ID NO: 1018046 - RNA, 22 nt, Human
gagcugccuacauugccaagag

SEQ ID NO: 1018047 - RNA, 22 nt, Human
uugcauugcuuggucuucaaga

SEQ ID NO: 1018048 - RNA, 22 nt, Human
ccaccagcuucagcagccgcgg

SEQ ID NO: 1018049 - RNA, 22 nt, Human
gacaggaggcagagcucaggug

SEQ ID NO: 1018050 - RNA, 23 nt, Human
uacauuguggauggaguccuggg

SEQ ID NO: 1018051 - RNA, 22 nt, Human
acaguaaaucaacagaauaucu

SEQ ID NO: 1018052 - RNA, 22 nt, Human
gcagcugggacacugaggccag

SEQ ID NO: 1018053 - RNA, 22 nt, Human
ggagugggcagcacugcccugu

SEQ ID NO: 1018054 - RNA, 22 nt, Human
agugcugucccgacaacugagg

SEQ ID NO: 1018055 - RNA, 22 nt, Human
agcagccauccuuagagaaaga

SEQ ID NO: 1018056 - RNA, 22 nt, Human
cacagggcuaaaugaaggguug

SEQ ID NO: 1018057 - RNA, 22 nt, Human
agugaguggguuacagauggga

SEQ ID NO: 1018058 - RNA, 22 nt, Human
guuuaagaggguuucauuccca

SEQ ID NO: 1018059 - RNA, 22 nt, Human
uccaggcauaagccuugagugu

SEQ ID NO: 1018060 - RNA, 22 nt, Human
uuauuccauuauuucacuuagg

SEQ ID NO: 1018061 - RNA, 22 nt, Human
ccugccagugaagcugacgggc

SEQ ID NO: 1018062 - RNA, 23 nt, Human
cuuuuaacuagaguaucagcugc

SEQ ID NO: 1018063 - RNA, 22 nt, Human
aauaacuuaagaaauuucccca

SEQ ID NO: 1018064 - RNA, 22 nt, Human
ggcuggcagaagugugcuggcu

SEQ ID NO: 1018065 - RNA, 22 nt, Human
auacuguuuugugacuuaucuu

SEQ ID NO: 1018066 - RNA, 22 nt, Human
auguuuauguugggcuauauuu

SEQ ID NO: 1018067 - RNA, 22 nt, Human
aagggaggaggauuuauuguac

SEQ ID NO: 1018068 - RNA, 22 nt, Human
gggugggagucuggcccucaaa

SEQ ID NO: 1018069 - RNA, 21 nt, Human
ucaggggcuguguuuuccauc

SEQ ID NO: 1018070 - RNA, 22 nt, Human
uacauucaacaugucacuaugu

SEQ ID NO: 1018071 - RNA, 22 nt, Human
uugagucaguaauuccauuucu

SEQ ID NO: 1018072 - RNA, 19 nt, Human
cucucacucgccacauccu

SEQ ID NO: 1018073 - RNA, 22 nt, Human
aaaugcagcagcuaauugaaaa

SEQ ID NO: 1018074 - RNA, 22 nt, Human
gggcugcuguagagaacauguu

SEQ ID NO: 1018075 - RNA, 22 nt, Human
ggcaaaaaccgcaauaacuucu

SEQ ID NO: 1018076 - RNA, 22 nt, Human
acauugcugcauucuccuuccc

SEQ ID NO: 1018077 - RNA, 22 nt, Human
uagggaccuuagaauuguaugu

SEQ ID NO: 1018078 - RNA, 18 nt, Human
gagcugccauauuuaguu

SEQ ID NO: 1018079 - RNA, 22 nt, Human
ccagagagauugcuucuaaaga

SEQ ID NO: 1018080 - RNA, 22 nt, Human
gcccucucggcauagcaggggc

SEQ ID NO: 1018081 - RNA, 22 nt, Human
uucacaguggcugugccauuug

SEQ ID NO: 1018082 - RNA, 22 nt, Human
cacccagcauuggcuaagagag

SEQ ID NO: 1018083 - RNA, 22 nt, Human
augucuaaaagauaaaguuuaa

SEQ ID NO: 1018084 - RNA, 18 nt, Human
gggcaucauucacaaagu

SEQ ID NO: 1018085 - RNA, 19 nt, Human
ggcucagggcgcugccgcc

SEQ ID NO: 1018086 - RNA, 20 nt, Human
cugagcgucuaagaggugag

SEQ ID NO: 1018087 - RNA, 22 nt, Human
guuaaauucgaugauggauaaa

SEQ ID NO: 1018088 - RNA, 22 nt, Human
ccaugagcuucaacugacacag

SEQ ID NO: 1018089 - RNA, 22 nt, Human
cagccuucugaaugaacguacu

SEQ ID NO: 1018090 - RNA, 22 nt, Human
uuagacauagaauauugucuag

SEQ ID NO: 1018091 - RNA, 22 nt, Human
aaauccuaaugacaaguuuagu

SEQ ID NO: 1018092 - RNA, 22 nt, Human
aucuucucaagcagcauccugu

SEQ ID NO: 1018093 - RNA, 22 nt, Human
ugucccagggaaggcccagcac

SEQ ID NO: 1018094 - RNA, 18 nt, Human
uggcucugcagccagaug

SEQ ID NO: 1018095 - RNA, 23 nt, Human
ccugucugugcuggguggacaca

SEQ ID NO: 1018096 - RNA, 22 nt, Human
uauauguaagcuauguaagagu

SEQ ID NO: 1018097 - RNA, 22 nt, Human
uauagaagagacaugugcauag

SEQ ID NO: 1018098 - RNA, 22 nt, Human
acagggcagagaggcaggcuug

SEQ ID NO: 1018099 - RNA, 22 nt, Human
caaauucagaaaauugguagag

SEQ ID NO: 1018100 - RNA, 22 nt, Human
ggagccaggggaccuucacaga

SEQ ID NO: 1018101 - RNA, 22 nt, Human
uuagaaaugauuucaccucuuu

SEQ ID NO: 1018102 - RNA, 22 nt, Human
ggguacuuaauauuuacggggu

SEQ ID NO: 1018103 - RNA, 22 nt, Human
agagaagacuuacagccacagu

SEQ ID NO: 1018104 - RNA, 22 nt, Human
uauuucugucagccagauaugg

SEQ ID NO: 1018105 - RNA, 22 nt, Human
aggccugagcagaggaguggac

SEQ ID NO: 1018106 - RNA, 22 nt, Human
guuuauuagaguuuucugucug

SEQ ID NO: 1018107 - RNA, 22 nt, Human
auauuagggucucuaaauucua

SEQ ID NO: 1018108 - RNA, 22 nt, Human
gcugcugguccucagagcucau

SEQ ID NO: 1018109 - RNA, 22 nt, Human
cuggcagcccaaccuagagucu

SEQ ID NO: 1018110 - RNA, 22 nt, Human
acagguggaggcuuuaggaggu

SEQ ID NO: 1018111 - RNA, 19 nt, Human
cgcaggagccgaggugacc

SEQ ID NO: 1018112 - RNA, 22 nt, Human
auguacauuuagaucauuucug

SEQ ID NO: 1018113 - RNA, 22 nt, Human
cugcugugagcacuccagccug

SEQ ID NO: 1018114 - RNA, 22 nt, Human
cagggagcuggcuggcgugagu

SEQ ID NO: 1018115 - RNA, 22 nt, Human
ggucccaggauugguugcgcag

SEQ ID NO: 1018116 - RNA, 22 nt, Human
uguuucaugauugcugucauuu

SEQ ID NO: 1018117 - RNA, 20 nt, Human
uauuucugggcaaccauuua

SEQ ID NO: 1018118 - RNA, 22 nt, Human
cagucccagacauaguaaggga

SEQ ID NO: 1018119 - RNA, 22 nt, Human
gcagcuggaagugacacucugu

SEQ ID NO: 1018120 - RNA, 22 nt, Human
accccagcccugcuucugggag

SEQ ID NO: 1018121 - RNA, 22 nt, Human
ucuugggauugcccugcaguuc

SEQ ID NO: 1018122 - RNA, 22 nt, Human
cacugccuccccaggcuccaca

SEQ ID NO: 1018123 - RNA, 22 nt, Human
cuguagcagugugcucuuuuuc

SEQ ID NO: 1018124 - RNA, 22 nt, Human
cacagggcaggccccaggccuc

SEQ ID NO: 1018125 - RNA, 22 nt, Human
gccaggcagcuagcaaccccug

SEQ ID NO: 1018126 - RNA, 22 nt, Human
ggguggggcccaggaaaucuau

SEQ ID NO: 1018127 - RNA, 22 nt, Human
guacauuggcaacucucuuaga

SEQ ID NO: 1018128 - RNA, 22 nt, Human
ucagaggaccuuacugagaacc

SEQ ID NO: 1018129 - RNA, 22 nt, Human
uguauaaacuuaagcaggaacc

SEQ ID NO: 1018130 - RNA, 22 nt, Human
agccuccaucccaugcacaaag

SEQ ID NO: 1018131 - RNA, 22 nt, Human
gccaggcagagccccgugcagc

SEQ ID NO: 1018132 - RNA, 22 nt, Human
agaaaugacacacaugagacau

SEQ ID NO: 1018133 - RNA, 22 nt, Human
cagagcaugaauaaaaguuaca

SEQ ID NO: 1018134 - RNA, 22 nt, Human
uacauucagcaaaagaaugguu

SEQ ID NO: 1018135 - RNA, 22 nt, Human
uaaguuuucuggaauaacuugg

SEQ ID NO: 1018136 - RNA, 22 nt, Human
gggcucuggaaggugcaccaug

SEQ ID NO: 1018137 - RNA, 22 nt, Human
gcagagcuucuguccuucagga

SEQ ID NO: 1018138 - RNA, 22 nt, Human
aaaugcaauuguauguacucca

SEQ ID NO: 1018139 - RNA, 22 nt, Human
ccuguggcacaugcagggauuc

SEQ ID NO: 1018140 - RNA, 22 nt, Human
gguaugaaaugauuccauguua

SEQ ID NO: 1018141 - RNA, 22 nt, Human
uggcacugcacuuuaagauuua

SEQ ID NO: 1018142 - RNA, 22 nt, Human
uguggccucaaggcugcccuca

SEQ ID NO: 1018143 - RNA, 23 nt, Human
gcccaugcuguugggcccgagca

SEQ ID NO: 1018144 - RNA, 22 nt, Human
aagcagcauaauugcuauuuua

SEQ ID NO: 1018145 - RNA, 22 nt, Human
cagagaccccgcugcccuucug

SEQ ID NO: 1018146 - RNA, 22 nt, Human
gcagcuggacccacacggcuua

SEQ ID NO: 1018147 - RNA, 22 nt, Human
ugguccugagcaccagccugac

SEQ ID NO: 1018148 - RNA, 22 nt, Human
ucuguucagaauuguaacacuc

SEQ ID NO: 1018149 - RNA, 20 nt, Human
gggcuggcgcauggggaaag

SEQ ID NO: 1018150 - RNA, 22 nt, Human
agaggcccucucucuccugaug

SEQ ID NO: 1018151 - RNA, 22 nt, Human
uggaggaugagugugggcucug

SEQ ID NO: 1018152 - RNA, 22 nt, Human
gcugugcacuaccuauacaucc

SEQ ID NO: 1018153 - RNA, 22 nt, Human
uggacucaaguccaaguucacg

SEQ ID NO: 1018154 - RNA, 22 nt, Human
acagcuuuugaaaaauuacugg

SEQ ID NO: 1018155 - RNA, 22 nt, Human
aaggccugcucagcugucugug

SEQ ID NO: 1018156 - RNA, 22 nt, Human
agggccugcaucaggagcuugg

SEQ ID NO: 1018157 - RNA, 22 nt, Human
auaauucagguuuucuggcaca

SEQ ID NO: 1018158 - RNA, 22 nt, Human
ggacaggguaaguacuagugug

SEQ ID NO: 1018159 - RNA, 22 nt, Human
guuaauaaagguauagaaucag

SEQ ID NO: 1018160 - RNA, 22 nt, Human
ggcuucagugagcugagcucac

SEQ ID NO: 1018161 - RNA, 22 nt, Human
aaggucauugguucugaauucu

SEQ ID NO: 1018162 - RNA, 22 nt, Human
gaguuguucaacgugugugaaa

SEQ ID NO: 1018163 - RNA, 17 nt, Human
uuucuccuuccaucuca

SEQ ID NO: 1018164 - RNA, 22 nt, Human
ccucaggauccgcaggugcagu

SEQ ID NO: 1018165 - RNA, 22 nt, Human
aaguaugacauuuaagacaauu

SEQ ID NO: 1018166 - RNA, 22 nt, Human
aaaguggucaccuucucauuuc

SEQ ID NO: 1018167 - RNA, 22 nt, Human
gauauuuugagaaauccuauga

SEQ ID NO: 1018168 - RNA, 22 nt, Human
ucauugucuugauaugauuguc

SEQ ID NO: 1018169 - RNA, 22 nt, Human
ccagucugugugccagccugcg

SEQ ID NO: 1018170 - RNA, 22 nt, Human
ccugcagguccccggaugcgca

SEQ ID NO: 1018171 - RNA, 20 nt, Human
aucuucuuggccagcuugcu

SEQ ID NO: 1018172 - RNA, 22 nt, Human
agcuggagaugcccagcaccgg

SEQ ID NO: 1018173 - RNA, 22 nt, Human
aggucauuccagccauuccccu

SEQ ID NO: 1018174 - RNA, 23 nt, Human
cugucuccugggcuagguggaau

SEQ ID NO: 1018175 - RNA, 22 nt, Human
auaagcauguuagaauauuuga

SEQ ID NO: 1018176 - RNA, 22 nt, Human
auuuaaaugcuuaagaggguuu

SEQ ID NO: 1018177 - RNA, 22 nt, Human
ucauucuugaucacuaguuagu

SEQ ID NO: 1018178 - RNA, 22 nt, Human
cucuucuuuaguccagaccauc

SEQ ID NO: 1018179 - RNA, 19 nt, Human
ugaagcaggcagagaagau

SEQ ID NO: 1018180 - RNA, 22 nt, Human
ucuggcuccugaguccaugcuc

SEQ ID NO: 1018181 - RNA, 22 nt, Human
gagcagggagacaacucuggug

SEQ ID NO: 1018182 - RNA, 22 nt, Human
auccugggaagcugacauugaa

SEQ ID NO: 1018183 - RNA, 22 nt, Human
ugccaaggguaugggcaagaua

SEQ ID NO: 1018184 - RNA, 22 nt, Human
ggcugagcucaggggcagcagg

SEQ ID NO: 1018185 - RNA, 21 nt, Human
uucaaagagugggcauuguca

SEQ ID NO: 1018186 - RNA, 22 nt, Human
ugaagccaucaggaagccagca

SEQ ID NO: 1018187 - RNA, 22 nt, Human
aaggccugggaggccucucuuc

SEQ ID NO: 1018188 - RNA, 22 nt, Human
uuuccuuccaaaugcccgggag

SEQ ID NO: 1018189 - RNA, 22 nt, Human
cugcugcugagagcucagccug

SEQ ID NO: 1018190 - RNA, 22 nt, Human
ggcugccugccuccaagccggg

SEQ ID NO: 1018191 - RNA, 22 nt, Human
ucugaggcuauguucaggcuaa

SEQ ID NO: 1018192 - RNA, 22 nt, Human
acagagauguggaugagggauu

SEQ ID NO: 1018193 - RNA, 22 nt, Human
cucccuggaggugagcuggcac

SEQ ID NO: 1018194 - RNA, 22 nt, Human
aaugaacaggugaaugucagau

SEQ ID NO: 1018195 - RNA, 22 nt, Human
ggcuuuauauuguuugagcaga

SEQ ID NO: 1018196 - RNA, 22 nt, Human
acugaaggcuuucccaagguca

SEQ ID NO: 1018197 - RNA, 22 nt, Human
guuuuuaucuaauagcaguuau

SEQ ID NO: 1018198 - RNA, 22 nt, Human
agagcuggggccagagucaagg

SEQ ID NO: 1018199 - RNA, 22 nt, Human
ggcucacgcaauuaucccggcc

SEQ ID NO: 1018200 - RNA, 21 nt, Human
ugcuuuaugggaaaaauguca

SEQ ID NO: 1018201 - RNA, 22 nt, Human
ccaugagcuuccuauauagggu

SEQ ID NO: 1018202 - RNA, 22 nt, Human
uggagcugaacuuugaggccag

SEQ ID NO: 1018203 - RNA, 22 nt, Human
ugcauaaacuucucugguguga

SEQ ID NO: 1018204 - RNA, 22 nt, Human
ccuccaaguuugacucaggaca

SEQ ID NO: 1018205 - RNA, 22 nt, Human
gacagaguuguugauguaugcu

SEQ ID NO: 1018206 - RNA, 22 nt, Human
agacaucauguuacagauuaag

SEQ ID NO: 1018207 - RNA, 22 nt, Human
uuacaaagagugccagagugug

SEQ ID NO: 1018208 - RNA, 22 nt, Human
agccaaagagaccccauaucca

SEQ ID NO: 1018209 - RNA, 22 nt, Human
ggcugugggccagcuagacccu

SEQ ID NO: 1018210 - RNA, 22 nt, Human
cucuuccucucaugcggucaua

SEQ ID NO: 1018211 - RNA, 20 nt, Human
cagcugccuggcucugggau

SEQ ID NO: 1018212 - RNA, 22 nt, Human
aggcuuccgaguagcugggacu

SEQ ID NO: 1018213 - RNA, 22 nt, Human
uuacaaagcguugagacaagua

SEQ ID NO: 1018214 - RNA, 22 nt, Human
gggagggaggugcugguucacg

SEQ ID NO: 1018215 - RNA, 22 nt, Human
caggggcucugggugaugugag

SEQ ID NO: 1018216 - RNA, 22 nt, Human
ucacuguaucauguugcacuua

SEQ ID NO: 1018217 - RNA, 22 nt, Human
uuuauguacauauccacaagga

SEQ ID NO: 1018218 - RNA, 22 nt, Human
aggggcugacuggaaagugcca

SEQ ID NO: 1018219 - RNA, 22 nt, Human
gccagugguagaggggaggccg

SEQ ID NO: 1018220 - RNA, 22 nt, Human
uguccugggaaugggaugcagu

SEQ ID NO: 1018221 - RNA, 22 nt, Human
aggaaaaagaguugcugccuuc

SEQ ID NO: 1018222 - RNA, 22 nt, Human
ggccuucacgugaccuggcgug

SEQ ID NO: 1018223 - RNA, 22 nt, Human
ucauguuauugacucauaauau

SEQ ID NO: 1018224 - RNA, 22 nt, Human
gauguguuuccaggauuuguuu

SEQ ID NO: 1018225 - RNA, 17 nt, Human
cugucugcgcaugaggu

SEQ ID NO: 1018226 - RNA, 22 nt, Human
ccaggccagagugcaguggcac

SEQ ID NO: 1018227 - RNA, 22 nt, Human
uuuccucugacugcuccccugc

SEQ ID NO: 1018228 - RNA, 22 nt, Human
uuucauuacguguuugacuugu

SEQ ID NO: 1018229 - RNA, 22 nt, Human
cagggagcacugcgagcggcag

SEQ ID NO: 1018230 - RNA, 22 nt, Human
acagccaggaauucuggagaag

SEQ ID NO: 1018231 - RNA, 22 nt, Human
aggccagggucccacacucgca

SEQ ID NO: 1018232 - RNA, 22 nt, Human
aguguuucuggcaaaugaaagu

SEQ ID NO: 1018233 - RNA, 22 nt, Human
gagggcagagucuaaugaugca

SEQ ID NO: 1018234 - RNA, 22 nt, Human
uuuccuaugauauucuaugugu

SEQ ID NO: 1018235 - RNA, 22 nt, Human
uucuggagaucugccuauggga

SEQ ID NO: 1018236 - RNA, 22 nt, Human
uugcagggaccugcagaaagcu

SEQ ID NO: 1018237 - RNA, 22 nt, Human
caaggccaagucucugugaaga

SEQ ID NO: 1018238 - RNA, 22 nt, Human
ucuucacagaugcauauacuuc

SEQ ID NO: 1018239 - RNA, 21 nt, Human
ucagaguguguuacagcaagc

SEQ ID NO: 1018240 - RNA, 19 nt, Human
ccuggguccacucagacua

SEQ ID NO: 1018241 - RNA, 18 nt, Human
ugcucuguuuaaugauuu

SEQ ID NO: 1018242 - RNA, 22 nt, Human
aagguuaaauagguauuuucca

SEQ ID NO: 1018243 - RNA, 22 nt, Human
gggcacuggaaggcucucaggc

SEQ ID NO: 1018244 - RNA, 22 nt, Human
ucucagaguuuuuuuccaggac

SEQ ID NO: 1018245 - RNA, 22 nt, Human
agcuuaggaggaugaugaacau

SEQ ID NO: 1018246 - RNA, 18 nt, Human
aggcuucccaggcaggcc

SEQ ID NO: 1018247 - RNA, 22 nt, Human
uuugggaagaggaaucucugga

SEQ ID NO: 1018248 - RNA, 22 nt, Human
uccuuuuuauaguuagagaaac

SEQ ID NO: 1018249 - RNA, 22 nt, Human
agagcugaaaaagcugacccgg

SEQ ID NO: 1018250 - RNA, 19 nt, Human
acccagagcccuuugcagg

SEQ ID NO: 1018251 - RNA, 22 nt, Human
cagggcacggagaagucacccc

SEQ ID NO: 1018252 - RNA, 22 nt, Human
uccugucugcucacagagcugg

SEQ ID NO: 1018253 - RNA, 22 nt, Human
ucuuuccuagaggcugaugagu

SEQ ID NO: 1018254 - RNA, 22 nt, Human
aggaggccgauuucagaggucg

SEQ ID NO: 1018255 - RNA, 22 nt, Human
cuggcucccagcuuucagggag

SEQ ID NO: 1018256 - RNA, 22 nt, Human
cucuucagauaaaagggauauu

SEQ ID NO: 1018257 - RNA, 23 nt, Human
uggggccaagugaggaagggucu

SEQ ID NO: 1018258 - RNA, 22 nt, Human
ccugucugcagauaucucaggu

SEQ ID NO: 1018259 - RNA, 22 nt, Human
cagggcugaaaucaagguguag

SEQ ID NO: 1018260 - RNA, 22 nt, Human
cuggaagguucuuugugugccu

SEQ ID NO: 1018261 - RNA, 22 nt, Human
gccuccccugcaauuguccuug

SEQ ID NO: 1018262 - RNA, 22 nt, Human
uucugagguccaugcaguacug

SEQ ID NO: 1018263 - RNA, 21 nt, Human
aggucccagguuugggcagca

SEQ ID NO: 1018264 - RNA, 22 nt, Human
gccauuuucugucuuguuuauu

SEQ ID NO: 1018265 - RNA, 22 nt, Human
ugcuccagugagcuggccaucc

SEQ ID NO: 1018266 - RNA, 20 nt, Human
uaacagaaguagaagugggu

SEQ ID NO: 1018267 - RNA, 19 nt, Human
ugcauccaaagccccacca

SEQ ID NO: 1018268 - RNA, 22 nt, Human
ugcagccuugccuccucccagc

SEQ ID NO: 1018269 - RNA, 22 nt, Human
gccuggagacaaggacaaaggg

SEQ ID NO: 1018270 - RNA, 22 nt, Human
aggcucuggcuacuacagagcu

SEQ ID NO: 1018271 - RNA, 22 nt, Human
uuucaguuuaugucuugaauua

SEQ ID NO: 1018272 - RNA, 22 nt, Human
acagugacguuuauuugagacg

SEQ ID NO: 1018273 - RNA, 22 nt, Human
ggcagauggaagaggcuggguc

SEQ ID NO: 1018274 - RNA, 17 nt, Human
ucaggauguagcaguag

SEQ ID NO: 1018275 - RNA, 20 nt, Human
gcugaccccugcugucaugc

SEQ ID NO: 1018276 - RNA, 22 nt, Human
cagcagugugcaggugugcugg

SEQ ID NO: 1018277 - RNA, 22 nt, Human
uacagagaguacagcauccaca

SEQ ID NO: 1018278 - RNA, 18 nt, Human
acauuucuccuucugacc

SEQ ID NO: 1018279 - RNA, 22 nt, Human
agcagcuauuucuuccagagag

SEQ ID NO: 1018280 - RNA, 22 nt, Human
aaagauuugaguucugcuuaua

SEQ ID NO: 1018281 - RNA, 22 nt, Human
aagccagguuccauggaggagc

SEQ ID NO: 1018282 - RNA, 18 nt, Human
gggcacuggggacuggag

SEQ ID NO: 1018283 - RNA, 22 nt, Human
cuccaggcucguccaagaucga

SEQ ID NO: 1018284 - RNA, 22 nt, Human
uccugccuucauacugcuguau

SEQ ID NO: 1018285 - RNA, 22 nt, Human
auggaaagggaagcaaggaaca

SEQ ID NO: 1018286 - RNA, 22 nt, Human
acauuucugcaucucagagcua

SEQ ID NO: 1018287 - RNA, 22 nt, Human
cugagauggaguuucgcucuuc

SEQ ID NO: 1018288 - RNA, 22 nt, Human
uguauuuucugaagauaaucaa

SEQ ID NO: 1018289 - RNA, 22 nt, Human
uguuccaugucuuuguaggacu

SEQ ID NO: 1018290 - RNA, 22 nt, Human
uggaggcauaggccugggcccu

SEQ ID NO: 1018291 - RNA, 22 nt, Human
accacuguaucuccagcacauu

SEQ ID NO: 1018292 - RNA, 22 nt, Human
auucaaguccagcuucucuaca

SEQ ID NO: 1018293 - RNA, 22 nt, Human
caagcagacaguaggccuagaa

SEQ ID NO: 1018294 - RNA, 22 nt, Human
acccagaggcggagguugcagu

SEQ ID NO: 1018295 - RNA, 22 nt, Human
cagugcaguuucccagaugcug

SEQ ID NO: 1018296 - RNA, 22 nt, Human
agcagcugaccagugaguccug

SEQ ID NO: 1018297 - RNA, 22 nt, Human
gcguggugcugcccugcacaca

SEQ ID NO: 1018298 - RNA, 22 nt, Human
acagguggccccgagggagugg

SEQ ID NO: 1018299 - RNA, 22 nt, Human
ucccagcauuaaugccugucag

SEQ ID NO: 1018300 - RNA, 21 nt, Human
agaauaaugguaucauuugcu

SEQ ID NO: 1018301 - RNA, 22 nt, Human
ucugccuggguguggagcagag

SEQ ID NO: 1018302 - RNA, 22 nt, Human
aaugccaguguguugauuccag

SEQ ID NO: 1018303 - RNA, 22 nt, Human
ccacugggcguuucuguccaau

SEQ ID NO: 1018304 - RNA, 22 nt, Human
gggcagugguccaggcuacagc

SEQ ID NO: 1018305 - RNA, 22 nt, Human
caguccagcucaucaguggcac

SEQ ID NO: 1018306 - RNA, 22 nt, Human
ugcagugguguccagguguacu

SEQ ID NO: 1018307 - RNA, 22 nt, Human
acagugcuggcuacaacccugg

SEQ ID NO: 1018308 - RNA, 22 nt, Human
acucugccuuucagcagaugaa

SEQ ID NO: 1018309 - RNA, 22 nt, Human
uuaaguccuugguaauuuucuu

SEQ ID NO: 1018310 - RNA, 22 nt, Human
gcacccagggacuuggcuggcc

SEQ ID NO: 1018311 - RNA, 22 nt, Human
ugucacuucaggaaugcaggga

SEQ ID NO: 1018312 - RNA, 22 nt, Human
agucugcacucagguggagguc

SEQ ID NO: 1018313 - RNA, 22 nt, Human
gcuugggagaggguccccagga

SEQ ID NO: 1018314 - RNA, 22 nt, Human
uugggugcugucauggggcacg

SEQ ID NO: 1018315 - RNA, 22 nt, Human
cuucagggugacgcaggcugca

SEQ ID NO: 1018316 - RNA, 23 nt, Human
ggagccuggcauaugagacgcau

SEQ ID NO: 1018317 - RNA, 22 nt, Human
guaaacaucgacccaacagggg

SEQ ID NO: 1018318 - RNA, 22 nt, Human
uguugaagauaaaguucucauu

SEQ ID NO: 1018319 - RNA, 22 nt, Human
gaggaacccagcugggguugcc

SEQ ID NO: 1018320 - RNA, 22 nt, Human
aaaggccagguuggcugguauu

SEQ ID NO: 1018321 - RNA, 22 nt, Human
ugggcagagaguagaggcaacg

SEQ ID NO: 1018322 - RNA, 22 nt, Human
acagaauuaaugaaaauuacaa

SEQ ID NO: 1018323 - RNA, 20 nt, Human
uuaagaaaagcacauccugc

SEQ ID NO: 1018324 - RNA, 22 nt, Human
augccuguaaucccagugcuuu

SEQ ID NO: 1018325 - RNA, 22 nt, Human
gccaggcagcaggaagccagug

SEQ ID NO: 1018326 - RNA, 22 nt, Human
ggucucagacuggcaggcagug

SEQ ID NO: 1018327 - RNA, 22 nt, Human
uauuauguagaguaaggguuaa

SEQ ID NO: 1018328 - RNA, 22 nt, Human
agcugcucugauaaaccuacuu

SEQ ID NO: 1018329 - RNA, 22 nt, Human
uccucagacuucccuuugugua

SEQ ID NO: 1018330 - RNA, 18 nt, Human
ucagcuuuugaaaaccaa

SEQ ID NO: 1018331 - RNA, 22 nt, Human
ggcuccucucuggccgcucccg

SEQ ID NO: 1018332 - RNA, 21 nt, Human
aaaaagcuggggcaugcaugc

SEQ ID NO: 1018333 - RNA, 22 nt, Human
ggagccugacagugcccagcau

SEQ ID NO: 1018334 - RNA, 20 nt, Human
aggaacuggaagggaggaaa

SEQ ID NO: 1018335 - RNA, 22 nt, Human
ccugucucuuucaaucugagag

SEQ ID NO: 1018336 - RNA, 22 nt, Human
ugagccagcaggccuccagugg

SEQ ID NO: 1018337 - RNA, 22 nt, Human
augcuguguccuagugaaagaa

SEQ ID NO: 1018338 - RNA, 22 nt, Human
caggccuggggcuggcuuccag

SEQ ID NO: 1018339 - RNA, 22 nt, Human
cacaguggcagguguggguugu

SEQ ID NO: 1018340 - RNA, 22 nt, Human
agcccaugcaacaggccuagcg

SEQ ID NO: 1018341 - RNA, 22 nt, Human
uuccgcuggggccgccuggcgg

SEQ ID NO: 1018342 - RNA, 22 nt, Human
accuggcacuacaggcaccugu

SEQ ID NO: 1018343 - RNA, 22 nt, Human
ugccugggguuggcaaacugcu

SEQ ID NO: 1018344 - RNA, 22 nt, Human
uccuuggcuuucuggagcuucu

SEQ ID NO: 1018345 - RNA, 22 nt, Human
ggcugccugaggcagugagaga

SEQ ID NO: 1018346 - RNA, 22 nt, Human
ucuguucaucaucuggacacau

SEQ ID NO: 1018347 - RNA, 22 nt, Human
ucuuuauuuuaugcuugugcaa

SEQ ID NO: 1018348 - RNA, 22 nt, Human
uugcaucuagggcaacccagag

SEQ ID NO: 1018349 - RNA, 22 nt, Human
ggcugccagugagugcagaccg

SEQ ID NO: 1018350 - RNA, 22 nt, Human
cuggguggaaagugcugagaau

SEQ ID NO: 1018351 - RNA, 22 nt, Human
ggcacagggaggcccuggugug

SEQ ID NO: 1018352 - RNA, 22 nt, Human
ugggcuggcccaccacaccucg

SEQ ID NO: 1018353 - RNA, 22 nt, Human
aggagucauaaaugugaacaaa

SEQ ID NO: 1018354 - RNA, 22 nt, Human
gagagcugcaagguagggcggg

SEQ ID NO: 1018355 - RNA, 22 nt, Human
aaauucagcagugaaaugcccc

SEQ ID NO: 1018356 - RNA, 22 nt, Human
ucugagaggcaucugcacuucu

SEQ ID NO: 1018357 - RNA, 22 nt, Human
aaguggacuaauacaaggacua

SEQ ID NO: 1018358 - RNA, 22 nt, Human
uguuacuuaucucacgugaugc

SEQ ID NO: 1018359 - RNA, 22 nt, Human
gcuugaaaauucauagguauuu

SEQ ID NO: 1018360 - RNA, 22 nt, Human
gcugagugauugauauuuuagu

SEQ ID NO: 1018361 - RNA, 22 nt, Human
cacugucuuuugugaagacaau

SEQ ID NO: 1018362 - RNA, 22 nt, Human
ucucagggagggcgagucagcg

SEQ ID NO: 1018363 - RNA, 22 nt, Human
aguggcagagguugacugcagu

SEQ ID NO: 1018364 - RNA, 22 nt, Human
gcaggaugagugaguacauuua

SEQ ID NO: 1018365 - RNA, 22 nt, Human
agagcugaauuuggguggugga

SEQ ID NO: 1018366 - RNA, 22 nt, Human
ccagcuuuccugcgaguugauu

SEQ ID NO: 1018367 - RNA, 22 nt, Human
gccaggcagcagcgaggauggu

SEQ ID NO: 1018368 - RNA, 22 nt, Human
gcugccaguaguuggagcucca

SEQ ID NO: 1018369 - RNA, 22 nt, Human
cauuugaauuguucugugggaa

SEQ ID NO: 1018370 - RNA, 22 nt, Human
aaauuucuaagcagccacuucc

SEQ ID NO: 1018371 - RNA, 22 nt, Human
acucuugucucaacuuuuguau

SEQ ID NO: 1018372 - RNA, 22 nt, Human
cuccucacacccacugcaacca

SEQ ID NO: 1018373 - RNA, 22 nt, Human
uuucuucaauugcuaacaagga

SEQ ID NO: 1018374 - RNA, 19 nt, Human
auacagauguauccaugau

SEQ ID NO: 1018375 - RNA, 22 nt, Human
uuguggaaauacagacuccaag

SEQ ID NO: 1018376 - RNA, 22 nt, Human
ugcugaggucaccuugcugcua

SEQ ID NO: 1018377 - RNA, 22 nt, Human
cauaauuugugguaguggggga

SEQ ID NO: 1018378 - RNA, 22 nt, Human
cuuauguaugcuacuuuguggu

SEQ ID NO: 1018379 - RNA, 22 nt, Human
uccgccaggacugagggcccau

SEQ ID NO: 1018380 - RNA, 22 nt, Human
ugcauacacaugugcacauacg

SEQ ID NO: 1018381 - RNA, 22 nt, Human
aggccuggcuuugguuugcuga

SEQ ID NO: 1018382 - RNA, 23 nt, Human
ugccucugccucccuagucugca

SEQ ID NO: 1018383 - RNA, 22 nt, Human
uuccuuccauagcaaaacaugc

SEQ ID NO: 1018384 - RNA, 22 nt, Human
uccuugaaugaauguucucucc

SEQ ID NO: 1018385 - RNA, 21 nt, Human
aaaugaaugugguagugcaag

SEQ ID NO: 1018386 - RNA, 22 nt, Human
cuggcagcgguuugcagccugg

SEQ ID NO: 1018387 - RNA, 22 nt, Human
agaggcuguuacacucccagau

SEQ ID NO: 1018388 - RNA, 22 nt, Human
ggucacugcucuaaacaaaagu

SEQ ID NO: 1018389 - RNA, 22 nt, Human
uggcagggugccaguugcgagu

SEQ ID NO: 1018390 - RNA, 22 nt, Human
uugaagaggacuuugcagcugu

SEQ ID NO: 1018391 - RNA, 22 nt, Human
ugcuggaggccugacuguguuu

SEQ ID NO: 1018392 - RNA, 22 nt, Human
ccuucugcuggucaucccagug

SEQ ID NO: 1018393 - RNA, 22 nt, Human
gggaccugaggcccugcuccac

SEQ ID NO: 1018394 - RNA, 22 nt, Human
ccugaagaugcuguggccuggu

SEQ ID NO: 1018395 - RNA, 22 nt, Human
gcugucugacuccaaguuggag

SEQ ID NO: 1018396 - RNA, 22 nt, Human
gcugggcaccucucccagauug

SEQ ID NO: 1018397 - RNA, 22 nt, Human
uagcauuucacugaucuucacu

SEQ ID NO: 1018398 - RNA, 22 nt, Human
agauggguaacuggagucugcu

SEQ ID NO: 1018399 - RNA, 22 nt, Human
gagcaggcuugcagagaagggg

SEQ ID NO: 1018400 - RNA, 22 nt, Human
caguuucuacgacuuaagcaca

SEQ ID NO: 1018401 - RNA, 22 nt, Human
ugugugaaggaauauauacuca

SEQ ID NO: 1018402 - RNA, 23 nt, Human
acuuaaaugguucuuuaucucag

SEQ ID NO: 1018403 - RNA, 22 nt, Human
cuuccucccccacacacucacu

SEQ ID NO: 1018404 - RNA, 22 nt, Human
ggcaaggccaggccuccaagac

SEQ ID NO: 1018405 - RNA, 22 nt, Human
caggcagauuugcugcccucca

SEQ ID NO: 1018406 - RNA, 18 nt, Human
cccagcccaccauuucuc

SEQ ID NO: 1018407 - RNA, 22 nt, Human
ugggugggagcacccugucugg

SEQ ID NO: 1018408 - RNA, 22 nt, Human
gcucccaggaagagaagggcca

SEQ ID NO: 1018409 - RNA, 22 nt, Human
ucuuucucucuaaucaagcaca

SEQ ID NO: 1018410 - RNA, 21 nt, Human
uucuuuccccagaggacuaaa

SEQ ID NO: 1018411 - RNA, 22 nt, Human
uuugcauuuccagaguagcaga

SEQ ID NO: 1018412 - RNA, 20 nt, Human
cucaggauugucuagccccu

SEQ ID NO: 1018413 - RNA, 18 nt, Human
gagucuuuguuacugcug

SEQ ID NO: 1018414 - RNA, 21 nt, Human
aaagaacaggcagauguucuu

SEQ ID NO: 1018415 - RNA, 22 nt, Human
aggagcccugcgggaggcagag

SEQ ID NO: 1018416 - RNA, 22 nt, Human
cagaguacugggagaacagaag

SEQ ID NO: 1018417 - RNA, 22 nt, Human
gcugucuuccuugcuccaaggg

SEQ ID NO: 1018418 - RNA, 22 nt, Human
aaagguuugcauggaauuuacc

SEQ ID NO: 1018419 - RNA, 22 nt, Human
uuuggaauauuaaaaugucuca

SEQ ID NO: 1018420 - RNA, 22 nt, Human
ggaggccaugaggcucuaggug

SEQ ID NO: 1018421 - RNA, 22 nt, Human
uuacauuuugggguaaggauaa

SEQ ID NO: 1018422 - RNA, 22 nt, Human
uggaagcuguggcauaacugag

SEQ ID NO: 1018423 - RNA, 22 nt, Human
agaaaugcauuagcacauauag

SEQ ID NO: 1018424 - RNA, 22 nt, Human
cagcagagguuggaacaguucu

SEQ ID NO: 1018425 - RNA, 22 nt, Human
cggggcuguagcacagcugagc

SEQ ID NO: 1018426 - RNA, 22 nt, Human
aaaaguaauugaugcaaucgua

SEQ ID NO: 1018427 - RNA, 21 nt, Human
aaggccugcuuacugcuaguu

SEQ ID NO: 1018428 - RNA, 22 nt, Human
agagccugugggagaugcagcu

SEQ ID NO: 1018429 - RNA, 22 nt, Human
uuauuccauucaguucaacaag

SEQ ID NO: 1018430 - RNA, 22 nt, Human
gcccaugcacuuucugugaugg

SEQ ID NO: 1018431 - RNA, 22 nt, Human
cauuuagaaacuguuuuuaaca

SEQ ID NO: 1018432 - RNA, 22 nt, Human
gagcuuugcuggaagccugggg

SEQ ID NO: 1018433 - RNA, 22 nt, Human
cacauaauugaacgugaugagu

SEQ ID NO: 1018434 - RNA, 22 nt, Human
gcccucagaugggaaaggaggg

SEQ ID NO: 1018435 - RNA, 22 nt, Human
gcucucugggugugucuagaua

SEQ ID NO: 1018436 - RNA, 22 nt, Human
gcacccagaggucagcagugcu

SEQ ID NO: 1018437 - RNA, 22 nt, Human
acuggcagagguuggacaccau

SEQ ID NO: 1018438 - RNA, 22 nt, Human
cgggcagauugggaagguucau

SEQ ID NO: 1018439 - RNA, 22 nt, Human
guuauaaaugacugcaaaaguu

SEQ ID NO: 1018440 - RNA, 22 nt, Human
gcugcagcuguaggacacaauu

SEQ ID NO: 1018441 - RNA, 22 nt, Human
ucaccuuagcuagaggaagaga

SEQ ID NO: 1018442 - RNA, 22 nt, Human
gggcccuggacguggcggcaga

SEQ ID NO: 1018443 - RNA, 22 nt, Human
ugaagcaggaucguuugcuuca

SEQ ID NO: 1018444 - RNA, 22 nt, Human
auucacagaauaguuuuaccag

SEQ ID NO: 1018445 - RNA, 22 nt, Human
ggcauggcuggguucuggugag

SEQ ID NO: 1018446 - RNA, 22 nt, Human
ccacugaaggucaacauagagc

SEQ ID NO: 1018447 - RNA, 22 nt, Human
gugaaggacuagcauggagggc

SEQ ID NO: 1018448 - RNA, 22 nt, Human
auauuaggugcucaauacaugc

SEQ ID NO: 1018449 - RNA, 22 nt, Human
cauuuguuuagaagucuuuaua

SEQ ID NO: 1018450 - RNA, 20 nt, Human
gaggcucugggcauggcgcc

SEQ ID NO: 1018451 - RNA, 22 nt, Human
gagcagcuguccccaaagcuuc

SEQ ID NO: 1018452 - RNA, 22 nt, Human
guacaguuuucaguguucacug

SEQ ID NO: 1018453 - RNA, 22 nt, Human
uuuuucaucugauugauaacuc

SEQ ID NO: 1018454 - RNA, 22 nt, Human
ucagagugaccuuacauggucu

SEQ ID NO: 1018455 - RNA, 22 nt, Human
uuggaaggagucaaccagcuga

SEQ ID NO: 1018456 - RNA, 22 nt, Human
uaaggccaaacuauuauaguuc

SEQ ID NO: 1018457 - RNA, 20 nt, Human
ugugcccaauguccagguuc

SEQ ID NO: 1018458 - RNA, 22 nt, Human
agauauguuuguauauauuugu

SEQ ID NO: 1018459 - RNA, 22 nt, Human
ccucagggacuccaugcugcag

SEQ ID NO: 1018460 - RNA, 22 nt, Human
uuuuuauaacucuuuugugaca

SEQ ID NO: 1018461 - RNA, 22 nt, Human
gaaugcagauggcugguguaug

SEQ ID NO: 1018462 - RNA, 22 nt, Human
caaaugcagucccuuuguugcu

SEQ ID NO: 1018463 - RNA, 22 nt, Human
agcaccuguggcucaugcucgu

SEQ ID NO: 1018464 - RNA, 20 nt, Human
agacaaaaugacuucaugca

SEQ ID NO: 1018465 - RNA, 22 nt, Human
gcagcaggcacggucucgacau

SEQ ID NO: 1018466 - RNA, 20 nt, Human
ccugggcuccaggagccccg

SEQ ID NO: 1018467 - RNA, 22 nt, Human
uuuccucuuugugacacagcug

SEQ ID NO: 1018468 - RNA, 18 nt, Human
agaaggagcuaugggcag

SEQ ID NO: 1018469 - RNA, 22 nt, Human
ggccugucucacccccgggugc

SEQ ID NO: 1018470 - RNA, 22 nt, Human
caguccaggccuggaggagcca

SEQ ID NO: 1018471 - RNA, 22 nt, Human
caggagugcagguggugaggca

SEQ ID NO: 1018472 - RNA, 22 nt, Human
gaggccacaguccugaggcauc

SEQ ID NO: 1018473 - RNA, 22 nt, Human
gcuuugaagucugugucuuuug

SEQ ID NO: 1018474 - RNA, 20 nt, Human
cagcaggcuauggggcaccc

SEQ ID NO: 1018475 - RNA, 22 nt, Human
ggcugucugugguggagcguug

SEQ ID NO: 1018476 - RNA, 20 nt, Human
acugccuugguucaguaggu

SEQ ID NO: 1018477 - RNA, 22 nt, Human
acagucuacuugagcuuguaua

SEQ ID NO: 1018478 - RNA, 22 nt, Human
uauuucagacacugaucuugca

SEQ ID NO: 1018479 - RNA, 22 nt, Human
aauguguagggugccuguuuuu

SEQ ID NO: 1018480 - RNA, 18 nt, Human
agccuggaggguugaagu

SEQ ID NO: 1018481 - RNA, 22 nt, Human
cugucugucaaguucaucucca

SEQ ID NO: 1018482 - RNA, 22 nt, Human
uggcagagaauaaaucuugacu

SEQ ID NO: 1018483 - RNA, 22 nt, Human
cauuaugugggaaaauguucuu

SEQ ID NO: 1018484 - RNA, 22 nt, Human
agugcuuuagcauccaacuguc

SEQ ID NO: 1018485 - RNA, 22 nt, Human
uggcuucugggacuugugagca

SEQ ID NO: 1018486 - RNA, 22 nt, Human
agccuggcccugcugaacucug

SEQ ID NO: 1018487 - RNA, 22 nt, Human
cuggaaggucuguccccacugc

SEQ ID NO: 1018488 - RNA, 22 nt, Human
ucucagaguuugaaucuggagu

SEQ ID NO: 1018489 - RNA, 22 nt, Human
ugagaauuuucaguuucacuuu

SEQ ID NO: 1018490 - RNA, 22 nt, Human
uagaaucuaguucauucauuug

SEQ ID NO: 1018491 - RNA, 22 nt, Human
cugggagcaagaggcugcaaau

SEQ ID NO: 1018492 - RNA, 22 nt, Human
aggcuuccuggaggaagaggua

SEQ ID NO: 1018493 - RNA, 22 nt, Human
gcagggcacagacagugccaag

SEQ ID NO: 1018494 - RNA, 22 nt, Human
ggucccaggcucccucuugucc

SEQ ID NO: 1018495 - RNA, 22 nt, Human
uaacuuucuucauaugugaacc

SEQ ID NO: 1018496 - RNA, 17 nt, Human
uugggagagaaagguau

SEQ ID NO: 1018497 - RNA, 22 nt, Human
agguggaacguucaggugcuag

SEQ ID NO: 1018498 - RNA, 22 nt, Human
ucccacugcuuugcucugcuca

SEQ ID NO: 1018499 - RNA, 22 nt, Human
cuggucugagggcucuugaggc

SEQ ID NO: 1018500 - RNA, 22 nt, Human
cauucacaucuuguuccaucac

SEQ ID NO: 1018501 - RNA, 22 nt, Human
cagggccucauccucagagauu

SEQ ID NO: 1018502 - RNA, 22 nt, Human
gcugugcagguccccacugccu

SEQ ID NO: 1018503 - RNA, 22 nt, Human
gucugucaucugagauggagug

SEQ ID NO: 1018504 - RNA, 22 nt, Human
ucagcaauaugauaggcuuugu

SEQ ID NO: 1018505 - RNA, 19 nt, Human
uccuuugaauaucaguuga

SEQ ID NO: 1018506 - RNA, 22 nt, Human
ucauaaaucauacuccauuugc

SEQ ID NO: 1018507 - RNA, 22 nt, Human
ucucgacagccuggcacagugg

SEQ ID NO: 1018508 - RNA, 22 nt, Human
ggagccugugcccaagcccaga

SEQ ID NO: 1018509 - RNA, 22 nt, Human
gcucccuguucucagccaugau

SEQ ID NO: 1018510 - RNA, 22 nt, Human
aaagaacaaaugauauaugguu

SEQ ID NO: 1018511 - RNA, 22 nt, Human
uuucuguagugugguauguagg

SEQ ID NO: 1018512 - RNA, 22 nt, Human
cagcagguauguuuguucagca

SEQ ID NO: 1018513 - RNA, 22 nt, Human
gaggccagaaugagcugaaugc

SEQ ID NO: 1018514 - RNA, 22 nt, Human
cugccucugguuuuggucccug

SEQ ID NO: 1018515 - RNA, 22 nt, Human
ucacuuauaaaaugcaagaucu

SEQ ID NO: 1018516 - RNA, 22 nt, Human
cuuaauuucaaacugcuaguga

SEQ ID NO: 1018517 - RNA, 22 nt, Human
aaugaaugaaccacauauaaca

SEQ ID NO: 1018518 - RNA, 22 nt, Human
aggagcugacuuguaaagcauu

SEQ ID NO: 1018519 - RNA, 22 nt, Human
ccccagcacuuggaguggggag

SEQ ID NO: 1018520 - RNA, 22 nt, Human
acuguugucaggcugcuuugga

SEQ ID NO: 1018521 - RNA, 22 nt, Human
uugcucugacuggagugcagug

SEQ ID NO: 1018522 - RNA, 22 nt, Human
cccaggaucaccuggucaaggg

SEQ ID NO: 1018523 - RNA, 22 nt, Human
ccagcugcuugggaaaaugucu

SEQ ID NO: 1018524 - RNA, 22 nt, Human
auauaauuguucugaaguguuu

SEQ ID NO: 1018525 - RNA, 22 nt, Human
uaaggccaggcuguggucggca

SEQ ID NO: 1018526 - RNA, 22 nt, Human
ugaggcaggaguucaggcugcg

SEQ ID NO: 1018527 - RNA, 22 nt, Human
guacccagaggcaugaucccag

SEQ ID NO: 1018528 - RNA, 22 nt, Human
aggcuuuaaguggccuacagcu

SEQ ID NO: 1018529 - RNA, 22 nt, Human
uggucuuuaagguagcugucau

SEQ ID NO: 1018530 - RNA, 21 nt, Human
ugcaggaaagugcugcgaccc

SEQ ID NO: 1018531 - RNA, 22 nt, Human
cuucugagcagaccuccugggg

SEQ ID NO: 1018532 - RNA, 22 nt, Human
aaauuucuguuguuuugagcca

SEQ ID NO: 1018533 - RNA, 22 nt, Human
ggccgggcaggucucagccagc

SEQ ID NO: 1018534 - RNA, 22 nt, Human
ggguggaguagaaagaugaauu

SEQ ID NO: 1018535 - RNA, 22 nt, Human
aggcccugagcauccgagggca

SEQ ID NO: 1018536 - RNA, 22 nt, Human
uucuucucagggucccacaugg

SEQ ID NO: 1018537 - RNA, 22 nt, Human
ugcacauucacuuagguauugu

SEQ ID NO: 1018538 - RNA, 22 nt, Human
uauuaaauuauggauuuaggag

SEQ ID NO: 1018539 - RNA, 22 nt, Human
aaaaauagcuucucuugucccu

SEQ ID NO: 1018540 - RNA, 22 nt, Human
ucauuucucccggccaaaaacu

SEQ ID NO: 1018541 - RNA, 22 nt, Human
auucaaauuaaguuaauucagc

SEQ ID NO: 1018542 - RNA, 22 nt, Human
gagugcagaugaacagaagauu

SEQ ID NO: 1018543 - RNA, 22 nt, Human
agacuucuuugugagcauuuuc

SEQ ID NO: 1018544 - RNA, 22 nt, Human
uuaaaaccaucagcuguaagau

SEQ ID NO: 1018545 - RNA, 22 nt, Human
gagggguguggagccaucaguu

SEQ ID NO: 1018546 - RNA, 22 nt, Human
aaaaugagauacaguuugaaag

SEQ ID NO: 1018547 - RNA, 22 nt, Human
gaaggccucacucugcagcaua

SEQ ID NO: 1018548 - RNA, 22 nt, Human
cugcccugggauggucugugcg

SEQ ID NO: 1018549 - RNA, 22 nt, Human
agcagcauguugggaugugaaa

SEQ ID NO: 1018550 - RNA, 22 nt, Human
ugacaaaacugcaauuacuuuu

SEQ ID NO: 1018551 - RNA, 22 nt, Human
augggaggcagcagagcccagc

SEQ ID NO: 1018552 - RNA, 22 nt, Human
gucccucugugucccugcaguc

SEQ ID NO: 1018553 - RNA, 20 nt, Human
ugcagcugcaggaggguggg

SEQ ID NO: 1018554 - RNA, 22 nt, Human
ggcacugacacuagcauggcac

SEQ ID NO: 1018555 - RNA, 22 nt, Human
cuacauuuuaauaagcugcuua

SEQ ID NO: 1018556 - RNA, 22 nt, Human
uugaaucucuugaaucucuguu

SEQ ID NO: 1018557 - RNA, 22 nt, Human
caaacugagcaucagaaaguuu

SEQ ID NO: 1018558 - RNA, 22 nt, Human
gaggugggaugugugugcuacu

SEQ ID NO: 1018559 - RNA, 22 nt, Human
cugggcuggagugcaauggcgc

SEQ ID NO: 1018560 - RNA, 22 nt, Human
uccugcugagcgucugucauuu

SEQ ID NO: 1018561 - RNA, 18 nt, Human
acucaggaaaugaugaca

SEQ ID NO: 1018562 - RNA, 22 nt, Human
agaggucauaucucagaagaga

SEQ ID NO: 1018563 - RNA, 22 nt, Human
acagagcugggugcccccugga

SEQ ID NO: 1018564 - RNA, 22 nt, Human
ucuuuccaaggacucuguagca

SEQ ID NO: 1018565 - RNA, 20 nt, Human
acagaaagagagaaugucag

SEQ ID NO: 1018566 - RNA, 22 nt, Human
cuguccuugcuggccagguaug

SEQ ID NO: 1018567 - RNA, 22 nt, Human
agucccagcuucccccaugcag

SEQ ID NO: 1018568 - RNA, 22 nt, Human
caggaggcuccuagggcucugu

SEQ ID NO: 1018569 - RNA, 22 nt, Human
caugaaaaugucaaguucugcu

SEQ ID NO: 1018570 - RNA, 22 nt, Human
cagagcagugaggaguugugua

SEQ ID NO: 1018571 - RNA, 22 nt, Human
uggcagggucuugcuguguugc

SEQ ID NO: 1018572 - RNA, 19 nt, Human
cugcugggugcugagggag

SEQ ID NO: 1018573 - RNA, 21 nt, Human
agcuuguguguaucacagugu

SEQ ID NO: 1018574 - RNA, 22 nt, Human
uccucaggagagcuccuaugcc

SEQ ID NO: 1018575 - RNA, 22 nt, Human
ggagugggaacaaugacauggu

SEQ ID NO: 1018576 - RNA, 22 nt, Human
gcagagaccccgcagugaggcc

SEQ ID NO: 1018577 - RNA, 22 nt, Human
uggagcagcuaagccucugaga

SEQ ID NO: 1018578 - RNA, 22 nt, Human
uccaggcaaagccuuguagacg

SEQ ID NO: 1018579 - RNA, 22 nt, Human
gagcagggccacuucuguaccu

SEQ ID NO: 1018580 - RNA, 22 nt, Human
ugcacagugaccccuggugacu

SEQ ID NO: 1018581 - RNA, 22 nt, Human
agccacagagguugaugugguu

SEQ ID NO: 1018582 - RNA, 22 nt, Human
gcuggccuugugucugaggaag

SEQ ID NO: 1018583 - RNA, 22 nt, Human
gcugcucucucccuaaguuggg

SEQ ID NO: 1018584 - RNA, 22 nt, Human
uuacauuuuaguuaaccuguga

SEQ ID NO: 1018585 - RNA, 22 nt, Human
gcuucuggaggagcugggcuga

SEQ ID NO: 1018586 - RNA, 22 nt, Human
ucauccaggaaaagauuuggaa

SEQ ID NO: 1018587 - RNA, 21 nt, Human
uucaaaaugguguguuugucu

SEQ ID NO: 1018588 - RNA, 22 nt, Human
agggcagcacaaggcauggacu

SEQ ID NO: 1018589 - RNA, 22 nt, Human
ugagagugauugguucgaaugu

SEQ ID NO: 1018590 - RNA, 22 nt, Human
ucucaccaaagccuugaccaua

SEQ ID NO: 1018591 - RNA, 20 nt, Human
cguaaggcaagugcugcauc

SEQ ID NO: 1018592 - RNA, 23 nt, Human
ugaguucucaucuuggcuucuau

SEQ ID NO: 1018593 - RNA, 22 nt, Human
gcuccuggucuggagcuucaag

SEQ ID NO: 1018594 - RNA, 22 nt, Human
aggccagcuguuacuagagcca

SEQ ID NO: 1018595 - RNA, 22 nt, Human
acagcagcauaaacugacuaag

SEQ ID NO: 1018596 - RNA, 22 nt, Human
gcucaggaccgaggggugggaa

SEQ ID NO: 1018597 - RNA, 22 nt, Human
ugaaacauugcacuguaugaau

SEQ ID NO: 1018598 - RNA, 22 nt, Human
ccagagccuaagaucugauccu

SEQ ID NO: 1018599 - RNA, 22 nt, Human
auggcacugaccucccuuguaa

SEQ ID NO: 1018600 - RNA, 22 nt, Human
caggccucagagaguggcgggg

SEQ ID NO: 1018601 - RNA, 22 nt, Human
gcacagagggcagugagccucu

SEQ ID NO: 1018602 - RNA, 21 nt, Human
gggagcuggaaacugggugac

SEQ ID NO: 1018603 - RNA, 22 nt, Human
auccaaagauggaaagaacuuu

SEQ ID NO: 1018604 - RNA, 22 nt, Human
agucucugagguucagaugccu

SEQ ID NO: 1018605 - RNA, 22 nt, Human
uuaauaaaguaugaauuggaaa

SEQ ID NO: 1018606 - RNA, 22 nt, Human
uuauuuucagcuaggaaagcca

SEQ ID NO: 1018607 - RNA, 20 nt, Human
gagauggcuaagugcugaac

SEQ ID NO: 1018608 - RNA, 22 nt, Human
cuccaggguuccccgauccacu

SEQ ID NO: 1018609 - RNA, 22 nt, Human
agccauggcgccacuagaggga

SEQ ID NO: 1018610 - RNA, 22 nt, Human
aaacaugaauagauauuaaaca

SEQ ID NO: 1018611 - RNA, 22 nt, Human
cuucaguucuaaaguagaaugu

SEQ ID NO: 1018612 - RNA, 22 nt, Human
cugcuguguugccagugucacc

SEQ ID NO: 1018613 - RNA, 22 nt, Human
aaaagguagauucuccuucuau

SEQ ID NO: 1018614 - RNA, 22 nt, Human
ucagcuuuccugcagcuaaggg

SEQ ID NO: 1018615 - RNA, 21 nt, Human
gugcuuuuccuuaauguucuu

SEQ ID NO: 1018616 - RNA, 22 nt, Human
aggauccuuuuucugcuguuug

SEQ ID NO: 1018617 - RNA, 19 nt, Human
gcacugaagaguuggucac

SEQ ID NO: 1018618 - RNA, 22 nt, Human
aggcuuccucgugccuuagaua

SEQ ID NO: 1018619 - RNA, 22 nt, Human
uguaacaguaagccugugagcu

SEQ ID NO: 1018620 - RNA, 22 nt, Human
gggccugggaacuugcauuuag

SEQ ID NO: 1018621 - RNA, 22 nt, Human
cuucaagauauuucuagaauca

SEQ ID NO: 1018622 - RNA, 22 nt, Human
aguucucagcuuaguaugcugu

SEQ ID NO: 1018623 - RNA, 22 nt, Human
guaggcagucucucaggugauc

SEQ ID NO: 1018624 - RNA, 22 nt, Human
cacagcuuguuuagugacucac

SEQ ID NO: 1018625 - RNA, 22 nt, Human
auuuucauggcuucugcucagu

SEQ ID NO: 1018626 - RNA, 22 nt, Human
acagaaauauagaagguaggaa

SEQ ID NO: 1018627 - RNA, 22 nt, Human
ccuggccugcucggcucuuaag

SEQ ID NO: 1018628 - RNA, 22 nt, Human
gucuggaguggggccugagaau

SEQ ID NO: 1018629 - RNA, 22 nt, Human
agggaucaaaaaauguacaugc

SEQ ID NO: 1018630 - RNA, 22 nt, Human
uccagccaagggagguuacuag

SEQ ID NO: 1018631 - RNA, 22 nt, Human
aauuagggagccaucauaaggu

SEQ ID NO: 1018632 - RNA, 22 nt, Human
ucagcaggcgguuccuuguggg

SEQ ID NO: 1018633 - RNA, 22 nt, Human
gguuggggcgagcuggaggccc

SEQ ID NO: 1018634 - RNA, 22 nt, Human
agugucauuuuguccaucuucu

SEQ ID NO: 1018635 - RNA, 22 nt, Human
gaagagcugacagugucauccu

SEQ ID NO: 1018636 - RNA, 22 nt, Human
cugcaggguuuuucaaggacaa

SEQ ID NO: 1018637 - RNA, 22 nt, Human
guggccuggaguuugauguagg

SEQ ID NO: 1018638 - RNA, 22 nt, Human
ugggagcaagcuacuuagggaa

SEQ ID NO: 1018639 - RNA, 22 nt, Human
gccugcuggauguggccaggcc

SEQ ID NO: 1018640 - RNA, 22 nt, Human
uguucucacuggaugcuucaca

SEQ ID NO: 1018641 - RNA, 22 nt, Human
acacauuucuaaauuuuuaccg

SEQ ID NO: 1018642 - RNA, 22 nt, Human
ucccagagcagaugugcuaaag

SEQ ID NO: 1018643 - RNA, 22 nt, Human
uggcagagcaaaaagauagaau

SEQ ID NO: 1018644 - RNA, 23 nt, Human
ugcaugugaauucauacuuguuu

SEQ ID NO: 1018645 - RNA, 22 nt, Human
cagcauggcuugaguguuuccu

SEQ ID NO: 1018646 - RNA, 22 nt, Human
uacagcauguccuuagcaaggc

SEQ ID NO: 1018647 - RNA, 22 nt, Human
gccugggugaauuugauccuaa

SEQ ID NO: 1018648 - RNA, 22 nt, Human
ucaauauauuccauguuuucuc

SEQ ID NO: 1018649 - RNA, 22 nt, Human
cagggucuuauaaggccaauuu

SEQ ID NO: 1018650 - RNA, 22 nt, Human
gagcugugaaaagugccugggg

SEQ ID NO: 1018651 - RNA, 22 nt, Human
aaaaaugaauucuucaguggca

SEQ ID NO: 1018652 - RNA, 22 nt, Human
aucuaagauguauugagcacuu

SEQ ID NO: 1018653 - RNA, 22 nt, Human
aguaugaauugcuuugccugua

SEQ ID NO: 1018654 - RNA, 22 nt, Human
augaacacauguacacauuucu

SEQ ID NO: 1018655 - RNA, 22 nt, Human
ggaggccaaggcaggcggauca

SEQ ID NO: 1018656 - RNA, 22 nt, Human
auuucagaugaccaaauggaaa

SEQ ID NO: 1018657 - RNA, 22 nt, Human
uuuuuaagcuccuuugauguca

SEQ ID NO: 1018658 - RNA, 22 nt, Human
uaugcacauuaucuaauccauu

SEQ ID NO: 1018659 - RNA, 22 nt, Human
cagcugaguuuccaagucugcc

SEQ ID NO: 1018660 - RNA, 22 nt, Human
ccucuucugcuucaggagcacu

SEQ ID NO: 1018661 - RNA, 20 nt, Human
aggaagccaaaggcugucuu

SEQ ID NO: 1018662 - RNA, 22 nt, Human
agcuggccuucggugucacugg

SEQ ID NO: 1018663 - RNA, 22 nt, Human
ccacagagacagagcccagggu

SEQ ID NO: 1018664 - RNA, 22 nt, Human
ucuacagacagagcagguggga

SEQ ID NO: 1018665 - RNA, 22 nt, Human
guggccucuguuggcuccuagg

SEQ ID NO: 1018666 - RNA, 22 nt, Human
guccuggggauacagaagugaa

SEQ ID NO: 1018667 - RNA, 22 nt, Human
agccaaggcagcuagagcucug

SEQ ID NO: 1018668 - RNA, 19 nt, Human
uuggaaggagccagagugg

SEQ ID NO: 1018669 - RNA, 21 nt, Human
aaucauacaaaacaugucagg

SEQ ID NO: 1018670 - RNA, 22 nt, Human
gacucguucauaguuccaauuu

SEQ ID NO: 1018671 - RNA, 19 nt, Human
ggcugggucuggcagguuc

SEQ ID NO: 1018672 - RNA, 22 nt, Human
ugggcaagucacuucugucuuu

SEQ ID NO: 1018673 - RNA, 22 nt, Human
uaacacaugucugggaugugaa

SEQ ID NO: 1018674 - RNA, 22 nt, Human
ucagggaccccucugaguggag

SEQ ID NO: 1018675 - RNA, 20 nt, Human
uagggcucauuaugaucucc

SEQ ID NO: 1018676 - RNA, 22 nt, Human
caagccugucucaccagugcua

SEQ ID NO: 1018677 - RNA, 22 nt, Human
agacaggcagaggcugcagagg

SEQ ID NO: 1018678 - RNA, 21 nt, Human
uucucagagucuauuacaguu

SEQ ID NO: 1018679 - RNA, 22 nt, Human
uagaaaugugauaauagcuuaa

SEQ ID NO: 1018680 - RNA, 22 nt, Human
ggcuguccuuggccaaggcacu

SEQ ID NO: 1018681 - RNA, 22 nt, Human
cagcaugcaaguccagaugugg

SEQ ID NO: 1018682 - RNA, 22 nt, Human
agggaggagaauggacuccuuc

SEQ ID NO: 1018683 - RNA, 22 nt, Human
ugcaugcauaaauguacacaca

SEQ ID NO: 1018684 - RNA, 22 nt, Human
uucuucaguuugguaaauguaa

SEQ ID NO: 1018685 - RNA, 22 nt, Human
cuuccagguccuucuugagaag

SEQ ID NO: 1018686 - RNA, 22 nt, Human
gaggaggcuggcgccgccugcc

SEQ ID NO: 1018687 - RNA, 22 nt, Human
cagaggcauauaauugcugggg

SEQ ID NO: 1018688 - RNA, 20 nt, Human
acaggagaucugaggaaagg

SEQ ID NO: 1018689 - RNA, 22 nt, Human
cauucacaaagcugauugaugg

SEQ ID NO: 1018690 - RNA, 19 nt, Human
ucucagaggaaaaauugcu

SEQ ID NO: 1018691 - RNA, 22 nt, Human
guuagaaacacauucuuauuga

SEQ ID NO: 1018692 - RNA, 22 nt, Human
gugauugcccagcaccauuguu

SEQ ID NO: 1018693 - RNA, 22 nt, Human
gcagagcugucuaagucacuuc

SEQ ID NO: 1018694 - RNA, 22 nt, Human
gggagagagagcucauguugaa

SEQ ID NO: 1018695 - RNA, 22 nt, Human
uccaguggcaccuuggcccuca

SEQ ID NO: 1018696 - RNA, 22 nt, Human
gccagcagguggagagaucaag

SEQ ID NO: 1018697 - RNA, 22 nt, Human
gaaaggugccccauaggcagga

SEQ ID NO: 1018698 - RNA, 22 nt, Human
ugggccacaagccaugggacca

SEQ ID NO: 1018699 - RNA, 22 nt, Human
uucucuuauucuggauaugcag

SEQ ID NO: 1018700 - RNA, 22 nt, Human
agagaacacgugcaucugcaau

SEQ ID NO: 1018701 - RNA, 22 nt, Human
augggggccugaacaggcaaaa

SEQ ID NO: 1018702 - RNA, 22 nt, Human
auuuccucaugaucauaaugca

SEQ ID NO: 1018703 - RNA, 22 nt, Human
ugggaccugcuccuggaaugag

SEQ ID NO: 1018704 - RNA, 22 nt, Human
gcugugugacugagagccuggc

SEQ ID NO: 1018705 - RNA, 18 nt, Human
cuguucuagaacuccugu

SEQ ID NO: 1018706 - RNA, 22 nt, Human
uggggacauagccagucuggcu

SEQ ID NO: 1018707 - RNA, 22 nt, Human
ugaaggcuguuggauggggaag

SEQ ID NO: 1018708 - RNA, 23 nt, Human
aaacaugcagcacaugaaugcua

SEQ ID NO: 1018709 - RNA, 22 nt, Human
caggucagagucccccuguccu

SEQ ID NO: 1018710 - RNA, 22 nt, Human
cuuggggcagugcuuggcacau

SEQ ID NO: 1018711 - RNA, 21 nt, Human
gccagggaagagaguuggcug

SEQ ID NO: 1018712 - RNA, 22 nt, Human
cugaaugucgaucagcuugggu

SEQ ID NO: 1018713 - RNA, 22 nt, Human
cacucugaugguuucuguucaa

SEQ ID NO: 1018714 - RNA, 22 nt, Human
acagcuuuucaauucugcugag

SEQ ID NO: 1018715 - RNA, 22 nt, Human
gaugcacagugacccugccagu

SEQ ID NO: 1018716 - RNA, 22 nt, Human
aggcucaggcaggaauggcgga

SEQ ID NO: 1018717 - RNA, 22 nt, Human
ccagcuuuuccucucauugcuu

SEQ ID NO: 1018718 - RNA, 22 nt, Human
agcugccagcaaguuucaaaca

SEQ ID NO: 1018719 - RNA, 22 nt, Human
caggaggcaucauggagcggac

SEQ ID NO: 1018720 - RNA, 22 nt, Human
ccaggccucaccugcccaccua

SEQ ID NO: 1018721 - RNA, 22 nt, Human
gaguuauucuagguccuuugua

SEQ ID NO: 1018722 - RNA, 22 nt, Human
ugccaggaggaggugggacaga

SEQ ID NO: 1018723 - RNA, 23 nt, Human
uccugagaugagacagugcugcc

SEQ ID NO: 1018724 - RNA, 23 nt, Human
uggcagagacccagaaucuacau

SEQ ID NO: 1018725 - RNA, 22 nt, Human
aggcccaguagugcugccuuua

SEQ ID NO: 1018726 - RNA, 22 nt, Human
ggcugcuuuaucggcugcugaa

SEQ ID NO: 1018727 - RNA, 22 nt, Human
gaggaguguauuccacaccacu

SEQ ID NO: 1018728 - RNA, 22 nt, Human
auucucaaacaagugguuugau

SEQ ID NO: 1018729 - RNA, 17 nt, Human
acagagcacaucaagau

SEQ ID NO: 1018730 - RNA, 22 nt, Human
ggucagagggugggcugccugu

SEQ ID NO: 1018731 - RNA, 22 nt, Human
ucuucccuaaucaccaucuuca

SEQ ID NO: 1018732 - RNA, 20 nt, Human
cugugcuuuggaaccuggaa

SEQ ID NO: 1018733 - RNA, 22 nt, Human
ccccuuccacagugcuuccuaa

SEQ ID NO: 1018734 - RNA, 22 nt, Human
gccuucugauaucucuuggcau

SEQ ID NO: 1018735 - RNA, 22 nt, Human
caaauaucuuuggcaaagagaa

SEQ ID NO: 1018736 - RNA, 22 nt, Human
cuugaaagcacuuaguaaauua

SEQ ID NO: 1018737 - RNA, 20 nt, Human
ugcugucguguuuucugcuu

SEQ ID NO: 1018738 - RNA, 22 nt, Human
uggcucagucuggguugacuga

SEQ ID NO: 1018739 - RNA, 22 nt, Human
cucaggauagauuguccucuca

SEQ ID NO: 1018740 - RNA, 22 nt, Human
agcuguccuggcucaggcugug

SEQ ID NO: 1018741 - RNA, 22 nt, Human
aaauucuaugucaauguuuauu

SEQ ID NO: 1018742 - RNA, 22 nt, Human
cagcagagacgguaagcagaac

SEQ ID NO: 1018743 - RNA, 22 nt, Human
aaaauugaagugaucaggaacu

SEQ ID NO: 1018744 - RNA, 22 nt, Human
ucuggcucugaauucacuucug

SEQ ID NO: 1018745 - RNA, 22 nt, Human
aagugacaaaaggguauccaaa

SEQ ID NO: 1018746 - RNA, 22 nt, Human
cuggcuggccggagcgaggcgg

SEQ ID NO: 1018747 - RNA, 22 nt, Human
ugcuguguggaugugaagaauc

SEQ ID NO: 1018748 - RNA, 22 nt, Human
ucauugcauuuauucacuggca

SEQ ID NO: 1018749 - RNA, 22 nt, Human
uucauuccuucccuaagcaacu

SEQ ID NO: 1018750 - RNA, 22 nt, Human
gugucccaggccucuggaauua

SEQ ID NO: 1018751 - RNA, 22 nt, Human
ccaaguacagauuccuccacug

SEQ ID NO: 1018752 - RNA, 22 nt, Human
gcagaggcuccauuuuacagau

SEQ ID NO: 1018753 - RNA, 22 nt, Human
gaggcuggcagaaaagcacagg

SEQ ID NO: 1018754 - RNA, 22 nt, Human
aaguucaagagugacauauuag

SEQ ID NO: 1018755 - RNA, 22 nt, Human
ggugggcaggucacucugccuc

SEQ ID NO: 1018756 - RNA, 22 nt, Human
ggcccagcugugcuuccagccc

SEQ ID NO: 1018757 - RNA, 22 nt, Human
gcaaguuauuuccauuuaaagc

SEQ ID NO: 1018758 - RNA, 22 nt, Human
agaaauguuacaguuguuauuu

SEQ ID NO: 1018759 - RNA, 22 nt, Human
aucagagauggcuccagugcuc

SEQ ID NO: 1018760 - RNA, 22 nt, Human
ucccaaggugcucggcaacagg

SEQ ID NO: 1018761 - RNA, 22 nt, Human
accugcaggcacaggugugcgc

SEQ ID NO: 1018762 - RNA, 17 nt, Human
ugagaaguaggcaucau

SEQ ID NO: 1018763 - RNA, 22 nt, Human
ccucagcucuucccugugcaca

SEQ ID NO: 1018764 - RNA, 22 nt, Human
cagggcuccccgcaccgcagcc

SEQ ID NO: 1018765 - RNA, 22 nt, Human
uccaugaggaccaaauucguag

SEQ ID NO: 1018766 - RNA, 22 nt, Human
augucaaaucaguuuuaucaga

SEQ ID NO: 1018767 - RNA, 22 nt, Human
gaccugccugagcugccucugc

SEQ ID NO: 1018768 - RNA, 22 nt, Human
cuccugggaauuuaguugugag

SEQ ID NO: 1018769 - RNA, 22 nt, Human
agcugcuguggggcucggccug

SEQ ID NO: 1018770 - RNA, 22 nt, Human
gcuccugggcucuaccuugcua

SEQ ID NO: 1018771 - RNA, 21 nt, Human
gggcuggacaugguggcucau

SEQ ID NO: 1018772 - RNA, 21 nt, Human
ugggaccuagcuuugcacagg

SEQ ID NO: 1018773 - RNA, 22 nt, Human
aaggucauuuuuuccucuguug

SEQ ID NO: 1018774 - RNA, 22 nt, Human
cuggcaggagcauucacagagg

SEQ ID NO: 1018775 - RNA, 22 nt, Human
cagacagacagccguggccacc

SEQ ID NO: 1018776 - RNA, 20 nt, Human
uggcccaguggggcagggug

SEQ ID NO: 1018777 - RNA, 19 nt, Human
agcagcuggagguggagug

SEQ ID NO: 1018778 - RNA, 22 nt, Human
uaugagcuuccaguguugcaug

SEQ ID NO: 1018779 - RNA, 22 nt, Human
ccaggagcaacuugaaggcaag

SEQ ID NO: 1018780 - RNA, 22 nt, Human
uauuuaguuaucuuucauaaaa

SEQ ID NO: 1018781 - RNA, 21 nt, Human
ccugggagaauuggguguggc

SEQ ID NO: 1018782 - RNA, 22 nt, Human
agagugggugaucucuguuguc

SEQ ID NO: 1018783 - RNA, 22 nt, Human
accuuucaaaguggcuaucacu

SEQ ID NO: 1018784 - RNA, 22 nt, Human
gcugggcuucucaaugcugccu

SEQ ID NO: 1018785 - RNA, 22 nt, Human
caguguuccaggcggcagugaa

SEQ ID NO: 1018786 - RNA, 22 nt, Human
agaaaauuagauuuuacugugu

SEQ ID NO: 1018787 - RNA, 22 nt, Human
agcuuuaucagaggagucucua

SEQ ID NO: 1018788 - RNA, 22 nt, Human
ugauuuccuagcugacaugaaa

SEQ ID NO: 1018789 - RNA, 22 nt, Human
cagcagggggcagcgcagauca

SEQ ID NO: 1018790 - RNA, 22 nt, Human
guccucuguagggcugggccac

SEQ ID NO: 1018791 - RNA, 22 nt, Human
cccuuucccuucuggcucaggg

SEQ ID NO: 1018792 - RNA, 22 nt, Human
gagguacagaguguuccaaugu

SEQ ID NO: 1018793 - RNA, 22 nt, Human
gagagggccgggggccagcucc

SEQ ID NO: 1018794 - RNA, 22 nt, Human
ggacacaguggaagacagcuug

SEQ ID NO: 1018795 - RNA, 22 nt, Human
uugaauaggacucagcagugau

SEQ ID NO: 1018796 - RNA, 22 nt, Human
auguuauaguuauaaaaugagg

SEQ ID NO: 1018797 - RNA, 22 nt, Human
aggcccuguaagguguggagau

SEQ ID NO: 1018798 - RNA, 22 nt, Human
gagauuucuuuugaugccuguc

SEQ ID NO: 1018799 - RNA, 22 nt, Human
gaagucuucauucucucugaga

SEQ ID NO: 1018800 - RNA, 22 nt, Human
agaagccaacagggcaggagag

SEQ ID NO: 1018801 - RNA, 22 nt, Human
acauguaaaaggaacaugcaug

SEQ ID NO: 1018802 - RNA, 22 nt, Human
cuauuagguuggugcaaaagua

SEQ ID NO: 1018803 - RNA, 22 nt, Human
gccagcugguaggcaccuagcc

SEQ ID NO: 1018804 - RNA, 22 nt, Human
agcugccugggcuuguacaccu

SEQ ID NO: 1018805 - RNA, 22 nt, Human
ucuucuucccaucccucaaaug

SEQ ID NO: 1018806 - RNA, 22 nt, Human
gugccugugcggacucagggaa

SEQ ID NO: 1018807 - RNA, 22 nt, Human
uuuaacacuaguuucuuuaacu

SEQ ID NO: 1018808 - RNA, 22 nt, Human
aucucauaacucauuugaagac

SEQ ID NO: 1018809 - RNA, 22 nt, Human
acaagagauuaucuacagauga

SEQ ID NO: 1018810 - RNA, 22 nt, Human
uuggcaguagugguaguacauu

SEQ ID NO: 1018811 - RNA, 22 nt, Human
gagcucagcacuaaaaucaugu

SEQ ID NO: 1018812 - RNA, 22 nt, Human
gcccaucaucacuguggaggcu

SEQ ID NO: 1018813 - RNA, 22 nt, Human
uagaaauguuagauguauugag

SEQ ID NO: 1018814 - RNA, 22 nt, Human
guggauggacaugggcaagagg

SEQ ID NO: 1018815 - RNA, 22 nt, Human
gaugcugaagugaagugaucuu

SEQ ID NO: 1018816 - RNA, 22 nt, Human
ucacaauauuuaucuuccaauu

SEQ ID NO: 1018817 - RNA, 22 nt, Human
cauuucugggagacaugcuaga

SEQ ID NO: 1018818 - RNA, 22 nt, Human
aguuauaaucugcuacugauau

SEQ ID NO: 1018819 - RNA, 22 nt, Human
agcagggcagcugaugcgcacg

SEQ ID NO: 1018820 - RNA, 22 nt, Human
uccaguggugguuugaagggca

SEQ ID NO: 1018821 - RNA, 22 nt, Human
gcugagcugaggcagggcuggg

SEQ ID NO: 1018822 - RNA, 22 nt, Human
uagccucucuccuccacaaccu

SEQ ID NO: 1018823 - RNA, 22 nt, Human
agauaacuuuuggguauucaug

SEQ ID NO: 1018824 - RNA, 22 nt, Human
uucuucuccgaggagggcuggu

SEQ ID NO: 1018825 - RNA, 20 nt, Human
cugggcagguguuugaucuc

SEQ ID NO: 1018826 - RNA, 22 nt, Human
aaaggucaagcuggacucaggu

SEQ ID NO: 1018827 - RNA, 22 nt, Human
uguguaaagcuuguuccagaaa

SEQ ID NO: 1018828 - RNA, 22 nt, Human
aauaaucucccuuuuuguaugu

SEQ ID NO: 1018829 - RNA, 22 nt, Human
cucaggagaugacagaagguau

SEQ ID NO: 1018830 - RNA, 22 nt, Human
agccaggaaugcaugcucugcu

SEQ ID NO: 1018831 - RNA, 22 nt, Human
aggccuggcaugagaccugaga

SEQ ID NO: 1018832 - RNA, 22 nt, Human
aguccagaccccggcagcuggu

SEQ ID NO: 1018833 - RNA, 22 nt, Human
aggcacuggguaauuaguagcu

SEQ ID NO: 1018834 - RNA, 22 nt, Human
cuggcccagucucagaguguca

SEQ ID NO: 1018835 - RNA, 22 nt, Human
uggagcaggacugcugcccuca

SEQ ID NO: 1018836 - RNA, 22 nt, Human
uccaggcaugguguaauuuugc

SEQ ID NO: 1018837 - RNA, 23 nt, Human
cuuugccacccagagccugacag

SEQ ID NO: 1018838 - RNA, 22 nt, Human
ccuggcugaaccaaugaagugg

SEQ ID NO: 1018839 - RNA, 22 nt, Human
auggcaguuguaugggcuguau

SEQ ID NO: 1018840 - RNA, 22 nt, Human
agaggagcugggaggcccucgu

SEQ ID NO: 1018841 - RNA, 22 nt, Human
uucacaggugacuggggauaac

SEQ ID NO: 1018842 - RNA, 18 nt, Human
uccugccugugccccagg

SEQ ID NO: 1018843 - RNA, 22 nt, Human
uugucuuaaauggauggacaau

SEQ ID NO: 1018844 - RNA, 22 nt, Human
cuggccucaccucagacuuacu

SEQ ID NO: 1018845 - RNA, 22 nt, Human
uggccuuccuggugacucauga

SEQ ID NO: 1018846 - RNA, 21 nt, Human
gcaaggcuuuuguguuuccca

SEQ ID NO: 1018847 - RNA, 22 nt, Human
ucugggugaugaaaugcacugu

SEQ ID NO: 1018848 - RNA, 22 nt, Human
ggggaugguagaccggugacgu

SEQ ID NO: 1018849 - RNA, 22 nt, Human
gucaggauuugaacucaggucu

SEQ ID NO: 1018850 - RNA, 19 nt, Human
caugcugaccugcuguggu

SEQ ID NO: 1018851 - RNA, 22 nt, Human
ugggccugggagggcagacgcu

SEQ ID NO: 1018852 - RNA, 22 nt, Human
agaauuguaagcaauuugauua

SEQ ID NO: 1018853 - RNA, 22 nt, Human
guaagggauuugaacauagguu

SEQ ID NO: 1018854 - RNA, 22 nt, Human
uguggcuuaagaaugccuuuaa

SEQ ID NO: 1018855 - RNA, 22 nt, Human
gcuuugaagacuuuuccagggu

SEQ ID NO: 1018856 - RNA, 22 nt, Human
uguccucuuccagugcuccuuc

SEQ ID NO: 1018857 - RNA, 22 nt, Human
uucaagauggcaccagugagug

SEQ ID NO: 1018858 - RNA, 22 nt, Human
ugagcugggcugggcugagcug

SEQ ID NO: 1018859 - RNA, 22 nt, Human
aagagagaacucccuucgccag

SEQ ID NO: 1018860 - RNA, 22 nt, Human
gugugccaggaacuggcugcug

SEQ ID NO: 1018861 - RNA, 22 nt, Human
aauuucuccaagaaugcuuaga

SEQ ID NO: 1018862 - RNA, 22 nt, Human
ucccaggaauugaagccagugu

SEQ ID NO: 1018863 - RNA, 22 nt, Human
aagugaaacauguaucucuuua

SEQ ID NO: 1018864 - RNA, 22 nt, Human
aagcugaggcccauggcaaggu

SEQ ID NO: 1018865 - RNA, 22 nt, Human
gcaggggcugcugggaacucgg

SEQ ID NO: 1018866 - RNA, 22 nt, Human
aucacauuguuagcauagacug

SEQ ID NO: 1018867 - RNA, 22 nt, Human
gugccugggcaugagcuuguug

SEQ ID NO: 1018868 - RNA, 22 nt, Human
ugagggaggcccuuugagcaga

SEQ ID NO: 1018869 - RNA, 22 nt, Human
cucuccuccaacagcccugccg

SEQ ID NO: 1018870 - RNA, 22 nt, Human
caaaguauauuggauugaaugg

SEQ ID NO: 1018871 - RNA, 22 nt, Human
cagggcagugaagaacacacgu

SEQ ID NO: 1018872 - RNA, 22 nt, Human
cuuucacagcugugcuuaugau

SEQ ID NO: 1018873 - RNA, 22 nt, Human
agaccaagugcaggugccacua

SEQ ID NO: 1018874 - RNA, 22 nt, Human
ggaagagggaaccacgacugua

SEQ ID NO: 1018875 - RNA, 22 nt, Human
agagccugucaauuguaaagag

SEQ ID NO: 1018876 - RNA, 22 nt, Human
uucauucauuacgugccaggca

SEQ ID NO: 1018877 - RNA, 22 nt, Human
cugcagggcccgccugagcccu

SEQ ID NO: 1018878 - RNA, 22 nt, Human
gugggcaaggucccugccagcu

SEQ ID NO: 1018879 - RNA, 22 nt, Human
gaaugugucacccugucccaug

SEQ ID NO: 1018880 - RNA, 22 nt, Human
ggucccagcuggucacugucag

SEQ ID NO: 1018881 - RNA, 22 nt, Human
uagaaaucagguuuuuagaaag

SEQ ID NO: 1018882 - RNA, 22 nt, Human
ucauuacaguguuuauaugucu

SEQ ID NO: 1018883 - RNA, 22 nt, Human
ugggcagagucauacaggagac

SEQ ID NO: 1018884 - RNA, 22 nt, Human
agagccugucugccuuucuacc

SEQ ID NO: 1018885 - RNA, 22 nt, Human
agccaagcugaucuccugcuga

SEQ ID NO: 1018886 - RNA, 22 nt, Human
gcagcagaugcuuucauggaca

SEQ ID NO: 1018887 - RNA, 23 nt, Human
acaaaugcccauacaucuaguuc

SEQ ID NO: 1018888 - RNA, 22 nt, Human
ugucuccucauacugucauauu

SEQ ID NO: 1018889 - RNA, 22 nt, Human
aucccaugagaccacguuggcu

SEQ ID NO: 1018890 - RNA, 17 nt, Human
uucaaagcuuaucaagg

SEQ ID NO: 1018891 - RNA, 22 nt, Human
uuugcagugucagcuucugugu

SEQ ID NO: 1018892 - RNA, 22 nt, Human
agcagcucacaggauuccugaa

SEQ ID NO: 1018893 - RNA, 22 nt, Human
guagcuuaugaaaugugagggg

SEQ ID NO: 1018894 - RNA, 22 nt, Human
cagaagagaugaaauaguauua

SEQ ID NO: 1018895 - RNA, 22 nt, Human
cuucuaggcuucucagggggca

SEQ ID NO: 1018896 - RNA, 23 nt, Human
ucccagccucuucucuugcauac

SEQ ID NO: 1018897 - RNA, 22 nt, Human
uuccagauuucuacacaagacc

SEQ ID NO: 1018898 - RNA, 22 nt, Human
cagcccuggugccaagguuccc

SEQ ID NO: 1018899 - RNA, 22 nt, Human
ccagugugggcccggccuccuc

SEQ ID NO: 1018900 - RNA, 22 nt, Human
gcacagggcccugugcguaggu

SEQ ID NO: 1018901 - RNA, 22 nt, Human
acugugugggccgcucacuggg

SEQ ID NO: 1018902 - RNA, 22 nt, Human
ucuguucaucucaugggagaau

SEQ ID NO: 1018903 - RNA, 22 nt, Human
cagagacagggcagggagugug

SEQ ID NO: 1018904 - RNA, 22 nt, Human
cagggagaggcaucauagggaa

SEQ ID NO: 1018905 - RNA, 22 nt, Human
uguggucucguuauguugccca

SEQ ID NO: 1018906 - RNA, 22 nt, Human
gcccaggagguugggcugugca

SEQ ID NO: 1018907 - RNA, 22 nt, Human
ggauaagaaaauuguaauaacu

SEQ ID NO: 1018908 - RNA, 22 nt, Human
ccugccagcccgcguucaugcc

SEQ ID NO: 1018909 - RNA, 21 nt, Human
agcugcuccagggagcucagg

SEQ ID NO: 1018910 - RNA, 22 nt, Human
aaauguauugcauaggauauuu

SEQ ID NO: 1018911 - RNA, 22 nt, Human
cagacuugacggcagcugcuuu

SEQ ID NO: 1018912 - RNA, 22 nt, Human
acagccaggagccaugggcagg

SEQ ID NO: 1018913 - RNA, 22 nt, Human
cagaagcauuccagcaaauagu

SEQ ID NO: 1018914 - RNA, 22 nt, Human
gccaggcuggucuugaacuccu

SEQ ID NO: 1018915 - RNA, 22 nt, Human
caauaugcaagcuauuaaguau

SEQ ID NO: 1018916 - RNA, 22 nt, Human
ucuacugcacuggugucucauc

SEQ ID NO: 1018917 - RNA, 22 nt, Human
uauauuuaaauccagguugaaa

SEQ ID NO: 1018918 - RNA, 22 nt, Human
ucauuucccuccuacaaagagg

SEQ ID NO: 1018919 - RNA, 22 nt, Human
cacacaggaugaagcagcagaa

SEQ ID NO: 1018920 - RNA, 22 nt, Human
uggcccugaggggcugugcccc

SEQ ID NO: 1018921 - RNA, 20 nt, Human
ggagcugcccugggcuggag

SEQ ID NO: 1018922 - RNA, 22 nt, Human
gagcucaggagcaucagaagaa

SEQ ID NO: 1018923 - RNA, 22 nt, Human
cugucaguaggcucccaucauu

SEQ ID NO: 1018924 - RNA, 22 nt, Human
uccagccaagccuugguagcug

SEQ ID NO: 1018925 - RNA, 22 nt, Human
caguggguggcuaaguggcuga

SEQ ID NO: 1018926 - RNA, 22 nt, Human
uaucuuuagaggaagagaaucu

SEQ ID NO: 1018927 - RNA, 22 nt, Human
uggcucuggcgugaagcccaga

SEQ ID NO: 1018928 - RNA, 22 nt, Human
gacucagugauuugacaugccu

SEQ ID NO: 1018929 - RNA, 22 nt, Human
auaaggcaucucucaguuagca

SEQ ID NO: 1018930 - RNA, 22 nt, Human
ggcacugaaguggguguugggu

SEQ ID NO: 1018931 - RNA, 22 nt, Human
ucuucuuccucauuuauacaua

SEQ ID NO: 1018932 - RNA, 22 nt, Human
aggaggcuguggagcacuccau

SEQ ID NO: 1018933 - RNA, 22 nt, Human
ggggcugggauuugaacccagg

SEQ ID NO: 1018934 - RNA, 22 nt, Human
ggccauggaccccgagcugacc

SEQ ID NO: 1018935 - RNA, 22 nt, Human
uugcugaauugaauccuuuggu

SEQ ID NO: 1018936 - RNA, 22 nt, Human
guuuucaaggggauuuaacuga

SEQ ID NO: 1018937 - RNA, 22 nt, Human
cucugagcccgcugcagcccca

SEQ ID NO: 1018938 - RNA, 22 nt, Human
gagauucuguagucaggcaucu

SEQ ID NO: 1018939 - RNA, 22 nt, Human
gggcucugguacuuccuggcuc

SEQ ID NO: 1018940 - RNA, 22 nt, Human
ugcacccucaucagucaaaugg

SEQ ID NO: 1018941 - RNA, 22 nt, Human
aaggcacuuuucuaaagaccuu

SEQ ID NO: 1018942 - RNA, 22 nt, Human
gcagauggugggggaggaguac

SEQ ID NO: 1018943 - RNA, 22 nt, Human
uuguuuguaugcugagaagaau

SEQ ID NO: 1018944 - RNA, 21 nt, Human
cugugcuucuuccuaagccag

SEQ ID NO: 1018945 - RNA, 22 nt, Human
guuugcauguguacuuaauugg

SEQ ID NO: 1018946 - RNA, 22 nt, Human
gaggaaccacucugagaagcca

SEQ ID NO: 1018947 - RNA, 22 nt, Human
acaggugggcuuaagagucggc

SEQ ID NO: 1018948 - RNA, 18 nt, Human
gugacagcugcuagcuca

SEQ ID NO: 1018949 - RNA, 22 nt, Human
ccugggaagagcugacaggagg

SEQ ID NO: 1018950 - RNA, 22 nt, Human
ugcuggccgugagcucucggga

SEQ ID NO: 1018951 - RNA, 22 nt, Human
gagagaagggggauaugagccu

SEQ ID NO: 1018952 - RNA, 22 nt, Human
uuucauugucuacauaugacau

SEQ ID NO: 1018953 - RNA, 22 nt, Human
ccuggcuccugccucugcaggg

SEQ ID NO: 1018954 - RNA, 22 nt, Human
uaacacaugguucugucaggaa

SEQ ID NO: 1018955 - RNA, 22 nt, Human
gugccagcaguuauggugauuu

SEQ ID NO: 1018956 - RNA, 22 nt, Human
cuucagaagaaaagcagugugu

SEQ ID NO: 1018957 - RNA, 22 nt, Human
ucacauuuuauaucucugguuu

SEQ ID NO: 1018958 - RNA, 22 nt, Human
gcugcugugaauuuuuuaaaug

SEQ ID NO: 1018959 - RNA, 22 nt, Human
aggcuucccaagcagcugcaaa

SEQ ID NO: 1018960 - RNA, 22 nt, Human
agcaauauuuaaagguuugcaa

SEQ ID NO: 1018961 - RNA, 22 nt, Human
ugcaggggcuugucugggccug

SEQ ID NO: 1018962 - RNA, 22 nt, Human
guggcugcagagccagcaagcu

SEQ ID NO: 1018963 - RNA, 22 nt, Human
ucuaggagcaugaagggaaggc

SEQ ID NO: 1018964 - RNA, 22 nt, Human
gucagugucuuaacagagauua

SEQ ID NO: 1018965 - RNA, 22 nt, Human
uggaaggagcuaaggaccuggg

SEQ ID NO: 1018966 - RNA, 22 nt, Human
caguuuuuagauuaguuggugg

SEQ ID NO: 1018967 - RNA, 22 nt, Human
aggcagagaaaaaccagauaug

SEQ ID NO: 1018968 - RNA, 22 nt, Human
ugugcccaucccucuggagugu

SEQ ID NO: 1018969 - RNA, 22 nt, Human
guccucagagugggcagguccu

SEQ ID NO: 1018970 - RNA, 22 nt, Human
uguaugaagccagaaucuguuu

SEQ ID NO: 1018971 - RNA, 22 nt, Human
gcguaaggccucuggucucgga

SEQ ID NO: 1018972 - RNA, 22 nt, Human
ccuguucagagcuaagcaucau

SEQ ID NO: 1018973 - RNA, 22 nt, Human
uaucuguucaauggaagaugac

SEQ ID NO: 1018974 - RNA, 22 nt, Human
uuucaguucaguuuauuauauc

SEQ ID NO: 1018975 - RNA, 22 nt, Human
ucagagugaggcccagcaaucu

SEQ ID NO: 1018976 - RNA, 22 nt, Human
acuuucuccagaaaaccaagga

SEQ ID NO: 1018977 - RNA, 18 nt, Human
ccugccagucuggagcag

SEQ ID NO: 1018978 - RNA, 22 nt, Human
gauuucuuugcaagcuguguuc

SEQ ID NO: 1018979 - RNA, 22 nt, Human
ccuuuuucccuggagggacagc

SEQ ID NO: 1018980 - RNA, 22 nt, Human
uugauacaggccuucuagauga

SEQ ID NO: 1018981 - RNA, 22 nt, Human
gcagagugggagcccagggcug

SEQ ID NO: 1018982 - RNA, 22 nt, Human
ugagcuucaaaauaugugaauc

SEQ ID NO: 1018983 - RNA, 22 nt, Human
cacaggugcuccucggggagcu

SEQ ID NO: 1018984 - RNA, 22 nt, Human
gccucgaggcugagaaggcaca

SEQ ID NO: 1018985 - RNA, 22 nt, Human
ugcaccauacccauuccccucu

SEQ ID NO: 1018986 - RNA, 22 nt, Human
ugcucuggggagcuccucugcg

SEQ ID NO: 1018987 - RNA, 22 nt, Human
ugugugacccccagugaagccu

SEQ ID NO: 1018988 - RNA, 22 nt, Human
gagagcugggggacuguggaug

SEQ ID NO: 1018989 - RNA, 22 nt, Human
ugacagaaauaguucuuaauuu

SEQ ID NO: 1018990 - RNA, 22 nt, Human
uuugcuuguucaagauuucugu

SEQ ID NO: 1018991 - RNA, 22 nt, Human
cagggccagagagggcuggcug

SEQ ID NO: 1018992 - RNA, 22 nt, Human
guggguggaucaccugagguca

SEQ ID NO: 1018993 - RNA, 22 nt, Human
ccagcacugcucucagacugag

SEQ ID NO: 1018994 - RNA, 22 nt, Human
ugagcccagagaucugagcuau

SEQ ID NO: 1018995 - RNA, 22 nt, Human
ugugaaauucuugaaaugcaca

SEQ ID NO: 1018996 - RNA, 17 nt, Human
uccaggcagcaacugag

SEQ ID NO: 1018997 - RNA, 22 nt, Human
uuugaaauuaagauauugucca

SEQ ID NO: 1018998 - RNA, 22 nt, Human
ugggcagacgcuguuggaaggc

SEQ ID NO: 1018999 - RNA, 22 nt, Human
uccaucagauucccuccugaga

SEQ ID NO: 1019000 - RNA, 22 nt, Human
gccaggggacgcggagcgacga

SEQ ID NO: 1019001 - RNA, 22 nt, Human
caguacuuugcaucauuccacu

SEQ ID NO: 1019002 - RNA, 22 nt, Human
acugccaggauggcacuagagg

SEQ ID NO: 1019003 - RNA, 22 nt, Human
auuagcugaccucuaaggagcc

SEQ ID NO: 1019004 - RNA, 22 nt, Human
aauaugcauguauacaugugua

SEQ ID NO: 1019005 - RNA, 22 nt, Human
ggaggccuagccagcuccaguu

SEQ ID NO: 1019006 - RNA, 22 nt, Human
gcucucuguuauuaagaucuuu

SEQ ID NO: 1019007 - RNA, 19 nt, Human
uuagaaacuguugacacug

SEQ ID NO: 1019008 - RNA, 22 nt, Human
gucccagaggcuuuggccacag

SEQ ID NO: 1019009 - RNA, 22 nt, Human
auagaacagaaacagaugcaca

SEQ ID NO: 1019010 - RNA, 22 nt, Human
agaagcugccuacaugaccagc

SEQ ID NO: 1019011 - RNA, 22 nt, Human
cagcuggcccuuugguagccuu

SEQ ID NO: 1019012 - RNA, 18 nt, Human
ucucugaauauuuuaugu

SEQ ID NO: 1019013 - RNA, 22 nt, Human
auguuuccgugagcauccuuga

SEQ ID NO: 1019014 - RNA, 22 nt, Human
augcccaaugucacaauuuuug

SEQ ID NO: 1019015 - RNA, 22 nt, Human
acaggcaggcuucggccagagc

SEQ ID NO: 1019016 - RNA, 22 nt, Human
gcauggcagugaggauggugcu

SEQ ID NO: 1019017 - RNA, 18 nt, Human
uccagagcuacuguggug

SEQ ID NO: 1019018 - RNA, 22 nt, Human
cugcaggggccucgagcacagg

SEQ ID NO: 1019019 - RNA, 22 nt, Human
ugcaugcugcacacaugcguag

SEQ ID NO: 1019020 - RNA, 22 nt, Human
uacauaauaaggggcauggugu

SEQ ID NO: 1019021 - RNA, 21 nt, Human
uuuuuucuugcgugaggccug

SEQ ID NO: 1019022 - RNA, 22 nt, Human
gcugucacucaccaggccugca

SEQ ID NO: 1019023 - RNA, 22 nt, Human
cuggcaggaaguuagaugguaa

SEQ ID NO: 1019024 - RNA, 22 nt, Human
ucagaagacuacuaggacacau

SEQ ID NO: 1019025 - RNA, 22 nt, Human
uggagccagagcgcagccuggg

SEQ ID NO: 1019026 - RNA, 22 nt, Human
gccugcugaaccucaugcaguc

SEQ ID NO: 1019027 - RNA, 22 nt, Human
gagugucugaauuagagcacaa

SEQ ID NO: 1019028 - RNA, 16 nt, Human
cagaguguaaacagga

SEQ ID NO: 1019029 - RNA, 22 nt, Human
cauuuccagcuccugcaucaug

SEQ ID NO: 1019030 - RNA, 22 nt, Human
aggccuguuccuuccugggcac

SEQ ID NO: 1019031 - RNA, 22 nt, Human
cgggcagaucacacagggcuug

SEQ ID NO: 1019032 - RNA, 22 nt, Human
gacagggccgcagauggagacu

SEQ ID NO: 1019033 - RNA, 22 nt, Human
ucaggcugugggcacuggccau

SEQ ID NO: 1019034 - RNA, 22 nt, Human
cuguucucuggcgguggcuguu

SEQ ID NO: 1019035 - RNA, 22 nt, Human
agucacccuccaacucuccacu

SEQ ID NO: 1019036 - RNA, 22 nt, Human
ugaaggaagaauaggcaguguu

SEQ ID NO: 1019037 - RNA, 22 nt, Human
uauccuuguacuauaguauuua

SEQ ID NO: 1019038 - RNA, 22 nt, Human
gagaggugaauguggaugccac

SEQ ID NO: 1019039 - RNA, 19 nt, Human
acagaaauguaagugagac

SEQ ID NO: 1019040 - RNA, 22 nt, Human
gagcagugguugaacagaggca

SEQ ID NO: 1019041 - RNA, 22 nt, Human
ugaaccagagucuccagugguu

SEQ ID NO: 1019042 - RNA, 22 nt, Human
gcagccacuaguuuuccuguuu

SEQ ID NO: 1019043 - RNA, 22 nt, Human
cugucuccagggcaggugcagg

SEQ ID NO: 1019044 - RNA, 23 nt, Human
agcuucauugaccuccgcagggg

SEQ ID NO: 1019045 - RNA, 20 nt, Human
aucuggcucagauccugcag

SEQ ID NO: 1019046 - RNA, 20 nt, Human
uccuggccuucucgggcagu

SEQ ID NO: 1019047 - RNA, 22 nt, Human
uaaugaauaaacuugagaguca

SEQ ID NO: 1019048 - RNA, 22 nt, Human
ccucagcugcuucccuggagcc

SEQ ID NO: 1019049 - RNA, 22 nt, Human
auaagagcuagucuuuuccuug

SEQ ID NO: 1019050 - RNA, 22 nt, Human
gcucugcucuaacauuccugac

SEQ ID NO: 1019051 - RNA, 22 nt, Human
caucacagauguuguguggagu

SEQ ID NO: 1019052 - RNA, 22 nt, Human
ggugcagaggagccagcugggg

SEQ ID NO: 1019053 - RNA, 22 nt, Human
ggagccugugggaugagaugug

SEQ ID NO: 1019054 - RNA, 22 nt, Human
cugggacccugcccuguggccu

SEQ ID NO: 1019055 - RNA, 22 nt, Human
cuguuaaucugcuugcaugaug

SEQ ID NO: 1019056 - RNA, 22 nt, Human
ugcucacugaacucuugcuguc

SEQ ID NO: 1019057 - RNA, 22 nt, Human
agaaaacuugucacagcucuca

SEQ ID NO: 1019058 - RNA, 22 nt, Human
ccuggcagguggcgcccucggc

SEQ ID NO: 1019059 - RNA, 22 nt, Human
ccagagaggccaaggucguggu

SEQ ID NO: 1019060 - RNA, 22 nt, Human
aacaguaacgagauguccuaac

SEQ ID NO: 1019061 - RNA, 22 nt, Human
gcaucuuucuguccauucagca

SEQ ID NO: 1019062 - RNA, 22 nt, Human
gccaggcucucagugacugccc

SEQ ID NO: 1019063 - RNA, 22 nt, Human
uucaugugaucacagauuguaa

SEQ ID NO: 1019064 - RNA, 22 nt, Human
uccuucagggggccgccugcac

SEQ ID NO: 1019065 - RNA, 22 nt, Human
cagguccccuccccuaccaggc

SEQ ID NO: 1019066 - RNA, 22 nt, Human
ugcuggggcucugaccacucca

SEQ ID NO: 1019067 - RNA, 22 nt, Human
uagagcugaguugacuccauuu

SEQ ID NO: 1019068 - RNA, 20 nt, Human
aggcagagcgcacuuuuaga

SEQ ID NO: 1019069 - RNA, 22 nt, Human
aaggaagggaaauagugauguc

SEQ ID NO: 1019070 - RNA, 22 nt, Human
agcuagaauguuccuuuucauu

SEQ ID NO: 1019071 - RNA, 22 nt, Human
aagucacacuagacaacugagg

SEQ ID NO: 1019072 - RNA, 22 nt, Human
gcagagccgugaauggauuuca

SEQ ID NO: 1019073 - RNA, 22 nt, Human
aaagguuaagguguucaagaaa

SEQ ID NO: 1019074 - RNA, 22 nt, Human
guuucacagucugcagaauuuu

SEQ ID NO: 1019075 - RNA, 20 nt, Human
aagggcagagggaacagacu

SEQ ID NO: 1019076 - RNA, 22 nt, Human
auguagaauggugauuggcagg

SEQ ID NO: 1019077 - RNA, 22 nt, Human
uggcacugaaaaaggagagguu

SEQ ID NO: 1019078 - RNA, 22 nt, Human
agggaaggaaaagcugucgcuu

SEQ ID NO: 1019079 - RNA, 22 nt, Human
ucugcuguaaagaauuucugcc

SEQ ID NO: 1019080 - RNA, 22 nt, Human
ucccagaggacuguuggugcua

SEQ ID NO: 1019081 - RNA, 22 nt, Human
gccagguggcugagcagcugca

SEQ ID NO: 1019082 - RNA, 22 nt, Human
gccacaggcacuuaagggcugg

SEQ ID NO: 1019083 - RNA, 22 nt, Human
acccaggguagagugcaguggc

SEQ ID NO: 1019084 - RNA, 22 nt, Human
gcuggagguagggagguccugu

SEQ ID NO: 1019085 - RNA, 22 nt, Human
aggcagaggagaaugaucuucc

SEQ ID NO: 1019086 - RNA, 22 nt, Human
ucaguguaaguuauguagaugu

SEQ ID NO: 1019087 - RNA, 22 nt, Human
ugggaccuguuacauugaguua

SEQ ID NO: 1019088 - RNA, 22 nt, Human
uagcuuuaaaaaucaucaaagc

SEQ ID NO: 1019089 - RNA, 19 nt, Human
gcagccaggugcucuaccu

SEQ ID NO: 1019090 - RNA, 22 nt, Human
ucucucagucagaugcuaaaga

SEQ ID NO: 1019091 - RNA, 22 nt, Human
aggaugaauaacugaaauggug

SEQ ID NO: 1019092 - RNA, 22 nt, Human
cugagccaaccacagcaggagc

SEQ ID NO: 1019093 - RNA, 22 nt, Human
ucccagaguucaaugggaaggu

SEQ ID NO: 1019094 - RNA, 22 nt, Human
ggggaccuuuccauuucugaga

SEQ ID NO: 1019095 - RNA, 22 nt, Human
ucaucucaaaacccaaggggca

SEQ ID NO: 1019096 - RNA, 22 nt, Human
aucauucuaguccuuauggucu

SEQ ID NO: 1019097 - RNA, 22 nt, Human
agaauaugaucggaauacagau

SEQ ID NO: 1019098 - RNA, 20 nt, Human
ccaggccugggccugcucua

SEQ ID NO: 1019099 - RNA, 22 nt, Human
cugccgaguacagccauagaaa

SEQ ID NO: 1019100 - RNA, 22 nt, Human
gccaggcagauaugugagcuua

SEQ ID NO: 1019101 - RNA, 22 nt, Human
acuuccugcuaugagcuucugu

SEQ ID NO: 1019102 - RNA, 22 nt, Human
aggcuguggugcugaaggaggg

SEQ ID NO: 1019103 - RNA, 22 nt, Human
agcaggcuuucaagagucuucu

SEQ ID NO: 1019104 - RNA, 22 nt, Human
ccuguguggccaggcuggaguc

SEQ ID NO: 1019105 - RNA, 22 nt, Human
ugagccugcugucgcuggaccc

SEQ ID NO: 1019106 - RNA, 22 nt, Human
ccugauggagcccugcugcaug

SEQ ID NO: 1019107 - RNA, 22 nt, Human
aucccuggacggcgccucccca

SEQ ID NO: 1019108 - RNA, 22 nt, Human
uuuauuauagugguggggacug

SEQ ID NO: 1019109 - RNA, 21 nt, Human
ugucagagcuuguaggacauu

SEQ ID NO: 1019110 - RNA, 22 nt, Human
cugggccuagaggaagcugaca

SEQ ID NO: 1019111 - RNA, 18 nt, Human
aaggcuucaaagaguaga

SEQ ID NO: 1019112 - RNA, 20 nt, Human
ucacauccucucccaacaug

SEQ ID NO: 1019113 - RNA, 22 nt, Human
ccagagaguaucauggagagua

SEQ ID NO: 1019114 - RNA, 22 nt, Human
cagugauguuucugcaucagag

SEQ ID NO: 1019115 - RNA, 22 nt, Human
ugugaaaagggcuuuguacaaa

SEQ ID NO: 1019116 - RNA, 22 nt, Human
auguagagcaguguuguccaau

SEQ ID NO: 1019117 - RNA, 20 nt, Human
ugcucugucuaaaacuuccc

SEQ ID NO: 1019118 - RNA, 22 nt, Human
agagcagguggcaacucuggga

SEQ ID NO: 1019119 - RNA, 22 nt, Human
ggucauuguucuuuucugugau

SEQ ID NO: 1019120 - RNA, 22 nt, Human
uaacagaaaggcucaggugcuc

SEQ ID NO: 1019121 - RNA, 22 nt, Human
uugguuuacuaggauucaaauu

SEQ ID NO: 1019122 - RNA, 22 nt, Human
caaagguauucucauuuuggaa

SEQ ID NO: 1019123 - RNA, 22 nt, Human
cagccagcuucagauccaagcc

SEQ ID NO: 1019124 - RNA, 22 nt, Human
cuuccuguugucacagucugcg

SEQ ID NO: 1019125 - RNA, 22 nt, Human
cccugcagacgucuugaugccu

SEQ ID NO: 1019126 - RNA, 23 nt, Human
uggcucugagagguucagaugcu

SEQ ID NO: 1019127 - RNA, 22 nt, Human
uagagcuauuuagagcauuuua

SEQ ID NO: 1019128 - RNA, 22 nt, Human
aauccugugugacucuggggag

SEQ ID NO: 1019129 - RNA, 22 nt, Human
uuuccauauucugcgucugcca

SEQ ID NO: 1019130 - RNA, 22 nt, Human
uuacuuuguucucaagauaugu

SEQ ID NO: 1019131 - RNA, 22 nt, Human
cugggcaguuuauucaguucug

SEQ ID NO: 1019132 - RNA, 22 nt, Human
gugguaauagagcuccaaacua

SEQ ID NO: 1019133 - RNA, 22 nt, Human
caaauagugucacauugugagg

SEQ ID NO: 1019134 - RNA, 23 nt, Human
aaccagauaaauggcuccagggc

SEQ ID NO: 1019135 - RNA, 22 nt, Human
cagccugcuagggcaaugccuu

SEQ ID NO: 1019136 - RNA, 22 nt, Human
cucuggaguucuucaagcuacu

SEQ ID NO: 1019137 - RNA, 22 nt, Human
cuggcugccacuucagggucuu

SEQ ID NO: 1019138 - RNA, 22 nt, Human
ucagaaaugaucguuauucauu

SEQ ID NO: 1019139 - RNA, 22 nt, Human
ucaucaguuuagaaaaaauaug

SEQ ID NO: 1019140 - RNA, 22 nt, Human
uucugucauuuagcauugucau

SEQ ID NO: 1019141 - RNA, 22 nt, Human
gcuggagauaguaggauccaua

SEQ ID NO: 1019142 - RNA, 22 nt, Human
uaauuauucuagucacauagca

SEQ ID NO: 1019143 - RNA, 22 nt, Human
aguuaaagucugaaauagagaa

SEQ ID NO: 1019144 - RNA, 20 nt, Human
agaggcuuccuugggaggag

SEQ ID NO: 1019145 - RNA, 22 nt, Human
acuuaaaaacagauccagcagg

SEQ ID NO: 1019146 - RNA, 22 nt, Human
uaaggccaauuacauauguuca

SEQ ID NO: 1019147 - RNA, 22 nt, Human
ugcagaggugaaagacuagcaa

SEQ ID NO: 1019148 - RNA, 22 nt, Human
cagccagcuggcacugugagua

SEQ ID NO: 1019149 - RNA, 22 nt, Human
auguagcaugaggcacugugcc

SEQ ID NO: 1019150 - RNA, 22 nt, Human
aauguucagaggacaauauaaa

SEQ ID NO: 1019151 - RNA, 22 nt, Human
acaaaugugucuaauugugccu

SEQ ID NO: 1019152 - RNA, 22 nt, Human
gaggccuguagucauggaugua

SEQ ID NO: 1019153 - RNA, 21 nt, Human
ggagcugcaggagccgaaggc

SEQ ID NO: 1019154 - RNA, 22 nt, Human
gcaggcuccaggccggccccuu

SEQ ID NO: 1019155 - RNA, 22 nt, Human
ccacagggcacagacaggaagc

SEQ ID NO: 1019156 - RNA, 21 nt, Human
aaugcauuaacauaaagcuga

SEQ ID NO: 1019157 - RNA, 19 nt, Human
gcuuuuuguugucaaaggu

SEQ ID NO: 1019158 - RNA, 22 nt, Human
ugauuucauaguauauacauga

SEQ ID NO: 1019159 - RNA, 22 nt, Human
aggcucagaggugagcaucugc

SEQ ID NO: 1019160 - RNA, 23 nt, Human
cauuucugggagauuuauaaaau

SEQ ID NO: 1019161 - RNA, 22 nt, Human
ugaaauguuugaagaccacuga

SEQ ID NO: 1019162 - RNA, 23 nt, Human
agaauuguaaauagaauauaccu

SEQ ID NO: 1019163 - RNA, 22 nt, Human
cccaggcaggagugugguggcu

SEQ ID NO: 1019164 - RNA, 22 nt, Human
aggcaguuguugcugagcagcu

SEQ ID NO: 1019165 - RNA, 22 nt, Human
aggcagcaugcucugcuucuac

SEQ ID NO: 1019166 - RNA, 22 nt, Human
uucuucuucuggcugcaccugg

SEQ ID NO: 1019167 - RNA, 22 nt, Human
caggggcuguggcacauggugu

SEQ ID NO: 1019168 - RNA, 22 nt, Human
ugggacagggaaucugaucccc

SEQ ID NO: 1019169 - RNA, 22 nt, Human
gccagggcaggggagcaucugc

SEQ ID NO: 1019170 - RNA, 22 nt, Human
aaggcuuucagcuaacuugauu

SEQ ID NO: 1019171 - RNA, 22 nt, Human
cacuuagucucaccaguucagu

SEQ ID NO: 1019172 - RNA, 19 nt, Human
ugagugggccccugcagac

SEQ ID NO: 1019173 - RNA, 22 nt, Human
uaaacagaaagcagauguacuu

SEQ ID NO: 1019174 - RNA, 22 nt, Human
uugauuccuugaaauauccuug

SEQ ID NO: 1019175 - RNA, 22 nt, Human
cagagccaggccugcccucuuu

SEQ ID NO: 1019176 - RNA, 20 nt, Human
acaaaauagguacuggguag

SEQ ID NO: 1019177 - RNA, 22 nt, Human
uuguuauaaagacuaaauaugu

SEQ ID NO: 1019178 - RNA, 22 nt, Human
gggcuggaggagauccagaggc

SEQ ID NO: 1019179 - RNA, 22 nt, Human
aucacauugccagugauuaccc

SEQ ID NO: 1019180 - RNA, 22 nt, Human
ugcagcucugaacagucaugaa

SEQ ID NO: 1019181 - RNA, 22 nt, Human
uuucaguuuuugcucgauguau

SEQ ID NO: 1019182 - RNA, 22 nt, Human
agcugguaugaacaggauagga

SEQ ID NO: 1019183 - RNA, 22 nt, Human
aggcacugaagugguaaaugua

SEQ ID NO: 1019184 - RNA, 22 nt, Human
caugaagcuugaagcaguccac

SEQ ID NO: 1019185 - RNA, 22 nt, Human
aaggcugaggagggccugcagg

SEQ ID NO: 1019186 - RNA, 22 nt, Human
augucccuugucugugaugucu

SEQ ID NO: 1019187 - RNA, 19 nt, Human
acucaagucuaaugaaauc

SEQ ID NO: 1019188 - RNA, 18 nt, Human
cuuguucuucucuuggcg

SEQ ID NO: 1019189 - RNA, 22 nt, Human
agccugucugucuccaaagcug

SEQ ID NO: 1019190 - RNA, 22 nt, Human
gcugugcagccaagugccucug

SEQ ID NO: 1019191 - RNA, 22 nt, Human
cugccuguuagucuagcaguua

SEQ ID NO: 1019192 - RNA, 22 nt, Human
uuagccauugucagcacauggc

SEQ ID NO: 1019193 - RNA, 22 nt, Human
ucagcuuuuaaaaacaagaagu

SEQ ID NO: 1019194 - RNA, 22 nt, Human
ucuuuuggguucuuaugauuua

SEQ ID NO: 1019195 - RNA, 22 nt, Human
gcuguuccugcuuagaggucgg

SEQ ID NO: 1019196 - RNA, 22 nt, Human
auuugcuugugcuaugaaaguu

SEQ ID NO: 1019197 - RNA, 22 nt, Human
gcucccugaaaagaacaaaguc

SEQ ID NO: 1019198 - RNA, 22 nt, Human
cagacaggaauucuggcguggu

SEQ ID NO: 1019199 - RNA, 19 nt, Human
guaagggcuaauggacuau

SEQ ID NO: 1019200 - RNA, 22 nt, Human
cauugcaccacauugcaucccu

SEQ ID NO: 1019201 - RNA, 22 nt, Human
auagucuuagucuauaguuuug

SEQ ID NO: 1019202 - RNA, 22 nt, Human
agcaccugcuugugacuaggga

SEQ ID NO: 1019203 - RNA, 22 nt, Human
cuucaugcugauauccucgaug

SEQ ID NO: 1019204 - RNA, 19 nt, Human
agcagccaucgaccaugga

SEQ ID NO: 1019205 - RNA, 22 nt, Human
cugucacacugauaucaggcuu

SEQ ID NO: 1019206 - RNA, 22 nt, Human
acuuccuguuaugugugccucu

SEQ ID NO: 1019207 - RNA, 22 nt, Human
ggguccagaguugaagagguua

SEQ ID NO: 1019208 - RNA, 22 nt, Human
agggcuccaggggcugggugac

SEQ ID NO: 1019209 - RNA, 22 nt, Human
ucuccucuauuucuguauguau

SEQ ID NO: 1019210 - RNA, 20 nt, Human
ggguggaguugcggucugug

SEQ ID NO: 1019211 - RNA, 22 nt, Human
uagaaaguaaaucaguuuuauu

SEQ ID NO: 1019212 - RNA, 20 nt, Human
agcaguaggaccucugggcc

SEQ ID NO: 1019213 - RNA, 22 nt, Human
cucccugggcagauguggcucu

SEQ ID NO: 1019214 - RNA, 22 nt, Human
augcugugauuguagaaauauu

SEQ ID NO: 1019215 - RNA, 22 nt, Human
ugucagaacucuauugaugucc

SEQ ID NO: 1019216 - RNA, 21 nt, Human
gcagaggcacggcaccaaggg

SEQ ID NO: 1019217 - RNA, 22 nt, Human
aauguaugcugugguaucuucu

SEQ ID NO: 1019218 - RNA, 22 nt, Human
aggcucugguuggcaaguaaag

SEQ ID NO: 1019219 - RNA, 22 nt, Human
agagcugagaauguggcuuccu

SEQ ID NO: 1019220 - RNA, 22 nt, Human
uguucaaaugaucuucuuaaau

SEQ ID NO: 1019221 - RNA, 22 nt, Human
uuccauaaucaccuuauucuuu

SEQ ID NO: 1019222 - RNA, 22 nt, Human
acagcuuuaucucagggaucag

SEQ ID NO: 1019223 - RNA, 22 nt, Human
ugaugaaaauaugauucugagg

SEQ ID NO: 1019224 - RNA, 22 nt, Human
caaaguuaugaaugauaagauu

SEQ ID NO: 1019225 - RNA, 22 nt, Human
ccucccucuguuagagcugucu

SEQ ID NO: 1019226 - RNA, 21 nt, Human
uuucugaaggcaacaucuauc

SEQ ID NO: 1019227 - RNA, 22 nt, Human
ucuagaauuuugccauauagcu

SEQ ID NO: 1019228 - RNA, 21 nt, Human
gccauuguuuucuaccuggag

SEQ ID NO: 1019229 - RNA, 23 nt, Human
ugagcugguauuguccaucucca

SEQ ID NO: 1019230 - RNA, 22 nt, Human
ucauugcagacuaacaaucuca

SEQ ID NO: 1019231 - RNA, 22 nt, Human
agccuggaggaggaguugagca

SEQ ID NO: 1019232 - RNA, 22 nt, Human
ggggcugguggugguuucucca

SEQ ID NO: 1019233 - RNA, 16 nt, Human
uguuagcugugcauua

SEQ ID NO: 1019234 - RNA, 19 nt, Human
gcuuuggagggagguucua

SEQ ID NO: 1019235 - RNA, 21 nt, Human
gggaaauuaggauugcucauc

SEQ ID NO: 1019236 - RNA, 22 nt, Human
cuggcaguguccagcucgugau

SEQ ID NO: 1019237 - RNA, 22 nt, Human
ccuggaaggcaggcauggauug

SEQ ID NO: 1019238 - RNA, 22 nt, Human
uucagaaguagcuaagcaguca

SEQ ID NO: 1019239 - RNA, 22 nt, Human
uggcccugccacucacugcuga

SEQ ID NO: 1019240 - RNA, 22 nt, Human
caaggaaacaugaaaugcauug

SEQ ID NO: 1019241 - RNA, 22 nt, Human
caggguggaagcuguagagugg

SEQ ID NO: 1019242 - RNA, 22 nt, Human
cucuguccuugcacaguuccua

SEQ ID NO: 1019243 - RNA, 20 nt, Human
cccuaggaacgcagcaggag

SEQ ID NO: 1019244 - RNA, 22 nt, Human
gcuguggcuguacagagaccau

SEQ ID NO: 1019245 - RNA, 22 nt, Human
ggcagcuguggacgucgucauu

SEQ ID NO: 1019246 - RNA, 23 nt, Human
cugcuguguuggucucgauggga

SEQ ID NO: 1019247 - RNA, 22 nt, Human
ucagcuccucaugcaggggaua

SEQ ID NO: 1019248 - RNA, 16 nt, Human
agaggccuugaggaag

SEQ ID NO: 1019249 - RNA, 20 nt, Human
ccucaguguccuggacuggg

SEQ ID NO: 1019250 - RNA, 22 nt, Human
uccaggcagagcaacaaaauau

SEQ ID NO: 1019251 - RNA, 22 nt, Human
cagcucuguaaauuccuucauc

SEQ ID NO: 1019252 - RNA, 22 nt, Human
aucaaaguaggcauauguuuuu

SEQ ID NO: 1019253 - RNA, 22 nt, Human
ugcccaggaucuggcgaugcuc

SEQ ID NO: 1019254 - RNA, 22 nt, Human
gguggggucacgacagagggaa

SEQ ID NO: 1019255 - RNA, 22 nt, Human
ucauugcaccccagucccagcu

SEQ ID NO: 1019256 - RNA, 22 nt, Human
ucaacagaagugauagcuauua

SEQ ID NO: 1019257 - RNA, 21 nt, Human
gcagcaguguucuagaauacu

SEQ ID NO: 1019258 - RNA, 22 nt, Human
ggcucagguuuccuucccagcu

SEQ ID NO: 1019259 - RNA, 22 nt, Human
uuguaaauaguaguaagaugcc

SEQ ID NO: 1019260 - RNA, 22 nt, Human
gacagccaugcacuucugcugu

SEQ ID NO: 1019261 - RNA, 22 nt, Human
augaaacacacacgcgcauacu

SEQ ID NO: 1019262 - RNA, 18 nt, Human
ucacagugcucuugccua

SEQ ID NO: 1019263 - RNA, 22 nt, Human
auguucuguuuuguaauucaua

SEQ ID NO: 1019264 - RNA, 22 nt, Human
auuuuacuacuccaauuaauga

SEQ ID NO: 1019265 - RNA, 22 nt, Human
ugagccugaguucaaggcugca

SEQ ID NO: 1019266 - RNA, 22 nt, Human
agucccuucucaaagugugcgg

SEQ ID NO: 1019267 - RNA, 22 nt, Human
gcacccaggcuugggcagcaac

SEQ ID NO: 1019268 - RNA, 22 nt, Human
cacagguguucuugcagugaaa

SEQ ID NO: 1019269 - RNA, 22 nt, Human
ugacaugcuuguuuuccuugaa

SEQ ID NO: 1019270 - RNA, 22 nt, Human
cugcugugugcuuacuuggguu

SEQ ID NO: 1019271 - RNA, 21 nt, Human
agcuggcagauauggugucug

SEQ ID NO: 1019272 - RNA, 20 nt, Human
aggcucagcugagcucuugg

SEQ ID NO: 1019273 - RNA, 22 nt, Human
cuugcuggugguguuuucuaug

SEQ ID NO: 1019274 - RNA, 22 nt, Human
aucuuucagggccauuuguauu

SEQ ID NO: 1019275 - RNA, 22 nt, Human
ggccucugccccagccacaccu

SEQ ID NO: 1019276 - RNA, 22 nt, Human
ggaggccaaggcagguggauca

SEQ ID NO: 1019277 - RNA, 22 nt, Human
ggccugagcucuggggaggcaa

SEQ ID NO: 1019278 - RNA, 22 nt, Human
gcugcucugugacagccuccgg

SEQ ID NO: 1019279 - RNA, 22 nt, Human
auucucuuuguauaacaucuug

SEQ ID NO: 1019280 - RNA, 22 nt, Human
uggaggagaauuuauggucgaa

SEQ ID NO: 1019281 - RNA, 20 nt, Human
ggggcccaagcccucuugcc

SEQ ID NO: 1019282 - RNA, 20 nt, Human
cucuccucacccgugucagg

SEQ ID NO: 1019283 - RNA, 18 nt, Human
aggcccuggccucgaaca

SEQ ID NO: 1019284 - RNA, 22 nt, Human
caacuuuaugauugguuuguca

SEQ ID NO: 1019285 - RNA, 22 nt, Human
guccucugggcuuugagcaguc

SEQ ID NO: 1019286 - RNA, 22 nt, Human
acauuucucaucuaguagagua

SEQ ID NO: 1019287 - RNA, 22 nt, Human
gcacugggaaugagggcagcuu

SEQ ID NO: 1019288 - RNA, 22 nt, Human
cuuaaauucuuaaugcccucau

SEQ ID NO: 1019289 - RNA, 22 nt, Human
augcaguauaaaucauuucugg

SEQ ID NO: 1019290 - RNA, 22 nt, Human
ggcagugaaugaaacagaggcu

SEQ ID NO: 1019291 - RNA, 21 nt, Human
ggagauggguaucgccugggc

SEQ ID NO: 1019292 - RNA, 22 nt, Human
uucuaguguccuuggacuugcu

SEQ ID NO: 1019293 - RNA, 22 nt, Human
gcagagcuccccaagacaccaa

SEQ ID NO: 1019294 - RNA, 22 nt, Human
ggcugcuggcauugagguaggu

SEQ ID NO: 1019295 - RNA, 22 nt, Human
gagaaagauguaggcugggagg

SEQ ID NO: 1019296 - RNA, 22 nt, Human
ucugccugccagucugguccuc

SEQ ID NO: 1019297 - RNA, 22 nt, Human
caaaagcaguucuaucugaguu

SEQ ID NO: 1019298 - RNA, 22 nt, Human
uuagccauuuuauacaagugua

SEQ ID NO: 1019299 - RNA, 22 nt, Human
aaauuucaguuaccuuuacguu

SEQ ID NO: 1019300 - RNA, 22 nt, Human
agcugggucuugggccaggaga

SEQ ID NO: 1019301 - RNA, 22 nt, Human
auuuaucaccaguuagcugacu

SEQ ID NO: 1019302 - RNA, 22 nt, Human
cuuuucaugagucuguuauggg

SEQ ID NO: 1019303 - RNA, 22 nt, Human
cagcagcaaaucuagaagagga

SEQ ID NO: 1019304 - RNA, 20 nt, Human
gcauugaguauagacagaug

SEQ ID NO: 1019305 - RNA, 22 nt, Human
gggccuguguguucaggagccu

SEQ ID NO: 1019306 - RNA, 22 nt, Human
uugaggagucaggggcacggaa

SEQ ID NO: 1019307 - RNA, 22 nt, Human
cuugcacacauguacaugugua

SEQ ID NO: 1019308 - RNA, 22 nt, Human
gugccuggagcuaauguguaua

SEQ ID NO: 1019309 - RNA, 22 nt, Human
gggccucugugcagaggggccu

SEQ ID NO: 1019310 - RNA, 20 nt, Human
uguuucuuuuaaugagcggc

SEQ ID NO: 1019311 - RNA, 22 nt, Human
cccagcuccagagccagaaaca

SEQ ID NO: 1019312 - RNA, 22 nt, Human
cacauuuaauccuuuauaagua

SEQ ID NO: 1019313 - RNA, 22 nt, Human
uguguacuugaaagggcagguc

SEQ ID NO: 1019314 - RNA, 22 nt, Human
acugggagucaugaggaaggag

SEQ ID NO: 1019315 - RNA, 22 nt, Human
aggugcagcaugaguccaacgg

SEQ ID NO: 1019316 - RNA, 21 nt, Human
agggaaagaaaaugagcuaau

SEQ ID NO: 1019317 - RNA, 22 nt, Human
uuaugcuaguauaguccuuaga

SEQ ID NO: 1019318 - RNA, 22 nt, Human
gcucagagauguucaguagcuu

SEQ ID NO: 1019319 - RNA, 21 nt, Human
agagagaaggccauauggucc

SEQ ID NO: 1019320 - RNA, 22 nt, Human
uuucacuagaacguucuuguuu

SEQ ID NO: 1019321 - RNA, 22 nt, Human
ccacagccauuccagggaggcu

SEQ ID NO: 1019322 - RNA, 22 nt, Human
ucuuuacaucacaauuguaugg

SEQ ID NO: 1019323 - RNA, 22 nt, Human
acagguggagugguuagcaggc

SEQ ID NO: 1019324 - RNA, 22 nt, Human
ugggaggaaugucacugagcca

SEQ ID NO: 1019325 - RNA, 22 nt, Human
cacagggccuugugugacugca

SEQ ID NO: 1019326 - RNA, 22 nt, Human
ugccugucuuaauaucuggaaa

SEQ ID NO: 1019327 - RNA, 22 nt, Human
aagggcugaaagaccuugggca

SEQ ID NO: 1019328 - RNA, 16 nt, Human
ccuuucucugccuucc

SEQ ID NO: 1019329 - RNA, 22 nt, Human
cugcuuccauaaauaaugugcu

SEQ ID NO: 1019330 - RNA, 22 nt, Human
aggagagagcugagcuuugcug

SEQ ID NO: 1019331 - RNA, 23 nt, Human
agagcaucaugaugcuaagucug

SEQ ID NO: 1019332 - RNA, 22 nt, Human
gugugucccuccucuccugagu

SEQ ID NO: 1019333 - RNA, 19 nt, Human
gccucugcuggggacaggc

SEQ ID NO: 1019334 - RNA, 22 nt, Human
uccaggcagucauuaaucucua

SEQ ID NO: 1019335 - RNA, 22 nt, Human
ccugggagaacugcuggguugg

SEQ ID NO: 1019336 - RNA, 22 nt, Human
gcuccuucaggugguagcuguu

SEQ ID NO: 1019337 - RNA, 22 nt, Human
caggcacugugcaagggucucg

SEQ ID NO: 1019338 - RNA, 18 nt, Human
aggcacagagcauacaua

SEQ ID NO: 1019339 - RNA, 22 nt, Human
uagagcaguuggcagcuguauu

SEQ ID NO: 1019340 - RNA, 22 nt, Human
aggaagcccuugucauuucugu

SEQ ID NO: 1019341 - RNA, 22 nt, Human
aaaugcaccuugcugugagacu

SEQ ID NO: 1019342 - RNA, 22 nt, Human
aucaguuuaacugucaagagcc

SEQ ID NO: 1019343 - RNA, 22 nt, Human
ggcuucucucuucacauggcuu

SEQ ID NO: 1019344 - RNA, 22 nt, Human
uucaggaucaaguugccaguag

SEQ ID NO: 1019345 - RNA, 22 nt, Human
caguguuugcuuaaguuauaug

SEQ ID NO: 1019346 - RNA, 20 nt, Human
cucucuggaaggugggagcc

SEQ ID NO: 1019347 - RNA, 22 nt, Human
acucugaggagugacuagaggu

SEQ ID NO: 1019348 - RNA, 22 nt, Human
uaacacacugaaggugagaugg

SEQ ID NO: 1019349 - RNA, 22 nt, Human
ugcauggacucaucagacaaga

SEQ ID NO: 1019350 - RNA, 23 nt, Human
ugcagagggacugaagccagcuu

SEQ ID NO: 1019351 - RNA, 22 nt, Human
aaguuauaucaucucauugacg

SEQ ID NO: 1019352 - RNA, 22 nt, Human
ccuggggagaagagcuuccccc

SEQ ID NO: 1019353 - RNA, 22 nt, Human
gcaggcucuucuuucugcccag

SEQ ID NO: 1019354 - RNA, 22 nt, Human
cugccucuauucacugaggcag

SEQ ID NO: 1019355 - RNA, 22 nt, Human
uaagaacagugucugucucaca

SEQ ID NO: 1019356 - RNA, 22 nt, Human
cuguggagcuuguggcaguggg

SEQ ID NO: 1019357 - RNA, 23 nt, Human
ucuggcuccauccuuggggaucc

SEQ ID NO: 1019358 - RNA, 22 nt, Human
uggcuucaucugcagcacugcc

SEQ ID NO: 1019359 - RNA, 22 nt, Human
guuuucugauuagcaaaucuga

SEQ ID NO: 1019360 - RNA, 22 nt, Human
caggguggggcuggcuaucaaa

SEQ ID NO: 1019361 - RNA, 22 nt, Human
uagggcaguuauaacauuagug

SEQ ID NO: 1019362 - RNA, 22 nt, Human
agcccugggaggccagcuugua

SEQ ID NO: 1019363 - RNA, 22 nt, Human
ucugcuguauuagguugaacug

SEQ ID NO: 1019364 - RNA, 22 nt, Human
ccagucccaucucugucgcuua

SEQ ID NO: 1019365 - RNA, 17 nt, Human
ucaggcugugccuggua

SEQ ID NO: 1019366 - RNA, 22 nt, Human
gaacagcuucuugggagcuggg

SEQ ID NO: 1019367 - RNA, 22 nt, Human
agaaauguauucuguauguuuu

SEQ ID NO: 1019368 - RNA, 22 nt, Human
uggccuuggacagagcgcuccu

SEQ ID NO: 1019369 - RNA, 22 nt, Human
ucuucaucucagauuaacagga

SEQ ID NO: 1019370 - RNA, 22 nt, Human
guggcucucgccagccugcggg

SEQ ID NO: 1019371 - RNA, 22 nt, Human
ucuuaaaaguaugccaauugga

SEQ ID NO: 1019372 - RNA, 22 nt, Human
uacaaagugugcccaugcugag

SEQ ID NO: 1019373 - RNA, 22 nt, Human
cucagggcaguauggcugagag

SEQ ID NO: 1019374 - RNA, 22 nt, Human
auccugugcaaugacugcaucu

SEQ ID NO: 1019375 - RNA, 22 nt, Human
aaaguguggcacaagucacauc

SEQ ID NO: 1019376 - RNA, 23 nt, Human
uugauuucaaaugcagagaacac

SEQ ID NO: 1019377 - RNA, 22 nt, Human
guuguauagagggcaugaaucu

SEQ ID NO: 1019378 - RNA, 22 nt, Human
uccucaggcugccuggaagacu

SEQ ID NO: 1019379 - RNA, 22 nt, Human
uauuuguugaguuguuaugucu

SEQ ID NO: 1019380 - RNA, 22 nt, Human
ugcuuccuauccacacaaugcc

SEQ ID NO: 1019381 - RNA, 22 nt, Human
ugcuauugugaacagugccaca

SEQ ID NO: 1019382 - RNA, 18 nt, Human
uguuccaaggaaggaauc

SEQ ID NO: 1019383 - RNA, 22 nt, Human
agauuuauguggucacacucag

SEQ ID NO: 1019384 - RNA, 22 nt, Human
uauggaaagcucuuuuugauug

SEQ ID NO: 1019385 - RNA, 22 nt, Human
uuccauuguuucugucuucacu

SEQ ID NO: 1019386 - RNA, 22 nt, Human
uucaauucaauucuaaauauau

SEQ ID NO: 1019387 - RNA, 22 nt, Human
cacccagcagcacuuaagacua

SEQ ID NO: 1019388 - RNA, 22 nt, Human
cuggcagcaguuaugaaacaau

SEQ ID NO: 1019389 - RNA, 22 nt, Human
guggcuucacauggcauuuggc

SEQ ID NO: 1019390 - RNA, 22 nt, Human
agugcuguaacaacuuauuugg

SEQ ID NO: 1019391 - RNA, 22 nt, Human
aaggcgacacaggcagcaggcc

SEQ ID NO: 1019392 - RNA, 22 nt, Human
acucugccccgaguucugggaa

SEQ ID NO: 1019393 - RNA, 22 nt, Human
gcagugcugaucccauggcaga

SEQ ID NO: 1019394 - RNA, 22 nt, Human
cauauguauuucucauaauuag

SEQ ID NO: 1019395 - RNA, 22 nt, Human
aauaauuauuugagagcagacc

SEQ ID NO: 1019396 - RNA, 22 nt, Human
gucagaggaauggaugagugau

SEQ ID NO: 1019397 - RNA, 22 nt, Human
ugcucuggagggugaagcuuuu

SEQ ID NO: 1019398 - RNA, 22 nt, Human
uccucaggaugugggguagaau

SEQ ID NO: 1019399 - RNA, 21 nt, Human
acagaacuguauagugauaaa

SEQ ID NO: 1019400 - RNA, 22 nt, Human
ccaggagcaggagcuggacaga

SEQ ID NO: 1019401 - RNA, 22 nt, Human
cucuguccacagguuugucccu

SEQ ID NO: 1019402 - RNA, 22 nt, Human
gaaaucugcccagugcacuggu

SEQ ID NO: 1019403 - RNA, 22 nt, Human
ggggcagaguagcuggggugug

SEQ ID NO: 1019404 - RNA, 22 nt, Human
cucugagcuccuggaagcgugc

SEQ ID NO: 1019405 - RNA, 22 nt, Human
auucagcaaugagcuuggauuu

SEQ ID NO: 1019406 - RNA, 22 nt, Human
caguggcgugaucucugcucac

SEQ ID NO: 1019407 - RNA, 22 nt, Human
ugggcagaaugugggauccaga

SEQ ID NO: 1019408 - RNA, 22 nt, Human
uguggccuggaaggggcugcuc

SEQ ID NO: 1019409 - RNA, 22 nt, Human
ugggagucagacagccugagau

SEQ ID NO: 1019410 - RNA, 22 nt, Human
aaaaagguugauccagauuagg

SEQ ID NO: 1019411 - RNA, 22 nt, Human
gcagaggccaggccaccagcaa

SEQ ID NO: 1019412 - RNA, 22 nt, Human
cuggguggcagagccugcagug

SEQ ID NO: 1019413 - RNA, 17 nt, Human
ucagcaggggccaagcu

SEQ ID NO: 1019414 - RNA, 22 nt, Human
ggagacagugguagggccuaag

SEQ ID NO: 1019415 - RNA, 22 nt, Human
uuuuggucagguuggucucgaa

SEQ ID NO: 1019416 - RNA, 22 nt, Human
ggggaccuaggcucugucucuu

SEQ ID NO: 1019417 - RNA, 21 nt, Human
ugacugaggcuucuucacaca

SEQ ID NO: 1019418 - RNA, 22 nt, Human
gucaaaaaguagucauuucugu

SEQ ID NO: 1019419 - RNA, 22 nt, Human
guauuaggaggaacacaggccu

SEQ ID NO: 1019420 - RNA, 22 nt, Human
uuugggaaacuuaggggucaga

SEQ ID NO: 1019421 - RNA, 17 nt, Human
uuucaucugggaccacc

SEQ ID NO: 1019422 - RNA, 22 nt, Human
ccagagcuccagggcuacagaa

SEQ ID NO: 1019423 - RNA, 20 nt, Human
ccuccaggcacacccaugug

SEQ ID NO: 1019424 - RNA, 22 nt, Human
cucugagagcggucuguggcuu

SEQ ID NO: 1019425 - RNA, 22 nt, Human
ccaggguguagggauuccagau

SEQ ID NO: 1019426 - RNA, 22 nt, Human
ucagugaucuaaggguauggcc

SEQ ID NO: 1019427 - RNA, 22 nt, Human
ucagaagcaggagugugcacaa

SEQ ID NO: 1019428 - RNA, 22 nt, Human
ugugccuggaucucugugacaa

SEQ ID NO: 1019429 - RNA, 22 nt, Human
uagcaguggaaucuuuugucca

SEQ ID NO: 1019430 - RNA, 22 nt, Human
uuuccuaguucuaagaaaugua

SEQ ID NO: 1019431 - RNA, 22 nt, Human
gagaaggggugauguggguaau

SEQ ID NO: 1019432 - RNA, 23 nt, Human
cuuucauugugguuucacagagc

SEQ ID NO: 1019433 - RNA, 22 nt, Human
gaggaaccaaaucagcuugcac

SEQ ID NO: 1019434 - RNA, 22 nt, Human
uacuaaauaguuuaauuccuca

SEQ ID NO: 1019435 - RNA, 22 nt, Human
caggaucccuggccuccgccca

SEQ ID NO: 1019436 - RNA, 22 nt, Human
uccuucaguuaucacaguacug

SEQ ID NO: 1019437 - RNA, 22 nt, Human
aucagagauuguaguaugugca

SEQ ID NO: 1019438 - RNA, 22 nt, Human
cagagccauccaggugccuguu

SEQ ID NO: 1019439 - RNA, 22 nt, Human
cucuccagccacagaagcugcu

SEQ ID NO: 1019440 - RNA, 22 nt, Human
uaauaguuucauaaugugcuuc

SEQ ID NO: 1019441 - RNA, 22 nt, Human
cuggcagcauggagccugugcu

SEQ ID NO: 1019442 - RNA, 22 nt, Human
uauuuccugcauggugauguaa

SEQ ID NO: 1019443 - RNA, 22 nt, Human
acagaggcugcgcuugggaacg

SEQ ID NO: 1019444 - RNA, 22 nt, Human
cucagagaaaaggagcaagggu

SEQ ID NO: 1019445 - RNA, 23 nt, Human
uuucauaugguguggaugaagaa

SEQ ID NO: 1019446 - RNA, 22 nt, Human
gcagagcucuguucuuaucucc

SEQ ID NO: 1019447 - RNA, 22 nt, Human
ugcugccauggucgcugguguc

SEQ ID NO: 1019448 - RNA, 22 nt, Human
uccuggccugucuggaguagcu

SEQ ID NO: 1019449 - RNA, 22 nt, Human
ccucaggggucacugugaggag

SEQ ID NO: 1019450 - RNA, 22 nt, Human
ugccuucaaucaggauggucuc

SEQ ID NO: 1019451 - RNA, 22 nt, Human
gcccagcugcacccuggugggu

SEQ ID NO: 1019452 - RNA, 22 nt, Human
uccaggaggguuuucugccuuc

SEQ ID NO: 1019453 - RNA, 22 nt, Human
uucaaucauuuuuacauagucc

SEQ ID NO: 1019454 - RNA, 22 nt, Human
agguacagcaauauaagagguc

SEQ ID NO: 1019455 - RNA, 22 nt, Human
cagggcucgcucuugcccuucg

SEQ ID NO: 1019456 - RNA, 22 nt, Human
ggaccagagaagugagcaccug

SEQ ID NO: 1019457 - RNA, 22 nt, Human
auucaguucuaaggucagugcc

SEQ ID NO: 1019458 - RNA, 22 nt, Human
auguccaggaucuauccccaga

SEQ ID NO: 1019459 - RNA, 23 nt, Human
cuugcagggcuggaggcuuagaa

SEQ ID NO: 1019460 - RNA, 20 nt, Human
agcuggagaagggcccuucc

SEQ ID NO: 1019461 - RNA, 22 nt, Human
cagcaugguuggguucugggga

SEQ ID NO: 1019462 - RNA, 21 nt, Human
gcagcagaggcuugacagaca

SEQ ID NO: 1019463 - RNA, 22 nt, Human
ccugggugucaugggcagcugg

SEQ ID NO: 1019464 - RNA, 23 nt, Human
acaguuauagcugugaauaacau

SEQ ID NO: 1019465 - RNA, 22 nt, Human
gcauuuaaauuugaacuucaga

SEQ ID NO: 1019466 - RNA, 22 nt, Human
ucugugcucuucucaguaucac

SEQ ID NO: 1019467 - RNA, 22 nt, Human
caugucuguguacacaugcaca

SEQ ID NO: 1019468 - RNA, 20 nt, Human
cugcaggguuagaggcucca

SEQ ID NO: 1019469 - RNA, 22 nt, Human
gaaaaugugccuuuggguauug

SEQ ID NO: 1019470 - RNA, 22 nt, Human
auuugucucugcacuuuacuca

SEQ ID NO: 1019471 - RNA, 22 nt, Human
ugaugcugcugggaguggugcu

SEQ ID NO: 1019472 - RNA, 22 nt, Human
ccauccugcauugcuauucaga

SEQ ID NO: 1019473 - RNA, 22 nt, Human
cuccucuggaaauuccucugcc

SEQ ID NO: 1019474 - RNA, 22 nt, Human
auacuguuucucuucuacauga

SEQ ID NO: 1019475 - RNA, 22 nt, Human
cuuaggaacgcucugccuagug

SEQ ID NO: 1019476 - RNA, 22 nt, Human
uuauuccaguaaucucuguaau

SEQ ID NO: 1019477 - RNA, 22 nt, Human
auaugcacauacauacauaggu

SEQ ID NO: 1019478 - RNA, 22 nt, Human
ucccagagacagagccuccucc

SEQ ID NO: 1019479 - RNA, 22 nt, Human
ucuguucagaagaggugaaagu

SEQ ID NO: 1019480 - RNA, 19 nt, Human
ugucucagugucccuuccu

SEQ ID NO: 1019481 - RNA, 22 nt, Human
uugaagcaaauucugugcagua

SEQ ID NO: 1019482 - RNA, 22 nt, Human
acacaugcauaagccuucccuu

SEQ ID NO: 1019483 - RNA, 22 nt, Human
auaugcauuuaccuggcauaua

SEQ ID NO: 1019484 - RNA, 22 nt, Human
acaaggcugaacagugaagccg

SEQ ID NO: 1019485 - RNA, 22 nt, Human
uagaaaugauuuugaugcuuca

SEQ ID NO: 1019486 - RNA, 22 nt, Human
acaugcauacacguacauaccu

SEQ ID NO: 1019487 - RNA, 22 nt, Human
agauuucagaugcucggcaguu

SEQ ID NO: 1019488 - RNA, 22 nt, Human
uagucccauuuugagguauuug

SEQ ID NO: 1019489 - RNA, 22 nt, Human
gucaccagucccagcuccugaa

SEQ ID NO: 1019490 - RNA, 23 nt, Human
ucagucuucccugucaguaauag

SEQ ID NO: 1019491 - RNA, 22 nt, Human
cugguucauccccuuccaggaa

SEQ ID NO: 1019492 - RNA, 22 nt, Human
uaaauuuacccaaggaacaugu

SEQ ID NO: 1019493 - RNA, 22 nt, Human
uucaacuauuaugaauaaaauu

SEQ ID NO: 1019494 - RNA, 22 nt, Human
ggucaggggcugcucuacagag

SEQ ID NO: 1019495 - RNA, 22 nt, Human
agggaccuugauggguuuggga

SEQ ID NO: 1019496 - RNA, 22 nt, Human
gugucaugcacacucaguguug

SEQ ID NO: 1019497 - RNA, 22 nt, Human
gcuggguggaucggaggcucug

SEQ ID NO: 1019498 - RNA, 22 nt, Human
ccagcagcagcguccaaggaga

SEQ ID NO: 1019499 - RNA, 20 nt, Human
ugcuuccuggccacugcggg

SEQ ID NO: 1019500 - RNA, 22 nt, Human
gaaggaaaggucucaugccuuu

SEQ ID NO: 1019501 - RNA, 23 nt, Human
ggccucuguguucugcccacaug

SEQ ID NO: 1019502 - RNA, 22 nt, Human
ccagcuggugggucuuucucug

SEQ ID NO: 1019503 - RNA, 22 nt, Human
augcaucauggaaaacucaguu

SEQ ID NO: 1019504 - RNA, 22 nt, Human
agagccugaggccaggaaaaug

SEQ ID NO: 1019505 - RNA, 21 nt, Human
cagaggccucaugcucugugc

SEQ ID NO: 1019506 - RNA, 22 nt, Human
ugagccugggagauggaggcug

SEQ ID NO: 1019507 - RNA, 22 nt, Human
ucucuucacaugcuugcuccaa

SEQ ID NO: 1019508 - RNA, 22 nt, Human
agauauuuguaucuugcuauug

SEQ ID NO: 1019509 - RNA, 22 nt, Human
gaauuucuggacccuuugagaa

SEQ ID NO: 1019510 - RNA, 22 nt, Human
uggcagaaguacacaagcaugc

SEQ ID NO: 1019511 - RNA, 22 nt, Human
ucagccagguaauguggagaug

SEQ ID NO: 1019512 - RNA, 22 nt, Human
cugcuggccuagcccauccucu

SEQ ID NO: 1019513 - RNA, 22 nt, Human
uggccuugagagaucaaaaggu

SEQ ID NO: 1019514 - RNA, 22 nt, Human
cagaaauguacugacaugcagu

SEQ ID NO: 1019515 - RNA, 22 nt, Human
cccuuccucccaggcuucugug

SEQ ID NO: 1019516 - RNA, 22 nt, Human
aggcuccuuguucaucauccau

SEQ ID NO: 1019517 - RNA, 22 nt, Human
uuuauuuauccuucuggauugc

SEQ ID NO: 1019518 - RNA, 22 nt, Human
aguuucuuuagauagaaaguuc

SEQ ID NO: 1019519 - RNA, 22 nt, Human
uaagacaugguugaucuagugu

SEQ ID NO: 1019520 - RNA, 22 nt, Human
uguggccuccuguuccugggua

SEQ ID NO: 1019521 - RNA, 20 nt, Human
ucugugcaccugcuacaagg

SEQ ID NO: 1019522 - RNA, 22 nt, Human
uuuccuaagguagugauaauuu

SEQ ID NO: 1019523 - RNA, 22 nt, Human
aucaguuucuaccauguggaau

SEQ ID NO: 1019524 - RNA, 22 nt, Human
caggccuggcugcagcucgccu

SEQ ID NO: 1019525 - RNA, 22 nt, Human
uccagcucuaacaugcugggcc

SEQ ID NO: 1019526 - RNA, 23 nt, Human
acacauuuuucccguucugaggu

SEQ ID NO: 1019527 - RNA, 17 nt, Human
aggagucucagaugagc

SEQ ID NO: 1019528 - RNA, 22 nt, Human
ugaggcagcaauuguauuguau

SEQ ID NO: 1019529 - RNA, 22 nt, Human
acauuucucauaggagagccac

SEQ ID NO: 1019530 - RNA, 23 nt, Human
ugcagcugccucuggcgggccgg

SEQ ID NO: 1019531 - RNA, 21 nt, Human
uccaggaguggcugggcaggg

SEQ ID NO: 1019532 - RNA, 22 nt, Human
aggaggccgcugaugggcuccc

SEQ ID NO: 1019533 - RNA, 22 nt, Human
ucuucagagacucugagccccu

SEQ ID NO: 1019534 - RNA, 23 nt, Human
ucuguacaauugagaagagaaca

SEQ ID NO: 1019535 - RNA, 22 nt, Human
uuugaaaauuagacacaggcua

SEQ ID NO: 1019536 - RNA, 22 nt, Human
agucaauucuuuucaacucaag

SEQ ID NO: 1019537 - RNA, 22 nt, Human
aucaauucuuaggaaaauagcu

SEQ ID NO: 1019538 - RNA, 22 nt, Human
ggcucaggccagaccacgacuc

SEQ ID NO: 1019539 - RNA, 22 nt, Human
uuucacaaguaaaguccuaagu

SEQ ID NO: 1019540 - RNA, 22 nt, Human
auucuucaguauguguggauug

SEQ ID NO: 1019541 - RNA, 22 nt, Human
agccccugggaguagcugcugc

SEQ ID NO: 1019542 - RNA, 22 nt, Human
cacauggccuguguggccagac

SEQ ID NO: 1019543 - RNA, 22 nt, Human
agagcauccaucggccaggacc

SEQ ID NO: 1019544 - RNA, 22 nt, Human
ugcugccacauuuaaagagggg

SEQ ID NO: 1019545 - RNA, 22 nt, Human
gcccagaaguugaggcugcagu

SEQ ID NO: 1019546 - RNA, 22 nt, Human
agggaccucuucuugcagcuga

SEQ ID NO: 1019547 - RNA, 22 nt, Human
ccucagaggugaacaucagugc

SEQ ID NO: 1019548 - RNA, 22 nt, Human
gugcaggggaucagguugcagc

SEQ ID NO: 1019549 - RNA, 22 nt, Human
gcugccacucugagcuugcuuc

SEQ ID NO: 1019550 - RNA, 22 nt, Human
gcccaggcuggagugcaguagc

SEQ ID NO: 1019551 - RNA, 23 nt, Human
ucaguuuuggcuguucaguguug

SEQ ID NO: 1019552 - RNA, 22 nt, Human
agauuuagacugccuuaaucau

SEQ ID NO: 1019553 - RNA, 22 nt, Human
cucaagacugaucgcaguggaa

SEQ ID NO: 1019554 - RNA, 22 nt, Human
aaggcuuuaugugaccaaaaga

SEQ ID NO: 1019555 - RNA, 22 nt, Human
auacacauauguguguauaugu

SEQ ID NO: 1019556 - RNA, 22 nt, Human
ccuccugggccuugcucuguga

SEQ ID NO: 1019557 - RNA, 22 nt, Human
cugagggugcuauucuugccuu

SEQ ID NO: 1019558 - RNA, 22 nt, Human
ugaaaucuuauacuuugguagu

SEQ ID NO: 1019559 - RNA, 22 nt, Human
ccuuggcccuagccucaggcaa

SEQ ID NO: 1019560 - RNA, 22 nt, Human
ucacauuucugauuauaccaaa

SEQ ID NO: 1019561 - RNA, 22 nt, Human
guguggcugccagccaagaggc

SEQ ID NO: 1019562 - RNA, 22 nt, Human
acagacagauuuugucugaugu

SEQ ID NO: 1019563 - RNA, 22 nt, Human
aauugcuaaagauuauguuuuc

SEQ ID NO: 1019564 - RNA, 23 nt, Human
cagaggcaucggauucaacauca

SEQ ID NO: 1019565 - RNA, 22 nt, Human
auacuuacuuuucuucagacua

SEQ ID NO: 1019566 - RNA, 22 nt, Human
uuucaaauggagucgugaaaug

SEQ ID NO: 1019567 - RNA, 22 nt, Human
uaacagaauuugcuaaacuccg

SEQ ID NO: 1019568 - RNA, 22 nt, Human
uuuacacaaaagauagcacacc

SEQ ID NO: 1019569 - RNA, 20 nt, Human
cccugcagccaugggagugg

SEQ ID NO: 1019570 - RNA, 22 nt, Human
agauacauagcugugagcacac

SEQ ID NO: 1019571 - RNA, 22 nt, Human
cugcccugagucaugccagaug

SEQ ID NO: 1019572 - RNA, 22 nt, Human
uauguacaugauuucauuugcu

SEQ ID NO: 1019573 - RNA, 22 nt, Human
aaacagcaggaacaucuugcca

SEQ ID NO: 1019574 - RNA, 22 nt, Human
uacuuucuagcucuccccaguu

SEQ ID NO: 1019575 - RNA, 22 nt, Human
uggcucaguuugggggauugaa

SEQ ID NO: 1019576 - RNA, 23 nt, Human
gagggcucugagugcuugggcca

SEQ ID NO: 1019577 - RNA, 22 nt, Human
aucaggaucacagaaacuuuua

SEQ ID NO: 1019578 - RNA, 22 nt, Human
accauuuuggguauuuucagag

SEQ ID NO: 1019579 - RNA, 22 nt, Human
ugcugaaauuagaacauugagg

SEQ ID NO: 1019580 - RNA, 23 nt, Human
cacaccaggagccgucugggcca

SEQ ID NO: 1019581 - RNA, 22 nt, Human
ccaggcuggagugcaauggugc

SEQ ID NO: 1019582 - RNA, 22 nt, Human
uaacacauauuugcaguaagca

SEQ ID NO: 1019583 - RNA, 22 nt, Human
ccuggccucagccuagggcuga

SEQ ID NO: 1019584 - RNA, 22 nt, Human
gcacagggcaacaggucuguua

SEQ ID NO: 1019585 - RNA, 20 nt, Human
agcaggaaugaugcuuucau

SEQ ID NO: 1019586 - RNA, 22 nt, Human
gagagcugauagaugagcuacu

SEQ ID NO: 1019587 - RNA, 22 nt, Human
ugaguagcggcuauguguaacu

SEQ ID NO: 1019588 - RNA, 22 nt, Human
ggagcugcuuugaucugaagaa

SEQ ID NO: 1019589 - RNA, 22 nt, Human
gucucagggacugcuucugggg

SEQ ID NO: 1019590 - RNA, 22 nt, Human
ugggcugcuuccucagcugaga

SEQ ID NO: 1019591 - RNA, 22 nt, Human
ccacagggccuuuccugcuggc

SEQ ID NO: 1019592 - RNA, 22 nt, Human
ugagggcugcuuccagagcuag

SEQ ID NO: 1019593 - RNA, 22 nt, Human
augaacugcaguauaaacuugg

SEQ ID NO: 1019594 - RNA, 23 nt, Human
uccagcagagccuuccaggaggg

SEQ ID NO: 1019595 - RNA, 22 nt, Human
gccagggaaacugcagaccagc

SEQ ID NO: 1019596 - RNA, 22 nt, Human
acacagggggcauucuaggagu

SEQ ID NO: 1019597 - RNA, 22 nt, Human
uuuccuuccuugcuagccugag

SEQ ID NO: 1019598 - RNA, 22 nt, Human
uucucagaauugacugggagca

SEQ ID NO: 1019599 - RNA, 22 nt, Human
gcugagagugagcacuggauau

SEQ ID NO: 1019600 - RNA, 22 nt, Human
guuucauuuacaucuguaggua

SEQ ID NO: 1019601 - RNA, 22 nt, Human
aggagucauugagagggguccu

SEQ ID NO: 1019602 - RNA, 22 nt, Human
ggcagggugccuggcuccuguu

SEQ ID NO: 1019603 - RNA, 22 nt, Human
ucuuaaagagcgcaauuugagg

SEQ ID NO: 1019604 - RNA, 22 nt, Human
augcccugugguucaugugaga

SEQ ID NO: 1019605 - RNA, 22 nt, Human
ucuguggcacgauugcacugca

SEQ ID NO: 1019606 - RNA, 22 nt, Human
cuguacaaguccuucaucaggg

SEQ ID NO: 1019607 - RNA, 23 nt, Human
agacccagagacuggcucugcuc

SEQ ID NO: 1019608 - RNA, 22 nt, Human
ggccagggggcuucagacucca

SEQ ID NO: 1019609 - RNA, 22 nt, Human
gcagguggauuaucagaagugc

SEQ ID NO: 1019610 - RNA, 22 nt, Human
ccagaggcuggcagccagcuga

SEQ ID NO: 1019611 - RNA, 23 nt, Human
agucaguguaaguuuggaaugca

SEQ ID NO: 1019612 - RNA, 21 nt, Human
acagccugucaucucaugguc

SEQ ID NO: 1019613 - RNA, 22 nt, Human
agucccagcucagaaccacuag

SEQ ID NO: 1019614 - RNA, 22 nt, Human
uggcuucuugggaugggucauu

SEQ ID NO: 1019615 - RNA, 22 nt, Human
ucucuuucuauugcaccaugcu

SEQ ID NO: 1019616 - RNA, 22 nt, Human
gaucuucuagcagaaguaauuu

SEQ ID NO: 1019617 - RNA, 22 nt, Human
uuccugaugcacacagucauuu

SEQ ID NO: 1019618 - RNA, 22 nt, Human
uuauuuaaaagugguaagauuc

SEQ ID NO: 1019619 - RNA, 22 nt, Human
gguauaaaugaucagaucgcug

SEQ ID NO: 1019620 - RNA, 22 nt, Human
agucuucagagaaauuaacucu

SEQ ID NO: 1019621 - RNA, 22 nt, Human
cucuccagaucugcugagccag

SEQ ID NO: 1019622 - RNA, 18 nt, Human
ccagagcuggcuccucgc

SEQ ID NO: 1019623 - RNA, 22 nt, Human
gcccugggauuggguggaggcu

SEQ ID NO: 1019624 - RNA, 22 nt, Human
acauuucuuccuaauuaucccu

SEQ ID NO: 1019625 - RNA, 22 nt, Human
uggcccugacuuggaggccuga

SEQ ID NO: 1019626 - RNA, 22 nt, Human
agauuucagguuggggcagaag

SEQ ID NO: 1019627 - RNA, 22 nt, Human
ugccuggaaggcccaugggaag

SEQ ID NO: 1019628 - RNA, 22 nt, Human
augaggcaguacacacaaagcc

SEQ ID NO: 1019629 - RNA, 21 nt, Human
gggugggaggacacagcaggc

SEQ ID NO: 1019630 - RNA, 22 nt, Human
uuuauuuauaagccacuugcug

SEQ ID NO: 1019631 - RNA, 22 nt, Human
ggcuuuauuaagcaggguaagu

SEQ ID NO: 1019632 - RNA, 22 nt, Human
uuaugggagcaauuggggaggu

SEQ ID NO: 1019633 - RNA, 21 nt, Human
ugcaggagucugugagucagg

SEQ ID NO: 1019634 - RNA, 22 nt, Human
ucuggagcuggcagggcccugg

SEQ ID NO: 1019635 - RNA, 22 nt, Human
acucagaguuugcguuccauac

SEQ ID NO: 1019636 - RNA, 22 nt, Human
ccauggaguuccucuggucuau

SEQ ID NO: 1019637 - RNA, 22 nt, Human
uggaccugcuggaugggcaggu

SEQ ID NO: 1019638 - RNA, 22 nt, Human
ccaaggcaggggaucaaaguuu

SEQ ID NO: 1019639 - RNA, 22 nt, Human
ucuggcuuucauuuguuuaaag

SEQ ID NO: 1019640 - RNA, 22 nt, Human
aaugucugagucucuguauccc

SEQ ID NO: 1019641 - RNA, 22 nt, Human
uuugaaagaauuuauguacuuu

SEQ ID NO: 1019642 - RNA, 22 nt, Human
cuccaguaucuguaggaaaagg

SEQ ID NO: 1019643 - RNA, 22 nt, Human
ucucucagaggaagaggcagug

SEQ ID NO: 1019644 - RNA, 21 nt, Human
ggcuccugcuuugugaggggc

SEQ ID NO: 1019645 - RNA, 22 nt, Human
ccucuccuugcacccgucccgc

SEQ ID NO: 1019646 - RNA, 22 nt, Human
aagcugccauagaacgagaggu

SEQ ID NO: 1019647 - RNA, 22 nt, Human
ucauugcaguugaguuguguua

SEQ ID NO: 1019648 - RNA, 22 nt, Human
uucuucuugaaacuuuagguug

SEQ ID NO: 1019649 - RNA, 22 nt, Human
cuucuugcaauuuucaucuuau

SEQ ID NO: 1019650 - RNA, 22 nt, Human
ccugccagcauggcuuaucucc

SEQ ID NO: 1019651 - RNA, 22 nt, Human
gagccagcuacauggucugcaa

SEQ ID NO: 1019652 - RNA, 22 nt, Human
aggucagaagugccagggaauu

SEQ ID NO: 1019653 - RNA, 22 nt, Human
agugaaauuccuggucuuuguu

SEQ ID NO: 1019654 - RNA, 22 nt, Human
cacauacaaugguguuauuugg

SEQ ID NO: 1019655 - RNA, 22 nt, Human
ggagccuggucagguuggcucc

SEQ ID NO: 1019656 - RNA, 21 nt, Human
caggaaaagcggaagucuagc

SEQ ID NO: 1019657 - RNA, 22 nt, Human
gggaugucacugugccuggcac

SEQ ID NO: 1019658 - RNA, 22 nt, Human
cugagccaguagucagggacaa

SEQ ID NO: 1019659 - RNA, 19 nt, Human
accuugggcaagugccuuc

SEQ ID NO: 1019660 - RNA, 22 nt, Human
augcacuugcguguuugcaaau

SEQ ID NO: 1019661 - RNA, 22 nt, Human
acagaaauaacuuuuuauguuu

SEQ ID NO: 1019662 - RNA, 22 nt, Human
ccaucagcuccaguaucuucug

SEQ ID NO: 1019663 - RNA, 22 nt, Human
aucuacagcugucugcacagua

SEQ ID NO: 1019664 - RNA, 19 nt, Human
agaaguuagacauugcaau

SEQ ID NO: 1019665 - RNA, 22 nt, Human
ucacaugcucaccuaagccaca

SEQ ID NO: 1019666 - RNA, 22 nt, Human
aaacaugagcauuucuguuuaa

SEQ ID NO: 1019667 - RNA, 22 nt, Human
uggagcaggugccaggugugug

SEQ ID NO: 1019668 - RNA, 22 nt, Human
aggggagcuaacaccagagccc

SEQ ID NO: 1019669 - RNA, 23 nt, Human
agccacuucuaucuugcuccugg

SEQ ID NO: 1019670 - RNA, 22 nt, Human
ggcuuucuaugaacucaaaggc

SEQ ID NO: 1019671 - RNA, 22 nt, Human
uggcucagauaauucaaggggc

SEQ ID NO: 1019672 - RNA, 22 nt, Human
gcugucacucuccggccuuccc

SEQ ID NO: 1019673 - RNA, 22 nt, Human
agcugccauggccugaauuuac

SEQ ID NO: 1019674 - RNA, 22 nt, Human
cccagcagaccgcugugauggc

SEQ ID NO: 1019675 - RNA, 22 nt, Human
agcuuuaucacaauauuggcua

SEQ ID NO: 1019676 - RNA, 20 nt, Human
aucaggauucuugcuuuguu

SEQ ID NO: 1019677 - RNA, 22 nt, Human
uaguccauuuucacacugcuga

SEQ ID NO: 1019678 - RNA, 22 nt, Human
cacucaggcugugucaggagga

SEQ ID NO: 1019679 - RNA, 22 nt, Human
gggcagccucggugccugcugc

SEQ ID NO: 1019680 - RNA, 22 nt, Human
aguuuuaugcaguguucugaua

SEQ ID NO: 1019681 - RNA, 22 nt, Human
aaggcacuugcccagagcugca

SEQ ID NO: 1019682 - RNA, 22 nt, Human
accauguuggccaagcuggucu

SEQ ID NO: 1019683 - RNA, 22 nt, Human
ccugccaggacauugcuugaag

SEQ ID NO: 1019684 - RNA, 22 nt, Human
gaggaagcagggcuuggcugag

SEQ ID NO: 1019685 - RNA, 22 nt, Human
gcacagaaguaaaauacaaguc

SEQ ID NO: 1019686 - RNA, 22 nt, Human
uuucaauguaugucuuucugag

SEQ ID NO: 1019687 - RNA, 23 nt, Human
uguaugaauaugccacaguuuaa

SEQ ID NO: 1019688 - RNA, 22 nt, Human
cugucaccuguucacugcagca

SEQ ID NO: 1019689 - RNA, 17 nt, Human
uucaaugauuaaugcau

SEQ ID NO: 1019690 - RNA, 22 nt, Human
ucagagcuuaucucuugcugga

SEQ ID NO: 1019691 - RNA, 22 nt, Human
aacuagaacgucuaguugcugg

SEQ ID NO: 1019692 - RNA, 22 nt, Human
uucauucccaagaguaaacaua

SEQ ID NO: 1019693 - RNA, 22 nt, Human
cccuggagggacagcugcucua

SEQ ID NO: 1019694 - RNA, 22 nt, Human
uguuguuuucucauggagaaua

SEQ ID NO: 1019695 - RNA, 22 nt, Human
gcugucugagaacaugguggaa

SEQ ID NO: 1019696 - RNA, 22 nt, Human
accaggcacucuuguggcagug

SEQ ID NO: 1019697 - RNA, 22 nt, Human
aaugggagguaguaugggaggu

SEQ ID NO: 1019698 - RNA, 22 nt, Human
ugauugacuuuagaauagcacu

SEQ ID NO: 1019699 - RNA, 22 nt, Human
cagcuuggaggaggaucuaaga

SEQ ID NO: 1019700 - RNA, 22 nt, Human
ucaggauguuaauauagcauua

SEQ ID NO: 1019701 - RNA, 23 nt, Human
ucucaggacacacaugucuauca

SEQ ID NO: 1019702 - RNA, 22 nt, Human
agaggaugauuuuaaggacacu

SEQ ID NO: 1019703 - RNA, 19 nt, Human
ugcccaggccagguugggc

SEQ ID NO: 1019704 - RNA, 22 nt, Human
cugcccugugaggguccuuggg

SEQ ID NO: 1019705 - RNA, 22 nt, Human
cccuggagggauuucucaauca

SEQ ID NO: 1019706 - RNA, 22 nt, Human
uccaugugccaaggggcagagg

SEQ ID NO: 1019707 - RNA, 22 nt, Human
aucuacccacugaacacaauau

SEQ ID NO: 1019708 - RNA, 22 nt, Human
uuuucuuauggugaagcacaaa

SEQ ID NO: 1019709 - RNA, 22 nt, Human
guuucauuaccugacccaugag

SEQ ID NO: 1019710 - RNA, 23 nt, Human
uuacaguaggaguuggaaaacca

SEQ ID NO: 1019711 - RNA, 22 nt, Human
ggcucuggcaaggggaggcuac

SEQ ID NO: 1019712 - RNA, 22 nt, Human
cacugcuucuggaggaauuugg

SEQ ID NO: 1019713 - RNA, 22 nt, Human
ccagaagucaggaaugagucuu

SEQ ID NO: 1019714 - RNA, 22 nt, Human
acaaaugccauauauaaauucu

SEQ ID NO: 1019715 - RNA, 20 nt, Human
ccagacagcaccugccuggu

SEQ ID NO: 1019716 - RNA, 22 nt, Human
ggcuggcauccagggaaaucca

SEQ ID NO: 1019717 - RNA, 22 nt, Human
auaacagagagcuacugaacug

SEQ ID NO: 1019718 - RNA, 22 nt, Human
cuugcugugugguguucucaga

SEQ ID NO: 1019719 - RNA, 22 nt, Human
gagccuggacaucucaggccca

SEQ ID NO: 1019720 - RNA, 21 nt, Human
ggcauggcaccucugggcagg

SEQ ID NO: 1019721 - RNA, 22 nt, Human
ucaggaugguguggaggaaaua

SEQ ID NO: 1019722 - RNA, 22 nt, Human
cauguacauucuguagauggag

SEQ ID NO: 1019723 - RNA, 22 nt, Human
gagccugagugcugccuccccu

SEQ ID NO: 1019724 - RNA, 22 nt, Human
gccagggaacccaagggccuca

SEQ ID NO: 1019725 - RNA, 22 nt, Human
uaugcacacauguaugcaugug

SEQ ID NO: 1019726 - RNA, 22 nt, Human
auaugucgcuacaucauuagau

SEQ ID NO: 1019727 - RNA, 22 nt, Human
auaaauaucacuguugucccuc

SEQ ID NO: 1019728 - RNA, 22 nt, Human
agccagccgggggaccacagug

SEQ ID NO: 1019729 - RNA, 22 nt, Human
uugauagguuuuauguauaguu

SEQ ID NO: 1019730 - RNA, 22 nt, Human
cagcuccugggccaucuccuag

SEQ ID NO: 1019731 - RNA, 22 nt, Human
cuuguagaauugaaauggucuc

SEQ ID NO: 1019732 - RNA, 22 nt, Human
cccaggaggcagaaguugcagu

SEQ ID NO: 1019733 - RNA, 22 nt, Human
ccaaaugcuccacugacuuugg

SEQ ID NO: 1019734 - RNA, 22 nt, Human
ucuggcagggguucugcacuug

SEQ ID NO: 1019735 - RNA, 22 nt, Human
ugcaggagcagagauggcugga

SEQ ID NO: 1019736 - RNA, 22 nt, Human
ugagguggcuagggaggcacuc

SEQ ID NO: 1019737 - RNA, 22 nt, Human
aguuugaaaguauugacagaag

SEQ ID NO: 1019738 - RNA, 22 nt, Human
uguaccuuuuucugugcaugcu

SEQ ID NO: 1019739 - RNA, 23 nt, Human
auugaugacuugauuacacuuuu

SEQ ID NO: 1019740 - RNA, 22 nt, Human
aucuggcugacuuugugggaca

SEQ ID NO: 1019741 - RNA, 22 nt, Human
cugcaucacagcaggaggcaca

SEQ ID NO: 1019742 - RNA, 22 nt, Human
gugacucacacaggccugggcu

SEQ ID NO: 1019743 - RNA, 22 nt, Human
ugccagggugucaggagagcua

SEQ ID NO: 1019744 - RNA, 22 nt, Human
agaaaaggauugauggaucaga

SEQ ID NO: 1019745 - RNA, 22 nt, Human
ccaccuccaccuauugccagcc

SEQ ID NO: 1019746 - RNA, 22 nt, Human
cagcuuuagagaaaacauauuu

SEQ ID NO: 1019747 - RNA, 19 nt, Human
cuugcugggugguuucugc

SEQ ID NO: 1019748 - RNA, 22 nt, Human
cauaccuuucucaagcacaugu

SEQ ID NO: 1019749 - RNA, 22 nt, Human
uucuccagagggcucugcagga

SEQ ID NO: 1019750 - RNA, 22 nt, Human
ccagugcuucuuugcuagcugg

SEQ ID NO: 1019751 - RNA, 22 nt, Human
aggaguggaauuacuggguucu

SEQ ID NO: 1019752 - RNA, 22 nt, Human
gcugucacauuuggagcacugg

SEQ ID NO: 1019753 - RNA, 22 nt, Human
gccuggucucuuucaugucagu

SEQ ID NO: 1019754 - RNA, 22 nt, Human
ucagcuuucucuucuaucgaua

SEQ ID NO: 1019755 - RNA, 22 nt, Human
gcugucugucuucacaucucgc

SEQ ID NO: 1019756 - RNA, 21 nt, Human
uaaagaagaugaaugugauca

SEQ ID NO: 1019757 - RNA, 22 nt, Human
ggcucagggaaugaggaagaau

SEQ ID NO: 1019758 - RNA, 22 nt, Human
gguggcagucuuaagagaucuu

SEQ ID NO: 1019759 - RNA, 22 nt, Human
ucauuuguugaacuuuagugcg

SEQ ID NO: 1019760 - RNA, 22 nt, Human
gacaaaggaucagagguuggga

SEQ ID NO: 1019761 - RNA, 22 nt, Human
guggcacuaaauacagcauuuc

SEQ ID NO: 1019762 - RNA, 22 nt, Human
cuggcuuucauuucaagcacgu

SEQ ID NO: 1019763 - RNA, 22 nt, Human
ucccagagaaagucaaggucuu

SEQ ID NO: 1019764 - RNA, 22 nt, Human
aacugcauucagaaagcucacu

SEQ ID NO: 1019765 - RNA, 23 nt, Human
cccauuuucauguuaacuccugg

SEQ ID NO: 1019766 - RNA, 22 nt, Human
uucacagggccacuggcaggag

SEQ ID NO: 1019767 - RNA, 22 nt, Human
aagggcucccaacucaucuuuu

SEQ ID NO: 1019768 - RNA, 22 nt, Human
uuggcaguagucucggcuaccc

SEQ ID NO: 1019769 - RNA, 22 nt, Human
auguguacaaccaagcacuaaa

SEQ ID NO: 1019770 - RNA, 22 nt, Human
agcuggggcugcagagaacagg

SEQ ID NO: 1019771 - RNA, 22 nt, Human
cuacauuucccagcugccuucc

SEQ ID NO: 1019772 - RNA, 22 nt, Human
cacagaguggaggcuuggccug

SEQ ID NO: 1019773 - RNA, 22 nt, Human
uuguaacaaucugucauaaaug

SEQ ID NO: 1019774 - RNA, 22 nt, Human
gcacugugcuagaagccagggg

SEQ ID NO: 1019775 - RNA, 22 nt, Human
ucacuguugaccuggaaguggg

SEQ ID NO: 1019776 - RNA, 22 nt, Human
ucaaaugcaggucuggucuugg

SEQ ID NO: 1019777 - RNA, 22 nt, Human
ggcuggcaagucagugcugaug

SEQ ID NO: 1019778 - RNA, 22 nt, Human
ugagcacaaguuugcaugugug

SEQ ID NO: 1019779 - RNA, 22 nt, Human
gagggacagcuaaagagaaauu

SEQ ID NO: 1019780 - RNA, 21 nt, Human
ugccagggauuuacagagccu

SEQ ID NO: 1019781 - RNA, 22 nt, Human
guugaaagaucauguggcugcc

SEQ ID NO: 1019782 - RNA, 22 nt, Human
ucugugcaggaagucauuauga

SEQ ID NO: 1019783 - RNA, 22 nt, Human
uaaagguaugucuuaaucaaac

SEQ ID NO: 1019784 - RNA, 22 nt, Human
uggggcuguggauucucacgaa

SEQ ID NO: 1019785 - RNA, 22 nt, Human
gggaguguugagcgcccugcca

SEQ ID NO: 1019786 - RNA, 22 nt, Human
ccuggagcgcgggucaagcugg

SEQ ID NO: 1019787 - RNA, 22 nt, Human
uuauuagguuuacauaaagguu

SEQ ID NO: 1019788 - RNA, 22 nt, Human
cagccagaaccuaggaugagcu

SEQ ID NO: 1019789 - RNA, 22 nt, Human
uucagagaagcaaaggcagauu

SEQ ID NO: 1019790 - RNA, 22 nt, Human
cugggcuguaauguggcacuga

SEQ ID NO: 1019791 - RNA, 22 nt, Human
uuccaggacuggguguuugaag

SEQ ID NO: 1019792 - RNA, 22 nt, Human
acauuucuauagugcaucuguu

SEQ ID NO: 1019793 - RNA, 22 nt, Human
ugucaagucucugaaugaaaug

SEQ ID NO: 1019794 - RNA, 22 nt, Human
aaaggccacugcaagggaaggu

SEQ ID NO: 1019795 - RNA, 23 nt, Human
gggcuccagucucugcucaguug

SEQ ID NO: 1019796 - RNA, 22 nt, Human
uccagaguacggaagagucauc

SEQ ID NO: 1019797 - RNA, 22 nt, Human
ugggcuggcguggagaguuuag

SEQ ID NO: 1019798 - RNA, 22 nt, Human
ggcugcugcccaccccugcaug

SEQ ID NO: 1019799 - RNA, 22 nt, Human
gauuuccuaauguggaucucug

SEQ ID NO: 1019800 - RNA, 17 nt, Human
ucuggccuuccugaacu

SEQ ID NO: 1019801 - RNA, 22 nt, Human
cuucagagugcagaagauuggg

SEQ ID NO: 1019802 - RNA, 22 nt, Human
ucuggccuauuucugucagauc

SEQ ID NO: 1019803 - RNA, 22 nt, Human
gcucuggaagcaucugagagga

SEQ ID NO: 1019804 - RNA, 22 nt, Human
ucuuacauauagcaugaguaca

SEQ ID NO: 1019805 - RNA, 22 nt, Human
gcaaagcugggugugaaugcac

SEQ ID NO: 1019806 - RNA, 22 nt, Human
gggaccugccaaggccacccag

SEQ ID NO: 1019807 - RNA, 23 nt, Human
uuucuguuggguauauauccaag

SEQ ID NO: 1019808 - RNA, 22 nt, Human
acgcagaagggccuggcgugcc

SEQ ID NO: 1019809 - RNA, 22 nt, Human
aggccucagugaucaucaucag

SEQ ID NO: 1019810 - RNA, 22 nt, Human
cuggcuggcaaguagaacacaa

SEQ ID NO: 1019811 - RNA, 22 nt, Human
ggauggagguucucagaugcuc

SEQ ID NO: 1019812 - RNA, 22 nt, Human
accaaggagaaggugcaagcuu

SEQ ID NO: 1019813 - RNA, 20 nt, Human
uaugaguauuacuuucagga

SEQ ID NO: 1019814 - RNA, 18 nt, Human
caugucugcgccacaagg

SEQ ID NO: 1019815 - RNA, 22 nt, Human
ccuggaagauucaccacuacca

SEQ ID NO: 1019816 - RNA, 22 nt, Human
aagagcuggaguuugcagcccu

SEQ ID NO: 1019817 - RNA, 22 nt, Human
cucugcaggggaggcaugcacu

SEQ ID NO: 1019818 - RNA, 22 nt, Human
aggcacugauucucagaguuac

SEQ ID NO: 1019819 - RNA, 22 nt, Human
gugccucagcaccgccugcagc

SEQ ID NO: 1019820 - RNA, 22 nt, Human
caaauguauaaauguacuuucu

SEQ ID NO: 1019821 - RNA, 22 nt, Human
agagcagcacguuguccccaca

SEQ ID NO: 1019822 - RNA, 19 nt, Human
ugagaaggcaguggggagc

SEQ ID NO: 1019823 - RNA, 23 nt, Human
cucugcaggagagugggcagggc

SEQ ID NO: 1019824 - RNA, 22 nt, Human
cuuugcauacaauuuuuagaaa

SEQ ID NO: 1019825 - RNA, 22 nt, Human
uggggaggacgggcgccuuccu

SEQ ID NO: 1019826 - RNA, 22 nt, Human
augggguggaguccgggcagcg

SEQ ID NO: 1019827 - RNA, 22 nt, Human
gcaggagagucugugccagguu

SEQ ID NO: 1019828 - RNA, 22 nt, Human
aagcuuuagagaugaguuccuu

SEQ ID NO: 1019829 - RNA, 22 nt, Human
gaaggcugaugacagauucugc

SEQ ID NO: 1019830 - RNA, 22 nt, Human
gugugcagaagacacaagacau

SEQ ID NO: 1019831 - RNA, 18 nt, Human
ucagagguacagaaaagu

SEQ ID NO: 1019832 - RNA, 22 nt, Human
gccugcagggcccuuguggguc

SEQ ID NO: 1019833 - RNA, 22 nt, Human
ggcucagaccucccagcuccag

SEQ ID NO: 1019834 - RNA, 22 nt, Human
caguacuuugaagauauuuuag

SEQ ID NO: 1019835 - RNA, 22 nt, Human
gggcugccaagccugccugccu

SEQ ID NO: 1019836 - RNA, 22 nt, Human
ggcuguagguuggugcuggaca

SEQ ID NO: 1019837 - RNA, 22 nt, Human
aaauaauguuaggccuuugcuc

SEQ ID NO: 1019838 - RNA, 22 nt, Human
uuucuaggcacagugucuuccc

SEQ ID NO: 1019839 - RNA, 22 nt, Human
auccuugagccaaugacugauu

SEQ ID NO: 1019840 - RNA, 22 nt, Human
cuucaggauuuaggaagaugaa

SEQ ID NO: 1019841 - RNA, 22 nt, Human
gagcugcuggcuccucagguua

SEQ ID NO: 1019842 - RNA, 22 nt, Human
uccgcccgcacguauggagugg

SEQ ID NO: 1019843 - RNA, 22 nt, Human
gacccagcuuaagucacauguu

SEQ ID NO: 1019844 - RNA, 22 nt, Human
uggcagaggaaaaagucacugg

SEQ ID NO: 1019845 - RNA, 22 nt, Human
auggcugggaugggguagagaa

SEQ ID NO: 1019846 - RNA, 23 nt, Human
agggcccaagccuggacagcagg

SEQ ID NO: 1019847 - RNA, 22 nt, Human
gaggcucagagggagcaugguc

SEQ ID NO: 1019848 - RNA, 22 nt, Human
aggccagcaagaaagagagucu

SEQ ID NO: 1019849 - RNA, 22 nt, Human
ucugcucuguggcuucagcuaa

SEQ ID NO: 1019850 - RNA, 20 nt, Human
cuccagggaacagacuggag

SEQ ID NO: 1019851 - RNA, 22 nt, Human
gggauggcucaaaggagucagg

SEQ ID NO: 1019852 - RNA, 22 nt, Human
cagagcugucauuugccaguga

SEQ ID NO: 1019853 - RNA, 22 nt, Human
acaagauagcuuagaagauuca

SEQ ID NO: 1019854 - RNA, 22 nt, Human
uguauguguauguacauaugca

SEQ ID NO: 1019855 - RNA, 22 nt, Human
gaggggcagagguagagaacaa

SEQ ID NO: 1019856 - RNA, 22 nt, Human
gucaggaugacaagugcuuuca

SEQ ID NO: 1019857 - RNA, 22 nt, Human
uagugaaacaguuaucaaucug

SEQ ID NO: 1019858 - RNA, 22 nt, Human
ggccagugugcaggucagagau

SEQ ID NO: 1019859 - RNA, 22 nt, Human
uaaaugcaguacaaauuguucu

SEQ ID NO: 1019860 - RNA, 22 nt, Human
caggcagcagccacucugguau

SEQ ID NO: 1019861 - RNA, 20 nt, Human
cccugagaccagagagcagc

SEQ ID NO: 1019862 - RNA, 22 nt, Human
cccagggcccuggacagcuaca

SEQ ID NO: 1019863 - RNA, 22 nt, Human
uaaggcacccauguucauacag

SEQ ID NO: 1019864 - RNA, 22 nt, Human
ccugagagcagcuuccugcuua

SEQ ID NO: 1019865 - RNA, 22 nt, Human
gcacugaaaauguuggauucca

SEQ ID NO: 1019866 - RNA, 22 nt, Human
aggagcagcccacuccuguccu

SEQ ID NO: 1019867 - RNA, 19 nt, Human
agccacagaacuugcagga

SEQ ID NO: 1019868 - RNA, 22 nt, Human
cucacugucuguacuagcugau

SEQ ID NO: 1019869 - RNA, 22 nt, Human
auggggagagaagggcugagcu

SEQ ID NO: 1019870 - RNA, 22 nt, Human
gcugccugguuucucagcugca

SEQ ID NO: 1019871 - RNA, 22 nt, Human
cuggcuccuccaaggccuggag

SEQ ID NO: 1019872 - RNA, 22 nt, Human
ucugucugagggagugacauuu

SEQ ID NO: 1019873 - RNA, 23 nt, Human
acagaggcuuaaaugaguggcag

SEQ ID NO: 1019874 - RNA, 22 nt, Human
gcaggcaguuugcuuuucccuc

SEQ ID NO: 1019875 - RNA, 22 nt, Human
gcaaguacaaacgcaucggcug

SEQ ID NO: 1019876 - RNA, 22 nt, Human
aggcaugugacccuggacucag

SEQ ID NO: 1019877 - RNA, 23 nt, Human
cuggggcuuucaaaucugggcag

SEQ ID NO: 1019878 - RNA, 22 nt, Human
ucucuucuauuugagacuauuu

SEQ ID NO: 1019879 - RNA, 22 nt, Human
ucccagagugugggcaucaagg

SEQ ID NO: 1019880 - RNA, 22 nt, Human
cauuugaaauaguucauucuug

SEQ ID NO: 1019881 - RNA, 19 nt, Human
uggcuuccaucucucucau

SEQ ID NO: 1019882 - RNA, 22 nt, Human
cagucacauugcccugcauuua

SEQ ID NO: 1019883 - RNA, 22 nt, Human
agguggcuccucccauggcugg

SEQ ID NO: 1019884 - RNA, 22 nt, Human
ggggcagaaagcccacagagug

SEQ ID NO: 1019885 - RNA, 22 nt, Human
auuguacaugcagugagucauc

SEQ ID NO: 1019886 - RNA, 22 nt, Human
uccuggaggcaaaugaagacuc

SEQ ID NO: 1019887 - RNA, 22 nt, Human
ucccagagguugagucacuuau

SEQ ID NO: 1019888 - RNA, 22 nt, Human
cagagccagcaguggggacagg

SEQ ID NO: 1019889 - RNA, 22 nt, Human
aguuauuacucuuuaacauauu

SEQ ID NO: 1019890 - RNA, 22 nt, Human
aaaagcucuuucugcuguagau

SEQ ID NO: 1019891 - RNA, 20 nt, Human
guauuaggagguaaauguaa

SEQ ID NO: 1019892 - RNA, 22 nt, Human
cacauguaguaagcaggcaaug

SEQ ID NO: 1019893 - RNA, 22 nt, Human
aggaggugacagccugcaucug

SEQ ID NO: 1019894 - RNA, 22 nt, Human
aucagagaaauggagggcgcuu

SEQ ID NO: 1019895 - RNA, 22 nt, Human
uugcugugucauuuguuuaauc

SEQ ID NO: 1019896 - RNA, 22 nt, Human
uuucaugagauuccuccacauc

SEQ ID NO: 1019897 - RNA, 22 nt, Human
guuccauaucacagcagacgaa

SEQ ID NO: 1019898 - RNA, 22 nt, Human
ugcuagaauuagguuaaacaaa

SEQ ID NO: 1019899 - RNA, 22 nt, Human
aagcuuuaaggaauuuuaugga

SEQ ID NO: 1019900 - RNA, 22 nt, Human
uggagcuggaauuucugggccu

SEQ ID NO: 1019901 - RNA, 22 nt, Human
gugugccaacaaaagacagugc

SEQ ID NO: 1019902 - RNA, 22 nt, Human
agcagcucuuaacaaagcaugg

SEQ ID NO: 1019903 - RNA, 22 nt, Human
ugaaacacugcgauaaaauccu

SEQ ID NO: 1019904 - RNA, 22 nt, Human
acaggacaggcugggcuagacu

SEQ ID NO: 1019905 - RNA, 22 nt, Human
ggcagcacugcagcuuguuggg

SEQ ID NO: 1019906 - RNA, 22 nt, Human
uggagcagggcaucacugugcg

SEQ ID NO: 1019907 - RNA, 21 nt, Human
gccugcaguuuugaagcccuu

SEQ ID NO: 1019908 - RNA, 22 nt, Human
ucagggacauuuagacacugau

SEQ ID NO: 1019909 - RNA, 22 nt, Human
cauggccuugagugacugcacu

SEQ ID NO: 1019910 - RNA, 22 nt, Human
aguaaaauuucugcugaggaga

SEQ ID NO: 1019911 - RNA, 22 nt, Human
uauuggugggggcagagagaga

SEQ ID NO: 1019912 - RNA, 22 nt, Human
gcugcucugcuguguaagcagg

SEQ ID NO: 1019913 - RNA, 22 nt, Human
cuugccuucuguuccuauagaa

SEQ ID NO: 1019914 - RNA, 22 nt, Human
agcagagucugugugcacuuua

SEQ ID NO: 1019915 - RNA, 22 nt, Human
cucacugcccugaaguuggguu

SEQ ID NO: 1019916 - RNA, 22 nt, Human
uagucuuuugagaaguauaucu

SEQ ID NO: 1019917 - RNA, 22 nt, Human
uacauauguaaacauguauaaa

SEQ ID NO: 1019918 - RNA, 22 nt, Human
acagcagcuggguucccaccau

SEQ ID NO: 1019919 - RNA, 22 nt, Human
cucccuggaggcccagaccugg

SEQ ID NO: 1019920 - RNA, 22 nt, Human
cauuaggguaauugaacacuua

SEQ ID NO: 1019921 - RNA, 22 nt, Human
ugaaucaguauaaauucucaaa

SEQ ID NO: 1019922 - RNA, 22 nt, Human
ucauugaacgaagagcuccauu

SEQ ID NO: 1019923 - RNA, 17 nt, Human
acagggcagaaacagcu

SEQ ID NO: 1019924 - RNA, 22 nt, Human
ggaggccaaagugugggcggcu

SEQ ID NO: 1019925 - RNA, 22 nt, Human
uucacuuaacaucauaucauga

SEQ ID NO: 1019926 - RNA, 22 nt, Human
aguuauucauuuauucuguaca

SEQ ID NO: 1019927 - RNA, 22 nt, Human
aguuauuucaguaacauaauag

SEQ ID NO: 1019928 - RNA, 22 nt, Human
uccucuggcccagcugccucug

SEQ ID NO: 1019929 - RNA, 22 nt, Human
uuaaaaugcagauucugauuca

SEQ ID NO: 1019930 - RNA, 22 nt, Human
ucucagaguuccucuggagucc

SEQ ID NO: 1019931 - RNA, 22 nt, Human
ucaggcagaugcagggauggau

SEQ ID NO: 1019932 - RNA, 22 nt, Human
aagcaauagcaacaacuuuaca

SEQ ID NO: 1019933 - RNA, 22 nt, Human
ugaggugaccgcagaugggaag

SEQ ID NO: 1019934 - RNA, 22 nt, Human
uuguaacagguacuaaauaacu

SEQ ID NO: 1019935 - RNA, 21 nt, Human
cucaggauggcggccuggugg

SEQ ID NO: 1019936 - RNA, 18 nt, Human
ucagagagaauaguaauu

SEQ ID NO: 1019937 - RNA, 22 nt, Human
ugcauguguguguauuuauaaa

SEQ ID NO: 1019938 - RNA, 22 nt, Human
cagggacccuacuagcucacac

SEQ ID NO: 1019939 - RNA, 22 nt, Human
agggacccauagagagaccagu

SEQ ID NO: 1019940 - RNA, 22 nt, Human
uggccuuggcagugagaagagu

SEQ ID NO: 1019941 - RNA, 21 nt, Human
acagcagggcuggcaugacag

SEQ ID NO: 1019942 - RNA, 22 nt, Human
agggcagcagcccauggcucug

SEQ ID NO: 1019943 - RNA, 22 nt, Human
cauguacacucauguaacuaua

SEQ ID NO: 1019944 - RNA, 22 nt, Human
aaauguaguauguugcauguau

SEQ ID NO: 1019945 - RNA, 22 nt, Human
accucuggccuucaggcaucau

SEQ ID NO: 1019946 - RNA, 22 nt, Human
uuuaagauucaguaaggcaaac

SEQ ID NO: 1019947 - RNA, 22 nt, Human
cagcuuggcuuccgcuuuacug

SEQ ID NO: 1019948 - RNA, 22 nt, Human
ugucugugaccucuuaggcaag

SEQ ID NO: 1019949 - RNA, 22 nt, Human
auucauuuagguauucacuuac

SEQ ID NO: 1019950 - RNA, 22 nt, Human
gacaggggucccucugggcugu

SEQ ID NO: 1019951 - RNA, 22 nt, Human
acauuuaaccaaacuguuuaau

SEQ ID NO: 1019952 - RNA, 22 nt, Human
acacagggaggaggugcugugc

SEQ ID NO: 1019953 - RNA, 22 nt, Human
cuucuggaggacacuggcccca

SEQ ID NO: 1019954 - RNA, 22 nt, Human
cuggcagucacggccaugugcu

SEQ ID NO: 1019955 - RNA, 22 nt, Human
aucaggauagugguuaccuggg

SEQ ID NO: 1019956 - RNA, 22 nt, Human
cugagccaaggggacagugaca

SEQ ID NO: 1019957 - RNA, 22 nt, Human
gcuggggucugugaggagggcu

SEQ ID NO: 1019958 - RNA, 22 nt, Human
ucucugaagauauuuauuauua

SEQ ID NO: 1019959 - RNA, 22 nt, Human
ucacaaaagcuuuugaauuugg

SEQ ID NO: 1019960 - RNA, 19 nt, Human
acauauguggauauacaug

SEQ ID NO: 1019961 - RNA, 22 nt, Human
uaggcacuggggaggcagcaug

SEQ ID NO: 1019962 - RNA, 22 nt, Human
aguccagggcucucugugggau

SEQ ID NO: 1019963 - RNA, 22 nt, Human
gaagagcugcaguuuccugggc

SEQ ID NO: 1019964 - RNA, 22 nt, Human
cagaggcagacccuccagggcg

SEQ ID NO: 1019965 - RNA, 22 nt, Human
cauguuuucuaggcuuucacaa

SEQ ID NO: 1019966 - RNA, 22 nt, Human
uacuuuagaaggaaauaaguuc

SEQ ID NO: 1019967 - RNA, 22 nt, Human
ggcauccaaauaccaagaugua

SEQ ID NO: 1019968 - RNA, 22 nt, Human
cuguccuguagcuccaucaguc

SEQ ID NO: 1019969 - RNA, 22 nt, Human
ugcugcuguauccuuaguguca

SEQ ID NO: 1019970 - RNA, 22 nt, Human
gcugugcagucuuuggugugcc

SEQ ID NO: 1019971 - RNA, 22 nt, Human
cucuggccagagccugcgggaa

SEQ ID NO: 1019972 - RNA, 22 nt, Human
uggagcccagacacuggcauug

SEQ ID NO: 1019973 - RNA, 22 nt, Human
agguaaaauagauaguauuucu

SEQ ID NO: 1019974 - RNA, 22 nt, Human
uaagacauuugaaaugugaucc

SEQ ID NO: 1019975 - RNA, 22 nt, Human
caggguggcacucagcgcaucu

SEQ ID NO: 1019976 - RNA, 22 nt, Human
ugugaugguucacugggcauga

SEQ ID NO: 1019977 - RNA, 22 nt, Human
aucauuacuccuguaaaauugu

SEQ ID NO: 1019978 - RNA, 22 nt, Human
gcauugaguccacucugucuuu

SEQ ID NO: 1019979 - RNA, 22 nt, Human
gcuggccauauauuuugcuguu

SEQ ID NO: 1019980 - RNA, 22 nt, Human
cagggacccgcacagguagcau

SEQ ID NO: 1019981 - RNA, 22 nt, Human
uucugucagcgucagaaauucu

SEQ ID NO: 1019982 - RNA, 22 nt, Human
uguggccaccagagcugcuauu

SEQ ID NO: 1019983 - RNA, 22 nt, Human
aucagcaaaaaugccuucagaa

SEQ ID NO: 1019984 - RNA, 22 nt, Human
uauuccagugugaucuuuguag

SEQ ID NO: 1019985 - RNA, 22 nt, Human
uuauguaauuuguuugcucuuc

SEQ ID NO: 1019986 - RNA, 18 nt, Human
ucugggcuucccgaggcu

SEQ ID NO: 1019987 - RNA, 22 nt, Human
caaauguguaaggaaguguuag

SEQ ID NO: 1019988 - RNA, 22 nt, Human
ugaaguuauauauguugaaaau

SEQ ID NO: 1019989 - RNA, 22 nt, Human
uccuauugguagacauuucugu

SEQ ID NO: 1019990 - RNA, 22 nt, Human
ucauuucuauugcuacugucug

SEQ ID NO: 1019991 - RNA, 22 nt, Human
ugaguuuugucuugcuagaagu

SEQ ID NO: 1019992 - RNA, 22 nt, Human
uauauucaaugauuaguaucag

SEQ ID NO: 1019993 - RNA, 22 nt, Human
ggagggcugccagguggagcgg

SEQ ID NO: 1019994 - RNA, 22 nt, Human
ggaaagagcuaaaagggugaga

SEQ ID NO: 1019995 - RNA, 22 nt, Human
cugggugaguugaugaaggaga

SEQ ID NO: 1019996 - RNA, 22 nt, Human
uagaaaugaauguuuaaaaguc

SEQ ID NO: 1019997 - RNA, 22 nt, Human
uaugugaauacagcaguggaug

SEQ ID NO: 1019998 - RNA, 22 nt, Human
caggccucuauggucagcugag

SEQ ID NO: 1019999 - RNA, 22 nt, Human
gagggauggugugagaggcuca

SEQ ID NO: 1020000 - RNA, 22 nt, Human
uagggcagcugcaucaggcacu

SEQ ID NO: 1020001 - RNA, 22 nt, Human
cagaaguaagauuacugugaga

SEQ ID NO: 1020002 - RNA, 22 nt, Human
agggagacacaugaggaaguca

SEQ ID NO: 1020003 - RNA, 22 nt, Human
auaaaauuugcuacuguuaaau

SEQ ID NO: 1020004 - RNA, 19 nt, Human
cucugccucccuccugggu

SEQ ID NO: 1020005 - RNA, 22 nt, Human
gucccuuggcucacaaacagcu

SEQ ID NO: 1020006 - RNA, 21 nt, Human
cauuucuauugaugagaaaag

SEQ ID NO: 1020007 - RNA, 22 nt, Human
ccagagaccagaacauggggau

SEQ ID NO: 1020008 - RNA, 22 nt, Human
uuucagaaagcaucaucaaagu

SEQ ID NO: 1020009 - RNA, 22 nt, Human
agaaauguuguggguuuuguua

SEQ ID NO: 1020010 - RNA, 22 nt, Human
uuuccucuuccgagggggaggc

SEQ ID NO: 1020011 - RNA, 22 nt, Human
ucuauaaauuaugcagucucag

SEQ ID NO: 1020012 - RNA, 22 nt, Human
ccugcaggggagagacuucuag

SEQ ID NO: 1020013 - RNA, 22 nt, Human
gcuggggaggcagcagagaaca

SEQ ID NO: 1020014 - RNA, 22 nt, Human
uucugucuguaaacuucucaau

SEQ ID NO: 1020015 - RNA, 22 nt, Human
acacaguaugaaaagucuaguu

SEQ ID NO: 1020016 - RNA, 22 nt, Human
caggcagcgcucguggccuggc

SEQ ID NO: 1020017 - RNA, 22 nt, Human
cagucucucugaaguauuaaga

SEQ ID NO: 1020018 - RNA, 22 nt, Human
cugaaaauguuacacaggaaga

SEQ ID NO: 1020019 - RNA, 22 nt, Human
agccuucagcaguucaggugcc

SEQ ID NO: 1020020 - RNA, 22 nt, Human
cccaugagaccugguuuaaggc

SEQ ID NO: 1020021 - RNA, 22 nt, Human
cagcccagccgagggccuggcu

SEQ ID NO: 1020022 - RNA, 22 nt, Human
uggcacauagaaaaggaucaau

SEQ ID NO: 1020023 - RNA, 22 nt, Human
caggcaccccaggugagcacug

SEQ ID NO: 1020024 - RNA, 21 nt, Human
ggccucugucauccugggaag

SEQ ID NO: 1020025 - RNA, 22 nt, Human
uccucugcuggaagggcaagag

SEQ ID NO: 1020026 - RNA, 22 nt, Human
agagauaugaguaguugugaca

SEQ ID NO: 1020027 - RNA, 22 nt, Human
auucacaguuuccucauauucu

SEQ ID NO: 1020028 - RNA, 22 nt, Human
caggguggaauggaaugcuggc

SEQ ID NO: 1020029 - RNA, 22 nt, Human
cggggcugcgcucuuccugccg

SEQ ID NO: 1020030 - RNA, 19 nt, Human
ccagagacauuggcaucuu

SEQ ID NO: 1020031 - RNA, 22 nt, Human
auggccuggccagagcucugcu

SEQ ID NO: 1020032 - RNA, 22 nt, Human
guccucugggcagcugccccac

SEQ ID NO: 1020033 - RNA, 22 nt, Human
uacauucuggaaaggcacagac

SEQ ID NO: 1020034 - RNA, 21 nt, Human
cacugcagccuugaccugggc

SEQ ID NO: 1020035 - RNA, 22 nt, Human
cagagcauuaaaaccagcucug

SEQ ID NO: 1020036 - RNA, 22 nt, Human
cugcuuccaugcaauggcaguc

SEQ ID NO: 1020037 - RNA, 22 nt, Human
gaaaugcauggaucuuggcaga

SEQ ID NO: 1020038 - RNA, 22 nt, Human
acagauauaugauuguguaaau

SEQ ID NO: 1020039 - RNA, 22 nt, Human
gccccuggcuggccagcuccuc

SEQ ID NO: 1020040 - RNA, 22 nt, Human
ggcggggguccaggagccugca

SEQ ID NO: 1020041 - RNA, 22 nt, Human
cagucuucuaaccuagcagccu

SEQ ID NO: 1020042 - RNA, 22 nt, Human
uacaaaguuuucuuggauugag

SEQ ID NO: 1020043 - RNA, 22 nt, Human
cuucucagaucucagcuuugag

SEQ ID NO: 1020044 - RNA, 20 nt, Human
cccagagccauagccagaca

SEQ ID NO: 1020045 - RNA, 22 nt, Human
aucuggcuugacuuugcgacuu

SEQ ID NO: 1020046 - RNA, 22 nt, Human
acagcagccugcagcccugugu

SEQ ID NO: 1020047 - RNA, 22 nt, Human
aggaagccugcaggugacugcu

SEQ ID NO: 1020048 - RNA, 20 nt, Human
acugugaaugcugaauuagc

SEQ ID NO: 1020049 - RNA, 22 nt, Human
caaaggcaguuacugaaugaag

SEQ ID NO: 1020050 - RNA, 22 nt, Human
cuuauuauaaaauccuguuuga

SEQ ID NO: 1020051 - RNA, 22 nt, Human
caggagacaauggcuguggggc

SEQ ID NO: 1020052 - RNA, 22 nt, Human
ucuaugaaaagucuauucauuc

SEQ ID NO: 1020053 - RNA, 22 nt, Human
cagcagagcauuugguaggagg

SEQ ID NO: 1020054 - RNA, 22 nt, Human
auuuccauacacccauuucuga

SEQ ID NO: 1020055 - RNA, 22 nt, Human
agugagggaugaagaacugcgg

SEQ ID NO: 1020056 - RNA, 22 nt, Human
uacaguagacaauguuaguaug

SEQ ID NO: 1020057 - RNA, 22 nt, Human
uggagcugagaaguggagcucu

SEQ ID NO: 1020058 - RNA, 22 nt, Human
gagggaccccaggcuggcccuu

SEQ ID NO: 1020059 - RNA, 22 nt, Human
ugaagggggagauauaugugug

SEQ ID NO: 1020060 - RNA, 22 nt, Human
cauuuuaagaugaccugguuuc

SEQ ID NO: 1020061 - RNA, 22 nt, Human
agcuuccuguugagagagggag

SEQ ID NO: 1020062 - RNA, 19 nt, Human
agcagccauagacaauaug

SEQ ID NO: 1020063 - RNA, 22 nt, Human
ccagggugagaaaaggcuggau

SEQ ID NO: 1020064 - RNA, 22 nt, Human
aaagaacaaauuagcuguuuua

SEQ ID NO: 1020065 - RNA, 22 nt, Human
auaaguucagguaaagaaauca

SEQ ID NO: 1020066 - RNA, 22 nt, Human
guggggggacguuggucacuuu

SEQ ID NO: 1020067 - RNA, 22 nt, Human
ugagaaagugggugccuagcaa

SEQ ID NO: 1020068 - RNA, 22 nt, Human
ugggcucugcaucagugcccau

SEQ ID NO: 1020069 - RNA, 22 nt, Human
agucuucacucuucacuacuau

SEQ ID NO: 1020070 - RNA, 22 nt, Human
uagacagauuucuuguuagaca

SEQ ID NO: 1020071 - RNA, 17 nt, Human
gagauggguggaucacc

SEQ ID NO: 1020072 - RNA, 22 nt, Human
ugcugccaaaugcgagcucugu

SEQ ID NO: 1020073 - RNA, 23 nt, Human
cagcccuuccugcauguuuuugu

SEQ ID NO: 1020074 - RNA, 22 nt, Human
ugcagaagauggucugagcacc

SEQ ID NO: 1020075 - RNA, 22 nt, Human
aacaaaugauaccaguucucaa

SEQ ID NO: 1020076 - RNA, 22 nt, Human
ccuugcauauauuauaucuuug

SEQ ID NO: 1020077 - RNA, 22 nt, Human
ccuggcagcuaagugcuuugag

SEQ ID NO: 1020078 - RNA, 22 nt, Human
gugccaaaagcuauaauuuggu

SEQ ID NO: 1020079 - RNA, 22 nt, Human
ugucagugguagacccagaggu

SEQ ID NO: 1020080 - RNA, 22 nt, Human
gggacuggcacagggcugggag

SEQ ID NO: 1020081 - RNA, 21 nt, Human
aaugugugcuauuuaucuuuu

SEQ ID NO: 1020082 - RNA, 22 nt, Human
uuuaauuuucugggcccagcag

SEQ ID NO: 1020083 - RNA, 22 nt, Human
ugguuuauuucucugaaagguu

SEQ ID NO: 1020084 - RNA, 22 nt, Human
auuuauuaccucggaguuucug

SEQ ID NO: 1020085 - RNA, 22 nt, Human
aggcucuggacagugaggaguu

SEQ ID NO: 1020086 - RNA, 22 nt, Human
uuaucauugucgcagucuaauu

SEQ ID NO: 1020087 - RNA, 22 nt, Human
uggcucagccauucguguugcc

SEQ ID NO: 1020088 - RNA, 21 nt, Human
uagggcucucugugucaggug

SEQ ID NO: 1020089 - RNA, 22 nt, Human
acagaauugauggaaaucucag

SEQ ID NO: 1020090 - RNA, 22 nt, Human
ccugggaguggcacucacagca

SEQ ID NO: 1020091 - RNA, 22 nt, Human
uucuuugcccuuaaugaaauaa

SEQ ID NO: 1020092 - RNA, 22 nt, Human
agagaggcgaguuaccugugcu

SEQ ID NO: 1020093 - RNA, 22 nt, Human
aaguugaagcaugaaccaaggu

SEQ ID NO: 1020094 - RNA, 22 nt, Human
gcagcagagcuuuguccuggcu

SEQ ID NO: 1020095 - RNA, 22 nt, Human
auagaaauggcagcuggugcua

SEQ ID NO: 1020096 - RNA, 22 nt, Human
gagagugucgggggccccagga

SEQ ID NO: 1020097 - RNA, 22 nt, Human
ccagagugacgugaagugugaa

SEQ ID NO: 1020098 - RNA, 22 nt, Human
aagaauucacugguagagucaa

SEQ ID NO: 1020099 - RNA, 22 nt, Human
acagauauaaacuauaguagug

SEQ ID NO: 1020100 - RNA, 22 nt, Human
cgugucaucugagccuugggcg

SEQ ID NO: 1020101 - RNA, 22 nt, Human
uugaggagcacuagucagguau

SEQ ID NO: 1020102 - RNA, 22 nt, Human
ugugaagcuggauccuggagcu

SEQ ID NO: 1020103 - RNA, 22 nt, Human
gagccaggguuugaaacuagac

SEQ ID NO: 1020104 - RNA, 23 nt, Human
aucagucuugguagcugugccca

SEQ ID NO: 1020105 - RNA, 22 nt, Human
aaaaugacauuccagugauauu

SEQ ID NO: 1020106 - RNA, 23 nt, Human
acugagccagggccugggucagc

SEQ ID NO: 1020107 - RNA, 22 nt, Human
uucucauucugacucaguguag

SEQ ID NO: 1020108 - RNA, 22 nt, Human
ccagggcuggugggagaugcug

SEQ ID NO: 1020109 - RNA, 22 nt, Human
guuuauuauucaacuucauguu

SEQ ID NO: 1020110 - RNA, 22 nt, Human
ugguccagacauuucugaggua

SEQ ID NO: 1020111 - RNA, 22 nt, Human
ucacagggcauuauggcuccag

SEQ ID NO: 1020112 - RNA, 22 nt, Human
auggcuggcauccaggugggcu

SEQ ID NO: 1020113 - RNA, 22 nt, Human
uaacagaagaugaaacuucuuu

SEQ ID NO: 1020114 - RNA, 22 nt, Human
ccugccugacagagaagguuca

SEQ ID NO: 1020115 - RNA, 22 nt, Human
gccucugcaugcucagcaccca

SEQ ID NO: 1020116 - RNA, 22 nt, Human
gcacaauuauuuaugcaguaug

SEQ ID NO: 1020117 - RNA, 22 nt, Human
cuccucagacuuuccuuguccg

SEQ ID NO: 1020118 - RNA, 22 nt, Human
gcuccugucuuggggcacuggc

SEQ ID NO: 1020119 - RNA, 22 nt, Human
uaaggcacuucaauguuuagaa

SEQ ID NO: 1020120 - RNA, 22 nt, Human
auacaaauuuauagaugcauuu

SEQ ID NO: 1020121 - RNA, 22 nt, Human
aucuggcuuuuacugaauugcu

SEQ ID NO: 1020122 - RNA, 22 nt, Human
aacucaguuacauauuagaaua

SEQ ID NO: 1020123 - RNA, 23 nt, Human
gcagagcugcccuauugccuugg

SEQ ID NO: 1020124 - RNA, 22 nt, Human
ucuugggauagugucucauggc

SEQ ID NO: 1020125 - RNA, 22 nt, Human
uccaugagaacccuuggagaua

SEQ ID NO: 1020126 - RNA, 22 nt, Human
caggacauugauccauuggcac

SEQ ID NO: 1020127 - RNA, 22 nt, Human
gccagggaggcuguaggguccu

SEQ ID NO: 1020128 - RNA, 22 nt, Human
cucagcagcagggaagagguca

SEQ ID NO: 1020129 - RNA, 22 nt, Human
gaacagaauuaccgaagaucug

SEQ ID NO: 1020130 - RNA, 20 nt, Human
ucagggcaugggacagcccc

SEQ ID NO: 1020131 - RNA, 22 nt, Human
aaguucaaguaguguuacaugg

SEQ ID NO: 1020132 - RNA, 22 nt, Human
auuuugaaaccaaguuauuucc

SEQ ID NO: 1020133 - RNA, 22 nt, Human
uagcagcuuaaguaauuagaau

SEQ ID NO: 1020134 - RNA, 22 nt, Human
cuuugcaauagaggcacacaug

SEQ ID NO: 1020135 - RNA, 22 nt, Human
caggccugugaguugaggcccc

SEQ ID NO: 1020136 - RNA, 22 nt, Human
augcugugucaggaauuugaua

SEQ ID NO: 1020137 - RNA, 22 nt, Human
gccaggcagccacccucugcga

SEQ ID NO: 1020138 - RNA, 22 nt, Human
ggcuucuuccugugaacauguu

SEQ ID NO: 1020139 - RNA, 22 nt, Human
uucuucuucauuucugacgaug

SEQ ID NO: 1020140 - RNA, 22 nt, Human
cagagagagugggguguggauu

SEQ ID NO: 1020141 - RNA, 19 nt, Human
ccaggccucuggggccugu

SEQ ID NO: 1020142 - RNA, 22 nt, Human
ggcugugccucaaggcuacuca

SEQ ID NO: 1020143 - RNA, 22 nt, Human
ugguggcuucugaggauggcga

SEQ ID NO: 1020144 - RNA, 22 nt, Human
cuggaaggcucugcugccuguc

SEQ ID NO: 1020145 - RNA, 22 nt, Human
ugcacacacgcggcacaucugu

SEQ ID NO: 1020146 - RNA, 22 nt, Human
cagggccaugaggcacaggguc

SEQ ID NO: 1020147 - RNA, 22 nt, Human
uucuuuaaaauagugagaaaga

SEQ ID NO: 1020148 - RNA, 22 nt, Human
ccugcagaaaggguccccagga

SEQ ID NO: 1020149 - RNA, 22 nt, Human
uuuggaauuggaaagugcugug

SEQ ID NO: 1020150 - RNA, 23 nt, Human
ucugcucugaaguucggcugagc

SEQ ID NO: 1020151 - RNA, 22 nt, Human
agggccucuaccauccaagguu

SEQ ID NO: 1020152 - RNA, 22 nt, Human
aggcuucuuagauuggcuggag

SEQ ID NO: 1020153 - RNA, 22 nt, Human
gccuaggagacaagcgugaaag

SEQ ID NO: 1020154 - RNA, 22 nt, Human
gccaggcaggccacgcuguguu

SEQ ID NO: 1020155 - RNA, 22 nt, Human
gugucccaauguucaggacggc

SEQ ID NO: 1020156 - RNA, 22 nt, Human
auucuguauuucuaauaagauc

SEQ ID NO: 1020157 - RNA, 22 nt, Human
agugcuuuauguuguugugcaa

SEQ ID NO: 1020158 - RNA, 22 nt, Human
guucuucaucauuaacacucug

SEQ ID NO: 1020159 - RNA, 22 nt, Human
uuaugauuugccacagauuggu

SEQ ID NO: 1020160 - RNA, 22 nt, Human
cgcugccaggauccccugccgg

SEQ ID NO: 1020161 - RNA, 22 nt, Human
ccucagggucugaggagaccgu

SEQ ID NO: 1020162 - RNA, 22 nt, Human
augcagagacagauguggcaug

SEQ ID NO: 1020163 - RNA, 22 nt, Human
uugucugugaaauggaaauagu

SEQ ID NO: 1020164 - RNA, 22 nt, Human
ucuguucaugaaauaucuuuuu

SEQ ID NO: 1020165 - RNA, 22 nt, Human
ugaagcaaacgcuucuguuccu

SEQ ID NO: 1020166 - RNA, 22 nt, Human
ccagguggacggcgaguacagg

SEQ ID NO: 1020167 - RNA, 22 nt, Human
uuuuaucaaucauuaagacauu

SEQ ID NO: 1020168 - RNA, 22 nt, Human
cagcugccccuccagggcuggg

SEQ ID NO: 1020169 - RNA, 22 nt, Human
cuuaaauuggaugaguuaaguu

SEQ ID NO: 1020170 - RNA, 22 nt, Human
agcaggcuccuuccuucucugg

SEQ ID NO: 1020171 - RNA, 19 nt, Human
ugggcagcucccucugucc

SEQ ID NO: 1020172 - RNA, 21 nt, Human
gcaggggauagaaauggucug

SEQ ID NO: 1020173 - RNA, 22 nt, Human
cagacaugauguaagcagaggc

SEQ ID NO: 1020174 - RNA, 22 nt, Human
cuggccacuggagguggcaccc

SEQ ID NO: 1020175 - RNA, 22 nt, Human
auuucaguguuuuaagaguuca

SEQ ID NO: 1020176 - RNA, 22 nt, Human
acccagccuacaaagcucaccu

SEQ ID NO: 1020177 - RNA, 22 nt, Human
ccacagagagugucagccuuug

SEQ ID NO: 1020178 - RNA, 22 nt, Human
cagcuggguuuaguggggugug

SEQ ID NO: 1020179 - RNA, 22 nt, Human
ugccacccagccaggaguggga

SEQ ID NO: 1020180 - RNA, 22 nt, Human
ccugucugagccagggugggca

SEQ ID NO: 1020181 - RNA, 19 nt, Human
uggcagaggcaguuuguac

SEQ ID NO: 1020182 - RNA, 22 nt, Human
ugugcagcuaguccuggacuug

SEQ ID NO: 1020183 - RNA, 22 nt, Human
cauggggagacaccuagggaaa

SEQ ID NO: 1020184 - RNA, 22 nt, Human
uaucuaaaggauuuaauuuagu

SEQ ID NO: 1020185 - RNA, 22 nt, Human
uggcucaguuucugcccagcug

SEQ ID NO: 1020186 - RNA, 22 nt, Human
ugggauggagccugaguauagu

SEQ ID NO: 1020187 - RNA, 22 nt, Human
augaacuuauuucugaacuuuu

SEQ ID NO: 1020188 - RNA, 22 nt, Human
auaugagagaggaaagauuuua

SEQ ID NO: 1020189 - RNA, 22 nt, Human
acagugucuccugguacccagu

SEQ ID NO: 1020190 - RNA, 20 nt, Human
agcccuguuuccuggagaga

SEQ ID NO: 1020191 - RNA, 22 nt, Human
cgacccuacagacagugcugag

SEQ ID NO: 1020192 - RNA, 17 nt, Human
agugaaauuuacauugc

SEQ ID NO: 1020193 - RNA, 22 nt, Human
uagcugucaccagaaauggcca

SEQ ID NO: 1020194 - RNA, 22 nt, Human
uuuucauuguuccucgagcauu

SEQ ID NO: 1020195 - RNA, 22 nt, Human
ucuucacaccgggcagcaggaa

SEQ ID NO: 1020196 - RNA, 22 nt, Human
gucccagggaagaaggcagcac

SEQ ID NO: 1020197 - RNA, 22 nt, Human
aagucauugguagcuugauagg

SEQ ID NO: 1020198 - RNA, 22 nt, Human
gacacagagauaggccuguguu

SEQ ID NO: 1020199 - RNA, 21 nt, Human
uccuccuucaaguccuggccu

SEQ ID NO: 1020200 - RNA, 20 nt, Human
cagagccaagagcagcaucu

SEQ ID NO: 1020201 - RNA, 22 nt, Human
gaucuguuucauucacagucug

SEQ ID NO: 1020202 - RNA, 22 nt, Human
cagggagcuggugccagccgac

SEQ ID NO: 1020203 - RNA, 22 nt, Human
gcugccuuuugcuccucccacc

SEQ ID NO: 1020204 - RNA, 22 nt, Human
aaggccaucuacuuacggaauu

SEQ ID NO: 1020205 - RNA, 23 nt, Human
cccagcagauuguaaagugucca

SEQ ID NO: 1020206 - RNA, 22 nt, Human
gaagagcuauguccagggagca

SEQ ID NO: 1020207 - RNA, 19 nt, Human
uugguggugguuuugguuc

SEQ ID NO: 1020208 - RNA, 22 nt, Human
ccugagggaggguauaggcugu

SEQ ID NO: 1020209 - RNA, 22 nt, Human
ugccagcuccgaggagcugcag

SEQ ID NO: 1020210 - RNA, 21 nt, Human
agggccugugcucuccagguc

SEQ ID NO: 1020211 - RNA, 22 nt, Human
ucaucaaagucaaagaaugacu

SEQ ID NO: 1020212 - RNA, 22 nt, Human
ggugaaggaggaagcugaugga

SEQ ID NO: 1020213 - RNA, 22 nt, Human
cugugucccccucagccaggug

SEQ ID NO: 1020214 - RNA, 18 nt, Human
acugugguuuauguguag

SEQ ID NO: 1020215 - RNA, 22 nt, Human
uucaggagcuggcugcgaagga

SEQ ID NO: 1020216 - RNA, 22 nt, Human
ccugucugcaugagugagcaua

SEQ ID NO: 1020217 - RNA, 22 nt, Human
uacaaaguaauguauaauaucg

SEQ ID NO: 1020218 - RNA, 22 nt, Human
cgagaguggacagggcgcagcu

SEQ ID NO: 1020219 - RNA, 22 nt, Human
uaaguucaguuggucgaaguag

SEQ ID NO: 1020220 - RNA, 22 nt, Human
aaugaaauguagcuuauccaua

SEQ ID NO: 1020221 - RNA, 22 nt, Human
cagguaggauggaagggcucaa

SEQ ID NO: 1020222 - RNA, 22 nt, Human
ccagucccgcaugguccagaau

SEQ ID NO: 1020223 - RNA, 22 nt, Human
ugcugccuuugggaccuggccu

SEQ ID NO: 1020224 - RNA, 22 nt, Human
ggccuugggaggagggucagaa

SEQ ID NO: 1020225 - RNA, 22 nt, Human
gaaucauuggaaccacauccaa

SEQ ID NO: 1020226 - RNA, 22 nt, Human
aaggcaguuaauuuggcuagaa

SEQ ID NO: 1020227 - RNA, 22 nt, Human
ugccucugugugcaggugagca

SEQ ID NO: 1020228 - RNA, 22 nt, Human
ggaaggaggggcaaagcaguuc

SEQ ID NO: 1020229 - RNA, 22 nt, Human
gggagcuggagcuggaagacuc

SEQ ID NO: 1020230 - RNA, 19 nt, Human
uggcuucuguuuucauguu

SEQ ID NO: 1020231 - RNA, 22 nt, Human
gaggccaggagugcuguaaguu

SEQ ID NO: 1020232 - RNA, 22 nt, Human
uauuugcaacauaaaacucuga

SEQ ID NO: 1020233 - RNA, 22 nt, Human
cccaggcuggauuucgguggca

SEQ ID NO: 1020234 - RNA, 22 nt, Human
caagcuccuuacauccacaggg

SEQ ID NO: 1020235 - RNA, 22 nt, Human
ggcugaaacagauuucaagaca

SEQ ID NO: 1020236 - RNA, 22 nt, Human
ugcagggcccuugggguugaac

SEQ ID NO: 1020237 - RNA, 22 nt, Human
caaagugcuggaauuacaggug

SEQ ID NO: 1020238 - RNA, 22 nt, Human
gucaggaugcuauuguuauuaa

SEQ ID NO: 1020239 - RNA, 22 nt, Human
augggaggaaggaggcccuuga

SEQ ID NO: 1020240 - RNA, 22 nt, Human
ggggcacacuuuugguagauau

SEQ ID NO: 1020241 - RNA, 22 nt, Human
gccaggcuguuuuuauuacugu

SEQ ID NO: 1020242 - RNA, 22 nt, Human
gcucccagcauugcuucccagg

SEQ ID NO: 1020243 - RNA, 20 nt, Human
aguaccuuuuguauguuacc

SEQ ID NO: 1020244 - RNA, 22 nt, Human
aggguggccaugagggagagau

SEQ ID NO: 1020245 - RNA, 19 nt, Human
acacagggaucagaggguu

SEQ ID NO: 1020246 - RNA, 22 nt, Human
gcagagccaggcuggggcaggu

SEQ ID NO: 1020247 - RNA, 19 nt, Human
gcaugcuugguggcuucug

SEQ ID NO: 1020248 - RNA, 22 nt, Human
cuagcaucagaugagaagcugu

SEQ ID NO: 1020249 - RNA, 17 nt, Human
ggagagugggaauggcc

SEQ ID NO: 1020250 - RNA, 22 nt, Human
uggcaguggcucagagugcaga

SEQ ID NO: 1020251 - RNA, 22 nt, Human
gccuucugcgcucgugucuccg

SEQ ID NO: 1020252 - RNA, 20 nt, Human
ugccagggccagcagaggcu

SEQ ID NO: 1020253 - RNA, 22 nt, Human
uacuuugucauucuaaccuucc

SEQ ID NO: 1020254 - RNA, 22 nt, Human
uacaugcaugucacagaaugaa

SEQ ID NO: 1020255 - RNA, 23 nt, Human
ccagcccuccaccagcucuaggc

SEQ ID NO: 1020256 - RNA, 22 nt, Human
agcucacagaaauccugcagga

SEQ ID NO: 1020257 - RNA, 21 nt, Human
uuguucuuccagaagcaaagu

SEQ ID NO: 1020258 - RNA, 21 nt, Human
uugaagcaaggguggcucuga

SEQ ID NO: 1020259 - RNA, 20 nt, Human
aaacauucauguacaaguga

SEQ ID NO: 1020260 - RNA, 22 nt, Human
auuuguuccacacauauuuacu

SEQ ID NO: 1020261 - RNA, 22 nt, Human
uccaggcaguuuuccagguugu

SEQ ID NO: 1020262 - RNA, 22 nt, Human
cuggccugaucucaugcugucc

SEQ ID NO: 1020263 - RNA, 20 nt, Human
gccugagcuauugccaggau

SEQ ID NO: 1020264 - RNA, 22 nt, Human
cuguggugagcaacugacugaa

SEQ ID NO: 1020265 - RNA, 22 nt, Human
cccagcuucugagggggccuug

SEQ ID NO: 1020266 - RNA, 22 nt, Human
aaagaguucuaugaucuuucca

SEQ ID NO: 1020267 - RNA, 22 nt, Human
acaaagucacaauaauuaaccu

SEQ ID NO: 1020268 - RNA, 22 nt, Human
gcccugagacugagcauggguu

SEQ ID NO: 1020269 - RNA, 22 nt, Human
auccuuggaugugucuuuuugu

SEQ ID NO: 1020270 - RNA, 22 nt, Human
gcucagagauggggaaugaaaa

SEQ ID NO: 1020271 - RNA, 22 nt, Human
ucucacucauuuccuaggucuu

SEQ ID NO: 1020272 - RNA, 22 nt, Human
uuuaaauuauaguuaaugucug

SEQ ID NO: 1020273 - RNA, 22 nt, Human
gguagcagggcugugagucaga

SEQ ID NO: 1020274 - RNA, 22 nt, Human
agggacagaugaaugacugagu

SEQ ID NO: 1020275 - RNA, 22 nt, Human
cuguagccaguuuggccucacc

SEQ ID NO: 1020276 - RNA, 22 nt, Human
uugaagcaggaaaauuucuauu

SEQ ID NO: 1020277 - RNA, 22 nt, Human
caaaguuaucaacugcaacauu

SEQ ID NO: 1020278 - RNA, 22 nt, Human
aaggcugagggcuguaccuggc

SEQ ID NO: 1020279 - RNA, 22 nt, Human
gucuucaauagagccucaauuu

SEQ ID NO: 1020280 - RNA, 22 nt, Human
gccagcuggagacuggcagggg

SEQ ID NO: 1020281 - RNA, 22 nt, Human
ucucuucuuguguuuuccugcc

SEQ ID NO: 1020282 - RNA, 19 nt, Human
aaaagucuauucaauuaca

SEQ ID NO: 1020283 - RNA, 22 nt, Human
uccagagguauguagagaguau

SEQ ID NO: 1020284 - RNA, 23 nt, Human
ccacagagcugccaauuccugug

SEQ ID NO: 1020285 - RNA, 22 nt, Human
caggauggccccggggcugugc

SEQ ID NO: 1020286 - RNA, 22 nt, Human
ucuucagauaaagggagaguau

SEQ ID NO: 1020287 - RNA, 22 nt, Human
gagcuuccauggacgccaucug

SEQ ID NO: 1020288 - RNA, 23 nt, Human
agggguggucaguacccgcagug

SEQ ID NO: 1020289 - RNA, 22 nt, Human
aauguguagcauuuaaugcagu

SEQ ID NO: 1020290 - RNA, 22 nt, Human
ugggcagacugagcccuguccc

SEQ ID NO: 1020291 - RNA, 20 nt, Human
ggcucugcuugugagcagcc

SEQ ID NO: 1020292 - RNA, 20 nt, Human
cacagcuugccuuuuaugac

SEQ ID NO: 1020293 - RNA, 22 nt, Human
uugcauuuccuguacuguuuga

SEQ ID NO: 1020294 - RNA, 22 nt, Human
ucuguggauuuuaguguucaug

SEQ ID NO: 1020295 - RNA, 22 nt, Human
caaagucagccagcuaguaggu

SEQ ID NO: 1020296 - RNA, 19 nt, Human
caguggccuggaggucucu

SEQ ID NO: 1020297 - RNA, 22 nt, Human
aagcuggcaugucaccugagaa

SEQ ID NO: 1020298 - RNA, 22 nt, Human
gugauuuucuccuccuagaagu

SEQ ID NO: 1020299 - RNA, 21 nt, Human
gcagccacagccaccaagcua

SEQ ID NO: 1020300 - RNA, 22 nt, Human
cccugggcaagcccuauuuucc

SEQ ID NO: 1020301 - RNA, 22 nt, Human
uggagcccagggugagaaggag

SEQ ID NO: 1020302 - RNA, 22 nt, Human
aagcugccacacggugaguacu

SEQ ID NO: 1020303 - RNA, 22 nt, Human
acagcuuuuaugggaccagcca

SEQ ID NO: 1020304 - RNA, 21 nt, Human
ccugagccuguuuauccagaa

SEQ ID NO: 1020305 - RNA, 22 nt, Human
cugugcuugacagugggaagca

SEQ ID NO: 1020306 - RNA, 22 nt, Human
cagagccacuuggagaugagaa

SEQ ID NO: 1020307 - RNA, 22 nt, Human
uauguacaguccuuaacuuaaa

SEQ ID NO: 1020308 - RNA, 22 nt, Human
cugcuuuggcucagugacauca

SEQ ID NO: 1020309 - RNA, 22 nt, Human
cugggaaauggcuucgagcuca

SEQ ID NO: 1020310 - RNA, 22 nt, Human
gcaucuaaacuugcaucauugu

SEQ ID NO: 1020311 - RNA, 22 nt, Human
agugcugucaguuuuauagaua

SEQ ID NO: 1020312 - RNA, 22 nt, Human
aggagccaagauggggcaagua

SEQ ID NO: 1020313 - RNA, 22 nt, Human
agcugguggauuaugcuguaca

SEQ ID NO: 1020314 - RNA, 22 nt, Human
aagcugccuuccaugugaggaa

SEQ ID NO: 1020315 - RNA, 22 nt, Human
uuugggcaguagauguaucacu

SEQ ID NO: 1020316 - RNA, 22 nt, Human
uacagucuuuggaaagagauag

SEQ ID NO: 1020317 - RNA, 22 nt, Human
ucauauaacuggauauuuucaa

SEQ ID NO: 1020318 - RNA, 22 nt, Human
guacauuucucuuguucuuauu

SEQ ID NO: 1020319 - RNA, 22 nt, Human
ggcccaucucuugcucuggguu

SEQ ID NO: 1020320 - RNA, 22 nt, Human
gcucccagggaccgcagggcag

SEQ ID NO: 1020321 - RNA, 22 nt, Human
aggccugggcaagaaggggcgu

SEQ ID NO: 1020322 - RNA, 22 nt, Human
aguucacauuccgagguacugg

SEQ ID NO: 1020323 - RNA, 22 nt, Human
cagguacauucguagacccauu

SEQ ID NO: 1020324 - RNA, 22 nt, Human
ugcagaagacacaagguaacgu

SEQ ID NO: 1020325 - RNA, 22 nt, Human
ggcaaaaaccauaauuacuuuu

SEQ ID NO: 1020326 - RNA, 22 nt, Human
cugggcucagcccaugcugucc

SEQ ID NO: 1020327 - RNA, 22 nt, Human
aaguguagauuauggagugucu

SEQ ID NO: 1020328 - RNA, 22 nt, Human
agccagugcaacagcagugaag

SEQ ID NO: 1020329 - RNA, 22 nt, Human
uccucuggcucuuucccuagga

SEQ ID NO: 1020330 - RNA, 22 nt, Human
agcucccagggcugggcaaguu

SEQ ID NO: 1020331 - RNA, 22 nt, Human
uguuauugagguuacuuauaag

SEQ ID NO: 1020332 - RNA, 22 nt, Human
ucuuugcaaauguuauuaucuu

SEQ ID NO: 1020333 - RNA, 22 nt, Human
uguagaaagcucuucugaaauc

SEQ ID NO: 1020334 - RNA, 22 nt, Human
agggcgacaauggagagcguuu

SEQ ID NO: 1020335 - RNA, 22 nt, Human
ucugucaccgagggcauccaaa

SEQ ID NO: 1020336 - RNA, 22 nt, Human
gaggccaaguuggagaccaggu

SEQ ID NO: 1020337 - RNA, 19 nt, Human
ccugugugggguagagauc

SEQ ID NO: 1020338 - RNA, 22 nt, Human
cuggagccccaggcugugcaga

SEQ ID NO: 1020339 - RNA, 22 nt, Human
cacaugaguccugccagguaug

SEQ ID NO: 1020340 - RNA, 22 nt, Human
ucuuugaauucaaacuguucaa

SEQ ID NO: 1020341 - RNA, 22 nt, Human
cuggcccuucucuugcuuccug

SEQ ID NO: 1020342 - RNA, 22 nt, Human
acagagcaauucuuggguguuu

SEQ ID NO: 1020343 - RNA, 22 nt, Human
ugagaguauuuuggcauuauca

SEQ ID NO: 1020344 - RNA, 22 nt, Human
ucaaaguccuugcuuuuucugu

SEQ ID NO: 1020345 - RNA, 22 nt, Human
ccuguguguaggccaggggagu

SEQ ID NO: 1020346 - RNA, 23 nt, Human
aaggucacagaacuuagcaagcc

SEQ ID NO: 1020347 - RNA, 22 nt, Human
augacucuuagcuaaagguaag

SEQ ID NO: 1020348 - RNA, 22 nt, Human
agcagccagagucugaacauua

SEQ ID NO: 1020349 - RNA, 22 nt, Human
aaggcuuuuguuccuauuuagu

SEQ ID NO: 1020350 - RNA, 22 nt, Human
uagaucugauacaauucaucug

SEQ ID NO: 1020351 - RNA, 22 nt, Human
gagagcuguguucauucuacca

SEQ ID NO: 1020352 - RNA, 22 nt, Human
cugaaggauguguggugggagu

SEQ ID NO: 1020353 - RNA, 22 nt, Human
ugauuuccaugaagcugaaggc

SEQ ID NO: 1020354 - RNA, 22 nt, Human
agggugcagaaggagccuagga

SEQ ID NO: 1020355 - RNA, 22 nt, Human
uacaaaugaguuguaugaacca

SEQ ID NO: 1020356 - RNA, 22 nt, Human
ggagcuguuggcagcuaucuug

SEQ ID NO: 1020357 - RNA, 22 nt, Human
gaggcagaaguugcagugagca

SEQ ID NO: 1020358 - RNA, 22 nt, Human
ucucucagggggaaggcugaag

SEQ ID NO: 1020359 - RNA, 19 nt, Human
cugccuguuauggagagaa

SEQ ID NO: 1020360 - RNA, 22 nt, Human
ggccuggagaaggcccagggag

SEQ ID NO: 1020361 - RNA, 23 nt, Human
uggccuggagagaaaagaugagu

SEQ ID NO: 1020362 - RNA, 22 nt, Human
ccagcauggcaccugagaugag

SEQ ID NO: 1020363 - RNA, 20 nt, Human
cagcucugggaaagaggcca

SEQ ID NO: 1020364 - RNA, 22 nt, Human
gugcagagaaaugagaagucga

SEQ ID NO: 1020365 - RNA, 22 nt, Human
auuucaguagaaaaucuugauu

SEQ ID NO: 1020366 - RNA, 19 nt, Human
ugucucugaaagaugagcu

SEQ ID NO: 1020367 - RNA, 21 nt, Human
cuacuuaaguaggggauuagg

SEQ ID NO: 1020368 - RNA, 22 nt, Human
uguaugcuuguguauaauauaa

SEQ ID NO: 1020369 - RNA, 22 nt, Human
aauaacuucaguucuuacauua

SEQ ID NO: 1020370 - RNA, 22 nt, Human
ccucuggcuguaccacuggcac

SEQ ID NO: 1020371 - RNA, 22 nt, Human
cacagcagagggagccauugaa

SEQ ID NO: 1020372 - RNA, 22 nt, Human
gggcugacaguuuccccugaaa

SEQ ID NO: 1020373 - RNA, 22 nt, Human
gcugagagcggccagcugggaa

SEQ ID NO: 1020374 - RNA, 22 nt, Human
agcuggcauacuuugcuaggaa

SEQ ID NO: 1020375 - RNA, 22 nt, Human
agcaccuucacaggcucucagg

SEQ ID NO: 1020376 - RNA, 21 nt, Human
ugcugaugucagagaagcaag

SEQ ID NO: 1020377 - RNA, 22 nt, Human
agcagggcuucugugccugugc

SEQ ID NO: 1020378 - RNA, 21 nt, Human
ggcagaaguagcauggacggg

SEQ ID NO: 1020379 - RNA, 21 nt, Human
ucucuggaguuagcagagaga

SEQ ID NO: 1020380 - RNA, 22 nt, Human
cugagagcagggacuugagcca

SEQ ID NO: 1020381 - RNA, 22 nt, Human
uuugaagugggcauuagaaccu

SEQ ID NO: 1020382 - RNA, 22 nt, Human
gauuucaaccuaacaguaugac

SEQ ID NO: 1020383 - RNA, 22 nt, Human
cccaggcagggacgugcucugg

SEQ ID NO: 1020384 - RNA, 22 nt, Human
uggcucagucauggaugaguaa

SEQ ID NO: 1020385 - RNA, 22 nt, Human
uauucugugugauauguaaaug

SEQ ID NO: 1020386 - RNA, 22 nt, Human
gggaaccagccgcuuccgccuc

SEQ ID NO: 1020387 - RNA, 22 nt, Human
agagccuggggauuggcaaggg

SEQ ID NO: 1020388 - RNA, 22 nt, Human
cagccugcauuuguaucuguau

SEQ ID NO: 1020389 - RNA, 22 nt, Human
gcugggcagccuggccgcugcc

SEQ ID NO: 1020390 - RNA, 22 nt, Human
ucgagucauguucucccauuaa

SEQ ID NO: 1020391 - RNA, 22 nt, Human
cagagcuggagcuugaauggag

SEQ ID NO: 1020392 - RNA, 22 nt, Human
cugggccagauccagccucaca

SEQ ID NO: 1020393 - RNA, 22 nt, Human
agaaaugacaagacugaucagg

SEQ ID NO: 1020394 - RNA, 22 nt, Human
cagcugugaauugucuuaucua

SEQ ID NO: 1020395 - RNA, 22 nt, Human
ggccucagugggccgcugcagg

SEQ ID NO: 1020396 - RNA, 20 nt, Human
uggccuuggggagcucacac

SEQ ID NO: 1020397 - RNA, 20 nt, Human
uucuuucaucuacacguugu

SEQ ID NO: 1020398 - RNA, 22 nt, Human
gcugccaguguggcaugaugca

SEQ ID NO: 1020399 - RNA, 23 nt, Human
ccuccugggcacaggccugaugg

SEQ ID NO: 1020400 - RNA, 22 nt, Human
guauuaggagguggagccuuug

SEQ ID NO: 1020401 - RNA, 21 nt, Human
agagaagaggacuuucucaca

SEQ ID NO: 1020402 - RNA, 22 nt, Human
cuugcaggcagggccuccugga

SEQ ID NO: 1020403 - RNA, 22 nt, Human
uuaagucauuucugauuauaga

SEQ ID NO: 1020404 - RNA, 22 nt, Human
ugaggcagcuuuuucugugugu

SEQ ID NO: 1020405 - RNA, 22 nt, Human
aaugaugguauugaugagcuaa

SEQ ID NO: 1020406 - RNA, 22 nt, Human
aaucuuagguuuggcuucaucu

SEQ ID NO: 1020407 - RNA, 22 nt, Human
ugcuggggguucagaugaguaa

SEQ ID NO: 1020408 - RNA, 22 nt, Human
ucagccuggcaggauggccugg

SEQ ID NO: 1020409 - RNA, 22 nt, Human
cuuagaaauuguuacucauuca

SEQ ID NO: 1020410 - RNA, 22 nt, Human
ccucuggcaacuucacagccca

SEQ ID NO: 1020411 - RNA, 22 nt, Human
cauuuacagugagaguuuuuac

SEQ ID NO: 1020412 - RNA, 22 nt, Human
aaugcagugagccauuaaaugg

SEQ ID NO: 1020413 - RNA, 22 nt, Human
ugcaauaacccaguaucuguga

SEQ ID NO: 1020414 - RNA, 23 nt, Human
ugggccuggccucccaguccagc

SEQ ID NO: 1020415 - RNA, 22 nt, Human
cucuggagcaccgggcuaucca

SEQ ID NO: 1020416 - RNA, 23 nt, Human
uggcagugaucaaaagcuuacau

SEQ ID NO: 1020417 - RNA, 22 nt, Human
uucugggagagaaagggccuug

SEQ ID NO: 1020418 - RNA, 22 nt, Human
uccagggagagccgcugcucca

SEQ ID NO: 1020419 - RNA, 22 nt, Human
gcuucgggguccaagcgcgugu

SEQ ID NO: 1020420 - RNA, 22 nt, Human
gccuggcccagggcucuuguug

SEQ ID NO: 1020421 - RNA, 22 nt, Human
cucaggauguacuacagaaggc

SEQ ID NO: 1020422 - RNA, 19 nt, Human
ccuuggaguuccaggugga

SEQ ID NO: 1020423 - RNA, 22 nt, Human
uguaugaauauguuggggaggu

SEQ ID NO: 1020424 - RNA, 22 nt, Human
aaagcaaugaugguagacacgu

SEQ ID NO: 1020425 - RNA, 19 nt, Human
ccugucugucuucagcuag

SEQ ID NO: 1020426 - RNA, 22 nt, Human
ccacagggugucaucagcuuga

SEQ ID NO: 1020427 - RNA, 22 nt, Human
gccugucugcagggcugucauu

SEQ ID NO: 1020428 - RNA, 20 nt, Human
gacaucauguacacauugcc

SEQ ID NO: 1020429 - RNA, 19 nt, Human
uccaaaggacccaccucca

SEQ ID NO: 1020430 - RNA, 22 nt, Human
aggcccuguuaugagccacugu

SEQ ID NO: 1020431 - RNA, 22 nt, Human
ccuccaggcugaauaucuagaa

SEQ ID NO: 1020432 - RNA, 22 nt, Human
ugcaagggcuuagggggcugug

SEQ ID NO: 1020433 - RNA, 22 nt, Human
gcaccugggacccagaggcacc

SEQ ID NO: 1020434 - RNA, 22 nt, Human
uggccuguggcuuaaggucugu

SEQ ID NO: 1020435 - RNA, 22 nt, Human
gcucucugguuccagucaggaa

SEQ ID NO: 1020436 - RNA, 19 nt, Human
auggaaaaugccagacuga

SEQ ID NO: 1020437 - RNA, 22 nt, Human
cugccucuauaggaguccacca

SEQ ID NO: 1020438 - RNA, 22 nt, Human
auuuaugauuagccuauuguug

SEQ ID NO: 1020439 - RNA, 22 nt, Human
agggcagagaaauguaguugag

SEQ ID NO: 1020440 - RNA, 22 nt, Human
uagugauuaaaggcagaauguu

SEQ ID NO: 1020441 - RNA, 22 nt, Human
agggcuccuccccggccuccac

SEQ ID NO: 1020442 - RNA, 20 nt, Human
gcuguucacauuauuaguag

SEQ ID NO: 1020443 - RNA, 22 nt, Human
aaauaguucagcuuguaaaccc

SEQ ID NO: 1020444 - RNA, 22 nt, Human
gugccagcucuccccacaucug

SEQ ID NO: 1020445 - RNA, 22 nt, Human
ccuuccaggagucucugcaggu

SEQ ID NO: 1020446 - RNA, 22 nt, Human
gaauuguagagggaacagaagc

SEQ ID NO: 1020447 - RNA, 23 nt, Human
aggagaagagauuuccacaugca

SEQ ID NO: 1020448 - RNA, 20 nt, Human
caggcacacucauuccugcu

SEQ ID NO: 1020449 - RNA, 22 nt, Human
uaaaagcucuucuguugaguua

SEQ ID NO: 1020450 - RNA, 22 nt, Human
uuucuguaaguggcaaauaaug

SEQ ID NO: 1020451 - RNA, 21 nt, Human
ucuuccuccacagcgugccac

SEQ ID NO: 1020452 - RNA, 22 nt, Human
ugccaggggaccuagggauguc

SEQ ID NO: 1020453 - RNA, 23 nt, Human
uugucugugcuuuuccaguugcu

SEQ ID NO: 1020454 - RNA, 22 nt, Human
gagagugaaggcuucccagcaa

SEQ ID NO: 1020455 - RNA, 22 nt, Human
cuuaauuuaagccuagaaugca

SEQ ID NO: 1020456 - RNA, 22 nt, Human
ggaggugguggcagugacaauu

SEQ ID NO: 1020457 - RNA, 22 nt, Human
uucucuucaucucaguaaaugu

SEQ ID NO: 1020458 - RNA, 22 nt, Human
agcugccuguccuaggccauca

SEQ ID NO: 1020459 - RNA, 22 nt, Human
agaggccagcagugccuaucug

SEQ ID NO: 1020460 - RNA, 22 nt, Human
acuggcaguuugagaaugcauu

SEQ ID NO: 1020461 - RNA, 22 nt, Human
ccugcagcuccggauuucuggg

SEQ ID NO: 1020462 - RNA, 22 nt, Human
gagauuggccuggcuugccaac

SEQ ID NO: 1020463 - RNA, 22 nt, Human
agcugggaggugggcagugaga

SEQ ID NO: 1020464 - RNA, 22 nt, Human
ucagcuggagaugagaaccgaa

SEQ ID NO: 1020465 - RNA, 22 nt, Human
cugggaggugcagcaaaaauca

SEQ ID NO: 1020466 - RNA, 22 nt, Human
ccagaggcuggguucaccucag

SEQ ID NO: 1020467 - RNA, 22 nt, Human
uagccgcuuaauuauuugguga

SEQ ID NO: 1020468 - RNA, 18 nt, Human
uggcagagugucuguucu

SEQ ID NO: 1020469 - RNA, 17 nt, Human
gcuguaguuugauaaga

SEQ ID NO: 1020470 - RNA, 21 nt, Human
aguucauacugaguaacaaaa

SEQ ID NO: 1020471 - RNA, 22 nt, Human
gcauguuuugcaacaagugacc

SEQ ID NO: 1020472 - RNA, 22 nt, Human
gcagagccugacgggauuuuuc

SEQ ID NO: 1020473 - RNA, 22 nt, Human
uguauuuuuagaccuuuagacc

SEQ ID NO: 1020474 - RNA, 22 nt, Human
cuggcucagacagcugugcagu

SEQ ID NO: 1020475 - RNA, 22 nt, Human
acagacagggcaccugccuccu

SEQ ID NO: 1020476 - RNA, 22 nt, Human
uggcagagaaccugggcuuugu

SEQ ID NO: 1020477 - RNA, 22 nt, Human
uuccaugugaguacacugugau

SEQ ID NO: 1020478 - RNA, 22 nt, Human
gccaugcuugguaugcugugag

SEQ ID NO: 1020479 - RNA, 22 nt, Human
uaaagguaacaugaacugcuuu

SEQ ID NO: 1020480 - RNA, 22 nt, Human
cugaaggagguagagugacaua

SEQ ID NO: 1020481 - RNA, 22 nt, Human
ugcugucuguuuacuggcuaua

SEQ ID NO: 1020482 - RNA, 22 nt, Human
acaaggaggucuggggggcccu

SEQ ID NO: 1020483 - RNA, 22 nt, Human
ccacagaguuacaaaacaguca

SEQ ID NO: 1020484 - RNA, 22 nt, Human
auggacaggcugagcuuccuca

SEQ ID NO: 1020485 - RNA, 22 nt, Human
cagagcuggcggugagaagaca

SEQ ID NO: 1020486 - RNA, 22 nt, Human
ugagacaguucugcagcugggu

SEQ ID NO: 1020487 - RNA, 22 nt, Human
ugagagugaaaugucacauguc

SEQ ID NO: 1020488 - RNA, 22 nt, Human
ugggccuggguuccuccugggc

SEQ ID NO: 1020489 - RNA, 22 nt, Human
aaugugguuaacccauuuaaga

SEQ ID NO: 1020490 - RNA, 22 nt, Human
cagcugccugucuggaggcaau

SEQ ID NO: 1020491 - RNA, 17 nt, Human
gaaagguccuagaaauc

SEQ ID NO: 1020492 - RNA, 22 nt, Human
ugccugugguuccaguuuuuuc

SEQ ID NO: 1020493 - RNA, 23 nt, Human
uccaggcacgcauuucuucuagc

SEQ ID NO: 1020494 - RNA, 22 nt, Human
ugaagcccugugucagcuucca

SEQ ID NO: 1020495 - RNA, 22 nt, Human
cucccaagauaaauaaggcagu

SEQ ID NO: 1020496 - RNA, 22 nt, Human
gugggccuugcagggugcaggg

SEQ ID NO: 1020497 - RNA, 21 nt, Human
agcagaacagucgagcacugc

SEQ ID NO: 1020498 - RNA, 22 nt, Human
agauuucaauggauauugcaag

SEQ ID NO: 1020499 - RNA, 22 nt, Human
cagucacauggaugauggauag

SEQ ID NO: 1020500 - RNA, 22 nt, Human
gccugaugagcuuccagcugag

SEQ ID NO: 1020501 - RNA, 22 nt, Human
cuuccuucugaagcauagaagc

SEQ ID NO: 1020502 - RNA, 22 nt, Human
uaagugcaauguuuuacuuaaa

SEQ ID NO: 1020503 - RNA, 22 nt, Human
caguauuuguucccuaucaaug

SEQ ID NO: 1020504 - RNA, 22 nt, Human
uauacaaugaguacauucuggg

SEQ ID NO: 1020505 - RNA, 22 nt, Human
ucagcugccucucccuggaaga

SEQ ID NO: 1020506 - RNA, 22 nt, Human
ugggcuggcugaacuucaaccu

SEQ ID NO: 1020507 - RNA, 20 nt, Human
gcaaaauaggcucuguuggu

SEQ ID NO: 1020508 - RNA, 22 nt, Human
uguacaguauauuucaaagcca

SEQ ID NO: 1020509 - RNA, 22 nt, Human
ugcuuuauggauuuguguccug

SEQ ID NO: 1020510 - RNA, 22 nt, Human
cugucuguucagauucauuacu

SEQ ID NO: 1020511 - RNA, 20 nt, Human
aaagucuuaugguuaauuuu

SEQ ID NO: 1020512 - RNA, 22 nt, Human
acauuguauaaugauuaucaca

SEQ ID NO: 1020513 - RNA, 19 nt, Human
uggagacugagagugagca

SEQ ID NO: 1020514 - RNA, 19 nt, Human
uaaaaugucuguggucagu

SEQ ID NO: 1020515 - RNA, 22 nt, Human
acaggccuuggcaggcauguga

SEQ ID NO: 1020516 - RNA, 22 nt, Human
guuguuuuuguucucuauagcu

SEQ ID NO: 1020517 - RNA, 22 nt, Human
cccagcucugcagaccugcccu

SEQ ID NO: 1020518 - RNA, 22 nt, Human
agcagggcagguaaggaucaga

SEQ ID NO: 1020519 - RNA, 22 nt, Human
cucuuaaagaauguuccagcug

SEQ ID NO: 1020520 - RNA, 22 nt, Human
gcucugaggcugggagcacucu

SEQ ID NO: 1020521 - RNA, 22 nt, Human
aaaugucuuucuucugcuacgu

SEQ ID NO: 1020522 - RNA, 22 nt, Human
ggaggcuccacugcucuuccug

SEQ ID NO: 1020523 - RNA, 22 nt, Human
ggccucugguucguggugaccu

SEQ ID NO: 1020524 - RNA, 22 nt, Human
gaaggccaguuuugagauaggu

SEQ ID NO: 1020525 - RNA, 18 nt, Human
uccauuguucuacuguga

SEQ ID NO: 1020526 - RNA, 22 nt, Human
uuagaaaauuugcuucuuugga

SEQ ID NO: 1020527 - RNA, 22 nt, Human
uccacagaauguaagauccaca

SEQ ID NO: 1020528 - RNA, 22 nt, Human
gccugcagaggugcugcuagcu

SEQ ID NO: 1020529 - RNA, 22 nt, Human
augacagaggagugcaggugau

SEQ ID NO: 1020530 - RNA, 22 nt, Human
uauguguacaucugguugagca

SEQ ID NO: 1020531 - RNA, 22 nt, Human
agcagcuucuuucacuccugga

SEQ ID NO: 1020532 - RNA, 22 nt, Human
ucuuugcaacucccauuuccau

SEQ ID NO: 1020533 - RNA, 22 nt, Human
acccaggagcaggcugggcagu

SEQ ID NO: 1020534 - RNA, 22 nt, Human
acaaagugcacaagaugagaac

SEQ ID NO: 1020535 - RNA, 22 nt, Human
uguagaaauuaguaagaucaac

SEQ ID NO: 1020536 - RNA, 22 nt, Human
accuggccauccagcuggcauc

SEQ ID NO: 1020537 - RNA, 22 nt, Human
auagauauuugaguuguuucca

SEQ ID NO: 1020538 - RNA, 22 nt, Human
uggcagggugggcuucagcccc

SEQ ID NO: 1020539 - RNA, 18 nt, Human
gugagcagagagcaucac

SEQ ID NO: 1020540 - RNA, 18 nt, Human
gaaaggagagacaguagg

SEQ ID NO: 1020541 - RNA, 22 nt, Human
aucaaguuuucuuaguugacug

SEQ ID NO: 1020542 - RNA, 22 nt, Human
agguuuucagcuguauccugag

SEQ ID NO: 1020543 - RNA, 22 nt, Human
aaaugugcuugugaucagcugu

SEQ ID NO: 1020544 - RNA, 22 nt, Human
caaaguccauaguuuacaauag

SEQ ID NO: 1020545 - RNA, 20 nt, Human
cuguaucagguuacaaagua

SEQ ID NO: 1020546 - RNA, 22 nt, Human
caggcugccgugaagcaggccu

SEQ ID NO: 1020547 - RNA, 22 nt, Human
uuuccucuaaacgcauuugcuu

SEQ ID NO: 1020548 - RNA, 23 nt, Human
aagcuuccuucacgucuccuggg

SEQ ID NO: 1020549 - RNA, 22 nt, Human
caugcugugugguuagaacugu

SEQ ID NO: 1020550 - RNA, 17 nt, Human
aauagcugcucagagag

SEQ ID NO: 1020551 - RNA, 22 nt, Human
ccauaagguuuggggccaugca

SEQ ID NO: 1020552 - RNA, 22 nt, Human
cacugaaauauuaauaucuuau

SEQ ID NO: 1020553 - RNA, 22 nt, Human
cugggaguguucuaggucacau

SEQ ID NO: 1020554 - RNA, 22 nt, Human
caguggagagacuuuuacucuu

SEQ ID NO: 1020555 - RNA, 22 nt, Human
agcagcuggugagcaagcucag

SEQ ID NO: 1020556 - RNA, 22 nt, Human
uuuguagaggguaauugacaga

SEQ ID NO: 1020557 - RNA, 22 nt, Human
cuacuucugugaugaaacuaca

SEQ ID NO: 1020558 - RNA, 22 nt, Human
uccugccuagcaggugaccuau

SEQ ID NO: 1020559 - RNA, 22 nt, Human
uggcagcagggccccuggagga

SEQ ID NO: 1020560 - RNA, 22 nt, Human
uaaccauauuuuccauuaaguu

SEQ ID NO: 1020561 - RNA, 17 nt, Human
uucaagauauugaaaug

SEQ ID NO: 1020562 - RNA, 22 nt, Human
ucaaaugcacguagagaaaaua

SEQ ID NO: 1020563 - RNA, 22 nt, Human
ugaauccagagcuauuucgucc

SEQ ID NO: 1020564 - RNA, 22 nt, Human
ugugacaugugucaucuuuucu

SEQ ID NO: 1020565 - RNA, 22 nt, Human
aauuuagaauucgcuagcuaau

SEQ ID NO: 1020566 - RNA, 22 nt, Human
agcugaaggcuagaacagcugg

SEQ ID NO: 1020567 - RNA, 22 nt, Human
aguauuucugcucaugaaagag

SEQ ID NO: 1020568 - RNA, 22 nt, Human
uccuuagagacaagaccaguuu

SEQ ID NO: 1020569 - RNA, 22 nt, Human
uuggagguuugaaaauaugugu

SEQ ID NO: 1020570 - RNA, 22 nt, Human
cugcugugccucuuuucacgug

SEQ ID NO: 1020571 - RNA, 20 nt, Human
acagaauaugcugguugugg

SEQ ID NO: 1020572 - RNA, 22 nt, Human
caguggguccuaaguacaguuc

SEQ ID NO: 1020573 - RNA, 22 nt, Human
ucucuucuagcuucuugugguu

SEQ ID NO: 1020574 - RNA, 22 nt, Human
augugaggcagcacggagauua

SEQ ID NO: 1020575 - RNA, 22 nt, Human
ucugagaguagagcugccucuu

SEQ ID NO: 1020576 - RNA, 22 nt, Human
agcugcuguccuaggcacugua

SEQ ID NO: 1020577 - RNA, 22 nt, Human
guggcugcuguccucucugguu

SEQ ID NO: 1020578 - RNA, 22 nt, Human
ucccagaguuuccuguguccca

SEQ ID NO: 1020579 - RNA, 22 nt, Human
agacaucaaugaucagagguag

SEQ ID NO: 1020580 - RNA, 22 nt, Human
uccuucaguucaauuaguccgu

SEQ ID NO: 1020581 - RNA, 22 nt, Human
ggccaccuuccaguugccugca

SEQ ID NO: 1020582 - RNA, 22 nt, Human
uucuuacagaguuuacagagcc

SEQ ID NO: 1020583 - RNA, 22 nt, Human
aaagcaguauauugguaguugu

SEQ ID NO: 1020584 - RNA, 22 nt, Human
cccaggcacauccacucuguga

SEQ ID NO: 1020585 - RNA, 22 nt, Human
aucauuucccuuuagaucacaa

SEQ ID NO: 1020586 - RNA, 22 nt, Human
gggcugggauugcuugcuguga

SEQ ID NO: 1020587 - RNA, 17 nt, Human
uuugaaaggaugucagu

SEQ ID NO: 1020588 - RNA, 22 nt, Human
ggagaggugaauggcugcucua

SEQ ID NO: 1020589 - RNA, 22 nt, Human
ugagaggccccagcucuuggcc

SEQ ID NO: 1020590 - RNA, 22 nt, Human
ggccugcuccgggggcugagcu

SEQ ID NO: 1020591 - RNA, 20 nt, Human
ccugucuggagacaaagaga

SEQ ID NO: 1020592 - RNA, 22 nt, Human
uuuccucugcugccauugcccc

SEQ ID NO: 1020593 - RNA, 22 nt, Human
ucagguggcuucggggaguggc

SEQ ID NO: 1020594 - RNA, 22 nt, Human
ugcaggagaaaguacggagcgu

SEQ ID NO: 1020595 - RNA, 22 nt, Human
aauguguauacuggcaauuaag

SEQ ID NO: 1020596 - RNA, 22 nt, Human
uuucucuguucucuaacuguaa

SEQ ID NO: 1020597 - RNA, 22 nt, Human
cagcagcugcgugcccaggccg

SEQ ID NO: 1020598 - RNA, 23 nt, Human
accaugaugggagugcaaauaag

SEQ ID NO: 1020599 - RNA, 22 nt, Human
uccagucauuuccauuguuccc

SEQ ID NO: 1020600 - RNA, 22 nt, Human
aagaauuauugcaauacuagau

SEQ ID NO: 1020601 - RNA, 22 nt, Human
aggaagccaugguggacgucua

SEQ ID NO: 1020602 - RNA, 21 nt, Human
ggccucugccuugccccacuc

SEQ ID NO: 1020603 - RNA, 22 nt, Human
uccagggcuggguuggcucagc

SEQ ID NO: 1020604 - RNA, 22 nt, Human
uuuuaucuucauuccuaucuac

SEQ ID NO: 1020605 - RNA, 22 nt, Human
aagggcucugggcuacgcacug

SEQ ID NO: 1020606 - RNA, 22 nt, Human
gcagcccaauggacugagacag

SEQ ID NO: 1020607 - RNA, 22 nt, Human
cucuggagugcagccugguggc

SEQ ID NO: 1020608 - RNA, 22 nt, Human
cagaagucacccucagaauaac

SEQ ID NO: 1020609 - RNA, 22 nt, Human
uccugcagucugcacucugccu

SEQ ID NO: 1020610 - RNA, 22 nt, Human
caggugggagcgaggagcuacu

SEQ ID NO: 1020611 - RNA, 22 nt, Human
ggcuccuguggcaagacagcuu

SEQ ID NO: 1020612 - RNA, 21 nt, Human
agaaaauggcguuuuagauuu

SEQ ID NO: 1020613 - RNA, 22 nt, Human
ugcuggcuggccuggccuggac

SEQ ID NO: 1020614 - RNA, 22 nt, Human
uuagcucagaaaauuuaaacuu

SEQ ID NO: 1020615 - RNA, 22 nt, Human
gccugaggaaugcuccugacuu

SEQ ID NO: 1020616 - RNA, 22 nt, Human
uucucagagcacugcugacaaa

SEQ ID NO: 1020617 - RNA, 22 nt, Human
aauguguauaugaacauacagg

SEQ ID NO: 1020618 - RNA, 22 nt, Human
ucccaggcuaggccucugcguu

SEQ ID NO: 1020619 - RNA, 22 nt, Human
aggcacugaauauccaguaaaa

SEQ ID NO: 1020620 - RNA, 22 nt, Human
uauuauuaaauggcagaauuuu

SEQ ID NO: 1020621 - RNA, 22 nt, Human
gcagggucugaggccacagagg

SEQ ID NO: 1020622 - RNA, 22 nt, Human
guuuuuccuugcugaggacccg

SEQ ID NO: 1020623 - RNA, 23 nt, Human
gccucugcucugcguuggggacu

SEQ ID NO: 1020624 - RNA, 22 nt, Human
uccugcagcugauaaauacagu

SEQ ID NO: 1020625 - RNA, 22 nt, Human
auggcagccuguggacagucaa

SEQ ID NO: 1020626 - RNA, 22 nt, Human
caggaaagagcugccaggcagg

SEQ ID NO: 1020627 - RNA, 23 nt, Human
uuugaaguugacugccuuccaga

SEQ ID NO: 1020628 - RNA, 22 nt, Human
uuuauugacccaaagcgagagu

SEQ ID NO: 1020629 - RNA, 22 nt, Human
gagaccaggaaguacagcagcc

SEQ ID NO: 1020630 - RNA, 22 nt, Human
ccugucaguugcugucagggau

SEQ ID NO: 1020631 - RNA, 22 nt, Human
aagauuuccuggauguaauucc

SEQ ID NO: 1020632 - RNA, 22 nt, Human
cuggagccggaccagggacggu

SEQ ID NO: 1020633 - RNA, 22 nt, Human
gcagaagcagcagaugggcgca

SEQ ID NO: 1020634 - RNA, 22 nt, Human
cucuggccgcagcucagcucug

SEQ ID NO: 1020635 - RNA, 22 nt, Human
gcagcuuugucacggagugucg

SEQ ID NO: 1020636 - RNA, 22 nt, Human
uguuacacagcagaauagcaag

SEQ ID NO: 1020637 - RNA, 22 nt, Human
aguguugucaaacggcucagca

SEQ ID NO: 1020638 - RNA, 22 nt, Human
aucuggcucuuccuggaguucc

SEQ ID NO: 1020639 - RNA, 22 nt, Human
aagccaggcugcacuugcuggg

SEQ ID NO: 1020640 - RNA, 22 nt, Human
aggaaucccgcaccagcugcug

SEQ ID NO: 1020641 - RNA, 22 nt, Human
uguauuuugugaggaucacucu

SEQ ID NO: 1020642 - RNA, 22 nt, Human
ccagcagcuguggcuuugccuc

SEQ ID NO: 1020643 - RNA, 22 nt, Human
ccuucucuacuccugaugcaug

SEQ ID NO: 1020644 - RNA, 22 nt, Human
cuggcaggucucgcugacgugu

SEQ ID NO: 1020645 - RNA, 22 nt, Human
ugggcagauuaaugcaguggcu

SEQ ID NO: 1020646 - RNA, 22 nt, Human
aggaggcugguucaggccauau

SEQ ID NO: 1020647 - RNA, 22 nt, Human
augcccgauaccuaguuaacuc

SEQ ID NO: 1020648 - RNA, 18 nt, Human
uggacaggguggagaaaa

SEQ ID NO: 1020649 - RNA, 22 nt, Human
agccuccuggaguuucugggau

SEQ ID NO: 1020650 - RNA, 22 nt, Human
ugucccagacacaguaugcgcu

SEQ ID NO: 1020651 - RNA, 22 nt, Human
ugauuaacugucuauuaaucau

SEQ ID NO: 1020652 - RNA, 22 nt, Human
auguucuuucagccagugcauc

SEQ ID NO: 1020653 - RNA, 22 nt, Human
guaguuuucugaaaauuacuuu

SEQ ID NO: 1020654 - RNA, 22 nt, Human
guggcugcuacagagcuggagg

SEQ ID NO: 1020655 - RNA, 22 nt, Human
cccugccucugaagcugcucag

SEQ ID NO: 1020656 - RNA, 22 nt, Human
uuauuucauguaaaauuuaugu

SEQ ID NO: 1020657 - RNA, 22 nt, Human
ugcaugcagcuggugauaagaa

SEQ ID NO: 1020658 - RNA, 22 nt, Human
aagcgccacgagaagcuggacc

SEQ ID NO: 1020659 - RNA, 22 nt, Human
agaagugccauacuguggucca

SEQ ID NO: 1020660 - RNA, 22 nt, Human
gcucugggauuaccagccuuag

SEQ ID NO: 1020661 - RNA, 22 nt, Human
agcagcucugagaggccagcac

SEQ ID NO: 1020662 - RNA, 22 nt, Human
agcugcucuuugaaggacacuu

SEQ ID NO: 1020663 - RNA, 22 nt, Human
cccugcagugugaccucaccua

SEQ ID NO: 1020664 - RNA, 22 nt, Human
gcacagggcugccaggcggcuu

SEQ ID NO: 1020665 - RNA, 22 nt, Human
aagggcagaauagagaagaugg

SEQ ID NO: 1020666 - RNA, 22 nt, Human
gcugucccaugguugcaagaug

SEQ ID NO: 1020667 - RNA, 22 nt, Human
uccaggcauaaugcccaguggu

SEQ ID NO: 1020668 - RNA, 22 nt, Human
gccuggcacauugcaguggauu

SEQ ID NO: 1020669 - RNA, 22 nt, Human
ccucugcaccauagccuucagc

SEQ ID NO: 1020670 - RNA, 22 nt, Human
cuuugaagagauuacugugcuc

SEQ ID NO: 1020671 - RNA, 22 nt, Human
caggcauggugagaacucagcc

SEQ ID NO: 1020672 - RNA, 22 nt, Human
uagugaaauuuaugcacagcua

SEQ ID NO: 1020673 - RNA, 22 nt, Human
cugcugugcagacagacucucu

SEQ ID NO: 1020674 - RNA, 22 nt, Human
cagcauggacccaucgcugagu

SEQ ID NO: 1020675 - RNA, 22 nt, Human
cuuguauuccccuaucucuaaa

SEQ ID NO: 1020676 - RNA, 22 nt, Human
gagcagcuuaugucaagccaga

SEQ ID NO: 1020677 - RNA, 22 nt, Human
uccaaauucuagggccuugguu

SEQ ID NO: 1020678 - RNA, 22 nt, Human
uaauuucacugauaugaaguca

SEQ ID NO: 1020679 - RNA, 22 nt, Human
cuggaaugccucccugucagag

SEQ ID NO: 1020680 - RNA, 22 nt, Human
cugcugagaaaagacugaggga

SEQ ID NO: 1020681 - RNA, 22 nt, Human
uggucaguugcaucagagaagu

SEQ ID NO: 1020682 - RNA, 22 nt, Human
agcuucuggaagccuggcagca

SEQ ID NO: 1020683 - RNA, 22 nt, Human
ggccaggcuggucucagacuuc

SEQ ID NO: 1020684 - RNA, 22 nt, Human
cagcuguggcugccacugcucc

SEQ ID NO: 1020685 - RNA, 22 nt, Human
cccaggcugauguucagcgggu

SEQ ID NO: 1020686 - RNA, 22 nt, Human
cagggccagccauccugcuggg

SEQ ID NO: 1020687 - RNA, 22 nt, Human
cucagagagggcaccagggcca

SEQ ID NO: 1020688 - RNA, 21 nt, Human
uagcuuuaauauucccacauu

SEQ ID NO: 1020689 - RNA, 22 nt, Human
uuauccaaacuggugaaucauu

SEQ ID NO: 1020690 - RNA, 22 nt, Human
aaauuucuggaagugucagagu

SEQ ID NO: 1020691 - RNA, 22 nt, Human
aagauuuccuucaguagagcua

SEQ ID NO: 1020692 - RNA, 17 nt, Human
acagaggcaggagugga

SEQ ID NO: 1020693 - RNA, 22 nt, Human
ccugccugcaaaaugggacaag

SEQ ID NO: 1020694 - RNA, 22 nt, Human
ccugggcagguguggcuucccc

SEQ ID NO: 1020695 - RNA, 22 nt, Human
ucuggagcaacagagcaggaca

SEQ ID NO: 1020696 - RNA, 22 nt, Human
caaaguccuagaacagugcuug

SEQ ID NO: 1020697 - RNA, 22 nt, Human
gccucacugcagccccaggaag

SEQ ID NO: 1020698 - RNA, 22 nt, Human
ggccucugaggacagccuuggc

SEQ ID NO: 1020699 - RNA, 22 nt, Human
auucucaauggcuacuuucaua

SEQ ID NO: 1020700 - RNA, 22 nt, Human
auaucuuuuagagcaagcuugu

SEQ ID NO: 1020701 - RNA, 22 nt, Human
uuuugagauggugucucgcucc

SEQ ID NO: 1020702 - RNA, 22 nt, Human
uagggcucuggugggcucuguu

SEQ ID NO: 1020703 - RNA, 22 nt, Human
uccaggcauguggccaguacuc

SEQ ID NO: 1020704 - RNA, 22 nt, Human
uuccuguauuuugcgaauuuuc

SEQ ID NO: 1020705 - RNA, 23 nt, Human
cagagcugauuaaacuuaaucuc

SEQ ID NO: 1020706 - RNA, 22 nt, Human
caugaagcacagcucucuuuuu

SEQ ID NO: 1020707 - RNA, 18 nt, Human
ucagcuggggcugcagcc

SEQ ID NO: 1020708 - RNA, 22 nt, Human
acccugggcuuggccugcucag

SEQ ID NO: 1020709 - RNA, 22 nt, Human
ugucacauugaauaugauuuau

SEQ ID NO: 1020710 - RNA, 22 nt, Human
ugucacauguguggcauuuuuc

SEQ ID NO: 1020711 - RNA, 22 nt, Human
uuccaggacaagauguuucagg

SEQ ID NO: 1020712 - RNA, 22 nt, Human
gaccauuucuaggaaucagacu

SEQ ID NO: 1020713 - RNA, 19 nt, Human
uggcuccugccugccuucu

SEQ ID NO: 1020714 - RNA, 22 nt, Human
uaaaugaagaaauggagauugu

SEQ ID NO: 1020715 - RNA, 22 nt, Human
auuacaguaacagcuacaaugc

SEQ ID NO: 1020716 - RNA, 22 nt, Human
cagacagcugcuuucuugcugu

SEQ ID NO: 1020717 - RNA, 22 nt, Human
aagccuuccugagugcaaggcc

SEQ ID NO: 1020718 - RNA, 22 nt, Human
cacagggcuuugauggcugagu

SEQ ID NO: 1020719 - RNA, 22 nt, Human
cuucccacuaguaucacagagc

SEQ ID NO: 1020720 - RNA, 22 nt, Human
aucucagacauguuguccauga

SEQ ID NO: 1020721 - RNA, 22 nt, Human
accugagaaugggggcaugugu

SEQ ID NO: 1020722 - RNA, 22 nt, Human
cacccaggacaggccagaugug

SEQ ID NO: 1020723 - RNA, 22 nt, Human
aagcuuuaugacuuggagacag

SEQ ID NO: 1020724 - RNA, 22 nt, Human
ucucaggaaauaggauuugagu

SEQ ID NO: 1020725 - RNA, 22 nt, Human
gcaguggcuaggagucuggcgu

SEQ ID NO: 1020726 - RNA, 19 nt, Human
agggccugagcagauguug

SEQ ID NO: 1020727 - RNA, 22 nt, Human
aaucuguucuacucuauucaga

SEQ ID NO: 1020728 - RNA, 22 nt, Human
cugaggcaugaaugugggcuuu

SEQ ID NO: 1020729 - RNA, 19 nt, Human
cacacccaugcuugccaag

SEQ ID NO: 1020730 - RNA, 20 nt, Human
uucauucauuccacaacuuc

SEQ ID NO: 1020731 - RNA, 22 nt, Human
uuccagaauuuuguucugcuug

SEQ ID NO: 1020732 - RNA, 22 nt, Human
aggcccugcuuuccagagcuca

SEQ ID NO: 1020733 - RNA, 22 nt, Human
uuccaugacaccgagggaaguc

SEQ ID NO: 1020734 - RNA, 22 nt, Human
cuuccuggccauugccauggca

SEQ ID NO: 1020735 - RNA, 22 nt, Human
aaaggccacacagagcagggag

SEQ ID NO: 1020736 - RNA, 22 nt, Human
cagcaggcccaggugcugguga

SEQ ID NO: 1020737 - RNA, 22 nt, Human
caggccaggcugcauuugcccc

SEQ ID NO: 1020738 - RNA, 23 nt, Human
acacaauagaguacuauucagcc

SEQ ID NO: 1020739 - RNA, 22 nt, Human
uuuuuauaugaaggauagugcg

SEQ ID NO: 1020740 - RNA, 22 nt, Human
caagccucagaaucuucuccau

SEQ ID NO: 1020741 - RNA, 22 nt, Human
ucucagaguuuagagcugagcc

SEQ ID NO: 1020742 - RNA, 22 nt, Human
agggccagcugaugagaaugag

SEQ ID NO: 1020743 - RNA, 22 nt, Human
ucagugugaggucuuccacccg

SEQ ID NO: 1020744 - RNA, 20 nt, Human
aggagaugauccagagucag

SEQ ID NO: 1020745 - RNA, 22 nt, Human
ugucuuuauauauuuggaaaau

SEQ ID NO: 1020746 - RNA, 22 nt, Human
uauuucuucgggauucaagcua

SEQ ID NO: 1020747 - RNA, 22 nt, Human
uugaacauuggcaauuucauau

SEQ ID NO: 1020748 - RNA, 22 nt, Human
cugcugcaggaugggcacucug

SEQ ID NO: 1020749 - RNA, 22 nt, Human
agccagcuggagaccacuguuu

SEQ ID NO: 1020750 - RNA, 22 nt, Human
caggcucccacccuccugcagc

SEQ ID NO: 1020751 - RNA, 19 nt, Human
agcaaauauaauaguguuc

SEQ ID NO: 1020752 - RNA, 22 nt, Human
ugcucccaggcauucucuguug

SEQ ID NO: 1020753 - RNA, 22 nt, Human
aaaguauucuugacuguuuuuc

SEQ ID NO: 1020754 - RNA, 22 nt, Human
aagaaauuaaugugccauuacu

SEQ ID NO: 1020755 - RNA, 20 nt, Human
aagcacauuucuacaauaau

SEQ ID NO: 1020756 - RNA, 22 nt, Human
agcugccaaguuggaguagcaa

SEQ ID NO: 1020757 - RNA, 22 nt, Human
agcucccauuaucuucugaaac

SEQ ID NO: 1020758 - RNA, 22 nt, Human
ggcacugauaauguccucucuc

SEQ ID NO: 1020759 - RNA, 22 nt, Human
cagaggcugaugugggaugggc

SEQ ID NO: 1020760 - RNA, 22 nt, Human
ugccaggcuaaguggaggacuu

SEQ ID NO: 1020761 - RNA, 23 nt, Human
ggcugagacuacaggcgcuugcc

SEQ ID NO: 1020762 - RNA, 22 nt, Human
aauauccacacugugucccugc

SEQ ID NO: 1020763 - RNA, 22 nt, Human
ucuggcaggcaaucggcucugg

SEQ ID NO: 1020764 - RNA, 22 nt, Human
uuaauuaaauucaugagcauug

SEQ ID NO: 1020765 - RNA, 22 nt, Human
cuguguggacugguugaggccc

SEQ ID NO: 1020766 - RNA, 22 nt, Human
aagaagaugguuaacuuucagu

SEQ ID NO: 1020767 - RNA, 22 nt, Human
ccucaggauacaggagccacag

SEQ ID NO: 1020768 - RNA, 22 nt, Human
aguggcagagcaggugcuggaa

SEQ ID NO: 1020769 - RNA, 22 nt, Human
aggaccagccuccaggucucuu

SEQ ID NO: 1020770 - RNA, 22 nt, Human
cuguguuugaugagaagccacc

SEQ ID NO: 1020771 - RNA, 22 nt, Human
acugggagagcgaccagauucu

SEQ ID NO: 1020772 - RNA, 21 nt, Human
aucuuuauuacgcagagaaga

SEQ ID NO: 1020773 - RNA, 22 nt, Human
agucuucccugugccagagugu

SEQ ID NO: 1020774 - RNA, 22 nt, Human
accugccucagugcagcuggau

SEQ ID NO: 1020775 - RNA, 22 nt, Human
cuggcucaguucuugguuuuca

SEQ ID NO: 1020776 - RNA, 21 nt, Human
ugcagaggcacaaacaagccc

SEQ ID NO: 1020777 - RNA, 22 nt, Human
agggaugguggagguugcaagu

SEQ ID NO: 1020778 - RNA, 22 nt, Human
agggugcauguuugcaagagug

SEQ ID NO: 1020779 - RNA, 22 nt, Human
ccacaaguuucagcacccagag

SEQ ID NO: 1020780 - RNA, 22 nt, Human
cagcagugaugugugaggguuc

SEQ ID NO: 1020781 - RNA, 22 nt, Human
auuguucaaagugcuuugcaug

SEQ ID NO: 1020782 - RNA, 22 nt, Human
uuacaaagagaaguuguagaau

SEQ ID NO: 1020783 - RNA, 22 nt, Human
cugcuuugcauagcugccagag

SEQ ID NO: 1020784 - RNA, 22 nt, Human
gggaccuggcgagggucacaca

SEQ ID NO: 1020785 - RNA, 22 nt, Human
aaaguguggagauugaacuaaa

SEQ ID NO: 1020786 - RNA, 22 nt, Human
aucaggauguuuggcugucaua

SEQ ID NO: 1020787 - RNA, 16 nt, Human
uggaaggggucuccgg

SEQ ID NO: 1020788 - RNA, 22 nt, Human
uuccaugaagggcagccucuca

SEQ ID NO: 1020789 - RNA, 22 nt, Human
aaguucaaggcagguccugagg

SEQ ID NO: 1020790 - RNA, 22 nt, Human
aggcagccagauggcagccugc

SEQ ID NO: 1020791 - RNA, 22 nt, Human
cucuccuugcagauggcugccu

SEQ ID NO: 1020792 - RNA, 22 nt, Human
acuguucacccagcacuagcag

SEQ ID NO: 1020793 - RNA, 22 nt, Human
acagguggggaggcugagguuc

SEQ ID NO: 1020794 - RNA, 22 nt, Human
ccugcaguuuguugugaccccg

SEQ ID NO: 1020795 - RNA, 22 nt, Human
uauguacaccggggaagguggg

SEQ ID NO: 1020796 - RNA, 22 nt, Human
gcagugggcaacaagagcugga

SEQ ID NO: 1020797 - RNA, 22 nt, Human
ucauuuugggguuugucaucuu

SEQ ID NO: 1020798 - RNA, 22 nt, Human
ggugaaggucuacugugugcca

SEQ ID NO: 1020799 - RNA, 22 nt, Human
gugucccaaagauuagaaauca

SEQ ID NO: 1020800 - RNA, 22 nt, Human
aaguuuaagguggaaguggugg

SEQ ID NO: 1020801 - RNA, 22 nt, Human
ugaaucauggauaaauagcuua

SEQ ID NO: 1020802 - RNA, 22 nt, Human
gggcuccaccuagggacacugg

SEQ ID NO: 1020803 - RNA, 22 nt, Human
ugggacacccucacgccugcac

SEQ ID NO: 1020804 - RNA, 22 nt, Human
cagggcuguggcuuugugcugu

SEQ ID NO: 1020805 - RNA, 22 nt, Human
aaugcacaugccacauguggua

SEQ ID NO: 1020806 - RNA, 22 nt, Human
aaaauaacuucuacuauuugca

SEQ ID NO: 1020807 - RNA, 21 nt, Human
uggccaaacuggagcauuuga

SEQ ID NO: 1020808 - RNA, 22 nt, Human
cccaggccagaacuugguugcu

SEQ ID NO: 1020809 - RNA, 22 nt, Human
uuauuccaauuucuccuacaaa

SEQ ID NO: 1020810 - RNA, 22 nt, Human
ugugcuucaucacuucucaguu

SEQ ID NO: 1020811 - RNA, 22 nt, Human
cacugaguucccugacauuuca

SEQ ID NO: 1020812 - RNA, 22 nt, Human
cuaaaauuaucaagauaauucc

SEQ ID NO: 1020813 - RNA, 22 nt, Human
agguggagacccagagaaggcg

SEQ ID NO: 1020814 - RNA, 22 nt, Human
ucucagagaaaugugucaccau

SEQ ID NO: 1020815 - RNA, 22 nt, Human
cucugugggggagaggcagcug

SEQ ID NO: 1020816 - RNA, 17 nt, Human
ccagguggaaucgugga

SEQ ID NO: 1020817 - RNA, 22 nt, Human
uugcauaaaagaguauaucuua

SEQ ID NO: 1020818 - RNA, 22 nt, Human
aaugauuuccccuacacagaag

SEQ ID NO: 1020819 - RNA, 22 nt, Human
caugcuuugggucagaaaugcc

SEQ ID NO: 1020820 - RNA, 22 nt, Human
ugaaggaauggaggaucagagc

SEQ ID NO: 1020821 - RNA, 22 nt, Human
cuccuuccugguuagcaccuua

SEQ ID NO: 1020822 - RNA, 22 nt, Human
ccagcccuucccaacuggccag

SEQ ID NO: 1020823 - RNA, 22 nt, Human
caagagcugugaccucauucac

SEQ ID NO: 1020824 - RNA, 22 nt, Human
cagcucaaguuucccaggucag

SEQ ID NO: 1020825 - RNA, 22 nt, Human
uuuauuuaaagucguguguuaa

SEQ ID NO: 1020826 - RNA, 22 nt, Human
ugugccuggcauucugggcuuc

SEQ ID NO: 1020827 - RNA, 21 nt, Human
ucagcagcaucugccuagagu

SEQ ID NO: 1020828 - RNA, 22 nt, Human
uguucagagacagaaauucuaa

SEQ ID NO: 1020829 - RNA, 22 nt, Human
ugaaguuguuaagguugccauu

SEQ ID NO: 1020830 - RNA, 22 nt, Human
uucuuccucagcagggcugccu

SEQ ID NO: 1020831 - RNA, 22 nt, Human
ggccucgcggcuucugguggcu

SEQ ID NO: 1020832 - RNA, 22 nt, Human
uuugaaugcaggacauacagaa

SEQ ID NO: 1020833 - RNA, 22 nt, Human
cugggagcaccauacuuguuuc

SEQ ID NO: 1020834 - RNA, 22 nt, Human
guuuucauuacugcugugauuu

SEQ ID NO: 1020835 - RNA, 22 nt, Human
aggcagcagccacaaggccuga

SEQ ID NO: 1020836 - RNA, 23 nt, Human
agaugaggcuucuccauguuggu

SEQ ID NO: 1020837 - RNA, 22 nt, Human
aauaauuuugagagccuggaaa

SEQ ID NO: 1020838 - RNA, 22 nt, Human
ugcagcauuauucacaguagcc

SEQ ID NO: 1020839 - RNA, 22 nt, Human
uagcugucagcaaucaaguggu

SEQ ID NO: 1020840 - RNA, 22 nt, Human
ugggcacacugaaucugcuauu

SEQ ID NO: 1020841 - RNA, 22 nt, Human
caaauucucaagguuuauccca

SEQ ID NO: 1020842 - RNA, 22 nt, Human
gguggccaggccagcucuggcc

SEQ ID NO: 1020843 - RNA, 22 nt, Human
gcagguggcagaggugggaucu

SEQ ID NO: 1020844 - RNA, 19 nt, Human
gaucuuugccaauuuaagc

SEQ ID NO: 1020845 - RNA, 22 nt, Human
cucccaggggaacuaucaagua

SEQ ID NO: 1020846 - RNA, 22 nt, Human
aaagccuucaaguagauguaag

SEQ ID NO: 1020847 - RNA, 22 nt, Human
ccuggaugauccaugucaugga

SEQ ID NO: 1020848 - RNA, 22 nt, Human
agaggugacauaggagaggcuc

SEQ ID NO: 1020849 - RNA, 22 nt, Human
aacaucuacuaagugccaggca

SEQ ID NO: 1020850 - RNA, 22 nt, Human
ccugccugauuccaggauggcu

SEQ ID NO: 1020851 - RNA, 22 nt, Human
uagaaacucaggauacucuucc

SEQ ID NO: 1020852 - RNA, 22 nt, Human
cugagcauggccgguccauggu

SEQ ID NO: 1020853 - RNA, 22 nt, Human
agaccgagaaguucuccaggcc

SEQ ID NO: 1020854 - RNA, 22 nt, Human
gagccuggccuccugccucagc

SEQ ID NO: 1020855 - RNA, 22 nt, Human
ucagagugggagaaugugccaa

SEQ ID NO: 1020856 - RNA, 22 nt, Human
cugcugugccuuaaaaugcaag

SEQ ID NO: 1020857 - RNA, 22 nt, Human
cgccugggaguccacaccugcu

SEQ ID NO: 1020858 - RNA, 22 nt, Human
ucuuuauuuaagucuguuguaa

SEQ ID NO: 1020859 - RNA, 18 nt, Human
gggcaagcggcugucacc

SEQ ID NO: 1020860 - RNA, 21 nt, Human
gugguuauuuucauuagcauc

SEQ ID NO: 1020861 - RNA, 22 nt, Human
ccucagggaaugggaggcuggg

SEQ ID NO: 1020862 - RNA, 22 nt, Human
auuauguaacugugguucagca

SEQ ID NO: 1020863 - RNA, 22 nt, Human
uggcuggcaaggcuggagucag

SEQ ID NO: 1020864 - RNA, 22 nt, Human
caggcugggaacgccacccgcu

SEQ ID NO: 1020865 - RNA, 22 nt, Human
uucaggauuguguuuuuccuga

SEQ ID NO: 1020866 - RNA, 23 nt, Human
gccuucagcucgggaaggcuccc

SEQ ID NO: 1020867 - RNA, 22 nt, Human
gggcagcaucaggaggggcuuu

SEQ ID NO: 1020868 - RNA, 22 nt, Human
ggagcugggaauuggaucaucu

SEQ ID NO: 1020869 - RNA, 22 nt, Human
aaggccugggaguacugggaca

SEQ ID NO: 1020870 - RNA, 22 nt, Human
ugcagggaaugcuugcagcaug

SEQ ID NO: 1020871 - RNA, 22 nt, Human
cagcuggaucccugcagaacuu

SEQ ID NO: 1020872 - RNA, 22 nt, Human
accugagcaugccaggagagug

SEQ ID NO: 1020873 - RNA, 22 nt, Human
agcccagaggcugggcgugcau

SEQ ID NO: 1020874 - RNA, 22 nt, Human
aaaguguaaaagcauguuaggg

SEQ ID NO: 1020875 - RNA, 22 nt, Human
ugcccugucuaagcugucagua

SEQ ID NO: 1020876 - RNA, 20 nt, Human
uuucaagucagcaauucuca

SEQ ID NO: 1020877 - RNA, 22 nt, Human
ggagcagcacugauuagcgguu

SEQ ID NO: 1020878 - RNA, 22 nt, Human
agauuuagugguggaauuuugg

SEQ ID NO: 1020879 - RNA, 22 nt, Human
cagggcuccccagagagccucu

SEQ ID NO: 1020880 - RNA, 17 nt, Human
acucaggaucugggagu

SEQ ID NO: 1020881 - RNA, 22 nt, Human
ucugagcuacgaugccugucac

SEQ ID NO: 1020882 - RNA, 22 nt, Human
ugccuggguucccaccccaaag

SEQ ID NO: 1020883 - RNA, 22 nt, Human
acacugaauaauugagaguuga

SEQ ID NO: 1020884 - RNA, 22 nt, Human
ucuggccacccgaggccccugc

SEQ ID NO: 1020885 - RNA, 22 nt, Human
ccucaggaaaugaauaaauggc

SEQ ID NO: 1020886 - RNA, 19 nt, Human
uaaggccaaaaguaagugu

SEQ ID NO: 1020887 - RNA, 22 nt, Human
cugaaggagaaggccacuguuc

SEQ ID NO: 1020888 - RNA, 21 nt, Human
ugccaggccugagcugggguc

SEQ ID NO: 1020889 - RNA, 22 nt, Human
ugcugcuguuuccuacaucuca

SEQ ID NO: 1020890 - RNA, 22 nt, Human
gguucacacuaagcuuaagugg

SEQ ID NO: 1020891 - RNA, 22 nt, Human
gccugcaggcuguaguuuguga

SEQ ID NO: 1020892 - RNA, 22 nt, Human
aauuuccagaucagaugacuca

SEQ ID NO: 1020893 - RNA, 22 nt, Human
acaaauaugguacucggagaaa

SEQ ID NO: 1020894 - RNA, 22 nt, Human
gugcauuugacgaauacucacu

SEQ ID NO: 1020895 - RNA, 22 nt, Human
auuuccagcagcauauuugucu

SEQ ID NO: 1020896 - RNA, 22 nt, Human
cuacauuaaauuggcuuacuua

SEQ ID NO: 1020897 - RNA, 22 nt, Human
ggcugcuguacugaugucaguu

SEQ ID NO: 1020898 - RNA, 22 nt, Human
gacccaggguggucaccugaaa

SEQ ID NO: 1020899 - RNA, 22 nt, Human
aggcacaggccucagcacccag

SEQ ID NO: 1020900 - RNA, 22 nt, Human
gccaggcauuuauugauugaau

SEQ ID NO: 1020901 - RNA, 22 nt, Human
cagcucugggugacaggagggc

SEQ ID NO: 1020902 - RNA, 23 nt, Human
uggcucagcuaguuuuccauuuc

SEQ ID NO: 1020903 - RNA, 22 nt, Human
ucauuauuuuggacuggagugu

SEQ ID NO: 1020904 - RNA, 22 nt, Human
cacugggcguguccugggugag

SEQ ID NO: 1020905 - RNA, 22 nt, Human
gaggccaaucaauagggcaaua

SEQ ID NO: 1020906 - RNA, 22 nt, Human
cugccugugccaaugcuccuuu

SEQ ID NO: 1020907 - RNA, 22 nt, Human
accaucagucacauguagagaa

SEQ ID NO: 1020908 - RNA, 22 nt, Human
aggcucugaaggagaaccuguu

SEQ ID NO: 1020909 - RNA, 22 nt, Human
aauacuauguagccaaaauaau

SEQ ID NO: 1020910 - RNA, 18 nt, Human
cagucccaaaccuuagga

SEQ ID NO: 1020911 - RNA, 22 nt, Human
guggcugcagcccagcggcacg

SEQ ID NO: 1020912 - RNA, 22 nt, Human
gccuggugcuaugagggccagc

SEQ ID NO: 1020913 - RNA, 22 nt, Human
cagggaguuuuuguuccucuag

SEQ ID NO: 1020914 - RNA, 22 nt, Human
acagaggccccgugggagagcc

SEQ ID NO: 1020915 - RNA, 18 nt, Human
cuuuaugugcagagcuuu

SEQ ID NO: 1020916 - RNA, 22 nt, Human
uuccucucgcucuccggggccc

SEQ ID NO: 1020917 - RNA, 22 nt, Human
guucacaagaguuacagacaga

SEQ ID NO: 1020918 - RNA, 19 nt, Human
gggcuuggggcugaagccu

SEQ ID NO: 1020919 - RNA, 21 nt, Human
ccccugggagcccugucagua

SEQ ID NO: 1020920 - RNA, 22 nt, Human
uccugccugcaaucccagcacu

SEQ ID NO: 1020921 - RNA, 22 nt, Human
uaauaucuacuucauagaguuu

SEQ ID NO: 1020922 - RNA, 22 nt, Human
cugaaugaggaaaagagugagg

SEQ ID NO: 1020923 - RNA, 22 nt, Human
gcagaggggaagcugaggaauu

SEQ ID NO: 1020924 - RNA, 21 nt, Human
acaggcuuuagaaaaugacuc

SEQ ID NO: 1020925 - RNA, 22 nt, Human
ccacugucuuuuccaggcugaa

SEQ ID NO: 1020926 - RNA, 22 nt, Human
uucauacaaugggauauuauga

SEQ ID NO: 1020927 - RNA, 23 nt, Human
ucguugaauagcaauagcacaac

SEQ ID NO: 1020928 - RNA, 22 nt, Human
aguacagaccugucucuuccug

SEQ ID NO: 1020929 - RNA, 22 nt, Human
auacuaaaguauagaacuuagu

SEQ ID NO: 1020930 - RNA, 22 nt, Human
guccucuggaagaugaguucuu

SEQ ID NO: 1020931 - RNA, 22 nt, Human
cagggcagggccacacccccug

SEQ ID NO: 1020932 - RNA, 22 nt, Human
ucccugggguaacauuagaggg

SEQ ID NO: 1020933 - RNA, 22 nt, Human
cagagccaggguugcaccccug

SEQ ID NO: 1020934 - RNA, 22 nt, Human
uacauaaugagcuaguuaaguu

SEQ ID NO: 1020935 - RNA, 22 nt, Human
ugggagcagcuuugcgagggag

SEQ ID NO: 1020936 - RNA, 22 nt, Human
acagagagcugugauugaguua

SEQ ID NO: 1020937 - RNA, 21 nt, Human
aucauucuggaaaauucaagc

SEQ ID NO: 1020938 - RNA, 22 nt, Human
auuaauuuccaggcacugugcu

SEQ ID NO: 1020939 - RNA, 22 nt, Human
acagaauugaaaguauaaucug

SEQ ID NO: 1020940 - RNA, 22 nt, Human
ccugcagggaaucgaggcagaa

SEQ ID NO: 1020941 - RNA, 22 nt, Human
agggcagcuagcuguagaaaga

SEQ ID NO: 1020942 - RNA, 19 nt, Human
cagcucaguuugauucucu

SEQ ID NO: 1020943 - RNA, 22 nt, Human
ugaccugcguaggugguuucug

SEQ ID NO: 1020944 - RNA, 22 nt, Human
ggcucagguuuaaagugcuuua

SEQ ID NO: 1020945 - RNA, 22 nt, Human
uccuggagccacggagcuuuca

SEQ ID NO: 1020946 - RNA, 22 nt, Human
cugucccucaucaccucugggu

SEQ ID NO: 1020947 - RNA, 22 nt, Human
aucuacagugcacaggacagcc

SEQ ID NO: 1020948 - RNA, 22 nt, Human
ggcaucuguccaucucuccagc

SEQ ID NO: 1020949 - RNA, 22 nt, Human
uauucacagcugccgcacucag

SEQ ID NO: 1020950 - RNA, 22 nt, Human
auucaaguggcugcuauguuaa

SEQ ID NO: 1020951 - RNA, 22 nt, Human
ucuucauuccguagauauuuau

SEQ ID NO: 1020952 - RNA, 22 nt, Human
acaaagucucuaauaaucuucu

SEQ ID NO: 1020953 - RNA, 22 nt, Human
agggcccuagggaaugagacau

SEQ ID NO: 1020954 - RNA, 22 nt, Human
cugaagagcucuccuguccccu

SEQ ID NO: 1020955 - RNA, 22 nt, Human
caaaguuuaaaguagauuucag

SEQ ID NO: 1020956 - RNA, 22 nt, Human
uaggcacugguuguggauaguu

SEQ ID NO: 1020957 - RNA, 19 nt, Human
uccugcagguggcuugcag

SEQ ID NO: 1020958 - RNA, 22 nt, Human
acaaagcuagagaagagaauug

SEQ ID NO: 1020959 - RNA, 21 nt, Human
agcaccuuacagcuauaaugg

SEQ ID NO: 1020960 - RNA, 22 nt, Human
aguaccaugcuuccugacuggu

SEQ ID NO: 1020961 - RNA, 22 nt, Human
ucaguuuuuguuugccagauag

SEQ ID NO: 1020962 - RNA, 21 nt, Human
acuguucaucuguucagaagc

SEQ ID NO: 1020963 - RNA, 22 nt, Human
acuggaaaacacuacuacaugc

SEQ ID NO: 1020964 - RNA, 23 nt, Human
ucaggauauugugugccaaggug

SEQ ID NO: 1020965 - RNA, 22 nt, Human
cagaaauguuuauauguggugu

SEQ ID NO: 1020966 - RNA, 22 nt, Human
gccaaaucacagggccaaaagc

SEQ ID NO: 1020967 - RNA, 22 nt, Human
guaaaugugcuucuuuuaacuu

SEQ ID NO: 1020968 - RNA, 22 nt, Human
gauugaaacauaggcagucgag

SEQ ID NO: 1020969 - RNA, 22 nt, Human
ccacagggcucuaggcgcuucc

SEQ ID NO: 1020970 - RNA, 22 nt, Human
cccuguacagucucuguggcac

SEQ ID NO: 1020971 - RNA, 22 nt, Human
gagcagugacuggagcaugaga

SEQ ID NO: 1020972 - RNA, 22 nt, Human
auguagaauuccuucuacuuug

SEQ ID NO: 1020973 - RNA, 22 nt, Human
auguuagaaucucugaaugugg

SEQ ID NO: 1020974 - RNA, 22 nt, Human
gacaggguacgggcuaggcaca

SEQ ID NO: 1020975 - RNA, 21 nt, Human
ggagucauuagucauuuccuu

SEQ ID NO: 1020976 - RNA, 22 nt, Human
auaaaacuuauuagaauugugu

SEQ ID NO: 1020977 - RNA, 22 nt, Human
ucaguuuucucaucugugaaau

SEQ ID NO: 1020978 - RNA, 22 nt, Human
ucacacagguuugcaaugauuu

SEQ ID NO: 1020979 - RNA, 20 nt, Human
uauuuguauuugggaaaguu

SEQ ID NO: 1020980 - RNA, 22 nt, Human
cagcugccacaccucuuucucu

SEQ ID NO: 1020981 - RNA, 22 nt, Human
gcaggguauaauacuuagguga

SEQ ID NO: 1020982 - RNA, 22 nt, Human
aauuuccaaauuucugucacac

SEQ ID NO: 1020983 - RNA, 22 nt, Human
uuuuugaaggcugaugugauua

SEQ ID NO: 1020984 - RNA, 22 nt, Human
gcaaauacauguugagcaccua

SEQ ID NO: 1020985 - RNA, 22 nt, Human
accugcaguggccacuccuaau

SEQ ID NO: 1020986 - RNA, 22 nt, Human
uucauucugggcucuaaggaac

SEQ ID NO: 1020987 - RNA, 20 nt, Human
accucugcaucaauccuuug

SEQ ID NO: 1020988 - RNA, 19 nt, Human
aggcagcacccaguccuug

SEQ ID NO: 1020989 - RNA, 22 nt, Human
gaggcagaggaagguggucucu

SEQ ID NO: 1020990 - RNA, 22 nt, Human
uaaguuuuaagcaaucugauaa

SEQ ID NO: 1020991 - RNA, 22 nt, Human
gugggccucuugaggguggcua

SEQ ID NO: 1020992 - RNA, 22 nt, Human
cucuuuccaggguaccccaggu

SEQ ID NO: 1020993 - RNA, 22 nt, Human
cacccaggcuagagugcagugg

SEQ ID NO: 1020994 - RNA, 22 nt, Human
cccaggagguagagguugcagu

SEQ ID NO: 1020995 - RNA, 22 nt, Human
cuggacagaaaaggccacugga

SEQ ID NO: 1020996 - RNA, 19 nt, Human
gagcagcugcacccauuga

SEQ ID NO: 1020997 - RNA, 22 nt, Human
uccaugagggacacuggaugcu

SEQ ID NO: 1020998 - RNA, 22 nt, Human
auguucaaacuuuuuacacacc

SEQ ID NO: 1020999 - RNA, 22 nt, Human
agacuuugagcucuuagagaag

SEQ ID NO: 1021000 - RNA, 22 nt, Human
uaugaagaaguucugugaaaug

SEQ ID NO: 1021001 - RNA, 22 nt, Human
gagacugauggggcucccagaa

SEQ ID NO: 1021002 - RNA, 22 nt, Human
cccaccccuggacaggugagug

SEQ ID NO: 1021003 - RNA, 20 nt, Human
auguccagugacuggaccau

SEQ ID NO: 1021004 - RNA, 22 nt, Human
cugcuuuagacaacugcuggga

SEQ ID NO: 1021005 - RNA, 22 nt, Human
cagggacaugacuggucucugu

SEQ ID NO: 1021006 - RNA, 22 nt, Human
uucccaggcugugcuaccagag

SEQ ID NO: 1021007 - RNA, 18 nt, Human
gucacuguguuucugagc

SEQ ID NO: 1021008 - RNA, 22 nt, Human
acucugcuuauugcugcaggca

SEQ ID NO: 1021009 - RNA, 22 nt, Human
gccuggcacucacugaagaggc

SEQ ID NO: 1021010 - RNA, 22 nt, Human
ugaugggaggugcugcaggacc

SEQ ID NO: 1021011 - RNA, 22 nt, Human
augaagauaagaccaggcugga

SEQ ID NO: 1021012 - RNA, 22 nt, Human
cucuucuuauggccguggcuga

SEQ ID NO: 1021013 - RNA, 22 nt, Human
acuguacacgugucauuuacag

SEQ ID NO: 1021014 - RNA, 22 nt, Human
cagaguguggcaucuuccaacu

SEQ ID NO: 1021015 - RNA, 22 nt, Human
aggagaaagacuggacagccaa

SEQ ID NO: 1021016 - RNA, 23 nt, Human
uugcacauuggagcuggucuucu

SEQ ID NO: 1021017 - RNA, 22 nt, Human
cauuucugugacacuuccaucu

SEQ ID NO: 1021018 - RNA, 22 nt, Human
uggcucugagacacaggcucuc

SEQ ID NO: 1021019 - RNA, 22 nt, Human
cugggguggauggguccaaguu

SEQ ID NO: 1021020 - RNA, 22 nt, Human
uaauaguugugacuuuguaaag

SEQ ID NO: 1021021 - RNA, 22 nt, Human
uucaggauccccuugaugggcu

SEQ ID NO: 1021022 - RNA, 22 nt, Human
cagaggcucaccagccuuucac

SEQ ID NO: 1021023 - RNA, 22 nt, Human
cugggggcaauggucagagugu

SEQ ID NO: 1021024 - RNA, 22 nt, Human
ggaugcaggaguugaagaagga

SEQ ID NO: 1021025 - RNA, 22 nt, Human
ugggcucugugccagguuggug

SEQ ID NO: 1021026 - RNA, 22 nt, Human
ggcucuggugaggguaggagau

SEQ ID NO: 1021027 - RNA, 22 nt, Human
cccagcuccaagggacagcgaa

SEQ ID NO: 1021028 - RNA, 22 nt, Human
aucuggcucucucauuuacaaa

SEQ ID NO: 1021029 - RNA, 19 nt, Human
auuccucaaggacagaaau

SEQ ID NO: 1021030 - RNA, 22 nt, Human
uaauuauaacaguuacaucuua

SEQ ID NO: 1021031 - RNA, 22 nt, Human
cccucagcuccacccucagcag

SEQ ID NO: 1021032 - RNA, 22 nt, Human
ucacuuagauggggaucaucac

SEQ ID NO: 1021033 - RNA, 21 nt, Human
gagcugggcgaggcuccgggg

SEQ ID NO: 1021034 - RNA, 22 nt, Human
ugugugccugagccgugccugg

SEQ ID NO: 1021035 - RNA, 22 nt, Human
ucugggaguuucugugggagcu

SEQ ID NO: 1021036 - RNA, 22 nt, Human
gagaagguggaccugaaggagc

SEQ ID NO: 1021037 - RNA, 22 nt, Human
cuuagaaaugcagauucucagg

SEQ ID NO: 1021038 - RNA, 23 nt, Human
gggagccauggguggucauggag

SEQ ID NO: 1021039 - RNA, 21 nt, Human
auacacauacacauaaaugug

SEQ ID NO: 1021040 - RNA, 22 nt, Human
aaaugucuuugaguauuucugc

SEQ ID NO: 1021041 - RNA, 21 nt, Human
cuguuucuugugaagugacac

SEQ ID NO: 1021042 - RNA, 22 nt, Human
cucugggcuuguugaccugcac

SEQ ID NO: 1021043 - RNA, 22 nt, Human
uggcuccuaucaaggagugggu

SEQ ID NO: 1021044 - RNA, 22 nt, Human
caggggcaggugugagaucauc

SEQ ID NO: 1021045 - RNA, 22 nt, Human
cccucugcucaggugcauaggc

SEQ ID NO: 1021046 - RNA, 22 nt, Human
aguacauuuauuaaugguaaaa

SEQ ID NO: 1021047 - RNA, 22 nt, Human
acagagccaaaaggacauagua

SEQ ID NO: 1021048 - RNA, 22 nt, Human
aaugcacagcguuccaugcuug

SEQ ID NO: 1021049 - RNA, 22 nt, Human
aagauacauaaagguagagucu

SEQ ID NO: 1021050 - RNA, 22 nt, Human
ugcugccagagagacagggacu

SEQ ID NO: 1021051 - RNA, 22 nt, Human
gucccagggaugcagacaugag

SEQ ID NO: 1021052 - RNA, 22 nt, Human
ugcaguggugguaaagaugcuc

SEQ ID NO: 1021053 - RNA, 22 nt, Human
cucaggacccgguccagguggg

SEQ ID NO: 1021054 - RNA, 22 nt, Human
gcagggacgccagggacagcaa

SEQ ID NO: 1021055 - RNA, 22 nt, Human
gacaguuuuuaauccuuucaug

SEQ ID NO: 1021056 - RNA, 19 nt, Human
ugucacugucauggcccag

SEQ ID NO: 1021057 - RNA, 22 nt, Human
acugggaggcaucuggagcuga

SEQ ID NO: 1021058 - RNA, 22 nt, Human
ugaguacucggagugcuuugga

SEQ ID NO: 1021059 - RNA, 22 nt, Human
cccaggaugaucgagaguggga

SEQ ID NO: 1021060 - RNA, 22 nt, Human
ugucccagguccuagaugacca

SEQ ID NO: 1021061 - RNA, 22 nt, Human
gccaaagcagucuugccucugc

SEQ ID NO: 1021062 - RNA, 22 nt, Human
aaaugcacagaaaggaugugga

SEQ ID NO: 1021063 - RNA, 23 nt, Human
ugggcaucuccucugugccaggc

SEQ ID NO: 1021064 - RNA, 21 nt, Human
ugcauaaagaaauacaaauac

SEQ ID NO: 1021065 - RNA, 22 nt, Human
cagcuauuuucucauuaaggau

SEQ ID NO: 1021066 - RNA, 22 nt, Human
cugcugugcuuguggccacccg

SEQ ID NO: 1021067 - RNA, 22 nt, Human
uagggcucgggcacaggacagg

SEQ ID NO: 1021068 - RNA, 17 nt, Human
aaaauucuguaaagagg

SEQ ID NO: 1021069 - RNA, 22 nt, Human
agucucugcugguugugccuau

SEQ ID NO: 1021070 - RNA, 22 nt, Human
ucugguaaccuuuaucccuccu

SEQ ID NO: 1021071 - RNA, 22 nt, Human
auguccaguuucuacacacaua

SEQ ID NO: 1021072 - RNA, 22 nt, Human
ugaagcugugggcaguggagcc

SEQ ID NO: 1021073 - RNA, 22 nt, Human
ccaaggagcucauauucuuguu

SEQ ID NO: 1021074 - RNA, 22 nt, Human
cacagggcaccaguuggccauc

SEQ ID NO: 1021075 - RNA, 22 nt, Human
agcugguuagcaaucuaaguga

SEQ ID NO: 1021076 - RNA, 22 nt, Human
cagagcagucuggagauccagc

SEQ ID NO: 1021077 - RNA, 22 nt, Human
gacagguggggaaacuaaggua

SEQ ID NO: 1021078 - RNA, 22 nt, Human
cauugcacuuuggguccaggac

SEQ ID NO: 1021079 - RNA, 22 nt, Human
aagcccagcugaaagcauuuuu

SEQ ID NO: 1021080 - RNA, 22 nt, Human
aaauuucaguuggaaugagcuc

SEQ ID NO: 1021081 - RNA, 22 nt, Human
ccaggauggggagcagauagaa

SEQ ID NO: 1021082 - RNA, 22 nt, Human
cagaggcagccgggggagaacg

SEQ ID NO: 1021083 - RNA, 22 nt, Human
aaagccagagcaagcugucaca

SEQ ID NO: 1021084 - RNA, 22 nt, Human
uuauuucauugauuucuaagac

SEQ ID NO: 1021085 - RNA, 22 nt, Human
gcagggcagcuuagucccuguc

SEQ ID NO: 1021086 - RNA, 22 nt, Human
uguaagauauucagcuuauuga

SEQ ID NO: 1021087 - RNA, 22 nt, Human
aggagcugggcugcugcuggga

SEQ ID NO: 1021088 - RNA, 22 nt, Human
gcugccagcuuuccuuggcuga

SEQ ID NO: 1021089 - RNA, 22 nt, Human
gccuucugauugcuggacugac

SEQ ID NO: 1021090 - RNA, 20 nt, Human
gacauucauaguuauuacca

SEQ ID NO: 1021091 - RNA, 19 nt, Human
aguagcagaaagugcagug

SEQ ID NO: 1021092 - RNA, 22 nt, Human
guaacacagaaaugaaauucca

SEQ ID NO: 1021093 - RNA, 22 nt, Human
cacauuugaaggaauuagcauu

SEQ ID NO: 1021094 - RNA, 22 nt, Human
aagcagccucauuugugguaag

SEQ ID NO: 1021095 - RNA, 22 nt, Human
ggggcggggcucugagaagcau

SEQ ID NO: 1021096 - RNA, 22 nt, Human
ucuaaccuuugaaacugcuuuc

SEQ ID NO: 1021097 - RNA, 22 nt, Human
accuggcaugaagcaugccuua

SEQ ID NO: 1021098 - RNA, 22 nt, Human
gaggcccucuugccacaaugaa

SEQ ID NO: 1021099 - RNA, 22 nt, Human
uccuggagcuuccuucauggua

SEQ ID NO: 1021100 - RNA, 19 nt, Human
gagggcucauuugaacaau

SEQ ID NO: 1021101 - RNA, 22 nt, Human
gagaggcugacuggcuguccug

SEQ ID NO: 1021102 - RNA, 22 nt, Human
acagggcagguggcuacugguc

SEQ ID NO: 1021103 - RNA, 22 nt, Human
ucaguuuucucauuuaugagau

SEQ ID NO: 1021104 - RNA, 22 nt, Human
ugcugccaccccucaccagagc

SEQ ID NO: 1021105 - RNA, 22 nt, Human
gaggaguggaguugcuggguug

SEQ ID NO: 1021106 - RNA, 20 nt, Human
uccuugaaagugggguauau

SEQ ID NO: 1021107 - RNA, 22 nt, Human
cucugagcagaggccguggcua

SEQ ID NO: 1021108 - RNA, 22 nt, Human
ucugggaauuuauuggcacuuu

SEQ ID NO: 1021109 - RNA, 22 nt, Human
ggcagaggagcuggaaacaugg

SEQ ID NO: 1021110 - RNA, 22 nt, Human
cuuuuccacugagccucacaaa

SEQ ID NO: 1021111 - RNA, 22 nt, Human
gaaauuuauuaucuacaucauu

SEQ ID NO: 1021112 - RNA, 22 nt, Human
agcagggcaaagucaggcuaac

SEQ ID NO: 1021113 - RNA, 22 nt, Human
gcccaggaggucaaguagcuau

SEQ ID NO: 1021114 - RNA, 22 nt, Human
gccuucugugcuccuggccuuu

SEQ ID NO: 1021115 - RNA, 22 nt, Human
acagugugugcuuucccuuacg

SEQ ID NO: 1021116 - RNA, 22 nt, Human
ggcugaguugagaggauuacuu

SEQ ID NO: 1021117 - RNA, 22 nt, Human
ccucugggugggaggccgggcg

SEQ ID NO: 1021118 - RNA, 21 nt, Human
ucccagagugcuugggacugc

SEQ ID NO: 1021119 - RNA, 22 nt, Human
cuuguggcccauggcuuccugc

SEQ ID NO: 1021120 - RNA, 22 nt, Human
uggagccauaacccuuucguac

SEQ ID NO: 1021121 - RNA, 22 nt, Human
ucgugucagaucagagguuccu

SEQ ID NO: 1021122 - RNA, 22 nt, Human
ucuucaauuagauuuaccaauu

SEQ ID NO: 1021123 - RNA, 22 nt, Human
cugcugugucagaguccagggg

SEQ ID NO: 1021124 - RNA, 22 nt, Human
guguacaugagaaaucaacuuu

SEQ ID NO: 1021125 - RNA, 22 nt, Human
ugauugaacugagcuucaagau

SEQ ID NO: 1021126 - RNA, 22 nt, Human
aaaaacuguaauuacuuuugca

SEQ ID NO: 1021127 - RNA, 22 nt, Human
agcaggaguguccccuggcugu

SEQ ID NO: 1021128 - RNA, 22 nt, Human
gaaaggccauuucugaggguuu

SEQ ID NO: 1021129 - RNA, 21 nt, Human
uccauaagagaccaucuccua

SEQ ID NO: 1021130 - RNA, 22 nt, Human
ugccuggguguaaagggccaac

SEQ ID NO: 1021131 - RNA, 22 nt, Human
ucacgagaggcacagaauagag

SEQ ID NO: 1021132 - RNA, 23 nt, Human
agcagggccagaauacuugcugu

SEQ ID NO: 1021133 - RNA, 22 nt, Human
ugcucuggaguggcuugugcac

SEQ ID NO: 1021134 - RNA, 22 nt, Human
uucauucuuauuugugaucugg

SEQ ID NO: 1021135 - RNA, 22 nt, Human
ucucaggaagugauauugagac

SEQ ID NO: 1021136 - RNA, 22 nt, Human
gcauguguuauuuuauguauga

SEQ ID NO: 1021137 - RNA, 22 nt, Human
cagaccagaaggaagccgacaa

SEQ ID NO: 1021138 - RNA, 22 nt, Human
acauuucacuguucacagcagg

SEQ ID NO: 1021139 - RNA, 22 nt, Human
cagagcagagugauuguucugg

SEQ ID NO: 1021140 - RNA, 22 nt, Human
acagagcuguacuacuuacuga

SEQ ID NO: 1021141 - RNA, 22 nt, Human
uuaaaugaggcugauguagauu

SEQ ID NO: 1021142 - RNA, 20 nt, Human
gggagucuggaugaaagaug

SEQ ID NO: 1021143 - RNA, 22 nt, Human
aacagaaaucauuuagggcucu

SEQ ID NO: 1021144 - RNA, 22 nt, Human
aauguuguuuuucugcaugucu

SEQ ID NO: 1021145 - RNA, 22 nt, Human
ucuuccaagguugcacacuauc

SEQ ID NO: 1021146 - RNA, 20 nt, Human
gcugccuguuucuguaagua

SEQ ID NO: 1021147 - RNA, 22 nt, Human
cccaggaggcagagcuugcagu

SEQ ID NO: 1021148 - RNA, 17 nt, Human
uccuucagggccucaca

SEQ ID NO: 1021149 - RNA, 22 nt, Human
ccagugcacagccaggcaggug

SEQ ID NO: 1021150 - RNA, 22 nt, Human
uugacaagaaucguugccuugg

SEQ ID NO: 1021151 - RNA, 22 nt, Human
gccucuggucccucaugcugug

SEQ ID NO: 1021152 - RNA, 22 nt, Human
ugaccugcagucaagaggggaa

SEQ ID NO: 1021153 - RNA, 17 nt, Human
uccaggcauaucuccua

SEQ ID NO: 1021154 - RNA, 22 nt, Human
aagaagagaaaugugcugcugg

SEQ ID NO: 1021155 - RNA, 22 nt, Human
uucaugaaacuuaacuguuggg

SEQ ID NO: 1021156 - RNA, 15 nt, Human
uucaggauaugacuc

SEQ ID NO: 1021157 - RNA, 22 nt, Human
ucucacugggucacagcagagg

SEQ ID NO: 1021158 - RNA, 22 nt, Human
ugcucugguccucccucggcgc

SEQ ID NO: 1021159 - RNA, 22 nt, Human
guuuucaauuauaagauggcuu

SEQ ID NO: 1021160 - RNA, 22 nt, Human
aggcucugugacaaucaagcug

SEQ ID NO: 1021161 - RNA, 22 nt, Human
acagaguagcucaagaagauug

SEQ ID NO: 1021162 - RNA, 22 nt, Human
acuuuggaucugauguaaucag

SEQ ID NO: 1021163 - RNA, 22 nt, Human
gagucacaaagccuuucuuauu

SEQ ID NO: 1021164 - RNA, 21 nt, Human
gagccuucccucugcccuuuc

SEQ ID NO: 1021165 - RNA, 20 nt, Human
uccugagauuuaagggguuc

SEQ ID NO: 1021166 - RNA, 22 nt, Human
uucugucagaagcuagcuccug

SEQ ID NO: 1021167 - RNA, 19 nt, Human
ucccuggcgccucucgggc

SEQ ID NO: 1021168 - RNA, 22 nt, Human
acuugaauuauauuucuagaga

SEQ ID NO: 1021169 - RNA, 22 nt, Human
uuauuuaauuuucucacucaga

SEQ ID NO: 1021170 - RNA, 22 nt, Human
gcucaggaucccaggggugugc

SEQ ID NO: 1021171 - RNA, 22 nt, Human
uagcagggguagauagagugug

SEQ ID NO: 1021172 - RNA, 22 nt, Human
gauuucaaggaguuuucacagu

SEQ ID NO: 1021173 - RNA, 22 nt, Human
uguaggacauguacuuguaaca

SEQ ID NO: 1021174 - RNA, 22 nt, Human
aaccaggacaauuuugaaagua

SEQ ID NO: 1021175 - RNA, 18 nt, Human
ccagaggcccgggcaggc

SEQ ID NO: 1021176 - RNA, 22 nt, Human
ugucuagggagcugcucaggcu

SEQ ID NO: 1021177 - RNA, 22 nt, Human
gcugggcaccggagagacccca

SEQ ID NO: 1021178 - RNA, 22 nt, Human
ggggagugacgcagggccauag

SEQ ID NO: 1021179 - RNA, 22 nt, Human
gcaguggggaaugcuggggaga

SEQ ID NO: 1021180 - RNA, 21 nt, Human
uggccaaaaccauauuauuaa

SEQ ID NO: 1021181 - RNA, 22 nt, Human
ggccugugagcccuugcaugua

SEQ ID NO: 1021182 - RNA, 22 nt, Human
cauuuguaguuaaaaaugucuc

SEQ ID NO: 1021183 - RNA, 22 nt, Human
uuuuauuaucuuugaaugggac

SEQ ID NO: 1021184 - RNA, 22 nt, Human
auucugucuuuuuauacaucua

SEQ ID NO: 1021185 - RNA, 22 nt, Human
guggcucuaggugagcauggag

SEQ ID NO: 1021186 - RNA, 22 nt, Human
cuggugccauucuguggccuag

SEQ ID NO: 1021187 - RNA, 22 nt, Human
caucacuguccaaaguucaguu

SEQ ID NO: 1021188 - RNA, 18 nt, Human
agcagcugugccacacug

SEQ ID NO: 1021189 - RNA, 22 nt, Human
uuugacaucuaagaauucuuac

SEQ ID NO: 1021190 - RNA, 22 nt, Human
uccagccaccaccuugauugcc

SEQ ID NO: 1021191 - RNA, 22 nt, Human
accugcaggggugcucucuggg

SEQ ID NO: 1021192 - RNA, 22 nt, Human
ucuucauuuuacaggcagaccu

SEQ ID NO: 1021193 - RNA, 22 nt, Human
uggaaagaugaagauguuuaag

SEQ ID NO: 1021194 - RNA, 22 nt, Human
uugcuauuuugagagucauagu

SEQ ID NO: 1021195 - RNA, 18 nt, Human
gggaagaggaucuggccc

SEQ ID NO: 1021196 - RNA, 22 nt, Human
gccuggagugcaguggcgugau

SEQ ID NO: 1021197 - RNA, 22 nt, Human
augcacagcagugaguucagug

SEQ ID NO: 1021198 - RNA, 22 nt, Human
guagcccaccuggggagggcga

SEQ ID NO: 1021199 - RNA, 22 nt, Human
gcaggggcuaaggacacagaga

SEQ ID NO: 1021200 - RNA, 20 nt, Human
auccaugagagucuggauuc

SEQ ID NO: 1021201 - RNA, 22 nt, Human
uccagugguaguaaagaggucu

SEQ ID NO: 1021202 - RNA, 22 nt, Human
aaggcaguuugggccaccaucu

SEQ ID NO: 1021203 - RNA, 22 nt, Human
gaaggccauugcguccugggau

SEQ ID NO: 1021204 - RNA, 22 nt, Human
uugagaagaggcuuuguaggaa

SEQ ID NO: 1021205 - RNA, 22 nt, Human
uuuugcuuuuguaacacagugu

SEQ ID NO: 1021206 - RNA, 20 nt, Human
agcuucuucugucuaauuuu

SEQ ID NO: 1021207 - RNA, 22 nt, Human
uggcucagcaagacauugaccu

SEQ ID NO: 1021208 - RNA, 22 nt, Human
uuucauugcagagucugugugc

SEQ ID NO: 1021209 - RNA, 22 nt, Human
agcuguguggugucugacagcu

SEQ ID NO: 1021210 - RNA, 22 nt, Human
cugaggucaauuaaucaacaac

SEQ ID NO: 1021211 - RNA, 22 nt, Human
gcagagccccucaagccagccu

SEQ ID NO: 1021212 - RNA, 22 nt, Human
auggacagugugaagcagauag

SEQ ID NO: 1021213 - RNA, 22 nt, Human
uuaagacaguguauuuguuuuc

SEQ ID NO: 1021214 - RNA, 22 nt, Human
cugugcuuccaggauggcagcu

SEQ ID NO: 1021215 - RNA, 22 nt, Human
acacaggagauauguaauggcu

SEQ ID NO: 1021216 - RNA, 22 nt, Human
ugccaggcgugguggugcgcac

SEQ ID NO: 1021217 - RNA, 19 nt, Human
acuuugcaugugugucuaa

SEQ ID NO: 1021218 - RNA, 22 nt, Human
aaaaguuaccucuguaauauaa

SEQ ID NO: 1021219 - RNA, 22 nt, Human
caaaugcaugagaaauaagagg

SEQ ID NO: 1021220 - RNA, 23 nt, Human
cuggccuccgacacuggccaaga

SEQ ID NO: 1021221 - RNA, 20 nt, Human
ccugaggguuuguguucuuu

SEQ ID NO: 1021222 - RNA, 22 nt, Human
uauuaguagcuugaaauuggug

SEQ ID NO: 1021223 - RNA, 22 nt, Human
agcugccugcuuaugagcucca

SEQ ID NO: 1021224 - RNA, 22 nt, Human
uucacauuauaaucaguucugc

SEQ ID NO: 1021225 - RNA, 22 nt, Human
cucugauuuccuuauucuguca

SEQ ID NO: 1021226 - RNA, 22 nt, Human
gagcugucuggggacucugggu

SEQ ID NO: 1021227 - RNA, 22 nt, Human
aggcugaggcagguggaucauu

SEQ ID NO: 1021228 - RNA, 22 nt, Human
uaggcacuagacaugguuacca

SEQ ID NO: 1021229 - RNA, 22 nt, Human
gccagcugaagcccugguggaa

SEQ ID NO: 1021230 - RNA, 22 nt, Human
uggccuggaaaaaugcagaugg

SEQ ID NO: 1021231 - RNA, 22 nt, Human
caaagugcugagauuacaggua

SEQ ID NO: 1021232 - RNA, 22 nt, Human
auaugcauguacgugugcacaa

SEQ ID NO: 1021233 - RNA, 22 nt, Human
cuuugaaaggaagccacacagc

SEQ ID NO: 1021234 - RNA, 22 nt, Human
cauuuguuaauuacuauuaucu

SEQ ID NO: 1021235 - RNA, 22 nt, Human
cagcugccugcaacacaagcuu

SEQ ID NO: 1021236 - RNA, 22 nt, Human
ucugaaagaagggcagucuuuu

SEQ ID NO: 1021237 - RNA, 22 nt, Human
ggagccugcgggagcucccauu

SEQ ID NO: 1021238 - RNA, 22 nt, Human
aguggugcugcgcgcggagcuc

SEQ ID NO: 1021239 - RNA, 20 nt, Human
gcauccagacacccagcugc

SEQ ID NO: 1021240 - RNA, 22 nt, Human
acagagcucccagccaucuccu

SEQ ID NO: 1021241 - RNA, 22 nt, Human
gcugcucugaaaaugacuguug

SEQ ID NO: 1021242 - RNA, 22 nt, Human
uauuccaguccuauccucuuuu

SEQ ID NO: 1021243 - RNA, 22 nt, Human
ugucaugcccaggagcaaggua

SEQ ID NO: 1021244 - RNA, 22 nt, Human
cagccagcugaauguaccauga

SEQ ID NO: 1021245 - RNA, 22 nt, Human
uugcauuugaucuuggguucuc

SEQ ID NO: 1021246 - RNA, 22 nt, Human
cuguggaaaauuuguauguaau

SEQ ID NO: 1021247 - RNA, 22 nt, Human
caggcacugugccucgcucccu

SEQ ID NO: 1021248 - RNA, 21 nt, Human
agcagccauuucacagagacu

SEQ ID NO: 1021249 - RNA, 22 nt, Human
uucaaugaggauagaacuggau

SEQ ID NO: 1021250 - RNA, 22 nt, Human
auguaugauauuuccaguauca

SEQ ID NO: 1021251 - RNA, 22 nt, Human
uuugaaaggagcuuuauccaga

SEQ ID NO: 1021252 - RNA, 22 nt, Human
gccuggagaagauggaacuagc

SEQ ID NO: 1021253 - RNA, 22 nt, Human
ugcacuggggucccagcgcacg

SEQ ID NO: 1021254 - RNA, 22 nt, Human
gcuguggucugugagcuccaaa

SEQ ID NO: 1021255 - RNA, 22 nt, Human
ggcaggagcucuccaguuugcc

SEQ ID NO: 1021256 - RNA, 22 nt, Human
gagaaccucuccacaagucugg

SEQ ID NO: 1021257 - RNA, 22 nt, Human
uugaaagucacaauggcauuaa

SEQ ID NO: 1021258 - RNA, 22 nt, Human
ggggcagagagaaggaagcuug

SEQ ID NO: 1021259 - RNA, 22 nt, Human
uugucugaaagaucauuacauu

SEQ ID NO: 1021260 - RNA, 22 nt, Human
gucccuaguggaaagacaugau

SEQ ID NO: 1021261 - RNA, 22 nt, Human
cccaggcaguagaaagaagagg

SEQ ID NO: 1021262 - RNA, 22 nt, Human
ucccagccuuccagucugguuu

SEQ ID NO: 1021263 - RNA, 22 nt, Human
uagaaaucuacuuagacuuucu

SEQ ID NO: 1021264 - RNA, 22 nt, Human
cagaaggcuuuguggaguagac

SEQ ID NO: 1021265 - RNA, 22 nt, Human
ccauuugucaccucugcacucc

SEQ ID NO: 1021266 - RNA, 22 nt, Human
caacagaaggaagcagggucag

SEQ ID NO: 1021267 - RNA, 22 nt, Human
aaaguguugggauuacaggugu

SEQ ID NO: 1021268 - RNA, 22 nt, Human
uuagaaauacaagugagguuga

SEQ ID NO: 1021269 - RNA, 22 nt, Human
uucauagugauuguucagauag

SEQ ID NO: 1021270 - RNA, 22 nt, Human
cugaggcuuggaggggucuggu

SEQ ID NO: 1021271 - RNA, 22 nt, Human
auccuugaaugacucugcccuc

SEQ ID NO: 1021272 - RNA, 22 nt, Human
cugccugcugccuguggagggu

SEQ ID NO: 1021273 - RNA, 22 nt, Human
cacaagacuuauuuguguagaa

SEQ ID NO: 1021274 - RNA, 22 nt, Human
augcuacauuuugguuuauaaa

SEQ ID NO: 1021275 - RNA, 22 nt, Human
uuuauuuggcauccagggagaa

SEQ ID NO: 1021276 - RNA, 22 nt, Human
gcccgcagagaucuuuaacaaa

SEQ ID NO: 1021277 - RNA, 22 nt, Human
acacugaagagcacuuucaaag

SEQ ID NO: 1021278 - RNA, 23 nt, Human
uauuagggccaggacuggcaaau

SEQ ID NO: 1021279 - RNA, 20 nt, Human
uggagccaaggugugucugg

SEQ ID NO: 1021280 - RNA, 22 nt, Human
cagccacguagcccuuggccgu

SEQ ID NO: 1021281 - RNA, 22 nt, Human
uuccagcaggcagacaggagau

SEQ ID NO: 1021282 - RNA, 22 nt, Human
caguguuuaaucauugugaauu

SEQ ID NO: 1021283 - RNA, 22 nt, Human
gagcuuuacuucugacuggugc

SEQ ID NO: 1021284 - RNA, 22 nt, Human
uuccuuccgggcaccaggcacu

SEQ ID NO: 1021285 - RNA, 22 nt, Human
uggcucuggugcgggcuccugc

SEQ ID NO: 1021286 - RNA, 20 nt, Human
acagccagaggaggcagaca

SEQ ID NO: 1021287 - RNA, 22 nt, Human
caggggccggcuguccgugccc

SEQ ID NO: 1021288 - RNA, 22 nt, Human
cuccaggccauggcugcggagg

SEQ ID NO: 1021289 - RNA, 22 nt, Human
cuuucacauaauugaccuugaa

SEQ ID NO: 1021290 - RNA, 22 nt, Human
uauuuccauguuagaacuaagu

SEQ ID NO: 1021291 - RNA, 22 nt, Human
ggccauggugguuugagcaccu

SEQ ID NO: 1021292 - RNA, 23 nt, Human
auggaagucacuguuuucuuguc

SEQ ID NO: 1021293 - RNA, 20 nt, Human
uguugauuggugucaucuca

SEQ ID NO: 1021294 - RNA, 22 nt, Human
accucaggauguggacacagaa

SEQ ID NO: 1021295 - RNA, 22 nt, Human
agaauccucuucaguaaauucu

SEQ ID NO: 1021296 - RNA, 22 nt, Human
cucaucugauaaaucacucuua

SEQ ID NO: 1021297 - RNA, 22 nt, Human
uuuucacacaaggugauaaguu

SEQ ID NO: 1021298 - RNA, 22 nt, Human
agaaucucuacucaaguacuug

SEQ ID NO: 1021299 - RNA, 17 nt, Human
aucuggcugcuucuaga

SEQ ID NO: 1021300 - RNA, 22 nt, Human
cagcuugggaguuugguuuuau

SEQ ID NO: 1021301 - RNA, 22 nt, Human
gcugucagugaggugagacaug

SEQ ID NO: 1021302 - RNA, 22 nt, Human
ccagccaggcauugcaaacuga

SEQ ID NO: 1021303 - RNA, 22 nt, Human
gagcaggccagcaauggaaggg

SEQ ID NO: 1021304 - RNA, 18 nt, Human
gcugccugcauuccucac

SEQ ID NO: 1021305 - RNA, 22 nt, Human
cauguacaaaaggcaaaugccu

SEQ ID NO: 1021306 - RNA, 22 nt, Human
uuucacaaguuucaggauucug

SEQ ID NO: 1021307 - RNA, 22 nt, Human
gccuggagggcucuagagaggc

SEQ ID NO: 1021308 - RNA, 22 nt, Human
cugggagaucuccugagggcag

SEQ ID NO: 1021309 - RNA, 22 nt, Human
ugcagccauuuucugccaaugc

SEQ ID NO: 1021310 - RNA, 22 nt, Human
ucaaauaccagcuuuuccagaa

SEQ ID NO: 1021311 - RNA, 21 nt, Human
gcacagcaugaguguuggcau

SEQ ID NO: 1021312 - RNA, 22 nt, Human
gccuuccugcagcucugagcgu

SEQ ID NO: 1021313 - RNA, 22 nt, Human
aggucauuuccuuagaggcaga

SEQ ID NO: 1021314 - RNA, 22 nt, Human
cuggcagguuuggugucuggug

SEQ ID NO: 1021315 - RNA, 22 nt, Human
uccugggcuguggccccgggca

SEQ ID NO: 1021316 - RNA, 22 nt, Human
ggucacaggggagaagagugau

SEQ ID NO: 1021317 - RNA, 22 nt, Human
gggccaugagagguucaucaac

SEQ ID NO: 1021318 - RNA, 22 nt, Human
ccaggcugcagucaaggggcau

SEQ ID NO: 1021319 - RNA, 22 nt, Human
gaaguucaggugggaauugagc

SEQ ID NO: 1021320 - RNA, 22 nt, Human
aacuuucagaauccuaugcauu

SEQ ID NO: 1021321 - RNA, 22 nt, Human
ugaaaugaucaguuugguuacu

SEQ ID NO: 1021322 - RNA, 22 nt, Human
accagagcuggcagaguaucaa

SEQ ID NO: 1021323 - RNA, 22 nt, Human
uguucuuucaguuagacacagu

SEQ ID NO: 1021324 - RNA, 22 nt, Human
uagaauucaagauucaacaggc

SEQ ID NO: 1021325 - RNA, 22 nt, Human
gugcugugcgcuuuuucuguau

SEQ ID NO: 1021326 - RNA, 22 nt, Human
uuacauaacgguaugaaaaaug

SEQ ID NO: 1021327 - RNA, 22 nt, Human
accuuuuuucagaacucuaaag

SEQ ID NO: 1021328 - RNA, 22 nt, Human
caggauggugugagugugagga

SEQ ID NO: 1021329 - RNA, 22 nt, Human
uaaugcaguacugauauaaaca

SEQ ID NO: 1021330 - RNA, 22 nt, Human
ccaaaguccacaguuuacauua

SEQ ID NO: 1021331 - RNA, 19 nt, Human
ccuuugaaucaggacacuu

SEQ ID NO: 1021332 - RNA, 22 nt, Human
ugcuagaagauagcuagaagau

SEQ ID NO: 1021333 - RNA, 22 nt, Human
auccuugacacacuccaguacu

SEQ ID NO: 1021334 - RNA, 21 nt, Human
ucagaacaauuccaugccucc

SEQ ID NO: 1021335 - RNA, 22 nt, Human
gggcucucaugaguguguggua

SEQ ID NO: 1021336 - RNA, 22 nt, Human
gcugccugaucauacaccaggg

SEQ ID NO: 1021337 - RNA, 22 nt, Human
agugccaggagcaaggagcucc

SEQ ID NO: 1021338 - RNA, 17 nt, Human
uguagcuucuccuucuc

SEQ ID NO: 1021339 - RNA, 22 nt, Human
ggcugccugggagcccuccucu

SEQ ID NO: 1021340 - RNA, 22 nt, Human
auacauguucguguacauguuc

SEQ ID NO: 1021341 - RNA, 22 nt, Human
cggcagcuccgcgccguaggac

SEQ ID NO: 1021342 - RNA, 23 nt, Human
ccuucagaagaaguaacaggggc

SEQ ID NO: 1021343 - RNA, 22 nt, Human
cuaguccacuguccugccucca

SEQ ID NO: 1021344 - RNA, 22 nt, Human
cuaugaaaggauuuggaguugu

SEQ ID NO: 1021345 - RNA, 22 nt, Human
uugcaaaggggaauaaagcaau

SEQ ID NO: 1021346 - RNA, 22 nt, Human
ccugcagcuguaggagaaggcg

SEQ ID NO: 1021347 - RNA, 22 nt, Human
agaaaguucacugguauauuuu

SEQ ID NO: 1021348 - RNA, 20 nt, Human
ucacaucuggcagcugauga

SEQ ID NO: 1021349 - RNA, 22 nt, Human
ggugggugagcccugggagcug

SEQ ID NO: 1021350 - RNA, 22 nt, Human
cuggcucaugugaugagggcaa

SEQ ID NO: 1021351 - RNA, 22 nt, Human
uuugcauuacuugacuuuaguu

SEQ ID NO: 1021352 - RNA, 22 nt, Human
agguaacacuacuuaguauacu

SEQ ID NO: 1021353 - RNA, 22 nt, Human
cacaucagguagaccuacagag

SEQ ID NO: 1021354 - RNA, 22 nt, Human
agcagagccagaauuggaccag

SEQ ID NO: 1021355 - RNA, 22 nt, Human
gcaggagccacuucagggaugc

SEQ ID NO: 1021356 - RNA, 22 nt, Human
aaauguguuucuuugugaaugg

SEQ ID NO: 1021357 - RNA, 22 nt, Human
gagcuguccgccccugggccga

SEQ ID NO: 1021358 - RNA, 22 nt, Human
cccagagcugagucugauauau

SEQ ID NO: 1021359 - RNA, 22 nt, Human
aauguugagcuugaaaguaggu

SEQ ID NO: 1021360 - RNA, 22 nt, Human
gaggcugcuuugaugacaggag

SEQ ID NO: 1021361 - RNA, 22 nt, Human
caagauaagaucauuuacacua

SEQ ID NO: 1021362 - RNA, 22 nt, Human
uugauguacagaauuguucaca

SEQ ID NO: 1021363 - RNA, 22 nt, Human
caaggccaagguuuugugaacu

SEQ ID NO: 1021364 - RNA, 22 nt, Human
cucagaguccccacaucugggu

SEQ ID NO: 1021365 - RNA, 22 nt, Human
uccuggagagugggcgagcaca

SEQ ID NO: 1021366 - RNA, 22 nt, Human
uauaaaguuucgaaagauguau

SEQ ID NO: 1021367 - RNA, 22 nt, Human
augauguuaccaguacuuagag

SEQ ID NO: 1021368 - RNA, 22 nt, Human
cacugcuuucacaguuuguucc

SEQ ID NO: 1021369 - RNA, 22 nt, Human
cuucuugcugggggccucagug

SEQ ID NO: 1021370 - RNA, 23 nt, Human
ucuccuccuagauacagucaugg

SEQ ID NO: 1021371 - RNA, 22 nt, Human
caggggcucccugggugccagu

SEQ ID NO: 1021372 - RNA, 22 nt, Human
uguaggauuuucaccagaccuu

SEQ ID NO: 1021373 - RNA, 22 nt, Human
acugaguguaggacuuugaguu

SEQ ID NO: 1021374 - RNA, 22 nt, Human
ugcagggaaagggcacugggcu

SEQ ID NO: 1021375 - RNA, 22 nt, Human
aggcagagcuggguuuugaaau

SEQ ID NO: 1021376 - RNA, 22 nt, Human
uagggcuauaagagaauaagac

SEQ ID NO: 1021377 - RNA, 22 nt, Human
aucuuucuauuucuaaaaacua

SEQ ID NO: 1021378 - RNA, 19 nt, Human
caguggagauuggaggagg

SEQ ID NO: 1021379 - RNA, 21 nt, Human
auggagccuaagaguggaggu

SEQ ID NO: 1021380 - RNA, 22 nt, Human
gggcugcugcccaggaggcacc

SEQ ID NO: 1021381 - RNA, 22 nt, Human
aggggcuggaguucgagguuac

SEQ ID NO: 1021382 - RNA, 23 nt, Human
uagaaugucauucaaugauaugg

SEQ ID NO: 1021383 - RNA, 22 nt, Human
cuuaagauuugagauaccuaau

SEQ ID NO: 1021384 - RNA, 19 nt, Human
agucucaguguacagaggc

SEQ ID NO: 1021385 - RNA, 22 nt, Human
gcucaggaaggcucaaccagga

SEQ ID NO: 1021386 - RNA, 19 nt, Human
guuuuucccagacgaggca

SEQ ID NO: 1021387 - RNA, 22 nt, Human
acagggccagccugggaccugg

SEQ ID NO: 1021388 - RNA, 22 nt, Human
uuuucaguuccaucucugcucu

SEQ ID NO: 1021389 - RNA, 22 nt, Human
agggcucugagcuggaccaccu

SEQ ID NO: 1021390 - RNA, 22 nt, Human
aagaauguggguggauaugaug

SEQ ID NO: 1021391 - RNA, 23 nt, Human
caggcaggaugaggacuacacuc

SEQ ID NO: 1021392 - RNA, 22 nt, Human
uugggguguuggauggagcaag

SEQ ID NO: 1021393 - RNA, 22 nt, Human
agaaaucucaguaucucaggga

SEQ ID NO: 1021394 - RNA, 22 nt, Human
gcaggccagcugugcagauggg

SEQ ID NO: 1021395 - RNA, 22 nt, Human
uacacuuuuuacuacagauucu

SEQ ID NO: 1021396 - RNA, 18 nt, Human
cagcagagacauucaaaa

SEQ ID NO: 1021397 - RNA, 22 nt, Human
accaggcagcaccaaagccggu

SEQ ID NO: 1021398 - RNA, 22 nt, Human
uagggaggcuacuucuuguagg

SEQ ID NO: 1021399 - RNA, 21 nt, Human
gccugccugcgugacccucuu

SEQ ID NO: 1021400 - RNA, 22 nt, Human
agagaggcugggcguagggcuu

SEQ ID NO: 1021401 - RNA, 22 nt, Human
ccugccuggcugucagcagagc

SEQ ID NO: 1021402 - RNA, 22 nt, Human
gaaaagagaacaucugaggauc

SEQ ID NO: 1021403 - RNA, 22 nt, Human
ggccuagggaguggccaugccu

SEQ ID NO: 1021404 - RNA, 22 nt, Human
agggcugcuauguugauucaga

SEQ ID NO: 1021405 - RNA, 22 nt, Human
cgcugccaggucaccaggggua

SEQ ID NO: 1021406 - RNA, 22 nt, Human
gagggggcgugcaaggcuccgc

SEQ ID NO: 1021407 - RNA, 22 nt, Human
ugcagagggacagccacagcuc

SEQ ID NO: 1021408 - RNA, 17 nt, Human
agcagcuggguugaucu

SEQ ID NO: 1021409 - RNA, 20 nt, Human
ucccaggcuccacccuagac

SEQ ID NO: 1021410 - RNA, 22 nt, Human
cccugcagagaccacugaccuu

SEQ ID NO: 1021411 - RNA, 22 nt, Human
auaaaugauucagcaggaaaua

SEQ ID NO: 1021412 - RNA, 22 nt, Human
cagcccagcagggucuggcccu

SEQ ID NO: 1021413 - RNA, 22 nt, Human
ugggauggcauccugggccuug

SEQ ID NO: 1021414 - RNA, 22 nt, Human
agggaagagcuugcaagaaacc

SEQ ID NO: 1021415 - RNA, 22 nt, Human
ucagguguuagaagaaauuuca

SEQ ID NO: 1021416 - RNA, 22 nt, Human
cucuucaauagauuguugaggg

SEQ ID NO: 1021417 - RNA, 22 nt, Human
uuccaggagacuuccagaaaua

SEQ ID NO: 1021418 - RNA, 22 nt, Human
cacagggcagugauuguccaca

SEQ ID NO: 1021419 - RNA, 22 nt, Human
aaaaugaggucaauauccuuuu

SEQ ID NO: 1021420 - RNA, 22 nt, Human
cuguggcuaugguguacauacu

SEQ ID NO: 1021421 - RNA, 22 nt, Human
uggaagggagugacagucagag

SEQ ID NO: 1021422 - RNA, 22 nt, Human
auuaaaagcuucccaagaguua

SEQ ID NO: 1021423 - RNA, 22 nt, Human
agcaggugacccaagcaggcug

SEQ ID NO: 1021424 - RNA, 22 nt, Human
auuuuccucaagccucuggaag

SEQ ID NO: 1021425 - RNA, 22 nt, Human
guggcugguuuccugcaugcaa

SEQ ID NO: 1021426 - RNA, 22 nt, Human
auaagaaacauuauucuuucca

SEQ ID NO: 1021427 - RNA, 22 nt, Human
cagcagaggaaagcaaaucuaa

SEQ ID NO: 1021428 - RNA, 22 nt, Human
caggugggcuugggagaacacu

SEQ ID NO: 1021429 - RNA, 22 nt, Human
ggcugccugcuccuccugcacg

SEQ ID NO: 1021430 - RNA, 22 nt, Human
aauacugucuuucacagauauu

SEQ ID NO: 1021431 - RNA, 22 nt, Human
cagaguccuggacacagagaca

SEQ ID NO: 1021432 - RNA, 22 nt, Human
gcucaggacuggaggagcgggg

SEQ ID NO: 1021433 - RNA, 21 nt, Human
gagacagacuuucguccccug

SEQ ID NO: 1021434 - RNA, 22 nt, Human
acaaacuaccuacagauguuca

SEQ ID NO: 1021435 - RNA, 22 nt, Human
uauguacagggauagaacuuga

SEQ ID NO: 1021436 - RNA, 22 nt, Human
agggcccuaaggaaggcacaca

SEQ ID NO: 1021437 - RNA, 21 nt, Human
agccuguugguuuacugcuca

SEQ ID NO: 1021438 - RNA, 22 nt, Human
agccagcugccuuucacaucug

SEQ ID NO: 1021439 - RNA, 22 nt, Human
cucaugucuucacccauucuaa

SEQ ID NO: 1021440 - RNA, 23 nt, Human
gguggcaggaguggaugcugagc

SEQ ID NO: 1021441 - RNA, 21 nt, Human
cucaggcauuugaggagaguc

SEQ ID NO: 1021442 - RNA, 22 nt, Human
uuuuccuucugauacuccauuu

SEQ ID NO: 1021443 - RNA, 22 nt, Human
uagggcuauucugaguaauaau

SEQ ID NO: 1021444 - RNA, 22 nt, Human
aguguggcugcguagggcucuc

SEQ ID NO: 1021445 - RNA, 22 nt, Human
auccaggguguggagagagcuc

SEQ ID NO: 1021446 - RNA, 21 nt, Human
uuacuuuugcagcaaccuaau

SEQ ID NO: 1021447 - RNA, 22 nt, Human
uccuggaggcaaaugagcacau

SEQ ID NO: 1021448 - RNA, 22 nt, Human
cucagcagugacaagagaguau

SEQ ID NO: 1021449 - RNA, 22 nt, Human
uucuaccuacccucugcauaca

SEQ ID NO: 1021450 - RNA, 23 nt, Human
ucugggcaccuuguugacaugau

SEQ ID NO: 1021451 - RNA, 22 nt, Human
gcugggagcaaguacucaucuu

SEQ ID NO: 1021452 - RNA, 22 nt, Human
agagccuggacuuuucugagcc

SEQ ID NO: 1021453 - RNA, 22 nt, Human
cugaagcaaaggaucgagcuaa

SEQ ID NO: 1021454 - RNA, 22 nt, Human
uuugcauuuguucaaguauuga

SEQ ID NO: 1021455 - RNA, 22 nt, Human
cugacucagcagcugaugaucc

SEQ ID NO: 1021456 - RNA, 22 nt, Human
ugggugggagcgcccugucugg

SEQ ID NO: 1021457 - RNA, 23 nt, Human
uggcagcuguguaagagaaagca

SEQ ID NO: 1021458 - RNA, 22 nt, Human
gcaggagucacugacuuggucc

SEQ ID NO: 1021459 - RNA, 22 nt, Human
gcuggcagggugguugagagag

SEQ ID NO: 1021460 - RNA, 22 nt, Human
uggcccugcugggucagagcug

SEQ ID NO: 1021461 - RNA, 22 nt, Human
gcugggaguuacugucuccuuu

SEQ ID NO: 1021462 - RNA, 22 nt, Human
aaguuugagagccuuuaguaua

SEQ ID NO: 1021463 - RNA, 22 nt, Human
gagugagggcagcaggggcugc

SEQ ID NO: 1021464 - RNA, 21 nt, Human
gagugcagcaagguagagucu

SEQ ID NO: 1021465 - RNA, 22 nt, Human
guugaaugaaucauucuaugua

SEQ ID NO: 1021466 - RNA, 22 nt, Human
cccagaggugcuucagaggugc

SEQ ID NO: 1021467 - RNA, 22 nt, Human
cacugcaguuccccagugcgca

SEQ ID NO: 1021468 - RNA, 19 nt, Human
ggcugucucggcccagcca

SEQ ID NO: 1021469 - RNA, 22 nt, Human
caguugcuggaugugcagcucu

SEQ ID NO: 1021470 - RNA, 22 nt, Human
uuuccuaggagauugaucacau

SEQ ID NO: 1021471 - RNA, 22 nt, Human
aaggccagccugagagcuaaca

SEQ ID NO: 1021472 - RNA, 22 nt, Human
ggugccaggcuguagucagggu

SEQ ID NO: 1021473 - RNA, 22 nt, Human
ugggcugcugagaaugagagag

SEQ ID NO: 1021474 - RNA, 17 nt, Human
ggccuugggcugcucuu

SEQ ID NO: 1021475 - RNA, 21 nt, Human
ccuucucuugcuucagcuuca

SEQ ID NO: 1021476 - RNA, 22 nt, Human
auuuauuaugggauuuggcaca

SEQ ID NO: 1021477 - RNA, 22 nt, Human
ugcucucucaggccuggcccac

SEQ ID NO: 1021478 - RNA, 22 nt, Human
uuacaaagaguguucuuuucca

SEQ ID NO: 1021479 - RNA, 22 nt, Human
uggccuggaagagaggucgagg

SEQ ID NO: 1021480 - RNA, 22 nt, Human
agccccuuccaguucucagauc

SEQ ID NO: 1021481 - RNA, 22 nt, Human
aaacagcuaauggccaggaaua

SEQ ID NO: 1021482 - RNA, 19 nt, Human
acagaaauuaguuauuuuc

SEQ ID NO: 1021483 - RNA, 22 nt, Human
caaauaguaugagcaaugauuc

SEQ ID NO: 1021484 - RNA, 22 nt, Human
uguguacacaaugauugcagag

SEQ ID NO: 1021485 - RNA, 22 nt, Human
gacauucacaguuuccgauggu

SEQ ID NO: 1021486 - RNA, 22 nt, Human
uggcugaaucugcagcaggaag

SEQ ID NO: 1021487 - RNA, 23 nt, Human
aggagccaggaaccagcuucccc

SEQ ID NO: 1021488 - RNA, 20 nt, Human
ugugaaagcaguagaaugac

SEQ ID NO: 1021489 - RNA, 22 nt, Human
ucagggcucaccagccucugcc

SEQ ID NO: 1021490 - RNA, 23 nt, Human
gccuggccaccccagggcugcuu

SEQ ID NO: 1021491 - RNA, 22 nt, Human
ccugggagugucagacuugcuu

SEQ ID NO: 1021492 - RNA, 22 nt, Human
aagacaauuugauacuaguugc

SEQ ID NO: 1021493 - RNA, 22 nt, Human
cugugaggcccugggugcugga

SEQ ID NO: 1021494 - RNA, 22 nt, Human
uagagcuggaaaacugcaggua

SEQ ID NO: 1021495 - RNA, 22 nt, Human
aagacauuacuggaaucugacu

SEQ ID NO: 1021496 - RNA, 22 nt, Human
ucagauggguuuugaaggaugu

SEQ ID NO: 1021497 - RNA, 21 nt, Human
uggccucccacacuuccaugg

SEQ ID NO: 1021498 - RNA, 22 nt, Human
ugguggcuguugcagaacugag

SEQ ID NO: 1021499 - RNA, 20 nt, Human
guggccuguccuguuguggg

SEQ ID NO: 1021500 - RNA, 22 nt, Human
gccccagguugccugucccagg

SEQ ID NO: 1021501 - RNA, 22 nt, Human
uuauuagcugggcuucagggug

SEQ ID NO: 1021502 - RNA, 22 nt, Human
ggcagcuccaaaaggaaacacu

SEQ ID NO: 1021503 - RNA, 22 nt, Human
uaaugucagcauaguuuauuuu

SEQ ID NO: 1021504 - RNA, 22 nt, Human
ucagggcacaggccuguggguu

SEQ ID NO: 1021505 - RNA, 22 nt, Human
aaucuucacagaaaaaugucug

SEQ ID NO: 1021506 - RNA, 19 nt, Human
ugaagcagcaaacucucag

SEQ ID NO: 1021507 - RNA, 22 nt, Human
gaggggcuugaggcccugaugg

SEQ ID NO: 1021508 - RNA, 22 nt, Human
guugggaagcagauggaugagc

SEQ ID NO: 1021509 - RNA, 21 nt, Human
acagauuuuauaucucugcug

SEQ ID NO: 1021510 - RNA, 22 nt, Human
agcacaggcuuuggugugaggg

SEQ ID NO: 1021511 - RNA, 22 nt, Human
gcacuugggcagagacgcacag

SEQ ID NO: 1021512 - RNA, 22 nt, Human
aguggcagaagucacuggguag

SEQ ID NO: 1021513 - RNA, 22 nt, Human
gcucccaggaugaggagccagg

SEQ ID NO: 1021514 - RNA, 22 nt, Human
aacaaaugaccugauuucuucc

SEQ ID NO: 1021515 - RNA, 22 nt, Human
gggacccugggaggcuggcgca

SEQ ID NO: 1021516 - RNA, 22 nt, Human
agggagcaugggugaagcaggc

SEQ ID NO: 1021517 - RNA, 22 nt, Human
acagucuugagcaucagccaga

SEQ ID NO: 1021518 - RNA, 22 nt, Human
cuggcaggaagaggaaagguca

SEQ ID NO: 1021519 - RNA, 22 nt, Human
ucaugaacaucucaaauaacca

SEQ ID NO: 1021520 - RNA, 22 nt, Human
aggagacauaacuaugaugaga

SEQ ID NO: 1021521 - RNA, 22 nt, Human
uccuugaagcuuguaucuaaua

SEQ ID NO: 1021522 - RNA, 22 nt, Human
uuuccucuccaccaggaggucu

SEQ ID NO: 1021523 - RNA, 22 nt, Human
uuccaugagcucugaguucaca

SEQ ID NO: 1021524 - RNA, 22 nt, Human
aauggcugggaguguauuuugg

SEQ ID NO: 1021525 - RNA, 22 nt, Human
guuuuucuuugugugaagacaa

SEQ ID NO: 1021526 - RNA, 22 nt, Human
uggagacugugcuaagggaguu

SEQ ID NO: 1021527 - RNA, 21 nt, Human
uucugggaaaugagcuggggc

SEQ ID NO: 1021528 - RNA, 22 nt, Human
ucucugggugauggcagggcac

SEQ ID NO: 1021529 - RNA, 22 nt, Human
ccucgcggcacucgggccggau

SEQ ID NO: 1021530 - RNA, 22 nt, Human
acuugcugguggcauuuacagu

SEQ ID NO: 1021531 - RNA, 22 nt, Human
gagcugccuguugcauagcaac

SEQ ID NO: 1021532 - RNA, 22 nt, Human
aggugagguuugggagguguca

SEQ ID NO: 1021533 - RNA, 22 nt, Human
uagacagauuuaaaggaaugga

SEQ ID NO: 1021534 - RNA, 22 nt, Human
agaaaucaauaucuauauguug

SEQ ID NO: 1021535 - RNA, 22 nt, Human
ggcagcaguaggagcuaaucuu

SEQ ID NO: 1021536 - RNA, 23 nt, Human
cagaccuggcagucauccucaac

SEQ ID NO: 1021537 - RNA, 22 nt, Human
gagcccucucuguaggcaagua

SEQ ID NO: 1021538 - RNA, 22 nt, Human
acacagaaccucauagccucuc

SEQ ID NO: 1021539 - RNA, 22 nt, Human
agauacauuguucuaagcauug

SEQ ID NO: 1021540 - RNA, 22 nt, Human
augauuucuauauaaacuuaaa

SEQ ID NO: 1021541 - RNA, 22 nt, Human
uaaggccaaguucauauacaac

SEQ ID NO: 1021542 - RNA, 22 nt, Human
aagccagcauuuucccauuccu

SEQ ID NO: 1021543 - RNA, 22 nt, Human
aggagcuggguuccuuuggugg

SEQ ID NO: 1021544 - RNA, 22 nt, Human
ucagaggugguaaaggacagca

SEQ ID NO: 1021545 - RNA, 22 nt, Human
guugcacaguuccucaagcagg

SEQ ID NO: 1021546 - RNA, 22 nt, Human
cugccugggccggccacccucu

SEQ ID NO: 1021547 - RNA, 22 nt, Human
gaggccuggaccagccacagag

SEQ ID NO: 1021548 - RNA, 22 nt, Human
accaucagucauugucaguggg

SEQ ID NO: 1021549 - RNA, 22 nt, Human
agggucuguggaugcaucuggg

SEQ ID NO: 1021550 - RNA, 22 nt, Human
ugacaguuaagguauacauuca

SEQ ID NO: 1021551 - RNA, 19 nt, Human
cugcagggaugugcagagu

SEQ ID NO: 1021552 - RNA, 22 nt, Human
ggugcccaccugucuuccugga

SEQ ID NO: 1021553 - RNA, 22 nt, Human
uggggacacagagguucguugg

SEQ ID NO: 1021554 - RNA, 20 nt, Human
uuguuucugcuauuuucuaa

SEQ ID NO: 1021555 - RNA, 22 nt, Human
cuaauacucauuucuguaacuc

SEQ ID NO: 1021556 - RNA, 22 nt, Human
guccucugggagccuugagccu

SEQ ID NO: 1021557 - RNA, 22 nt, Human
uguuuuaagagcgcacuuuaua

SEQ ID NO: 1021558 - RNA, 22 nt, Human
agagcuuauaucuuggccaucc

SEQ ID NO: 1021559 - RNA, 22 nt, Human
ucacagugagccaugucagaga

SEQ ID NO: 1021560 - RNA, 22 nt, Human
uaaacauggauucugaucacag

SEQ ID NO: 1021561 - RNA, 22 nt, Human
aacuagaaccacuuguauuucc

SEQ ID NO: 1021562 - RNA, 22 nt, Human
ucgagcucuggagccaaggaug

SEQ ID NO: 1021563 - RNA, 22 nt, Human
ucuuuccucugagcuccuguag

SEQ ID NO: 1021564 - RNA, 22 nt, Human
ucccagcagagccagcaagccg

SEQ ID NO: 1021565 - RNA, 22 nt, Human
gcugccucuguagcuuuggacc

SEQ ID NO: 1021566 - RNA, 23 nt, Human
cauccaggagcugagucugacug

SEQ ID NO: 1021567 - RNA, 22 nt, Human
ugcaauaaguuguguuaucacu

SEQ ID NO: 1021568 - RNA, 21 nt, Human
acccuggguucuccauacccu

SEQ ID NO: 1021569 - RNA, 22 nt, Human
cuggagcugcuguccuugggug

SEQ ID NO: 1021570 - RNA, 22 nt, Human
gcagccuguuguaccagccugu

SEQ ID NO: 1021571 - RNA, 22 nt, Human
gagcugggcacacgccacuuga

SEQ ID NO: 1021572 - RNA, 22 nt, Human
cugagggcaugaacauuccaua

SEQ ID NO: 1021573 - RNA, 22 nt, Human
cuuucaaugugccugccuuggg

SEQ ID NO: 1021574 - RNA, 22 nt, Human
cuuguaauuauaauguacuguu

SEQ ID NO: 1021575 - RNA, 22 nt, Human
uccaggcauuggagagauaaug

SEQ ID NO: 1021576 - RNA, 22 nt, Human
uaaagaacacagggaauagcac

SEQ ID NO: 1021577 - RNA, 22 nt, Human
cucccaagggguaagggagcug

SEQ ID NO: 1021578 - RNA, 22 nt, Human
uguacaguguagucaugagguu

SEQ ID NO: 1021579 - RNA, 22 nt, Human
uacaaagcuguauagccugguc

SEQ ID NO: 1021580 - RNA, 20 nt, Human
cacaggccuugugagcagac

SEQ ID NO: 1021581 - RNA, 20 nt, Human
aacagggggcugcagagggc

SEQ ID NO: 1021582 - RNA, 22 nt, Human
ucagcagggcugugguguggcu

SEQ ID NO: 1021583 - RNA, 22 nt, Human
gcuggcagguccaagauagagc

SEQ ID NO: 1021584 - RNA, 22 nt, Human
accuuaaaacugacacauggag

SEQ ID NO: 1021585 - RNA, 22 nt, Human
uugcuagcugguguaugcauug

SEQ ID NO: 1021586 - RNA, 22 nt, Human
ucuggcucggauuugucuagca

SEQ ID NO: 1021587 - RNA, 22 nt, Human
acauuugucuucuuucagauua

SEQ ID NO: 1021588 - RNA, 21 nt, Human
agcaggaggcagucacagcuc

SEQ ID NO: 1021589 - RNA, 22 nt, Human
cugggaggcccacguugggaag

SEQ ID NO: 1021590 - RNA, 22 nt, Human
cuggcagcugugugaagaacug

SEQ ID NO: 1021591 - RNA, 22 nt, Human
ugucccaggccucauguugcca

SEQ ID NO: 1021592 - RNA, 22 nt, Human
gcauuucugugcauacacauga

SEQ ID NO: 1021593 - RNA, 22 nt, Human
caguaugucuacuggacaaagu

SEQ ID NO: 1021594 - RNA, 22 nt, Human
uuugaaguucccccauaucaga

SEQ ID NO: 1021595 - RNA, 22 nt, Human
agcucccagaagccagagucgg

SEQ ID NO: 1021596 - RNA, 23 nt, Human
agcacacuuguacaaugcccuag

SEQ ID NO: 1021597 - RNA, 22 nt, Human
aaggagaguacaggaguuggua

SEQ ID NO: 1021598 - RNA, 22 nt, Human
aaaauuauggaguaucccaaag

SEQ ID NO: 1021599 - RNA, 22 nt, Human
acuuucuaggucucaguccuuu

SEQ ID NO: 1021600 - RNA, 22 nt, Human
gccugcagugagugcagaaggu

SEQ ID NO: 1021601 - RNA, 22 nt, Human
agccaucauuucugucacuggc

SEQ ID NO: 1021602 - RNA, 22 nt, Human
ucccugggagaugaugaugagg

SEQ ID NO: 1021603 - RNA, 22 nt, Human
caggagcaaggagcagugggau

SEQ ID NO: 1021604 - RNA, 22 nt, Human
gugagcagaacagguggcuucu

SEQ ID NO: 1021605 - RNA, 20 nt, Human
ucugugugccaucaccuaac

SEQ ID NO: 1021606 - RNA, 22 nt, Human
aagccucuggggccucaucugu

SEQ ID NO: 1021607 - RNA, 22 nt, Human
accaggcagcacuuuccuugca

SEQ ID NO: 1021608 - RNA, 22 nt, Human
gagcugccagacaugggaauga

SEQ ID NO: 1021609 - RNA, 22 nt, Human
acauuuguaugcguuuuuacug

SEQ ID NO: 1021610 - RNA, 22 nt, Human
agcugggaugauaaccucaguc

SEQ ID NO: 1021611 - RNA, 22 nt, Human
uucuucaaauagcagggaguca

SEQ ID NO: 1021612 - RNA, 21 nt, Human
uagaaaucagcuggugccucu

SEQ ID NO: 1021613 - RNA, 22 nt, Human
acauuucuucccuuuagcagaa

SEQ ID NO: 1021614 - RNA, 22 nt, Human
uugcauuugacaaauuauuuaa

SEQ ID NO: 1021615 - RNA, 22 nt, Human
agauuucccacuccauguauug

SEQ ID NO: 1021616 - RNA, 22 nt, Human
uggcccugaggacccagugugg

SEQ ID NO: 1021617 - RNA, 23 nt, Human
ugcugggcagagcuggugcugag

SEQ ID NO: 1021618 - RNA, 22 nt, Human
gcugccuugaacuuggccuggg

SEQ ID NO: 1021619 - RNA, 22 nt, Human
agaaaucaugacuaagagcagu

SEQ ID NO: 1021620 - RNA, 22 nt, Human
cccuugggguggagguugcagu

SEQ ID NO: 1021621 - RNA, 22 nt, Human
cauugcacagcccuguggugau

SEQ ID NO: 1021622 - RNA, 21 nt, Human
uuucugucucugccacuaguu

SEQ ID NO: 1021623 - RNA, 22 nt, Human
uccaagaagucaucuaaacugu

SEQ ID NO: 1021624 - RNA, 22 nt, Human
cccagcugcaccucuauggccu

SEQ ID NO: 1021625 - RNA, 18 nt, Human
gcuggcugcacuucugcu

SEQ ID NO: 1021626 - RNA, 22 nt, Human
cagggccagcgucucgggcuau

SEQ ID NO: 1021627 - RNA, 22 nt, Human
cagcuccagcccaggcagcucc

SEQ ID NO: 1021628 - RNA, 20 nt, Human
ucauuucuugggguuccaag

SEQ ID NO: 1021629 - RNA, 22 nt, Human
auggaagguccuacagagcgca

SEQ ID NO: 1021630 - RNA, 22 nt, Human
augguacaaaauguauaaaguc

SEQ ID NO: 1021631 - RNA, 22 nt, Human
ccuggagcucacugggagccgg

SEQ ID NO: 1021632 - RNA, 22 nt, Human
gcagggacaaggcagguguucu

SEQ ID NO: 1021633 - RNA, 22 nt, Human
agaaaucagaacccugaaguuc

SEQ ID NO: 1021634 - RNA, 22 nt, Human
cugaaggauucaaaauggcagg

SEQ ID NO: 1021635 - RNA, 22 nt, Human
auuacaaaagaagggagaaggu

SEQ ID NO: 1021636 - RNA, 22 nt, Human
agguuuauguuuggugcaggag

SEQ ID NO: 1021637 - RNA, 22 nt, Human
ugaaaaggaguccuuguuuuca

SEQ ID NO: 1021638 - RNA, 22 nt, Human
ucucugucugagccuggcagac

SEQ ID NO: 1021639 - RNA, 20 nt, Human
ccagcuuucccugcagcauc

SEQ ID NO: 1021640 - RNA, 22 nt, Human
agcuggcccucgagagccaauu

SEQ ID NO: 1021641 - RNA, 22 nt, Human
cuggagcccugaaugggcagga

SEQ ID NO: 1021642 - RNA, 21 nt, Human
gaugaagcaaucuuucuguug

SEQ ID NO: 1021643 - RNA, 22 nt, Human
cuguucacacacuuguacucuc

SEQ ID NO: 1021644 - RNA, 22 nt, Human
cagaccuggaaaacaggcuugc

SEQ ID NO: 1021645 - RNA, 22 nt, Human
cauucauuuacuuucaacagcu

SEQ ID NO: 1021646 - RNA, 22 nt, Human
caggccugugacaccgugucug

SEQ ID NO: 1021647 - RNA, 22 nt, Human
aaauugugcucacacugauauu

SEQ ID NO: 1021648 - RNA, 22 nt, Human
aucuggcuuuuaccccacggcc

SEQ ID NO: 1021649 - RNA, 22 nt, Human
cccucugccugcgcccuggugu

SEQ ID NO: 1021650 - RNA, 22 nt, Human
gagagcugggaaagccguggag

SEQ ID NO: 1021651 - RNA, 21 nt, Human
ugauuuccaucuuaaaauaaa

SEQ ID NO: 1021652 - RNA, 22 nt, Human
auaauaacaccugaauaggaaa

SEQ ID NO: 1021653 - RNA, 22 nt, Human
aaagauuauggcauugaaauac

SEQ ID NO: 1021654 - RNA, 22 nt, Human
ucaaaguagggguaagccaggc

SEQ ID NO: 1021655 - RNA, 22 nt, Human
uggcaccugaacuuagaggugu

SEQ ID NO: 1021656 - RNA, 22 nt, Human
uugaaguuguaguucagugaag

SEQ ID NO: 1021657 - RNA, 22 nt, Human
cuagggacagaaagaggguaga

SEQ ID NO: 1021658 - RNA, 22 nt, Human
uuaugcaacaggugagcagaca

SEQ ID NO: 1021659 - RNA, 22 nt, Human
gaucuguuauaaucucuuuuau

SEQ ID NO: 1021660 - RNA, 22 nt, Human
aucugcuuccugggcuccauga

SEQ ID NO: 1021661 - RNA, 22 nt, Human
uaugauuuguagacauuugauu

SEQ ID NO: 1021662 - RNA, 22 nt, Human
ugcugaugaguccuucuaucgc

SEQ ID NO: 1021663 - RNA, 22 nt, Human
aaauuaguacauugcaaagucc

SEQ ID NO: 1021664 - RNA, 22 nt, Human
ucuuccagcaaugugaaaucac

SEQ ID NO: 1021665 - RNA, 22 nt, Human
uguagaaagaauauguuucaua

SEQ ID NO: 1021666 - RNA, 22 nt, Human
caggguuucaccauguuagcag

SEQ ID NO: 1021667 - RNA, 22 nt, Human
uaggaaauggcucaguuacugc

SEQ ID NO: 1021668 - RNA, 21 nt, Human
aagagcugucaggaaggcugc

SEQ ID NO: 1021669 - RNA, 22 nt, Human
agcugagcugcagaugacugua

SEQ ID NO: 1021670 - RNA, 22 nt, Human
ucacaggcuccagggccuggau

SEQ ID NO: 1021671 - RNA, 22 nt, Human
gcagugguggagcuuacauauc

SEQ ID NO: 1021672 - RNA, 22 nt, Human
uugauaaaaugauaucuucuuu

SEQ ID NO: 1021673 - RNA, 22 nt, Human
cagaauuuuucgaauguacugu

SEQ ID NO: 1021674 - RNA, 22 nt, Human
aaauugcauuuuaaagguagau

SEQ ID NO: 1021675 - RNA, 22 nt, Human
ucagagugaggcgucaacauga

SEQ ID NO: 1021676 - RNA, 22 nt, Human
ugucccauggacacaacuucuu

SEQ ID NO: 1021677 - RNA, 22 nt, Human
agaaaauauucauugagaggcu

SEQ ID NO: 1021678 - RNA, 22 nt, Human
ucugaggcccugcaggcagugu

SEQ ID NO: 1021679 - RNA, 20 nt, Human
aagaaacuugaaaguacaag

SEQ ID NO: 1021680 - RNA, 22 nt, Human
gagagcugggcuuugggugaag

SEQ ID NO: 1021681 - RNA, 22 nt, Human
ggcugccuccucgagacaggau

SEQ ID NO: 1021682 - RNA, 22 nt, Human
ucaggacagccagggugcagac

SEQ ID NO: 1021683 - RNA, 22 nt, Human
cuucuucauguauugauagucu

SEQ ID NO: 1021684 - RNA, 22 nt, Human
caagagcuggguggcaagcuag

SEQ ID NO: 1021685 - RNA, 23 nt, Human
aacaauagguuuuggcagaauag

SEQ ID NO: 1021686 - RNA, 22 nt, Human
ggcuccuggcaucuggugggua

SEQ ID NO: 1021687 - RNA, 17 nt, Human
ccugggaggaguuauga

SEQ ID NO: 1021688 - RNA, 21 nt, Human
aaagugguaaggauuauuuug

SEQ ID NO: 1021689 - RNA, 22 nt, Human
cagggcaguaacgggaacaucu

SEQ ID NO: 1021690 - RNA, 22 nt, Human
agcagcucuguuuaccuggagg

SEQ ID NO: 1021691 - RNA, 20 nt, Human
ugaaaaggucaggagacaug

SEQ ID NO: 1021692 - RNA, 22 nt, Human
augugguugaagaauuacaucu

SEQ ID NO: 1021693 - RNA, 22 nt, Human
ggacuccucuagaaguugaggc

SEQ ID NO: 1021694 - RNA, 21 nt, Human
ucucugggcccuccugugggg

SEQ ID NO: 1021695 - RNA, 22 nt, Human
acuacuuugggccauuuguuua

SEQ ID NO: 1021696 - RNA, 22 nt, Human
aaauuauucucauguguuucuu

SEQ ID NO: 1021697 - RNA, 22 nt, Human
aguaaaaauugaggugcaaaau

SEQ ID NO: 1021698 - RNA, 22 nt, Human
auaugcacacucugcccacaga

SEQ ID NO: 1021699 - RNA, 22 nt, Human
ucucaagaucucaagauggccc

SEQ ID NO: 1021700 - RNA, 19 nt, Human
acuggcagcuguagucugu

SEQ ID NO: 1021701 - RNA, 22 nt, Human
uuggaaaaacacgauagugguu

SEQ ID NO: 1021702 - RNA, 22 nt, Human
ggagaagggacagacucagcuu

SEQ ID NO: 1021703 - RNA, 22 nt, Human
uuguuuuggagaugagcuaaaa

SEQ ID NO: 1021704 - RNA, 22 nt, Human
ucagugcagaauagugaugcau

SEQ ID NO: 1021705 - RNA, 22 nt, Human
ucaagagaaggggaaauagacu

SEQ ID NO: 1021706 - RNA, 22 nt, Human
agggacacugaugagaaauucu

SEQ ID NO: 1021707 - RNA, 20 nt, Human
accauaauguuaauuacaaa

SEQ ID NO: 1021708 - RNA, 22 nt, Human
gagcuggugugugcccgagcac

SEQ ID NO: 1021709 - RNA, 22 nt, Human
caggccugauacacugaacucu

SEQ ID NO: 1021710 - RNA, 22 nt, Human
cccagcucuuuuagcggcaucu

SEQ ID NO: 1021711 - RNA, 22 nt, Human
guggcagagguuccucagugug

SEQ ID NO: 1021712 - RNA, 22 nt, Human
ugugccugucacccucagagag

SEQ ID NO: 1021713 - RNA, 22 nt, Human
agggagaacaguugcagcagac

SEQ ID NO: 1021714 - RNA, 22 nt, Human
auucaguuaaaaacuguacuuc

SEQ ID NO: 1021715 - RNA, 22 nt, Human
aagggcagcugacagaugcuua

SEQ ID NO: 1021716 - RNA, 22 nt, Human
aacugcauuugcauaaguccau

SEQ ID NO: 1021717 - RNA, 22 nt, Human
ggcagcaugagccuggugaauu

SEQ ID NO: 1021718 - RNA, 22 nt, Human
gccucugcugcaagccugguug

SEQ ID NO: 1021719 - RNA, 22 nt, Human
ugauuucccuguagccucugaa

SEQ ID NO: 1021720 - RNA, 22 nt, Human
uucacauuaucaggauuguuuc

SEQ ID NO: 1021721 - RNA, 22 nt, Human
agacaaauggaguaugagcaac

SEQ ID NO: 1021722 - RNA, 21 nt, Human
ccuccaggugauuccgugcuc

SEQ ID NO: 1021723 - RNA, 22 nt, Human
agcagcugguaggaguggccac

SEQ ID NO: 1021724 - RNA, 22 nt, Human
ugggcccaagagagucuccaac

SEQ ID NO: 1021725 - RNA, 22 nt, Human
aggguauguuuuuaucuacugu

SEQ ID NO: 1021726 - RNA, 22 nt, Human
aguaauaauuuauauuagggag

SEQ ID NO: 1021727 - RNA, 22 nt, Human
caguagcaggcacucagcacgu

SEQ ID NO: 1021728 - RNA, 22 nt, Human
ugcuuuauggagcccaucucau

SEQ ID NO: 1021729 - RNA, 22 nt, Human
uggccuggcugcccugucugga

SEQ ID NO: 1021730 - RNA, 22 nt, Human
aaacagcuggucucaaauguuc

SEQ ID NO: 1021731 - RNA, 22 nt, Human
ccagggcugcugugggacucca

SEQ ID NO: 1021732 - RNA, 23 nt, Human
aggugcagcccuggaccugcccc

SEQ ID NO: 1021733 - RNA, 22 nt, Human
auuuagcaaaaaaugaugaagc

SEQ ID NO: 1021734 - RNA, 22 nt, Human
uauucacaggcacgaaauauug

SEQ ID NO: 1021735 - RNA, 22 nt, Human
ggaggaugagcuacgaggagcu

SEQ ID NO: 1021736 - RNA, 22 nt, Human
uggccaggggaguuccccucca

SEQ ID NO: 1021737 - RNA, 22 nt, Human
agucccagcuacucaagaggcu

SEQ ID NO: 1021738 - RNA, 19 nt, Human
gcugcucugggucucaucu

SEQ ID NO: 1021739 - RNA, 22 nt, Human
uacauguuuacuccaagucagg

SEQ ID NO: 1021740 - RNA, 22 nt, Human
gaugauggacaaagcauuggug

SEQ ID NO: 1021741 - RNA, 22 nt, Human
aggaaaaucgagucuggaggca

SEQ ID NO: 1021742 - RNA, 23 nt, Human
uuuggacuugugacucuucuccu

SEQ ID NO: 1021743 - RNA, 22 nt, Human
gccagggagucugggccacaga

SEQ ID NO: 1021744 - RNA, 22 nt, Human
ggcugcugaguuggccaggaga

SEQ ID NO: 1021745 - RNA, 22 nt, Human
uagagcauuuagaggggcagga

SEQ ID NO: 1021746 - RNA, 22 nt, Human
ugagcuuccucccugcauccau

SEQ ID NO: 1021747 - RNA, 22 nt, Human
uuugcagcaaggagagagcauu

SEQ ID NO: 1021748 - RNA, 22 nt, Human
uagcugccaaaagggugggcua

SEQ ID NO: 1021749 - RNA, 22 nt, Human
gcaguggcuaagcucgcaugca

SEQ ID NO: 1021750 - RNA, 22 nt, Human
aauucuauguucuugaguaaga

SEQ ID NO: 1021751 - RNA, 22 nt, Human
uugcauuuaaguagauguuaca

SEQ ID NO: 1021752 - RNA, 22 nt, Human
gggcugugagaguggggcugcu

SEQ ID NO: 1021753 - RNA, 18 nt, Human
agacccucuaagggcagu

SEQ ID NO: 1021754 - RNA, 23 nt, Human
gcagaggagcaagcuggacacca

SEQ ID NO: 1021755 - RNA, 22 nt, Human
uugccaggagcucaucugaggg

SEQ ID NO: 1021756 - RNA, 22 nt, Human
ucuggcucugacacuacuguua

SEQ ID NO: 1021757 - RNA, 22 nt, Human
gucuucuuguuuugaaggaaau

SEQ ID NO: 1021758 - RNA, 22 nt, Human
caggguggcccuguggucucau

SEQ ID NO: 1021759 - RNA, 22 nt, Human
agaaaugaagagagucaagguu

SEQ ID NO: 1021760 - RNA, 22 nt, Human
ggcaggagaauggcgugaacuc

SEQ ID NO: 1021761 - RNA, 22 nt, Human
gcagcuguguaaugagcccaca

SEQ ID NO: 1021762 - RNA, 22 nt, Human
uucaagauccagcacaacagug

SEQ ID NO: 1021763 - RNA, 20 nt, Human
uccugggguaagccaugguc

SEQ ID NO: 1021764 - RNA, 20 nt, Human
ugcagaagaacguucugguu

SEQ ID NO: 1021765 - RNA, 22 nt, Human
aggggagaguuaaugugaaugu

SEQ ID NO: 1021766 - RNA, 22 nt, Human
uggcuggcuagugggcaggauu

SEQ ID NO: 1021767 - RNA, 22 nt, Human
uaugacauugcuuuuuagaacu

SEQ ID NO: 1021768 - RNA, 22 nt, Human
aagucagagcaacugagacauu

SEQ ID NO: 1021769 - RNA, 22 nt, Human
gaggccuggcugucagucccca

SEQ ID NO: 1021770 - RNA, 22 nt, Human
uuucuacauucaaaaacuacca

SEQ ID NO: 1021771 - RNA, 22 nt, Human
acuuaaaaagaaucuuuucacg

SEQ ID NO: 1021772 - RNA, 22 nt, Human
uggggcuggcuauugucucccu

SEQ ID NO: 1021773 - RNA, 22 nt, Human
uagcucuucaaucacugucucc

SEQ ID NO: 1021774 - RNA, 22 nt, Human
ccagggugugagaaggaaguag

SEQ ID NO: 1021775 - RNA, 22 nt, Human
cuccagggaaaggggcguccgc

SEQ ID NO: 1021776 - RNA, 22 nt, Human
cugcugcucgaccagucccagg

SEQ ID NO: 1021777 - RNA, 22 nt, Human
gaugagggccugguggcugugc

SEQ ID NO: 1021778 - RNA, 22 nt, Human
ggaagagagggcugggccucaa

SEQ ID NO: 1021779 - RNA, 22 nt, Human
uccagggagauacuggcugcca

SEQ ID NO: 1021780 - RNA, 22 nt, Human
ugccagcaguagcaguaggcca

SEQ ID NO: 1021781 - RNA, 22 nt, Human
aggagugcaaauaguccagaga

SEQ ID NO: 1021782 - RNA, 22 nt, Human
aagcugcagacccccugucuca

SEQ ID NO: 1021783 - RNA, 22 nt, Human
cuuaaagaaauugaggagagga

SEQ ID NO: 1021784 - RNA, 23 nt, Human
uccugcagauaagcugguugaca

SEQ ID NO: 1021785 - RNA, 22 nt, Human
augcuuuuccaggagaaauaua

SEQ ID NO: 1021786 - RNA, 22 nt, Human
agcugucuccagauacaggauu

SEQ ID NO: 1021787 - RNA, 22 nt, Human
acacacaacucauuguguaaua

SEQ ID NO: 1021788 - RNA, 22 nt, Human
caggugccgggaaugcagcaau

SEQ ID NO: 1021789 - RNA, 22 nt, Human
aagcccaguuucacacugagac

SEQ ID NO: 1021790 - RNA, 22 nt, Human
cccuggagcuagucugagcaga

SEQ ID NO: 1021791 - RNA, 22 nt, Human
gagcugugagggacacauugcu

SEQ ID NO: 1021792 - RNA, 22 nt, Human
aagauuauuuaagacaggaacc

SEQ ID NO: 1021793 - RNA, 22 nt, Human
uggcagcauuuuuuccagaaca

SEQ ID NO: 1021794 - RNA, 22 nt, Human
uugggagcuggaagcaaggccu

SEQ ID NO: 1021795 - RNA, 22 nt, Human
ccaaaguccauaguuuacauaa

SEQ ID NO: 1021796 - RNA, 22 nt, Human
ugugcuucuugcagcuccugua

SEQ ID NO: 1021797 - RNA, 22 nt, Human
ucccaaggccaggcaucuagaa

SEQ ID NO: 1021798 - RNA, 22 nt, Human
gcagagcugggucuguauccaa

SEQ ID NO: 1021799 - RNA, 22 nt, Human
agggcagcauugccuuucucca

SEQ ID NO: 1021800 - RNA, 22 nt, Human
gugucauuaaccaccaugcaaa

SEQ ID NO: 1021801 - RNA, 22 nt, Human
ugcacauuaguguuugagaugc

SEQ ID NO: 1021802 - RNA, 17 nt, Human
gcagccagugcagcagg

SEQ ID NO: 1021803 - RNA, 22 nt, Human
gaggcccugaagacagcugggg

SEQ ID NO: 1021804 - RNA, 22 nt, Human
uccuucaaagcuccuagugagc

SEQ ID NO: 1021805 - RNA, 22 nt, Human
aagucauuaucucuucuaaucu

SEQ ID NO: 1021806 - RNA, 22 nt, Human
cucugucacuucuccagcugag

SEQ ID NO: 1021807 - RNA, 22 nt, Human
agggcaguucaacuucauagug

SEQ ID NO: 1021808 - RNA, 17 nt, Human
gcauccaguaacaugcc

SEQ ID NO: 1021809 - RNA, 22 nt, Human
aacuuaaacccacucauguaga

SEQ ID NO: 1021810 - RNA, 22 nt, Human
gguugccggggcaggacuggaa

SEQ ID NO: 1021811 - RNA, 22 nt, Human
ggcacagggagccgcaguugca

SEQ ID NO: 1021812 - RNA, 22 nt, Human
aggcugaggcagguggaucacu

SEQ ID NO: 1021813 - RNA, 22 nt, Human
agcuggcagcucucagggguac

SEQ ID NO: 1021814 - RNA, 19 nt, Human
gagcccucuccauggccac

SEQ ID NO: 1021815 - RNA, 22 nt, Human
ggggauggaauguaguagugau

SEQ ID NO: 1021816 - RNA, 22 nt, Human
cccaucacagacacuggguuau

SEQ ID NO: 1021817 - RNA, 22 nt, Human
ugacucuguaccugucugccuu

SEQ ID NO: 1021818 - RNA, 22 nt, Human
ccagggcauguccaagacuuag

SEQ ID NO: 1021819 - RNA, 22 nt, Human
gagcugagccuggguggaccgc

SEQ ID NO: 1021820 - RNA, 22 nt, Human
augaaauaucuugaagaaauuc

SEQ ID NO: 1021821 - RNA, 20 nt, Human
gagggcucguggauggauaa

SEQ ID NO: 1021822 - RNA, 22 nt, Human
acagagauggcacagagaaggu

SEQ ID NO: 1021823 - RNA, 17 nt, Human
ggcugcugugcuggugc

SEQ ID NO: 1021824 - RNA, 22 nt, Human
cccccuggcaggcuggccucuc

SEQ ID NO: 1021825 - RNA, 18 nt, Human
agggucagugucacuggc

SEQ ID NO: 1021826 - RNA, 22 nt, Human
ugagugaggaagcgguggagga

SEQ ID NO: 1021827 - RNA, 22 nt, Human
ccaggccucuggcugcuuaguc

SEQ ID NO: 1021828 - RNA, 22 nt, Human
ccugugcccucagccuggcucu

SEQ ID NO: 1021829 - RNA, 22 nt, Human
ucugggcuuuacacugugcuua

SEQ ID NO: 1021830 - RNA, 22 nt, Human
auguauguuaguguauuaucua

SEQ ID NO: 1021831 - RNA, 22 nt, Human
ugcaggugugguuccucagcca

SEQ ID NO: 1021832 - RNA, 22 nt, Human
uggcagaaguucacuaguagcu

SEQ ID NO: 1021833 - RNA, 22 nt, Human
ugggccacggggguggagagcu

SEQ ID NO: 1021834 - RNA, 22 nt, Human
uccagggaaggugugaggcugg

SEQ ID NO: 1021835 - RNA, 22 nt, Human
gucuuguuugggauguggaugg

SEQ ID NO: 1021836 - RNA, 20 nt, Human
agguccugggacuggcagag

SEQ ID NO: 1021837 - RNA, 22 nt, Human
uugcacuccagcccgagcaaca

SEQ ID NO: 1021838 - RNA, 22 nt, Human
gcucugggugaacuuggagcaa

SEQ ID NO: 1021839 - RNA, 22 nt, Human
agcuggcuccagaaggagucgu

SEQ ID NO: 1021840 - RNA, 22 nt, Human
aaucaguuaggguguuaaugag

SEQ ID NO: 1021841 - RNA, 22 nt, Human
gaggucagucagaccaggguuu

SEQ ID NO: 1021842 - RNA, 22 nt, Human
gcuggcugaggucuagcucuuu

SEQ ID NO: 1021843 - RNA, 22 nt, Human
auaauguagguauguguauuua

SEQ ID NO: 1021844 - RNA, 22 nt, Human
ugauguucuguauaucauauag

SEQ ID NO: 1021845 - RNA, 22 nt, Human
cuggccugaggucggcuguagg

SEQ ID NO: 1021846 - RNA, 23 nt, Human
aaguaacagggauaauagcaguu

SEQ ID NO: 1021847 - RNA, 22 nt, Human
cugcucuaauaucagauagacu

SEQ ID NO: 1021848 - RNA, 22 nt, Human
ucuggagcgaggucccugucug

SEQ ID NO: 1021849 - RNA, 22 nt, Human
aggagccaggaaaccugcucug

SEQ ID NO: 1021850 - RNA, 22 nt, Human
caggagccccaggcugacaaua

SEQ ID NO: 1021851 - RNA, 22 nt, Human
accaaggagacaaagguguauu

SEQ ID NO: 1021852 - RNA, 22 nt, Human
auaaacagcuccauuuagugcc

SEQ ID NO: 1021853 - RNA, 22 nt, Human
acaggacauguaccaggugguc

SEQ ID NO: 1021854 - RNA, 22 nt, Human
uccaaagggaagcgcuuucugu

SEQ ID NO: 1021855 - RNA, 22 nt, Human
caggaggaaaugugacccugcu

SEQ ID NO: 1021856 - RNA, 22 nt, Human
aagauuucugcuccugagagaa

SEQ ID NO: 1021857 - RNA, 22 nt, Human
cuagggaccucagcuccuggag

SEQ ID NO: 1021858 - RNA, 22 nt, Human
cagauccacccuuguagugaca

SEQ ID NO: 1021859 - RNA, 22 nt, Human
gagguagcaugcuggaagggac

SEQ ID NO: 1021860 - RNA, 22 nt, Human
gcccaggaguucaagucuagug

SEQ ID NO: 1021861 - RNA, 20 nt, Human
caccaggcgcucugagaaca

SEQ ID NO: 1021862 - RNA, 22 nt, Human
cugggagcggcugucacugguu

SEQ ID NO: 1021863 - RNA, 22 nt, Human
uuuccaagagcuuauuucugaa

SEQ ID NO: 1021864 - RNA, 22 nt, Human
ugccuggguccaggccaagccu

SEQ ID NO: 1021865 - RNA, 22 nt, Human
uaauuucaauagcuugcauaau

SEQ ID NO: 1021866 - RNA, 22 nt, Human
uguuaaucaaucaacaguauua

SEQ ID NO: 1021867 - RNA, 22 nt, Human
uggcagcauguuauguaaggaa

SEQ ID NO: 1021868 - RNA, 22 nt, Human
uguaugaagguuuaccugcugu

SEQ ID NO: 1021869 - RNA, 22 nt, Human
gauuuauuuuuaaucagcaggg

SEQ ID NO: 1021870 - RNA, 20 nt, Human
uauuugaaauggccaagugu

SEQ ID NO: 1021871 - RNA, 23 nt, Human
uggagcugacagucagagggagg

SEQ ID NO: 1021872 - RNA, 22 nt, Human
gcaaggcugagcacauuugcau

SEQ ID NO: 1021873 - RNA, 22 nt, Human
agcugcuaugacaacaccagcc

SEQ ID NO: 1021874 - RNA, 22 nt, Human
aaacacaucauucaugucguca

SEQ ID NO: 1021875 - RNA, 22 nt, Human
cugggaugucuauagaacacuu

SEQ ID NO: 1021876 - RNA, 22 nt, Human
aauaguguuguucacucaggag

SEQ ID NO: 1021877 - RNA, 22 nt, Human
gggcccagcgugguuccaucug

SEQ ID NO: 1021878 - RNA, 22 nt, Human
acugucugcuggccccugguua

SEQ ID NO: 1021879 - RNA, 22 nt, Human
uugauacauagcacaguuuagg

SEQ ID NO: 1021880 - RNA, 22 nt, Human
gccagguggucuggcuccagag

SEQ ID NO: 1021881 - RNA, 22 nt, Human
auaucauucugauguauaucuu

SEQ ID NO: 1021882 - RNA, 22 nt, Human
gagagcuggauucuggauaggu

SEQ ID NO: 1021883 - RNA, 22 nt, Human
cgcaccacugaauuccagccug

SEQ ID NO: 1021884 - RNA, 22 nt, Human
agguccagcuguugcagccucc

SEQ ID NO: 1021885 - RNA, 22 nt, Human
cauguuaaugaauuuuugcagu

SEQ ID NO: 1021886 - RNA, 22 nt, Human
ggccaggagcaagccaggcucu

SEQ ID NO: 1021887 - RNA, 22 nt, Human
accaucagagcacaguccgugc

SEQ ID NO: 1021888 - RNA, 22 nt, Human
gucugcugcagagcauggcuuu

SEQ ID NO: 1021889 - RNA, 22 nt, Human
aauguacaaaagucagccaacu

SEQ ID NO: 1021890 - RNA, 22 nt, Human
guccugggaaggaagccaggga

SEQ ID NO: 1021891 - RNA, 22 nt, Human
uggcagaguuggagguggaaga

SEQ ID NO: 1021892 - RNA, 22 nt, Human
aacuuuaaggcuauaaauuaug

SEQ ID NO: 1021893 - RNA, 22 nt, Human
aacuucuugguccugagcuguu

SEQ ID NO: 1021894 - RNA, 22 nt, Human
cugagcugggaguagagacucu

SEQ ID NO: 1021895 - RNA, 19 nt, Human
ggaagagaggaaaggugga

SEQ ID NO: 1021896 - RNA, 23 nt, Human
uggccugcagaguuucugcuggg

SEQ ID NO: 1021897 - RNA, 22 nt, Human
aagacuuucucccaaauccuca

SEQ ID NO: 1021898 - RNA, 22 nt, Human
aguggcagagcugugucuugaa

SEQ ID NO: 1021899 - RNA, 19 nt, Human
aggcagaggcuuggcuagc

SEQ ID NO: 1021900 - RNA, 22 nt, Human
gccucugcaucuucgccgcacu

SEQ ID NO: 1021901 - RNA, 22 nt, Human
agccucucugaugugacagcua

SEQ ID NO: 1021902 - RNA, 22 nt, Human
cacccagcuuuugcauccuccg

SEQ ID NO: 1021903 - RNA, 22 nt, Human
ucugagagcuguagaagccuau

SEQ ID NO: 1021904 - RNA, 22 nt, Human
cagagccauuauggagacuugc

SEQ ID NO: 1021905 - RNA, 22 nt, Human
ggccugcuggcuccagcgcccg

SEQ ID NO: 1021906 - RNA, 22 nt, Human
gucaaauauacuaagagguaaa

SEQ ID NO: 1021907 - RNA, 22 nt, Human
uugguuuagagagugugguuac

SEQ ID NO: 1021908 - RNA, 22 nt, Human
ggcugggcuccgggagcaugcg

SEQ ID NO: 1021909 - RNA, 22 nt, Human
gggaaggagguggcuugaagug

SEQ ID NO: 1021910 - RNA, 22 nt, Human
agcagagccugggcuaggggug

SEQ ID NO: 1021911 - RNA, 22 nt, Human
gggcuggugaggcugcccugca

SEQ ID NO: 1021912 - RNA, 22 nt, Human
cugaugcuauaagccacagugg

SEQ ID NO: 1021913 - RNA, 22 nt, Human
uaggagcuaaaauauuuuauau

SEQ ID NO: 1021914 - RNA, 21 nt, Human
acagcauguuuguguguuugc

SEQ ID NO: 1021915 - RNA, 22 nt, Human
ggcucugggucuguggggagcg

SEQ ID NO: 1021916 - RNA, 22 nt, Human
ucuacuauguuucuuaaauaga

SEQ ID NO: 1021917 - RNA, 22 nt, Human
acugucaccaucagagcgggaa

SEQ ID NO: 1021918 - RNA, 22 nt, Human
gcauggcauuaacaagauggaa

SEQ ID NO: 1021919 - RNA, 22 nt, Human
gagcaccucaauuugcuauuug

SEQ ID NO: 1021920 - RNA, 22 nt, Human
ugggccacuugaaaguggaugu

SEQ ID NO: 1021921 - RNA, 22 nt, Human
agaaacugaauuauuucugagg

SEQ ID NO: 1021922 - RNA, 22 nt, Human
caaugugugcuuacaggccagu

SEQ ID NO: 1021923 - RNA, 22 nt, Human
ugcucagggacaauggagaggg

SEQ ID NO: 1021924 - RNA, 19 nt, Human
uugaaauuguuugauaugg

SEQ ID NO: 1021925 - RNA, 22 nt, Human
caacacauugaagcuaugauga

SEQ ID NO: 1021926 - RNA, 22 nt, Human
ccagcugaggcagccacacagg

SEQ ID NO: 1021927 - RNA, 22 nt, Human
cagagaaacucagauagcugau

SEQ ID NO: 1021928 - RNA, 22 nt, Human
cagagcugcucaugguggccag

SEQ ID NO: 1021929 - RNA, 20 nt, Human
ccagagcugauggcugcccg

SEQ ID NO: 1021930 - RNA, 22 nt, Human
gaauuugaaaagugaugggaau

SEQ ID NO: 1021931 - RNA, 18 nt, Human
ccuggagcuccacagcaa

SEQ ID NO: 1021932 - RNA, 22 nt, Human
cuaaucaucuuucucuuaaagc

SEQ ID NO: 1021933 - RNA, 22 nt, Human
uacuuccuguuuccaugucugu

SEQ ID NO: 1021934 - RNA, 22 nt, Human
guacuuccagccaagugagaca

SEQ ID NO: 1021935 - RNA, 22 nt, Human
ugggcagcuuccacuuaguuag

SEQ ID NO: 1021936 - RNA, 22 nt, Human
cuggccaggcuugggacagaca

SEQ ID NO: 1021937 - RNA, 22 nt, Human
ucaccagggcuccagccagccu

SEQ ID NO: 1021938 - RNA, 22 nt, Human
ucaggggaaaucucucagcgaa

SEQ ID NO: 1021939 - RNA, 22 nt, Human
uggcccuguguccugcugccag

SEQ ID NO: 1021940 - RNA, 22 nt, Human
guccaggucuggacccugagcc

SEQ ID NO: 1021941 - RNA, 22 nt, Human
gggagcugaauggcaauggaga

SEQ ID NO: 1021942 - RNA, 22 nt, Human
gaaggcuggcuuucugagagca

SEQ ID NO: 1021943 - RNA, 22 nt, Human
cugagaggcacaaggcauuucg

SEQ ID NO: 1021944 - RNA, 22 nt, Human
auguaauuugcccucaaguuaa

SEQ ID NO: 1021945 - RNA, 22 nt, Human
aggcacugaaagguggccagag

SEQ ID NO: 1021946 - RNA, 22 nt, Human
ucuuugcaugugcuucuuggcc

SEQ ID NO: 1021947 - RNA, 22 nt, Human
augauugaaaaugacauugcca

SEQ ID NO: 1021948 - RNA, 22 nt, Human
ucuguucaagacugaggugaca

SEQ ID NO: 1021949 - RNA, 20 nt, Human
cucaggauacugcaaaguug

SEQ ID NO: 1021950 - RNA, 22 nt, Human
aaaugcauguagaauaauagag

SEQ ID NO: 1021951 - RNA, 22 nt, Human
guccucaguaagagggccucug

SEQ ID NO: 1021952 - RNA, 22 nt, Human
auuguacaaugccuggaacauu

SEQ ID NO: 1021953 - RNA, 23 nt, Human
gugagcagcccacuaggaaugcc

SEQ ID NO: 1021954 - RNA, 22 nt, Human
aaagcucuuuuccaaguauuga

SEQ ID NO: 1021955 - RNA, 22 nt, Human
uucuuuugggaauuacguaugc

SEQ ID NO: 1021956 - RNA, 22 nt, Human
ucuggcaggucaaucauucuuu

SEQ ID NO: 1021957 - RNA, 22 nt, Human
ugugaaaagcguguguucuagg

SEQ ID NO: 1021958 - RNA, 20 nt, Human
ggggcugcaugcagagaaga

SEQ ID NO: 1021959 - RNA, 22 nt, Human
uacauuugcuuugauuuucagc

SEQ ID NO: 1021960 - RNA, 22 nt, Human
ugggugcaugugagcacgugca

SEQ ID NO: 1021961 - RNA, 22 nt, Human
agcaugcacaugacuggcuuaa

SEQ ID NO: 1021962 - RNA, 22 nt, Human
gucauuccuuauguugauucag

SEQ ID NO: 1021963 - RNA, 22 nt, Human
gcuuuauguaaguccaaaggca

SEQ ID NO: 1021964 - RNA, 22 nt, Human
ggcaggcaggucuucauggccc

SEQ ID NO: 1021965 - RNA, 22 nt, Human
ugcagagguguugcugagauaa

SEQ ID NO: 1021966 - RNA, 22 nt, Human
gaggccacgguuuuccuugggg

SEQ ID NO: 1021967 - RNA, 23 nt, Human
gugcugugagccccuuggccucc

SEQ ID NO: 1021968 - RNA, 22 nt, Human
ccagccuuacugcccuucagug

SEQ ID NO: 1021969 - RNA, 22 nt, Human
ucuucaaagaauuuuaguaauu

SEQ ID NO: 1021970 - RNA, 22 nt, Human
gaggcaggguguugauuacaga

SEQ ID NO: 1021971 - RNA, 22 nt, Human
cagccaucccagccugugguuc

SEQ ID NO: 1021972 - RNA, 22 nt, Human
agccucuggcccuagacugcuu

SEQ ID NO: 1021973 - RNA, 22 nt, Human
uccuugaaaagaaugucuccau

SEQ ID NO: 1021974 - RNA, 22 nt, Human
gcagcuuucuuuuugcaugucu

SEQ ID NO: 1021975 - RNA, 22 nt, Human
acagggcauuuccucuaugugu

SEQ ID NO: 1021976 - RNA, 18 nt, Human
augggaggggccaagaga

SEQ ID NO: 1021977 - RNA, 22 nt, Human
ggcucaggagaggggcuaaaag

SEQ ID NO: 1021978 - RNA, 22 nt, Human
gccuuugccugcgacguggcug

SEQ ID NO: 1021979 - RNA, 22 nt, Human
ucuggagcuggagggcaaggca

SEQ ID NO: 1021980 - RNA, 22 nt, Human
ucauccaguaccauggaaggca

SEQ ID NO: 1021981 - RNA, 18 nt, Human
uuccaugauuccuuucac

SEQ ID NO: 1021982 - RNA, 22 nt, Human
agagauucauguuuacuguagg

SEQ ID NO: 1021983 - RNA, 22 nt, Human
cagagaaaaaauccugcucuca

SEQ ID NO: 1021984 - RNA, 22 nt, Human
agcugcucucacuggacgccug

SEQ ID NO: 1021985 - RNA, 22 nt, Human
uugugcauuucucugagugugu

SEQ ID NO: 1021986 - RNA, 22 nt, Human
cacugaaggcugcagcucagcc

SEQ ID NO: 1021987 - RNA, 22 nt, Human
cauaauuuuccaugguuugcua

SEQ ID NO: 1021988 - RNA, 22 nt, Human
uacuuacagagcuuauaaguua

SEQ ID NO: 1021989 - RNA, 22 nt, Human
auacaucuaugccuuucugaca

SEQ ID NO: 1021990 - RNA, 22 nt, Human
uugaccauaccuccaggcaguu

SEQ ID NO: 1021991 - RNA, 22 nt, Human
ucaagcaggguagcaagcuggu

SEQ ID NO: 1021992 - RNA, 22 nt, Human
ccagcagccaccuucucgaaau

SEQ ID NO: 1021993 - RNA, 22 nt, Human
uucacauugugcagauuauggu

SEQ ID NO: 1021994 - RNA, 22 nt, Human
gcagagaaaguuuuguccucag

SEQ ID NO: 1021995 - RNA, 19 nt, Human
auguaugaggucuucugcu

SEQ ID NO: 1021996 - RNA, 22 nt, Human
uuuacagagaauguacauaaag

SEQ ID NO: 1021997 - RNA, 22 nt, Human
cauugcugugggcauuugcugc

SEQ ID NO: 1021998 - RNA, 22 nt, Human
auguuacauaguccuuauuugu

SEQ ID NO: 1021999 - RNA, 22 nt, Human
cugugccuggggggcagagcug

SEQ ID NO: 1022000 - RNA, 22 nt, Human
agaagauuuagguugacgcuau

SEQ ID NO: 1022001 - RNA, 22 nt, Human
aagggcugccagggggugccag

SEQ ID NO: 1022002 - RNA, 22 nt, Human
cauuugaugacucaacucauaa

SEQ ID NO: 1022003 - RNA, 22 nt, Human
acuguacuguguauuguagaau

SEQ ID NO: 1022004 - RNA, 22 nt, Human
ccaggccugauugggaaucuug

SEQ ID NO: 1022005 - RNA, 20 nt, Human
ugcguguguauuuauuuucu

SEQ ID NO: 1022006 - RNA, 22 nt, Human
uggccgggccgggcgccuccac

SEQ ID NO: 1022007 - RNA, 22 nt, Human
accucugcaguagggcugugcc

SEQ ID NO: 1022008 - RNA, 22 nt, Human
gccucucucuacccaguaugau

SEQ ID NO: 1022009 - RNA, 22 nt, Human
agagcagccugugaugaugcac

SEQ ID NO: 1022010 - RNA, 22 nt, Human
gucaggauuauaauccccaugg

SEQ ID NO: 1022011 - RNA, 22 nt, Human
gccagcagcccagaaggacuuu

SEQ ID NO: 1022012 - RNA, 22 nt, Human
acauuguuugagaauacagaug

SEQ ID NO: 1022013 - RNA, 22 nt, Human
uccagcagcccgaaggcccauc

SEQ ID NO: 1022014 - RNA, 22 nt, Human
uugaacaguccuaagagacccu

SEQ ID NO: 1022015 - RNA, 19 nt, Human
cugagagaugcuucacaca

SEQ ID NO: 1022016 - RNA, 19 nt, Human
cauaauacaguggaucuga

SEQ ID NO: 1022017 - RNA, 22 nt, Human
aggaaaaaccuguuaaugguag

SEQ ID NO: 1022018 - RNA, 22 nt, Human
uuucuuguaagauguuuauuaa

SEQ ID NO: 1022019 - RNA, 22 nt, Human
ccuccaggauaagucagggccu

SEQ ID NO: 1022020 - RNA, 22 nt, Human
gcagcuuuaaacauuggaaaua

SEQ ID NO: 1022021 - RNA, 22 nt, Human
aggcucugggaagcagugaguu

SEQ ID NO: 1022022 - RNA, 22 nt, Human
uguacaaagguacuuugauguu

SEQ ID NO: 1022023 - RNA, 22 nt, Human
ccacagagacaggguccuugcu

SEQ ID NO: 1022024 - RNA, 19 nt, Human
gcuucccaccagccagccc

SEQ ID NO: 1022025 - RNA, 22 nt, Human
caggugggagcggagacugauu

SEQ ID NO: 1022026 - RNA, 17 nt, Human
gcucccugaggacagcu

SEQ ID NO: 1022027 - RNA, 22 nt, Human
ggcuuucuagaucuagcucugu

SEQ ID NO: 1022028 - RNA, 22 nt, Human
agggggcccuugcaggugagcg

SEQ ID NO: 1022029 - RNA, 22 nt, Human
guauucauauuaaacauaucaa

SEQ ID NO: 1022030 - RNA, 22 nt, Human
ugcccaaguccuccaccgaggu

SEQ ID NO: 1022031 - RNA, 22 nt, Human
ucauuuuucacacagggucacc

SEQ ID NO: 1022032 - RNA, 22 nt, Human
ggguuccuccaguuccuagagc

SEQ ID NO: 1022033 - RNA, 22 nt, Human
cccccagccagcagugcucagc

SEQ ID NO: 1022034 - RNA, 22 nt, Human
ugcauuccuccaccuccugcac

SEQ ID NO: 1022035 - RNA, 22 nt, Human
cuggaggcacccuuagagaggc

SEQ ID NO: 1022036 - RNA, 18 nt, Human
uucacaggaaaugucuuu

SEQ ID NO: 1022037 - RNA, 22 nt, Human
uuucuucucacccaggacagag

SEQ ID NO: 1022038 - RNA, 22 nt, Human
agcagccauagauagcaugcaa

SEQ ID NO: 1022039 - RNA, 22 nt, Human
acugagcugcaagucagggagg

SEQ ID NO: 1022040 - RNA, 22 nt, Human
gccgaagcugccgucugguccu

SEQ ID NO: 1022041 - RNA, 22 nt, Human
caggaguggugugagggacucc

SEQ ID NO: 1022042 - RNA, 22 nt, Human
caguagcagggauuauuuuagg

SEQ ID NO: 1022043 - RNA, 22 nt, Human
cagcuccugccugggcagcugu

SEQ ID NO: 1022044 - RNA, 22 nt, Human
ugucucugagaugacucccacc

SEQ ID NO: 1022045 - RNA, 22 nt, Human
uuagggcuuuucugaauaggcc

SEQ ID NO: 1022046 - RNA, 22 nt, Human
ucagccugcuccaagugcugcc

SEQ ID NO: 1022047 - RNA, 22 nt, Human
aaagauuuaugaaguucaauua

SEQ ID NO: 1022048 - RNA, 20 nt, Human
ugcagcugguuucacaggga

SEQ ID NO: 1022049 - RNA, 20 nt, Human
uguauauuuucugguguaaa

SEQ ID NO: 1022050 - RNA, 22 nt, Human
acagcuggaggucugugagcac

SEQ ID NO: 1022051 - RNA, 22 nt, Human
gcucccugccuacacggaccuu

SEQ ID NO: 1022052 - RNA, 22 nt, Human
caccaggcuggagugcagaggu

SEQ ID NO: 1022053 - RNA, 22 nt, Human
cuggggcccaucgagggcugag

SEQ ID NO: 1022054 - RNA, 22 nt, Human
agggagcugcucugcuuccgug

SEQ ID NO: 1022055 - RNA, 22 nt, Human
uggaggaaguggcuggccagaa

SEQ ID NO: 1022056 - RNA, 22 nt, Human
agaauguagucuuggagauuua

SEQ ID NO: 1022057 - RNA, 22 nt, Human
uggcucaguuccaucaucugga

SEQ ID NO: 1022058 - RNA, 22 nt, Human
ugauggcuaucccuggaagggc

SEQ ID NO: 1022059 - RNA, 22 nt, Human
aggcaagggggcgccaccuucc

SEQ ID NO: 1022060 - RNA, 22 nt, Human
cugggacagcugagacaggaga

SEQ ID NO: 1022061 - RNA, 22 nt, Human
cacccuggcuggaggugcagug

SEQ ID NO: 1022062 - RNA, 22 nt, Human
ugcagggaaucuguggcuggac

SEQ ID NO: 1022063 - RNA, 22 nt, Human
cccuaggguuuggccagagccc

SEQ ID NO: 1022064 - RNA, 22 nt, Human
acacagccaggguaguaaggcu

SEQ ID NO: 1022065 - RNA, 22 nt, Human
agugcuuugguauagaacuauu

SEQ ID NO: 1022066 - RNA, 21 nt, Human
uagcacuucgcuguaauuggg

SEQ ID NO: 1022067 - RNA, 22 nt, Human
caggaaugaggucguaaguguc

SEQ ID NO: 1022068 - RNA, 22 nt, Human
agucccagacuccaguuuucug

SEQ ID NO: 1022069 - RNA, 19 nt, Human
gccagcagaaugaugaggc

SEQ ID NO: 1022070 - RNA, 22 nt, Human
uggcagggccuaccccaauauc

SEQ ID NO: 1022071 - RNA, 21 nt, Human
ucacuuauaauguauuugcug

SEQ ID NO: 1022072 - RNA, 22 nt, Human
acagauguacacucauauauaa

SEQ ID NO: 1022073 - RNA, 22 nt, Human
auucuuaauugccaugcuguau

SEQ ID NO: 1022074 - RNA, 22 nt, Human
acagaggccucggccugcccag

SEQ ID NO: 1022075 - RNA, 22 nt, Human
cucucugcuguauccuuaggcu

SEQ ID NO: 1022076 - RNA, 22 nt, Human
uggcagcaauuugugauguuga

SEQ ID NO: 1022077 - RNA, 22 nt, Human
uuucuagggcucuugucuucug

SEQ ID NO: 1022078 - RNA, 22 nt, Human
ucagagcuaaggggagagcaaa

SEQ ID NO: 1022079 - RNA, 22 nt, Human
agccucugauggcucccaagga

SEQ ID NO: 1022080 - RNA, 22 nt, Human
ucaccgccuugcccggccgggc

SEQ ID NO: 1022081 - RNA, 18 nt, Human
ggcugagguugacuagaa

SEQ ID NO: 1022082 - RNA, 22 nt, Human
uuucuucauagaccuugucuug

SEQ ID NO: 1022083 - RNA, 22 nt, Human
ugugaaaggagccauagacagu

SEQ ID NO: 1022084 - RNA, 22 nt, Human
gagagcuguaauagucaugucu

SEQ ID NO: 1022085 - RNA, 22 nt, Human
caggccucaggggcucaggcug

SEQ ID NO: 1022086 - RNA, 22 nt, Human
aaugaucuggcucaggauauca

SEQ ID NO: 1022087 - RNA, 22 nt, Human
uaacagaaauauuuccagguga

SEQ ID NO: 1022088 - RNA, 22 nt, Human
gggcugcuuauacugaugauaa

SEQ ID NO: 1022089 - RNA, 22 nt, Human
ucugucucaaguucuugcacuc

SEQ ID NO: 1022090 - RNA, 22 nt, Human
agggaaaggcugaugcuguggg

SEQ ID NO: 1022091 - RNA, 22 nt, Human
cccagcauggagugaggacuca

SEQ ID NO: 1022092 - RNA, 22 nt, Human
gggcagcucucacagcagccaa

SEQ ID NO: 1022093 - RNA, 22 nt, Human
cugacuguaauucuguucuuaa

SEQ ID NO: 1022094 - RNA, 22 nt, Human
uugcauuugagaaaguucuccu

SEQ ID NO: 1022095 - RNA, 22 nt, Human
gagccuggggacccuccugagu

SEQ ID NO: 1022096 - RNA, 19 nt, Human
ugccuggcaccagcuccac

SEQ ID NO: 1022097 - RNA, 22 nt, Human
gguuauauaauucagugcuuuc

SEQ ID NO: 1022098 - RNA, 22 nt, Human
uacccagcuucaagucaggacu

SEQ ID NO: 1022099 - RNA, 22 nt, Human
ugggcuguggagcaccuuugca

SEQ ID NO: 1022100 - RNA, 22 nt, Human
uuguaacacuuuucuauuaaua

SEQ ID NO: 1022101 - RNA, 22 nt, Human
uuguuaaaaugcauauucuggu

SEQ ID NO: 1022102 - RNA, 21 nt, Human
ugggcagauggcaguguggcu

SEQ ID NO: 1022103 - RNA, 22 nt, Human
ucaagagagugcugcuuggggu

SEQ ID NO: 1022104 - RNA, 22 nt, Human
uggcucagagccuugagagcug

SEQ ID NO: 1022105 - RNA, 22 nt, Human
gagcuuuaggagaaggagguca

SEQ ID NO: 1022106 - RNA, 22 nt, Human
uuuuccuguccaggcaauuauu

SEQ ID NO: 1022107 - RNA, 22 nt, Human
auauucuuccaaaacaucauuu

SEQ ID NO: 1022108 - RNA, 20 nt, Human
cccuggccuguuucaugccc

SEQ ID NO: 1022109 - RNA, 22 nt, Human
gagggucccgagcccugucaga

SEQ ID NO: 1022110 - RNA, 22 nt, Human
ccugccugguguaagucuaagg

SEQ ID NO: 1022111 - RNA, 22 nt, Human
ggaggccaaggcagguggaucg

SEQ ID NO: 1022112 - RNA, 22 nt, Human
gauggggaugagaagugagcag

SEQ ID NO: 1022113 - RNA, 19 nt, Human
acagaagcauagaaaagga

SEQ ID NO: 1022114 - RNA, 22 nt, Human
gcugauuauuacaugucugugg

SEQ ID NO: 1022115 - RNA, 22 nt, Human
cuggaagaggaagccagcugga

SEQ ID NO: 1022116 - RNA, 22 nt, Human
cauuucuguucucuuccuguac

SEQ ID NO: 1022117 - RNA, 23 nt, Human
aggaacugaggccuagggaggua

SEQ ID NO: 1022118 - RNA, 22 nt, Human
uacucagagucauugcccuucu

SEQ ID NO: 1022119 - RNA, 22 nt, Human
acagggcagugucuugaaaaau

SEQ ID NO: 1022120 - RNA, 22 nt, Human
agagaaaagaguucaggcuuug

SEQ ID NO: 1022121 - RNA, 23 nt, Human
ccucagcauggcaggagcccagc

SEQ ID NO: 1022122 - RNA, 22 nt, Human
aaauugugagcuauagaucuag

SEQ ID NO: 1022123 - RNA, 22 nt, Human
ucagagagaaauaguuuuugac

SEQ ID NO: 1022124 - RNA, 22 nt, Human
uuucauggcuaggacuagagug

SEQ ID NO: 1022125 - RNA, 22 nt, Human
ucagagaguuagugucuuagcu

SEQ ID NO: 1022126 - RNA, 22 nt, Human
guugaaagagcauggacuugaa

SEQ ID NO: 1022127 - RNA, 22 nt, Human
uccagcagaccaucaaggcuca

SEQ ID NO: 1022128 - RNA, 22 nt, Human
aucuucaaagggauguccaugg

SEQ ID NO: 1022129 - RNA, 22 nt, Human
uggcagcagccauggaaggccc

SEQ ID NO: 1022130 - RNA, 22 nt, Human
ggcucaggggccaggccugucc

SEQ ID NO: 1022131 - RNA, 22 nt, Human
acugcagggcauccuggccaag

SEQ ID NO: 1022132 - RNA, 22 nt, Human
gggaccugccauugcucacagg

SEQ ID NO: 1022133 - RNA, 22 nt, Human
uggcucaggcuugaaaauagau

SEQ ID NO: 1022134 - RNA, 22 nt, Human
ggaggcucugcuccguguguuc

SEQ ID NO: 1022135 - RNA, 22 nt, Human
uugcacagaugagggugaugcu

SEQ ID NO: 1022136 - RNA, 22 nt, Human
cuggguggcuguccagccagcc

SEQ ID NO: 1022137 - RNA, 22 nt, Human
uggugcugacaguucugagugc

SEQ ID NO: 1022138 - RNA, 22 nt, Human
uuccauuuauucuuguccagau

SEQ ID NO: 1022139 - RNA, 21 nt, Human
agacaguaacucuucuacucc

SEQ ID NO: 1022140 - RNA, 22 nt, Human
caguguccucagccagcagcua

SEQ ID NO: 1022141 - RNA, 22 nt, Human
uguggcugucuguucuccuagg

SEQ ID NO: 1022142 - RNA, 20 nt, Human
uccaggcagcucagaguguc

SEQ ID NO: 1022143 - RNA, 22 nt, Human
uggccggggcugauggacagug

SEQ ID NO: 1022144 - RNA, 22 nt, Human
auugcuguacacuucuagaucu

SEQ ID NO: 1022145 - RNA, 19 nt, Human
ugcugcuguccuugcaggg

SEQ ID NO: 1022146 - RNA, 22 nt, Human
guauucuugguuaucaaaauac

SEQ ID NO: 1022147 - RNA, 22 nt, Human
ugaauggucacugagcaucugu

SEQ ID NO: 1022148 - RNA, 22 nt, Human
auccagucaaaauuaguaaggu

SEQ ID NO: 1022149 - RNA, 22 nt, Human
cacaagucuguggucuccaaca

SEQ ID NO: 1022150 - RNA, 22 nt, Human
uuugacaggacuaacauauggc

SEQ ID NO: 1022151 - RNA, 22 nt, Human
ggagcugcuccuucagccaagu

SEQ ID NO: 1022152 - RNA, 22 nt, Human
cugccaggacugacgucuucag

SEQ ID NO: 1022153 - RNA, 22 nt, Human
gcuggagccaagcugcucuugg

SEQ ID NO: 1022154 - RNA, 22 nt, Human
ugcucuucggggccacugcuug

SEQ ID NO: 1022155 - RNA, 22 nt, Human
auaguacacauccuacaauguu

SEQ ID NO: 1022156 - RNA, 23 nt, Human
uuacuuuugcaccaaccuaauau

SEQ ID NO: 1022157 - RNA, 22 nt, Human
uuugcauuuguuuagaaccuga

SEQ ID NO: 1022158 - RNA, 22 nt, Human
agaccaagaaaggaugaggauc

SEQ ID NO: 1022159 - RNA, 23 nt, Human
uggugccucagaagcagugggcu

SEQ ID NO: 1022160 - RNA, 22 nt, Human
aagcacuuagaagagugccugc

SEQ ID NO: 1022161 - RNA, 22 nt, Human
agaggcccucucugcucagucu

SEQ ID NO: 1022162 - RNA, 22 nt, Human
gugguuuugccauuacaaguaa

SEQ ID NO: 1022163 - RNA, 22 nt, Human
gcugcagcccggcgcgccugag

SEQ ID NO: 1022164 - RNA, 22 nt, Human
cuguaguugaugauuucugaua

SEQ ID NO: 1022165 - RNA, 22 nt, Human
cagggccuuuuagcaucuucuc

SEQ ID NO: 1022166 - RNA, 22 nt, Human
aauuagggaaaacauuugcuuu

SEQ ID NO: 1022167 - RNA, 22 nt, Human
uuugacauuauccuguuacugg

SEQ ID NO: 1022168 - RNA, 22 nt, Human
acugggccggugcagaguaguu

SEQ ID NO: 1022169 - RNA, 22 nt, Human
caagugucuauaucagugcuug

SEQ ID NO: 1022170 - RNA, 22 nt, Human
uuccauauuuguguggcaaaag

SEQ ID NO: 1022171 - RNA, 22 nt, Human
uggcucagcugucacagccugg

SEQ ID NO: 1022172 - RNA, 22 nt, Human
gaauuguacgcuuuacauaggu

SEQ ID NO: 1022173 - RNA, 22 nt, Human
cugccugugcaugcagucagaa

SEQ ID NO: 1022174 - RNA, 22 nt, Human
aguuuauguagaauuggcaaua

SEQ ID NO: 1022175 - RNA, 22 nt, Human
cuggcugcgucugcucugacag

SEQ ID NO: 1022176 - RNA, 22 nt, Human
gcacagcaauuucuauaagcuc

SEQ ID NO: 1022177 - RNA, 22 nt, Human
cuggagccagccagggcccucu

SEQ ID NO: 1022178 - RNA, 22 nt, Human
uggcucagcgguggcagcagac

SEQ ID NO: 1022179 - RNA, 20 nt, Human
gugcauuucaccuguacugu

SEQ ID NO: 1022180 - RNA, 22 nt, Human
ucuuuccuuagaauaauucuuu

SEQ ID NO: 1022181 - RNA, 21 nt, Human
gagcucucaggcaagaagcag

SEQ ID NO: 1022182 - RNA, 22 nt, Human
ugucccaggcugaaguacagug

SEQ ID NO: 1022183 - RNA, 22 nt, Human
ggcugucucugugacugccacc

SEQ ID NO: 1022184 - RNA, 22 nt, Human
gccagcugcaucuccugggcug

SEQ ID NO: 1022185 - RNA, 22 nt, Human
agaagccauugaagcagaccuc

SEQ ID NO: 1022186 - RNA, 23 nt, Human
ugcagggcaaguuagagacccca

SEQ ID NO: 1022187 - RNA, 22 nt, Human
agcccccaaaagugcuuaugau

SEQ ID NO: 1022188 - RNA, 22 nt, Human
cccugcagagagugcuuuugug

SEQ ID NO: 1022189 - RNA, 22 nt, Human
aaagagcuucauuuccauuuau

SEQ ID NO: 1022190 - RNA, 22 nt, Human
agggggcaggagagaccugcug

SEQ ID NO: 1022191 - RNA, 22 nt, Human
uagggcagccuuauagcuccca

SEQ ID NO: 1022192 - RNA, 22 nt, Human
ugcagcuccucuggcugccuga

SEQ ID NO: 1022193 - RNA, 22 nt, Human
acauuugaggauguuaagaaug

SEQ ID NO: 1022194 - RNA, 22 nt, Human
gucaggaugggcagccaaacua

SEQ ID NO: 1022195 - RNA, 22 nt, Human
uuauuaggaaaaggucagaugu

SEQ ID NO: 1022196 - RNA, 22 nt, Human
ugaaacuuauaagaauaugaau

SEQ ID NO: 1022197 - RNA, 20 nt, Human
gugugaagcccucaggagga

SEQ ID NO: 1022198 - RNA, 22 nt, Human
cucaggauauugggcuggagca

SEQ ID NO: 1022199 - RNA, 22 nt, Human
uugcauugaaugcacauuuuua

SEQ ID NO: 1022200 - RNA, 22 nt, Human
uaaaaguggauaagcuguagga

SEQ ID NO: 1022201 - RNA, 22 nt, Human
aacaguaucuuuuaucagaaau

SEQ ID NO: 1022202 - RNA, 22 nt, Human
ucacaaauagcuauauuaagga

SEQ ID NO: 1022203 - RNA, 22 nt, Human
agauaugugcgucuuagauuga

SEQ ID NO: 1022204 - RNA, 22 nt, Human
auguaagguucagaguauguga

SEQ ID NO: 1022205 - RNA, 22 nt, Human
cugcucugagaggcucuuccua

SEQ ID NO: 1022206 - RNA, 22 nt, Human
uaacacauuuuccucauacgga

SEQ ID NO: 1022207 - RNA, 20 nt, Human
cccaggagugagcagcuuua

SEQ ID NO: 1022208 - RNA, 22 nt, Human
ggcugagcaauuuugaugacau

SEQ ID NO: 1022209 - RNA, 17 nt, Human
ucuguucaugcauaccu

SEQ ID NO: 1022210 - RNA, 22 nt, Human
agagcugaggauccagcugagc

SEQ ID NO: 1022211 - RNA, 21 nt, Human
uuugaaagugggugauucuuu

SEQ ID NO: 1022212 - RNA, 22 nt, Human
agccucugcuuaugcaaaggua

SEQ ID NO: 1022213 - RNA, 22 nt, Human
agaagaaacugucggggauauu

SEQ ID NO: 1022214 - RNA, 22 nt, Human
auaccuuuuagacauguaguug

SEQ ID NO: 1022215 - RNA, 22 nt, Human
agagggcauuaacucugucuug

SEQ ID NO: 1022216 - RNA, 22 nt, Human
cuucuccucugaguccugggag

SEQ ID NO: 1022217 - RNA, 22 nt, Human
agcaguggccuggggcucugug

SEQ ID NO: 1022218 - RNA, 22 nt, Human
aggccugagguuccugugcuca

SEQ ID NO: 1022219 - RNA, 22 nt, Human
cccagccugucuuucccaauga

SEQ ID NO: 1022220 - RNA, 22 nt, Human
gcuguucaaaagccacaguuac

SEQ ID NO: 1022221 - RNA, 22 nt, Human
aaauguguuucgaaaacuggug

SEQ ID NO: 1022222 - RNA, 22 nt, Human
ucugaggcauaaccuguucugc

SEQ ID NO: 1022223 - RNA, 22 nt, Human
uguauaaaccauggacagcuuu

SEQ ID NO: 1022224 - RNA, 22 nt, Human
cagguaagagacggauuggccc

SEQ ID NO: 1022225 - RNA, 22 nt, Human
gcagcugcagguggucccaugc

SEQ ID NO: 1022226 - RNA, 22 nt, Human
ugcuggcucaguuugcagacuc

SEQ ID NO: 1022227 - RNA, 22 nt, Human
aaagcugcugccaaucaggcuu

SEQ ID NO: 1022228 - RNA, 18 nt, Human
aguaguggguuuagcuuc

SEQ ID NO: 1022229 - RNA, 22 nt, Human
acagauugaucuugagaauuau

SEQ ID NO: 1022230 - RNA, 22 nt, Human
guguaugaggggagaauguuuu

SEQ ID NO: 1022231 - RNA, 22 nt, Human
aguuacuugagacguuuaugaa

SEQ ID NO: 1022232 - RNA, 22 nt, Human
cauaauaucuccgauuacuugc

SEQ ID NO: 1022233 - RNA, 22 nt, Human
uccuucagcuuauuucuuagga

SEQ ID NO: 1022234 - RNA, 20 nt, Human
uccaagggcagcagaaucag

SEQ ID NO: 1022235 - RNA, 22 nt, Human
aggccuguuggcgugggcucua

SEQ ID NO: 1022236 - RNA, 22 nt, Human
gccaggcuggugcaaggauauu

SEQ ID NO: 1022237 - RNA, 22 nt, Human
cuuugaaaacuuaaauaacagc

SEQ ID NO: 1022238 - RNA, 22 nt, Human
aaucuucuuucuuaacaguaca

SEQ ID NO: 1022239 - RNA, 19 nt, Human
ucaucucacagggccuggc

SEQ ID NO: 1022240 - RNA, 20 nt, Human
cagagcugggauuugaacac

SEQ ID NO: 1022241 - RNA, 22 nt, Human
ccugccugcaccuucucugggg

SEQ ID NO: 1022242 - RNA, 22 nt, Human
gugcugucguggaacugggcug

SEQ ID NO: 1022243 - RNA, 22 nt, Human
agaugguuuugucuuuaugauu

SEQ ID NO: 1022244 - RNA, 22 nt, Human
ugaagcagaggggucuugagcu

SEQ ID NO: 1022245 - RNA, 22 nt, Human
cauugcuuccuaugucccuucu

SEQ ID NO: 1022246 - RNA, 22 nt, Human
aucugccuggcuccaggugagc

SEQ ID NO: 1022247 - RNA, 22 nt, Human
aaagauuucagaagccugugcc

SEQ ID NO: 1022248 - RNA, 22 nt, Human
ugcagggagcucuggggugcag

SEQ ID NO: 1022249 - RNA, 22 nt, Human
ucuggccuacuggaguccauga

SEQ ID NO: 1022250 - RNA, 22 nt, Human
uucuucaauuuuccauauacug

SEQ ID NO: 1022251 - RNA, 22 nt, Human
ugugggcucccccucacucugu

SEQ ID NO: 1022252 - RNA, 22 nt, Human
cagcugcccaagccccagaugu

SEQ ID NO: 1022253 - RNA, 23 nt, Human
ccagccucugggucuucauccag

SEQ ID NO: 1022254 - RNA, 20 nt, Human
uaagaacaagacuaggaagc

SEQ ID NO: 1022255 - RNA, 19 nt, Human
cugggagguguucagagaa

SEQ ID NO: 1022256 - RNA, 22 nt, Human
uucuggagagaaaccuuacaaa

SEQ ID NO: 1022257 - RNA, 22 nt, Human
uggagcagagaugguggccuuc

SEQ ID NO: 1022258 - RNA, 22 nt, Human
ucacaucucccuggaggacaca

SEQ ID NO: 1022259 - RNA, 22 nt, Human
aauacauauggaauuccauguu

SEQ ID NO: 1022260 - RNA, 22 nt, Human
cagcacugcuucgcagccaggg

SEQ ID NO: 1022261 - RNA, 22 nt, Human
aguuauaugugaaaacacguau

SEQ ID NO: 1022262 - RNA, 22 nt, Human
agcaguccaacugagguggcau

SEQ ID NO: 1022263 - RNA, 22 nt, Human
gacacauagaucuaucucacuc

SEQ ID NO: 1022264 - RNA, 22 nt, Human
ucccaggguccucuucuggaau

SEQ ID NO: 1022265 - RNA, 22 nt, Human
guucuucaguaaaauuaaaugu

SEQ ID NO: 1022266 - RNA, 22 nt, Human
caggcugcagaggccuuucaug

SEQ ID NO: 1022267 - RNA, 22 nt, Human
caggucccgccccgggcugacc

SEQ ID NO: 1022268 - RNA, 22 nt, Human
ggggcuguuuuuggaauggcug

SEQ ID NO: 1022269 - RNA, 19 nt, Human
uucauucuuucuacuuacc

SEQ ID NO: 1022270 - RNA, 22 nt, Human
aaagaauagccuuuguccaaau

SEQ ID NO: 1022271 - RNA, 22 nt, Human
cagaagcagugagagaugugca

SEQ ID NO: 1022272 - RNA, 22 nt, Human
aaaugugucaguuucauucucu

SEQ ID NO: 1022273 - RNA, 22 nt, Human
auuucucagcacuuccuaucuc

SEQ ID NO: 1022274 - RNA, 20 nt, Human
cuuagaaauuuuuacccugg

SEQ ID NO: 1022275 - RNA, 22 nt, Human
cagcauuuaucuuguagcagga

SEQ ID NO: 1022276 - RNA, 22 nt, Human
ggucucuguugccuccaucaag

SEQ ID NO: 1022277 - RNA, 22 nt, Human
ucagcuuuggucacauugaguu

SEQ ID NO: 1022278 - RNA, 22 nt, Human
ucaguagcagaaagcaaugagu

SEQ ID NO: 1022279 - RNA, 22 nt, Human
ggcagcucugaugaugcucugg

SEQ ID NO: 1022280 - RNA, 22 nt, Human
gagaggcugaaaucacaggagc

SEQ ID NO: 1022281 - RNA, 22 nt, Human
cugugcuggagaugggccagag

SEQ ID NO: 1022282 - RNA, 22 nt, Human
acuuccuggcguagcugacauu

SEQ ID NO: 1022283 - RNA, 22 nt, Human
ugaccaaaggugguuuauuugg

SEQ ID NO: 1022284 - RNA, 22 nt, Human
cugggaggacaacuuggagcuc

SEQ ID NO: 1022285 - RNA, 18 nt, Human
ucugucucuguccuugcu

SEQ ID NO: 1022286 - RNA, 22 nt, Human
ugcaugugcccacucuggcuua

SEQ ID NO: 1022287 - RNA, 22 nt, Human
gguggccugcccugaucccugg

SEQ ID NO: 1022288 - RNA, 22 nt, Human
aaauuauuaugccccucuauaa

SEQ ID NO: 1022289 - RNA, 22 nt, Human
ugaaaugauaucugauaacaaa

SEQ ID NO: 1022290 - RNA, 20 nt, Human
accuuucaaaugauucagca

SEQ ID NO: 1022291 - RNA, 22 nt, Human
agaaaacauuacauaggugugu

SEQ ID NO: 1022292 - RNA, 22 nt, Human
cucagaagccuucagucuuggc

SEQ ID NO: 1022293 - RNA, 22 nt, Human
ugcagggcuacaggacuacaac

SEQ ID NO: 1022294 - RNA, 22 nt, Human
acaugauuaaaagauuuuaaag

SEQ ID NO: 1022295 - RNA, 22 nt, Human
uugacacagaucaauauucaac

SEQ ID NO: 1022296 - RNA, 22 nt, Human
agaguggggaagguguugagaa

SEQ ID NO: 1022297 - RNA, 22 nt, Human
ugaagcaggaaccagcagcauu

SEQ ID NO: 1022298 - RNA, 22 nt, Human
aagacauugucauuuuauaauu

SEQ ID NO: 1022299 - RNA, 22 nt, Human
gcaggcaggagcccaacugccu

SEQ ID NO: 1022300 - RNA, 22 nt, Human
agcugcucuugggugacuucaa

SEQ ID NO: 1022301 - RNA, 22 nt, Human
gugauaaaauucaaauagcucu

SEQ ID NO: 1022302 - RNA, 22 nt, Human
cggggcugcucguccuccugug

SEQ ID NO: 1022303 - RNA, 22 nt, Human
gccagcagccacagaagucacu

SEQ ID NO: 1022304 - RNA, 22 nt, Human
aauuucagaccauuugcaauua

SEQ ID NO: 1022305 - RNA, 22 nt, Human
uuccaagagcuuuaauuguuga

SEQ ID NO: 1022306 - RNA, 22 nt, Human
caaaugaagaaccuucucaccu

SEQ ID NO: 1022307 - RNA, 22 nt, Human
ucaagagauugaauaauaacug

SEQ ID NO: 1022308 - RNA, 22 nt, Human
agggcagccaugagccuucagg

SEQ ID NO: 1022309 - RNA, 22 nt, Human
agaaauguggaucguuuuaaaa

SEQ ID NO: 1022310 - RNA, 22 nt, Human
uucugucaaacucacaggccga

SEQ ID NO: 1022311 - RNA, 17 nt, Human
cuggagccaagagggcc

SEQ ID NO: 1022312 - RNA, 22 nt, Human
caggaggaacaagagguucugg

SEQ ID NO: 1022313 - RNA, 22 nt, Human
ugggccuccaauuccagcggga

SEQ ID NO: 1022314 - RNA, 23 nt, Human
gcugagguacauuuacaggaaga

SEQ ID NO: 1022315 - RNA, 22 nt, Human
uuccauaaugagauucccagcc

SEQ ID NO: 1022316 - RNA, 22 nt, Human
ccagcugcugugcagggaggcu

SEQ ID NO: 1022317 - RNA, 22 nt, Human
cagcugccuguauuguccucau

SEQ ID NO: 1022318 - RNA, 20 nt, Human
aagcaauauagugcaaaugu

SEQ ID NO: 1022319 - RNA, 22 nt, Human
gagacauggcaaaagcacuggu

SEQ ID NO: 1022320 - RNA, 22 nt, Human
agaggccuccgaaaggugggcu

SEQ ID NO: 1022321 - RNA, 22 nt, Human
cuugaauccaaaugggagauga

SEQ ID NO: 1022322 - RNA, 22 nt, Human
cuugaaagauuuggccucugug

SEQ ID NO: 1022323 - RNA, 22 nt, Human
agggcacaagacucugagcccc

SEQ ID NO: 1022324 - RNA, 22 nt, Human
aagcacaaugaacaucuuagau

SEQ ID NO: 1022325 - RNA, 22 nt, Human
aucuuccuucacuuucucccac

SEQ ID NO: 1022326 - RNA, 22 nt, Human
gccaggugcauggcugagucuc

SEQ ID NO: 1022327 - RNA, 22 nt, Human
agugggaggcggcugacgggcg

SEQ ID NO: 1022328 - RNA, 22 nt, Human
uucuaacucuguuauguguuuc

SEQ ID NO: 1022329 - RNA, 22 nt, Human
gcaggaguguggugggacaucc

SEQ ID NO: 1022330 - RNA, 22 nt, Human
cugggccucaaucucagaguuu

SEQ ID NO: 1022331 - RNA, 22 nt, Human
ucagggcaagucucagaagguu

SEQ ID NO: 1022332 - RNA, 22 nt, Human
cacauuucuaggaaauuaaaug

SEQ ID NO: 1022333 - RNA, 22 nt, Human
gaccucagugaauggucaugua

SEQ ID NO: 1022334 - RNA, 22 nt, Human
uagugcuuuaaguuuacagaga

SEQ ID NO: 1022335 - RNA, 22 nt, Human
aaugagcugcugcuguuccacc

SEQ ID NO: 1022336 - RNA, 22 nt, Human
ugggacugcucuugcugggguc

SEQ ID NO: 1022337 - RNA, 22 nt, Human
ucagaacagaagaaggaacacg

SEQ ID NO: 1022338 - RNA, 22 nt, Human
ugaagcagagugaaggugaauu

SEQ ID NO: 1022339 - RNA, 22 nt, Human
uccaggcaucuguauuuuuuaa

SEQ ID NO: 1022340 - RNA, 22 nt, Human
cugcuguggaugcaggaccuca

SEQ ID NO: 1022341 - RNA, 22 nt, Human
agggaaaguaagcauuucauua

SEQ ID NO: 1022342 - RNA, 22 nt, Human
ugcuucuggaaacaguggcugu

SEQ ID NO: 1022343 - RNA, 22 nt, Human
aucaguuuaaaugggcuguugg

SEQ ID NO: 1022344 - RNA, 22 nt, Human
uuauuagggugguuuauguucu

SEQ ID NO: 1022345 - RNA, 18 nt, Human
cucucuggucuggauccc

SEQ ID NO: 1022346 - RNA, 19 nt, Human
agggagaauuccaagagga

SEQ ID NO: 1022347 - RNA, 22 nt, Human
uucuguuuuagaaauaaguagu

SEQ ID NO: 1022348 - RNA, 22 nt, Human
cagcugucuaaguugagcagga

SEQ ID NO: 1022349 - RNA, 22 nt, Human
uacaguaaccuuauuugucauu

SEQ ID NO: 1022350 - RNA, 22 nt, Human
cagagcuggccugugauuuuug

SEQ ID NO: 1022351 - RNA, 22 nt, Human
gggcuccaacggugagcaugga

SEQ ID NO: 1022352 - RNA, 22 nt, Human
ggcuccugaaagacuaugggaa

SEQ ID NO: 1022353 - RNA, 22 nt, Human
agccagaggccagccugccuca

SEQ ID NO: 1022354 - RNA, 22 nt, Human
caggacagagcccagacugugu

SEQ ID NO: 1022355 - RNA, 22 nt, Human
aaacagcugucauuguuuuaaa

SEQ ID NO: 1022356 - RNA, 22 nt, Human
cuccagggcagcauggcagugg

SEQ ID NO: 1022357 - RNA, 22 nt, Human
uucuuguaauuuggagaaauga

SEQ ID NO: 1022358 - RNA, 22 nt, Human
uuuccuuccagguuccuaaggc

SEQ ID NO: 1022359 - RNA, 22 nt, Human
ccagcuccaggacugggagcug

SEQ ID NO: 1022360 - RNA, 21 nt, Human
gacaaagugaagcaggcagga

SEQ ID NO: 1022361 - RNA, 22 nt, Human
cacauuuaaagguugaagcuga

SEQ ID NO: 1022362 - RNA, 22 nt, Human
ggagacaguauggcuuguagcu

SEQ ID NO: 1022363 - RNA, 22 nt, Human
cagggcagggagcuuagaauga

SEQ ID NO: 1022364 - RNA, 22 nt, Human
ugaaugauacagaauuauguag

SEQ ID NO: 1022365 - RNA, 22 nt, Human
uauuuucuggacagucuugcuu

SEQ ID NO: 1022366 - RNA, 23 nt, Human
uugcuucugugcaauucaguacu

SEQ ID NO: 1022367 - RNA, 21 nt, Human
acagacagggccagugucccc

SEQ ID NO: 1022368 - RNA, 21 nt, Human
aauaaaacaguuggugucaau

SEQ ID NO: 1022369 - RNA, 22 nt, Human
cuggcagcuucaggacacucgg

SEQ ID NO: 1022370 - RNA, 22 nt, Human
gcagggcagccacaggcccccu

SEQ ID NO: 1022371 - RNA, 22 nt, Human
gcucucuggaggccauggacag

SEQ ID NO: 1022372 - RNA, 22 nt, Human
cuuccugcauugugccagaguu

SEQ ID NO: 1022373 - RNA, 22 nt, Human
uauuuccaaaagccuauuauga

SEQ ID NO: 1022374 - RNA, 22 nt, Human
cagagccccucagcucucuccc

SEQ ID NO: 1022375 - RNA, 22 nt, Human
aaaugcacacaccaggaaacua

SEQ ID NO: 1022376 - RNA, 22 nt, Human
uaugaacucuggagucugagug

SEQ ID NO: 1022377 - RNA, 22 nt, Human
cugugcccuggccaggccucuc

SEQ ID NO: 1022378 - RNA, 22 nt, Human
ucacaggagggagagacaccca

SEQ ID NO: 1022379 - RNA, 22 nt, Human
ugcuuuaucugacuuggcgcug

SEQ ID NO: 1022380 - RNA, 22 nt, Human
uccacugcagcuucugauggaa

SEQ ID NO: 1022381 - RNA, 22 nt, Human
gcuggagcugaguucccugggc

SEQ ID NO: 1022382 - RNA, 22 nt, Human
gccacccccaaguagguggucu

SEQ ID NO: 1022383 - RNA, 19 nt, Human
guggccugcgcugggugcg

SEQ ID NO: 1022384 - RNA, 22 nt, Human
uggcacugggaugcuacuguua

SEQ ID NO: 1022385 - RNA, 22 nt, Human
augcugagugagugaaacccag

SEQ ID NO: 1022386 - RNA, 22 nt, Human
uaaguucaagucuuggauauaa

SEQ ID NO: 1022387 - RNA, 22 nt, Human
uagauauggccgucuguuuuaa

SEQ ID NO: 1022388 - RNA, 22 nt, Human
aaggcaggaugcggacccaucu

SEQ ID NO: 1022389 - RNA, 22 nt, Human
agcuggcagucauccuagugag

SEQ ID NO: 1022390 - RNA, 22 nt, Human
agucuugcauuuucugaagaug

SEQ ID NO: 1022391 - RNA, 22 nt, Human
ugcucugcaagcaggagcaaga

SEQ ID NO: 1022392 - RNA, 22 nt, Human
gcagagaggaaugaagccaucc

SEQ ID NO: 1022393 - RNA, 22 nt, Human
gcugccacuuggucaugucaug

SEQ ID NO: 1022394 - RNA, 22 nt, Human
aaggcagcaccgccuccugaaa

SEQ ID NO: 1022395 - RNA, 22 nt, Human
cacugccugugagcugugugcc

SEQ ID NO: 1022396 - RNA, 22 nt, Human
ucuggcucuguguccccaccca

SEQ ID NO: 1022397 - RNA, 22 nt, Human
auuagggaaacugacuugucuc

SEQ ID NO: 1022398 - RNA, 22 nt, Human
ugcagggccuucuagaccaugg

SEQ ID NO: 1022399 - RNA, 22 nt, Human
cugcuguggguuaagacacugu

SEQ ID NO: 1022400 - RNA, 22 nt, Human
uuucucaguuacuagcuguggu

SEQ ID NO: 1022401 - RNA, 22 nt, Human
ucaaggugcugugcugugcuag

SEQ ID NO: 1022402 - RNA, 22 nt, Human
uccaguucuaggucacucucug

SEQ ID NO: 1022403 - RNA, 22 nt, Human
aaaguuguaauggaagaaaugc

SEQ ID NO: 1022404 - RNA, 22 nt, Human
caagauggacauaaggagagaa

SEQ ID NO: 1022405 - RNA, 22 nt, Human
accuuucacgguaucagacauc

SEQ ID NO: 1022406 - RNA, 22 nt, Human
cacugaagcuuucauucucuug

SEQ ID NO: 1022407 - RNA, 22 nt, Human
gcugguaggaagugcuccugcc

SEQ ID NO: 1022408 - RNA, 22 nt, Human
uagaauaugugguaggaucugg

SEQ ID NO: 1022409 - RNA, 22 nt, Human
auaaaguuuaaaagucaauagu

SEQ ID NO: 1022410 - RNA, 18 nt, Human
cuguccaguagacucugc

SEQ ID NO: 1022411 - RNA, 22 nt, Human
uuauuauuuuguguacagcaaa

SEQ ID NO: 1022412 - RNA, 22 nt, Human
cuacauuuuucaccgagccucu

SEQ ID NO: 1022413 - RNA, 22 nt, Human
ucucuucuugauuuucacugga

SEQ ID NO: 1022414 - RNA, 22 nt, Human
cagggccagcgcccaggcccag

SEQ ID NO: 1022415 - RNA, 22 nt, Human
uaaggcacgcauaagagggggc

SEQ ID NO: 1022416 - RNA, 22 nt, Human
ucuggcuccacaccucacugca

SEQ ID NO: 1022417 - RNA, 22 nt, Human
cugcaggaauucaaagugagcu

SEQ ID NO: 1022418 - RNA, 22 nt, Human
aacuacauuguccuuucugaag

SEQ ID NO: 1022419 - RNA, 22 nt, Human
gagauuggauuuaauggccaaa

SEQ ID NO: 1022420 - RNA, 22 nt, Human
agcagggcugcagugugucuuu

SEQ ID NO: 1022421 - RNA, 22 nt, Human
cagggcuggauccuccagacuc

SEQ ID NO: 1022422 - RNA, 22 nt, Human
gggcuucucccuaaggacucug

SEQ ID NO: 1022423 - RNA, 22 nt, Human
cagcuggcuggucagugcacaa

SEQ ID NO: 1022424 - RNA, 20 nt, Human
uguucacaguaguugcugcu

SEQ ID NO: 1022425 - RNA, 22 nt, Human
auacaacuuuaucuguaaugag

SEQ ID NO: 1022426 - RNA, 22 nt, Human
gcugagaguguaggauguuuac

SEQ ID NO: 1022427 - RNA, 22 nt, Human
uaugacuuauuucaucaguucu

SEQ ID NO: 1022428 - RNA, 22 nt, Human
cagggcucuucaucacacagua

SEQ ID NO: 1022429 - RNA, 20 nt, Human
uggcuccucuuggcuguggc

SEQ ID NO: 1022430 - RNA, 22 nt, Human
ucucaggccccugaguuucucu

SEQ ID NO: 1022431 - RNA, 22 nt, Human
ggugauuuucgaguuucauguu

SEQ ID NO: 1022432 - RNA, 20 nt, Human
gccuguccugagugucaugg

SEQ ID NO: 1022433 - RNA, 22 nt, Human
ugucacagggauaccauggggc

SEQ ID NO: 1022434 - RNA, 22 nt, Human
gugccuuccccgguggucuguu

SEQ ID NO: 1022435 - RNA, 22 nt, Human
ggcugcucuucuuggcgaccuc

SEQ ID NO: 1022436 - RNA, 22 nt, Human
ugguccagaugccuuggcuuua

SEQ ID NO: 1022437 - RNA, 22 nt, Human
augauauuugcaaugugcuugc

SEQ ID NO: 1022438 - RNA, 22 nt, Human
cugagccaaaaagcagagcuug

SEQ ID NO: 1022439 - RNA, 22 nt, Human
ccucauggccuugagcugaggg

SEQ ID NO: 1022440 - RNA, 22 nt, Human
uguguacaggccuugcuagacu

SEQ ID NO: 1022441 - RNA, 22 nt, Human
uucaaaggcaggauagcagcug

SEQ ID NO: 1022442 - RNA, 23 nt, Human
ccuggcuggauucucugcauuca

SEQ ID NO: 1022443 - RNA, 22 nt, Human
ggcagcugugaagugccucaca

SEQ ID NO: 1022444 - RNA, 22 nt, Human
ucuacccagagcuaugaccuga

SEQ ID NO: 1022445 - RNA, 22 nt, Human
cucuucuugccugaugaggcag

SEQ ID NO: 1022446 - RNA, 22 nt, Human
ggcagcuccucaaaaaauuaaa

SEQ ID NO: 1022447 - RNA, 22 nt, Human
gaaaucugaaucuucuguuggu

SEQ ID NO: 1022448 - RNA, 22 nt, Human
agacuucucaguuuuauuagua

SEQ ID NO: 1022449 - RNA, 22 nt, Human
cuggcuucugggccagggcaga

SEQ ID NO: 1022450 - RNA, 22 nt, Human
aggagcuggaguccaggcaagu

SEQ ID NO: 1022451 - RNA, 23 nt, Human
ugggaccuguuugcccacagaug

SEQ ID NO: 1022452 - RNA, 22 nt, Human
uuugaauguuuuagguacuuaa

SEQ ID NO: 1022453 - RNA, 22 nt, Human
accaggcagagcugggccuuaa

SEQ ID NO: 1022454 - RNA, 22 nt, Human
agcacaggaccaaggaagcugu

SEQ ID NO: 1022455 - RNA, 20 nt, Human
ccucaggaugagggugagca

SEQ ID NO: 1022456 - RNA, 18 nt, Human
cggcagagugcuucuagc

SEQ ID NO: 1022457 - RNA, 22 nt, Human
agcuugccucuuaaucaccuca

SEQ ID NO: 1022458 - RNA, 22 nt, Human
cugaggucuagacaccccaggg

SEQ ID NO: 1022459 - RNA, 22 nt, Human
cugggccugguagggcuugaaa

SEQ ID NO: 1022460 - RNA, 22 nt, Human
guuguuuugcaggauccuuaca

SEQ ID NO: 1022461 - RNA, 22 nt, Human
cccaggacucuucacugcagcc

SEQ ID NO: 1022462 - RNA, 22 nt, Human
ugcagggacaggcucuggggau

SEQ ID NO: 1022463 - RNA, 22 nt, Human
aaauaguuuagcucucauuuca

SEQ ID NO: 1022464 - RNA, 21 nt, Human
agaaaaacacgauauaagccc

SEQ ID NO: 1022465 - RNA, 22 nt, Human
agccacagcccacaggacucuu

SEQ ID NO: 1022466 - RNA, 22 nt, Human
agggcugcaccggggcuucgcg

SEQ ID NO: 1022467 - RNA, 22 nt, Human
auguaauaggguaacauaacau

SEQ ID NO: 1022468 - RNA, 22 nt, Human
ucaaugauuagaguuuagugug

SEQ ID NO: 1022469 - RNA, 22 nt, Human
aaguuauuuccucgugacugaa

SEQ ID NO: 1022470 - RNA, 22 nt, Human
ccugggagugcacagguuucgu

SEQ ID NO: 1022471 - RNA, 22 nt, Human
agagcugccgagcuggggccau

SEQ ID NO: 1022472 - RNA, 20 nt, Human
ggcagcaggaguuuccucuu

SEQ ID NO: 1022473 - RNA, 22 nt, Human
cacugcuuuuuuggcuauguac

SEQ ID NO: 1022474 - RNA, 18 nt, Human
ucagagagcagcuuuauu

SEQ ID NO: 1022475 - RNA, 22 nt, Human
augaagucuagcaagcauugaa

SEQ ID NO: 1022476 - RNA, 18 nt, Human
ucauuuguuuugcaugaa

SEQ ID NO: 1022477 - RNA, 20 nt, Human
gggcaguggcgcuaucucag

SEQ ID NO: 1022478 - RNA, 22 nt, Human
agagugaaguaauuguuaggau

SEQ ID NO: 1022479 - RNA, 22 nt, Human
gcagcuuucuaagcuuuauugc

SEQ ID NO: 1022480 - RNA, 22 nt, Human
accugcagcugagaaaaugacu

SEQ ID NO: 1022481 - RNA, 22 nt, Human
agaaaucauucccaaacccaua

SEQ ID NO: 1022482 - RNA, 22 nt, Human
gguuuauuaaugugaacuguau

SEQ ID NO: 1022483 - RNA, 22 nt, Human
agccagggauggcagugcccag

SEQ ID NO: 1022484 - RNA, 22 nt, Human
ccuuagagaguacugggcugcc

SEQ ID NO: 1022485 - RNA, 22 nt, Human
caggccucccggugcacacuga

SEQ ID NO: 1022486 - RNA, 22 nt, Human
ggcugccucugaugugcagacg

SEQ ID NO: 1022487 - RNA, 22 nt, Human
uacauauagacaguuacucuag

SEQ ID NO: 1022488 - RNA, 19 nt, Human
ggacacagaaagcugcauu

SEQ ID NO: 1022489 - RNA, 22 nt, Human
cugagagccuccuguuggcuag

SEQ ID NO: 1022490 - RNA, 22 nt, Human
acuccagggcuccaucccuugu

SEQ ID NO: 1022491 - RNA, 22 nt, Human
aaagcuaugaggcaugcauuuc

SEQ ID NO: 1022492 - RNA, 22 nt, Human
cccugcagccggccagcucauu

SEQ ID NO: 1022493 - RNA, 22 nt, Human
gugucccagcagcacauuggcu

SEQ ID NO: 1022494 - RNA, 22 nt, Human
uuucacaagacagcuacuguug

SEQ ID NO: 1022495 - RNA, 21 nt, Human
ugggggagaauugguugcuuu

SEQ ID NO: 1022496 - RNA, 22 nt, Human
caugugucaaaugauguagcug

SEQ ID NO: 1022497 - RNA, 22 nt, Human
acauaccauacauggugagaug

SEQ ID NO: 1022498 - RNA, 22 nt, Human
ucaggcagagcuguggagcucu

SEQ ID NO: 1022499 - RNA, 17 nt, Human
auuuccucagggcugag

SEQ ID NO: 1022500 - RNA, 22 nt, Human
uccagggacacagaguccuucu

SEQ ID NO: 1022501 - RNA, 22 nt, Human
aagcccagaugugagaacugag

SEQ ID NO: 1022502 - RNA, 22 nt, Human
ugaggaggucagagucuggcug

SEQ ID NO: 1022503 - RNA, 22 nt, Human
acaauucucucauaucuuauua

SEQ ID NO: 1022504 - RNA, 22 nt, Human
gccccagcucugccacaacuag

SEQ ID NO: 1022505 - RNA, 22 nt, Human
auuugcuuaucuccacaguugu

SEQ ID NO: 1022506 - RNA, 19 nt, Human
cagaguccuugaccagucc

SEQ ID NO: 1022507 - RNA, 22 nt, Human
gcuggggagggcgucaaggcca

SEQ ID NO: 1022508 - RNA, 22 nt, Human
uccagcagguuggucaggugca

SEQ ID NO: 1022509 - RNA, 22 nt, Human
cagucccaggguugguucagcu

SEQ ID NO: 1022510 - RNA, 22 nt, Human
cacagcagaaauaugaaggcag

SEQ ID NO: 1022511 - RNA, 22 nt, Human
ucuucacauggaacaugaagcu

SEQ ID NO: 1022512 - RNA, 22 nt, Human
ccagagacgucggucagggcgc

SEQ ID NO: 1022513 - RNA, 22 nt, Human
ccagcuggagcucgcagauagg

SEQ ID NO: 1022514 - RNA, 22 nt, Human
uaagacacaugcguacaagaua

SEQ ID NO: 1022515 - RNA, 21 nt, Human
guguuuccuguuuauggcuug

SEQ ID NO: 1022516 - RNA, 22 nt, Human
ugggggacugcacuggcgucag

SEQ ID NO: 1022517 - RNA, 22 nt, Human
uuuguacauauauaaaaucugu

SEQ ID NO: 1022518 - RNA, 22 nt, Human
gaggcuguuagggccugaggua

SEQ ID NO: 1022519 - RNA, 22 nt, Human
ugaggcucaaggucugguggag

SEQ ID NO: 1022520 - RNA, 20 nt, Human
uacagaaacaggacuuuugg

SEQ ID NO: 1022521 - RNA, 22 nt, Human
ccuggcagcccagagcgccgcu

SEQ ID NO: 1022522 - RNA, 22 nt, Human
caagagcuggagaggcagucua

SEQ ID NO: 1022523 - RNA, 22 nt, Human
uacaucauaauaauacuuagaa

SEQ ID NO: 1022524 - RNA, 22 nt, Human
ugaggccagucucaucacaggc

SEQ ID NO: 1022525 - RNA, 18 nt, Human
acauacauucugucugca

SEQ ID NO: 1022526 - RNA, 22 nt, Human
caggcagcguccugcuuccugu

SEQ ID NO: 1022527 - RNA, 22 nt, Human
cuggcuuccucaggagcagugg

SEQ ID NO: 1022528 - RNA, 22 nt, Human
cacaaaugguuguagacauuaa

SEQ ID NO: 1022529 - RNA, 22 nt, Human
caggcccugggcaggaucagcc

SEQ ID NO: 1022530 - RNA, 19 nt, Human
uuuacucuccaaggugagu

SEQ ID NO: 1022531 - RNA, 20 nt, Human
agacccuguguccuguggcc

SEQ ID NO: 1022532 - RNA, 22 nt, Human
aaaugcacaggagaaccaauuc

SEQ ID NO: 1022533 - RNA, 22 nt, Human
auuauuauauagggaaaguccc

SEQ ID NO: 1022534 - RNA, 22 nt, Human
gacuucuauuaauaccucuacu

SEQ ID NO: 1022535 - RNA, 22 nt, Human
cugggcacacagugacucugca

SEQ ID NO: 1022536 - RNA, 22 nt, Human
ucugccagugguuuggcccuga

SEQ ID NO: 1022537 - RNA, 22 nt, Human
ugggccugggcuccuguccucu

SEQ ID NO: 1022538 - RNA, 22 nt, Human
uuagccaugugggaaaaacagc

SEQ ID NO: 1022539 - RNA, 22 nt, Human
ucaaacuagccugacugguauu

SEQ ID NO: 1022540 - RNA, 22 nt, Human
uggggaagggcacccuggagac

SEQ ID NO: 1022541 - RNA, 22 nt, Human
caggaacacaaugagucucaaa

SEQ ID NO: 1022542 - RNA, 22 nt, Human
gccuggagaggaagccggugga

SEQ ID NO: 1022543 - RNA, 22 nt, Human
guuccaggcaagugggauagga

SEQ ID NO: 1022544 - RNA, 22 nt, Human
guggcuucugcggugugcgcag

SEQ ID NO: 1022545 - RNA, 22 nt, Human
acagugcuaaacacuucuugaa

SEQ ID NO: 1022546 - RNA, 22 nt, Human
ucagcuuucucaaagaagcugg

SEQ ID NO: 1022547 - RNA, 22 nt, Human
uuagccaugcccuagaagagga

SEQ ID NO: 1022548 - RNA, 22 nt, Human
gcacugggaaugugagcagcug

SEQ ID NO: 1022549 - RNA, 23 nt, Human
ccuggcagcaaacgaggagguua

SEQ ID NO: 1022550 - RNA, 22 nt, Human
cagagcugggcauggugaaagg

SEQ ID NO: 1022551 - RNA, 22 nt, Human
uggucucugacucugaagaccc

SEQ ID NO: 1022552 - RNA, 17 nt, Human
uuccucucacauuuuuu

SEQ ID NO: 1022553 - RNA, 22 nt, Human
cugcccuggcagccuaccaugg

SEQ ID NO: 1022554 - RNA, 22 nt, Human
gcagcuggucuggccuagagua

SEQ ID NO: 1022555 - RNA, 22 nt, Human
aaagcagggaugaggcuagagg

SEQ ID NO: 1022556 - RNA, 21 nt, Human
uagagaaaagaagcuguuccu

SEQ ID NO: 1022557 - RNA, 22 nt, Human
gcccuggaaucucuccauggga

SEQ ID NO: 1022558 - RNA, 20 nt, Human
gcagcugcccccagucccug

SEQ ID NO: 1022559 - RNA, 22 nt, Human
cuggggcugcgguggaggagcc

SEQ ID NO: 1022560 - RNA, 22 nt, Human
ccuuggaggacugcugcuucuu

SEQ ID NO: 1022561 - RNA, 22 nt, Human
auacauguaacugcauuguaau

SEQ ID NO: 1022562 - RNA, 20 nt, Human
uguuccaugacuauuuggau

SEQ ID NO: 1022563 - RNA, 22 nt, Human
ccugccugaaggucagccaccc

SEQ ID NO: 1022564 - RNA, 21 nt, Human
cgggcuggccgggcccucacc

SEQ ID NO: 1022565 - RNA, 22 nt, Human
gaggacagugugaucugccagc

SEQ ID NO: 1022566 - RNA, 22 nt, Human
uagggcucugagaguucagccu

SEQ ID NO: 1022567 - RNA, 22 nt, Human
cugauuccugauucaugcucuu

SEQ ID NO: 1022568 - RNA, 22 nt, Human
ugggacagugugccuugcuccu

SEQ ID NO: 1022569 - RNA, 20 nt, Human
cagagaccugucuucacaga

SEQ ID NO: 1022570 - RNA, 22 nt, Human
cucccagagagcaggugggccg

SEQ ID NO: 1022571 - RNA, 22 nt, Human
gccuggagcucaugugggcauu

SEQ ID NO: 1022572 - RNA, 22 nt, Human
gccucugcucucagguagccuc

SEQ ID NO: 1022573 - RNA, 22 nt, Human
ccugggagagucuguggucucc

SEQ ID NO: 1022574 - RNA, 18 nt, Human
gcuuuauuucuuggggaa

SEQ ID NO: 1022575 - RNA, 17 nt, Human
ccaggugggaggugggg

SEQ ID NO: 1022576 - RNA, 20 nt, Human
auuucaguguuugcaauuuc

SEQ ID NO: 1022577 - RNA, 19 nt, Human
gggcuucugggaucaagag

SEQ ID NO: 1022578 - RNA, 21 nt, Human
ucaaagcacauauuugcacau

SEQ ID NO: 1022579 - RNA, 22 nt, Human
ccuuucucuggcagcaggacag

SEQ ID NO: 1022580 - RNA, 22 nt, Human
agcuggaggggccagcaggugu

SEQ ID NO: 1022581 - RNA, 22 nt, Human
cuggccagaguuggagggugug

SEQ ID NO: 1022582 - RNA, 22 nt, Human
ccuggagggcgccgcacagucc

SEQ ID NO: 1022583 - RNA, 21 nt, Human
ucacuagugccuucugucauu

SEQ ID NO: 1022584 - RNA, 22 nt, Human
gcagacagcauguugggcuauu

SEQ ID NO: 1022585 - RNA, 22 nt, Human
acaugauuggacuccuuccccu

SEQ ID NO: 1022586 - RNA, 22 nt, Human
caguacuucuuggaaacuggau

SEQ ID NO: 1022587 - RNA, 22 nt, Human
gugcucuggcuggucucccggu

SEQ ID NO: 1022588 - RNA, 22 nt, Human
acaguacauaauccugagucug

SEQ ID NO: 1022589 - RNA, 22 nt, Human
cuggcaguggggccucaguguu

SEQ ID NO: 1022590 - RNA, 22 nt, Human
ugcaguggaggccgugagacag

SEQ ID NO: 1022591 - RNA, 22 nt, Human
cuguccuguggaccugaggacg

SEQ ID NO: 1022592 - RNA, 22 nt, Human
agguauagaauugaaaggguuu

SEQ ID NO: 1022593 - RNA, 22 nt, Human
cugcucuguuaauuaaacuuug

SEQ ID NO: 1022594 - RNA, 22 nt, Human
cagagagggcggcccuggcuuc

SEQ ID NO: 1022595 - RNA, 22 nt, Human
gagcaacaguuuaugguuuuuc

SEQ ID NO: 1022596 - RNA, 23 nt, Human
ugggccuggaaagccuuagagag

SEQ ID NO: 1022597 - RNA, 20 nt, Human
cagauggcacgucagggcau

SEQ ID NO: 1022598 - RNA, 22 nt, Human
cucuuaguaaugccaugaagca

SEQ ID NO: 1022599 - RNA, 19 nt, Human
guagggacagugguucuga

SEQ ID NO: 1022600 - RNA, 22 nt, Human
gccugcuggaggagccucaggg

SEQ ID NO: 1022601 - RNA, 22 nt, Human
gacagagaggcugagcaguaca

SEQ ID NO: 1022602 - RNA, 23 nt, Human
uuucaaauuacucugcagaugac

SEQ ID NO: 1022603 - RNA, 22 nt, Human
acagcagcuaaccccugggcca

SEQ ID NO: 1022604 - RNA, 22 nt, Human
uggcccugaaucaaggccagca

SEQ ID NO: 1022605 - RNA, 22 nt, Human
ucagggcauggcugcacuuggc

SEQ ID NO: 1022606 - RNA, 22 nt, Human
ucuuuccuaggugauaugcaau

SEQ ID NO: 1022607 - RNA, 22 nt, Human
agccagcuggugggucagcugg

SEQ ID NO: 1022608 - RNA, 20 nt, Human
gaggcugcggacugcuggac

SEQ ID NO: 1022609 - RNA, 22 nt, Human
uguugauuaguguuuagacuua

SEQ ID NO: 1022610 - RNA, 16 nt, Human
ccaccugcagcucuca

SEQ ID NO: 1022611 - RNA, 20 nt, Human
ucagccagcuaacaugggga

SEQ ID NO: 1022612 - RNA, 22 nt, Human
cugcaggcugagcgccugccgg

SEQ ID NO: 1022613 - RNA, 22 nt, Human
uuguaauuugcaaauguauugu

SEQ ID NO: 1022614 - RNA, 22 nt, Human
uccuucaagaugccacagcuuu

SEQ ID NO: 1022615 - RNA, 22 nt, Human
ccugcuggccaguggagggcug

SEQ ID NO: 1022616 - RNA, 22 nt, Human
cagcaauauacacagucuaugg

SEQ ID NO: 1022617 - RNA, 22 nt, Human
uucaaaauuguucuaagcucug

SEQ ID NO: 1022618 - RNA, 22 nt, Human
acucaagauagggaaaguacaa

SEQ ID NO: 1022619 - RNA, 22 nt, Human
aaauauagugacacuuauaguc

SEQ ID NO: 1022620 - RNA, 22 nt, Human
ucuugggaagcccauuuccacc

SEQ ID NO: 1022621 - RNA, 22 nt, Human
aguauacauauauuagccuucg

SEQ ID NO: 1022622 - RNA, 18 nt, Human
ccauuucaugauuauuac

SEQ ID NO: 1022623 - RNA, 22 nt, Human
ccagcagcucccucaggguccg

SEQ ID NO: 1022624 - RNA, 20 nt, Human
gagcagcuguuugcauugca

SEQ ID NO: 1022625 - RNA, 22 nt, Human
uacugcaugguggaguggagcu

SEQ ID NO: 1022626 - RNA, 22 nt, Human
uauguacauggagagcaauuga

SEQ ID NO: 1022627 - RNA, 22 nt, Human
cugcccuguuuggacagcccgg

SEQ ID NO: 1022628 - RNA, 20 nt, Human
auguaaaauuauaaggcuga

SEQ ID NO: 1022629 - RNA, 23 nt, Human
ggggccugcaccggucugcgcgg

SEQ ID NO: 1022630 - RNA, 22 nt, Human
cauugcacgggcgucugucugu

SEQ ID NO: 1022631 - RNA, 22 nt, Human
uacuuuuugucucuuugaaugu

SEQ ID NO: 1022632 - RNA, 22 nt, Human
cacccagcacagagggaggcga

SEQ ID NO: 1022633 - RNA, 22 nt, Human
cagagcugcuucccaguuugug

SEQ ID NO: 1022634 - RNA, 22 nt, Human
acaaagucugaaaccugaggca

SEQ ID NO: 1022635 - RNA, 22 nt, Human
auuauuaggacuacugggguug

SEQ ID NO: 1022636 - RNA, 22 nt, Human
agcuagaaguacagccauauga

SEQ ID NO: 1022637 - RNA, 22 nt, Human
cagcuuguuuuauuuggggacc

SEQ ID NO: 1022638 - RNA, 20 nt, Human
uccaagcccuccuuccauuc

SEQ ID NO: 1022639 - RNA, 22 nt, Human
gcagcaggcuuuucauaccuug

SEQ ID NO: 1022640 - RNA, 22 nt, Human
uggcagaguaggauggcccugu

SEQ ID NO: 1022641 - RNA, 22 nt, Human
cucuucaaaagucuaauccuua

SEQ ID NO: 1022642 - RNA, 22 nt, Human
uugaagcacaaugucuuuuauc

SEQ ID NO: 1022643 - RNA, 22 nt, Human
gccuggagagcacugugcgcuu

SEQ ID NO: 1022644 - RNA, 22 nt, Human
aaagagcuaacauugccgagau

SEQ ID NO: 1022645 - RNA, 21 nt, Human
ucugagagcaacugcccuuua

SEQ ID NO: 1022646 - RNA, 22 nt, Human
uccuugaagagugggcggucga

SEQ ID NO: 1022647 - RNA, 22 nt, Human
uuagauaaauugcaacuugauu

SEQ ID NO: 1022648 - RNA, 22 nt, Human
aggccuuaccauagcuguagca

SEQ ID NO: 1022649 - RNA, 22 nt, Human
gggcagggguagcauuccaagu

SEQ ID NO: 1022650 - RNA, 22 nt, Human
uggcagcuguguccagguagaa

SEQ ID NO: 1022651 - RNA, 22 nt, Human
gugacagucaaagacaugacuu

SEQ ID NO: 1022652 - RNA, 22 nt, Human
aauacugccugugagguaacuc

SEQ ID NO: 1022653 - RNA, 22 nt, Human
aaaguuugucacuuggcuagaa

SEQ ID NO: 1022654 - RNA, 22 nt, Human
uuugacagauccuuaacucagc

SEQ ID NO: 1022655 - RNA, 22 nt, Human
aacaaauguaaaaugcagaugc

SEQ ID NO: 1022656 - RNA, 22 nt, Human
cugagcugcucccgcugcagcg

SEQ ID NO: 1022657 - RNA, 22 nt, Human
uucaucaauguguuuaauaaug

SEQ ID NO: 1022658 - RNA, 22 nt, Human
uuaaauuuuagaaacagacucu

SEQ ID NO: 1022659 - RNA, 22 nt, Human
ucagcaaugugauacugugcaa

SEQ ID NO: 1022660 - RNA, 22 nt, Human
aacaaauggggccuuguaugaa

SEQ ID NO: 1022661 - RNA, 22 nt, Human
ggaaagagcccagcagugcuug

SEQ ID NO: 1022662 - RNA, 22 nt, Human
ucucuucuaacacuagaaauuc

SEQ ID NO: 1022663 - RNA, 22 nt, Human
ccugaggcuuaaucugucccaa

SEQ ID NO: 1022664 - RNA, 22 nt, Human
cacucaggguacaauggagggc

SEQ ID NO: 1022665 - RNA, 22 nt, Human
auuuggcaacauuaauugaauc

SEQ ID NO: 1022666 - RNA, 22 nt, Human
ucauuucaaguucugacagcua

SEQ ID NO: 1022667 - RNA, 22 nt, Human
agggcccauagaucgucagcuu

SEQ ID NO: 1022668 - RNA, 18 nt, Human
uggcucuggacuugcucc

SEQ ID NO: 1022669 - RNA, 22 nt, Human
auugaaagcauggauuuggauu

SEQ ID NO: 1022670 - RNA, 22 nt, Human
ucucagagaugucaagagucua

SEQ ID NO: 1022671 - RNA, 22 nt, Human
cagagguagaaggcaugcagug

SEQ ID NO: 1022672 - RNA, 22 nt, Human
ccagaggaaaaauaucucccua

SEQ ID NO: 1022673 - RNA, 20 nt, Human
uucacagaggacucagguca

SEQ ID NO: 1022674 - RNA, 22 nt, Human
agcaggguuccaggaguugcag

SEQ ID NO: 1022675 - RNA, 22 nt, Human
aacaggagaguaaauauaugau

SEQ ID NO: 1022676 - RNA, 22 nt, Human
ugcaucuguucagagcugucga

SEQ ID NO: 1022677 - RNA, 22 nt, Human
gcuggggcugggcugaggaaga

SEQ ID NO: 1022678 - RNA, 22 nt, Human
acuaaagaagccaaaguuuucu

SEQ ID NO: 1022679 - RNA, 22 nt, Human
agcaaagucaguggaaccaucc

SEQ ID NO: 1022680 - RNA, 22 nt, Human
caggccagugugcuucccaggc

SEQ ID NO: 1022681 - RNA, 22 nt, Human
ggaagagccuggggugucaggc

SEQ ID NO: 1022682 - RNA, 22 nt, Human
cacagcuggugcacuagcucug

SEQ ID NO: 1022683 - RNA, 22 nt, Human
uuauucagauuggcuacaggau

SEQ ID NO: 1022684 - RNA, 22 nt, Human
aaaugucuaucuggcauauucc

SEQ ID NO: 1022685 - RNA, 22 nt, Human
ucugucugcgcuugcccuggug

SEQ ID NO: 1022686 - RNA, 21 nt, Human
gauuugcagaaacuagacagg

SEQ ID NO: 1022687 - RNA, 22 nt, Human
aagagagagcauucuucuguua

SEQ ID NO: 1022688 - RNA, 23 nt, Human
agcagccagagauccucggcccu

SEQ ID NO: 1022689 - RNA, 22 nt, Human
ugucacauaggcaaaauguuuu

SEQ ID NO: 1022690 - RNA, 22 nt, Human
gaggcagagucacaaagagucu

SEQ ID NO: 1022691 - RNA, 22 nt, Human
uguuaggguccugugcaggggc

SEQ ID NO: 1022692 - RNA, 22 nt, Human
ggggcagcucccgagggcagga

SEQ ID NO: 1022693 - RNA, 22 nt, Human
ucacugaagacugggcucuaaa

SEQ ID NO: 1022694 - RNA, 22 nt, Human
auccagagacccaaggacagaa

SEQ ID NO: 1022695 - RNA, 22 nt, Human
uucugucacuuaggaggucaua

SEQ ID NO: 1022696 - RNA, 22 nt, Human
cugcugugugaccauggacagg

SEQ ID NO: 1022697 - RNA, 22 nt, Human
aaugcuagugugauauguaagg

SEQ ID NO: 1022698 - RNA, 22 nt, Human
gagcagugggaaggaacagggu

SEQ ID NO: 1022699 - RNA, 22 nt, Human
gagcagcugcagugcagacccu

SEQ ID NO: 1022700 - RNA, 22 nt, Human
ugcccacauggugccauggcca

SEQ ID NO: 1022701 - RNA, 22 nt, Human
cagggccauuggcguggcuguc

SEQ ID NO: 1022702 - RNA, 22 nt, Human
gcuuccucgcugggcagaggca

SEQ ID NO: 1022703 - RNA, 22 nt, Human
agcugcuccuuuccugcaggcg

SEQ ID NO: 1022704 - RNA, 22 nt, Human
cucaggauggaagccuacagga

SEQ ID NO: 1022705 - RNA, 22 nt, Human
aaggacuccaauucuuucaucu

SEQ ID NO: 1022706 - RNA, 22 nt, Human
gcugcucuugaggggcucacug

SEQ ID NO: 1022707 - RNA, 22 nt, Human
agucccagugagaugagccacg

SEQ ID NO: 1022708 - RNA, 22 nt, Human
ucucugcucugugccucaguuu

SEQ ID NO: 1022709 - RNA, 22 nt, Human
ccagagagggcgccaccuggag

SEQ ID NO: 1022710 - RNA, 22 nt, Human
caggcugcggucggcucugguc

SEQ ID NO: 1022711 - RNA, 22 nt, Human
ccucagagguguggcaucucug

SEQ ID NO: 1022712 - RNA, 22 nt, Human
acagauuuuaaaugacacuccc

SEQ ID NO: 1022713 - RNA, 22 nt, Human
gcagcguggggacaggagcuca

SEQ ID NO: 1022714 - RNA, 23 nt, Human
agaugaaagcuucccaucacagu

SEQ ID NO: 1022715 - RNA, 22 nt, Human
aaauauagcaauuaugccuacu

SEQ ID NO: 1022716 - RNA, 22 nt, Human
ugucucugccagcuagcagaau

SEQ ID NO: 1022717 - RNA, 22 nt, Human
ugggaauggaugcuaagugcua

SEQ ID NO: 1022718 - RNA, 22 nt, Human
guggcagcaaaauccugcauuc

SEQ ID NO: 1022719 - RNA, 22 nt, Human
cacugaagguaggaccaaggcu

SEQ ID NO: 1022720 - RNA, 22 nt, Human
gaaggagggugcggaucugagc

SEQ ID NO: 1022721 - RNA, 22 nt, Human
ccuccagcugccucagucucuu

SEQ ID NO: 1022722 - RNA, 22 nt, Human
uuaaacauuuauggaggcagca

SEQ ID NO: 1022723 - RNA, 22 nt, Human
cuuauaaaguccaucugaacaa

SEQ ID NO: 1022724 - RNA, 23 nt, Human
agccagggcacugguggagauug

SEQ ID NO: 1022725 - RNA, 22 nt, Human
guggccuuuccugaagaaauga

SEQ ID NO: 1022726 - RNA, 22 nt, Human
ccccaccugugcgucugccgca

SEQ ID NO: 1022727 - RNA, 22 nt, Human
uggccugggucacaccaggguc

SEQ ID NO: 1022728 - RNA, 22 nt, Human
cgccaggcuugguagcucaugc

SEQ ID NO: 1022729 - RNA, 22 nt, Human
ucucagaguuuacggggcugaa

SEQ ID NO: 1022730 - RNA, 22 nt, Human
ugguaaagaaggcuagaucuga

SEQ ID NO: 1022731 - RNA, 22 nt, Human
uauuuccaagcugaauccaaug

SEQ ID NO: 1022732 - RNA, 19 nt, Human
ccucuccgcccaccagccc

SEQ ID NO: 1022733 - RNA, 22 nt, Human
guguaaggugaaaucaacaaau

SEQ ID NO: 1022734 - RNA, 22 nt, Human
ggcagcugcaaaucugcucugu

SEQ ID NO: 1022735 - RNA, 22 nt, Human
cauacuuugggauaagagugga

SEQ ID NO: 1022736 - RNA, 22 nt, Human
aucuccaggcauuucaagagac

SEQ ID NO: 1022737 - RNA, 22 nt, Human
auggcaggcccagguguucauu

SEQ ID NO: 1022738 - RNA, 22 nt, Human
agccagcaugaagacagaggcc

SEQ ID NO: 1022739 - RNA, 22 nt, Human
accauccugaaaccuucaugcu

SEQ ID NO: 1022740 - RNA, 22 nt, Human
uuguuuucacagcuuugcccgg

SEQ ID NO: 1022741 - RNA, 22 nt, Human
uuauccaagcagaagcugcaca

SEQ ID NO: 1022742 - RNA, 22 nt, Human
uggcuggggccugaauccugca

SEQ ID NO: 1022743 - RNA, 22 nt, Human
cagagccugccaccuuucuccc

SEQ ID NO: 1022744 - RNA, 22 nt, Human
ugcauuguuuagaacucuuugg

SEQ ID NO: 1022745 - RNA, 22 nt, Human
ucucagagggaaacaugaguga

SEQ ID NO: 1022746 - RNA, 22 nt, Human
cucagagaaccuaagcggagga

SEQ ID NO: 1022747 - RNA, 22 nt, Human
uuaacagacauauauauuugua

SEQ ID NO: 1022748 - RNA, 22 nt, Human
acugucuccucaucaugccugg

SEQ ID NO: 1022749 - RNA, 22 nt, Human
ggccaggaagggaagaucagca

SEQ ID NO: 1022750 - RNA, 22 nt, Human
ccagagagaguacugggcucug

SEQ ID NO: 1022751 - RNA, 22 nt, Human
acagguggcuuauuggcugauu

SEQ ID NO: 1022752 - RNA, 22 nt, Human
uggugcuguggaggggcagaag

SEQ ID NO: 1022753 - RNA, 22 nt, Human
agcuggguggagggcccacggu

SEQ ID NO: 1022754 - RNA, 22 nt, Human
cagcaauaguguguuuguuuca

SEQ ID NO: 1022755 - RNA, 22 nt, Human
uagugcuuuaggccugaguguc

SEQ ID NO: 1022756 - RNA, 22 nt, Human
gggcauggugaugugcaccugu

SEQ ID NO: 1022757 - RNA, 21 nt, Human
ugauccuuucccccauguugc

SEQ ID NO: 1022758 - RNA, 22 nt, Human
gggaaggagccugcuugcuaga

SEQ ID NO: 1022759 - RNA, 22 nt, Human
acuauaaaaggauaaaccagaa

SEQ ID NO: 1022760 - RNA, 22 nt, Human
gaaggaaaucugugauuuaugc

SEQ ID NO: 1022761 - RNA, 22 nt, Human
ucagggcagaauccaaagaauu

SEQ ID NO: 1022762 - RNA, 22 nt, Human
gcugcagcaagcccuccagggg

SEQ ID NO: 1022763 - RNA, 22 nt, Human
uguaaauaaugcauguaaauca

SEQ ID NO: 1022764 - RNA, 22 nt, Human
ucagagagguuaaauaucuugu

SEQ ID NO: 1022765 - RNA, 22 nt, Human
uggaggaugccauccaggauac

SEQ ID NO: 1022766 - RNA, 22 nt, Human
aaacacauuuuaggaaaaucua

SEQ ID NO: 1022767 - RNA, 22 nt, Human
cccaggcagaauuaguguuuca

SEQ ID NO: 1022768 - RNA, 22 nt, Human
cagaguguuucuuugggugggu

SEQ ID NO: 1022769 - RNA, 22 nt, Human
gcugaaggaggcucugguacua

SEQ ID NO: 1022770 - RNA, 22 nt, Human
ucauuauccuaguaucuugaau

SEQ ID NO: 1022771 - RNA, 22 nt, Human
cugcugagguccuugcucagac

SEQ ID NO: 1022772 - RNA, 22 nt, Human
cuggcucaauuuguacugcugu

SEQ ID NO: 1022773 - RNA, 22 nt, Human
ggcagccauacucagaccuggg

SEQ ID NO: 1022774 - RNA, 22 nt, Human
uccaggccacugcagaggcucu

SEQ ID NO: 1022775 - RNA, 22 nt, Human
agcauggggcuccgcaaugaac

SEQ ID NO: 1022776 - RNA, 22 nt, Human
gucugucuguuguugagaagca

SEQ ID NO: 1022777 - RNA, 22 nt, Human
gaaaggucuuccggucuuccag

SEQ ID NO: 1022778 - RNA, 22 nt, Human
ugaaaaaccucaguccgcuuua

SEQ ID NO: 1022779 - RNA, 22 nt, Human
ugcuagaauuugcagaagcaua

SEQ ID NO: 1022780 - RNA, 22 nt, Human
ugaaaugaaugugauucgauag

SEQ ID NO: 1022781 - RNA, 22 nt, Human
ucuuugcacugugcaagcagaa

SEQ ID NO: 1022782 - RNA, 22 nt, Human
cauuauguucaguagcuuaaaa

SEQ ID NO: 1022783 - RNA, 22 nt, Human
ccuccagggcagacggggagca

SEQ ID NO: 1022784 - RNA, 22 nt, Human
cacuccagccucagugacagag

SEQ ID NO: 1022785 - RNA, 22 nt, Human
agacccagaaagcagcugcauu

SEQ ID NO: 1022786 - RNA, 22 nt, Human
cugggagcuagcucugagcuga

SEQ ID NO: 1022787 - RNA, 22 nt, Human
aauuuuaaucaguggugcugag

SEQ ID NO: 1022788 - RNA, 21 nt, Human
ccugggccaaauucccuggac

SEQ ID NO: 1022789 - RNA, 22 nt, Human
aaggccagaguacuagaggcug

SEQ ID NO: 1022790 - RNA, 22 nt, Human
ucugccugcaguguggcagggc

SEQ ID NO: 1022791 - RNA, 22 nt, Human
agggcagcacagcugugcuccu

SEQ ID NO: 1022792 - RNA, 22 nt, Human
gugauuccuauuaguacaugca

SEQ ID NO: 1022793 - RNA, 22 nt, Human
ucaguuaacaacuauuuauuga

SEQ ID NO: 1022794 - RNA, 22 nt, Human
gugggggcaggcagugcuagga

SEQ ID NO: 1022795 - RNA, 22 nt, Human
ccuggggcucaagauggcgccg

SEQ ID NO: 1022796 - RNA, 22 nt, Human
agggcuccaggggaccaucagu

SEQ ID NO: 1022797 - RNA, 22 nt, Human
ggucauugucagagccuguacu

SEQ ID NO: 1022798 - RNA, 22 nt, Human
gcucccacaaccuucuugcucc

SEQ ID NO: 1022799 - RNA, 19 nt, Human
ggcucucccuugagagagc

SEQ ID NO: 1022800 - RNA, 22 nt, Human
augcugugaaaaagaaggcuga

SEQ ID NO: 1022801 - RNA, 22 nt, Human
acuuccuguguuggucuugcug

SEQ ID NO: 1022802 - RNA, 22 nt, Human
acucugggccccagguggagcu

SEQ ID NO: 1022803 - RNA, 22 nt, Human
aacaugauggggaagaacaaga

SEQ ID NO: 1022804 - RNA, 22 nt, Human
gccuggaguggacuuggccccu

SEQ ID NO: 1022805 - RNA, 22 nt, Human
agcugagagguggcaagcugua

SEQ ID NO: 1022806 - RNA, 22 nt, Human
cucuuuccucagccacagucua

SEQ ID NO: 1022807 - RNA, 23 nt, Human
cagcugaagcagccugggcugga

SEQ ID NO: 1022808 - RNA, 20 nt, Human
caggaugauuggacacgaug

SEQ ID NO: 1022809 - RNA, 22 nt, Human
cugcuuuguguggucccuccag

SEQ ID NO: 1022810 - RNA, 22 nt, Human
caggcuggagugcaguugugca

SEQ ID NO: 1022811 - RNA, 22 nt, Human
uguccauggauagagcugcucg

SEQ ID NO: 1022812 - RNA, 22 nt, Human
agcaguggagcgagauguuuaa

SEQ ID NO: 1022813 - RNA, 22 nt, Human
cucuggcuucuaccuugcaguu

SEQ ID NO: 1022814 - RNA, 22 nt, Human
gcuggcugggucccugagaggc

SEQ ID NO: 1022815 - RNA, 22 nt, Human
agcugccauccuguucagcacc

SEQ ID NO: 1022816 - RNA, 22 nt, Human
uacaaagagguaauugcauaua

SEQ ID NO: 1022817 - RNA, 22 nt, Human
gagaagcaauuuccaacugugc

SEQ ID NO: 1022818 - RNA, 22 nt, Human
ucagaagcauguggggagccug

SEQ ID NO: 1022819 - RNA, 22 nt, Human
aggacuuagaacauuauguacu

SEQ ID NO: 1022820 - RNA, 22 nt, Human
uugcuucaguagcucuuuaaag

SEQ ID NO: 1022821 - RNA, 22 nt, Human
agggcagcagcuccuccuagcu

SEQ ID NO: 1022822 - RNA, 22 nt, Human
gugggagcugcggaggccuggg

SEQ ID NO: 1022823 - RNA, 22 nt, Human
cuucucuucccagggacacagg

SEQ ID NO: 1022824 - RNA, 22 nt, Human
cagaguguuagcgcugguuggg

SEQ ID NO: 1022825 - RNA, 22 nt, Human
guugacagcuggugagcugcua

SEQ ID NO: 1022826 - RNA, 22 nt, Human
cugucccagauguucucagcac

SEQ ID NO: 1022827 - RNA, 22 nt, Human
agaugagggguagaaaggacuu

SEQ ID NO: 1022828 - RNA, 22 nt, Human
uggccugccccgagauccuggc

SEQ ID NO: 1022829 - RNA, 22 nt, Human
auucauuugcuauuguguaugg

SEQ ID NO: 1022830 - RNA, 22 nt, Human
cagaagaaaguggggagacaag

SEQ ID NO: 1022831 - RNA, 22 nt, Human
uauuucaugugcaccauaauuc

SEQ ID NO: 1022832 - RNA, 22 nt, Human
ccaaggagcaaggcucaacaag

SEQ ID NO: 1022833 - RNA, 22 nt, Human
cccagcaggucggugcugccug

SEQ ID NO: 1022834 - RNA, 22 nt, Human
gucccacaccuugaggggucuu

SEQ ID NO: 1022835 - RNA, 19 nt, Human
uugcauuguaguuggacug

SEQ ID NO: 1022836 - RNA, 22 nt, Human
gacagcaggagaucaugauaga

SEQ ID NO: 1022837 - RNA, 22 nt, Human
cuuaaauuuucaucuacaagaa

SEQ ID NO: 1022838 - RNA, 22 nt, Human
augauacaucuucaugucagug

SEQ ID NO: 1022839 - RNA, 22 nt, Human
uauugaugcuuggauugggcca

SEQ ID NO: 1022840 - RNA, 22 nt, Human
ugcauguguuugccacagugag

SEQ ID NO: 1022841 - RNA, 22 nt, Human
aauauguuccacuuaaagcugg

SEQ ID NO: 1022842 - RNA, 22 nt, Human
uuuucuuacugucugugauccu

SEQ ID NO: 1022843 - RNA, 22 nt, Human
ugucuuuagaaagaagcagaca

SEQ ID NO: 1022844 - RNA, 22 nt, Human
uucccucuccuacucaggaaag

SEQ ID NO: 1022845 - RNA, 22 nt, Human
ucagagaacacagaggugaugu

SEQ ID NO: 1022846 - RNA, 18 nt, Human
aaagaaggauuggagagc

SEQ ID NO: 1022847 - RNA, 22 nt, Human
agcagcuggggccugugacgau

SEQ ID NO: 1022848 - RNA, 22 nt, Human
uugcaucuaccauaucaaagau

SEQ ID NO: 1022849 - RNA, 22 nt, Human
aauauucaaguuauucuuucuu

SEQ ID NO: 1022850 - RNA, 22 nt, Human
ggcagagacuggguuggcagag

SEQ ID NO: 1022851 - RNA, 22 nt, Human
acccagcaugacaccugcacau

SEQ ID NO: 1022852 - RNA, 22 nt, Human
ucagcuuucuauguugcuaaac

SEQ ID NO: 1022853 - RNA, 22 nt, Human
ccagagccggauugugaagugc

SEQ ID NO: 1022854 - RNA, 22 nt, Human
ugccagggcugcuacuggcuga

SEQ ID NO: 1022855 - RNA, 22 nt, Human
acacacagguaaaggagccugg

SEQ ID NO: 1022856 - RNA, 20 nt, Human
cuucuucauuaacccuacug

SEQ ID NO: 1022857 - RNA, 22 nt, Human
ccuguggcugccacuuggguga

SEQ ID NO: 1022858 - RNA, 22 nt, Human
ugcugcucucagccaccaggaa

SEQ ID NO: 1022859 - RNA, 19 nt, Human
agcagagcagggccguggg

SEQ ID NO: 1022860 - RNA, 22 nt, Human
uggcagaguucgcugugccuuu

SEQ ID NO: 1022861 - RNA, 23 nt, Human
ucacaggggccagcgcucugugg

SEQ ID NO: 1022862 - RNA, 19 nt, Human
agcuccugggcucugggcc

SEQ ID NO: 1022863 - RNA, 22 nt, Human
gcucugcugaagccccuugcau

SEQ ID NO: 1022864 - RNA, 22 nt, Human
gagggcagugaauuuugaagcu

SEQ ID NO: 1022865 - RNA, 22 nt, Human
agccaggaauuggacaacacau

SEQ ID NO: 1022866 - RNA, 22 nt, Human
cuuucagagguuacucaggaaa

SEQ ID NO: 1022867 - RNA, 22 nt, Human
ugggcagagucguggggaauag

SEQ ID NO: 1022868 - RNA, 22 nt, Human
ucagucuuugcuuaugacaaua

SEQ ID NO: 1022869 - RNA, 22 nt, Human
cagagugagggccugcaccugc

SEQ ID NO: 1022870 - RNA, 22 nt, Human
ggcugcucugccuuccagcugg

SEQ ID NO: 1022871 - RNA, 22 nt, Human
ggcacugggcaccggcugaggg

SEQ ID NO: 1022872 - RNA, 22 nt, Human
agguaagggucacaguucauau

SEQ ID NO: 1022873 - RNA, 22 nt, Human
agcuaccuggcuuaucacuguc

SEQ ID NO: 1022874 - RNA, 22 nt, Human
ugccucugggugaccaaggagc

SEQ ID NO: 1022875 - RNA, 22 nt, Human
uagcauuucccaaaugcauuug

SEQ ID NO: 1022876 - RNA, 22 nt, Human
uggcucugucacugugagcuau

SEQ ID NO: 1022877 - RNA, 22 nt, Human
gagagaagaaagccaugguccu

SEQ ID NO: 1022878 - RNA, 22 nt, Human
cugagggcccugaagcuuggca

SEQ ID NO: 1022879 - RNA, 22 nt, Human
uuauucagucugucuagggagu

SEQ ID NO: 1022880 - RNA, 22 nt, Human
gccauccucugagcacuaggca

SEQ ID NO: 1022881 - RNA, 22 nt, Human
ugccugggccuucccaccucug

SEQ ID NO: 1022882 - RNA, 22 nt, Human
ugugaaagcaagucuaguucuc

SEQ ID NO: 1022883 - RNA, 22 nt, Human
agucucagccacacagaccuau

SEQ ID NO: 1022884 - RNA, 22 nt, Human
agacaaagacagcaucucaggu

SEQ ID NO: 1022885 - RNA, 22 nt, Human
cagagcagcagagcuuccaugg

SEQ ID NO: 1022886 - RNA, 22 nt, Human
aagucuguuugagugucacacu

SEQ ID NO: 1022887 - RNA, 22 nt, Human
ggguccagcgacagcaggcuca

SEQ ID NO: 1022888 - RNA, 22 nt, Human
cugguccuugacgcgugggagg

SEQ ID NO: 1022889 - RNA, 22 nt, Human
gugccugccccacuccucagca

SEQ ID NO: 1022890 - RNA, 22 nt, Human
caccugcaaggagcuuucauuu

SEQ ID NO: 1022891 - RNA, 20 nt, Human
cccaggcagagcuagcggca

SEQ ID NO: 1022892 - RNA, 22 nt, Human
aucaggauuacacggggaugcu

SEQ ID NO: 1022893 - RNA, 22 nt, Human
gcugucugucucugugacuuaa

SEQ ID NO: 1022894 - RNA, 22 nt, Human
aaggcaguaaaaucuaccuugc

SEQ ID NO: 1022895 - RNA, 20 nt, Human
uccagggcuagggagcucau

SEQ ID NO: 1022896 - RNA, 22 nt, Human
acauacuuuuuaaaagauugcu

SEQ ID NO: 1022897 - RNA, 22 nt, Human
gugcuuuuaaaggcaauuagua

SEQ ID NO: 1022898 - RNA, 18 nt, Human
gcagcuuuugauucaccc

SEQ ID NO: 1022899 - RNA, 22 nt, Human
guguaugaacgaaagaauggau

SEQ ID NO: 1022900 - RNA, 22 nt, Human
gcugggagaggcccugaaguga

SEQ ID NO: 1022901 - RNA, 22 nt, Human
gugaaaucugaggcccaugaug

SEQ ID NO: 1022902 - RNA, 22 nt, Human
agaagcuuccuacauuguucuu

SEQ ID NO: 1022903 - RNA, 21 nt, Human
agcugggccucagccugcagu

SEQ ID NO: 1022904 - RNA, 22 nt, Human
uggcagcacuugaacuugagcc

SEQ ID NO: 1022905 - RNA, 22 nt, Human
cuaucauuuuacaugguuggug

SEQ ID NO: 1022906 - RNA, 22 nt, Human
cccaggcacagauuaucccaau

SEQ ID NO: 1022907 - RNA, 22 nt, Human
gccagcuggagugagagugggc

SEQ ID NO: 1022908 - RNA, 22 nt, Human
cagagacaguuucacagggucu

SEQ ID NO: 1022909 - RNA, 18 nt, Human
aaguaacagaagagcaca

SEQ ID NO: 1022910 - RNA, 22 nt, Human
ugccugggccucugaggaaggc

SEQ ID NO: 1022911 - RNA, 22 nt, Human
uggacagguugaguaggaggag

SEQ ID NO: 1022912 - RNA, 22 nt, Human
gggcuuggcacaugggcucagc

SEQ ID NO: 1022913 - RNA, 22 nt, Human
uugaagauggaucgccacucuc

SEQ ID NO: 1022914 - RNA, 22 nt, Human
uguguucuggaaagcucacuga

SEQ ID NO: 1022915 - RNA, 22 nt, Human
cuacauuuguucuauagcuuuu

SEQ ID NO: 1022916 - RNA, 20 nt, Human
ggcagcucacuacuuucugu

SEQ ID NO: 1022917 - RNA, 22 nt, Human
ccagcuuucugggugguuucug

SEQ ID NO: 1022918 - RNA, 22 nt, Human
ugcuggguagaaguauuagucu

SEQ ID NO: 1022919 - RNA, 22 nt, Human
cuucuuuccuuccuccaguggc

SEQ ID NO: 1022920 - RNA, 22 nt, Human
agagccugcaucuagccucaga

SEQ ID NO: 1022921 - RNA, 22 nt, Human
agcuuccuuggcgcugaggccu

SEQ ID NO: 1022922 - RNA, 19 nt, Human
ugggccugcaucugggucu

SEQ ID NO: 1022923 - RNA, 16 nt, Human
gccuggaguggcaggg

SEQ ID NO: 1022924 - RNA, 22 nt, Human
uugaauuauaagugugucuacu

SEQ ID NO: 1022925 - RNA, 22 nt, Human
uuuuccucugcagagcaguuag

SEQ ID NO: 1022926 - RNA, 22 nt, Human
ggccucggcccacugcugcggu

SEQ ID NO: 1022927 - RNA, 22 nt, Human
uuucacagguacaaacacuccu

SEQ ID NO: 1022928 - RNA, 22 nt, Human
cugcugccggcgagccucccuu

SEQ ID NO: 1022929 - RNA, 22 nt, Human
ucacagcaaaagugugcagagc

SEQ ID NO: 1022930 - RNA, 22 nt, Human
gcugggcagccccuacagagag

SEQ ID NO: 1022931 - RNA, 22 nt, Human
uccuggauucugcccugaaggc

SEQ ID NO: 1022932 - RNA, 22 nt, Human
cuguguccugcgucaagccaau

SEQ ID NO: 1022933 - RNA, 19 nt, Human
acuuucuccaggaccuguu

SEQ ID NO: 1022934 - RNA, 22 nt, Human
auguuuccagguucuuccuaug

SEQ ID NO: 1022935 - RNA, 22 nt, Human
aguauguagugcaaucagucag

SEQ ID NO: 1022936 - RNA, 22 nt, Human
aaucuggcucagaagaagauga

SEQ ID NO: 1022937 - RNA, 22 nt, Human
agcagcugaucaaagcacuuau

SEQ ID NO: 1022938 - RNA, 19 nt, Human
accaggcuuauggucagug

SEQ ID NO: 1022939 - RNA, 22 nt, Human
gcugucugcugggucgcucagg

SEQ ID NO: 1022940 - RNA, 22 nt, Human
cagaggcucagauggcccuggc

SEQ ID NO: 1022941 - RNA, 22 nt, Human
guugaaagcuuuucauuuaguu

SEQ ID NO: 1022942 - RNA, 22 nt, Human
gcugcucuacccaugcaucugu

SEQ ID NO: 1022943 - RNA, 22 nt, Human
aaauguauccuacuuccugagu

SEQ ID NO: 1022944 - RNA, 22 nt, Human
aggagcagaccguaguccugca

SEQ ID NO: 1022945 - RNA, 22 nt, Human
uagggcucacugagaugaauau

SEQ ID NO: 1022946 - RNA, 17 nt, Human
guccuacccauggucua

SEQ ID NO: 1022947 - RNA, 17 nt, Human
ucagcaaagacaaagga

SEQ ID NO: 1022948 - RNA, 22 nt, Human
accugccuaucagcugccugcu

SEQ ID NO: 1022949 - RNA, 22 nt, Human
aggaccugacauuguguuuucu

SEQ ID NO: 1022950 - RNA, 22 nt, Human
guuccacaaaauguacccaguu

SEQ ID NO: 1022951 - RNA, 22 nt, Human
cccaggaguaagugacauuguu

SEQ ID NO: 1022952 - RNA, 22 nt, Human
ucccagaggucucugcugguuc

SEQ ID NO: 1022953 - RNA, 22 nt, Human
uggagcaagcuggagagaacau

SEQ ID NO: 1022954 - RNA, 22 nt, Human
agagaugaaaaguggagacugg

SEQ ID NO: 1022955 - RNA, 22 nt, Human
ucuggccaacaaaaacuaaguc

SEQ ID NO: 1022956 - RNA, 22 nt, Human
auguaaacaagguuauugucca

SEQ ID NO: 1022957 - RNA, 22 nt, Human
guggccaggacauugccaggca

SEQ ID NO: 1022958 - RNA, 21 nt, Human
aggugcagagccagggaccag

SEQ ID NO: 1022959 - RNA, 22 nt, Human
agaccauagggaccucagguug

SEQ ID NO: 1022960 - RNA, 22 nt, Human
aggcucagcaucugauucauau

SEQ ID NO: 1022961 - RNA, 22 nt, Human
ggucccagcugcucaagaggcu

SEQ ID NO: 1022962 - RNA, 22 nt, Human
gaggcugggaaguccaagacca

SEQ ID NO: 1022963 - RNA, 19 nt, Human
agguggucuaggcuggaga

SEQ ID NO: 1022964 - RNA, 19 nt, Human
aacuagaaagguuuugaga

SEQ ID NO: 1022965 - RNA, 22 nt, Human
uccauuuuagaagaaaauccac

SEQ ID NO: 1022966 - RNA, 22 nt, Human
gccucugcucggacuuugccuc

SEQ ID NO: 1022967 - RNA, 22 nt, Human
aaugucugccugaacuuuauau

SEQ ID NO: 1022968 - RNA, 22 nt, Human
aggcuggaguacaguggcuauu

SEQ ID NO: 1022969 - RNA, 22 nt, Human
ccagggccaguaagauuggcau

SEQ ID NO: 1022970 - RNA, 20 nt, Human
ccugucuccucuuaccuggc

SEQ ID NO: 1022971 - RNA, 22 nt, Human
gcacacaggcaguuuccagcca

SEQ ID NO: 1022972 - RNA, 22 nt, Human
uuuuccuaguaggccuauuaga

SEQ ID NO: 1022973 - RNA, 22 nt, Human
augaagcugaccuugucuugcu

SEQ ID NO: 1022974 - RNA, 22 nt, Human
gcagauggcugagccugcagau

SEQ ID NO: 1022975 - RNA, 22 nt, Human
auaguuugugaaacacagcagu

SEQ ID NO: 1022976 - RNA, 18 nt, Human
ugacucacccugucagug

SEQ ID NO: 1022977 - RNA, 21 nt, Human
agcagagugcuuugacuuugu

SEQ ID NO: 1022978 - RNA, 22 nt, Human
uggcagcagacaucugaggucu

SEQ ID NO: 1022979 - RNA, 22 nt, Human
acacauaagccuaaucaucucc

SEQ ID NO: 1022980 - RNA, 22 nt, Human
uugguuuaggaacuggcuugga

SEQ ID NO: 1022981 - RNA, 22 nt, Human
ugaaagcacaaguucuaacagg

SEQ ID NO: 1022982 - RNA, 22 nt, Human
gccugccuuuguaugacccuga

SEQ ID NO: 1022983 - RNA, 18 nt, Human
agcagagcccaugcauuc

SEQ ID NO: 1022984 - RNA, 22 nt, Human
gauucuuacuucuaagcaagcu

SEQ ID NO: 1022985 - RNA, 22 nt, Human
gcuguucauagaaauggucuca

SEQ ID NO: 1022986 - RNA, 22 nt, Human
ucagugucuugaccugggugug

SEQ ID NO: 1022987 - RNA, 22 nt, Human
uuuuagcacuaagugauaugcu

SEQ ID NO: 1022988 - RNA, 22 nt, Human
acagagguaggacaugagauau

SEQ ID NO: 1022989 - RNA, 22 nt, Human
aaggccugaacaugaggagaug

SEQ ID NO: 1022990 - RNA, 23 nt, Human
uccuucagagccucccuccaagc

SEQ ID NO: 1022991 - RNA, 22 nt, Human
cuggccuagcucucugcuugaa

SEQ ID NO: 1022992 - RNA, 22 nt, Human
agggcagcucucaccucuggcc

SEQ ID NO: 1022993 - RNA, 22 nt, Human
acucucagaggguggcagcaau

SEQ ID NO: 1022994 - RNA, 22 nt, Human
agacccugcaccucucgugggc

SEQ ID NO: 1022995 - RNA, 22 nt, Human
gccuggagacagcagaggcggc

SEQ ID NO: 1022996 - RNA, 19 nt, Human
ucauuguugguuugucggg

SEQ ID NO: 1022997 - RNA, 22 nt, Human
ggcuuuauuuugcaugaaugcu

SEQ ID NO: 1022998 - RNA, 22 nt, Human
gggauggggggaagcguccaug

SEQ ID NO: 1022999 - RNA, 22 nt, Human
cagcugaguuacucugaggucu

SEQ ID NO: 1023000 - RNA, 22 nt, Human
caggcacuucugcugcuugucu

SEQ ID NO: 1023001 - RNA, 22 nt, Human
uucugucaaagacuuuuucagg

SEQ ID NO: 1023002 - RNA, 22 nt, Human
gggagggaagguaccuguguga

SEQ ID NO: 1023003 - RNA, 22 nt, Human
agauggagaaugacaauuaagg

SEQ ID NO: 1023004 - RNA, 22 nt, Human
cuggccacaacuagcccaggac

SEQ ID NO: 1023005 - RNA, 22 nt, Human
ggaugcugggagacagcaggca

SEQ ID NO: 1023006 - RNA, 22 nt, Human
aauguguacaugacagauagaa

SEQ ID NO: 1023007 - RNA, 22 nt, Human
guuggccugaauggucaagagg

SEQ ID NO: 1023008 - RNA, 22 nt, Human
uuccuugaaugagucauggaaa

SEQ ID NO: 1023009 - RNA, 22 nt, Human
uaucuuuaacuugcaguauuua

SEQ ID NO: 1023010 - RNA, 18 nt, Human
ugucauaauauaucaccu

SEQ ID NO: 1023011 - RNA, 20 nt, Human
ccugggguacacuggcaugu

SEQ ID NO: 1023012 - RNA, 22 nt, Human
cuuuuuccagcuucaggguggg

SEQ ID NO: 1023013 - RNA, 22 nt, Human
ucauuuguugcuguuaccugag

SEQ ID NO: 1023014 - RNA, 22 nt, Human
agggccucugacgcccccagcc

SEQ ID NO: 1023015 - RNA, 22 nt, Human
ucucagagauuuuguuucccuu

SEQ ID NO: 1023016 - RNA, 22 nt, Human
cugggccuggcguuccaggcug

SEQ ID NO: 1023017 - RNA, 22 nt, Human
cagaggccaccuguggccacug

SEQ ID NO: 1023018 - RNA, 22 nt, Human
guguguuucagaagccaggugu

SEQ ID NO: 1023019 - RNA, 22 nt, Human
cagcccugagagaaccaucuau

SEQ ID NO: 1023020 - RNA, 22 nt, Human
aaaguucuaaaacucuuuguga

SEQ ID NO: 1023021 - RNA, 22 nt, Human
aaggaguuuggguagucauaca

SEQ ID NO: 1023022 - RNA, 22 nt, Human
uuucuucacaggguauugggug

SEQ ID NO: 1023023 - RNA, 22 nt, Human
cagccagggagggcaaaugaga

SEQ ID NO: 1023024 - RNA, 22 nt, Human
uuuggaaaguugucacuuuaga

SEQ ID NO: 1023025 - RNA, 22 nt, Human
uagcaggguaaauguagaugga

SEQ ID NO: 1023026 - RNA, 22 nt, Human
gugcccugaguggguaggagag

SEQ ID NO: 1023027 - RNA, 19 nt, Human
uugaggggccaggggagau

SEQ ID NO: 1023028 - RNA, 19 nt, Human
aaacacagauuucuuacca

SEQ ID NO: 1023029 - RNA, 22 nt, Human
ggcuccacccugcuuccagaag

SEQ ID NO: 1023030 - RNA, 22 nt, Human
aaggcccuggccccagcuucuu

SEQ ID NO: 1023031 - RNA, 22 nt, Human
agcccuggcccggcugugcuuu

SEQ ID NO: 1023032 - RNA, 18 nt, Human
gcagagugcgucucugug

SEQ ID NO: 1023033 - RNA, 20 nt, Human
gccagcacagggagcaguuc

SEQ ID NO: 1023034 - RNA, 22 nt, Human
cauuuauucucagauccuuguc

SEQ ID NO: 1023035 - RNA, 22 nt, Human
caaauaguuuuucauguauuau

SEQ ID NO: 1023036 - RNA, 22 nt, Human
ugacagggugauuaugagagcu

SEQ ID NO: 1023037 - RNA, 21 nt, Human
ccugugugucugacugggcua

SEQ ID NO: 1023038 - RNA, 22 nt, Human
uggaccugggguggccuccucu

SEQ ID NO: 1023039 - RNA, 22 nt, Human
cucucugguacauagaguuugg

SEQ ID NO: 1023040 - RNA, 22 nt, Human
uuugcauaggauggacauuuua

SEQ ID NO: 1023041 - RNA, 21 nt, Human
ccucuggcuugugcugugccc

SEQ ID NO: 1023042 - RNA, 22 nt, Human
gaggcugcggggaggagccugc

SEQ ID NO: 1023043 - RNA, 22 nt, Human
cccagagcuccgguccugccca

SEQ ID NO: 1023044 - RNA, 22 nt, Human
cugccacuuacuaggcauggug

SEQ ID NO: 1023045 - RNA, 22 nt, Human
ucuuugcaggccaaauuguuaa

SEQ ID NO: 1023046 - RNA, 22 nt, Human
ucccuuaaaacucauguguugu

SEQ ID NO: 1023047 - RNA, 22 nt, Human
aaaacaggugucagcaaacuau

SEQ ID NO: 1023048 - RNA, 22 nt, Human
uagaaaauagggccuguggagc

SEQ ID NO: 1023049 - RNA, 22 nt, Human
ugcaccccauuuuacauuuaca

SEQ ID NO: 1023050 - RNA, 17 nt, Human
cagcugugagagccuua

SEQ ID NO: 1023051 - RNA, 22 nt, Human
aagguacaguuuuaagaauaag

SEQ ID NO: 1023052 - RNA, 22 nt, Human
ggaccuggcaauuugcaucucu

SEQ ID NO: 1023053 - RNA, 22 nt, Human
gaagcagcagcuggggacaguu

SEQ ID NO: 1023054 - RNA, 22 nt, Human
uaaggucauggugaauaauaag

SEQ ID NO: 1023055 - RNA, 22 nt, Human
ucacugucugaaagaaauggcc

SEQ ID NO: 1023056 - RNA, 22 nt, Human
aaggagcucccggcagaccagg

SEQ ID NO: 1023057 - RNA, 22 nt, Human
gaggagcacaugaggcugaggg

SEQ ID NO: 1023058 - RNA, 22 nt, Human
uacauaauugucuuuguccuca

SEQ ID NO: 1023059 - RNA, 22 nt, Human
aagcaaagaguuuaguggguga

SEQ ID NO: 1023060 - RNA, 22 nt, Human
acugcaggagacacagcugcug

SEQ ID NO: 1023061 - RNA, 21 nt, Human
guuuuaagggagaaaaccuag

SEQ ID NO: 1023062 - RNA, 22 nt, Human
aggcacagcacaccuggccccc

SEQ ID NO: 1023063 - RNA, 22 nt, Human
gccaggcuguggggaacuugaa

SEQ ID NO: 1023064 - RNA, 22 nt, Human
cuggcagcucugagucccuucu

SEQ ID NO: 1023065 - RNA, 22 nt, Human
ugcagggagggcccagcaaucu

SEQ ID NO: 1023066 - RNA, 22 nt, Human
agggcuacugccugccuucagg

SEQ ID NO: 1023067 - RNA, 22 nt, Human
aagguacaaaguauuauuuaaa

SEQ ID NO: 1023068 - RNA, 22 nt, Human
cagagacccuaggcaggugaca

SEQ ID NO: 1023069 - RNA, 22 nt, Human
ggcaggagauaaaauauuaguu

SEQ ID NO: 1023070 - RNA, 22 nt, Human
ccagcuggcacuguggcugccc

SEQ ID NO: 1023071 - RNA, 22 nt, Human
cacagaauuaagggagaaauau

SEQ ID NO: 1023072 - RNA, 22 nt, Human
ccacugggggcugcaggcacuc

SEQ ID NO: 1023073 - RNA, 22 nt, Human
aaucuuucccuauuaaaugugg

SEQ ID NO: 1023074 - RNA, 22 nt, Human
uccucagaugcucuuggacgcc

SEQ ID NO: 1023075 - RNA, 22 nt, Human
gggcuggggcucaauaauuugu

SEQ ID NO: 1023076 - RNA, 22 nt, Human
gugcugggauuacaggugugag

SEQ ID NO: 1023077 - RNA, 22 nt, Human
acacuaauuaagcugcuuuacu

SEQ ID NO: 1023078 - RNA, 22 nt, Human
aaaugcacagagccuuagagau

SEQ ID NO: 1023079 - RNA, 22 nt, Human
acuuugcaaugggcagaaccca

SEQ ID NO: 1023080 - RNA, 22 nt, Human
uaccuugggguuuuguugcucu

SEQ ID NO: 1023081 - RNA, 22 nt, Human
ccuuuggguucaaucucggucu

SEQ ID NO: 1023082 - RNA, 22 nt, Human
ugcagggaaaacccaggaugcu

SEQ ID NO: 1023083 - RNA, 23 nt, Human
cugcccugaucuugaucuauugu

SEQ ID NO: 1023084 - RNA, 22 nt, Human
uccuggcccacuaugccagcau

SEQ ID NO: 1023085 - RNA, 22 nt, Human
uggaaauggaucugaugagucu

SEQ ID NO: 1023086 - RNA, 22 nt, Human
auucagagcacuggguagaauu

SEQ ID NO: 1023087 - RNA, 22 nt, Human
cugaggaguuuggguuguucaa

SEQ ID NO: 1023088 - RNA, 18 nt, Human
cagggcuguggggucacu

SEQ ID NO: 1023089 - RNA, 22 nt, Human
uuugaaguaccugguucugacu

SEQ ID NO: 1023090 - RNA, 22 nt, Human
ugcagggcuaagucagagccug

SEQ ID NO: 1023091 - RNA, 22 nt, Human
cuggcugaguuacuccacugag

SEQ ID NO: 1023092 - RNA, 22 nt, Human
gcugagaggcacuaucuccgga

SEQ ID NO: 1023093 - RNA, 22 nt, Human
uuaauacaagcauaugcacaca

SEQ ID NO: 1023094 - RNA, 22 nt, Human
uacuuuggauccuuacaauagc

SEQ ID NO: 1023095 - RNA, 22 nt, Human
cuccucugucuggcccugagcc

SEQ ID NO: 1023096 - RNA, 22 nt, Human
ucugggggcgaccagggacugc

SEQ ID NO: 1023097 - RNA, 22 nt, Human
aagcugcccucauucccagugc

SEQ ID NO: 1023098 - RNA, 22 nt, Human
agacaguguguguauauauggu

SEQ ID NO: 1023099 - RNA, 22 nt, Human
gugggagccauuuccaguaugc

SEQ ID NO: 1023100 - RNA, 22 nt, Human
acuugggaguucuggaagccug

SEQ ID NO: 1023101 - RNA, 22 nt, Human
caucugccuaaguggcccuguu

SEQ ID NO: 1023102 - RNA, 22 nt, Human
gauggcagguaguggucucauc

SEQ ID NO: 1023103 - RNA, 19 nt, Human
acagagcucucugcuucug

SEQ ID NO: 1023104 - RNA, 22 nt, Human
uacauaguuccauuuacaggaa

SEQ ID NO: 1023105 - RNA, 21 nt, Human
ugcucaugcaaugcaugucca

SEQ ID NO: 1023106 - RNA, 22 nt, Human
ggguggcuccuaugggcauagc

SEQ ID NO: 1023107 - RNA, 22 nt, Human
aaauguuucuacuugugagcau

SEQ ID NO: 1023108 - RNA, 22 nt, Human
guacuuccguggacuaauuguu

SEQ ID NO: 1023109 - RNA, 22 nt, Human
gggcugcacagaucuucaaggg

SEQ ID NO: 1023110 - RNA, 22 nt, Human
gucagaggggcagcugccaggc

SEQ ID NO: 1023111 - RNA, 22 nt, Human
ccucauggaccucagacugucc

SEQ ID NO: 1023112 - RNA, 22 nt, Human
gcuaccugagcaagagcuucaa

SEQ ID NO: 1023113 - RNA, 21 nt, Human
gcagcuggucucagagcuugc

SEQ ID NO: 1023114 - RNA, 22 nt, Human
uucacauugguucuugauagcu

SEQ ID NO: 1023115 - RNA, 22 nt, Human
uugugaaacauucauggauuug

SEQ ID NO: 1023116 - RNA, 22 nt, Human
caguagacacauuaauauggaa

SEQ ID NO: 1023117 - RNA, 22 nt, Human
uccagccaugacucggacagug

SEQ ID NO: 1023118 - RNA, 22 nt, Human
gcagagacuccacugucuugug

SEQ ID NO: 1023119 - RNA, 20 nt, Human
gcacugaagguuccagggga

SEQ ID NO: 1023120 - RNA, 23 nt, Human
cagaaaacccagagcucaguccc

SEQ ID NO: 1023121 - RNA, 22 nt, Human
cugagauggaguuuugcucuug

SEQ ID NO: 1023122 - RNA, 22 nt, Human
cagugguuauacuuacuguuuc

SEQ ID NO: 1023123 - RNA, 22 nt, Human
agccacagcgaaccucucuucc

SEQ ID NO: 1023124 - RNA, 22 nt, Human
uggcuggcaguaggcuaguggc

SEQ ID NO: 1023125 - RNA, 22 nt, Human
cugggagaugacucagagcagg

SEQ ID NO: 1023126 - RNA, 22 nt, Human
aggcagugcagaguccucuucu

SEQ ID NO: 1023127 - RNA, 22 nt, Human
acugucucucuagcaguucagg

SEQ ID NO: 1023128 - RNA, 22 nt, Human
uagaacacuugaccacugcucc

SEQ ID NO: 1023129 - RNA, 22 nt, Human
ucugaggccccugggcaggaug

SEQ ID NO: 1023130 - RNA, 22 nt, Human
ccucugggagacugcuacugag

SEQ ID NO: 1023131 - RNA, 22 nt, Human
uaauuccaaguugagacaugca

SEQ ID NO: 1023132 - RNA, 22 nt, Human
auuucagauucagaaauguagg

SEQ ID NO: 1023133 - RNA, 22 nt, Human
acagggcagaaauguugcaucu

SEQ ID NO: 1023134 - RNA, 22 nt, Human
acguuuucagugacugugcuuc

SEQ ID NO: 1023135 - RNA, 22 nt, Human
auugucgcuuauuuaggugcuu

SEQ ID NO: 1023136 - RNA, 22 nt, Human
auaaggcagucccuuaacaagg

SEQ ID NO: 1023137 - RNA, 22 nt, Human
acccuuucuuacucacacgcuc

SEQ ID NO: 1023138 - RNA, 22 nt, Human
uugcauugaaaauauauuuuaa

SEQ ID NO: 1023139 - RNA, 22 nt, Human
cagggugacugcccuggccacu

SEQ ID NO: 1023140 - RNA, 22 nt, Human
ccucccacauugaggacaugcu

SEQ ID NO: 1023141 - RNA, 22 nt, Human
aggaccauccuaagguaggcaa

SEQ ID NO: 1023142 - RNA, 22 nt, Human
ccucaggguggcaucagaucuu

SEQ ID NO: 1023143 - RNA, 21 nt, Human
agagcugggacuugccugaga

SEQ ID NO: 1023144 - RNA, 22 nt, Human
cccaaggccucuccuuggcuug

SEQ ID NO: 1023145 - RNA, 22 nt, Human
aaaaguauuggccaccauuucu

SEQ ID NO: 1023146 - RNA, 21 nt, Human
ugcugccaucaugcagagaug

SEQ ID NO: 1023147 - RNA, 22 nt, Human
gcugguccacucccuggaggcu

SEQ ID NO: 1023148 - RNA, 22 nt, Human
ucuggcucucaacaaauauuua

SEQ ID NO: 1023149 - RNA, 22 nt, Human
ggagccagugcccucuggugga

SEQ ID NO: 1023150 - RNA, 22 nt, Human
ugucauaaaacacaagcuguug

SEQ ID NO: 1023151 - RNA, 22 nt, Human
ugcuuuauaacuuaguuuaugg

SEQ ID NO: 1023152 - RNA, 22 nt, Human
cuccuugguguaguacugagca

SEQ ID NO: 1023153 - RNA, 22 nt, Human
cugaggccuaagacaugaauga

SEQ ID NO: 1023154 - RNA, 22 nt, Human
aacaguaaaaaucauuuaguug

SEQ ID NO: 1023155 - RNA, 22 nt, Human
ucuguucagguuucagagaacu

SEQ ID NO: 1023156 - RNA, 22 nt, Human
agcugcugagagucugccgggc

SEQ ID NO: 1023157 - RNA, 22 nt, Human
ugauuucuuccuugucauuaga

SEQ ID NO: 1023158 - RNA, 18 nt, Human
ugaauagggguuugcaga

SEQ ID NO: 1023159 - RNA, 22 nt, Human
caccagggacaaugcuaggggu

SEQ ID NO: 1023160 - RNA, 22 nt, Human
aagcuuuaugaucucucagcua

SEQ ID NO: 1023161 - RNA, 22 nt, Human
agcuucuggaaggcaaggcuug

SEQ ID NO: 1023162 - RNA, 22 nt, Human
gauaaugaugacaaugacaacc

SEQ ID NO: 1023163 - RNA, 22 nt, Human
guguggcugauugacaugguca

SEQ ID NO: 1023164 - RNA, 22 nt, Human
ccagagcuucggggcggcugua

SEQ ID NO: 1023165 - RNA, 22 nt, Human
uggggcucaccuaggcuggaag

SEQ ID NO: 1023166 - RNA, 22 nt, Human
ggcagagcuugcagugagccga

SEQ ID NO: 1023167 - RNA, 19 nt, Human
ucuaacagaagugucgucc

SEQ ID NO: 1023168 - RNA, 22 nt, Human
acuuucugcaguguuggaaaug

SEQ ID NO: 1023169 - RNA, 22 nt, Human
ggagccagagggaugcaguuga

SEQ ID NO: 1023170 - RNA, 22 nt, Human
gccauuuagggaggcaagguga

SEQ ID NO: 1023171 - RNA, 21 nt, Human
uugaaaguaaauucagcagcu

SEQ ID NO: 1023172 - RNA, 22 nt, Human
uaucuguuggcuccuaguugua

SEQ ID NO: 1023173 - RNA, 22 nt, Human
gcuuuggaugugugccugaggu

SEQ ID NO: 1023174 - RNA, 22 nt, Human
ggacagaggguugacagaguau

SEQ ID NO: 1023175 - RNA, 22 nt, Human
uuuguuagagugugggaggcug

SEQ ID NO: 1023176 - RNA, 22 nt, Human
uugagaagaaauaguuugcaau

SEQ ID NO: 1023177 - RNA, 22 nt, Human
uuuccaauaaagugucauuguu

SEQ ID NO: 1023178 - RNA, 22 nt, Human
agccuggaguucccaggagaag

SEQ ID NO: 1023179 - RNA, 22 nt, Human
uggagggcucuuucaccuggua

SEQ ID NO: 1023180 - RNA, 22 nt, Human
cucaggcccacagcagacccac

SEQ ID NO: 1023181 - RNA, 22 nt, Human
cuauuacauuucuggacauuca

SEQ ID NO: 1023182 - RNA, 22 nt, Human
gcaggggaguggaugauggauu

SEQ ID NO: 1023183 - RNA, 22 nt, Human
uacauuaucuuguuaucuuuca

SEQ ID NO: 1023184 - RNA, 22 nt, Human
agaggucagaacaggaaagugu

SEQ ID NO: 1023185 - RNA, 22 nt, Human
uuucuguauuuaaaagaucugg

SEQ ID NO: 1023186 - RNA, 22 nt, Human
uuaugcuaaaugaaucaaguca

SEQ ID NO: 1023187 - RNA, 18 nt, Human
gcucugcccaggcugccc

SEQ ID NO: 1023188 - RNA, 22 nt, Human
gugcuucucuucacacccaacu

SEQ ID NO: 1023189 - RNA, 22 nt, Human
ccuggagcacagcccaguccca

SEQ ID NO: 1023190 - RNA, 22 nt, Human
ugucucugaggugagggucagc

SEQ ID NO: 1023191 - RNA, 22 nt, Human
uuuuucuuaaauguggguuggc

SEQ ID NO: 1023192 - RNA, 22 nt, Human
auuauucuuaugucaucauggc

SEQ ID NO: 1023193 - RNA, 22 nt, Human
gauggcacacagacauccccgc

SEQ ID NO: 1023194 - RNA, 22 nt, Human
uggcucugucaaacugcacaca

SEQ ID NO: 1023195 - RNA, 22 nt, Human
gugcucuguguauuaggauguc

SEQ ID NO: 1023196 - RNA, 22 nt, Human
cuggcugcaggaaggagugggc

SEQ ID NO: 1023197 - RNA, 22 nt, Human
gcccucugcuggccucaccucg

SEQ ID NO: 1023198 - RNA, 22 nt, Human
gaggggcagaaugugaucaggg

SEQ ID NO: 1023199 - RNA, 22 nt, Human
auuguauuuccagcuugaaugu

SEQ ID NO: 1023200 - RNA, 20 nt, Human
ggagagcagggaagacagua

SEQ ID NO: 1023201 - RNA, 22 nt, Human
ucuuagcauuucauaacaacug

SEQ ID NO: 1023202 - RNA, 22 nt, Human
uggcucagcauucacuggucuu

SEQ ID NO: 1023203 - RNA, 22 nt, Human
ggcagugguuagaaacaugagc

SEQ ID NO: 1023204 - RNA, 22 nt, Human
cagaagcauugacuccuugcuc

SEQ ID NO: 1023205 - RNA, 22 nt, Human
ucaaagucacaacucucuaauu

SEQ ID NO: 1023206 - RNA, 22 nt, Human
uuuguuuagaugguaaaucagu

SEQ ID NO: 1023207 - RNA, 22 nt, Human
uugcauugaucccagcuugggc

SEQ ID NO: 1023208 - RNA, 22 nt, Human
uuaaaauagccagugccccucu

SEQ ID NO: 1023209 - RNA, 22 nt, Human
uuccuggugguggugacagcac

SEQ ID NO: 1023210 - RNA, 22 nt, Human
acuuccugcaaucguccacucc

SEQ ID NO: 1023211 - RNA, 22 nt, Human
auuucucacucacaguccaugu

SEQ ID NO: 1023212 - RNA, 22 nt, Human
ucugucaaaaguuuucaauaaa

SEQ ID NO: 1023213 - RNA, 22 nt, Human
uuauguaccugaauuaguaaag

SEQ ID NO: 1023214 - RNA, 22 nt, Human
ucuguucagcugccucagggua

SEQ ID NO: 1023215 - RNA, 22 nt, Human
acaaaaauuagcugggcauggu

SEQ ID NO: 1023216 - RNA, 22 nt, Human
ucagaggagccaaaguucugag

SEQ ID NO: 1023217 - RNA, 22 nt, Human
uccugcaggccagaggggugag

SEQ ID NO: 1023218 - RNA, 22 nt, Human
cugugcaguaggucagggcugg

SEQ ID NO: 1023219 - RNA, 22 nt, Human
ccagcagagggucuuggccauu

SEQ ID NO: 1023220 - RNA, 22 nt, Human
acacaggggcucggcugggugc

SEQ ID NO: 1023221 - RNA, 22 nt, Human
aaggcuuuugggaauuuucaac

SEQ ID NO: 1023222 - RNA, 22 nt, Human
agggcuggcaucucuaaugcug

SEQ ID NO: 1023223 - RNA, 19 nt, Human
cucagcuguagcucaugug

SEQ ID NO: 1023224 - RNA, 22 nt, Human
gacccaggguauccagagcugc

SEQ ID NO: 1023225 - RNA, 22 nt, Human
aaagguuaguucuuagaagugc

SEQ ID NO: 1023226 - RNA, 22 nt, Human
cagcugccccauaaaucacagu

SEQ ID NO: 1023227 - RNA, 22 nt, Human
uauuuaaaaagaggccagcugg

SEQ ID NO: 1023228 - RNA, 22 nt, Human
agccuggagaggcgccauacac

SEQ ID NO: 1023229 - RNA, 22 nt, Human
cucaggauccaucuccugcccu

SEQ ID NO: 1023230 - RNA, 22 nt, Human
cagaagcaaaugccuugcugag

SEQ ID NO: 1023231 - RNA, 22 nt, Human
gccagagguucaacaacugucu

SEQ ID NO: 1023232 - RNA, 22 nt, Human
cagggugggcacccagccucca

SEQ ID NO: 1023233 - RNA, 22 nt, Human
uacauaugaacuuuauaacuug

SEQ ID NO: 1023234 - RNA, 22 nt, Human
gcuggcuguguuucaucucuga

SEQ ID NO: 1023235 - RNA, 22 nt, Human
agccagcaggugagugcagccu

SEQ ID NO: 1023236 - RNA, 22 nt, Human
guggcccaggcuuggcgcuggc

SEQ ID NO: 1023237 - RNA, 22 nt, Human
ggagccagggaagcugcuuccu

SEQ ID NO: 1023238 - RNA, 22 nt, Human
ucucagagugacaaugagaauu

SEQ ID NO: 1023239 - RNA, 22 nt, Human
uaugagaaaauaaauaucuguu

SEQ ID NO: 1023240 - RNA, 22 nt, Human
ucugggcagcagcagcuaguag

SEQ ID NO: 1023241 - RNA, 22 nt, Human
ucacauuuucauauucucugag

SEQ ID NO: 1023242 - RNA, 16 nt, Human
gagccaggugccuuga

SEQ ID NO: 1023243 - RNA, 22 nt, Human
auucugauaucuuauucuagcu

SEQ ID NO: 1023244 - RNA, 22 nt, Human
guccuggcccacuggcaggcug

SEQ ID NO: 1023245 - RNA, 16 nt, Human
gggagggaguuggugg

SEQ ID NO: 1023246 - RNA, 22 nt, Human
gccuuucaguuccaucaaagga

SEQ ID NO: 1023247 - RNA, 22 nt, Human
ucagcaaugagaacuggcauuu

SEQ ID NO: 1023248 - RNA, 22 nt, Human
acuuggcaaguaucuauaaagu

SEQ ID NO: 1023249 - RNA, 22 nt, Human
uccacauccauugcuugacuuu

SEQ ID NO: 1023250 - RNA, 22 nt, Human
uguuuuaugagccauauaaccu

SEQ ID NO: 1023251 - RNA, 22 nt, Human
cagcuucuggcguggagccuga

SEQ ID NO: 1023252 - RNA, 22 nt, Human
aggcccugaagucggccccuca

SEQ ID NO: 1023253 - RNA, 22 nt, Human
cucacaggagaaagucaugguc

SEQ ID NO: 1023254 - RNA, 22 nt, Human
uuguucaugguuguaaguuuga

SEQ ID NO: 1023255 - RNA, 22 nt, Human
acauuucuuuucaucucuauau

SEQ ID NO: 1023256 - RNA, 22 nt, Human
ggccuugguaaagggaugcaug

SEQ ID NO: 1023257 - RNA, 22 nt, Human
ccaaagugcugagauuacaggu

SEQ ID NO: 1023258 - RNA, 22 nt, Human
cuggaguuagaguagacacuga

SEQ ID NO: 1023259 - RNA, 22 nt, Human
ugaaggccucugguacaugcca

SEQ ID NO: 1023260 - RNA, 22 nt, Human
gagaaaugcaugcaugucauca

SEQ ID NO: 1023261 - RNA, 22 nt, Human
cagagcugauuggauccagaga

SEQ ID NO: 1023262 - RNA, 22 nt, Human
cagggccaccguguuugcugcu

SEQ ID NO: 1023263 - RNA, 18 nt, Human
ggagccagucugucucug

SEQ ID NO: 1023264 - RNA, 22 nt, Human
cugcagagcuaggcugagugaa

SEQ ID NO: 1023265 - RNA, 22 nt, Human
ucagaggaauaaugcugcauuu

SEQ ID NO: 1023266 - RNA, 18 nt, Human
gcagcugacacuggaguu

SEQ ID NO: 1023267 - RNA, 22 nt, Human
aaaugaacaguugcauucucug

SEQ ID NO: 1023268 - RNA, 21 nt, Human
accucaagcaacaaccaaggu

SEQ ID NO: 1023269 - RNA, 22 nt, Human
caugaaaauaacauuguuguga

SEQ ID NO: 1023270 - RNA, 22 nt, Human
uuagaacuuaagaauacugucu

SEQ ID NO: 1023271 - RNA, 22 nt, Human
cagcaguggccaucuguguggu

SEQ ID NO: 1023272 - RNA, 19 nt, Human
cagaccuguccagccugug

SEQ ID NO: 1023273 - RNA, 22 nt, Human
uuggaaauugcaagugauuugc

SEQ ID NO: 1023274 - RNA, 22 nt, Human
auuucacaucuaucucagauuu

SEQ ID NO: 1023275 - RNA, 22 nt, Human
uggcuuccuggacagaugcggu

SEQ ID NO: 1023276 - RNA, 22 nt, Human
cauuugaaauucuuagaacaaa

SEQ ID NO: 1023277 - RNA, 22 nt, Human
auguaugagagauucuuuuauu

SEQ ID NO: 1023278 - RNA, 22 nt, Human
uggagucugugaugcucugggu

SEQ ID NO: 1023279 - RNA, 20 nt, Human
uuugucuguuaaguguuucu

SEQ ID NO: 1023280 - RNA, 22 nt, Human
ccaaggcuucccagagaugcuc

SEQ ID NO: 1023281 - RNA, 22 nt, Human
ugugcccauuccacuugaguac

SEQ ID NO: 1023282 - RNA, 22 nt, Human
ggggugggcgugcagggacacc

SEQ ID NO: 1023283 - RNA, 22 nt, Human
cccaugagguggagguugcagu

SEQ ID NO: 1023284 - RNA, 22 nt, Human
ugcugucugauucagggugauu

SEQ ID NO: 1023285 - RNA, 22 nt, Human
ugcugcacucaccaacagauaa

SEQ ID NO: 1023286 - RNA, 22 nt, Human
acucacuuuccauucaagcacc

SEQ ID NO: 1023287 - RNA, 22 nt, Human
guuuucuuugaaugcuucuaga

SEQ ID NO: 1023288 - RNA, 22 nt, Human
cugagccagcgggcucacuuuu

SEQ ID NO: 1023289 - RNA, 22 nt, Human
uucccucucacuuaaagcuugg

SEQ ID NO: 1023290 - RNA, 22 nt, Human
aucugccugcaguggagguggg

SEQ ID NO: 1023291 - RNA, 22 nt, Human
ugggcagacgggagcuugccuu

SEQ ID NO: 1023292 - RNA, 22 nt, Human
auggaaaggcuguggaaacuua

SEQ ID NO: 1023293 - RNA, 22 nt, Human
cugggcacugcaggguguugag

SEQ ID NO: 1023294 - RNA, 22 nt, Human
ccaaggagaaugacaccaugga

SEQ ID NO: 1023295 - RNA, 22 nt, Human
gcagggaccuugcccacccucc

SEQ ID NO: 1023296 - RNA, 22 nt, Human
aaugaucuacucucauuaucuc

SEQ ID NO: 1023297 - RNA, 22 nt, Human
uggaucucggcaaugcgggacu

SEQ ID NO: 1023298 - RNA, 22 nt, Human
caggccacaaguuggguucaag

SEQ ID NO: 1023299 - RNA, 22 nt, Human
cagaaaauaaaguuucuacgca

SEQ ID NO: 1023300 - RNA, 20 nt, Human
uuucagugguuugugccuag

SEQ ID NO: 1023301 - RNA, 22 nt, Human
caaggccuccugggcccagaga

SEQ ID NO: 1023302 - RNA, 22 nt, Human
aagaauguucauuaaacuguug

SEQ ID NO: 1023303 - RNA, 22 nt, Human
ccaucuccacugucccugucaa

SEQ ID NO: 1023304 - RNA, 22 nt, Human
acucugagcaucccaagucuua

SEQ ID NO: 1023305 - RNA, 22 nt, Human
cuggcuggucaucagcaguacg

SEQ ID NO: 1023306 - RNA, 22 nt, Human
ccacucugauuuuggcuccacu

SEQ ID NO: 1023307 - RNA, 22 nt, Human
uauguuauuuucauacaacaga

SEQ ID NO: 1023308 - RNA, 22 nt, Human
uuuguuuucaaugugucauuca

SEQ ID NO: 1023309 - RNA, 22 nt, Human
cauuacaugguccaggauauau

SEQ ID NO: 1023310 - RNA, 22 nt, Human
gagcuggcaggaggcuccccga

SEQ ID NO: 1023311 - RNA, 22 nt, Human
ucaaugauagacaagaucuaag

SEQ ID NO: 1023312 - RNA, 22 nt, Human
ucagagguaagggcugagagga

SEQ ID NO: 1023313 - RNA, 22 nt, Human
caaaagucuuccuauucucuua

SEQ ID NO: 1023314 - RNA, 22 nt, Human
gaugcacaugugaguauagaag

SEQ ID NO: 1023315 - RNA, 22 nt, Human
augacacuuggugauacuuugu

SEQ ID NO: 1023316 - RNA, 22 nt, Human
auucagcaguuccugcuucagu

SEQ ID NO: 1023317 - RNA, 22 nt, Human
gcucaggagcucuugguggcgc

SEQ ID NO: 1023318 - RNA, 22 nt, Human
aacuagaaaacaagaugcugau

SEQ ID NO: 1023319 - RNA, 22 nt, Human
gccagaaacauacacaucacuu

SEQ ID NO: 1023320 - RNA, 22 nt, Human
ucagcuggcaguucagaggcug

SEQ ID NO: 1023321 - RNA, 21 nt, Human
ugggagagggcucagcuaccc

SEQ ID NO: 1023322 - RNA, 22 nt, Human
uccugagagcagaguccaggug

SEQ ID NO: 1023323 - RNA, 22 nt, Human
gaaauauuucucuugagccccu

SEQ ID NO: 1023324 - RNA, 22 nt, Human
agcagacauaucucaugucaca

SEQ ID NO: 1023325 - RNA, 22 nt, Human
accauguguuuuacacauggua

SEQ ID NO: 1023326 - RNA, 22 nt, Human
gagcugcugguugcuggugccu

SEQ ID NO: 1023327 - RNA, 22 nt, Human
agacaucagcuugugugcaggg

SEQ ID NO: 1023328 - RNA, 22 nt, Human
gccuggugaaaggcagagagcg

SEQ ID NO: 1023329 - RNA, 21 nt, Human
cagacccucuagaggccaccu

SEQ ID NO: 1023330 - RNA, 22 nt, Human
cucacugugccuuuucccaaac

SEQ ID NO: 1023331 - RNA, 18 nt, Human
gacccagcagaugggcuu

SEQ ID NO: 1023332 - RNA, 22 nt, Human
gggagccaaggagagaggccuu

SEQ ID NO: 1023333 - RNA, 19 nt, Human
ugcucaggccaaggagccc

SEQ ID NO: 1023334 - RNA, 23 nt, Human
uccugaggguuucccagccuugg

SEQ ID NO: 1023335 - RNA, 22 nt, Human
gcugcugucagugguggcaguu

SEQ ID NO: 1023336 - RNA, 22 nt, Human
uugcagcagggugaauucacuc

SEQ ID NO: 1023337 - RNA, 22 nt, Human
aaaguuagaaugauaucaacga

SEQ ID NO: 1023338 - RNA, 22 nt, Human
ucagagaggcaauacuguuuaa

SEQ ID NO: 1023339 - RNA, 22 nt, Human
ucagugcacagagauuuuuguu

SEQ ID NO: 1023340 - RNA, 22 nt, Human
ggggaccuggccacccauccuu

SEQ ID NO: 1023341 - RNA, 22 nt, Human
aggaccugacuggcuccugcuu

SEQ ID NO: 1023342 - RNA, 22 nt, Human
cagucccaaggaggaagcaguc

SEQ ID NO: 1023343 - RNA, 22 nt, Human
ggcucuggucagugaggggccu

SEQ ID NO: 1023344 - RNA, 22 nt, Human
aagggagacaguugugugagga

SEQ ID NO: 1023345 - RNA, 22 nt, Human
cagagagcuuagugugcugcau

SEQ ID NO: 1023346 - RNA, 15 nt, Human
aggcacugugggacc

SEQ ID NO: 1023347 - RNA, 22 nt, Human
guuuuccuucucagccauugcc

SEQ ID NO: 1023348 - RNA, 22 nt, Human
uagcaggguccaaugugaggca

SEQ ID NO: 1023349 - RNA, 22 nt, Human
uguuaucugagcaacgucgacg

SEQ ID NO: 1023350 - RNA, 22 nt, Human
agcuuguuaaggaugcauauua

SEQ ID NO: 1023351 - RNA, 22 nt, Human
cuuuaagagaucaccaaucaca

SEQ ID NO: 1023352 - RNA, 22 nt, Human
agccaggauggucucgaucggc

SEQ ID NO: 1023353 - RNA, 22 nt, Human
agaaugcaagauaaacuuuauu

SEQ ID NO: 1023354 - RNA, 22 nt, Human
gcagcagaggcccuacucuuug

SEQ ID NO: 1023355 - RNA, 18 nt, Human
agggaucaucacugcagc

SEQ ID NO: 1023356 - RNA, 22 nt, Human
uggccugggugcugcugacauc

SEQ ID NO: 1023357 - RNA, 22 nt, Human
gcugucagcgcccaaggagcuc

SEQ ID NO: 1023358 - RNA, 20 nt, Human
cccucugcacauggcugugg

SEQ ID NO: 1023359 - RNA, 22 nt, Human
uccaugagcuagcuuuccaaag

SEQ ID NO: 1023360 - RNA, 22 nt, Human
cagggcucaggaaaucagacgu

SEQ ID NO: 1023361 - RNA, 22 nt, Human
aucuuucaguuucauaccaauu

SEQ ID NO: 1023362 - RNA, 21 nt, Human
agcagccauggaugguaugua

SEQ ID NO: 1023363 - RNA, 22 nt, Human
ucagggcaggcgagcagcugcu

SEQ ID NO: 1023364 - RNA, 22 nt, Human
aucacuguguauguauaugcag

SEQ ID NO: 1023365 - RNA, 22 nt, Human
gcaggcaggcuuccuugaacug

SEQ ID NO: 1023366 - RNA, 22 nt, Human
aaauguguguauguacauauau

SEQ ID NO: 1023367 - RNA, 22 nt, Human
uccagggaugguaaugagcagu

SEQ ID NO: 1023368 - RNA, 20 nt, Human
uagauuucauacuucucuuu

SEQ ID NO: 1023369 - RNA, 22 nt, Human
uugcauugggagugaggagacc

SEQ ID NO: 1023370 - RNA, 22 nt, Human
gccagccuucuguggccugcaa

SEQ ID NO: 1023371 - RNA, 20 nt, Human
ucauccaguugguuuauggu

SEQ ID NO: 1023372 - RNA, 19 nt, Human
cccucaggucugagcaguc

SEQ ID NO: 1023373 - RNA, 22 nt, Human
uacauguauugauuucucuucu

SEQ ID NO: 1023374 - RNA, 22 nt, Human
ucagacaguuugcagugugccu

SEQ ID NO: 1023375 - RNA, 22 nt, Human
acuuccuggcugggugaccugg

SEQ ID NO: 1023376 - RNA, 22 nt, Human
gggaaauugugugagaucuuug

SEQ ID NO: 1023377 - RNA, 22 nt, Human
gcaccaggcuuagagccccagg

SEQ ID NO: 1023378 - RNA, 22 nt, Human
uaacacauaucuacaacaugug

SEQ ID NO: 1023379 - RNA, 22 nt, Human
agcagggggaguuagacuagau

SEQ ID NO: 1023380 - RNA, 22 nt, Human
caggcagccuucucgucucaca

SEQ ID NO: 1023381 - RNA, 22 nt, Human
agugacucacuagcucucagug

SEQ ID NO: 1023382 - RNA, 22 nt, Human
ccagucacuggaaaaugggaau

SEQ ID NO: 1023383 - RNA, 22 nt, Human
gugugcccuggcuccagcacca

SEQ ID NO: 1023384 - RNA, 19 nt, Human
ucaaaugccaaugucacag

SEQ ID NO: 1023385 - RNA, 19 nt, Human
aucugccuguuaucacaua

SEQ ID NO: 1023386 - RNA, 22 nt, Human
gcuguucagggcacucaugggc

SEQ ID NO: 1023387 - RNA, 22 nt, Human
gcaaggcugcugccacccaucu

SEQ ID NO: 1023388 - RNA, 22 nt, Human
gaaggccauuagagccugugcc

SEQ ID NO: 1023389 - RNA, 22 nt, Human
ggggaccuucccagagcaguug

SEQ ID NO: 1023390 - RNA, 22 nt, Human
ucaauucaacacaugcacauug

SEQ ID NO: 1023391 - RNA, 22 nt, Human
cugggagauugcuagagaugca

SEQ ID NO: 1023392 - RNA, 22 nt, Human
ggcuccagggaguggagagaag

SEQ ID NO: 1023393 - RNA, 22 nt, Human
uuggaaggcccugccuagcagg

SEQ ID NO: 1023394 - RNA, 22 nt, Human
uguuccaucaguuuuugguuga

SEQ ID NO: 1023395 - RNA, 22 nt, Human
aggaaagggguagguguggacg

SEQ ID NO: 1023396 - RNA, 22 nt, Human
gcagacagccagacugcacugg

SEQ ID NO: 1023397 - RNA, 22 nt, Human
cuggccuggucuggccucucca

SEQ ID NO: 1023398 - RNA, 20 nt, Human
cucuggcuccgcgugaccgc

SEQ ID NO: 1023399 - RNA, 22 nt, Human
acccaggcuggagugcaguagc

SEQ ID NO: 1023400 - RNA, 22 nt, Human
aaacaaacauagguuugaaagu

SEQ ID NO: 1023401 - RNA, 22 nt, Human
ucuuagaaaugaaguucuuucu

SEQ ID NO: 1023402 - RNA, 22 nt, Human
aucuagauuagguauaagagcu

SEQ ID NO: 1023403 - RNA, 22 nt, Human
ggagcuguucaggacugcuuca

SEQ ID NO: 1023404 - RNA, 22 nt, Human
aaacuguauauuuauggcaugu

SEQ ID NO: 1023405 - RNA, 22 nt, Human
ucagcuuucucucgccaucagg

SEQ ID NO: 1023406 - RNA, 22 nt, Human
cagggagaaaucuccaggaggu

SEQ ID NO: 1023407 - RNA, 22 nt, Human
uuuaagagcuaguaugucauuu

SEQ ID NO: 1023408 - RNA, 22 nt, Human
ucuggcuccacuuucuucauuu

SEQ ID NO: 1023409 - RNA, 22 nt, Human
ggcucagagaccugcgaucuga

SEQ ID NO: 1023410 - RNA, 22 nt, Human
gcuggccugcugggcaccaccg

SEQ ID NO: 1023411 - RNA, 22 nt, Human
cuuucucaaugccggaaggcac

SEQ ID NO: 1023412 - RNA, 22 nt, Human
ugugcugguacaugugaggaug

SEQ ID NO: 1023413 - RNA, 22 nt, Human
cccuccagagcuugaccugcug

SEQ ID NO: 1023414 - RNA, 22 nt, Human
acauugaucagccucccaugca

SEQ ID NO: 1023415 - RNA, 22 nt, Human
ccagcuccugggucuuagucag

SEQ ID NO: 1023416 - RNA, 22 nt, Human
guggagccaggggcuguaggua

SEQ ID NO: 1023417 - RNA, 22 nt, Human
ucuggcugcugcgugagugcuu

SEQ ID NO: 1023418 - RNA, 22 nt, Human
acaauguaggauauguacuugu

SEQ ID NO: 1023419 - RNA, 22 nt, Human
ccagggcaugggaagaacugaa

SEQ ID NO: 1023420 - RNA, 22 nt, Human
uccaguggcacuggagacuaga

SEQ ID NO: 1023421 - RNA, 22 nt, Human
ucuccugugcacccucccugug

SEQ ID NO: 1023422 - RNA, 22 nt, Human
cccugccuugggguccacaccg

SEQ ID NO: 1023423 - RNA, 22 nt, Human
ugagaacugaggauuugaauuc

SEQ ID NO: 1023424 - RNA, 22 nt, Human
ccaggccuguguuguguggagg

SEQ ID NO: 1023425 - RNA, 22 nt, Human
ugauuuccucuacuagcaauua

SEQ ID NO: 1023426 - RNA, 22 nt, Human
cagaagcacuaggaggaaacgu

SEQ ID NO: 1023427 - RNA, 22 nt, Human
uuuaauuuuccucuuccuggag

SEQ ID NO: 1023428 - RNA, 22 nt, Human
caggcugggcagccuccccggc

SEQ ID NO: 1023429 - RNA, 22 nt, Human
gagggcuccauuccccgugccc

SEQ ID NO: 1023430 - RNA, 22 nt, Human
acagagcuuaauucaggagcuu

SEQ ID NO: 1023431 - RNA, 22 nt, Human
gccaggcaaauuaaggaaugca

SEQ ID NO: 1023432 - RNA, 22 nt, Human
uuuuauuggagugauaccaagc

SEQ ID NO: 1023433 - RNA, 22 nt, Human
ugcuccauucucuagccagugc

SEQ ID NO: 1023434 - RNA, 22 nt, Human
ugugcagggaagggcaugcuau

SEQ ID NO: 1023435 - RNA, 22 nt, Human
agcuccaggugcaagucauggu

SEQ ID NO: 1023436 - RNA, 22 nt, Human
gcuuuauuuugugagggauuac

SEQ ID NO: 1023437 - RNA, 22 nt, Human
ugaaagguguccaauauuucuc

SEQ ID NO: 1023438 - RNA, 22 nt, Human
aguuuagaguucaaauuaguuc

SEQ ID NO: 1023439 - RNA, 22 nt, Human
uucaugugaauauauuugucuu

SEQ ID NO: 1023440 - RNA, 22 nt, Human
agccaugcaccuuacucuugcu

SEQ ID NO: 1023441 - RNA, 22 nt, Human
uucuggagcuaaaguccacucu

SEQ ID NO: 1023442 - RNA, 22 nt, Human
gcccagcacagcuggaagaguc

SEQ ID NO: 1023443 - RNA, 22 nt, Human
gcagaagggaauaaggagcuuu

SEQ ID NO: 1023444 - RNA, 20 nt, Human
gcagcagacagacaggggac

SEQ ID NO: 1023445 - RNA, 22 nt, Human
ucucaggacuuugggaagcuca

SEQ ID NO: 1023446 - RNA, 22 nt, Human
ugaugaaauguugaggcaguga

SEQ ID NO: 1023447 - RNA, 22 nt, Human
ggcacugagcugccuuggggca

SEQ ID NO: 1023448 - RNA, 22 nt, Human
agauuuccugcacugccuuuga

SEQ ID NO: 1023449 - RNA, 22 nt, Human
ugcauuugucuugucucaugaa

SEQ ID NO: 1023450 - RNA, 22 nt, Human
aucuggcuuggguguggguagc

SEQ ID NO: 1023451 - RNA, 22 nt, Human
augcugagcagagcugacaugc

SEQ ID NO: 1023452 - RNA, 22 nt, Human
guuuauaaggcccaauauuucu

SEQ ID NO: 1023453 - RNA, 23 nt, Human
uaagaacagacaagcauuuacau

SEQ ID NO: 1023454 - RNA, 22 nt, Human
cccaggcacucuuggucauuuu

SEQ ID NO: 1023455 - RNA, 22 nt, Human
aguggggcggacaggaccagga

SEQ ID NO: 1023456 - RNA, 22 nt, Human
ucauuuguaccauuuuuuaaga

SEQ ID NO: 1023457 - RNA, 22 nt, Human
uuuauguaaguggaaugaugcc

SEQ ID NO: 1023458 - RNA, 23 nt, Human
ucuggcucuaugugacagcucuc

SEQ ID NO: 1023459 - RNA, 22 nt, Human
aaaugaugcucacagauuagug

SEQ ID NO: 1023460 - RNA, 22 nt, Human
uuagcuaaacuguaacuagaau

SEQ ID NO: 1023461 - RNA, 22 nt, Human
agagggcugccucagucagcua

SEQ ID NO: 1023462 - RNA, 23 nt, Human
aagaauaaaugacauuaaaggug

SEQ ID NO: 1023463 - RNA, 22 nt, Human
aaagaaauagauggcauuuaaa

SEQ ID NO: 1023464 - RNA, 22 nt, Human
cugggccugggaggccaggucu

SEQ ID NO: 1023465 - RNA, 22 nt, Human
agaguucugcucuucucaguga

SEQ ID NO: 1023466 - RNA, 22 nt, Human
ggccugaggcaauagucagaca

SEQ ID NO: 1023467 - RNA, 22 nt, Human
ggggcagaaguagugccccuga

SEQ ID NO: 1023468 - RNA, 22 nt, Human
gauuucuugauaaguaguguga

SEQ ID NO: 1023469 - RNA, 19 nt, Human
cuguccuuggcugcacugu

SEQ ID NO: 1023470 - RNA, 23 nt, Human
cgcccagccucagugaccugggc

SEQ ID NO: 1023471 - RNA, 22 nt, Human
agcauuuaguuaguaaauguuu

SEQ ID NO: 1023472 - RNA, 22 nt, Human
agggcuccaaggaaguguagcu

SEQ ID NO: 1023473 - RNA, 22 nt, Human
agggccuggaacuggagaccac

SEQ ID NO: 1023474 - RNA, 22 nt, Human
acaauacuauuuucaguauccu

SEQ ID NO: 1023475 - RNA, 20 nt, Human
agguggcuccugcugggggu

SEQ ID NO: 1023476 - RNA, 22 nt, Human
cacugccuggaaggagagacau

SEQ ID NO: 1023477 - RNA, 22 nt, Human
ccugugucagccccugccucca

SEQ ID NO: 1023478 - RNA, 22 nt, Human
agccagccaguucacuaggaaa

SEQ ID NO: 1023479 - RNA, 22 nt, Human
cugcucugugguccaugagaca

SEQ ID NO: 1023480 - RNA, 22 nt, Human
ugauuuccacagucaggggugc

SEQ ID NO: 1023481 - RNA, 22 nt, Human
auugacaagcaguaugucuuag

SEQ ID NO: 1023482 - RNA, 22 nt, Human
ccagagagucgaugggggacac

SEQ ID NO: 1023483 - RNA, 22 nt, Human
uaacacauuuuaagccauuuua

SEQ ID NO: 1023484 - RNA, 22 nt, Human
agcucagggcgaucugucucgg

SEQ ID NO: 1023485 - RNA, 22 nt, Human
gaguuauuaauggcugaguuug

SEQ ID NO: 1023486 - RNA, 22 nt, Human
cuauugaauagcccaaaucauu

SEQ ID NO: 1023487 - RNA, 22 nt, Human
auguagaagcugacagugcugu

SEQ ID NO: 1023488 - RNA, 22 nt, Human
gcugccugaagugucuacacug

SEQ ID NO: 1023489 - RNA, 22 nt, Human
gagcuuuagcugagaccugcuu

SEQ ID NO: 1023490 - RNA, 22 nt, Human
aauuacuuaagagaaacuuuga

SEQ ID NO: 1023491 - RNA, 22 nt, Human
cuggagaggcugggaacagguu

SEQ ID NO: 1023492 - RNA, 22 nt, Human
ccaggagcauuaagagaacaua

SEQ ID NO: 1023493 - RNA, 22 nt, Human
cagagcugcacauucuaugaug

SEQ ID NO: 1023494 - RNA, 22 nt, Human
caggggcucuaaugcaugauca

SEQ ID NO: 1023495 - RNA, 22 nt, Human
agagccugcagcugugaagaaa

SEQ ID NO: 1023496 - RNA, 22 nt, Human
cuggagccccagacagggagag

SEQ ID NO: 1023497 - RNA, 22 nt, Human
agucccagagaggucggggcca

SEQ ID NO: 1023498 - RNA, 22 nt, Human
ucagagagcuggugggcagagg

SEQ ID NO: 1023499 - RNA, 22 nt, Human
ucugaagaacugaguaaacaug

SEQ ID NO: 1023500 - RNA, 22 nt, Human
cguguggucccggcaaggcaag

SEQ ID NO: 1023501 - RNA, 22 nt, Human
gccccagccaaggugacacgaa

SEQ ID NO: 1023502 - RNA, 22 nt, Human
cugugcauugucuugucuguag

SEQ ID NO: 1023503 - RNA, 22 nt, Human
gcugggaagugcaagaucaagg

SEQ ID NO: 1023504 - RNA, 20 nt, Human
cuucuucaguaguuuguucu

SEQ ID NO: 1023505 - RNA, 22 nt, Human
uuugcauaagucauguccagug

SEQ ID NO: 1023506 - RNA, 22 nt, Human
cugggccaucagaggggcugga

SEQ ID NO: 1023507 - RNA, 18 nt, Human
cagaaaucacaccagcac

SEQ ID NO: 1023508 - RNA, 22 nt, Human
augcuuuacaguuuuccaaaca

SEQ ID NO: 1023509 - RNA, 22 nt, Human
ugaacaacugcaaaaaucucca

SEQ ID NO: 1023510 - RNA, 22 nt, Human
ugcugggggugucucaccaggc

SEQ ID NO: 1023511 - RNA, 22 nt, Human
uguguauuaccauuuuacagcu

SEQ ID NO: 1023512 - RNA, 22 nt, Human
cagcuuuccagagaccugcccc

SEQ ID NO: 1023513 - RNA, 22 nt, Human
gcagcaugagcuauacaaagua

SEQ ID NO: 1023514 - RNA, 20 nt, Human
ucugcucagcccucaguggc

SEQ ID NO: 1023515 - RNA, 22 nt, Human
uuucaucuaacacuacauaggg

SEQ ID NO: 1023516 - RNA, 20 nt, Human
agaaucugacccagagagac

SEQ ID NO: 1023517 - RNA, 19 nt, Human
uucuaccuuacuguaggcu

SEQ ID NO: 1023518 - RNA, 22 nt, Human
agcaaggcagucagcuggcugg

SEQ ID NO: 1023519 - RNA, 22 nt, Human
cauggcccucuucuggagcaau

SEQ ID NO: 1023520 - RNA, 22 nt, Human
uaugaacugugagugugauggg

SEQ ID NO: 1023521 - RNA, 22 nt, Human
auaacagaugugaagugcuaau

SEQ ID NO: 1023522 - RNA, 19 nt, Human
ggccccucucacaggaguu

SEQ ID NO: 1023523 - RNA, 22 nt, Human
ucuuccaguguagacaucugcc

SEQ ID NO: 1023524 - RNA, 22 nt, Human
cccagcuaccucugcuaggaga

SEQ ID NO: 1023525 - RNA, 19 nt, Human
ccagcagcuuugauucucu

SEQ ID NO: 1023526 - RNA, 22 nt, Human
uucauuaguucugaagaugucu

SEQ ID NO: 1023527 - RNA, 22 nt, Human
caccaggcugaaccagagggga

SEQ ID NO: 1023528 - RNA, 22 nt, Human
agguggguaucaugagagauua

SEQ ID NO: 1023529 - RNA, 22 nt, Human
cuccuggacauggagcggagga

SEQ ID NO: 1023530 - RNA, 22 nt, Human
acaggcagguccugucccagcu

SEQ ID NO: 1023531 - RNA, 20 nt, Human
ugcuuuaugcuauacuuugu

SEQ ID NO: 1023532 - RNA, 22 nt, Human
uguuucuuuguagauauucuuu

SEQ ID NO: 1023533 - RNA, 22 nt, Human
uggagcaggugcucaggguaau

SEQ ID NO: 1023534 - RNA, 22 nt, Human
gcuguucccauguggggcucag

SEQ ID NO: 1023535 - RNA, 22 nt, Human
ggcuggagacaacguccugccc

SEQ ID NO: 1023536 - RNA, 22 nt, Human
gugcugggcuccaccccagagg

SEQ ID NO: 1023537 - RNA, 22 nt, Human
acuuagaacaggcagaauucca

SEQ ID NO: 1023538 - RNA, 23 nt, Human
uccagggauuaaugaagucaguc

SEQ ID NO: 1023539 - RNA, 22 nt, Human
guuccuauauagccuuaaggau

SEQ ID NO: 1023540 - RNA, 22 nt, Human
ucaugcaaggcugaaacauggu

SEQ ID NO: 1023541 - RNA, 22 nt, Human
ccccuuccaggaagcagaaucg

SEQ ID NO: 1023542 - RNA, 22 nt, Human
agaagcaguuauuuuuugcaca

SEQ ID NO: 1023543 - RNA, 22 nt, Human
uccucaugccgggucucacgcu

SEQ ID NO: 1023544 - RNA, 22 nt, Human
ggcacugggugagggucacugg

SEQ ID NO: 1023545 - RNA, 22 nt, Human
ggguggcacaggugcagagggu

SEQ ID NO: 1023546 - RNA, 22 nt, Human
gaggccugguuugcaugagaau

SEQ ID NO: 1023547 - RNA, 22 nt, Human
uccaggccuaggccaagugauu

SEQ ID NO: 1023548 - RNA, 22 nt, Human
uguuagaaguuaaucacuaauu

SEQ ID NO: 1023549 - RNA, 22 nt, Human
ucucagaggucuucagccucug

SEQ ID NO: 1023550 - RNA, 22 nt, Human
ccauccuaucugaccuacuugu

SEQ ID NO: 1023551 - RNA, 21 nt, Human
uaaggccaagucuauuucugu

SEQ ID NO: 1023552 - RNA, 22 nt, Human
gcccagccuccaagcuccaagg

SEQ ID NO: 1023553 - RNA, 22 nt, Human
guucuguacuccaagcucuucc

SEQ ID NO: 1023554 - RNA, 22 nt, Human
agugugucgagggaggguccag

SEQ ID NO: 1023555 - RNA, 22 nt, Human
acaguuucuccauuuacaccuu

SEQ ID NO: 1023556 - RNA, 22 nt, Human
cuuauuagaaagaaaagacaug

SEQ ID NO: 1023557 - RNA, 19 nt, Human
gucacauuugucucccagg

SEQ ID NO: 1023558 - RNA, 22 nt, Human
acccuggguucccgcagcacca

SEQ ID NO: 1023559 - RNA, 22 nt, Human
ugucaccaguuccaggaaauaa

SEQ ID NO: 1023560 - RNA, 22 nt, Human
ucuuuucaucauuuaauaggua

SEQ ID NO: 1023561 - RNA, 21 nt, Human
ccagagagagggaaguggguu

SEQ ID NO: 1023562 - RNA, 22 nt, Human
cuacauuuggagaguauaggaa

SEQ ID NO: 1023563 - RNA, 23 nt, Human
acagaaaucauuuguaagguacc

SEQ ID NO: 1023564 - RNA, 22 nt, Human
uuaaugcagaaaucaaacugac

SEQ ID NO: 1023565 - RNA, 22 nt, Human
uagaaacauauaggauggcagg

SEQ ID NO: 1023566 - RNA, 19 nt, Human
agcagagcccugaagaucc

SEQ ID NO: 1023567 - RNA, 20 nt, Human
ucacaggggaccaggagcag

SEQ ID NO: 1023568 - RNA, 22 nt, Human
agggcuccgggccaccggccug

SEQ ID NO: 1023569 - RNA, 22 nt, Human
uccaggcaugucccaagccgga

SEQ ID NO: 1023570 - RNA, 22 nt, Human
uggacaggugagugacucaggg

SEQ ID NO: 1023571 - RNA, 20 nt, Human
uuccuguauacaaagaguuc

SEQ ID NO: 1023572 - RNA, 22 nt, Human
auuucuuccucugucaguaacu

SEQ ID NO: 1023573 - RNA, 22 nt, Human
ugggacaguuguccuccacucu

SEQ ID NO: 1023574 - RNA, 22 nt, Human
ugggccugacucaccugccucc

SEQ ID NO: 1023575 - RNA, 23 nt, Human
aguacauucgaaaaauucuguga

SEQ ID NO: 1023576 - RNA, 22 nt, Human
uaacagaaauaguaggugaggg

SEQ ID NO: 1023577 - RNA, 22 nt, Human
uugaauucauuucucauugagu

SEQ ID NO: 1023578 - RNA, 23 nt, Human
acagagaucuugacuuguaugga

SEQ ID NO: 1023579 - RNA, 22 nt, Human
cugcuggggucagagcacuggg

SEQ ID NO: 1023580 - RNA, 22 nt, Human
uucucagauauuuacugagcau

SEQ ID NO: 1023581 - RNA, 22 nt, Human
caguuucuguuuuaaauagcag

SEQ ID NO: 1023582 - RNA, 22 nt, Human
uagauuucgcugcaucucaauc

SEQ ID NO: 1023583 - RNA, 22 nt, Human
ccagccuggguguuagaagaca

SEQ ID NO: 1023584 - RNA, 22 nt, Human
gaagcccagggcguggccgggc

SEQ ID NO: 1023585 - RNA, 22 nt, Human
guuaauuuaguagaguccagau

SEQ ID NO: 1023586 - RNA, 22 nt, Human
agugcacaccuuaguacaaagu

SEQ ID NO: 1023587 - RNA, 22 nt, Human
ucucccagaggaucccagugga

SEQ ID NO: 1023588 - RNA, 22 nt, Human
agacagcugcucgcagagcuau

SEQ ID NO: 1023589 - RNA, 22 nt, Human
uugcuguguaacuccuggccug

SEQ ID NO: 1023590 - RNA, 22 nt, Human
guggagacgggacagaagcuaa

SEQ ID NO: 1023591 - RNA, 22 nt, Human
gacugucauucuagugcccaug

SEQ ID NO: 1023592 - RNA, 22 nt, Human
ugggcugcccugaugguccuca

SEQ ID NO: 1023593 - RNA, 22 nt, Human
ccugccagauccccugagcuga

SEQ ID NO: 1023594 - RNA, 22 nt, Human
uauuugaagauucuucugaugu

SEQ ID NO: 1023595 - RNA, 22 nt, Human
acagagcacugcccugugccgc

SEQ ID NO: 1023596 - RNA, 22 nt, Human
uggcccugacagguccugggca

SEQ ID NO: 1023597 - RNA, 22 nt, Human
agcugauuccacuuuuucccca

SEQ ID NO: 1023598 - RNA, 22 nt, Human
ucucaggagccacagcgggagu

SEQ ID NO: 1023599 - RNA, 22 nt, Human
cucuuaaaaacuugauauauuu

SEQ ID NO: 1023600 - RNA, 22 nt, Human
cccaggcagugugugcaugcgu

SEQ ID NO: 1023601 - RNA, 22 nt, Human
ggaggccuugaggccaggagcu

SEQ ID NO: 1023602 - RNA, 22 nt, Human
gacagcagccacagggagaggg

SEQ ID NO: 1023603 - RNA, 22 nt, Human
cauggcauugcauaacggggcu

SEQ ID NO: 1023604 - RNA, 22 nt, Human
uucugucacagugcugguauca

SEQ ID NO: 1023605 - RNA, 22 nt, Human
cagggcagagccaggauuucaa

SEQ ID NO: 1023606 - RNA, 22 nt, Human
ucaggcuggaaugcaguggggc

SEQ ID NO: 1023607 - RNA, 22 nt, Human
aaaaucugcuuccuuuuacaga

SEQ ID NO: 1023608 - RNA, 22 nt, Human
uccaggcaugucugaguccuuc

SEQ ID NO: 1023609 - RNA, 22 nt, Human
ccacacagucaguuuccaagaa

SEQ ID NO: 1023610 - RNA, 22 nt, Human
ggccucagaccggagcuggcca

SEQ ID NO: 1023611 - RNA, 22 nt, Human
gugccugguuuggggaauguuc

SEQ ID NO: 1023612 - RNA, 22 nt, Human
cuggcccauggugagcucuggg

SEQ ID NO: 1023613 - RNA, 22 nt, Human
uaugaaaugguaguaggaaggg

SEQ ID NO: 1023614 - RNA, 22 nt, Human
ggcagcuggccuccucgcccac

SEQ ID NO: 1023615 - RNA, 22 nt, Human
gcugccugauguccagcaggac

SEQ ID NO: 1023616 - RNA, 22 nt, Human
uggcucagaggggaagugguuu

SEQ ID NO: 1023617 - RNA, 22 nt, Human
ccuggccuccuggccuucucau

SEQ ID NO: 1023618 - RNA, 22 nt, Human
gccuggguuccaugaucuccag

SEQ ID NO: 1023619 - RNA, 22 nt, Human
agggguggagaguguugccagu

SEQ ID NO: 1023620 - RNA, 22 nt, Human
ccaggcucugcgcuggacaugg

SEQ ID NO: 1023621 - RNA, 22 nt, Human
gcuggccagggcugcucgcgga

SEQ ID NO: 1023622 - RNA, 22 nt, Human
auuuuucucuuuccacugagau

SEQ ID NO: 1023623 - RNA, 19 nt, Human
ccaggagcaguggugagcu

SEQ ID NO: 1023624 - RNA, 22 nt, Human
aaagauuuaagaauaauuugug

SEQ ID NO: 1023625 - RNA, 23 nt, Human
agacaguggccgagagguacuag

SEQ ID NO: 1023626 - RNA, 22 nt, Human
aaaggcaggcuuucacaucuca

SEQ ID NO: 1023627 - RNA, 22 nt, Human
uugucuguaaagacggccacca

SEQ ID NO: 1023628 - RNA, 22 nt, Human
gucaaacaaauuaacauaucca

SEQ ID NO: 1023629 - RNA, 22 nt, Human
cagagcuggagggaacccuggc

SEQ ID NO: 1023630 - RNA, 22 nt, Human
uccugcagugugucuccugcac

SEQ ID NO: 1023631 - RNA, 22 nt, Human
gcagagugaggaagagcuucca

SEQ ID NO: 1023632 - RNA, 22 nt, Human
caggggcugagaaggaacgucc

SEQ ID NO: 1023633 - RNA, 22 nt, Human
uuuugagauggagucuugcucu

SEQ ID NO: 1023634 - RNA, 22 nt, Human
ggggcuccagucuucacauuuu

SEQ ID NO: 1023635 - RNA, 20 nt, Human
aagcagaagcugcucucagc

SEQ ID NO: 1023636 - RNA, 22 nt, Human
cuggccucauagccaagcugug

SEQ ID NO: 1023637 - RNA, 22 nt, Human
uggcagcaguggagguagaaag

SEQ ID NO: 1023638 - RNA, 22 nt, Human
caggcagccugagggaucuggg

SEQ ID NO: 1023639 - RNA, 22 nt, Human
ggcugccugaacuuuggggaaa

SEQ ID NO: 1023640 - RNA, 22 nt, Human
gucaugccagcggagcucggga

SEQ ID NO: 1023641 - RNA, 18 nt, Human
ggacaucaucaggugcuu

SEQ ID NO: 1023642 - RNA, 22 nt, Human
ucccaggccauaaaacucagag

SEQ ID NO: 1023643 - RNA, 22 nt, Human
ccagggcagcagaauuggggca

SEQ ID NO: 1023644 - RNA, 22 nt, Human
aagggcucacccaacucacuuc

SEQ ID NO: 1023645 - RNA, 22 nt, Human
agcaggaaguagucuguaagca

SEQ ID NO: 1023646 - RNA, 22 nt, Human
gcagaugguggggcaggaaaau

SEQ ID NO: 1023647 - RNA, 22 nt, Human
cagccucuaagcacagccucuc

SEQ ID NO: 1023648 - RNA, 22 nt, Human
cuggagccacuuuuuauccuuu

SEQ ID NO: 1023649 - RNA, 22 nt, Human
agccaaagaucagugugcaagu

SEQ ID NO: 1023650 - RNA, 22 nt, Human
ucugggaacucugucauuuccc

SEQ ID NO: 1023651 - RNA, 22 nt, Human
ugcccuguuaucuuggaagagu

SEQ ID NO: 1023652 - RNA, 19 nt, Human
ggcauccagaacuaccagu

SEQ ID NO: 1023653 - RNA, 22 nt, Human
cuucccagaccuuagagugcag

SEQ ID NO: 1023654 - RNA, 22 nt, Human
ggagcugggguuggcaucuucc

SEQ ID NO: 1023655 - RNA, 22 nt, Human
aguuucauauuaccaugucacc

SEQ ID NO: 1023656 - RNA, 22 nt, Human
cagcuucuucaguccuggagcu

SEQ ID NO: 1023657 - RNA, 22 nt, Human
gagaaacuuggaguuauucugg

SEQ ID NO: 1023658 - RNA, 22 nt, Human
uccauuuacuauucucauaucg

SEQ ID NO: 1023659 - RNA, 22 nt, Human
uauccaggaggaacucauuuug

SEQ ID NO: 1023660 - RNA, 22 nt, Human
cucaugauguagcgaaugagaa

SEQ ID NO: 1023661 - RNA, 22 nt, Human
gcagaaggucuggcacuucagg

SEQ ID NO: 1023662 - RNA, 22 nt, Human
aggcucugacgucacacguggc

SEQ ID NO: 1023663 - RNA, 21 nt, Human
aggcucccagaaaugggcauc

SEQ ID NO: 1023664 - RNA, 22 nt, Human
gcagggcuguggacacuuuggu

SEQ ID NO: 1023665 - RNA, 22 nt, Human
ugucuguaagguguuuauguua

SEQ ID NO: 1023666 - RNA, 19 nt, Human
ucugaggguccagaugcau

SEQ ID NO: 1023667 - RNA, 22 nt, Human
aacaugcucuguuucuuggaug

SEQ ID NO: 1023668 - RNA, 22 nt, Human
guuuagaacacggaaauacuga

SEQ ID NO: 1023669 - RNA, 22 nt, Human
cauuaucugccauugacaccau

SEQ ID NO: 1023670 - RNA, 22 nt, Human
auuacaaucgagagaaacaaau

SEQ ID NO: 1023671 - RNA, 22 nt, Human
aaucagucauuagcucugaccu

SEQ ID NO: 1023672 - RNA, 22 nt, Human
cugggaggcggagguuguagug

SEQ ID NO: 1023673 - RNA, 15 nt, Human
aaucuggcggcaagu

SEQ ID NO: 1023674 - RNA, 22 nt, Human
agcagcuggguccggcggagca

SEQ ID NO: 1023675 - RNA, 22 nt, Human
cagucccaugagcccagaacau

SEQ ID NO: 1023676 - RNA, 22 nt, Human
aggggccucgcaggaccgcucc

SEQ ID NO: 1023677 - RNA, 22 nt, Human
uguaaucauuacaguacaugga

SEQ ID NO: 1023678 - RNA, 22 nt, Human
auacauguuguaccauauguuu

SEQ ID NO: 1023679 - RNA, 22 nt, Human
ccuugcugcgugcuagcacaga

SEQ ID NO: 1023680 - RNA, 22 nt, Human
gcucuccaaacccuguggcuuu

SEQ ID NO: 1023681 - RNA, 22 nt, Human
aggcccugcccagugccacaag

SEQ ID NO: 1023682 - RNA, 22 nt, Human
uuccaggaauucagcucucagu

SEQ ID NO: 1023683 - RNA, 20 nt, Human
cugugccuaaaccuccgggu

SEQ ID NO: 1023684 - RNA, 22 nt, Human
gcagauggugccaugucuugug

SEQ ID NO: 1023685 - RNA, 22 nt, Human
ugauuucccucaucauaacaga

SEQ ID NO: 1023686 - RNA, 22 nt, Human
gggcugaccccaccccucacuc

SEQ ID NO: 1023687 - RNA, 22 nt, Human
ccacagggucagccacucugca

SEQ ID NO: 1023688 - RNA, 22 nt, Human
guuugauucaagaacaaagagu

SEQ ID NO: 1023689 - RNA, 17 nt, Human
gcugagugcagggaguc

SEQ ID NO: 1023690 - RNA, 22 nt, Human
ccucagggaggccucuguggcu

SEQ ID NO: 1023691 - RNA, 22 nt, Human
agagcuggcugguagcccugau

SEQ ID NO: 1023692 - RNA, 22 nt, Human
ccaaggagaaaugcugugcuuu

SEQ ID NO: 1023693 - RNA, 22 nt, Human
agcaugcugguguucauggcag

SEQ ID NO: 1023694 - RNA, 22 nt, Human
gcuguauuuauuuucuaggguu

SEQ ID NO: 1023695 - RNA, 22 nt, Human
uccauguguuuuccuguccaca

SEQ ID NO: 1023696 - RNA, 22 nt, Human
cccagccucagcuuuacuucca

SEQ ID NO: 1023697 - RNA, 22 nt, Human
uccugggcuugcuccuccagcu

SEQ ID NO: 1023698 - RNA, 22 nt, Human
uuauuuaaaauguagguuggga

SEQ ID NO: 1023699 - RNA, 22 nt, Human
ugcagaaguauuccaggcccca

SEQ ID NO: 1023700 - RNA, 22 nt, Human
ucugcaggacugaggccuguuu

SEQ ID NO: 1023701 - RNA, 22 nt, Human
cucacugugaccucagcagaca

SEQ ID NO: 1023702 - RNA, 21 nt, Human
cagaggcugagagggcaaucu

SEQ ID NO: 1023703 - RNA, 21 nt, Human
ucacagacuggucagugaggc

SEQ ID NO: 1023704 - RNA, 19 nt, Human
uuucaauggcuuagagaaa

SEQ ID NO: 1023705 - RNA, 22 nt, Human
gaaaugcagaaccugagaccau

SEQ ID NO: 1023706 - RNA, 22 nt, Human
gguuucaacuuuugugaggaau

SEQ ID NO: 1023707 - RNA, 18 nt, Human
uggagccagcucuaggau

SEQ ID NO: 1023708 - RNA, 22 nt, Human
ucaccagucuuucuuaccauug

SEQ ID NO: 1023709 - RNA, 22 nt, Human
uggaggcauuuuagguugucac

SEQ ID NO: 1023710 - RNA, 19 nt, Human
uucuccaggcugcagaggg

SEQ ID NO: 1023711 - RNA, 22 nt, Human
ucuggauggucagcucuuccug

SEQ ID NO: 1023712 - RNA, 22 nt, Human
ggcugcugguagggguaggaag

SEQ ID NO: 1023713 - RNA, 22 nt, Human
ccugacucuggccaggccagcu

SEQ ID NO: 1023714 - RNA, 22 nt, Human
uauaucuuauaugugcagguac

SEQ ID NO: 1023715 - RNA, 22 nt, Human
gcagagcaguacucucuugacu

SEQ ID NO: 1023716 - RNA, 22 nt, Human
guguugaugacauuuuagaaac

SEQ ID NO: 1023717 - RNA, 20 nt, Human
cugcagggugagugggcgau

SEQ ID NO: 1023718 - RNA, 22 nt, Human
acuggcagcuguaggaugcaug

SEQ ID NO: 1023719 - RNA, 20 nt, Human
agucucuguagugccugaga

SEQ ID NO: 1023720 - RNA, 22 nt, Human
acaggcuuacaggcugcaagua

SEQ ID NO: 1023721 - RNA, 22 nt, Human
gaagaacacuucaugauucauu

SEQ ID NO: 1023722 - RNA, 22 nt, Human
cccugccuucuuggccuuuaaa

SEQ ID NO: 1023723 - RNA, 22 nt, Human
agagccugaggaugucccagcu

SEQ ID NO: 1023724 - RNA, 22 nt, Human
gagggcagagacagugauucac

SEQ ID NO: 1023725 - RNA, 22 nt, Human
gaagccaagugcaaaugccuua

SEQ ID NO: 1023726 - RNA, 22 nt, Human
acuucucuucauagguggcaau

SEQ ID NO: 1023727 - RNA, 22 nt, Human
cugcuuuguaaaauagacauaa

SEQ ID NO: 1023728 - RNA, 22 nt, Human
caaaggcaacauauacuuguuu

SEQ ID NO: 1023729 - RNA, 22 nt, Human
guucucucugcuuccaagaugg

SEQ ID NO: 1023730 - RNA, 22 nt, Human
uacauggguagguuaagucaua

SEQ ID NO: 1023731 - RNA, 22 nt, Human
gcuggcagagacaagaagacua

SEQ ID NO: 1023732 - RNA, 22 nt, Human
uacaaagugagcaaccucuuuu

SEQ ID NO: 1023733 - RNA, 22 nt, Human
acagcuuuucugauagauccug

SEQ ID NO: 1023734 - RNA, 22 nt, Human
uaacacaugguuaguacacaau

SEQ ID NO: 1023735 - RNA, 22 nt, Human
ucuggcccagccccugagguca

SEQ ID NO: 1023736 - RNA, 22 nt, Human
uauauuaacacccacuugccuc

SEQ ID NO: 1023737 - RNA, 22 nt, Human
uguacaguaggaacuuguuauu

SEQ ID NO: 1023738 - RNA, 22 nt, Human
cuggcuugcagcucaucauaaa

SEQ ID NO: 1023739 - RNA, 22 nt, Human
uugagaagaauguguugaguuu

SEQ ID NO: 1023740 - RNA, 22 nt, Human
agaagccaauucugugugaguc

SEQ ID NO: 1023741 - RNA, 22 nt, Human
cucccuggcuuuguccugaggc

SEQ ID NO: 1023742 - RNA, 22 nt, Human
gcagugcuaaguagcuggccca

SEQ ID NO: 1023743 - RNA, 22 nt, Human
agucaaagcuacaggcauuuga

SEQ ID NO: 1023744 - RNA, 22 nt, Human
cuucuggggauggagcccagaa

SEQ ID NO: 1023745 - RNA, 21 nt, Human
ccuuuacaauuuugcauuccu

SEQ ID NO: 1023746 - RNA, 22 nt, Human
acaguuugcccugacauucucc

SEQ ID NO: 1023747 - RNA, 22 nt, Human
gaauacauuggaaaucagaaua

SEQ ID NO: 1023748 - RNA, 22 nt, Human
aguggggaagagcaugggcccu

SEQ ID NO: 1023749 - RNA, 22 nt, Human
aaaggccacacugcucuuucuc

SEQ ID NO: 1023750 - RNA, 22 nt, Human
ucugggagguggcagggugcau

SEQ ID NO: 1023751 - RNA, 22 nt, Human
cagugaggcucugcugagcggu

SEQ ID NO: 1023752 - RNA, 22 nt, Human
uguuuuucaaauauugcucugu

SEQ ID NO: 1023753 - RNA, 21 nt, Human
agcagaggcagaauguaugca

SEQ ID NO: 1023754 - RNA, 22 nt, Human
ccuggcugguggcagcgacaag

SEQ ID NO: 1023755 - RNA, 22 nt, Human
uuucuauaugaggagcuaaagu

SEQ ID NO: 1023756 - RNA, 22 nt, Human
cauucauuuaugaaauaucuau

SEQ ID NO: 1023757 - RNA, 22 nt, Human
uggaaagucucuuuugacugua

SEQ ID NO: 1023758 - RNA, 22 nt, Human
cagaguggcagucccaggccca

SEQ ID NO: 1023759 - RNA, 22 nt, Human
guauuagggccaaaggcaggaa

SEQ ID NO: 1023760 - RNA, 22 nt, Human
gggcuggcaucgguugcugaga

SEQ ID NO: 1023761 - RNA, 22 nt, Human
acugcuuuucuaagauucugug

SEQ ID NO: 1023762 - RNA, 22 nt, Human
agagccagcaagugaauaguga

SEQ ID NO: 1023763 - RNA, 20 nt, Human
cugagcccccagccugcagg

SEQ ID NO: 1023764 - RNA, 22 nt, Human
acccagagcugggcuuggcaaa

SEQ ID NO: 1023765 - RNA, 22 nt, Human
cagagggcucggcggccgcucc

SEQ ID NO: 1023766 - RNA, 22 nt, Human
ugaaaugauguacaagaaggca

SEQ ID NO: 1023767 - RNA, 22 nt, Human
aaggcucuuggagugaaugcag

SEQ ID NO: 1023768 - RNA, 22 nt, Human
uagagcuggaauuugcagcaag

SEQ ID NO: 1023769 - RNA, 22 nt, Human
ugcuuccuucccguucuucucc

SEQ ID NO: 1023770 - RNA, 22 nt, Human
aaguguuaaaagauuaaaugcu

SEQ ID NO: 1023771 - RNA, 22 nt, Human
uuuauuauucucuggagaaugu

SEQ ID NO: 1023772 - RNA, 22 nt, Human
gcucucuggguggugggcaaca

SEQ ID NO: 1023773 - RNA, 22 nt, Human
ccaaagugcugggguuacaggc

SEQ ID NO: 1023774 - RNA, 22 nt, Human
gguccccguggaggcuggagcg

SEQ ID NO: 1023775 - RNA, 22 nt, Human
cugggcacuuuggggagccuac

SEQ ID NO: 1023776 - RNA, 22 nt, Human
gcugugagccgcugcugagcau

SEQ ID NO: 1023777 - RNA, 21 nt, Human
aacugcuggucuuuucugucu

SEQ ID NO: 1023778 - RNA, 22 nt, Human
ggcugcagcggauuggggauug

SEQ ID NO: 1023779 - RNA, 22 nt, Human
cuuauguacacacauauauugu

SEQ ID NO: 1023780 - RNA, 22 nt, Human
ugcagggcuuccucuuggaguu

SEQ ID NO: 1023781 - RNA, 22 nt, Human
aaguugagaugucauaggagac

SEQ ID NO: 1023782 - RNA, 22 nt, Human
aggcugcuggcaggcguggacg

SEQ ID NO: 1023783 - RNA, 22 nt, Human
uccuuccugcaggccaaguccu

SEQ ID NO: 1023784 - RNA, 22 nt, Human
augcucugggcaggagcccugg

SEQ ID NO: 1023785 - RNA, 22 nt, Human
acaguguguucugggaccucca

SEQ ID NO: 1023786 - RNA, 22 nt, Human
aguuuuucuccccuggcuucau

SEQ ID NO: 1023787 - RNA, 22 nt, Human
cuggcugcaggaugaggcugcc

SEQ ID NO: 1023788 - RNA, 22 nt, Human
aaaagacaucuauuucaggcag

SEQ ID NO: 1023789 - RNA, 22 nt, Human
agguaaagacugcaaggagaau

SEQ ID NO: 1023790 - RNA, 22 nt, Human
ugcagaaggaggaggaaaucca

SEQ ID NO: 1023791 - RNA, 22 nt, Human
gaaggagagggucaaggauaau

SEQ ID NO: 1023792 - RNA, 22 nt, Human
cauucugugauucuaaaucccu

SEQ ID NO: 1023793 - RNA, 22 nt, Human
cagcagggcccccgggugcgcc

SEQ ID NO: 1023794 - RNA, 22 nt, Human
gucugucacucaggggcuggag

SEQ ID NO: 1023795 - RNA, 22 nt, Human
ccugagagcauuccacacugaa

SEQ ID NO: 1023796 - RNA, 22 nt, Human
uauugacaauuugugaaacuau

SEQ ID NO: 1023797 - RNA, 22 nt, Human
cugagauggccacugggucuca

SEQ ID NO: 1023798 - RNA, 22 nt, Human
uccagccaugcaugacaaucac

SEQ ID NO: 1023799 - RNA, 22 nt, Human
aauguguacuuuuucaugcuca

SEQ ID NO: 1023800 - RNA, 22 nt, Human
ucuguccucuuugaagcugcuc

SEQ ID NO: 1023801 - RNA, 22 nt, Human
aggcucugaugcaagcccaggg

SEQ ID NO: 1023802 - RNA, 21 nt, Human
cucuugugucagagccagagg

SEQ ID NO: 1023803 - RNA, 21 nt, Human
gcccucaggggaggauggccu

SEQ ID NO: 1023804 - RNA, 22 nt, Human
agagcugcaccuaugcagaccu

SEQ ID NO: 1023805 - RNA, 22 nt, Human
aggagccaugagugacaucaca

SEQ ID NO: 1023806 - RNA, 22 nt, Human
agggcucccgcgguguccggga

SEQ ID NO: 1023807 - RNA, 22 nt, Human
agacagugauguaagcaggagu

SEQ ID NO: 1023808 - RNA, 22 nt, Human
ggcuggccucaggguccucgcu

SEQ ID NO: 1023809 - RNA, 22 nt, Human
cugccugcaugcugccauagcu

SEQ ID NO: 1023810 - RNA, 22 nt, Human
ugcagaggaccauuguccugga

SEQ ID NO: 1023811 - RNA, 22 nt, Human
aaaggccaagcaugagguggac

SEQ ID NO: 1023812 - RNA, 22 nt, Human
cacagcauaaugaaauauacuu

SEQ ID NO: 1023813 - RNA, 22 nt, Human
uucaugaaaguguaucuugugg

SEQ ID NO: 1023814 - RNA, 22 nt, Human
cagggccaguucucgcagcagu

SEQ ID NO: 1023815 - RNA, 19 nt, Human
acacagggcuagaguuaca

SEQ ID NO: 1023816 - RNA, 23 nt, Human
uguugaaguaacuguuacauaga

SEQ ID NO: 1023817 - RNA, 22 nt, Human
uguuugaauuuugcuaacgugu

SEQ ID NO: 1023818 - RNA, 22 nt, Human
cacccagccuucacacaggagu

SEQ ID NO: 1023819 - RNA, 22 nt, Human
agccuggaauuaaggaaaugca

SEQ ID NO: 1023820 - RNA, 22 nt, Human
ucauugcagaaauaaaggugaa

SEQ ID NO: 1023821 - RNA, 22 nt, Human
uuggcagucucagucagauggc

SEQ ID NO: 1023822 - RNA, 22 nt, Human
ugcugaaacaauaacauacugg

SEQ ID NO: 1023823 - RNA, 17 nt, Human
ucuuuccugccaugcuc

SEQ ID NO: 1023824 - RNA, 22 nt, Human
cugccugugugugccugcagaa

SEQ ID NO: 1023825 - RNA, 22 nt, Human
ucaggcugguggucagauggcu

SEQ ID NO: 1023826 - RNA, 22 nt, Human
caguauguacucuuaucaugua

SEQ ID NO: 1023827 - RNA, 22 nt, Human
uucuuuggggaauauucugguu

SEQ ID NO: 1023828 - RNA, 22 nt, Human
gucucagaccacccucuuuggc

SEQ ID NO: 1023829 - RNA, 22 nt, Human
uuuaaauuuguguuuagagggu

SEQ ID NO: 1023830 - RNA, 22 nt, Human
uucuucuuuccuauaauuaauu

SEQ ID NO: 1023831 - RNA, 22 nt, Human
guggcccucugauagggucagg

SEQ ID NO: 1023832 - RNA, 19 nt, Human
gcuguauuaaagauacaug

SEQ ID NO: 1023833 - RNA, 22 nt, Human
ugccugaugcaggaguaucaga

SEQ ID NO: 1023834 - RNA, 22 nt, Human
caguguuuguauagaauaugca

SEQ ID NO: 1023835 - RNA, 22 nt, Human
aauaauuuuagcucagaguugu

SEQ ID NO: 1023836 - RNA, 22 nt, Human
uggcagucuggguuggcaguua

SEQ ID NO: 1023837 - RNA, 22 nt, Human
caggagcccguugcuccggcgg

SEQ ID NO: 1023838 - RNA, 22 nt, Human
cuuagcaugugguguccuugua

SEQ ID NO: 1023839 - RNA, 20 nt, Human
ggcacuggaagcacacagga

SEQ ID NO: 1023840 - RNA, 22 nt, Human
aaaaucaguacacuuuauuuug

SEQ ID NO: 1023841 - RNA, 22 nt, Human
uccugucagugaggcagaugaa

SEQ ID NO: 1023842 - RNA, 22 nt, Human
agugggcagugcgcucggaugc

SEQ ID NO: 1023843 - RNA, 22 nt, Human
agggcagagacaugcuuccuga

SEQ ID NO: 1023844 - RNA, 22 nt, Human
uguuuguucccucucuuuccug

SEQ ID NO: 1023845 - RNA, 22 nt, Human
auguuucaaugcacuuuagccu

SEQ ID NO: 1023846 - RNA, 19 nt, Human
cuggcagccugucuguguc

SEQ ID NO: 1023847 - RNA, 22 nt, Human
auuuaguguguauugcuauuau

SEQ ID NO: 1023848 - RNA, 22 nt, Human
agugaaaugauaguguaaauac

SEQ ID NO: 1023849 - RNA, 22 nt, Human
gcagcuccuggcacaguuuuuu

SEQ ID NO: 1023850 - RNA, 22 nt, Human
gccuggaggggacagucucugg

SEQ ID NO: 1023851 - RNA, 22 nt, Human
cuagggacugggaccuuaguua

SEQ ID NO: 1023852 - RNA, 20 nt, Human
cagccuccacucacucagcu

SEQ ID NO: 1023853 - RNA, 22 nt, Human
cugccugcuucugagccagagg

SEQ ID NO: 1023854 - RNA, 22 nt, Human
ugagagucucagaccuccuggu

SEQ ID NO: 1023855 - RNA, 22 nt, Human
ugaaugauguauaauauugaga

SEQ ID NO: 1023856 - RNA, 22 nt, Human
uggccacccagcugacgccuuc

SEQ ID NO: 1023857 - RNA, 22 nt, Human
aaaagggacuacucucagcucc

SEQ ID NO: 1023858 - RNA, 22 nt, Human
uuacauuagacccacuuucaug

SEQ ID NO: 1023859 - RNA, 22 nt, Human
gcucagagggaacaaggggcug

SEQ ID NO: 1023860 - RNA, 22 nt, Human
guggccuggcgagcuggcgcgg

SEQ ID NO: 1023861 - RNA, 22 nt, Human
cagagccaggucuaggagucuc

SEQ ID NO: 1023862 - RNA, 22 nt, Human
caguggcuguuucuggaaggca

SEQ ID NO: 1023863 - RNA, 22 nt, Human
agucucugucguagaucagcgu

SEQ ID NO: 1023864 - RNA, 22 nt, Human
acagggccucagcugauucugg

SEQ ID NO: 1023865 - RNA, 22 nt, Human
uccaggcauuccagccauucca

SEQ ID NO: 1023866 - RNA, 22 nt, Human
aggugaguugguaggaaguuug

SEQ ID NO: 1023867 - RNA, 22 nt, Human
ucaaagucauggcaggcucaga

SEQ ID NO: 1023868 - RNA, 22 nt, Human
cuggcagcuuagcacucugguu

SEQ ID NO: 1023869 - RNA, 22 nt, Human
ggcucugcugguaagaugccuc

SEQ ID NO: 1023870 - RNA, 22 nt, Human
gagcacaggcuuugguggacac

SEQ ID NO: 1023871 - RNA, 22 nt, Human
cucuggacagcaggugcugugg

SEQ ID NO: 1023872 - RNA, 22 nt, Human
acagcugggugcugcucagagc

SEQ ID NO: 1023873 - RNA, 22 nt, Human
cucuguccuaugcuugauagaa

SEQ ID NO: 1023874 - RNA, 22 nt, Human
ugggcugcagggguugagagcu

SEQ ID NO: 1023875 - RNA, 22 nt, Human
ccuggcugcuuucacuauggag

SEQ ID NO: 1023876 - RNA, 22 nt, Human
gcuaugcaggagccuaaugaca

SEQ ID NO: 1023877 - RNA, 22 nt, Human
agcaaucaccaccucuauauuu

SEQ ID NO: 1023878 - RNA, 22 nt, Human
cugggccuagcaacagaggagu

SEQ ID NO: 1023879 - RNA, 22 nt, Human
cgucuuccucuuacgaugcgcu

SEQ ID NO: 1023880 - RNA, 22 nt, Human
ucucaggguuuccugggggcug

SEQ ID NO: 1023881 - RNA, 22 nt, Human
ggagcugugcagugacuacaga

SEQ ID NO: 1023882 - RNA, 22 nt, Human
guguuuccuaguuuaaugaaug

SEQ ID NO: 1023883 - RNA, 21 nt, Human
cagagcagcguucugcugugg

SEQ ID NO: 1023884 - RNA, 22 nt, Human
ugaaggccagcucuuuaucagc

SEQ ID NO: 1023885 - RNA, 22 nt, Human
gagcucccaggccccagcaagg

SEQ ID NO: 1023886 - RNA, 22 nt, Human
uauuccuauuucuaaacauaug

SEQ ID NO: 1023887 - RNA, 22 nt, Human
uuuagaguugaguauucauugg

SEQ ID NO: 1023888 - RNA, 22 nt, Human
cagggcaguaccgcccucuggc

SEQ ID NO: 1023889 - RNA, 22 nt, Human
uuugucaucccuuuugaaacug

SEQ ID NO: 1023890 - RNA, 22 nt, Human
uuacacaacaucuguauuauua

SEQ ID NO: 1023891 - RNA, 21 nt, Human
guuuucaugauagagucugua

SEQ ID NO: 1023892 - RNA, 22 nt, Human
aagaaugucguugguauuuuaa

SEQ ID NO: 1023893 - RNA, 22 nt, Human
gaucaaaagcuggguucuaaaa

SEQ ID NO: 1023894 - RNA, 22 nt, Human
cucaggauagcugcgcagccug

SEQ ID NO: 1023895 - RNA, 22 nt, Human
aguguacauguuuacagcaucu

SEQ ID NO: 1023896 - RNA, 21 nt, Human
ccagcuuucccaagucccuuu

SEQ ID NO: 1023897 - RNA, 22 nt, Human
ucucaggggauucacuggcacc

SEQ ID NO: 1023898 - RNA, 22 nt, Human
uccucagacacccugcuggcuu

SEQ ID NO: 1023899 - RNA, 22 nt, Human
agagaauuuuaaaagccuugaa

SEQ ID NO: 1023900 - RNA, 22 nt, Human
cuauugaaaguguacaauucaa

SEQ ID NO: 1023901 - RNA, 22 nt, Human
gcccaggccggagagcagugcu

SEQ ID NO: 1023902 - RNA, 22 nt, Human
caacauuucaaggucuuuagga

SEQ ID NO: 1023903 - RNA, 22 nt, Human
ccuggaggagcgcugaccagcu

SEQ ID NO: 1023904 - RNA, 22 nt, Human
acuggcaguagagggagcgcau

SEQ ID NO: 1023905 - RNA, 22 nt, Human
uuggcacugugccuggcacauu

SEQ ID NO: 1023906 - RNA, 22 nt, Human
cggcuggguucggcugcaggcc

SEQ ID NO: 1023907 - RNA, 22 nt, Human
cuucauuaaccaaaaugcaaua

SEQ ID NO: 1023908 - RNA, 18 nt, Human
uucagcagcagacacacu

SEQ ID NO: 1023909 - RNA, 22 nt, Human
uuuuagauaguuuaacugcacu

SEQ ID NO: 1023910 - RNA, 22 nt, Human
cuccuucccuucaaguguuccu

SEQ ID NO: 1023911 - RNA, 22 nt, Human
uuuucauugagcaccugaguaa

SEQ ID NO: 1023912 - RNA, 22 nt, Human
cugaaggaagcagguggccugu

SEQ ID NO: 1023913 - RNA, 22 nt, Human
gggcugugcugaguaggaggug

SEQ ID NO: 1023914 - RNA, 21 nt, Human
uauuucuuugacucucucccu

SEQ ID NO: 1023915 - RNA, 22 nt, Human
cugggcugcaucaaagaggcau

SEQ ID NO: 1023916 - RNA, 22 nt, Human
uucuucuuaauguccugggaac

SEQ ID NO: 1023917 - RNA, 22 nt, Human
aacaucagaauauccauguugg

SEQ ID NO: 1023918 - RNA, 22 nt, Human
gaguggagcaaaagagguagau

SEQ ID NO: 1023919 - RNA, 22 nt, Human
aggcucaguuugguuuccauug

SEQ ID NO: 1023920 - RNA, 22 nt, Human
aagaaauuaaggaaugcaacga

SEQ ID NO: 1023921 - RNA, 22 nt, Human
uccaggccaauguagcaggccc

SEQ ID NO: 1023922 - RNA, 22 nt, Human
auuugaauggcuuaacacaacg

SEQ ID NO: 1023923 - RNA, 22 nt, Human
cuccaggagcugugucuuucuu

SEQ ID NO: 1023924 - RNA, 22 nt, Human
augggaugaacuugaucugcuu

SEQ ID NO: 1023925 - RNA, 22 nt, Human
gcacugggaagaaugagccugu

SEQ ID NO: 1023926 - RNA, 22 nt, Human
gggagcugagggaccucugugg

SEQ ID NO: 1023927 - RNA, 23 nt, Human
aucaagauaauccagaugaccua

SEQ ID NO: 1023928 - RNA, 22 nt, Human
gcucucagguacaaagcugugu

SEQ ID NO: 1023929 - RNA, 22 nt, Human
ggccucugcccucacuccuguc

SEQ ID NO: 1023930 - RNA, 22 nt, Human
ugggggcauggaccagccuggc

SEQ ID NO: 1023931 - RNA, 22 nt, Human
gaaggcaggcuucugauuaggu

SEQ ID NO: 1023932 - RNA, 22 nt, Human
augcuucagugcuaccuucaaa

SEQ ID NO: 1023933 - RNA, 22 nt, Human
guuagggaucaggaacaagagc

SEQ ID NO: 1023934 - RNA, 22 nt, Human
cagcauuuggugaucaucuuaa

SEQ ID NO: 1023935 - RNA, 22 nt, Human
cggcagcaaaggaagccagguc

SEQ ID NO: 1023936 - RNA, 22 nt, Human
ucaggaugguccuuuaugagaa

SEQ ID NO: 1023937 - RNA, 22 nt, Human
uucugugaaucuuuuuucccac

SEQ ID NO: 1023938 - RNA, 17 nt, Human
gccuggcccagccuggc

SEQ ID NO: 1023939 - RNA, 22 nt, Human
uuucuucagagagagcuuuccc

SEQ ID NO: 1023940 - RNA, 22 nt, Human
guggugcauccuugaguaagcu

SEQ ID NO: 1023941 - RNA, 22 nt, Human
ugggcagaggcucugaagucca

SEQ ID NO: 1023942 - RNA, 22 nt, Human
agagcugcaauuucauguggug

SEQ ID NO: 1023943 - RNA, 22 nt, Human
cuggaagggucuacuuagcaga

SEQ ID NO: 1023944 - RNA, 22 nt, Human
cagcuuuuuagaaucuagggca

SEQ ID NO: 1023945 - RNA, 22 nt, Human
aaaagucugcucucauuucaga

SEQ ID NO: 1023946 - RNA, 22 nt, Human
cucucccagucaggcucaggau

SEQ ID NO: 1023947 - RNA, 22 nt, Human
ccugggcaacauagugagaccc

SEQ ID NO: 1023948 - RNA, 22 nt, Human
uacaaaaguaauuacgguuuuu

SEQ ID NO: 1023949 - RNA, 22 nt, Human
auauucguggucaaguaaggcc

SEQ ID NO: 1023950 - RNA, 22 nt, Human
agaggaugguugaggaagaccu

SEQ ID NO: 1023951 - RNA, 22 nt, Human
uguaugaaguuacugagccucu

SEQ ID NO: 1023952 - RNA, 23 nt, Human
uugaaggagaaagcuuucuuggu

SEQ ID NO: 1023953 - RNA, 22 nt, Human
agccagcagggcuuagaggaca

SEQ ID NO: 1023954 - RNA, 22 nt, Human
aaaguguaaggaauuuaaguaa

SEQ ID NO: 1023955 - RNA, 22 nt, Human
uccaggcaaaaggaacugcuug

SEQ ID NO: 1023956 - RNA, 22 nt, Human
cccugcagaucagugagaacuu

SEQ ID NO: 1023957 - RNA, 22 nt, Human
cagggccaagccccuuuggcug

SEQ ID NO: 1023958 - RNA, 22 nt, Human
ugcuuggccuacuuguccuuug

SEQ ID NO: 1023959 - RNA, 22 nt, Human
ggcucaggacacagugguuuag

SEQ ID NO: 1023960 - RNA, 18 nt, Human
cagaagcaggcagugcag

SEQ ID NO: 1023961 - RNA, 22 nt, Human
cuccaguggcaaguccgggcgg

SEQ ID NO: 1023962 - RNA, 22 nt, Human
gcccggcagucacacacccagg

SEQ ID NO: 1023963 - RNA, 21 nt, Human
ucugucucuccacugcccugc

SEQ ID NO: 1023964 - RNA, 22 nt, Human
aggggaggagcuuuucuugccu

SEQ ID NO: 1023965 - RNA, 22 nt, Human
gccuggagcccaguguggggcu

SEQ ID NO: 1023966 - RNA, 22 nt, Human
gcugcagcuuuaggauccagug

SEQ ID NO: 1023967 - RNA, 22 nt, Human
ugcucagacaagcugaacagua

SEQ ID NO: 1023968 - RNA, 22 nt, Human
ccaggcucugucuggucagaag

SEQ ID NO: 1023969 - RNA, 22 nt, Human
uaacacauaagcugagaccaug

SEQ ID NO: 1023970 - RNA, 22 nt, Human
uuugcaaauauguguuucuauu

SEQ ID NO: 1023971 - RNA, 19 nt, Human
ggagccuggagcacgugcc

SEQ ID NO: 1023972 - RNA, 21 nt, Human
aaugaaguggcuauuuugagg

SEQ ID NO: 1023973 - RNA, 22 nt, Human
ucaagagaagugcuccacagua

SEQ ID NO: 1023974 - RNA, 22 nt, Human
aaaugguguuucuaaugcuaga

SEQ ID NO: 1023975 - RNA, 21 nt, Human
acagagcauaaugguguggca

SEQ ID NO: 1023976 - RNA, 22 nt, Human
gucacacucagaaugacuagag

SEQ ID NO: 1023977 - RNA, 22 nt, Human
cccagacuccucuggcuggugg

SEQ ID NO: 1023978 - RNA, 22 nt, Human
gugccuggcaugcgccggugcu

SEQ ID NO: 1023979 - RNA, 22 nt, Human
uucagucagugacuaagcaguu

SEQ ID NO: 1023980 - RNA, 22 nt, Human
uagcacaucuggcgcuuauagg

SEQ ID NO: 1023981 - RNA, 22 nt, Human
agggccugcucuaucacucuca

SEQ ID NO: 1023982 - RNA, 22 nt, Human
uaggccaguggcagguugugug

SEQ ID NO: 1023983 - RNA, 21 nt, Human
uggcucuggguaggagagugc

SEQ ID NO: 1023984 - RNA, 22 nt, Human
uaaauguauaggcacuaaaccu

SEQ ID NO: 1023985 - RNA, 22 nt, Human
gagcauuugguuauaguaauuu

SEQ ID NO: 1023986 - RNA, 21 nt, Human
agugaaauugcaucagaggga

SEQ ID NO: 1023987 - RNA, 22 nt, Human
uaagaacaguguuucaucucua

SEQ ID NO: 1023988 - RNA, 22 nt, Human
uccuuuccagccucaccucagc

SEQ ID NO: 1023989 - RNA, 22 nt, Human
uauucacaguugauuuacaguu

SEQ ID NO: 1023990 - RNA, 22 nt, Human
cugggccuuggauugacacugu

SEQ ID NO: 1023991 - RNA, 22 nt, Human
augcuuccaaggcuaagacaag

SEQ ID NO: 1023992 - RNA, 22 nt, Human
uaggcaggugugcacugcccac

SEQ ID NO: 1023993 - RNA, 21 nt, Human
aggagggcacaaggccaggaa

SEQ ID NO: 1023994 - RNA, 22 nt, Human
ucucugaguauccugaacugcc

SEQ ID NO: 1023995 - RNA, 22 nt, Human
uuaacagagugccuggcaugua

SEQ ID NO: 1023996 - RNA, 22 nt, Human
ucacugcagagaccucuaguca

SEQ ID NO: 1023997 - RNA, 22 nt, Human
acagggcaugugcaagagacau

SEQ ID NO: 1023998 - RNA, 23 nt, Human
aucuguucaucugacacagauuc

SEQ ID NO: 1023999 - RNA, 22 nt, Human
agcaacagcccugagguucaug

SEQ ID NO: 1024000 - RNA, 22 nt, Human
ucugcagcgugcaggcuggugc

SEQ ID NO: 1024001 - RNA, 22 nt, Human
uucagcagucguccaggaaaag

SEQ ID NO: 1024002 - RNA, 22 nt, Human
uaaaucucacuggguauauugg

SEQ ID NO: 1024003 - RNA, 22 nt, Human
cacugaaggcuaggauuagaug

SEQ ID NO: 1024004 - RNA, 22 nt, Human
aggccucacauugggcuucaag

SEQ ID NO: 1024005 - RNA, 22 nt, Human
ccugggcaggaugggcccggug

SEQ ID NO: 1024006 - RNA, 20 nt, Human
ggcagagggccugggagaag

SEQ ID NO: 1024007 - RNA, 22 nt, Human
cagcagcuacuuggagcagcag

SEQ ID NO: 1024008 - RNA, 22 nt, Human
gaccauuugcuaguaaauugca

SEQ ID NO: 1024009 - RNA, 22 nt, Human
agcaguggcugaagauguuccu

SEQ ID NO: 1024010 - RNA, 22 nt, Human
ucccucagggugcaguugcuuu

SEQ ID NO: 1024011 - RNA, 22 nt, Human
uacaaaguuugggguccucaaa

SEQ ID NO: 1024012 - RNA, 22 nt, Human
cuaucuuucgauucuagcuuaa

SEQ ID NO: 1024013 - RNA, 22 nt, Human
cagagcaguaaaucuggggcac

SEQ ID NO: 1024014 - RNA, 22 nt, Human
agcaggagcccuuaucaccagg

SEQ ID NO: 1024015 - RNA, 22 nt, Human
uuagaaaacauaagugguaaag

SEQ ID NO: 1024016 - RNA, 22 nt, Human
agugcuuuccuucuugugacau

SEQ ID NO: 1024017 - RNA, 21 nt, Human
agaagccuggguggagguggg

SEQ ID NO: 1024018 - RNA, 17 nt, Human
gguguauggggagggaa

SEQ ID NO: 1024019 - RNA, 22 nt, Human
cucugagagagcuggugagcac

SEQ ID NO: 1024020 - RNA, 17 nt, Human
agguauaaaaugguagc

SEQ ID NO: 1024021 - RNA, 22 nt, Human
cagagcucagagcagggcacuc

SEQ ID NO: 1024022 - RNA, 22 nt, Human
cuugucugugucggauaaaacu

SEQ ID NO: 1024023 - RNA, 22 nt, Human
cacguuuuaugacagaagaagc

SEQ ID NO: 1024024 - RNA, 19 nt, Human
cccucuugcacaaagcaaa

SEQ ID NO: 1024025 - RNA, 22 nt, Human
aguacuucagaggcugcccagg

SEQ ID NO: 1024026 - RNA, 22 nt, Human
agcugcuacugcucugccagag

SEQ ID NO: 1024027 - RNA, 22 nt, Human
cccagggacagaugggcagcua

SEQ ID NO: 1024028 - RNA, 22 nt, Human
gaaaugugcagaauguguuaga

SEQ ID NO: 1024029 - RNA, 22 nt, Human
gugugaaagcuuguccucugua

SEQ ID NO: 1024030 - RNA, 22 nt, Human
cugcagagcauaaaucugaaua

SEQ ID NO: 1024031 - RNA, 22 nt, Human
cagagggcucuuggcugccugc

SEQ ID NO: 1024032 - RNA, 22 nt, Human
gcaggcagagaaggaacauuua

SEQ ID NO: 1024033 - RNA, 22 nt, Human
uuauuuauggcacuguuggugg

SEQ ID NO: 1024034 - RNA, 22 nt, Human
acaacauucuuaaauacacuga

SEQ ID NO: 1024035 - RNA, 22 nt, Human
uagcuuuagugaaaaauaucag

SEQ ID NO: 1024036 - RNA, 22 nt, Human
ucuccuggucaccucagaaguc

SEQ ID NO: 1024037 - RNA, 22 nt, Human
ccugucugcggaggaguggaag

SEQ ID NO: 1024038 - RNA, 22 nt, Human
aaaagguuuugaguacaaauau

SEQ ID NO: 1024039 - RNA, 22 nt, Human
cagcucugugcaggccugggga

SEQ ID NO: 1024040 - RNA, 22 nt, Human
cacagcuuccauuagaaugaga

SEQ ID NO: 1024041 - RNA, 18 nt, Human
agcagcugucagaaugcc

SEQ ID NO: 1024042 - RNA, 22 nt, Human
uccugcagccauuagaggucaa

SEQ ID NO: 1024043 - RNA, 22 nt, Human
caguagccacuagacacaugua

SEQ ID NO: 1024044 - RNA, 22 nt, Human
aucuuguuauaagagauaaugg

SEQ ID NO: 1024045 - RNA, 22 nt, Human
aggucaaggccaaaagaguggu

SEQ ID NO: 1024046 - RNA, 20 nt, Human
uccaggagaacugggagccg

SEQ ID NO: 1024047 - RNA, 22 nt, Human
ugggaggacuugugggcuucau

SEQ ID NO: 1024048 - RNA, 22 nt, Human
ucuuagaaauuccccaguggcu

SEQ ID NO: 1024049 - RNA, 22 nt, Human
ggaggccagggacccagucagc

SEQ ID NO: 1024050 - RNA, 22 nt, Human
uaaugcacaugacugaacuauu

SEQ ID NO: 1024051 - RNA, 22 nt, Human
uccagggaugccagccauguug

SEQ ID NO: 1024052 - RNA, 22 nt, Human
gaaauguguuguucauuucuaa

SEQ ID NO: 1024053 - RNA, 22 nt, Human
uaucaauacauguuaucagugu

SEQ ID NO: 1024054 - RNA, 22 nt, Human
guucacauccuugugaggauuu

SEQ ID NO: 1024055 - RNA, 22 nt, Human
aaccugcauguuucuaaaagca

SEQ ID NO: 1024056 - RNA, 18 nt, Human
gcccugguggagcuggug

SEQ ID NO: 1024057 - RNA, 22 nt, Human
cuacuucuaaguacauggugau

SEQ ID NO: 1024058 - RNA, 22 nt, Human
agaaauguacgauguuaugcag

SEQ ID NO: 1024059 - RNA, 22 nt, Human
cucugcaugccuugcucagaca

SEQ ID NO: 1024060 - RNA, 22 nt, Human
ucagaaauuuucucaguaguuc

SEQ ID NO: 1024061 - RNA, 22 nt, Human
agauuccagaucccaaaaauga

SEQ ID NO: 1024062 - RNA, 22 nt, Human
gaggcaggcccugaaugaguca

SEQ ID NO: 1024063 - RNA, 22 nt, Human
cuacaaugacagaauugaguag

SEQ ID NO: 1024064 - RNA, 22 nt, Human
cagcagccuacaaugcacagaa

SEQ ID NO: 1024065 - RNA, 23 nt, Human
cagguggcuccacgagggguggg

SEQ ID NO: 1024066 - RNA, 22 nt, Human
agugaccaaucaugguuagauu

SEQ ID NO: 1024067 - RNA, 21 nt, Human
ugcuggaaaaagugguucuag

SEQ ID NO: 1024068 - RNA, 22 nt, Human
auaaacaguaaaugugagcagu

SEQ ID NO: 1024069 - RNA, 22 nt, Human
uucugucaugcucauguaauug

SEQ ID NO: 1024070 - RNA, 22 nt, Human
cagcugcccaggccaccuggag

SEQ ID NO: 1024071 - RNA, 22 nt, Human
ccucuucugagugagacucccu

SEQ ID NO: 1024072 - RNA, 22 nt, Human
uccguauuugacuauugcaccg

SEQ ID NO: 1024073 - RNA, 22 nt, Human
guguacauagaauugugcuuug

SEQ ID NO: 1024074 - RNA, 22 nt, Human
uuuugaaagggugauuuggcuu

SEQ ID NO: 1024075 - RNA, 22 nt, Human
ugugacagaucuuuaaauaaug

SEQ ID NO: 1024076 - RNA, 22 nt, Human
ggcuggucacaccacugcaggg

SEQ ID NO: 1024077 - RNA, 22 nt, Human
gggcugcugccaccagguggau

SEQ ID NO: 1024078 - RNA, 18 nt, Human
ccuggcagccaugcgcgc

SEQ ID NO: 1024079 - RNA, 22 nt, Human
cugggagaggaaccucgagggu

SEQ ID NO: 1024080 - RNA, 22 nt, Human
gauuucuucauuuguggugaau

SEQ ID NO: 1024081 - RNA, 22 nt, Human
ugggaguguucuuggcuugcuu

SEQ ID NO: 1024082 - RNA, 22 nt, Human
gcucugucaacagcuagcugug

SEQ ID NO: 1024083 - RNA, 22 nt, Human
guuuuauaauugcuucauaaga

SEQ ID NO: 1024084 - RNA, 22 nt, Human
augggcuguccuaguccagccc

SEQ ID NO: 1024085 - RNA, 22 nt, Human
ccacagaaaguugucuagagua

SEQ ID NO: 1024086 - RNA, 22 nt, Human
augggaggcaggcucagaaccg

SEQ ID NO: 1024087 - RNA, 22 nt, Human
ccaaugauggugcccacgauga

SEQ ID NO: 1024088 - RNA, 22 nt, Human
gagauggggucagcugggacau

SEQ ID NO: 1024089 - RNA, 17 nt, Human
gcugcagcgguaggcag

SEQ ID NO: 1024090 - RNA, 21 nt, Human
acugggagaacgagccuuucc

SEQ ID NO: 1024091 - RNA, 22 nt, Human
gccuccuggccuuugcuccuca

SEQ ID NO: 1024092 - RNA, 22 nt, Human
gguuugcaugugauguugggca

SEQ ID NO: 1024093 - RNA, 22 nt, Human
cagggcucagaagacagaccuc

SEQ ID NO: 1024094 - RNA, 22 nt, Human
ugcuggcccaugaagacgcagu

SEQ ID NO: 1024095 - RNA, 19 nt, Human
ccagagcccgccagauggg

SEQ ID NO: 1024096 - RNA, 22 nt, Human
gcucugggcugcccucuggaca

SEQ ID NO: 1024097 - RNA, 22 nt, Human
aaaaaugugaccacaggguguu

SEQ ID NO: 1024098 - RNA, 22 nt, Human
uucauguauuuaucauguaaau

SEQ ID NO: 1024099 - RNA, 22 nt, Human
aagcaccuggguuauaucuuag

SEQ ID NO: 1024100 - RNA, 22 nt, Human
ugaggcacuccaggaugcuguu

SEQ ID NO: 1024101 - RNA, 22 nt, Human
uggccugggcaugaagcaucgu

SEQ ID NO: 1024102 - RNA, 22 nt, Human
gcaaaaaaugcuuguugcuuag

SEQ ID NO: 1024103 - RNA, 20 nt, Human
augugaaagaucaguugucu

SEQ ID NO: 1024104 - RNA, 22 nt, Human
uggccuggcucacagugagauu

SEQ ID NO: 1024105 - RNA, 22 nt, Human
agaugcugugucuguucccuug

SEQ ID NO: 1024106 - RNA, 22 nt, Human
aucuggcuauugacauguuaua

SEQ ID NO: 1024107 - RNA, 22 nt, Human
gagguggccucaagcagucuuc

SEQ ID NO: 1024108 - RNA, 22 nt, Human
ugaggcaggagguugagaacug

SEQ ID NO: 1024109 - RNA, 22 nt, Human
guacucucuugaaggccuuucu

SEQ ID NO: 1024110 - RNA, 22 nt, Human
gaggcccuccagcugucagcug

SEQ ID NO: 1024111 - RNA, 22 nt, Human
uggcugggcccccaccugccuc

SEQ ID NO: 1024112 - RNA, 22 nt, Human
uucucugaguacguuucagugu

SEQ ID NO: 1024113 - RNA, 22 nt, Human
ggaggccaaggagggcggauca

SEQ ID NO: 1024114 - RNA, 22 nt, Human
gauucacucauauuuuacguuu

SEQ ID NO: 1024115 - RNA, 22 nt, Human
uucaauucugcucugaucuuag

SEQ ID NO: 1024116 - RNA, 22 nt, Human
ggagucagccugucagagugua

SEQ ID NO: 1024117 - RNA, 22 nt, Human
aggcacugugcagucccaagca

SEQ ID NO: 1024118 - RNA, 22 nt, Human
ccagacccugcucuggggcucu

SEQ ID NO: 1024119 - RNA, 22 nt, Human
gcagauggcagcccaggcuggg

SEQ ID NO: 1024120 - RNA, 22 nt, Human
ucuggcucuaacuaggcaucag

SEQ ID NO: 1024121 - RNA, 22 nt, Human
ggcccacuugaaauggagcuca

SEQ ID NO: 1024122 - RNA, 17 nt, Human
agcugaaauugcugaag

SEQ ID NO: 1024123 - RNA, 22 nt, Human
uccuucagcuacucaguuucca

SEQ ID NO: 1024124 - RNA, 22 nt, Human
aggcacugacucaagggagcca

SEQ ID NO: 1024125 - RNA, 22 nt, Human
uuucaaauagaaucuuuccaaa

SEQ ID NO: 1024126 - RNA, 22 nt, Human
acugugcaaugaguaauaaacu

SEQ ID NO: 1024127 - RNA, 22 nt, Human
gucuucuuuucagucugcuugu

SEQ ID NO: 1024128 - RNA, 20 nt, Human
ugaaggccauuuguuccaga

SEQ ID NO: 1024129 - RNA, 22 nt, Human
uucaaugagcccaagaacguga

SEQ ID NO: 1024130 - RNA, 22 nt, Human
gcacuuggauauacaaaugaag

SEQ ID NO: 1024131 - RNA, 22 nt, Human
ggacacagauaaucacacagau

SEQ ID NO: 1024132 - RNA, 22 nt, Human
ccacagggauaggaauggggcu

SEQ ID NO: 1024133 - RNA, 22 nt, Human
cacagaggacuguagcggggag

SEQ ID NO: 1024134 - RNA, 22 nt, Human
cacacaggagagugcuggaggu

SEQ ID NO: 1024135 - RNA, 22 nt, Human
augccagucaaagaagaugaca

SEQ ID NO: 1024136 - RNA, 22 nt, Human
aggauccuguauggagaagcug

SEQ ID NO: 1024137 - RNA, 22 nt, Human
gaaggaagucauuagugcagac

SEQ ID NO: 1024138 - RNA, 22 nt, Human
gagggcucuacucaccacccug

SEQ ID NO: 1024139 - RNA, 23 nt, Human
acuuuauugaccccaggucaguu

SEQ ID NO: 1024140 - RNA, 22 nt, Human
cacaucagggcugcuugggggu

SEQ ID NO: 1024141 - RNA, 22 nt, Human
aaaugcauugguuucuacuugu

SEQ ID NO: 1024142 - RNA, 22 nt, Human
acagcuuuguguuaaugggaag

SEQ ID NO: 1024143 - RNA, 22 nt, Human
uuucacaucagagguagauuag

SEQ ID NO: 1024144 - RNA, 22 nt, Human
uagcagcucacagccucccauu

SEQ ID NO: 1024145 - RNA, 22 nt, Human
aaugcacaugucuuggccucac

SEQ ID NO: 1024146 - RNA, 22 nt, Human
uuuagggaaauugaggguuaag

SEQ ID NO: 1024147 - RNA, 22 nt, Human
aaauaauuauagcgagucuauc

SEQ ID NO: 1024148 - RNA, 22 nt, Human
aacccagccguguagcugccgc

SEQ ID NO: 1024149 - RNA, 22 nt, Human
ggagccuguggcugcuugaagc

SEQ ID NO: 1024150 - RNA, 22 nt, Human
cagagcaucgcgcagagagccu

SEQ ID NO: 1024151 - RNA, 22 nt, Human
acacagggcggaaagcaugaga

SEQ ID NO: 1024152 - RNA, 22 nt, Human
cuggccugcugggugagguccu

SEQ ID NO: 1024153 - RNA, 22 nt, Human
cugcuguguuucugcuagaaaa

SEQ ID NO: 1024154 - RNA, 17 nt, Human
ggccuuggggccucagu

SEQ ID NO: 1024155 - RNA, 22 nt, Human
uggggugguaauacaccguucu

SEQ ID NO: 1024156 - RNA, 22 nt, Human
gcuccucugucaaaugagagug

SEQ ID NO: 1024157 - RNA, 22 nt, Human
cagggugccucccgcucgccgg

SEQ ID NO: 1024158 - RNA, 22 nt, Human
ucacaguaaaagcauggaagag

SEQ ID NO: 1024159 - RNA, 22 nt, Human
uugaaauggaagugaaaauucu

SEQ ID NO: 1024160 - RNA, 22 nt, Human
ucacaguaucacacaaggauua

SEQ ID NO: 1024161 - RNA, 22 nt, Human
uuuucauuuacauuagggaaga

SEQ ID NO: 1024162 - RNA, 21 nt, Human
gcucccugcucagcuccuggg

SEQ ID NO: 1024163 - RNA, 22 nt, Human
agaggcuccuucacucuggcac

SEQ ID NO: 1024164 - RNA, 22 nt, Human
uaaagcaggccacauaugugau

SEQ ID NO: 1024165 - RNA, 17 nt, Human
uccuggcucugccacug

SEQ ID NO: 1024166 - RNA, 22 nt, Human
uggcacaugguaagacucagua

SEQ ID NO: 1024167 - RNA, 22 nt, Human
gcuguauuuaacaacuggcuca

SEQ ID NO: 1024168 - RNA, 22 nt, Human
uagcagggaagaugaucagaau

SEQ ID NO: 1024169 - RNA, 18 nt, Human
uugcuuuguaagcuugca

SEQ ID NO: 1024170 - RNA, 19 nt, Human
acaaaugauguugcacuga

SEQ ID NO: 1024171 - RNA, 22 nt, Human
ucccaggcuggcaggcagcagu

SEQ ID NO: 1024172 - RNA, 22 nt, Human
gaauguaauagucaguagaaca

SEQ ID NO: 1024173 - RNA, 22 nt, Human
agccuggacagcuacggagaac

SEQ ID NO: 1024174 - RNA, 22 nt, Human
aagacaagcaucaaaucaggca

SEQ ID NO: 1024175 - RNA, 22 nt, Human
cagagggcacaugguuuccuca

SEQ ID NO: 1024176 - RNA, 22 nt, Human
agggaccucauguaaguggauu

SEQ ID NO: 1024177 - RNA, 22 nt, Human
cucugggcacauuuuccaggac

SEQ ID NO: 1024178 - RNA, 22 nt, Human
uccuguaguugcuaaguuuguu

SEQ ID NO: 1024179 - RNA, 22 nt, Human
cagugcugggcagaggagagcg

SEQ ID NO: 1024180 - RNA, 22 nt, Human
ggcucaggccuguaauccuagc

SEQ ID NO: 1024181 - RNA, 22 nt, Human
ucagaggacgcacuaggguugu

SEQ ID NO: 1024182 - RNA, 22 nt, Human
gcagggccuuagcagcggcugc

SEQ ID NO: 1024183 - RNA, 22 nt, Human
uuuccucacuucaugagaguuu

SEQ ID NO: 1024184 - RNA, 22 nt, Human
acuuugcagagccagaagagaa

SEQ ID NO: 1024185 - RNA, 22 nt, Human
caggaccccauauucacugaac

SEQ ID NO: 1024186 - RNA, 22 nt, Human
uuauuauaaugagggauaaaaa

SEQ ID NO: 1024187 - RNA, 22 nt, Human
ggagccugggcauuaguaauuu

SEQ ID NO: 1024188 - RNA, 22 nt, Human
caggccuggcccccggcacacc

SEQ ID NO: 1024189 - RNA, 22 nt, Human
ugggcugcccaagguggccaug

SEQ ID NO: 1024190 - RNA, 22 nt, Human
aagauuucuuacuuauugaugc

SEQ ID NO: 1024191 - RNA, 22 nt, Human
ucaaaugcggucauggcuuuua

SEQ ID NO: 1024192 - RNA, 22 nt, Human
gauuucuguaacacuucagaua

SEQ ID NO: 1024193 - RNA, 22 nt, Human
gguucacacuuucaugauuuca

SEQ ID NO: 1024194 - RNA, 22 nt, Human
uuucauugaugggugauagaaa

SEQ ID NO: 1024195 - RNA, 22 nt, Human
cuccucccucuuugccacacau

SEQ ID NO: 1024196 - RNA, 22 nt, Human
agcugcugagccaggcugaugu

SEQ ID NO: 1024197 - RNA, 22 nt, Human
gugcuuccccaagccacagccu

SEQ ID NO: 1024198 - RNA, 22 nt, Human
ggcaguggaggacccugugucu

SEQ ID NO: 1024199 - RNA, 22 nt, Human
gggugggaucuguggagccuca

SEQ ID NO: 1024200 - RNA, 22 nt, Human
cagaaagaccugggcucaagag

SEQ ID NO: 1024201 - RNA, 22 nt, Human
ugcuucugggcaaaugugugug

SEQ ID NO: 1024202 - RNA, 22 nt, Human
ugagaaccaugaaaagcuguca

SEQ ID NO: 1024203 - RNA, 21 nt, Human
cuggacugaggagacagucgc

SEQ ID NO: 1024204 - RNA, 22 nt, Human
aaggcacugcuuugcugcgccc

SEQ ID NO: 1024205 - RNA, 20 nt, Human
auuccauaguuggcacuuuu

SEQ ID NO: 1024206 - RNA, 22 nt, Human
aggcucagauccuuguguccug

SEQ ID NO: 1024207 - RNA, 22 nt, Human
ugcuaucucuauauccauuuau

SEQ ID NO: 1024208 - RNA, 22 nt, Human
acaggagugaaucuggcacuua

SEQ ID NO: 1024209 - RNA, 22 nt, Human
ggagccuggcaaugcugcgucc

SEQ ID NO: 1024210 - RNA, 22 nt, Human
gucaggggccaugggccaagga

SEQ ID NO: 1024211 - RNA, 22 nt, Human
aaagccuugggauuugugauca

SEQ ID NO: 1024212 - RNA, 22 nt, Human
ucuggcucuuugggugauugua

SEQ ID NO: 1024213 - RNA, 22 nt, Human
ggcuggaaguccaagaucaagg

SEQ ID NO: 1024214 - RNA, 21 nt, Human
ccaccaggucuucugcucggg

SEQ ID NO: 1024215 - RNA, 22 nt, Human
uuuccagguauuaauacuguau

SEQ ID NO: 1024216 - RNA, 23 nt, Human
gagugcagaauagacaugcagug

SEQ ID NO: 1024217 - RNA, 22 nt, Human
cagcugaguguuggcauguuca

SEQ ID NO: 1024218 - RNA, 22 nt, Human
cacagaggaaaggcaguuggua

SEQ ID NO: 1024219 - RNA, 22 nt, Human
auguuagaaggaauguuaaaag

SEQ ID NO: 1024220 - RNA, 22 nt, Human
aaggcucucugauggcagcagu

SEQ ID NO: 1024221 - RNA, 22 nt, Human
acagccuguguaccagcuggga

SEQ ID NO: 1024222 - RNA, 22 nt, Human
aaugcacauaaauauggucuua

SEQ ID NO: 1024223 - RNA, 22 nt, Human
ucccggcgcugggagguggguc

SEQ ID NO: 1024224 - RNA, 22 nt, Human
uucugaaagccaauucauugaa

SEQ ID NO: 1024225 - RNA, 22 nt, Human
uuagagucaaaauggcauguua

SEQ ID NO: 1024226 - RNA, 22 nt, Human
uuccagagcaguuuucagauca

SEQ ID NO: 1024227 - RNA, 22 nt, Human
aaguucaaggaagccuccaguu

SEQ ID NO: 1024228 - RNA, 20 nt, Human
aaaguguaagcauauaauua

SEQ ID NO: 1024229 - RNA, 19 nt, Human
agcuggggcgguguguguu

SEQ ID NO: 1024230 - RNA, 22 nt, Human
uuggcagugucugcaaaaugga

SEQ ID NO: 1024231 - RNA, 22 nt, Human
cuggcucauccagguguugcuc

SEQ ID NO: 1024232 - RNA, 22 nt, Human
cuuuggcaaggguuuuaauugu

SEQ ID NO: 1024233 - RNA, 22 nt, Human
uuuucucuuguuaauguacuga

SEQ ID NO: 1024234 - RNA, 22 nt, Human
cagcugccaugacauguccugc

SEQ ID NO: 1024235 - RNA, 22 nt, Human
cgucccaguuccagccgcgcug

SEQ ID NO: 1024236 - RNA, 22 nt, Human
gcugcuuccuuuccugcugacc

SEQ ID NO: 1024237 - RNA, 22 nt, Human
ccuggccucuccgaguaaccug

SEQ ID NO: 1024238 - RNA, 22 nt, Human
auguuauuuuggaaaauacaaa

SEQ ID NO: 1024239 - RNA, 22 nt, Human
uucuucaaacaaaaguggcaug

SEQ ID NO: 1024240 - RNA, 22 nt, Human
aagggcaggagaagacggauau

SEQ ID NO: 1024241 - RNA, 22 nt, Human
aaacauuugcaacucgguuugg

SEQ ID NO: 1024242 - RNA, 22 nt, Human
uccuccaggucuaggguggcuu

SEQ ID NO: 1024243 - RNA, 23 nt, Human
uuucacaaugagcauuacagaau

SEQ ID NO: 1024244 - RNA, 22 nt, Human
gcucagagcuugaaguuccacu

SEQ ID NO: 1024245 - RNA, 22 nt, Human
ugcugccacaaauucagcugcc

SEQ ID NO: 1024246 - RNA, 22 nt, Human
cuccagugagcgcggggcaugg

SEQ ID NO: 1024247 - RNA, 22 nt, Human
gugcauugcgaugcagacgacc

SEQ ID NO: 1024248 - RNA, 22 nt, Human
caugagauaauuuuucuccagu

SEQ ID NO: 1024249 - RNA, 22 nt, Human
aggcugcagaacagucaggugc

SEQ ID NO: 1024250 - RNA, 19 nt, Human
gcagccaccgcggcggccg

SEQ ID NO: 1024251 - RNA, 22 nt, Human
cagggcucugccuugagggaug

SEQ ID NO: 1024252 - RNA, 22 nt, Human
cuggccugagaaugcuacccuu

SEQ ID NO: 1024253 - RNA, 22 nt, Human
gugcaugugucuuuauaguaga

SEQ ID NO: 1024254 - RNA, 22 nt, Human
cagcaggcccagaguuucaugg

SEQ ID NO: 1024255 - RNA, 22 nt, Human
ugcugaaagucccaaaucucau

SEQ ID NO: 1024256 - RNA, 18 nt, Human
acugugugaauuagcucc

SEQ ID NO: 1024257 - RNA, 22 nt, Human
cugggagcugucaggagcgugu

SEQ ID NO: 1024258 - RNA, 22 nt, Human
gugaggggaguaaagccauguu

SEQ ID NO: 1024259 - RNA, 22 nt, Human
cacuggggugggccugguagag

SEQ ID NO: 1024260 - RNA, 22 nt, Human
uccucagaauggauggcagggg

SEQ ID NO: 1024261 - RNA, 22 nt, Human
ucucagaguaauucuuuaaggu

SEQ ID NO: 1024262 - RNA, 22 nt, Human
uguuugaacugaauaacauagu

SEQ ID NO: 1024263 - RNA, 22 nt, Human
acuguucacuagugaggguuga

SEQ ID NO: 1024264 - RNA, 22 nt, Human
uccuggaguugugcagugcaca

SEQ ID NO: 1024265 - RNA, 22 nt, Human
agcugucugucuccugaggaga

SEQ ID NO: 1024266 - RNA, 18 nt, Human
cugcugcaggcacucagg

SEQ ID NO: 1024267 - RNA, 22 nt, Human
uagcugccuagacagcuauagc

SEQ ID NO: 1024268 - RNA, 22 nt, Human
cuuccucccggcccaugcucug

SEQ ID NO: 1024269 - RNA, 22 nt, Human
cagggacaauggcagagccuga

SEQ ID NO: 1024270 - RNA, 22 nt, Human
uaguacuuaucucugucauugu

SEQ ID NO: 1024271 - RNA, 22 nt, Human
ugaagcagauggucuggucauu

SEQ ID NO: 1024272 - RNA, 22 nt, Human
gccucugcugacaagauggaca

SEQ ID NO: 1024273 - RNA, 22 nt, Human
cuugaaucuucugaguauuugc

SEQ ID NO: 1024274 - RNA, 22 nt, Human
cccugcagaaccacagacaaac

SEQ ID NO: 1024275 - RNA, 22 nt, Human
agccagggagguggagguugca

SEQ ID NO: 1024276 - RNA, 18 nt, Human
guuaauuuugaaguucau

SEQ ID NO: 1024277 - RNA, 22 nt, Human
aucaguuucacuugcuugcaaa

SEQ ID NO: 1024278 - RNA, 22 nt, Human
aaggagagguuguccguguugu

SEQ ID NO: 1024279 - RNA, 22 nt, Human
ucuggccauggcaagccgagug

SEQ ID NO: 1024280 - RNA, 22 nt, Human
uuagcauuucaguacacauguu

SEQ ID NO: 1024281 - RNA, 22 nt, Human
ugggggucaggaugaggccuug

SEQ ID NO: 1024282 - RNA, 19 nt, Human
ggcuggcaagugacagugu

SEQ ID NO: 1024283 - RNA, 22 nt, Human
cugagguggaacagaggugaag

SEQ ID NO: 1024284 - RNA, 22 nt, Human
gaggcaggcacuguuaucagca

SEQ ID NO: 1024285 - RNA, 23 nt, Human
aagcugccuucgcaguuggucug

SEQ ID NO: 1024286 - RNA, 22 nt, Human
agcuuccugaugcaagagggcu

SEQ ID NO: 1024287 - RNA, 22 nt, Human
uaaggcacccuucugaguagag

SEQ ID NO: 1024288 - RNA, 22 nt, Human
augauguugauaaauuacuuua

SEQ ID NO: 1024289 - RNA, 22 nt, Human
caggaaagaaaugagaacacca

SEQ ID NO: 1024290 - RNA, 22 nt, Human
ccaggcaggcagcguucucagg

SEQ ID NO: 1024291 - RNA, 22 nt, Human
agaacagcaguuaugguucauu

SEQ ID NO: 1024292 - RNA, 22 nt, Human
ucuguucaguugauguaguuuu

SEQ ID NO: 1024293 - RNA, 22 nt, Human
agggauggaagcucgucugcaa

SEQ ID NO: 1024294 - RNA, 22 nt, Human
aaggaaagacauauaaaugacu

SEQ ID NO: 1024295 - RNA, 22 nt, Human
aagauuucucuccuggaaagca

SEQ ID NO: 1024296 - RNA, 22 nt, Human
cucuucuugcuagacugagugc

SEQ ID NO: 1024297 - RNA, 22 nt, Human
ucuuuggaucccaacuggcugg

SEQ ID NO: 1024298 - RNA, 22 nt, Human
gcuccuggcuccaggcagccaa

SEQ ID NO: 1024299 - RNA, 22 nt, Human
ugcugcucuguaaagugaugag

SEQ ID NO: 1024300 - RNA, 22 nt, Human
agagcugagcaccaagcauggu

SEQ ID NO: 1024301 - RNA, 22 nt, Human
cacacacaguuuuguauucugu

SEQ ID NO: 1024302 - RNA, 22 nt, Human
gccucccuggcccacagcagcg

SEQ ID NO: 1024303 - RNA, 22 nt, Human
uaaucuguguaccuucaucgga

SEQ ID NO: 1024304 - RNA, 20 nt, Human
ccagguggugccuggagagg

SEQ ID NO: 1024305 - RNA, 22 nt, Human
cuggccuuggugcuugcagaca

SEQ ID NO: 1024306 - RNA, 20 nt, Human
ucucaggccccaguuuucuu

SEQ ID NO: 1024307 - RNA, 21 nt, Human
aaaaugugagcgugaugcuua

SEQ ID NO: 1024308 - RNA, 22 nt, Human
acacccagagcgccagugccga

SEQ ID NO: 1024309 - RNA, 22 nt, Human
acugggccuggauuggcguguc

SEQ ID NO: 1024310 - RNA, 22 nt, Human
agguagagcuccaguagaaaau

SEQ ID NO: 1024311 - RNA, 21 nt, Human
gcagggacaaagcuucaggag

SEQ ID NO: 1024312 - RNA, 22 nt, Human
ugcagauucaaaugaaaugcaa

SEQ ID NO: 1024313 - RNA, 23 nt, Human
cagugcagggcaacucagacucc

SEQ ID NO: 1024314 - RNA, 22 nt, Human
auuucagcccaguaugagcccc

SEQ ID NO: 1024315 - RNA, 22 nt, Human
cucuuccuacagucugcuaugc

SEQ ID NO: 1024316 - RNA, 22 nt, Human
ccagagagcuacaaggcauaaa

SEQ ID NO: 1024317 - RNA, 22 nt, Human
agaacagaagggaggaaggccu

SEQ ID NO: 1024318 - RNA, 22 nt, Human
gccugcagccucagagaauuuu

SEQ ID NO: 1024319 - RNA, 22 nt, Human
aacccuggggcagcugcuaggg

SEQ ID NO: 1024320 - RNA, 22 nt, Human
uuggcugagagaggaaaagggc

SEQ ID NO: 1024321 - RNA, 22 nt, Human
augugaaagagguguucagugg

SEQ ID NO: 1024322 - RNA, 22 nt, Human
gagguuagaggucagugcaguc

SEQ ID NO: 1024323 - RNA, 22 nt, Human
ugcugucccuaagucucuucaa

SEQ ID NO: 1024324 - RNA, 22 nt, Human
agagugggccucugagucccag

SEQ ID NO: 1024325 - RNA, 22 nt, Human
ugcagugguugagagcccagac

SEQ ID NO: 1024326 - RNA, 22 nt, Human
aucauucuauuguugagcugcc

SEQ ID NO: 1024327 - RNA, 22 nt, Human
uucucugaaggccaugcucacu

SEQ ID NO: 1024328 - RNA, 22 nt, Human
aggccagagaggggaccagccu

SEQ ID NO: 1024329 - RNA, 22 nt, Human
caguggguaggaaaggcucuuc

SEQ ID NO: 1024330 - RNA, 22 nt, Human
acauuuaaauaccuauguuucu

SEQ ID NO: 1024331 - RNA, 22 nt, Human
uaaaugcaagugcuccugggag

SEQ ID NO: 1024332 - RNA, 22 nt, Human
caugaguuuuuuaguucaugca

SEQ ID NO: 1024333 - RNA, 22 nt, Human
aagggcucuguugccauuucag

SEQ ID NO: 1024334 - RNA, 22 nt, Human
ucccagagacaucauuucuccg

SEQ ID NO: 1024335 - RNA, 22 nt, Human
gaaguuuauuucaaucuauuca

SEQ ID NO: 1024336 - RNA, 19 nt, Human
ucuggcuccugccaggcug

SEQ ID NO: 1024337 - RNA, 22 nt, Human
aggccagaaaugucagggagug

SEQ ID NO: 1024338 - RNA, 22 nt, Human
caagaaaugggauuugacugcc

SEQ ID NO: 1024339 - RNA, 22 nt, Human
guggcugcucgggcuccggccc

SEQ ID NO: 1024340 - RNA, 22 nt, Human
cuuggcugucuauaggaaagag

SEQ ID NO: 1024341 - RNA, 22 nt, Human
acagaggaaggcugagcugccc

SEQ ID NO: 1024342 - RNA, 22 nt, Human
uccuucagggcugaccacaggc

SEQ ID NO: 1024343 - RNA, 22 nt, Human
aucaggaugaagcuguagcgaa

SEQ ID NO: 1024344 - RNA, 22 nt, Human
uccugcagacauuuacaccuuu

SEQ ID NO: 1024345 - RNA, 22 nt, Human
gggacagcuguagugcuuggcu

SEQ ID NO: 1024346 - RNA, 22 nt, Human
agcuagaauauugaucugaaau

SEQ ID NO: 1024347 - RNA, 22 nt, Human
augcagcaguuuacaaagcaau

SEQ ID NO: 1024348 - RNA, 22 nt, Human
acccaggagguggaggcugcag

SEQ ID NO: 1024349 - RNA, 22 nt, Human
uaucuguuguaguacagaugau

SEQ ID NO: 1024350 - RNA, 22 nt, Human
cuuauguaaaacggaaagggaa

SEQ ID NO: 1024351 - RNA, 22 nt, Human
agucucugcacaguaagaagca

SEQ ID NO: 1024352 - RNA, 22 nt, Human
uaaggccaccguuauagaacca

SEQ ID NO: 1024353 - RNA, 22 nt, Human
ucauuugugugagugauuugac

SEQ ID NO: 1024354 - RNA, 22 nt, Human
cccagacucaucccugggagcu

SEQ ID NO: 1024355 - RNA, 22 nt, Human
acacaaauuguaggauaauugc

SEQ ID NO: 1024356 - RNA, 22 nt, Human
cagggugccuguccucagcaaa

SEQ ID NO: 1024357 - RNA, 22 nt, Human
caggagcucucaucgucagggc

SEQ ID NO: 1024358 - RNA, 22 nt, Human
guuuaagaaaauucauguuguu

SEQ ID NO: 1024359 - RNA, 22 nt, Human
caggccuccacuccacgcagac

SEQ ID NO: 1024360 - RNA, 22 nt, Human
ccacccuuggguucggaggccg

SEQ ID NO: 1024361 - RNA, 22 nt, Human
caggcuggagugaguguagugg

SEQ ID NO: 1024362 - RNA, 22 nt, Human
gcugcccugugguccagcaggu

SEQ ID NO: 1024363 - RNA, 22 nt, Human
aggccuccuggcuccaggccuu

SEQ ID NO: 1024364 - RNA, 22 nt, Human
auuuccaggagaaaggauuuua

SEQ ID NO: 1024365 - RNA, 22 nt, Human
ccauaaucuggcuuugagagag

SEQ ID NO: 1024366 - RNA, 22 nt, Human
uauccagggaguuuuagggcuu

SEQ ID NO: 1024367 - RNA, 22 nt, Human
acauuucuaguuguucaucucc

SEQ ID NO: 1024368 - RNA, 22 nt, Human
gcuggcaggguucucacugaaa

SEQ ID NO: 1024369 - RNA, 22 nt, Human
ucucucuucaacccuuaacuag

SEQ ID NO: 1024370 - RNA, 22 nt, Human
uagcugccagaccauucuuacu

SEQ ID NO: 1024371 - RNA, 22 nt, Human
ucagccacuacccaccuuaaca

SEQ ID NO: 1024372 - RNA, 22 nt, Human
gcuggccacacugcugauggag

SEQ ID NO: 1024373 - RNA, 22 nt, Human
uuuucaguaaugucuacauaau

SEQ ID NO: 1024374 - RNA, 22 nt, Human
augucccagcugagagacaacu

SEQ ID NO: 1024375 - RNA, 22 nt, Human
uccaggcaggguuaaggguccu

SEQ ID NO: 1024376 - RNA, 22 nt, Human
uuuccucauuuaucugcuggga

SEQ ID NO: 1024377 - RNA, 22 nt, Human
ggagccuugggcgcucucccau

SEQ ID NO: 1024378 - RNA, 22 nt, Human
ugucuucaucuccaugcacaga

SEQ ID NO: 1024379 - RNA, 22 nt, Human
auucuucauguugaagcuguca

SEQ ID NO: 1024380 - RNA, 22 nt, Human
acuguucaagcaaaugacauug

SEQ ID NO: 1024381 - RNA, 22 nt, Human
cuggccugggagcugcuagcgu

SEQ ID NO: 1024382 - RNA, 22 nt, Human
uccuggagggaggcggugcuac

SEQ ID NO: 1024383 - RNA, 22 nt, Human
cccaggcuggagugcaauggug

SEQ ID NO: 1024384 - RNA, 22 nt, Human
guaauugacucagcucuguuca

SEQ ID NO: 1024385 - RNA, 22 nt, Human
ugcuugugagaguuuuuucaga

SEQ ID NO: 1024386 - RNA, 22 nt, Human
uuugucauaucacacaauuuug

SEQ ID NO: 1024387 - RNA, 21 nt, Human
uggcagaguugaguaguuaug

SEQ ID NO: 1024388 - RNA, 22 nt, Human
caggaccuggaaugcuugugaa

SEQ ID NO: 1024389 - RNA, 22 nt, Human
uauuucuuucagguauguguug

SEQ ID NO: 1024390 - RNA, 21 nt, Human
agcaacucugacuagaugagg

SEQ ID NO: 1024391 - RNA, 22 nt, Human
ccaggacucaguggggaaaggg

SEQ ID NO: 1024392 - RNA, 22 nt, Human
aggcacuggucuaccccuuagu

SEQ ID NO: 1024393 - RNA, 22 nt, Human
uggcuggggccacaguuuuccu

SEQ ID NO: 1024394 - RNA, 22 nt, Human
auguaaggcugccuaugacacu

SEQ ID NO: 1024395 - RNA, 22 nt, Human
aggccugaaguguggagugggg

SEQ ID NO: 1024396 - RNA, 22 nt, Human
gggaccuggggacuccuuguuc

SEQ ID NO: 1024397 - RNA, 22 nt, Human
aaauauacuagaugaugaccca

SEQ ID NO: 1024398 - RNA, 22 nt, Human
gaaaugcaggcuuggauucagc

SEQ ID NO: 1024399 - RNA, 22 nt, Human
gaacccaggcuuuugaggcugu

SEQ ID NO: 1024400 - RNA, 22 nt, Human
uggcucugugcuucuaguaucu

SEQ ID NO: 1024401 - RNA, 19 nt, Human
aauguaguguuaugucaac

SEQ ID NO: 1024402 - RNA, 22 nt, Human
ugugggcaggcccgggucugag

SEQ ID NO: 1024403 - RNA, 22 nt, Human
cacugcaggucugagauggggg

SEQ ID NO: 1024404 - RNA, 22 nt, Human
auacaaagacaaaucucaaucu

SEQ ID NO: 1024405 - RNA, 22 nt, Human
auuuagaaauuccaaaaguauu

SEQ ID NO: 1024406 - RNA, 22 nt, Human
auuuuacuuugugaauauugac

SEQ ID NO: 1024407 - RNA, 22 nt, Human
auguacauuuguaguaauauca

SEQ ID NO: 1024408 - RNA, 22 nt, Human
uacaauauguggccuuuuguga

SEQ ID NO: 1024409 - RNA, 19 nt, Human
guugaaaguaggugagggu

SEQ ID NO: 1024410 - RNA, 22 nt, Human
acaagcaugggcuuugacauca

SEQ ID NO: 1024411 - RNA, 22 nt, Human
gucuauauauugcuugaauaau

SEQ ID NO: 1024412 - RNA, 22 nt, Human
ucaguucugcuagaaaaacagu

SEQ ID NO: 1024413 - RNA, 22 nt, Human
ccugaagagcacucuagaguug

SEQ ID NO: 1024414 - RNA, 22 nt, Human
auggccugggcccgcuucagau

SEQ ID NO: 1024415 - RNA, 22 nt, Human
agcugccuggagucauuuccug

SEQ ID NO: 1024416 - RNA, 22 nt, Human
ucaaacuguuuacagugagaua

SEQ ID NO: 1024417 - RNA, 22 nt, Human
agccaggaagaaggucacacca

SEQ ID NO: 1024418 - RNA, 22 nt, Human
ugaaaugauuauaugguguuug

SEQ ID NO: 1024419 - RNA, 22 nt, Human
gcuguucauuagaaauagaaug

SEQ ID NO: 1024420 - RNA, 22 nt, Human
cagcuucugagcaagccagggg

SEQ ID NO: 1024421 - RNA, 22 nt, Human
auggauaagucaaagaguaucc

SEQ ID NO: 1024422 - RNA, 22 nt, Human
uuaaacagagucugaaauguaa

SEQ ID NO: 1024423 - RNA, 22 nt, Human
uuguuuuggaagaacuuacucu

SEQ ID NO: 1024424 - RNA, 22 nt, Human
ccaggcagagugcuccagaaag

SEQ ID NO: 1024425 - RNA, 21 nt, Human
auucugaguugucagucuuca

SEQ ID NO: 1024426 - RNA, 22 nt, Human
cugcugagcccuggcacaggug

SEQ ID NO: 1024427 - RNA, 22 nt, Human
uggcccugugugcaggcugcac

SEQ ID NO: 1024428 - RNA, 22 nt, Human
ccucaggcuuacgggcaaugga

SEQ ID NO: 1024429 - RNA, 22 nt, Human
auuugcuuuuacuauguuaaaa

SEQ ID NO: 1024430 - RNA, 22 nt, Human
ucugggcucuuaguguacccuc

SEQ ID NO: 1024431 - RNA, 23 nt, Human
auaaggcauaaagguacauugga

SEQ ID NO: 1024432 - RNA, 21 nt, Human
ucucugugucuuuaagcugga

SEQ ID NO: 1024433 - RNA, 22 nt, Human
augggaggaugcucgggugcuc

SEQ ID NO: 1024434 - RNA, 22 nt, Human
cugaaggagcauagucaguuuu

SEQ ID NO: 1024435 - RNA, 22 nt, Human
uguguccuucugggagucccag

SEQ ID NO: 1024436 - RNA, 22 nt, Human
gaggaccacagaugagccugca

SEQ ID NO: 1024437 - RNA, 22 nt, Human
ucagcagugcagggugaggcag

SEQ ID NO: 1024438 - RNA, 19 nt, Human
aagggcugggcaccucacu

SEQ ID NO: 1024439 - RNA, 22 nt, Human
agagagcauggcacagaggggu

SEQ ID NO: 1024440 - RNA, 22 nt, Human
guauuuucaagagcaguaguau

SEQ ID NO: 1024441 - RNA, 22 nt, Human
aaaugguaagacaacacauuau

SEQ ID NO: 1024442 - RNA, 20 nt, Human
uaguauuugcauaaggauag

SEQ ID NO: 1024443 - RNA, 22 nt, Human
augugaaauagcuggauaugaa

SEQ ID NO: 1024444 - RNA, 22 nt, Human
gggauggggucaacauguaccu

SEQ ID NO: 1024445 - RNA, 22 nt, Human
gccaccucggcuuucucugcuc

SEQ ID NO: 1024446 - RNA, 22 nt, Human
ucaggauccauagacucccaaa

SEQ ID NO: 1024447 - RNA, 22 nt, Human
cugccucucagccugaccgcca

SEQ ID NO: 1024448 - RNA, 22 nt, Human
aguguuucucagaagggccuau

SEQ ID NO: 1024449 - RNA, 17 nt, Human
ucuguucaagugagagg

SEQ ID NO: 1024450 - RNA, 22 nt, Human
ugccugccaugcagaaagcuga

SEQ ID NO: 1024451 - RNA, 22 nt, Human
ggucccaggcugcgggcuggug

SEQ ID NO: 1024452 - RNA, 22 nt, Human
ccauuguaaagaguauacuuug

SEQ ID NO: 1024453 - RNA, 22 nt, Human
agcagcugcagagggcuccccc

SEQ ID NO: 1024454 - RNA, 22 nt, Human
gagggcucugaaaggaggucac

SEQ ID NO: 1024455 - RNA, 22 nt, Human
cuauuaggcuuccauuucaugc

SEQ ID NO: 1024456 - RNA, 19 nt, Human
aucuuacagagcagaguac

SEQ ID NO: 1024457 - RNA, 22 nt, Human
cagggacauugguggccagguu

SEQ ID NO: 1024458 - RNA, 22 nt, Human
uacuuccagcaaucugcauauu

SEQ ID NO: 1024459 - RNA, 22 nt, Human
aaaugucuuuaucucauguaac

SEQ ID NO: 1024460 - RNA, 22 nt, Human
uugcucagcacuggagccagcu

SEQ ID NO: 1024461 - RNA, 22 nt, Human
cugcaguguucuggaaugcauu

SEQ ID NO: 1024462 - RNA, 22 nt, Human
aucugacaaccuauugacuuga

SEQ ID NO: 1024463 - RNA, 22 nt, Human
gcagaagucagaccaucugaau

SEQ ID NO: 1024464 - RNA, 22 nt, Human
gaguggggucugggcaucaguc

SEQ ID NO: 1024465 - RNA, 22 nt, Human
ucgggcucgcucuccuagcgga

SEQ ID NO: 1024466 - RNA, 22 nt, Human
acaugcauucucuaaaagcaaa

SEQ ID NO: 1024467 - RNA, 22 nt, Human
agcuggguguguaucagauaaa

SEQ ID NO: 1024468 - RNA, 22 nt, Human
gugcuaggauuacaggcauggg

SEQ ID NO: 1024469 - RNA, 22 nt, Human
aaauuuaagaagugugugcgug

SEQ ID NO: 1024470 - RNA, 22 nt, Human
uggcccucagucuugcuccugc

SEQ ID NO: 1024471 - RNA, 22 nt, Human
ccucugcucugguccaugugcu

SEQ ID NO: 1024472 - RNA, 22 nt, Human
cauuagggacugaggaauaagg

SEQ ID NO: 1024473 - RNA, 22 nt, Human
ucaguuuucucaucuguaauuu

SEQ ID NO: 1024474 - RNA, 22 nt, Human
ucucaagcuuguugguauguuu

SEQ ID NO: 1024475 - RNA, 22 nt, Human
uugaaaggugaacaugaugcac

SEQ ID NO: 1024476 - RNA, 22 nt, Human
caugccaguuuugagaugcacc

SEQ ID NO: 1024477 - RNA, 17 nt, Human
ccucccacaccgcccug

SEQ ID NO: 1024478 - RNA, 22 nt, Human
gucaccaggucugaugcagcca

SEQ ID NO: 1024479 - RNA, 22 nt, Human
gcuucucuggccugcagggcau

SEQ ID NO: 1024480 - RNA, 22 nt, Human
uggcucugaccagguagaggag

SEQ ID NO: 1024481 - RNA, 21 nt, Human
cccagggaagccgcagucacc

SEQ ID NO: 1024482 - RNA, 22 nt, Human
ccugggcucuauccugacccag

SEQ ID NO: 1024483 - RNA, 22 nt, Human
uuuacucuugcuacacaacugu

SEQ ID NO: 1024484 - RNA, 22 nt, Human
agguauaagaagauuauuuaua

SEQ ID NO: 1024485 - RNA, 22 nt, Human
gaggcagcaugguaccuuggag

SEQ ID NO: 1024486 - RNA, 22 nt, Human
aucagcaagacuaggggaauac

SEQ ID NO: 1024487 - RNA, 22 nt, Human
ucuccucucuuaccugguacaa

SEQ ID NO: 1024488 - RNA, 22 nt, Human
guggcugcagagggcacagcau

SEQ ID NO: 1024489 - RNA, 22 nt, Human
gcucuggacuggggccugagaa

SEQ ID NO: 1024490 - RNA, 20 nt, Human
acugcuucuuucucugaccu

SEQ ID NO: 1024491 - RNA, 22 nt, Human
cugagcugguggaagcaugcag

SEQ ID NO: 1024492 - RNA, 17 nt, Human
cucuccuuccucugagg

SEQ ID NO: 1024493 - RNA, 22 nt, Human
uauauauucuuaaguaguguag

SEQ ID NO: 1024494 - RNA, 23 nt, Human
auuugagaaaguauuuuuaagac

SEQ ID NO: 1024495 - RNA, 22 nt, Human
caccugcagggggagucaagag

SEQ ID NO: 1024496 - RNA, 22 nt, Human
ucagggcaucaucaugaauaua

SEQ ID NO: 1024497 - RNA, 22 nt, Human
gcagggacugugaucucacaga

SEQ ID NO: 1024498 - RNA, 22 nt, Human
gagucaguaauggauaugucau

SEQ ID NO: 1024499 - RNA, 23 nt, Human
ggccuguguuuugucugaaguac

SEQ ID NO: 1024500 - RNA, 22 nt, Human
aguguuucccaguaggaugaaa

SEQ ID NO: 1024501 - RNA, 22 nt, Human
agcagccacccagcugcucauu

SEQ ID NO: 1024502 - RNA, 22 nt, Human
uauaauuuaucaugucacaguu

SEQ ID NO: 1024503 - RNA, 22 nt, Human
ccaggccuuccaguacgcagaa

SEQ ID NO: 1024504 - RNA, 22 nt, Human
uugugcaauuuaaaaucuuccu

SEQ ID NO: 1024505 - RNA, 22 nt, Human
uaaaucuccuguuuuucaucua

SEQ ID NO: 1024506 - RNA, 22 nt, Human
aaggccaacuaggaugagcuag

SEQ ID NO: 1024507 - RNA, 22 nt, Human
acacaaguucuaaagauugcgc

SEQ ID NO: 1024508 - RNA, 22 nt, Human
agcugcccugggucuugcugcu

SEQ ID NO: 1024509 - RNA, 22 nt, Human
uagaaauguugguauuaacauu

SEQ ID NO: 1024510 - RNA, 22 nt, Human
aaaguauuugugauuuuuacca

SEQ ID NO: 1024511 - RNA, 22 nt, Human
caguuucuuaucuucaaaauug

SEQ ID NO: 1024512 - RNA, 22 nt, Human
ucaugccacuuacaaaauaaug

SEQ ID NO: 1024513 - RNA, 22 nt, Human
uuucuuucaauucuccuaaugc

SEQ ID NO: 1024514 - RNA, 22 nt, Human
ucacaguuauagucuguagaau

SEQ ID NO: 1024515 - RNA, 22 nt, Human
ucccaggauguuggcggcaggu

SEQ ID NO: 1024516 - RNA, 22 nt, Human
aggccagaaauuuggaguaugu

SEQ ID NO: 1024517 - RNA, 22 nt, Human
gagacaaaaguuggagugcaag

SEQ ID NO: 1024518 - RNA, 22 nt, Human
uuucauaauacuguacaugaaa

SEQ ID NO: 1024519 - RNA, 22 nt, Human
gcccucucuucugcagccucca

SEQ ID NO: 1024520 - RNA, 19 nt, Human
uguguaaagucugugguca

SEQ ID NO: 1024521 - RNA, 22 nt, Human
ccaaaauguuugaaugcaugug

SEQ ID NO: 1024522 - RNA, 22 nt, Human
ccagcccuguaaggaugaggca

SEQ ID NO: 1024523 - RNA, 18 nt, Human
uuccauaauguauguaac

SEQ ID NO: 1024524 - RNA, 22 nt, Human
agcucucaagauaagaaagaac

SEQ ID NO: 1024525 - RNA, 22 nt, Human
uauuuuguuaauaauccagucc

SEQ ID NO: 1024526 - RNA, 22 nt, Human
gcagggaccagggccagaucca

SEQ ID NO: 1024527 - RNA, 22 nt, Human
ccugggcuugcaucugugcugg

SEQ ID NO: 1024528 - RNA, 21 nt, Human
uaacacauuuugguacuuugg

SEQ ID NO: 1024529 - RNA, 19 nt, Human
augagcuggcauuucaggu

SEQ ID NO: 1024530 - RNA, 22 nt, Human
ccagaaaaugcagaacauagaa

SEQ ID NO: 1024531 - RNA, 20 nt, Human
auacacauauucuugcaacu

SEQ ID NO: 1024532 - RNA, 22 nt, Human
agcagcugagccccagcuguga

SEQ ID NO: 1024533 - RNA, 20 nt, Human
caguccaaucagaggccacc

SEQ ID NO: 1024534 - RNA, 22 nt, Human
uuccucagcuggccugauuggg

SEQ ID NO: 1024535 - RNA, 22 nt, Human
uggcaguccccugugccuggaa

SEQ ID NO: 1024536 - RNA, 22 nt, Human
uggucucuucuuccaagauggc

SEQ ID NO: 1024537 - RNA, 22 nt, Human
gaugaaaaucuugagaugucga

SEQ ID NO: 1024538 - RNA, 22 nt, Human
caggggcucugagauugucuaa

SEQ ID NO: 1024539 - RNA, 22 nt, Human
uggccuccccuaacagccucuu

SEQ ID NO: 1024540 - RNA, 22 nt, Human
agaugaaagauuuuuauagaga

SEQ ID NO: 1024541 - RNA, 22 nt, Human
aucugccugagucuagguuuuc

SEQ ID NO: 1024542 - RNA, 22 nt, Human
augguuuguguggcccagauga

SEQ ID NO: 1024543 - RNA, 17 nt, Human
aggccucccuccaggcc

SEQ ID NO: 1024544 - RNA, 22 nt, Human
gcugcaggcauuuuccugggca

SEQ ID NO: 1024545 - RNA, 22 nt, Human
aaagaugucauacacauuaaga

SEQ ID NO: 1024546 - RNA, 22 nt, Human
agcugagcuaguaguuccagug

SEQ ID NO: 1024547 - RNA, 22 nt, Human
ggccuggcauggggacuaaggg

SEQ ID NO: 1024548 - RNA, 22 nt, Human
acugcagccuagggaccacagu

SEQ ID NO: 1024549 - RNA, 22 nt, Human
aaaguuaguuucuuauaugucu

SEQ ID NO: 1024550 - RNA, 19 nt, Human
ccaggccugcgggcguugg

SEQ ID NO: 1024551 - RNA, 22 nt, Human
agggaguguaaauggugcucag

SEQ ID NO: 1024552 - RNA, 22 nt, Human
agccugagccccauccagcuga

SEQ ID NO: 1024553 - RNA, 22 nt, Human
cuggcagcgcagcaugaagucg

SEQ ID NO: 1024554 - RNA, 22 nt, Human
auguuuuugagauacaaacaga

SEQ ID NO: 1024555 - RNA, 22 nt, Human
cugagcuuggccaggaaugaau

SEQ ID NO: 1024556 - RNA, 22 nt, Human
uggcagagucaucacaucugga

SEQ ID NO: 1024557 - RNA, 22 nt, Human
ugcccacaggaagacaccagcg

SEQ ID NO: 1024558 - RNA, 22 nt, Human
uggaagggggaagacagcucug

SEQ ID NO: 1024559 - RNA, 22 nt, Human
uuccaggggcagcagugauggu

SEQ ID NO: 1024560 - RNA, 22 nt, Human
ccuggcuuccuggagcucacaa

SEQ ID NO: 1024561 - RNA, 18 nt, Human
acaaauguagugucuuaa

SEQ ID NO: 1024562 - RNA, 22 nt, Human
ucccaggaaaacacucgaggac

SEQ ID NO: 1024563 - RNA, 22 nt, Human
uucugaggcacuggcucuccca

SEQ ID NO: 1024564 - RNA, 22 nt, Human
cacucuccagcacaccccauuu

SEQ ID NO: 1024565 - RNA, 22 nt, Human
cccagccaaggugcugguguug

SEQ ID NO: 1024566 - RNA, 22 nt, Human
ccaggagguggagauugcagug

SEQ ID NO: 1024567 - RNA, 22 nt, Human
ugggcacuguagcuggugcugg

SEQ ID NO: 1024568 - RNA, 22 nt, Human
uggcucagugacauuccuccca

SEQ ID NO: 1024569 - RNA, 22 nt, Human
uuguacaaguauuaugugaaca

SEQ ID NO: 1024570 - RNA, 22 nt, Human
aaguccagcucuaaauaucuga

SEQ ID NO: 1024571 - RNA, 22 nt, Human
agccccucuguggcucugccuc

SEQ ID NO: 1024572 - RNA, 22 nt, Human
ucuggagauaagacagacagau

SEQ ID NO: 1024573 - RNA, 22 nt, Human
gaguuauuggguggaaagguag

SEQ ID NO: 1024574 - RNA, 22 nt, Human
agcuccugcacccagccuugag

SEQ ID NO: 1024575 - RNA, 21 nt, Human
ugguggagugugcugagcaug

SEQ ID NO: 1024576 - RNA, 22 nt, Human
guucagggagggacagaugaag

SEQ ID NO: 1024577 - RNA, 23 nt, Human
auguuauuauuagcagucuugcc

SEQ ID NO: 1024578 - RNA, 22 nt, Human
ucccagaguauuagcaauugcu

SEQ ID NO: 1024579 - RNA, 21 nt, Human
agucuguuaggaugacucuga

SEQ ID NO: 1024580 - RNA, 22 nt, Human
ucccagagaagagcuggaugga

SEQ ID NO: 1024581 - RNA, 22 nt, Human
gagcugccugugugccaugaug

SEQ ID NO: 1024582 - RNA, 22 nt, Human
ggcccuguuagagcucccacaa

SEQ ID NO: 1024583 - RNA, 22 nt, Human
gcccugugcgacucuagagguu

SEQ ID NO: 1024584 - RNA, 22 nt, Human
auugaggcagcauaguucaggg

SEQ ID NO: 1024585 - RNA, 22 nt, Human
aucuggcucauucagggaacgg

SEQ ID NO: 1024586 - RNA, 22 nt, Human
uggcagagcccagacuccaguc

SEQ ID NO: 1024587 - RNA, 22 nt, Human
auggggugaccaugagcauuua

SEQ ID NO: 1024588 - RNA, 22 nt, Human
cagggcccaggccacuggguug

SEQ ID NO: 1024589 - RNA, 22 nt, Human
gcagacuguaucaaugucagua

SEQ ID NO: 1024590 - RNA, 18 nt, Human
agcagaauucuaggguuc

SEQ ID NO: 1024591 - RNA, 20 nt, Human
ccugccuguguuugugauga

SEQ ID NO: 1024592 - RNA, 22 nt, Human
acauuucucagguaagucauuu

SEQ ID NO: 1024593 - RNA, 22 nt, Human
aaugaugguuucaucacuugaa

SEQ ID NO: 1024594 - RNA, 22 nt, Human
ucacaggcuugugaacauugca

SEQ ID NO: 1024595 - RNA, 22 nt, Human
acaggcucuggggcaggauggc

SEQ ID NO: 1024596 - RNA, 22 nt, Human
cugcagggaccacaagcagguu

SEQ ID NO: 1024597 - RNA, 22 nt, Human
cugugccaggcccagcugacuu

SEQ ID NO: 1024598 - RNA, 22 nt, Human
cugcagggagaggggacagccu

SEQ ID NO: 1024599 - RNA, 22 nt, Human
ggcuucauggaggaggugaguc

SEQ ID NO: 1024600 - RNA, 22 nt, Human
uggcagcagggaggccaguguu

SEQ ID NO: 1024601 - RNA, 23 nt, Human
guaaaauacgcagugcaguguga

SEQ ID NO: 1024602 - RNA, 20 nt, Human
ucacuaguaaccaucugcuu

SEQ ID NO: 1024603 - RNA, 20 nt, Human
cuucuucagccuaugcuuca

SEQ ID NO: 1024604 - RNA, 22 nt, Human
uugugaaauguuucaaaauagu

SEQ ID NO: 1024605 - RNA, 22 nt, Human
cauuuguaauacugacuugcag

SEQ ID NO: 1024606 - RNA, 22 nt, Human
auucuucauuuacuguuacuug

SEQ ID NO: 1024607 - RNA, 22 nt, Human
cagauggcagggcagcucugca

SEQ ID NO: 1024608 - RNA, 22 nt, Human
uuaugacauaugaguacaagua

SEQ ID NO: 1024609 - RNA, 22 nt, Human
gaggcacugagagugggggaug

SEQ ID NO: 1024610 - RNA, 22 nt, Human
gccuuccuuacaccugcucagc

SEQ ID NO: 1024611 - RNA, 22 nt, Human
uaaaugugagugaugcggugaa

SEQ ID NO: 1024612 - RNA, 21 nt, Human
gcucuuggaaggggcucagcu

SEQ ID NO: 1024613 - RNA, 23 nt, Human
ucugucacuuucugcuguggagu

SEQ ID NO: 1024614 - RNA, 22 nt, Human
gucuggaggaggaagaaggcac

SEQ ID NO: 1024615 - RNA, 22 nt, Human
cauccaggcaccacaaccagcu

SEQ ID NO: 1024616 - RNA, 22 nt, Human
agccuucauaaucuugggcuuu

SEQ ID NO: 1024617 - RNA, 23 nt, Human
aucaaaguggaaaucaauuaucu

SEQ ID NO: 1024618 - RNA, 22 nt, Human
accugagccuagggagguugag

SEQ ID NO: 1024619 - RNA, 22 nt, Human
uuuagaaauucaucuauggccu

SEQ ID NO: 1024620 - RNA, 22 nt, Human
gauacaaauucaugucugaauu

SEQ ID NO: 1024621 - RNA, 22 nt, Human
acugugcuuucucuggaggcau

SEQ ID NO: 1024622 - RNA, 22 nt, Human
agagccaggaucuguuuugggg

SEQ ID NO: 1024623 - RNA, 22 nt, Human
auaaggcagaaaugauucuagu

SEQ ID NO: 1024624 - RNA, 22 nt, Human
agccuggcacugccccauccau

SEQ ID NO: 1024625 - RNA, 22 nt, Human
aggcugcuuucauggccgcccc

SEQ ID NO: 1024626 - RNA, 22 nt, Human
uucauugugauucuuggcuagc

SEQ ID NO: 1024627 - RNA, 22 nt, Human
uauagagguggaaacugagguu

SEQ ID NO: 1024628 - RNA, 22 nt, Human
cagcaggcguugggagaaagac

SEQ ID NO: 1024629 - RNA, 22 nt, Human
aaaauacuguggaguguugaaa

SEQ ID NO: 1024630 - RNA, 22 nt, Human
auggauaauggugauaguugca

SEQ ID NO: 1024631 - RNA, 22 nt, Human
gcugauguuuaguugauguuac

SEQ ID NO: 1024632 - RNA, 22 nt, Human
uguuuuaaagccauugccuuuc

SEQ ID NO: 1024633 - RNA, 22 nt, Human
ugcauguuaagaaaauauugag

SEQ ID NO: 1024634 - RNA, 22 nt, Human
auguaugaagcuuuguuuggga

SEQ ID NO: 1024635 - RNA, 22 nt, Human
gaaaucugcuucuugcauagua

SEQ ID NO: 1024636 - RNA, 22 nt, Human
aaauaguuguuuggaucaauaa

SEQ ID NO: 1024637 - RNA, 22 nt, Human
aaaauuauagaucuagugccug

SEQ ID NO: 1024638 - RNA, 22 nt, Human
agcaggagagcagugcgugguc

SEQ ID NO: 1024639 - RNA, 22 nt, Human
gcugcucuccauggccgugagu

SEQ ID NO: 1024640 - RNA, 22 nt, Human
cagaggcucuuccucacugccc

SEQ ID NO: 1024641 - RNA, 20 nt, Human
ccagcauguacacaugugga

SEQ ID NO: 1024642 - RNA, 22 nt, Human
uaaaugugucuuuuuaaggccu

SEQ ID NO: 1024643 - RNA, 22 nt, Human
uguacaaugccagggaacacca

SEQ ID NO: 1024644 - RNA, 22 nt, Human
ucagccucucugaguccagacc

SEQ ID NO: 1024645 - RNA, 22 nt, Human
agcucccagucuccucuccaug

SEQ ID NO: 1024646 - RNA, 18 nt, Human
aaaaugcaggcgacaugg

SEQ ID NO: 1024647 - RNA, 23 nt, Human
ucagggacaugaugugucauauc

SEQ ID NO: 1024648 - RNA, 19 nt, Human
gagguggguccccgcagcc

SEQ ID NO: 1024649 - RNA, 22 nt, Human
aggagccaagcagaacuaagga

SEQ ID NO: 1024650 - RNA, 22 nt, Human
ugcugcacaauuggaaaguauc

SEQ ID NO: 1024651 - RNA, 19 nt, Human
caagugaagccugggaugg

SEQ ID NO: 1024652 - RNA, 22 nt, Human
cuggagcccaggccuggugucu

SEQ ID NO: 1024653 - RNA, 22 nt, Human
ucaaucacguguuccauguucu

SEQ ID NO: 1024654 - RNA, 22 nt, Human
agccuggauccuaggcucagcu

SEQ ID NO: 1024655 - RNA, 20 nt, Human
uggagcuguaaucuugucug

SEQ ID NO: 1024656 - RNA, 18 nt, Human
cagauccaggcagcuauu

SEQ ID NO: 1024657 - RNA, 22 nt, Human
cacaugaagagagucuaguaau

SEQ ID NO: 1024658 - RNA, 17 nt, Human
uccaugagacaugaaga

SEQ ID NO: 1024659 - RNA, 22 nt, Human
cagcuggccugaucccuguggc

SEQ ID NO: 1024660 - RNA, 22 nt, Human
cccaggucugugccagcucuga

SEQ ID NO: 1024661 - RNA, 22 nt, Human
ccuaagaauuaaugaauacacc

SEQ ID NO: 1024662 - RNA, 22 nt, Human
uggccugaauuauggcagaucu

SEQ ID NO: 1024663 - RNA, 22 nt, Human
aauagcucacugauuucucuuu

SEQ ID NO: 1024664 - RNA, 22 nt, Human
aaauccuaccaagaaauucccu

SEQ ID NO: 1024665 - RNA, 22 nt, Human
cagagcugcagauugaaggcau

SEQ ID NO: 1024666 - RNA, 22 nt, Human
agaugcugcuccacaggccagg

SEQ ID NO: 1024667 - RNA, 22 nt, Human
uccugggcugugugccacucug

SEQ ID NO: 1024668 - RNA, 22 nt, Human
aaaauuauucauggcuuuugga

SEQ ID NO: 1024669 - RNA, 22 nt, Human
cccaugagauucugaauuuggc

SEQ ID NO: 1024670 - RNA, 22 nt, Human
cccugcagaucuaggguccuuc

SEQ ID NO: 1024671 - RNA, 22 nt, Human
gccugugcuuaacugacgugag

SEQ ID NO: 1024672 - RNA, 22 nt, Human
gggccuggugcuucugacuccu

SEQ ID NO: 1024673 - RNA, 22 nt, Human
ugaggcagaaauuccuguuuuc

SEQ ID NO: 1024674 - RNA, 22 nt, Human
aggucauuacaauuaucauuuu

SEQ ID NO: 1024675 - RNA, 22 nt, Human
cccuguggaggaggagagcagu

SEQ ID NO: 1024676 - RNA, 22 nt, Human
ugcuuaaacccugaucaugugu

SEQ ID NO: 1024677 - RNA, 22 nt, Human
uccugcagagucccacugauuu

SEQ ID NO: 1024678 - RNA, 22 nt, Human
gcagccacuuugcaaccaagag

SEQ ID NO: 1024679 - RNA, 22 nt, Human
ucagaguguggugagaugugca

SEQ ID NO: 1024680 - RNA, 22 nt, Human
aagcagcagaccugauuuugaa

SEQ ID NO: 1024681 - RNA, 22 nt, Human
ucccagccuuucuuuucugcug

SEQ ID NO: 1024682 - RNA, 22 nt, Human
gcucccaguucccaaagugacc

SEQ ID NO: 1024683 - RNA, 22 nt, Human
uuacaagcagcuacauaucaca

SEQ ID NO: 1024684 - RNA, 22 nt, Human
cuccagggggcauccacacagc

SEQ ID NO: 1024685 - RNA, 22 nt, Human
ucuacugugguccuuguaacca

SEQ ID NO: 1024686 - RNA, 22 nt, Human
auuauuaggugcucucugacaa

SEQ ID NO: 1024687 - RNA, 22 nt, Human
cugaagcaaaugaaacagcucu

SEQ ID NO: 1024688 - RNA, 19 nt, Human
cuggugcuugagugaguca

SEQ ID NO: 1024689 - RNA, 22 nt, Human
ucacuuaaaaauucuaguuaug

SEQ ID NO: 1024690 - RNA, 22 nt, Human
aggagcagaauuuaaugugcag

SEQ ID NO: 1024691 - RNA, 22 nt, Human
agggaagaaaauccaucgcugc

SEQ ID NO: 1024692 - RNA, 22 nt, Human
aaaucaguuaagaugaggccau

SEQ ID NO: 1024693 - RNA, 22 nt, Human
agagugaaguucaucgugcagc

SEQ ID NO: 1024694 - RNA, 22 nt, Human
acauuuuuuagagucccacauu

SEQ ID NO: 1024695 - RNA, 22 nt, Human
ugaaagguagcuggccucauag

SEQ ID NO: 1024696 - RNA, 22 nt, Human
cagcugagaccagaaugcaggu

SEQ ID NO: 1024697 - RNA, 22 nt, Human
gggcucugggauucagagcaag

SEQ ID NO: 1024698 - RNA, 22 nt, Human
cugcuuugauuagaagaguaca

SEQ ID NO: 1024699 - RNA, 22 nt, Human
ccugucugcaugaucccugcca

SEQ ID NO: 1024700 - RNA, 22 nt, Human
gaaaacuaacggaaaaguuagg

SEQ ID NO: 1024701 - RNA, 22 nt, Human
auauuaggcaaggagauuauuu

SEQ ID NO: 1024702 - RNA, 22 nt, Human
gcagagguggcaucugggcucu

SEQ ID NO: 1024703 - RNA, 22 nt, Human
gagccaagggcgugcuggagag

SEQ ID NO: 1024704 - RNA, 22 nt, Human
gggagucugggcuagacuccuu

SEQ ID NO: 1024705 - RNA, 22 nt, Human
ggagcuggcuacagagaacucc

SEQ ID NO: 1024706 - RNA, 22 nt, Human
agcugagcacauucaaacaggu

SEQ ID NO: 1024707 - RNA, 22 nt, Human
acagcagcuugcgugucugguc

SEQ ID NO: 1024708 - RNA, 22 nt, Human
ggcaugggccgaggugccuccu

SEQ ID NO: 1024709 - RNA, 22 nt, Human
agcagggcuuugcagacuuggg

SEQ ID NO: 1024710 - RNA, 22 nt, Human
uugaagagugccuuccagacau

SEQ ID NO: 1024711 - RNA, 22 nt, Human
ugggugaggaugaugaggcagc

SEQ ID NO: 1024712 - RNA, 21 nt, Human
gcagagccggggcgagaaggc

SEQ ID NO: 1024713 - RNA, 22 nt, Human
cuggagcauccaugcccagggu

SEQ ID NO: 1024714 - RNA, 22 nt, Human
guagcuuauuagggauaauagu

SEQ ID NO: 1024715 - RNA, 22 nt, Human
ugaacaaacugcauucuucacu

SEQ ID NO: 1024716 - RNA, 22 nt, Human
cagcagcuggugagacacagcc

SEQ ID NO: 1024717 - RNA, 22 nt, Human
aaagaggaaccaagagcacgug

SEQ ID NO: 1024718 - RNA, 22 nt, Human
uucucagagcucacuguaguaa

SEQ ID NO: 1024719 - RNA, 22 nt, Human
cuuucuuauaccugucagggcc

SEQ ID NO: 1024720 - RNA, 22 nt, Human
ggcuucugccacgagagggaag

SEQ ID NO: 1024721 - RNA, 22 nt, Human
uauugucuguccgggucaaagc

SEQ ID NO: 1024722 - RNA, 22 nt, Human
gccuggagcagacgugucccgg

SEQ ID NO: 1024723 - RNA, 22 nt, Human
acacugcucacuucuucccuug

SEQ ID NO: 1024724 - RNA, 23 nt, Human
acagcugcaccuggccgccuggc

SEQ ID NO: 1024725 - RNA, 22 nt, Human
aggaaagcucccaguagggcuc

SEQ ID NO: 1024726 - RNA, 22 nt, Human
uagagcuguaucaaagagccuu

SEQ ID NO: 1024727 - RNA, 22 nt, Human
uuaaacaguguuucaugugggg

SEQ ID NO: 1024728 - RNA, 22 nt, Human
ucuggccugaaaguccaugcuu

SEQ ID NO: 1024729 - RNA, 22 nt, Human
gccuuccuuuuaccaccagcca

SEQ ID NO: 1024730 - RNA, 22 nt, Human
aagaaaugcagaaaugugcugg

SEQ ID NO: 1024731 - RNA, 22 nt, Human
gauccuugcacuugacuuggca

SEQ ID NO: 1024732 - RNA, 22 nt, Human
aggcaggcucaggcccaugcuu

SEQ ID NO: 1024733 - RNA, 22 nt, Human
acugcccucccaucuauugcaa

SEQ ID NO: 1024734 - RNA, 22 nt, Human
gcugagagcaaagcaugucuag

SEQ ID NO: 1024735 - RNA, 19 nt, Human
uagaaugcccacuuaaaaa

SEQ ID NO: 1024736 - RNA, 22 nt, Human
uauggcauuguuggugaugaua

SEQ ID NO: 1024737 - RNA, 22 nt, Human
ggacuucuaagugccagacacu

SEQ ID NO: 1024738 - RNA, 22 nt, Human
caggcugaggcaguaggguuug

SEQ ID NO: 1024739 - RNA, 22 nt, Human
cucagaagaacaaaggcucuac

SEQ ID NO: 1024740 - RNA, 22 nt, Human
uguggaaaauuggaacguuccu

SEQ ID NO: 1024741 - RNA, 22 nt, Human
aagggcuggccacauucugggu

SEQ ID NO: 1024742 - RNA, 21 nt, Human
ucagggcagugggagguuccu

SEQ ID NO: 1024743 - RNA, 22 nt, Human
gauacauuuuaucuccuaacag

SEQ ID NO: 1024744 - RNA, 22 nt, Human
uuaaauuagucaagcuucucug

SEQ ID NO: 1024745 - RNA, 22 nt, Human
ucacauuuuaucuauuuuaagu

SEQ ID NO: 1024746 - RNA, 22 nt, Human
aagaacaguguccugggacucg

SEQ ID NO: 1024747 - RNA, 22 nt, Human
aauaguauuuauuuggaaaaag

SEQ ID NO: 1024748 - RNA, 22 nt, Human
agagagccugaguggcagcuau

SEQ ID NO: 1024749 - RNA, 22 nt, Human
agguauuauuagcaucucuauu

SEQ ID NO: 1024750 - RNA, 22 nt, Human
uucacaauaggagcaugcaaau

SEQ ID NO: 1024751 - RNA, 22 nt, Human
cugggaggcaccgcgucgugcu

SEQ ID NO: 1024752 - RNA, 22 nt, Human
uugccuugauucuucucaugug

SEQ ID NO: 1024753 - RNA, 22 nt, Human
uagcuguguaagcuugguaaga

SEQ ID NO: 1024754 - RNA, 22 nt, Human
gccaggcucagcagucaaccug

SEQ ID NO: 1024755 - RNA, 22 nt, Human
uaggcagggauuaggguugauu

SEQ ID NO: 1024756 - RNA, 22 nt, Human
cagccaggcccccgagucguug

SEQ ID NO: 1024757 - RNA, 22 nt, Human
aucaaaguucguaacugauaac

SEQ ID NO: 1024758 - RNA, 22 nt, Human
aaaguucaugguguuauagaaa

SEQ ID NO: 1024759 - RNA, 18 nt, Human
ucuuggaguaaugaucaa

SEQ ID NO: 1024760 - RNA, 22 nt, Human
aggccugggacgggagccguga

SEQ ID NO: 1024761 - RNA, 21 nt, Human
guggcccugguguggcugcac

SEQ ID NO: 1024762 - RNA, 22 nt, Human
uggcugugucaucauagcugug

SEQ ID NO: 1024763 - RNA, 22 nt, Human
cagcugccuucugcgggaaguc

SEQ ID NO: 1024764 - RNA, 22 nt, Human
uggccugucuuguugugcuaga

SEQ ID NO: 1024765 - RNA, 22 nt, Human
gugcagugagcagugcagcacc

SEQ ID NO: 1024766 - RNA, 20 nt, Human
agcauuugaaauaugacuau

SEQ ID NO: 1024767 - RNA, 22 nt, Human
gcugcagcucgccuuccggccu

SEQ ID NO: 1024768 - RNA, 22 nt, Human
acacaggaagucagcacugaug

SEQ ID NO: 1024769 - RNA, 22 nt, Human
ugcauugcaguuaacucaguau

SEQ ID NO: 1024770 - RNA, 21 nt, Human
gggcagaggggccuccugggu

SEQ ID NO: 1024771 - RNA, 22 nt, Human
ccuguccuccaagagcacaucu

SEQ ID NO: 1024772 - RNA, 22 nt, Human
aacauacauauuucagugucca

SEQ ID NO: 1024773 - RNA, 22 nt, Human
aauuuuaagcauaugacugguu

SEQ ID NO: 1024774 - RNA, 22 nt, Human
ccagugcuuccaggaauacggu

SEQ ID NO: 1024775 - RNA, 22 nt, Human
ucccagagcccaaguuggagag

SEQ ID NO: 1024776 - RNA, 22 nt, Human
uucucagauccaucagaagucc

SEQ ID NO: 1024777 - RNA, 22 nt, Human
ucugcaggccucgacaaggcca

SEQ ID NO: 1024778 - RNA, 22 nt, Human
cucugagaggugagaagcagca

SEQ ID NO: 1024779 - RNA, 17 nt, Human
uauguaguacuuauaaa

SEQ ID NO: 1024780 - RNA, 22 nt, Human
aggagacaucuaacuguagguu

SEQ ID NO: 1024781 - RNA, 22 nt, Human
ucagagcuuuggagaccaggaa

SEQ ID NO: 1024782 - RNA, 22 nt, Human
ugcuuuauguuaucagaagggu

SEQ ID NO: 1024783 - RNA, 22 nt, Human
agcugaguuaauucaucacuua

SEQ ID NO: 1024784 - RNA, 17 nt, Human
guccugggaggagagag

SEQ ID NO: 1024785 - RNA, 22 nt, Human
gcugucaccaaagcaggcacug

SEQ ID NO: 1024786 - RNA, 22 nt, Human
uggcucagcgcggccuggucuu

SEQ ID NO: 1024787 - RNA, 22 nt, Human
ggauccuucuuugaccucacag

SEQ ID NO: 1024788 - RNA, 22 nt, Human
cuuccaaagcacuuuauggacc

SEQ ID NO: 1024789 - RNA, 22 nt, Human
gggcucagccccauugaaccag

SEQ ID NO: 1024790 - RNA, 22 nt, Human
acugugugaaacaucaaugugu

SEQ ID NO: 1024791 - RNA, 22 nt, Human
uggcugaaggaagauucuucua

SEQ ID NO: 1024792 - RNA, 22 nt, Human
gccaccagugggggccugggca

SEQ ID NO: 1024793 - RNA, 22 nt, Human
cugccuggggaaugugaggauu

SEQ ID NO: 1024794 - RNA, 22 nt, Human
ccuggcugucguuuugugaaau

SEQ ID NO: 1024795 - RNA, 22 nt, Human
uguaggccuauguccagcaauu

SEQ ID NO: 1024796 - RNA, 22 nt, Human
cagcugaacauguagagcaucu

SEQ ID NO: 1024797 - RNA, 22 nt, Human
gcagcaaucuucacagugucau

SEQ ID NO: 1024798 - RNA, 22 nt, Human
ccgggcgggggcucucgucacc

SEQ ID NO: 1024799 - RNA, 22 nt, Human
gggcacugaaugccaagcuagg

SEQ ID NO: 1024800 - RNA, 22 nt, Human
ugaccuuauuugaaaauagaga

SEQ ID NO: 1024801 - RNA, 22 nt, Human
cagcauggggcuuggagucagc

SEQ ID NO: 1024802 - RNA, 22 nt, Human
ggcagccauggacacuggcuag

SEQ ID NO: 1024803 - RNA, 22 nt, Human
uuccaggauggcaauaaugaau

SEQ ID NO: 1024804 - RNA, 22 nt, Human
ucugggaaccagugcggcuggg

SEQ ID NO: 1024805 - RNA, 22 nt, Human
ucccagggucaguggugaggcc

SEQ ID NO: 1024806 - RNA, 22 nt, Human
uuauacauguguuuugagauga

SEQ ID NO: 1024807 - RNA, 23 nt, Human
uucuucucaauuaguugauucag

SEQ ID NO: 1024808 - RNA, 22 nt, Human
cacagguggcuccaaguuagag

SEQ ID NO: 1024809 - RNA, 23 nt, Human
cuuuccuuucuuugacacccagc

SEQ ID NO: 1024810 - RNA, 22 nt, Human
uagaaacaucagcuaaccaaaa

SEQ ID NO: 1024811 - RNA, 22 nt, Human
gaaaggucaguuccacuuccau

SEQ ID NO: 1024812 - RNA, 22 nt, Human
uccagucaggcugaauucaagg

SEQ ID NO: 1024813 - RNA, 22 nt, Human
ccagcuuuucagaaucugccug

SEQ ID NO: 1024814 - RNA, 22 nt, Human
ggcuucaccgcgggguugcagg

SEQ ID NO: 1024815 - RNA, 22 nt, Human
augacacaauuuuagagcugaa

SEQ ID NO: 1024816 - RNA, 22 nt, Human
uagucucuggagacucuagggg

SEQ ID NO: 1024817 - RNA, 22 nt, Human
uagaacagaguuccagugauca

SEQ ID NO: 1024818 - RNA, 22 nt, Human
aaugagacacgugaagcagaug

SEQ ID NO: 1024819 - RNA, 18 nt, Human
ccugagcccugcuuacuu

SEQ ID NO: 1024820 - RNA, 22 nt, Human
cacagaagaaucaugcuguguu

SEQ ID NO: 1024821 - RNA, 22 nt, Human
auaaaaguaggaccaacuuaca

SEQ ID NO: 1024822 - RNA, 22 nt, Human
ucacaggacccugaggguggcg

SEQ ID NO: 1024823 - RNA, 22 nt, Human
cagauaaaggcuuacuaguagu

SEQ ID NO: 1024824 - RNA, 22 nt, Human
ugaagcagcaccauuuuagagc

SEQ ID NO: 1024825 - RNA, 22 nt, Human
aucaguuuggugcuuucaguga

SEQ ID NO: 1024826 - RNA, 22 nt, Human
agggagaaaauuggaugcacaa

SEQ ID NO: 1024827 - RNA, 22 nt, Human
gucaggauuauuuuauuaaaag

SEQ ID NO: 1024828 - RNA, 20 nt, Human
uacuugaauguugcagcagu

SEQ ID NO: 1024829 - RNA, 22 nt, Human
uagggcaguuucauguuaucuu

SEQ ID NO: 1024830 - RNA, 22 nt, Human
uccugaggaaaguucaugaaug

SEQ ID NO: 1024831 - RNA, 22 nt, Human
uuuaccaagcuuuaauuacaua

SEQ ID NO: 1024832 - RNA, 22 nt, Human
gaggacaggagacucacuguuu

SEQ ID NO: 1024833 - RNA, 22 nt, Human
ugcagcagacugaguaugagaa

SEQ ID NO: 1024834 - RNA, 22 nt, Human
cacauaaucaccaaguccuuuc

SEQ ID NO: 1024835 - RNA, 22 nt, Human
gggucagcugcugggggcugac

SEQ ID NO: 1024836 - RNA, 22 nt, Human
cuggcucaauaaauauuagcug

SEQ ID NO: 1024837 - RNA, 22 nt, Human
cagugucuuauuuguagcucag

SEQ ID NO: 1024838 - RNA, 22 nt, Human
ggaggcaggaaagacagguuca

SEQ ID NO: 1024839 - RNA, 22 nt, Human
auuugaagaaaguuuucuagau

SEQ ID NO: 1024840 - RNA, 20 nt, Human
agggcagagggauuacaggc

SEQ ID NO: 1024841 - RNA, 21 nt, Human
gggccuggcugcgcaggacgg

SEQ ID NO: 1024842 - RNA, 17 nt, Human
cagacagauauccuggg

SEQ ID NO: 1024843 - RNA, 22 nt, Human
guaaacaugcuguguacucagc

SEQ ID NO: 1024844 - RNA, 22 nt, Human
aucuggcuggauucuuagcguu

SEQ ID NO: 1024845 - RNA, 22 nt, Human
agcccucauggaacagcuccua

SEQ ID NO: 1024846 - RNA, 22 nt, Human
aaaucuaggcucauccuggucc

SEQ ID NO: 1024847 - RNA, 22 nt, Human
ugccuggaugugcuggccucac

SEQ ID NO: 1024848 - RNA, 22 nt, Human
cuggcucccucgcugaggugcu

SEQ ID NO: 1024849 - RNA, 22 nt, Human
uauguuuuucaagugcacacua

SEQ ID NO: 1024850 - RNA, 22 nt, Human
agaggcacuccagccacugguc

SEQ ID NO: 1024851 - RNA, 22 nt, Human
aggccagguggucaugcuugcu

SEQ ID NO: 1024852 - RNA, 23 nt, Human
gagguacagcaccagugaauagg

SEQ ID NO: 1024853 - RNA, 22 nt, Human
cuuuggaagugaccacaauccu

SEQ ID NO: 1024854 - RNA, 22 nt, Human
aggcucugcagaccccagcugu

SEQ ID NO: 1024855 - RNA, 22 nt, Human
cagaggccucacuuccagccag

SEQ ID NO: 1024856 - RNA, 21 nt, Human
cccuguguuccacagcagaca

SEQ ID NO: 1024857 - RNA, 22 nt, Human
cccacagguccccaugaacucg

SEQ ID NO: 1024858 - RNA, 22 nt, Human
uuugcauuguuucaaaagugaa

SEQ ID NO: 1024859 - RNA, 22 nt, Human
ugugcucuggaguugccuucac

SEQ ID NO: 1024860 - RNA, 22 nt, Human
agcagccagagaaugaugcagu

SEQ ID NO: 1024861 - RNA, 22 nt, Human
aggguccugggugcaguugcuu

SEQ ID NO: 1024862 - RNA, 22 nt, Human
ccuccucugggaagauucagag

SEQ ID NO: 1024863 - RNA, 22 nt, Human
aagcagcugauuucacagcuca

SEQ ID NO: 1024864 - RNA, 22 nt, Human
agcuggcacagaccaggagauc

SEQ ID NO: 1024865 - RNA, 22 nt, Human
cucugagaaagcugugagcuaa

SEQ ID NO: 1024866 - RNA, 20 nt, Human
agccagaagaaggcuggaga

SEQ ID NO: 1024867 - RNA, 22 nt, Human
gggucucucucggcuccacgcg

SEQ ID NO: 1024868 - RNA, 22 nt, Human
ggcaggugcucugugggccugg

SEQ ID NO: 1024869 - RNA, 22 nt, Human
uucaguaaaacacugcaauguc

SEQ ID NO: 1024870 - RNA, 23 nt, Human
aaacugcuuccaauuccugccau

SEQ ID NO: 1024871 - RNA, 22 nt, Human
uccuucagaggacggcagccag

SEQ ID NO: 1024872 - RNA, 22 nt, Human
aucugcuuuugagaauuuacuu

SEQ ID NO: 1024873 - RNA, 22 nt, Human
cauuagggucucucagcugaau

SEQ ID NO: 1024874 - RNA, 21 nt, Human
ucuuugcaucaguuguuuucu

SEQ ID NO: 1024875 - RNA, 22 nt, Human
caggagcugggucuggaagcag

SEQ ID NO: 1024876 - RNA, 20 nt, Human
gagccugggaagucuaaggu

SEQ ID NO: 1024877 - RNA, 17 nt, Human
gugcagggaugaaggau

SEQ ID NO: 1024878 - RNA, 22 nt, Human
gccaggugcuaucccugcgcug

SEQ ID NO: 1024879 - RNA, 22 nt, Human
ucucagagaagugaugagcaau

SEQ ID NO: 1024880 - RNA, 22 nt, Human
gaggcacugaauacuugagggu

SEQ ID NO: 1024881 - RNA, 22 nt, Human
ugguaaauauguccauucucuu

SEQ ID NO: 1024882 - RNA, 22 nt, Human
cagucacacaaguggacuuggg

SEQ ID NO: 1024883 - RNA, 22 nt, Human
gcaggagcucguuuccaggcug

SEQ ID NO: 1024884 - RNA, 22 nt, Human
gucaggauguuuauucuccagu

SEQ ID NO: 1024885 - RNA, 22 nt, Human
aggcccagggcugcucucugaa

SEQ ID NO: 1024886 - RNA, 22 nt, Human
agaggcacagaggcaguccccu

SEQ ID NO: 1024887 - RNA, 22 nt, Human
gugggagcccucagggaggugc

SEQ ID NO: 1024888 - RNA, 22 nt, Human
uccucugcuguucugguucuuu

SEQ ID NO: 1024889 - RNA, 22 nt, Human
cagacccucgggugaguuggcc

SEQ ID NO: 1024890 - RNA, 21 nt, Human
guauugcagaguuaugugcuc

SEQ ID NO: 1024891 - RNA, 22 nt, Human
uuucacagcuggguggcagagu

SEQ ID NO: 1024892 - RNA, 22 nt, Human
cucagggucugguccuuagauu

SEQ ID NO: 1024893 - RNA, 22 nt, Human
ucucuggagggcuccaggcggg

SEQ ID NO: 1024894 - RNA, 21 nt, Human
cugcucuggggaccggcugug

SEQ ID NO: 1024895 - RNA, 22 nt, Human
caggguccggcugccuggcugu

SEQ ID NO: 1024896 - RNA, 22 nt, Human
ccuauugacaauucucuucucc

SEQ ID NO: 1024897 - RNA, 22 nt, Human
uauggcauaucugggagacucu

SEQ ID NO: 1024898 - RNA, 22 nt, Human
cagaggccccauuggcugugcg

SEQ ID NO: 1024899 - RNA, 22 nt, Human
aaugaacaaaauaugcuuugca

SEQ ID NO: 1024900 - RNA, 22 nt, Human
agggcuccugaggcccuucugg

SEQ ID NO: 1024901 - RNA, 21 nt, Human
cucuggaggcaagggagagug

SEQ ID NO: 1024902 - RNA, 22 nt, Human
aauuauguagccauaugaaaca

SEQ ID NO: 1024903 - RNA, 22 nt, Human
ggagcugucuguagggcacagg

SEQ ID NO: 1024904 - RNA, 22 nt, Human
uaaaugagggcugacaugauug

SEQ ID NO: 1024905 - RNA, 22 nt, Human
gcaggcagguggcaucuuguga

SEQ ID NO: 1024906 - RNA, 22 nt, Human
cuacccagcaccuaggcugccu

SEQ ID NO: 1024907 - RNA, 22 nt, Human
caggggcagucugugugcgugg

SEQ ID NO: 1024908 - RNA, 22 nt, Human
gcugcccugucugcagcaggac

SEQ ID NO: 1024909 - RNA, 22 nt, Human
gaggaaugucagcacaggccuc

SEQ ID NO: 1024910 - RNA, 21 nt, Human
uucuucaaagaagaaggcaca

SEQ ID NO: 1024911 - RNA, 22 nt, Human
guguuuccucacuucucugacu

SEQ ID NO: 1024912 - RNA, 22 nt, Human
uaagaacaucuguccccagauu

SEQ ID NO: 1024913 - RNA, 22 nt, Human
uauguacuacacuagaacauuu

SEQ ID NO: 1024914 - RNA, 22 nt, Human
cuucuucauaggcaguccuguu

SEQ ID NO: 1024915 - RNA, 22 nt, Human
ucccagaagugaaauuucuaga

SEQ ID NO: 1024916 - RNA, 22 nt, Human
gguguccaucaggcugugcuuc

SEQ ID NO: 1024917 - RNA, 20 nt, Human
ugucauuguuucuaggaccu

SEQ ID NO: 1024918 - RNA, 22 nt, Human
cugguuuagcuguaagguuccc

SEQ ID NO: 1024919 - RNA, 22 nt, Human
cugcugcucagugucaucaugu

SEQ ID NO: 1024920 - RNA, 22 nt, Human
gcaggaugggagcuucacucug

SEQ ID NO: 1024921 - RNA, 22 nt, Human
agaauccuguuuuacuucauca

SEQ ID NO: 1024922 - RNA, 22 nt, Human
uccauuuuucaugacuccucaa

SEQ ID NO: 1024923 - RNA, 22 nt, Human
cauacauugcucauucaguauc

SEQ ID NO: 1024924 - RNA, 22 nt, Human
ggguguccugugccaagcuggg

SEQ ID NO: 1024925 - RNA, 22 nt, Human
acagagaaagugggcugaagau

SEQ ID NO: 1024926 - RNA, 22 nt, Human
agcugcucaggagagccagguc

SEQ ID NO: 1024927 - RNA, 21 nt, Human
auacauucuauuaagcauuua

SEQ ID NO: 1024928 - RNA, 22 nt, Human
agggccagagucuguguagaua

SEQ ID NO: 1024929 - RNA, 22 nt, Human
ugucugucugcaagccagaaag

SEQ ID NO: 1024930 - RNA, 22 nt, Human
ucagcagggccuccuugugcag

SEQ ID NO: 1024931 - RNA, 22 nt, Human
gcuggcagaauuucuucuugcu

SEQ ID NO: 1024932 - RNA, 22 nt, Human
ucuuuuggaaaugaugugcagg

SEQ ID NO: 1024933 - RNA, 22 nt, Human
cagcagugucuccagcaucaca

SEQ ID NO: 1024934 - RNA, 22 nt, Human
uuugcaguagacaucuuauuuu

SEQ ID NO: 1024935 - RNA, 22 nt, Human
aguacuuugcacuuugcucaga

SEQ ID NO: 1024936 - RNA, 22 nt, Human
ugggcugcugcggugcucuugg

SEQ ID NO: 1024937 - RNA, 22 nt, Human
ucuggccuuaucuguccaagcc

SEQ ID NO: 1024938 - RNA, 22 nt, Human
cacccuggaaagaaggucuggg

SEQ ID NO: 1024939 - RNA, 22 nt, Human
ccuaugccugucacucugcgcu

SEQ ID NO: 1024940 - RNA, 22 nt, Human
uccuuuuugguccaaggugacc

SEQ ID NO: 1024941 - RNA, 20 nt, Human
uauaacaguguugggugugu

SEQ ID NO: 1024942 - RNA, 22 nt, Human
gugggaugguagguagguaaua

SEQ ID NO: 1024943 - RNA, 22 nt, Human
gcauguguugguuuaugcaugu

SEQ ID NO: 1024944 - RNA, 22 nt, Human
uauuacugagguuuuauggagu

SEQ ID NO: 1024945 - RNA, 22 nt, Human
uccuucaggccucauucucaua

SEQ ID NO: 1024946 - RNA, 22 nt, Human
uuuucuaacaucuaguaauuug

SEQ ID NO: 1024947 - RNA, 22 nt, Human
ucaugcuuaaaagacacuugag

SEQ ID NO: 1024948 - RNA, 22 nt, Human
gcagggugaaggucacauagaa

SEQ ID NO: 1024949 - RNA, 22 nt, Human
gagagugaugaaugguuaaaca

SEQ ID NO: 1024950 - RNA, 22 nt, Human
uuggaggcaaugggaaggaggc

SEQ ID NO: 1024951 - RNA, 22 nt, Human
uggagcuggaauuugagcugga

SEQ ID NO: 1024952 - RNA, 22 nt, Human
gaugaggggucauuggcuggga

SEQ ID NO: 1024953 - RNA, 22 nt, Human
acuguggggggcuuugcucagu

SEQ ID NO: 1024954 - RNA, 22 nt, Human
caggaaccuaaugaaggcucac

SEQ ID NO: 1024955 - RNA, 22 nt, Human
gccaggccugcaagugcuggug

SEQ ID NO: 1024956 - RNA, 22 nt, Human
ggcuuuauuauguggccaugug

SEQ ID NO: 1024957 - RNA, 22 nt, Human
aagagcuggauggaaucuggga

SEQ ID NO: 1024958 - RNA, 22 nt, Human
ucaugcacaugugucaccauca

SEQ ID NO: 1024959 - RNA, 18 nt, Human
uggccuggagacaacucu

SEQ ID NO: 1024960 - RNA, 22 nt, Human
cugcaagauuggaagaugcaau

SEQ ID NO: 1024961 - RNA, 22 nt, Human
cauuucugauuacagaauacua

SEQ ID NO: 1024962 - RNA, 22 nt, Human
gugcgccagcucaaggggaggc

SEQ ID NO: 1024963 - RNA, 22 nt, Human
agcagaagaaagccacaugacu

SEQ ID NO: 1024964 - RNA, 22 nt, Human
ucuguaucacccguucccagaa

SEQ ID NO: 1024965 - RNA, 22 nt, Human
agcugcaggcccaugcucaguc

SEQ ID NO: 1024966 - RNA, 17 nt, Human
aagauuucauuagcuga

SEQ ID NO: 1024967 - RNA, 22 nt, Human
ucaggggagguugaaucgucuc

SEQ ID NO: 1024968 - RNA, 22 nt, Human
ccuuucucuuugcugaucaugu

SEQ ID NO: 1024969 - RNA, 22 nt, Human
ugaugggaaaaugaggccuggg

SEQ ID NO: 1024970 - RNA, 22 nt, Human
cuuuccaaugcauuuccaaugu

SEQ ID NO: 1024971 - RNA, 22 nt, Human
aggggcugccuggcuuggcacu

SEQ ID NO: 1024972 - RNA, 22 nt, Human
agggcuggaggguacuaguuua

SEQ ID NO: 1024973 - RNA, 22 nt, Human
ggccugggcccacugucaagag

SEQ ID NO: 1024974 - RNA, 22 nt, Human
cucccugguguccccuccagga

SEQ ID NO: 1024975 - RNA, 22 nt, Human
gaagcccuauccucuccuggga

SEQ ID NO: 1024976 - RNA, 22 nt, Human
aagauuucugcuuuuggaggca

SEQ ID NO: 1024977 - RNA, 22 nt, Human
gcauuauuaauagcugcaugag

SEQ ID NO: 1024978 - RNA, 22 nt, Human
accagccugucugagucguggg

SEQ ID NO: 1024979 - RNA, 22 nt, Human
aggcuuuaauuaucuacaggag

SEQ ID NO: 1024980 - RNA, 22 nt, Human
gggcaugagagggcagcuggca

SEQ ID NO: 1024981 - RNA, 22 nt, Human
caaugaaaauuuaaguugcagc

SEQ ID NO: 1024982 - RNA, 18 nt, Human
gcuccuggaccaggucac

SEQ ID NO: 1024983 - RNA, 22 nt, Human
cagaaccaggaacugauggaga

SEQ ID NO: 1024984 - RNA, 22 nt, Human
agcuuuauauaaaagaguacau

SEQ ID NO: 1024985 - RNA, 22 nt, Human
cugagccacugcuuguucagug

SEQ ID NO: 1024986 - RNA, 22 nt, Human
aagauacugaugauguaggcua

SEQ ID NO: 1024987 - RNA, 22 nt, Human
ugaaaugagauagauaaucagg

SEQ ID NO: 1024988 - RNA, 23 nt, Human
gcugucugucaucucugcgggag

SEQ ID NO: 1024989 - RNA, 22 nt, Human
ucagaccauccugcuguuagug

SEQ ID NO: 1024990 - RNA, 22 nt, Human
aaagauuucacaucccaagccu

SEQ ID NO: 1024991 - RNA, 22 nt, Human
ccgggccucgggacaccgggua

SEQ ID NO: 1024992 - RNA, 23 nt, Human
cagggcugggcuugguguuaggc

SEQ ID NO: 1024993 - RNA, 22 nt, Human
cugggcucagaugagaggaagg

SEQ ID NO: 1024994 - RNA, 22 nt, Human
aagccagguguuuaggccagcg

SEQ ID NO: 1024995 - RNA, 22 nt, Human
gugucauguagaaauugaugaa

SEQ ID NO: 1024996 - RNA, 22 nt, Human
gggcuggagccagcuguggcug

SEQ ID NO: 1024997 - RNA, 22 nt, Human
guucccauacaguaucagugcu

SEQ ID NO: 1024998 - RNA, 22 nt, Human
uggcugggugcuauccaguacu

SEQ ID NO: 1024999 - RNA, 22 nt, Human
gggcuggcaucaguugccgaga

SEQ ID NO: 1025000 - RNA, 22 nt, Human
ugcuugagacacauaugaauuu

SEQ ID NO: 1025001 - RNA, 22 nt, Human
aggucaaaccacagcucuaggc

SEQ ID NO: 1025002 - RNA, 22 nt, Human
aaugucugcucuacucaggagg

SEQ ID NO: 1025003 - RNA, 22 nt, Human
ucccuggaacagagagacaacg

SEQ ID NO: 1025004 - RNA, 22 nt, Human
uuuuuccuuagggguuacucac

SEQ ID NO: 1025005 - RNA, 19 nt, Human
acauuuaaauucagaucuc

SEQ ID NO: 1025006 - RNA, 22 nt, Human
aagggcucgguagcaguccuga

SEQ ID NO: 1025007 - RNA, 21 nt, Human
gccuggcagguggaagggcuc

SEQ ID NO: 1025008 - RNA, 22 nt, Human
cacacaugaaucccuaguaccu

SEQ ID NO: 1025009 - RNA, 22 nt, Human
ugucuuuaaaauuaaacacauc

SEQ ID NO: 1025010 - RNA, 22 nt, Human
cugaggucucuuuccauaguga

SEQ ID NO: 1025011 - RNA, 22 nt, Human
gccaggcuggcaaaaggaaacc

SEQ ID NO: 1025012 - RNA, 22 nt, Human
cagaggcacaagaaagcaaggc

SEQ ID NO: 1025013 - RNA, 22 nt, Human
gcuuccuagaucugugguacuc

SEQ ID NO: 1025014 - RNA, 22 nt, Human
agggaccugcucacugccuggc

SEQ ID NO: 1025015 - RNA, 22 nt, Human
uuaaauauuuucagcaggguca

SEQ ID NO: 1025016 - RNA, 22 nt, Human
uaauguguccugaaagcuucug

SEQ ID NO: 1025017 - RNA, 22 nt, Human
ucacaauacucacucaauggcu

SEQ ID NO: 1025018 - RNA, 22 nt, Human
aucgagggugaguacagcggac

SEQ ID NO: 1025019 - RNA, 20 nt, Human
uccugcagucgcuagcgccc

SEQ ID NO: 1025020 - RNA, 22 nt, Human
cagggagggacaauugucaccu

SEQ ID NO: 1025021 - RNA, 22 nt, Human
gcaugggcaagaggacuggggg

SEQ ID NO: 1025022 - RNA, 22 nt, Human
ucaggggcugugcauuucccag

SEQ ID NO: 1025023 - RNA, 23 nt, Human
aaaguguagccagguuaagaacc

SEQ ID NO: 1025024 - RNA, 22 nt, Human
cagagguacaagcuaaguuggg

SEQ ID NO: 1025025 - RNA, 22 nt, Human
cucugugauuuugugagccaga

SEQ ID NO: 1025026 - RNA, 18 nt, Human
ucuuccaacacugacacc

SEQ ID NO: 1025027 - RNA, 22 nt, Human
gcccugugccagucacgcugug

SEQ ID NO: 1025028 - RNA, 22 nt, Human
cccagggucccugcucucugug

SEQ ID NO: 1025029 - RNA, 22 nt, Human
ccagcagaggggcggagugcag

SEQ ID NO: 1025030 - RNA, 22 nt, Human
guagaagugaugucauguuaua

SEQ ID NO: 1025031 - RNA, 22 nt, Human
gugcauguuaaugguguacaaa

SEQ ID NO: 1025032 - RNA, 21 nt, Human
aagggagauaggaaucaggcc

SEQ ID NO: 1025033 - RNA, 22 nt, Human
gcucuggcuacuguggcuaccg

SEQ ID NO: 1025034 - RNA, 22 nt, Human
cccuuagcucaauuucuugccc

SEQ ID NO: 1025035 - RNA, 22 nt, Human
uguggcugcucaggugcagacc

SEQ ID NO: 1025036 - RNA, 22 nt, Human
augaugguggguaauguguaaa

SEQ ID NO: 1025037 - RNA, 22 nt, Human
cuguacaucucugaggacagua

SEQ ID NO: 1025038 - RNA, 22 nt, Human
uuuauuccaugugucuaugacc

SEQ ID NO: 1025039 - RNA, 22 nt, Human
cucagaauuuagggcucugagg

SEQ ID NO: 1025040 - RNA, 22 nt, Human
ggcuagaauaauugacuucauu

SEQ ID NO: 1025041 - RNA, 22 nt, Human
uaaugugugucaucaguagagu

SEQ ID NO: 1025042 - RNA, 22 nt, Human
agucucuuuguggacucugccu

SEQ ID NO: 1025043 - RNA, 22 nt, Human
agcaggugacagggcuguggug

SEQ ID NO: 1025044 - RNA, 22 nt, Human
aggccugggucucgugccuacc

SEQ ID NO: 1025045 - RNA, 18 nt, Human
cuccagggaacucaguca

SEQ ID NO: 1025046 - RNA, 22 nt, Human
gcagugggaagguuggcacaug

SEQ ID NO: 1025047 - RNA, 22 nt, Human
augauugaccaucugcugggcu

SEQ ID NO: 1025048 - RNA, 22 nt, Human
ucucccacagccgugcuucaag

SEQ ID NO: 1025049 - RNA, 19 nt, Human
ugacaggcuguugccuuga

SEQ ID NO: 1025050 - RNA, 22 nt, Human
gcugaaauucagauuccuaggc

SEQ ID NO: 1025051 - RNA, 22 nt, Human
gaaacaauuuuuguugucuaag

SEQ ID NO: 1025052 - RNA, 22 nt, Human
guugaguggguuaggaugcuga

SEQ ID NO: 1025053 - RNA, 22 nt, Human
auccaugaagguacuucucagg

SEQ ID NO: 1025054 - RNA, 22 nt, Human
ugcucuguugugcaugugggau

SEQ ID NO: 1025055 - RNA, 22 nt, Human
gcaguccaaaguggcucucacc

SEQ ID NO: 1025056 - RNA, 20 nt, Human
acaaaugcauucugugacau

SEQ ID NO: 1025057 - RNA, 22 nt, Human
ccagcucuagccccauguggcu

SEQ ID NO: 1025058 - RNA, 22 nt, Human
auuuauuauugugguuacuucu

SEQ ID NO: 1025059 - RNA, 21 nt, Human
gagugcaggucugaugccauc

SEQ ID NO: 1025060 - RNA, 22 nt, Human
agugcuuuaccuagauaauguu

SEQ ID NO: 1025061 - RNA, 22 nt, Human
ugcccacauucaaaaggugaug

SEQ ID NO: 1025062 - RNA, 22 nt, Human
agcucccaauugacuugaacua

SEQ ID NO: 1025063 - RNA, 22 nt, Human
uggcuuccacugugugcccccu

SEQ ID NO: 1025064 - RNA, 22 nt, Human
cagagcagggugcaccuugggc

SEQ ID NO: 1025065 - RNA, 22 nt, Human
gcagugggagcuuaggcagugc

SEQ ID NO: 1025066 - RNA, 22 nt, Human
aaucauaauuguauacauucau

SEQ ID NO: 1025067 - RNA, 22 nt, Human
guccugggccugcugaggcuga

SEQ ID NO: 1025068 - RNA, 22 nt, Human
ucagaggucccuagcaggagug

SEQ ID NO: 1025069 - RNA, 22 nt, Human
cgaggcagggaagcugcaaaag

SEQ ID NO: 1025070 - RNA, 22 nt, Human
cuccaugaauuugagcuuugug

SEQ ID NO: 1025071 - RNA, 22 nt, Human
cugcagagcaaguaacauccuc

SEQ ID NO: 1025072 - RNA, 22 nt, Human
auauauuuacucuccuguugca

SEQ ID NO: 1025073 - RNA, 22 nt, Human
aaauacauaaagguuguaccag

SEQ ID NO: 1025074 - RNA, 17 nt, Human
uggagcugcguguguuc

SEQ ID NO: 1025075 - RNA, 22 nt, Human
acuguccauucacucauauuca

SEQ ID NO: 1025076 - RNA, 22 nt, Human
uaucuacuccucuuucagaugc

SEQ ID NO: 1025077 - RNA, 22 nt, Human
ugucccagauacuggacauaga

SEQ ID NO: 1025078 - RNA, 22 nt, Human
gcucaagagagaugcaguucuu

SEQ ID NO: 1025079 - RNA, 22 nt, Human
aaacugcugguugcuggccagc

SEQ ID NO: 1025080 - RNA, 22 nt, Human
cacgggagacgugaucuuggac

SEQ ID NO: 1025081 - RNA, 22 nt, Human
gccugagacagugugguccaau

SEQ ID NO: 1025082 - RNA, 19 nt, Human
gugaggauacugcucagag

SEQ ID NO: 1025083 - RNA, 22 nt, Human
agauuugcggcuuuacuuugca

SEQ ID NO: 1025084 - RNA, 22 nt, Human
aaggagaaaugguagaugugca

SEQ ID NO: 1025085 - RNA, 20 nt, Human
cagcuuggaugagaggcuga

SEQ ID NO: 1025086 - RNA, 22 nt, Human
acuguguccuauuuccuugaca

SEQ ID NO: 1025087 - RNA, 22 nt, Human
ucuucaaaugcuaguaauauca

SEQ ID NO: 1025088 - RNA, 22 nt, Human
uccagagggcgauggcuggggg

SEQ ID NO: 1025089 - RNA, 18 nt, Human
gcaggugccacugcuguu

SEQ ID NO: 1025090 - RNA, 22 nt, Human
gugggagcugcuaccuccuucc

SEQ ID NO: 1025091 - RNA, 22 nt, Human
gagcagaugugugccaggaugc

SEQ ID NO: 1025092 - RNA, 22 nt, Human
aggggcucaguuacuuuggcag

SEQ ID NO: 1025093 - RNA, 22 nt, Human
cuuuucauuguuuguacaugca

SEQ ID NO: 1025094 - RNA, 22 nt, Human
gcugccacauuuucaggacuaa

SEQ ID NO: 1025095 - RNA, 19 nt, Human
ucauucaggaccaguggau

SEQ ID NO: 1025096 - RNA, 22 nt, Human
uggcugaauaauauucuguugu

SEQ ID NO: 1025097 - RNA, 22 nt, Human
aaggagugcaugacucagagua

SEQ ID NO: 1025098 - RNA, 22 nt, Human
cuagaaauauuuuacagucaag

SEQ ID NO: 1025099 - RNA, 22 nt, Human
augcagcuucaggauuaugaug

SEQ ID NO: 1025100 - RNA, 22 nt, Human
ugaaaucuccucuuuauauauc

SEQ ID NO: 1025101 - RNA, 22 nt, Human
caacagcugaucuuugaugaag

SEQ ID NO: 1025102 - RNA, 22 nt, Human
gcagagugauggaaugugggug

SEQ ID NO: 1025103 - RNA, 22 nt, Human
uguaugaaucucauuuguuuaa

SEQ ID NO: 1025104 - RNA, 22 nt, Human
aguguguguuugggcgguuuau

SEQ ID NO: 1025105 - RNA, 22 nt, Human
cccagggacagcuagguggggc

SEQ ID NO: 1025106 - RNA, 22 nt, Human
aggggugugcauccuggaggau

SEQ ID NO: 1025107 - RNA, 22 nt, Human
gaggccuggguuggaggugcau

SEQ ID NO: 1025108 - RNA, 23 nt, Human
ggcagcucucaucugaugacuga

SEQ ID NO: 1025109 - RNA, 22 nt, Human
acuuccugcagcuucucagccc

SEQ ID NO: 1025110 - RNA, 22 nt, Human
aaguucaauggaaaagcuuuag

SEQ ID NO: 1025111 - RNA, 22 nt, Human
aauguaugagcgugaaagcacu

SEQ ID NO: 1025112 - RNA, 22 nt, Human
gccagcaguauguccuggcagu

SEQ ID NO: 1025113 - RNA, 22 nt, Human
uagaaagugaagguuaauuaau

SEQ ID NO: 1025114 - RNA, 22 nt, Human
ggucaggguuccagguaucuuc

SEQ ID NO: 1025115 - RNA, 22 nt, Human
guuuccauggcucuguuaaugg

SEQ ID NO: 1025116 - RNA, 22 nt, Human
uaugaccuuaggaagcaagaag

SEQ ID NO: 1025117 - RNA, 22 nt, Human
agggcagagaucugagugggca

SEQ ID NO: 1025118 - RNA, 22 nt, Human
uggcugccuagugucugagcag

SEQ ID NO: 1025119 - RNA, 22 nt, Human
ggcagaggaagcuggaaguggg

SEQ ID NO: 1025120 - RNA, 22 nt, Human
ucaucacucauuggacaacaga

SEQ ID NO: 1025121 - RNA, 22 nt, Human
ccaggaguuugaggcugcagug

SEQ ID NO: 1025122 - RNA, 22 nt, Human
ugucauaacuuagugacaaauc

SEQ ID NO: 1025123 - RNA, 22 nt, Human
cccugcugucaggugcugggag

SEQ ID NO: 1025124 - RNA, 21 nt, Human
acagaugggaugagcacacug

SEQ ID NO: 1025125 - RNA, 20 nt, Human
gucaucgccggcagcaaaga

SEQ ID NO: 1025126 - RNA, 22 nt, Human
cagcucugaggaacacuccuuu

SEQ ID NO: 1025127 - RNA, 22 nt, Human
ugucaccucuuuggcugcagcu

SEQ ID NO: 1025128 - RNA, 22 nt, Human
caggaugagguagaggcagaua

SEQ ID NO: 1025129 - RNA, 22 nt, Human
cuucucucugcauaggcauggg

SEQ ID NO: 1025130 - RNA, 22 nt, Human
auaacagaguugggaagugaaa

SEQ ID NO: 1025131 - RNA, 22 nt, Human
uccaggcuggacaugaggcggg

SEQ ID NO: 1025132 - RNA, 22 nt, Human
cuggcuuucucugugguguuca

SEQ ID NO: 1025133 - RNA, 22 nt, Human
cagcugccagcuucucuccauc

SEQ ID NO: 1025134 - RNA, 20 nt, Human
uccucagaagacauuugggg

SEQ ID NO: 1025135 - RNA, 20 nt, Human
cugcugugguccuuuauuuu

SEQ ID NO: 1025136 - RNA, 22 nt, Human
ucuuugcaucccuuccauaguu

SEQ ID NO: 1025137 - RNA, 22 nt, Human
gacuacucaaacuuucucuaua

SEQ ID NO: 1025138 - RNA, 22 nt, Human
aacuuuauuguuaggggcuaaa

SEQ ID NO: 1025139 - RNA, 22 nt, Human
ccccuuccgucucuugaguguc

SEQ ID NO: 1025140 - RNA, 22 nt, Human
gagccuggauagccuuguucca

SEQ ID NO: 1025141 - RNA, 22 nt, Human
aagugggaauagaaaugaaggu

SEQ ID NO: 1025142 - RNA, 22 nt, Human
gagccuggauugucaccgacuu

SEQ ID NO: 1025143 - RNA, 22 nt, Human
uuugacaucaauacccuagaau

SEQ ID NO: 1025144 - RNA, 22 nt, Human
auaaggcauauagucacuuuuu

SEQ ID NO: 1025145 - RNA, 22 nt, Human
ugacuagaccuauaucuuuuug

SEQ ID NO: 1025146 - RNA, 22 nt, Human
gaggucaauaauaugugcuuua

SEQ ID NO: 1025147 - RNA, 22 nt, Human
ucuggcuccaggaccgggcaca

SEQ ID NO: 1025148 - RNA, 22 nt, Human
aucaaauauaauaauuuucgcu

SEQ ID NO: 1025149 - RNA, 22 nt, Human
agaugcugucacacacacuguu

SEQ ID NO: 1025150 - RNA, 19 nt, Human
uggggccuccugucccugg

SEQ ID NO: 1025151 - RNA, 22 nt, Human
acagucuugcuguauggucagg

SEQ ID NO: 1025152 - RNA, 22 nt, Human
auguacaaaaugccacugaauu

SEQ ID NO: 1025153 - RNA, 22 nt, Human
cucacugcaaguuccaccuacc

SEQ ID NO: 1025154 - RNA, 22 nt, Human
ccacagcugaccgcaggugagc

SEQ ID NO: 1025155 - RNA, 22 nt, Human
ugucucagaguaucccugaacu

SEQ ID NO: 1025156 - RNA, 22 nt, Human
aaguucuaauuuugcauucagg

SEQ ID NO: 1025157 - RNA, 22 nt, Human
agaccaugggcucugaagagca

SEQ ID NO: 1025158 - RNA, 22 nt, Human
uggcucaguagcagugugguca

SEQ ID NO: 1025159 - RNA, 22 nt, Human
gcugcucuggcucugcaguguc

SEQ ID NO: 1025160 - RNA, 22 nt, Human
aaugcacagcuaaagugguucc

SEQ ID NO: 1025161 - RNA, 22 nt, Human
cucugcuuggaacuggacagaa

SEQ ID NO: 1025162 - RNA, 22 nt, Human
ucgcugugguuucuguacaugg

SEQ ID NO: 1025163 - RNA, 22 nt, Human
cugccuggcuaaacucaagucg

SEQ ID NO: 1025164 - RNA, 23 nt, Human
agaggccaacuucuugccccucc

SEQ ID NO: 1025165 - RNA, 22 nt, Human
uucaaauacauucuuugccacu

SEQ ID NO: 1025166 - RNA, 22 nt, Human
cuagucacucagcacugacaaa

SEQ ID NO: 1025167 - RNA, 22 nt, Human
ccugguguugugaaguagccgu

SEQ ID NO: 1025168 - RNA, 18 nt, Human
aauuuccauaugaauugc

SEQ ID NO: 1025169 - RNA, 22 nt, Human
acuggaagccaguugacaauca

SEQ ID NO: 1025170 - RNA, 22 nt, Human
auccaaagcccuaaguuaacug

SEQ ID NO: 1025171 - RNA, 22 nt, Human
gcugccucugcacagcucacuc

SEQ ID NO: 1025172 - RNA, 22 nt, Human
ucccagagcucuggagguugga

SEQ ID NO: 1025173 - RNA, 22 nt, Human
agucaguguucuccggagaggc

SEQ ID NO: 1025174 - RNA, 22 nt, Human
aggcuccuaucgcuuucagcaa

SEQ ID NO: 1025175 - RNA, 22 nt, Human
gcucccaccuccagccugaguu

SEQ ID NO: 1025176 - RNA, 22 nt, Human
gcccagcuggcuuccagcacau

SEQ ID NO: 1025177 - RNA, 22 nt, Human
uuggcagggccaggcucucucu

SEQ ID NO: 1025178 - RNA, 22 nt, Human
cugaagaggacgcagcagcaag

SEQ ID NO: 1025179 - RNA, 22 nt, Human
caugggaggucugcaaggugcu

SEQ ID NO: 1025180 - RNA, 22 nt, Human
uguguuauugccacugaagacc

SEQ ID NO: 1025181 - RNA, 22 nt, Human
augggaggcagacacuaaguuc

SEQ ID NO: 1025182 - RNA, 22 nt, Human
aauauguucaaaauagaucacu

SEQ ID NO: 1025183 - RNA, 22 nt, Human
cacagaaaaaggcuugaaaauc

SEQ ID NO: 1025184 - RNA, 22 nt, Human
gcugccuucaguucugauucau

SEQ ID NO: 1025185 - RNA, 22 nt, Human
acauuucugcauguaggguaau

SEQ ID NO: 1025186 - RNA, 22 nt, Human
caggcacuggggaugcugggau

SEQ ID NO: 1025187 - RNA, 22 nt, Human
gcaggccugacuguagggggca

SEQ ID NO: 1025188 - RNA, 22 nt, Human
cccucuacagggaagcgcuuuc

SEQ ID NO: 1025189 - RNA, 22 nt, Human
cuggcucauuuuagcaucaggu

SEQ ID NO: 1025190 - RNA, 22 nt, Human
acccagcaaagauaaacuuaug

SEQ ID NO: 1025191 - RNA, 22 nt, Human
ugacacagaaauuaagcuguca

SEQ ID NO: 1025192 - RNA, 23 nt, Human
ccaaagucgaagucuaguccaga

SEQ ID NO: 1025193 - RNA, 21 nt, Human
uuaagagcuuagcaguaggcc

SEQ ID NO: 1025194 - RNA, 22 nt, Human
ccagcuccgggaguugcugcug

SEQ ID NO: 1025195 - RNA, 22 nt, Human
ggcaaaaacagcaaugacuuuu

SEQ ID NO: 1025196 - RNA, 22 nt, Human
aaggcaguaggaucuuccacag

SEQ ID NO: 1025197 - RNA, 23 nt, Human
ugcauuauccucucugaagacca

SEQ ID NO: 1025198 - RNA, 22 nt, Human
agagccacugggagacagagca

SEQ ID NO: 1025199 - RNA, 22 nt, Human
aauugugcuaugauuaugaaag

SEQ ID NO: 1025200 - RNA, 22 nt, Human
uuauuacacugaaagaauugcg

SEQ ID NO: 1025201 - RNA, 22 nt, Human
agagcagagggcucugggacaa

SEQ ID NO: 1025202 - RNA, 22 nt, Human
augcuguggaaguuccugaagc

SEQ ID NO: 1025203 - RNA, 22 nt, Human
gcagcagcccagggcucucaga

SEQ ID NO: 1025204 - RNA, 22 nt, Human
cauugcccaguaggaucaccag

SEQ ID NO: 1025205 - RNA, 22 nt, Human
gccaggcauucuagaaguagug

SEQ ID NO: 1025206 - RNA, 22 nt, Human
uccucacauggugagccacaca

SEQ ID NO: 1025207 - RNA, 22 nt, Human
auuuacagaugaugcuauuuga

SEQ ID NO: 1025208 - RNA, 22 nt, Human
ccagagccagagaggugccugc

SEQ ID NO: 1025209 - RNA, 22 nt, Human
cucucuucccgugaguguugca

SEQ ID NO: 1025210 - RNA, 22 nt, Human
uuguaugaauguauccuaauuu

SEQ ID NO: 1025211 - RNA, 22 nt, Human
auccaguuuaugucauauucuu

SEQ ID NO: 1025212 - RNA, 22 nt, Human
uucuucucggcugucagauagu

SEQ ID NO: 1025213 - RNA, 22 nt, Human
uagcacauaacuuagaauaguu

SEQ ID NO: 1025214 - RNA, 22 nt, Human
cccccaggcucugacacaggag

SEQ ID NO: 1025215 - RNA, 21 nt, Human
gcagccacugccuucaacaau

SEQ ID NO: 1025216 - RNA, 21 nt, Human
ucuuguccuugcucucccacu

SEQ ID NO: 1025217 - RNA, 22 nt, Human
cugcucuggucucuucauguuu

SEQ ID NO: 1025218 - RNA, 22 nt, Human
uaauacuuaccuugcagagucu

SEQ ID NO: 1025219 - RNA, 22 nt, Human
uagcuuuacaaagugcugcacc

SEQ ID NO: 1025220 - RNA, 20 nt, Human
cugaacacagaauaagcaca

SEQ ID NO: 1025221 - RNA, 22 nt, Human
agagucugaggcagcugcagcc

SEQ ID NO: 1025222 - RNA, 22 nt, Human
uuccuguccgcaauggccuggg

SEQ ID NO: 1025223 - RNA, 22 nt, Human
auugacaaauggauguugacau

SEQ ID NO: 1025224 - RNA, 21 nt, Human
ugcuccuuagcugccccugcc

SEQ ID NO: 1025225 - RNA, 22 nt, Human
ccuguucaauauucuuccuugu

SEQ ID NO: 1025226 - RNA, 22 nt, Human
agcaauaugacauugcuacauc

SEQ ID NO: 1025227 - RNA, 22 nt, Human
ugggcagauguggcucuccuug

SEQ ID NO: 1025228 - RNA, 22 nt, Human
ggcuuuauuucacuguaccaua

SEQ ID NO: 1025229 - RNA, 22 nt, Human
aggcugggaaaccugaaguugu

SEQ ID NO: 1025230 - RNA, 22 nt, Human
uuuauuagauuaucaaagaggu

SEQ ID NO: 1025231 - RNA, 22 nt, Human
uacaguuuguuacauuguuagu

SEQ ID NO: 1025232 - RNA, 22 nt, Human
cugccuggucucaggcaugggg

SEQ ID NO: 1025233 - RNA, 19 nt, Human
gaagaagcuugagaaguag

SEQ ID NO: 1025234 - RNA, 22 nt, Human
caguggugaagagcaggggcuc

SEQ ID NO: 1025235 - RNA, 21 nt, Human
ugaggcuguuguaccagggag

SEQ ID NO: 1025236 - RNA, 22 nt, Human
ggcacugacugugcagcgcacc

SEQ ID NO: 1025237 - RNA, 22 nt, Human
gcugccaugccacagcacucac

SEQ ID NO: 1025238 - RNA, 22 nt, Human
ucucccacagucucccauggcu

SEQ ID NO: 1025239 - RNA, 22 nt, Human
agccuccacagaugcaaagggc

SEQ ID NO: 1025240 - RNA, 22 nt, Human
cucaaggacuuauucaugccug

SEQ ID NO: 1025241 - RNA, 22 nt, Human
ggagagaauuccauggacaugu

SEQ ID NO: 1025242 - RNA, 19 nt, Human
uucuccagccugaccugag

SEQ ID NO: 1025243 - RNA, 22 nt, Human
gagcacagaaucuucccaugca

SEQ ID NO: 1025244 - RNA, 22 nt, Human
agcaucuggucaugagugagaa

SEQ ID NO: 1025245 - RNA, 22 nt, Human
ggccagagagccgcuguuagga

SEQ ID NO: 1025246 - RNA, 22 nt, Human
ucuggccagugaaaugcagaau

SEQ ID NO: 1025247 - RNA, 22 nt, Human
guggccucaugucuauaaagag

SEQ ID NO: 1025248 - RNA, 22 nt, Human
uggcucagccuggcccuuucau

SEQ ID NO: 1025249 - RNA, 22 nt, Human
ucucaggguuuguacaagugua

SEQ ID NO: 1025250 - RNA, 22 nt, Human
gcuguccaugucuggccucagu

SEQ ID NO: 1025251 - RNA, 22 nt, Human
uagggcagagcuuguacacgau

SEQ ID NO: 1025252 - RNA, 22 nt, Human
ucuaggagaaccaucagggagg

SEQ ID NO: 1025253 - RNA, 22 nt, Human
agaaguuguagguuugcauauu

SEQ ID NO: 1025254 - RNA, 22 nt, Human
ccugagggaaggaugcuaccca

SEQ ID NO: 1025255 - RNA, 22 nt, Human
agggggugcuacuuccagaguu

SEQ ID NO: 1025256 - RNA, 22 nt, Human
uuuugucuaagaacuuugcaaa

SEQ ID NO: 1025257 - RNA, 23 nt, Human
cuuuuaacuugaucugagaccag

SEQ ID NO: 1025258 - RNA, 22 nt, Human
ucagcuuuuuggauugcccaag

SEQ ID NO: 1025259 - RNA, 22 nt, Human
gccucugcccuccugggacugc

SEQ ID NO: 1025260 - RNA, 22 nt, Human
uuuuucaugagacuagaaguca

SEQ ID NO: 1025261 - RNA, 22 nt, Human
acuugggaugguggccagagcg

SEQ ID NO: 1025262 - RNA, 22 nt, Human
cugagcugggacucaguagcaa

SEQ ID NO: 1025263 - RNA, 21 nt, Human
ccugggagaucagcugccuuc

SEQ ID NO: 1025264 - RNA, 22 nt, Human
cuggcucuaucuccaaggcugg

SEQ ID NO: 1025265 - RNA, 22 nt, Human
agggcugcaucugccuggugaa

SEQ ID NO: 1025266 - RNA, 22 nt, Human
uuauucuuuucuccagaauccc

SEQ ID NO: 1025267 - RNA, 22 nt, Human
uagcuuuaagacauggugaaug

SEQ ID NO: 1025268 - RNA, 22 nt, Human
aacucagucauaaagcgaaugc

SEQ ID NO: 1025269 - RNA, 22 nt, Human
auggcucauuuaucuugcagcc

SEQ ID NO: 1025270 - RNA, 22 nt, Human
augcuuuuccuaaaaugaugcc

SEQ ID NO: 1025271 - RNA, 22 nt, Human
cagaguguaucuguguaagcau

SEQ ID NO: 1025272 - RNA, 22 nt, Human
ggccugcucaguccucuuucuu

SEQ ID NO: 1025273 - RNA, 22 nt, Human
cuggggcuggugaggcaggcuc

SEQ ID NO: 1025274 - RNA, 22 nt, Human
uuuaaauggcauuuucccagau

SEQ ID NO: 1025275 - RNA, 22 nt, Human
auucacagggacaaugggagag

SEQ ID NO: 1025276 - RNA, 22 nt, Human
uuguaugagcuccaggaacuca

SEQ ID NO: 1025277 - RNA, 22 nt, Human
cuggcuguauuaguuugauccu

SEQ ID NO: 1025278 - RNA, 22 nt, Human
caccagggcucugagcucugaa

SEQ ID NO: 1025279 - RNA, 22 nt, Human
ggauccuuaacuaucacaguga

SEQ ID NO: 1025280 - RNA, 22 nt, Human
ucgggguagacgccagcucgga

SEQ ID NO: 1025281 - RNA, 22 nt, Human
gcuggccauucucuuugagaug

SEQ ID NO: 1025282 - RNA, 22 nt, Human
aaauuuucagagcacuagagaa

SEQ ID NO: 1025283 - RNA, 22 nt, Human
cugagcugcggcaggcaccugg

SEQ ID NO: 1025284 - RNA, 22 nt, Human
acagagguguuccagaccuagg

SEQ ID NO: 1025285 - RNA, 22 nt, Human
acccuggggguggccagugcca

SEQ ID NO: 1025286 - RNA, 16 nt, Human
ccacagggcaaggggc

SEQ ID NO: 1025287 - RNA, 22 nt, Human
caaaugcauaguuuauaagaag

SEQ ID NO: 1025288 - RNA, 22 nt, Human
cauuuguacagaacagcuuuau

SEQ ID NO: 1025289 - RNA, 22 nt, Human
uggaggaaaauuacuggggucu

SEQ ID NO: 1025290 - RNA, 20 nt, Human
aaaggaauauaugaaguaua

SEQ ID NO: 1025291 - RNA, 22 nt, Human
acagugucaugucguguucccc

SEQ ID NO: 1025292 - RNA, 22 nt, Human
cuuguucaguccugacuuccug

SEQ ID NO: 1025293 - RNA, 22 nt, Human
cuccacagcucaggcucagagu

SEQ ID NO: 1025294 - RNA, 22 nt, Human
agagacaggguuuugucguguu

SEQ ID NO: 1025295 - RNA, 17 nt, Human
cccagcuggcagugccg

SEQ ID NO: 1025296 - RNA, 22 nt, Human
cagagccagcccacuguucccg

SEQ ID NO: 1025297 - RNA, 22 nt, Human
uacagggguaacaguggggaau

SEQ ID NO: 1025298 - RNA, 22 nt, Human
cuucuucaaccugaaaguuuca

SEQ ID NO: 1025299 - RNA, 22 nt, Human
cauuuauuggcauguaguaggu

SEQ ID NO: 1025300 - RNA, 22 nt, Human
acucugugugaguagagccugu

SEQ ID NO: 1025301 - RNA, 22 nt, Human
uggcugcugagaaggcagcugu

SEQ ID NO: 1025302 - RNA, 22 nt, Human
gcaggcagaucaccugucagga

SEQ ID NO: 1025303 - RNA, 22 nt, Human
gcucugcuggaaguucucugga

SEQ ID NO: 1025304 - RNA, 22 nt, Human
ccucucccacguggcagaggcu

SEQ ID NO: 1025305 - RNA, 22 nt, Human
acauuucugagcagggagcugu

SEQ ID NO: 1025306 - RNA, 22 nt, Human
ggcugccugugcccaggcacac

SEQ ID NO: 1025307 - RNA, 22 nt, Human
cauggccucaaaggacugcaga

SEQ ID NO: 1025308 - RNA, 22 nt, Human
cuucagaagccugcagccuuug

SEQ ID NO: 1025309 - RNA, 22 nt, Human
gcucacugcaaccucugcuucc

SEQ ID NO: 1025310 - RNA, 22 nt, Human
ccacaggggucucuguagcuga

SEQ ID NO: 1025311 - RNA, 22 nt, Human
uaaaugcagcaguuucuguucu

SEQ ID NO: 1025312 - RNA, 22 nt, Human
ugggagcccaagggagcugccg

SEQ ID NO: 1025313 - RNA, 22 nt, Human
aaaaagauguccugaaguuuag

SEQ ID NO: 1025314 - RNA, 21 nt, Human
uuugcauuuuacaugugggga

SEQ ID NO: 1025315 - RNA, 22 nt, Human
cuggggugucucgucugccauu

SEQ ID NO: 1025316 - RNA, 22 nt, Human
agggucaggagacacuggcaac

SEQ ID NO: 1025317 - RNA, 21 nt, Human
cugagggccgcagcugggcuc

SEQ ID NO: 1025318 - RNA, 22 nt, Human
uggcucagcuuuccccaucugg

SEQ ID NO: 1025319 - RNA, 22 nt, Human
uaauuuaauuucaugccagccu

SEQ ID NO: 1025320 - RNA, 22 nt, Human
agcagccagaaauccagaggug

SEQ ID NO: 1025321 - RNA, 20 nt, Human
cuuugccuauucucugccug

SEQ ID NO: 1025322 - RNA, 22 nt, Human
acucugaaugugcauguaaauc

SEQ ID NO: 1025323 - RNA, 22 nt, Human
uuuuccagagcugucucuugca

SEQ ID NO: 1025324 - RNA, 22 nt, Human
aagggaaaucauauggugcagu

SEQ ID NO: 1025325 - RNA, 22 nt, Human
uagaaaucagcaggcauaugua

SEQ ID NO: 1025326 - RNA, 19 nt, Human
cugcucaggucagucuguc

SEQ ID NO: 1025327 - RNA, 22 nt, Human
ggcuggcuugccaagcucaggg

SEQ ID NO: 1025328 - RNA, 22 nt, Human
cauaauuucuguaucagcacca

SEQ ID NO: 1025329 - RNA, 20 nt, Human
caggccucugggggcccugg

SEQ ID NO: 1025330 - RNA, 22 nt, Human
auaauauaauccuacuucccau

SEQ ID NO: 1025331 - RNA, 21 nt, Human
cagcuccacuaaagcagcugu

SEQ ID NO: 1025332 - RNA, 22 nt, Human
gggugacauuucccaaugagcc

SEQ ID NO: 1025333 - RNA, 22 nt, Human
cucuguagaaacagggcagaag

SEQ ID NO: 1025334 - RNA, 22 nt, Human
gggaccugggccagaggacagu

SEQ ID NO: 1025335 - RNA, 22 nt, Human
cucaggaggaggaaguucauug

SEQ ID NO: 1025336 - RNA, 22 nt, Human
ucugagcauugaauuuucuucc

SEQ ID NO: 1025337 - RNA, 22 nt, Human
acagaguauuggaaaggcagug

SEQ ID NO: 1025338 - RNA, 22 nt, Human
uggcagggaauacagauguuua

SEQ ID NO: 1025339 - RNA, 22 nt, Human
ggaccugccagaacucaggcua

SEQ ID NO: 1025340 - RNA, 22 nt, Human
gcuuucuugguucugcaggggc

SEQ ID NO: 1025341 - RNA, 22 nt, Human
agccacagcuccuugguggaga

SEQ ID NO: 1025342 - RNA, 22 nt, Human
cuguggcugcagccuugguccu

SEQ ID NO: 1025343 - RNA, 22 nt, Human
ggggcuggcucacuaagagacu

SEQ ID NO: 1025344 - RNA, 20 nt, Human
auaauuuacccugcaccacu

SEQ ID NO: 1025345 - RNA, 22 nt, Human
uccaguggguugcugagggagg

SEQ ID NO: 1025346 - RNA, 22 nt, Human
ccuguucauuuuuugacucugc

SEQ ID NO: 1025347 - RNA, 22 nt, Human
cuggugucugcucccucacagc

SEQ ID NO: 1025348 - RNA, 22 nt, Human
agggcaaguugagugugcgugg

SEQ ID NO: 1025349 - RNA, 22 nt, Human
ugcugagguuucgucugcuugc

SEQ ID NO: 1025350 - RNA, 22 nt, Human
cauucauuagaauagauaugua

SEQ ID NO: 1025351 - RNA, 22 nt, Human
gcagcuccuucaaucucaccau

SEQ ID NO: 1025352 - RNA, 22 nt, Human
cugaaauuccauuucagccaca

SEQ ID NO: 1025353 - RNA, 22 nt, Human
uuagugucuucuucauccucug

SEQ ID NO: 1025354 - RNA, 22 nt, Human
ucauuuaauaauuuuugaguag

SEQ ID NO: 1025355 - RNA, 22 nt, Human
ucuuagaaguuuauggcacgga

SEQ ID NO: 1025356 - RNA, 22 nt, Human
uaggaaaagucuagauugauga

SEQ ID NO: 1025357 - RNA, 22 nt, Human
caaggccauauugccuguaugu

SEQ ID NO: 1025358 - RNA, 17 nt, Human
agagagagcaugccacc

SEQ ID NO: 1025359 - RNA, 22 nt, Human
auuugcauaauagugauuugua

SEQ ID NO: 1025360 - RNA, 22 nt, Human
acugucacuccaacugagucgu

SEQ ID NO: 1025361 - RNA, 22 nt, Human
cugcagaguggagccucggcug

SEQ ID NO: 1025362 - RNA, 22 nt, Human
cauuuuaaaugauuuaagccaa

SEQ ID NO: 1025363 - RNA, 20 nt, Human
guccugggagccacagcaca

SEQ ID NO: 1025364 - RNA, 22 nt, Human
cagugguugguagauacuugag

SEQ ID NO: 1025365 - RNA, 22 nt, Human
aaaguuuuagaacuaggaagca

SEQ ID NO: 1025366 - RNA, 22 nt, Human
uugcauaaagauuuuauugcau

SEQ ID NO: 1025367 - RNA, 22 nt, Human
ggaggcugagaaguccaagauc

SEQ ID NO: 1025368 - RNA, 23 nt, Human
ugcucugugaauaguuggugacu

SEQ ID NO: 1025369 - RNA, 22 nt, Human
augcauugucugguuucauuuu

SEQ ID NO: 1025370 - RNA, 22 nt, Human
cuguaugaacccauauacuuau

SEQ ID NO: 1025371 - RNA, 23 nt, Human
aaauucaguccuucaacucugag

SEQ ID NO: 1025372 - RNA, 22 nt, Human
uaguuauuauuguuacuaucag

SEQ ID NO: 1025373 - RNA, 22 nt, Human
uaacaguguggacuugagaucu

SEQ ID NO: 1025374 - RNA, 22 nt, Human
guccaugacugugacucacaug

SEQ ID NO: 1025375 - RNA, 22 nt, Human
ugcauauuuuauaaagauggaa

SEQ ID NO: 1025376 - RNA, 22 nt, Human
uugcacuaggaaaaggcagcca

SEQ ID NO: 1025377 - RNA, 22 nt, Human
uucuucuuucccccugugguac

SEQ ID NO: 1025378 - RNA, 22 nt, Human
cugggagcgcagcaggcacaac

SEQ ID NO: 1025379 - RNA, 22 nt, Human
gccuggccgcuccgagcuccgc

SEQ ID NO: 1025380 - RNA, 18 nt, Human
cagcugccagcucaugga

SEQ ID NO: 1025381 - RNA, 22 nt, Human
agaauucuccuucagggcagga

SEQ ID NO: 1025382 - RNA, 22 nt, Human
gcuucccacagcuggacugggg

SEQ ID NO: 1025383 - RNA, 22 nt, Human
ccaggugggaggaaagcagaga

SEQ ID NO: 1025384 - RNA, 22 nt, Human
ucaaguguaguggugucagguc

SEQ ID NO: 1025385 - RNA, 22 nt, Human
gugcauauaugcacauaugugu

SEQ ID NO: 1025386 - RNA, 22 nt, Human
aggauccuuuggccacuucuua

SEQ ID NO: 1025387 - RNA, 17 nt, Human
agccugcugaucucaca

SEQ ID NO: 1025388 - RNA, 23 nt, Human
auaauaacgucugucuugucucu

SEQ ID NO: 1025389 - RNA, 18 nt, Human
caaagcucacguuccauc

SEQ ID NO: 1025390 - RNA, 22 nt, Human
caguguggugugcacagcuuag

SEQ ID NO: 1025391 - RNA, 22 nt, Human
ugcccugugugugcaagcacug

SEQ ID NO: 1025392 - RNA, 22 nt, Human
ucacugcucuccaauguggagu

SEQ ID NO: 1025393 - RNA, 19 nt, Human
cuuuucaucaacagccaau

SEQ ID NO: 1025394 - RNA, 22 nt, Human
uuguaacagcuguuuauauagu

SEQ ID NO: 1025395 - RNA, 22 nt, Human
caagagcauuuaguuagcuggu

SEQ ID NO: 1025396 - RNA, 22 nt, Human
ccucuguccuggggaguggagc

SEQ ID NO: 1025397 - RNA, 23 nt, Human
uggcuggcagaaacugaagcaug

SEQ ID NO: 1025398 - RNA, 22 nt, Human
ugggcccugacuucaagcaucc

SEQ ID NO: 1025399 - RNA, 22 nt, Human
agaaagcacucugucuuuuacc

SEQ ID NO: 1025400 - RNA, 22 nt, Human
ugcagaagaccuuccagggcug

SEQ ID NO: 1025401 - RNA, 22 nt, Human
ccugagaccaaguugcagccau

SEQ ID NO: 1025402 - RNA, 22 nt, Human
cacauguuuggcaugucaccaa

SEQ ID NO: 1025403 - RNA, 22 nt, Human
cccaggaggucgaagcugcagu

SEQ ID NO: 1025404 - RNA, 22 nt, Human
cccagaaggucgaggcugcagu

SEQ ID NO: 1025405 - RNA, 22 nt, Human
uaaggcacacaguugcugcaug

SEQ ID NO: 1025406 - RNA, 22 nt, Human
ugacagaaugugacucucagau

SEQ ID NO: 1025407 - RNA, 22 nt, Human
agccaagcaccacuggcacucg

SEQ ID NO: 1025408 - RNA, 22 nt, Human
acaccagggccuagccagggcg

SEQ ID NO: 1025409 - RNA, 22 nt, Human
ucuuuccauggccacacagucu

SEQ ID NO: 1025410 - RNA, 22 nt, Human
uuuguaaaggccugaauuucag

SEQ ID NO: 1025411 - RNA, 22 nt, Human
uccagucaagcuugagaauuuc

SEQ ID NO: 1025412 - RNA, 22 nt, Human
guguggcugugggagauguuca

SEQ ID NO: 1025413 - RNA, 22 nt, Human
aguuuuucugggaggcacugcu

SEQ ID NO: 1025414 - RNA, 22 nt, Human
ccugccuguaagauggguacaa

SEQ ID NO: 1025415 - RNA, 22 nt, Human
cauggcagagccugcagguggg

SEQ ID NO: 1025416 - RNA, 20 nt, Human
cagucccaauccagggccag

SEQ ID NO: 1025417 - RNA, 20 nt, Human
ccaggcacugucccaugcag

SEQ ID NO: 1025418 - RNA, 17 nt, Human
guuugcaugguguuaac

SEQ ID NO: 1025419 - RNA, 22 nt, Human
ccugucugaaggcagggggaug

SEQ ID NO: 1025420 - RNA, 22 nt, Human
ggcugcuggaagacugaacaag

SEQ ID NO: 1025421 - RNA, 22 nt, Human
uucccaguuagucauuuuuaca

SEQ ID NO: 1025422 - RNA, 22 nt, Human
uucagcagugcagacacccagu

SEQ ID NO: 1025423 - RNA, 22 nt, Human
gguaacaguauguagaguaaga

SEQ ID NO: 1025424 - RNA, 20 nt, Human
guguuucaugugauacaaug

SEQ ID NO: 1025425 - RNA, 22 nt, Human
ugucccagcacuuugggagucu

SEQ ID NO: 1025426 - RNA, 22 nt, Human
gccuggagaauuaaaaggaagg

SEQ ID NO: 1025427 - RNA, 22 nt, Human
cugccuggaccggcagcccucc

SEQ ID NO: 1025428 - RNA, 23 nt, Human
agcuuugugaaagcagacauggg

SEQ ID NO: 1025429 - RNA, 22 nt, Human
agucccuguacuuuccacugcc

SEQ ID NO: 1025430 - RNA, 22 nt, Human
agcucuggaauaaugaugugau

SEQ ID NO: 1025431 - RNA, 22 nt, Human
uccucacaagcaagcacaggua

SEQ ID NO: 1025432 - RNA, 22 nt, Human
ccucacugcuauguguuugcuc

SEQ ID NO: 1025433 - RNA, 22 nt, Human
uucagagagaaaccagugggaa

SEQ ID NO: 1025434 - RNA, 22 nt, Human
cagagccagcuguccuuggcau

SEQ ID NO: 1025435 - RNA, 22 nt, Human
uccugggcugcagggaagagca

SEQ ID NO: 1025436 - RNA, 22 nt, Human
agcagaaccacagcacuguuga

SEQ ID NO: 1025437 - RNA, 22 nt, Human
gcucucuugguggcuguccugg

SEQ ID NO: 1025438 - RNA, 22 nt, Human
cugggaggcacuauucaggagg

SEQ ID NO: 1025439 - RNA, 22 nt, Human
gagagcugcagccgagaggggg

SEQ ID NO: 1025440 - RNA, 22 nt, Human
uaagauguuuugguuugauaag

SEQ ID NO: 1025441 - RNA, 22 nt, Human
ggcaggagaaaggucucuucuu

SEQ ID NO: 1025442 - RNA, 19 nt, Human
ugugaaagcuaguguucuu

SEQ ID NO: 1025443 - RNA, 22 nt, Human
ugcugugagguugagaaggaag

SEQ ID NO: 1025444 - RNA, 22 nt, Human
aggcccugggcaguucuguagc

SEQ ID NO: 1025445 - RNA, 22 nt, Human
uggggacaggagacuuacagcu

SEQ ID NO: 1025446 - RNA, 22 nt, Human
acagaacuuccugcuggagugg

SEQ ID NO: 1025447 - RNA, 23 nt, Human
uagagcagggaaaucugucagag

SEQ ID NO: 1025448 - RNA, 22 nt, Human
gcaagauguuaacauagggaga

SEQ ID NO: 1025449 - RNA, 22 nt, Human
accuugaugccuuuccaagaug

SEQ ID NO: 1025450 - RNA, 22 nt, Human
accagagcagacuacuggaggu

SEQ ID NO: 1025451 - RNA, 22 nt, Human
cugggcugcaguuccugguccu

SEQ ID NO: 1025452 - RNA, 22 nt, Human
cuucuucaauagcaagcgcaua

SEQ ID NO: 1025453 - RNA, 22 nt, Human
gucuggagccacccuaagcauu

SEQ ID NO: 1025454 - RNA, 22 nt, Human
uggugagcgaugcugcauguuc

SEQ ID NO: 1025455 - RNA, 22 nt, Human
cagcccugcacgcugccuccgc

SEQ ID NO: 1025456 - RNA, 17 nt, Human
ccucacagggaccagac

SEQ ID NO: 1025457 - RNA, 22 nt, Human
aaaaucuaaguagcgaguaagg

SEQ ID NO: 1025458 - RNA, 22 nt, Human
gcagcuggcucagagagguggg

SEQ ID NO: 1025459 - RNA, 22 nt, Human
uguaugaaugggaaaaggaaac

SEQ ID NO: 1025460 - RNA, 23 nt, Human
aagcugccagucugaagccuggg

SEQ ID NO: 1025461 - RNA, 22 nt, Human
ugcuuugggucucucuaguuuc

SEQ ID NO: 1025462 - RNA, 22 nt, Human
caguguggcugagacagaggcu

SEQ ID NO: 1025463 - RNA, 22 nt, Human
gugucaugggagucagaaguga

SEQ ID NO: 1025464 - RNA, 17 nt, Human
cagugaggccuuuccuc

SEQ ID NO: 1025465 - RNA, 20 nt, Human
uugauaggcagcuugucagg

SEQ ID NO: 1025466 - RNA, 22 nt, Human
agaaggccuaacuugggggcaa

SEQ ID NO: 1025467 - RNA, 22 nt, Human
aggucauuaaaguuaaaugagg

SEQ ID NO: 1025468 - RNA, 21 nt, Human
ccauaccuaccucaccugguu

SEQ ID NO: 1025469 - RNA, 22 nt, Human
agagggcuuugauucucaguuc

SEQ ID NO: 1025470 - RNA, 22 nt, Human
uucagagcaucucuaaagccag

SEQ ID NO: 1025471 - RNA, 22 nt, Human
cucucugaggcaggccuguggg

SEQ ID NO: 1025472 - RNA, 22 nt, Human
guggauggauugaggcaguggg

SEQ ID NO: 1025473 - RNA, 22 nt, Human
ucaaaugcuucuacuccuaaga

SEQ ID NO: 1025474 - RNA, 22 nt, Human
gagccaggggucagcuccgagg

SEQ ID NO: 1025475 - RNA, 22 nt, Human
aagagcuggauugugcugcaga

SEQ ID NO: 1025476 - RNA, 19 nt, Human
ggccaggcugacugugguc

SEQ ID NO: 1025477 - RNA, 19 nt, Human
cucuggagcagacacugga

SEQ ID NO: 1025478 - RNA, 19 nt, Human
gcugucugaugcugagguc

SEQ ID NO: 1025479 - RNA, 22 nt, Human
uuagccauggacugaauugacu

SEQ ID NO: 1025480 - RNA, 22 nt, Human
aggugccagcucucaggcagga

SEQ ID NO: 1025481 - RNA, 22 nt, Human
acuguguccucauguggcagaa

SEQ ID NO: 1025482 - RNA, 22 nt, Human
aaaugcauaucaaagacuugaa

SEQ ID NO: 1025483 - RNA, 22 nt, Human
uggccugacugucaggcuguau

SEQ ID NO: 1025484 - RNA, 22 nt, Human
gaggcagcgggucaggaccgug

SEQ ID NO: 1025485 - RNA, 22 nt, Human
cucauuaaaggaaaucaccugc

SEQ ID NO: 1025486 - RNA, 22 nt, Human
cagcccucagguccucagcagc

SEQ ID NO: 1025487 - RNA, 22 nt, Human
gagccaccuucaacucaggaau

SEQ ID NO: 1025488 - RNA, 22 nt, Human
aacuuucuuggaugucucaaca

SEQ ID NO: 1025489 - RNA, 22 nt, Human
cuucuucaguugcauguauugg

SEQ ID NO: 1025490 - RNA, 22 nt, Human
ucacaugcuugaggaaagaaaa

SEQ ID NO: 1025491 - RNA, 22 nt, Human
uuccucugaaauggcuuggaaa

SEQ ID NO: 1025492 - RNA, 22 nt, Human
uuccaggaagcaguuagcagcc

SEQ ID NO: 1025493 - RNA, 22 nt, Human
cagauuuagaguggggcuugga

SEQ ID NO: 1025494 - RNA, 22 nt, Human
ugcucccaaacgaccuacugug

SEQ ID NO: 1025495 - RNA, 22 nt, Human
uucauuccuucuguaccuugcc

SEQ ID NO: 1025496 - RNA, 22 nt, Human
acaggcaggcgggacagcccga

SEQ ID NO: 1025497 - RNA, 22 nt, Human
ucuauuuuauacucaaaucuuc

SEQ ID NO: 1025498 - RNA, 22 nt, Human
agaggccaguggcugugcuguc

SEQ ID NO: 1025499 - RNA, 22 nt, Human
gugcaugucggggugcauguca

SEQ ID NO: 1025500 - RNA, 19 nt, Human
aagaagcaauaagcuguga

SEQ ID NO: 1025501 - RNA, 22 nt, Human
gccucugcaacuccgccuuggu

SEQ ID NO: 1025502 - RNA, 22 nt, Human
ggcagucagugugguucauaaa

SEQ ID NO: 1025503 - RNA, 22 nt, Human
ugauuuccuaggucuggagaag

SEQ ID NO: 1025504 - RNA, 22 nt, Human
uuuaagaaguuauguuauaaau

SEQ ID NO: 1025505 - RNA, 22 nt, Human
gcucuguccagcgugcacagaa

SEQ ID NO: 1025506 - RNA, 22 nt, Human
auccacagucuuagccaucaaa

SEQ ID NO: 1025507 - RNA, 22 nt, Human
auugcagcuggucaggguaauu

SEQ ID NO: 1025508 - RNA, 22 nt, Human
accagagaaaacacagcaggcu

SEQ ID NO: 1025509 - RNA, 22 nt, Human
agcaggguauguuagagcugua

SEQ ID NO: 1025510 - RNA, 22 nt, Human
uuuagggaugucagaacaggga

SEQ ID NO: 1025511 - RNA, 22 nt, Human
ucagcuuugcaaguuagaaaau

SEQ ID NO: 1025512 - RNA, 22 nt, Human
aaguucaaggcucuagaguucc

SEQ ID NO: 1025513 - RNA, 18 nt, Human
caggagcaggaguugaac

SEQ ID NO: 1025514 - RNA, 22 nt, Human
caucugcuguuccuuggacuca

SEQ ID NO: 1025515 - RNA, 22 nt, Human
auaucaaacgaaguuauuuuaa

SEQ ID NO: 1025516 - RNA, 22 nt, Human
aggccuguuccaggccccuuuu

SEQ ID NO: 1025517 - RNA, 22 nt, Human
gcuucucucucagacugcaagc

SEQ ID NO: 1025518 - RNA, 22 nt, Human
guaacagaaagucaugcucauu

SEQ ID NO: 1025519 - RNA, 22 nt, Human
uaauuuuaacugugcuguuugg

SEQ ID NO: 1025520 - RNA, 20 nt, Human
gcaaggcacagugaggaggg

SEQ ID NO: 1025521 - RNA, 22 nt, Human
ugcucugguaacucacuuccau

SEQ ID NO: 1025522 - RNA, 22 nt, Human
uucucagguagugcugaugcug

SEQ ID NO: 1025523 - RNA, 20 nt, Human
uugcauuggaugugcaggug

SEQ ID NO: 1025524 - RNA, 22 nt, Human
gcuggccauagaagccaaagag

SEQ ID NO: 1025525 - RNA, 22 nt, Human
agggcuccuaugaugcucugcc

SEQ ID NO: 1025526 - RNA, 22 nt, Human
ggccugcucuggcuguggucag

SEQ ID NO: 1025527 - RNA, 22 nt, Human
cuggccaguuguccuggcuugg

SEQ ID NO: 1025528 - RNA, 20 nt, Human
uccugcaguuccuaggaggg

SEQ ID NO: 1025529 - RNA, 22 nt, Human
uuauuauagauuaugcaagauu

SEQ ID NO: 1025530 - RNA, 22 nt, Human
uuugcaguuucauugcugaaau

SEQ ID NO: 1025531 - RNA, 22 nt, Human
gcaggggcaggagaucucaggc

SEQ ID NO: 1025532 - RNA, 21 nt, Human
augugaaaccuuccacgcuga

SEQ ID NO: 1025533 - RNA, 22 nt, Human
gagccugaauuugaccugcuua

SEQ ID NO: 1025534 - RNA, 22 nt, Human
ucucagagaacaguuggugcuu

SEQ ID NO: 1025535 - RNA, 22 nt, Human
cuggugguucaggagaauggcu

SEQ ID NO: 1025536 - RNA, 23 nt, Human
uaauucacauauacauugcuuca

SEQ ID NO: 1025537 - RNA, 17 nt, Human
caggcuccuuccagauu

SEQ ID NO: 1025538 - RNA, 22 nt, Human
guggccuggaaaggcuggucug

SEQ ID NO: 1025539 - RNA, 19 nt, Human
uccaggaggcugccauuga

SEQ ID NO: 1025540 - RNA, 22 nt, Human
ggugcagugguguggcaaaggg

SEQ ID NO: 1025541 - RNA, 22 nt, Human
caagaauuguacaaacugggug

SEQ ID NO: 1025542 - RNA, 18 nt, Human
acaggccucaguccugca

SEQ ID NO: 1025543 - RNA, 21 nt, Human
gaacauuuggguuguuucuac

SEQ ID NO: 1025544 - RNA, 22 nt, Human
gagccugccucuagucucuaga

SEQ ID NO: 1025545 - RNA, 22 nt, Human
aagauucuacaguagguacauu

SEQ ID NO: 1025546 - RNA, 22 nt, Human
gaagagcugcucagaacaugau

SEQ ID NO: 1025547 - RNA, 22 nt, Human
gaaagagaaccugggccuagau

SEQ ID NO: 1025548 - RNA, 20 nt, Human
cuggcaggagcgagucuacc

SEQ ID NO: 1025549 - RNA, 22 nt, Human
gucugucauacggcuuauguaa

SEQ ID NO: 1025550 - RNA, 22 nt, Human
ggcgaggccgggacaggcugga

SEQ ID NO: 1025551 - RNA, 22 nt, Human
uugcucaggcuggugugcagug

SEQ ID NO: 1025552 - RNA, 22 nt, Human
agagccaggaugucuucugggg

SEQ ID NO: 1025553 - RNA, 17 nt, Human
aggcauggucuggggug

SEQ ID NO: 1025554 - RNA, 22 nt, Human
gcauugucaaaagugguaugac

SEQ ID NO: 1025555 - RNA, 22 nt, Human
agaaaugugagccccuuaucaa

SEQ ID NO: 1025556 - RNA, 22 nt, Human
acagggcaccugagguaggaag

SEQ ID NO: 1025557 - RNA, 22 nt, Human
uucaggauaguggugaguggca

SEQ ID NO: 1025558 - RNA, 22 nt, Human
caggggccaggcugucugcugu

SEQ ID NO: 1025559 - RNA, 22 nt, Human
gggaguggagagcaauggauga

SEQ ID NO: 1025560 - RNA, 22 nt, Human
augcugugucaccuuaggauuu

SEQ ID NO: 1025561 - RNA, 22 nt, Human
guuauguaugggggccuuauga

SEQ ID NO: 1025562 - RNA, 22 nt, Human
cugcugcauuacucuucucaag

SEQ ID NO: 1025563 - RNA, 22 nt, Human
aaguucaagucugcaucuuuuu

SEQ ID NO: 1025564 - RNA, 22 nt, Human
agggcccuccccgcucagggca

SEQ ID NO: 1025565 - RNA, 18 nt, Human
uggagcaggaagccuggc

SEQ ID NO: 1025566 - RNA, 22 nt, Human
cugugugcugaaaugcagugag

SEQ ID NO: 1025567 - RNA, 22 nt, Human
uggccugccugggagcagcagg

SEQ ID NO: 1025568 - RNA, 22 nt, Human
gcagagccccauugcuggcggg

SEQ ID NO: 1025569 - RNA, 23 nt, Human
acagugugguggacaaggagcag

SEQ ID NO: 1025570 - RNA, 22 nt, Human
ccagggcagccaacccagaugc

SEQ ID NO: 1025571 - RNA, 22 nt, Human
ggcucaagcagucugccugccu

SEQ ID NO: 1025572 - RNA, 22 nt, Human
acuucaugcagaagagagcugu

SEQ ID NO: 1025573 - RNA, 19 nt, Human
gcagcugugggaagagcca

SEQ ID NO: 1025574 - RNA, 22 nt, Human
auauaguuggguuucauucuac

SEQ ID NO: 1025575 - RNA, 22 nt, Human
uguguuuuacaaauucucuuaa

SEQ ID NO: 1025576 - RNA, 22 nt, Human
uuuucauuuuuguagaugcaag

SEQ ID NO: 1025577 - RNA, 22 nt, Human
gacaucauagggugggaggaaa

SEQ ID NO: 1025578 - RNA, 22 nt, Human
aauacaaucaaauucacuagca

SEQ ID NO: 1025579 - RNA, 19 nt, Human
ggaugagggucaggcauag

SEQ ID NO: 1025580 - RNA, 23 nt, Human
ucagagagcuguugagagcugcc

SEQ ID NO: 1025581 - RNA, 22 nt, Human
agagccugcuguguaagucaca

SEQ ID NO: 1025582 - RNA, 22 nt, Human
uggcagcuugaaugcagucuuu

SEQ ID NO: 1025583 - RNA, 22 nt, Human
gggcugggaauggcuaaguaug

SEQ ID NO: 1025584 - RNA, 22 nt, Human
aagagcuggaugaagaaaucaa

SEQ ID NO: 1025585 - RNA, 22 nt, Human
aggggugauuugggacaggaca

SEQ ID NO: 1025586 - RNA, 22 nt, Human
ccagggcuggguuugucggugu

SEQ ID NO: 1025587 - RNA, 22 nt, Human
uuguaugaucaaaagaaaugua

SEQ ID NO: 1025588 - RNA, 22 nt, Human
caaauccagaucccagucguag

SEQ ID NO: 1025589 - RNA, 22 nt, Human
cagcaggggaacugugggccag

SEQ ID NO: 1025590 - RNA, 22 nt, Human
caaggagaaaacggcuucugaa

SEQ ID NO: 1025591 - RNA, 22 nt, Human
aagggcagagggaaucccacau

SEQ ID NO: 1025592 - RNA, 22 nt, Human
gcuguucagaugcgauucagga

SEQ ID NO: 1025593 - RNA, 22 nt, Human
agugauuugggugucagaaagu

SEQ ID NO: 1025594 - RNA, 22 nt, Human
uggagcugacucacaccagcua

SEQ ID NO: 1025595 - RNA, 22 nt, Human
ccagaggcuggggaaggauaca

SEQ ID NO: 1025596 - RNA, 22 nt, Human
gugcaagguacauccuugaugu

SEQ ID NO: 1025597 - RNA, 23 nt, Human
uuucuucagaagccuugcgaggc

SEQ ID NO: 1025598 - RNA, 22 nt, Human
uaauaaaugaaagugcuggcau

SEQ ID NO: 1025599 - RNA, 22 nt, Human
uuaaauuauuucuagugaggug

SEQ ID NO: 1025600 - RNA, 22 nt, Human
ucugucaucucuaaaauagaaa

SEQ ID NO: 1025601 - RNA, 22 nt, Human
cuucucagaggccagaagcuau

SEQ ID NO: 1025602 - RNA, 22 nt, Human
ugucucaguauacgaaacacuu

SEQ ID NO: 1025603 - RNA, 22 nt, Human
ccagggcugagcugugaccaug

SEQ ID NO: 1025604 - RNA, 22 nt, Human
ugucucagggcagcagcagggg

SEQ ID NO: 1025605 - RNA, 22 nt, Human
aauucauccaugaacaauucca

SEQ ID NO: 1025606 - RNA, 22 nt, Human
cuuguucaguugccucuccugc

SEQ ID NO: 1025607 - RNA, 18 nt, Human
aucuuuccauagcauguu

SEQ ID NO: 1025608 - RNA, 22 nt, Human
cagaggcagaggucaucucugg

SEQ ID NO: 1025609 - RNA, 22 nt, Human
uccauuuuguagguaugcuaca

SEQ ID NO: 1025610 - RNA, 22 nt, Human
ugggccagcaauugcugcucag

SEQ ID NO: 1025611 - RNA, 22 nt, Human
gggcaagcucuucagaagcucu

SEQ ID NO: 1025612 - RNA, 22 nt, Human
acaguguguuggaggagacugu

SEQ ID NO: 1025613 - RNA, 22 nt, Human
ggcagaggaaggaugaauucac

SEQ ID NO: 1025614 - RNA, 22 nt, Human
aacaaccaaaaagaugaaugua

SEQ ID NO: 1025615 - RNA, 21 nt, Human
gauugaaaccauggcagugag

SEQ ID NO: 1025616 - RNA, 23 nt, Human
uccuccuuuugcuugugcuuccc

SEQ ID NO: 1025617 - RNA, 22 nt, Human
ccagugcaggugagcaccaggu

SEQ ID NO: 1025618 - RNA, 22 nt, Human
acauuucuccuugcaggaguca

SEQ ID NO: 1025619 - RNA, 23 nt, Human
ccagugauugccuggaaggaggu

SEQ ID NO: 1025620 - RNA, 22 nt, Human
gugcugugucuaucaggaauaa

SEQ ID NO: 1025621 - RNA, 22 nt, Human
ccucucuguguggccucuccau

SEQ ID NO: 1025622 - RNA, 22 nt, Human
uggccugccucccggcuucuuu

SEQ ID NO: 1025623 - RNA, 22 nt, Human
agccuuguuggucugaguuugg

SEQ ID NO: 1025624 - RNA, 22 nt, Human
cugggagcuggaaugggagaag

SEQ ID NO: 1025625 - RNA, 22 nt, Human
uacauuguucaugcaugagaaa

SEQ ID NO: 1025626 - RNA, 22 nt, Human
aagggcagcuuaaauugguagc

SEQ ID NO: 1025627 - RNA, 22 nt, Human
uaugcacaauaugaucuauuug

SEQ ID NO: 1025628 - RNA, 22 nt, Human
uuugaaaauuuaagugcuacac

SEQ ID NO: 1025629 - RNA, 22 nt, Human
ccacuguuuuucaguuaacuuu

SEQ ID NO: 1025630 - RNA, 22 nt, Human
gaaauauucuugucuuguuuuc

SEQ ID NO: 1025631 - RNA, 22 nt, Human
cucucuggcuuggcacggagau

SEQ ID NO: 1025632 - RNA, 22 nt, Human
aaaccuauuggcaagaauaaua

SEQ ID NO: 1025633 - RNA, 22 nt, Human
uguccucaaggagcuucagucu

SEQ ID NO: 1025634 - RNA, 22 nt, Human
ugugucagaaggcaauggggau

SEQ ID NO: 1025635 - RNA, 20 nt, Human
cugagcugagcuccaugggu

SEQ ID NO: 1025636 - RNA, 22 nt, Human
cugcugugagugguucuugccu

SEQ ID NO: 1025637 - RNA, 22 nt, Human
ccccagcugcauacuugccaag

SEQ ID NO: 1025638 - RNA, 19 nt, Human
ugaaauggcaguugcuaaa

SEQ ID NO: 1025639 - RNA, 21 nt, Human
uaaaugugagcagggcugggc

SEQ ID NO: 1025640 - RNA, 22 nt, Human
gcugucagaaggugaaggguaa

SEQ ID NO: 1025641 - RNA, 22 nt, Human
uggaaauauacaaugugucucu

SEQ ID NO: 1025642 - RNA, 22 nt, Human
aggcucuggaguguggugcugg

SEQ ID NO: 1025643 - RNA, 22 nt, Human
agauguguuucuaguuccugca

SEQ ID NO: 1025644 - RNA, 22 nt, Human
caaggccacuccagagacuggu

SEQ ID NO: 1025645 - RNA, 22 nt, Human
uuugacauugccaauuugcuca

SEQ ID NO: 1025646 - RNA, 22 nt, Human
ggaggccaggguggguggaucg

SEQ ID NO: 1025647 - RNA, 22 nt, Human
ucuucauuuuauagcaucugug

SEQ ID NO: 1025648 - RNA, 20 nt, Human
cauauauaccuagaagugga

SEQ ID NO: 1025649 - RNA, 22 nt, Human
agugaaaucagguuuugacugc

SEQ ID NO: 1025650 - RNA, 22 nt, Human
accaaggaagaaucuauuugag

SEQ ID NO: 1025651 - RNA, 23 nt, Human
cagcuuucagggcuuuagggaag

SEQ ID NO: 1025652 - RNA, 22 nt, Human
cagcugcccugccuugcccuua

SEQ ID NO: 1025653 - RNA, 22 nt, Human
aaauauguauggaguucaugaa

SEQ ID NO: 1025654 - RNA, 22 nt, Human
ucugccuggauuccauucucca

SEQ ID NO: 1025655 - RNA, 22 nt, Human
cuauuagguaugugguugcuau

SEQ ID NO: 1025656 - RNA, 22 nt, Human
cagcuuauucaguaagcacaua

SEQ ID NO: 1025657 - RNA, 22 nt, Human
uggcugaauaaaauaugguguu

SEQ ID NO: 1025658 - RNA, 22 nt, Human
gggggcucugacucccucagcu

SEQ ID NO: 1025659 - RNA, 22 nt, Human
auuugaagucuucaugauuucu

SEQ ID NO: 1025660 - RNA, 22 nt, Human
ugcugguggagaaaguggaggu

SEQ ID NO: 1025661 - RNA, 22 nt, Human
agcuggagcuucaagcagguaa

SEQ ID NO: 1025662 - RNA, 22 nt, Human
ucuccucugcgcggcagugccc

SEQ ID NO: 1025663 - RNA, 22 nt, Human
gucugucucucuccagagugca

SEQ ID NO: 1025664 - RNA, 22 nt, Human
aaaugcaucagcucauaagaga

SEQ ID NO: 1025665 - RNA, 22 nt, Human
gcugucccgaaccccugguaau

SEQ ID NO: 1025666 - RNA, 22 nt, Human
ggcucugcccagguggacagca

SEQ ID NO: 1025667 - RNA, 22 nt, Human
aggggcugggacagagccaagc

SEQ ID NO: 1025668 - RNA, 23 nt, Human
gucagggcuggggucagagugac

SEQ ID NO: 1025669 - RNA, 22 nt, Human
uuugaaagcuacuuucggguca

SEQ ID NO: 1025670 - RNA, 22 nt, Human
cugggagcuuguuaggaaugca

SEQ ID NO: 1025671 - RNA, 22 nt, Human
ugggcucugcugcguaccaguu

SEQ ID NO: 1025672 - RNA, 22 nt, Human
aaucacuuuucucuaauguagc

SEQ ID NO: 1025673 - RNA, 22 nt, Human
ugcaaacuauugguagagaugg

SEQ ID NO: 1025674 - RNA, 22 nt, Human
cugucauuuaagacauucugga

SEQ ID NO: 1025675 - RNA, 22 nt, Human
aagcagaugggacuccaaggca

SEQ ID NO: 1025676 - RNA, 22 nt, Human
cugggcugucccaaccccaucc

SEQ ID NO: 1025677 - RNA, 22 nt, Human
aggucauugaaguuauuuucuu

SEQ ID NO: 1025678 - RNA, 22 nt, Human
gucugucucccugugacugaga

SEQ ID NO: 1025679 - RNA, 22 nt, Human
ccagaagggcuauugcagugac

SEQ ID NO: 1025680 - RNA, 22 nt, Human
agacucaagcagauaggaauua

SEQ ID NO: 1025681 - RNA, 22 nt, Human
gcugagagaaaagugagguucu

SEQ ID NO: 1025682 - RNA, 22 nt, Human
uuugcagucuggccugcuuugg

SEQ ID NO: 1025683 - RNA, 22 nt, Human
uacaugcucaguaacuuucagu

SEQ ID NO: 1025684 - RNA, 22 nt, Human
ccugggagagccaucuguggcc

SEQ ID NO: 1025685 - RNA, 22 nt, Human
ucucacugcaaauauuauguau

SEQ ID NO: 1025686 - RNA, 22 nt, Human
gccuucaguaguauccucauga

SEQ ID NO: 1025687 - RNA, 22 nt, Human
gagcucauccccaugguccguc

SEQ ID NO: 1025688 - RNA, 22 nt, Human
ggcugcagcagagggacucacg

SEQ ID NO: 1025689 - RNA, 22 nt, Human
cuaaaugcccuacaaugacugg

SEQ ID NO: 1025690 - RNA, 19 nt, Human
auuuacugccuaaaaucuc

SEQ ID NO: 1025691 - RNA, 22 nt, Human
uugaaucuggguacuuguaaua

SEQ ID NO: 1025692 - RNA, 22 nt, Human
aaugcacauauauguguauaca

SEQ ID NO: 1025693 - RNA, 22 nt, Human
ccuuugggugaauuccucucuu

SEQ ID NO: 1025694 - RNA, 22 nt, Human
gugucccaggagaggagacaau

SEQ ID NO: 1025695 - RNA, 22 nt, Human
ccccuggguccaggcuucucug

SEQ ID NO: 1025696 - RNA, 18 nt, Human
gaggccugagaaccaggu

SEQ ID NO: 1025697 - RNA, 18 nt, Human
uaaaugcauguuaauaac

SEQ ID NO: 1025698 - RNA, 19 nt, Human
uacauuuguguacacuugu

SEQ ID NO: 1025699 - RNA, 22 nt, Human
agcagggcuugccgcuuguccu

SEQ ID NO: 1025700 - RNA, 23 nt, Human
auuuccuacuauaaaagagguaa

SEQ ID NO: 1025701 - RNA, 22 nt, Human
guggcuugaccaucccugcuac

SEQ ID NO: 1025702 - RNA, 22 nt, Human
cccaggagauggagguugcagu

SEQ ID NO: 1025703 - RNA, 22 nt, Human
aaaugcacaaaguaaguguaau

SEQ ID NO: 1025704 - RNA, 22 nt, Human
acuuuacaagcuuauagccuag

SEQ ID NO: 1025705 - RNA, 22 nt, Human
uugaacagcuguuacauuguua

SEQ ID NO: 1025706 - RNA, 22 nt, Human
gagagugauucccucccauaga

SEQ ID NO: 1025707 - RNA, 22 nt, Human
cccuggagcugcuugcauguug

SEQ ID NO: 1025708 - RNA, 22 nt, Human
gacagugcauuuccuggcaugg

SEQ ID NO: 1025709 - RNA, 22 nt, Human
uggaggaugccuggggaggccu

SEQ ID NO: 1025710 - RNA, 22 nt, Human
ucagaagagcuggugcugccug

SEQ ID NO: 1025711 - RNA, 22 nt, Human
ugagccagccuugcagcugugc

SEQ ID NO: 1025712 - RNA, 22 nt, Human
auugaaagagaauguagcucuu

SEQ ID NO: 1025713 - RNA, 22 nt, Human
ggcaccuggagguuuacuggau

SEQ ID NO: 1025714 - RNA, 22 nt, Human
cugcugugaguuuggaggucua

SEQ ID NO: 1025715 - RNA, 22 nt, Human
gccugagcaggcguggaccaug

SEQ ID NO: 1025716 - RNA, 22 nt, Human
uuucauaauagugcaguuuguu

SEQ ID NO: 1025717 - RNA, 22 nt, Human
aauuaggggaggacguaucaua

SEQ ID NO: 1025718 - RNA, 22 nt, Human
ggcuggcacagagggcuggugu

SEQ ID NO: 1025719 - RNA, 22 nt, Human
caucaguguggcaguucacugu

SEQ ID NO: 1025720 - RNA, 22 nt, Human
aaauguagaccuauagggaccu

SEQ ID NO: 1025721 - RNA, 22 nt, Human
uuuuuuaguuaggucagaaugu

SEQ ID NO: 1025722 - RNA, 22 nt, Human
ucugccugaaauucacauguaa

SEQ ID NO: 1025723 - RNA, 22 nt, Human
gcccccucuuuggagccagcca

SEQ ID NO: 1025724 - RNA, 21 nt, Human
cagggcacacagaggauggua

SEQ ID NO: 1025725 - RNA, 22 nt, Human
cagggcuggcucaugaaaaguu

SEQ ID NO: 1025726 - RNA, 22 nt, Human
auucuuauuuaaauagagucug

SEQ ID NO: 1025727 - RNA, 22 nt, Human
cuuuggcagccucugcuauuga

SEQ ID NO: 1025728 - RNA, 22 nt, Human
gagaggccaccugacgagcagu

SEQ ID NO: 1025729 - RNA, 22 nt, Human
caguggggaggccaggauagaa

SEQ ID NO: 1025730 - RNA, 22 nt, Human
gucuuucuuaauucaagugcuu

SEQ ID NO: 1025731 - RNA, 22 nt, Human
caaagccucugauuucacuugu

SEQ ID NO: 1025732 - RNA, 19 nt, Human
agaggcugucaccuguagc

SEQ ID NO: 1025733 - RNA, 22 nt, Human
uuucacaaugcaauccuacuuc

SEQ ID NO: 1025734 - RNA, 22 nt, Human
gccuggcugggcaccaggggag

SEQ ID NO: 1025735 - RNA, 22 nt, Human
ugcugccuucuaggcgugcccu

SEQ ID NO: 1025736 - RNA, 22 nt, Human
uuaauuuucucaucugugaaau

SEQ ID NO: 1025737 - RNA, 23 nt, Human
ucagaaugcacugaauuuacccu

SEQ ID NO: 1025738 - RNA, 22 nt, Human
uagaggugacacugagaccaua

SEQ ID NO: 1025739 - RNA, 22 nt, Human
ccucgaccuccccaggcucagg

SEQ ID NO: 1025740 - RNA, 22 nt, Human
accugggagucacaccugagaa

SEQ ID NO: 1025741 - RNA, 22 nt, Human
ggagacagugacuuagagacug

SEQ ID NO: 1025742 - RNA, 22 nt, Human
cucugguguccuuuagaauuua

SEQ ID NO: 1025743 - RNA, 22 nt, Human
uucuuugaguuaguacagucca

SEQ ID NO: 1025744 - RNA, 22 nt, Human
ccuggcugcauuuugcuggaug

SEQ ID NO: 1025745 - RNA, 22 nt, Human
aaguguuuauuuauaacgaucu

SEQ ID NO: 1025746 - RNA, 22 nt, Human
agaugaaaauacgugacuuuaa

SEQ ID NO: 1025747 - RNA, 22 nt, Human
agggcagagauuaauuaagaca

SEQ ID NO: 1025748 - RNA, 22 nt, Human
uuuccucugaugcugacuugga

SEQ ID NO: 1025749 - RNA, 22 nt, Human
ucugucaauauaugugcugcag

SEQ ID NO: 1025750 - RNA, 22 nt, Human
uucugagacaauugagagucua

SEQ ID NO: 1025751 - RNA, 22 nt, Human
ugugacaucgcugugucuguuu

SEQ ID NO: 1025752 - RNA, 22 nt, Human
acuggcaggcugcuggccggcg

SEQ ID NO: 1025753 - RNA, 22 nt, Human
ucagaacaauugggaaccauua

SEQ ID NO: 1025754 - RNA, 22 nt, Human
gaugcacuugccccuccucaga

SEQ ID NO: 1025755 - RNA, 22 nt, Human
ugacacaggcagcucccagcac

SEQ ID NO: 1025756 - RNA, 20 nt, Human
ugucaugcauuagaugaaga

SEQ ID NO: 1025757 - RNA, 22 nt, Human
ugcagugccucggcagugcagc

SEQ ID NO: 1025758 - RNA, 22 nt, Human
cagggccuuauccugccauuga

SEQ ID NO: 1025759 - RNA, 22 nt, Human
aguuugaauugaaaugcagaug

SEQ ID NO: 1025760 - RNA, 22 nt, Human
ucucaggaauagaguggcagca

SEQ ID NO: 1025761 - RNA, 21 nt, Human
gcucagaguauugcacuguuu

SEQ ID NO: 1025762 - RNA, 22 nt, Human
acagccugagaguggagcuggc

SEQ ID NO: 1025763 - RNA, 19 nt, Human
gcauuucucuuuacagcca

SEQ ID NO: 1025764 - RNA, 22 nt, Human
uccagggauguccuguagcacu

SEQ ID NO: 1025765 - RNA, 17 nt, Human
ugaggccugcaucagug

SEQ ID NO: 1025766 - RNA, 22 nt, Human
agcuguucccucacugcaguca

SEQ ID NO: 1025767 - RNA, 22 nt, Human
aguuuauagcccagauucaugg

SEQ ID NO: 1025768 - RNA, 22 nt, Human
caaugauguuuagauaaaaucc

SEQ ID NO: 1025769 - RNA, 22 nt, Human
gcaggggcugagcaccagcggg

SEQ ID NO: 1025770 - RNA, 22 nt, Human
agcagaacugaugagacuugag

SEQ ID NO: 1025771 - RNA, 22 nt, Human
ggcucugcaugugagugggugg

SEQ ID NO: 1025772 - RNA, 22 nt, Human
accuuuuuguucuguucucagc

SEQ ID NO: 1025773 - RNA, 20 nt, Human
uagaaaucuuauaaaagacu

SEQ ID NO: 1025774 - RNA, 22 nt, Human
aucuucaaagcacaucguuugu

SEQ ID NO: 1025775 - RNA, 22 nt, Human
ugucccucugaggcuucccugg

SEQ ID NO: 1025776 - RNA, 22 nt, Human
aaaguuucaauagaggaagugg

SEQ ID NO: 1025777 - RNA, 22 nt, Human
ccccaggcagggccuaacagag

SEQ ID NO: 1025778 - RNA, 22 nt, Human
ccuggccucgugcucacggcuc

SEQ ID NO: 1025779 - RNA, 22 nt, Human
gagagcacaugaacauggagga

SEQ ID NO: 1025780 - RNA, 22 nt, Human
agccucugcacgggcacgggug

SEQ ID NO: 1025781 - RNA, 22 nt, Human
caggauagaaaggccauggagu

SEQ ID NO: 1025782 - RNA, 22 nt, Human
aggacagugguguucuggagug

SEQ ID NO: 1025783 - RNA, 20 nt, Human
ggcugugcccuuccguggcc

SEQ ID NO: 1025784 - RNA, 22 nt, Human
ggcccugugguuuugcaaaguc

SEQ ID NO: 1025785 - RNA, 22 nt, Human
ggguggaggagaacaggcccca

SEQ ID NO: 1025786 - RNA, 22 nt, Human
cuuucucuguguuucacaugcu

SEQ ID NO: 1025787 - RNA, 22 nt, Human
ccacugaggcaggcaguaucua

SEQ ID NO: 1025788 - RNA, 22 nt, Human
ucccugggaacaaaggaugaga

SEQ ID NO: 1025789 - RNA, 22 nt, Human
aaggcugagacagcacaggucc

SEQ ID NO: 1025790 - RNA, 22 nt, Human
ccugagcugaacuaagcaguuu

SEQ ID NO: 1025791 - RNA, 22 nt, Human
aucuagaaaguguugaagauca

SEQ ID NO: 1025792 - RNA, 22 nt, Human
agccaggaaccagcuacagucu

SEQ ID NO: 1025793 - RNA, 22 nt, Human
acagggcagagggcaguuggua

SEQ ID NO: 1025794 - RNA, 20 nt, Human
auguagaugaaagcaaaggc

SEQ ID NO: 1025795 - RNA, 22 nt, Human
uaagaacagauaaaguuucccc

SEQ ID NO: 1025796 - RNA, 22 nt, Human
cauuuccugucuggaggucaaa

SEQ ID NO: 1025797 - RNA, 22 nt, Human
ccagcugcaggggagcagugga

SEQ ID NO: 1025798 - RNA, 22 nt, Human
ucuagggaacaugggucaagcu

SEQ ID NO: 1025799 - RNA, 22 nt, Human
uucucauggugucuuuauacau

SEQ ID NO: 1025800 - RNA, 22 nt, Human
gugcagggcuggcaccggaggc

SEQ ID NO: 1025801 - RNA, 19 nt, Human
ucucacaguuuccuugccu

SEQ ID NO: 1025802 - RNA, 19 nt, Human
ucuguucacauuguuucgc

SEQ ID NO: 1025803 - RNA, 22 nt, Human
guccaguguguuuaucuuggau

SEQ ID NO: 1025804 - RNA, 22 nt, Human
aaagccuuggucaucugguucc

SEQ ID NO: 1025805 - RNA, 22 nt, Human
uauuucuugaguggucaguuuc

SEQ ID NO: 1025806 - RNA, 22 nt, Human
cuacccaggcuggagugcagua

SEQ ID NO: 1025807 - RNA, 22 nt, Human
accagagauggggcuucucugu

SEQ ID NO: 1025808 - RNA, 22 nt, Human
gcugagguggcugccuuaguaa

SEQ ID NO: 1025809 - RNA, 22 nt, Human
auugaaagcacaaagaacaagu

SEQ ID NO: 1025810 - RNA, 22 nt, Human
gagacacacacaggagguggca

SEQ ID NO: 1025811 - RNA, 18 nt, Human
gagcacugguguugaggu

SEQ ID NO: 1025812 - RNA, 21 nt, Human
acucaggagacuaacuauguc

SEQ ID NO: 1025813 - RNA, 22 nt, Human
ggcacugagaacaggcugacuu

SEQ ID NO: 1025814 - RNA, 22 nt, Human
uuucacacugcagcaucagaga

SEQ ID NO: 1025815 - RNA, 22 nt, Human
aagcagcacaguaauauuggug

SEQ ID NO: 1025816 - RNA, 22 nt, Human
uuucugaacaaagccauuauca

SEQ ID NO: 1025817 - RNA, 22 nt, Human
cacagcuucugagugaggauuu

SEQ ID NO: 1025818 - RNA, 22 nt, Human
caggacaguauaggcuuuagga

SEQ ID NO: 1025819 - RNA, 22 nt, Human
ucucagagugguggucccucug

SEQ ID NO: 1025820 - RNA, 22 nt, Human
uuccagagaaaagguuuauuuc

SEQ ID NO: 1025821 - RNA, 22 nt, Human
ccagcuccccucagcagguaau

SEQ ID NO: 1025822 - RNA, 22 nt, Human
caaggccaugagcagcgagugu

SEQ ID NO: 1025823 - RNA, 22 nt, Human
uuucugaauaacucuaugauau

SEQ ID NO: 1025824 - RNA, 22 nt, Human
guuaacacaggacucucugccu

SEQ ID NO: 1025825 - RNA, 22 nt, Human
uggaccugaagaauaggaagua

SEQ ID NO: 1025826 - RNA, 22 nt, Human
cagagugaaauaggggaucaag

SEQ ID NO: 1025827 - RNA, 22 nt, Human
guucacaucacuucacugaacc

SEQ ID NO: 1025828 - RNA, 22 nt, Human
ccucccacauccuagcucugcu

SEQ ID NO: 1025829 - RNA, 23 nt, Human
agaugagccaacaccuccaugcc

SEQ ID NO: 1025830 - RNA, 22 nt, Human
ccagcaccuugaucuuggaguu

SEQ ID NO: 1025831 - RNA, 20 nt, Human
uggagcuccagcguccaugu

SEQ ID NO: 1025832 - RNA, 22 nt, Human
accaggcugugaagugagacua

SEQ ID NO: 1025833 - RNA, 22 nt, Human
ggacacagcugcagccacaccc

SEQ ID NO: 1025834 - RNA, 22 nt, Human
gaggggcugggcagucccugga

SEQ ID NO: 1025835 - RNA, 22 nt, Human
cauuuugugcuagacacuaugg

SEQ ID NO: 1025836 - RNA, 22 nt, Human
uccugagagcagcugcuuugga

SEQ ID NO: 1025837 - RNA, 22 nt, Human
aggccucacucucagagcuucu

SEQ ID NO: 1025838 - RNA, 22 nt, Human
gagggcuccucacauucucuau

SEQ ID NO: 1025839 - RNA, 22 nt, Human
ucugggaguggguccaaggaau

SEQ ID NO: 1025840 - RNA, 22 nt, Human
auaugagaauuggaaaauauca

SEQ ID NO: 1025841 - RNA, 22 nt, Human
agaaaucuaagaugcucaagga

SEQ ID NO: 1025842 - RNA, 22 nt, Human
cggcuggggcuguccccaugac

SEQ ID NO: 1025843 - RNA, 22 nt, Human
cauauaaauacaacauguguua

SEQ ID NO: 1025844 - RNA, 21 nt, Human
ccugcugugaucuuagugagu

SEQ ID NO: 1025845 - RNA, 22 nt, Human
uucuuucacucaagaaggaucu

SEQ ID NO: 1025846 - RNA, 22 nt, Human
ggcccagcacagugcuuggggg

SEQ ID NO: 1025847 - RNA, 22 nt, Human
gucacuggggccacaugcagaa

SEQ ID NO: 1025848 - RNA, 22 nt, Human
cuguccagucuuuagcaagcug

SEQ ID NO: 1025849 - RNA, 22 nt, Human
gaaaugugaccuacuuccuugu

SEQ ID NO: 1025850 - RNA, 19 nt, Human
ugcagaagacacaguggug

SEQ ID NO: 1025851 - RNA, 22 nt, Human
auuuaaauuuucugauggagag

SEQ ID NO: 1025852 - RNA, 22 nt, Human
uggaggcaccacuggcugcccg

SEQ ID NO: 1025853 - RNA, 22 nt, Human
uugaaauacugcauuguucagu

SEQ ID NO: 1025854 - RNA, 22 nt, Human
uaucaauugggccaaaugguac

SEQ ID NO: 1025855 - RNA, 22 nt, Human
cucugaccauucccuugauuuu

SEQ ID NO: 1025856 - RNA, 22 nt, Human
uggcucaguaaucgagucuccu

SEQ ID NO: 1025857 - RNA, 22 nt, Human
uucagagccacuucaagucuaa

SEQ ID NO: 1025858 - RNA, 23 nt, Human
ugggaguguugggaucucugcuc

SEQ ID NO: 1025859 - RNA, 22 nt, Human
guggagaccuccuaggaugugu

SEQ ID NO: 1025860 - RNA, 22 nt, Human
uacauuguuuuuucuugccauc

SEQ ID NO: 1025861 - RNA, 22 nt, Human
uggcagagaacacggcugaucu

SEQ ID NO: 1025862 - RNA, 20 nt, Human
cagcaggaaaagugccucag

SEQ ID NO: 1025863 - RNA, 22 nt, Human
ccugggcuucugucuagauguu

SEQ ID NO: 1025864 - RNA, 22 nt, Human
ggcagggagagcaugcugauaa

SEQ ID NO: 1025865 - RNA, 22 nt, Human
gaggagagggcugcgggcccac

SEQ ID NO: 1025866 - RNA, 22 nt, Human
gaggccuggaauuccagccugg

SEQ ID NO: 1025867 - RNA, 22 nt, Human
uuaacacagggggagacaaagu

SEQ ID NO: 1025868 - RNA, 22 nt, Human
gacccagcuaaccaggugggga

SEQ ID NO: 1025869 - RNA, 22 nt, Human
aguugcagacgcagagauguug

SEQ ID NO: 1025870 - RNA, 22 nt, Human
ucccagccauuccuuuaggugu

SEQ ID NO: 1025871 - RNA, 22 nt, Human
uuuugugagcccauaaaugcca

SEQ ID NO: 1025872 - RNA, 22 nt, Human
guuugcauuucuugaacuauau

SEQ ID NO: 1025873 - RNA, 22 nt, Human
caggacaguuugcuuugcccug

SEQ ID NO: 1025874 - RNA, 23 nt, Human
uggagcugggcucagacccuggg

SEQ ID NO: 1025875 - RNA, 22 nt, Human
agggcagaaauauugauacugu

SEQ ID NO: 1025876 - RNA, 22 nt, Human
gggcugucaugugucagugacc

SEQ ID NO: 1025877 - RNA, 22 nt, Human
augcaguacugauacaugccac

SEQ ID NO: 1025878 - RNA, 22 nt, Human
ucauaaaacacaccagguaguu

SEQ ID NO: 1025879 - RNA, 22 nt, Human
accuggagucauuugaggagua

SEQ ID NO: 1025880 - RNA, 20 nt, Human
uaggcagagcugugcagccu

SEQ ID NO: 1025881 - RNA, 22 nt, Human
gcaggguaggugacagguaguc

SEQ ID NO: 1025882 - RNA, 22 nt, Human
ugcauuauaacugaauguuguu

SEQ ID NO: 1025883 - RNA, 22 nt, Human
aagacauuuauuugaaucaauu

SEQ ID NO: 1025884 - RNA, 19 nt, Human
ugaguucugugguucucaa

SEQ ID NO: 1025885 - RNA, 22 nt, Human
gaaugcacacgugugugcaugc

SEQ ID NO: 1025886 - RNA, 22 nt, Human
acacagaguauuuagaaggggu

SEQ ID NO: 1025887 - RNA, 20 nt, Human
uggagcugugguaaggagca

SEQ ID NO: 1025888 - RNA, 22 nt, Human
uguccugcaacugaaggagaag

SEQ ID NO: 1025889 - RNA, 22 nt, Human
gucaaguuaagauaaggucaug

SEQ ID NO: 1025890 - RNA, 22 nt, Human
ugucucugguauuaggugaaaa

SEQ ID NO: 1025891 - RNA, 22 nt, Human
ugcuuuauucagucucugccau

SEQ ID NO: 1025892 - RNA, 22 nt, Human
uuugaaagucaaccuuccaguu

SEQ ID NO: 1025893 - RNA, 22 nt, Human
aagauauagauaaaacuaugca

SEQ ID NO: 1025894 - RNA, 22 nt, Human
cccuggaguccggagcucaccu

SEQ ID NO: 1025895 - RNA, 22 nt, Human
gacauuucaaucucauuauggg

SEQ ID NO: 1025896 - RNA, 22 nt, Human
auuucacucauucauguuacuu

SEQ ID NO: 1025897 - RNA, 22 nt, Human
ugggcagaaaucaguaucagau

SEQ ID NO: 1025898 - RNA, 22 nt, Human
gacccuguuucuacaaauaauu

SEQ ID NO: 1025899 - RNA, 23 nt, Human
ucucuuucaagagcuuaaugugc

SEQ ID NO: 1025900 - RNA, 22 nt, Human
ucuucuccagugcuucugcaca

SEQ ID NO: 1025901 - RNA, 22 nt, Human
cccagccugugacagccguccu

SEQ ID NO: 1025902 - RNA, 22 nt, Human
uucuguauauuguaaagacuca

SEQ ID NO: 1025903 - RNA, 22 nt, Human
ggcugcuggggacgugggagag

SEQ ID NO: 1025904 - RNA, 22 nt, Human
aggcccugcaggaagcaggaug

SEQ ID NO: 1025905 - RNA, 22 nt, Human
cauguugaauggccuugauuuu

SEQ ID NO: 1025906 - RNA, 22 nt, Human
aguaugaacggaaggccuggga

SEQ ID NO: 1025907 - RNA, 22 nt, Human
uuuccucugagugagcugggag

SEQ ID NO: 1025908 - RNA, 22 nt, Human
aggccagcucacccuggcuccu

SEQ ID NO: 1025909 - RNA, 22 nt, Human
aggccagaugucgggcuagaag

SEQ ID NO: 1025910 - RNA, 20 nt, Human
augugagggguugaaguggg

SEQ ID NO: 1025911 - RNA, 22 nt, Human
uccauucuaugcuuacauuuau

SEQ ID NO: 1025912 - RNA, 22 nt, Human
caggcacagaguuauucauuua

SEQ ID NO: 1025913 - RNA, 22 nt, Human
acauuuagaguucuuuacucca

SEQ ID NO: 1025914 - RNA, 22 nt, Human
uugaggaguguuuagggugagg

SEQ ID NO: 1025915 - RNA, 18 nt, Human
ugacagaaccuggagccu

SEQ ID NO: 1025916 - RNA, 22 nt, Human
aagaggaagucuccauggagag

SEQ ID NO: 1025917 - RNA, 22 nt, Human
cauggcagagaaggggaacugg

SEQ ID NO: 1025918 - RNA, 22 nt, Human
agccaggcugcaguuggcuggc

SEQ ID NO: 1025919 - RNA, 22 nt, Human
aucaggauggguuuggcuuagg

SEQ ID NO: 1025920 - RNA, 22 nt, Human
ugggcacuauggcucugugcac

SEQ ID NO: 1025921 - RNA, 22 nt, Human
uggcugucagcugccuggugcg

SEQ ID NO: 1025922 - RNA, 22 nt, Human
gcugugugcucacguaguggaa

SEQ ID NO: 1025923 - RNA, 22 nt, Human
ucccagcgcggggggaggaucc

SEQ ID NO: 1025924 - RNA, 21 nt, Human
augaagucuaugcuucugugu

SEQ ID NO: 1025925 - RNA, 22 nt, Human
uggcugccuuucaccucaucuc

SEQ ID NO: 1025926 - RNA, 22 nt, Human
gggaccuggucuagcacugagc

SEQ ID NO: 1025927 - RNA, 22 nt, Human
gccucccuguucuuccacaaua

SEQ ID NO: 1025928 - RNA, 22 nt, Human
cauuuacuuaaaucuuuacaag

SEQ ID NO: 1025929 - RNA, 22 nt, Human
uugaacauuaacuucagucuau

SEQ ID NO: 1025930 - RNA, 22 nt, Human
uucuuacagcccuauuacuaaa

SEQ ID NO: 1025931 - RNA, 22 nt, Human
guacccaggcacgccuugcuga

SEQ ID NO: 1025932 - RNA, 22 nt, Human
gagaggucaucucccaucagca

SEQ ID NO: 1025933 - RNA, 22 nt, Human
ucauccuuuugcaugggaaggc

SEQ ID NO: 1025934 - RNA, 22 nt, Human
acauuucugcuagaauagguga

SEQ ID NO: 1025935 - RNA, 22 nt, Human
aguucacauaucuguuuuauuu

SEQ ID NO: 1025936 - RNA, 22 nt, Human
ccagccuucugagcugccugga

SEQ ID NO: 1025937 - RNA, 20 nt, Human
cuggguggcaagcaaggggg

SEQ ID NO: 1025938 - RNA, 22 nt, Human
agcaggaguuugaugcuuuuau

SEQ ID NO: 1025939 - RNA, 22 nt, Human
ccagugcauaaucaauacagcc

SEQ ID NO: 1025940 - RNA, 22 nt, Human
ggcagaaggccucccagcuccu

SEQ ID NO: 1025941 - RNA, 22 nt, Human
agagggagcccagucauagcug

SEQ ID NO: 1025942 - RNA, 22 nt, Human
acccacgaagaugagcggcaug

SEQ ID NO: 1025943 - RNA, 22 nt, Human
uccugcagaucaaagccuuuga

SEQ ID NO: 1025944 - RNA, 22 nt, Human
gaugcugagagguggagggaac

SEQ ID NO: 1025945 - RNA, 22 nt, Human
uauuucugaggcccaggaagug

SEQ ID NO: 1025946 - RNA, 22 nt, Human
acagcuuuguuuucccugcuga

SEQ ID NO: 1025947 - RNA, 17 nt, Human
ugagcaguagaagaugc

SEQ ID NO: 1025948 - RNA, 22 nt, Human
acuuuauuuccuauugcaucca

SEQ ID NO: 1025949 - RNA, 22 nt, Human
auccuugagccuuaucuuuugu

SEQ ID NO: 1025950 - RNA, 22 nt, Human
gaaggccuagggaugcucugcg

SEQ ID NO: 1025951 - RNA, 22 nt, Human
ucugggcacugcugagccugua

SEQ ID NO: 1025952 - RNA, 22 nt, Human
ggcaggugcaccugagccaucu

SEQ ID NO: 1025953 - RNA, 22 nt, Human
uaaggcaccuguccaggcuggg

SEQ ID NO: 1025954 - RNA, 22 nt, Human
cagcagcucccauccgcugagc

SEQ ID NO: 1025955 - RNA, 22 nt, Human
gcagaggcugggugucccaguc

SEQ ID NO: 1025956 - RNA, 22 nt, Human
cagagccucagaauccugugga

SEQ ID NO: 1025957 - RNA, 22 nt, Human
cugccucuccccagaguggccc

SEQ ID NO: 1025958 - RNA, 22 nt, Human
ccagggccucguguucugagug

SEQ ID NO: 1025959 - RNA, 22 nt, Human
cagggcagaaggcacucuacuc

SEQ ID NO: 1025960 - RNA, 19 nt, Human
auauauguauacaaugugg

SEQ ID NO: 1025961 - RNA, 20 nt, Human
ccagagcagccacugaaguu

SEQ ID NO: 1025962 - RNA, 22 nt, Human
gaagcagcuagcccacuaguca

SEQ ID NO: 1025963 - RNA, 22 nt, Human
uuugagauggagucuugcucug

SEQ ID NO: 1025964 - RNA, 22 nt, Human
uuacaggggacauuggggacau

SEQ ID NO: 1025965 - RNA, 22 nt, Human
gagagucacugucugcauuucc

SEQ ID NO: 1025966 - RNA, 22 nt, Human
aggagguggccugagcgugccc

SEQ ID NO: 1025967 - RNA, 22 nt, Human
gcugcucucagagcucaugcug

SEQ ID NO: 1025968 - RNA, 22 nt, Human
caagagcuagacuuugucagga

SEQ ID NO: 1025969 - RNA, 22 nt, Human
ccaggccuccugugaguggacc

SEQ ID NO: 1025970 - RNA, 22 nt, Human
cuugcugucuugcauuuagagc

SEQ ID NO: 1025971 - RNA, 22 nt, Human
gcacccagaauaaggacaggac

SEQ ID NO: 1025972 - RNA, 22 nt, Human
uguacuuccccaaugacagcac

SEQ ID NO: 1025973 - RNA, 22 nt, Human
uuugaaucugauauggcagcau

SEQ ID NO: 1025974 - RNA, 22 nt, Human
ucucccaggugggugccuggag

SEQ ID NO: 1025975 - RNA, 22 nt, Human
ugggccugaaggagcugcgccc

SEQ ID NO: 1025976 - RNA, 21 nt, Human
ccuggcagaagccugauaugc

SEQ ID NO: 1025977 - RNA, 22 nt, Human
agcauucauugcuagaauguaa

SEQ ID NO: 1025978 - RNA, 22 nt, Human
ucuggcucucauacucgccagu

SEQ ID NO: 1025979 - RNA, 22 nt, Human
uggccugcuuucauuugaugcu

SEQ ID NO: 1025980 - RNA, 22 nt, Human
agccccaguaagggagggccug

SEQ ID NO: 1025981 - RNA, 22 nt, Human
uguuucauuaguacugacaaua

SEQ ID NO: 1025982 - RNA, 22 nt, Human
cccuguccuggaugggagcacu

SEQ ID NO: 1025983 - RNA, 22 nt, Human
agacaaaggauuaaugaugaug

SEQ ID NO: 1025984 - RNA, 22 nt, Human
aaaguuuccugcuaagugcuau

SEQ ID NO: 1025985 - RNA, 22 nt, Human
ggcuggagauaugucuggaaca

SEQ ID NO: 1025986 - RNA, 22 nt, Human
ggcuucccaaggagccaggaug

SEQ ID NO: 1025987 - RNA, 22 nt, Human
aggcagcaaagaaaugaugcug

SEQ ID NO: 1025988 - RNA, 22 nt, Human
uucuuuccaaccagauauuggu

SEQ ID NO: 1025989 - RNA, 22 nt, Human
ccugccucaucaacuugucgug

SEQ ID NO: 1025990 - RNA, 23 nt, Human
uuuauauuccuaaugucuugagc

SEQ ID NO: 1025991 - RNA, 22 nt, Human
aucagcaaucaaauugcagagu

SEQ ID NO: 1025992 - RNA, 22 nt, Human
uggagcaggugggaugucguga

SEQ ID NO: 1025993 - RNA, 22 nt, Human
aagugacaccucuucccuuucc

SEQ ID NO: 1025994 - RNA, 22 nt, Human
uagggcucugcucaucaguugu

SEQ ID NO: 1025995 - RNA, 22 nt, Human
agaggagugggaagcagugcaa

SEQ ID NO: 1025996 - RNA, 22 nt, Human
gggcauggaggucugucugcag

SEQ ID NO: 1025997 - RNA, 22 nt, Human
agaugguguuuccccaggugga

SEQ ID NO: 1025998 - RNA, 22 nt, Human
gagugguaggcaguguuaggaa

SEQ ID NO: 1025999 - RNA, 22 nt, Human
gccaggcacaguucuaggugcu

SEQ ID NO: 1026000 - RNA, 22 nt, Human
gggagcaggagccugccugcca

SEQ ID NO: 1026001 - RNA, 16 nt, Human
cagcuuuaugucagug

SEQ ID NO: 1026002 - RNA, 22 nt, Human
ccuguucaagguauuaauuauc

SEQ ID NO: 1026003 - RNA, 22 nt, Human
aaguucaaggugauaguggcag

SEQ ID NO: 1026004 - RNA, 22 nt, Human
gcaaauucuuaacuggacugug

SEQ ID NO: 1026005 - RNA, 22 nt, Human
agugaccauuuucagcuagagg

SEQ ID NO: 1026006 - RNA, 22 nt, Human
guuuauuauacaacaaaagcua

SEQ ID NO: 1026007 - RNA, 22 nt, Human
aaggagcuuguucgccuuccuc

SEQ ID NO: 1026008 - RNA, 22 nt, Human
acuggacagaggaaauauggag

SEQ ID NO: 1026009 - RNA, 22 nt, Human
ccagagagguagcuuacccucu

SEQ ID NO: 1026010 - RNA, 22 nt, Human
acauucuagaagucuuugcaau

SEQ ID NO: 1026011 - RNA, 22 nt, Human
uucugugauugacauguggcuu

SEQ ID NO: 1026012 - RNA, 22 nt, Human
gcuggcuccucuguccucacgg

SEQ ID NO: 1026013 - RNA, 22 nt, Human
acaugauuuuaguaucauaaua

SEQ ID NO: 1026014 - RNA, 23 nt, Human
uccagcagccaagaaggguagaa

SEQ ID NO: 1026015 - RNA, 22 nt, Human
agggacuuguguccuauguaug

SEQ ID NO: 1026016 - RNA, 22 nt, Human
acaguguuuuagaaaagcuuga

SEQ ID NO: 1026017 - RNA, 22 nt, Human
gccagccugugcuuggccaggc

SEQ ID NO: 1026018 - RNA, 22 nt, Human
uauuugaaggcauacauuuuga

SEQ ID NO: 1026019 - RNA, 22 nt, Human
gcugggaggaauuuggggaaua

SEQ ID NO: 1026020 - RNA, 23 nt, Human
cagggccaggcagcagcugucac

SEQ ID NO: 1026021 - RNA, 22 nt, Human
aggccugcagcaggagcaaacc

SEQ ID NO: 1026022 - RNA, 22 nt, Human
uuaagucacuuaucuaaagaca

SEQ ID NO: 1026023 - RNA, 22 nt, Human
gggccugugcacaguucuguua

SEQ ID NO: 1026024 - RNA, 18 nt, Human
gagaggcccggcugugcc

SEQ ID NO: 1026025 - RNA, 22 nt, Human
ugugugccagccuacgaggagc

SEQ ID NO: 1026026 - RNA, 22 nt, Human
ucccuggacaacagacuucacu

SEQ ID NO: 1026027 - RNA, 22 nt, Human
aauaauuagugggacagagaac

SEQ ID NO: 1026028 - RNA, 22 nt, Human
cccucccaagcacucugacaua

SEQ ID NO: 1026029 - RNA, 22 nt, Human
gaaaauguuuccuguuauuugc

SEQ ID NO: 1026030 - RNA, 20 nt, Human
gagauggacagaugaagggg

SEQ ID NO: 1026031 - RNA, 22 nt, Human
uugcauugaugucuauacgcug

SEQ ID NO: 1026032 - RNA, 22 nt, Human
auggccuggggagcaugggaag

SEQ ID NO: 1026033 - RNA, 22 nt, Human
agcagcugagaugguaagauuc

SEQ ID NO: 1026034 - RNA, 22 nt, Human
ccuggcagcgugccgagcugcg

SEQ ID NO: 1026035 - RNA, 22 nt, Human
augaggcauuccacucaaacuc

SEQ ID NO: 1026036 - RNA, 22 nt, Human
ugcuuuggccacuagaauucag

SEQ ID NO: 1026037 - RNA, 21 nt, Human
uggcucugcucagagcagucc

SEQ ID NO: 1026038 - RNA, 23 nt, Human
aggcacugaaugugucagugagu

SEQ ID NO: 1026039 - RNA, 22 nt, Human
accucugcucaagaccccuccg

SEQ ID NO: 1026040 - RNA, 22 nt, Human
ccagcaugagacgaugaugaag

SEQ ID NO: 1026041 - RNA, 22 nt, Human
ugcuuuuaagaacaaugcugcu

SEQ ID NO: 1026042 - RNA, 22 nt, Human
agcugagccagcagcaacagga

SEQ ID NO: 1026043 - RNA, 22 nt, Human
uugagggucuggaucugcugcu

SEQ ID NO: 1026044 - RNA, 22 nt, Human
ucaucacauaugucaugauuug

SEQ ID NO: 1026045 - RNA, 22 nt, Human
gccugcagaacugugaggcaau

SEQ ID NO: 1026046 - RNA, 23 nt, Human
aaucuggcugauguuuuuucucu

SEQ ID NO: 1026047 - RNA, 21 nt, Human
cuguggaagggaacuagaggg

SEQ ID NO: 1026048 - RNA, 22 nt, Human
auguuugacugaguuuggcaga

SEQ ID NO: 1026049 - RNA, 22 nt, Human
auccagggauaaaaguaagguu

SEQ ID NO: 1026050 - RNA, 22 nt, Human
gucccuggaucugggacagcug

SEQ ID NO: 1026051 - RNA, 18 nt, Human
aagcugcccucaggcagg

SEQ ID NO: 1026052 - RNA, 21 nt, Human
uccucagggccccagagcacu

SEQ ID NO: 1026053 - RNA, 21 nt, Human
cagaaguaaggguaacuucuc

SEQ ID NO: 1026054 - RNA, 22 nt, Human
gaaucauuuagcucugcaugga

SEQ ID NO: 1026055 - RNA, 22 nt, Human
aguggcagaucucuggucugga

SEQ ID NO: 1026056 - RNA, 22 nt, Human
ggcacuguguacacacagagac

SEQ ID NO: 1026057 - RNA, 22 nt, Human
uuggaaagcaagcuggacauac

SEQ ID NO: 1026058 - RNA, 17 nt, Human
acacagggagagggagc

SEQ ID NO: 1026059 - RNA, 22 nt, Human
uacugcauaacuggcauguggg

SEQ ID NO: 1026060 - RNA, 22 nt, Human
ggccagagaauaugccuuacgu

SEQ ID NO: 1026061 - RNA, 22 nt, Human
ucaggcugccuaucagacugug

SEQ ID NO: 1026062 - RNA, 22 nt, Human
agcagccagugggagugauaca

SEQ ID NO: 1026063 - RNA, 17 nt, Human
aguggcaggcagauggg

SEQ ID NO: 1026064 - RNA, 22 nt, Human
cccagcuccuuggaugggcagg

SEQ ID NO: 1026065 - RNA, 22 nt, Human
ggggauggauuccgggucccug

SEQ ID NO: 1026066 - RNA, 22 nt, Human
uucaguuucagucuugcaaaaa

SEQ ID NO: 1026067 - RNA, 22 nt, Human
agcuuuauggugccucacuuga

SEQ ID NO: 1026068 - RNA, 22 nt, Human
uacaacauguaaagugguuuaa

SEQ ID NO: 1026069 - RNA, 22 nt, Human
ggcauggcucggagucagaaca

SEQ ID NO: 1026070 - RNA, 22 nt, Human
gugcauuucucauacacuaaau

SEQ ID NO: 1026071 - RNA, 22 nt, Human
agucccagaugacccagcuacu

SEQ ID NO: 1026072 - RNA, 22 nt, Human
ccacagaggacaacugccuggc

SEQ ID NO: 1026073 - RNA, 22 nt, Human
uccagugcuggaccagagcacc

SEQ ID NO: 1026074 - RNA, 22 nt, Human
gcugauccuuuuaugucuagcu

SEQ ID NO: 1026075 - RNA, 22 nt, Human
aauauaauuuuauuccuagagu

SEQ ID NO: 1026076 - RNA, 22 nt, Human
aaguccaucucugccccacaca

SEQ ID NO: 1026077 - RNA, 22 nt, Human
ugcaauaaagugcuauaaaucc

SEQ ID NO: 1026078 - RNA, 22 nt, Human
uuguccuuggaugaagcuggga

SEQ ID NO: 1026079 - RNA, 22 nt, Human
gagaggagucccuaucacaguu

SEQ ID NO: 1026080 - RNA, 20 nt, Human
cugcuguguuauuguagaac

SEQ ID NO: 1026081 - RNA, 20 nt, Human
ucagagagagggugccacuu

SEQ ID NO: 1026082 - RNA, 22 nt, Human
aucaggaugcugucaguuacca

SEQ ID NO: 1026083 - RNA, 23 nt, Human
aaaguugauuugcaguuuaagag

SEQ ID NO: 1026084 - RNA, 22 nt, Human
aagggcucugcugucucucccc

SEQ ID NO: 1026085 - RNA, 19 nt, Human
cccaaggcccugggcaggc

SEQ ID NO: 1026086 - RNA, 22 nt, Human
cuccagggaugagacagaguag

SEQ ID NO: 1026087 - RNA, 19 nt, Human
cuugguuaugguaugaugc

SEQ ID NO: 1026088 - RNA, 22 nt, Human
caguacuugggggguucuaagu

SEQ ID NO: 1026089 - RNA, 22 nt, Human
aagccagguguugugguaagag

SEQ ID NO: 1026090 - RNA, 22 nt, Human
auuucucuuagcaagacauuac

SEQ ID NO: 1026091 - RNA, 22 nt, Human
cugggcagaauuuuaggauggc

SEQ ID NO: 1026092 - RNA, 22 nt, Human
aaggcagucugguuucaaagca

SEQ ID NO: 1026093 - RNA, 22 nt, Human
ccucugagagaaggccuucagc

SEQ ID NO: 1026094 - RNA, 22 nt, Human
cagcagagcuuauguuggguca

SEQ ID NO: 1026095 - RNA, 22 nt, Human
gccuggagggauagaaugcaag

SEQ ID NO: 1026096 - RNA, 22 nt, Human
auucuucacauaagugcuguac

SEQ ID NO: 1026097 - RNA, 22 nt, Human
agccucugcuggcccuggcacu

SEQ ID NO: 1026098 - RNA, 20 nt, Human
ccugucugcaauggagguca

SEQ ID NO: 1026099 - RNA, 22 nt, Human
uaucuauuccaaauaucagcgu

SEQ ID NO: 1026100 - RNA, 22 nt, Human
uggcugcucaagggaggaggcu

SEQ ID NO: 1026101 - RNA, 22 nt, Human
guuucuuagguaaauucuuuga

SEQ ID NO: 1026102 - RNA, 22 nt, Human
gccaccucuuugucucugccgc

SEQ ID NO: 1026103 - RNA, 22 nt, Human
cuuuauguccaccagacugcaa

SEQ ID NO: 1026104 - RNA, 22 nt, Human
uacaguaacauguuguacaagc

SEQ ID NO: 1026105 - RNA, 22 nt, Human
gagcugccaguguaugaauucu

SEQ ID NO: 1026106 - RNA, 22 nt, Human
uuucuugaccacuauguugaua

SEQ ID NO: 1026107 - RNA, 22 nt, Human
gugcauuuggugacucucaccc

SEQ ID NO: 1026108 - RNA, 22 nt, Human
agagcuguuuggacaucugagu

SEQ ID NO: 1026109 - RNA, 19 nt, Human
ugaagcaauaccauuuuug

SEQ ID NO: 1026110 - RNA, 22 nt, Human
auucuucauaccuacugagguu

SEQ ID NO: 1026111 - RNA, 22 nt, Human
ugggcuggugagggaucauuua

SEQ ID NO: 1026112 - RNA, 22 nt, Human
ccuuucucuuggauaccgauug

SEQ ID NO: 1026113 - RNA, 22 nt, Human
uauuuagaugcauuuggauugc

SEQ ID NO: 1026114 - RNA, 22 nt, Human
gaugugggguugagggaccagc

SEQ ID NO: 1026115 - RNA, 21 nt, Human
uggcccuggccacggcugcca

SEQ ID NO: 1026116 - RNA, 22 nt, Human
agccuggagguaaugaggaaac

SEQ ID NO: 1026117 - RNA, 22 nt, Human
gagccagcgccuugccucuggg

SEQ ID NO: 1026118 - RNA, 22 nt, Human
agcagccacagucugggacagg

SEQ ID NO: 1026119 - RNA, 22 nt, Human
ggcuggguuauuuauggccaag

SEQ ID NO: 1026120 - RNA, 22 nt, Human
gagggaccuuuacacagacauu

SEQ ID NO: 1026121 - RNA, 19 nt, Human
ugucccagacuccgugucu

SEQ ID NO: 1026122 - RNA, 22 nt, Human
uuuacuuuugguaaggucauuu

SEQ ID NO: 1026123 - RNA, 22 nt, Human
aaauuauaggugccaccuugga

SEQ ID NO: 1026124 - RNA, 22 nt, Human
ucucucuugucaccccaucugc

SEQ ID NO: 1026125 - RNA, 22 nt, Human
uauuucccagggagcaacaagc

SEQ ID NO: 1026126 - RNA, 22 nt, Human
agaccacagucaggcuccuggu

SEQ ID NO: 1026127 - RNA, 21 nt, Human
uccugcaggaggccugagagg

SEQ ID NO: 1026128 - RNA, 22 nt, Human
ugcauaguucuccuuccuccuc

SEQ ID NO: 1026129 - RNA, 22 nt, Human
gaaggccacggaauggagcugg

SEQ ID NO: 1026130 - RNA, 17 nt, Human
uuccaguuuaguauugu

SEQ ID NO: 1026131 - RNA, 22 nt, Human
cccacucccugcacgccugccg

SEQ ID NO: 1026132 - RNA, 22 nt, Human
ggaggccacgguuuagcaccga

SEQ ID NO: 1026133 - RNA, 22 nt, Human
cacauauuguaguucaccagga

SEQ ID NO: 1026134 - RNA, 22 nt, Human
ugagccagucugucugggugaa

SEQ ID NO: 1026135 - RNA, 22 nt, Human
cuagguauucauguuucguggc

SEQ ID NO: 1026136 - RNA, 22 nt, Human
aacaucuuuuuguuugcugaaa

SEQ ID NO: 1026137 - RNA, 22 nt, Human
uugaaagacuucuccugugaaa

SEQ ID NO: 1026138 - RNA, 19 nt, Human
ucuuucauuucuagcucug

SEQ ID NO: 1026139 - RNA, 22 nt, Human
aacauucugguucuaaaaaccu

SEQ ID NO: 1026140 - RNA, 22 nt, Human
agguauaagucucauuucuguu

SEQ ID NO: 1026141 - RNA, 22 nt, Human
ucagagugugagacauauugga

SEQ ID NO: 1026142 - RNA, 21 nt, Human
ugggcacugagggugcugcuc

SEQ ID NO: 1026143 - RNA, 22 nt, Human
uguauaaauuuaaauuccugcu

SEQ ID NO: 1026144 - RNA, 22 nt, Human
cagagccuuccuagcagacucu

SEQ ID NO: 1026145 - RNA, 22 nt, Human
ccuggcucucugcagauccugg

SEQ ID NO: 1026146 - RNA, 22 nt, Human
ugugccagccucuggcuguguc

SEQ ID NO: 1026147 - RNA, 22 nt, Human
gccugcagggugaugggcugcc

SEQ ID NO: 1026148 - RNA, 22 nt, Human
guguuccauguuugagguaguu

SEQ ID NO: 1026149 - RNA, 22 nt, Human
uggccuugggcagguggccugc

SEQ ID NO: 1026150 - RNA, 22 nt, Human
cccugaggggaguggugaggug

SEQ ID NO: 1026151 - RNA, 22 nt, Human
agucccaggcagccgagccggu

SEQ ID NO: 1026152 - RNA, 22 nt, Human
uuuccucuuuguaccuugacua

SEQ ID NO: 1026153 - RNA, 22 nt, Human
cccaccaguacagaugguagau

SEQ ID NO: 1026154 - RNA, 22 nt, Human
caggagacaaguuagcagcuga

SEQ ID NO: 1026155 - RNA, 22 nt, Human
aucaaaaugcuccagugauggu

SEQ ID NO: 1026156 - RNA, 22 nt, Human
ucuuggagaauggcagagaagc

SEQ ID NO: 1026157 - RNA, 22 nt, Human
uuuuuccuuggaugugucucuc

SEQ ID NO: 1026158 - RNA, 22 nt, Human
ucuuuguaaaugccuagcauaa

SEQ ID NO: 1026159 - RNA, 22 nt, Human
ggccagggccuggggacugucc

SEQ ID NO: 1026160 - RNA, 22 nt, Human
ugcaggugaaaauuaugaggau

SEQ ID NO: 1026161 - RNA, 22 nt, Human
auuagagguacaaaccuucacu

SEQ ID NO: 1026162 - RNA, 22 nt, Human
cucuggagguugagcccagcaa

SEQ ID NO: 1026163 - RNA, 22 nt, Human
ucugggaaguccucugucaugc

SEQ ID NO: 1026164 - RNA, 22 nt, Human
guggccaggccgacugccaggc

SEQ ID NO: 1026165 - RNA, 22 nt, Human
accaggcaacugugaaugggcu

SEQ ID NO: 1026166 - RNA, 21 nt, Human
uggagacucugguucuuugug

SEQ ID NO: 1026167 - RNA, 22 nt, Human
agcccagcagaaaguccagccu

SEQ ID NO: 1026168 - RNA, 22 nt, Human
ucagggugaaccaggcaggaau

SEQ ID NO: 1026169 - RNA, 22 nt, Human
aguaugaaucucuuuauucugc

SEQ ID NO: 1026170 - RNA, 21 nt, Human
guccaguggaggaggacagga

SEQ ID NO: 1026171 - RNA, 22 nt, Human
caucagcacuaugauuaaagua

SEQ ID NO: 1026172 - RNA, 22 nt, Human
uggcucaggccuacgacgccuu

SEQ ID NO: 1026173 - RNA, 22 nt, Human
caucucaugggcaugccaagcu

SEQ ID NO: 1026174 - RNA, 22 nt, Human
agucucagaguaccugagggac

SEQ ID NO: 1026175 - RNA, 22 nt, Human
ugaagacacauacaagggaaug

SEQ ID NO: 1026176 - RNA, 22 nt, Human
auacaaguugugauaauguaaa

SEQ ID NO: 1026177 - RNA, 22 nt, Human
gcugagcuagaaaaggaccaca

SEQ ID NO: 1026178 - RNA, 22 nt, Human
caugaaugcuggguucauguaa

SEQ ID NO: 1026179 - RNA, 22 nt, Human
ggcugggcaaacaagacucuuc

SEQ ID NO: 1026180 - RNA, 22 nt, Human
ugggaggcagguaggugaugau

SEQ ID NO: 1026181 - RNA, 22 nt, Human
gcucccucugcucaggcacuug

SEQ ID NO: 1026182 - RNA, 22 nt, Human
gagcacugaggaaagcugguua

SEQ ID NO: 1026183 - RNA, 22 nt, Human
ucaguuuucaauuucaucagag

SEQ ID NO: 1026184 - RNA, 22 nt, Human
agguggagaagagaugggcagu

SEQ ID NO: 1026185 - RNA, 22 nt, Human
cagcagagcugugugggaaggg

SEQ ID NO: 1026186 - RNA, 22 nt, Human
ucccagagauuuccucuccuuc

SEQ ID NO: 1026187 - RNA, 19 nt, Human
aucagcaagguaggaugug

SEQ ID NO: 1026188 - RNA, 22 nt, Human
ccuguucacccuccaugcacag

SEQ ID NO: 1026189 - RNA, 22 nt, Human
cuccagggaggucugcaggacu

SEQ ID NO: 1026190 - RNA, 22 nt, Human
ugaagacagaccaaggagaaug

SEQ ID NO: 1026191 - RNA, 22 nt, Human
ugcuggccaacaaggcuccaag

SEQ ID NO: 1026192 - RNA, 22 nt, Human
ucagggacgugagcucagaguc

SEQ ID NO: 1026193 - RNA, 22 nt, Human
ccaggccuggaccaugccaggg

SEQ ID NO: 1026194 - RNA, 22 nt, Human
ccucuuugugccugcaggcugc

SEQ ID NO: 1026195 - RNA, 22 nt, Human
uauuuuaaagugaagggucuug

SEQ ID NO: 1026196 - RNA, 22 nt, Human
guuuggggucugcagagcggcg

SEQ ID NO: 1026197 - RNA, 22 nt, Human
agugaaauugcuguaagaggaa

SEQ ID NO: 1026198 - RNA, 22 nt, Human
acugggccuugccauggcagcc

SEQ ID NO: 1026199 - RNA, 22 nt, Human
guggcagcugguaugcagacag

SEQ ID NO: 1026200 - RNA, 22 nt, Human
augggaggaagagaagaugucu

SEQ ID NO: 1026201 - RNA, 22 nt, Human
uguaugcaaauuuauuagcaca

SEQ ID NO: 1026202 - RNA, 22 nt, Human
gcagggacgcagcacucuccgu

SEQ ID NO: 1026203 - RNA, 22 nt, Human
cagggcuguaaauuagugcuga

SEQ ID NO: 1026204 - RNA, 22 nt, Human
ccaggcagcucugauuuauguc

SEQ ID NO: 1026205 - RNA, 22 nt, Human
ggcucuggcguccaauggagcg

SEQ ID NO: 1026206 - RNA, 22 nt, Human
cugggugguucuaacuguugau

SEQ ID NO: 1026207 - RNA, 22 nt, Human
auugacaauuagcccuuaggug

SEQ ID NO: 1026208 - RNA, 23 nt, Human
cacugggcccaggguguggaggc

SEQ ID NO: 1026209 - RNA, 22 nt, Human
gcagcugaauguccauugcugc

SEQ ID NO: 1026210 - RNA, 22 nt, Human
ggcucccugccuguccucaguc

SEQ ID NO: 1026211 - RNA, 22 nt, Human
cagcaaucgggugauaugcaau

SEQ ID NO: 1026212 - RNA, 22 nt, Human
auuuccuagccucucuugcagu

SEQ ID NO: 1026213 - RNA, 22 nt, Human
agccacagcauguguguaugua

SEQ ID NO: 1026214 - RNA, 23 nt, Human
uucauuugucuacuucacuuguu

SEQ ID NO: 1026215 - RNA, 22 nt, Human
ugucaacacaccuaucucaauu

SEQ ID NO: 1026216 - RNA, 22 nt, Human
ccugugggagggagcggcugga

SEQ ID NO: 1026217 - RNA, 22 nt, Human
aagggcaggcacccacccucac

SEQ ID NO: 1026218 - RNA, 22 nt, Human
uggugccuugggccuacagcgc

SEQ ID NO: 1026219 - RNA, 22 nt, Human
gccugccuagaauugcagcuuu

SEQ ID NO: 1026220 - RNA, 22 nt, Human
cccuucagcugagugggacagc

SEQ ID NO: 1026221 - RNA, 22 nt, Human
gaagagcuuaguuguccuagaa

SEQ ID NO: 1026222 - RNA, 22 nt, Human
cccaggaguuugaguucagcau

SEQ ID NO: 1026223 - RNA, 22 nt, Human
uauuucuguaacucagggucug

SEQ ID NO: 1026224 - RNA, 22 nt, Human
auaaggcaagcugucaguuugu

SEQ ID NO: 1026225 - RNA, 22 nt, Human
aaacuuuaagacaguccucaag

SEQ ID NO: 1026226 - RNA, 22 nt, Human
ucagaagaagagacuccacagc

SEQ ID NO: 1026227 - RNA, 22 nt, Human
aggugcagaaaaaaguccuuua

SEQ ID NO: 1026228 - RNA, 19 nt, Human
gcucugagaggggcauggg

SEQ ID NO: 1026229 - RNA, 22 nt, Human
guuugcauauuugcacaggaau

SEQ ID NO: 1026230 - RNA, 22 nt, Human
ucacagaaauaagauaguuauu

SEQ ID NO: 1026231 - RNA, 22 nt, Human
aaggaccuauauugucagagga

SEQ ID NO: 1026232 - RNA, 22 nt, Human
gagagcuggccagcuucaguau

SEQ ID NO: 1026233 - RNA, 22 nt, Human
aacagcagggggaccugcuggu

SEQ ID NO: 1026234 - RNA, 22 nt, Human
cuguuuauacgacagguggagg

SEQ ID NO: 1026235 - RNA, 22 nt, Human
auuucucaguuccuacuguuua

SEQ ID NO: 1026236 - RNA, 22 nt, Human
auucugucuuuuuaaaauaaua

SEQ ID NO: 1026237 - RNA, 22 nt, Human
gcaaaugcuaaaguguagagac

SEQ ID NO: 1026238 - RNA, 22 nt, Human
gagucccaugaugauagccaca

SEQ ID NO: 1026239 - RNA, 22 nt, Human
aacaggcaggagaauucugccu

SEQ ID NO: 1026240 - RNA, 22 nt, Human
gugcagggagcccagaaggucc

SEQ ID NO: 1026241 - RNA, 22 nt, Human
ucuuagaaguucauguuccagc

SEQ ID NO: 1026242 - RNA, 20 nt, Human
uaucaaucagaaagaagacu

SEQ ID NO: 1026243 - RNA, 22 nt, Human
cugagcuggucuauggacuugg

SEQ ID NO: 1026244 - RNA, 22 nt, Human
cugggcuguucugccccugggu

SEQ ID NO: 1026245 - RNA, 22 nt, Human
caggaacacaaguucagggaug

SEQ ID NO: 1026246 - RNA, 22 nt, Human
ugucagagagcaggcaguagaa

SEQ ID NO: 1026247 - RNA, 22 nt, Human
gugcagugaaaaaagaaugucc

SEQ ID NO: 1026248 - RNA, 22 nt, Human
ccugcuguaaugugucuuuauu

SEQ ID NO: 1026249 - RNA, 22 nt, Human
agugcagccgagaucaggugcu

SEQ ID NO: 1026250 - RNA, 22 nt, Human
ggcucugcuucagaaggcucau

SEQ ID NO: 1026251 - RNA, 22 nt, Human
ucaucuugcugccauugcuuua

SEQ ID NO: 1026252 - RNA, 22 nt, Human
ucugcagauuuaucagcagcug

SEQ ID NO: 1026253 - RNA, 23 nt, Human
uuugcaaauuggacacaaccaca

SEQ ID NO: 1026254 - RNA, 22 nt, Human
gaggccuggagccgccuaggcg

SEQ ID NO: 1026255 - RNA, 22 nt, Human
uuguauuagcuguaaauuuucu

SEQ ID NO: 1026256 - RNA, 22 nt, Human
guuuauuaacugucaagugauu

SEQ ID NO: 1026257 - RNA, 22 nt, Human
uagcugcugcagcacagggagg

SEQ ID NO: 1026258 - RNA, 20 nt, Human
gcucccugguagaaauguuu

SEQ ID NO: 1026259 - RNA, 22 nt, Human
ucacagacaauuguuuuggugu

SEQ ID NO: 1026260 - RNA, 22 nt, Human
cagggccacccucugcugggug

SEQ ID NO: 1026261 - RNA, 22 nt, Human
uuauacuaaaacgcauugaauu

SEQ ID NO: 1026262 - RNA, 22 nt, Human
uagccucuggaauccuuucucu

SEQ ID NO: 1026263 - RNA, 22 nt, Human
gcaggauggugcccuuucugcc

SEQ ID NO: 1026264 - RNA, 22 nt, Human
uggagggaacccaggcugcucu

SEQ ID NO: 1026265 - RNA, 22 nt, Human
gaacccaguccaggugcagccu

SEQ ID NO: 1026266 - RNA, 22 nt, Human
uuucagaugcaauuaauuuuca

SEQ ID NO: 1026267 - RNA, 22 nt, Human
gccuccugguugcuucuccaac

SEQ ID NO: 1026268 - RNA, 22 nt, Human
gcagccaggaaagcuggacccu

SEQ ID NO: 1026269 - RNA, 22 nt, Human
gaagcagcuuucuggugaggag

SEQ ID NO: 1026270 - RNA, 22 nt, Human
agcccaggucuggcccagccug

SEQ ID NO: 1026271 - RNA, 22 nt, Human
gagggcugauaacaggaauaca

SEQ ID NO: 1026272 - RNA, 22 nt, Human
aacaaauguguuuuguaauuaa

SEQ ID NO: 1026273 - RNA, 22 nt, Human
ucucagggaccaugaugaugac

SEQ ID NO: 1026274 - RNA, 23 nt, Human
ugacacauuuccuuuccacugca

SEQ ID NO: 1026275 - RNA, 22 nt, Human
ggagcugcucagagccaguccc

SEQ ID NO: 1026276 - RNA, 22 nt, Human
ccacagggaacaugacagccuu

SEQ ID NO: 1026277 - RNA, 22 nt, Human
gagccuucaucgcagccuuguu

SEQ ID NO: 1026278 - RNA, 20 nt, Human
cucaguguggccugaguguu

SEQ ID NO: 1026279 - RNA, 21 nt, Human
aguugcauaggccagccaucc

SEQ ID NO: 1026280 - RNA, 22 nt, Human
uaggccagcccuuaguccuguc

SEQ ID NO: 1026281 - RNA, 22 nt, Human
augagacuaccuguaauguggc

SEQ ID NO: 1026282 - RNA, 22 nt, Human
guaugaaaauuguaaaguucuu

SEQ ID NO: 1026283 - RNA, 22 nt, Human
gcagauggaaagugcuugaggg

SEQ ID NO: 1026284 - RNA, 22 nt, Human
acauguuagaaaugcagaaucu

SEQ ID NO: 1026285 - RNA, 22 nt, Human
ugugaggagaggcccagcuccc

SEQ ID NO: 1026286 - RNA, 21 nt, Human
gcucccuggcugugugaccug

SEQ ID NO: 1026287 - RNA, 22 nt, Human
gccugagauucugcauuucuaa

SEQ ID NO: 1026288 - RNA, 22 nt, Human
acaggggauugauuggaagucu

SEQ ID NO: 1026289 - RNA, 23 nt, Human
ugcagccacucaggagcucagug

SEQ ID NO: 1026290 - RNA, 22 nt, Human
aaacuucauggauaauauaaag

SEQ ID NO: 1026291 - RNA, 23 nt, Human
ucccagggaaggugagcgaggcu

SEQ ID NO: 1026292 - RNA, 22 nt, Human
aauuaacaaauguagcugugau

SEQ ID NO: 1026293 - RNA, 22 nt, Human
aguguguccagaaaucuguauu

SEQ ID NO: 1026294 - RNA, 22 nt, Human
ucuuuucuggacucugcaugga

SEQ ID NO: 1026295 - RNA, 22 nt, Human
cucaguuucuucauauuguagg

SEQ ID NO: 1026296 - RNA, 22 nt, Human
uucacuuauagggauguuauug

SEQ ID NO: 1026297 - RNA, 22 nt, Human
cacaggagagcugggaggugcc

SEQ ID NO: 1026298 - RNA, 22 nt, Human
ggaggaugccaagcugugcaca

SEQ ID NO: 1026299 - RNA, 22 nt, Human
aagggcucucugcauugaaauu

SEQ ID NO: 1026300 - RNA, 22 nt, Human
accauuugacucucuaaggaua

SEQ ID NO: 1026301 - RNA, 22 nt, Human
caaauucucuuacuguuugaca

SEQ ID NO: 1026302 - RNA, 21 nt, Human
cucaaagaccaaaaguguaga

SEQ ID NO: 1026303 - RNA, 22 nt, Human
agucccaguucgguucuuccuc

SEQ ID NO: 1026304 - RNA, 22 nt, Human
gggcucuguccauuccuucaua

SEQ ID NO: 1026305 - RNA, 22 nt, Human
gcaagcuggcuguuagaggaug

SEQ ID NO: 1026306 - RNA, 22 nt, Human
ucuguucauuugccucggcucu

SEQ ID NO: 1026307 - RNA, 22 nt, Human
gagggagagugauggaccauug

SEQ ID NO: 1026308 - RNA, 22 nt, Human
augugaggaagaaagagguaag

SEQ ID NO: 1026309 - RNA, 22 nt, Human
agagccuguacuuuucugugaa

SEQ ID NO: 1026310 - RNA, 22 nt, Human
augaaggcuguguagauggaug

SEQ ID NO: 1026311 - RNA, 22 nt, Human
cagguggggcgcccucaggcag

SEQ ID NO: 1026312 - RNA, 22 nt, Human
gcagggugccgacuucagggau

SEQ ID NO: 1026313 - RNA, 22 nt, Human
cccacucuggcucccuucuagu

SEQ ID NO: 1026314 - RNA, 22 nt, Human
uggcucagugaagagauaacuu

SEQ ID NO: 1026315 - RNA, 22 nt, Human
guauuagguuggugcaaaauug

SEQ ID NO: 1026316 - RNA, 22 nt, Human
cucacugacgaggaagcugaga

SEQ ID NO: 1026317 - RNA, 22 nt, Human
aucacaggugguaggaaaagaa

SEQ ID NO: 1026318 - RNA, 22 nt, Human
aguccaugguucugacucaucu

SEQ ID NO: 1026319 - RNA, 22 nt, Human
gcucccuccaugaggcagaccg

SEQ ID NO: 1026320 - RNA, 19 nt, Human
aggacucuggaggcaugag

SEQ ID NO: 1026321 - RNA, 22 nt, Human
gcuggccugaccagccacaggc

SEQ ID NO: 1026322 - RNA, 22 nt, Human
uaaauucuacaacuucaaagau

SEQ ID NO: 1026323 - RNA, 22 nt, Human
agaacagcagcacgucaagcug

SEQ ID NO: 1026324 - RNA, 22 nt, Human
cagcccuguccagcagagggug

SEQ ID NO: 1026325 - RNA, 22 nt, Human
cuggcagcuuccuuugcaucug

SEQ ID NO: 1026326 - RNA, 19 nt, Human
uccuucagucagaucuggg

SEQ ID NO: 1026327 - RNA, 22 nt, Human
aaucucuuuggcucaaggaucc

SEQ ID NO: 1026328 - RNA, 22 nt, Human
ccuguggggccaucucagucac

SEQ ID NO: 1026329 - RNA, 22 nt, Human
guaucacuuuugagagugagaa

SEQ ID NO: 1026330 - RNA, 22 nt, Human
cccauuuaaacacaagcuuuca

SEQ ID NO: 1026331 - RNA, 22 nt, Human
aauccaggguguggccuuucca

SEQ ID NO: 1026332 - RNA, 22 nt, Human
uccugugccuccaccugcuccg

SEQ ID NO: 1026333 - RNA, 22 nt, Human
agcugcaguaaagcucuccagg

SEQ ID NO: 1026334 - RNA, 21 nt, Human
ccuggcuucagggugcacugg

SEQ ID NO: 1026335 - RNA, 22 nt, Human
gcagcugggccccagccucucc

SEQ ID NO: 1026336 - RNA, 22 nt, Human
gccugggaacucugaucuccug

SEQ ID NO: 1026337 - RNA, 22 nt, Human
cucaggaaaggccaugcaaggg

SEQ ID NO: 1026338 - RNA, 22 nt, Human
agaaaaggcuugaagagguuuu

SEQ ID NO: 1026339 - RNA, 19 nt, Human
aucugccuuagugcugcug

SEQ ID NO: 1026340 - RNA, 22 nt, Human
gguaaaaugcagauucuuagcc

SEQ ID NO: 1026341 - RNA, 22 nt, Human
uuugacaaaggaaaaaugcaca

SEQ ID NO: 1026342 - RNA, 22 nt, Human
ccugggugaugugcugcccucg

SEQ ID NO: 1026343 - RNA, 22 nt, Human
ugggcacaggggaauggaugaa

SEQ ID NO: 1026344 - RNA, 22 nt, Human
agggcacaucugcugggaaugg

SEQ ID NO: 1026345 - RNA, 22 nt, Human
gaauaguucuauggcugcaggg

SEQ ID NO: 1026346 - RNA, 22 nt, Human
cugcagggaugugaggcccguu

SEQ ID NO: 1026347 - RNA, 22 nt, Human
uuucugaaaucucuuuugagga

SEQ ID NO: 1026348 - RNA, 19 nt, Human
uggcagggagugauauuag

SEQ ID NO: 1026349 - RNA, 22 nt, Human
ggcuuggaccagucacaguggu

SEQ ID NO: 1026350 - RNA, 19 nt, Human
ccaggccuggcgucuccgc

SEQ ID NO: 1026351 - RNA, 22 nt, Human
ccagcugggauuaagggaaaau

SEQ ID NO: 1026352 - RNA, 22 nt, Human
aaggcaguagguguuucaaacu

SEQ ID NO: 1026353 - RNA, 19 nt, Human
agaaucaggucaggugaca

SEQ ID NO: 1026354 - RNA, 22 nt, Human
auguaucagauaaagcaugugg

SEQ ID NO: 1026355 - RNA, 22 nt, Human
ugggacagagugagcuuuggcc

SEQ ID NO: 1026356 - RNA, 22 nt, Human
ucuccuuugaaaguuaggacug

SEQ ID NO: 1026357 - RNA, 22 nt, Human
gccuuggcugaugugcgaauga

SEQ ID NO: 1026358 - RNA, 22 nt, Human
uaaaauguuugcaagagaccag

SEQ ID NO: 1026359 - RNA, 22 nt, Human
accucugcaacccuggaauggg

SEQ ID NO: 1026360 - RNA, 22 nt, Human
caguggccaugguggcaggggu

SEQ ID NO: 1026361 - RNA, 22 nt, Human
gcugccuggcuuuaguccacuu

SEQ ID NO: 1026362 - RNA, 22 nt, Human
cccucugaccuccugccacagu

SEQ ID NO: 1026363 - RNA, 22 nt, Human
gaggagagagggacugucugca

SEQ ID NO: 1026364 - RNA, 22 nt, Human
uaggcugggagccugaggcuag

SEQ ID NO: 1026365 - RNA, 22 nt, Human
ugggccuguggcuuggcucuag

SEQ ID NO: 1026366 - RNA, 22 nt, Human
gcuugggacuggagaauagggu

SEQ ID NO: 1026367 - RNA, 22 nt, Human
gguggguauugaauacaggugu

SEQ ID NO: 1026368 - RNA, 22 nt, Human
guggcuucuggcugggccucag

SEQ ID NO: 1026369 - RNA, 22 nt, Human
ucccugcucagcucaccuggca

SEQ ID NO: 1026370 - RNA, 21 nt, Human
auuuucauuaauucagugugg

SEQ ID NO: 1026371 - RNA, 22 nt, Human
gccaggugggagacagacagca

SEQ ID NO: 1026372 - RNA, 20 nt, Human
aaaaucucccagaaacuuau

SEQ ID NO: 1026373 - RNA, 22 nt, Human
agcagcugucccuuaacaucag

SEQ ID NO: 1026374 - RNA, 22 nt, Human
agacccucuccaugcccacugc

SEQ ID NO: 1026375 - RNA, 22 nt, Human
ugggcucauggcccagcacugg

SEQ ID NO: 1026376 - RNA, 22 nt, Human
uggcagccaucugagggugggg

SEQ ID NO: 1026377 - RNA, 22 nt, Human
gaacuguaguuaauacuacaca

SEQ ID NO: 1026378 - RNA, 22 nt, Human
cugggguggugcaggccucaug

SEQ ID NO: 1026379 - RNA, 22 nt, Human
ugaagaugucagcagggguggu

SEQ ID NO: 1026380 - RNA, 22 nt, Human
agggaagaagcugguaguaggu

SEQ ID NO: 1026381 - RNA, 22 nt, Human
auuagggaaggauuuggccuga

SEQ ID NO: 1026382 - RNA, 22 nt, Human
uggagcugguaaacagugacau

SEQ ID NO: 1026383 - RNA, 22 nt, Human
caaagugcuaggauuacaggcc

SEQ ID NO: 1026384 - RNA, 22 nt, Human
uucagcaaauggacuguucagg

SEQ ID NO: 1026385 - RNA, 22 nt, Human
guuuacaaauauuuuaaauggu

SEQ ID NO: 1026386 - RNA, 22 nt, Human
cugcucuggcguacucggcauc

SEQ ID NO: 1026387 - RNA, 21 nt, Human
agccugcaauguagguaccgg

SEQ ID NO: 1026388 - RNA, 22 nt, Human
ggcugcugguggaaugguaggc

SEQ ID NO: 1026389 - RNA, 22 nt, Human
cccuggaggcaaagguugcagu

SEQ ID NO: 1026390 - RNA, 22 nt, Human
cggcagagacggcgcuuugaac

SEQ ID NO: 1026391 - RNA, 22 nt, Human
cccuggaggcggauguugcagu

SEQ ID NO: 1026392 - RNA, 22 nt, Human
cugggacacccagagcugcaga

SEQ ID NO: 1026393 - RNA, 19 nt, Human
acaaagcugugagcagcuu

SEQ ID NO: 1026394 - RNA, 21 nt, Human
ucacaugcccauuacuggagc

SEQ ID NO: 1026395 - RNA, 22 nt, Human
agccaggauuggcugagccuua

SEQ ID NO: 1026396 - RNA, 22 nt, Human
cagggccacuguagaugaggag

SEQ ID NO: 1026397 - RNA, 22 nt, Human
acagagagaaacaaucagcagc

SEQ ID NO: 1026398 - RNA, 20 nt, Human
agaguaacuggcacauaggg

SEQ ID NO: 1026399 - RNA, 22 nt, Human
ggcuuuaucaaaugagacccug

SEQ ID NO: 1026400 - RNA, 22 nt, Human
uggcucagagcagggacucugg

SEQ ID NO: 1026401 - RNA, 22 nt, Human
uaagaacaagauguuccuguuu

SEQ ID NO: 1026402 - RNA, 22 nt, Human
aagcugccagauucagucugcu

SEQ ID NO: 1026403 - RNA, 22 nt, Human
uaagauaugguaggaaguuugg

SEQ ID NO: 1026404 - RNA, 22 nt, Human
ugcuagaaaucugaaacuagca

SEQ ID NO: 1026405 - RNA, 22 nt, Human
uugaaucuauguauucagugua

SEQ ID NO: 1026406 - RNA, 22 nt, Human
cagagaaagggugaauuccuuc

SEQ ID NO: 1026407 - RNA, 22 nt, Human
gaggccuuagagcuuuucuaga

SEQ ID NO: 1026408 - RNA, 22 nt, Human
uacaaacuuguuuuaaguaagu

SEQ ID NO: 1026409 - RNA, 18 nt, Human
cagaugagaugcaaucuc

SEQ ID NO: 1026410 - RNA, 22 nt, Human
cucagcccagcccaggaccagg

SEQ ID NO: 1026411 - RNA, 22 nt, Human
aauuugauuuucuuaaaccaua

SEQ ID NO: 1026412 - RNA, 23 nt, Human
ucuccagugucucuucauugagu

SEQ ID NO: 1026413 - RNA, 22 nt, Human
agccucucuuucugguggcuaa

SEQ ID NO: 1026414 - RNA, 22 nt, Human
ucagaagcaaacaucacucuag

SEQ ID NO: 1026415 - RNA, 22 nt, Human
agaggggcucaagcaguggucu

SEQ ID NO: 1026416 - RNA, 22 nt, Human
gccugcagccucaagggcugag

SEQ ID NO: 1026417 - RNA, 22 nt, Human
accacaggaauugcucuguggu

SEQ ID NO: 1026418 - RNA, 22 nt, Human
cuacagacccaccuuggaagaa

SEQ ID NO: 1026419 - RNA, 19 nt, Human
cucuuaaauugucucuugc

SEQ ID NO: 1026420 - RNA, 18 nt, Human
uuugcaaaggaaguaugg

SEQ ID NO: 1026421 - RNA, 22 nt, Human
ugauuuccaaaaggcuucuaag

SEQ ID NO: 1026422 - RNA, 22 nt, Human
uugauacagcagccugugaucc

SEQ ID NO: 1026423 - RNA, 22 nt, Human
agagcuguucagcagccagguu

SEQ ID NO: 1026424 - RNA, 22 nt, Human
ugaaaugagcauuuauucuuua

SEQ ID NO: 1026425 - RNA, 22 nt, Human
uccugcagccuugggcuggagc

SEQ ID NO: 1026426 - RNA, 22 nt, Human
uuccuuaggcuguuugcagugc

SEQ ID NO: 1026427 - RNA, 22 nt, Human
uuagaaaaaggcuguggucuua

SEQ ID NO: 1026428 - RNA, 22 nt, Human
aaucagaauuuauugaaucuuu

SEQ ID NO: 1026429 - RNA, 22 nt, Human
guguuuuaucagacaaaguaua

SEQ ID NO: 1026430 - RNA, 22 nt, Human
ucugcgcugccuugauccuugg

SEQ ID NO: 1026431 - RNA, 22 nt, Human
ggccucuggcaggcaggcccuc

SEQ ID NO: 1026432 - RNA, 22 nt, Human
guggccugggguuuguucugag

SEQ ID NO: 1026433 - RNA, 22 nt, Human
ggugacuggagggacccaggcc

SEQ ID NO: 1026434 - RNA, 21 nt, Human
agucccaggggugagugaugu

SEQ ID NO: 1026435 - RNA, 22 nt, Human
ccugccaggccagugagcuucc

SEQ ID NO: 1026436 - RNA, 22 nt, Human
cugggagcaagucaggaaaggu

SEQ ID NO: 1026437 - RNA, 22 nt, Human
acccugccgugggcugcuugug

SEQ ID NO: 1026438 - RNA, 22 nt, Human
agcuuccuacaaccaucucaga

SEQ ID NO: 1026439 - RNA, 22 nt, Human
uggcugugaacaaagagaauaa

SEQ ID NO: 1026440 - RNA, 23 nt, Human
aggagccaggugcagcccuugug

SEQ ID NO: 1026441 - RNA, 22 nt, Human
ccugggaggcagagguugcagu

SEQ ID NO: 1026442 - RNA, 22 nt, Human
agcugcugcgccucacccuggc

SEQ ID NO: 1026443 - RNA, 22 nt, Human
ccagugcuaagguagccucugc

SEQ ID NO: 1026444 - RNA, 22 nt, Human
gcagaggcaaucagguaugugg

SEQ ID NO: 1026445 - RNA, 22 nt, Human
cuuagaaaucgaacucagguua

SEQ ID NO: 1026446 - RNA, 22 nt, Human
aggccugaaggaagaugagcug

SEQ ID NO: 1026447 - RNA, 22 nt, Human
uccugcagcucugagaagcauc

SEQ ID NO: 1026448 - RNA, 23 nt, Human
acagacaacacugaugagagaaa

SEQ ID NO: 1026449 - RNA, 22 nt, Human
gcaggagcagucaggggcagcu

SEQ ID NO: 1026450 - RNA, 22 nt, Human
aaguucaagaucaagguuccag

SEQ ID NO: 1026451 - RNA, 22 nt, Human
cccaucaggaacccaggagccc

SEQ ID NO: 1026452 - RNA, 22 nt, Human
ugagugccugaacauagaguag

SEQ ID NO: 1026453 - RNA, 22 nt, Human
ucccagggacucucugccuucc

SEQ ID NO: 1026454 - RNA, 22 nt, Human
aauuagggagagguagcuaggu

SEQ ID NO: 1026455 - RNA, 22 nt, Human
ucuggcucuauaacuccuagcu

SEQ ID NO: 1026456 - RNA, 22 nt, Human
auuucacucuuaauugcuuccu

SEQ ID NO: 1026457 - RNA, 22 nt, Human
aggacccugagcgggcaugccg

SEQ ID NO: 1026458 - RNA, 22 nt, Human
agcaggaggguuuuguagaguc

SEQ ID NO: 1026459 - RNA, 22 nt, Human
cagcauggggaucacuguaggc

SEQ ID NO: 1026460 - RNA, 22 nt, Human
gcucucuuuuuccagugguggu

SEQ ID NO: 1026461 - RNA, 20 nt, Human
uccagccacuuccgcugguc

SEQ ID NO: 1026462 - RNA, 22 nt, Human
aagccagggucaggggccuccu

SEQ ID NO: 1026463 - RNA, 18 nt, Human
uggcagggaggaaauaua

SEQ ID NO: 1026464 - RNA, 22 nt, Human
ccauuguaguaucuguuuuagu

SEQ ID NO: 1026465 - RNA, 22 nt, Human
gcucagagaaucagcagacacc

SEQ ID NO: 1026466 - RNA, 23 nt, Human
cagggcugguagggaagagcgug

SEQ ID NO: 1026467 - RNA, 22 nt, Human
gugccugugccaggggugugcu

SEQ ID NO: 1026468 - RNA, 22 nt, Human
aguccggggucuggacaccugg

SEQ ID NO: 1026469 - RNA, 22 nt, Human
ugggcacuggaagccugcugug

SEQ ID NO: 1026470 - RNA, 22 nt, Human
acguuuucagccuuaauguaga

SEQ ID NO: 1026471 - RNA, 22 nt, Human
cagccaggacagggaaacuagu

SEQ ID NO: 1026472 - RNA, 22 nt, Human
aggcugggaaauguagucuucc

SEQ ID NO: 1026473 - RNA, 19 nt, Human
ucaggacugacuugaaguc

SEQ ID NO: 1026474 - RNA, 22 nt, Human
uauuuguauuucaugcaguaaa

SEQ ID NO: 1026475 - RNA, 22 nt, Human
caaauacuaaacauaagauuuu

SEQ ID NO: 1026476 - RNA, 22 nt, Human
acucaggagggaucagcuauca

SEQ ID NO: 1026477 - RNA, 22 nt, Human
uacacacaugcauuugccuuau

SEQ ID NO: 1026478 - RNA, 22 nt, Human
ugaacauauucaccucuaaaua

SEQ ID NO: 1026479 - RNA, 22 nt, Human
auccuugaacuuagacacuagg

SEQ ID NO: 1026480 - RNA, 22 nt, Human
uucauuacugcgguagucacac

SEQ ID NO: 1026481 - RNA, 22 nt, Human
cccagcagccagaaugaggagc

SEQ ID NO: 1026482 - RNA, 22 nt, Human
ggcuuuauguuuuucauguggu

SEQ ID NO: 1026483 - RNA, 22 nt, Human
caggcacucauucagagaggug

SEQ ID NO: 1026484 - RNA, 22 nt, Human
uuuaauuuguauuucuagaggg

SEQ ID NO: 1026485 - RNA, 22 nt, Human
ugcugagcgcauccggcggccg

SEQ ID NO: 1026486 - RNA, 22 nt, Human
cauuaaaauaucucaugguguu

SEQ ID NO: 1026487 - RNA, 22 nt, Human
gcccagcuccucugcagacccu

SEQ ID NO: 1026488 - RNA, 22 nt, Human
acaguaauuaaaauggaucugc

SEQ ID NO: 1026489 - RNA, 20 nt, Human
caccacagaauuggggacag

SEQ ID NO: 1026490 - RNA, 22 nt, Human
cuguaugguccacgugggugcc

SEQ ID NO: 1026491 - RNA, 20 nt, Human
gagggcaggcacccauuuca

SEQ ID NO: 1026492 - RNA, 20 nt, Human
uuuuccuucugaguauguug

SEQ ID NO: 1026493 - RNA, 21 nt, Human
uuuagggaccaggucauaggc

SEQ ID NO: 1026494 - RNA, 22 nt, Human
agugucauaugccacugcaucc

SEQ ID NO: 1026495 - RNA, 22 nt, Human
cagcucccuauggugaggcgac

SEQ ID NO: 1026496 - RNA, 22 nt, Human
cuuuccuagauggccaucuuuc

SEQ ID NO: 1026497 - RNA, 22 nt, Human
gguggcaggcccugagcauccc

SEQ ID NO: 1026498 - RNA, 22 nt, Human
ggcuggcuuucucuccgcaccu

SEQ ID NO: 1026499 - RNA, 22 nt, Human
ggcugcagggcagcuggugugg

SEQ ID NO: 1026500 - RNA, 21 nt, Human
ugccagcauguaggcuaguug

SEQ ID NO: 1026501 - RNA, 22 nt, Human
uggccuggggaccugugagacc

SEQ ID NO: 1026502 - RNA, 22 nt, Human
gcagacagggcuacagagguac

SEQ ID NO: 1026503 - RNA, 22 nt, Human
gccuggagcucggcugagggcg

SEQ ID NO: 1026504 - RNA, 22 nt, Human
uagagcugcuggacuguaacag

SEQ ID NO: 1026505 - RNA, 23 nt, Human
ccugugugcccuuaauucacagc

SEQ ID NO: 1026506 - RNA, 22 nt, Human
ugcucacagcccagaacauaau

SEQ ID NO: 1026507 - RNA, 22 nt, Human
ggcuucaccaggugcaugcaug

SEQ ID NO: 1026508 - RNA, 22 nt, Human
cacugaagaugcgacuagugcu

SEQ ID NO: 1026509 - RNA, 22 nt, Human
uuuuagauugggaaauguaaag

SEQ ID NO: 1026510 - RNA, 22 nt, Human
agauacauuaguaguuacuugu

SEQ ID NO: 1026511 - RNA, 22 nt, Human
cagcuuuggcccagucgggagg

SEQ ID NO: 1026512 - RNA, 22 nt, Human
gcccauggacacccaagugcca

SEQ ID NO: 1026513 - RNA, 22 nt, Human
ucuuugaacuuggcugaucucu

SEQ ID NO: 1026514 - RNA, 22 nt, Human
caggugcucccagagaagugcu

SEQ ID NO: 1026515 - RNA, 22 nt, Human
uauuuugagguauuuuugagcu

SEQ ID NO: 1026516 - RNA, 22 nt, Human
gcugucucauacaaggcccugc

SEQ ID NO: 1026517 - RNA, 22 nt, Human
auggacagugugucuguuucca

SEQ ID NO: 1026518 - RNA, 22 nt, Human
uaaguucauuagacuacagaua

SEQ ID NO: 1026519 - RNA, 22 nt, Human
auuucuguaguccacauucuuu

SEQ ID NO: 1026520 - RNA, 22 nt, Human
uacaaaugaaccaacuuugaug

SEQ ID NO: 1026521 - RNA, 22 nt, Human
gcaggagcuggaaagugauguu

SEQ ID NO: 1026522 - RNA, 22 nt, Human
ugaucagucccaugaucuucca

SEQ ID NO: 1026523 - RNA, 22 nt, Human
aacauuuaugauugagguaaau

SEQ ID NO: 1026524 - RNA, 22 nt, Human
ucaaagucauggcuaguaauga

SEQ ID NO: 1026525 - RNA, 18 nt, Human
uuuuacucauagcaggcc

SEQ ID NO: 1026526 - RNA, 22 nt, Human
cccaggcugaguuagagguguc

SEQ ID NO: 1026527 - RNA, 20 nt, Human
uuucacaucugucccuuuaa

SEQ ID NO: 1026528 - RNA, 22 nt, Human
acuucuggugucauacugcauu

SEQ ID NO: 1026529 - RNA, 17 nt, Human
gcuuccugugcugggga

SEQ ID NO: 1026530 - RNA, 22 nt, Human
uuuccauauuuggucuuuggga

SEQ ID NO: 1026531 - RNA, 22 nt, Human
ccugugccauccugagcauccc

SEQ ID NO: 1026532 - RNA, 22 nt, Human
gagacagugguugcagaagcuc

SEQ ID NO: 1026533 - RNA, 22 nt, Human
cugcuuugaaaauaaacuuguc

SEQ ID NO: 1026534 - RNA, 21 nt, Human
accagcaggagaucagaagga

SEQ ID NO: 1026535 - RNA, 22 nt, Human
aauuagggaaguauuuaguagu

SEQ ID NO: 1026536 - RNA, 22 nt, Human
uuucuucucgacaccuuauccc

SEQ ID NO: 1026537 - RNA, 22 nt, Human
uucaggaucacuaaacccucca

SEQ ID NO: 1026538 - RNA, 22 nt, Human
ggccucugcaacuggcuguggc

SEQ ID NO: 1026539 - RNA, 22 nt, Human
ccucuucuagguuucagccugc

SEQ ID NO: 1026540 - RNA, 22 nt, Human
caucaaauggcaagugaaagcu

SEQ ID NO: 1026541 - RNA, 22 nt, Human
cucaggcacgggucagugagcg

SEQ ID NO: 1026542 - RNA, 22 nt, Human
ugaaggaaugaguauacuguuu

SEQ ID NO: 1026543 - RNA, 21 nt, Human
ucagcagcuuuugcagucccu

SEQ ID NO: 1026544 - RNA, 22 nt, Human
auaguuugaaggcuguucuacu

SEQ ID NO: 1026545 - RNA, 22 nt, Human
cccuggaguccuggcaguugau

SEQ ID NO: 1026546 - RNA, 22 nt, Human
cuguccagaaagggggcaacaa

SEQ ID NO: 1026547 - RNA, 22 nt, Human
agcagcauagaagcugggagga

SEQ ID NO: 1026548 - RNA, 22 nt, Human
agauuguagaaacuguagcauu

SEQ ID NO: 1026549 - RNA, 21 nt, Human
acaugucucuaaucucaguga

SEQ ID NO: 1026550 - RNA, 22 nt, Human
cauaacuagagugaaauguuga

SEQ ID NO: 1026551 - RNA, 21 nt, Human
acagcaagccuuccuuucagg

SEQ ID NO: 1026552 - RNA, 22 nt, Human
cuccugagcucugaggaagcuu

SEQ ID NO: 1026553 - RNA, 22 nt, Human
gagugaaaaaggaagggccaua

SEQ ID NO: 1026554 - RNA, 22 nt, Human
gcugucugggaugucacugcug

SEQ ID NO: 1026555 - RNA, 22 nt, Human
uugcagagaucagcagguuuga

SEQ ID NO: 1026556 - RNA, 22 nt, Human
aagggcuccaagagguagcugg

SEQ ID NO: 1026557 - RNA, 22 nt, Human
ccuuccuggcuguccgccugau

SEQ ID NO: 1026558 - RNA, 21 nt, Human
aggcccagcuuuccucuugcu

SEQ ID NO: 1026559 - RNA, 22 nt, Human
uguauuuucuucuggaagcuua

SEQ ID NO: 1026560 - RNA, 22 nt, Human
aaggcagcagugcacgacugau

SEQ ID NO: 1026561 - RNA, 22 nt, Human
uagucaaaccucagaauacccc

SEQ ID NO: 1026562 - RNA, 22 nt, Human
ugaauaugugacuuugauuuca

SEQ ID NO: 1026563 - RNA, 22 nt, Human
auuauguagcuaaaaauugugu

SEQ ID NO: 1026564 - RNA, 22 nt, Human
acucugccaucccaggugcugu

SEQ ID NO: 1026565 - RNA, 22 nt, Human
ugccaggcccugugcuggaugc

SEQ ID NO: 1026566 - RNA, 22 nt, Human
agcucugacauugauucucagc

SEQ ID NO: 1026567 - RNA, 22 nt, Human
gccuggaggguugagguuuugu

SEQ ID NO: 1026568 - RNA, 23 nt, Human
aggauguaggauguauggcagag

SEQ ID NO: 1026569 - RNA, 22 nt, Human
ugcccuguuccugccuccagcu

SEQ ID NO: 1026570 - RNA, 22 nt, Human
agucucagaaaagaagcaugga

SEQ ID NO: 1026571 - RNA, 22 nt, Human
ucagagagugcaaaauauagcu

SEQ ID NO: 1026572 - RNA, 22 nt, Human
uucuuucccaguagaugugaaa

SEQ ID NO: 1026573 - RNA, 20 nt, Human
ugaaggccagcagcauaggg

SEQ ID NO: 1026574 - RNA, 22 nt, Human
agcuaggaaauugaggcugaga

SEQ ID NO: 1026575 - RNA, 21 nt, Human
aaagagguuaauauuguaagu

SEQ ID NO: 1026576 - RNA, 22 nt, Human
augacagaaggccucccugaca

SEQ ID NO: 1026577 - RNA, 20 nt, Human
aguguacagacacuagaaau

SEQ ID NO: 1026578 - RNA, 22 nt, Human
gaaaggagggaaacagagcggu

SEQ ID NO: 1026579 - RNA, 22 nt, Human
auaucauuauguuaugagcaca

SEQ ID NO: 1026580 - RNA, 22 nt, Human
cuggccacaugugugcugagca

SEQ ID NO: 1026581 - RNA, 22 nt, Human
cuggugcaggaaggagcuggca

SEQ ID NO: 1026582 - RNA, 22 nt, Human
ccuagaugggauggcggccggg

SEQ ID NO: 1026583 - RNA, 22 nt, Human
cugcagaggccucgccuccucu

SEQ ID NO: 1026584 - RNA, 22 nt, Human
augcagguugggcaaguguggg

SEQ ID NO: 1026585 - RNA, 22 nt, Human
guggaggacaaaagaagccuuu

SEQ ID NO: 1026586 - RNA, 22 nt, Human
uaacacauuaguucuccuagau

SEQ ID NO: 1026587 - RNA, 22 nt, Human
aguaugaauacagauuuucucu

SEQ ID NO: 1026588 - RNA, 22 nt, Human
gaggccugguuuccagcauccu

SEQ ID NO: 1026589 - RNA, 22 nt, Human
ccaggccucccuuuuccagcca

SEQ ID NO: 1026590 - RNA, 22 nt, Human
cagcuucugcuaucgaacaucu

SEQ ID NO: 1026591 - RNA, 22 nt, Human
aaauggaucuguggaauacauu

SEQ ID NO: 1026592 - RNA, 22 nt, Human
ggcagggaggaggugaaaguga

SEQ ID NO: 1026593 - RNA, 22 nt, Human
acagagcaguucuggagcuggc

SEQ ID NO: 1026594 - RNA, 22 nt, Human
agagcuggccagggaucacucu

SEQ ID NO: 1026595 - RNA, 22 nt, Human
gacaauaaaaugaucuuacagu

SEQ ID NO: 1026596 - RNA, 22 nt, Human
acuuccugggcaugcagagucc

SEQ ID NO: 1026597 - RNA, 22 nt, Human
agcuuccaauuucuccaagaga

SEQ ID NO: 1026598 - RNA, 20 nt, Human
gucaggauuaguaaacucug

SEQ ID NO: 1026599 - RNA, 20 nt, Human
ugaagcagccuugauucugu

SEQ ID NO: 1026600 - RNA, 22 nt, Human
uuugcauuccugccugcauuca

SEQ ID NO: 1026601 - RNA, 22 nt, Human
auaucuuuguuuuugccaagau

SEQ ID NO: 1026602 - RNA, 22 nt, Human
cugugcuugcggguguggagcc

SEQ ID NO: 1026603 - RNA, 22 nt, Human
acacagggcugcgccugacccc

SEQ ID NO: 1026604 - RNA, 22 nt, Human
ggucccagguugacagggagac

SEQ ID NO: 1026605 - RNA, 22 nt, Human
cccucuggcucuucucaggccg

SEQ ID NO: 1026606 - RNA, 22 nt, Human
gcucccacgcaauucuuuucag

SEQ ID NO: 1026607 - RNA, 22 nt, Human
aggcccugcauuguacugaggg

SEQ ID NO: 1026608 - RNA, 22 nt, Human
uggcccugacacgugguacugg

SEQ ID NO: 1026609 - RNA, 22 nt, Human
accaugggucagccaccucagc

SEQ ID NO: 1026610 - RNA, 20 nt, Human
gcugggggugugcugaguga

SEQ ID NO: 1026611 - RNA, 22 nt, Human
gggcagauggggcacaggcuga

SEQ ID NO: 1026612 - RNA, 22 nt, Human
aauaaacugcucaauugcauca

SEQ ID NO: 1026613 - RNA, 22 nt, Human
uuguacaaauaggaaccucuga

SEQ ID NO: 1026614 - RNA, 19 nt, Human
cagcaauaaugccagaugg

SEQ ID NO: 1026615 - RNA, 22 nt, Human
augucccuucuuuggugcucag

SEQ ID NO: 1026616 - RNA, 22 nt, Human
aggaccaacauagcagcagugg

SEQ ID NO: 1026617 - RNA, 22 nt, Human
uugcugaaguuaaugcuugcaa

SEQ ID NO: 1026618 - RNA, 22 nt, Human
ggagccuggccuggcucugugu

SEQ ID NO: 1026619 - RNA, 22 nt, Human
uucauucuugggaucagagagu

SEQ ID NO: 1026620 - RNA, 22 nt, Human
gcuggcauuacaggagagaacc

SEQ ID NO: 1026621 - RNA, 17 nt, Human
gguggccugcaguggcu

SEQ ID NO: 1026622 - RNA, 22 nt, Human
uacaaaguuugagaaugcuuuc

SEQ ID NO: 1026623 - RNA, 22 nt, Human
auucuucaucagagaugcacua

SEQ ID NO: 1026624 - RNA, 22 nt, Human
cugcccugacugaccuuuugaa

SEQ ID NO: 1026625 - RNA, 22 nt, Human
ugguccugccccgugcacagag

SEQ ID NO: 1026626 - RNA, 22 nt, Human
acacagggucuagaguuaggcc

SEQ ID NO: 1026627 - RNA, 22 nt, Human
cagagcugggaucccaugggcg

SEQ ID NO: 1026628 - RNA, 22 nt, Human
acagucauuagauacaaugucu

SEQ ID NO: 1026629 - RNA, 22 nt, Human
gucaggaucucccaguacauau

SEQ ID NO: 1026630 - RNA, 22 nt, Human
cagaguggcgacccccucagcu

SEQ ID NO: 1026631 - RNA, 22 nt, Human
ccaaggaguagagcaggaagcu

SEQ ID NO: 1026632 - RNA, 22 nt, Human
ccagguggaggugugagguccu

SEQ ID NO: 1026633 - RNA, 23 nt, Human
ggcagagagcauggcuggggccc

SEQ ID NO: 1026634 - RNA, 22 nt, Human
agucauaauuauaaacaucagu

SEQ ID NO: 1026635 - RNA, 22 nt, Human
gccaggcuggccagcaccuucu

SEQ ID NO: 1026636 - RNA, 18 nt, Human
gcagcugcaguuguagcu

SEQ ID NO: 1026637 - RNA, 22 nt, Human
acagaggccaugagcugccacc

SEQ ID NO: 1026638 - RNA, 22 nt, Human
ucuguucaugucuuuuuaagug

SEQ ID NO: 1026639 - RNA, 22 nt, Human
gauggccuguauuugggccaga

SEQ ID NO: 1026640 - RNA, 22 nt, Human
ccagagcccagcacacggugcu

SEQ ID NO: 1026641 - RNA, 22 nt, Human
agguuuaugccuuggagcuggg

SEQ ID NO: 1026642 - RNA, 22 nt, Human
uuccggaagguucucuagaauu

SEQ ID NO: 1026643 - RNA, 22 nt, Human
cugggaaggggaagguccucuc

SEQ ID NO: 1026644 - RNA, 22 nt, Human
ugucuuuucuacuguaagcaua

SEQ ID NO: 1026645 - RNA, 22 nt, Human
acaggugauucaggcucuggga

SEQ ID NO: 1026646 - RNA, 20 nt, Human
ccuggagccuggaaggaguc

SEQ ID NO: 1026647 - RNA, 22 nt, Human
auccaggcuggguguggcuacu

SEQ ID NO: 1026648 - RNA, 22 nt, Human
ccagcugcagguguuccagaug

SEQ ID NO: 1026649 - RNA, 17 nt, Human
uccuucagugccucugc

SEQ ID NO: 1026650 - RNA, 22 nt, Human
gcuggcagcuggaaguugggcu

SEQ ID NO: 1026651 - RNA, 22 nt, Human
ucaucaguguccuuaucacuua

SEQ ID NO: 1026652 - RNA, 22 nt, Human
ucagaggagaaguugggaaaau

SEQ ID NO: 1026653 - RNA, 22 nt, Human
gcucccagcaauugaggcagcc

SEQ ID NO: 1026654 - RNA, 22 nt, Human
agcugcaggccucuccugggga

SEQ ID NO: 1026655 - RNA, 22 nt, Human
gugcagcagggggaagacagug

SEQ ID NO: 1026656 - RNA, 21 nt, Human
ccucugcucgggcaugcguuu

SEQ ID NO: 1026657 - RNA, 22 nt, Human
accaugaugcauccuuaaggaa

SEQ ID NO: 1026658 - RNA, 22 nt, Human
guccucuggccuuucccaggac

SEQ ID NO: 1026659 - RNA, 22 nt, Human
guagccauuggcaaugaagccu

SEQ ID NO: 1026660 - RNA, 22 nt, Human
cagcuuuauuucacguguuugu

SEQ ID NO: 1026661 - RNA, 22 nt, Human
caguuuuucaaaauuacaugau

SEQ ID NO: 1026662 - RNA, 22 nt, Human
gcaccugcaggaugagccaggg

SEQ ID NO: 1026663 - RNA, 22 nt, Human
cugcagugcaagcccagaugga

SEQ ID NO: 1026664 - RNA, 23 nt, Human
gaggcagcuccugcagugcccug

SEQ ID NO: 1026665 - RNA, 22 nt, Human
gaguuauuucagaaggaaagau

SEQ ID NO: 1026666 - RNA, 22 nt, Human
cucccuggcacagcgagagguu

SEQ ID NO: 1026667 - RNA, 22 nt, Human
cagcaauaagguaagcuucucc

SEQ ID NO: 1026668 - RNA, 22 nt, Human
ggccugcuucucagugagcuug

SEQ ID NO: 1026669 - RNA, 22 nt, Human
uccaggagucagacagauggug

SEQ ID NO: 1026670 - RNA, 22 nt, Human
aauauuguuucaagaucacaga

SEQ ID NO: 1026671 - RNA, 22 nt, Human
uccaggcauguugggaagauga

SEQ ID NO: 1026672 - RNA, 22 nt, Human
ugagccaguggaagauggcagu

SEQ ID NO: 1026673 - RNA, 22 nt, Human
gguggcagaggugcaucagccc

SEQ ID NO: 1026674 - RNA, 22 nt, Human
cuggcugcuggccugaggaugc

SEQ ID NO: 1026675 - RNA, 22 nt, Human
ugaagcaguucucagaaguggg

SEQ ID NO: 1026676 - RNA, 22 nt, Human
ugcauauuauguguaucugucu

SEQ ID NO: 1026677 - RNA, 22 nt, Human
cccuggagggcagacagaugcc

SEQ ID NO: 1026678 - RNA, 22 nt, Human
ccugggaggcggagguugcagg

SEQ ID NO: 1026679 - RNA, 22 nt, Human
ccugcagguaaggcuaacugcc

SEQ ID NO: 1026680 - RNA, 22 nt, Human
auagacuugguuaguaaauuug

SEQ ID NO: 1026681 - RNA, 22 nt, Human
cugggagggguagccaauccua

SEQ ID NO: 1026682 - RNA, 22 nt, Human
cuguccagcuuggcuccugggg

SEQ ID NO: 1026683 - RNA, 22 nt, Human
gaggggcuggguagggcaaccc

SEQ ID NO: 1026684 - RNA, 23 nt, Human
uugugggcagauuccauggggag

SEQ ID NO: 1026685 - RNA, 22 nt, Human
gcuggcaguaaaggguuuggca

SEQ ID NO: 1026686 - RNA, 22 nt, Human
cucuggagggaggcugagcugg

SEQ ID NO: 1026687 - RNA, 22 nt, Human
gagggcuccacacgggcccagc

SEQ ID NO: 1026688 - RNA, 22 nt, Human
gcacccagcccagggcgugaug

SEQ ID NO: 1026689 - RNA, 22 nt, Human
acagaguaucuaucaggaguau

SEQ ID NO: 1026690 - RNA, 22 nt, Human
cagcuuccaucuccacugcccu

SEQ ID NO: 1026691 - RNA, 22 nt, Human
cugggcuucucccccuggcaga

SEQ ID NO: 1026692 - RNA, 20 nt, Human
cacaggcuauaugagagcca

SEQ ID NO: 1026693 - RNA, 22 nt, Human
gaaagaggaaggagauguauua

SEQ ID NO: 1026694 - RNA, 15 nt, Human
uccaggcauucauuc

SEQ ID NO: 1026695 - RNA, 19 nt, Human
gccacuccugaugcugccc

SEQ ID NO: 1026696 - RNA, 22 nt, Human
ggugggcacauucagucucugu

SEQ ID NO: 1026697 - RNA, 22 nt, Human
ccaggcugcuguugguguccgc

SEQ ID NO: 1026698 - RNA, 22 nt, Human
uaucuguuugcucacagguguu

SEQ ID NO: 1026699 - RNA, 22 nt, Human
cuuuccaagaaugcagauaccu

SEQ ID NO: 1026700 - RNA, 22 nt, Human
uccucucagugugguuguggga

SEQ ID NO: 1026701 - RNA, 22 nt, Human
gagccauacaaccuauaaagug

SEQ ID NO: 1026702 - RNA, 22 nt, Human
gcaggcagagguggaggagaca

SEQ ID NO: 1026703 - RNA, 22 nt, Human
uucaggauuauacucucuuccc

SEQ ID NO: 1026704 - RNA, 22 nt, Human
uagggcucagcucuagcuccug

SEQ ID NO: 1026705 - RNA, 22 nt, Human
ucccaggacaugggcucugcuc

SEQ ID NO: 1026706 - RNA, 22 nt, Human
augugaaaauccaauggcagca

SEQ ID NO: 1026707 - RNA, 22 nt, Human
aaaauccuuagccgagugaggu

SEQ ID NO: 1026708 - RNA, 22 nt, Human
cugggagcccgcguccuggugg

SEQ ID NO: 1026709 - RNA, 22 nt, Human
uuuccaagacuccaguucuccc

SEQ ID NO: 1026710 - RNA, 22 nt, Human
agcauuuaugacuaauguaaaa

SEQ ID NO: 1026711 - RNA, 23 nt, Human
gcauugucuccccacuucugggc

SEQ ID NO: 1026712 - RNA, 22 nt, Human
gcagggccagugcagagaggaa

SEQ ID NO: 1026713 - RNA, 22 nt, Human
caaagucccagcugcuuagaga

SEQ ID NO: 1026714 - RNA, 17 nt, Human
aggcuggcucacaggga

SEQ ID NO: 1026715 - RNA, 22 nt, Human
ucucucagaggccaggguccug

SEQ ID NO: 1026716 - RNA, 21 nt, Human
ucuugaaaauuguagcaguuu

SEQ ID NO: 1026717 - RNA, 20 nt, Human
aacuuguucuaccuguuuca

SEQ ID NO: 1026718 - RNA, 22 nt, Human
uuuggccacagauccuuggggg

SEQ ID NO: 1026719 - RNA, 22 nt, Human
cuucuuaaugacagauuaaaau

SEQ ID NO: 1026720 - RNA, 22 nt, Human
ucaggagucugugcaguuccac

SEQ ID NO: 1026721 - RNA, 19 nt, Human
ucagaggauuuggcuauga

SEQ ID NO: 1026722 - RNA, 22 nt, Human
uaguuucagcuccuucauccug

SEQ ID NO: 1026723 - RNA, 22 nt, Human
uagaacagaggguugcccagau

SEQ ID NO: 1026724 - RNA, 22 nt, Human
uggagaugaauauguguaccug

SEQ ID NO: 1026725 - RNA, 22 nt, Human
acagccuguuugaucuggugcu

SEQ ID NO: 1026726 - RNA, 22 nt, Human
ucucugggaaugggccugggua

SEQ ID NO: 1026727 - RNA, 22 nt, Human
uuuaucuuuaggacuuugcaga

SEQ ID NO: 1026728 - RNA, 22 nt, Human
aagggacuuugucagcuuucca

SEQ ID NO: 1026729 - RNA, 22 nt, Human
agcagccaaccuuacauucauc

SEQ ID NO: 1026730 - RNA, 19 nt, Human
ugcucauggggacuucucc

SEQ ID NO: 1026731 - RNA, 22 nt, Human
agaccauggccauccuaggaaa

SEQ ID NO: 1026732 - RNA, 23 nt, Human
uucuuucaagaaguucacagugc

SEQ ID NO: 1026733 - RNA, 22 nt, Human
aaauauguaagauuagcacuag

SEQ ID NO: 1026734 - RNA, 22 nt, Human
ggcaaggccuugcccagcauuc

SEQ ID NO: 1026735 - RNA, 22 nt, Human
cuugaaagcacuccuuugacug

SEQ ID NO: 1026736 - RNA, 17 nt, Human
ugaaacaccaagacugu

SEQ ID NO: 1026737 - RNA, 22 nt, Human
ucagggcaaaagggaaaccauu

SEQ ID NO: 1026738 - RNA, 22 nt, Human
ugaacacauaaggcuuuccugu

SEQ ID NO: 1026739 - RNA, 22 nt, Human
gagucacauuaauuuaauuuua

SEQ ID NO: 1026740 - RNA, 18 nt, Human
acauuucuaugcuucugg

SEQ ID NO: 1026741 - RNA, 22 nt, Human
aagacagagggaagcaaugaug

SEQ ID NO: 1026742 - RNA, 22 nt, Human
ugagguaggugguaagagauac

SEQ ID NO: 1026743 - RNA, 22 nt, Human
auacaucucauguaagagauaa

SEQ ID NO: 1026744 - RNA, 22 nt, Human
ucagcugaaguggagaagcaga

SEQ ID NO: 1026745 - RNA, 20 nt, Human
gcaggcagggaaugggggug

SEQ ID NO: 1026746 - RNA, 20 nt, Human
augccucuaauuuugcaaac

SEQ ID NO: 1026747 - RNA, 22 nt, Human
cccuggaagguucucuggcuca

SEQ ID NO: 1026748 - RNA, 22 nt, Human
uuccuucucagcccucgaggau

SEQ ID NO: 1026749 - RNA, 22 nt, Human
cacagaggcaaccuucuggggu

SEQ ID NO: 1026750 - RNA, 22 nt, Human
gagggcucuaccaaguaacucu

SEQ ID NO: 1026751 - RNA, 20 nt, Human
cucugcagcaaggccugggu

SEQ ID NO: 1026752 - RNA, 22 nt, Human
agggccaggaacaccugaaggg

SEQ ID NO: 1026753 - RNA, 20 nt, Human
cagaccugcacccacuucga

SEQ ID NO: 1026754 - RNA, 22 nt, Human
uauuuugucuucugcucaucac

SEQ ID NO: 1026755 - RNA, 22 nt, Human
aguggcaguagaugagcugguu

SEQ ID NO: 1026756 - RNA, 22 nt, Human
gaaaaaugcuccaaaucugugg

SEQ ID NO: 1026757 - RNA, 22 nt, Human
cucugaaagaguuuaguauuau

SEQ ID NO: 1026758 - RNA, 20 nt, Human
agucccuuuggucagguauu

SEQ ID NO: 1026759 - RNA, 22 nt, Human
ggcuuuauuaacucauccguaa

SEQ ID NO: 1026760 - RNA, 22 nt, Human
cuuguccuuuacuugagacuca

SEQ ID NO: 1026761 - RNA, 22 nt, Human
ccugcugugaccggggagcagg

SEQ ID NO: 1026762 - RNA, 22 nt, Human
caagggugguauugggagcaua

SEQ ID NO: 1026763 - RNA, 22 nt, Human
auuuuuccaauuaggauaaaga

SEQ ID NO: 1026764 - RNA, 22 nt, Human
uggcucaggagggaucuuugcu

SEQ ID NO: 1026765 - RNA, 22 nt, Human
auaaagaggauguauuuacagc

SEQ ID NO: 1026766 - RNA, 22 nt, Human
ccucacucugcacccugcagca

SEQ ID NO: 1026767 - RNA, 22 nt, Human
ggcaggaggaagaguuagcacc

SEQ ID NO: 1026768 - RNA, 22 nt, Human
cccuggagcaucucugcugucu

SEQ ID NO: 1026769 - RNA, 22 nt, Human
ugggcuccggcggccucaggcu

SEQ ID NO: 1026770 - RNA, 23 nt, Human
cccuggagcuagucugagcagag

SEQ ID NO: 1026771 - RNA, 18 nt, Human
acaaaggucugcaagacc

SEQ ID NO: 1026772 - RNA, 22 nt, Human
guagggacuguucucaccugag

SEQ ID NO: 1026773 - RNA, 22 nt, Human
augugugccccuuuuacucuuu

SEQ ID NO: 1026774 - RNA, 22 nt, Human
uuacugaaaauucuucaggauu

SEQ ID NO: 1026775 - RNA, 17 nt, Human
gggcugacaguggccuc

SEQ ID NO: 1026776 - RNA, 22 nt, Human
uggggcuguccuuagucugaga

SEQ ID NO: 1026777 - RNA, 22 nt, Human
cugcugugggcaggguagcugg

SEQ ID NO: 1026778 - RNA, 18 nt, Human
ggucuuuaggucaguguc

SEQ ID NO: 1026779 - RNA, 22 nt, Human
agugcacagcgugauguauugg

SEQ ID NO: 1026780 - RNA, 23 nt, Human
uuuuccuguggagacaugacugg

SEQ ID NO: 1026781 - RNA, 22 nt, Human
ugucccuggaacuauggcucca

SEQ ID NO: 1026782 - RNA, 22 nt, Human
aggcaauccccugaggauacuu

SEQ ID NO: 1026783 - RNA, 22 nt, Human
gcagggcugggugggagacaga

SEQ ID NO: 1026784 - RNA, 22 nt, Human
cucuccucagaacaggcccucu

SEQ ID NO: 1026785 - RNA, 22 nt, Human
uggaagagggagcuggguggcc

SEQ ID NO: 1026786 - RNA, 19 nt, Human
uuugaauccagcugguaac

SEQ ID NO: 1026787 - RNA, 22 nt, Human
acugcuuuaucugagaaguccu

SEQ ID NO: 1026788 - RNA, 22 nt, Human
caggugggcguggcgagaaggc

SEQ ID NO: 1026789 - RNA, 22 nt, Human
gcuguggccaacaaaccacuuu

SEQ ID NO: 1026790 - RNA, 22 nt, Human
uaggcacugggcuaggacaggu

SEQ ID NO: 1026791 - RNA, 22 nt, Human
uucccaguauuaccuucaggaa

SEQ ID NO: 1026792 - RNA, 22 nt, Human
auuaaagaaacccagcauguga

SEQ ID NO: 1026793 - RNA, 22 nt, Human
aaagacuagcauuuauauguac

SEQ ID NO: 1026794 - RNA, 22 nt, Human
ucucccaggcugcccuguggac

SEQ ID NO: 1026795 - RNA, 22 nt, Human
gggcugcacguauucugcucac

SEQ ID NO: 1026796 - RNA, 22 nt, Human
agacaaaugguaauuaugucua

SEQ ID NO: 1026797 - RNA, 22 nt, Human
cucucccccacagcagccuucu

SEQ ID NO: 1026798 - RNA, 22 nt, Human
agaggcuccaccuucucugucc

SEQ ID NO: 1026799 - RNA, 22 nt, Human
gaugguuuaugauagaugggaa

SEQ ID NO: 1026800 - RNA, 21 nt, Human
ucagagagucacagugaacug

SEQ ID NO: 1026801 - RNA, 22 nt, Human
caagagcugcaaauagcgugac

SEQ ID NO: 1026802 - RNA, 22 nt, Human
gacccuggaacuuucagcagag

SEQ ID NO: 1026803 - RNA, 22 nt, Human
gcucugcugucuucuugcaggc

SEQ ID NO: 1026804 - RNA, 22 nt, Human
cuggauuuaauuaacuguugcu

SEQ ID NO: 1026805 - RNA, 22 nt, Human
uauguguuugacacccugcaag

SEQ ID NO: 1026806 - RNA, 22 nt, Human
gaggccagcgcgcagcacuuuu

SEQ ID NO: 1026807 - RNA, 22 nt, Human
cuagccaugggcauuaaaggua

SEQ ID NO: 1026808 - RNA, 22 nt, Human
gcccagagagaugcuguagacc

SEQ ID NO: 1026809 - RNA, 22 nt, Human
cucugucagaguguugucccca

SEQ ID NO: 1026810 - RNA, 21 nt, Human
uucaauacuauuucaauaguc

SEQ ID NO: 1026811 - RNA, 22 nt, Human
uggccuggggaagaccaugggc

SEQ ID NO: 1026812 - RNA, 22 nt, Human
guuugcauaucugugaaaugga

SEQ ID NO: 1026813 - RNA, 22 nt, Human
ucaggaaagaagaugcucagug

SEQ ID NO: 1026814 - RNA, 22 nt, Human
ugacagaaagaauaugucaauc

SEQ ID NO: 1026815 - RNA, 22 nt, Human
gauggguggucucagacuugcc

SEQ ID NO: 1026816 - RNA, 22 nt, Human
gaagcucucaaacucuccccuu

SEQ ID NO: 1026817 - RNA, 22 nt, Human
gagagugagauaauuucacaua

SEQ ID NO: 1026818 - RNA, 22 nt, Human
gccaccagggggcuccagugag

SEQ ID NO: 1026819 - RNA, 22 nt, Human
agcagcaggcuguguggacuga

SEQ ID NO: 1026820 - RNA, 22 nt, Human
auugacaaggaaacuauaccag

SEQ ID NO: 1026821 - RNA, 22 nt, Human
gcuggccucuggagaagggcuu

SEQ ID NO: 1026822 - RNA, 22 nt, Human
uguauguaaaguuuguaauaga

SEQ ID NO: 1026823 - RNA, 22 nt, Human
ucuuuacaguccucugucaauc

SEQ ID NO: 1026824 - RNA, 22 nt, Human
acaggcugacuuccugccaugu

SEQ ID NO: 1026825 - RNA, 22 nt, Human
ugaggggagaagcagcagccug

SEQ ID NO: 1026826 - RNA, 22 nt, Human
uuagagccaguuacaaggucaa

SEQ ID NO: 1026827 - RNA, 22 nt, Human
ucaggccacggcucacugagac

SEQ ID NO: 1026828 - RNA, 22 nt, Human
uaucuguugucuuuuacaugua

SEQ ID NO: 1026829 - RNA, 22 nt, Human
augcaguacagauaauucuaca

SEQ ID NO: 1026830 - RNA, 22 nt, Human
uccucagaagaaccccuagauu

SEQ ID NO: 1026831 - RNA, 22 nt, Human
uuguaacaggcacucugugcca

SEQ ID NO: 1026832 - RNA, 20 nt, Human
uccuucaggcagggccuagu

SEQ ID NO: 1026833 - RNA, 22 nt, Human
cauuucacaaauggccacauca

SEQ ID NO: 1026834 - RNA, 22 nt, Human
aagggcagccugacucacgguc

SEQ ID NO: 1026835 - RNA, 22 nt, Human
ucuggcucaucucuccagguaa

SEQ ID NO: 1026836 - RNA, 22 nt, Human
gcucagaggagcaucauaagga

SEQ ID NO: 1026837 - RNA, 22 nt, Human
accaggcacuccugaggucuga

SEQ ID NO: 1026838 - RNA, 22 nt, Human
ucagagugcagcgggaggcugg

SEQ ID NO: 1026839 - RNA, 22 nt, Human
ccggggacuuaaagugaaggaa

SEQ ID NO: 1026840 - RNA, 19 nt, Human
agacacacuugauaugugu

SEQ ID NO: 1026841 - RNA, 22 nt, Human
uugaaagaagaagcugcgaugu

SEQ ID NO: 1026842 - RNA, 22 nt, Human
cagacaggcaggugcugcuuug

SEQ ID NO: 1026843 - RNA, 22 nt, Human
auguccagaguaaagcacauuc

SEQ ID NO: 1026844 - RNA, 22 nt, Human
ugguggccuugauggcaucugc

SEQ ID NO: 1026845 - RNA, 20 nt, Human
aguaggggaaugcaagagca

SEQ ID NO: 1026846 - RNA, 22 nt, Human
acaaaauuguguuaaacuuuau

SEQ ID NO: 1026847 - RNA, 22 nt, Human
ggucauugaaaucagaaggguu

SEQ ID NO: 1026848 - RNA, 22 nt, Human
ccagcuccuucugucuguggag

SEQ ID NO: 1026849 - RNA, 22 nt, Human
gacccaggcccaaggcugccag

SEQ ID NO: 1026850 - RNA, 20 nt, Human
acuggcagccugccugcugu

SEQ ID NO: 1026851 - RNA, 22 nt, Human
caggauggagaguuguugguug

SEQ ID NO: 1026852 - RNA, 23 nt, Human
ugagcaucacaggagaaccaggc

SEQ ID NO: 1026853 - RNA, 20 nt, Human
acaauagauuugagcaaagu

SEQ ID NO: 1026854 - RNA, 22 nt, Human
uaggcacugaggggagcaaggu

SEQ ID NO: 1026855 - RNA, 22 nt, Human
agugauggugagugagaagcuc

SEQ ID NO: 1026856 - RNA, 22 nt, Human
gccugcagccccucugcaguag

SEQ ID NO: 1026857 - RNA, 22 nt, Human
aaaaugugaucuacaaaugcaa

SEQ ID NO: 1026858 - RNA, 22 nt, Human
agcuuuaucuucaccugggaau

SEQ ID NO: 1026859 - RNA, 22 nt, Human
uagcugccauugcuccaggaag

SEQ ID NO: 1026860 - RNA, 22 nt, Human
cagccugggcuccagagucccu

SEQ ID NO: 1026861 - RNA, 22 nt, Human
aggcaccuugagagcaggagcu

SEQ ID NO: 1026862 - RNA, 22 nt, Human
aggcccugggagcagagaugca

SEQ ID NO: 1026863 - RNA, 22 nt, Human
cauacuuuugcccugacauucu

SEQ ID NO: 1026864 - RNA, 22 nt, Human
cucccaggguagggagagacua

SEQ ID NO: 1026865 - RNA, 22 nt, Human
gucucccaucguuugugaggaa

SEQ ID NO: 1026866 - RNA, 22 nt, Human
uggccugguuauauugcuauca

SEQ ID NO: 1026867 - RNA, 22 nt, Human
uggcacuggcgcaggauggcgg

SEQ ID NO: 1026868 - RNA, 22 nt, Human
uccugccuugccugggacauca

SEQ ID NO: 1026869 - RNA, 22 nt, Human
ugggaggagcccucugggaagg

SEQ ID NO: 1026870 - RNA, 22 nt, Human
ggagccaggcaaucuguacuuu

SEQ ID NO: 1026871 - RNA, 22 nt, Human
cagauccaucucucagaaagag

SEQ ID NO: 1026872 - RNA, 22 nt, Human
agggcccucuggcaggccaggc

SEQ ID NO: 1026873 - RNA, 22 nt, Human
caggccugaguguggaagucuu

SEQ ID NO: 1026874 - RNA, 22 nt, Human
gcuuggccagcagccgggaugc

SEQ ID NO: 1026875 - RNA, 22 nt, Human
ccaguuuuuccagugcuuucug

SEQ ID NO: 1026876 - RNA, 20 nt, Human
uacauucaaaacaaacucug

SEQ ID NO: 1026877 - RNA, 22 nt, Human
cagcauuggguuaccuuuguuu

SEQ ID NO: 1026878 - RNA, 22 nt, Human
ugcuggaauaauuucauguuaa

SEQ ID NO: 1026879 - RNA, 22 nt, Human
caaggccacguucugcaugcgg

SEQ ID NO: 1026880 - RNA, 22 nt, Human
augcaguagauaggcacuuuua

SEQ ID NO: 1026881 - RNA, 22 nt, Human
gaugguuuggaaugaaguagcu

SEQ ID NO: 1026882 - RNA, 22 nt, Human
ccugucauacuaacguaguggg

SEQ ID NO: 1026883 - RNA, 22 nt, Human
ugucaugccaggaaauaguccc

SEQ ID NO: 1026884 - RNA, 22 nt, Human
uuguuacaucuuauguaagugg

SEQ ID NO: 1026885 - RNA, 20 nt, Human
aaggcacuaugucugcuagc

SEQ ID NO: 1026886 - RNA, 22 nt, Human
agcauugccugccuauugcuaa

SEQ ID NO: 1026887 - RNA, 22 nt, Human
ucugucacaauuugcuuacucu

SEQ ID NO: 1026888 - RNA, 22 nt, Human
ucagcugccuuucccaugcuag

SEQ ID NO: 1026889 - RNA, 22 nt, Human
acagccagggucucaggaggcg

SEQ ID NO: 1026890 - RNA, 22 nt, Human
gggcuggcgggaaaggcaauuc

SEQ ID NO: 1026891 - RNA, 22 nt, Human
cugcccugaccugccucagagu

SEQ ID NO: 1026892 - RNA, 22 nt, Human
acagcugugaaaauccacagga

SEQ ID NO: 1026893 - RNA, 22 nt, Human
ggaggcccagagaggugaagug

SEQ ID NO: 1026894 - RNA, 22 nt, Human
agagccuggaccugagcuacaa

SEQ ID NO: 1026895 - RNA, 22 nt, Human
uguucuugagccuuuagaccua

SEQ ID NO: 1026896 - RNA, 22 nt, Human
acagccuggacuggcucucugc

SEQ ID NO: 1026897 - RNA, 22 nt, Human
cccucugcugccuggcuggguc

SEQ ID NO: 1026898 - RNA, 22 nt, Human
auccugggcagugugucacucu

SEQ ID NO: 1026899 - RNA, 22 nt, Human
auaaggcagaaauagggaaagu

SEQ ID NO: 1026900 - RNA, 22 nt, Human
gaggcagcaucuauggugggaa

SEQ ID NO: 1026901 - RNA, 22 nt, Human
agagcccucucauuggcuuauu

SEQ ID NO: 1026902 - RNA, 22 nt, Human
cgccucagccguggucaucuuc

SEQ ID NO: 1026903 - RNA, 22 nt, Human
gcagcugaagcugcaguuccag

SEQ ID NO: 1026904 - RNA, 22 nt, Human
gggcucugggaugcucuuagag

SEQ ID NO: 1026905 - RNA, 22 nt, Human
cugcugggcagaggcugcauga

SEQ ID NO: 1026906 - RNA, 22 nt, Human
uucaacacaggaacaugauaua

SEQ ID NO: 1026907 - RNA, 22 nt, Human
ucuucaaauccuacagugucug

SEQ ID NO: 1026908 - RNA, 22 nt, Human
uccauaagcagguucuuccuga

SEQ ID NO: 1026909 - RNA, 21 nt, Human
gccacugcacuccagccuggg

SEQ ID NO: 1026910 - RNA, 22 nt, Human
cuccucacuuuccagacugggc

SEQ ID NO: 1026911 - RNA, 22 nt, Human
gcagagcuguuaauggagcuga

SEQ ID NO: 1026912 - RNA, 23 nt, Human
uuuuccagaaucgacucuguaga

SEQ ID NO: 1026913 - RNA, 22 nt, Human
aaagauucgagcgauguauaaa

SEQ ID NO: 1026914 - RNA, 22 nt, Human
cuuuggaauauuuuauugagaa

SEQ ID NO: 1026915 - RNA, 21 nt, Human
auugaaagucaacaaucaguu

SEQ ID NO: 1026916 - RNA, 22 nt, Human
uuucuagucucgaucucuuaau

SEQ ID NO: 1026917 - RNA, 22 nt, Human
cugcagccuaggugcagcuggg

SEQ ID NO: 1026918 - RNA, 22 nt, Human
ugguuugcccacucgagugauu

SEQ ID NO: 1026919 - RNA, 22 nt, Human
acagcagcuaaaggugucuccu

SEQ ID NO: 1026920 - RNA, 22 nt, Human
ucccucagaaauucucucugaa

SEQ ID NO: 1026921 - RNA, 22 nt, Human
gggaaauugucaacacucucaa

SEQ ID NO: 1026922 - RNA, 22 nt, Human
ccuguucaccauggucacgugc

SEQ ID NO: 1026923 - RNA, 21 nt, Human
cugcucugacagugaggccag

SEQ ID NO: 1026924 - RNA, 21 nt, Human
ugggaugggucugggaccagc

SEQ ID NO: 1026925 - RNA, 22 nt, Human
gcccagcugucuggcagggaug

SEQ ID NO: 1026926 - RNA, 22 nt, Human
ccaaaguccauaguuuacauua

SEQ ID NO: 1026927 - RNA, 23 nt, Human
caguggagacucaugcuuccuua

SEQ ID NO: 1026928 - RNA, 22 nt, Human
ugcaggugguuuggacacugcu

SEQ ID NO: 1026929 - RNA, 22 nt, Human
acagcagcacuauugacauuuu

SEQ ID NO: 1026930 - RNA, 23 nt, Human
ucacacagcuggucagguacaga

SEQ ID NO: 1026931 - RNA, 22 nt, Human
cucuggagcgcugcuucccgcg

SEQ ID NO: 1026932 - RNA, 22 nt, Human
cacugggcaauucugagccuaa

SEQ ID NO: 1026933 - RNA, 22 nt, Human
uagcucuucauuucaucugauu

SEQ ID NO: 1026934 - RNA, 22 nt, Human
ugugucccuuggaaccucagcu

SEQ ID NO: 1026935 - RNA, 22 nt, Human
cacacagaugguaagggaggga

SEQ ID NO: 1026936 - RNA, 22 nt, Human
ucagcuuugggggucucaggag

SEQ ID NO: 1026937 - RNA, 22 nt, Human
gggcacugcuuugcucugucac

SEQ ID NO: 1026938 - RNA, 15 nt, Human
cuccaugauuuugca

SEQ ID NO: 1026939 - RNA, 22 nt, Human
ccuggcugcuauagcagcaugu

SEQ ID NO: 1026940 - RNA, 22 nt, Human
gcccaggagaggccagggcuga

SEQ ID NO: 1026941 - RNA, 22 nt, Human
uuucacauaucaacucuauccu

SEQ ID NO: 1026942 - RNA, 22 nt, Human
gugucacaugguuuacugcagc

SEQ ID NO: 1026943 - RNA, 22 nt, Human
agggccugacacccuugccagc

SEQ ID NO: 1026944 - RNA, 22 nt, Human
acauaugugcuuauauccauga

SEQ ID NO: 1026945 - RNA, 22 nt, Human
uuucauguuuucuuaaauggca

SEQ ID NO: 1026946 - RNA, 21 nt, Human
ucagggcagcugcucuucaga

SEQ ID NO: 1026947 - RNA, 22 nt, Human
uauugaaauucuucauguccuc

SEQ ID NO: 1026948 - RNA, 20 nt, Human
augauuuugcacuaacuuca

SEQ ID NO: 1026949 - RNA, 22 nt, Human
gcugguuuccuuaucuauaaag

SEQ ID NO: 1026950 - RNA, 22 nt, Human
uuagacauguuugcuaaaauga

SEQ ID NO: 1026951 - RNA, 22 nt, Human
ugggccaggauuucaagacccu

SEQ ID NO: 1026952 - RNA, 22 nt, Human
acaagguauccacauuaaaugu

SEQ ID NO: 1026953 - RNA, 22 nt, Human
uaaagguaguuuuaaaggugcu

SEQ ID NO: 1026954 - RNA, 22 nt, Human
ucuuugaauccuuuacaucuga

SEQ ID NO: 1026955 - RNA, 20 nt, Human
cuccaggggaagagccuucc

SEQ ID NO: 1026956 - RNA, 22 nt, Human
cugcucuaacugcauuaguuuu

SEQ ID NO: 1026957 - RNA, 17 nt, Human
gggcagggacuccuggg

SEQ ID NO: 1026958 - RNA, 22 nt, Human
uaaauuguuuucuagaaguugu

SEQ ID NO: 1026959 - RNA, 22 nt, Human
cugccucuggccucaggcccag

SEQ ID NO: 1026960 - RNA, 22 nt, Human
guagggacccacagucuauauu

SEQ ID NO: 1026961 - RNA, 22 nt, Human
cugaagcacagcauauaaauaa

SEQ ID NO: 1026962 - RNA, 22 nt, Human
cuggcagugacauugcaggugc

SEQ ID NO: 1026963 - RNA, 22 nt, Human
gcucagaggcacgaccucuugg

SEQ ID NO: 1026964 - RNA, 22 nt, Human
uaugcauagguaucuauacuca

SEQ ID NO: 1026965 - RNA, 22 nt, Human
ggacagagcccugguggccuaa

SEQ ID NO: 1026966 - RNA, 22 nt, Human
gcugagguggagauugcaguga

SEQ ID NO: 1026967 - RNA, 22 nt, Human
uuuacagaaugucaauuucuau

SEQ ID NO: 1026968 - RNA, 22 nt, Human
uagagaaaagcagggaucagga

SEQ ID NO: 1026969 - RNA, 22 nt, Human
guauuuauaggggaaugagagu

SEQ ID NO: 1026970 - RNA, 22 nt, Human
cagcugcaggaacaaaaaugug

SEQ ID NO: 1026971 - RNA, 22 nt, Human
aaaggugacugcagcagcuauu

SEQ ID NO: 1026972 - RNA, 22 nt, Human
ggcuagaacuuuacacuuugca

SEQ ID NO: 1026973 - RNA, 22 nt, Human
ugggacaggaugaccagaaggu

SEQ ID NO: 1026974 - RNA, 22 nt, Human
aggagccccucuucaguccugg

SEQ ID NO: 1026975 - RNA, 21 nt, Human
aaauguguuccauaaugcuuu

SEQ ID NO: 1026976 - RNA, 22 nt, Human
ugucacaaacauacauuauaga

SEQ ID NO: 1026977 - RNA, 22 nt, Human
uuucacauaaauauuaugccua

SEQ ID NO: 1026978 - RNA, 22 nt, Human
gcugccuggaauaacggcuggc

SEQ ID NO: 1026979 - RNA, 23 nt, Human
uuguuuuuagagguggcaugaga

SEQ ID NO: 1026980 - RNA, 22 nt, Human
ugcagcugauuaaagggcagac

SEQ ID NO: 1026981 - RNA, 22 nt, Human
ccugcagagccacgugccagcg

SEQ ID NO: 1026982 - RNA, 22 nt, Human
ugauuuuuagcuauucugaaga

SEQ ID NO: 1026983 - RNA, 22 nt, Human
aucugucaagauagacucugca

SEQ ID NO: 1026984 - RNA, 22 nt, Human
gcuuccugagaaacaaucugau

SEQ ID NO: 1026985 - RNA, 22 nt, Human
gagaacucagacgcaggucaug

SEQ ID NO: 1026986 - RNA, 22 nt, Human
guugaaaguagaugcuauuugg

SEQ ID NO: 1026987 - RNA, 19 nt, Human
uggcugggcgugccuccgu

SEQ ID NO: 1026988 - RNA, 22 nt, Human
aaaguucuuucucuuauuuggu

SEQ ID NO: 1026989 - RNA, 22 nt, Human
auuguaaguagaaauguuaugg

SEQ ID NO: 1026990 - RNA, 22 nt, Human
uccuggagaauccugccaccug

SEQ ID NO: 1026991 - RNA, 22 nt, Human
gcugccuguugaagggucugug

SEQ ID NO: 1026992 - RNA, 22 nt, Human
cuugaaguugcaaaacauuaau

SEQ ID NO: 1026993 - RNA, 19 nt, Human
uggccagguacugucugcu

SEQ ID NO: 1026994 - RNA, 22 nt, Human
uuuacuuugugucaagucaaga

SEQ ID NO: 1026995 - RNA, 22 nt, Human
uaaugcuuaacagcuggcuuuu

SEQ ID NO: 1026996 - RNA, 22 nt, Human
agauuucucuuucccuggcuga

SEQ ID NO: 1026997 - RNA, 22 nt, Human
acucccagguugccuggcaggc

SEQ ID NO: 1026998 - RNA, 22 nt, Human
aggcuggcuggcaggggacaca

SEQ ID NO: 1026999 - RNA, 22 nt, Human
agccugagagccaagcugugca

SEQ ID NO: 1027000 - RNA, 22 nt, Human
uuucagaugugugucucugaag

SEQ ID NO: 1027001 - RNA, 22 nt, Human
ggccugcugcuaugacuuccug

SEQ ID NO: 1027002 - RNA, 23 nt, Human
aguuuguaaagaaauauuugcac

SEQ ID NO: 1027003 - RNA, 22 nt, Human
gccagagcacaggcugguagua

SEQ ID NO: 1027004 - RNA, 23 nt, Human
cccagcgcugagcccugcaggca

SEQ ID NO: 1027005 - RNA, 22 nt, Human
uggcagagagagugcagucgac

SEQ ID NO: 1027006 - RNA, 22 nt, Human
ccuuaaauucuccauuugaaag

SEQ ID NO: 1027007 - RNA, 22 nt, Human
cagaguccugcaccagcuccag

SEQ ID NO: 1027008 - RNA, 22 nt, Human
caggcucccugggcaguggcag

SEQ ID NO: 1027009 - RNA, 22 nt, Human
uuucaaaccuacuuguauguuu

SEQ ID NO: 1027010 - RNA, 22 nt, Human
uccugagauucugcauuucuaa

SEQ ID NO: 1027011 - RNA, 22 nt, Human
gccugagagucugcauuucuaa

SEQ ID NO: 1027012 - RNA, 22 nt, Human
caggguggcaggcaccauggcc

SEQ ID NO: 1027013 - RNA, 22 nt, Human
cugggccucauccucagaguuu

SEQ ID NO: 1027014 - RNA, 22 nt, Human
ccagagaggccuuggcaagaca

SEQ ID NO: 1027015 - RNA, 22 nt, Human
cuagaaaugcucaagagaaagu

SEQ ID NO: 1027016 - RNA, 22 nt, Human
uccaaacacccuccaugcugca

SEQ ID NO: 1027017 - RNA, 22 nt, Human
gccagagacacuuggagguaga

SEQ ID NO: 1027018 - RNA, 22 nt, Human
cuuccucugcggcgccgggcgc

SEQ ID NO: 1027019 - RNA, 22 nt, Human
cugggcagugguggcaucuuug

SEQ ID NO: 1027020 - RNA, 22 nt, Human
aauguaugacaguucuaguggu

SEQ ID NO: 1027021 - RNA, 22 nt, Human
gaaaugugugacaaguuucaau

SEQ ID NO: 1027022 - RNA, 18 nt, Human
cccagcuuagcgccccuc

SEQ ID NO: 1027023 - RNA, 22 nt, Human
gcuuccuucuaccacaucaugc

SEQ ID NO: 1027024 - RNA, 22 nt, Human
ggcugcaguuugucuuuugcuu

SEQ ID NO: 1027025 - RNA, 22 nt, Human
uauuuccaccuauuauuuucug

SEQ ID NO: 1027026 - RNA, 22 nt, Human
auguuucaucaguaagguuuug

SEQ ID NO: 1027027 - RNA, 22 nt, Human
aaguuguauauaccgcuuuaag

SEQ ID NO: 1027028 - RNA, 22 nt, Human
caagggccuccaccuugcucgu

SEQ ID NO: 1027029 - RNA, 22 nt, Human
gccuggcaggccuguuggggcu

SEQ ID NO: 1027030 - RNA, 22 nt, Human
aauguguguauuucuaggcgag

SEQ ID NO: 1027031 - RNA, 22 nt, Human
gugugccaccagucaaggugaa

SEQ ID NO: 1027032 - RNA, 22 nt, Human
cuccauugaacauccucucaga

SEQ ID NO: 1027033 - RNA, 22 nt, Human
ccugcucugguuuagucagucu

SEQ ID NO: 1027034 - RNA, 22 nt, Human
uggaaagaaaaacaggccauga

SEQ ID NO: 1027035 - RNA, 21 nt, Human
ggauggauagggaagagauuu

SEQ ID NO: 1027036 - RNA, 19 nt, Human
ccucugccagcccgccucu

SEQ ID NO: 1027037 - RNA, 22 nt, Human
gcucaagggaugggagugggug

SEQ ID NO: 1027038 - RNA, 22 nt, Human
gaggccugcuuuggcacucugg

SEQ ID NO: 1027039 - RNA, 22 nt, Human
ucaacacuauccaggcaaucuu

SEQ ID NO: 1027040 - RNA, 22 nt, Human
cugccuggaaugccagcuucuc

SEQ ID NO: 1027041 - RNA, 21 nt, Human
uuucaauguguucuuuguagu

SEQ ID NO: 1027042 - RNA, 22 nt, Human
cugcaucaguggauaugauggu

SEQ ID NO: 1027043 - RNA, 22 nt, Human
uauaauguuuuccauggacuga

SEQ ID NO: 1027044 - RNA, 22 nt, Human
cagacuuucaaggagugaaggc

SEQ ID NO: 1027045 - RNA, 22 nt, Human
uuugaaagaaaccagugaguga

SEQ ID NO: 1027046 - RNA, 22 nt, Human
aaggcugcuuuuaacaugcaua

SEQ ID NO: 1027047 - RNA, 22 nt, Human
ucuuguccuaagagcuggauuc

SEQ ID NO: 1027048 - RNA, 22 nt, Human
aguguuccugcucucaggaagc

SEQ ID NO: 1027049 - RNA, 17 nt, Human
aggugcuggagcaucag

SEQ ID NO: 1027050 - RNA, 22 nt, Human
ugugcccauuacacagaggcau

SEQ ID NO: 1027051 - RNA, 22 nt, Human
uuccauaaaggugauaguauac

SEQ ID NO: 1027052 - RNA, 21 nt, Human
gauuuuaaagagacugccaca

SEQ ID NO: 1027053 - RNA, 22 nt, Human
agcuuguuagaaauguagacuc

SEQ ID NO: 1027054 - RNA, 19 nt, Human
cugggacaaugaaagcauc

SEQ ID NO: 1027055 - RNA, 22 nt, Human
ucauggagacuuugagccuguu

SEQ ID NO: 1027056 - RNA, 22 nt, Human
caggaggccaacugugggacuu

SEQ ID NO: 1027057 - RNA, 22 nt, Human
ccagucccagcucugccaugcu

SEQ ID NO: 1027058 - RNA, 22 nt, Human
ccuuuugcucucccauccagaa

SEQ ID NO: 1027059 - RNA, 22 nt, Human
agcugcagagguuugugcaaca

SEQ ID NO: 1027060 - RNA, 22 nt, Human
agcugccacaugcccaagggca

SEQ ID NO: 1027061 - RNA, 22 nt, Human
ugcuggguuaccuaagccuaaa

SEQ ID NO: 1027062 - RNA, 22 nt, Human
aggcugucugaccccagagccc

SEQ ID NO: 1027063 - RNA, 18 nt, Human
gggcccuggcguccgccc

SEQ ID NO: 1027064 - RNA, 22 nt, Human
uuucuuauauucugucauuguu

SEQ ID NO: 1027065 - RNA, 22 nt, Human
auugucuuuccacugagaaguu

SEQ ID NO: 1027066 - RNA, 22 nt, Human
caguagcaggcaggugcuuuug

SEQ ID NO: 1027067 - RNA, 22 nt, Human
uuucuauugaucuaauaaacau

SEQ ID NO: 1027068 - RNA, 19 nt, Human
acaggcagaauugggugug

SEQ ID NO: 1027069 - RNA, 22 nt, Human
cagccccucacagagcuguccu

SEQ ID NO: 1027070 - RNA, 22 nt, Human
acuggcagccacaacuggcagg

SEQ ID NO: 1027071 - RNA, 22 nt, Human
gccucugggcucugccccuggc

SEQ ID NO: 1027072 - RNA, 18 nt, Human
gaaaugugauucuagggc

SEQ ID NO: 1027073 - RNA, 22 nt, Human
cacagggcuucucauggggugc

SEQ ID NO: 1027074 - RNA, 22 nt, Human
agagauguucauucagcauguu

SEQ ID NO: 1027075 - RNA, 22 nt, Human
ucaaagagcuauucaguugugg

SEQ ID NO: 1027076 - RNA, 22 nt, Human
uugggcugaaguagagggcaga

SEQ ID NO: 1027077 - RNA, 22 nt, Human
caaaugauacuguuuuuagucu

SEQ ID NO: 1027078 - RNA, 21 nt, Human
ucuguacaucauugagucccc

SEQ ID NO: 1027079 - RNA, 18 nt, Human
gagcccugagucugcaca

SEQ ID NO: 1027080 - RNA, 22 nt, Human
uaguauuuaaucacuuuugucu

SEQ ID NO: 1027081 - RNA, 22 nt, Human
uguacauacauagauauacaca

SEQ ID NO: 1027082 - RNA, 22 nt, Human
caucagcagucacaugaugcug

SEQ ID NO: 1027083 - RNA, 22 nt, Human
cagagcugguaagugguagagg

SEQ ID NO: 1027084 - RNA, 22 nt, Human
ucugugacuugcgggaggagaa

SEQ ID NO: 1027085 - RNA, 22 nt, Human
cuggaagguuccucccagcucc

SEQ ID NO: 1027086 - RNA, 21 nt, Human
uccuuccuugagguccuuucc

SEQ ID NO: 1027087 - RNA, 22 nt, Human
gugugcaugcauagacaccaca

SEQ ID NO: 1027088 - RNA, 20 nt, Human
gagauuuccaaucaugccca

SEQ ID NO: 1027089 - RNA, 22 nt, Human
cagaauggcuuuuauggcucag

SEQ ID NO: 1027090 - RNA, 22 nt, Human
ucugggagguaaccaugcugau

SEQ ID NO: 1027091 - RNA, 22 nt, Human
gcagagccaggagcccaggauc

SEQ ID NO: 1027092 - RNA, 22 nt, Human
aguucuucauaaccuuacugug

SEQ ID NO: 1027093 - RNA, 22 nt, Human
ggcccucccugagccagguggg

SEQ ID NO: 1027094 - RNA, 22 nt, Human
acucaggaaaugaagacugguu

SEQ ID NO: 1027095 - RNA, 22 nt, Human
caugggcuuuggaggcuggagg

SEQ ID NO: 1027096 - RNA, 22 nt, Human
ggaggccaguccuggccgggcu

SEQ ID NO: 1027097 - RNA, 22 nt, Human
cagcaggguagguuguaucagu

SEQ ID NO: 1027098 - RNA, 22 nt, Human
auucuucauacagacaaguccu

SEQ ID NO: 1027099 - RNA, 22 nt, Human
uuugacaugcaaagcacuuuag

SEQ ID NO: 1027100 - RNA, 22 nt, Human
ucagagaguccuggucauuugc

SEQ ID NO: 1027101 - RNA, 22 nt, Human
uccugcagagacagaggccuca

SEQ ID NO: 1027102 - RNA, 22 nt, Human
agcagggggccacagucacagc

SEQ ID NO: 1027103 - RNA, 22 nt, Human
uauguacauaacaugaaaugca

SEQ ID NO: 1027104 - RNA, 22 nt, Human
ucugggaguuguaguccggugg

SEQ ID NO: 1027105 - RNA, 22 nt, Human
guccagggaaauagcgacaggg

SEQ ID NO: 1027106 - RNA, 23 nt, Human
cacugcagcguggucuggcagga

SEQ ID NO: 1027107 - RNA, 22 nt, Human
ggucccaggaaucuguguucua

SEQ ID NO: 1027108 - RNA, 22 nt, Human
acuccuggggauccauuccuuu

SEQ ID NO: 1027109 - RNA, 22 nt, Human
uccugcaggccuguucccagua

SEQ ID NO: 1027110 - RNA, 22 nt, Human
cagcuuugcaggcuggucagug

SEQ ID NO: 1027111 - RNA, 23 nt, Human
uuuauccaacucuguaaucucuc

SEQ ID NO: 1027112 - RNA, 22 nt, Human
guccaggaaucaaaagauggaa

SEQ ID NO: 1027113 - RNA, 22 nt, Human
aggcacuguacuagguacaggg

SEQ ID NO: 1027114 - RNA, 22 nt, Human
cagagccaaaugcugugguuau

SEQ ID NO: 1027115 - RNA, 22 nt, Human
agggcagacuaggauggaagug

SEQ ID NO: 1027116 - RNA, 22 nt, Human
cccagggagguagcaggagaaa

SEQ ID NO: 1027117 - RNA, 22 nt, Human
uaguuacagcaggcaggauaua

SEQ ID NO: 1027118 - RNA, 22 nt, Human
aaauccuaauaaugcacuagug

SEQ ID NO: 1027119 - RNA, 22 nt, Human
gaggccacagcuaucagggaca

SEQ ID NO: 1027120 - RNA, 22 nt, Human
ggagggugcauuuuacccugug

SEQ ID NO: 1027121 - RNA, 22 nt, Human
ucucugguggcuccaucaguag

SEQ ID NO: 1027122 - RNA, 22 nt, Human
gcucaggaaaacagucuaguaa

SEQ ID NO: 1027123 - RNA, 22 nt, Human
uuaagacauucagauauuucua

SEQ ID NO: 1027124 - RNA, 22 nt, Human
uucuuucucaacaugaauguuu

SEQ ID NO: 1027125 - RNA, 22 nt, Human
ccagguggcuucugcccgaugu

SEQ ID NO: 1027126 - RNA, 22 nt, Human
uaaaugugaccuucauuuuaua

SEQ ID NO: 1027127 - RNA, 22 nt, Human
acaauguguuuuuauacauuug

SEQ ID NO: 1027128 - RNA, 22 nt, Human
caggcagcucgaugccuuguug

SEQ ID NO: 1027129 - RNA, 22 nt, Human
gauuuagagaauguuuuguaag

SEQ ID NO: 1027130 - RNA, 22 nt, Human
aaaucucaauuugaauuguagc

SEQ ID NO: 1027131 - RNA, 22 nt, Human
acagcuguggccacuugcaucc

SEQ ID NO: 1027132 - RNA, 22 nt, Human
aagcugccaaugguaagcugcu

SEQ ID NO: 1027133 - RNA, 22 nt, Human
aauacaguagguaauaguucau

SEQ ID NO: 1027134 - RNA, 22 nt, Human
uaaggccaaggggccauagucu

SEQ ID NO: 1027135 - RNA, 22 nt, Human
ugagcccagucugucugacaug

SEQ ID NO: 1027136 - RNA, 22 nt, Human
aaagucauguaaugauaugauu

SEQ ID NO: 1027137 - RNA, 22 nt, Human
ggcucuggagacauguggagag

SEQ ID NO: 1027138 - RNA, 22 nt, Human
aguuuuauuccaaugugcagca

SEQ ID NO: 1027139 - RNA, 22 nt, Human
uuccaggaggcacugacagagg

SEQ ID NO: 1027140 - RNA, 23 nt, Human
ggcucugugcugggccugcagga

SEQ ID NO: 1027141 - RNA, 22 nt, Human
cagagcugagucuucaagguug

SEQ ID NO: 1027142 - RNA, 22 nt, Human
ugucccagcagcuggguucucu

SEQ ID NO: 1027143 - RNA, 22 nt, Human
augaccccuaaaauuuacuguc

SEQ ID NO: 1027144 - RNA, 22 nt, Human
ugagcccagagcccuuguaggg

SEQ ID NO: 1027145 - RNA, 22 nt, Human
caccagcagaagacugagggug

SEQ ID NO: 1027146 - RNA, 22 nt, Human
ccacagugguucucaaccaggg

SEQ ID NO: 1027147 - RNA, 22 nt, Human
ucaaaugcucuuugcagagagg

SEQ ID NO: 1027148 - RNA, 20 nt, Human
auaaaauaacugccacaaga

SEQ ID NO: 1027149 - RNA, 22 nt, Human
gaggcugaggguuagagaguca

SEQ ID NO: 1027150 - RNA, 22 nt, Human
cccuccagcucaaagcaaccgg

SEQ ID NO: 1027151 - RNA, 22 nt, Human
aucugucaggagcaaggacuac

SEQ ID NO: 1027152 - RNA, 22 nt, Human
gacagggcgagacucagucuca

SEQ ID NO: 1027153 - RNA, 22 nt, Human
auuuccauagagcgucucacag

SEQ ID NO: 1027154 - RNA, 22 nt, Human
cuuauguaaacuacagauaaua

SEQ ID NO: 1027155 - RNA, 22 nt, Human
auagauacauuagguaacuugu

SEQ ID NO: 1027156 - RNA, 22 nt, Human
uagggcagaguccaggaugggc

SEQ ID NO: 1027157 - RNA, 22 nt, Human
auaguguuacccuucuuaaagu

SEQ ID NO: 1027158 - RNA, 17 nt, Human
uuauuuuuugggcugag

SEQ ID NO: 1027159 - RNA, 21 nt, Human
uggcugcuggcccucucucca

SEQ ID NO: 1027160 - RNA, 22 nt, Human
ccuggacucaggcugugggcac

SEQ ID NO: 1027161 - RNA, 22 nt, Human
caucacugacgcugagauucca

SEQ ID NO: 1027162 - RNA, 22 nt, Human
ccagagaguaaacauuuuccgg

SEQ ID NO: 1027163 - RNA, 22 nt, Human
aagauuuagggccaguuuacau

SEQ ID NO: 1027164 - RNA, 22 nt, Human
gggcuucucuuaugcuaacugg

SEQ ID NO: 1027165 - RNA, 22 nt, Human
aggagcuguuuuguucagcaaa

SEQ ID NO: 1027166 - RNA, 22 nt, Human
aggcuggggaauugaauuugcu

SEQ ID NO: 1027167 - RNA, 22 nt, Human
ggccugugcacaugugcaggaa

SEQ ID NO: 1027168 - RNA, 22 nt, Human
ugcuggcugggcugcuggagac

SEQ ID NO: 1027169 - RNA, 22 nt, Human
agggcuggagccacagcuggga

SEQ ID NO: 1027170 - RNA, 22 nt, Human
ggaaaaggccauuguuucucug

SEQ ID NO: 1027171 - RNA, 21 nt, Human
auucagaguaauucaucuuua

SEQ ID NO: 1027172 - RNA, 22 nt, Human
cugcugggcuccucaugugacu

SEQ ID NO: 1027173 - RNA, 20 nt, Human
uccagaggccacauccagug

SEQ ID NO: 1027174 - RNA, 22 nt, Human
ugcugggcuugaaagcugcuaa

SEQ ID NO: 1027175 - RNA, 22 nt, Human
uauaauuuuagaagagauggaa

SEQ ID NO: 1027176 - RNA, 22 nt, Human
uuguaugaggauagcaagaagc

SEQ ID NO: 1027177 - RNA, 22 nt, Human
augcuauacauaugacaucaca

SEQ ID NO: 1027178 - RNA, 21 nt, Human
acagucuccccagaucucucc

SEQ ID NO: 1027179 - RNA, 20 nt, Human
aguagcagugugacauugac

SEQ ID NO: 1027180 - RNA, 22 nt, Human
uggaagcagugauucuugucug

SEQ ID NO: 1027181 - RNA, 22 nt, Human
cauccagggcagccauggccug

SEQ ID NO: 1027182 - RNA, 22 nt, Human
gaagccucaacaucucugcguc

SEQ ID NO: 1027183 - RNA, 22 nt, Human
acuugcauuauauuuaucacaa

SEQ ID NO: 1027184 - RNA, 19 nt, Human
auuucaagagguuuauugg

SEQ ID NO: 1027185 - RNA, 18 nt, Human
cucucugggugaggacaa

SEQ ID NO: 1027186 - RNA, 21 nt, Human
gcaugccugcaucuuaguguu

SEQ ID NO: 1027187 - RNA, 22 nt, Human
agcugcugugugcucaggcagg

SEQ ID NO: 1027188 - RNA, 22 nt, Human
guuauaaaaugcacaguuguuu

SEQ ID NO: 1027189 - RNA, 22 nt, Human
ugucagugaguuaguugcaagu

SEQ ID NO: 1027190 - RNA, 22 nt, Human
aggugaguuacaggaggagguc

SEQ ID NO: 1027191 - RNA, 22 nt, Human
cugaaggauuagagagcacuua

SEQ ID NO: 1027192 - RNA, 22 nt, Human
acccagcuguuucccgugucau

SEQ ID NO: 1027193 - RNA, 22 nt, Human
cucucugagugagggacaagcu

SEQ ID NO: 1027194 - RNA, 22 nt, Human
ccaggggaaacagggagcacuc

SEQ ID NO: 1027195 - RNA, 22 nt, Human
cuguaugaggaucagacuggac

SEQ ID NO: 1027196 - RNA, 22 nt, Human
auuaauuuuaccuuuguaaaca

SEQ ID NO: 1027197 - RNA, 22 nt, Human
cugagagucagcuucuccuccu

SEQ ID NO: 1027198 - RNA, 22 nt, Human
uccugccugagcguggaggagg

SEQ ID NO: 1027199 - RNA, 19 nt, Human
uccauaagcuuguguucau

SEQ ID NO: 1027200 - RNA, 22 nt, Human
ucugggagagcugcugucagag

SEQ ID NO: 1027201 - RNA, 22 nt, Human
gucuucuuguguugccugucuu

SEQ ID NO: 1027202 - RNA, 22 nt, Human
uaagcauucaaugcuuagcacu

SEQ ID NO: 1027203 - RNA, 22 nt, Human
uuccauaacugaccgaaugcau

SEQ ID NO: 1027204 - RNA, 22 nt, Human
gcugggaggaucucucccuguc

SEQ ID NO: 1027205 - RNA, 22 nt, Human
cagccagguaugggcgugcggg

SEQ ID NO: 1027206 - RNA, 22 nt, Human
cucaaguaagaaacagaauugg

SEQ ID NO: 1027207 - RNA, 22 nt, Human
ugcguugcgcuccugcagcagg

SEQ ID NO: 1027208 - RNA, 22 nt, Human
gugggaugcaguggugaguggc

SEQ ID NO: 1027209 - RNA, 22 nt, Human
ucuggcuccuggcuccacugcc

SEQ ID NO: 1027210 - RNA, 21 nt, Human
agcugcuuucagcuccuagag

SEQ ID NO: 1027211 - RNA, 22 nt, Human
gaaaagggcaagagagagggca

SEQ ID NO: 1027212 - RNA, 22 nt, Human
augucaaacacaacaccagugg

SEQ ID NO: 1027213 - RNA, 22 nt, Human
guggcucuccauugacauggaa

SEQ ID NO: 1027214 - RNA, 22 nt, Human
acuuugcacuaaguuacucauu

SEQ ID NO: 1027215 - RNA, 22 nt, Human
ccagggugaggaggcucccacg

SEQ ID NO: 1027216 - RNA, 22 nt, Human
cagggcucaccacugggauccu

SEQ ID NO: 1027217 - RNA, 23 nt, Human
gggggcugguugacucucugcag

SEQ ID NO: 1027218 - RNA, 22 nt, Human
ucagagagccucaggcacugcc

SEQ ID NO: 1027219 - RNA, 20 nt, Human
ugcagagcuggcuggcuccu

SEQ ID NO: 1027220 - RNA, 22 nt, Human
ggcagggcuugucucugugaug

SEQ ID NO: 1027221 - RNA, 22 nt, Human
ccuggccucagacagagggugg

SEQ ID NO: 1027222 - RNA, 22 nt, Human
uucugucacuuuuuuggaaucu

SEQ ID NO: 1027223 - RNA, 22 nt, Human
cuugugcauuucauuccucagg

SEQ ID NO: 1027224 - RNA, 19 nt, Human
auaaggcaauuggauuugg

SEQ ID NO: 1027225 - RNA, 22 nt, Human
acaguguucacuuaacaaugga

SEQ ID NO: 1027226 - RNA, 22 nt, Human
uuaaacagguuuuugaauggcc

SEQ ID NO: 1027227 - RNA, 22 nt, Human
ugacuucaaaggcucuacuccu

SEQ ID NO: 1027228 - RNA, 22 nt, Human
gggcacagaagucuaagacauc

SEQ ID NO: 1027229 - RNA, 22 nt, Human
ucagucuucccuccagugcaac

SEQ ID NO: 1027230 - RNA, 22 nt, Human
gaggcugcugagagcccuguuu

SEQ ID NO: 1027231 - RNA, 22 nt, Human
ugggcuccagcaccugugcucu

SEQ ID NO: 1027232 - RNA, 22 nt, Human
gccugcagacguguuuuccuca

SEQ ID NO: 1027233 - RNA, 22 nt, Human
ggaaaugacuuggugcuucguu

SEQ ID NO: 1027234 - RNA, 22 nt, Human
aggcucccaagcacugacccca

SEQ ID NO: 1027235 - RNA, 22 nt, Human
ugcagcuguaacagaggccuca

SEQ ID NO: 1027236 - RNA, 22 nt, Human
aaaguucugggggagaagaacg

SEQ ID NO: 1027237 - RNA, 22 nt, Human
uuccucagaaaauacuguccaa

SEQ ID NO: 1027238 - RNA, 22 nt, Human
ugcauggaggaagaugaaugca

SEQ ID NO: 1027239 - RNA, 22 nt, Human
agccuggagaagauguguauug

SEQ ID NO: 1027240 - RNA, 22 nt, Human
uuucaguguaagguuuccagga

SEQ ID NO: 1027241 - RNA, 22 nt, Human
ccagccugguucagaauuggcu

SEQ ID NO: 1027242 - RNA, 22 nt, Human
ucuugggaaauaaacagauuga

SEQ ID NO: 1027243 - RNA, 20 nt, Human
cuugaguucagagcugucau

SEQ ID NO: 1027244 - RNA, 22 nt, Human
aacuagaaagaacauauuucca

SEQ ID NO: 1027245 - RNA, 22 nt, Human
cugcugucuuuauuucacugcu

SEQ ID NO: 1027246 - RNA, 20 nt, Human
uugagcagcagugcuguguc

SEQ ID NO: 1027247 - RNA, 22 nt, Human
uccucauucuuggugcaucaaa

SEQ ID NO: 1027248 - RNA, 22 nt, Human
cugagcacguaguuagggucca

SEQ ID NO: 1027249 - RNA, 22 nt, Human
cuuucuuucgaagacgugauua

SEQ ID NO: 1027250 - RNA, 22 nt, Human
uucccagauuggagggcagggg

SEQ ID NO: 1027251 - RNA, 22 nt, Human
gggcucggcaucuguggacucu

SEQ ID NO: 1027252 - RNA, 22 nt, Human
acugagcaggguuccgcaugga

SEQ ID NO: 1027253 - RNA, 22 nt, Human
cugaucuuaaguaacauuauuu

SEQ ID NO: 1027254 - RNA, 22 nt, Human
gcuggccugaccugaggcuggg

SEQ ID NO: 1027255 - RNA, 22 nt, Human
uuuuggcucugcagguuugcac

SEQ ID NO: 1027256 - RNA, 18 nt, Human
cugccagugugcucuccg

SEQ ID NO: 1027257 - RNA, 22 nt, Human
aucuucccaggcuggggagagg

SEQ ID NO: 1027258 - RNA, 22 nt, Human
ccagguaggagagucaacaugu

SEQ ID NO: 1027259 - RNA, 22 nt, Human
gcugguggcagagcuccgcggc

SEQ ID NO: 1027260 - RNA, 22 nt, Human
auggugguagaagcacuaugug

SEQ ID NO: 1027261 - RNA, 22 nt, Human
gggcagcaucaggaggggcuuu

SEQ ID NO: 1027262 - RNA, 22 nt, Human
cugaggagauccccccagaagu

SEQ ID NO: 1027263 - RNA, 22 nt, Human
ggcagaggaagcuggaaguggg

SEQ ID NO: 1027264 - RNA, 22 nt, Human
cauugcaacuucaaacuccugg

SEQ ID NO: 1027265 - RNA, 22 nt, Human
ugugaagaauuaaugugaauca

SEQ ID NO: 1027266 - RNA, 22 nt, Human
ucucugagaucagccacugacu

SEQ ID NO: 1027267 - RNA, 23 nt, Human
uggagaauucagucuuuguuuug

SEQ ID NO: 1027268 - RNA, 22 nt, Human
caguuuccugaagagaaagaau

SEQ ID NO: 1027269 - RNA, 22 nt, Human
ggcuggaaggcccuuuguugau

SEQ ID NO: 1027270 - RNA, 22 nt, Human
gucugugcaguuacuagcuggu

SEQ ID NO: 1027271 - RNA, 22 nt, Human
ucugugggcauuuauaaucugg

SEQ ID NO: 1027272 - RNA, 22 nt, Human
uucucuucacagggaucauccu

SEQ ID NO: 1027273 - RNA, 19 nt, Human
uccuugacuguauucagag

SEQ ID NO: 1027274 - RNA, 22 nt, Human
uagggcucugagaguucagccu

SEQ ID NO: 1027275 - RNA, 22 nt, Human
acauucaugcaccuuccuaucc

SEQ ID NO: 1027276 - RNA, 22 nt, Human
uggccucuccuggcagcaucca

SEQ ID NO: 1027277 - RNA, 22 nt, Human
gcuuucuuuucaagaauguauu

SEQ ID NO: 1027278 - RNA, 22 nt, Human
agugauguagguggauucuggc

SEQ ID NO: 1027279 - RNA, 19 nt, Human
ugggcuuccccagggcaga

SEQ ID NO: 1027280 - RNA, 22 nt, Human
agucuggagugauuauguggga

SEQ ID NO: 1027281 - RNA, 22 nt, Human
uccuggccucugagucaagaac

SEQ ID NO: 1027282 - RNA, 22 nt, Human
gaaacauuuguugaguacuugc

SEQ ID NO: 1027283 - RNA, 22 nt, Human
auagcaaaggacaauagucagu

SEQ ID NO: 1027284 - RNA, 22 nt, Human
uucuuuuaauuucugucugcag

SEQ ID NO: 1027285 - RNA, 22 nt, Human
ucacgugagggaccugugucug

SEQ ID NO: 1027286 - RNA, 21 nt, Human
gcuggcugucucuuacacggu

SEQ ID NO: 1027287 - RNA, 22 nt, Human
uggaaauacaagaaguauguca

SEQ ID NO: 1027288 - RNA, 22 nt, Human
ccagaaugugugaaauuugaug

SEQ ID NO: 1027289 - RNA, 22 nt, Human
gggacagcuguagugcuuggcu

SEQ ID NO: 1027290 - RNA, 22 nt, Human
acaggauuaauaaaaaauugua

SEQ ID NO: 1027291 - RNA, 22 nt, Human
ugauuccugugcuuauuccagu

SEQ ID NO: 1027292 - RNA, 22 nt, Human
uguuuuaagggucaacugucac

SEQ ID NO: 1027293 - RNA, 22 nt, Human
auugcacaucugcacuacagcc

SEQ ID NO: 1027294 - RNA, 22 nt, Human
cacaguuuuaucuuauacugau

SEQ ID NO: 1027295 - RNA, 22 nt, Human
augcacuaugaugagcuagucu

SEQ ID NO: 1027296 - RNA, 23 nt, Human
uggccucuccccaccuggcagaa

SEQ ID NO: 1027297 - RNA, 22 nt, Human
guacuuucaggcuuucccuuaa

SEQ ID NO: 1027298 - RNA, 22 nt, Human
uuaaggaacuugucuuucucuu

SEQ ID NO: 1027299 - RNA, 22 nt, Human
cccaggaguuagagguuguggu

SEQ ID NO: 1027300 - RNA, 22 nt, Human
ccuuuuggccaggucagugcag

SEQ ID NO: 1027301 - RNA, 22 nt, Human
aaugaaacuaguagaaucuuug

SEQ ID NO: 1027302 - RNA, 22 nt, Human
gagaguuaguugagcagucuga

SEQ ID NO: 1027303 - RNA, 22 nt, Human
cuuauuggucccaggaggagaa

SEQ ID NO: 1027304 - RNA, 22 nt, Human
ggucuccugaccuuuagucccu

SEQ ID NO: 1027305 - RNA, 22 nt, Human
caaaugaugcauggcuagugag

SEQ ID NO: 1027306 - RNA, 22 nt, Human
uaaaguuuauuggcaccaccau

SEQ ID NO: 1027307 - RNA, 22 nt, Human
uggcuggcuguccagcugggca

SEQ ID NO: 1027308 - RNA, 21 nt, Human
ugucagcaacaauacuuucuc

SEQ ID NO: 1027309 - RNA, 22 nt, Human
auuuccaggaguugaggucuga

SEQ ID NO: 1027310 - RNA, 22 nt, Human
acaaguuucauuguuuagaacc

SEQ ID NO: 1027311 - RNA, 22 nt, Human
uucaguaugcugaaugauuuuu

SEQ ID NO: 1027312 - RNA, 22 nt, Human
cuauuuucccauaugguugaca

SEQ ID NO: 1027313 - RNA, 22 nt, Human
cuguggcugcgcccugggggag

SEQ ID NO: 1027314 - RNA, 22 nt, Human
ugcugggauuacagucaugagc

SEQ ID NO: 1027315 - RNA, 22 nt, Human
ccugugucaucagcuguggcua

SEQ ID NO: 1027316 - RNA, 22 nt, Human
cauugcuguuaauugucucuag

SEQ ID NO: 1027317 - RNA, 22 nt, Human
uucugugcucaaaacuuuccaa

SEQ ID NO: 1027318 - RNA, 22 nt, Human
gagcugggaagauagcuugagc

SEQ ID NO: 1027319 - RNA, 22 nt, Human
cuucauuaaugucuauaaguuu

SEQ ID NO: 1027320 - RNA, 17 nt, Human
ucuggaugucauggaag

SEQ ID NO: 1027321 - RNA, 22 nt, Human
acugcauuugguaaagucaaga

SEQ ID NO: 1027322 - RNA, 22 nt, Human
ugggggagccuucacaguagcu

SEQ ID NO: 1027323 - RNA, 22 nt, Human
agggcagagauuaauuaagaca

SEQ ID NO: 1027324 - RNA, 22 nt, Human
ugggugcucugcgaccguaggg

SEQ ID NO: 1027325 - RNA, 22 nt, Human
uuaggcauccugucccuggauu

SEQ ID NO: 1027326 - RNA, 22 nt, Human
uggcagcagggccccuggagga

SEQ ID NO: 1027327 - RNA, 22 nt, Human
gaugugucccuuucaacucaga

SEQ ID NO: 1027328 - RNA, 22 nt, Human
cugggguuggccagggcccuag

SEQ ID NO: 1027329 - RNA, 22 nt, Human
ugaacaugcuguugauggccug

SEQ ID NO: 1027330 - RNA, 22 nt, Human
gcucugugccccugccguggac

SEQ ID NO: 1027331 - RNA, 22 nt, Human
uugcaaauaauagccugaaacu

SEQ ID NO: 1027332 - RNA, 22 nt, Human
acaaacuucccagacaagcucc

SEQ ID NO: 1027333 - RNA, 22 nt, Human
cucugguuucgcaggaaauaga

SEQ ID NO: 1027334 - RNA, 22 nt, Human
cuuccagugcauagguagauca

SEQ ID NO: 1027335 - RNA, 22 nt, Human
auggauggaacucugcuguggu

SEQ ID NO: 1027336 - RNA, 22 nt, Human
ugaggaggugggcacacagagu

SEQ ID NO: 1027337 - RNA, 22 nt, Human
cugagcugguucucuugugaaa

SEQ ID NO: 1027338 - RNA, 22 nt, Human
uuguccagcgaccaggcucugu

SEQ ID NO: 1027339 - RNA, 22 nt, Human
ucaggcuagcccagugcuuggg

SEQ ID NO: 1027340 - RNA, 22 nt, Human
gcugccuggaauaacggcuggc

SEQ ID NO: 1027341 - RNA, 22 nt, Human
uugcugccagcgcccugcaggg

SEQ ID NO: 1027342 - RNA, 22 nt, Human
cuggugcuguagccugauugag

SEQ ID NO: 1027343 - RNA, 22 nt, Human
gcuggguggaucggaggcucug

SEQ ID NO: 1027344 - RNA, 22 nt, Human
gaucuguccuggcaguuaacac

SEQ ID NO: 1027345 - RNA, 22 nt, Human
ugagcagacuugaugaggcagc

SEQ ID NO: 1027346 - RNA, 22 nt, Human
ccucuggccuaggccgggagag

SEQ ID NO: 1027347 - RNA, 22 nt, Human
uuggaggaagcucaugggggau

SEQ ID NO: 1027348 - RNA, 22 nt, Human
ucuggauggucagcucuuccug

SEQ ID NO: 1027349 - RNA, 22 nt, Human
gguguggcaguggaccugugaa

SEQ ID NO: 1027350 - RNA, 22 nt, Human
uugagacucgagucucucagac

SEQ ID NO: 1027351 - RNA, 19 nt, Human
uuuaaugugugcugcaauc

SEQ ID NO: 1027352 - RNA, 22 nt, Human
cugcgggcugucaggcgugcca

SEQ ID NO: 1027353 - RNA, 22 nt, Human
uaaugccuuaugucaaauguaa

SEQ ID NO: 1027354 - RNA, 22 nt, Human
guuauucuauuaaugugauugu

SEQ ID NO: 1027355 - RNA, 22 nt, Human
cuggcagcucugagucccuucu

SEQ ID NO: 1027356 - RNA, 22 nt, Human
gccuggagcucggcugagggcg

SEQ ID NO: 1027357 - RNA, 22 nt, Human
gccucugcaccaguacugugcc

SEQ ID NO: 1027358 - RNA, 22 nt, Human
agcauucuguggucuucuaugg

SEQ ID NO: 1027359 - RNA, 22 nt, Human
cugaccaguccuuagcaccugg

SEQ ID NO: 1027360 - RNA, 22 nt, Human
gcuucuggugaggccucaggaa

SEQ ID NO: 1027361 - RNA, 22 nt, Human
caauguuuuuccuuccuuaaua

SEQ ID NO: 1027362 - RNA, 22 nt, Human
uagaggaugauccuuccuugcc

SEQ ID NO: 1027363 - RNA, 22 nt, Human
caguuuuucaaaauuacaugau

SEQ ID NO: 1027364 - RNA, 22 nt, Human
acagccaggaauucuggagaag

SEQ ID NO: 1027365 - RNA, 22 nt, Human
ucauugaggaaagguaguggcu

SEQ ID NO: 1027366 - RNA, 22 nt, Human
guucuucagcccucagguccua

SEQ ID NO: 1027367 - RNA, 22 nt, Human
agcaaauaauugucuuugaggg

SEQ ID NO: 1027368 - RNA, 22 nt, Human
auccuugaaugacucugcccuc

SEQ ID NO: 1027369 - RNA, 22 nt, Human
agaaaucugacugcugugcaca

SEQ ID NO: 1027370 - RNA, 22 nt, Human
uuuucuuggaguggcuguccuu

SEQ ID NO: 1027371 - RNA, 22 nt, Human
acugcauuaucaccaagaugua

SEQ ID NO: 1027372 - RNA, 22 nt, Human
ugggaacuguacugccuugaac

SEQ ID NO: 1027373 - RNA, 23 nt, Human
cguguccuucagggagagugugg

SEQ ID NO: 1027374 - RNA, 22 nt, Human
uuucauuauaaaaaguuggcuu

SEQ ID NO: 1027375 - RNA, 22 nt, Human
cuggcccugucagcacagaauc

SEQ ID NO: 1027376 - RNA, 22 nt, Human
auggaguucugccagcgcugcu

SEQ ID NO: 1027377 - RNA, 22 nt, Human
cugcuucacccugccugagaac

SEQ ID NO: 1027378 - RNA, 22 nt, Human
gacaggugcuaagggaccuggc

SEQ ID NO: 1027379 - RNA, 22 nt, Human
gcugccaucuccugaggacagg

SEQ ID NO: 1027380 - RNA, 22 nt, Human
cuccagcagaaagggcgagugg

SEQ ID NO: 1027381 - RNA, 22 nt, Human
cccagaggcugaguugggagca

SEQ ID NO: 1027382 - RNA, 22 nt, Human
uccaggcugacgcagcuauuua

SEQ ID NO: 1027383 - RNA, 22 nt, Human
auagacacagcuaugauuugag

SEQ ID NO: 1027384 - RNA, 22 nt, Human
ucggggauggugucugagggag

SEQ ID NO: 1027385 - RNA, 22 nt, Human
ucauccugaagaaccugcuucc

SEQ ID NO: 1027386 - RNA, 22 nt, Human
gugggugucaguaucuuuaacg

SEQ ID NO: 1027387 - RNA, 22 nt, Human
acaaaggugagcagaagacaca

SEQ ID NO: 1027388 - RNA, 22 nt, Human
aucauuaacccuugaugcuggg

SEQ ID NO: 1027389 - RNA, 22 nt, Human
ucucugguuauuaacuaacucc

SEQ ID NO: 1027390 - RNA, 20 nt, Human
gaccagaucccuuaccagcu

SEQ ID NO: 1027391 - RNA, 22 nt, Human
ugaggauggaaugcugugcaag

SEQ ID NO: 1027392 - RNA, 22 nt, Human
uaucugucgggagucuuccgga

SEQ ID NO: 1027393 - RNA, 22 nt, Human
augcauugaggaugacaugagu

SEQ ID NO: 1027394 - RNA, 21 nt, Human
uccuccuguagaggguccugg

SEQ ID NO: 1027395 - RNA, 22 nt, Human
aacaugaugacauuguaagcuu

SEQ ID NO: 1027396 - RNA, 22 nt, Human
gacaaagcgccugcucgcgggc

SEQ ID NO: 1027397 - RNA, 22 nt, Human
auuccaaagccugaauaaugga

SEQ ID NO: 1027398 - RNA, 22 nt, Human
cugagaggcacaaggcauuucg

SEQ ID NO: 1027399 - RNA, 22 nt, Human
auucucuguacagaagguaccg

SEQ ID NO: 1027400 - RNA, 22 nt, Human
ccagcaugcucagucuaaauug

SEQ ID NO: 1027401 - RNA, 22 nt, Human
uggggugccgacagggagggca

SEQ ID NO: 1027402 - RNA, 22 nt, Human
acauuguugagccucuuguuca

SEQ ID NO: 1027403 - RNA, 22 nt, Human
uccuuagagugguugugcuaug

SEQ ID NO: 1027404 - RNA, 22 nt, Human
acaaagugaaaagcaucgaauu

SEQ ID NO: 1027405 - RNA, 22 nt, Human
cuggaagcgucggaggaagggc

SEQ ID NO: 1027406 - RNA, 22 nt, Human
guggaaauuuuaggaucaucuu

SEQ ID NO: 1027407 - RNA, 22 nt, Human
auguuguugaacucuuugcaug

SEQ ID NO: 1027408 - RNA, 22 nt, Human
ucagaagcauccauuucaccac

SEQ ID NO: 1027409 - RNA, 22 nt, Human
aaugcauacguguuuguggcaa

SEQ ID NO: 1027410 - RNA, 23 nt, Human
aauagcugguaaugauagcacaa

SEQ ID NO: 1027411 - RNA, 22 nt, Human
ccugugggcgcagcuggaguca

SEQ ID NO: 1027412 - RNA, 19 nt, Human
cucuggcuccugggcugcc

SEQ ID NO: 1027413 - RNA, 22 nt, Human
gugcuggggagauaggaagaga

SEQ ID NO: 1027414 - RNA, 22 nt, Human
ugccuggauggcucugagcagg

SEQ ID NO: 1027415 - RNA, 21 nt, Human
uucugagacucauuugaacuc

SEQ ID NO: 1027416 - RNA, 22 nt, Human
ucaugauaauacaggccuucua

SEQ ID NO: 1027417 - RNA, 22 nt, Human
gccuucugauugcuggacugac

SEQ ID NO: 1027418 - RNA, 22 nt, Human
gacaguggagccacguugggag

SEQ ID NO: 1027419 - RNA, 16 nt, Human
uccuaacuggcaguuc

SEQ ID NO: 1027420 - RNA, 22 nt, Human
gaugugugugcccugggccugc

SEQ ID NO: 1027421 - RNA, 22 nt, Human
auuuccagcagcauauuugucu

SEQ ID NO: 1027422 - RNA, 22 nt, Human
aggcauuuaaagauguaagacu

SEQ ID NO: 1027423 - RNA, 22 nt, Human
cuguggccagagcgccguugac

SEQ ID NO: 1027424 - RNA, 22 nt, Human
aucagagcugcauuuuagagcc

SEQ ID NO: 1027425 - RNA, 22 nt, Human
ggcaguggugggaggcucgcuc

SEQ ID NO: 1027426 - RNA, 22 nt, Human
gcauucuugguggagugcuaaa

SEQ ID NO: 1027427 - RNA, 22 nt, Human
ugucauuggugaucugaugccu

SEQ ID NO: 1027428 - RNA, 22 nt, Human
gucccuggucuaccguggcuuc

SEQ ID NO: 1027429 - RNA, 21 nt, Human
uaaacauaaccuuguauggcu

SEQ ID NO: 1027430 - RNA, 22 nt, Human
aguaacuuaagcaauuguguau

SEQ ID NO: 1027431 - RNA, 22 nt, Human
gcuucuggaagcauaugcaaga

SEQ ID NO: 1027432 - RNA, 22 nt, Human
gauugcugggucccacucccag

SEQ ID NO: 1027433 - RNA, 20 nt, Human
ugggguccuggaggggaucc

SEQ ID NO: 1027434 - RNA, 17 nt, Human
gugcuggccuggggcuc

SEQ ID NO: 1027435 - RNA, 22 nt, Human
ggcuguggucauuaggagguug

SEQ ID NO: 1027436 - RNA, 22 nt, Human
ggcuucuuagaauuugacuuac

SEQ ID NO: 1027437 - RNA, 22 nt, Human
uggcaggaaaaagggccagagg

SEQ ID NO: 1027438 - RNA, 22 nt, Human
guugcaaaugggaagaugguua

SEQ ID NO: 1027439 - RNA, 22 nt, Human
ugcagcaucuccuugugccaug

SEQ ID NO: 1027440 - RNA, 22 nt, Human
cuggccucacagaggcuaagcc

SEQ ID NO: 1027441 - RNA, 22 nt, Human
uggggugugcucagagcagggg

SEQ ID NO: 1027442 - RNA, 22 nt, Human
ugggugccaaccucugguggcc

SEQ ID NO: 1027443 - RNA, 22 nt, Human
ucguuaaucagcaccagaauuc

SEQ ID NO: 1027444 - RNA, 22 nt, Human
gaggagcuucagaggaaucuua

SEQ ID NO: 1027445 - RNA, 22 nt, Human
cagcugcucugguggucucucc

SEQ ID NO: 1027446 - RNA, 22 nt, Human
ucuuucagaaacuuugucugcg

SEQ ID NO: 1027447 - RNA, 22 nt, Human
cuuccucuguggccagagugua

SEQ ID NO: 1027448 - RNA, 22 nt, Human
agauaucuuacacuuugaaguu

SEQ ID NO: 1027449 - RNA, 22 nt, Human
uucccuuucuuaaagaguuagg

SEQ ID NO: 1027450 - RNA, 22 nt, Human
gccuggggaacuugauccuguc

SEQ ID NO: 1027451 - RNA, 17 nt, Human
aguuggcagccguugcu

SEQ ID NO: 1027452 - RNA, 22 nt, Human
uggcugcccccucccguggaca

SEQ ID NO: 1027453 - RNA, 22 nt, Human
uacauuguguuaaaacagaaga

SEQ ID NO: 1027454 - RNA, 17 nt, Human
ugggggcccuguguaga

SEQ ID NO: 1027455 - RNA, 22 nt, Human
auggaguugagcucuguugucc

SEQ ID NO: 1027456 - RNA, 22 nt, Human
caaagaugccaaaaggaagaca

SEQ ID NO: 1027457 - RNA, 22 nt, Human
uugcauauccuccaacacaugg

SEQ ID NO: 1027458 - RNA, 22 nt, Human
aauggcugccagggcaggaggu

SEQ ID NO: 1027459 - RNA, 22 nt, Human
uccaggauugucagccagaagg

SEQ ID NO: 1027460 - RNA, 22 nt, Human
agguggcuaugaggaugcaguc

SEQ ID NO: 1027461 - RNA, 22 nt, Human
cccaggaguaagugacauuguu

SEQ ID NO: 1027462 - RNA, 22 nt, Human
uuuccacacucacugcacucau

SEQ ID NO: 1027463 - RNA, 22 nt, Human
uuuccagggaggaauguggggu

SEQ ID NO: 1027464 - RNA, 22 nt, Human
gucagcaggguccccuugagug

SEQ ID NO: 1027465 - RNA, 22 nt, Human
ccugugacucugucugaugguc

SEQ ID NO: 1027466 - RNA, 22 nt, Human
uugcuugaacccaggaagugga

SEQ ID NO: 1027467 - RNA, 22 nt, Human
uggcuguagaaucagagacuug

SEQ ID NO: 1027468 - RNA, 22 nt, Human
uuccccuugauaaugcaguaag

SEQ ID NO: 1027469 - RNA, 22 nt, Human
aggacagcagugcuggcacuug

SEQ ID NO: 1027470 - RNA, 22 nt, Human
cucugggguggaggaggcugac

SEQ ID NO: 1027471 - RNA, 22 nt, Human
ucugagugggaacucucaugac

SEQ ID NO: 1027472 - RNA, 22 nt, Human
cucugugaaccccuccuuucuu

SEQ ID NO: 1027473 - RNA, 21 nt, Human
agggccagaucaccaaggagc

SEQ ID NO: 1027474 - RNA, 19 nt, Human
ucuggcugccaaggauuga

SEQ ID NO: 1027475 - RNA, 22 nt, Human
ccugugauauuguucauaauau

SEQ ID NO: 1027476 - RNA, 22 nt, Human
ugcauuaagaauuucugaggau

SEQ ID NO: 1027477 - RNA, 22 nt, Human
ucucauuuacuuccacaggcug

SEQ ID NO: 1027478 - RNA, 22 nt, Human
gauggugcaggugaagugcugg

SEQ ID NO: 1027479 - RNA, 19 nt, Human
ggggcccggggucugcgag

SEQ ID NO: 1027480 - RNA, 22 nt, Human
ucccugagugggcugguaguau

SEQ ID NO: 1027481 - RNA, 22 nt, Human
ggagacagugacuuagagacug

SEQ ID NO: 1027482 - RNA, 22 nt, Human
gcugcuggcuuccugcuguuuu

SEQ ID NO: 1027483 - RNA, 22 nt, Human
ucccugggguaucgcugaggca

SEQ ID NO: 1027484 - RNA, 22 nt, Human
cugagcagucuagccagguguu

SEQ ID NO: 1027485 - RNA, 22 nt, Human
ucugagagcuguagaagccuau

SEQ ID NO: 1027486 - RNA, 22 nt, Human
accagagucaauuauuuugcca

SEQ ID NO: 1027487 - RNA, 22 nt, Human
ugugcccuccugccaggggcug

SEQ ID NO: 1027488 - RNA, 22 nt, Human
aucuaugugggaaucauaauag

SEQ ID NO: 1027489 - RNA, 21 nt, Human
acugaacuuguguucuagagg

SEQ ID NO: 1027490 - RNA, 22 nt, Human
cauuguguauuucuguaguacu

SEQ ID NO: 1027491 - RNA, 22 nt, Human
uucaccugugacagguagaguu

SEQ ID NO: 1027492 - RNA, 22 nt, Human
uggcuuuugaaaaggugaugua

SEQ ID NO: 1027493 - RNA, 22 nt, Human
ccaccagaccaccaagagcaac

SEQ ID NO: 1027494 - RNA, 22 nt, Human
gggagcugaacugcugaaguug

SEQ ID NO: 1027495 - RNA, 22 nt, Human
agcauuagguguguuucagagg

SEQ ID NO: 1027496 - RNA, 22 nt, Human
uuguccuuaccucaaucuggaa

SEQ ID NO: 1027497 - RNA, 22 nt, Human
gcugucaggaacaugccuuggu

SEQ ID NO: 1027498 - RNA, 22 nt, Human
uggcuacauuuauacucucauu

SEQ ID NO: 1027499 - RNA, 22 nt, Human
caggaacagcaccaggagcuag

SEQ ID NO: 1027500 - RNA, 22 nt, Human
cgaggaggaaacgcggagaacu

SEQ ID NO: 1027501 - RNA, 22 nt, Human
agaggagguccuuuucugaugu

SEQ ID NO: 1027502 - RNA, 22 nt, Human
uuuggagagaugaaguucugug

SEQ ID NO: 1027503 - RNA, 22 nt, Human
uucagaagguaggaaugucccu

SEQ ID NO: 1027504 - RNA, 22 nt, Human
acauagcuuaaaugagaagaua

SEQ ID NO: 1027505 - RNA, 22 nt, Human
guaugugucuuagaacuuggga

SEQ ID NO: 1027506 - RNA, 22 nt, Human
uugaggagucaggggcacggaa

SEQ ID NO: 1027507 - RNA, 22 nt, Human
gugggggcaggcagugcuagga

SEQ ID NO: 1027508 - RNA, 22 nt, Human
uggcugagcugcagcguggcuu

SEQ ID NO: 1027509 - RNA, 23 nt, Human
uggcuugcuaauguuccaaauaa

SEQ ID NO: 1027510 - RNA, 22 nt, Human
ggaggaggggugacugaaugcu

SEQ ID NO: 1027511 - RNA, 22 nt, Human
cuucuggcguuggaggucugag

SEQ ID NO: 1027512 - RNA, 21 nt, Human
auucaaagaagaggaaggccc

SEQ ID NO: 1027513 - RNA, 22 nt, Human
gggagcugaaggagccggcggg

SEQ ID NO: 1027514 - RNA, 22 nt, Human
gccuggcucugaguuucucucc

SEQ ID NO: 1027515 - RNA, 23 nt, Human
ucuggcugcuccuuucaaugcuc

SEQ ID NO: 1027516 - RNA, 22 nt, Human
cucaucuggcuucaguaacagu

SEQ ID NO: 1027517 - RNA, 19 nt, Human
gggugaggaagagcguugc

SEQ ID NO: 1027518 - RNA, 20 nt, Human
uuugauugccccucugacuu

SEQ ID NO: 1027519 - RNA, 20 nt, Human
uucaugcagugguugcugug

SEQ ID NO: 1027520 - RNA, 20 nt, Human
ggcagcaaccauaugcuaca

SEQ ID NO: 1027521 - RNA, 22 nt, Human
uugauucugcugaucucggacg

SEQ ID NO: 1027522 - RNA, 22 nt, Human
auuuacucgugcuucauugaau

SEQ ID NO: 1027523 - RNA, 22 nt, Human
caggucuucuucagcacuugga

SEQ ID NO: 1027524 - RNA, 18 nt, Human
gaaggcauucaguggcuu

SEQ ID NO: 1027525 - RNA, 22 nt, Human
gggagaguagcuggaagguucu

SEQ ID NO: 1027526 - RNA, 22 nt, Human
cuugaugaaugaccuggguggu

SEQ ID NO: 1027527 - RNA, 22 nt, Human
ccaugcccuugucaucuccagg

SEQ ID NO: 1027528 - RNA, 22 nt, Human
ugaggucuguccugucuuugga

SEQ ID NO: 1027529 - RNA, 22 nt, Human
gugagagugguuuauguccaug

SEQ ID NO: 1027530 - RNA, 22 nt, Human
uauggcaagaugacauguucuc

SEQ ID NO: 1027531 - RNA, 22 nt, Human
uguuucaggcuucugggauuuu

SEQ ID NO: 1027532 - RNA, 22 nt, Human
uccaggcuccccugcgugcucc

SEQ ID NO: 1027533 - RNA, 22 nt, Human
uugggugcugucauggggcacg

SEQ ID NO: 1027534 - RNA, 22 nt, Human
ugagcucaagcaauucacccgc

SEQ ID NO: 1027535 - RNA, 22 nt, Human
ucugcuugugucuguccagccu

SEQ ID NO: 1027536 - RNA, 22 nt, Human
ucuggcuucaacuuuacugaaa

SEQ ID NO: 1027537 - RNA, 22 nt, Human
cucagcaacagcgacuuaaggg

SEQ ID NO: 1027538 - RNA, 22 nt, Human
ugucuucuaccuugacagcauu

SEQ ID NO: 1027539 - RNA, 22 nt, Human
ugaauagagcugcaguggacau

SEQ ID NO: 1027540 - RNA, 22 nt, Human
ccaaagcuggcuuucaugguuu

SEQ ID NO: 1027541 - RNA, 22 nt, Human
cuggagaggcugggaacagguu

SEQ ID NO: 1027542 - RNA, 23 nt, Human
acugccugugccgaucucucuca

SEQ ID NO: 1027543 - RNA, 22 nt, Human
auacaccaccuuggaucuuuca

SEQ ID NO: 1027544 - RNA, 22 nt, Human
ccuuugagccugggcgcggacc

SEQ ID NO: 1027545 - RNA, 22 nt, Human
ucuccucuauuucuguauguau

SEQ ID NO: 1027546 - RNA, 22 nt, Human
gcucagguagaugggguugucc

SEQ ID NO: 1027547 - RNA, 22 nt, Human
augaggagucaaggagucggag

SEQ ID NO: 1027548 - RNA, 22 nt, Human
uggugcugccaccuccucugcu

SEQ ID NO: 1027549 - RNA, 22 nt, Human
ucuauuaaugauucaauagugu

SEQ ID NO: 1027550 - RNA, 22 nt, Human
gucaggggccaugggccaagga

SEQ ID NO: 1027551 - RNA, 22 nt, Human
gagcugucucuuugggccuuuu

SEQ ID NO: 1027552 - RNA, 22 nt, Human
augugagcuggggcccggccag

SEQ ID NO: 1027553 - RNA, 22 nt, Human
ugacuuuggacuagugauuuaa

SEQ ID NO: 1027554 - RNA, 21 nt, Human
ucccucagaagcucuugguca

SEQ ID NO: 1027555 - RNA, 22 nt, Human
gccagaggggcucgaaggcgcg

SEQ ID NO: 1027556 - RNA, 22 nt, Human
ugcaaauauuccaugcuguuca

SEQ ID NO: 1027557 - RNA, 22 nt, Human
ccuugagacacagccaaagaug

SEQ ID NO: 1027558 - RNA, 21 nt, Human
ucuccucccggggagaggccg

SEQ ID NO: 1027559 - RNA, 22 nt, Human
guucuccaggggcuguucaucu

SEQ ID NO: 1027560 - RNA, 22 nt, Human
gagcagcaggccagguugcagg

SEQ ID NO: 1027561 - RNA, 22 nt, Human
ccaucgcuucaaaucucagacu

SEQ ID NO: 1027562 - RNA, 21 nt, Human
uggagagugauuucagugugg

SEQ ID NO: 1027563 - RNA, 22 nt, Human
ugccuguguccccuucuuggca

SEQ ID NO: 1027564 - RNA, 22 nt, Human
caugggcucuucuggacugcac

SEQ ID NO: 1027565 - RNA, 22 nt, Human
uggcccagcucagggugggcgg

SEQ ID NO: 1027566 - RNA, 22 nt, Human
ugcuggaagggucggcgugggc

SEQ ID NO: 1027567 - RNA, 22 nt, Human
uucguuuaguccacaaaugcau

SEQ ID NO: 1027568 - RNA, 22 nt, Human
aaccagacucuccaaaggcaaa

SEQ ID NO: 1027569 - RNA, 22 nt, Human
gucuccugaggcauccauugaa

SEQ ID NO: 1027570 - RNA, 22 nt, Human
cuuggcugaacuccaggaugca

SEQ ID NO: 1027571 - RNA, 23 nt, Human
uacagccaugucgcugauuuaac

SEQ ID NO: 1027572 - RNA, 22 nt, Human
ugaacagugugagggugugacc

SEQ ID NO: 1027573 - RNA, 22 nt, Human
ggggucccugcaccagcauguc

SEQ ID NO: 1027574 - RNA, 22 nt, Human
gugcugagugcagagugcagag

SEQ ID NO: 1027575 - RNA, 22 nt, Human
gcggggggcagcagucgcucag

SEQ ID NO: 1027576 - RNA, 22 nt, Human
ucugcucagccgaucugcuccg

SEQ ID NO: 1027577 - RNA, 22 nt, Human
auucccuuugacgaucccuagg

SEQ ID NO: 1027578 - RNA, 22 nt, Human
uuagaaaaaggcuguggucuua

SEQ ID NO: 1027579 - RNA, 20 nt, Human
uuucacuggcuugauaaggu

SEQ ID NO: 1027580 - RNA, 18 nt, Human
ucagacaaguuagacagg

SEQ ID NO: 1027581 - RNA, 22 nt, Human
agccacccuaccagcccugaaa

SEQ ID NO: 1027582 - RNA, 19 nt, Human
caggucuucuuggaggacu

SEQ ID NO: 1027583 - RNA, 22 nt, Human
ggaguugacggccgacacccag

SEQ ID NO: 1027584 - RNA, 22 nt, Human
uuccuuggaaagagacgucgcu

SEQ ID NO: 1027585 - RNA, 20 nt, Human
uugaggagauauugaauacu

SEQ ID NO: 1027586 - RNA, 22 nt, Human
uggauguuugaaguugcaugug

SEQ ID NO: 1027587 - RNA, 22 nt, Human
ccuggccugugaaucugagagc

SEQ ID NO: 1027588 - RNA, 19 nt, Human
ugcuugccugccuuuccca

SEQ ID NO: 1027589 - RNA, 22 nt, Human
uuccuuggagucaaacagggag

SEQ ID NO: 1027590 - RNA, 22 nt, Human
aagaggaggacgguucccagaa

SEQ ID NO: 1027591 - RNA, 22 nt, Human
ucuccaggggcagggucuggag

SEQ ID NO: 1027592 - RNA, 22 nt, Human
gcuggccugcgagggcaggcug

SEQ ID NO: 1027593 - RNA, 22 nt, Human
gcagcuuuggagguggaacucu

SEQ ID NO: 1027594 - RNA, 22 nt, Human
cagaggauauaugguuuguaug

SEQ ID NO: 1027595 - RNA, 22 nt, Human
aggcuguagaucuagacaugua

SEQ ID NO: 1027596 - RNA, 22 nt, Human
gucaucaucaggcagaugcugc

SEQ ID NO: 1027597 - RNA, 22 nt, Human
ggcuggaacuucuucuggcauu

SEQ ID NO: 1027598 - RNA, 22 nt, Human
ucccagugggaagcagcacgcu

SEQ ID NO: 1027599 - RNA, 22 nt, Human
ggaauccugguguuuucugccu

SEQ ID NO: 1027600 - RNA, 20 nt, Human
ugugggccuucggcgugcuc

SEQ ID NO: 1027601 - RNA, 22 nt, Human
ccuggguccaauucuggcuugu

SEQ ID NO: 1027602 - RNA, 22 nt, Human
gagaacuugaacuuuuccucug

SEQ ID NO: 1027603 - RNA, 22 nt, Human
auuuggucuacauuuuccaaau

SEQ ID NO: 1027604 - RNA, 22 nt, Human
cacaauuuccauugagcagcag

SEQ ID NO: 1027605 - RNA, 18 nt, Human
ucugugggaucagugagg

SEQ ID NO: 1027606 - RNA, 22 nt, Human
cugagcaggacagugggagacc

SEQ ID NO: 1027607 - RNA, 22 nt, Human
uggcaauguggaaugguccagg

SEQ ID NO: 1027608 - RNA, 22 nt, Human
uggccucuuucuucccuuugac

SEQ ID NO: 1027609 - RNA, 22 nt, Human
ugcuggccucggcgcugggccu

SEQ ID NO: 1027610 - RNA, 22 nt, Human
ugguaccagcuguguguucacu

SEQ ID NO: 1027611 - RNA, 22 nt, Human
uugggacaaagacuccuugaau

SEQ ID NO: 1027612 - RNA, 22 nt, Human
gccagugccugcugcucagggc

SEQ ID NO: 1027613 - RNA, 20 nt, Human
guggcagugguggcagcagu

SEQ ID NO: 1027614 - RNA, 22 nt, Human
ugacucauauuucauggauacg

SEQ ID NO: 1027615 - RNA, 22 nt, Human
augcuugaaaguuauuucauuu

SEQ ID NO: 1027616 - RNA, 22 nt, Human
gguggcaccuuacccugcgcag

SEQ ID NO: 1027617 - RNA, 21 nt, Human
gcaggguuugugcugugaguu

SEQ ID NO: 1027618 - RNA, 22 nt, Human
cuguggcuaggaagcuguggga

SEQ ID NO: 1027619 - RNA, 22 nt, Human
cuucuggguauuccagauaccu

SEQ ID NO: 1027620 - RNA, 22 nt, Human
auuguugacuugauuacucaac

SEQ ID NO: 1027621 - RNA, 22 nt, Human
uagcugggacuacuggcccugc

SEQ ID NO: 1027622 - RNA, 23 nt, Human
uuguccucuggaucgguuugguu

SEQ ID NO: 1027623 - RNA, 22 nt, Human
ugugacuaggccugagcucuug

SEQ ID NO: 1027624 - RNA, 22 nt, Human
guugcauuaaucugcucaggcu

SEQ ID NO: 1027625 - RNA, 22 nt, Human
agguucccagagauagagcugu

SEQ ID NO: 1027626 - RNA, 22 nt, Human
auguucaaguaccuuugugucu

SEQ ID NO: 1027627 - RNA, 22 nt, Human
uugaggucuucaggaucaggcu

SEQ ID NO: 1027628 - RNA, 22 nt, Human
auguccagaguaaagcacauuc

SEQ ID NO: 1027629 - RNA, 22 nt, Human
cuggcuuuuuucccauuaugca

SEQ ID NO: 1027630 - RNA, 22 nt, Human
ucugaggacagugcugugccug

SEQ ID NO: 1027631 - RNA, 22 nt, Human
uaacuucucugagccucauucc

SEQ ID NO: 1027632 - RNA, 22 nt, Human
uugagcagaucgggcugugggg

SEQ ID NO: 1027633 - RNA, 22 nt, Human
guugguccuuugagcaagaucc

SEQ ID NO: 1027634 - RNA, 22 nt, Human
cugaugcucuggauguagucaa

SEQ ID NO: 1027635 - RNA, 22 nt, Human
uuugcaaaguccauugaaguua

SEQ ID NO: 1027636 - RNA, 22 nt, Human
agaagugaguugugacuauggg

SEQ ID NO: 1027637 - RNA, 22 nt, Human
cccucuggcucuucucaggccg

SEQ ID NO: 1027638 - RNA, 22 nt, Human
cacagcuaccugcaugccugcu

SEQ ID NO: 1027639 - RNA, 22 nt, Human
gcaaaacagucgaugccuccca

SEQ ID NO: 1027640 - RNA, 22 nt, Human
accagucauagaaagcaguggu

SEQ ID NO: 1027641 - RNA, 18 nt, Human
uccaggcuccaggcuaac

SEQ ID NO: 1027642 - RNA, 22 nt, Human
ucauggaugauagcuucauugc

SEQ ID NO: 1027643 - RNA, 22 nt, Human
gggagcuggagcuggaagacuc

SEQ ID NO: 1027644 - RNA, 22 nt, Human
aacacugugcccacccuagucc

SEQ ID NO: 1027645 - RNA, 22 nt, Human
uaaugccuuucuguacuauaug

SEQ ID NO: 1027646 - RNA, 22 nt, Human
ucuuggcaguucuugugcuuuu

SEQ ID NO: 1027647 - RNA, 22 nt, Human
cucuggagggaggcugagcugg

SEQ ID NO: 1027648 - RNA, 21 nt, Human
uggacauuuacccuucaggga

SEQ ID NO: 1027649 - RNA, 22 nt, Human
aacagauuguaaccugauagcc

SEQ ID NO: 1027650 - RNA, 22 nt, Human
auaaugacauucuuagacugga

SEQ ID NO: 1027651 - RNA, 22 nt, Human
agacaagagcugaggacauauu

SEQ ID NO: 1027652 - RNA, 22 nt, Human
ggcaaucauuggcauucucugg

SEQ ID NO: 1027653 - RNA, 22 nt, Human
cuugggcaggggaaacagcugc

SEQ ID NO: 1027654 - RNA, 22 nt, Human
gaguggggcccacugcugggug

SEQ ID NO: 1027655 - RNA, 20 nt, Human
ggccggggagcucuccaggg

SEQ ID NO: 1027656 - RNA, 22 nt, Human
ucugccaucaagaugcucuggc

SEQ ID NO: 1027657 - RNA, 22 nt, Human
guucuucagauuccauuucagu

SEQ ID NO: 1027658 - RNA, 22 nt, Human
ugggguccucucacuuggaggg

SEQ ID NO: 1027659 - RNA, 22 nt, Human
gaagcuucgaaagagugauuuc

SEQ ID NO: 1027660 - RNA, 22 nt, Human
ucccucugcuagugcuugagcu

SEQ ID NO: 1027661 - RNA, 22 nt, Human
agguuaggaaugggagguaaug

SEQ ID NO: 1027662 - RNA, 22 nt, Human
ucauccagccucaucaggagcu

SEQ ID NO: 1027663 - RNA, 22 nt, Human
ugucuuggccacuaggagugcc

SEQ ID NO: 1027664 - RNA, 22 nt, Human
ucacugaauuucaagcuagugg

SEQ ID NO: 1027665 - RNA, 22 nt, Human
agugacagauuaccggcagagc

SEQ ID NO: 1027666 - RNA, 22 nt, Human
cuagggcagggaguguuugcgc

SEQ ID NO: 1027667 - RNA, 22 nt, Human
ugcuggcugggcugcuggagac

SEQ ID NO: 1027668 - RNA, 22 nt, Human
uccuuggcaugccgucuucucc

SEQ ID NO: 1027669 - RNA, 22 nt, Human
gaccugugcagugacugguggc

SEQ ID NO: 1027670 - RNA, 18 nt, Human
uggggggcuugucugaag

SEQ ID NO: 1027671 - RNA, 18 nt, Human
cuggucucccuucgcuuu

SEQ ID NO: 1027672 - RNA, 22 nt, Human
guuggcuaugagagcuuuagug

SEQ ID NO: 1027673 - RNA, 22 nt, Human
cugagcagaagggugcacgugc

SEQ ID NO: 1027674 - RNA, 22 nt, Human
ccuggggaccugccucagcccu

SEQ ID NO: 1027675 - RNA, 23 nt, Human
cguuuuuuccucagauguucugg

SEQ ID NO: 1027676 - RNA, 22 nt, Human
uuuuucaagacaaccugcaugu

SEQ ID NO: 1027677 - RNA, 22 nt, Human
aaagcugggcuggccaacccag

SEQ ID NO: 1027678 - RNA, 22 nt, Human
ucuuugcauggacauguguuuu

SEQ ID NO: 1027679 - RNA, 22 nt, Human
cugggcuguuuguucuggucuc

SEQ ID NO: 1027680 - RNA, 22 nt, Human
caaugggccuggagagagcugg

SEQ ID NO: 1027681 - RNA, 22 nt, Human
ggugggugagcccugggagcug

SEQ ID NO: 1027682 - RNA, 22 nt, Human
aggggcuuguggaguugcuggu

SEQ ID NO: 1027683 - RNA, 22 nt, Human
ucguggaucaccgcgucugugu

SEQ ID NO: 1027684 - RNA, 22 nt, Human
auuuugacauugcggcauugcu

SEQ ID NO: 1027685 - RNA, 22 nt, Human
uaguauuuccuguaagcuauag

SEQ ID NO: 1027686 - RNA, 22 nt, Human
ccuggggagaagagcuuccccc

SEQ ID NO: 1027687 - RNA, 22 nt, Human
aggaauuugggguuacaugaug

SEQ ID NO: 1027688 - RNA, 22 nt, Human
ugucuggauagagccuaggccc

SEQ ID NO: 1027689 - RNA, 22 nt, Human
guucuucaggcugugcucuaga

SEQ ID NO: 1027690 - RNA, 22 nt, Human
gcccagggcugcaaguggacgc

SEQ ID NO: 1027691 - RNA, 22 nt, Human
augaaacucuagcuuucagcac

SEQ ID NO: 1027692 - RNA, 22 nt, Human
ugugaggaccucagcagagucu

SEQ ID NO: 1027693 - RNA, 22 nt, Human
guuuuguucaugaacauugggu

SEQ ID NO: 1027694 - RNA, 22 nt, Human
ccugcucaacgaauauggcgau

SEQ ID NO: 1027695 - RNA, 22 nt, Human
caugcuggucagccaguggaug

SEQ ID NO: 1027696 - RNA, 22 nt, Human
gcauaacaacagacucuguguu

SEQ ID NO: 1027697 - RNA, 19 nt, Human
ccuggcccugcugcgcggg

SEQ ID NO: 1027698 - RNA, 19 nt, Human
cugggacaaugaaagcauc

SEQ ID NO: 1027699 - RNA, 22 nt, Human
ccuugcagcauauagagucccu

SEQ ID NO: 1027700 - RNA, 21 nt, Human
ucugaggagaaacucuuggug

SEQ ID NO: 1027701 - RNA, 22 nt, Human
cagcuggcgacucuccucgaug

SEQ ID NO: 1027702 - RNA, 18 nt, Human
gacaaaaguacagacaga

SEQ ID NO: 1027703 - RNA, 22 nt, Human
agugacauuauuuuguguacua

SEQ ID NO: 1027704 - RNA, 22 nt, Human
aggagcagaacuguuguggagg

SEQ ID NO: 1027705 - RNA, 18 nt, Human
uccaccgcgugcaccucu

SEQ ID NO: 1027706 - RNA, 22 nt, Human
gugaagcacaugggcguugggu

SEQ ID NO: 1027707 - RNA, 20 nt, Human
uggccucugagaugccacgg

SEQ ID NO: 1027708 - RNA, 22 nt, Human
uucucugaguacguuucagugu

SEQ ID NO: 1027709 - RNA, 22 nt, Human
ugcugcgggacccacugugggc

SEQ ID NO: 1027710 - RNA, 22 nt, Human
guuugagauggguuauugcucu

SEQ ID NO: 1027711 - RNA, 22 nt, Human
aaguuugucucauuugaucuuc

SEQ ID NO: 1027712 - RNA, 22 nt, Human
gcuguccugggaacaggcacua

SEQ ID NO: 1027713 - RNA, 23 nt, Human
uggcucuguggaucccucaggag

SEQ ID NO: 1027714 - RNA, 22 nt, Human
ccagaucccuguuugccucugg

SEQ ID NO: 1027715 - RNA, 22 nt, Human
cagaaagcaguugucaaugggc

SEQ ID NO: 1027716 - RNA, 22 nt, Human
uugacacagucaacuugauuuu

SEQ ID NO: 1027717 - RNA, 22 nt, Human
caagagcuggguggcaagcuag

SEQ ID NO: 1027718 - RNA, 22 nt, Human
aucuucaaagcacaucguuugu

SEQ ID NO: 1027719 - RNA, 22 nt, Human
cugccaucugagccaaaagugc

SEQ ID NO: 1027720 - RNA, 22 nt, Human
aggcuuuugcucuggcuccucu

SEQ ID NO: 1027721 - RNA, 22 nt, Human
uuaauggauuggagguuucaau

SEQ ID NO: 1027722 - RNA, 22 nt, Human
ucagccaggccaggcauucaca

SEQ ID NO: 1027723 - RNA, 22 nt, Human
uugaugcugucuuucagaauca

SEQ ID NO: 1027724 - RNA, 23 nt, Human
gggugcugccuguagucaugcug

SEQ ID NO: 1027725 - RNA, 22 nt, Human
ugguuuguauauguuugugaga

SEQ ID NO: 1027726 - RNA, 22 nt, Human
gccuucugaucgcuggacugac

SEQ ID NO: 1027727 - RNA, 22 nt, Human
acugcauucuuuaucccacaac

SEQ ID NO: 1027728 - RNA, 22 nt, Human
ggugggucuuguggggcagcuu

SEQ ID NO: 1027729 - RNA, 21 nt, Human
ucuuggggaggagggcugcac

SEQ ID NO: 1027730 - RNA, 22 nt, Human
cugggauccacgggcucccaag

SEQ ID NO: 1027731 - RNA, 22 nt, Human
ggccucugccccgcggggcucg

SEQ ID NO: 1027732 - RNA, 22 nt, Human
aauggcuguucucugugauugg

SEQ ID NO: 1027733 - RNA, 22 nt, Human
agguggucuuguggaugccgca

SEQ ID NO: 1027734 - RNA, 22 nt, Human
uccuuggcagcagggagcauga

SEQ ID NO: 1027735 - RNA, 22 nt, Human
guggggacgggauggcucacug

SEQ ID NO: 1027736 - RNA, 22 nt, Human
caggcuguguuccuggaacccc

SEQ ID NO: 1027737 - RNA, 22 nt, Human
aaagucuuaauguaaguuuagu

SEQ ID NO: 1027738 - RNA, 22 nt, Human
uuugaauauacuucaaacaaag

SEQ ID NO: 1027739 - RNA, 23 nt, Human
gagcugggauacaggcuuacugc

SEQ ID NO: 1027740 - RNA, 22 nt, Human
cauugcugugggcauuugcugc

SEQ ID NO: 1027741 - RNA, 22 nt, Human
uucacagugguagugcauuuag

SEQ ID NO: 1027742 - RNA, 21 nt, Human
ugcauauauaagugcauacac

SEQ ID NO: 1027743 - RNA, 22 nt, Human
auaggcauaacacugauguccu

SEQ ID NO: 1027744 - RNA, 22 nt, Human
ugcugcucuucaccauggccuc

SEQ ID NO: 1027745 - RNA, 22 nt, Human
gaugucuggcuaccacucgcac

SEQ ID NO: 1027746 - RNA, 22 nt, Human
gcuguggcuccaauggugagcc

SEQ ID NO: 1027747 - RNA, 22 nt, Human
ggcggccugugggucggccuca

SEQ ID NO: 1027748 - RNA, 22 nt, Human
aggugcugccccgagaaggaug

SEQ ID NO: 1027749 - RNA, 22 nt, Human
ccucuugauugguuggaagcgg

SEQ ID NO: 1027750 - RNA, 22 nt, Human
ugagucauguaauaaugcugcu

SEQ ID NO: 1027751 - RNA, 22 nt, Human
uugcaggucuggggguccuggu

SEQ ID NO: 1027752 - RNA, 22 nt, Human
ucuccaggcuuaaucucagcuu

SEQ ID NO: 1027753 - RNA, 22 nt, Human
gcugauggcuugcuggcugaca

SEQ ID NO: 1027754 - RNA, 22 nt, Human
uuuuccuuaacagagggagaaa

SEQ ID NO: 1027755 - RNA, 22 nt, Human
uucauugauuuccuuggaauaa

SEQ ID NO: 1027756 - RNA, 22 nt, Human
uuccuccagccuggagcacuuc

SEQ ID NO: 1027757 - RNA, 22 nt, Human
gaaacuguauguaguuuuuggg

SEQ ID NO: 1027758 - RNA, 22 nt, Human
gcugggagucgcgucuguggcc

SEQ ID NO: 1027759 - RNA, 22 nt, Human
cucccucaggccuuagcccugc

SEQ ID NO: 1027760 - RNA, 23 nt, Human
aucuguguguggguagggaugau

SEQ ID NO: 1027761 - RNA, 22 nt, Human
agcuccagggaaagaguggauc

SEQ ID NO: 1027762 - RNA, 22 nt, Human
uccuccuuuccccgcuggagcc

SEQ ID NO: 1027763 - RNA, 22 nt, Human
agggccagcagcuuggccaacc

SEQ ID NO: 1027764 - RNA, 22 nt, Human
agcucagaacugcagacaugug

SEQ ID NO: 1027765 - RNA, 22 nt, Human
aaaugccucauuuucucucacu

SEQ ID NO: 1027766 - RNA, 22 nt, Human
uaggcagggauuaggguugauu

SEQ ID NO: 1027767 - RNA, 22 nt, Human
uauuucagcucuuuggauuauc

SEQ ID NO: 1027768 - RNA, 22 nt, Human
gaggcugugugucccucuggac

SEQ ID NO: 1027769 - RNA, 22 nt, Human
ggaaacuuggaugccagcacuc

SEQ ID NO: 1027770 - RNA, 22 nt, Human
aguggcugugaaauacauggga

SEQ ID NO: 1027771 - RNA, 22 nt, Human
aguguccaacucagcuugucaa

SEQ ID NO: 1027772 - RNA, 22 nt, Human
gcggggggcaggcaguacguug

SEQ ID NO: 1027773 - RNA, 22 nt, Human
gagcuuggugcugccuguuguc

SEQ ID NO: 1027774 - RNA, 22 nt, Human
auggcuguguuguuccucugaa

SEQ ID NO: 1027775 - RNA, 22 nt, Human
gacuggcucuaucuccuuggcg

SEQ ID NO: 1027776 - RNA, 22 nt, Human
ugcccuguuccugccuccagcu

SEQ ID NO: 1027777 - RNA, 21 nt, Human
uuggaacaagcagcaguuugc

SEQ ID NO: 1027778 - RNA, 22 nt, Human
agcugugaccuucaagagcuac

SEQ ID NO: 1027779 - RNA, 22 nt, Human
ucagguagugguuaaguucugu

SEQ ID NO: 1027780 - RNA, 22 nt, Human
cugcacagucauuuccucucaa

SEQ ID NO: 1027781 - RNA, 22 nt, Human
aggccagugguucucugugucc

SEQ ID NO: 1027782 - RNA, 22 nt, Human
caagggcagaggcagggccccg

SEQ ID NO: 1027783 - RNA, 22 nt, Human
ccuucaaucuuaagucagccca

SEQ ID NO: 1027784 - RNA, 22 nt, Human
aguucugacucugaaucuggga

SEQ ID NO: 1027785 - RNA, 17 nt, Human
acuuguauugugcuuua

SEQ ID NO: 1027786 - RNA, 22 nt, Human
cuccaggacaugacuuucuugc

SEQ ID NO: 1027787 - RNA, 23 nt, Human
gguuggcuguacccaggcucccu

SEQ ID NO: 1027788 - RNA, 22 nt, Human
ggauguggaccuugccugguga

SEQ ID NO: 1027789 - RNA, 23 nt, Human
auaugucaugcaccagcacuuua

SEQ ID NO: 1027790 - RNA, 22 nt, Human
ggcuuggaaauugcaggacaca

SEQ ID NO: 1027791 - RNA, 22 nt, Human
uugucaggaacuaugauuaugc

SEQ ID NO: 1027792 - RNA, 22 nt, Human
uuauuuaaaagugguaagauuc

SEQ ID NO: 1027793 - RNA, 22 nt, Human
ccucuuccuucucacuguggaa

SEQ ID NO: 1027794 - RNA, 22 nt, Human
uugucgggcuuacgcagggcca

SEQ ID NO: 1027795 - RNA, 22 nt, Human
ucuggggucaccuggggugcuu

SEQ ID NO: 1027796 - RNA, 22 nt, Human
ucuuccagauacuuccugacuu

SEQ ID NO: 1027797 - RNA, 22 nt, Human
uuauuuuguagcucugaucuuu

SEQ ID NO: 1027798 - RNA, 22 nt, Human
gccuggaucccagggagucagg

SEQ ID NO: 1027799 - RNA, 19 nt, Human
ggauaagguuggagugauc

SEQ ID NO: 1027800 - RNA, 22 nt, Human
cucaggucuuaguucugucauc

SEQ ID NO: 1027801 - RNA, 22 nt, Human
agugcguggaccccuggcugcu

SEQ ID NO: 1027802 - RNA, 22 nt, Human
gaauucggguacucuaggccag

SEQ ID NO: 1027803 - RNA, 22 nt, Human
acuagaaacuaauggauuauua

SEQ ID NO: 1027804 - RNA, 22 nt, Human
aggguccugggugcaguugcuu

SEQ ID NO: 1027805 - RNA, 22 nt, Human
cugcaccgugucucgggcugcc

SEQ ID NO: 1027806 - RNA, 22 nt, Human
uuguacuuaaauaugcaaauag

SEQ ID NO: 1027807 - RNA, 22 nt, Human
cuccuuccugguuagcaccuua

SEQ ID NO: 1027808 - RNA, 22 nt, Human
gggcuguaggagcuggaauggg

SEQ ID NO: 1027809 - RNA, 22 nt, Human
guucuucaaagugacaacuaaa

SEQ ID NO: 1027810 - RNA, 22 nt, Human
auuaauaucccccgccguucug

SEQ ID NO: 1027811 - RNA, 21 nt, Human
agcugugguuuuacaucuuuu

SEQ ID NO: 1027812 - RNA, 22 nt, Human
guaaagcaaaauguagagauug

SEQ ID NO: 1027813 - RNA, 22 nt, Human
gcuagagaccagaggccuugaa

SEQ ID NO: 1027814 - RNA, 22 nt, Human
guggccuuuucaaguaggguau

SEQ ID NO: 1027815 - RNA, 22 nt, Human
ugaguggacgugaggcugagua

SEQ ID NO: 1027816 - RNA, 23 nt, Human
ugggcagcuucugcaugcccacc

SEQ ID NO: 1027817 - RNA, 22 nt, Human
ugcuugacuuaguuucucauuu

SEQ ID NO: 1027818 - RNA, 22 nt, Human
cagugcugcaggcgccugcggu

SEQ ID NO: 1027819 - RNA, 22 nt, Human
ggagugggaacaaugacauggu

SEQ ID NO: 1027820 - RNA, 22 nt, Human
ggucuggagcuaaucuuguugg

SEQ ID NO: 1027821 - RNA, 22 nt, Human
gcugccauggcugggggccgug

SEQ ID NO: 1027822 - RNA, 22 nt, Human
cguggcucugggcuccuuugcc

SEQ ID NO: 1027823 - RNA, 22 nt, Human
ugggcugcuucuauuggugguc

SEQ ID NO: 1027824 - RNA, 22 nt, Human
uguauuucugcuuucucuagua

SEQ ID NO: 1027825 - RNA, 22 nt, Human
ccugggaaggugaggcccugga

SEQ ID NO: 1027826 - RNA, 22 nt, Human
ucccugagcucacauggcagga

SEQ ID NO: 1027827 - RNA, 22 nt, Human
gucauuuuugacuuugaaguga

SEQ ID NO: 1027828 - RNA, 22 nt, Human
uauuagggaacugcaagacuaa

SEQ ID NO: 1027829 - RNA, 22 nt, Human
cuccuuggguucuuucgguucc

SEQ ID NO: 1027830 - RNA, 22 nt, Human
ccucugagcuggccuguggggc

SEQ ID NO: 1027831 - RNA, 22 nt, Human
gauugcugccagcguguccgug

SEQ ID NO: 1027832 - RNA, 22 nt, Human
ccugugggagggagcggcugga

SEQ ID NO: 1027833 - RNA, 22 nt, Human
aaugccuuggagagccuagagg

SEQ ID NO: 1027834 - RNA, 22 nt, Human
uucagguuuuuaaguucugccu

SEQ ID NO: 1027835 - RNA, 22 nt, Human
gauuuucauuauagcuaguuuc

SEQ ID NO: 1027836 - RNA, 22 nt, Human
aucuggcucccuuggaauccgu

SEQ ID NO: 1027837 - RNA, 22 nt, Human
cagagggagcccuccaggagca

SEQ ID NO: 1027838 - RNA, 22 nt, Human
ucggagcgucacuggcuggagg

SEQ ID NO: 1027839 - RNA, 22 nt, Human
uguacauauucaagcacuucua

SEQ ID NO: 1027840 - RNA, 22 nt, Human
uuugagaagcauggcuguauuc

SEQ ID NO: 1027841 - RNA, 22 nt, Human
uaugccuaccuccaaaauauau

SEQ ID NO: 1027842 - RNA, 22 nt, Human
agaauccuggagaagcuguacc

SEQ ID NO: 1027843 - RNA, 22 nt, Human
agcuuucuauauaugaguugcu

SEQ ID NO: 1027844 - RNA, 22 nt, Human
gggagcugagcuggaagagaau

SEQ ID NO: 1027845 - RNA, 22 nt, Human
gucuguggaguugcuugcugga

SEQ ID NO: 1027846 - RNA, 22 nt, Human
ucuggaaggggaucugugguca

SEQ ID NO: 1027847 - RNA, 22 nt, Human
agauugucauugacgaugagca

SEQ ID NO: 1027848 - RNA, 23 nt, Human
aaugaguugggcagcauacaggc

SEQ ID NO: 1027849 - RNA, 22 nt, Human
ggacucuggcucaguguugcuu

SEQ ID NO: 1027850 - RNA, 22 nt, Human
augcugagugagugaaacccag

SEQ ID NO: 1027851 - RNA, 22 nt, Human
ugggcagggagcuggaaccaca

SEQ ID NO: 1027852 - RNA, 22 nt, Human
uuccaggacuggguguuugaag

SEQ ID NO: 1027853 - RNA, 21 nt, Human
gcagcaugagaaagccccaaa

SEQ ID NO: 1027854 - RNA, 22 nt, Human
cucggaauggaacaacagcggu

SEQ ID NO: 1027855 - RNA, 22 nt, Measles virus
acuguucucaguagucuccugu

SEQ ID NO: 1027856 - RNA, 22 nt, Measles virus
acucuggaggagcagaugcaag

SEQ ID NO: 1027857 - RNA, 22 nt, Measles virus
aacaucaugguggauuaauucu

SEQ ID NO: 1027858 - RNA, 22 nt, Measles virus
uggggccaaauaaugacaggau

SEQ ID NO: 1027859 - RNA, 22 nt, Measles virus
ucuucacauuagaagcacaggc

SEQ ID NO: 1027860 - RNA, 22 nt, Measles virus
guugacucuuugucuucuaugu

SEQ ID NO: 1027861 - RNA, 22 nt, Measles virus
aaguuguugccucuggauugga

SEQ ID NO: 1027862 - RNA, 22 nt, Measles virus
gugccugcucuucugccaucgg

SEQ ID NO: 1027863 - RNA, 23 nt, Measles virus
auuacaucuucacgucgaaacag

SEQ ID NO: 1027864 - RNA, 19 nt, Measles virus
auuuggccccagcuuacgg

SEQ ID NO: 1027865 - RNA, 20 nt, Measles virus
gcagcaugcagggggagggu

SEQ ID NO: 1027866 - RNA, 22 nt, Measles virus
uuugcagccaucaguuccucaa

SEQ ID NO: 1027867 - RNA, 22 nt, Measles virus
cugguuuuugcacuugguggga

SEQ ID NO: 1027868 - RNA, 22 nt, Measles virus
guugacucuuugucuucuaugu

SEQ ID NO: 1027869 - RNA, 22 nt, Measles virus
gugccugcucuucugccaucgg

SEQ ID NO: 1027870 - RNA, 22 nt, Measles virus
aucugagcaauuugagcccuag

SEQ ID NO: 1027871 - RNA, 22 nt, Measles virus
auagaguuaagcaauccaucuu

SEQ ID NO: 1027872 - RNA, 22 nt, Measles virus
auauggaauaugagagugggcc

SEQ ID NO: 1027873 - RNA, 22 nt, Measles virus
uccccuccuucugcaguuucaa

SEQ ID NO: 1027874 - RNA, 22 nt, Measles virus
ucugucauuguggaacuuagga

SEQ ID NO: 1027875 - RNA, 22 nt, Measles virus
aaguuguugccucuggauugga

SEQ ID NO: 1027876 - RNA, 22 nt, Measles virus
acccuucaccugaagcuugagc

SEQ ID NO: 1027877 - RNA, 22 nt, Measles virus
uccuaaguuuuuuauaauggau

SEQ ID NO: 1027878 - RNA, 22 nt, Measles virus
aacaucaugguggauuaauucu

SEQ ID NO: 1027879 - RNA, 19 nt, Measles virus
auuuggccccagcuuacgg

SEQ ID NO: 1027880 - RNA, 22 nt, Measles virus
uggggccaaauaaugacaggau

SEQ ID NO: 1027881 - RNA, 22 nt, Measles virus
acuguucucaguagucuccugu

SEQ ID NO: 1027882 - RNA, 22 nt, Measles virus
gcaguuauugaggagaguuaua

SEQ ID NO: 1027883 - RNA, 20 nt, Measles virus
gcagcaugcagggggagggu

SEQ ID NO: 1027884 - RNA, 22 nt, Human
uuuguucacugagcaaugauua

SEQ ID NO: 1027885 - RNA, 22 nt, Human
uauggaaaguguuuucuucugu

SEQ ID NO: 1027886 - RNA, 22 nt, Human
caaaagaagcucuuggggcuag

SEQ ID NO: 1027887 - RNA, 22 nt, Human
guccaagagucaagaagggggc

SEQ ID NO: 1027888 - RNA, 22 nt, Human
ucugaaaugcaaauuugacuga

SEQ ID NO: 1027889 - RNA, 22 nt, Human
aagaagaaguguuauuuuuaga

SEQ ID NO: 1027890 - RNA, 18 nt, Human
agugucuggauauuuggg

SEQ ID NO: 1027891 - RNA, 21 nt, Human
agaauucuuaaguauucuaau

SEQ ID NO: 1027892 - RNA, 22 nt, Human
uucaucuugauggcuuccuaau

SEQ ID NO: 1027893 - RNA, 22 nt, Human
auucagaaauagaaaauuugau

SEQ ID NO: 1027894 - RNA, 22 nt, Human
ucuguaaucaagauauuugaga

SEQ ID NO: 1027895 - RNA, 22 nt, Human
uucuucauggguucuuuuagga

SEQ ID NO: 1027896 - RNA, 22 nt, Human
aauucuauaggcaagcuauuuu

SEQ ID NO: 1027897 - RNA, 22 nt, Human
ucuuucuacaucauuugcuucu

SEQ ID NO: 1027898 - RNA, 21 nt, Human
uuuguucaggggcaaaguuaa

SEQ ID NO: 1027899 - RNA, 20 nt, Human
gucuccacuggggguuaacc

SEQ ID NO: 1027900 - RNA, 22 nt, Human
gguuccccaggcggcccuugga

SEQ ID NO: 1027901 - RNA, 22 nt, Human
uguugauuugugggcugcaaaa

SEQ ID NO: 1027902 - RNA, 22 nt, Human
ucagaaauagucuuuaaaauga

SEQ ID NO: 1027903 - RNA, 22 nt, Human
ugugccuacugauagagccaag

SEQ ID NO: 1027904 - RNA, 22 nt, Human
uucugaaaggcagguuguuugc

SEQ ID NO: 1027905 - RNA, 22 nt, Human
uuaguaauguguuaauaugaau

SEQ ID NO: 1027906 - RNA, 22 nt, Human
uuuguucauuuugagcucauca

SEQ ID NO: 1027907 - RNA, 22 nt, Human
aaacucuuuccacgauuacuuu

SEQ ID NO: 1027908 - RNA, 22 nt, Human
uucuggaaguguuagaaucugg

SEQ ID NO: 1027909 - RNA, 22 nt, Human
guuuaauuuuagguugucaagc

SEQ ID NO: 1027910 - RNA, 23 nt, Human
uugcuuagagaccuccucaucag

SEQ ID NO: 1027911 - RNA, 22 nt, Human
aauuuguuacacagcaauauaa

SEQ ID NO: 1027912 - RNA, 22 nt, Human
uucauaguguuuccuuccagug

SEQ ID NO: 1027913 - RNA, 22 nt, Human
cuguuauuuagaacauggaauc

SEQ ID NO: 1027914 - RNA, 22 nt, Human
ucccuagucgcaucuguggaga

SEQ ID NO: 1027915 - RNA, 22 nt, Human
ggagugacucacagcugggaca

SEQ ID NO: 1027916 - RNA, 22 nt, Human
ccugcuuaacauugccaugaca

SEQ ID NO: 1027917 - RNA, 22 nt, Human
ucuauuucgcauauaaguuuug

SEQ ID NO: 1027918 - RNA, 22 nt, Human
ucugaaaugcaggcaauuugcu

SEQ ID NO: 1027919 - RNA, 22 nt, Human
cuuagaugaagucacagaaccc

SEQ ID NO: 1027920 - RNA, 22 nt, Human
aguuucuguuaccauauuugac

SEQ ID NO: 1027921 - RNA, 22 nt, Human
uuuguucaugccuauauucuca

SEQ ID NO: 1027922 - RNA, 22 nt, Human
ucugaaauguucucuuguuuug

SEQ ID NO: 1027923 - RNA, 22 nt, Human
auucuucugccuacuuucaucc

SEQ ID NO: 1027924 - RNA, 20 nt, Human
gaaauucucguauuaguuua

SEQ ID NO: 1027925 - RNA, 22 nt, Human
ggagagcugguagcuggcucca

SEQ ID NO: 1027926 - RNA, 22 nt, Human
cagugcuguuguaagcucauug

SEQ ID NO: 1027927 - RNA, 22 nt, Human
agaugacuaacauaguauugcu

SEQ ID NO: 1027928 - RNA, 22 nt, Human
ugaagacaguuuuacucaugag

SEQ ID NO: 1027929 - RNA, 21 nt, Human
ugacaguguggcauggaaggu

SEQ ID NO: 1027930 - RNA, 22 nt, Human
acugcauuaucaccaagaugua

SEQ ID NO: 1027931 - RNA, 22 nt, Human
ugcccuguuccugccuccagcu

SEQ ID NO: 1027932 - RNA, 22 nt, Human
gucuguccacuuggaagcuccc

SEQ ID NO: 1027933 - RNA, 22 nt, Human
uuccuccagccuggagcacuuc

SEQ ID NO: 1027934 - RNA, 22 nt, Human
gcacagucaacacuuauucacc

SEQ ID NO: 1027935 - RNA, 22 nt, Human
ccuggccauagggcccaggaaa

SEQ ID NO: 1027936 - RNA, 22 nt, Human
guggcgcagaggguggcagaga

SEQ ID NO: 1027937 - RNA, 22 nt, Human
ugugacguuguucuggauuccc

SEQ ID NO: 1027938 - RNA, 20 nt, Human
gaccagaucccuuaccagcu

SEQ ID NO: 1027939 - RNA, 22 nt, Human
uugacuauacucuggcggaaaa

SEQ ID NO: 1027940 - RNA, 22 nt, Human
aaggcaguuaauuuggcuagaa

SEQ ID NO: 1027941 - RNA, 22 nt, Human
ggcuagcuuagagucaugcuag

SEQ ID NO: 1027942 - RNA, 22 nt, Human
ucaggccccaucccagacuuau

SEQ ID NO: 1027943 - RNA, 22 nt, Human
augcccucuguuucccaaggcc

SEQ ID NO: 1027944 - RNA, 20 nt, Human
ggccugagcauggcuggcag

SEQ ID NO: 1027945 - RNA, 20 nt, Human
uucaugcagugguugcugug

SEQ ID NO: 1027946 - RNA, 19 nt, Human
agcagggagugguuguggg

SEQ ID NO: 1027947 - RNA, 22 nt, Human
ugaaguuguuaagguugccauu

SEQ ID NO: 1027948 - RNA, 19 nt, Human
agcagagcagggccguggg

SEQ ID NO: 1027949 - RNA, 22 nt, Human
uggugaagucagcggagcccgg

SEQ ID NO: 1027950 - RNA, 22 nt, Human
ggcagcugaagaggaacuuugg

SEQ ID NO: 1027951 - RNA, 22 nt, Human
uguagcucuccagccagcaagg

SEQ ID NO: 1027952 - RNA, 22 nt, Human
cuggacacuggggaugcgcagu

SEQ ID NO: 1027953 - RNA, 22 nt, Human
uuuggagagaugaaguucugug

SEQ ID NO: 1027954 - RNA, 22 nt, Human
aaagcagcagcacguggaagag

SEQ ID NO: 1027955 - RNA, 22 nt, Human
accuuguuguagguacaaaaga

SEQ ID NO: 1027956 - RNA, 22 nt, Human
ugaacaggugccuucagggagu

SEQ ID NO: 1027957 - RNA, 22 nt, Human
ggugacgaauccauagcaucga

SEQ ID NO: 1027958 - RNA, 22 nt, Human
aggccgugugagcaugugugag

SEQ ID NO: 1027959 - RNA, 22 nt, Human
ucuacuuccgcaaaaggcacau

SEQ ID NO: 1027960 - RNA, 22 nt, Human
agaaucugcauuuuaacaagau

SEQ ID NO: 1027961 - RNA, 22 nt, Human
ggcacagcugaugcagacacac

SEQ ID NO: 1027962 - RNA, 22 nt, Human
cuccccacgccuggacuaagag

SEQ ID NO: 1027963 - RNA, 22 nt, Human
gucagcgugcucagccuauuau

SEQ ID NO: 1027964 - RNA, 22 nt, Human
ucaaagcacuggggaaagccug

SEQ ID NO: 1027965 - RNA, 22 nt, Human
cuggagccggcgagccccagcc

SEQ ID NO: 1027966 - RNA, 22 nt, Human
ugcuugacuuaguuucucauuu

SEQ ID NO: 1027967 - RNA, 22 nt, Human
agugaaaaccuaaucaugcagu

SEQ ID NO: 1027968 - RNA, 22 nt, Human
auuucauccauuaagaguacuc

SEQ ID NO: 1027969 - RNA, 22 nt, Human
cccaccacgugcuuugcuggag

SEQ ID NO: 1027970 - RNA, 22 nt, Human
augaggagucaaggagucggag

SEQ ID NO: 1027971 - RNA, 22 nt, Human
ugcuggcugggcugcuggagac

SEQ ID NO: 1027972 - RNA, 22 nt, Human
caggcuugaugugucuauacuu

SEQ ID NO: 1027973 - RNA, 22 nt, Human
gaggcucagagggacuuucaag

SEQ ID NO: 1027974 - RNA, 22 nt, Human
ccugggugaugugcugcccucg

SEQ ID NO: 1027975 - RNA, 20 nt, Human
augcacccucagggucccug

SEQ ID NO: 1027976 - RNA, 22 nt, Human
ggugaccagggucaguagcuuu

SEQ ID NO: 1027977 - RNA, 22 nt, Human
cuucucagagcuuccagaaaac

SEQ ID NO: 1027978 - RNA, 23 nt, Human
gagcugggauacaggcuuacugc

SEQ ID NO: 1027979 - RNA, 22 nt, Human
ucaccgccuugcccggccgggc

SEQ ID NO: 1027980 - RNA, 22 nt, Human
gcaaggagcaccuuucuggaac

SEQ ID NO: 1027981 - RNA, 22 nt, Human
uacucuggaguugagaugcgag

SEQ ID NO: 1027982 - RNA, 22 nt, Human
cacaccuuaggccugagcgcuu

SEQ ID NO: 1027983 - RNA, 22 nt, Human
agaaacaucgcuuaguccucau

SEQ ID NO: 1027984 - RNA, 22 nt, Human
aagcagccagccaucaugcccg

SEQ ID NO: 1027985 - RNA, 22 nt, Human
cagagcagcagagcuuccaugg

SEQ ID NO: 1027986 - RNA, 22 nt, Human
cggggccuagucuaccucggca

SEQ ID NO: 1027987 - RNA, 22 nt, Human
acagccaggaauucuggagaag

SEQ ID NO: 1027988 - RNA, 22 nt, Human
ucaucuguuaugggaguuuuug

SEQ ID NO: 1027989 - RNA, 22 nt, Human
ccgcguggcacccuccuggagg

SEQ ID NO: 1027990 - RNA, 22 nt, Human
acaagucuguuaugcaccugga

SEQ ID NO: 1027991 - RNA, 22 nt, Human
uugaacaguccuaagagacccu

SEQ ID NO: 1027992 - RNA, 22 nt, Human
agaacauaucuguuuucuaacu

SEQ ID NO: 1027993 - RNA, 22 nt, Human
aucccugugacgagcaucccua

SEQ ID NO: 1027994 - RNA, 22 nt, Human
aggcaguggcuuuuguuguguu

SEQ ID NO: 1027995 - RNA, 22 nt, Human
uggcccagcucagggugggcgg

SEQ ID NO: 1027996 - RNA, 22 nt, Human
aaggcccacagaacugucucca

SEQ ID NO: 1027997 - RNA, 22 nt, Human
uggcacugaagcuggaaagccu

SEQ ID NO: 1027998 - RNA, 16 nt, Human
ggcagcagcuccgugc

SEQ ID NO: 1027999 - RNA, 22 nt, Human
aggccagugguucucugugucc

SEQ ID NO: 1028000 - RNA, 21 nt, Human
aggcagcgauuuucauauugc

SEQ ID NO: 1028001 - RNA, 22 nt, Human
auggacagcucuuaugugggca

SEQ ID NO: 1028002 - RNA, 21 nt, Human
aggcaugagcccugcauggac

SEQ ID NO: 1028003 - RNA, 22 nt, Human
caggaacacaaugagucucaaa

SEQ ID NO: 1028004 - RNA, 22 nt, Human
agugccucugcagguccgaguu

SEQ ID NO: 1028005 - RNA, 22 nt, Human
ccagagacaaggagcuggaguc

SEQ ID NO: 1028006 - RNA, 22 nt, Human
caagccaggaaggauccagcac

SEQ ID NO: 1028007 - RNA, 22 nt, Human
cuggagcucuccagagccccgu

SEQ ID NO: 1028008 - RNA, 22 nt, Human
ugugaagaucaggguccuagag

SEQ ID NO: 1028009 - RNA, 22 nt, Human
aaggagucugggccauucagag

SEQ ID NO: 1028010 - RNA, 22 nt, Human
cugucaccucugcccuuugccc

SEQ ID NO: 1028011 - RNA, 20 nt, Human
ugagccugcuguaggaggcc

SEQ ID NO: 1028012 - RNA, 22 nt, Human
agaggaaguaaucaggaccugc

SEQ ID NO: 1028013 - RNA, 22 nt, Human
gaaguauuucugaguugcccag

SEQ ID NO: 1028014 - RNA, 19 nt, Human
agugagcauggcuugacug

SEQ ID NO: 1028015 - RNA, 17 nt, Human
uuuguucguuaguccgg

SEQ ID NO: 1028016 - RNA, 22 nt, Human
ccggcgucucuuccacuuccua

SEQ ID NO: 1028017 - RNA, 22 nt, Human
ucuugggcaauuucucuagagg

SEQ ID NO: 1028018 - RNA, 15 nt, Human
uggugguguugagac

SEQ ID NO: 1028019 - RNA, 22 nt, Human
aagggggaaauccuagcgccgc

SEQ ID NO: 1028020 - RNA, 20 nt, Human
ugcuggaggcgccggcgcuc

SEQ ID NO: 1028021 - RNA, 22 nt, Human
ggggcccagcaccccuccucgc

SEQ ID NO: 1028022 - RNA, 22 nt, Human
ucccugccuccuggcagugcca

SEQ ID NO: 1028023 - RNA, 22 nt, Human
acagcugggaacucacacagca

SEQ ID NO: 1028024 - RNA, 22 nt, Human
uggcaaggccacaggugcaguu

SEQ ID NO: 1028025 - RNA, 22 nt, Human
agcuccugaaaagcgcuugcuu

SEQ ID NO: 1028026 - RNA, 21 nt, Human
gccaccucaaucuucuagcgc

SEQ ID NO: 1028027 - RNA, 18 nt, Human
cuggucucccuucgcuuu

SEQ ID NO: 1028028 - RNA, 22 nt, Human
ucaccccuugugaaugcugcuc

SEQ ID NO: 1028029 - RNA, 22 nt, Human
cugagcagaagggugcacgugc

SEQ ID NO: 1028030 - RNA, 20 nt, Human
ggcauggcaaauguucuugc

SEQ ID NO: 1028031 - RNA, 22 nt, Human
ccuguggccgcgucgggcggcg

SEQ ID NO: 1028032 - RNA, 22 nt, Human
ccgcuguccuggagcugcugcu

SEQ ID NO: 1028033 - RNA, 22 nt, Human
cugcugagguggagauugcagu

SEQ ID NO: 1028034 - RNA, 22 nt, Human
gucccuggucuaccguggcuuc

SEQ ID NO: 1028035 - RNA, 22 nt, Human
cugcugucuuuauuucacugcu

SEQ ID NO: 1028036 - RNA, 22 nt, Human
gcaggcuuauggggagacagag

SEQ ID NO: 1028037 - RNA, 22 nt, Human
agagcuagaaggaagcauuucu

SEQ ID NO: 1028038 - RNA, 21 nt, Human
gcuccuggugcugcguggcgc

SEQ ID NO: 1028039 - RNA, 22 nt, Human
gcagcagugugggcugaaccua

SEQ ID NO: 1028040 - RNA, 22 nt, Human
gagcagcaggccagguugcagg

SEQ ID NO: 1028041 - RNA, 20 nt, Human
aggggcaccugcgacggggc

SEQ ID NO: 1028042 - RNA, 22 nt, Human
gggcauuucuugucaauguagg

SEQ ID NO: 1028043 - RNA, 22 nt, Human
auaguagcgagaucucagcuca

SEQ ID NO: 1028044 - RNA, 22 nt, Human
aagguccuguagccacagagcc

SEQ ID NO: 1028045 - RNA, 22 nt, Human
acggagcccgugucagguggga

SEQ ID NO: 1028046 - RNA, 22 nt, Human
gaggcuggcagaaaagcacagg

SEQ ID NO: 1028047 - RNA, 20 nt, Human
gcugugccaugacccucgag

SEQ ID NO: 1028048 - RNA, 22 nt, Human
auggccugcagugcugccacag

SEQ ID NO: 1028049 - RNA, 22 nt, Human
guucuccaggggcuguucaucu

SEQ ID NO: 1028050 - RNA, 22 nt, Human
caagcagauauuuuagucaaga

SEQ ID NO: 1028051 - RNA, 22 nt, Human
cugcacagccugucugggggcc

SEQ ID NO: 1028052 - RNA, 22 nt, Human
ucggaaccgaccugggagcugg

SEQ ID NO: 1028053 - RNA, 22 nt, Human
acagaguaucuaucaggaguau

SEQ ID NO: 1028054 - RNA, 22 nt, Human
uggcccagaucucugaccuuga

SEQ ID NO: 1028055 - RNA, 22 nt, Human
gagcugggaagauagcuugagc

SEQ ID NO: 1028056 - RNA, 22 nt, Human
uggugcagacaggagccccgcu

SEQ ID NO: 1028057 - RNA, 22 nt, Human
ugagaagcauuaggaagaacau

SEQ ID NO: 1028058 - RNA, 22 nt, Human
uaggcuccaguguguggcgagu

SEQ ID NO: 1028059 - RNA, 22 nt, Human
gggcagagguucaacuucaaca

SEQ ID NO: 1028060 - RNA, 22 nt, Human
ugcccuggcuccucccacgcug

SEQ ID NO: 1028061 - RNA, 22 nt, Human
cggagccugcuuguugcagcug

SEQ ID NO: 1028062 - RNA, 20 nt, Human
uggcccagcacgacgaggac

SEQ ID NO: 1028063 - RNA, 22 nt, Human
augucccugagggucucucuga

SEQ ID NO: 1028064 - RNA, 22 nt, Human
cagcugcucugguggucucucc

SEQ ID NO: 1028065 - RNA, 22 nt, Human
ccugggacuuggucugggguuu

SEQ ID NO: 1028066 - RNA, 21 nt, Human
uguguucuucuaggucagcua

SEQ ID NO: 1028067 - RNA, 22 nt, Human
ucaggggcuugaggugcauguc

SEQ ID NO: 1028068 - RNA, 22 nt, Human
aggcucugucaggcggagcagc

SEQ ID NO: 1028069 - RNA, 22 nt, Human
acaguguuucacuuaaccguuu

SEQ ID NO: 1028070 - RNA, 22 nt, Human
cugcacagucauuuccucucaa

SEQ ID NO: 1028071 - RNA, 22 nt, Human
guugcaaaugggaagaugguua

SEQ ID NO: 1028072 - RNA, 22 nt, Human
uggcuccaggggacacgcagua

SEQ ID NO: 1028073 - RNA, 22 nt, Human
uuccuuaguuauuugguccccu

SEQ ID NO: 1028074 - RNA, 23 nt, Human
gacagguaaggguugggagaauc

SEQ ID NO: 1028075 - RNA, 22 nt, Human
ugggcugcuuccucagcugaga

SEQ ID NO: 1028076 - RNA, 22 nt, Human
uccagcugugcuccaggaggug

SEQ ID NO: 1028077 - RNA, 22 nt, Human
uguggugccgagagucuggacg

SEQ ID NO: 1028078 - RNA, 21 nt, Human
cccgugccuucagcaguccug

SEQ ID NO: 1028079 - RNA, 21 nt, Human
uuccuggaggcagaaacguga

SEQ ID NO: 1028080 - RNA, 22 nt, Human
agauggcagggguaccuggaag

SEQ ID NO: 1028081 - RNA, 22 nt, Human
uucucacguuauuggcugagag

SEQ ID NO: 1028082 - RNA, 22 nt, Human
agacacuguguacagaaaaaga

SEQ ID NO: 1028083 - RNA, 22 nt, Human
ugcacacaguucucaggaaaga

SEQ ID NO: 1028084 - RNA, 22 nt, Human
cugcucucuguuccccuggauc

SEQ ID NO: 1028085 - RNA, 22 nt, Human
ugggcagacgggagcuugccuu

SEQ ID NO: 1028086 - RNA, 22 nt, Human
gggcucggcaucuguggacucu

SEQ ID NO: 1028087 - RNA, 23 nt, Human
aaaguacuuaaucugcaaaccac

SEQ ID NO: 1028088 - RNA, 22 nt, Human
cugucucugauaagcucgaggg

SEQ ID NO: 1028089 - RNA, 22 nt, Human
cugaaggauguguggugggagu

SEQ ID NO: 1028090 - RNA, 22 nt, Human
cugcugccuuccaaaggccagg

SEQ ID NO: 1028091 - RNA, 22 nt, Human
acuggcaguagagggagcgcau

SEQ ID NO: 1028092 - RNA, 22 nt, Human
gccuggcucugaguuucucucc

SEQ ID NO: 1028093 - RNA, 22 nt, Human
uccucuccaggugagccgaaau

SEQ ID NO: 1028094 - RNA, 22 nt, Human
ucugaggucauuccaaggacau

SEQ ID NO: 1028095 - RNA, 22 nt, Human
uggcuccguuguacaggcugga

SEQ ID NO: 1028096 - RNA, 22 nt, Human
uggguagggagcuggaauccua

SEQ ID NO: 1028097 - RNA, 22 nt, Human
gcuuggccagcagccgggaugc

SEQ ID NO: 1028098 - RNA, 22 nt, Human
agaguguggaaauguucagagu

SEQ ID NO: 1028099 - RNA, 22 nt, Human
agucagucugcuagccugugga

SEQ ID NO: 1028100 - RNA, 22 nt, Human
cggagaggugggggcagcaucu

SEQ ID NO: 1028101 - RNA, 19 nt, Human
gggucccacugcccgucug

SEQ ID NO: 1028102 - RNA, 22 nt, Human
gggcagcaaaucugagucuggu

SEQ ID NO: 1028103 - RNA, 22 nt, Human
gagcugucucuuugggccuuuu

SEQ ID NO: 1028104 - RNA, 22 nt, Human
ucaugucccguugcuggcugcc

SEQ ID NO: 1028105 - RNA, 22 nt, Human
ugcagcugccuagggcuggcuu

SEQ ID NO: 1028106 - RNA, 22 nt, Human
ugaaaugccuaugaagucagga

SEQ ID NO: 1028107 - RNA, 22 nt, Human
ugagaagcaguuucaguaagaa

SEQ ID NO: 1028108 - RNA, 22 nt, Human
agcaugucuaacucuucagggu

SEQ ID NO: 1028109 - RNA, 22 nt, Human
ugcucccaggcauucucuguug

SEQ ID NO: 1028110 - RNA, 22 nt, Human
gggccuuggcgaaguguggugg

SEQ ID NO: 1028111 - RNA, 22 nt, Human
ugucuuggccacuaggagugcc

SEQ ID NO: 1028112 - RNA, 22 nt, Human
gccagccccagacauccuaucg

SEQ ID NO: 1028113 - RNA, 22 nt, Human
cugggaagggacgccagugccu

SEQ ID NO: 1028114 - RNA, 22 nt, Human
ucaggagaguguucaguggagg

SEQ ID NO: 1028115 - RNA, 22 nt, Human
gcacagagagcagugggggaca

SEQ ID NO: 1028116 - RNA, 22 nt, Human
ugcuucucucuaggaagacgcu

SEQ ID NO: 1028117 - RNA, 22 nt, Human
ugcugcgggacccacugugggc

SEQ ID NO: 1028118 - RNA, 22 nt, Human
ugcccacaggaagacaccagcg

SEQ ID NO: 1028119 - RNA, 22 nt, Human
cacugcccuggggguugccauc

SEQ ID NO: 1028120 - RNA, 22 nt, Human
guugaguguugugcaugcacca

SEQ ID NO: 1028121 - RNA, 22 nt, Human
caugugguauugugagauccac

SEQ ID NO: 1028122 - RNA, 22 nt, Human
cacaucucagggcuacaggcag

SEQ ID NO: 1028123 - RNA, 22 nt, Human
guuuuguucaugaacauugggu

SEQ ID NO: 1028124 - RNA, 22 nt, Human
aaccauggauuucaguucaccu

SEQ ID NO: 1028125 - RNA, 16 nt, Human
aggcucagaggcugga

SEQ ID NO: 1028126 - RNA, 21 nt, Human
aaagugguaaggauuauuuug

SEQ ID NO: 1028127 - RNA, 22 nt, Human
cccgaccucgcaaagcgcacuc

SEQ ID NO: 1028128 - RNA, 22 nt, Human
ugaauagagcugcaguggacau

SEQ ID NO: 1028129 - RNA, 22 nt, Human
ccuggagacccacuucugccaa

SEQ ID NO: 1028130 - RNA, 18 nt, Human
gacaaaaguacagacaga

SEQ ID NO: 1028131 - RNA, 22 nt, Human
uuccaggccgggcaggaaacac

SEQ ID NO: 1028132 - RNA, 22 nt, Human
agccagcuaccggggcuccugg

SEQ ID NO: 1028133 - RNA, 22 nt, Human
gugacaugguuugccgucccug

SEQ ID NO: 1028134 - RNA, 22 nt, Human
ccugcucaacgaauauggcgau

SEQ ID NO: 1028135 - RNA, 22 nt, Human
ccaggagagcucucguucagug

SEQ ID NO: 1028136 - RNA, 22 nt, Human
caggaaugccaaccagugcaug

SEQ ID NO: 1028137 - RNA, 22 nt, Human
gccuggcuucccuuggagcauu

SEQ ID NO: 1028138 - RNA, 22 nt, Human
gcucugugcaguucagggacac

SEQ ID NO: 1028139 - RNA, 22 nt, Human
acacaagcagcuuuugagcgga

SEQ ID NO: 1028140 - RNA, 22 nt, Human
cagagccaaaccucagggcccg

SEQ ID NO: 1028141 - RNA, 20 nt, Human
ccacccuguccggggcggag

SEQ ID NO: 1028142 - RNA, 22 nt, Human
agccugugagggaugcugcagu

SEQ ID NO: 1028143 - RNA, 22 nt, Human
agggcagagauuaauuaagaca

SEQ ID NO: 1028144 - RNA, 22 nt, Human
ucuuccuggauggggguugaug

SEQ ID NO: 1028145 - RNA, 22 nt, Human
aacacauggcaagagcaggaaa

SEQ ID NO: 1028146 - RNA, 22 nt, Human
guguggcuaggauggcuuugcu

SEQ ID NO: 1028147 - RNA, 17 nt, Human
gugcuggccuggggcuc

SEQ ID NO: 1028148 - RNA, 22 nt, Human
aagaguggagcuggaaaguggg

SEQ ID NO: 1028149 - RNA, 22 nt, Human
gcaggccuccccugcuggagcu

SEQ ID NO: 1028150 - RNA, 22 nt, Human
cucucuccuuagcugcagacca

SEQ ID NO: 1028151 - RNA, 22 nt, Human
agagcaccaaggugguuuggac

SEQ ID NO: 1028152 - RNA, 22 nt, Human
ucugagagcuguagaagccuau

SEQ ID NO: 1028153 - RNA, 22 nt, Human
gccugcuuccuagccuuccaag

SEQ ID NO: 1028154 - RNA, 22 nt, Human
gcacguguucuguggcaugggu

SEQ ID NO: 1028155 - RNA, 22 nt, Human
agcugaacgugcuucugcagca

SEQ ID NO: 1028156 - RNA, 20 nt, Human
gcuccccuucucugggccuc

SEQ ID NO: 1028157 - RNA, 22 nt, Human
cucccagccuucgccagucuga

SEQ ID NO: 1028158 - RNA, 22 nt, Human
caggcacaaugagcgccaucuu

SEQ ID NO: 1028159 - RNA, 22 nt, Human
guggccuuuucaaguaggguau

SEQ ID NO: 1028160 - RNA, 22 nt, Human
auggaggaugugcagcaugggc

SEQ ID NO: 1028161 - RNA, 22 nt, Human
ucaguguccuucguucuuguug

SEQ ID NO: 1028162 - RNA, 22 nt, Human
caaacauuuguuggaaccccug

SEQ ID NO: 1028163 - RNA, 22 nt, Human
gagacagagagguacucaacau

SEQ ID NO: 1028164 - RNA, 22 nt, Human
caucaggaauaaaugaggcugu

SEQ ID NO: 1028165 - RNA, 22 nt, Human
guuuccuuuuggaauuagagcu

SEQ ID NO: 1028166 - RNA, 22 nt, Human
agccagugcagcuggaaauuca

SEQ ID NO: 1028167 - RNA, 22 nt, Human
ucagcacaggucuugcaaaaca

SEQ ID NO: 1028168 - RNA, 20 nt, Human
ucuggggaugaggucuagga

SEQ ID NO: 1028169 - RNA, 22 nt, Human
ccuuugagccugggcgcggacc

SEQ ID NO: 1028170 - RNA, 21 nt, Human
ugagcaccagcugcaugcccc

SEQ ID NO: 1028171 - RNA, 20 nt, Human
uucacagaggacucagguca

SEQ ID NO: 1028172 - RNA, 21 nt, Human
cacuccacuuagaacaggguu

SEQ ID NO: 1028173 - RNA, 22 nt, Human
ugaaagcucugucaucauuccu

SEQ ID NO: 1028174 - RNA, 22 nt, Human
gcggccugcgcugcucccgacg

SEQ ID NO: 1028175 - RNA, 22 nt, Human
ugcagcuucucugcaacaggag

SEQ ID NO: 1028176 - RNA, 22 nt, Human
gucuggagccacugcugcugcu

SEQ ID NO: 1028177 - RNA, 22 nt, Human
ugcgcaugcguggcucuccggc

SEQ ID NO: 1028178 - RNA, 22 nt, Human
acuuggucguggugcagcaugg

SEQ ID NO: 1028179 - RNA, 22 nt, Human
aggugugcaggaugaaccccuc

SEQ ID NO: 1028180 - RNA, 22 nt, Human
ggugaccucaccuggucccacc

SEQ ID NO: 1028181 - RNA, 22 nt, Human
cagcaguacuucucagagguau

SEQ ID NO: 1028182 - RNA, 22 nt, Human
agcucaguggcuggggcgcugc

SEQ ID NO: 1028183 - RNA, 22 nt, Human
gacauuuauuggauuuuacgag

SEQ ID NO: 1028184 - RNA, 22 nt, Human
gagcugcauagcugggauccuc

SEQ ID NO: 1028185 - RNA, 22 nt, Human
ccucagucuauuuccagcaggu

SEQ ID NO: 1028186 - RNA, 22 nt, Human
cccucucccugcagaauguggc

SEQ ID NO: 1028187 - RNA, 22 nt, Human
acccggaggcgggggaugcagu

SEQ ID NO: 1028188 - RNA, 22 nt, Human
gagcucauccccaugguccguc

SEQ ID NO: 1028189 - RNA, 22 nt, Human
ccagccagcugcccuuggggcc

SEQ ID NO: 1028190 - RNA, 22 nt, Human
ugaaaacacuuuaguuuagguc

SEQ ID NO: 1028191 - RNA, 22 nt, Human
cucucuuuuucgugugccgaag

SEQ ID NO: 1028192 - RNA, 22 nt, Human
gcucagagauguucaguagcuu

SEQ ID NO: 1028193 - RNA, 23 nt, Human
ugucuggauucgacugugguugg

SEQ ID NO: 1028194 - RNA, 22 nt, Human
uagcagcacuauuuguuguagu

SEQ ID NO: 1028195 - RNA, 22 nt, Human
acugcauuugguaaagucaaga

SEQ ID NO: 1028196 - RNA, 22 nt, Human
cucggaauggaacaacagcggu

SEQ ID NO: 1028197 - RNA, 22 nt, Human
caggcacaagaucggcuagaua

SEQ ID NO: 1028198 - RNA, 22 nt, Human
caugaaaugauauuuggguggg

SEQ ID NO: 1028199 - RNA, 19 nt, Human
ugguggaggugcaccugac

SEQ ID NO: 1028200 - RNA, 22 nt, Human
ucuuugcauggacauguguuuu

SEQ ID NO: 1028201 - RNA, 22 nt, Human
cagcuuuugcagacuucuugcc

SEQ ID NO: 1028202 - RNA, 21 nt, Human
gacauugagcgugucgcagug

SEQ ID NO: 1028203 - RNA, 22 nt, Human
caugcauuucuaccaaggaaua

SEQ ID NO: 1028204 - RNA, 22 nt, Human
ccugcagacacuuguccagcaa

SEQ ID NO: 1028205 - RNA, 22 nt, Human
ggauguggaccuugccugguga

SEQ ID NO: 1028206 - RNA, 22 nt, Human
agcauggccucccgggccuggc

SEQ ID NO: 1028207 - RNA, 22 nt, Human
gaagcccuggggucagugucgu

SEQ ID NO: 1028208 - RNA, 22 nt, Human
cccuguccugcuaggcccuggu

SEQ ID NO: 1028209 - RNA, 22 nt, Human
cugcagggcagggccuccuggc

SEQ ID NO: 1028210 - RNA, 22 nt, Human
cuccagagagaaaggaggccgc

SEQ ID NO: 1028211 - RNA, 22 nt, Human
ugagaacaaaguugaaaguuug

SEQ ID NO: 1028212 - RNA, 22 nt, Human
caagagcuuuagaaaugcucau

SEQ ID NO: 1028213 - RNA, 22 nt, Human
agaugcugccaggccccucagu

SEQ ID NO: 1028214 - RNA, 22 nt, Human
uccuggcucaggccccuggugc

SEQ ID NO: 1028215 - RNA, 22 nt, Human
gagguggcugcuugcugggaaa

SEQ ID NO: 1028216 - RNA, 22 nt, Human
caguaaauguccucgcagggaa

SEQ ID NO: 1028217 - RNA, 22 nt, Human
ugacauccuacaccccuggguc

SEQ ID NO: 1028218 - RNA, 22 nt, Human
agcaguuuauccucauaaugga

SEQ ID NO: 1028219 - RNA, 22 nt, Human
agcggcgccgagcuuggccagg

SEQ ID NO: 1028220 - RNA, 22 nt, Human
ugucuguccaucugucugggac

SEQ ID NO: 1028221 - RNA, 19 nt, Human
ugcuccaggccuugccgca

SEQ ID NO: 1028222 - RNA, 22 nt, Human
gccccgucguggggccagggau

SEQ ID NO: 1028223 - RNA, 22 nt, Human
gcugucaggaacaugccuuggu

SEQ ID NO: 1028224 - RNA, 22 nt, Human
ugcaugcagcuggucgggcgcc

SEQ ID NO: 1028225 - RNA, 19 nt, Human
ugccuggcaccagcuccac

SEQ ID NO: 1028226 - RNA, 22 nt, Human
ucucgugcaggccuugcucgga

SEQ ID NO: 1028227 - RNA, 22 nt, Human
acucauguccuaggaguaaagc

SEQ ID NO: 1028228 - RNA, 22 nt, Human
uccugaaggccugaguuccacc

SEQ ID NO: 1028229 - RNA, 22 nt, Human
gaguuugugggaauggaguauu

SEQ ID NO: 1028230 - RNA, 22 nt, Human
acggugcuggguauugggguuc

SEQ ID NO: 1028231 - RNA, 22 nt, Human
gcaccagccugagccucuugca

SEQ ID NO: 1028232 - RNA, 22 nt, Human
guccuggugcuggucauugucg

SEQ ID NO: 1028233 - RNA, 22 nt, Human
gggucugcuccaccugcagccc

SEQ ID NO: 1028234 - RNA, 22 nt, Human
uuuguaguuguggaugcugaag

SEQ ID NO: 1028235 - RNA, 22 nt, Human
gcugccaucuccugaggacagg

SEQ ID NO: 1028236 - RNA, 22 nt, Human
cugccaggauucugugaacccc

SEQ ID NO: 1028237 - RNA, 22 nt, Human
agcagccuugugacuccggggu

SEQ ID NO: 1028238 - RNA, 22 nt, Human
aaagugacaaccauuuauuaag

SEQ ID NO: 1028239 - RNA, 22 nt, Human
agagcagaggcauggccguggg

SEQ ID NO: 1028240 - RNA, 17 nt, Human
gcguguccccgcgucuc

SEQ ID NO: 1028241 - RNA, 22 nt, Human
ucuguucagaagaggugaaagu

SEQ ID NO: 1028242 - RNA, 22 nt, Human
gccaggcaggccacgcuguguu

SEQ ID NO: 1028243 - RNA, 22 nt, Human
cagcuggacugggauguagcga

SEQ ID NO: 1028244 - RNA, 15 nt, Human
gagaugcucucaggg

SEQ ID NO: 1028245 - RNA, 22 nt, Human
uccggcggccggccugagcccg

SEQ ID NO: 1028246 - RNA, 22 nt, Human
uuucaugauuaacuuagugaau

SEQ ID NO: 1028247 - RNA, 17 nt, Human
agcagcuggguugaucu

SEQ ID NO: 1028248 - RNA, 22 nt, Human
ggaaggggagcuaaaucuacug

SEQ ID NO: 1028249 - RNA, 19 nt, Human
acugcagggaggaggugug

SEQ ID NO: 1028250 - RNA, 22 nt, Human
ggcuagcuccuccgcgcaucca

SEQ ID NO: 1028251 - RNA, 22 nt, Human
ggccagccuggggcucccagac

SEQ ID NO: 1028252 - RNA, 22 nt, Human
aggcucagcaucugauucauau

SEQ ID NO: 1028253 - RNA, 22 nt, Human
ugcaagagcccaaacuauauac

SEQ ID NO: 1028254 - RNA, 21 nt, Human
gcacuucugcagggcugcugg

SEQ ID NO: 1028255 - RNA, 22 nt, Human
uugaugcugucuuucagaauca

SEQ ID NO: 1028256 - RNA, 22 nt, Human
guggcagcggcccaggccgucu

SEQ ID NO: 1028257 - RNA, 22 nt, Human
uggggugccgacagggagggca

SEQ ID NO: 1028258 - RNA, 22 nt, Human
acucagugggcuugaugucgaa

SEQ ID NO: 1028259 - RNA, 18 nt, Human
uggcaugcuuugauacau

SEQ ID NO: 1028260 - RNA, 22 nt, Human
cugugugcagggcacaauggaa

SEQ ID NO: 1028261 - RNA, 21 nt, Human
agaaggcaaaagcagacaucu

SEQ ID NO: 1028262 - RNA, 22 nt, Human
acuggcccuggcugcuaggcug

SEQ ID NO: 1028263 - RNA, 22 nt, Human
ccucuuccacugggccccaucc

SEQ ID NO: 1028264 - RNA, 22 nt, Human
cccuugagguagacugaacacc

SEQ ID NO: 1028265 - RNA, 22 nt, Human
gcuaagggauaggcugccuccu

SEQ ID NO: 1028266 - RNA, 22 nt, Human
ucagccaggccaggcauucaca

SEQ ID NO: 1028267 - RNA, 22 nt, Human
cuucucugucacaggguuacgu

SEQ ID NO: 1028268 - RNA, 22 nt, Human
uagcagaacaauagucaaugau

SEQ ID NO: 1028269 - RNA, 22 nt, Human
ugcucgagguccccaccggcuc

SEQ ID NO: 1028270 - RNA, 20 nt, Human
ggccggggagcucuccaggg

SEQ ID NO: 1028271 - RNA, 23 nt, Human
gcacagagcaguuaggggaagau

SEQ ID NO: 1028272 - RNA, 22 nt, Human
aagcucuuuccacuaaaccacu

SEQ ID NO: 1028273 - RNA, 22 nt, Human
gccagcagcucuugggcgggca

SEQ ID NO: 1028274 - RNA, 22 nt, Human
gugcaggugguuggcccagccg

SEQ ID NO: 1028275 - RNA, 22 nt, Human
gcaccgagaaggaagcaugccu

SEQ ID NO: 1028276 - RNA, 22 nt, Human
ugcuuguauucauaucacagcu

SEQ ID NO: 1028277 - RNA, 20 nt, Human
uuucacuggcuugauaaggu

SEQ ID NO: 1028278 - RNA, 22 nt, Human
agagcuccaggguuuuguagug

SEQ ID NO: 1028279 - RNA, 19 nt, Human
uccuggggaggggcauggc

SEQ ID NO: 1028280 - RNA, 23 nt, Human
cagcugguugugggaguggcugc

SEQ ID NO: 1028281 - RNA, 22 nt, Human
ccaggaugacccccacuuuccu

SEQ ID NO: 1028282 - RNA, 22 nt, Human
aaccagcacugcuggggccugc

SEQ ID NO: 1028283 - RNA, 22 nt, Human
acgugcuggagaagagcucgcc

SEQ ID NO: 1028284 - RNA, 22 nt, Human
cucgcggcgcccgaagcccuug

SEQ ID NO: 1028285 - RNA, 20 nt, Human
uuugauugccccucugacuu

SEQ ID NO: 1028286 - RNA, 22 nt, Human
aagucuucagacuggagagauu

SEQ ID NO: 1028287 - RNA, 22 nt, Human
uagucaccuguugugugaugcc

SEQ ID NO: 1028288 - RNA, 22 nt, Human
agcuccacucccugccuguuuc

SEQ ID NO: 1028289 - RNA, 22 nt, Human
cgccccagccaguugagcggcg

SEQ ID NO: 1028290 - RNA, 22 nt, Human
ugcuggccucggcgcugggccu

SEQ ID NO: 1028291 - RNA, 22 nt, Human
ugucugccugcgggccggcaca

SEQ ID NO: 1028292 - RNA, 22 nt, Human
uagcuguucucuguaaauugga

SEQ ID NO: 1028293 - RNA, 22 nt, Human
gccugaucagguccucggcaua

SEQ ID NO: 1028294 - RNA, 22 nt, Human
gcagcugccgugagcucacgcc

SEQ ID NO: 1028295 - RNA, 22 nt, Human
gcgagaaacuaagugcccuuug

SEQ ID NO: 1028296 - RNA, 22 nt, Human
gcagcccaggaggcgggagccc

SEQ ID NO: 1028297 - RNA, 17 nt, Human
gugagcugagucaggac

SEQ ID NO: 1028298 - RNA, 22 nt, Human
aggcugcugccuuggagagugu

SEQ ID NO: 1028299 - RNA, 23 nt, Human
aagaaugcuucugaagagcugcc

SEQ ID NO: 1028300 - RNA, 22 nt, Human
accaggaguuuugaccaggggc

SEQ ID NO: 1028301 - RNA, 22 nt, Human
cccuuguuuuugaguacaauag

SEQ ID NO: 1028302 - RNA, 22 nt, Human
gcagcuuuggagguggaacucu

SEQ ID NO: 1028303 - RNA, 22 nt, Human
acagugcaaauaggacugucuu

SEQ ID NO: 1028304 - RNA, 22 nt, Human
ugcauggacgugacuuggccaa

SEQ ID NO: 1028305 - RNA, 22 nt, Human
ucuguggcauguugcacuugua

SEQ ID NO: 1028306 - RNA, 22 nt, Human
aaggcuccagugaaugcuggca

SEQ ID NO: 1028307 - RNA, 22 nt, Human
gccuggaaugcaaugugacgaa

SEQ ID NO: 1028308 - RNA, 23 nt, Human
acagucguagguauccuuuuccu

SEQ ID NO: 1028309 - RNA, 22 nt, Human
cugagguccucagagggaaagg

SEQ ID NO: 1028310 - RNA, 22 nt, Human
cugcaccgugucucgggcugcc

SEQ ID NO: 1028311 - RNA, 22 nt, Human
uggcugaggcacagcugccgcc

SEQ ID NO: 1028312 - RNA, 22 nt, Human
cuugccagggacucagucaggg

SEQ ID NO: 1028313 - RNA, 22 nt, Human
gcucugagucacacugcccugu

SEQ ID NO: 1028314 - RNA, 22 nt, Human
ggugcggagacuccaugaggcc

SEQ ID NO: 1028315 - RNA, 22 nt, Human
cugaaggacacgugaggagcca

SEQ ID NO: 1028316 - RNA, 22 nt, Human
cagggagccccaauuccaugcc

SEQ ID NO: 1028317 - RNA, 22 nt, Human
gagccaggcccguacuugcugu

SEQ ID NO: 1028318 - RNA, 22 nt, Human
ggcaguggugggaggcucgcuc

SEQ ID NO: 1028319 - RNA, 22 nt, Human
auuuccuguaggggcuugcgaa

SEQ ID NO: 1028320 - RNA, 22 nt, Human
ugggcugcuucuauuggugguc

SEQ ID NO: 1028321 - RNA, 22 nt, Human
gggacaaccaacuuagcauuac

SEQ ID NO: 1028322 - RNA, 23 nt, Human
acucguggaauucucugcgaucg

SEQ ID NO: 1028323 - RNA, 22 nt, Human
ugcaggccuggacugauguggu

SEQ ID NO: 1028324 - RNA, 22 nt, Human
ugaggcuggaugggaugccucc

SEQ ID NO: 1028325 - RNA, 20 nt, Human
ccagagcugauggcugcccg

SEQ ID NO: 1028326 - RNA, 22 nt, Human
uucugugcucaaaacuuuccaa

SEQ ID NO: 1028327 - RNA, 22 nt, Human
agcugccgaugcccagcugcau

SEQ ID NO: 1028328 - RNA, 22 nt, Human
agggaagcagcagccgccuguc

SEQ ID NO: 1028329 - RNA, 22 nt, Human
cgccguccccuaggaaagagcu

SEQ ID NO: 1028330 - RNA, 18 nt, Human
gaaggcauucaguggcuu

SEQ ID NO: 1028331 - RNA, 22 nt, Human
agcucagggccaggcgcguuuc

SEQ ID NO: 1028332 - RNA, 22 nt, Human
cacagaggaugcccaagcgauc

SEQ ID NO: 1028333 - RNA, 22 nt, Human
uggguguguccauauuuugacu

SEQ ID NO: 1028334 - RNA, 22 nt, Human
acacauggucuacuucuucuca

SEQ ID NO: 1028335 - RNA, 22 nt, Human
cagaaacacuguauuuagggaa

SEQ ID NO: 1028336 - RNA, 22 nt, Human
ugcccagucuccgggccagccc

SEQ ID NO: 1028337 - RNA, 22 nt, Human
ccuuccaguucuugguuguaau

SEQ ID NO: 1028338 - RNA, 22 nt, Human
agguggagaagagaugggcagu

SEQ ID NO: 1028339 - RNA, 22 nt, Human
agagaccuuuugccuucuaguu

SEQ ID NO: 1028340 - RNA, 22 nt, Human
ucacaggagcccaggggagcug

SEQ ID NO: 1028341 - RNA, 22 nt, Human
gggcugacaccacccaggcgca

SEQ ID NO: 1028342 - RNA, 22 nt, Human
aguccgcgcuccaugggagucc

SEQ ID NO: 1028343 - RNA, 22 nt, Human
cagcugccuaugaccuagccuc

SEQ ID NO: 1028344 - RNA, 22 nt, Human
uguaccacucuacuaaggguuc

SEQ ID NO: 1028345 - RNA, 22 nt, Human
ggaaggcuuuaagcaccaaagc

SEQ ID NO: 1028346 - RNA, 22 nt, Human
uccuggccaaguagauguggcg

SEQ ID NO: 1028347 - RNA, 22 nt, Human
ccagcugggucccugcuggggc

SEQ ID NO: 1028348 - RNA, 22 nt, Human
aggacaggauugagcugaacug

SEQ ID NO: 1028349 - RNA, 22 nt, Human
cugugcuggcagaccuggaguu

SEQ ID NO: 1028350 - RNA, 22 nt, Human
gccuggcgccgggcugccuguc

SEQ ID NO: 1028351 - RNA, 22 nt, Human
gggagccccaccucggugcccg

SEQ ID NO: 1028352 - RNA, 22 nt, Human
uugggacaaagacuccuugaau

SEQ ID NO: 1028353 - RNA, 22 nt, Human
gcggcccgagcaggacgggugg

SEQ ID NO: 1028354 - RNA, 22 nt, Human
auacaccaccuuggaucuuuca

SEQ ID NO: 1028355 - RNA, 22 nt, Human
gauggaggagauggcagggugc

SEQ ID NO: 1028356 - RNA, 22 nt, Human
gguuccaggcauggcaggaugu

SEQ ID NO: 1028357 - RNA, 22 nt, Human
ucacccuucccagcuguccgcc

SEQ ID NO: 1028358 - RNA, 22 nt, Human
uugugcccucaaagggugcguc

SEQ ID NO: 1028359 - RNA, 22 nt, Human
ggaguucaaaucuuuuggaucu

SEQ ID NO: 1028360 - RNA, 22 nt, Human
guggccaucuuuggcccugacu

SEQ ID NO: 1028361 - RNA, 22 nt, Human
cagggcucgcucuugcccuucg

SEQ ID NO: 1028362 - RNA, 22 nt, Human
ggagguggagcuggaaguucca

SEQ ID NO: 1028363 - RNA, 22 nt, Human
ccaggaagaaacagucuuuaua

SEQ ID NO: 1028364 - RNA, 22 nt, Human
ugggcacacugaaucugcuauu

SEQ ID NO: 1028365 - RNA, 22 nt, Human
gacaaagcgccugcucgcgggc

SEQ ID NO: 1028366 - RNA, 22 nt, Human
gcggcuccgaagccaggccgcg

SEQ ID NO: 1028367 - RNA, 22 nt, Human
aaguguguauuuuucuucagug

SEQ ID NO: 1028368 - RNA, 22 nt, Human
gaggugaguggggucuccaggg

SEQ ID NO: 1028369 - RNA, 22 nt, Human
cugccguguuuuucauguuaaa

SEQ ID NO: 1028370 - RNA, 22 nt, Human
ugguggggccagacuucagcuc

SEQ ID NO: 1028371 - RNA, 22 nt, Human
uuccaggaagcucucggccucu

SEQ ID NO: 1028372 - RNA, 22 nt, Human
uggcucaggccuacgacgccuu

SEQ ID NO: 1028373 - RNA, 22 nt, Human
uaugcgugccucugucugucug

SEQ ID NO: 1028374 - RNA, 22 nt, Human
augcaguuagguaauagucuca

SEQ ID NO: 1028375 - RNA, 22 nt, Human
ugcugcccacuguauuucucca

SEQ ID NO: 1028376 - RNA, 22 nt, Human
caggacccaucagccaggcacu

SEQ ID NO: 1028377 - RNA, 22 nt, Human
gagugggugaaugugcucauaa

SEQ ID NO: 1028378 - RNA, 21 nt, Human
caaaagagacugauucuugga

SEQ ID NO: 1028379 - RNA, 22 nt, Human
gcugccgacccacagggguuaa

SEQ ID NO: 1028380 - RNA, 22 nt, Human
cagggcucacucggcuggcguc

SEQ ID NO: 1028381 - RNA, 22 nt, Human
ucuccucuccuuucauguuguu

SEQ ID NO: 1028382 - RNA, 22 nt, Human
auuuacagacguggauuagugc

SEQ ID NO: 1028383 - RNA, 22 nt, Human
aguacuuuuuguucaauugugc

SEQ ID NO: 1028384 - RNA, 22 nt, Human
caucugcaggggaagccaguuu

SEQ ID NO: 1028385 - RNA, 22 nt, Human
guggccuccuccguccgccucu

SEQ ID NO: 1028386 - RNA, 18 nt, Human
gccugccagccgagggac

SEQ ID NO: 1028387 - RNA, 22 nt, Human
cauugagcgacccugcaugacu

SEQ ID NO: 1028388 - RNA, 20 nt, Human
acguggccaccaguggcuua

SEQ ID NO: 1028389 - RNA, 22 nt, Human
agagcuggguggacuuguaguu

SEQ ID NO: 1028390 - RNA, 22 nt, Human
agcuuugcugcuggagaagggu

SEQ ID NO: 1028391 - RNA, 22 nt, Human
ggccacuguuuccugggcaguu

SEQ ID NO: 1028392 - RNA, 22 nt, Human
ugucuucuaccuugacagcauu

SEQ ID NO: 1028393 - RNA, 22 nt, Human
uucuguucccuaggaccugggg

SEQ ID NO: 1028394 - RNA, 20 nt, Human
gcagcagacagacaggggac

SEQ ID NO: 1028395 - RNA, 22 nt, Human
cgcaggugccggcagauggggu

SEQ ID NO: 1028396 - RNA, 22 nt, Human
uggucaggcugcucugcggcgu

SEQ ID NO: 1028397 - RNA, 22 nt, Human
ccagcugcugcaccgugcaugg

SEQ ID NO: 1028398 - RNA, 22 nt, Human
ggugccuaauaauucuauugca

SEQ ID NO: 1028399 - RNA, 23 nt, Human
uggcucugagcuuccugguggcc

SEQ ID NO: 1028400 - RNA, 22 nt, Human
cucugcguggcugggcccaggg

SEQ ID NO: 1028401 - RNA, 22 nt, Human
aaaagagccacuuaugaccuca

SEQ ID NO: 1028402 - RNA, 22 nt, Human
cgggcagugcccagcggggcag

SEQ ID NO: 1028403 - RNA, 22 nt, Human
agugcguggaccccuggcugcu

SEQ ID NO: 1028404 - RNA, 22 nt, Human
gaagcgugcagguccguauacu

SEQ ID NO: 1028405 - RNA, 22 nt, Human
ggcacugggugagggucacugg

SEQ ID NO: 1028406 - RNA, 22 nt, Human
gauacuugaggagaucaccaca

SEQ ID NO: 1028407 - RNA, 23 nt, Human
gguuggcuguacccaggcucccu

SEQ ID NO: 1028408 - RNA, 22 nt, Human
guguuucccuggcacaagaacc

SEQ ID NO: 1028409 - RNA, 21 nt, Human
gcagcaugagaaagccccaaa

SEQ ID NO: 1028410 - RNA, 22 nt, Human
gucccucugccugugguucucu

SEQ ID NO: 1028411 - RNA, 22 nt, Human
ugcaugguuauauacuacuagu

SEQ ID NO: 1028412 - RNA, 22 nt, Human
agggagcugcucugcuuccgug

SEQ ID NO: 1028413 - RNA, 22 nt, Human
acaugaggaacucaggagucac

SEQ ID NO: 1028414 - RNA, 22 nt, Human
uugagacucgagucucucagac

SEQ ID NO: 1028415 - RNA, 19 nt, Human
ggggcccggggucugcgag

SEQ ID NO: 1028416 - RNA, 22 nt, Human
ccucguccacaauccuugcaca

SEQ ID NO: 1028417 - RNA, 22 nt, Human
cuugggcaggggaaacagcugc

SEQ ID NO: 1028418 - RNA, 22 nt, Human
acucaucuuugaauuuucagua

SEQ ID NO: 1028419 - RNA, 22 nt, Human
gagcacucuggcauguaaccuu

SEQ ID NO: 1028420 - RNA, 22 nt, Human
ugcccauggcaggauuucugaa

SEQ ID NO: 1028421 - RNA, 22 nt, Human
gacacugcacuuggggcccaca

SEQ ID NO: 1028422 - RNA, 22 nt, Human
gguuuguggagcuggaaacacu

SEQ ID NO: 1028423 - RNA, 17 nt, Human
ucugcagggggccgugu

SEQ ID NO: 1028424 - RNA, 22 nt, Human
cguggcucugggcuccuuugcc

SEQ ID NO: 1028425 - RNA, 22 nt, Human
ugcagcaccuauggacacuugu

SEQ ID NO: 1028426 - RNA, 20 nt, Human
gcucagggccugggucugga

SEQ ID NO: 1028427 - RNA, 22 nt, Human
gcucuggcuacuguggcuaccg

SEQ ID NO: 1028428 - RNA, 22 nt, Human
gccuucugauugcuggacugac

SEQ ID NO: 1028429 - RNA, 22 nt, Human
cacaguuuugucuugguuucca

SEQ ID NO: 1028430 - RNA, 20 nt, Human
gagcagugagccagggaaag

SEQ ID NO: 1028431 - RNA, 22 nt, Human
ccaggcaaagcccaugcaagag

SEQ ID NO: 1028432 - RNA, 22 nt, Human
gacaguggagccacguugggag

SEQ ID NO: 1028433 - RNA, 22 nt, Human
uggaaacacccacgcaugcaua

SEQ ID NO: 1028434 - RNA, 22 nt, Human
caggcgaccccuaggagcaaca

SEQ ID NO: 1028435 - RNA, 22 nt, Human
gcucguacaccagcguggaggu

SEQ ID NO: 1028436 - RNA, 22 nt, Human
cuguguccaauggccuuagcag

SEQ ID NO: 1028437 - RNA, 22 nt, Human
ucagugcagggugggagagaga

SEQ ID NO: 1028438 - RNA, 22 nt, Human
aggggcagccucacaauccucu

SEQ ID NO: 1028439 - RNA, 22 nt, Human
aagaagguugaaugacuacuuu

SEQ ID NO: 1028440 - RNA, 22 nt, Human
agccacugugugaccagcuguc

SEQ ID NO: 1028441 - RNA, 22 nt, Human
ggccauggcgggagccggcguc

SEQ ID NO: 1028442 - RNA, 22 nt, Human
uggccuugcccagcgccuaggu

SEQ ID NO: 1028443 - RNA, 22 nt, Human
cagaaccaggaacugauggaga

SEQ ID NO: 1028444 - RNA, 22 nt, Human
aggcggcuccgggagugugggc

SEQ ID NO: 1028445 - RNA, 17 nt, Human
uaagggggaaacggagc

SEQ ID NO: 1028446 - RNA, 22 nt, Human
gcagaagcugggcagcgaggug

SEQ ID NO: 1028447 - RNA, 22 nt, Human
gauggcgguggccaccuccuug

SEQ ID NO: 1028448 - RNA, 22 nt, Human
uacugcauuaucaaggggaagg

SEQ ID NO: 1028449 - RNA, 22 nt, Human
gcuucucauguuuauuuuuaca

SEQ ID NO: 1028450 - RNA, 22 nt, Human
gcuggguggaucggaggcucug

SEQ ID NO: 1028451 - RNA, 22 nt, Human
ggcuggccuguguggccgccac

SEQ ID NO: 1028452 - RNA, 22 nt, Human
caggacagaaauaaggaauaua

SEQ ID NO: 1028453 - RNA, 22 nt, Human
ugcuugucacccugccugagug

SEQ ID NO: 1028454 - RNA, 19 nt, Human
uggcagcauugguaccuug

SEQ ID NO: 1028455 - RNA, 22 nt, Human
auguccagaguaaagcacauuc

SEQ ID NO: 1028456 - RNA, 22 nt, Human
cccaccagaccugcaccggcac

SEQ ID NO: 1028457 - RNA, 22 nt, Human
auugucgucaauggacacauag

SEQ ID NO: 1028458 - RNA, 22 nt, Human
accuggaggcagagguugcagu

SEQ ID NO: 1028459 - RNA, 22 nt, Human
ugagaccuuggacuccauccuu

SEQ ID NO: 1028460 - RNA, 22 nt, Human
cugaaagcaaaguaauucuuaa

SEQ ID NO: 1028461 - RNA, 22 nt, Human
guguggucgaaguucucccgga

SEQ ID NO: 1028462 - RNA, 22 nt, Human
ggcagcaggguagccauuucuc

SEQ ID NO: 1028463 - RNA, 18 nt, Human
ggccucagccuggccgga

SEQ ID NO: 1028464 - RNA, 22 nt, Human
cccagguaaggaugcuccucau

SEQ ID NO: 1028465 - RNA, 22 nt, Human
gguguuguacauucuguggauu

SEQ ID NO: 1028466 - RNA, 22 nt, Human
gggaggugauuaggaccaugua

SEQ ID NO: 1028467 - RNA, 22 nt, Human
gugggggcaggcagugcuagga

SEQ ID NO: 1028468 - RNA, 22 nt, Human
ucaugcagaguagaaagggcaa

SEQ ID NO: 1028469 - RNA, 22 nt, Human
uccaagacaagcacauuccugc

SEQ ID NO: 1028470 - RNA, 22 nt, Human
cacggccacugcagcaccccag

SEQ ID NO: 1028471 - RNA, 20 nt, Human
agcuugccccugucuuugcc

SEQ ID NO: 1028472 - RNA, 22 nt, Human
cgcugggcgcgcuccgaacccg

SEQ ID NO: 1028473 - RNA, 22 nt, Human
uccaggaggacugagggggcug

SEQ ID NO: 1028474 - RNA, 22 nt, Human
auggucacuucacccaugagcu

SEQ ID NO: 1028475 - RNA, 22 nt, Human
aggcaguuguugcugagcagcu

SEQ ID NO: 1028476 - RNA, 22 nt, Human
aagcagggugucuugacccaug

SEQ ID NO: 1028477 - RNA, 22 nt, Human
gcuguccugggaacaggcacua

SEQ ID NO: 1028478 - RNA, 22 nt, Human
ucagguccaagauggccaucca

SEQ ID NO: 1028479 - RNA, 22 nt, Human
acagcuucgaggaucucauccc

SEQ ID NO: 1028480 - RNA, 22 nt, Human
agcaauguuggccuauauaccu

SEQ ID NO: 1028481 - RNA, 22 nt, Human
agccagggacgcugcaggcuac

SEQ ID NO: 1028482 - RNA, 22 nt, Human
cgugaugcucaggaggucauag

SEQ ID NO: 1028483 - RNA, 22 nt, Human
gcugcaggcucugcaggaauug

SEQ ID NO: 1028484 - RNA, 22 nt, Human
aguucugggaggugcacgucca

SEQ ID NO: 1028485 - RNA, 22 nt, Human
aggcccugcugaggccucccuc

SEQ ID NO: 1028486 - RNA, 22 nt, Human
ggccaaggcucuugagggcuga

SEQ ID NO: 1028487 - RNA, 22 nt, Human
cccacaggcaggugcaugggcu

SEQ ID NO: 1028488 - RNA, 22 nt, Human
ugggugccaaccucugguggcc

SEQ ID NO: 1028489 - RNA, 22 nt, Human
gcgacgcaggcacgacguguug

SEQ ID NO: 1028490 - RNA, 22 nt, Human
cccauugugguuguugaggaua

SEQ ID NO: 1028491 - RNA, 22 nt, Human
ucguuagccucgagaucuuugu

SEQ ID NO: 1028492 - RNA, 22 nt, Human
gccuucugaucgcuggacugac

SEQ ID NO: 1028493 - RNA, 22 nt, Human
gcagcucucuggccugcccugg

SEQ ID NO: 1028494 - RNA, 22 nt, Human
gcuguggcuccaauggugagcc

SEQ ID NO: 1028495 - RNA, 22 nt, Human
uuacgcagcugcuccaggaagc

SEQ ID NO: 1028496 - RNA, 22 nt, Human
gcuucuggaagcauaugcaaga

SEQ ID NO: 1028497 - RNA, 22 nt, Human
ugcauaaauauuguugggagua

SEQ ID NO: 1028498 - RNA, 23 nt, Human
acagaagccaggagccgcugggc

SEQ ID NO: 1028499 - RNA, 22 nt, Human
uggagcagccuuuucuaagcaa

SEQ ID NO: 1028500 - RNA, 17 nt, Human
aggucugagaguaucug

SEQ ID NO: 1028501 - RNA, 22 nt, Human
cuggcuuugaucagagugaccu

SEQ ID NO: 1028502 - RNA, 22 nt, Human
gccagaggggcucgaaggcgcg

SEQ ID NO: 1028503 - RNA, 22 nt, Human
auugcacaucugcacuacagcc

SEQ ID NO: 1028504 - RNA, 22 nt, Human
ccugguccccaucggcccagcg

SEQ ID NO: 1028505 - RNA, 22 nt, Human
auucuggacaaggcaagcuccu

SEQ ID NO: 1028506 - RNA, 22 nt, Human
gagcagcaucuccggcuuaaag

SEQ ID NO: 1028507 - RNA, 22 nt, Human
caggaaugguuaaucuaaagug

SEQ ID NO: 1028508 - RNA, 22 nt, Human
gagcugcagcggcugacgcaac

SEQ ID NO: 1028509 - RNA, 22 nt, Human
ugcauccuguucuagguuuggg

SEQ ID NO: 1028510 - RNA, 22 nt, Human
cuggagcagcagguggccaggg

SEQ ID NO: 1028511 - RNA, 22 nt, Human
gccacguagaagugccgcgaga

SEQ ID NO: 1028512 - RNA, 22 nt, Human
guccacauaggaacccagcuuc

SEQ ID NO: 1028513 - RNA, 23 nt, Human
gcauccagagcucaguccccuuu

SEQ ID NO: 1028514 - RNA, 22 nt, Human
cuagagaaaaagcuuagguacg

SEQ ID NO: 1028515 - RNA, 22 nt, Human
caaguaugagaaagcuauuacc

SEQ ID NO: 1028516 - RNA, 22 nt, Human
ucauuuacacuucacaaaugga

SEQ ID NO: 1028517 - RNA, 22 nt, Human
cagcuggcgacucuccucgaug

SEQ ID NO: 1028518 - RNA, 22 nt, Human
uggccaggcagguagaacggcc

SEQ ID NO: 1028519 - RNA, 22 nt, Human
aguguugucaaacggcucagca

SEQ ID NO: 1028520 - RNA, 22 nt, Human
gcagcucacagucuccgccauc

SEQ ID NO: 1028521 - RNA, 22 nt, Human
augcacacguacccuacaaggc

SEQ ID NO: 1028522 - RNA, 17 nt, Human
ugggggcccuguguaga

SEQ ID NO: 1028523 - RNA, 22 nt, Human
guucuucagcccucagguccua

SEQ ID NO: 1028524 - RNA, 22 nt, Human
aaggcuuguugucacgcucuug

SEQ ID NO: 1028525 - RNA, 22 nt, Human
caugcuggucagccaguggaug

SEQ ID NO: 1028526 - RNA, 21 nt, Human
caggaacauucuuuacauuua

SEQ ID NO: 1028527 - RNA, 22 nt, Human
augcuacauuuugguuuauaaa

SEQ ID NO: 1028528 - RNA, 22 nt, Human
gcggggggcagcagucgcucag

SEQ ID NO: 1028529 - RNA, 22 nt, Human
ccucugagcuggccuguggggc

SEQ ID NO: 1028530 - RNA, 22 nt, Human
agcagugugggcugcacgcugg

SEQ ID NO: 1028531 - RNA, 22 nt, Human
aucaugcagcaacaagcaaggc

SEQ ID NO: 1028532 - RNA, 22 nt, Human
auggcuguguuguuccucugaa

SEQ ID NO: 1028533 - RNA, 22 nt, Human
aaggcauggcaggguuuacaca

SEQ ID NO: 1028534 - RNA, 19 nt, Human
cucugccucuggcuguggc

SEQ ID NO: 1028535 - RNA, 22 nt, Human
cucuggucaagcaaagagguuu

SEQ ID NO: 1028536 - RNA, 22 nt, Human
ugugugcucgauggcccugcag

SEQ ID NO: 1028537 - RNA, 23 nt, Human
aagugcucaguggacagcauugc

SEQ ID NO: 1028538 - RNA, 22 nt, Human
ugcagcaucuccuugugccaug

SEQ ID NO: 1028539 - RNA, 20 nt, Human
caucaacaccuugucagccu

SEQ ID NO: 1028540 - RNA, 20 nt, Human
cgggacacucaagcucuggg

SEQ ID NO: 1028541 - RNA, 21 nt, Human
ggucaggcaugugcccugagc

SEQ ID NO: 1028542 - RNA, 22 nt, Human
uugaguuuccugacagcgaagg

SEQ ID NO: 1028543 - RNA, 22 nt, Human
gucgaucaccucguccuccgug

SEQ ID NO: 1028544 - RNA, 22 nt, Human
acugauuucagggaugagaaga

SEQ ID NO: 1028545 - RNA, 22 nt, Human
gcccuguguguuugcacugauu

SEQ ID NO: 1028546 - RNA, 22 nt, Human
cagagaauaaaagggcauuccu

SEQ ID NO: 1028547 - RNA, 21 nt, Human
uggcccuggccacggcugcca

SEQ ID NO: 1028548 - RNA, 22 nt, Human
uggcacaguuaaaguuguagaa

SEQ ID NO: 1028549 - RNA, 22 nt, Human
ugcuucucaaaaggagguaggu

SEQ ID NO: 1028550 - RNA, 22 nt, Human
uagcaccggcagugguaggugc

SEQ ID NO: 1028551 - RNA, 22 nt, Human
ccaagcuggacagcagcaagga

SEQ ID NO: 1028552 - RNA, 22 nt, Human
ucuguagcauucaccagcccug

SEQ ID NO: 1028553 - RNA, 22 nt, Human
augugagcuggggcccggccag

SEQ ID NO: 1028554 - RNA, 22 nt, Human
uuucaaguagagggaucgcuag

SEQ ID NO: 1028555 - RNA, 22 nt, Human
cagagcugucauuugccaguga

SEQ ID NO: 1028556 - RNA, 22 nt, Human
gccuggagcucggcugagggcg

SEQ ID NO: 1028557 - RNA, 22 nt, Human
cucgagagauccucuugccacc

SEQ ID NO: 1028558 - RNA, 19 nt, Human
aaugcugcuucuuuuugca

SEQ ID NO: 1028559 - RNA, 22 nt, Human
caggccagcagggccuccgugg

SEQ ID NO: 1028560 - RNA, 22 nt, Human
uuugaagauaaauauggagaaa

SEQ ID NO: 1028561 - RNA, 21 nt, Human
cccuugccugcacuccucggc

SEQ ID NO: 1028562 - RNA, 18 nt, Human
acuguggcucagaguugc

SEQ ID NO: 1028563 - RNA, 22 nt, Human
uugauuugauuguaauggcucu

SEQ ID NO: 1028564 - RNA, 18 nt, Human
gccuggcuucggagccgc

SEQ ID NO: 1028565 - RNA, 22 nt, Human
agcaccaggucgcuggcacgcu

SEQ ID NO: 1028566 - RNA, 22 nt, Human
agcuggugugccaguuccaguu

SEQ ID NO: 1028567 - RNA, 22 nt, Human
cuguggcuaggaagcuguggga

SEQ ID NO: 1028568 - RNA, 22 nt, Human
ccuggccugugaaucugagagc

SEQ ID NO: 1028569 - RNA, 22 nt, Human
ccaagaggggcagagggcugca

SEQ ID NO: 1028570 - RNA, 22 nt, Human
cuccugcagcccucagcagcca

SEQ ID NO: 1028571 - RNA, 22 nt, Human
agucaggaagcuggagcugggg

SEQ ID NO: 1028572 - RNA, 22 nt, Human
cucuccaggcgagguccuacug

SEQ ID NO: 1028573 - RNA, 22 nt, Human
gcagggcagggcaagaacuggg

SEQ ID NO: 1028574 - RNA, 22 nt, Human
cuccagaggcgacuugcaucac

SEQ ID NO: 1028575 - RNA, 22 nt, Human
gcuuuggaaauauagacucaag

SEQ ID NO: 1028576 - RNA, 22 nt, Human
aggaagccuggaguccugccca

SEQ ID NO: 1028577 - RNA, 20 nt, Human
cagagcagugcccaggcggc

SEQ ID NO: 1028578 - RNA, 22 nt, Human
acagcagguuauuguuauggca

SEQ ID NO: 1028579 - RNA, 22 nt, Human
uccugagauaggaguugaaggc

SEQ ID NO: 1028580 - RNA, 22 nt, Human
ggagacucaccccgcauucuag

SEQ ID NO: 1028581 - RNA, 22 nt, Human
agcgggcucacccgguuguugu

SEQ ID NO: 1028582 - RNA, 22 nt, Human
agacuucucuaacuugaggacc

SEQ ID NO: 1028583 - RNA, 22 nt, Human
gagcagcuguucugacuugucu

SEQ ID NO: 1028584 - RNA, 22 nt, Human
ggcugcccucggggucgcaggc

SEQ ID NO: 1028585 - RNA, 18 nt, Human
ucugaaggaaugauucca

SEQ ID NO: 1028586 - RNA, 21 nt, Human
uagaccagcugugcuccucgg

SEQ ID NO: 1028587 - RNA, 22 nt, Human
gcaaaacagucgaugccuccca

SEQ ID NO: 1028588 - RNA, 22 nt, Human
cgaggagugugaaggcuugucg

SEQ ID NO: 1028589 - RNA, 22 nt, Human
cuugucuaguuccuggugaugu

SEQ ID NO: 1028590 - RNA, 22 nt, Human
aagccacugcagcaggagcugc

SEQ ID NO: 1028591 - RNA, 22 nt, Human
caggaugccuuugaacucugga

SEQ ID NO: 1028592 - RNA, 22 nt, Human
cccugcacagccuggcucucuu

SEQ ID NO: 1028593 - RNA, 18 nt, Human
cgcauguacacgucaugc

SEQ ID NO: 1028594 - RNA, 22 nt, Human
agaagugaguugugacuauggg

SEQ ID NO: 1028595 - RNA, 22 nt, Human
ucccacagcuucgugcuucccc

SEQ ID NO: 1028596 - RNA, 22 nt, Human
cugagcugcucccgcugcagcg

SEQ ID NO: 1028597 - RNA, 21 nt, Human
auucugaguugucagucuuca

SEQ ID NO: 1028598 - RNA, 22 nt, Human
ggggucugggcuuagcuggaau

SEQ ID NO: 1028599 - RNA, 22 nt, Human
augaacugcaguauaaacuugg

SEQ ID NO: 1028600 - RNA, 22 nt, Human
uggggucagcaggccuggccug

SEQ ID NO: 1028601 - RNA, 22 nt, Human
agagaugcuguggguagaggca

SEQ ID NO: 1028602 - RNA, 22 nt, Human
uugacccgaguccuucuugggg

SEQ ID NO: 1028603 - RNA, 22 nt, Human
ggagccuggaguuucugauggg

SEQ ID NO: 1028604 - RNA, 22 nt, Human
ccagguaggagagucaacaugu

SEQ ID NO: 1028605 - RNA, 22 nt, Human
gagcugcuggccuccugcggga

SEQ ID NO: 1028606 - RNA, 21 nt, Human
ucuuggggaggagggcugcac

SEQ ID NO: 1028607 - RNA, 22 nt, Human
aagacagugacagucacaauug

SEQ ID NO: 1028608 - RNA, 22 nt, Human
gcaguaucuaugugauggguug

SEQ ID NO: 1028609 - RNA, 22 nt, Human
uugcacgcuugcgguuccugcc

SEQ ID NO: 1028610 - RNA, 22 nt, Human
ggcagccagagggcagcuggau

SEQ ID NO: 1028611 - RNA, 22 nt, Human
agccuugcaugauuucauucau

SEQ ID NO: 1028612 - RNA, 22 nt, Human
uccuuggcagcagggagcauga

SEQ ID NO: 1028613 - RNA, 22 nt, Human
uuccuucuucauuguguuacag

SEQ ID NO: 1028614 - RNA, 23 nt, Human
ugagagccuggcagccuggguuc

SEQ ID NO: 1028615 - RNA, 23 nt, Human
agguggagcugugcagccggggc

SEQ ID NO: 1028616 - RNA, 22 nt, Human
cgggcuccgggucuuugcaguc

SEQ ID NO: 1028617 - RNA, 22 nt, Human
cugggguccuugccauguguca

SEQ ID NO: 1028618 - RNA, 22 nt, Human
gauggugcaggugaagugcugg

SEQ ID NO: 1028619 - RNA, 18 nt, Human
accugauuggcgcagccc

SEQ ID NO: 1028620 - RNA, 22 nt, Human
cccuggcucugccucagagccc

SEQ ID NO: 1028621 - RNA, 18 nt, Human
gaggcacauaguuggggc

SEQ ID NO: 1028622 - RNA, 22 nt, Human
caccugagcaacccugugcggg

SEQ ID NO: 1028623 - RNA, 19 nt, Human
gcuuccagcacugcaggag

SEQ ID NO: 1028624 - RNA, 22 nt, Human
gagcacugagcuggaauuggag

SEQ ID NO: 1028625 - RNA, 22 nt, Human
aaggagcuuucauuacagccuu

SEQ ID NO: 1028626 - RNA, 22 nt, Human
ucugggugucacuccugccugc

SEQ ID NO: 1028627 - RNA, 22 nt, Human
gugcuggggagauaggaagaga

SEQ ID NO: 1028628 - RNA, 22 nt, Human
uuccugagucgccgagucuaug

SEQ ID NO: 1028629 - RNA, 22 nt, Human
cuggcagcucugagucccuucu

SEQ ID NO: 1028630 - RNA, 22 nt, Human
cucagagaagauggaugaggua

SEQ ID NO: 1028631 - RNA, 22 nt, Human
ugaucagcaucuucccagcucg

SEQ ID NO: 1028632 - RNA, 22 nt, Human
gcugggugauucauuuccauaa

SEQ ID NO: 1028633 - RNA, 22 nt, Human
ugggugugagcccgggagccgc

SEQ ID NO: 1028634 - RNA, 22 nt, Human
uuccugcaggccauagagccug

SEQ ID NO: 1028635 - RNA, 22 nt, Human
gguggcagaggugcaucagccc

SEQ ID NO: 1028636 - RNA, 22 nt, Human
aggugcccaugagcuccauggc

SEQ ID NO: 1028637 - RNA, 22 nt, Human
cugccuuggcccuaguucaugg

SEQ ID NO: 1028638 - RNA, 22 nt, Human
aagcucucuguccccuggacug

SEQ ID NO: 1028639 - RNA, 23 nt, Human
uuguucuuggaucuuccugaagc

SEQ ID NO: 1028640 - RNA, 20 nt, Human
agcuggcccccgguggccug

SEQ ID NO: 1028641 - RNA, 22 nt, Human
gcagucauggguagaacucaag

SEQ ID NO: 1028642 - RNA, 22 nt, Human
ucuccuggcauuugguugagua

SEQ ID NO: 1028643 - RNA, 22 nt, Human
ucaccucucuggccgucuaccu

SEQ ID NO: 1028644 - RNA, 22 nt, Human
gcugugcagaggugagaaucca

SEQ ID NO: 1028645 - RNA, 19 nt, Human
ugguggaggccccauguuc

SEQ ID NO: 1028646 - RNA, 22 nt, Human
uugcccacuggcuguuggucag

SEQ ID NO: 1028647 - RNA, 22 nt, Human
uugucgggcuuacgcagggcca

SEQ ID NO: 1028648 - RNA, 22 nt, Human
ggugagagaaaagaaacacugu

SEQ ID NO: 1028649 - RNA, 22 nt, Human
ggucuggccuccgggcaggugg

SEQ ID NO: 1028650 - RNA, 22 nt, Human
gacggggcagccagcugguggc

SEQ ID NO: 1028651 - RNA, 23 nt, Human
uggccucuccccaccuggcagaa

SEQ ID NO: 1028652 - RNA, 22 nt, Human
caugggcucuucuggacugcac

SEQ ID NO: 1028653 - RNA, 22 nt, Human
agacagcgaggacagaggggug

SEQ ID NO: 1028654 - RNA, 21 nt, Human
uuuaaggccagcaggagguga

SEQ ID NO: 1028655 - RNA, 22 nt, Human
cuccaggacaugacuuucuugc

SEQ ID NO: 1028656 - RNA, 22 nt, Human
ugcugcuuguuuuguaaauaaa

SEQ ID NO: 1028657 - RNA, 17 nt, Human
gcaggcacugcugccug

SEQ ID NO: 1028658 - RNA, 22 nt, Human
aggccacaggaguacugucggu

SEQ ID NO: 1028659 - RNA, 22 nt, Human
cagcagcaacaacggaagccuu

SEQ ID NO: 1028660 - RNA, 21 nt, Human
agcgucaauaucgucaacagg

SEQ ID NO: 1028661 - RNA, 22 nt, Human
agggaugcaguaaaaacuguag

SEQ ID NO: 1028662 - RNA, 22 nt, Human
uucuuucugggguccuucggcu

SEQ ID NO: 1028663 - RNA, 22 nt, Human
ugcugcucaagcugcagcaaaa

SEQ ID NO: 1028664 - RNA, 19 nt, Human
agacaaguuuccagaagcc

SEQ ID NO: 1028665 - RNA, 22 nt, Human
uuuccagggaggaauguggggu

SEQ ID NO: 1028666 - RNA, 20 nt, Human
ggaaaaguacuccuccuuaa

SEQ ID NO: 1028667 - RNA, 22 nt, Human
uaagucauagauuaauggccac

SEQ ID NO: 1028668 - RNA, 22 nt, Human
cagcccuguugcgcuuccggcg

SEQ ID NO: 1028669 - RNA, 19 nt, Human
ucuggcugccaaggauuga

SEQ ID NO: 1028670 - RNA, 22 nt, Human
cuucuccgacaaccgacgccgg

SEQ ID NO: 1028671 - RNA, 22 nt, Human
gccaggucgucuccauguccaa

SEQ ID NO: 1028672 - RNA, 22 nt, Human
uggcacugucaccaaugcuguc

SEQ ID NO: 1028673 - RNA, 18 nt, Human
uggcagccagcugcuccu

SEQ ID NO: 1028674 - RNA, 22 nt, Human
cuuguuuucuucugcagucuau

SEQ ID NO: 1028675 - RNA, 22 nt, Human
uuuucaguugugcucucuaguu

SEQ ID NO: 1028676 - RNA, 22 nt, Human
uggcugcccccucccguggaca

SEQ ID NO: 1028677 - RNA, 22 nt, Human
gcugccaauccagcugugggag

SEQ ID NO: 1028678 - RNA, 22 nt, Human
cccccagcucugcugggucccg

SEQ ID NO: 1028679 - RNA, 22 nt, Human
gucugcugacagagcauggacc

SEQ ID NO: 1028680 - RNA, 22 nt, Human
agaugcugcuccacaggccagg

SEQ ID NO: 1028681 - RNA, 22 nt, Human
augaagcugguuuuggcuuggg

SEQ ID NO: 1028682 - RNA, 22 nt, Human
ugggcaaggcuggagccugcag

SEQ ID NO: 1028683 - RNA, 22 nt, Human
ucuucaugucaugguauauuga

SEQ ID NO: 1028684 - RNA, 22 nt, Human
gaggcagagacuccaccuucag

SEQ ID NO: 1028685 - RNA, 22 nt, Human
uucacguuguugaagaaaauac

SEQ ID NO: 1028686 - RNA, 22 nt, Human
ccgaggcuggccucagggcugu

SEQ ID NO: 1028687 - RNA, 22 nt, Human
gugcugcagagucucgugccgc

SEQ ID NO: 1028688 - RNA, 22 nt, Human
cagcagcaggcgcacggccguc

SEQ ID NO: 1028689 - RNA, 22 nt, Human
agccacagucuguagccagcuu

SEQ ID NO: 1028690 - RNA, 22 nt, Human
ucggagcuguagaugaaacccu

SEQ ID NO: 1028691 - RNA, 22 nt, Human
aagccagguguuuaggccagcg

SEQ ID NO: 1028692 - RNA, 22 nt, Human
gagcuuggugcugccuguuguc

SEQ ID NO: 1028693 - RNA, 22 nt, Human
cccaggaacagcacagaacagc

SEQ ID NO: 1028694 - RNA, 22 nt, Human
agacagcacuuuuguauggggg

SEQ ID NO: 1028695 - RNA, 22 nt, Human
agcugcugcaaguggugcuaac

SEQ ID NO: 1028696 - RNA, 22 nt, Human
agcccugugugcuuguguuccu

SEQ ID NO: 1028697 - RNA, 22 nt, Human
ggggaagaaauagaacauuuug

SEQ ID NO: 1028698 - RNA, 21 nt, Human
uuggaacaagcagcaguuugc

SEQ ID NO: 1028699 - RNA, 21 nt, Human
uccagcacagaugaccucccc

SEQ ID NO: 1028700 - RNA, 22 nt, Human
caaaauuguugaugcugcuuug

SEQ ID NO: 1028701 - RNA, 22 nt, Human
agucagcuugucucuaggguug

SEQ ID NO: 1028702 - RNA, 22 nt, Human
ccauggccugaaggagugcauc

SEQ ID NO: 1028703 - RNA, 22 nt, Human
gccacaggaaagcacccuggag

SEQ ID NO: 1028704 - RNA, 22 nt, Human
uuaaguccuugguaauuuucuu

SEQ ID NO: 1028705 - RNA, 22 nt, Human
augacagcucuagcacacagua

SEQ ID NO: 1028706 - RNA, 22 nt, Human
gccccagcguggcuguguuagg

SEQ ID NO: 1028707 - RNA, 22 nt, Human
ccauggccaggaaagccaaggu

SEQ ID NO: 1028708 - RNA, 22 nt, Human
cagugcaacguugugcauucaa

SEQ ID NO: 1028709 - RNA, 22 nt, Human
guagagcagggagcaggaagcu

SEQ ID NO: 1028710 - RNA, 22 nt, Human
agggcccuagggaaugagacau

SEQ ID NO: 1028711 - RNA, 22 nt, Human
auuguugacuugauuacucaac

SEQ ID NO: 1028712 - RNA, 22 nt, Human
ucagucucuggggcuucuguuu

SEQ ID NO: 1028713 - RNA, 22 nt, Human
agguccugucuuaucucuguaa

SEQ ID NO: 1028714 - RNA, 22 nt, Human
aggcucaguauagcuggcaagu

SEQ ID NO: 1028715 - RNA, 22 nt, Human
gcggccuuguggcggagcaggc

SEQ ID NO: 1028716 - RNA, 22 nt, Human
aggagccgggccugggcccugc

SEQ ID NO: 1028717 - RNA, 23 nt, Human
gggugcugccuguagucaugcug

SEQ ID NO: 1028718 - RNA, 22 nt, Human
cagagggagcccuccaggagca

SEQ ID NO: 1028719 - RNA, 22 nt, Human
gcugcagggagcuggaaggcuc

SEQ ID NO: 1028720 - RNA, 22 nt, Human
gcagcugcgcugguguggggca

SEQ ID NO: 1028721 - RNA, 22 nt, Human
ggcggcgcguagccggagacuu

SEQ ID NO: 1028722 - RNA, 22 nt, Human
aggcgaagggaccagacgguag

SEQ ID NO: 1028723 - RNA, 22 nt, Human
gauuuucauuauagcuaguuuc

SEQ ID NO: 1028724 - RNA, 22 nt, Human
uccuuggcaugccgucuucucc

SEQ ID NO: 1028725 - RNA, 22 nt, Human
gcacugccugugagcccugguu

SEQ ID NO: 1028726 - RNA, 22 nt, Human
ugccuggcugggcugcucaugg

SEQ ID NO: 1028727 - RNA, 22 nt, Human
ggacuggucugagagggauuca

SEQ ID NO: 1028728 - RNA, 22 nt, Human
uuugaacuucuaccugucauau

SEQ ID NO: 1028729 - RNA, 22 nt, Human
cuggcacaggauccgagaccuu

SEQ ID NO: 1028730 - RNA, 22 nt, Human
uucuccucagcaaggcagcuuu

SEQ ID NO: 1028731 - RNA, 23 nt, Human
ggaggcacuuaggcagagcagag

SEQ ID NO: 1028732 - RNA, 18 nt, Human
cagaaaguuauuuacucu

SEQ ID NO: 1028733 - RNA, 18 nt, Human
uccaggcuccaggcuaac

SEQ ID NO: 1028734 - RNA, 22 nt, Human
cacucacccgguccuucccagu

SEQ ID NO: 1028735 - RNA, 22 nt, Human
aagcagaaaaacugagcuccaa

SEQ ID NO: 1028736 - RNA, 22 nt, Human
gagcuaggauaucaugagggua

SEQ ID NO: 1028737 - RNA, 22 nt, Human
aggcugagccugggcguggugg

SEQ ID NO: 1028738 - RNA, 22 nt, Human
gagcaaggaugggucuauagua

SEQ ID NO: 1028739 - RNA, 22 nt, Human
ccagcuugcuccucugcaaugg

SEQ ID NO: 1028740 - RNA, 21 nt, Human
uaagaacauuaucuucuuccu

SEQ ID NO: 1028741 - RNA, 18 nt, Human
ucagggaaucuuggccuu

SEQ ID NO: 1028742 - RNA, 22 nt, Human
cuguccauggcaaugaugcaga

SEQ ID NO: 1028743 - RNA, 22 nt, Human
ucagguagugguuaaguucugu

SEQ ID NO: 1028744 - RNA, 22 nt, Human
aggcuaggccuugcccuggaac

SEQ ID NO: 1028745 - RNA, 22 nt, Human
guguuuggucagacguccgggg

SEQ ID NO: 1028746 - RNA, 22 nt, Human
uuucgagggauuagcuaggacu

SEQ ID NO: 1028747 - RNA, 22 nt, Human
uugaacaguuuugucagguuca

SEQ ID NO: 1028748 - RNA, 22 nt, Human
ggacucucaggcugucggcuuc

SEQ ID NO: 1028749 - RNA, 22 nt, Human
gcagaggggaagcugaggaauu

SEQ ID NO: 1028750 - RNA, 22 nt, Human
augcaguggcagcuccuggugu

SEQ ID NO: 1028751 - RNA, 22 nt, Human
ucccaggauguuuauggcuggu

SEQ ID NO: 1028752 - RNA, 22 nt, Human
ucucaggcuuccuggugcugug

SEQ ID NO: 1028753 - RNA, 22 nt, Human
ugcuagguaagaagggggcucc

SEQ ID NO: 1028754 - RNA, 22 nt, Human
cuggccagccucccagguaccc

SEQ ID NO: 1028755 - RNA, 22 nt, Human
uccagcaguccaugugagacac

SEQ ID NO: 1028756 - RNA, 22 nt, Human
uggguccuggaaggcgacaggu

SEQ ID NO: 1028757 - RNA, 22 nt, Human
aggcagccuauggggagcucag

SEQ ID NO: 1028758 - RNA, 22 nt, Human
aucagagcuaguacuugcaggu

SEQ ID NO: 1028759 - RNA, 22 nt, Human
gagggcucaacuacuacuaggc

SEQ ID NO: 1028760 - RNA, 22 nt, Human
ccagguggacggcgaguacagg

SEQ ID NO: 1028761 - RNA, 22 nt, Human
agaggagguccuuuucugaugu

SEQ ID NO: 1028762 - RNA, 22 nt, Human
cagggaugggauggagucaguu

SEQ ID NO: 1028763 - RNA, 22 nt, Human
aggcugucucaccucaggaggg

SEQ ID NO: 1028764 - RNA, 22 nt, Human
uuguuuguaaggcucuuagaau

SEQ ID NO: 1028765 - RNA, 22 nt, Human
uagaucuuucacuacuguguag

SEQ ID NO: 1028766 - RNA, 22 nt, Human
gccagcuggcugcaggucccag

SEQ ID NO: 1028767 - RNA, 22 nt, Human
ugugcccuccugccaggggcug

SEQ ID NO: 1028768 - RNA, 22 nt, Human
uuccaggacuggguguuugaag

SEQ ID NO: 1028769 - RNA, 22 nt, Human
uccaggcugacgcagcuauuua

SEQ ID NO: 1028770 - RNA, 19 nt, Human
augagcuggcauuucaggu

SEQ ID NO: 1028771 - RNA, 22 nt, Human
ggcagguguuuuuauauuaaag

SEQ ID NO: 1028772 - RNA, 22 nt, Human
uacagugcuugguaucuaguaa

SEQ ID NO: 1028773 - RNA, 22 nt, Human
ccuggaaaaugccacuuucaca

SEQ ID NO: 1028774 - RNA, 22 nt, Human
uuucccaggcuggaaugcagug

SEQ ID NO: 1028775 - RNA, 22 nt, Human
uuucucagccuccuugcuggag

SEQ ID NO: 1028776 - RNA, 22 nt, Human
uccuggcaaagauguugguguu

SEQ ID NO: 1028777 - RNA, 22 nt, Human
gugacagguauacucaccauug

SEQ ID NO: 1028778 - RNA, 22 nt, Human
gucagcaggguccccuugagug

SEQ ID NO: 1028779 - RNA, 22 nt, Human
ucaggggacagccagcuggagg

SEQ ID NO: 1028780 - RNA, 22 nt, Human
gcuggccugcgagggcaggcug

SEQ ID NO: 1028781 - RNA, 22 nt, Human
ugcgggucccagggucacaggc

SEQ ID NO: 1028782 - RNA, 22 nt, Human
uuccuuggaaagagacgucgcu

SEQ ID NO: 1028783 - RNA, 22 nt, Human
gccuuugcugugacaaugcugg

SEQ ID NO: 1028784 - RNA, 22 nt, Human
agagaccuuccugacuccagag

SEQ ID NO: 1028785 - RNA, 22 nt, Human
aggagccauugcaggauggcag

SEQ ID NO: 1028786 - RNA, 23 nt, Human
augcuagcugugccaacaccaua

SEQ ID NO: 1028787 - RNA, 22 nt, Human
agccccaguccgcugcgggcgg

SEQ ID NO: 1028788 - RNA, 22 nt, Human
cuggagcuggcccaggcuggcc

SEQ ID NO: 1028789 - RNA, 22 nt, Human
aggcuuuugcucuggcuccucu

SEQ ID NO: 1028790 - RNA, 22 nt, Human
cccaggaguuagagguuguggu

SEQ ID NO: 1028791 - RNA, 22 nt, Human
accuccuccaaggagccauagg

SEQ ID NO: 1028792 - RNA, 22 nt, Human
ugcccguggccuggggcagcuu

SEQ ID NO: 1028793 - RNA, 22 nt, Human
gggcccuggacguggcggcaga

SEQ ID NO: 1028794 - RNA, 22 nt, Human
cgaggaggaaacgcggagaacu

SEQ ID NO: 1028795 - RNA, 22 nt, Human
ucagauggaaugaugccacugc

SEQ ID NO: 1028796 - RNA, 22 nt, Human
uggagcugguucuggggaagcu

SEQ ID NO: 1028797 - RNA, 22 nt, Human
ugagaugaagugauguaaaaca

SEQ ID NO: 1028798 - RNA, 22 nt, Human
ggcucacgcaauuaucccggcc

SEQ ID NO: 1028799 - RNA, 22 nt, Human
cucuggagggaggcugagcugg

SEQ ID NO: 1028800 - RNA, 22 nt, Human
ggcuagggagacagagggcaug

SEQ ID NO: 1028801 - RNA, 22 nt, Human
acaggaucgcccuguugcccag

SEQ ID NO: 1028802 - RNA, 22 nt, Human
caaacugaacacgaaagucuuu

SEQ ID NO: 1028803 - RNA, 22 nt, Human
gggagacaaaggugagguucuu

SEQ ID NO: 1028804 - RNA, 22 nt, Human
acugcauucuuuaucccacaac

SEQ ID NO: 1028805 - RNA, 19 nt, Human
cacuguccuagucgaggcc

SEQ ID NO: 1028806 - RNA, 22 nt, Human
ccagcaugcucagucuaaauug

SEQ ID NO: 1028807 - RNA, 22 nt, Human
uaaagacaauuucgagcuguag

SEQ ID NO: 1028808 - RNA, 22 nt, Human
gcugcccucuguguuuguccuu

SEQ ID NO: 1028809 - RNA, 22 nt, Human
caggccgggcacugcgcuaggu

SEQ ID NO: 1028810 - RNA, 22 nt, Human
ccagucagccaagcugcagcgg

SEQ ID NO: 1028811 - RNA, 22 nt, Human
uguggccaccagagcugcuauu

SEQ ID NO: 1028812 - RNA, 19 nt, Human
cuucuggauccgcagggcc

SEQ ID NO: 1028813 - RNA, 22 nt, Human
ugcagguggcagcggggcacca

SEQ ID NO: 1028814 - RNA, 22 nt, Human
ucauccugaagaaccugcuucc

SEQ ID NO: 1028815 - RNA, 22 nt, Human
ucauuccuccagcgggagucca

SEQ ID NO: 1028816 - RNA, 22 nt, Human
gugccaccagaugcuguugcua

SEQ ID NO: 1028817 - RNA, 22 nt, Human
aggcugagguaggaggaucgcu

SEQ ID NO: 1028818 - RNA, 22 nt, Human
caguggccucuggcuuugcugu

SEQ ID NO: 1028819 - RNA, 18 nt, Human
gugacugccccaaaaggc

SEQ ID NO: 1028820 - RNA, 22 nt, Human
ccucauucucgcguguguuucu

SEQ ID NO: 1028821 - RNA, 22 nt, Human
uccugccaccggggguggcgau

SEQ ID NO: 1028822 - RNA, 22 nt, Human
auuuccuggaggaauggaagca

SEQ ID NO: 1028823 - RNA, 22 nt, Human
ccaguucuuucugugugcaaca

SEQ ID NO: 1028824 - RNA, 22 nt, Human
gcccuguuuucuggguuccuug

SEQ ID NO: 1028825 - RNA, 22 nt, Human
gcucagugaagggugccaagua

SEQ ID NO: 1028826 - RNA, 22 nt, Human
gacagucccccagcagcaaacc

SEQ ID NO: 1028827 - RNA, 22 nt, Human
agauaaaguccaaacuguguag

SEQ ID NO: 1028828 - RNA, 22 nt, Human
ggcuggacuugguccuguuuug

SEQ ID NO: 1028829 - RNA, 22 nt, Human
cuggagggcugcagcgaggcug

SEQ ID NO: 1028830 - RNA, 22 nt, Human
accaggcccuccagcugcgugg

SEQ ID NO: 1028831 - RNA, 22 nt, Human
aggaaagcucccaguagggcuc

SEQ ID NO: 1028832 - RNA, 22 nt, Human
cauggaaggcaaaagacacaga

SEQ ID NO: 1028833 - RNA, 22 nt, Human
acagugucuccugguacccagu

SEQ ID NO: 1028834 - RNA, 22 nt, Human
uaggcacugggcuaggacaggu

SEQ ID NO: 1028835 - RNA, 22 nt, Human
cagagcagaaaccugggugauu

SEQ ID NO: 1028836 - RNA, 22 nt, Human
ugcugcacuuauggcucugagg

SEQ ID NO: 1028837 - RNA, 22 nt, Human
gucuugcacuuaccuaagaacu

SEQ ID NO: 1028838 - RNA, 22 nt, Human
uuugccaguauuuuauugauga

SEQ ID NO: 1028839 - RNA, 22 nt, Human
aggcaguguguagcuggaagag

SEQ ID NO: 1028840 - RNA, 22 nt, Human
ugcauuucccauuguguggcuc

SEQ ID NO: 1028841 - RNA, 22 nt, Human
cucuguccugguuuauacuggc

SEQ ID NO: 1028842 - RNA, 22 nt, Human
ggacugucuccuugcugguagg

SEQ ID NO: 1028843 - RNA, 22 nt, Human
agaauaaccaguguuucacagu

SEQ ID NO: 1028844 - RNA, 22 nt, Human
agccaccaccacugaaagguua

SEQ ID NO: 1028845 - RNA, 22 nt, Human
gaagcgcggcgucggcgugggu

SEQ ID NO: 1028846 - RNA, 22 nt, Human
gaugugugugcccugggccugc

SEQ ID NO: 1028847 - RNA, 22 nt, Human
aaagcugcaagcuccugaggaa

SEQ ID NO: 1028848 - RNA, 22 nt, Human
uugcuggaagguggcuggaauc

SEQ ID NO: 1028849 - RNA, 22 nt, Human
agcagcaggugaccucgaugcc

SEQ ID NO: 1028850 - RNA, 22 nt, Human
ggaagcuguuaucaucuguauc

SEQ ID NO: 1028851 - RNA, 22 nt, Human
uugagcugccuggcuguggcuc

SEQ ID NO: 1028852 - RNA, 22 nt, Human
aauccagguggcggagguugug

SEQ ID NO: 1028853 - RNA, 22 nt, Human
gcacuuguuuuauguuccugag

SEQ ID NO: 1028854 - RNA, 22 nt, Human
gagcuccuauggucgguggcuc

SEQ ID NO: 1028855 - RNA, 22 nt, Human
uacagcgaaaauuuagcuugau

SEQ ID NO: 1028856 - RNA, 22 nt, Human
ccuugcagcauauagagucccu

SEQ ID NO: 1028857 - RNA, 22 nt, Human
acuggauucucuuacacagaug

SEQ ID NO: 1028858 - RNA, 22 nt, Human
ccagcaggagacuagcaacaua

SEQ ID NO: 1028859 - RNA, 22 nt, Human
gccugcacucaaacacucucuu

SEQ ID NO: 1028860 - RNA, 22 nt, Human
gccaugaacucgggcauggaga

SEQ ID NO: 1028861 - RNA, 18 nt, Human
uagcucuuguugguccau

SEQ ID NO: 1028862 - RNA, 22 nt, Human
cuugcuacuaugccuggcuaau

SEQ ID NO: 1028863 - RNA, 22 nt, Human
gcagagauccaggguauagguu

SEQ ID NO: 1028864 - RNA, 22 nt, Human
gcauucuugguggagugcuaaa

SEQ ID NO: 1028865 - RNA, 22 nt, Human
gcccagcugcacccuggugggu

SEQ ID NO: 1028866 - RNA, 22 nt, Human
gcacugguuuauuuaagaacaa

SEQ ID NO: 1028867 - RNA, 22 nt, Human
augcccugggagugcuguacca

SEQ ID NO: 1028868 - RNA, 22 nt, Human
ugggcacagugaguugccuuua

SEQ ID NO: 1028869 - RNA, 22 nt, Human
agccccaggcccggacgccucu

SEQ ID NO: 1028870 - RNA, 22 nt, Human
caggggcggguaaaaggccucc

SEQ ID NO: 1028871 - RNA, 22 nt, Human
acugccaguuguuuuguccagu

SEQ ID NO: 1028872 - RNA, 22 nt, Human
gcucaugggcccagagcagccc

SEQ ID NO: 1028873 - RNA, 22 nt, Human
gacggagcugguugcugcggcu

SEQ ID NO: 1028874 - RNA, 22 nt, Human
ggccgggcuguggagaaggggu

SEQ ID NO: 1028875 - RNA, 22 nt, Human
uuggcagugacugcgggccccg

SEQ ID NO: 1028876 - RNA, 22 nt, Human
gagugugucggucagcguggcg

SEQ ID NO: 1028877 - RNA, 22 nt, Human
ucguggaugcgcagggcggccu

SEQ ID NO: 1028878 - RNA, 22 nt, Human
aagcagcacagcaaugacucua

SEQ ID NO: 1028879 - RNA, 22 nt, Human
uccaaggucagcgagagucacu

SEQ ID NO: 1028880 - RNA, 19 nt, Human
ggcugccuucugcucaucu

SEQ ID NO: 1028881 - RNA, 22 nt, Human
agggugcccaccgcuucugccc

SEQ ID NO: 1028882 - RNA, 22 nt, Human
gaggucaggggagaggcugaug

SEQ ID NO: 1028883 - RNA, 22 nt, Human
cugccguugugaagcucuuaga

SEQ ID NO: 1028884 - RNA, 22 nt, Human
cgggaagguggagguugcagug

SEQ ID NO: 1028885 - RNA, 22 nt, Human
cucaugucggcaggacucgccc

SEQ ID NO: 1028886 - RNA, 22 nt, Human
ucccagugggaagcagcacgcu

SEQ ID NO: 1028887 - RNA, 22 nt, Human
uguucugcaaugcugccuccuu

SEQ ID NO: 1028888 - RNA, 22 nt, Human
cggucaggugcagcguuggcac

SEQ ID NO: 1028889 - RNA, 22 nt, Human
agccuggacagcuacggagaac

SEQ ID NO: 1028890 - RNA, 22 nt, Human
ccaccgaaacgucugcggaucc

SEQ ID NO: 1028891 - RNA, 18 nt, Human
augggcagguaagaucca

SEQ ID NO: 1028892 - RNA, 22 nt, Human
cucagcaacccacacacggucu

SEQ ID NO: 1028893 - RNA, 22 nt, Human
ggcuggcuggcuuagcagagga

SEQ ID NO: 1028894 - RNA, 22 nt, Human
uuccaggcgcacgucggccuua

SEQ ID NO: 1028895 - RNA, 22 nt, Human
agcgcuugccgcacuccaagca

SEQ ID NO: 1028896 - RNA, 22 nt, Human
cuccagcucgcgagcucugcuc

SEQ ID NO: 1028897 - RNA, 22 nt, Human
aggcucgcaugcccugcaccac

SEQ ID NO: 1028898 - RNA, 22 nt, Human
agcucugcuucuugggaagaug

SEQ ID NO: 1028899 - RNA, 22 nt, Human
cugggcuuucaggcccuaaggc

SEQ ID NO: 1028900 - RNA, 22 nt, Human
aaggggggcaccugcaugcccg

SEQ ID NO: 1028901 - RNA, 22 nt, Human
gcggcccggguccccagcagca

SEQ ID NO: 1028902 - RNA, 21 nt, Human
gcaaccagaccacagggcagu

SEQ ID NO: 1028903 - RNA, 22 nt, Human
ugggaagauaugagugaccaac

SEQ ID NO: 1028904 - RNA, 22 nt, Human
cuggccgcaguguggaguugug

SEQ ID NO: 1028905 - RNA, 22 nt, Human
agugucugcgggcagaggagcg

SEQ ID NO: 1028906 - RNA, 22 nt, Human
auuugugggacuauaaugcagg

SEQ ID NO: 1028907 - RNA, 22 nt, Human
cucgccccggcacaguguccgu

SEQ ID NO: 1028908 - RNA, 21 nt, Human
gccaucaccaagcucuucccc

SEQ ID NO: 1028909 - RNA, 22 nt, Human
agcagugccgcaucuugugacc

SEQ ID NO: 1028910 - RNA, 22 nt, Human
gugugcgccgacacagccaggu

SEQ ID NO: 1028911 - RNA, 22 nt, Human
ugugagacguaggccaucgagg

SEQ ID NO: 1028912 - RNA, 22 nt, Human
uggugcugccaccuccucugcu

SEQ ID NO: 1028913 - RNA, 22 nt, Human
uccguuuucacacugcuauaaa

SEQ ID NO: 1028914 - RNA, 22 nt, Human
caggguggcaggcaccauggcc

SEQ ID NO: 1028915 - RNA, 22 nt, Human
agcccugaccuguccuguucug

SEQ ID NO: 1028916 - RNA, 22 nt, Human
aagugcaggucucagcuacucu

SEQ ID NO: 1028917 - RNA, 21 nt, Human
ugcuccaggagggggcagucc

SEQ ID NO: 1028918 - RNA, 21 nt, Human
cuagaaagaauguugucgucu

SEQ ID NO: 1028919 - RNA, 22 nt, Human
ucgcagcacuagcccugcauug

SEQ ID NO: 1028920 - RNA, 22 nt, Human
uccagcucugcugugcgccggu

SEQ ID NO: 1028921 - RNA, 22 nt, Human
ucugcuguuuacugugugauau

SEQ ID NO: 1028922 - RNA, 22 nt, Human
gaccuccguguacaccucccag

SEQ ID NO: 1028923 - RNA, 22 nt, Human
ugaaagaagccucccuuuggag

SEQ ID NO: 1028924 - RNA, 22 nt, Human
cacaggaagcaagccuggggcc

SEQ ID NO: 1028925 - RNA, 22 nt, Human
gccagugccugcugcucagggc

SEQ ID NO: 1028926 - RNA, 22 nt, Human
ugcuugcugaaaggcauuuaga

SEQ ID NO: 1028927 - RNA, 22 nt, Human
uuuacagcuacuguccuauuuc

SEQ ID NO: 1028928 - RNA, 22 nt, Human
uggaaggggccaggcgcggagu

SEQ ID NO: 1028929 - RNA, 22 nt, Human
aagcuuccugcaugggacugcu

SEQ ID NO: 1028930 - RNA, 22 nt, Human
acagggcaccugagguaggaag

SEQ ID NO: 1028931 - RNA, 18 nt, Human
cgauguguaugugauuug

SEQ ID NO: 1028932 - RNA, 21 nt, Human
uccugccuuaguccagagcag

SEQ ID NO: 1028933 - RNA, 22 nt, Human
ucucugucucccguguguccgg

SEQ ID NO: 1028934 - RNA, 22 nt, Human
ccccaacccugguuccguggcg

SEQ ID NO: 1028935 - RNA, 22 nt, Human
uggcagaaugaagacuggggcc

SEQ ID NO: 1028936 - RNA, 18 nt, Human
augcucuagucuuuccug

SEQ ID NO: 1028937 - RNA, 19 nt, Human
ccugcugaagugaugcagc

SEQ ID NO: 1028938 - RNA, 21 nt, Human
agggccagaucaccaaggagc

SEQ ID NO: 1028939 - RNA, 22 nt, Human
gcccagcaccucucucaggguu

SEQ ID NO: 1028940 - RNA, 22 nt, Human
cugcucaauuccggcacgcugg

SEQ ID NO: 1028941 - RNA, 22 nt, Human
cagcuugcacacauauuagacg

SEQ ID NO: 1028942 - RNA, 22 nt, Human
gagcuguguaugcaucauucug

SEQ ID NO: 1028943 - RNA, 22 nt, Human
cugagcugguucucuugugaaa

SEQ ID NO: 1028944 - RNA, 22 nt, Human
uagcaggaggcaguuccucgcu

SEQ ID NO: 1028945 - RNA, 22 nt, Human
caggaacagcaccaggagcuag

SEQ ID NO: 1028946 - RNA, 21 nt, Human
uggcaggcagcuggaagcuug

SEQ ID NO: 1028947 - RNA, 22 nt, Human
uccaagaagcuuacaaucuaau

SEQ ID NO: 1028948 - RNA, 22 nt, Human
uucaguuuugcuuuuaaucaug

SEQ ID NO: 1028949 - RNA, 22 nt, Human
ugcccuccacaguggcuccacc

SEQ ID NO: 1028950 - RNA, 22 nt, Human
ccaggagcccugccacaauggu

SEQ ID NO: 1028951 - RNA, 19 nt, Human
ugcagcuguaugagcuuaa

SEQ ID NO: 1028952 - RNA, 22 nt, Human
uuccuuucucuggacugcagcc

SEQ ID NO: 1028953 - RNA, 22 nt, Human
augcuugcccauguuucugaag

SEQ ID NO: 1028954 - RNA, 22 nt, Human
uagcaggagagaaguuuuaagu

SEQ ID NO: 1028955 - RNA, 22 nt, Human
cugagaguauuggcaggcuugg

SEQ ID NO: 1028956 - RNA, 22 nt, Human
gcugcucucucccuaaguuggg

SEQ ID NO: 1028957 - RNA, 22 nt, Human
acuagugcacauuguuucucaa

SEQ ID NO: 1028958 - RNA, 22 nt, Human
agcugucuaccugcagaguccu

SEQ ID NO: 1028959 - RNA, 22 nt, Human
gccaccagccccaugcgcugug

SEQ ID NO: 1028960 - RNA, 22 nt, Human
gugcugucguggaacugggcug

SEQ ID NO: 1028961 - RNA, 22 nt, Human
augcugagugagugaaacccag

SEQ ID NO: 1028962 - RNA, 22 nt, Human
ccagcagcgauagggugagugc

SEQ ID NO: 1028963 - RNA, 22 nt, Human
gcggggccauguccaacggccu

SEQ ID NO: 1028964 - RNA, 22 nt, Human
ucuuuuaucuguuguguaacaa

SEQ ID NO: 1028965 - RNA, 22 nt, Human
gccucugcaccaguacugugcc

SEQ ID NO: 1028966 - RNA, 22 nt, Human
uguccagcugaaggcagccuca

SEQ ID NO: 1028967 - RNA, 16 nt, Human
guagccguggccgcug

SEQ ID NO: 1028968 - RNA, 22 nt, Human
uccuccuuuccccgcuggagcc

SEQ ID NO: 1028969 - RNA, 22 nt, Human
uucagcacuggacagcgagucu

SEQ ID NO: 1028970 - RNA, 22 nt, Human
uuaagugcuucaagggaagcuc

SEQ ID NO: 1028971 - RNA, 22 nt, Human
cuucacugcagucauggcucug

SEQ ID NO: 1028972 - RNA, 20 nt, Human
uccugggguaagccaugguc

SEQ ID NO: 1028973 - RNA, 21 nt, Human
uaggugggagccccaguaugc

SEQ ID NO: 1028974 - RNA, 18 nt, Human
auuugcaggcaugcaggc

SEQ ID NO: 1028975 - RNA, 22 nt, Human
ccuuugugaauaugcagaaaau

SEQ ID NO: 1028976 - RNA, 22 nt, Human
caagcuuguuucuccugggggu

SEQ ID NO: 1028977 - RNA, 22 nt, Human
guucaguuauuucugaagauau

SEQ ID NO: 1028978 - RNA, 22 nt, Human
uccuggcccuguggccugcagu

SEQ ID NO: 1028979 - RNA, 17 nt, Human
ugcaugcgucugugaua

SEQ ID NO: 1028980 - RNA, 22 nt, Human
cucguugcugaagccaaaguca

SEQ ID NO: 1028981 - RNA, 22 nt, Human
ucggagcgucacuggcuggagg

SEQ ID NO: 1028982 - RNA, 22 nt, Human
auggaguucugccagcgcugcu

SEQ ID NO: 1028983 - RNA, 22 nt, Human
acacggcacuuuaggaaggggc

SEQ ID NO: 1028984 - RNA, 22 nt, Human
ggagcugugcugggugaucagg

SEQ ID NO: 1028985 - RNA, 22 nt, Human
agcugggcuggagcuccaagcg

SEQ ID NO: 1028986 - RNA, 22 nt, Human
gcggggggcaggcaguacguug

SEQ ID NO: 1028987 - RNA, 22 nt, Human
cagagccacugucugccaggca

SEQ ID NO: 1028988 - RNA, 21 nt, Human
uccaggagcacgggacuagga

SEQ ID NO: 1028989 - RNA, 22 nt, Human
gcugcuggcuuccugcuguuuu

SEQ ID NO: 1028990 - RNA, 22 nt, Human
uuccugguaacaaucucaaagu

SEQ ID NO: 1028991 - RNA, 22 nt, Human
aacacugagaggggaguggcac

SEQ ID NO: 1028992 - RNA, 22 nt, Human
cugagcagucuagccagguguu

SEQ ID NO: 1028993 - RNA, 22 nt, Human
gcucguugaaccuguccccgag

SEQ ID NO: 1028994 - RNA, 22 nt, Human
ggagcagggaauuacagcgcag

SEQ ID NO: 1028995 - RNA, 22 nt, Human
gcagagcugucuaagucacuuc

SEQ ID NO: 1028996 - RNA, 22 nt, Human
ugcuugucucucugugcccacu

SEQ ID NO: 1028997 - RNA, 22 nt, Human
agcccucucccuuucuucuuag

SEQ ID NO: 1028998 - RNA, 18 nt, Human
gccagcccuccaaccucc

SEQ ID NO: 1028999 - RNA, 18 nt, Human
cugccuguugcugagagg

SEQ ID NO: 1029000 - RNA, 22 nt, Human
ggccgcggauuuucccgcuggc

SEQ ID NO: 1029001 - RNA, 19 nt, Human
cucugccauuugcugccug

SEQ ID NO: 1029002 - RNA, 22 nt, Human
gccaggaccucagaugcagggc

SEQ ID NO: 1029003 - RNA, 22 nt, Human
gcgcugccucugcucuccccac

SEQ ID NO: 1029004 - RNA, 22 nt, Human
ucacacuuuauuuauuucaugc

SEQ ID NO: 1029005 - RNA, 22 nt, Human
cugagccagcgggcucacuuuu

SEQ ID NO: 1029006 - RNA, 23 nt, Human
gggcagcuuaagcuuguuuuucu

SEQ ID NO: 1029007 - RNA, 22 nt, Human
uccuucaaucacccagugggga

SEQ ID NO: 1029008 - RNA, 22 nt, Human
cugaccaguccuuagcaccugg

SEQ ID NO: 1029009 - RNA, 22 nt, Human
ccagcugcgggcaucgagaguu

SEQ ID NO: 1029010 - RNA, 22 nt, Human
ggcuuuuguuucagcucugcua

SEQ ID NO: 1029011 - RNA, 22 nt, Human
caaauguuugguggcauuuugu

SEQ ID NO: 1029012 - RNA, 22 nt, Human
ccagaacagaccugccugaccu

SEQ ID NO: 1029013 - RNA, 23 nt, Human
ugcaaaauuugcagaguucgaug

SEQ ID NO: 1029014 - RNA, 20 nt, Human
uuugacaccuugggagagac

SEQ ID NO: 1029015 - RNA, 19 nt, Human
uugcuucaugucuuuugcu

SEQ ID NO: 1029016 - RNA, 22 nt, Human
ggaguagcugcauuccgagcac

SEQ ID NO: 1029017 - RNA, 22 nt, Human
ucuccaggggcagggucuggag

SEQ ID NO: 1029018 - RNA, 22 nt, Human
gggcuccagccaggugucccca

SEQ ID NO: 1029019 - RNA, 22 nt, Human
agcaccauugcaaauauggcag

SEQ ID NO: 1029020 - RNA, 22 nt, Human
uugcucuauguuuguaaacaga

SEQ ID NO: 1029021 - RNA, 22 nt, Human
caagaaguugacagccagguga

SEQ ID NO: 1029022 - RNA, 22 nt, Human
guggucaucuaacuaaauuuuc

SEQ ID NO: 1029023 - RNA, 22 nt, Human
caugggaauaaaguuauuucaa

SEQ ID NO: 1029024 - RNA, 22 nt, Human
caggacccaaccucccugcucu

SEQ ID NO: 1029025 - RNA, 22 nt, Human
cagcuccccucuguggggcagu

SEQ ID NO: 1029026 - RNA, 22 nt, Human
cggcuucucgggucggauuccg

SEQ ID NO: 1029027 - RNA, 22 nt, Human
uggcucugccccauaccccugc

SEQ ID NO: 1029028 - RNA, 22 nt, Human
cuccagcagaaagggcgagugg

SEQ ID NO: 1029029 - RNA, 22 nt, Human
agacgcgguggugcaugccugu

SEQ ID NO: 1029030 - RNA, 22 nt, Human
cugcccugcagcuccacggacu

SEQ ID NO: 1029031 - RNA, 20 nt, Human
ccagguggugccuggagagg

SEQ ID NO: 1029032 - RNA, 22 nt, Human
gcgguauuugugugggugucga

SEQ ID NO: 1029033 - RNA, 22 nt, Human
agagaagcagggagucaucugu

SEQ ID NO: 1029034 - RNA, 22 nt, Human
agauuauuuaagacaggaacca

SEQ ID NO: 1029035 - RNA, 22 nt, Human
ugugcugcucucagugacagcc

SEQ ID NO: 1029036 - RNA, 22 nt, Human
cggagcagagccacucgggccg

SEQ ID NO: 1029037 - RNA, 22 nt, Human
gccccucuccuugugcaccugc

SEQ ID NO: 1029038 - RNA, 22 nt, Human
uccugcagccauuagaggucaa

SEQ ID NO: 1029039 - RNA, 22 nt, Human
gagucacauacuauguaauaga

SEQ ID NO: 1029040 - RNA, 22 nt, Human
gcccagcgagcagagguggacg

SEQ ID NO: 1029041 - RNA, 22 nt, Human
ugcaggaacucgaaaacuauag

SEQ ID NO: 1029042 - RNA, 22 nt, Human
gccgugcgugcgcaggugcugu

SEQ ID NO: 1029043 - RNA, 22 nt, Human
agcaccagcucaaggugcaccu

SEQ ID NO: 1029044 - RNA, 22 nt, Human
acggccgaugacuccagcaugg

SEQ ID NO: 1029045 - RNA, 22 nt, Human
ccucuggccuaggccgggagag

SEQ ID NO: 1029046 - RNA, 22 nt, Human
uaccaggagcccccuucugguc

SEQ ID NO: 1029047 - RNA, 22 nt, Human
gcagagcugguacuugagccug

SEQ ID NO: 1029048 - RNA, 22 nt, Human
gagugcucgggccucugccugc

SEQ ID NO: 1029049 - RNA, 22 nt, Human
uaguggggaaggaggacaagaa

SEQ ID NO: 1029050 - RNA, 22 nt, Human
ggcggcacgcaggcugcugucg

SEQ ID NO: 1029051 - RNA, 22 nt, Human
uagcccuugaugcugcggccag

SEQ ID NO: 1029052 - RNA, 22 nt, Human
ccacccagccagaugcaggaag

SEQ ID NO: 1029053 - RNA, 22 nt, Human
ucuccccaguauggauucucug

SEQ ID NO: 1029054 - RNA, 22 nt, Human
gaggagagaagcuaacggugcu

SEQ ID NO: 1029055 - RNA, 22 nt, Human
aggagcggauguguccugccag

SEQ ID NO: 1029056 - RNA, 22 nt, Human
ucccagccugacagugcaucaa

SEQ ID NO: 1029057 - RNA, 22 nt, Human
ggcggccugugggucggccuca

SEQ ID NO: 1029058 - RNA, 22 nt, Human
aacaugaugacauuguaagcuu

SEQ ID NO: 1029059 - RNA, 18 nt, Human
agggagagaccgcggguc

SEQ ID NO: 1029060 - RNA, 22 nt, Human
cauggggaugaggcugagacuu

SEQ ID NO: 1029061 - RNA, 22 nt, Human
cccagcauuucugggcugcacu

SEQ ID NO: 1029062 - RNA, 17 nt, Human
gccuggcccagccuggc

SEQ ID NO: 1029063 - RNA, 22 nt, Human
ugcuccaggcugcugaagaucu

SEQ ID NO: 1029064 - RNA, 22 nt, Human
cagcuggaggagcagcuuccag

SEQ ID NO: 1029065 - RNA, 20 nt, Human
cucuuuucacucucaguggu

SEQ ID NO: 1029066 - RNA, 22 nt, Human
gcugccaccguggagaugagug

SEQ ID NO: 1029067 - RNA, 22 nt, Human
cugagcacguaguuagggucca

SEQ ID NO: 1029068 - RNA, 22 nt, Human
gccagguugcugacgacgaucu

SEQ ID NO: 1029069 - RNA, 16 nt, Human
ugcggcaacuugcggc

SEQ ID NO: 1029070 - RNA, 22 nt, Human
gugcugauugggagcugggauu

SEQ ID NO: 1029071 - RNA, 22 nt, Human
gccuggcuaagcagaaggaccc

SEQ ID NO: 1029072 - RNA, 22 nt, Human
uaaccuguuaagggcugaccca

SEQ ID NO: 1029073 - RNA, 22 nt, Human
cagaggccccauuggcugugcg

SEQ ID NO: 1029074 - RNA, 22 nt, Human
caacauuucaaggucuuuagga

SEQ ID NO: 1029075 - RNA, 20 nt, Human
uugagcagcagugcuguguc

SEQ ID NO: 1029076 - RNA, 20 nt, Human
guggcagugguggcagcagu

SEQ ID NO: 1029077 - RNA, 22 nt, Human
auggcugugguaucagacgcag

SEQ ID NO: 1029078 - RNA, 22 nt, Human
aaucaggagugugcacuuugau

SEQ ID NO: 1029079 - RNA, 21 nt, Human
uuccuccucuggagaagaaga

SEQ ID NO: 1029080 - RNA, 22 nt, Human
ucccuggcacaagaaggcuguc

SEQ ID NO: 1029081 - RNA, 22 nt, Human
ggagggaguuucauuccugccc

SEQ ID NO: 1029082 - RNA, 22 nt, Human
agccccaguucccuggaagucu

SEQ ID NO: 1029083 - RNA, 22 nt, Human
aaucccuccccaggcaaguccu

SEQ ID NO: 1029084 - RNA, 21 nt, Human
gcugcucgagauccagugcuu

SEQ ID NO: 1029085 - RNA, 22 nt, Human
aagcauuuuagauaaagcauca

SEQ ID NO: 1029086 - RNA, 22 nt, Human
ccugcugaggucagccacccaa

SEQ ID NO: 1029087 - RNA, 22 nt, Human
cacagagagcuacgugcagcgu

SEQ ID NO: 1029088 - RNA, 22 nt, Human
aggacucaucccugcuugucag

SEQ ID NO: 1029089 - RNA, 22 nt, Human
aacacaguuucugcauugguag

SEQ ID NO: 1029090 - RNA, 22 nt, Human
cucugcaggcacccaggguggg

SEQ ID NO: 1029091 - RNA, 22 nt, Human
gucugcacgugccagggagggg

SEQ ID NO: 1029092 - RNA, 22 nt, Human
agggcccaccuuggugcugagg

SEQ ID NO: 1029093 - RNA, 22 nt, Human
uagcaucuguacugacauaauc

SEQ ID NO: 1029094 - RNA, 22 nt, Human
aaagugcugggauuacaggugu

SEQ ID NO: 1029095 - RNA, 22 nt, Human
cagggagcuggugccagccgac

SEQ ID NO: 1029096 - RNA, 22 nt, Human
ggcugcugcccaccccugcaug

SEQ ID NO: 1029097 - RNA, 22 nt, Human
aaggcagcaugaaucccuguac

SEQ ID NO: 1029098 - RNA, 22 nt, Human
gcugucugcugggucgcucagg

SEQ ID NO: 1029099 - RNA, 22 nt, Human
ggcuuccuccuuccugcuguca

SEQ ID NO: 1029100 - RNA, 22 nt, Human
gccaaaguccuccagccaugca

SEQ ID NO: 1029101 - RNA, 22 nt, Human
cuggcuccauccuugagcucug

SEQ ID NO: 1029102 - RNA, 22 nt, Human
ucucugagguuguuuccagcac

SEQ ID NO: 1029103 - RNA, 22 nt, Human
gaccugugcagugacugguggc

SEQ ID NO: 1029104 - RNA, 22 nt, Human
cuucuggcguuggaggucugag

SEQ ID NO: 1029105 - RNA, 22 nt, Human
uccaggaguccuggguggcccc

SEQ ID NO: 1029106 - RNA, 22 nt, Human
ggcccucucuacauguuagacg

SEQ ID NO: 1029107 - RNA, 22 nt, Human
agcaggaggagagccuggcggu

SEQ ID NO: 1029108 - RNA, 22 nt, Human
gcuuccaaugcuucuaucacau

SEQ ID NO: 1029109 - RNA, 22 nt, Human
ccugcgcgucugggucugucuc

SEQ ID NO: 1029110 - RNA, 22 nt, Human
uuucuuggucuucccgaccugg

SEQ ID NO: 1029111 - RNA, 22 nt, Human
gccacaggucggcuagaggguc

SEQ ID NO: 1029112 - RNA, 22 nt, Human
aggggcacgaguagagcucuag

SEQ ID NO: 1029113 - RNA, 22 nt, Human
gggcagcaucaggaggggcuuu

SEQ ID NO: 1029114 - RNA, 22 nt, Human
agcagcaccuguccucgcugcu

SEQ ID NO: 1029115 - RNA, 22 nt, Human
uugaccacugaaugguucugaa

SEQ ID NO: 1029116 - RNA, 22 nt, Human
gcuaggaguggugggucaagga

SEQ ID NO: 1029117 - RNA, 22 nt, Human
acagacacaggcguggagucgc

SEQ ID NO: 1029118 - RNA, 22 nt, Human
gcccagaguuugaagauacagu

SEQ ID NO: 1029119 - RNA, 22 nt, Human
agcuccagggaaagaguggauc

SEQ ID NO: 1029120 - RNA, 22 nt, Human
cgcagcugcugcucugaaacag

SEQ ID NO: 1029121 - RNA, 22 nt, Human
uucuuggcacagaugagauucu

SEQ ID NO: 1029122 - RNA, 22 nt, Human
ggcaguggcuccucucuacucc

SEQ ID NO: 1029123 - RNA, 22 nt, Human
aggaggguggggucugccuguc

SEQ ID NO: 1029124 - RNA, 22 nt, Human
ugcacagagggaggcauaaaau

SEQ ID NO: 1029125 - RNA, 22 nt, Human
uuuuuggguccaggcuguaucu

SEQ ID NO: 1029126 - RNA, 22 nt, Human
augaaacucuagcuuucagcac

SEQ ID NO: 1029127 - RNA, 22 nt, Human
ccaggacaagccagagggacag

SEQ ID NO: 1029128 - RNA, 22 nt, Human
cuguggcugcgcccugggggag

SEQ ID NO: 1029129 - RNA, 22 nt, Human
agcugcaccggcuggaccacug

SEQ ID NO: 1029130 - RNA, 22 nt, Human
gcagacccugaacugggcaugg

SEQ ID NO: 1029131 - RNA, 22 nt, Human
aggugccugucgucucugguua

SEQ ID NO: 1029132 - RNA, 22 nt, Human
uggccagucuuagcugugccug

SEQ ID NO: 1029133 - RNA, 22 nt, Human
acaggacagucuaguaacagua

SEQ ID NO: 1029134 - RNA, 19 nt, Human
agcagccaucgaccaugga

SEQ ID NO: 1029135 - RNA, 22 nt, Human
gaggcuguaacuugggcacugg

SEQ ID NO: 1029136 - RNA, 22 nt, Human
cucaucuggcuucaguaacagu

SEQ ID NO: 1029137 - RNA, 22 nt, Human
cuugcuuuaucugguuucucau

SEQ ID NO: 1029138 - RNA, 22 nt, Human
uucaaacaguguagaauauaug

SEQ ID NO: 1029139 - RNA, 22 nt, Human
uuggcgcccaggacgccgccgc

SEQ ID NO: 1029140 - RNA, 23 nt, Human
uguacacuuggucaagguacuua

SEQ ID NO: 1029141 - RNA, 22 nt, Human
uggcacguuggauugggaguuc

SEQ ID NO: 1029142 - RNA, 22 nt, Human
ugcucagaauugcgcuggugga

SEQ ID NO: 1029143 - RNA, 22 nt, Human
agcccgcaucucgcuaaagaua

SEQ ID NO: 1029144 - RNA, 22 nt, Human
ugggcccaucauugcugugggc

SEQ ID NO: 1029145 - RNA, 22 nt, Human
gcacuucaccacuguccugguu

SEQ ID NO: 1029146 - RNA, 22 nt, Human
cggucguaguucuucagcaggu

SEQ ID NO: 1029147 - RNA, 22 nt, Human
agcacugugagcaccagcacgc

SEQ ID NO: 1029148 - RNA, 22 nt, Human
uuuccuguccugguacuuggca

SEQ ID NO: 1029149 - RNA, 22 nt, Human
gcagagcacccugcagugguau

SEQ ID NO: 1029150 - RNA, 22 nt, Human
ugcacgugugagcauucacaug

SEQ ID NO: 1029151 - RNA, 22 nt, Human
gggcuccagaggcucacccugg

SEQ ID NO: 1029152 - RNA, 22 nt, Human
aaugcaaugcagcaccuccuug

SEQ ID NO: 1029153 - RNA, 20 nt, Human
ccacaguggagacuggagac

SEQ ID NO: 1029154 - RNA, 22 nt, Human
cuucuggguauuccagauaccu

SEQ ID NO: 1029155 - RNA, 22 nt, Human
gcaggaguguggugggacaucc

SEQ ID NO: 1029156 - RNA, 22 nt, Human
uggcggugacggcggcgccugg

SEQ ID NO: 1029157 - RNA, 22 nt, Human
gcaguccuuaggagaggaagua

SEQ ID NO: 1029158 - RNA, 22 nt, Human
agggccagcagcuuggccaacc

SEQ ID NO: 1029159 - RNA, 22 nt, Human
uagcgggucacccugcugugaa

SEQ ID NO: 1029160 - RNA, 22 nt, Human
aaguccagguccucauuccauc

SEQ ID NO: 1029161 - RNA, 22 nt, Human
cagggcucgcucgcucgcucgc

SEQ ID NO: 1029162 - RNA, 22 nt, Human
aaauuaacuaucacuuuuguga

SEQ ID NO: 1029163 - RNA, 22 nt, Human
aucugucccuccucacagccuc

SEQ ID NO: 1029164 - RNA, 22 nt, Human
agggugugcuguugggucuuuc

SEQ ID NO: 1029165 - RNA, 22 nt, Human
aggacaaaggaccagaucugga

SEQ ID NO: 1029166 - RNA, 23 nt, Human
gccagagcugccugcccuugcug

SEQ ID NO: 1029167 - RNA, 22 nt, Human
aggcucccaagcacugacccca

SEQ ID NO: 1029168 - RNA, 22 nt, Human
gugagcugggugaaugguaggg

SEQ ID NO: 1029169 - RNA, 22 nt, Human
gggagagcgcgcuagggccgag

SEQ ID NO: 1029170 - RNA, 22 nt, Human
agauugucauugacgaugagca

SEQ ID NO: 1029171 - RNA, 22 nt, Human
caugcagugcuuugcgccgggc

SEQ ID NO: 1029172 - RNA, 22 nt, Human
auugacuuucccuucuccucau

SEQ ID NO: 1029173 - RNA, 22 nt, Human
gaggggccuggcgaggacaugu

SEQ ID NO: 1029174 - RNA, 22 nt, Human
uacuuugucauucuaaccuucc

SEQ ID NO: 1029175 - RNA, 22 nt, Human
acaagcgggccacagugcuggu

SEQ ID NO: 1029176 - RNA, 22 nt, Human
cugggcuguuuguucuggucuc

SEQ ID NO: 1029177 - RNA, 22 nt, Human
ucuggaaggggaucugugguca

SEQ ID NO: 1029178 - RNA, 22 nt, Human
gggagcuggagcuggaagacuc

SEQ ID NO: 1029179 - RNA, 22 nt, Human
aaagcugggcuggccaacccag

SEQ ID NO: 1029180 - RNA, 22 nt, Human
guuguacauaugaggauaaguu

SEQ ID NO: 1029181 - RNA, 22 nt, Human
uugggugcugucauggggcacg

SEQ ID NO: 1029182 - RNA, 22 nt, Human
uucuccagcucaucagggaggg

SEQ ID NO: 1029183 - RNA, 22 nt, Human
acagugcuaucaauagcuagaa

SEQ ID NO: 1029184 - RNA, 22 nt, Human
cggcagcgguuggagguuguag

SEQ ID NO: 1029185 - RNA, 22 nt, Human
gcaugcaggaagggcuugggga

SEQ ID NO: 1029186 - RNA, 23 nt, Human
acaaguguuuccaauauggcugg

SEQ ID NO: 1029187 - RNA, 22 nt, Human
gugcagcugggcgcugaccuuc

SEQ ID NO: 1029188 - RNA, 22 nt, Human
gccugagccgccugagcggcgg

SEQ ID NO: 1029189 - RNA, 22 nt, Human
cugguggaauggcagagggaac

SEQ ID NO: 1029190 - RNA, 22 nt, Human
uggcccgggaguuuugaagagu

SEQ ID NO: 1029191 - RNA, 22 nt, Human
gcugucccgaaccccugguaau

SEQ ID NO: 1029192 - RNA, 22 nt, Human
acugagcaggguuccgcaugga

SEQ ID NO: 1029193 - RNA, 23 nt, Human
ggacaugucucuggguauuuuga

SEQ ID NO: 1029194 - RNA, 22 nt, Human
gcccagccccuggguggacgug

SEQ ID NO: 1029195 - RNA, 22 nt, Human
ucccacacagcccgcucaccgg

SEQ ID NO: 1029196 - RNA, 22 nt, Human
gucugugcaguuacuagcuggu

SEQ ID NO: 1029197 - RNA, 22 nt, Human
ggcucuggcgagcuuuaguaca

SEQ ID NO: 1029198 - RNA, 22 nt, Human
aggaauguggaagguggcggcg

SEQ ID NO: 1029199 - RNA, 22 nt, Human
gaggggcugggguugacuccaa

SEQ ID NO: 1029200 - RNA, 22 nt, Human
uguuggcagugcuacagucagu

SEQ ID NO: 1029201 - RNA, 22 nt, Human
aguggcuguuccaggugaggac

SEQ ID NO: 1029202 - RNA, 22 nt, Human
ugagcugcuucuuauaaugugu

SEQ ID NO: 1029203 - RNA, 22 nt, Human
uagcugcuugaccaggcagugg

SEQ ID NO: 1029204 - RNA, 22 nt, Human
cagcuccagccaccggggggug

SEQ ID NO: 1029205 - RNA, 22 nt, Human
uagggcucugagaguucagccu

SEQ ID NO: 1029206 - RNA, 22 nt, Human
cagcccacugccucugugguag

SEQ ID NO: 1029207 - RNA, 22 nt, Human
auguuguugaacucuuugcaug

SEQ ID NO: 1029208 - RNA, 22 nt, Human
gcagugacagacaacuguuuga

SEQ ID NO: 1029209 - RNA, 22 nt, Human
ucuguggcaaacacagugacca

SEQ ID NO: 1029210 - RNA, 22 nt, Human
auagcuuugagggcuccuuagg

SEQ ID NO: 1029211 - RNA, 22 nt, Human
ucccagucuagagccggauugg

SEQ ID NO: 1029212 - RNA, 22 nt, Human
acuggaaaguauucuuucacug

SEQ ID NO: 1029213 - RNA, 22 nt, Human
agcaggcauuugauauauauuu

SEQ ID NO: 1029214 - RNA, 22 nt, Human
uugcuugaacccaggaagugga

SEQ ID NO: 1029215 - RNA, 22 nt, Human
uuugcagagugcagaagcaucu

SEQ ID NO: 1029216 - RNA, 22 nt, Human
agcuccugaaaauccagacugg

SEQ ID NO: 1029217 - RNA, 22 nt, Human
ucugcuggaaaaccagggaauu

SEQ ID NO: 1029218 - RNA, 22 nt, Human
ucagaagcauccauuucaccac

SEQ ID NO: 1029219 - RNA, 22 nt, Human
uuccuggggacuuaccgucauu

SEQ ID NO: 1029220 - RNA, 22 nt, Human
gggagccagcagggcauggagc

SEQ ID NO: 1029221 - RNA, 22 nt, Human
gggagcugaacugcugaaguug

SEQ ID NO: 1029222 - RNA, 22 nt, Human
gguccccguggaggcuggagcg

SEQ ID NO: 1029223 - RNA, 22 nt, Human
aaaaugcucaucagcgauggcu

SEQ ID NO: 1029224 - RNA, 22 nt, Human
guggacagacauaauccuaauu

SEQ ID NO: 1029225 - RNA, 22 nt, Human
agagcgagucuggggcucggau

SEQ ID NO: 1029226 - RNA, 22 nt, Human
cuguguacccacgugggcaccc

SEQ ID NO: 1029227 - RNA, 22 nt, Human
agcggcgccggagggaggugcg

SEQ ID NO: 1029228 - RNA, 22 nt, Human
ccugugggcgcagcuggaguca

SEQ ID NO: 1029229 - RNA, 22 nt, Human
gcagauggauguggacggcgcc

SEQ ID NO: 1029230 - RNA, 22 nt, Human
cagaaagcaguugucaaugggc

SEQ ID NO: 1029231 - RNA, 22 nt, Human
cagcugccuguauuguccucau

SEQ ID NO: 1029232 - RNA, 22 nt, Human
uggcaggaaaaagggccagagg

SEQ ID NO: 1029233 - RNA, 19 nt, Human
ccauucugucucugccaca

SEQ ID NO: 1029234 - RNA, 22 nt, Human
cuguccagcgacuaggggaugg

SEQ ID NO: 1029235 - RNA, 20 nt, Human
cucagugcuuucauugccuc

SEQ ID NO: 1029236 - RNA, 22 nt, Human
acagcuggccgaggcucaggga

SEQ ID NO: 1029237 - RNA, 22 nt, Human
gggagggcuuggacccagaugu

SEQ ID NO: 1029238 - RNA, 22 nt, Human
ccugugcaugccaggguacacc

SEQ ID NO: 1029239 - RNA, 22 nt, Human
auuguuacuggguuaauuugga

SEQ ID NO: 1029240 - RNA, 22 nt, Human
uggcacagcuugucauaaacuc

SEQ ID NO: 1029241 - RNA, 22 nt, Human
caggccuugaaggccugcggga

SEQ ID NO: 1029242 - RNA, 22 nt, Human
gagguccacugaggcaacaggg

SEQ ID NO: 1029243 - RNA, 17 nt, Human
agccugcugaucucaca

SEQ ID NO: 1029244 - RNA, 22 nt, Human
caaugcacauggacaucaggcu

SEQ ID NO: 1029245 - RNA, 22 nt, Human
aggugacaucccggcagcagag

SEQ ID NO: 1029246 - RNA, 22 nt, Human
uggcagcauuuuuuccagaaca

SEQ ID NO: 1029247 - RNA, 22 nt, Human
ugacucacuuaauuuacaaguc

SEQ ID NO: 1029248 - RNA, 21 nt, Human
ugcaaugcauugacagcagca

SEQ ID NO: 1029249 - RNA, 22 nt, Human
caaugcagauaccuuccagaga

SEQ ID NO: 1029250 - RNA, 19 nt, Human
ggguccauggugucaagga

SEQ ID NO: 1029251 - RNA, 22 nt, Human
gaggaggcuuccgggaggcacg

SEQ ID NO: 1029252 - RNA, 22 nt, Human
uuugagaagauaggggaauacu

SEQ ID NO: 1029253 - RNA, 23 nt, Human
gggcugcuccaggccaaggcugg

SEQ ID NO: 1029254 - RNA, 22 nt, Human
acugggcaaggauaugaugggu

SEQ ID NO: 1029255 - RNA, 22 nt, Human
agccagugucgugugacaugag

SEQ ID NO: 1029256 - RNA, 22 nt, Human
uacaccagauuauuuauaacau

SEQ ID NO: 1029257 - RNA, 22 nt, Human
ucugcgcccugucgccugcucc

SEQ ID NO: 1029258 - RNA, 18 nt, Human
gagagcccagcagguggu

SEQ ID NO: 1029259 - RNA, 22 nt, Human
cuggccucacagaggcuaagcc

SEQ ID NO: 1029260 - RNA, 22 nt, Human
cugggccacaagccugugugau

SEQ ID NO: 1029261 - RNA, 22 nt, Human
acgccucugcagcugccgggcc

SEQ ID NO: 1029262 - RNA, 22 nt, Human
gguagacaacuuuguaauagcc

SEQ ID NO: 1029263 - RNA, 22 nt, Human
ugcaggcuggaggagggacuaa

SEQ ID NO: 1029264 - RNA, 22 nt, Human
uuccuggugguggugacagcac

SEQ ID NO: 1029265 - RNA, 22 nt, Human
gcacccagggcaggaagugagg

SEQ ID NO: 1029266 - RNA, 19 nt, Human
caggucuucuuggaggacu

SEQ ID NO: 1029267 - RNA, 22 nt, Human
cuguuccuccaccucaacaaac

SEQ ID NO: 1029268 - RNA, 22 nt, Human
gggcugcacuagggcaagguga

SEQ ID NO: 1029269 - RNA, 22 nt, Human
aagcuggccuguaccugcugag

SEQ ID NO: 1029270 - RNA, 22 nt, Human
ggagaugccuuguuucaggaac

SEQ ID NO: 1029271 - RNA, 22 nt, Human
ggaauccugguguuuucugccu

SEQ ID NO: 1029272 - RNA, 22 nt, Human
agcgcuggugaucucuauuuug

SEQ ID NO: 1029273 - RNA, 22 nt, Human
auggagcagcagaaggggcuug

SEQ ID NO: 1029274 - RNA, 21 nt, Human
agagacugucacugcaguacc

SEQ ID NO: 1029275 - RNA, 22 nt, Human
gggggaaaguggagguucguga

SEQ ID NO: 1029276 - RNA, 22 nt, Human
gugcugagugcagagugcagag

SEQ ID NO: 1029277 - RNA, 22 nt, Human
gggagcugaaggagccggcggg

SEQ ID NO: 1029278 - RNA, 22 nt, Human
gcucugugccccugccguggac

SEQ ID NO: 1029279 - RNA, 22 nt, Human
cuggccagggugcgaucguggu

SEQ ID NO: 1029280 - RNA, 22 nt, Human
uuagcaaacaucuucgugugag

SEQ ID NO: 1029281 - RNA, 22 nt, Human
ugggcagggagcuggaaccaca

SEQ ID NO: 1029282 - RNA, 22 nt, Human
gccuggcaaggcccuguugacu

SEQ ID NO: 1029283 - RNA, 22 nt, Human
auaggacuuuguaucaggauga

SEQ ID NO: 1029284 - RNA, 22 nt, Human
cuggagcucuguguguuccuga

SEQ ID NO: 1029285 - RNA, 22 nt, Human
ugaggauggaaugcugugcaag

SEQ ID NO: 1029286 - RNA, 22 nt, Human
ccaggcccugccugugguuccu

SEQ ID NO: 1029287 - RNA, 22 nt, Human
auuuacucgugcuucauugaau

SEQ ID NO: 1029288 - RNA, 22 nt, Human
cugacucccaaagaggacgcgu

SEQ ID NO: 1029289 - RNA, 22 nt, Human
augcugugccuggaaagcggcu

SEQ ID NO: 1029290 - RNA, 21 nt, Human
agccaggcaagcacccccacu

SEQ ID NO: 1029291 - RNA, 22 nt, Human
agacugugagaagauggcugcg

SEQ ID NO: 1029292 - RNA, 22 nt, Human
gacuggcucuaucaggauaaau

SEQ ID NO: 1029293 - RNA, 22 nt, Human
gcugcuccgcagagugugugug

SEQ ID NO: 1029294 - RNA, 22 nt, Human
cagugcccuuccaggacugcag

SEQ ID NO: 1029295 - RNA, 22 nt, Human
cugcagggcccaaggucaacgg

SEQ ID NO: 1029296 - RNA, 22 nt, Human
cuccuuggguucuuucgguucc

SEQ ID NO: 1029297 - RNA, 22 nt, Human
ucucuccuccacaccgggugcu

SEQ ID NO: 1029298 - RNA, 22 nt, Human
caggccacacggcggcucccug

SEQ ID NO: 1029299 - RNA, 22 nt, Human
uccaggagcucauccacgucaa

SEQ ID NO: 1029300 - RNA, 22 nt, Human
ugcucccaaaccugacaggcuc

SEQ ID NO: 1029301 - RNA, 22 nt, Human
aagcccgguugggaacguggug

SEQ ID NO: 1029302 - RNA, 22 nt, Human
uguuaccauaggucagaacguu

SEQ ID NO: 1029303 - RNA, 22 nt, Human
ugacaggcuugcuaagacauag

SEQ ID NO: 1029304 - RNA, 22 nt, Human
uugaggucuggcaguagcguug

SEQ ID NO: 1029305 - RNA, 22 nt, Human
cguggggcggguggacacuugc

SEQ ID NO: 1029306 - RNA, 19 nt, Human
guuggcacugaaaauggcu

SEQ ID NO: 1029307 - RNA, 22 nt, Human
ggagcggagggagggccacugu

SEQ ID NO: 1029308 - RNA, 22 nt, Human
ucagcccggguucgcaaacacu

SEQ ID NO: 1029309 - RNA, 22 nt, Human
uccaaggacauuguucuaguug

SEQ ID NO: 1029310 - RNA, 22 nt, Human
ucucugguuaugucauuaagca

SEQ ID NO: 1029311 - RNA, 22 nt, Human
gcaaugagcacccagagggcag

SEQ ID NO: 1029312 - RNA, 22 nt, Human
gcgagucgccgcugcagcccua

SEQ ID NO: 1029313 - RNA, 19 nt, Human
gaugcucauucagguggaa

SEQ ID NO: 1029314 - RNA, 22 nt, Human
gugccgcuggagcuggaauuga

SEQ ID NO: 1029315 - RNA, 22 nt, Human
cuucucggccguguggaugcgc

SEQ ID NO: 1029316 - RNA, 22 nt, Human
caaagccaggcuuucuaaugua

SEQ ID NO: 1029317 - RNA, 19 nt, Human
acacaccagugccugugac

SEQ ID NO: 1029318 - RNA, 22 nt, Human
cacgcacgcuggguggaggcgc

SEQ ID NO: 1029319 - RNA, 22 nt, Human
aagccgggccugagaaaugaca

SEQ ID NO: 1029320 - RNA, 22 nt, Human
cuugaggcugcacuccagggcc

SEQ ID NO: 1029321 - RNA, 22 nt, Human
aaggcacuugcccagagcugca

SEQ ID NO: 1029322 - RNA, 22 nt, Human
uuccuggccucuuccaccacca

SEQ ID NO: 1029323 - RNA, 20 nt, Human
cugaccagcagccugucucc

SEQ ID NO: 1029324 - RNA, 22 nt, Human
gugcucacugugagacguccug

SEQ ID NO: 1029325 - RNA, 22 nt, Human
uucuggagacccagcaacaggg

SEQ ID NO: 1029326 - RNA, 22 nt, Human
agcaggggcaggguuuugugcu

SEQ ID NO: 1029327 - RNA, 22 nt, Human
uggcaugcaagaggaggcuccc

SEQ ID NO: 1029328 - RNA, 22 nt, Human
aggacagcagugcuggcacuug

SEQ ID NO: 1029329 - RNA, 22 nt, Human
cucugggguggaggaggcugac

SEQ ID NO: 1029330 - RNA, 22 nt, Human
uguacauauucaagcacuucua

SEQ ID NO: 1029331 - RNA, 22 nt, Human
agccagucggggccaugcuggg

SEQ ID NO: 1029332 - RNA, 22 nt, Human
gcagagucagguccaaggacug

SEQ ID NO: 1029333 - RNA, 22 nt, Human
cagcccaggacugcagguguuu

SEQ ID NO: 1029334 - RNA, 22 nt, Human
ugucuucauuccccaugaaguc

SEQ ID NO: 1029335 - RNA, 22 nt, Human
uggcccaggugcacccagaggc

SEQ ID NO: 1029336 - RNA, 22 nt, Human
uccugggcccuccggaucaggu

SEQ ID NO: 1029337 - RNA, 22 nt, Human
cuuccagcugauuggcauccag

SEQ ID NO: 1029338 - RNA, 21 nt, Human
gcccacagugaggaggauccc

SEQ ID NO: 1029339 - RNA, 22 nt, Human
ggugggugagcccugggagcug

SEQ ID NO: 1029340 - RNA, 22 nt, Human
accauccuuuaguuugcguuuc

SEQ ID NO: 1029341 - RNA, 22 nt, Human
ucugcacccugugguccucuag

SEQ ID NO: 1029342 - RNA, 22 nt, Human
gagcuguucugugauugaucua

SEQ ID NO: 1029343 - RNA, 22 nt, Human
aggaagagcuggaccagaggac

SEQ ID NO: 1029344 - RNA, 22 nt, Human
ugcccugcagacccugcagugu

SEQ ID NO: 1029345 - RNA, 22 nt, Human
uguguggcaagcuguaugcuag

SEQ ID NO: 1029346 - RNA, 22 nt, Human
cuaccugguacauagaaauguu

SEQ ID NO: 1029347 - RNA, 22 nt, Human
acaucguguaucacugaaccuu

SEQ ID NO: 1029348 - RNA, 22 nt, Human
gcugggcaggccucgugagggc

SEQ ID NO: 1029349 - RNA, 22 nt, Human
uccuggccucugagucaagaac

SEQ ID NO: 1029350 - RNA, 21 nt, Human
acauguccccuaugcuuaagg

SEQ ID NO: 1029351 - RNA, 22 nt, Human
agcacuggaaaguuaagaguuu

SEQ ID NO: 1029352 - RNA, 22 nt, Human
ccuuuuggccaggucagugcag

SEQ ID NO: 1029353 - RNA, 20 nt, Human
cagugcccguggaaaagaug

SEQ ID NO: 1029354 - RNA, 22 nt, Human
acauauuuugaaagcuuucuaa

SEQ ID NO: 1029355 - RNA, 22 nt, Human
gcgaguccacuggggggcgcag

SEQ ID NO: 1029356 - RNA, 22 nt, Human
ccucuucuaggacguccuugug

SEQ ID NO: 1029357 - RNA, 22 nt, Human
auuuacagccuugccaucuaua

SEQ ID NO: 1029358 - RNA, 22 nt, Human
gccagagggauuccuggugugu

SEQ ID NO: 1029359 - RNA, 19 nt, Human
uggugcgcuguuccugagc

SEQ ID NO: 1029360 - RNA, 22 nt, Human
accugguaaccugccugacuaa

SEQ ID NO: 1029361 - RNA, 22 nt, Human
uggcuggcuguccagcugggca

SEQ ID NO: 1029362 - RNA, 22 nt, Human
aagcacagggacucaggaccgg

SEQ ID NO: 1029363 - RNA, 22 nt, Human
ucuccagaguaaccuuggagca

SEQ ID NO: 1029364 - RNA, 21 nt, Human
acccugcuuuaugccguccuc

SEQ ID NO: 1029365 - RNA, 22 nt, Human
ucauggcucuaaagacauagau

SEQ ID NO: 1029366 - RNA, 23 nt, Human
cuuuccuuucuuugacacccagc

SEQ ID NO: 1029367 - RNA, 22 nt, Human
gccagcuagaggcugcagugca

SEQ ID NO: 1029368 - RNA, 22 nt, Human
ccgcgagguggagguugcagug

SEQ ID NO: 1029369 - RNA, 22 nt, Human
ggggagaguauuuuauucaagu

SEQ ID NO: 1029370 - RNA, 22 nt, Human
ugugacagugccagcuucauag

SEQ ID NO: 1029371 - RNA, 22 nt, Human
gaccaggagauuugagcuaggc

SEQ ID NO: 1029372 - RNA, 23 nt, Human
agacagaggcugaggcuggccgc

SEQ ID NO: 1029373 - RNA, 22 nt, Human
gguguugcaguugaagacuggu

SEQ ID NO: 1029374 - RNA, 22 nt, Human
ggcucuguaaguguugcaggua

SEQ ID NO: 1029375 - RNA, 23 nt, Human
ugggcagcuucugcaugcccacc

SEQ ID NO: 1029376 - RNA, 22 nt, Human
cagcaguguacaaggugucaga

SEQ ID NO: 1029377 - RNA, 22 nt, Human
ugcgccugcgcaaagguuucug

SEQ ID NO: 1029378 - RNA, 22 nt, Human
agugcuuuauguuguugugcaa

SEQ ID NO: 1029379 - RNA, 22 nt, Human
ugcaaggcacccacucugcuuu

SEQ ID NO: 1029380 - RNA, 22 nt, Human
ggcagagcuugcagugagccga

SEQ ID NO: 1029381 - RNA, 22 nt, Human
gaggcuggacgugcauuucuac

SEQ ID NO: 1029382 - RNA, 22 nt, Human
cgggagccucugggucacacug

SEQ ID NO: 1029383 - RNA, 22 nt, Human
gacacuacguggcucacauuuc

SEQ ID NO: 1029384 - RNA, 18 nt, Human
uccaccgcgugcaccucu

SEQ ID NO: 1029385 - RNA, 22 nt, Human
uugaggagucaggggcacggaa

SEQ ID NO: 1029386 - RNA, 22 nt, Human
ccaagagcuucccauagcuucu

SEQ ID NO: 1029387 - RNA, 21 nt, Human
ccaccaggucuucugcucggg

SEQ ID NO: 1029388 - RNA, 22 nt, Human
cagugcagccaaggacaggcac

SEQ ID NO: 1029389 - RNA, 22 nt, Human
acauuguugagccucuuguuca

SEQ ID NO: 1029390 - RNA, 22 nt, Human
ugagccuggagucguggagggg

SEQ ID NO: 1029391 - RNA, 22 nt, Human
ccggcucggcgaccaggcugaa

SEQ ID NO: 1029392 - RNA, 22 nt, Human
aaggcucccucuucucgagugu

SEQ ID NO: 1029393 - RNA, 22 nt, Human
gcugaagagagaugcguccagc

SEQ ID NO: 1029394 - RNA, 22 nt, Human
gcuucugcagagccguccugag

SEQ ID NO: 1029395 - RNA, 22 nt, Human
uggcuccuuccgcagcaugccu

SEQ ID NO: 1029396 - RNA, 21 nt, Human
ugcuaagugucacaugucugc

SEQ ID NO: 1029397 - RNA, 22 nt, Human
ggcgcggugacucagccucgcu

SEQ ID NO: 1029398 - RNA, 23 nt, Human
guguggccccagggccuccucgc

SEQ ID NO: 1029399 - RNA, 19 nt, Human
ucuugaggaaaguaaggca

SEQ ID NO: 1029400 - RNA, 22 nt, Human
ccaagaggggaagggccgcagc

SEQ ID NO: 1029401 - RNA, 22 nt, Human
cugucacagcccgcgucuccuc

SEQ ID NO: 1029402 - RNA, 22 nt, Human
gcugccuggaauaacggcuggc

SEQ ID NO: 1029403 - RNA, 22 nt, Human
uccaugacagcgugagaguuug

SEQ ID NO: 1029404 - RNA, 22 nt, Human
ugugaagcgugugcaggggaca

SEQ ID NO: 1029405 - RNA, 22 nt, Human
gggacagcuguagugcuuggcu

SEQ ID NO: 1029406 - RNA, 19 nt, Human
gcagcugugggaagagcca

SEQ ID NO: 1029407 - RNA, 22 nt, Human
uucuuugcccauguuuccuaag

SEQ ID NO: 1029408 - RNA, 22 nt, Human
cccaggcacacugaagugacau

SEQ ID NO: 1029409 - RNA, 22 nt, Human
aacagaaaucauuuagggcucu

SEQ ID NO: 1029410 - RNA, 21 nt, Human
acagaaguggcuuggucucag

SEQ ID NO: 1029411 - RNA, 22 nt, Human
gugagagugguuuauguccaug

SEQ ID NO: 1029412 - RNA, 22 nt, Human
caggagcucaagaccacccugg

SEQ ID NO: 1029413 - RNA, 22 nt, Human
aggcaguguggagggcuguugc

SEQ ID NO: 1029414 - RNA, 22 nt, Human
ucccucugcuagugcuugagcu

SEQ ID NO: 1029415 - RNA, 22 nt, Human
agaagagccacuguugacggca

SEQ ID NO: 1029416 - RNA, 22 nt, Human
gacagguaaagaugguggcagg

SEQ ID NO: 1029417 - RNA, 22 nt, Human
uuguguacucaccagcacauac

SEQ ID NO: 1029418 - RNA, 21 nt, Human
aacaggucccccacgggcuuu

SEQ ID NO: 1029419 - RNA, 22 nt, Human
agcaggaacucagggaguucuc

SEQ ID NO: 1029420 - RNA, 22 nt, Human
ggccugcuucucugggcuuucu

SEQ ID NO: 1029421 - RNA, 22 nt, Human
ccgugugcacgcgccggugcug

SEQ ID NO: 1029422 - RNA, 22 nt, Human
gcgaaucucagcuggugcugcg

SEQ ID NO: 1029423 - RNA, 22 nt, Human
augcauugaggaugacaugagu

SEQ ID NO: 1029424 - RNA, 22 nt, Human
ucuuccagauacuuccugacuu

SEQ ID NO: 1029425 - RNA, 22 nt, Human
acagagacacggaagcuaaaga

SEQ ID NO: 1029426 - RNA, 22 nt, Human
gagcaacacauugaaugaggau

SEQ ID NO: 1029427 - RNA, 22 nt, Human
agacacauuuucagcucugcca

SEQ ID NO: 1029428 - RNA, 22 nt, Human
gggcagcaggcuccacguuccu

SEQ ID NO: 1029429 - RNA, 22 nt, Human
aaagaggcucaaggugggccag

SEQ ID NO: 1029430 - RNA, 22 nt, Human
gaagaccccagagcgagguaag

SEQ ID NO: 1029431 - RNA, 22 nt, Human
gugcaaagcuuaacauucugca

SEQ ID NO: 1029432 - RNA, 22 nt, Human
ggcuuuggggguguccaagaaa

SEQ ID NO: 1029433 - RNA, 22 nt, Human
ucccgggcaggucgagcgagcc

SEQ ID NO: 1029434 - RNA, 22 nt, Human
cugcgugguaggacucaguucu

SEQ ID NO: 1029435 - RNA, 22 nt, Human
gggggcgccgccgcucaucuca

SEQ ID NO: 1029436 - RNA, 22 nt, Human
uuuuccuucugauacuccauuu

SEQ ID NO: 1029437 - RNA, 22 nt, Human
uggggugugcucagagcagggg

SEQ ID NO: 1029438 - RNA, 21 nt, Human
ggcagcucagcagauggggac

SEQ ID NO: 1029439 - RNA, 22 nt, Human
gagcagcagcugggccagguuc

SEQ ID NO: 1029440 - RNA, 20 nt, Human
uuuuccacuccucaaaacag

SEQ ID NO: 1029441 - RNA, 22 nt, Human
ggcuucuuagaauuugacuuac

SEQ ID NO: 1029442 - RNA, 22 nt, Human
ucuugccgcgcaggcgcaguuc

SEQ ID NO: 1029443 - RNA, 22 nt, Human
gcuagggagacuugugucauca

SEQ ID NO: 1029444 - RNA, 22 nt, Human
accaagaguccaagugagguug

SEQ ID NO: 1029445 - RNA, 21 nt, Human
ugcuuugcagguggauuuagu

SEQ ID NO: 1029446 - RNA, 22 nt, Human
gaaggcaagcagcauaaauguc

SEQ ID NO: 1029447 - RNA, 22 nt, Human
cuggagaggcugggaacagguu

SEQ ID NO: 1029448 - RNA, 20 nt, Human
cugcuccacccggcucucag

SEQ ID NO: 1029449 - RNA, 22 nt, Human
ugcugugcuggcggcagaggcc

SEQ ID NO: 1029450 - RNA, 22 nt, Human
gugcgccagcucaaggggaggc

SEQ ID NO: 1029451 - RNA, 22 nt, Human
cauuucaaacaguuacagcugc

SEQ ID NO: 1029452 - RNA, 22 nt, Human
ugaguccagaugggccagcagg

SEQ ID NO: 1029453 - RNA, 22 nt, Human
cuggaagcgucggaggaagggc

SEQ ID NO: 1029454 - RNA, 20 nt, Human
gugcccaguuggugacagac

SEQ ID NO: 1029455 - RNA, 22 nt, Human
acucgcggcggacggcggccag

SEQ ID NO: 1029456 - RNA, 22 nt, Human
gcugacugguucaggucccgcu

SEQ ID NO: 1029457 - RNA, 22 nt, Human
cuugucugcuauaaaaauccag

SEQ ID NO: 1029458 - RNA, 22 nt, Human
gcagcagcaggcgcucggccgu

SEQ ID NO: 1029459 - RNA, 22 nt, Human
ggacauggaaguauggagugga

SEQ ID NO: 1029460 - RNA, 22 nt, Human
gccggacugcugcagcugcuag

SEQ ID NO: 1029461 - RNA, 18 nt, Human
acagggagggcgcugggg

SEQ ID NO: 1029462 - RNA, 22 nt, Human
gugcuggcuggggcaucaggca

SEQ ID NO: 1029463 - RNA, 22 nt, Human
gccaggguggcagaaggcccca

SEQ ID NO: 1029464 - RNA, 22 nt, Human
ucugccaucaagaugcucuggc

SEQ ID NO: 1029465 - RNA, 22 nt, Human
guagaggggugauucugugaga

SEQ ID NO: 1029466 - RNA, 22 nt, Human
ugaggucuguccugucuuugga

SEQ ID NO: 1029467 - RNA, 22 nt, Human
gggagaguagcuggaagguucu

SEQ ID NO: 1029468 - RNA, 22 nt, Human
gcugcagugagccaagaucgug

SEQ ID NO: 1029469 - RNA, 21 nt, Human
ggagucagggucuggcugggg

SEQ ID NO: 1029470 - RNA, 22 nt, Human
cgcggucucuuuaaggcggguc

SEQ ID NO: 1029471 - RNA, 22 nt, Human
gcaggccugucuugcucgcccu

SEQ ID NO: 1029472 - RNA, 22 nt, Human
ugaguggacgugaggcugagua

SEQ ID NO: 1029473 - RNA, 22 nt, Human
cuugacacugucacucaggcca

SEQ ID NO: 1029474 - RNA, 22 nt, Human
cccugcuucccugggagaggcg

SEQ ID NO: 1029475 - RNA, 22 nt, Human
aggcuccaugguucucccucag

SEQ ID NO: 1029476 - RNA, 22 nt, Human
cauguguauuauucuuguggaa

SEQ ID NO: 1029477 - RNA, 22 nt, Human
cgugcagcggagcuggucacug

SEQ ID NO: 1029478 - RNA, 22 nt, Human
ggcgcaguugagcgugcuguuc

SEQ ID NO: 1029479 - RNA, 22 nt, Human
cagcaugaauguguucguaggg

SEQ ID NO: 1029480 - RNA, 22 nt, Human
cugagggccuucuaugcugagc

SEQ ID NO: 1029481 - RNA, 22 nt, Human
ucgggguagacgccagcucgga

SEQ ID NO: 1029482 - RNA, 22 nt, Human
ucaugcaccucuccaugucccc

SEQ ID NO: 1029483 - RNA, 20 nt, Human
uugagcuuuuaguacagaca

SEQ ID NO: 1029484 - RNA, 22 nt, Human
guggcaggagggcaucacuugg

SEQ ID NO: 1029485 - RNA, 22 nt, Human
aguguguccaggaagcagaugg

SEQ ID NO: 1029486 - RNA, 22 nt, Human
uggcucaucuuuuuagacuuau

SEQ ID NO: 1029487 - RNA, 22 nt, Human
agagccuguucggaggcgcccc

SEQ ID NO: 1029488 - RNA, 22 nt, Human
cccucucgcggggcagcggagg

SEQ ID NO: 1029489 - RNA, 22 nt, Human
gggagggucugagagcugcacc

SEQ ID NO: 1029490 - RNA, 22 nt, Human
gcccagcccagaaagguucgga

SEQ ID NO: 1029491 - RNA, 22 nt, Human
uacauggauguuauccuuacug

SEQ ID NO: 1029492 - RNA, 22 nt, Human
agcucuuuuaucaugaggagag

SEQ ID NO: 1029493 - RNA, 22 nt, Human
uccguggggccuguggcuuccg

SEQ ID NO: 1029494 - RNA, 22 nt, Human
ggcucucuuaacuggccauccu

SEQ ID NO: 1029495 - RNA, 19 nt, Human
agcucaggcccaucguccc

SEQ ID NO: 1029496 - RNA, 22 nt, Human
ggcucugcugguaagaugccuc

SEQ ID NO: 1029497 - RNA, 22 nt, Human
aucugccuggcuccaggugagc

SEQ ID NO: 1029498 - RNA, 22 nt, Human
acaggcgcacaugagggccgug

SEQ ID NO: 1029499 - RNA, 22 nt, Human
ugcugggauuacagucaugagc

SEQ ID NO: 1029500 - RNA, 22 nt, Human
uuccuuuucuucuaccacaugu

SEQ ID NO: 1029501 - RNA, 22 nt, Human
uccagcagguccgagacaaguu

SEQ ID NO: 1029502 - RNA, 20 nt, Human
gugcuaaguacugugaaggg

SEQ ID NO: 1029503 - RNA, 22 nt, Human
caugccugccuggugggcgugg

SEQ ID NO: 1029504 - RNA, 22 nt, Human
gagccucguggcggccacugcg

SEQ ID NO: 1029505 - RNA, 22 nt, Human
uguuccugacggccaaagaggu

SEQ ID NO: 1029506 - RNA, 21 nt, Human
agaugcaguuugcaggugggu

SEQ ID NO: 1029507 - RNA, 22 nt, Human
cccuugggcuucagcccuaccg

SEQ ID NO: 1029508 - RNA, 22 nt, Human
agaguguguggggcugagguca

SEQ ID NO: 1029509 - RNA, 22 nt, Human
uuucuucucacccaggacagag

SEQ ID NO: 1029510 - RNA, 22 nt, Human
ggcuauguguccagcaucuuug

SEQ ID NO: 1029511 - RNA, 22 nt, Human
aagucauugguagcuugauagg

SEQ ID NO: 1029512 - RNA, 22 nt, Human
gcacugggggcagcagugaggg

SEQ ID NO: 1029513 - RNA, 20 nt, Human
ccuggagccuggaaggaguc

SEQ ID NO: 1029514 - RNA, 22 nt, Human
gaggcaaagcauguggcucagg

SEQ ID NO: 1029515 - RNA, 22 nt, Human
caggucuucuucagcacuugga

SEQ ID NO: 1029516 - RNA, 22 nt, Human
aaggcacauauuuuagagucac

SEQ ID NO: 1029517 - RNA, 22 nt, Human
agcaggugucacuuucacucca

SEQ ID NO: 1029518 - RNA, 22 nt, Human
cagggcuccccagagagccucu

SEQ ID NO: 1029519 - RNA, 18 nt, Human
uacagcuugaguugacug

SEQ ID NO: 1029520 - RNA, 22 nt, Human
gaaguccgggaggaucauguuc

SEQ ID NO: 1029521 - RNA, 22 nt, Human
uauagcagcaugauuuauaguc

SEQ ID NO: 1029522 - RNA, 22 nt, Human
gcuguagguaaggauggcaaag

SEQ ID NO: 1029523 - RNA, 22 nt, Human
ugcugaggagguggcugugcuu

SEQ ID NO: 1029524 - RNA, 22 nt, Human
aaagcagaacugagagagcugg

SEQ ID NO: 1029525 - RNA, 22 nt, Human
guugcagcaucacugcugagug

SEQ ID NO: 1029526 - RNA, 22 nt, Human
ugccuggauggcucugagcagg

SEQ ID NO: 1029527 - RNA, 22 nt, Human
cgcugcgaggcgcccuuguugc

SEQ ID NO: 1029528 - RNA, 22 nt, Human
acagagccuccaggagugcugg

SEQ ID NO: 1029529 - RNA, 22 nt, Human
acgucuucguuggcagagauuu

SEQ ID NO: 1029530 - RNA, 22 nt, Human
ucucaguccaaaugagagguug

SEQ ID NO: 1029531 - RNA, 22 nt, Human
cuggagucggcgccccaacaga

SEQ ID NO: 1029532 - RNA, 22 nt, Human
cucagugcuuaguguguuuugg

SEQ ID NO: 1029533 - RNA, 22 nt, Human
cugcggcuggggacagcuguug

SEQ ID NO: 1029534 - RNA, 22 nt, Human
ccucuugauugguuggaagcgg

SEQ ID NO: 1029535 - RNA, 22 nt, Human
ccaugcagugcuggagcugauu

SEQ ID NO: 1029536 - RNA, 22 nt, Human
cagugccagcugcuuggccuac

SEQ ID NO: 1029537 - RNA, 21 nt, Human
ucagcuugcuucauuauuaug

SEQ ID NO: 1029538 - RNA, 19 nt, Human
aacuacagcgcacuguccu

SEQ ID NO: 1029539 - RNA, 22 nt, Human
acgcggugcggcaaguucaugg

SEQ ID NO: 1029540 - RNA, 22 nt, Human
ccugaggcccuggcugugcuga

SEQ ID NO: 1029541 - RNA, 22 nt, Human
caggcccuuuccugggcauagg

SEQ ID NO: 1029542 - RNA, 22 nt, Human
ucucugccacagcuucugccuu

SEQ ID NO: 1029543 - RNA, 21 nt, Human
ugcuggguuugcccaucaggc

SEQ ID NO: 1029544 - RNA, 22 nt, Human
cacagcuucuccccgcugcggc

SEQ ID NO: 1029545 - RNA, 22 nt, Human
agcacguucuucauuacuucac

SEQ ID NO: 1029546 - RNA, 22 nt, Human
gaagccaaguccucgaguuuca

SEQ ID NO: 1029547 - RNA, 22 nt, Human
ggugcccaaggaagguugccgu

SEQ ID NO: 1029548 - RNA, 22 nt, Human
uggcugagcugcagcguggcuu

SEQ ID NO: 1029549 - RNA, 22 nt, Human
agccuuacauaaacagccuuau

SEQ ID NO: 1029550 - RNA, 22 nt, Human
acguagcacugagagaugcagg

SEQ ID NO: 1029551 - RNA, 22 nt, Human
gccucugcacuguggcacacca

SEQ ID NO: 1029552 - RNA, 23 nt, Human
uccugcagauaagcugguugaca

SEQ ID NO: 1029553 - RNA, 22 nt, Human
acuuugccuucuuacuguguug

SEQ ID NO: 1029554 - RNA, 21 nt, Human
acagaagcggcgaguggcccc

SEQ ID NO: 1029555 - RNA, 22 nt, Human
gcagcccucuuggucacuaggc

SEQ ID NO: 1029556 - RNA, 22 nt, Human
cugcgggcugucaggcgugcca

SEQ ID NO: 1029557 - RNA, 22 nt, Human
uggcuuccagaacugagcaaca

SEQ ID NO: 1029558 - RNA, 22 nt, Human
uucaaacacugcuuugagaggg

SEQ ID NO: 1029559 - RNA, 23 nt, Human
agcccagcagagaaccuaggucc

SEQ ID NO: 1029560 - RNA, 22 nt, Human
ucaagcggacugagauacucug

SEQ ID NO: 1029561 - RNA, 22 nt, Human
caggccugugacaccgugucug

SEQ ID NO: 1029562 - RNA, 22 nt, Human
uccucuucaaaauagcucugaa

SEQ ID NO: 1029563 - RNA, 22 nt, Human
agucaggacagauuuucugggg

SEQ ID NO: 1029564 - RNA, 22 nt, Human
gaggcugugugucccucuggac

SEQ ID NO: 1029565 - RNA, 22 nt, Human
cucuagcucccagggagcgucu

SEQ ID NO: 1029566 - RNA, 18 nt, Human
gcugaaauucuaaacaaa

SEQ ID NO: 1029567 - RNA, 22 nt, Human
ggcagugaugucaaacagugaa

SEQ ID NO: 1029568 - RNA, 22 nt, Human
gcggggacagaaggcgguucuc

SEQ ID NO: 1029569 - RNA, 22 nt, Human
ccugucugaaggcagggggaug

SEQ ID NO: 1029570 - RNA, 22 nt, Human
cagggccagggcuauggugaag

SEQ ID NO: 1029571 - RNA, 22 nt, Human
ucuucaugucucugcuugaguc

SEQ ID NO: 1029572 - RNA, 23 nt, Human
ucuggcugcuccuuucaaugcuc

SEQ ID NO: 1029573 - RNA, 22 nt, Human
cagcuccaucuugcuuauacca

SEQ ID NO: 1029574 - RNA, 22 nt, Human
aguaacagguguacagacuauc

SEQ ID NO: 1029575 - RNA, 22 nt, Human
gguguggcaguggaccugugaa

SEQ ID NO: 1029576 - RNA, 22 nt, Human
ugugcuugucguggagccaggc

SEQ ID NO: 1029577 - RNA, 22 nt, Human
ggcggugguugagaggacggcg

SEQ ID NO: 1029578 - RNA, 22 nt, Human
acaguguuacuugauaguguau

SEQ ID NO: 1029579 - RNA, 22 nt, Human
ggaaggggagcuggaaagggua

SEQ ID NO: 1029580 - RNA, 22 nt, Human
caugucaagacugaagauccag

SEQ ID NO: 1029581 - RNA, 22 nt, Human
acaaaugcuuaguucaccaaaa

SEQ ID NO: 1029582 - RNA, 22 nt, Human
aagcccuuggcgcacaccgggc

SEQ ID NO: 1029583 - RNA, 22 nt, Human
cugaagcugggcacuuccuuuu

SEQ ID NO: 1029584 - RNA, 22 nt, Human
aacagauuguaaccugauagcc

SEQ ID NO: 1029585 - RNA, 22 nt, Human
gcaaggaagcagaguugcuauc

SEQ ID NO: 1029586 - RNA, 22 nt, Human
ggagaagggaacugaguuuuug

SEQ ID NO: 1029587 - RNA, 20 nt, Human
uccuccuugcagagcccaga

SEQ ID NO: 1029588 - RNA, 22 nt, Human
gagaacuugaacuuuuccucug

SEQ ID NO: 1029589 - RNA, 22 nt, Human
augcacaagguagauuauuauu

SEQ ID NO: 1029590 - RNA, 22 nt, Human
cucccagggucuaggcugcugg

SEQ ID NO: 1029591 - RNA, 22 nt, Human
uggcugagugaacauguccauu

SEQ ID NO: 1029592 - RNA, 22 nt, Human
ucaucuccauacggucucgcag

SEQ ID NO: 1029593 - RNA, 22 nt, Human
cauuuacauuuaagguuaauau

SEQ ID NO: 1029594 - RNA, 22 nt, Human
gccuguuucuccuccuuggccc

SEQ ID NO: 1029595 - RNA, 22 nt, Human
uggaaggggagcuggaaagggg

SEQ ID NO: 1029596 - RNA, 22 nt, Human
cuccgcuuguguauaccuccaa

SEQ ID NO: 1029597 - RNA, 22 nt, Human
ucaguccuuaucugguguucag

SEQ ID NO: 1029598 - RNA, 22 nt, Human
guaugucaugagccuugugcgu

SEQ ID NO: 1029599 - RNA, 22 nt, Human
guaguucuuucucaauguucaa

SEQ ID NO: 1029600 - RNA, 22 nt, Human
uggccuuggcagugagaagagu

SEQ ID NO: 1029601 - RNA, 22 nt, Human
aagcagcauaugacagcaucca

SEQ ID NO: 1029602 - RNA, 22 nt, Human
guggcccaggcuuggcgcuggc

SEQ ID NO: 1029603 - RNA, 22 nt, Human
gccggucuuaagcugacuguga

SEQ ID NO: 1029604 - RNA, 22 nt, Human
gccggggcuggggagagacaug

SEQ ID NO: 1029605 - RNA, 23 nt, Human
gguucugccgcuuacugcugugc

SEQ ID NO: 1029606 - RNA, 22 nt, Human
ugccucugcugcauauucaccu

SEQ ID NO: 1029607 - RNA, 22 nt, Human
guagcccaccuggggagggcga

SEQ ID NO: 1029608 - RNA, 22 nt, Human
cgugcggccucggggcccggcu

SEQ ID NO: 1029609 - RNA, 22 nt, Human
uggaagggguuacgcagcagga

SEQ ID NO: 1029610 - RNA, 22 nt, Human
aguggguguagucuuccuccug

SEQ ID NO: 1029611 - RNA, 22 nt, Human
gcagccuccgcacugcgagucc

SEQ ID NO: 1029612 - RNA, 22 nt, Human
ucacaguucaacuaguucagau

SEQ ID NO: 1029613 - RNA, 22 nt, Human
cagccggaccugagggauuccu

SEQ ID NO: 1029614 - RNA, 22 nt, Human
ccuggccgacauggugaaacgc

SEQ ID NO: 1029615 - RNA, 22 nt, Human
uagcaggacaugugcagagaag

SEQ ID NO: 1029616 - RNA, 22 nt, Human
gggagcugagcuggaagagaau

SEQ ID NO: 1029617 - RNA, 22 nt, Human
ggagccaguuuagaccucaguu

SEQ ID NO: 1029618 - RNA, 22 nt, Human
auggcucugcugggcaaagcaa

SEQ ID NO: 1029619 - RNA, 22 nt, Human
ccuguggcacaugcagggauuc

SEQ ID NO: 1029620 - RNA, 21 nt, Human
ucgaccugcugggcucgggcu

SEQ ID NO: 1029621 - RNA, 22 nt, Human
guggccaaggcagagaaagagc

SEQ ID NO: 1029622 - RNA, 22 nt, Human
cacagcuaccugcaugccugcu

SEQ ID NO: 1029623 - RNA, 22 nt, Human
gcaugagacuagcucaugagca

SEQ ID NO: 1029624 - RNA, 22 nt, Human
gugcaggacagcacaucuccug

SEQ ID NO: 1029625 - RNA, 22 nt, Human
ucggugcgcgaggcgcgguccc

SEQ ID NO: 1029626 - RNA, 22 nt, Human
gugaccaucaucucagcuaguu

SEQ ID NO: 1029627 - RNA, 22 nt, Human
ggaccugaacauaaaacgaggc

SEQ ID NO: 1029628 - RNA, 22 nt, Human
cagguagaggcugccaucagcu

SEQ ID NO: 1029629 - RNA, 22 nt, Human
ugacagcccaccucacaggauu

SEQ ID NO: 1029630 - RNA, 22 nt, Human
caugaccagagaggacggccag

SEQ ID NO: 1029631 - RNA, 22 nt, Human
uuguugcaagccuggaaucugg

SEQ ID NO: 1029632 - RNA, 22 nt, Human
cgcugccuucaucccacgccua

SEQ ID NO: 1029633 - RNA, 22 nt, Human
cagggucuuggcgccaucaccc

SEQ ID NO: 1029634 - RNA, 22 nt, Human
cugacagcgagagaguugcccc

SEQ ID NO: 1029635 - RNA, 20 nt, Human
ggggcccaagcccucuugcc

SEQ ID NO: 1029636 - RNA, 22 nt, Human
gcuucuggugaggccucaggaa

SEQ ID NO: 1029637 - RNA, 22 nt, Human
cccuggcucaggcagcuuuguu

SEQ ID NO: 1029638 - RNA, 22 nt, Human
gugcucuagaaauugucagugg

SEQ ID NO: 1029639 - RNA, 22 nt, Human
gugccugguuuggggaauguuc

SEQ ID NO: 1029640 - RNA, 22 nt, Human
ccugcgggcugugcugaagccu

SEQ ID NO: 1029641 - RNA, 18 nt, Human
uaaguggacacaggucac

SEQ ID NO: 1029642 - RNA, 22 nt, Human
aaaggugccucuuacaaggcuu

SEQ ID NO: 1029643 - RNA, 22 nt, Human
auccuugaaugacucugcccuc

SEQ ID NO: 1029644 - RNA, 22 nt, Human
uacagcagcccaccuucuucug

SEQ ID NO: 1029645 - RNA, 19 nt, Human
cgcacagccugccaggcgc

SEQ ID NO: 1029646 - RNA, 22 nt, Human
cggcgcaggcagaccgcgggcu

SEQ ID NO: 1029647 - RNA, 20 nt, Human
caacacugcccauuguuugc

SEQ ID NO: 1029648 - RNA, 22 nt, Human
ucugagggauuugucccuuauc

SEQ ID NO: 1029649 - RNA, 22 nt, Human
ucagacaccgucuauuuugccu

SEQ ID NO: 1029650 - RNA, 22 nt, Human
aggguccugggugcaguugcuu

SEQ ID NO: 1029651 - RNA, 22 nt, Human
uugcugccuuuguacucugaug

SEQ ID NO: 1029652 - RNA, 22 nt, Human
ugcagggcagcuagggagcuuu

SEQ ID NO: 1029653 - RNA, 20 nt, Human
cuguuugcuaucaugagcug

SEQ ID NO: 1029654 - RNA, 22 nt, Human
ucugaggcugaauggacuccgu

SEQ ID NO: 1029655 - RNA, 22 nt, Human
agcccuugguauuuuccgaucc

SEQ ID NO: 1029656 - RNA, 22 nt, Human
cggcuggagcugagaaaggagc

SEQ ID NO: 1029657 - RNA, 22 nt, Human
gaggagaggcuggacgcgguga

SEQ ID NO: 1029658 - RNA, 22 nt, Human
ucaggaugagucaucaagcugc

SEQ ID NO: 1029659 - RNA, 22 nt, Human
uccaggagggggagccgugccg

SEQ ID NO: 1029660 - RNA, 22 nt, Human
cucucugggcccaguuggcacc

SEQ ID NO: 1029661 - RNA, 22 nt, Human
cuggagaacagagcuguuuaga

SEQ ID NO: 1029662 - RNA, 22 nt, Human
uggcagcagggccccuggagga

SEQ ID NO: 1029663 - RNA, 22 nt, Human
uuggaggaagcucaugggggau

SEQ ID NO: 1029664 - RNA, 22 nt, Human
ggagagagaccuccaugcccag

SEQ ID NO: 1029665 - RNA, 21 nt, Human
ccuggagacaaagacagggug

SEQ ID NO: 1029666 - RNA, 22 nt, Human
ggaagcaaauuccagaaccaca

SEQ ID NO: 1029667 - RNA, 22 nt, Human
gcccagggcugcaaguggacgc

SEQ ID NO: 1029668 - RNA, 15 nt, Human
agcucuuucagcuac

SEQ ID NO: 1029669 - RNA, 21 nt, Human
acucaucuuuuuggagaccag

SEQ ID NO: 1029670 - RNA, 22 nt, Human
cuggcaguguccagcucgugau

SEQ ID NO: 1029671 - RNA, 22 nt, Human
ccacugcuaacuugcugcagcu

SEQ ID NO: 1029672 - RNA, 22 nt, Human
uuuugguaauuaaguagauauu

SEQ ID NO: 1029673 - RNA, 22 nt, Human
cuccguggcuguggacgcagcc

SEQ ID NO: 1029674 - RNA, 22 nt, Human
auuggccagacuuauccuucag

SEQ ID NO: 1029675 - RNA, 22 nt, Human
gcugccauggcugggggccgug

SEQ ID NO: 1029676 - RNA, 22 nt, Human
uugacguccucgauggggaacu

SEQ ID NO: 1029677 - RNA, 22 nt, Human
ggccgugcuccaaagucaucgu

SEQ ID NO: 1029678 - RNA, 21 nt, Human
agccugcaauguagguaccgg

SEQ ID NO: 1029679 - RNA, 22 nt, Human
ggugggucuuguggggcagcuu

SEQ ID NO: 1029680 - RNA, 21 nt, Human
gcuguucggcggcccucgcgc

SEQ ID NO: 1029681 - RNA, 21 nt, Human
ucaggaagagccaguucaugc

SEQ ID NO: 1029682 - RNA, 22 nt, Human
guugggcugaagugugugcuua

SEQ ID NO: 1029683 - RNA, 22 nt, Human
gagugccuuccccaugcuuugg

SEQ ID NO: 1029684 - RNA, 22 nt, Human
ucaccggcagacguggccugau

SEQ ID NO: 1029685 - RNA, 22 nt, Human
gcaguggccacauggaggagga

SEQ ID NO: 1029686 - RNA, 22 nt, Human
ugagacaaagcagcugacagaa

SEQ ID NO: 1029687 - RNA, 22 nt, Human
gcagggcugauggcuucccuca

SEQ ID NO: 1029688 - RNA, 22 nt, Human
uuccuguucaggaaaguugugu

SEQ ID NO: 1029689 - RNA, 19 nt, Human
augggaagcggccagcgga

SEQ ID NO: 1029690 - RNA, 22 nt, Human
aucaagggcgcgugguucggcg

SEQ ID NO: 1029691 - RNA, 22 nt, Human
acccggagucggagguugcagu

SEQ ID NO: 1029692 - RNA, 22 nt, Human
uggccugauuuugcuaagagaa

SEQ ID NO: 1029693 - RNA, 22 nt, Human
ccuuuguucacuggagagugga

SEQ ID NO: 1029694 - RNA, 22 nt, Human
cuggccuggcaggggaccucua

SEQ ID NO: 1029695 - RNA, 22 nt, Human
ugucauggacuggauuucugcu

SEQ ID NO: 1029696 - RNA, 22 nt, Human
gugaagcacaugggcguugggu

SEQ ID NO: 1029697 - RNA, 22 nt, Human
gcagcugcgaagaagucuaucu

SEQ ID NO: 1029698 - RNA, 22 nt, Human
gaaccuggcagcccuauaucug

SEQ ID NO: 1029699 - RNA, 22 nt, Human
cgcagcuucagggccaggaggg

SEQ ID NO: 1029700 - RNA, 22 nt, Human
caggaggaaaguuccacucaac

SEQ ID NO: 1029701 - RNA, 22 nt, Human
aaagcacauuacaagcucaguc

SEQ ID NO: 1029702 - RNA, 22 nt, Human
cgggcacucagggucgaggugg

SEQ ID NO: 1029703 - RNA, 22 nt, Human
cuacuucuguggcucuaagaga

SEQ ID NO: 1029704 - RNA, 22 nt, Human
uguggaagaacuucuugcuugg

SEQ ID NO: 1029705 - RNA, 22 nt, Human
gagaggaagccuucuguacuug

SEQ ID NO: 1029706 - RNA, 19 nt, Human
agcaguggagccaugccug

SEQ ID NO: 1029707 - RNA, 22 nt, Human
cuugaugaaugaccuggguggu

SEQ ID NO: 1029708 - RNA, 23 nt, Human
guuauugcuggugcuggccagcc

SEQ ID NO: 1029709 - RNA, 22 nt, Human
uggccuuggucacaaugcaaac

SEQ ID NO: 1029710 - RNA, 22 nt, Human
agcauggcuuuggaggauagca

SEQ ID NO: 1029711 - RNA, 22 nt, Human
cugggagaugacucagagcagg

SEQ ID NO: 1029712 - RNA, 22 nt, Human
augggucccuggccgcccucgg

SEQ ID NO: 1029713 - RNA, 22 nt, Human
aagcgcagacacagagagugga

SEQ ID NO: 1029714 - RNA, 22 nt, Human
ugccagcaguagcaguaggcca

SEQ ID NO: 1029715 - RNA, 22 nt, Human
uccaggcuccccugcgugcucc

SEQ ID NO: 1029716 - RNA, 22 nt, Human
auacaugugugugcauacaugu

SEQ ID NO: 1029717 - RNA, 22 nt, Human
cuucacaaaauauuucauuaua

SEQ ID NO: 1029718 - RNA, 22 nt, Human
ucgggacgguggcauuugugcc

SEQ ID NO: 1029719 - RNA, 22 nt, Human
ggccucugccccgcggggcucg

SEQ ID NO: 1029720 - RNA, 22 nt, Human
uaggccacagagaggagauuuc

SEQ ID NO: 1029721 - RNA, 22 nt, Human
uuccuggcagaggccccgacag

SEQ ID NO: 1029722 - RNA, 22 nt, Human
cgucauuuguaaaugaucaaga

SEQ ID NO: 1029723 - RNA, 22 nt, Human
aggugcugccccgagaaggaug

SEQ ID NO: 1029724 - RNA, 22 nt, Human
gcccagcugagaagcgcggggc

SEQ ID NO: 1029725 - RNA, 23 nt, Human
ugucuccaucucauuacuugggg

SEQ ID NO: 1029726 - RNA, 22 nt, Human
uuguacacacaggaacaaacgu

SEQ ID NO: 1029727 - RNA, 18 nt, Human
ucugagggugcgggagcu

SEQ ID NO: 1029728 - RNA, 22 nt, Human
gcaggggcugagcaccagcggg

SEQ ID NO: 1029729 - RNA, 22 nt, Human
gugggccugaugcugccaugag

SEQ ID NO: 1029730 - RNA, 22 nt, Human
ggcacuggcaaagcaaagucug

SEQ ID NO: 1029731 - RNA, 22 nt, Human
uggcuccacaggccagggugug

SEQ ID NO: 1029732 - RNA, 22 nt, Human
ccaggaggaaagaccagcccau

SEQ ID NO: 1029733 - RNA, 21 nt, Human
acucugaaaauuaauaguuau

SEQ ID NO: 1029734 - RNA, 22 nt, Human
ccaggcccugcuccucacacca

SEQ ID NO: 1029735 - RNA, 22 nt, Human
gcccucugccacaggacgccag

SEQ ID NO: 1029736 - RNA, 22 nt, Human
ugcuccaucuagagcucugcag

SEQ ID NO: 1029737 - RNA, 22 nt, Human
acagcaucccugaagauaacca

SEQ ID NO: 1029738 - RNA, 22 nt, Human
ugccuguggaaaggcuggugcu

SEQ ID NO: 1029739 - RNA, 19 nt, Human
uuuaaugugugcugcaauc

SEQ ID NO: 1029740 - RNA, 22 nt, Human
uugaugagaccauugccgcguc

SEQ ID NO: 1029741 - RNA, 22 nt, Human
aggcuguccucucuugcucagu

SEQ ID NO: 1029742 - RNA, 21 nt, Human
gcuggcugucucuuacacggu

SEQ ID NO: 1029743 - RNA, 22 nt, Human
gaggagcuucagaggaaucuua

SEQ ID NO: 1029744 - RNA, 22 nt, Human
cuccuucacgcaggcugccaug

SEQ ID NO: 1029745 - RNA, 22 nt, Human
cagacaggguccuguccgucac

SEQ ID NO: 1029746 - RNA, 22 nt, Human
uggaagggagcuggaauuugga

SEQ ID NO: 1029747 - RNA, 22 nt, Human
caugcaugccgggcugacagag

SEQ ID NO: 1029748 - RNA, 22 nt, Human
ggcucuccacuauggaugagaa

SEQ ID NO: 1029749 - RNA, 22 nt, Human
cagcgguggcaaggugacugug

SEQ ID NO: 1029750 - RNA, 22 nt, Human
uguuccucugaacuucuuccaa

SEQ ID NO: 1029751 - RNA, 22 nt, Human
uacauguacaugcauagguaga

SEQ ID NO: 1029752 - RNA, 22 nt, Human
uuucuagguguucacagagcau

SEQ ID NO: 1029753 - RNA, 22 nt, Human
aaaggagacuucagaucuccuu

SEQ ID NO: 1029754 - RNA, 22 nt, Human
ugggagcaagcuggugcuggag

SEQ ID NO: 1029755 - RNA, 22 nt, Human
uccaggagugauaaggccacug

SEQ ID NO: 1029756 - RNA, 22 nt, Human
guccguaguggcugaugcuuug

SEQ ID NO: 1029757 - RNA, 22 nt, Human
gagcucagccugaggccuggcu

SEQ ID NO: 1029758 - RNA, 21 nt, Human
cuggagcuuggugagaagugu

SEQ ID NO: 1029759 - RNA, 22 nt, Human
ggaaugugcugacacgcgagag

SEQ ID NO: 1029760 - RNA, 22 nt, Human
guccaggccugccucugaggag

SEQ ID NO: 1029761 - RNA, 22 nt, Human
augcaggaagagcccuggagcu

SEQ ID NO: 1029762 - RNA, 22 nt, Human
aucauuaacccuugaugcuggg

SEQ ID NO: 1029763 - RNA, 22 nt, Human
agcgggucugcaagccuucccu

SEQ ID NO: 1029764 - RNA, 20 nt, Human
gggcucugcauccaucagcc

SEQ ID NO: 1029765 - RNA, 22 nt, Human
gguuguaguuggagguuguaua

SEQ ID NO: 1029766 - RNA, 22 nt, Human
cggcagagcccugagucagccu

SEQ ID NO: 1029767 - RNA, 22 nt, Human
cgccaguggcagcuggaacagg

SEQ ID NO: 1029768 - RNA, 22 nt, Human
agguuuggguucauugcuggcu

SEQ ID NO: 1029769 - RNA, 18 nt, Human
agcugaggggacugaaga

SEQ ID NO: 1029770 - RNA, 22 nt, Human
ccagcuggcccagcugugcucc

SEQ ID NO: 1029771 - RNA, 22 nt, Human
ccagcagcucccucaggguccg

SEQ ID NO: 1029772 - RNA, 22 nt, Human
augcuugaaaguuauuucauuu

SEQ ID NO: 1029773 - RNA, 22 nt, Human
ccccacaccugccgggcagcag

SEQ ID NO: 1029774 - RNA, 22 nt, Human
ggcagcagaacuggcccuguau

SEQ ID NO: 1029775 - RNA, 22 nt, Human
gccccuucguggaagugcauuc

SEQ ID NO: 1029776 - RNA, 22 nt, Human
augccccagugugugcuuccuu

SEQ ID NO: 1029777 - RNA, 23 nt, Human
uggcuugcuaauguuccaaauaa

SEQ ID NO: 1029778 - RNA, 22 nt, Human
aguggcaguagaugagcugguu

SEQ ID NO: 1029779 - RNA, 22 nt, Human
gagccacaguggauugauucca

SEQ ID NO: 1029780 - RNA, 22 nt, Human
ggagcugcucagagccaguccc

SEQ ID NO: 1029781 - RNA, 22 nt, Human
gguggcaccuuacccugcgcag

SEQ ID NO: 1029782 - RNA, 22 nt, Human
agaggcucuuugagcugggaga

SEQ ID NO: 1029783 - RNA, 23 nt, Human
ggaagcucacguaguccugcacu

SEQ ID NO: 1029784 - RNA, 22 nt, Human
acuucacagauauuuauuuggu

SEQ ID NO: 1029785 - RNA, 22 nt, Human
gccugagauucccggagccgug

SEQ ID NO: 1029786 - RNA, 22 nt, Human
agccagcauauauauaguugaa

SEQ ID NO: 1029787 - RNA, 22 nt, Human
ucugcucagccgaucugcuccg

SEQ ID NO: 1029788 - RNA, 22 nt, Human
cuagcagcauucuucuaguuag

SEQ ID NO: 1029789 - RNA, 22 nt, Human
cagcugcuguucaguuuuguuu

SEQ ID NO: 1029790 - RNA, 22 nt, Human
ucuacaacgugguuuuguugua

SEQ ID NO: 1029791 - RNA, 22 nt, Human
cuuugugauaguguuaagacca

SEQ ID NO: 1029792 - RNA, 17 nt, Human
ucuccuggcucuaucag

SEQ ID NO: 1029793 - RNA, 22 nt, Human
ugugcucagucuuuggcuggga

SEQ ID NO: 1029794 - RNA, 22 nt, Human
ugugaacuggcagguggacggg

SEQ ID NO: 1029795 - RNA, 22 nt, Human
gaauaauugugaugcuugaagu

SEQ ID NO: 1029796 - RNA, 22 nt, Human
gacuuugccacuugcuccagcu

SEQ ID NO: 1029797 - RNA, 22 nt, Human
agggcuccuaugccccauggac

SEQ ID NO: 1029798 - RNA, 22 nt, Human
gccacccuggacgcacuguucg

SEQ ID NO: 1029799 - RNA, 22 nt, Human
cagaccagccauuugccucuuc

SEQ ID NO: 1029800 - RNA, 22 nt, Human
gaagguuuuguuugcaaaucau

SEQ ID NO: 1029801 - RNA, 22 nt, Human
ucugcuugugucuguccagccu

SEQ ID NO: 1029802 - RNA, 21 nt, Human
uaagccaccaugugaaaccag

SEQ ID NO: 1029803 - RNA, 22 nt, Human
acgugcaggaucugguuggcga

SEQ ID NO: 1029804 - RNA, 22 nt, Human
gaaccuguccugagugaggagu

SEQ ID NO: 1029805 - RNA, 22 nt, Human
gucguucucugccagggcguug

SEQ ID NO: 1029806 - RNA, 19 nt, Human
ugcuugccugccuuuccca

SEQ ID NO: 1029807 - RNA, 22 nt, Human
gccagguaugaauuacgcacga

SEQ ID NO: 1029808 - RNA, 22 nt, Human
caaagaagagauuuacagagcu

SEQ ID NO: 1029809 - RNA, 22 nt, Human
gcuacaggggucaguccuuugc

SEQ ID NO: 1029810 - RNA, 23 nt, Human
agcaacagugggugaguguugcu

SEQ ID NO: 1029811 - RNA, 22 nt, Human
ccagacuggggcuccuugaggg

SEQ ID NO: 1029812 - RNA, 22 nt, Human
ccucaaaggccuggcaccagaa

SEQ ID NO: 1029813 - RNA, 22 nt, Human
gagggcugccacguugggcgag

SEQ ID NO: 1029814 - RNA, 22 nt, Human
ugaggaggugggcacacagagu

SEQ ID NO: 1029815 - RNA, 22 nt, Human
cagcccuugcgacacccuggcu

SEQ ID NO: 1029816 - RNA, 22 nt, Human
uuuguguuguacuucugugcau

SEQ ID NO: 1029817 - RNA, 22 nt, Human
cuuuacuucagcaagcuuuccu

SEQ ID NO: 1029818 - RNA, 22 nt, Human
gcagagcuggaacugguacuca

SEQ ID NO: 1029819 - RNA, 22 nt, Human
agcaggccugccaccucggggu

SEQ ID NO: 1029820 - RNA, 22 nt, Human
ccaggacacgauuuuuagucug

SEQ ID NO: 1029821 - RNA, 23 nt, Human
acacauguuuaugcuugggggca

SEQ ID NO: 1029822 - RNA, 22 nt, Human
ggcagguguggugaccagagau

SEQ ID NO: 1029823 - RNA, 22 nt, Human
gguccagcacaacacuggcaug

SEQ ID NO: 1029824 - RNA, 22 nt, Human
uuggggaagcuuugaaauacuu

SEQ ID NO: 1029825 - RNA, 20 nt, Human
ggcagagcuaugucuguugc

SEQ ID NO: 1029826 - RNA, 22 nt, Human
uuucgggaaaaacugguaagac

SEQ ID NO: 1029827 - RNA, 22 nt, Human
cagcuccagcccaggcagcucc

SEQ ID NO: 1029828 - RNA, 21 nt, Human
gggcuggauauuggaaagagg

SEQ ID NO: 1029829 - RNA, 22 nt, Human
gcagaagcccggucagcgcacg

SEQ ID NO: 1029830 - RNA, 22 nt, Human
ucccagaacccugccagguccu

SEQ ID NO: 1029831 - RNA, 22 nt, Human
acaugcacccaguuacacucuc

SEQ ID NO: 1029832 - RNA, 22 nt, Human
uggcagccugcgugaaggagcu

SEQ ID NO: 1029833 - RNA, 22 nt, Human
ccugcacuaccuggggcugcug

SEQ ID NO: 1029834 - RNA, 22 nt, Human
ucccuguccugggcaaucccag

SEQ ID NO: 1029835 - RNA, 22 nt, Human
gagcaccgccuccacgaugccc

SEQ ID NO: 1029836 - RNA, 22 nt, Human
ggaccugcucucccaguucucu

SEQ ID NO: 1029837 - RNA, 22 nt, Human
ugggaagaguuagagacagcug

SEQ ID NO: 1029838 - RNA, 22 nt, Human
gugcaugucuuuggaggccucc

SEQ ID NO: 1029839 - RNA, 22 nt, Human
uuggaggacuaguuaagagacc

SEQ ID NO: 1029840 - RNA, 19 nt, Human
uucacuaggucacaagguc

SEQ ID NO: 1029841 - RNA, 18 nt, Human
cccacggugcuguagggc

SEQ ID NO: 1029842 - RNA, 22 nt, Human
gucccugauaagagccaucgau

SEQ ID NO: 1029843 - RNA, 22 nt, Human
ugguaugcuuauuaucuucaac

SEQ ID NO: 1029844 - RNA, 22 nt, Human
cuugccaguguugcagaagcuc

SEQ ID NO: 1029845 - RNA, 22 nt, Human
aggccugggacgggagccguga

SEQ ID NO: 1029846 - RNA, 22 nt, Human
gggcucuguuuagaccagagau

SEQ ID NO: 1029847 - RNA, 22 nt, Human
ugagcaccaggcaccacagcuc

SEQ ID NO: 1029848 - RNA, 22 nt, Human
ggggaccuuuccauuucugaga

SEQ ID NO: 1029849 - RNA, 22 nt, Human
gcugguggcagagcuccgcggc

SEQ ID NO: 1029850 - RNA, 16 nt, Human
aggagcuggguaggag

SEQ ID NO: 1029851 - RNA, 22 nt, Human
cuguucccgguggccgggccag

SEQ ID NO: 1029852 - RNA, 22 nt, Human
gaaagcagaugaaauugcaaca

SEQ ID NO: 1029853 - RNA, 22 nt, Human
gggaccuggacaugugugugcu

SEQ ID NO: 1029854 - RNA, 22 nt, Human
ggcagaggagcuggaaacaugg

SEQ ID NO: 1029855 - RNA, 21 nt, Human
uccugcugagaaacagauggu

SEQ ID NO: 1029856 - RNA, 22 nt, Human
gacagcagccacagggagaggg

SEQ ID NO: 1029857 - RNA, 22 nt, Human
ggccuugggauguggcugcagc

SEQ ID NO: 1029858 - RNA, 22 nt, Human
gcggagaggcagagacuccgcg

SEQ ID NO: 1029859 - RNA, 22 nt, Human
gcagcagcggggccccugcgcg

SEQ ID NO: 1029860 - RNA, 22 nt, Human
cugcuguguggauucaauggcu

SEQ ID NO: 1029861 - RNA, 19 nt, Human
ugguucuccuuccacaguc

SEQ ID NO: 1029862 - RNA, 22 nt, Human
ugccauagcaaugguaagcuga

SEQ ID NO: 1029863 - RNA, 22 nt, Human
ggcagccuccagggcacuggug

SEQ ID NO: 1029864 - RNA, 21 nt, Human
agaugcagugacccacugggg

SEQ ID NO: 1029865 - RNA, 22 nt, Human
cuggugcuguagccugauugag

SEQ ID NO: 1029866 - RNA, 22 nt, Human
ccugguguuaucauaggucaug

SEQ ID NO: 1029867 - RNA, 22 nt, Human
guuggcuaugagagcuuuagug

SEQ ID NO: 1029868 - RNA, 22 nt, Human
gaugucuggcuaccacucgcac

SEQ ID NO: 1029869 - RNA, 22 nt, Human
guacuuucaggcuuucccuuaa

SEQ ID NO: 1029870 - RNA, 22 nt, Human
ccaggaaguaugacccaacaga

SEQ ID NO: 1029871 - RNA, 22 nt, Human
uucuccccgucucucugaggcc

SEQ ID NO: 1029872 - RNA, 22 nt, Human
agaacaggaggaagccagcucc

SEQ ID NO: 1029873 - RNA, 22 nt, Human
cagagcugagucuucaagguug

SEQ ID NO: 1029874 - RNA, 22 nt, Human
uuccggacgcccgucuuccagc

SEQ ID NO: 1029875 - RNA, 23 nt, Human
uggugggcccugcuugcucacug

SEQ ID NO: 1029876 - RNA, 22 nt, Human
cagcauggagacaaagugggca

SEQ ID NO: 1029877 - RNA, 22 nt, Human
ccaggcuccccaggaggcccuu

SEQ ID NO: 1029878 - RNA, 22 nt, Human
gcugcaagugcauguugcaacu

SEQ ID NO: 1029879 - RNA, 22 nt, Human
uggagugcaguugggaggacac

SEQ ID NO: 1029880 - RNA, 22 nt, Human
uuguugcugcucaaccucuaua

SEQ ID NO: 1029881 - RNA, 22 nt, Human
ugguccugagcaccagccugac

SEQ ID NO: 1029882 - RNA, 22 nt, Human
uggcugaggucuggggcuucug

SEQ ID NO: 1029883 - RNA, 22 nt, Human
ccagcagccaccuucucgaaau

SEQ ID NO: 1029884 - RNA, 22 nt, Human
cugagcaugcuacaugcagcac

SEQ ID NO: 1029885 - RNA, 22 nt, Human
ugccgcgcgcccagguuaggug

SEQ ID NO: 1029886 - RNA, 20 nt, Human
cagcucugggcaggucgagg

SEQ ID NO: 1029887 - RNA, 22 nt, Human
agucauguguucaucuuucauu

SEQ ID NO: 1029888 - RNA, 22 nt, Human
guggcuaggcccaacggcagga

SEQ ID NO: 1029889 - RNA, 22 nt, Human
cuccaggacugaggacagagcu

SEQ ID NO: 1029890 - RNA, 22 nt, Human
gcagcaaucuucacagugucau

SEQ ID NO: 1029891 - RNA, 22 nt, Human
cagagcugacccaaggauugaa

SEQ ID NO: 1029892 - RNA, 22 nt, Human
ggcaagagggcagauggagugc

SEQ ID NO: 1029893 - RNA, 22 nt, Human
aaggggaguuagugauaaaacc

SEQ ID NO: 1029894 - RNA, 22 nt, Human
ccugugcuucacucaacaagcc

SEQ ID NO: 1029895 - RNA, 22 nt, Human
aggccaagcucccagagaagcu

SEQ ID NO: 1029896 - RNA, 22 nt, Human
uucccuggugggugagaaccug

SEQ ID NO: 1029897 - RNA, 22 nt, Human
cagggccugccugguuccugga

SEQ ID NO: 1029898 - RNA, 22 nt, Human
aaucuucaggguccuggggcuc

SEQ ID NO: 1029899 - RNA, 23 nt, Human
uggcucuguggaucccucaggag

SEQ ID NO: 1029900 - RNA, 22 nt, Human
guaggggccagaaagacuuaga

SEQ ID NO: 1029901 - RNA, 22 nt, Human
cuacagcuguguguuuaugugc

SEQ ID NO: 1029902 - RNA, 22 nt, Human
gggcccugcgacucgcggcgga

SEQ ID NO: 1029903 - RNA, 22 nt, Human
ccuccugggccuugcucuguga

SEQ ID NO: 1029904 - RNA, 22 nt, Human
guucuucaggcugugcucuaga

SEQ ID NO: 1029905 - RNA, 22 nt, Human
augcggagccccaagcuugaag

SEQ ID NO: 1029906 - RNA, 22 nt, Human
uucucaggaacucagugucagc

SEQ ID NO: 1029907 - RNA, 22 nt, Human
cuucauuucaggcugaagaaua

SEQ ID NO: 1029908 - RNA, 20 nt, Human
ucugugugccaucaccuaac

SEQ ID NO: 1029909 - RNA, 22 nt, Human
gccugcuggcuggaaauucucc

SEQ ID NO: 1029910 - RNA, 17 nt, Human
gagguaggaagugaguc

SEQ ID NO: 1029911 - RNA, 19 nt, Human
ucuuucauuucuagcucug

SEQ ID NO: 1029912 - RNA, 22 nt, Human
ugaggacauuuaucuuggcgca

SEQ ID NO: 1029913 - RNA, 22 nt, Human
ugccaggcugcccuccagucug

SEQ ID NO: 1029914 - RNA, 22 nt, Human
aucacuagaguuacauugccag

SEQ ID NO: 1029915 - RNA, 22 nt, Human
auucuugauauagauaguuaau

SEQ ID NO: 1029916 - RNA, 22 nt, Human
ucucagucuuugcaaggaugcu

SEQ ID NO: 1029917 - RNA, 22 nt, Human
ugagcagacuugaugaggcagc

SEQ ID NO: 1029918 - RNA, 22 nt, Human
agggagcauugugacauaucac

SEQ ID NO: 1029919 - RNA, 22 nt, Human
caggugggagccacagcguaca

SEQ ID NO: 1029920 - RNA, 22 nt, Human
cagguugaaaguggaggagcua

SEQ ID NO: 1029921 - RNA, 22 nt, Human
uccgggagcugaacgucuugcg

SEQ ID NO: 1029922 - RNA, 22 nt, Human
acagagacaauauuuguaaagu

SEQ ID NO: 1029923 - RNA, 22 nt, Human
ccaggcagccugcuccauucug

SEQ ID NO: 1029924 - RNA, 22 nt, Human
acugcacuccagcccgagcaac

SEQ ID NO: 1029925 - RNA, 22 nt, Human
ucucucugcagcccgggacacu

SEQ ID NO: 1029926 - RNA, 22 nt, Human
ccugugggagggagcggcugga

SEQ ID NO: 1029927 - RNA, 18 nt, Human
ugugccucugcaggacgu

SEQ ID NO: 1029928 - RNA, 22 nt, Human
cuucaugcugauauccucgaug

SEQ ID NO: 1029929 - RNA, 22 nt, Human
gugccuccaggcucgacuaguc

SEQ ID NO: 1029930 - RNA, 22 nt, Human
gcacagcuaugagcugaauugu

SEQ ID NO: 1029931 - RNA, 22 nt, Human
uugaggucuucaggaucaggcu

SEQ ID NO: 1029932 - RNA, 22 nt, Human
ccaggccuguguuguguggagg

SEQ ID NO: 1029933 - RNA, 22 nt, Human
ugggugguugcugaggcuccuu

SEQ ID NO: 1029934 - RNA, 22 nt, Human
ugacaagagaccccuccgcagg

SEQ ID NO: 1029935 - RNA, 22 nt, Human
uccccaguaagccugcacugug

SEQ ID NO: 1029936 - RNA, 22 nt, Human
uccugugccuccaccugcuccg

SEQ ID NO: 1029937 - RNA, 22 nt, Human
uugcaggucuggggguccuggu

SEQ ID NO: 1029938 - RNA, 22 nt, Human
ccuggccuccuggccuucucau

SEQ ID NO: 1029939 - RNA, 22 nt, Human
aacccgggagguggagguuaug

SEQ ID NO: 1029940 - RNA, 22 nt, Human
gucaggaugagggaugaggagu

SEQ ID NO: 1029941 - RNA, 22 nt, Human
gggcacagucugcagcccccca

SEQ ID NO: 1029942 - RNA, 22 nt, Human
ucccggcgcugggagguggguc

SEQ ID NO: 1029943 - RNA, 22 nt, Human
ccagcaggaaagugacguuuga

SEQ ID NO: 1029944 - RNA, 22 nt, Human
auccauuugccgugcuaugugc

SEQ ID NO: 1029945 - RNA, 22 nt, Human
agaaggcaucagaaguguguag

SEQ ID NO: 1029946 - RNA, 22 nt, Human
caggcuguguuccuggaacccc

SEQ ID NO: 1029947 - RNA, 22 nt, Human
augcaauaguaauucuagucug

SEQ ID NO: 1029948 - RNA, 22 nt, Human
ccugggcaaaugccagagacaa

SEQ ID NO: 1029949 - RNA, 22 nt, Human
ugcuccugaacacagcccuaug

SEQ ID NO: 1029950 - RNA, 22 nt, Human
aaggaggaauguagccagcucc

SEQ ID NO: 1029951 - RNA, 22 nt, Human
ugcugcucuucaccauggccuc

SEQ ID NO: 1029952 - RNA, 22 nt, Human
agagucaguuaugucaagugcu

SEQ ID NO: 1029953 - RNA, 22 nt, Human
cuuccugcaacaccuguguugc

SEQ ID NO: 1029954 - RNA, 22 nt, Human
agagggcgcccaggcccacgcc

SEQ ID NO: 1029955 - RNA, 22 nt, Human
gaaggcaagugagccaagagaa

SEQ ID NO: 1029956 - RNA, 22 nt, Human
cucacagcugcuucaggaucca

SEQ ID NO: 1029957 - RNA, 22 nt, Human
gugcagcugugguggagccagg

SEQ ID NO: 1029958 - RNA, 22 nt, Human
cuuuggucuccgucaucaauca

SEQ ID NO: 1029959 - RNA, 22 nt, Human
uggugcaggccaagcugcgagc

SEQ ID NO: 1029960 - RNA, 22 nt, Human
gaucggguggguucugccauca

SEQ ID NO: 1029961 - RNA, 22 nt, Human
ucucuacagcacccgcaugcua

SEQ ID NO: 1029962 - RNA, 22 nt, Human
uccuuggagaaucuuguuuuac

SEQ ID NO: 1029963 - RNA, 22 nt, Human
ccgagcuguggucucuuuuacg

SEQ ID NO: 1029964 - RNA, 22 nt, Human
guccuguguaaguacuugcuca

SEQ ID NO: 1029965 - RNA, 22 nt, Human
ucuccaggcuuaaucucagcuu

SEQ ID NO: 1029966 - RNA, 22 nt, Human
ugagcuucuuuauuuggccaga

SEQ ID NO: 1029967 - RNA, 20 nt, Human
ugugcccaauguccagguuc

SEQ ID NO: 1029968 - RNA, 22 nt, Human
agguggcuaugaggaugcaguc

SEQ ID NO: 1029969 - RNA, 22 nt, Human
aagacacuuucuaaauagaagu

SEQ ID NO: 1029970 - RNA, 22 nt, Human
aggcucagugauguaaaauaua

SEQ ID NO: 1029971 - RNA, 19 nt, Human
ucucccaugccugugucua

SEQ ID NO: 1029972 - RNA, 22 nt, Human
gcaguugcaggauuuguguugu

SEQ ID NO: 1029973 - RNA, 22 nt, Human
cauggcaggugcagauucugug

SEQ ID NO: 1029974 - RNA, 22 nt, Human
uccuucagaggacggcagccag

SEQ ID NO: 1029975 - RNA, 22 nt, Human
aaagagcucggaaaguguugaa

SEQ ID NO: 1029976 - RNA, 22 nt, Human
ggcuuucugucugcgucugugu

SEQ ID NO: 1029977 - RNA, 22 nt, Human
cucuggagcgcugcuucccgcg

SEQ ID NO: 1029978 - RNA, 22 nt, Human
aggagcagaacuguuguggagg

SEQ ID NO: 1029979 - RNA, 22 nt, Human
acagagggucugggcacaggac

SEQ ID NO: 1029980 - RNA, 22 nt, Human
ugugugcacaaagaguacaugg

SEQ ID NO: 1029981 - RNA, 22 nt, Human
gcucuccacugaccacggggca

SEQ ID NO: 1029982 - RNA, 23 nt, Human
cugagggcuggucugaagucugc

SEQ ID NO: 1029983 - RNA, 22 nt, Human
gugcuccaggucgcucagagag

SEQ ID NO: 1029984 - RNA, 18 nt, Human
ggcggguguuuuauucac

SEQ ID NO: 1029985 - RNA, 22 nt, Human
ucacagcucacuguagccucga

SEQ ID NO: 1029986 - RNA, 22 nt, Human
uuuucaguuccaucucugcucu

SEQ ID NO: 1029987 - RNA, 22 nt, Human
cagcuuguuuacaugcuuauuc

SEQ ID NO: 1029988 - RNA, 22 nt, Human
acacuggacucagaggccagaa

SEQ ID NO: 1029989 - RNA, 22 nt, Human
gcggcgccugggacccgccagc

SEQ ID NO: 1029990 - RNA, 22 nt, Human
ucuccucuauuucuguauguau

SEQ ID NO: 1029991 - RNA, 22 nt, Human
agcuggugauguggucccucac

SEQ ID NO: 1029992 - RNA, 22 nt, Human
cccaggucgucagcaguguggu

SEQ ID NO: 1029993 - RNA, 22 nt, Human
ugcuggaguggcacuguguggc

SEQ ID NO: 1029994 - RNA, 22 nt, Human
cuuugcagagggggugggagcu

SEQ ID NO: 1029995 - RNA, 22 nt, Human
gugagguccucccugcugggag

SEQ ID NO: 1029996 - RNA, 22 nt, Human
ggagaggguagggguccugccc

SEQ ID NO: 1029997 - RNA, 22 nt, Human
ccugugucaucagcuguggcua

SEQ ID NO: 1029998 - RNA, 22 nt, Human
ggucagugccuaucaugugggc

SEQ ID NO: 1029999 - RNA, 22 nt, Human
cuggucaauaaucauguaguac

SEQ ID NO: 1030000 - RNA, 22 nt, Human
uccgcgcucucacccgcucccg

SEQ ID NO: 1030001 - RNA, 20 nt, Human
uaugugcaguuugguuuauc

SEQ ID NO: 1030002 - RNA, 22 nt, Human
uaggugucuggacaacuuugua

SEQ ID NO: 1030003 - RNA, 22 nt, Human
gugcagcugguggagucugggg

SEQ ID NO: 1030004 - RNA, 22 nt, Human
gggcuggagagucccacguggg

SEQ ID NO: 1030005 - RNA, 22 nt, Human
cccagcugaacuugcauuccaa

SEQ ID NO: 1030006 - RNA, 22 nt, Human
gaagagguucaacguggucauc

SEQ ID NO: 1030007 - RNA, 17 nt, Human
ucugagaaugcuggagg

SEQ ID NO: 1030008 - RNA, 22 nt, Human
cccaggacucugacacccccaa

SEQ ID NO: 1030009 - RNA, 22 nt, Human
aagagagaacucccuucgccag

SEQ ID NO: 1030010 - RNA, 22 nt, Human
agaagcagaaggaagcagggcc

SEQ ID NO: 1030011 - RNA, 22 nt, Human
caagggcagaggcagggccccg

SEQ ID NO: 1030012 - RNA, 22 nt, Human
aggcagagaaaaaccagauaug

SEQ ID NO: 1030013 - RNA, 22 nt, Human
ggagcgugcacuccaggcccuu

SEQ ID NO: 1030014 - RNA, 22 nt, Human
cuucauguacaguuauuggaga

SEQ ID NO: 1030015 - RNA, 22 nt, Human
cacgccuggacggcggagggug

SEQ ID NO: 1030016 - RNA, 22 nt, Human
cccacugcaugaguugguauua

SEQ ID NO: 1030017 - RNA, 22 nt, Human
gagcuccugaaacguuccugcc

SEQ ID NO: 1030018 - RNA, 21 nt, Human
agaugaggauacugaggccua

SEQ ID NO: 1030019 - RNA, 22 nt, Human
accugccagaaugcuaguccug

SEQ ID NO: 1030020 - RNA, 22 nt, Human
ggcagaggaagcuggaaguggg

SEQ ID NO: 1030021 - RNA, 22 nt, Human
gugcgggccuggggguuucucu

SEQ ID NO: 1030022 - RNA, 22 nt, Human
cacgugcaggucuuaggagaca

SEQ ID NO: 1030023 - RNA, 22 nt, Human
gaagcuucgaaagagugauuuc

SEQ ID NO: 1030024 - RNA, 22 nt, Human
uugcacagaugcacaugguugc

SEQ ID NO: 1030025 - RNA, 21 nt, Human
cagaggggcuagccuggcugc

SEQ ID NO: 1030026 - RNA, 22 nt, Human
gcuugcugaacaggaaccuggc

SEQ ID NO: 1030027 - RNA, 22 nt, Human
cagugcugcaggcgccugcggu

SEQ ID NO: 1030028 - RNA, 22 nt, Human
ggcuguggucauuaggagguug

SEQ ID NO: 1030029 - RNA, 22 nt, Human
ccuggauucucacuggacucca

SEQ ID NO: 1030030 - RNA, 22 nt, Human
agcuggguguagggcuggacaa

SEQ ID NO: 1030031 - RNA, 22 nt, Human
acagcuggaggucugugagcac

SEQ ID NO: 1030032 - RNA, 22 nt, Human
agcugugaccuucaagagcuac

SEQ ID NO: 1030033 - RNA, 19 nt, Human
cugggacaaugaaagcauc

SEQ ID NO: 1030034 - RNA, 22 nt, Human
ccacagcaugcaggccugacac

SEQ ID NO: 1030035 - RNA, 20 nt, Human
cucaccagguguaggcugag

SEQ ID NO: 1030036 - RNA, 22 nt, Human
aagagcuggcucuugcagcagc

SEQ ID NO: 1030037 - RNA, 22 nt, Human
agaucaaggacaugaagaggcu

SEQ ID NO: 1030038 - RNA, 22 nt, Human
gugcugccuccauauccgucag

SEQ ID NO: 1030039 - RNA, 22 nt, Human
ggcgagcaugagucacucuggg

SEQ ID NO: 1030040 - RNA, 19 nt, Human
gagcagcuuccuaucuggu

SEQ ID NO: 1030041 - RNA, 22 nt, Human
auaggcauaacacugauguccu

SEQ ID NO: 1030042 - RNA, 22 nt, Human
ccccagcagacucagggcaggu

SEQ ID NO: 1030043 - RNA, 22 nt, Human
ccacccuuccauucuuccucuu

SEQ ID NO: 1030044 - RNA, 22 nt, Human
cagggcacuuaaauugccucgu

SEQ ID NO: 1030045 - RNA, 21 nt, Human
aguuagcagauuucugucucc

SEQ ID NO: 1030046 - RNA, 22 nt, Human
caccgagugacaguagccauca

SEQ ID NO: 1030047 - RNA, 22 nt, Human
uucucugguuugcuguuucuga

SEQ ID NO: 1030048 - RNA, 22 nt, Human
gaaaggcucagauucccccagg

SEQ ID NO: 1030049 - RNA, 19 nt, Human
aggaaggcggcggcugccc

SEQ ID NO: 1030050 - RNA, 22 nt, Human
cuggcagcugcccgagaugccc

SEQ ID NO: 1030051 - RNA, 22 nt, Human
ucugagagccacugaacagcaa

SEQ ID NO: 1030052 - RNA, 19 nt, Human
cccagaggaaugccuggaa

SEQ ID NO: 1030053 - RNA, 22 nt, Human
aagcauuucagguagagauauu

SEQ ID NO: 1030054 - RNA, 19 nt, Human
uccuugacuguauucagag

SEQ ID NO: 1030055 - RNA, 22 nt, Human
cugggccucacccuagaccaau

SEQ ID NO: 1030056 - RNA, 22 nt, Human
uucagguuuuuaaguucugccu

SEQ ID NO: 1030057 - RNA, 22 nt, Human
uuuucuuggaguggcuguccuu

SEQ ID NO: 1030058 - RNA, 22 nt, Human
gcaguaaauugagagucauguu

SEQ ID NO: 1030059 - RNA, 22 nt, Human
uggcugaggagagggcggaagu

SEQ ID NO: 1030060 - RNA, 17 nt, Human
gcccgugggcuacggua

SEQ ID NO: 1030061 - RNA, 22 nt, Human
caguguuuagcacagugcuugg

SEQ ID NO: 1030062 - RNA, 22 nt, Human
ugacagugugcccggagguuag

SEQ ID NO: 1030063 - RNA, 22 nt, Human
gagcccuuuuccuagauacugu

SEQ ID NO: 1030064 - RNA, 19 nt, Human
gcacacccugcaccaccau

SEQ ID NO: 1030065 - RNA, 22 nt, Human
gcugcccauugcucucccacuc

SEQ ID NO: 1030066 - RNA, 22 nt, Human
cagcacauggauggaguuagga

SEQ ID NO: 1030067 - RNA, 23 nt, Human
agccucuuguggauggucagcga

SEQ ID NO: 1030068 - RNA, 22 nt, Human
ucuccauggauuuggaaaugau

SEQ ID NO: 1030069 - RNA, 22 nt, Human
uugagcagaucgggcugugggg

SEQ ID NO: 1030070 - RNA, 21 nt, Human
uaaagcucguucaggaaaguc

SEQ ID NO: 1030071 - RNA, 16 nt, Human
uugccgcacaggucgc

SEQ ID NO: 1030072 - RNA, 22 nt, Human
acaugggcaucuaugaggcucu

SEQ ID NO: 1030073 - RNA, 22 nt, Human
ugggggagccuucacaguagcu

SEQ ID NO: 1030074 - RNA, 22 nt, Human
agaauccuggagaagcuguacc

SEQ ID NO: 1030075 - RNA, 22 nt, Human
gccugccuucggugcgcagcgg

SEQ ID NO: 1030076 - RNA, 22 nt, Human
ggaagaggcugaggccaugcug

SEQ ID NO: 1030077 - RNA, 21 nt, Human
ucugugcuuuuuuggcuccua

SEQ ID NO: 1030078 - RNA, 22 nt, Human
ucuuauugguaaugauggcauu

SEQ ID NO: 1030079 - RNA, 22 nt, Human
agguggaguuaagugugaacug

SEQ ID NO: 1030080 - RNA, 22 nt, Human
gccugugcuuaacugacgugag

SEQ ID NO: 1030081 - RNA, 22 nt, Human
gccagcagcgagaguuuaaccu

SEQ ID NO: 1030082 - RNA, 22 nt, Human
agcaaggcagcuuucacugcuu

SEQ ID NO: 1030083 - RNA, 22 nt, Human
ugccgcugucgccaccauggcu

SEQ ID NO: 1030084 - RNA, 22 nt, Human
uccuugcagcaggaacccacuu

SEQ ID NO: 1030085 - RNA, 22 nt, Human
gcucgguggccagccugaggcc

SEQ ID NO: 1030086 - RNA, 22 nt, Human
ggccuugguaaauuggcauuug

SEQ ID NO: 1030087 - RNA, 23 nt, Human
ccacuggagaaaguggcaggugg

SEQ ID NO: 1030088 - RNA, 23 nt, Human
cagcacaguacauuuccugucuc

SEQ ID NO: 1030089 - RNA, 22 nt, Human
gaggggcucuugggcaugaagg

SEQ ID NO: 1030090 - RNA, 20 nt, Human
ucucuggcaagaagcugcag

SEQ ID NO: 1030091 - RNA, 22 nt, Human
acaugcuuucuagguccuucug

SEQ ID NO: 1030092 - RNA, 22 nt, Human
aggggagccagggcugcgaguu

SEQ ID NO: 1030093 - RNA, 22 nt, Human
ggccuuccauugcucuuuucua

SEQ ID NO: 1030094 - RNA, 22 nt, Human
gcacaaaagguacuucauguag

SEQ ID NO: 1030095 - RNA, 22 nt, Human
caagagcuggguggcaagcuag

SEQ ID NO: 1030096 - RNA, 22 nt, Human
gacagcaggaugugaggggaug

SEQ ID NO: 1030097 - RNA, 22 nt, Human
ggccuuccugcugcuccgggcc

SEQ ID NO: 1030098 - RNA, 22 nt, Human
uguguuucugagaaucccaccu

SEQ ID NO: 1030099 - RNA, 22 nt, Human
ucgggcugcucgcugcggaacu

SEQ ID NO: 1030100 - RNA, 22 nt, Human
uggccccugaggagcgucagcc

SEQ ID NO: 1030101 - RNA, 22 nt, Human
uugcaggguugacacugccugc

SEQ ID NO: 1030102 - RNA, 22 nt, Human
ggcgcucaguguugccccagag

SEQ ID NO: 1030103 - RNA, 22 nt, Human
gcuggccugaccugaggcuggg

SEQ ID NO: 1030104 - RNA, 17 nt, Human
ugagcaguagaagaugc

SEQ ID NO: 1030105 - RNA, 22 nt, Human
gcugcugcuugaaggcucggag

SEQ ID NO: 1030106 - RNA, 22 nt, Human
guccuggugccaccugcgggau

SEQ ID NO: 1030107 - RNA, 22 nt, Human
caggcucgguccaguggcaccc

SEQ ID NO: 1030108 - RNA, 22 nt, Human
cgcccacgaaguagguggcauu

SEQ ID NO: 1030109 - RNA, 22 nt, Human
gccccagcagcaaugcgguuga

SEQ ID NO: 1030110 - RNA, 22 nt, Human
cuugaaguggagcuuuugaaau

SEQ ID NO: 1030111 - RNA, 22 nt, Human
gagagaagggggauaugagccu

SEQ ID NO: 1030112 - RNA, 23 nt, Human
cacuggugggguuuaaaagaagc

SEQ ID NO: 1030113 - RNA, 22 nt, Human
cagcagcucaggcuccuuccca

SEQ ID NO: 1030114 - RNA, 17 nt, Human
uggcacagaggugcuau

SEQ ID NO: 1030115 - RNA, 18 nt, Human
ggaaggugcuggagugca

SEQ ID NO: 1030116 - RNA, 22 nt, Human
uccugucucaguguauuugcag

SEQ ID NO: 1030117 - RNA, 22 nt, Human
augugggccgugcggguguccu

SEQ ID NO: 1030118 - RNA, 22 nt, Human
cucuggcaauugcugcugacuc

SEQ ID NO: 1030119 - RNA, 22 nt, Human
cccuggaacccauggccagugu

SEQ ID NO: 1030120 - RNA, 22 nt, Human
cugaggagauccccccagaagu

SEQ ID NO: 1030121 - RNA, 17 nt, Human
gcuccagaauucuaguc

SEQ ID NO: 1030122 - RNA, 21 nt, Human
aggucccagguuugggcagca

SEQ ID NO: 1030123 - RNA, 22 nt, Human
uuuuccuuaacagagggagaaa

SEQ ID NO: 1030124 - RNA, 22 nt, Human
gagucgagcagaaagccgucgg

SEQ ID NO: 1030125 - RNA, 22 nt, Human
agcagcaggagccgugggguga

SEQ ID NO: 1030126 - RNA, 22 nt, Human
caggcgggcaggugcggccccu

SEQ ID NO: 1030127 - RNA, 22 nt, Human
ggcaucagcccgguccugggcu

SEQ ID NO: 1030128 - RNA, 22 nt, Human
ccaggcagccaagugugugugu

SEQ ID NO: 1030129 - RNA, 22 nt, Human
gcaagcagcccagaacagcucu

SEQ ID NO: 1030130 - RNA, 22 nt, Human
uugcugccagcgcccugcaggg

SEQ ID NO: 1030131 - RNA, 22 nt, Human
gcucgcuuagauuuuccucuga

SEQ ID NO: 1030132 - RNA, 22 nt, Human
ggcuagggaucuagaccaggac

SEQ ID NO: 1030133 - RNA, 22 nt, Human
aagugacuuaaucuccucucag

SEQ ID NO: 1030134 - RNA, 19 nt, Human
ccuggcccugcugcgcggg

SEQ ID NO: 1030135 - RNA, 22 nt, Human
aacuugccaagagcuuugcuag

SEQ ID NO: 1030136 - RNA, 22 nt, Human
gcucuagcuggcgcugaccugg

SEQ ID NO: 1030137 - RNA, 22 nt, Human
gucuccugaggcauccauugaa

SEQ ID NO: 1030138 - RNA, 22 nt, Human
acaguucuguccuagacuucgu

SEQ ID NO: 1030139 - RNA, 22 nt, Human
uacauguuauuucacuauuggu

SEQ ID NO: 1030140 - RNA, 22 nt, Human
uggggcuccuccuggcaggagg

SEQ ID NO: 1030141 - RNA, 22 nt, Human
cuuccucuguggccagagugua

SEQ ID NO: 1030142 - RNA, 22 nt, Human
cgcgcugcagacagcggaggcc

SEQ ID NO: 1030143 - RNA, 22 nt, Human
agacaagagcugaggacauauu

SEQ ID NO: 1030144 - RNA, 23 nt, Human
gcugccaaggaggcaggggugcc

SEQ ID NO: 1030145 - RNA, 22 nt, Molluscum contagiosum virus
cuggcgggcagcucugcuggca

SEQ ID NO: 1030146 - RNA, 22 nt, Molluscum contagiosum virus
uggagaccggcggcucggaaug

SEQ ID NO: 1030147 - RNA, 19 nt, Molluscum contagiosum virus
uggaagaaucggacucgga

SEQ ID NO: 1030148 - RNA, 22 nt, Molluscum contagiosum virus
ugcuggccgcccuggcgcuguu

SEQ ID NO: 1030149 - RNA, 22 nt, Molluscum contagiosum virus
ugcuggcguucguucgcgccag

SEQ ID NO: 1030150 - RNA, 22 nt, Molluscum contagiosum virus
ugcuggucgucgccggcgccaa

SEQ ID NO: 1030151 - RNA, 23 nt, Molluscum contagiosum virus
ugcuucuucgacgagcgcgcggg

SEQ ID NO: 1030152 - RNA, 22 nt, Molluscum contagiosum virus
ugcugcgcgccaguuuuccgug

SEQ ID NO: 1030153 - RNA, 22 nt, Molluscum contagiosum virus
ugcuuugaugacuaugcgucuu

SEQ ID NO: 1030154 - RNA, 22 nt, Molluscum contagiosum virus
uggaggacgugcacgggccagc

SEQ ID NO: 1030155 - RNA, 22 nt, Molluscum contagiosum virus
ugcgagccauuaugcucggagu

SEQ ID NO: 1030156 - RNA, 22 nt, Molluscum contagiosum virus
ugcgcauuggcagcgcuuuguu

SEQ ID NO: 1030157 - RNA, 22 nt, Molluscum contagiosum virus
ugccggcguccucuucccgcgg

SEQ ID NO: 1030158 - RNA, 22 nt, Molluscum contagiosum virus
ugccuccugcacgcgguccauc

SEQ ID NO: 1030159 - RNA, 20 nt, Molluscum contagiosum virus
ugcucgcucgugcugccggu

SEQ ID NO: 1030160 - RNA, 22 nt, Molluscum contagiosum virus
ugcuaguccuagccgcgagccc

SEQ ID NO: 1030161 - RNA, 22 nt, Molluscum contagiosum virus
ugcgugcccagcagguagcugg

SEQ ID NO: 1030162 - RNA, 21 nt, Molluscum contagiosum virus
ugcggguaccuuuccugcggg

SEQ ID NO: 1030163 - RNA, 22 nt, Molluscum contagiosum virus
ugcgcgcguggugugcuaccag

SEQ ID NO: 1030164 - RNA, 22 nt, Molluscum contagiosum virus
ugcgcgugaacaucggcagcgg

SEQ ID NO: 1030165 - RNA, 21 nt, Molluscum contagiosum virus
ugcggcuugggcaccgcgcgg

SEQ ID NO: 1030166 - RNA, 22 nt, Molluscum contagiosum virus
accgagucggaccgcaucucgg

SEQ ID NO: 1030167 - RNA, 22 nt, Molluscum contagiosum virus
accccgagcugcggcgcgugcu

SEQ ID NO: 1030168 - RNA, 22 nt, Molluscum contagiosum virus
ugcagcagcagcgcuuucaggu

SEQ ID NO: 1030169 - RNA, 22 nt, Molluscum contagiosum virus
ugcaggccagugcgacguugcg

SEQ ID NO: 1030170 - RNA, 22 nt, Molluscum contagiosum virus
accuugucacugucgcgacaac

SEQ ID NO: 1030171 - RNA, 22 nt, Molluscum contagiosum virus
aaugaaagacgugcugcugcug

SEQ ID NO: 1030172 - RNA, 22 nt, Molluscum contagiosum virus
aaugcgaggcgcgacuggcaca

SEQ ID NO: 1030173 - RNA, 20 nt, Molluscum contagiosum virus
accagugugaccaggucucc

SEQ ID NO: 1030174 - RNA, 22 nt, Molluscum contagiosum virus
acauguccaagcugcaggaacg

SEQ ID NO: 1030175 - RNA, 22 nt, Molluscum contagiosum virus
acagugcucgcaaaggagucgc

SEQ ID NO: 1030176 - RNA, 22 nt, Molluscum contagiosum virus
aaguacuucucgauguugggaa

SEQ ID NO: 1030177 - RNA, 22 nt, Molluscum contagiosum virus
ucuguucgagaaccugcacgcg

SEQ ID NO: 1030178 - RNA, 17 nt, Molluscum contagiosum virus
ucugcgugacauccgcc

SEQ ID NO: 1030179 - RNA, 22 nt, Molluscum contagiosum virus
ucucugcgcgcaagucaccgcu

SEQ ID NO: 1030180 - RNA, 20 nt, Molluscum contagiosum virus
ucuacguguccgcauccgcc

SEQ ID NO: 1030181 - RNA, 19 nt, Molluscum contagiosum virus
ucuagcagcugcgccagcg

SEQ ID NO: 1030182 - RNA, 22 nt, Molluscum contagiosum virus
ucuccccggacggugcggucuu

SEQ ID NO: 1030183 - RNA, 22 nt, Molluscum contagiosum virus
ucucgacggggccguaguaggg

SEQ ID NO: 1030184 - RNA, 22 nt, Molluscum contagiosum virus
ucucgcagcuggaccugcgcgc

SEQ ID NO: 1030185 - RNA, 18 nt, Molluscum contagiosum virus
uccagcagcaguguugcc

SEQ ID NO: 1030186 - RNA, 23 nt, Molluscum contagiosum virus
uccaggccacgucguugcggcac

SEQ ID NO: 1030187 - RNA, 22 nt, Molluscum contagiosum virus
ucagcguuuaccccgagggccg

SEQ ID NO: 1030188 - RNA, 20 nt, Molluscum contagiosum virus
uccaaguucaacaacgucuu

SEQ ID NO: 1030189 - RNA, 22 nt, Molluscum contagiosum virus
uccacgaagcacagcaugcagu

SEQ ID NO: 1030190 - RNA, 20 nt, Molluscum contagiosum virus
ucauguggaugucgcaguag

SEQ ID NO: 1030191 - RNA, 22 nt, Molluscum contagiosum virus
uccgcggacgcgggccuguccg

SEQ ID NO: 1030192 - RNA, 22 nt, Molluscum contagiosum virus
uccgcgggcgcgggccuguccg

SEQ ID NO: 1030193 - RNA, 22 nt, Molluscum contagiosum virus
uccggcgaaaagccgcucgcgu

SEQ ID NO: 1030194 - RNA, 22 nt, Molluscum contagiosum virus
uaggcguguccgcagcugugcg

SEQ ID NO: 1030195 - RNA, 22 nt, Molluscum contagiosum virus
uagugcucuuuguggaccgcgg

SEQ ID NO: 1030196 - RNA, 22 nt, Molluscum contagiosum virus
uaguuguagucgggcagcuugu

SEQ ID NO: 1030197 - RNA, 22 nt, Molluscum contagiosum virus
uaugggcagcagcgagagcaug

SEQ ID NO: 1030198 - RNA, 21 nt, Molluscum contagiosum virus
uauccacgccaccaggccugg

SEQ ID NO: 1030199 - RNA, 22 nt, Molluscum contagiosum virus
ucagcgcgaucucgaucgaaca

SEQ ID NO: 1030200 - RNA, 23 nt, Molluscum contagiosum virus
ugauggacauguacacgcgcgcg

SEQ ID NO: 1030201 - RNA, 22 nt, Molluscum contagiosum virus
ugcaccuguuccagcacguagc

SEQ ID NO: 1030202 - RNA, 22 nt, Molluscum contagiosum virus
ugcacgcuguccaggcgcugca

SEQ ID NO: 1030203 - RNA, 22 nt, Molluscum contagiosum virus
ugcacuacaaccauggcgcgcu

SEQ ID NO: 1030204 - RNA, 21 nt, Molluscum contagiosum virus
ugaucguguccaaguucaaga

SEQ ID NO: 1030205 - RNA, 22 nt, Molluscum contagiosum virus
ugaucguguccaaguucaagaa

SEQ ID NO: 1030206 - RNA, 22 nt, Molluscum contagiosum virus
ugaugagcucgccguugguguu

SEQ ID NO: 1030207 - RNA, 22 nt, Molluscum contagiosum virus
ugaccuuguacugcacgugcuc

SEQ ID NO: 1030208 - RNA, 22 nt, Molluscum contagiosum virus
gaugcgugcacgucgagcacgg

SEQ ID NO: 1030209 - RNA, 22 nt, Molluscum contagiosum virus
gaugcucauggacgcgcucggg

SEQ ID NO: 1030210 - RNA, 22 nt, Molluscum contagiosum virus
gagugucgcgaccguagaagau

SEQ ID NO: 1030211 - RNA, 22 nt, Molluscum contagiosum virus
gaugaccucguucccgucgacc

SEQ ID NO: 1030212 - RNA, 22 nt, Molluscum contagiosum virus
cguaagccaccgcgcaggaccg

SEQ ID NO: 1030213 - RNA, 22 nt, Molluscum contagiosum virus
cgucaggcugggcgcgcgagcu

SEQ ID NO: 1030214 - RNA, 22 nt, Molluscum contagiosum virus
cgucugcuuuugcgucgcgcgu

SEQ ID NO: 1030215 - RNA, 22 nt, Molluscum contagiosum virus
cgucggacaggccuugcagacg

SEQ ID NO: 1030216 - RNA, 22 nt, Molluscum contagiosum virus
cguggcgccgcugcuggaacag

SEQ ID NO: 1030217 - RNA, 22 nt, Molluscum contagiosum virus
gacguccugcgccaugcgcagu

SEQ ID NO: 1030218 - RNA, 22 nt, Molluscum contagiosum virus
gacguccuguagcaaggggucu

SEQ ID NO: 1030219 - RNA, 22 nt, Molluscum contagiosum virus
cgugcccgagcacgcgugugug

SEQ ID NO: 1030220 - RNA, 22 nt, Molluscum contagiosum virus
cgugcgcaccugcgcaagaugu

SEQ ID NO: 1030221 - RNA, 22 nt, Molluscum contagiosum virus
cgugcgccgcgcccagucgacc

SEQ ID NO: 1030222 - RNA, 22 nt, Molluscum contagiosum virus
cgugcgguguugcucgaagggc

SEQ ID NO: 1030223 - RNA, 22 nt, Molluscum contagiosum virus
cgugcucacggcagcguaaucc

SEQ ID NO: 1030224 - RNA, 19 nt, Molluscum contagiosum virus
cgugagggacagagucgcu

SEQ ID NO: 1030225 - RNA, 22 nt, Molluscum contagiosum virus
gacugcuucguuuucgaccugg

SEQ ID NO: 1030226 - RNA, 22 nt, Molluscum contagiosum virus
gagaaagcugaugcccucguug

SEQ ID NO: 1030227 - RNA, 22 nt, Molluscum contagiosum virus
gagccgcacaaagaacgcgcgu

SEQ ID NO: 1030228 - RNA, 22 nt, Molluscum contagiosum virus
gagauguuccccgagcucgacc

SEQ ID NO: 1030229 - RNA, 22 nt, Molluscum contagiosum virus
gagcacgugcgccgcuucgagg

SEQ ID NO: 1030230 - RNA, 22 nt, Molluscum contagiosum virus
gaggugcacgcagagcuggucg

SEQ ID NO: 1030231 - RNA, 22 nt, Molluscum contagiosum virus
gaggauccgcauccucuaggcg

SEQ ID NO: 1030232 - RNA, 22 nt, Molluscum contagiosum virus
gaggacgugcgcgagaacuacu

SEQ ID NO: 1030233 - RNA, 22 nt, Molluscum contagiosum virus
gaggagaaaugucuugaucgug

SEQ ID NO: 1030234 - RNA, 22 nt, Molluscum contagiosum virus
gagcgagcgaacucgacaacgc

SEQ ID NO: 1030235 - RNA, 22 nt, Molluscum contagiosum virus
gagcgcgagaagaaguacaucc

SEQ ID NO: 1030236 - RNA, 22 nt, Molluscum contagiosum virus
cgccuggaaaccacgcuauccg

SEQ ID NO: 1030237 - RNA, 22 nt, Molluscum contagiosum virus
cgcgagcgcuugcgaccugaag

SEQ ID NO: 1030238 - RNA, 22 nt, Molluscum contagiosum virus
cgcgacauggacaucgccagug

SEQ ID NO: 1030239 - RNA, 22 nt, Molluscum contagiosum virus
cgcggcacgccuucgucagcuu

SEQ ID NO: 1030240 - RNA, 22 nt, Molluscum contagiosum virus
cgcggcaguccgagcuguucaa

SEQ ID NO: 1030241 - RNA, 22 nt, Molluscum contagiosum virus
cgcgggagcggccuccggagaa

SEQ ID NO: 1030242 - RNA, 21 nt, Molluscum contagiosum virus
cgcgcagguccagcugcgaga

SEQ ID NO: 1030243 - RNA, 22 nt, Molluscum contagiosum virus
cgcgcccgaugaucugcuugag

SEQ ID NO: 1030244 - RNA, 22 nt, Molluscum contagiosum virus
cggagacucgcgcaacagcgcu

SEQ ID NO: 1030245 - RNA, 21 nt, Molluscum contagiosum virus
cggcccagcacgcgcggcucc

SEQ ID NO: 1030246 - RNA, 22 nt, Molluscum contagiosum virus
cggacucgggcacaggcgugau

SEQ ID NO: 1030247 - RNA, 22 nt, Molluscum contagiosum virus
cggacgcgggccuguccgcgga

SEQ ID NO: 1030248 - RNA, 22 nt, Molluscum contagiosum virus
cgcuuccgaagcccaggccugg

SEQ ID NO: 1030249 - RNA, 22 nt, Molluscum contagiosum virus
cgcuggugucgcuuccaugggc

SEQ ID NO: 1030250 - RNA, 22 nt, Molluscum contagiosum virus
cgcucgucuuccagagccugcg

SEQ ID NO: 1030251 - RNA, 20 nt, Molluscum contagiosum virus
cgcugcguacguggucuugc

SEQ ID NO: 1030252 - RNA, 22 nt, Molluscum contagiosum virus
cgcguacaauguagcugccgau

SEQ ID NO: 1030253 - RNA, 17 nt, Molluscum contagiosum virus
cgcguacguguccaugc

SEQ ID NO: 1030254 - RNA, 22 nt, Molluscum contagiosum virus
cgcguaggccagcaccugagcc

SEQ ID NO: 1030255 - RNA, 22 nt, Molluscum contagiosum virus
cgcgcucuuccguccgugcccg

SEQ ID NO: 1030256 - RNA, 22 nt, Molluscum contagiosum virus
cgcgugugcggggcagcaggca

SEQ ID NO: 1030257 - RNA, 22 nt, Molluscum contagiosum virus
cggugcacgcguagcacggcca

SEQ ID NO: 1030258 - RNA, 22 nt, Molluscum contagiosum virus
cggugcuggcgcgcgugcccug

SEQ ID NO: 1030259 - RNA, 22 nt, Molluscum contagiosum virus
cgggcucagaaggcgucgggag

SEQ ID NO: 1030260 - RNA, 22 nt, Molluscum contagiosum virus
cgggccggaagcccacgauggc

SEQ ID NO: 1030261 - RNA, 18 nt, Molluscum contagiosum virus
cgggcgcgaccugcggcu

SEQ ID NO: 1030262 - RNA, 22 nt, Molluscum contagiosum virus
cggccgcgagcagcuguggggg

SEQ ID NO: 1030263 - RNA, 22 nt, Molluscum contagiosum virus
cggcgcgucgagcuugggcgug

SEQ ID NO: 1030264 - RNA, 18 nt, Molluscum contagiosum virus
gugcgcagcccgcugccc

SEQ ID NO: 1030265 - RNA, 22 nt, Molluscum contagiosum virus
gugcgcgucauuaaacuccagg

SEQ ID NO: 1030266 - RNA, 22 nt, Molluscum contagiosum virus
gugcgcuuugaggaacuagugc

SEQ ID NO: 1030267 - RNA, 22 nt, Molluscum contagiosum virus
gugcuuggguucccguguaacc

SEQ ID NO: 1030268 - RNA, 22 nt, Molluscum contagiosum virus
gugcgucgcugcgcgugguggg

SEQ ID NO: 1030269 - RNA, 22 nt, Molluscum contagiosum virus
gugccgucagcacccaccaaga

SEQ ID NO: 1030270 - RNA, 22 nt, Molluscum contagiosum virus
gugggcggcagagagccggcgc

SEQ ID NO: 1030271 - RNA, 22 nt, Molluscum contagiosum virus
guggcaugcugcacgucgucca

SEQ ID NO: 1030272 - RNA, 22 nt, Molluscum contagiosum virus
guuccagcuagaagaggccguc

SEQ ID NO: 1030273 - RNA, 22 nt, Molluscum contagiosum virus
guugccgucgucgcugcaguuu

SEQ ID NO: 1030274 - RNA, 22 nt, Molluscum contagiosum virus
uacacguaguugaggucgcugc

SEQ ID NO: 1030275 - RNA, 22 nt, Molluscum contagiosum virus
uacagccucuacacgcagaacg

SEQ ID NO: 1030276 - RNA, 22 nt, Molluscum contagiosum virus
uagcucugcucgcucugcgaga

SEQ ID NO: 1030277 - RNA, 22 nt, Molluscum contagiosum virus
uacucggccacgcgguggugcg

SEQ ID NO: 1030278 - RNA, 22 nt, Molluscum contagiosum virus
guccugcgagcucgacaugucc

SEQ ID NO: 1030279 - RNA, 18 nt, Molluscum contagiosum virus
gucgacugggcgcggcgc

SEQ ID NO: 1030280 - RNA, 22 nt, Molluscum contagiosum virus
gucgacugggcgcggcgcacgu

SEQ ID NO: 1030281 - RNA, 22 nt, Molluscum contagiosum virus
gucgcccaucacgucgaagauc

SEQ ID NO: 1030282 - RNA, 22 nt, Molluscum contagiosum virus
gucggcgggcacggccagcguc

SEQ ID NO: 1030283 - RNA, 22 nt, Molluscum contagiosum virus
gugagcacaguguagcgcgcgc

SEQ ID NO: 1030284 - RNA, 22 nt, Molluscum contagiosum virus
gucgugcuccacgcgcagcuuc

SEQ ID NO: 1030285 - RNA, 22 nt, Molluscum contagiosum virus
gucuagugcguccgcccuuacg

SEQ ID NO: 1030286 - RNA, 22 nt, Molluscum contagiosum virus
gucugcuuuugcgucgcgcguu

SEQ ID NO: 1030287 - RNA, 22 nt, Molluscum contagiosum virus
aucagcgcgaucucgaucgaac

SEQ ID NO: 1030288 - RNA, 22 nt, Molluscum contagiosum virus
aucgagcccgagucuuccagcu

SEQ ID NO: 1030289 - RNA, 22 nt, Molluscum contagiosum virus
aucagguagagcgcgcagccgg

SEQ ID NO: 1030290 - RNA, 22 nt, Molluscum contagiosum virus
agugaaggucgcguuccaggug

SEQ ID NO: 1030291 - RNA, 20 nt, Molluscum contagiosum virus
aucuucguggagacggcgac

SEQ ID NO: 1030292 - RNA, 21 nt, Molluscum contagiosum virus
augcgcgccuuggcuagcagc

SEQ ID NO: 1030293 - RNA, 22 nt, Molluscum contagiosum virus
augcaggcggagcagcugcugg

SEQ ID NO: 1030294 - RNA, 22 nt, Molluscum contagiosum virus
auggccaccgggaugcgcaugg

SEQ ID NO: 1030295 - RNA, 22 nt, Molluscum contagiosum virus
auggccagcuucugcgccgcgc

SEQ ID NO: 1030296 - RNA, 22 nt, Molluscum contagiosum virus
auggccccuugucuaguuggag

SEQ ID NO: 1030297 - RNA, 22 nt, Molluscum contagiosum virus
auggcggccagcguugcgccga

SEQ ID NO: 1030298 - RNA, 20 nt, Molluscum contagiosum virus
augucgcgcaucaccgagcg

SEQ ID NO: 1030299 - RNA, 22 nt, Molluscum contagiosum virus
cccgagcucuucagcagcugca

SEQ ID NO: 1030300 - RNA, 22 nt, Molluscum contagiosum virus
ccgcagugcucgcacacgugca

SEQ ID NO: 1030301 - RNA, 22 nt, Molluscum contagiosum virus
ccggggugugccuuuuccuugu

SEQ ID NO: 1030302 - RNA, 22 nt, Molluscum contagiosum virus
ccgcgcagaaaagccucgcagu

SEQ ID NO: 1030303 - RNA, 22 nt, Molluscum contagiosum virus
ccgcgugacgucuucucgcggg

SEQ ID NO: 1030304 - RNA, 22 nt, Molluscum contagiosum virus
uucuugaccuugaucgagaugu

SEQ ID NO: 1030305 - RNA, 22 nt, Molluscum contagiosum virus
uugaugcugaacgaucucugac

SEQ ID NO: 1030306 - RNA, 22 nt, Molluscum contagiosum virus
uucgggccuuaaaugaacacca

SEQ ID NO: 1030307 - RNA, 22 nt, Molluscum contagiosum virus
uucguccaccagcgugugguug

SEQ ID NO: 1030308 - RNA, 22 nt, Molluscum contagiosum virus
uuguaguugcgguggugcaucc

SEQ ID NO: 1030309 - RNA, 22 nt, Molluscum contagiosum virus
uugccaucgauuaugcuugagu

SEQ ID NO: 1030310 - RNA, 22 nt, Molluscum contagiosum virus
ccguuccugguagugcaccagg

SEQ ID NO: 1030311 - RNA, 22 nt, Molluscum contagiosum virus
uuccuggacacgcgcaucgugu

SEQ ID NO: 1030312 - RNA, 22 nt, Molluscum contagiosum virus
uuccaugcgcaacgugcugcgu

SEQ ID NO: 1030313 - RNA, 22 nt, Molluscum contagiosum virus
uuacggacgcccuccucgaccu

SEQ ID NO: 1030314 - RNA, 22 nt, Molluscum contagiosum virus
uuugaacucuugcgagcggcaa

SEQ ID NO: 1030315 - RNA, 22 nt, Molluscum contagiosum virus
uuuugcgggggcgcgcgaaugc

SEQ ID NO: 1030316 - RNA, 22 nt, Molluscum contagiosum virus
cgccggcuggcaauguagcgua

SEQ ID NO: 1030317 - RNA, 18 nt, Molluscum contagiosum virus
cgccucaagcucgggccc

SEQ ID NO: 1030318 - RNA, 22 nt, Molluscum contagiosum virus
cgccgacacgcgcgugcucauc

SEQ ID NO: 1030319 - RNA, 22 nt, Molluscum contagiosum virus
cgagcagccgcgccgcacuguc

SEQ ID NO: 1030320 - RNA, 18 nt, Molluscum contagiosum virus
cgacgccuucugagcccg

SEQ ID NO: 1030321 - RNA, 22 nt, Molluscum contagiosum virus
cgacgccuucugagcccgagcu

SEQ ID NO: 1030322 - RNA, 18 nt, Molluscum contagiosum virus
cgacaccuuccgagcccg

SEQ ID NO: 1030323 - RNA, 22 nt, Molluscum contagiosum virus
cgcagcacgcugagcguggcag

SEQ ID NO: 1030324 - RNA, 22 nt, Molluscum contagiosum virus
cgaggguggccacgucgagucu

SEQ ID NO: 1030325 - RNA, 22 nt, Molluscum contagiosum virus
cgcacagcugcgggcugcggcu

SEQ ID NO: 1030326 - RNA, 22 nt, Molluscum contagiosum virus
aggagcacguuccugccgguga

SEQ ID NO: 1030327 - RNA, 22 nt, Molluscum contagiosum virus
agguccguguacccgcgcucgu

SEQ ID NO: 1030328 - RNA, 22 nt, Molluscum contagiosum virus
aggucuucgccgcgggagaacu

SEQ ID NO: 1030329 - RNA, 22 nt, Molluscum contagiosum virus
aggugcacgaccgcgcgcugcu

SEQ ID NO: 1030330 - RNA, 22 nt, Molluscum contagiosum virus
ccuucgugcacgccuucgacgc

SEQ ID NO: 1030331 - RNA, 22 nt, Molluscum contagiosum virus
ccuucucgguguagauguggua

SEQ ID NO: 1030332 - RNA, 22 nt, Molluscum contagiosum virus
ccuugcgcuugugcguacgcgc

SEQ ID NO: 1030333 - RNA, 22 nt, Molluscum contagiosum virus
ccugcggggugccuuuccugcg

SEQ ID NO: 1030334 - RNA, 22 nt, Molluscum contagiosum virus
aggugcucgaugagaguucgcg

SEQ ID NO: 1030335 - RNA, 22 nt, Molluscum contagiosum virus
ccugcacguucacgcgcuccag

SEQ ID NO: 1030336 - RNA, 22 nt, Molluscum contagiosum virus
ccugcagcagcaaugugcacac

SEQ ID NO: 1030337 - RNA, 22 nt, Molluscum contagiosum virus
ccugcaugacgauguagcucuu

SEQ ID NO: 1030338 - RNA, 22 nt, Molluscum contagiosum virus
acugcgcagccgccgaguaugg

SEQ ID NO: 1030339 - RNA, 22 nt, Molluscum contagiosum virus
acguguucgaacugcucgcguu

SEQ ID NO: 1030340 - RNA, 21 nt, Molluscum contagiosum virus
acuucgagaugaucucgcggc

SEQ ID NO: 1030341 - RNA, 22 nt, Molluscum contagiosum virus
acgggcucccuaagcgagcgag

SEQ ID NO: 1030342 - RNA, 22 nt, Molluscum contagiosum virus
acggcguacacaacuuccgcgu

SEQ ID NO: 1030343 - RNA, 22 nt, Molluscum contagiosum virus
acguaaagacggcgauucgugc

SEQ ID NO: 1030344 - RNA, 20 nt, Molluscum contagiosum virus
acguacacgccgcacauugc

SEQ ID NO: 1030345 - RNA, 22 nt, Molluscum contagiosum virus
acgugcucgauagcgcagagcu

SEQ ID NO: 1030346 - RNA, 22 nt, Molluscum contagiosum virus
acguggcgggcaaggcgcgaca

SEQ ID NO: 1030347 - RNA, 22 nt, Molluscum contagiosum virus
agcgaauauggaccuugcacgc

SEQ ID NO: 1030348 - RNA, 22 nt, Molluscum contagiosum virus
agcgacucggacucgagcgacu

SEQ ID NO: 1030349 - RNA, 22 nt, Molluscum contagiosum virus
agcgagauggcguugaugcugc

SEQ ID NO: 1030350 - RNA, 22 nt, Molluscum contagiosum virus
agcgccgugaacugugcgacgc

SEQ ID NO: 1030351 - RNA, 22 nt, Molluscum contagiosum virus
agcgccuucuugaccagcacca

SEQ ID NO: 1030352 - RNA, 22 nt, Molluscum contagiosum virus
agcgcgaaaacacguuggagga

SEQ ID NO: 1030353 - RNA, 22 nt, Molluscum contagiosum virus
agccgcgcugucgcugccugua

SEQ ID NO: 1030354 - RNA, 22 nt, Molluscum contagiosum virus
agcgcgugagcuacgagcgcca

SEQ ID NO: 1030355 - RNA, 23 nt, Molluscum contagiosum virus
agcuugguguuauugacggcguc

SEQ ID NO: 1030356 - RNA, 22 nt, Molluscum contagiosum virus
agcgguguugcugacgacugcg

SEQ ID NO: 1030357 - RNA, 22 nt, Molluscum contagiosum virus
agcucgcgcagcgcaucggggg

SEQ ID NO: 1030358 - RNA, 22 nt, Molluscum contagiosum virus
agcggcgacucuggcacguggu

SEQ ID NO: 1030359 - RNA, 22 nt, Molluscum contagiosum virus
agcgguagucggcgaugagccc

SEQ ID NO: 1030360 - RNA, 22 nt, Molluscum contagiosum virus
agcgggcgcgccacucccuguc

SEQ ID NO: 1030361 - RNA, 22 nt, Molluscum contagiosum virus
agacacgcgcgcgugccugacg

SEQ ID NO: 1030362 - RNA, 22 nt, Molluscum contagiosum virus
agaagcuuuccaugccgcuccc

SEQ ID NO: 1030363 - RNA, 22 nt, Molluscum contagiosum virus
agagaaacauguagaaggccag

SEQ ID NO: 1030364 - RNA, 22 nt, Molluscum contagiosum virus
agagcccgugcaugugagccau

SEQ ID NO: 1030365 - RNA, 22 nt, Molluscum contagiosum virus
agagcugcccgaguuucggaag

SEQ ID NO: 1030366 - RNA, 22 nt, Molluscum contagiosum virus
agcccgcaguauugcgcgagcc

SEQ ID NO: 1030367 - RNA, 22 nt, Molluscum contagiosum virus
agcccgucuacauuuugcggcg

SEQ ID NO: 1030368 - RNA, 22 nt, Molluscum contagiosum virus
agcacguuguucuugcgcgugg

SEQ ID NO: 1030369 - RNA, 22 nt, Molluscum contagiosum virus
agcacuucuccgaugggucggu

SEQ ID NO: 1030370 - RNA, 22 nt, Molluscum contagiosum virus
agcaauucgcuuugcagcccgc

SEQ ID NO: 1030371 - RNA, 22 nt, Molluscum contagiosum virus
agaucacgcuggaccuggcgca

SEQ ID NO: 1030372 - RNA, 22 nt, Molluscum contagiosum virus
agaucgcgaucuugaaggagua

SEQ ID NO: 1030373 - RNA, 22 nt, Molluscum contagiosum virus
agaugcucauggacgcgcucgg

SEQ ID NO: 1030374 - RNA, 22 nt, Molluscum contagiosum virus
ggggccugcaguugagagccuu

SEQ ID NO: 1030375 - RNA, 22 nt, Molluscum contagiosum virus
gggcuugucggaauuucugucu

SEQ ID NO: 1030376 - RNA, 22 nt, Molluscum contagiosum virus
gggcguccgagggcgcgugccu

SEQ ID NO: 1030377 - RNA, 22 nt, Molluscum contagiosum virus
gggcgcgccgacgucaccgggc

SEQ ID NO: 1030378 - RNA, 22 nt, Molluscum contagiosum virus
gggcgcugaacuuagcgcgcag

SEQ ID NO: 1030379 - RNA, 18 nt, Molluscum contagiosum virus
gggccugccagccggcgc

SEQ ID NO: 1030380 - RNA, 22 nt, Molluscum contagiosum virus
gcagcauuuuggugggcacgca

SEQ ID NO: 1030381 - RNA, 22 nt, Molluscum contagiosum virus
gcacgagcgaaaacgcgugucu

SEQ ID NO: 1030382 - RNA, 22 nt, Molluscum contagiosum virus
gcacgagcuggagcuggccuuc

SEQ ID NO: 1030383 - RNA, 22 nt, Molluscum contagiosum virus
gcacgcgcgcgugucuuccagc

SEQ ID NO: 1030384 - RNA, 22 nt, Molluscum contagiosum virus
gcacgcuuuccuuugcggcgag

SEQ ID NO: 1030385 - RNA, 22 nt, Molluscum contagiosum virus
gcacagcucgcgcugcgucugc

SEQ ID NO: 1030386 - RNA, 22 nt, Molluscum contagiosum virus
gcacagcugcgggcugcggcua

SEQ ID NO: 1030387 - RNA, 20 nt, Molluscum contagiosum virus
gcagucguacgugagcaugc

SEQ ID NO: 1030388 - RNA, 20 nt, Molluscum contagiosum virus
gcagguccuccgugcugggc

SEQ ID NO: 1030389 - RNA, 22 nt, Molluscum contagiosum virus
gccgcgacaucuuccgcuuccu

SEQ ID NO: 1030390 - RNA, 22 nt, Molluscum contagiosum virus
gcccuuugccacggcgagucac

SEQ ID NO: 1030391 - RNA, 22 nt, Molluscum contagiosum virus
gccgacgucaccgggcgcgcca

SEQ ID NO: 1030392 - RNA, 19 nt, Molluscum contagiosum virus
gccgucgaugcgcaccagc

SEQ ID NO: 1030393 - RNA, 22 nt, Molluscum contagiosum virus
gcuugauccugcgauggccgug

SEQ ID NO: 1030394 - RNA, 22 nt, Molluscum contagiosum virus
gcuuggcgggcagcggcgacga

SEQ ID NO: 1030395 - RNA, 22 nt, Molluscum contagiosum virus
gcugucugugcauguagcaguc

SEQ ID NO: 1030396 - RNA, 22 nt, Molluscum contagiosum virus
gcuuguguccaagcugggcugc

SEQ ID NO: 1030397 - RNA, 22 nt, Molluscum contagiosum virus
gcucgaucagguucgcggagug

SEQ ID NO: 1030398 - RNA, 22 nt, Molluscum contagiosum virus
gcucuacggcgugcugugccug

SEQ ID NO: 1030399 - RNA, 22 nt, Molluscum contagiosum virus
gcuggcgcucguagcucacgcg

SEQ ID NO: 1030400 - RNA, 22 nt, Molluscum contagiosum virus
gcugagcgcggagcuggcguug

SEQ ID NO: 1030401 - RNA, 22 nt, Molluscum contagiosum virus
gcugaguauggacgugggcggc

SEQ ID NO: 1030402 - RNA, 22 nt, Molluscum contagiosum virus
gcugcacaugugcgugcaccuc

SEQ ID NO: 1030403 - RNA, 22 nt, Molluscum contagiosum virus
gcugcacgggucguagucgugc

SEQ ID NO: 1030404 - RNA, 22 nt, Molluscum contagiosum virus
gcugccguccagguucagcgcg

SEQ ID NO: 1030405 - RNA, 22 nt, Molluscum contagiosum virus
gcugcgaguacuuccuggaaug

SEQ ID NO: 1030406 - RNA, 22 nt, Molluscum contagiosum virus
gcuagcgagcaaagucguggca

SEQ ID NO: 1030407 - RNA, 22 nt, Molluscum contagiosum virus
gcgugcuguggaagucgucaua

SEQ ID NO: 1030408 - RNA, 22 nt, Molluscum contagiosum virus
gcguucccgcagcgccugcgga

SEQ ID NO: 1030409 - RNA, 18 nt, Molluscum contagiosum virus
gcguucucggcaaugccc

SEQ ID NO: 1030410 - RNA, 22 nt, Molluscum contagiosum virus
gcucacggccuucgcguuccgg

SEQ ID NO: 1030411 - RNA, 22 nt, Molluscum contagiosum virus
gcucagcaugauguacuugaug

SEQ ID NO: 1030412 - RNA, 22 nt, Molluscum contagiosum virus
gcucagcauggaguuuugcaac

SEQ ID NO: 1030413 - RNA, 22 nt, Molluscum contagiosum virus
gcucauccaggcgccgcgcucg

SEQ ID NO: 1030414 - RNA, 22 nt, Molluscum contagiosum virus
gcuccgcgggcgccauaaagag

SEQ ID NO: 1030415 - RNA, 22 nt, Molluscum contagiosum virus
gcuccgcguggcagugcgcggg

SEQ ID NO: 1030416 - RNA, 22 nt, Molluscum contagiosum virus
gcguccagcuccagguuuagcu

SEQ ID NO: 1030417 - RNA, 22 nt, Molluscum contagiosum virus
gcgucccggcucugcucgucca

SEQ ID NO: 1030418 - RNA, 22 nt, Molluscum contagiosum virus
gcgucggacacguccagaaccu

SEQ ID NO: 1030419 - RNA, 22 nt, Molluscum contagiosum virus
gcgucgucgccguguuggaagu

SEQ ID NO: 1030420 - RNA, 22 nt, Molluscum contagiosum virus
gcgugcgccgcagugcaccauc

SEQ ID NO: 1030421 - RNA, 22 nt, Molluscum contagiosum virus
gcgugagccaauggacgccggg

SEQ ID NO: 1030422 - RNA, 22 nt, Molluscum contagiosum virus
gcggugcagcugccgcagagcc

SEQ ID NO: 1030423 - RNA, 22 nt, Molluscum contagiosum virus
gcggucgacgggaacgagguca

SEQ ID NO: 1030424 - RNA, 22 nt, Molluscum contagiosum virus
gacccaguggcguuugccguga

SEQ ID NO: 1030425 - RNA, 17 nt, Molluscum contagiosum virus
gacggaaugcgagcgcc

SEQ ID NO: 1030426 - RNA, 22 nt, Molluscum contagiosum virus
gacggcggguucucgucccgug

SEQ ID NO: 1030427 - RNA, 20 nt, Molluscum contagiosum virus
gaccuucuggggcucgaguc

SEQ ID NO: 1030428 - RNA, 22 nt, Molluscum contagiosum virus
gaaguucugcacagcacaggcc

SEQ ID NO: 1030429 - RNA, 22 nt, Molluscum contagiosum virus
gaacgacacggagcggaucgug

SEQ ID NO: 1030430 - RNA, 22 nt, Molluscum contagiosum virus
gaaguccagcacgcgcgcgugc

SEQ ID NO: 1030431 - RNA, 22 nt, Molluscum contagiosum virus
cuucgccaaugacggcgucucu

SEQ ID NO: 1030432 - RNA, 17 nt, Molluscum contagiosum virus
cuucgcgcagcuuggcc

SEQ ID NO: 1030433 - RNA, 22 nt, Molluscum contagiosum virus
cuguucgcgcagagauguuguc

SEQ ID NO: 1030434 - RNA, 22 nt, Molluscum contagiosum virus
cugggagcaccgcguggcgcgc

SEQ ID NO: 1030435 - RNA, 22 nt, Molluscum contagiosum virus
cugguguuuucguccauccacu

SEQ ID NO: 1030436 - RNA, 22 nt, Molluscum contagiosum virus
cugugcccgaguagaagagcgu

SEQ ID NO: 1030437 - RNA, 22 nt, Molluscum contagiosum virus
cugugcgcgcaggccacggggu

SEQ ID NO: 1030438 - RNA, 22 nt, Molluscum contagiosum virus
cugcgcguacgccgcaugguug

SEQ ID NO: 1030439 - RNA, 22 nt, Molluscum contagiosum virus
cuggcgggcagcucugcuggca

SEQ ID NO: 1030440 - RNA, 22 nt, Molluscum contagiosum virus
cuggacgacgugcagcaugcca

SEQ ID NO: 1030441 - RNA, 22 nt, Molluscum contagiosum virus
cguggucaagauccaagcgcaa

SEQ ID NO: 1030442 - RNA, 22 nt, Molluscum contagiosum virus
cuaggcguguccgcagcugugc

SEQ ID NO: 1030443 - RNA, 22 nt, Molluscum contagiosum virus
cuacgugcuggaacaggugcac

SEQ ID NO: 1030444 - RNA, 22 nt, Molluscum contagiosum virus
cugccaugcccacauuggcgcc

SEQ ID NO: 1030445 - RNA, 22 nt, Molluscum contagiosum virus
cugcaugcugugcuucguggag

SEQ ID NO: 1030446 - RNA, 22 nt, Molluscum contagiosum virus
cugccgcggggcuagcgcugca

SEQ ID NO: 1030447 - RNA, 22 nt, Molluscum contagiosum virus
cucguggcguugcugcugcgcg

SEQ ID NO: 1030448 - RNA, 22 nt, Molluscum contagiosum virus
cucugcgcuaucgagcacgucg

SEQ ID NO: 1030449 - RNA, 22 nt, Molluscum contagiosum virus
cucugugucggaauccucgcgg

SEQ ID NO: 1030450 - RNA, 22 nt, Molluscum contagiosum virus
cucgaugacgcggcgguugcgc

SEQ ID NO: 1030451 - RNA, 22 nt, Molluscum contagiosum virus
cucgcacacgcggaucuccuug

SEQ ID NO: 1030452 - RNA, 22 nt, Molluscum contagiosum virus
cuccgaugggucggucgugacu

SEQ ID NO: 1030453 - RNA, 22 nt, Molluscum contagiosum virus
cuccgcacacgugcucguugcc

SEQ ID NO: 1030454 - RNA, 22 nt, Molluscum contagiosum virus
cucccugcgcguacgccgcaug

SEQ ID NO: 1030455 - RNA, 22 nt, Molluscum contagiosum virus
cucgggcggguuguuggcgugg

SEQ ID NO: 1030456 - RNA, 20 nt, Molluscum contagiosum virus
cucggcgcuaugccgcgugc

SEQ ID NO: 1030457 - RNA, 22 nt, Molluscum contagiosum virus
cuccucgggcaaggaggcgagc

SEQ ID NO: 1030458 - RNA, 22 nt, Molluscum contagiosum virus
cucgcgcaucugccgcgacucc

SEQ ID NO: 1030459 - RNA, 22 nt, Molluscum contagiosum virus
cucgcgcgucuccgcguagaau

SEQ ID NO: 1030460 - RNA, 16 nt, Molluscum contagiosum virus
cguggcgcugcgcgag

SEQ ID NO: 1030461 - RNA, 22 nt, Molluscum contagiosum virus
ggcguccuucuuugcgugcgcc

SEQ ID NO: 1030462 - RNA, 22 nt, Molluscum contagiosum virus
ggcggaugcggacacguagacc

SEQ ID NO: 1030463 - RNA, 22 nt, Molluscum contagiosum virus
ggcggaugucacgcagaagugg

SEQ ID NO: 1030464 - RNA, 22 nt, Molluscum contagiosum virus
ggcguucgcagugcccgggggc

SEQ ID NO: 1030465 - RNA, 22 nt, Molluscum contagiosum virus
ggcuccucgcgcagcgccacgu

SEQ ID NO: 1030466 - RNA, 22 nt, Molluscum contagiosum virus
ggcucgaaaucugcgcgaggcc

SEQ ID NO: 1030467 - RNA, 22 nt, Molluscum contagiosum virus
ggcucgcaacuacccgcaggcc

SEQ ID NO: 1030468 - RNA, 22 nt, Molluscum contagiosum virus
ggcucgggguuggcuuugugca

SEQ ID NO: 1030469 - RNA, 22 nt, Molluscum contagiosum virus
ggcucguagauggcaggcacgu

SEQ ID NO: 1030470 - RNA, 23 nt, Molluscum contagiosum virus
gggaagcgugucacuuuccgaug

SEQ ID NO: 1030471 - RNA, 22 nt, Molluscum contagiosum virus
ggcugcagaaccgcgcgcugua

SEQ ID NO: 1030472 - RNA, 22 nt, Molluscum contagiosum virus
ggcuugcgcuuagaccuuuacg

SEQ ID NO: 1030473 - RNA, 23 nt, Molluscum contagiosum virus
ggcuugcgcuuagaccuuuacgu

SEQ ID NO: 1030474 - RNA, 22 nt, Molluscum contagiosum virus
gggcagcguguagcggcacacc

SEQ ID NO: 1030475 - RNA, 22 nt, Molluscum contagiosum virus
gggaccggcaccugcuacuccc

SEQ ID NO: 1030476 - RNA, 22 nt, Molluscum contagiosum virus
aacucgcucgcuuagggagccc

SEQ ID NO: 1030477 - RNA, 22 nt, Molluscum contagiosum virus
aacguuccgucgugugcuugcg

SEQ ID NO: 1030478 - RNA, 22 nt, Molluscum contagiosum virus
aaagcggaaaaaugcacgcccg

SEQ ID NO: 1030479 - RNA, 22 nt, Molluscum contagiosum virus
aagcacagcaggagcacgccug

SEQ ID NO: 1030480 - RNA, 19 nt, Molluscum contagiosum virus
gcgagcauguucugcgcga

SEQ ID NO: 1030481 - RNA, 22 nt, Molluscum contagiosum virus
gcgagcgccgugaacugugcag

SEQ ID NO: 1030482 - RNA, 22 nt, Molluscum contagiosum virus
aaggcgcacccucacaccuaga

SEQ ID NO: 1030483 - RNA, 22 nt, Molluscum contagiosum virus
aaggcgucgggagcaccgucag

SEQ ID NO: 1030484 - RNA, 22 nt, Molluscum contagiosum virus
aagggcucugccaccaugcgca

SEQ ID NO: 1030485 - RNA, 22 nt, Molluscum contagiosum virus
gcgaggcgcuggucucguucga

SEQ ID NO: 1030486 - RNA, 22 nt, Molluscum contagiosum virus
gcgcaagacgaguagugcgcga

SEQ ID NO: 1030487 - RNA, 22 nt, Molluscum contagiosum virus
gcgcacacgggcucgagcucgg

SEQ ID NO: 1030488 - RNA, 22 nt, Molluscum contagiosum virus
gcgccacgagcuugucccgcca

SEQ ID NO: 1030489 - RNA, 22 nt, Molluscum contagiosum virus
gcgccacuugagacucgcaugu

SEQ ID NO: 1030490 - RNA, 22 nt, Molluscum contagiosum virus
gcgcccugcgccgcacguaugg

SEQ ID NO: 1030491 - RNA, 22 nt, Molluscum contagiosum virus
gcgccgcgccuguguccgucuc

SEQ ID NO: 1030492 - RNA, 22 nt, Molluscum contagiosum virus
gcgccgcuggaggcgagcguug

SEQ ID NO: 1030493 - RNA, 22 nt, Molluscum contagiosum virus
gcgcugcuccgcucguucagca

SEQ ID NO: 1030494 - RNA, 23 nt, Molluscum contagiosum virus
gcgcgaaacgguaagcucgacgu

SEQ ID NO: 1030495 - RNA, 23 nt, Molluscum contagiosum virus
gcgcgcagacguggugcucgugg

SEQ ID NO: 1030496 - RNA, 19 nt, Molluscum contagiosum virus
gcgccgugccuggccuggc

SEQ ID NO: 1030497 - RNA, 17 nt, Molluscum contagiosum virus
gcgcgccuuucccgucc

SEQ ID NO: 1030498 - RNA, 22 nt, Molluscum contagiosum virus
gcgcgcggccauguguacgcag

SEQ ID NO: 1030499 - RNA, 22 nt, Molluscum contagiosum virus
gcgcgcuacacugugcucacgu

SEQ ID NO: 1030500 - RNA, 20 nt, Molluscum contagiosum virus
gcgcggacgcguuucuucgc

SEQ ID NO: 1030501 - RNA, 22 nt, Molluscum contagiosum virus
gcgcuggucacaugcacguacu

SEQ ID NO: 1030502 - RNA, 20 nt, Molluscum contagiosum virus
gcgcuucgagcacgcuuucc

SEQ ID NO: 1030503 - RNA, 22 nt, Molluscum contagiosum virus
gcggcccuucguguucgcggac

SEQ ID NO: 1030504 - RNA, 19 nt, Molluscum contagiosum virus
gcggcgccgucuuguugcc

SEQ ID NO: 1030505 - RNA, 22 nt, Molluscum contagiosum virus
gcggcgcuaccugcacaaggag

SEQ ID NO: 1030506 - RNA, 22 nt, Molluscum contagiosum virus
uccuccgcggccaauucgcgcu

SEQ ID NO: 1030507 - RNA, 22 nt, Molluscum contagiosum virus
uccucgguguacugcuugcagu

SEQ ID NO: 1030508 - RNA, 21 nt, Molluscum contagiosum virus
ucgagaggucaugaugguaca

SEQ ID NO: 1030509 - RNA, 19 nt, Molluscum contagiosum virus
ucgagcacgggcuuugcgu

SEQ ID NO: 1030510 - RNA, 22 nt, Molluscum contagiosum virus
uccgugcacgggcucgagcgcg

SEQ ID NO: 1030511 - RNA, 22 nt, Molluscum contagiosum virus
gucaaagaccgggcgguaguug

SEQ ID NO: 1030512 - RNA, 22 nt, Molluscum contagiosum virus
guagcucuggaugugcucggug

SEQ ID NO: 1030513 - RNA, 22 nt, Molluscum contagiosum virus
ggugcucguacuccucaugaau

SEQ ID NO: 1030514 - RNA, 22 nt, Molluscum contagiosum virus
ggugcacgcguagcacggccag

SEQ ID NO: 1030515 - RNA, 22 nt, Molluscum contagiosum virus
ggucuaagcgcaagccagagcu

SEQ ID NO: 1030516 - RNA, 19 nt, Molluscum contagiosum virus
ggucgcguuccaggugcug

SEQ ID NO: 1030517 - RNA, 18 nt, Molluscum contagiosum virus
gggucuggucgcacggag

SEQ ID NO: 1030518 - RNA, 22 nt, Molluscum contagiosum virus
gggugcagggcccuguuuugua

SEQ ID NO: 1030519 - RNA, 22 nt, Molluscum contagiosum virus
ggucgagucguucucgcgguac

SEQ ID NO: 1030520 - RNA, 20 nt, Molluscum contagiosum virus
gguacacggccucuggcggc

SEQ ID NO: 1030521 - RNA, 22 nt, Molluscum contagiosum virus
ucgugcucuaggugugagggug

SEQ ID NO: 1030522 - RNA, 23 nt, Molluscum contagiosum virus
ucggggaagagcagguggaugcc

SEQ ID NO: 1030523 - RNA, 22 nt, Molluscum contagiosum virus
ucggcgggcucggaaggugucg

SEQ ID NO: 1030524 - RNA, 22 nt, Molluscum contagiosum virus
ucggcgcaacgcuggccgccau

SEQ ID NO: 1030525 - RNA, 21 nt, Molluscum contagiosum virus
ucggagggucggagccugagc

SEQ ID NO: 1030526 - RNA, 22 nt, Molluscum contagiosum virus
ucggcaacgucggugcacguug

SEQ ID NO: 1030527 - RNA, 22 nt, Molluscum contagiosum virus
ucgcuagcagugccgccuccuc

SEQ ID NO: 1030528 - RNA, 22 nt, Molluscum contagiosum virus
ucgcguggaacuugacgccgua

SEQ ID NO: 1030529 - RNA, 22 nt, Molluscum contagiosum virus
ucgcgugugcggggcagcaggc

SEQ ID NO: 1030530 - RNA, 22 nt, Molluscum contagiosum virus
ucgcccagauccgcccagcuug

SEQ ID NO: 1030531 - RNA, 22 nt, Molluscum contagiosum virus
ucgcccguguucgcggagcugu

SEQ ID NO: 1030532 - RNA, 22 nt, Molluscum contagiosum virus
ucgcggcgccgcuguccuguga

SEQ ID NO: 1030533 - RNA, 22 nt, Molluscum contagiosum virus
ggagcagcggcucguagcuggu

SEQ ID NO: 1030534 - RNA, 22 nt, Molluscum contagiosum virus
ggacgacgaguacgugcaugug

SEQ ID NO: 1030535 - RNA, 22 nt, Molluscum contagiosum virus
ggaguagcgugcgccugcagcc

SEQ ID NO: 1030536 - RNA, 22 nt, Molluscum contagiosum virus
ggaaaacgcccagaaugccgag

SEQ ID NO: 1030537 - RNA, 22 nt, Molluscum contagiosum virus
ggaagaccgucgugcuguuguc

SEQ ID NO: 1030538 - RNA, 22 nt, Molluscum contagiosum virus
ggaagcgcucuagguugggugu

SEQ ID NO: 1030539 - RNA, 21 nt, Molluscum contagiosum virus
ggaagcgggcgagaucguggc

SEQ ID NO: 1030540 - RNA, 22 nt, Molluscum contagiosum virus
ggaaggccacuggcgagcguac

SEQ ID NO: 1030541 - RNA, 22 nt, Molluscum contagiosum virus
ggacgcgucucaacgugggagu

SEQ ID NO: 1030542 - RNA, 22 nt, Molluscum contagiosum virus
ggacgcucgugaggaaagcguu

SEQ ID NO: 1030543 - RNA, 22 nt, Molluscum contagiosum virus
ggagaaaagggguuguaguccc

SEQ ID NO: 1030544 - RNA, 22 nt, Molluscum contagiosum virus
ggcagcgaaacgcgugccucgc

SEQ ID NO: 1030545 - RNA, 22 nt, Molluscum contagiosum virus
ggaugccuuucaggggucuguc

SEQ ID NO: 1030546 - RNA, 22 nt, Molluscum contagiosum virus
ggaugcuggugucgagcucgcg

SEQ ID NO: 1030547 - RNA, 22 nt, Molluscum contagiosum virus
ggcaacgcaugcagucgacggc

SEQ ID NO: 1030548 - RNA, 22 nt, Molluscum contagiosum virus
ggcacgcuggcacuugcgggug

SEQ ID NO: 1030549 - RNA, 22 nt, Molluscum contagiosum virus
ggaucauggugugcacguucgc

SEQ ID NO: 1030550 - RNA, 22 nt, Molluscum contagiosum virus
ggcgacaucuucaugguuacgg

SEQ ID NO: 1030551 - RNA, 22 nt, Molluscum contagiosum virus
ggccugugcugugcagaacuuc

SEQ ID NO: 1030552 - RNA, 22 nt, Molluscum contagiosum virus
ggccuucgcugccuucgaagag

SEQ ID NO: 1030553 - RNA, 22 nt, Molluscum contagiosum virus
ggcgccucgagcgcgcuggacu

SEQ ID NO: 1030554 - RNA, 22 nt, Molluscum contagiosum virus
ugugugugcgcucacacggaac

SEQ ID NO: 1030555 - RNA, 19 nt, Molluscum contagiosum virus
uguccugguucuuugcgcg

SEQ ID NO: 1030556 - RNA, 22 nt, Molluscum contagiosum virus
ugucggucucgagcgccgccau

SEQ ID NO: 1030557 - RNA, 22 nt, Molluscum contagiosum virus
ugugcucgcgugccuugcgcgu

SEQ ID NO: 1030558 - RNA, 22 nt, Molluscum contagiosum virus
uguggacuccuugugcagguag

SEQ ID NO: 1030559 - RNA, 22 nt, Molluscum contagiosum virus
ugguguagaggaagcgcaggug

SEQ ID NO: 1030560 - RNA, 22 nt, Molluscum contagiosum virus
uggucgugcucgugcaccucgu

SEQ ID NO: 1030561 - RNA, 22 nt, Molluscum contagiosum virus
uggucuucuugccgcggcagcg

SEQ ID NO: 1030562 - RNA, 22 nt, Molluscum contagiosum virus
uggugcacgaguccgcgggcgg

SEQ ID NO: 1030563 - RNA, 22 nt, Molluscum contagiosum virus
uguccacguaccugucgagugc

SEQ ID NO: 1030564 - RNA, 22 nt, Molluscum contagiosum virus
ugucaagcacggaaaggaagug

SEQ ID NO: 1030565 - RNA, 22 nt, Molluscum contagiosum virus
uguccgagcgaaccgcggcagc

SEQ ID NO: 1030566 - RNA, 22 nt, Molluscum contagiosum virus
ugugauggagggucuaggcuuc

SEQ ID NO: 1030567 - RNA, 22 nt, Molluscum contagiosum virus
ugugcacgcacgcgguugcgcc

SEQ ID NO: 1030568 - RNA, 21 nt, Molluscum contagiosum virus
ugugcgaggacguggcgcugc

SEQ ID NO: 1030569 - RNA, 22 nt, Molluscum contagiosum virus
caaugcgugcgcccgucgccgu

SEQ ID NO: 1030570 - RNA, 22 nt, Molluscum contagiosum virus
caaugucugugugcgaucugga

SEQ ID NO: 1030571 - RNA, 23 nt, Molluscum contagiosum virus
auuucccugccggugcguuggca

SEQ ID NO: 1030572 - RNA, 22 nt, Molluscum contagiosum virus
cagcacgcgcagcguguccaug

SEQ ID NO: 1030573 - RNA, 22 nt, Molluscum contagiosum virus
cagacgcgacaccuuccgagcc

SEQ ID NO: 1030574 - RNA, 22 nt, Molluscum contagiosum virus
cacugacaaggucuuucucgcg

SEQ ID NO: 1030575 - RNA, 22 nt, Molluscum contagiosum virus
cagcgcgugccgcagaagguug

SEQ ID NO: 1030576 - RNA, 22 nt, Molluscum contagiosum virus
cagcaguagaaaaugcccagcc

SEQ ID NO: 1030577 - RNA, 19 nt, Molluscum contagiosum virus
cagcagugccagcgcuguc

SEQ ID NO: 1030578 - RNA, 22 nt, Molluscum contagiosum virus
cagcagugccagcgcuguccgc

SEQ ID NO: 1030579 - RNA, 22 nt, Molluscum contagiosum virus
cacgccucaagcucgggcccag

SEQ ID NO: 1030580 - RNA, 22 nt, Molluscum contagiosum virus
cacgcgcacgcucucgcuggcu

SEQ ID NO: 1030581 - RNA, 22 nt, Molluscum contagiosum virus
cacgcgcagcucaaugagcgug

SEQ ID NO: 1030582 - RNA, 22 nt, Molluscum contagiosum virus
cacgcuagucguuggcgcgccc

SEQ ID NO: 1030583 - RNA, 22 nt, Molluscum contagiosum virus
cacgacggcggguucucguccc

SEQ ID NO: 1030584 - RNA, 22 nt, Molluscum contagiosum virus
cacgggcgcggagaacugcacc

SEQ ID NO: 1030585 - RNA, 22 nt, Molluscum contagiosum virus
ccagcgccgccaggacagcauu

SEQ ID NO: 1030586 - RNA, 20 nt, Molluscum contagiosum virus
ccagcgccuguccgugggcg

SEQ ID NO: 1030587 - RNA, 22 nt, Molluscum contagiosum virus
ccaggccugggcuucggaagcg

SEQ ID NO: 1030588 - RNA, 22 nt, Molluscum contagiosum virus
uggccgugcccgccgacugccg

SEQ ID NO: 1030589 - RNA, 22 nt, Molluscum contagiosum virus
uggcuucucgacuggagggggc

SEQ ID NO: 1030590 - RNA, 22 nt, Molluscum contagiosum virus
ugggcuacagacaggcacgcgc

SEQ ID NO: 1030591 - RNA, 22 nt, Molluscum contagiosum virus
ugggcuccgugagcucguccga

SEQ ID NO: 1030592 - RNA, 22 nt, Molluscum contagiosum virus
caucuucuugaugaucuugcgc

SEQ ID NO: 1030593 - RNA, 22 nt, Molluscum contagiosum virus
caugacgcgcgugcgcaugucg

SEQ ID NO: 1030594 - RNA, 22 nt, Molluscum contagiosum virus
caugcacagccgcuuucugggc

SEQ ID NO: 1030595 - RNA, 22 nt, Molluscum contagiosum virus
caugggcucguccuguacuggc

SEQ ID NO: 1030596 - RNA, 22 nt, Molluscum contagiosum virus
cauguggaugucgcaguagaug

SEQ ID NO: 1030597 - RNA, 22 nt, Molluscum contagiosum virus
caggaauugcagcgccugcgac

SEQ ID NO: 1030598 - RNA, 22 nt, Molluscum contagiosum virus
caucagguagcgcucguccacg

SEQ ID NO: 1030599 - RNA, 22 nt, Molluscum contagiosum virus
auguuggccagguagguguucu

SEQ ID NO: 1030600 - RNA, 22 nt, Human
ccagcagagcauggggaggaag

SEQ ID NO: 1030601 - RNA, 21 nt, Human
gggcuggacaugguggcucau

SEQ ID NO: 1030602 - RNA, 22 nt, Human
cugcccuguuuggacagcccgg

SEQ ID NO: 1030603 - RNA, 22 nt, Human
ucaggggacagccagcuggagg

SEQ ID NO: 1030604 - RNA, 22 nt, Human
agagcuggcugguagcccugau

SEQ ID NO: 1030605 - RNA, 22 nt, Human
uccagccaugcaugacaaucac

SEQ ID NO: 1030606 - RNA, 22 nt, Human
cagcaugcaaguccagaugugg

SEQ ID NO: 1030607 - RNA, 22 nt, Human
guccucuguguaggcugcagac

SEQ ID NO: 1030608 - RNA, 22 nt, Human
cugggcacaggggagcagaguc

SEQ ID NO: 1030609 - RNA, 22 nt, Human
agccuccaguagcugaagagac

SEQ ID NO: 1030610 - RNA, 22 nt, Human
gcccucuggcagccuuggcugg

SEQ ID NO: 1030611 - RNA, 22 nt, Human
aaagaacagauguguggugcau

SEQ ID NO: 1030612 - RNA, 22 nt, Human
uaaaucaguuucucuuauuggu

SEQ ID NO: 1030613 - RNA, 22 nt, Human
aaaucugguucaguaaguccuc

SEQ ID NO: 1030614 - RNA, 22 nt, Human
cccuggcagaaugucucugggc

SEQ ID NO: 1030615 - RNA, 22 nt, Human
ucuggcucccagccugcucuca

SEQ ID NO: 1030616 - RNA, 22 nt, Human
uguacaguauauuucaaagcca

SEQ ID NO: 1030617 - RNA, 22 nt, Human
aaggcacuagcagaauuaguga

SEQ ID NO: 1030618 - RNA, 22 nt, Human
gcuggcagggacagcugcgugu

SEQ ID NO: 1030619 - RNA, 22 nt, Human
gccugcagccucaagggcugag

SEQ ID NO: 1030620 - RNA, 22 nt, Human
agcagagcuauucuugugcaau

SEQ ID NO: 1030621 - RNA, 22 nt, Human
aaggccagcuuguagggcuggu

SEQ ID NO: 1030622 - RNA, 23 nt, Human
gccugggacugguagugugaccu

SEQ ID NO: 1030623 - RNA, 22 nt, Human
agccuucaaccuagcuagagca

SEQ ID NO: 1030624 - RNA, 22 nt, Human
cagguggggcagcugugggagc

SEQ ID NO: 1030625 - RNA, 22 nt, Human
accagagcuuacaugcuagaaa

SEQ ID NO: 1030626 - RNA, 22 nt, Human
gcagaggcuccauuuuacagau

SEQ ID NO: 1030627 - RNA, 22 nt, Human
gcuggagccuucugcucuguug

SEQ ID NO: 1030628 - RNA, 22 nt, Human
uuaguaaauaaagucuacuuuc

SEQ ID NO: 1030629 - RNA, 22 nt, Human
aaugauggauuuagacaagcug

SEQ ID NO: 1030630 - RNA, 22 nt, Human
ggcuggaaguccaagaucaaga

SEQ ID NO: 1030631 - RNA, 23 nt, Human
aggugccaacugagagcugagag

SEQ ID NO: 1030632 - RNA, 22 nt, Human
gcucagagaaucagcagacacc

SEQ ID NO: 1030633 - RNA, 22 nt, Human
gaugcacuugccccuccucaga

SEQ ID NO: 1030634 - RNA, 22 nt, Human
cuggagcucuguguguuccuga

SEQ ID NO: 1030635 - RNA, 22 nt, Human
uggaaagaaaguaaaggcguau

SEQ ID NO: 1030636 - RNA, 22 nt, Human
acauuucucagggaguuuugcu

SEQ ID NO: 1030637 - RNA, 22 nt, Human
uggcucuguugugcugagccag

SEQ ID NO: 1030638 - RNA, 22 nt, Human
cugggcagaauuuuaggauggc

SEQ ID NO: 1030639 - RNA, 22 nt, Human
gccuggagggucccucucugga

SEQ ID NO: 1030640 - RNA, 22 nt, Human
cucagagaagucuuugcuaaac

SEQ ID NO: 1030641 - RNA, 22 nt, Human
uuccauaauaggcuuaagugaa

SEQ ID NO: 1030642 - RNA, 22 nt, Human
gcagugaaucuggcaagaauuu

SEQ ID NO: 1030643 - RNA, 20 nt, Human
ucauugcacauaauggaagc

SEQ ID NO: 1030644 - RNA, 22 nt, Human
cuuacauuaaguaagagauuga

SEQ ID NO: 1030645 - RNA, 22 nt, Human
caagggcucuuuugaggaaugu

SEQ ID NO: 1030646 - RNA, 22 nt, Human
agauuuccaucuuuuucaugug

SEQ ID NO: 1030647 - RNA, 17 nt, Human
aggcagcucagaacauc

SEQ ID NO: 1030648 - RNA, 22 nt, Human
agcuggguggagggcccacggu

SEQ ID NO: 1030649 - RNA, 22 nt, Human
aacaaaugauuguugguuggag

SEQ ID NO: 1030650 - RNA, 22 nt, Human
ucaaacuguuuacagugagaua

SEQ ID NO: 1030651 - RNA, 22 nt, Human
cagggccaaguuggugccuuuu

SEQ ID NO: 1030652 - RNA, 22 nt, Human
uaacagaaauuuuaguuagggg

SEQ ID NO: 1030653 - RNA, 22 nt, Human
auaagagcuagucuuuuccuug

SEQ ID NO: 1030654 - RNA, 22 nt, Human
gguccuggaaauugacggaaag

SEQ ID NO: 1030655 - RNA, 22 nt, Human
ucaagagaagugcuccacagua

SEQ ID NO: 1030656 - RNA, 23 nt, Human
gagagcugacugucaagacuguu

SEQ ID NO: 1030657 - RNA, 21 nt, Human
aucuuuauuacgcagagaaga

SEQ ID NO: 1030658 - RNA, 22 nt, Human
agauuucagaugcucggcaguu

SEQ ID NO: 1030659 - RNA, 22 nt, Human
ccacaaguuucagcacccagag

SEQ ID NO: 1030660 - RNA, 22 nt, Human
uacauucaacaugucacuaugu

SEQ ID NO: 1030661 - RNA, 22 nt, Human
uggccagguguggguucucaga

SEQ ID NO: 1030662 - RNA, 22 nt, Human
aucagcaagacuaggggaauac

SEQ ID NO: 1030663 - RNA, 22 nt, Human
guuagaaagugucugcuugggu

SEQ ID NO: 1030664 - RNA, 22 nt, Human
ccaaaauguuugaaugcaugug

SEQ ID NO: 1030665 - RNA, 22 nt, Human
agggcagccugagugcuggccc

SEQ ID NO: 1030666 - RNA, 22 nt, Human
cagaggccccagaacuagcucu

SEQ ID NO: 1030667 - RNA, 22 nt, Human
ggggcagauggaacagagcaca

SEQ ID NO: 1030668 - RNA, 22 nt, Human
cagacacagauaugcauauggc

SEQ ID NO: 1030669 - RNA, 22 nt, Human
cugcucugugguccaugagaca

SEQ ID NO: 1030670 - RNA, 22 nt, Human
caggccucuauggucagcugag

SEQ ID NO: 1030671 - RNA, 22 nt, Human
ugucucugagaugacucccacc

SEQ ID NO: 1030672 - RNA, 22 nt, Human
uggaggaugccauccaggauac

SEQ ID NO: 1030673 - RNA, 22 nt, Human
agugaaauaugcccauugcugu

SEQ ID NO: 1030674 - RNA, 22 nt, Human
ucccagcgcggggggaggaucc

SEQ ID NO: 1030675 - RNA, 22 nt, Human
agcuggagaugcccagcaccgg

SEQ ID NO: 1030676 - RNA, 22 nt, Human
cugcccugagggccuguguguu

SEQ ID NO: 1030677 - RNA, 22 nt, Human
aggagcuggaguccaggcaagu

SEQ ID NO: 1030678 - RNA, 22 nt, Human
ugaaggaaagagggaacauccc

SEQ ID NO: 1030679 - RNA, 23 nt, Human
uggcaccaggcauucuaggggua

SEQ ID NO: 1030680 - RNA, 23 nt, Human
uccugagaugagacagugcugcc

SEQ ID NO: 1030681 - RNA, 22 nt, Human
gagacaaaaguuggagugcaag

SEQ ID NO: 1030682 - RNA, 22 nt, Human
ggucucagaucuuuauuaaggc

SEQ ID NO: 1030683 - RNA, 22 nt, Human
ugggcagagucguggggaauag

SEQ ID NO: 1030684 - RNA, 22 nt, Human
uugccaggagcucaucugaggg

SEQ ID NO: 1030685 - RNA, 22 nt, Human
ucuggcagggguucugcacuug

SEQ ID NO: 1030686 - RNA, 22 nt, Human
ugcaggagcagagauggcugga

SEQ ID NO: 1030687 - RNA, 22 nt, Human
uugaggagcaggaugggaggcu

SEQ ID NO: 1030688 - RNA, 21 nt, Human
uccucagggccccagagcacu

SEQ ID NO: 1030689 - RNA, 22 nt, Human
acauuucucccugcaugccugc

SEQ ID NO: 1030690 - RNA, 22 nt, Human
ugcacagcgggugucugucagg

SEQ ID NO: 1030691 - RNA, 22 nt, Human
auguaucagauaaagcaugugg

SEQ ID NO: 1030692 - RNA, 22 nt, Human
caggggcuguuugccucaggcc

SEQ ID NO: 1030693 - RNA, 22 nt, Human
cugagauggccacugggucuca

SEQ ID NO: 1030694 - RNA, 22 nt, Human
ugggcccaagagagucuccaac

SEQ ID NO: 1030695 - RNA, 22 nt, Human
aguggugcugcgcgcggagcuc

SEQ ID NO: 1030696 - RNA, 22 nt, Human
uccagcagggaauuaguagucu

SEQ ID NO: 1030697 - RNA, 22 nt, Human
auaauaacaccugaauaggaaa

SEQ ID NO: 1030698 - RNA, 22 nt, Human
gaugguuuaugauagaugggaa

SEQ ID NO: 1030699 - RNA, 22 nt, Human
cuggccuuuagccccagugucu

SEQ ID NO: 1030700 - RNA, 22 nt, Human
acagaccaaaaaaggauauugg

SEQ ID NO: 1030701 - RNA, 22 nt, Human
ccucacagggccaggccccuca

SEQ ID NO: 1030702 - RNA, 22 nt, Human
uuugcauuuguuuagaaccuga

SEQ ID NO: 1030703 - RNA, 22 nt, Human
gcucaggaucagccaccucuuu

SEQ ID NO: 1030704 - RNA, 22 nt, Human
gccucccuggcccacagcagcg

SEQ ID NO: 1030705 - RNA, 22 nt, Human
cuguacauauacauuuuuuucc

SEQ ID NO: 1030706 - RNA, 22 nt, Human
ggcagcuguggacgucgucauu

SEQ ID NO: 1030707 - RNA, 22 nt, Human
cuuauguaaacuacagauaaua

SEQ ID NO: 1030708 - RNA, 22 nt, Human
gcagcugcuggaaguuccugcc

SEQ ID NO: 1030709 - RNA, 22 nt, Human
accuggcaugaagcaugccuua

SEQ ID NO: 1030710 - RNA, 23 nt, Human
aggaacugaggccuagggaggua

SEQ ID NO: 1030711 - RNA, 20 nt, Human
cccuccagcaaccaggacuu

SEQ ID NO: 1030712 - RNA, 20 nt, Human
uacagaaacaggacuuuugg

SEQ ID NO: 1030713 - RNA, 22 nt, Human
aggcugaggcagguggaucacc

SEQ ID NO: 1030714 - RNA, 23 nt, Human
ugauuuccagugagucaguggga

SEQ ID NO: 1030715 - RNA, 22 nt, Human
ucagcaggcgguuccuuguggg

SEQ ID NO: 1030716 - RNA, 22 nt, Human
ccaggaagccucagaugcugag

SEQ ID NO: 1030717 - RNA, 22 nt, Human
uagauaaauuagaaaguuuacu

SEQ ID NO: 1030718 - RNA, 22 nt, Human
ugugccugucacccucagagag

SEQ ID NO: 1030719 - RNA, 22 nt, Human
cuggcugcuggccugaggaugc

SEQ ID NO: 1030720 - RNA, 17 nt, Human
gcugagugcagggaguc

SEQ ID NO: 1030721 - RNA, 22 nt, Human
ugcaggcuguaaucugaggcua

SEQ ID NO: 1030722 - RNA, 22 nt, Human
guguaaggugaaaucaacaaau

SEQ ID NO: 1030723 - RNA, 23 nt, Human
gcugcagcuguggauguucucag

SEQ ID NO: 1030724 - RNA, 22 nt, Human
agaugagggguagaaaggacuu

SEQ ID NO: 1030725 - RNA, 20 nt, Human
caagcccucuuuagccugcc

SEQ ID NO: 1030726 - RNA, 22 nt, Human
aacagaaugcaggggaugcugc

SEQ ID NO: 1030727 - RNA, 19 nt, Human
agcagccaucgaccaugga

SEQ ID NO: 1030728 - RNA, 22 nt, Human
ggcucagaaacuaaaggcgcug

SEQ ID NO: 1030729 - RNA, 22 nt, Human
cucccugggcagauguggcucu

SEQ ID NO: 1030730 - RNA, 22 nt, Human
cugcacagagcagggcagacac

SEQ ID NO: 1030731 - RNA, 22 nt, Human
guauacauagaugaugaacaag

SEQ ID NO: 1030732 - RNA, 22 nt, Human
ugaagcaggaucguuugcuuca

SEQ ID NO: 1030733 - RNA, 22 nt, Human
gugcuuccccaagccacagccu

SEQ ID NO: 1030734 - RNA, 22 nt, Human
ggggccuguagagcuucaggga

SEQ ID NO: 1030735 - RNA, 21 nt, Human
accagcaggagaucagaagga

SEQ ID NO: 1030736 - RNA, 19 nt, Human
cagagcugcuggccucguc

SEQ ID NO: 1030737 - RNA, 22 nt, Human
caguuucugggcguucacaggu

SEQ ID NO: 1030738 - RNA, 22 nt, Human
cacagaauaaauugguaucaga

SEQ ID NO: 1030739 - RNA, 21 nt, Human
ucuggagcccuaagcugagaa

SEQ ID NO: 1030740 - RNA, 22 nt, Human
ucagggcaccaaaaaagaugcc

SEQ ID NO: 1030741 - RNA, 22 nt, Human
ucaccaggcuggaaugcagugg

SEQ ID NO: 1030742 - RNA, 22 nt, Human
cuggagcuggcuuccuuccacu

SEQ ID NO: 1030743 - RNA, 22 nt, Human
ucuggcuccacuuucuucauuu

SEQ ID NO: 1030744 - RNA, 22 nt, Human
gagcagcuguccccaaagcuuc

SEQ ID NO: 1030745 - RNA, 22 nt, Human
cuuuccuagauggccaucuuuc

SEQ ID NO: 1030746 - RNA, 22 nt, Human
gagagcuguaauagucaugucu

SEQ ID NO: 1030747 - RNA, 22 nt, Human
cuuguacauagagaagaagccu

SEQ ID NO: 1030748 - RNA, 22 nt, Human
ggcuggcacucuguccaguguc

SEQ ID NO: 1030749 - RNA, 22 nt, Human
acacaguauuacaauaggugcu

SEQ ID NO: 1030750 - RNA, 22 nt, Human
ggcagauggagaagcagcaggu

SEQ ID NO: 1030751 - RNA, 17 nt, Human
aguggcaggcagauggg

SEQ ID NO: 1030752 - RNA, 22 nt, Human
uucuuucccagaagauauguuu

SEQ ID NO: 1030753 - RNA, 22 nt, Human
ccuuucagaugggcauggaccg

SEQ ID NO: 1030754 - RNA, 22 nt, Human
acccagcuggaugcauggaggc

SEQ ID NO: 1030755 - RNA, 22 nt, Human
cagagccagcaguggggacagg

SEQ ID NO: 1030756 - RNA, 22 nt, Human
aggcagaaaauagucauccaaa

SEQ ID NO: 1030757 - RNA, 22 nt, Human
ucugcagaaguggcugggccac

SEQ ID NO: 1030758 - RNA, 22 nt, Human
ugcaggccggcccuaggccuca

SEQ ID NO: 1030759 - RNA, 22 nt, Human
uuccauauuuguguggcaaaag

SEQ ID NO: 1030760 - RNA, 21 nt, Human
ggagucauuagucauuuccuu

SEQ ID NO: 1030761 - RNA, 22 nt, Human
gugcccaggcccaaggcaccac

SEQ ID NO: 1030762 - RNA, 21 nt, Human
uuuauguacuucauagaguag

SEQ ID NO: 1030763 - RNA, 22 nt, Human
aauuaacaaauguagcugugau

SEQ ID NO: 1030764 - RNA, 22 nt, Human
ucaaguauaucuagucauuagg

SEQ ID NO: 1030765 - RNA, 22 nt, Human
ucagagccaaucauggugcauu

SEQ ID NO: 1030766 - RNA, 22 nt, Human
cccagacauaacagcagagagg

SEQ ID NO: 1030767 - RNA, 22 nt, Human
gcaggguauaauacuuagguga

SEQ ID NO: 1030768 - RNA, 22 nt, Human
cugggcaguuuuacaucauugc

SEQ ID NO: 1030769 - RNA, 22 nt, Human
ucagugcagaauagugaugcau

SEQ ID NO: 1030770 - RNA, 22 nt, Human
acacaugcugauaagaauauaa

SEQ ID NO: 1030771 - RNA, 22 nt, Human
ccuggagcuuuuccauccugga

SEQ ID NO: 1030772 - RNA, 20 nt, Human
acugcuucuuucucugaccu

SEQ ID NO: 1030773 - RNA, 22 nt, Human
ugagacaguucugcagcugggu

SEQ ID NO: 1030774 - RNA, 22 nt, Human
uguuauugagguuacuuauaag

SEQ ID NO: 1030775 - RNA, 22 nt, Human
uggagccaggagccugggaguc

SEQ ID NO: 1030776 - RNA, 19 nt, Human
ccagagcccgccagauggg

SEQ ID NO: 1030777 - RNA, 22 nt, Human
uggcucaguaaucgagucuccu

SEQ ID NO: 1030778 - RNA, 22 nt, Human
uagaaaauagggccuguggagc

SEQ ID NO: 1030779 - RNA, 22 nt, Human
uuuccucuccaccaggaggucu

SEQ ID NO: 1030780 - RNA, 22 nt, Human
cuggcccagagagcagagcuua

SEQ ID NO: 1030781 - RNA, 22 nt, Human
cguggccuuugagugagcuccc

SEQ ID NO: 1030782 - RNA, 22 nt, Human
gagccugaugaaacaggcagac

SEQ ID NO: 1030783 - RNA, 19 nt, Human
ugcuuccucaccaucuccc

SEQ ID NO: 1030784 - RNA, 22 nt, Human
uaugcacacauuagcacagggu

SEQ ID NO: 1030785 - RNA, 22 nt, Human
ggcagcugugaagugccucaca

SEQ ID NO: 1030786 - RNA, 22 nt, Human
aagcuggcaauuaucaaaacug

SEQ ID NO: 1030787 - RNA, 22 nt, Human
cggagcugccugccaagccugc

SEQ ID NO: 1030788 - RNA, 22 nt, Human
cagugcaugaaacaauaugcag

SEQ ID NO: 1030789 - RNA, 22 nt, Human
ggguggcacaggugcagagggu

SEQ ID NO: 1030790 - RNA, 22 nt, Human
aggagcagaccguaguccugca

SEQ ID NO: 1030791 - RNA, 22 nt, Human
ucaucaaagcgcuuggaguagg

SEQ ID NO: 1030792 - RNA, 22 nt, Human
ucauugcaggcauuccccugcc

SEQ ID NO: 1030793 - RNA, 22 nt, Human
ucucagagccuaacuaaccuaa

SEQ ID NO: 1030794 - RNA, 22 nt, Human
agggcugcuccuccuucaggcc

SEQ ID NO: 1030795 - RNA, 22 nt, Human
ccaggcugcucacaagcugccc

SEQ ID NO: 1030796 - RNA, 20 nt, Human
ucugcucagcccucaguggc

SEQ ID NO: 1030797 - RNA, 22 nt, Human
aaaguuagaaugauaucaacga

SEQ ID NO: 1030798 - RNA, 22 nt, Human
gauccuugcaacucugugaggu

SEQ ID NO: 1030799 - RNA, 22 nt, Human
uccaagaagucaucuaaacugu

SEQ ID NO: 1030800 - RNA, 21 nt, Human
gcagagccggggcgagaaggc

SEQ ID NO: 1030801 - RNA, 22 nt, Human
ucucugggaaugggccugggua

SEQ ID NO: 1030802 - RNA, 23 nt, Human
gagguacagcaccagugaauagg

SEQ ID NO: 1030803 - RNA, 22 nt, Human
ucauuuccucaaauucaagguu

SEQ ID NO: 1030804 - RNA, 22 nt, Human
cugaggcuuggaggggucuggu

SEQ ID NO: 1030805 - RNA, 22 nt, Human
ugcugaggagguggcugugcuu

SEQ ID NO: 1030806 - RNA, 22 nt, Human
gcucucugguuccagucaggaa

SEQ ID NO: 1030807 - RNA, 22 nt, Human
gccagagcacaggcugguagua

SEQ ID NO: 1030808 - RNA, 22 nt, Human
aaaagacaucuauuucaggcag

SEQ ID NO: 1030809 - RNA, 22 nt, Human
uuggccuuaaccucucugugcc

SEQ ID NO: 1030810 - RNA, 22 nt, Human
agugaaauggaugcugcuacug

SEQ ID NO: 1030811 - RNA, 22 nt, Human
ugucaugccauuuaaaauguuu

SEQ ID NO: 1030812 - RNA, 22 nt, Human
agagccaggaugucuucugggg

SEQ ID NO: 1030813 - RNA, 22 nt, Human
acugucugcuggccccugguua

SEQ ID NO: 1030814 - RNA, 22 nt, Human
acugaguguaggacuuugaguu

SEQ ID NO: 1030815 - RNA, 22 nt, Human
gucugcccucacgccagcuggg

SEQ ID NO: 1030816 - RNA, 22 nt, Human
uggcagcuguguccagguagaa

SEQ ID NO: 1030817 - RNA, 22 nt, Human
gccagcagccacagaagucacu

SEQ ID NO: 1030818 - RNA, 22 nt, Human
ggccaugguuggggaagacaug

SEQ ID NO: 1030819 - RNA, 22 nt, Human
gcagggcuauuggaaggagaug

SEQ ID NO: 1030820 - RNA, 19 nt, Human
ccuuggaguuccaggugga

SEQ ID NO: 1030821 - RNA, 22 nt, Human
aggagcagcccacuccuguccu

SEQ ID NO: 1030822 - RNA, 22 nt, Human
acaaaguuauucuuucagagga

SEQ ID NO: 1030823 - RNA, 22 nt, Human
ucuggaaguuagaggaggaaag

SEQ ID NO: 1030824 - RNA, 22 nt, Human
uuguguccugauuugacacaau

SEQ ID NO: 1030825 - RNA, 22 nt, Human
agcugcuguccuaggcacugua

SEQ ID NO: 1030826 - RNA, 17 nt, Human
gugcagggaugaaggau

SEQ ID NO: 1030827 - RNA, 22 nt, Human
ugggcagaguagcucagaagaa

SEQ ID NO: 1030828 - RNA, 22 nt, Human
cuggagccacugggucuuguau

SEQ ID NO: 1030829 - RNA, 22 nt, Human
uggcgugcccuccagacuuggc

SEQ ID NO: 1030830 - RNA, 22 nt, Human
ggccaggaagggaagaucagca

SEQ ID NO: 1030831 - RNA, 23 nt, Human
caguacuuaguguagcguuaauu

SEQ ID NO: 1030832 - RNA, 22 nt, Human
gcaagcaguuguggcuucugag

SEQ ID NO: 1030833 - RNA, 22 nt, Human
gugucauguagaaauugaugaa

SEQ ID NO: 1030834 - RNA, 22 nt, Human
accuggcacuacaggcaccugu

SEQ ID NO: 1030835 - RNA, 18 nt, Human
gggcaagcggcugucacc

SEQ ID NO: 1030836 - RNA, 19 nt, Human
ugcagccacgugagagacu

SEQ ID NO: 1030837 - RNA, 19 nt, Human
cuguggcugaccucuggcc

SEQ ID NO: 1030838 - RNA, 22 nt, Human
agaaguuaccacauacuucucu

SEQ ID NO: 1030839 - RNA, 22 nt, Human
ggcuucugagugcucugcuguu

SEQ ID NO: 1030840 - RNA, 22 nt, Human
guuauguaucuugauugggugg

SEQ ID NO: 1030841 - RNA, 22 nt, Human
uggccugggcaugaagcaucgu

SEQ ID NO: 1030842 - RNA, 20 nt, Human
ccuggagccuggaaggaguc

SEQ ID NO: 1030843 - RNA, 22 nt, Human
ucccuggguccugcuugcucuc

SEQ ID NO: 1030844 - RNA, 23 nt, Human
ccaaagucgaagucuaguccaga

SEQ ID NO: 1030845 - RNA, 22 nt, Human
cugugucccuugucccagagcc

SEQ ID NO: 1030846 - RNA, 22 nt, Human
agggcagagcacugaauuggga

SEQ ID NO: 1030847 - RNA, 22 nt, Human
cagccuccugggacacucaccg

SEQ ID NO: 1030848 - RNA, 22 nt, Human
uaacagaaaagaacugaguuug

SEQ ID NO: 1030849 - RNA, 22 nt, Human
aaaguuuccugcuaagugcuau

SEQ ID NO: 1030850 - RNA, 22 nt, Human
gccuaggagacaagcgugaaag

SEQ ID NO: 1030851 - RNA, 22 nt, Human
ccucuuccacugggccccaucc

SEQ ID NO: 1030852 - RNA, 22 nt, Human
cacauggggcgcugcauuggcc

SEQ ID NO: 1030853 - RNA, 19 nt, Human
cuggggcuuugguacugcc

SEQ ID NO: 1030854 - RNA, 16 nt, Human
ccaccugcagcucuca

SEQ ID NO: 1030855 - RNA, 22 nt, Human
ggcaaaaaccacaauuacuuuu

SEQ ID NO: 1030856 - RNA, 19 nt, Human
uccucaggggcucacagac

SEQ ID NO: 1030857 - RNA, 22 nt, Human
agagcuuagaauuucagaugau

SEQ ID NO: 1030858 - RNA, 23 nt, Human
uggggccaagugaggaagggucu

SEQ ID NO: 1030859 - RNA, 22 nt, Human
ucucucagaggccaggguccug

SEQ ID NO: 1030860 - RNA, 22 nt, Human
uacagaaaucacaucgcuuuga

SEQ ID NO: 1030861 - RNA, 22 nt, Human
gucccaggcagagucaggaggg

SEQ ID NO: 1030862 - RNA, 22 nt, Human
ggugcccaccugucuuccugga

SEQ ID NO: 1030863 - RNA, 22 nt, Human
ucccagagguugagucacuuau

SEQ ID NO: 1030864 - RNA, 22 nt, Human
aaggcacuugcccagagcugca

SEQ ID NO: 1030865 - RNA, 22 nt, Human
acagagcuuaggaugacuccca

SEQ ID NO: 1030866 - RNA, 20 nt, Human
cugcucugcuuugcaggugg

SEQ ID NO: 1030867 - RNA, 22 nt, Human
aucagcaagauguaauuucuau

SEQ ID NO: 1030868 - RNA, 22 nt, Human
ccaaagagcuagaauuauaggc

SEQ ID NO: 1030869 - RNA, 22 nt, Human
agggcagaaaccaccuugaugg

SEQ ID NO: 1030870 - RNA, 22 nt, Human
ccagcuggagcucgcagauagg

SEQ ID NO: 1030871 - RNA, 22 nt, Human
agggccugcaucaggagcuugg

SEQ ID NO: 1030872 - RNA, 22 nt, Human
uuugcauuccugccugcauuca

SEQ ID NO: 1030873 - RNA, 18 nt, Human
agggaucaucacugcagc

SEQ ID NO: 1030874 - RNA, 22 nt, Human
uccauggggcccaggaugagag

SEQ ID NO: 1030875 - RNA, 22 nt, Human
gaggugagaagggggucagaug

SEQ ID NO: 1030876 - RNA, 22 nt, Human
gucccagaugucuggaacuccc

SEQ ID NO: 1030877 - RNA, 22 nt, Human
ccagcacugcucucagacugag

SEQ ID NO: 1030878 - RNA, 22 nt, Human
gagcucccaggccccagcaagg

SEQ ID NO: 1030879 - RNA, 22 nt, Human
aacuuuauuguuaggggcuaaa

SEQ ID NO: 1030880 - RNA, 22 nt, Human
cugcagagguugguucuaagau

SEQ ID NO: 1030881 - RNA, 22 nt, Human
aucuggcuggauucuuagcguu

SEQ ID NO: 1030882 - RNA, 22 nt, Human
agccuggauucgugcauccaca

SEQ ID NO: 1030883 - RNA, 22 nt, Human
caggcagccuucucgucucaca

SEQ ID NO: 1030884 - RNA, 22 nt, Human
cagcagagguuggaacaguucu

SEQ ID NO: 1030885 - RNA, 22 nt, Human
ugucccaggccucauguugcca

SEQ ID NO: 1030886 - RNA, 22 nt, Human
ucauugcaguugaguuguguua

SEQ ID NO: 1030887 - RNA, 22 nt, Human
aguguccccuacagaggcauuc

SEQ ID NO: 1030888 - RNA, 23 nt, Human
uugauacagaagaaucaguuugu

SEQ ID NO: 1030889 - RNA, 22 nt, Human
caggugggaccaugauagggca

SEQ ID NO: 1030890 - RNA, 22 nt, Human
ucuccucaccaccagcagcaga

SEQ ID NO: 1030891 - RNA, 22 nt, Human
ugcagaagacacaagguaacgu

SEQ ID NO: 1030892 - RNA, 22 nt, Human
caggggcuuaagugacagaagg

SEQ ID NO: 1030893 - RNA, 22 nt, Human
gcaggagcccuggcauguucuu

SEQ ID NO: 1030894 - RNA, 22 nt, Human
aagugaaacauguaucucuuua

SEQ ID NO: 1030895 - RNA, 22 nt, Human
cuuccugcaggacagccaucug

SEQ ID NO: 1030896 - RNA, 22 nt, Human
uacagaaaaacuggcauugaag

SEQ ID NO: 1030897 - RNA, 22 nt, Human
gggaggugauggcaagcagcgg

SEQ ID NO: 1030898 - RNA, 22 nt, Human
cugaggugcuagggucccugcu

SEQ ID NO: 1030899 - RNA, 22 nt, Human
auuguacaugcagugagucauc

SEQ ID NO: 1030900 - RNA, 22 nt, Human
uucaaaggcaggauagcagcug

SEQ ID NO: 1030901 - RNA, 22 nt, Human
gcugggagucgcgucuguggcc

SEQ ID NO: 1030902 - RNA, 22 nt, Human
ggcuggcaagugucugcucaug

SEQ ID NO: 1030903 - RNA, 22 nt, Human
ccacaggggcccacgagccgcu

SEQ ID NO: 1030904 - RNA, 22 nt, Human
uuuucuuauggugaagcacaaa

SEQ ID NO: 1030905 - RNA, 22 nt, Human
uuaacagauguuuauggagcau

SEQ ID NO: 1030906 - RNA, 22 nt, Human
cucagggcuugaguguccagga

SEQ ID NO: 1030907 - RNA, 22 nt, Human
ccauuguaguaucuguuuuagu

SEQ ID NO: 1030908 - RNA, 22 nt, Human
guuugaaaaaagcaguauguaa

SEQ ID NO: 1030909 - RNA, 22 nt, Human
agugugaccuuauuuggaaaca

SEQ ID NO: 1030910 - RNA, 22 nt, Human
gaaaucugucuuuguuugaaua

SEQ ID NO: 1030911 - RNA, 22 nt, Human
gcugcucucagagcucaugcug

SEQ ID NO: 1030912 - RNA, 22 nt, Human
ugcucccaggcucuguggucug

SEQ ID NO: 1030913 - RNA, 22 nt, Human
ggccugcuauuggugggcagac

SEQ ID NO: 1030914 - RNA, 21 nt, Human
acagaugggaugagcacacug

SEQ ID NO: 1030915 - RNA, 22 nt, Human
gaugaagccugacuucucggug

SEQ ID NO: 1030916 - RNA, 22 nt, Human
guuaauaaagguauagaaucag

SEQ ID NO: 1030917 - RNA, 22 nt, Human
uauauguaagcuauguaagagu

SEQ ID NO: 1030918 - RNA, 22 nt, Human
uuguaacaaucugucauaaaug

SEQ ID NO: 1030919 - RNA, 16 nt, Human
gggagggaguuggugg

SEQ ID NO: 1030920 - RNA, 22 nt, Human
gccuggcccagggcucuuguug

SEQ ID NO: 1030921 - RNA, 22 nt, Human
gcugucugcugugcacugagca

SEQ ID NO: 1030922 - RNA, 22 nt, Human
uuugugaagggaacagaagugu

SEQ ID NO: 1030923 - RNA, 22 nt, Human
cugcccugagucaugccagaug

SEQ ID NO: 1030924 - RNA, 22 nt, Human
agaaaaggauugauggaucaga

SEQ ID NO: 1030925 - RNA, 22 nt, Human
agcuuaggaggaugaugaacau

SEQ ID NO: 1030926 - RNA, 22 nt, Human
gccugagauucugcauuucuaa

SEQ ID NO: 1030927 - RNA, 22 nt, Human
ggcagcucaccucugguccagg

SEQ ID NO: 1030928 - RNA, 23 nt, Human
aggcccugccugucccucuuuuu

SEQ ID NO: 1030929 - RNA, 22 nt, Human
auaugucgcuacaucauuagau

SEQ ID NO: 1030930 - RNA, 22 nt, Human
caggccucuccuuagucuggca

SEQ ID NO: 1030931 - RNA, 22 nt, Human
uagaacagaguuccagugauca

SEQ ID NO: 1030932 - RNA, 22 nt, Human
acagcuugcaauggcuuucaac

SEQ ID NO: 1030933 - RNA, 22 nt, Human
ggggacaguuaaagaccaagac

SEQ ID NO: 1030934 - RNA, 22 nt, Human
aucaaaguaggcauauguuuuu

SEQ ID NO: 1030935 - RNA, 22 nt, Human
gcucugagaggugcagcaguaa

SEQ ID NO: 1030936 - RNA, 22 nt, Human
ucucucagcuuugagaccugcu

SEQ ID NO: 1030937 - RNA, 22 nt, Human
ugucuuccucuuggcuugagcu

SEQ ID NO: 1030938 - RNA, 22 nt, Human
ugcagcauucuuggccacuacu

SEQ ID NO: 1030939 - RNA, 19 nt, Human
ggcccaaguacugagugcc

SEQ ID NO: 1030940 - RNA, 22 nt, Human
gaguuauucuagguccuuugua

SEQ ID NO: 1030941 - RNA, 22 nt, Human
ugagggaguuggguguauagga

SEQ ID NO: 1030942 - RNA, 22 nt, Human
cagugcaguugguggcaggggu

SEQ ID NO: 1030943 - RNA, 22 nt, Human
ucccagauuguugauggcuuaa

SEQ ID NO: 1030944 - RNA, 22 nt, Human
cccagcauuucugggcugcacu

SEQ ID NO: 1030945 - RNA, 22 nt, Human
aguuuuucugggaggcacugcu

SEQ ID NO: 1030946 - RNA, 22 nt, Human
ccugguguugugaaguagccgu

SEQ ID NO: 1030947 - RNA, 22 nt, Human
agcagccagugggagugauaca

SEQ ID NO: 1030948 - RNA, 22 nt, Human
uggcagagucaucacaucugga

SEQ ID NO: 1030949 - RNA, 22 nt, Human
cagaagaaaguggggagacaag

SEQ ID NO: 1030950 - RNA, 22 nt, Human
cagcucugggugacaggagggc

SEQ ID NO: 1030951 - RNA, 23 nt, Human
uggcagugaucaaaagcuuacau

SEQ ID NO: 1030952 - RNA, 23 nt, Human
uggugccucagaagcagugggcu

SEQ ID NO: 1030953 - RNA, 22 nt, Human
gugaaaucugaggcccaugaug

SEQ ID NO: 1030954 - RNA, 22 nt, Human
cagaagcagugagagaugugca

SEQ ID NO: 1030955 - RNA, 22 nt, Human
ugcagccaucgcagagucugua

SEQ ID NO: 1030956 - RNA, 22 nt, Human
ugaagacagaccaaggagaaug

SEQ ID NO: 1030957 - RNA, 20 nt, Human
auauguguacguguauacau

SEQ ID NO: 1030958 - RNA, 22 nt, Human
accagagauggggcuucucugu

SEQ ID NO: 1030959 - RNA, 22 nt, Human
agaugggcgcccuggacugagg

SEQ ID NO: 1030960 - RNA, 19 nt, Human
gcaggguguugacuguccc

SEQ ID NO: 1030961 - RNA, 22 nt, Human
aggagagucuugagucacuggu

SEQ ID NO: 1030962 - RNA, 20 nt, Human
aagcaauauagugcaaaugu

SEQ ID NO: 1030963 - RNA, 22 nt, Human
agaggccuuucuguugagugaa

SEQ ID NO: 1030964 - RNA, 22 nt, Human
agccaagcugaucuccugcuga

SEQ ID NO: 1030965 - RNA, 22 nt, Human
ucggagcuguagaugaaacccu

SEQ ID NO: 1030966 - RNA, 22 nt, Human
ucacugcagacaaccucaguca

SEQ ID NO: 1030967 - RNA, 20 nt, Human
guggccucucacauucugag

SEQ ID NO: 1030968 - RNA, 22 nt, Human
auguagcaucuauccugauaaa

SEQ ID NO: 1030969 - RNA, 22 nt, Human
ugggaggaucgcuugagcccag

SEQ ID NO: 1030970 - RNA, 22 nt, Human
augucuuucucacagccaguuc

SEQ ID NO: 1030971 - RNA, 22 nt, Human
uacuuuagaaggaaauaaguuc

SEQ ID NO: 1030972 - RNA, 22 nt, Human
cugggguggaggagcuccccug

SEQ ID NO: 1030973 - RNA, 22 nt, Human
uuuauuauucucuggagaaugu

SEQ ID NO: 1030974 - RNA, 22 nt, Human
aggaaaugcugaugcuccugga

SEQ ID NO: 1030975 - RNA, 22 nt, Human
aaaguguagagacuuuggaacc

SEQ ID NO: 1030976 - RNA, 20 nt, Human
cagagaccugucuucacaga

SEQ ID NO: 1030977 - RNA, 22 nt, Human
ggagugggaacaaugacauggu

SEQ ID NO: 1030978 - RNA, 22 nt, Human
auuugcagagcucugaauuuug

SEQ ID NO: 1030979 - RNA, 22 nt, Human
aagggcagcuauuaucgucauc

SEQ ID NO: 1030980 - RNA, 22 nt, Human
cuggggggagcugcguccagca

SEQ ID NO: 1030981 - RNA, 21 nt, Human
cucacaggaugcaguguuacu

SEQ ID NO: 1030982 - RNA, 22 nt, Human
uaauaucuacuucauagaguuu

SEQ ID NO: 1030983 - RNA, 22 nt, Human
acagagguguguguaggacagu

SEQ ID NO: 1030984 - RNA, 22 nt, Human
uucuuuggggaauauucugguu

SEQ ID NO: 1030985 - RNA, 22 nt, Human
ugucagaacucuauugaugucc

SEQ ID NO: 1030986 - RNA, 22 nt, Human
gucuuucuuaauucaagugcuu

SEQ ID NO: 1030987 - RNA, 22 nt, Human
aacugcauucagaaagcucacu

SEQ ID NO: 1030988 - RNA, 22 nt, Human
guagaagugaugucauguuaua

SEQ ID NO: 1030989 - RNA, 22 nt, Human
aucaaaguuucccagaaguugu

SEQ ID NO: 1030990 - RNA, 23 nt, Human
ccagcucccaggucugaggacug

SEQ ID NO: 1030991 - RNA, 22 nt, Human
ggccucugguucguggugaccu

SEQ ID NO: 1030992 - RNA, 19 nt, Human
uaaaaugucuguggucagu

SEQ ID NO: 1030993 - RNA, 22 nt, Human
cccuggaguccuggcaguugau

SEQ ID NO: 1030994 - RNA, 22 nt, Human
aaucacaauuacuuuugcacca

SEQ ID NO: 1030995 - RNA, 22 nt, Human
aggucauuuccuuagaggcaga

SEQ ID NO: 1030996 - RNA, 22 nt, Human
gcagagcauguccucaggacag

SEQ ID NO: 1030997 - RNA, 22 nt, Human
cagccaggcccccgagucguug

SEQ ID NO: 1030998 - RNA, 22 nt, Human
ggcauggcucggagucagaaca

SEQ ID NO: 1030999 - RNA, 22 nt, Human
ggaugcaggggcagcagagccu

SEQ ID NO: 1031000 - RNA, 18 nt, Human
ugucucugaauuccagug

SEQ ID NO: 1031001 - RNA, 22 nt, Human
cucuugaagcaggggccaguuc

SEQ ID NO: 1031002 - RNA, 21 nt, Human
caugaagccgguucccuguuu

SEQ ID NO: 1031003 - RNA, 22 nt, Human
uuaauuuauguccaaaccagau

SEQ ID NO: 1031004 - RNA, 18 nt, Human
gagcugccauauuuaguu

SEQ ID NO: 1031005 - RNA, 22 nt, Human
uggcuggcgccgggcuagccac

SEQ ID NO: 1031006 - RNA, 22 nt, Human
aucacaaaggcugcuucaugau

SEQ ID NO: 1031007 - RNA, 22 nt, Human
gccuggagaccugcuccucuac

SEQ ID NO: 1031008 - RNA, 20 nt, Human
agcccuguuuccuggagaga

SEQ ID NO: 1031009 - RNA, 22 nt, Human
ggacucuguuuuccugaucacu

SEQ ID NO: 1031010 - RNA, 22 nt, Human
ugugcugguacaugugaggaug

SEQ ID NO: 1031011 - RNA, 22 nt, Human
augggagugacagggccacugg

SEQ ID NO: 1031012 - RNA, 21 nt, Human
uauuucuuugacucucucccu

SEQ ID NO: 1031013 - RNA, 22 nt, Human
gaggagagggcugcgggcccac

SEQ ID NO: 1031014 - RNA, 22 nt, Human
cuacuuuaauuuucugcagaga

SEQ ID NO: 1031015 - RNA, 22 nt, Human
aagucauugguagcuugauagg

SEQ ID NO: 1031016 - RNA, 22 nt, Human
ugcagaagaccuuccagggcug

SEQ ID NO: 1031017 - RNA, 21 nt, Human
ccugggagaucagcugccuuc

SEQ ID NO: 1031018 - RNA, 22 nt, Human
acccugagggguauagcagaag

SEQ ID NO: 1031019 - RNA, 18 nt, Human
uggccuggagacaacucu

SEQ ID NO: 1031020 - RNA, 22 nt, Human
ccuagagcucugcuuuaucuaa

SEQ ID NO: 1031021 - RNA, 22 nt, Human
ggugaggcagguggcugcugag

SEQ ID NO: 1031022 - RNA, 22 nt, Human
ccugggcagguguggcuucccc

SEQ ID NO: 1031023 - RNA, 22 nt, Human
gcugggcagccuggccgcugcc

SEQ ID NO: 1031024 - RNA, 21 nt, Human
ugccagcauuaaacagucauu

SEQ ID NO: 1031025 - RNA, 22 nt, Human
gugggcaaggucccugccagcu

SEQ ID NO: 1031026 - RNA, 22 nt, Human
ccugugucagccccugccucca

SEQ ID NO: 1031027 - RNA, 22 nt, Human
gugggugauguacuggaggcca

SEQ ID NO: 1031028 - RNA, 22 nt, Human
uucacaggaauguaggggucuu

SEQ ID NO: 1031029 - RNA, 20 nt, Human
ccuccuggucaggugugcag

SEQ ID NO: 1031030 - RNA, 22 nt, Human
ugggccugugaugcugggcuau

SEQ ID NO: 1031031 - RNA, 22 nt, Human
ucucagagauguuagggaagag

SEQ ID NO: 1031032 - RNA, 22 nt, Human
uacaaaugaaccaacuuugaug

SEQ ID NO: 1031033 - RNA, 22 nt, Human
cagagcagaaaccugggugauu

SEQ ID NO: 1031034 - RNA, 22 nt, Human
ccagcccucacugaggccucuc

SEQ ID NO: 1031035 - RNA, 21 nt, Human
uggcucugcucagagcagucc

SEQ ID NO: 1031036 - RNA, 22 nt, Human
caguuucuucaucaguuaagca

SEQ ID NO: 1031037 - RNA, 22 nt, Human
agggaagaaaauccaucgcugc

SEQ ID NO: 1031038 - RNA, 22 nt, Human
auggaaagccaguguuccauca

SEQ ID NO: 1031039 - RNA, 22 nt, Human
agccacagucaaccuguccaua

SEQ ID NO: 1031040 - RNA, 22 nt, Human
ucaugcacaugugucaccauca

SEQ ID NO: 1031041 - RNA, 22 nt, Human
uaauuuaauuucaugccagccu

SEQ ID NO: 1031042 - RNA, 22 nt, Human
auggacagugugaagcagauag

SEQ ID NO: 1031043 - RNA, 22 nt, Human
ggcacugaauuucuuggcaucu

SEQ ID NO: 1031044 - RNA, 22 nt, Human
agcugcccugggucuugcugcu

SEQ ID NO: 1031045 - RNA, 22 nt, Human
ugucccagggaaggcccagcac

SEQ ID NO: 1031046 - RNA, 21 nt, Human
uguucacauggagcagaaugu

SEQ ID NO: 1031047 - RNA, 20 nt, Human
ccugggguacacuggcaugu

SEQ ID NO: 1031048 - RNA, 22 nt, Human
acugcagcaaagcccgugucuu

SEQ ID NO: 1031049 - RNA, 22 nt, Human
gcuggccuuugaggaagcugcg

SEQ ID NO: 1031050 - RNA, 21 nt, Human
ugcuggccucaagggugacuu

SEQ ID NO: 1031051 - RNA, 22 nt, Human
cuggaaugccucccugucagag

SEQ ID NO: 1031052 - RNA, 22 nt, Human
gggacuggaacuacuggugcag

SEQ ID NO: 1031053 - RNA, 22 nt, Human
cagggcagagggaaacuccuuu

SEQ ID NO: 1031054 - RNA, 22 nt, Human
ucuagaaauuuugccuuguauu

SEQ ID NO: 1031055 - RNA, 22 nt, Human
cagcuccccucuguggggcagu

SEQ ID NO: 1031056 - RNA, 19 nt, Human
acccucucagugccugagg

SEQ ID NO: 1031057 - RNA, 22 nt, Human
aagacccacaaggcugaauguu

SEQ ID NO: 1031058 - RNA, 22 nt, Human
agcaguggaccucagugcuauu

SEQ ID NO: 1031059 - RNA, 22 nt, Human
ucuguuccauguuuuguuccau

SEQ ID NO: 1031060 - RNA, 22 nt, Human
ugugugccagccuacgaggagc

SEQ ID NO: 1031061 - RNA, 22 nt, Human
acguuuucuagagaauaugcag

SEQ ID NO: 1031062 - RNA, 22 nt, Human
uucaagauggccccagugagcc

SEQ ID NO: 1031063 - RNA, 22 nt, Human
caugaagcacagcucucuuuuu

SEQ ID NO: 1031064 - RNA, 22 nt, Human
ggccucaguuucuccauggguu

SEQ ID NO: 1031065 - RNA, 22 nt, Human
ugggggagccuucacaguagcu

SEQ ID NO: 1031066 - RNA, 17 nt, Human
ucaggcugggugcagug

SEQ ID NO: 1031067 - RNA, 22 nt, Human
acacagggcagagagcuggcuc

SEQ ID NO: 1031068 - RNA, 22 nt, Human
ggcucugguugaccaugauggc

SEQ ID NO: 1031069 - RNA, 22 nt, Human
cacagaaucugugacuccaaga

SEQ ID NO: 1031070 - RNA, 22 nt, Human
agagcccugaagcagagcuaaa

SEQ ID NO: 1031071 - RNA, 22 nt, Human
aagaaauuaaugugccauuacu

SEQ ID NO: 1031072 - RNA, 22 nt, Human
ccaggcaggcagcguucucagg

SEQ ID NO: 1031073 - RNA, 22 nt, Human
guacauuucauuuaaaugaugu

SEQ ID NO: 1031074 - RNA, 22 nt, Human
ccauuuguucgcccagcuccaa

SEQ ID NO: 1031075 - RNA, 20 nt, Human
gggguuggcuggcacaggga

SEQ ID NO: 1031076 - RNA, 22 nt, Human
gcauuguccugcuucugagugu

SEQ ID NO: 1031077 - RNA, 22 nt, Human
ccaggguggaggcuggauggag

SEQ ID NO: 1031078 - RNA, 20 nt, Human
aguagcagugugacauugac

SEQ ID NO: 1031079 - RNA, 22 nt, Human
aucuggcugagcgaggcccaca

SEQ ID NO: 1031080 - RNA, 22 nt, Human
ugaagcaaacgcuucuguuccu

SEQ ID NO: 1031081 - RNA, 22 nt, Human
gcugucuguucgagcguguguu

SEQ ID NO: 1031082 - RNA, 22 nt, Human
auucuggauuaucaguccacca

SEQ ID NO: 1031083 - RNA, 22 nt, Human
ucucaggguuuguacaagugua

SEQ ID NO: 1031084 - RNA, 22 nt, Human
ucugagggugggagaaggagcu

SEQ ID NO: 1031085 - RNA, 22 nt, Human
aggacccugagcgggcaugccg

SEQ ID NO: 1031086 - RNA, 22 nt, Human
ccagagccggcucccucagcuu

SEQ ID NO: 1031087 - RNA, 22 nt, Human
caguggcagagaacagagaccu

SEQ ID NO: 1031088 - RNA, 22 nt, Human
ccagccuggguguuagaagaca

SEQ ID NO: 1031089 - RNA, 22 nt, Human
acauuuacagugcuagacaauc

SEQ ID NO: 1031090 - RNA, 22 nt, Human
gcuucucuggccugcagggcau

SEQ ID NO: 1031091 - RNA, 22 nt, Human
aaggcagcagugcacgacugau

SEQ ID NO: 1031092 - RNA, 22 nt, Human
ggggcuguuuuuggaauggcug

SEQ ID NO: 1031093 - RNA, 22 nt, Human
cccaggcagggacgugcucugg

SEQ ID NO: 1031094 - RNA, 22 nt, Human
gagccuccuccuggugugccga

SEQ ID NO: 1031095 - RNA, 22 nt, Human
cucaaggacuuauucaugccug

SEQ ID NO: 1031096 - RNA, 22 nt, Human
cucugggcaggaccaguggacc

SEQ ID NO: 1031097 - RNA, 22 nt, Human
ugggcagaaaucaguaucagau

SEQ ID NO: 1031098 - RNA, 22 nt, Human
gccucugcaccaguacugugcc

SEQ ID NO: 1031099 - RNA, 22 nt, Human
ggcuucuccagguacugagcau

SEQ ID NO: 1031100 - RNA, 22 nt, Human
augaacacauguacacauuucu

SEQ ID NO: 1031101 - RNA, 22 nt, Human
cuacauuuggagaguauaggaa

SEQ ID NO: 1031102 - RNA, 22 nt, Human
ggucucagcccucgccagcagc

SEQ ID NO: 1031103 - RNA, 22 nt, Human
uagaaguuaaaggaauacagaa

SEQ ID NO: 1031104 - RNA, 20 nt, Human
agcugaggcaccugagguua

SEQ ID NO: 1031105 - RNA, 22 nt, Human
auuucuuccucugucaguaacu

SEQ ID NO: 1031106 - RNA, 22 nt, Human
cccugcagcuuuugcauaguca

SEQ ID NO: 1031107 - RNA, 22 nt, Human
agcaauaugacauugcuacauc

SEQ ID NO: 1031108 - RNA, 22 nt, Human
cugaggcucccucgggucugcu

SEQ ID NO: 1031109 - RNA, 22 nt, Human
ugagccagaguggagugugccu

SEQ ID NO: 1031110 - RNA, 22 nt, Human
ucugagagguuaagcaauuuga

SEQ ID NO: 1031111 - RNA, 22 nt, Human
ugggcagcagcaaagccagacu

SEQ ID NO: 1031112 - RNA, 22 nt, Human
ugcugccuuugggaccuggccu

SEQ ID NO: 1031113 - RNA, 22 nt, Human
ucaggcacugcuuucugauaug

SEQ ID NO: 1031114 - RNA, 22 nt, Human
cccuggcauaaaacuucuccag

SEQ ID NO: 1031115 - RNA, 21 nt, Human
ccuccaggugauuccgugcuc

SEQ ID NO: 1031116 - RNA, 22 nt, Human
cacucugagaaguacaagcucc

SEQ ID NO: 1031117 - RNA, 22 nt, Human
cccaggcagagagcuggugagc

SEQ ID NO: 1031118 - RNA, 19 nt, Human
agcagccauagacaauaug

SEQ ID NO: 1031119 - RNA, 22 nt, Human
gcaggagccacuucagggaugc

SEQ ID NO: 1031120 - RNA, 23 nt, Human
ucuggcucuaugugacagcucuc

SEQ ID NO: 1031121 - RNA, 22 nt, Human
agaaugcaguuugaaauaaggu

SEQ ID NO: 1031122 - RNA, 22 nt, Human
uuacaaagagaaguuguagaau

SEQ ID NO: 1031123 - RNA, 22 nt, Human
gcagcuggagccagccagacac

SEQ ID NO: 1031124 - RNA, 22 nt, Human
cggcuggguagaggugccgggu

SEQ ID NO: 1031125 - RNA, 22 nt, Human
ucuuuccuaggugauaugcaau

SEQ ID NO: 1031126 - RNA, 22 nt, Human
cuggagcucuccagagccccgu

SEQ ID NO: 1031127 - RNA, 23 nt, Human
aacaauagguuuuggcagaauag

SEQ ID NO: 1031128 - RNA, 22 nt, Human
gugugcaguagagaaagagcag

SEQ ID NO: 1031129 - RNA, 18 nt, Human
gaggauggaaggagaugc

SEQ ID NO: 1031130 - RNA, 22 nt, Human
gcugugugcucacguaguggaa

SEQ ID NO: 1031131 - RNA, 22 nt, Human
cuggcucaggguggucuggguc

SEQ ID NO: 1031132 - RNA, 22 nt, Human
gcuguguccucacacagccuuu

SEQ ID NO: 1031133 - RNA, 22 nt, Human
aguuuaugaaacacagauuuga

SEQ ID NO: 1031134 - RNA, 22 nt, Human
ggcugggagcuggacaggccgg

SEQ ID NO: 1031135 - RNA, 22 nt, Human
agccaagcaccacuggcacucg

SEQ ID NO: 1031136 - RNA, 22 nt, Human
caguacuuaacuuauaggagag

SEQ ID NO: 1031137 - RNA, 22 nt, Human
cuggagcagguuuaggaguccc

SEQ ID NO: 1031138 - RNA, 22 nt, Human
cagguggcuucucccuaggcca

SEQ ID NO: 1031139 - RNA, 22 nt, Human
caggaaggcccaccuguccugu

SEQ ID NO: 1031140 - RNA, 22 nt, Human
acugaaggguaaugugggagcc

SEQ ID NO: 1031141 - RNA, 22 nt, Human
cccaugccuucugacucacagg

SEQ ID NO: 1031142 - RNA, 22 nt, Human
cugagccaugagccugcgccca

SEQ ID NO: 1031143 - RNA, 22 nt, Human
uugucccaggacuugcauagau

SEQ ID NO: 1031144 - RNA, 22 nt, Human
cuggccuagcucucugcuugaa

SEQ ID NO: 1031145 - RNA, 22 nt, Human
cagggcagaaggcacucuacuc

SEQ ID NO: 1031146 - RNA, 22 nt, Human
guuccuauauagccuuaaggau

SEQ ID NO: 1031147 - RNA, 22 nt, Human
cagcuggcagcccuggcccugc

SEQ ID NO: 1031148 - RNA, 22 nt, Human
gucccaggugggcuccaccucu

SEQ ID NO: 1031149 - RNA, 22 nt, Human
uucaaaacagcuagauauugga

SEQ ID NO: 1031150 - RNA, 22 nt, Human
cagagcagagugauuguucugg

SEQ ID NO: 1031151 - RNA, 22 nt, Human
gcacccagggacuuggcuggcc

SEQ ID NO: 1031152 - RNA, 22 nt, Human
cuggccuggagccucugggugg

SEQ ID NO: 1031153 - RNA, 22 nt, Human
gccuccuggccuuugcuccuca

SEQ ID NO: 1031154 - RNA, 22 nt, Human
agagugauggguugugcugacc

SEQ ID NO: 1031155 - RNA, 22 nt, Human
ugcugcucuucaccauggccuc

SEQ ID NO: 1031156 - RNA, 22 nt, Human
accucugcucaagaccccuccg

SEQ ID NO: 1031157 - RNA, 22 nt, Human
gugucacaagagcccaggaaac

SEQ ID NO: 1031158 - RNA, 22 nt, Human
gccuggcaaggcccuguugacu

SEQ ID NO: 1031159 - RNA, 20 nt, Human
agaauucuuacccuuugaug

SEQ ID NO: 1031160 - RNA, 22 nt, Human
caggagugagaugcgaucacuu

SEQ ID NO: 1031161 - RNA, 22 nt, Human
ugaaccaggaggcagccagcac

SEQ ID NO: 1031162 - RNA, 22 nt, Human
gccucugcaugcucagcaccca

SEQ ID NO: 1031163 - RNA, 22 nt, Human
cuagaaauauuuuacagucaag

SEQ ID NO: 1031164 - RNA, 22 nt, Human
acugugcuuucucuggaggcau

SEQ ID NO: 1031165 - RNA, 22 nt, Human
aaguguguugacugaauugggg

SEQ ID NO: 1031166 - RNA, 19 nt, Human
guuuuucccagacgaggca

SEQ ID NO: 1031167 - RNA, 22 nt, Human
auacauguuguaccauauguuu

SEQ ID NO: 1031168 - RNA, 22 nt, Human
gugccugguuuggggaguguuc

SEQ ID NO: 1031169 - RNA, 20 nt, Human
ccagcauguacacaugugga

SEQ ID NO: 1031170 - RNA, 22 nt, Human
cagggacagccuugggguggcg

SEQ ID NO: 1031171 - RNA, 22 nt, Human
ccugaagaugcuguggccuggu

SEQ ID NO: 1031172 - RNA, 22 nt, Human
cagcugucuaaguugagcagga

SEQ ID NO: 1031173 - RNA, 22 nt, Human
gcucccaggaugaggagccagg

SEQ ID NO: 1031174 - RNA, 22 nt, Human
guugaguggguuaggaugcuga

SEQ ID NO: 1031175 - RNA, 22 nt, Human
gaguguucccacaccccaguug

SEQ ID NO: 1031176 - RNA, 22 nt, Human
agaucaaagccaugagagauuu

SEQ ID NO: 1031177 - RNA, 22 nt, Human
caguacuuaguucucaugguuu

SEQ ID NO: 1031178 - RNA, 22 nt, Human
gaagccaguacugugcucugca

SEQ ID NO: 1031179 - RNA, 22 nt, Human
gcuggcaucacuggcuucggug

SEQ ID NO: 1031180 - RNA, 22 nt, Human
uaaggcauucucaugcugugaa

SEQ ID NO: 1031181 - RNA, 22 nt, Human
ugcauauuuuauaaagauggaa

SEQ ID NO: 1031182 - RNA, 22 nt, Human
gcagggacugugaucucacaga

SEQ ID NO: 1031183 - RNA, 19 nt, Human
ggccccucucacaggaguu

SEQ ID NO: 1031184 - RNA, 21 nt, Human
ugggggagaauugguugcuuu

SEQ ID NO: 1031185 - RNA, 22 nt, Human
uuagauaaauuaagacuuuaca

SEQ ID NO: 1031186 - RNA, 22 nt, Human
cuggagagauccuccugaaaaa

SEQ ID NO: 1031187 - RNA, 22 nt, Human
aguccaggaguugggugacauu

SEQ ID NO: 1031188 - RNA, 22 nt, Human
ggugggcaacauuuggccugag

SEQ ID NO: 1031189 - RNA, 22 nt, Human
uacauauuugucuuuguacugu

SEQ ID NO: 1031190 - RNA, 22 nt, Human
uuccuguccgcaauggccuggg

SEQ ID NO: 1031191 - RNA, 22 nt, Human
ucugccugcggcugcagguggc

SEQ ID NO: 1031192 - RNA, 22 nt, Human
cugagcugcggcaggcaccugg

SEQ ID NO: 1031193 - RNA, 22 nt, Human
agggcaaguugagugugcgugg

SEQ ID NO: 1031194 - RNA, 19 nt, Human
uccugggcugggccagguc

SEQ ID NO: 1031195 - RNA, 22 nt, Human
ugggcuggcccaccacaccucg

SEQ ID NO: 1031196 - RNA, 22 nt, Human
cugagccaguagucagggacaa

SEQ ID NO: 1031197 - RNA, 22 nt, Human
gcuucucucucagacugcaagc

SEQ ID NO: 1031198 - RNA, 22 nt, Human
cucugugccucaguuuucuucu

SEQ ID NO: 1031199 - RNA, 22 nt, Human
ggucccagcuggucacugucag

SEQ ID NO: 1031200 - RNA, 22 nt, Human
agggcacagccuaaagccuaug

SEQ ID NO: 1031201 - RNA, 17 nt, Human
aagacagaagccaugag

SEQ ID NO: 1031202 - RNA, 22 nt, Human
uucucuuagcuguaaagucaau

SEQ ID NO: 1031203 - RNA, 22 nt, Human
auccuugaaugacucugcccuc

SEQ ID NO: 1031204 - RNA, 22 nt, Human
gccagcaguauguccuggcagu

SEQ ID NO: 1031205 - RNA, 22 nt, Human
cagguacacucccuugugcuga

SEQ ID NO: 1031206 - RNA, 22 nt, Human
ggagccagagucugcaguguaa

SEQ ID NO: 1031207 - RNA, 22 nt, Human
ggagccagugcccucuggugga

SEQ ID NO: 1031208 - RNA, 22 nt, Human
gaacaguaucaguagugccagu

SEQ ID NO: 1031209 - RNA, 22 nt, Human
ggccucugguucacagggagga

SEQ ID NO: 1031210 - RNA, 22 nt, Human
cagcccuggccccagguggucu

SEQ ID NO: 1031211 - RNA, 22 nt, Human
gggccucugugcagaggggccu

SEQ ID NO: 1031212 - RNA, 22 nt, Human
uccuucagcuacucaguuucca

SEQ ID NO: 1031213 - RNA, 22 nt, Human
cuggccagcauuuuugcuuuag

SEQ ID NO: 1031214 - RNA, 17 nt, Human
cugaggcccagggccca

SEQ ID NO: 1031215 - RNA, 22 nt, Human
acuauacauugaauguuaaggu

SEQ ID NO: 1031216 - RNA, 22 nt, Human
ucccaaggcacagggcagggac

SEQ ID NO: 1031217 - RNA, 22 nt, Human
gcugucugucucugugacuuaa

SEQ ID NO: 1031218 - RNA, 22 nt, Human
ccuccagguguuacauaugacu

SEQ ID NO: 1031219 - RNA, 22 nt, Human
ucccccacucuaaaggagccuu

SEQ ID NO: 1031220 - RNA, 22 nt, Human
gguggguuuggaagagcaggcu

SEQ ID NO: 1031221 - RNA, 22 nt, Human
ugacagaaagaauaugucaauc

SEQ ID NO: 1031222 - RNA, 22 nt, Human
uagcaggguaaauguagaugga

SEQ ID NO: 1031223 - RNA, 22 nt, Human
ccagcugcugugaggaccacag

SEQ ID NO: 1031224 - RNA, 20 nt, Human
ggccuuggccucuuugcagc

SEQ ID NO: 1031225 - RNA, 22 nt, Human
accugagcaugccaggagagug

SEQ ID NO: 1031226 - RNA, 22 nt, Human
agaauuuuugauuaucuacucg

SEQ ID NO: 1031227 - RNA, 22 nt, Human
cuguagcagugugcucuuuuuc

SEQ ID NO: 1031228 - RNA, 22 nt, Human
agaacuguccuuggaggagagu

SEQ ID NO: 1031229 - RNA, 22 nt, Human
ccugggagguggagguugcagu

SEQ ID NO: 1031230 - RNA, 22 nt, Human
ugagcugggcugggcugagcug

SEQ ID NO: 1031231 - RNA, 22 nt, Human
gaggcaggguguugauuacaga

SEQ ID NO: 1031232 - RNA, 22 nt, Human
uccagccaacugccuagggagc

SEQ ID NO: 1031233 - RNA, 22 nt, Human
ggcucuggguucugcaaugcgu

SEQ ID NO: 1031234 - RNA, 22 nt, Human
agggcagcagcccauggcucug

SEQ ID NO: 1031235 - RNA, 22 nt, Human
agggacaguuacaucaucagac

SEQ ID NO: 1031236 - RNA, 22 nt, Human
acagaguagcucaagaagauug

SEQ ID NO: 1031237 - RNA, 21 nt, Human
ugaaaucugaugggacaaaug

SEQ ID NO: 1031238 - RNA, 19 nt, Human
ucaaagcaagcauguucug

SEQ ID NO: 1031239 - RNA, 22 nt, Human
ccagguggcuucugcccgaugu

SEQ ID NO: 1031240 - RNA, 22 nt, Human
cugggcuggagugcaauggcgc

SEQ ID NO: 1031241 - RNA, 22 nt, Human
aguauacauauauuagccuucg

SEQ ID NO: 1031242 - RNA, 22 nt, Human
cagcccuggaacagcugacuca

SEQ ID NO: 1031243 - RNA, 22 nt, Human
agaaagcacucugucuuuuacc

SEQ ID NO: 1031244 - RNA, 22 nt, Human
uugggaaggcguggaagcagaa

SEQ ID NO: 1031245 - RNA, 22 nt, Human
auugacaaucuacuauguucug

SEQ ID NO: 1031246 - RNA, 22 nt, Human
gcugccucaggcaccuccuggc

SEQ ID NO: 1031247 - RNA, 22 nt, Human
ccagccaguccagcauuggugu

SEQ ID NO: 1031248 - RNA, 22 nt, Human
ccagggcaggagaaagacucac

SEQ ID NO: 1031249 - RNA, 22 nt, Human
cuguacaggugaggagggggcu

SEQ ID NO: 1031250 - RNA, 22 nt, Human
auagaaaacagauguccuuaaa

SEQ ID NO: 1031251 - RNA, 22 nt, Human
aucuaagauguauugagcacuu

SEQ ID NO: 1031252 - RNA, 22 nt, Human
cccuggaggcggagcuugcagu

SEQ ID NO: 1031253 - RNA, 22 nt, Human
agaggccuaauugcuacccuuu

SEQ ID NO: 1031254 - RNA, 22 nt, Human
aggcccagggcugcucucugaa

SEQ ID NO: 1031255 - RNA, 22 nt, Human
agaggucauaucucagaagaga

SEQ ID NO: 1031256 - RNA, 22 nt, Human
cugcagugcaagcccagaugga

SEQ ID NO: 1031257 - RNA, 22 nt, Human
caggcugggcagccuccccggc

SEQ ID NO: 1031258 - RNA, 22 nt, Human
cugggccuggcguuccaggcug

SEQ ID NO: 1031259 - RNA, 22 nt, Human
uggagccaugccuggccuuucc

SEQ ID NO: 1031260 - RNA, 22 nt, Human
gcugucucggggcuuucuccug

SEQ ID NO: 1031261 - RNA, 22 nt, Human
acaaagucucuaauaaucuucu

SEQ ID NO: 1031262 - RNA, 22 nt, Human
uuuccucugcugccauugcccc

SEQ ID NO: 1031263 - RNA, 22 nt, Human
agggcagagagaugaaugggau

SEQ ID NO: 1031264 - RNA, 22 nt, Human
cagcucccuauggugaggcgac

SEQ ID NO: 1031265 - RNA, 22 nt, Human
ugggcucucuggcaggaaggcu

SEQ ID NO: 1031266 - RNA, 22 nt, Human
cagcccagcacuaaguagauuu

SEQ ID NO: 1031267 - RNA, 22 nt, Human
uuuccauauuuggucuuuggga

SEQ ID NO: 1031268 - RNA, 22 nt, Human
cuggcagcuggaggcuagaggc

SEQ ID NO: 1031269 - RNA, 22 nt, Human
ugcauuguaggauguuuagcag

SEQ ID NO: 1031270 - RNA, 22 nt, Human
cucccacuccuggcucaccaca

SEQ ID NO: 1031271 - RNA, 22 nt, Human
gaggcugggaaguccaagacca

SEQ ID NO: 1031272 - RNA, 22 nt, Human
aaaugcacagagccuuagagau

SEQ ID NO: 1031273 - RNA, 22 nt, Human
ucucaggaguagugggauccau

SEQ ID NO: 1031274 - RNA, 22 nt, Human
agauuguagaaacuguagcauu

SEQ ID NO: 1031275 - RNA, 22 nt, Human
gugugccaacaaaagacagugc

SEQ ID NO: 1031276 - RNA, 22 nt, Human
acucugugugaguagagccugu

SEQ ID NO: 1031277 - RNA, 22 nt, Human
ggcugggcugcugggucagagc

SEQ ID NO: 1031278 - RNA, 22 nt, Human
caguggguaggaaaggcucuuc

SEQ ID NO: 1031279 - RNA, 22 nt, Human
gaagagcugacagugucauccu

SEQ ID NO: 1031280 - RNA, 22 nt, Human
ccagggcaauuauuuggagggu

SEQ ID NO: 1031281 - RNA, 22 nt, Human
uggcaggguggcaacuuuuggu

SEQ ID NO: 1031282 - RNA, 22 nt, Human
cgcugggggaacagcgagggug

SEQ ID NO: 1031283 - RNA, 22 nt, Human
acuccuggguugcaguccucaa

SEQ ID NO: 1031284 - RNA, 22 nt, Human
ucaaagucauggcaggcucaga

SEQ ID NO: 1031285 - RNA, 22 nt, Human
agucccagugagaugaaccagg

SEQ ID NO: 1031286 - RNA, 23 nt, Human
cagggcugguagggaagagcgug

SEQ ID NO: 1031287 - RNA, 22 nt, Human
cagagcaggcccacugcccucc

SEQ ID NO: 1031288 - RNA, 20 nt, Human
acuuucucgguuucucaccu

SEQ ID NO: 1031289 - RNA, 22 nt, Human
cagcagugcuucagugugagau

SEQ ID NO: 1031290 - RNA, 22 nt, Human
agcugccaccucugccuuuggg

SEQ ID NO: 1031291 - RNA, 22 nt, Human
aggguauguuuuuaucuacugu

SEQ ID NO: 1031292 - RNA, 22 nt, Human
cccagcuaccucugcuaggaga

SEQ ID NO: 1031293 - RNA, 22 nt, Human
ggcaaaaaguucccaucagugu

SEQ ID NO: 1031294 - RNA, 22 nt, Human
aaggcacugcuuugcugcgccc

SEQ ID NO: 1031295 - RNA, 22 nt, Human
gaugccugcauuucaggagagu

SEQ ID NO: 1031296 - RNA, 22 nt, Human
ugggaggcuuccagaccuugcu

SEQ ID NO: 1031297 - RNA, 22 nt, Human
agaugaaaagauaagcagcaau

SEQ ID NO: 1031298 - RNA, 22 nt, Human
agccuggccugggcaggcacau

SEQ ID NO: 1031299 - RNA, 22 nt, Human
ccaggcugccgaggaaagaaag

SEQ ID NO: 1031300 - RNA, 19 nt, Human
cuguccuuggcugcacugu

SEQ ID NO: 1031301 - RNA, 23 nt, Human
aggaggccugaaacugaggcuga

SEQ ID NO: 1031302 - RNA, 20 nt, Human
cuuuggcaaugagaacaggg

SEQ ID NO: 1031303 - RNA, 22 nt, Human
aguauuuccuggcuuaucugcu

SEQ ID NO: 1031304 - RNA, 22 nt, Human
gauuucaaagguucugcaugcc

SEQ ID NO: 1031305 - RNA, 22 nt, Human
gccugggugaauuugauccuaa

SEQ ID NO: 1031306 - RNA, 22 nt, Human
ggaggggcagccauggaacucc

SEQ ID NO: 1031307 - RNA, 22 nt, Human
cacugaaggcugcagcucagcc

SEQ ID NO: 1031308 - RNA, 22 nt, Human
cucuggaggccuaaggaagugg

SEQ ID NO: 1031309 - RNA, 22 nt, Human
cuggcucuucagugcuugguuc

SEQ ID NO: 1031310 - RNA, 22 nt, Human
agcucagcuuccucuccaugcu

SEQ ID NO: 1031311 - RNA, 22 nt, Human
caggcagccaggggaccugucc

SEQ ID NO: 1031312 - RNA, 22 nt, Human
gagguuagaggucagugcaguc

SEQ ID NO: 1031313 - RNA, 22 nt, Human
cacacagaugguaagggaggga

SEQ ID NO: 1031314 - RNA, 22 nt, Human
uauguacauguuaaagggcaaa

SEQ ID NO: 1031315 - RNA, 22 nt, Human
uguuccauaaguggugcuuugu

SEQ ID NO: 1031316 - RNA, 17 nt, Human
agugaaauuuacauugc

SEQ ID NO: 1031317 - RNA, 21 nt, Human
aggugcagagccagggaccag

SEQ ID NO: 1031318 - RNA, 22 nt, Human
uguauuagaucugagaacuucu

SEQ ID NO: 1031319 - RNA, 22 nt, Human
accccagaggcggaggcugcag

SEQ ID NO: 1031320 - RNA, 22 nt, Human
ggcuucccagcagagggcgcac

SEQ ID NO: 1031321 - RNA, 22 nt, Human
ugaugguugauuauaaaucagu

SEQ ID NO: 1031322 - RNA, 22 nt, Human
aggccuggugugccggaugcag

SEQ ID NO: 1031323 - RNA, 22 nt, Human
uguguccuucugggagucccag

SEQ ID NO: 1031324 - RNA, 22 nt, Human
uaggccagcccuuaguccuguc

SEQ ID NO: 1031325 - RNA, 20 nt, Human
ccugucuggagacaaagaga

SEQ ID NO: 1031326 - RNA, 22 nt, Human
ggccugaggcaauagucagaca

SEQ ID NO: 1031327 - RNA, 22 nt, Human
uaaaaguggauaagcuguagga

SEQ ID NO: 1031328 - RNA, 22 nt, Human
cugcagaggguuugagcauccu

SEQ ID NO: 1031329 - RNA, 22 nt, Human
aaugaugguuaaacacuggagg

SEQ ID NO: 1031330 - RNA, 22 nt, Human
cccagaaggucgaggcugcagu

SEQ ID NO: 1031331 - RNA, 22 nt, Human
cccaggaggucgaagcugcagu

SEQ ID NO: 1031332 - RNA, 22 nt, Human
uggcagcuccuggggccagcac

SEQ ID NO: 1031333 - RNA, 22 nt, Human
augauggugggagaugacccag

SEQ ID NO: 1031334 - RNA, 20 nt, Human
ugcagggcugccucccagcu

SEQ ID NO: 1031335 - RNA, 22 nt, Human
uggcagaggaggcucagauuga

SEQ ID NO: 1031336 - RNA, 22 nt, Human
gcccaggcuggagugcaguagc

SEQ ID NO: 1031337 - RNA, 22 nt, Human
guggcuucugcggugugcgcag

SEQ ID NO: 1031338 - RNA, 22 nt, Human
ccagagccucuuaugaagaucg

SEQ ID NO: 1031339 - RNA, 22 nt, Human
cccuggaggcaaagguugcagu

SEQ ID NO: 1031340 - RNA, 22 nt, Human
uggcugccuagugucugagcag

SEQ ID NO: 1031341 - RNA, 22 nt, Human
ugggagcaagcuggugcuggag

SEQ ID NO: 1031342 - RNA, 18 nt, Human
acauuucuaggugaaagc

SEQ ID NO: 1031343 - RNA, 19 nt, Human
ggcugccuggagcgagggc

SEQ ID NO: 1031344 - RNA, 22 nt, Human
cucuggaauuaaggaagccugu

SEQ ID NO: 1031345 - RNA, 22 nt, Human
ccacuugugaaauaaucaaaua

SEQ ID NO: 1031346 - RNA, 22 nt, Human
ggauccuuaacuaucacaguga

SEQ ID NO: 1031347 - RNA, 22 nt, Human
gaggccagcgcgcagcacuuuu

SEQ ID NO: 1031348 - RNA, 22 nt, Human
gcucccaggaagagaagggcca

SEQ ID NO: 1031349 - RNA, 22 nt, Human
uggcucagugacauuccuccca

SEQ ID NO: 1031350 - RNA, 22 nt, Human
uuugcauugcauacaaggaacu

SEQ ID NO: 1031351 - RNA, 22 nt, Human
ccaaggcuucccagagaugcuc

SEQ ID NO: 1031352 - RNA, 18 nt, Human
cagauccaggcagcuauu

SEQ ID NO: 1031353 - RNA, 22 nt, Human
cuggggcugcggacgggagccc

SEQ ID NO: 1031354 - RNA, 22 nt, Human
ucagcaaugagaacuggcauuu

SEQ ID NO: 1031355 - RNA, 22 nt, Human
cccagggcuuuucucacuagac

SEQ ID NO: 1031356 - RNA, 22 nt, Human
caguggugaagagcaggggcuc

SEQ ID NO: 1031357 - RNA, 22 nt, Human
ccugucugcaugagugagcaua

SEQ ID NO: 1031358 - RNA, 22 nt, Human
agaauucuguucuucgggugug

SEQ ID NO: 1031359 - RNA, 22 nt, Human
agagccaggcggcugggcaccu

SEQ ID NO: 1031360 - RNA, 22 nt, Human
gucccugcaucaccacgggacu

SEQ ID NO: 1031361 - RNA, 22 nt, Human
ccuggcugugcauugccggccc

SEQ ID NO: 1031362 - RNA, 22 nt, Human
ggcagugaaugaaacagaggcu

SEQ ID NO: 1031363 - RNA, 18 nt, Human
aggcuucccaggcaggcc

SEQ ID NO: 1031364 - RNA, 22 nt, Human
cucugggcuuguugaccugcac

SEQ ID NO: 1031365 - RNA, 22 nt, Human
ugucucagaggcaggaagagcc

SEQ ID NO: 1031366 - RNA, 22 nt, Human
caagagcucccagaccugggca

SEQ ID NO: 1031367 - RNA, 22 nt, Human
cacugaaucucaaggggagggu

SEQ ID NO: 1031368 - RNA, 22 nt, Human
caugcacaacauacucaagagg

SEQ ID NO: 1031369 - RNA, 21 nt, Human
ggcagccugacccccagagag

SEQ ID NO: 1031370 - RNA, 22 nt, Human
gccugggaacucugaucuccug

SEQ ID NO: 1031371 - RNA, 22 nt, Human
uugcauugcuuggucuucaaga

SEQ ID NO: 1031372 - RNA, 22 nt, Human
ccucucaucauuaucgcuuugu

SEQ ID NO: 1031373 - RNA, 22 nt, Human
gcuggccugcgagggcaggcug

SEQ ID NO: 1031374 - RNA, 22 nt, Human
acuguacacgugucauuuacag

SEQ ID NO: 1031375 - RNA, 22 nt, Human
uauuauguagaguaaggguuaa

SEQ ID NO: 1031376 - RNA, 22 nt, Human
gggagcugagggaccucugugg

SEQ ID NO: 1031377 - RNA, 22 nt, Human
gaauuguagagggaacagaagc

SEQ ID NO: 1031378 - RNA, 22 nt, Human
cccuggaggaaaaucugaggcu

SEQ ID NO: 1031379 - RNA, 22 nt, Human
ugauuuccacagucaggggugc

SEQ ID NO: 1031380 - RNA, 22 nt, Human
cacacaugaaucccuaguaccu

SEQ ID NO: 1031381 - RNA, 22 nt, Human
ggcaggagauaaaauauuaguu

SEQ ID NO: 1031382 - RNA, 22 nt, Human
auacaguauuaccuguucagga

SEQ ID NO: 1031383 - RNA, 22 nt, Human
uacauaguuccauuuacaggaa

SEQ ID NO: 1031384 - RNA, 23 nt, Human
ggagccuggcauaugagacgcau

SEQ ID NO: 1031385 - RNA, 22 nt, Human
ugaaggcauugaugaaggaauc

SEQ ID NO: 1031386 - RNA, 22 nt, Human
gggcugcuuauacugaugauaa

SEQ ID NO: 1031387 - RNA, 22 nt, Human
aggcucagcccaagguggagag

SEQ ID NO: 1031388 - RNA, 22 nt, Human
ucucagaguuuuuuuccaggac

SEQ ID NO: 1031389 - RNA, 22 nt, Human
gaggccuguagucauggaugua

SEQ ID NO: 1031390 - RNA, 22 nt, Human
cagagccugccaccuuucuccc

SEQ ID NO: 1031391 - RNA, 22 nt, Human
aucuggcuuacgaagcacuggu

SEQ ID NO: 1031392 - RNA, 22 nt, Human
guguauaacuaucuaucuagua

SEQ ID NO: 1031393 - RNA, 22 nt, Human
cagggccugagggcugcucugc

SEQ ID NO: 1031394 - RNA, 22 nt, Human
ugccugggccucugaggaaggc

SEQ ID NO: 1031395 - RNA, 22 nt, Human
aggcccuggcacugccugggag

SEQ ID NO: 1031396 - RNA, 20 nt, Human
acagccagaggaggcagaca

SEQ ID NO: 1031397 - RNA, 22 nt, Human
ucucuggaauuuugagagugac

SEQ ID NO: 1031398 - RNA, 22 nt, Human
aaaagguuuugaguacaaauau

SEQ ID NO: 1031399 - RNA, 22 nt, Human
acugcuuacaaaaggaaagaau

SEQ ID NO: 1031400 - RNA, 22 nt, Human
gcacagguugcaaaaguucaca

SEQ ID NO: 1031401 - RNA, 22 nt, Human
gccuggaguggacuuggccccu

SEQ ID NO: 1031402 - RNA, 22 nt, Human
ccuggagguggagguugcagug

SEQ ID NO: 1031403 - RNA, 22 nt, Human
cucuggccugcuuccucaggua

SEQ ID NO: 1031404 - RNA, 22 nt, Human
gcuggcugggucccugagaggc

SEQ ID NO: 1031405 - RNA, 22 nt, Human
cccaggcugaugggaugggcca

SEQ ID NO: 1031406 - RNA, 22 nt, Human
ccaggcagagggauccccaucc

SEQ ID NO: 1031407 - RNA, 22 nt, Human
aaaaguuuaagacucauucuag

SEQ ID NO: 1031408 - RNA, 22 nt, Human
aacucagcauccugcacagaga

SEQ ID NO: 1031409 - RNA, 22 nt, Human
uaaaguucagugcaugaaugug

SEQ ID NO: 1031410 - RNA, 23 nt, Human
ccuucagaagaaguaacaggggc

SEQ ID NO: 1031411 - RNA, 22 nt, Human
uggccugguaccacauagauuu

SEQ ID NO: 1031412 - RNA, 22 nt, Human
caguggaggccuugggaccuuu

SEQ ID NO: 1031413 - RNA, 22 nt, Human
uggcugaauaauauucuguugu

SEQ ID NO: 1031414 - RNA, 22 nt, Human
gagcuguccuaccaggaguccu

SEQ ID NO: 1031415 - RNA, 22 nt, Human
augggaguuuucucugaugcuc

SEQ ID NO: 1031416 - RNA, 22 nt, Human
aaagacugguguguuacauaua

SEQ ID NO: 1031417 - RNA, 22 nt, Human
gccugaaguuucaugccucuau

SEQ ID NO: 1031418 - RNA, 18 nt, Human
agagaugguguagaguuu

SEQ ID NO: 1031419 - RNA, 22 nt, Human
gccuguguggaugcgccggugc

SEQ ID NO: 1031420 - RNA, 22 nt, Human
gauggguggucucagacuugcc

SEQ ID NO: 1031421 - RNA, 22 nt, Human
uggcuucuuagaccaguggccu

SEQ ID NO: 1031422 - RNA, 22 nt, Human
ucagcagggaggcucugugccc

SEQ ID NO: 1031423 - RNA, 22 nt, Human
agugaaauacugucguuuuuag

SEQ ID NO: 1031424 - RNA, 22 nt, Human
ggugaaggaggaagcugaugga

SEQ ID NO: 1031425 - RNA, 22 nt, Human
ccccagcucagugcagggacau

SEQ ID NO: 1031426 - RNA, 23 nt, Human
uuacuuuugcaccaaccuaauau

SEQ ID NO: 1031427 - RNA, 22 nt, Human
cccugggacccgcugcagaggc

SEQ ID NO: 1031428 - RNA, 22 nt, Human
cacaggcucuucucacuugauu

SEQ ID NO: 1031429 - RNA, 22 nt, Human
gcuaggagauugagcucugaag

SEQ ID NO: 1031430 - RNA, 22 nt, Human
acucugagcaucccaagucuua

SEQ ID NO: 1031431 - RNA, 22 nt, Human
cucaggaggugguagaggcccu

SEQ ID NO: 1031432 - RNA, 22 nt, Human
uuccucagagggcgcuggggaa

SEQ ID NO: 1031433 - RNA, 22 nt, Human
aaaucuguaagcaauugcucag

SEQ ID NO: 1031434 - RNA, 22 nt, Human
cagaaguaagauuacugugagu

SEQ ID NO: 1031435 - RNA, 21 nt, Human
cacugcagccuugaccugggc

SEQ ID NO: 1031436 - RNA, 22 nt, Human
ugccuaggaaaccucaugcuuc

SEQ ID NO: 1031437 - RNA, 22 nt, Human
gccugcaguucugugcuaggca

SEQ ID NO: 1031438 - RNA, 22 nt, Human
gcagggacagggcagggccuuu

SEQ ID NO: 1031439 - RNA, 19 nt, Human
ucucagaggaaaaauugcu

SEQ ID NO: 1031440 - RNA, 22 nt, Human
agaggccagggacacugcucaa

SEQ ID NO: 1031441 - RNA, 22 nt, Human
gcagugugaccgagcuugcuuc

SEQ ID NO: 1031442 - RNA, 22 nt, Human
uccagggagagccgcugcucca

SEQ ID NO: 1031443 - RNA, 22 nt, Human
gcacugaaauuauaugcauuug

SEQ ID NO: 1031444 - RNA, 22 nt, Human
auagaaauggcagcuggugcua

SEQ ID NO: 1031445 - RNA, 22 nt, Human
uucucauucugacucaguguag

SEQ ID NO: 1031446 - RNA, 22 nt, Human
gcaggaguguggugggacaucc

SEQ ID NO: 1031447 - RNA, 22 nt, Human
uacaaaguuugggguccucaaa

SEQ ID NO: 1031448 - RNA, 22 nt, Human
ugcauuaugcuugugcuguaua

SEQ ID NO: 1031449 - RNA, 22 nt, Human
ggcagagaugugggucagaauc

SEQ ID NO: 1031450 - RNA, 22 nt, Human
cucucuguuaugcuuucaugaa

SEQ ID NO: 1031451 - RNA, 21 nt, Human
agcuuguguguaucacagugu

SEQ ID NO: 1031452 - RNA, 22 nt, Human
acagaaggcggggacaaggcgg

SEQ ID NO: 1031453 - RNA, 22 nt, Human
gccuggugcuaugagggccagc

SEQ ID NO: 1031454 - RNA, 22 nt, Human
agccugcaggaugggcagcacc

SEQ ID NO: 1031455 - RNA, 22 nt, Human
caggcugcagaggccuuucaug

SEQ ID NO: 1031456 - RNA, 22 nt, Human
gaggaggcuaagugggcucugg

SEQ ID NO: 1031457 - RNA, 22 nt, Human
cucaguuucugacauuaaaauc

SEQ ID NO: 1031458 - RNA, 22 nt, Human
aggagugcaaauaguccagaga

SEQ ID NO: 1031459 - RNA, 22 nt, Human
ugguccagacauuucugaggua

SEQ ID NO: 1031460 - RNA, 22 nt, Human
gccuggagcagacgugucccgg

SEQ ID NO: 1031461 - RNA, 22 nt, Human
ucuuuccucugagcuccuguag

SEQ ID NO: 1031462 - RNA, 22 nt, Human
gcuucuggaggagcugggcuga

SEQ ID NO: 1031463 - RNA, 22 nt, Human
agcuggaggggccagcaggugu

SEQ ID NO: 1031464 - RNA, 22 nt, Human
agaagccaauucugugugaguc

SEQ ID NO: 1031465 - RNA, 22 nt, Human
augagcuguaagguggcuuccu

SEQ ID NO: 1031466 - RNA, 22 nt, Human
cagcuucccuuggcugagcaga

SEQ ID NO: 1031467 - RNA, 22 nt, Human
cccuggugguacggcacuggca

SEQ ID NO: 1031468 - RNA, 22 nt, Human
gaaaugugcagaauguguuaga

SEQ ID NO: 1031469 - RNA, 22 nt, Human
uggccugggucacaccaggguc

SEQ ID NO: 1031470 - RNA, 22 nt, Human
gagcucuguguagccugagggu

SEQ ID NO: 1031471 - RNA, 22 nt, Human
ugaaagcuguccacuaggcugu

SEQ ID NO: 1031472 - RNA, 22 nt, Human
agugcugucccgacaacugagg

SEQ ID NO: 1031473 - RNA, 23 nt, Human
ugcagcugccucuggcgggccgg

SEQ ID NO: 1031474 - RNA, 17 nt, Human
uccuucagugccucugc

SEQ ID NO: 1031475 - RNA, 22 nt, Human
caggaugggugucggccagcac

SEQ ID NO: 1031476 - RNA, 22 nt, Human
uuccaaagaaauugaccaagac

SEQ ID NO: 1031477 - RNA, 22 nt, Human
gccccagccaaggugacacgaa

SEQ ID NO: 1031478 - RNA, 22 nt, Human
ccugccugcguccucugagggc

SEQ ID NO: 1031479 - RNA, 22 nt, Human
ccuggcagucaggggaguccuu

SEQ ID NO: 1031480 - RNA, 22 nt, Human
aauuuagauugauaaacaugga

SEQ ID NO: 1031481 - RNA, 22 nt, Human
aagcugccuuccaugugaggaa

SEQ ID NO: 1031482 - RNA, 22 nt, Human
cggggcugcucguccuccugug

SEQ ID NO: 1031483 - RNA, 17 nt, Human
cccagagaugcugccuu

SEQ ID NO: 1031484 - RNA, 22 nt, Human
aggccugcagcaggagcaaacc

SEQ ID NO: 1031485 - RNA, 22 nt, Human
guucccauacaguaucagugcu

SEQ ID NO: 1031486 - RNA, 22 nt, Human
acacagggauauuucagguggu

SEQ ID NO: 1031487 - RNA, 22 nt, Human
gacagggcaagacucugucuaa

SEQ ID NO: 1031488 - RNA, 20 nt, Human
cucucccagcacagcuuccu

SEQ ID NO: 1031489 - RNA, 23 nt, Human
uccuucagagccucccuccaagc

SEQ ID NO: 1031490 - RNA, 22 nt, Human
agaguguaauaagggcaagggc

SEQ ID NO: 1031491 - RNA, 22 nt, Human
gcagggcagcuuagucccuguc

SEQ ID NO: 1031492 - RNA, 22 nt, Human
auguacacaugcaugcaugugc

SEQ ID NO: 1031493 - RNA, 19 nt, Human
cugggagguguucagagaa

SEQ ID NO: 1031494 - RNA, 22 nt, Human
ugagccaguggaagauggcagu

SEQ ID NO: 1031495 - RNA, 22 nt, Human
ugccugucuuaauaucuggaaa

SEQ ID NO: 1031496 - RNA, 19 nt, Human
ucuggcuccugccaggcug

SEQ ID NO: 1031497 - RNA, 22 nt, Human
aacaaauggggccuuguaugaa

SEQ ID NO: 1031498 - RNA, 22 nt, Human
ucaggaguccugccugcagccu

SEQ ID NO: 1031499 - RNA, 22 nt, Human
cuguggcuuucucugccuccuu

SEQ ID NO: 1031500 - RNA, 22 nt, Human
ugaggcuggcaaggcugguauu

SEQ ID NO: 1031501 - RNA, 19 nt, Human
cagucccaaauucuuguca

SEQ ID NO: 1031502 - RNA, 22 nt, Human
accucugcaaugcaaugucaug

SEQ ID NO: 1031503 - RNA, 22 nt, Human
cucaggauucucgacacucaca

SEQ ID NO: 1031504 - RNA, 22 nt, Human
aguaaaaauugaggugcaaaau

SEQ ID NO: 1031505 - RNA, 20 nt, Human
ugcagagcuggcuggcuccu

SEQ ID NO: 1031506 - RNA, 22 nt, Human
agccuccaucccaugcacaaag

SEQ ID NO: 1031507 - RNA, 15 nt, Human
aaucuggcggcaagu

SEQ ID NO: 1031508 - RNA, 22 nt, Human
agccuggagcuugaguuaugag

SEQ ID NO: 1031509 - RNA, 22 nt, Human
uccuugaagagugggcggucga

SEQ ID NO: 1031510 - RNA, 22 nt, Human
cuuggggcugucacucuggcau

SEQ ID NO: 1031511 - RNA, 22 nt, Human
gguggggucacgacagagggaa

SEQ ID NO: 1031512 - RNA, 23 nt, Human
aaucuggcugauguuuuuucucu

SEQ ID NO: 1031513 - RNA, 22 nt, Human
cuguguccucccgcugcaccca

SEQ ID NO: 1031514 - RNA, 22 nt, Human
ggaggcugcugccucacguggg

SEQ ID NO: 1031515 - RNA, 22 nt, Human
ccagcagaggggcggagugcag

SEQ ID NO: 1031516 - RNA, 22 nt, Human
uggcucaguuugggggauugaa

SEQ ID NO: 1031517 - RNA, 22 nt, Human
cuguccuugcuggccagguaug

SEQ ID NO: 1031518 - RNA, 22 nt, Human
ugggcaagucacuucugucuuu

SEQ ID NO: 1031519 - RNA, 22 nt, Human
ugauuuccuggcuuuggaguuc

SEQ ID NO: 1031520 - RNA, 22 nt, Human
ugcucauuggcgaucugaggga

SEQ ID NO: 1031521 - RNA, 22 nt, Human
ccaggccagcaggcacaccugc

SEQ ID NO: 1031522 - RNA, 22 nt, Human
agcaugcugguguucauggcag

SEQ ID NO: 1031523 - RNA, 20 nt, Human
gcuuccuucccagcccccac

SEQ ID NO: 1031524 - RNA, 22 nt, Human
gaugcagggcuggcaggagcuu

SEQ ID NO: 1031525 - RNA, 22 nt, Human
ccuuaaaagaacuaucucuucu

SEQ ID NO: 1031526 - RNA, 22 nt, Human
aaugucugccugaacuuuauau

SEQ ID NO: 1031527 - RNA, 22 nt, Human
uuaugcuaguauaguccuuaga

SEQ ID NO: 1031528 - RNA, 21 nt, Human
ggccucugccuugccccacuc

SEQ ID NO: 1031529 - RNA, 22 nt, Human
uauguacauggagagcaauuga

SEQ ID NO: 1031530 - RNA, 22 nt, Human
cgcugggcgccgaccugcuggc

SEQ ID NO: 1031531 - RNA, 22 nt, Human
aggccagcucacccuggcuccu

SEQ ID NO: 1031532 - RNA, 22 nt, Human
guaucuuuccacaucuucagua

SEQ ID NO: 1031533 - RNA, 19 nt, Human
uggggccuccugucccugg

SEQ ID NO: 1031534 - RNA, 22 nt, Human
ugaggugaagaguggagcucag

SEQ ID NO: 1031535 - RNA, 19 nt, Human
ccagguggaacugagguag

SEQ ID NO: 1031536 - RNA, 22 nt, Human
ccagccugguucagaauuggcu

SEQ ID NO: 1031537 - RNA, 22 nt, Human
gcauucaucuuccuccaugcag

SEQ ID NO: 1031538 - RNA, 22 nt, Human
uccagggacagcgcuggagcua

SEQ ID NO: 1031539 - RNA, 22 nt, Human
uaacagaauccuguuauugcca

SEQ ID NO: 1031540 - RNA, 22 nt, Human
agcagcucuguuuaccuggagg

SEQ ID NO: 1031541 - RNA, 22 nt, Human
gccuggagaggaagccggugga

SEQ ID NO: 1031542 - RNA, 22 nt, Human
uaacagaaaggcucaggugcuc

SEQ ID NO: 1031543 - RNA, 19 nt, Human
gcacacccugcaccaccau

SEQ ID NO: 1031544 - RNA, 22 nt, Human
caagggaccugagauggucucu

SEQ ID NO: 1031545 - RNA, 22 nt, Human
caggcuggaguuaccuuuaggg

SEQ ID NO: 1031546 - RNA, 22 nt, Human
uaaggcacuucaauguuuagaa

SEQ ID NO: 1031547 - RNA, 22 nt, Human
caggggccggcuguccgugccc

SEQ ID NO: 1031548 - RNA, 22 nt, Human
ggagcugaaggggugggcucag

SEQ ID NO: 1031549 - RNA, 22 nt, Human
aaggagcucccggcagaccagg

SEQ ID NO: 1031550 - RNA, 22 nt, Human
guccucuggugaaagcauuccc

SEQ ID NO: 1031551 - RNA, 22 nt, Human
uggaggccagagguacugggac

SEQ ID NO: 1031552 - RNA, 17 nt, Human
cuggagccuccaacucc

SEQ ID NO: 1031553 - RNA, 22 nt, Human
agcuggccuguuagagcugagu

SEQ ID NO: 1031554 - RNA, 22 nt, Human
uugaauucauuucucauugagu

SEQ ID NO: 1031555 - RNA, 22 nt, Human
ccagggcaauaggaacacuuuu

SEQ ID NO: 1031556 - RNA, 22 nt, Human
aaagaaggaccuggaggaggau

SEQ ID NO: 1031557 - RNA, 22 nt, Human
agagugaaggccagguuacagu

SEQ ID NO: 1031558 - RNA, 22 nt, Human
caguggccugagccaggcuucc

SEQ ID NO: 1031559 - RNA, 22 nt, Human
gcucucugggugugucuagaua

SEQ ID NO: 1031560 - RNA, 22 nt, Human
cagggccuccuaaggcaucuaa

SEQ ID NO: 1031561 - RNA, 22 nt, Human
uuugcauuucuaaugagcuccg

SEQ ID NO: 1031562 - RNA, 22 nt, Human
uugacaagaaucguugccuugg

SEQ ID NO: 1031563 - RNA, 19 nt, Human
augucuguugaauuucaua

SEQ ID NO: 1031564 - RNA, 22 nt, Human
acauuucuuugcuagacagcag

SEQ ID NO: 1031565 - RNA, 17 nt, Human
cuggagccaagagggcc

SEQ ID NO: 1031566 - RNA, 22 nt, Human
agugcauuauauguuucaaugg

SEQ ID NO: 1031567 - RNA, 22 nt, Human
ugcagaaggaggaggaaaucca

SEQ ID NO: 1031568 - RNA, 22 nt, Human
gccucuggggcagcugagucau

SEQ ID NO: 1031569 - RNA, 22 nt, Human
gaggcuggcagaaaagcacagg

SEQ ID NO: 1031570 - RNA, 22 nt, Human
agcugccacagagccuggccag

SEQ ID NO: 1031571 - RNA, 22 nt, Human
agaggcaggagguugacuugag

SEQ ID NO: 1031572 - RNA, 22 nt, Human
cugggaggacaacuuggagcuc

SEQ ID NO: 1031573 - RNA, 22 nt, Human
aauuucaauuacuuuugcacca

SEQ ID NO: 1031574 - RNA, 22 nt, Human
uggagcaagcuggagagaacau

SEQ ID NO: 1031575 - RNA, 22 nt, Human
gauggcacacagacauccccgc

SEQ ID NO: 1031576 - RNA, 22 nt, Human
agcuguguggugucugacagcu

SEQ ID NO: 1031577 - RNA, 22 nt, Human
ggcauguuucaucacaucaaga

SEQ ID NO: 1031578 - RNA, 21 nt, Human
agggaaagaaaaugagcuaau

SEQ ID NO: 1031579 - RNA, 22 nt, Human
cacuggugacuucugagcugga

SEQ ID NO: 1031580 - RNA, 22 nt, Human
augaagcugguuuuggcuuggg

SEQ ID NO: 1031581 - RNA, 21 nt, Human
gcagccacagccaccaagcua

SEQ ID NO: 1031582 - RNA, 22 nt, Human
ugucacauaggcaaaauguuuu

SEQ ID NO: 1031583 - RNA, 22 nt, Human
auugaauagaugcauuauacua

SEQ ID NO: 1031584 - RNA, 23 nt, Human
agaugaggcuucuccauguuggu

SEQ ID NO: 1031585 - RNA, 22 nt, Human
uugagucaguaauuccauuucu

SEQ ID NO: 1031586 - RNA, 22 nt, Human
aggccuguuccaggccccuuuu

SEQ ID NO: 1031587 - RNA, 22 nt, Human
acagacagggcaccugccuccu

SEQ ID NO: 1031588 - RNA, 22 nt, Human
ugcuggggcucugaccacucca

SEQ ID NO: 1031589 - RNA, 19 nt, Human
ugagaggcuuaaggcagcu

SEQ ID NO: 1031590 - RNA, 22 nt, Human
gcaaggagacuguagggccaag

SEQ ID NO: 1031591 - RNA, 22 nt, Human
gagacacacacaggagguggca

SEQ ID NO: 1031592 - RNA, 22 nt, Human
cuguccugauggugccacuggu

SEQ ID NO: 1031593 - RNA, 22 nt, Human
agggccagcccauaaugccaaa

SEQ ID NO: 1031594 - RNA, 22 nt, Human
cucccagggccaucgagucacu

SEQ ID NO: 1031595 - RNA, 22 nt, Human
aggagcugcaaauauuaguaau

SEQ ID NO: 1031596 - RNA, 22 nt, Human
uccagcagaaaagagguaggga

SEQ ID NO: 1031597 - RNA, 22 nt, Human
ggcucuggugggaagguuagau

SEQ ID NO: 1031598 - RNA, 21 nt, Human
augaagucuaugcuucugugu

SEQ ID NO: 1031599 - RNA, 22 nt, Human
agucagugaaggcauugcucaa

SEQ ID NO: 1031600 - RNA, 22 nt, Human
agagccaggugcugcuguuuga

SEQ ID NO: 1031601 - RNA, 22 nt, Human
gacauucacaguuuccgauggu

SEQ ID NO: 1031602 - RNA, 22 nt, Human
gggucuggacggcugcaggaag

SEQ ID NO: 1031603 - RNA, 22 nt, Human
agcagcugaucaaagcacuuau

SEQ ID NO: 1031604 - RNA, 22 nt, Human
ucagggcaggcgagcagcugcu

SEQ ID NO: 1031605 - RNA, 22 nt, Human
ggaaagagcuaaaagggugaga

SEQ ID NO: 1031606 - RNA, 22 nt, Human
auugucgcuuauuuaggugcuu

SEQ ID NO: 1031607 - RNA, 22 nt, Human
ucuucucaguuucucuaggaug

SEQ ID NO: 1031608 - RNA, 22 nt, Human
aaaagguagauucuccuucuau

SEQ ID NO: 1031609 - RNA, 22 nt, Human
uuaauacagucuccagaaguaa

SEQ ID NO: 1031610 - RNA, 22 nt, Human
uuuccauauucugcgucugcca

SEQ ID NO: 1031611 - RNA, 22 nt, Human
uacuuucuagcucuccccaguu

SEQ ID NO: 1031612 - RNA, 22 nt, Human
cagaguggcagucccaggccca

SEQ ID NO: 1031613 - RNA, 22 nt, Human
ugggcuguggagcaccuuugca

SEQ ID NO: 1031614 - RNA, 22 nt, Human
gcuggccauauauuuugcuguu

SEQ ID NO: 1031615 - RNA, 22 nt, Human
ucaguuuucaauuucaucagag

SEQ ID NO: 1031616 - RNA, 22 nt, Human
acuaaggaauaugacaaacuca

SEQ ID NO: 1031617 - RNA, 22 nt, Human
uuugcauuugcaaauaaugaaa

SEQ ID NO: 1031618 - RNA, 22 nt, Human
cagaguguauucugcaguugca

SEQ ID NO: 1031619 - RNA, 22 nt, Human
ucuggccuuaucuguccaagcc

SEQ ID NO: 1031620 - RNA, 22 nt, Human
gcagcuuuguggagaggcccau

SEQ ID NO: 1031621 - RNA, 22 nt, Human
agaggccuccgaaaggugggcu

SEQ ID NO: 1031622 - RNA, 22 nt, Human
ucccaaagcuacucuucugacu

SEQ ID NO: 1031623 - RNA, 22 nt, Human
auggacaggaacucccuuggca

SEQ ID NO: 1031624 - RNA, 22 nt, Human
ccagcucuagccccauguggcu

SEQ ID NO: 1031625 - RNA, 22 nt, Human
uuaaguccuugguaauuuucuu

SEQ ID NO: 1031626 - RNA, 22 nt, Human
aggccagcuguuacuagagcca

SEQ ID NO: 1031627 - RNA, 22 nt, Human
ucaugccacuuacaaaauaaug

SEQ ID NO: 1031628 - RNA, 22 nt, Human
uagaaacacagaucugguguca

SEQ ID NO: 1031629 - RNA, 22 nt, Human
cagugcuccugauguacccuug

SEQ ID NO: 1031630 - RNA, 20 nt, Human
cuggguggcaagcaaggggg

SEQ ID NO: 1031631 - RNA, 22 nt, Human
cugcuccacaccuccauuuccu

SEQ ID NO: 1031632 - RNA, 22 nt, Human
gcagugggcaacaagagcugga

SEQ ID NO: 1031633 - RNA, 22 nt, Human
gggccugggaacuugcauuuag

SEQ ID NO: 1031634 - RNA, 22 nt, Human
gugcauuugacgaauacucacu

SEQ ID NO: 1031635 - RNA, 22 nt, Human
gcaguggauccaaugguaucuu

SEQ ID NO: 1031636 - RNA, 18 nt, Human
uggagcaggaagccuggc

SEQ ID NO: 1031637 - RNA, 22 nt, Human
acagcaagccagcuugucacug

SEQ ID NO: 1031638 - RNA, 19 nt, Human
ugggccugcaucugggucu

SEQ ID NO: 1031639 - RNA, 22 nt, Human
ucaaggcuaaacuuucagagua

SEQ ID NO: 1031640 - RNA, 22 nt, Human
cagccucucuguaucucaggau

SEQ ID NO: 1031641 - RNA, 22 nt, Human
uguuuaaucuauaaaauggaga

SEQ ID NO: 1031642 - RNA, 22 nt, Human
uguuuuauuucuccaagaggga

SEQ ID NO: 1031643 - RNA, 22 nt, Human
gcccugagggguggugucugua

SEQ ID NO: 1031644 - RNA, 22 nt, Human
uuuuccuacugauaaacaguua

SEQ ID NO: 1031645 - RNA, 22 nt, Human
gacaggggucccucugggcugu

SEQ ID NO: 1031646 - RNA, 22 nt, Human
agcaccugcuaugugucaggga

SEQ ID NO: 1031647 - RNA, 22 nt, Human
gugcauugcgaugcagacgacc

SEQ ID NO: 1031648 - RNA, 22 nt, Human
caggcagccugagggaucuggg

SEQ ID NO: 1031649 - RNA, 22 nt, Human
gggccccaaaaugccaggcucu

SEQ ID NO: 1031650 - RNA, 22 nt, Human
ucacacgugagguucuauccug

SEQ ID NO: 1031651 - RNA, 22 nt, Human
acaggcucuggggcaggauggc

SEQ ID NO: 1031652 - RNA, 22 nt, Human
ugcccuguuaucuuggaagagu

SEQ ID NO: 1031653 - RNA, 22 nt, Human
gaggaagcagggcuuggcugag

SEQ ID NO: 1031654 - RNA, 19 nt, Human
cagagcagugguuccugaa

SEQ ID NO: 1031655 - RNA, 22 nt, Human
ucaagaaagggcuucaccagga

SEQ ID NO: 1031656 - RNA, 22 nt, Human
agcugccagcaucccggaaggg

SEQ ID NO: 1031657 - RNA, 22 nt, Human
cagagcugcgcuuuuuccuggu

SEQ ID NO: 1031658 - RNA, 22 nt, Human
gugcaugugucuuuauaguagc

SEQ ID NO: 1031659 - RNA, 22 nt, Human
guggccucaugucuauaaagag

SEQ ID NO: 1031660 - RNA, 22 nt, Human
cagaggcagaggucaucucugg

SEQ ID NO: 1031661 - RNA, 19 nt, Human
uggcuucuguuuucauguu

SEQ ID NO: 1031662 - RNA, 22 nt, Human
aucuauuaugcugagaaacugu

SEQ ID NO: 1031663 - RNA, 21 nt, Human
agaaaauggcguuuuagauuu

SEQ ID NO: 1031664 - RNA, 23 nt, Human
aggauguaggauguauggcagag

SEQ ID NO: 1031665 - RNA, 22 nt, Human
auacauuagaaucugguacuca

SEQ ID NO: 1031666 - RNA, 22 nt, Human
gcuggccugaccagccacaggc

SEQ ID NO: 1031667 - RNA, 22 nt, Human
gcugugugaaaacugggccugg

SEQ ID NO: 1031668 - RNA, 22 nt, Human
cuuucauucuuagauauuagug

SEQ ID NO: 1031669 - RNA, 22 nt, Human
agugaaaucagguuuugacugc

SEQ ID NO: 1031670 - RNA, 22 nt, Human
uggggacaggagacuuacagcu

SEQ ID NO: 1031671 - RNA, 22 nt, Human
ggcugccucugaugugcagacg

SEQ ID NO: 1031672 - RNA, 22 nt, Human
ccuggaugauccaugucaugga

SEQ ID NO: 1031673 - RNA, 22 nt, Human
ugcuuccuucccguucuucucc

SEQ ID NO: 1031674 - RNA, 22 nt, Human
agagcuggacgucugagcccua

SEQ ID NO: 1031675 - RNA, 18 nt, Human
gagguccugcucuagccc

SEQ ID NO: 1031676 - RNA, 22 nt, Human
gugcucuggcuggucucccggu

SEQ ID NO: 1031677 - RNA, 23 nt, Human
cuuuuaacuugaucugagaccag

SEQ ID NO: 1031678 - RNA, 18 nt, Human
ucugagggugcgggagcu

SEQ ID NO: 1031679 - RNA, 22 nt, Human
aggggugaaggcccgauaggag

SEQ ID NO: 1031680 - RNA, 22 nt, Human
uagcagaaccagcagucaauuu

SEQ ID NO: 1031681 - RNA, 22 nt, Human
cugggaggauacacaagaucag

SEQ ID NO: 1031682 - RNA, 22 nt, Human
augccuguaaucccagugcuuu

SEQ ID NO: 1031683 - RNA, 22 nt, Human
caacagaaggaagcagggucag

SEQ ID NO: 1031684 - RNA, 22 nt, Human
gauuucaaggauguuagaggug

SEQ ID NO: 1031685 - RNA, 22 nt, Human
uacauuccacuagugacuggcg

SEQ ID NO: 1031686 - RNA, 22 nt, Human
uauaacaguuuaggugguguca

SEQ ID NO: 1031687 - RNA, 22 nt, Human
ggcagcaguggcugcuauuguc

SEQ ID NO: 1031688 - RNA, 22 nt, Human
uugaggagcacuagucagguau

SEQ ID NO: 1031689 - RNA, 22 nt, Human
uaauuuaauuccauggauucua

SEQ ID NO: 1031690 - RNA, 22 nt, Human
cucccuggaggcccagaccugg

SEQ ID NO: 1031691 - RNA, 22 nt, Human
ugagagugauugguucgaaugu

SEQ ID NO: 1031692 - RNA, 22 nt, Human
cauugcugugggcauuugcugc

SEQ ID NO: 1031693 - RNA, 22 nt, Human
cagugcaguuucccagaugcug

SEQ ID NO: 1031694 - RNA, 22 nt, Human
uccagcagaccaucaaggcuca

SEQ ID NO: 1031695 - RNA, 22 nt, Human
aucaauucuuaggaaaauagcu

SEQ ID NO: 1031696 - RNA, 22 nt, Human
cauucacucagcgaugccagua

SEQ ID NO: 1031697 - RNA, 22 nt, Human
cucugcaggggaggcaugcacu

SEQ ID NO: 1031698 - RNA, 22 nt, Human
aggcuggcccuacuggcugccu

SEQ ID NO: 1031699 - RNA, 22 nt, Human
ggccugaggcgucccagcugug

SEQ ID NO: 1031700 - RNA, 22 nt, Human
gcugcagcagcugcaggguugu

SEQ ID NO: 1031701 - RNA, 22 nt, Human
guggccaggacauugccaggca

SEQ ID NO: 1031702 - RNA, 22 nt, Human
uuuaagaugguauuuuauaaag

SEQ ID NO: 1031703 - RNA, 22 nt, Human
uggcaggguuggccaccuuacc

SEQ ID NO: 1031704 - RNA, 22 nt, Human
ucucagggccccaaaggcuagu

SEQ ID NO: 1031705 - RNA, 22 nt, Human
gccagguggcugagcagcugca

SEQ ID NO: 1031706 - RNA, 22 nt, Human
ggcagcagcaagguuggagcug

SEQ ID NO: 1031707 - RNA, 22 nt, Human
cacugcagcaccaugcagggcu

SEQ ID NO: 1031708 - RNA, 22 nt, Human
ugcagcuguaacagaggccuca

SEQ ID NO: 1031709 - RNA, 22 nt, Human
ccaggagucaauaaaggaagcu

SEQ ID NO: 1031710 - RNA, 22 nt, Human
gcucuggaagcaucugagagga

SEQ ID NO: 1031711 - RNA, 22 nt, Human
gcaagauguuaacauagggaga

SEQ ID NO: 1031712 - RNA, 22 nt, Human
acauugaucagccucccaugca

SEQ ID NO: 1031713 - RNA, 22 nt, Human
ggucuuccgagaggccugugcu

SEQ ID NO: 1031714 - RNA, 22 nt, Human
aaguucaagaucaagguuccag

SEQ ID NO: 1031715 - RNA, 18 nt, Human
ugggauggagaguaacug

SEQ ID NO: 1031716 - RNA, 22 nt, Human
uuacauuuuaguuaaccuguga

SEQ ID NO: 1031717 - RNA, 22 nt, Human
caguguccucagccagcagcua

SEQ ID NO: 1031718 - RNA, 22 nt, Human
agcuuuauucaugauuucaggg

SEQ ID NO: 1031719 - RNA, 22 nt, Human
auguacauuuguaguaauauca

SEQ ID NO: 1031720 - RNA, 22 nt, Human
ccacagggcacaagggagguug

SEQ ID NO: 1031721 - RNA, 22 nt, Human
agagaauuuuaaaagccuugaa

SEQ ID NO: 1031722 - RNA, 22 nt, Human
aaggaggaauuucagggugaau

SEQ ID NO: 1031723 - RNA, 22 nt, Human
aggauccuguauggagaagcug

SEQ ID NO: 1031724 - RNA, 22 nt, Human
ccagcugcaggggagcagugga

SEQ ID NO: 1031725 - RNA, 22 nt, Human
ggcagcaguccauggcccaagg

SEQ ID NO: 1031726 - RNA, 22 nt, Human
cagguggagcugacugagggca

SEQ ID NO: 1031727 - RNA, 22 nt, Human
cuacccaggcuggagugcagua

SEQ ID NO: 1031728 - RNA, 22 nt, Human
gaggcagagucacaaagagucu

SEQ ID NO: 1031729 - RNA, 22 nt, Human
cugucaucacaguugagcagcc

SEQ ID NO: 1031730 - RNA, 22 nt, Human
ccugggagguggagguugcagc

SEQ ID NO: 1031731 - RNA, 22 nt, Human
cuggggugucucgucugccauu

SEQ ID NO: 1031732 - RNA, 20 nt, Human
ucagccagcuaacaugggga

SEQ ID NO: 1031733 - RNA, 18 nt, Human
ucugucucuguccuugcu

SEQ ID NO: 1031734 - RNA, 22 nt, Human
auaagaaacauuauucuuucca

SEQ ID NO: 1031735 - RNA, 22 nt, Human
cagcugaguuuccaagucugcc

SEQ ID NO: 1031736 - RNA, 22 nt, Human
augauugaccaucugcugggcu

SEQ ID NO: 1031737 - RNA, 22 nt, Human
gccugagaaggauaggaagcga

SEQ ID NO: 1031738 - RNA, 22 nt, Human
gaaaguuucuucauuaagaugu

SEQ ID NO: 1031739 - RNA, 22 nt, Human
gcagggcugcugaaacuuguuu

SEQ ID NO: 1031740 - RNA, 22 nt, Human
ucaaagucucugcuucuguaac

SEQ ID NO: 1031741 - RNA, 22 nt, Human
gucccagggagguucagggcuu

SEQ ID NO: 1031742 - RNA, 21 nt, Human
uggcucuggguaggagagugc

SEQ ID NO: 1031743 - RNA, 22 nt, Human
caggugggccgggguuuguucu

SEQ ID NO: 1031744 - RNA, 22 nt, Human
gagcucccuggagguucagaua

SEQ ID NO: 1031745 - RNA, 22 nt, Human
ggaaaguggugguggaaagagg

SEQ ID NO: 1031746 - RNA, 22 nt, Human
ucacaugcccuguauuuaccag

SEQ ID NO: 1031747 - RNA, 22 nt, Human
uguacaugugucuguauaucuu

SEQ ID NO: 1031748 - RNA, 22 nt, Human
gcaggaguuaggcgucguggau

SEQ ID NO: 1031749 - RNA, 22 nt, Human
accugccucagugcagcuggau

SEQ ID NO: 1031750 - RNA, 22 nt, Human
gaggaccacagaugagccugca

SEQ ID NO: 1031751 - RNA, 18 nt, Human
gcaggagauggguggggu

SEQ ID NO: 1031752 - RNA, 22 nt, Human
caguagcacucugucagugaag

SEQ ID NO: 1031753 - RNA, 22 nt, Human
aaagcugcugccaaucaggcuu

SEQ ID NO: 1031754 - RNA, 22 nt, Human
uagacacaagagaaggguauaa

SEQ ID NO: 1031755 - RNA, 22 nt, Human
gcugugcagguccccacugccu

SEQ ID NO: 1031756 - RNA, 22 nt, Human
ucccuggaacagagagacaacg

SEQ ID NO: 1031757 - RNA, 22 nt, Human
ggcugccuccucgagacaggau

SEQ ID NO: 1031758 - RNA, 22 nt, Human
augagacuaccuguaauguggc

SEQ ID NO: 1031759 - RNA, 22 nt, Human
aaugagcugcugcuguuccacc

SEQ ID NO: 1031760 - RNA, 22 nt, Human
acuuuauuuccuauugcaucca

SEQ ID NO: 1031761 - RNA, 22 nt, Human
gagaggccaccugacgagcagu

SEQ ID NO: 1031762 - RNA, 22 nt, Human
uuccauaaucaccuuauucuuu

SEQ ID NO: 1031763 - RNA, 22 nt, Human
caggccuggcugcagcucgccu

SEQ ID NO: 1031764 - RNA, 21 nt, Human
cgggcuggccgggcccucacc

SEQ ID NO: 1031765 - RNA, 22 nt, Human
aaggcacucagccuugggacag

SEQ ID NO: 1031766 - RNA, 22 nt, Human
uuuaguaaguucacugcaaagc

SEQ ID NO: 1031767 - RNA, 18 nt, Human
uguacaguuaugagcauu

SEQ ID NO: 1031768 - RNA, 19 nt, Human
acuuucuccaggaccuguu

SEQ ID NO: 1031769 - RNA, 22 nt, Human
gugcucuguguauuaggauguc

SEQ ID NO: 1031770 - RNA, 22 nt, Human
uuucaaauaccauaaaccuaau

SEQ ID NO: 1031771 - RNA, 22 nt, Human
uaagaauuguguugaauagagu

SEQ ID NO: 1031772 - RNA, 22 nt, Human
ggugccagccuagugcaguggu

SEQ ID NO: 1031773 - RNA, 22 nt, Human
gggcuggcaggaccugggcuga

SEQ ID NO: 1031774 - RNA, 22 nt, Human
gcucuccacugaccacggggca

SEQ ID NO: 1031775 - RNA, 22 nt, Human
acaaagugaauugcaucgaguu

SEQ ID NO: 1031776 - RNA, 22 nt, Human
ggcuucaccaggugcaugcaug

SEQ ID NO: 1031777 - RNA, 18 nt, Human
uuucacaaccuccagagg

SEQ ID NO: 1031778 - RNA, 22 nt, Human
ucugccuuggcaaccacagcuu

SEQ ID NO: 1031779 - RNA, 23 nt, Human
cagggccaggcagcagcugucac

SEQ ID NO: 1031780 - RNA, 19 nt, Human
augauggucccauucaccu

SEQ ID NO: 1031781 - RNA, 22 nt, Human
gcacccagccagcaucucagag

SEQ ID NO: 1031782 - RNA, 23 nt, Human
agccucuuuucuccugcccugca

SEQ ID NO: 1031783 - RNA, 22 nt, Human
acaugucaauuuaguacucuua

SEQ ID NO: 1031784 - RNA, 22 nt, Human
cagggccuucguaaguguccgg

SEQ ID NO: 1031785 - RNA, 22 nt, Human
gccuggaggggccaggguggua

SEQ ID NO: 1031786 - RNA, 22 nt, Human
ugcagaaguauuccaggcccca

SEQ ID NO: 1031787 - RNA, 22 nt, Human
gcuccaggagagggaagcagau

SEQ ID NO: 1031788 - RNA, 22 nt, Human
ugcaucuguucagagcugucga

SEQ ID NO: 1031789 - RNA, 22 nt, Human
agccuggaauuaaggaaaugca

SEQ ID NO: 1031790 - RNA, 22 nt, Human
uagccgcuuaauuauuugguga

SEQ ID NO: 1031791 - RNA, 22 nt, Human
ugucaccaguuccaggaaauaa

SEQ ID NO: 1031792 - RNA, 22 nt, Human
auguaguguagagauuagucuc

SEQ ID NO: 1031793 - RNA, 22 nt, Human
gcagcagagcuuuguccuggcu

SEQ ID NO: 1031794 - RNA, 22 nt, Human
gugcauguuaaugguguacaaa

SEQ ID NO: 1031795 - RNA, 22 nt, Human
augggaggcaggcucagaaccg

SEQ ID NO: 1031796 - RNA, 22 nt, Human
ccagggcauccucacaucgcag

SEQ ID NO: 1031797 - RNA, 22 nt, Human
ucucaggaucuaauacauggua

SEQ ID NO: 1031798 - RNA, 22 nt, Human
uggcagggucuugcuguguugc

SEQ ID NO: 1031799 - RNA, 22 nt, Human
gugggaugguagguagguaaua

SEQ ID NO: 1031800 - RNA, 22 nt, Human
aaaugcuguguuuuaacauaga

SEQ ID NO: 1031801 - RNA, 18 nt, Human
acaaaggucugcaagacc

SEQ ID NO: 1031802 - RNA, 22 nt, Human
gagguggguguaucacagguca

SEQ ID NO: 1031803 - RNA, 22 nt, Human
cagagcuggagcuugaauggag

SEQ ID NO: 1031804 - RNA, 22 nt, Human
ggggauggaauguaguagugau

SEQ ID NO: 1031805 - RNA, 22 nt, Human
uccagucaagcuugagaauuuc

SEQ ID NO: 1031806 - RNA, 22 nt, Human
uccugccuuagagcaaggaaaa

SEQ ID NO: 1031807 - RNA, 22 nt, Human
guaggaagcucugaggcuaguu

SEQ ID NO: 1031808 - RNA, 22 nt, Human
ugaggaugacgauggcaauggc

SEQ ID NO: 1031809 - RNA, 22 nt, Human
ccagccuggagggcaguggugg

SEQ ID NO: 1031810 - RNA, 22 nt, Human
ggcuucucgugccgaagcaaga

SEQ ID NO: 1031811 - RNA, 22 nt, Human
uacuacauuaauaaaacauuca

SEQ ID NO: 1031812 - RNA, 22 nt, Human
ugcugccaaaugcgagcucugu

SEQ ID NO: 1031813 - RNA, 21 nt, Human
gccacguuucagucuucucag

SEQ ID NO: 1031814 - RNA, 22 nt, Human
ccucucauagucuguauccuuu

SEQ ID NO: 1031815 - RNA, 22 nt, Human
ugauuuccucuacuagcaauua

SEQ ID NO: 1031816 - RNA, 19 nt, Human
agucucaguguacagaggc

SEQ ID NO: 1031817 - RNA, 20 nt, Human
uaaggcuguuuuguauuccu

SEQ ID NO: 1031818 - RNA, 22 nt, Human
uggcuggcccugggagugcaga

SEQ ID NO: 1031819 - RNA, 22 nt, Human
gccugcagggugaugggcugcc

SEQ ID NO: 1031820 - RNA, 22 nt, Human
cuccucacuuuccagacugggc

SEQ ID NO: 1031821 - RNA, 22 nt, Human
uacaaagugugcccaugcugag

SEQ ID NO: 1031822 - RNA, 22 nt, Human
auguaacuucugugaaucugac

SEQ ID NO: 1031823 - RNA, 22 nt, Human
cagcacuggggggauucggagc

SEQ ID NO: 1031824 - RNA, 22 nt, Human
uccagucaggcugaauucaagg

SEQ ID NO: 1031825 - RNA, 22 nt, Human
acagagcuuaauucaggagcuu

SEQ ID NO: 1031826 - RNA, 22 nt, Human
ccuggagcaaaaaucuaaggag

SEQ ID NO: 1031827 - RNA, 22 nt, Human
auuugucuuugagugcccugcu

SEQ ID NO: 1031828 - RNA, 22 nt, Human
aggcugcuuucauggccgcccc

SEQ ID NO: 1031829 - RNA, 22 nt, Human
aaguuugacagaaguuucuaau

SEQ ID NO: 1031830 - RNA, 22 nt, Human
acacaggagauauguaauggcu

SEQ ID NO: 1031831 - RNA, 22 nt, Human
gcucacuggccugaagaggacg

SEQ ID NO: 1031832 - RNA, 22 nt, Human
cgcaccacugaauuccagccug

SEQ ID NO: 1031833 - RNA, 18 nt, Human
gcccagaggucugggccc

SEQ ID NO: 1031834 - RNA, 22 nt, Human
gaaggccucacucugcagcaua

SEQ ID NO: 1031835 - RNA, 22 nt, Human
ugcugccaggucuugcugucca

SEQ ID NO: 1031836 - RNA, 22 nt, Human
acccaggagcaggcugggcagu

SEQ ID NO: 1031837 - RNA, 22 nt, Human
acauuuaaauaccuauguuucu

SEQ ID NO: 1031838 - RNA, 22 nt, Human
cagcaauaacucaaagccauuu

SEQ ID NO: 1031839 - RNA, 16 nt, Human
ccacagggcaaggggc

SEQ ID NO: 1031840 - RNA, 22 nt, Human
aggccugucuggggcucagcca

SEQ ID NO: 1031841 - RNA, 18 nt, Human
cuucagugacagucuggc

SEQ ID NO: 1031842 - RNA, 22 nt, Human
uuucuguauuuaaaagaucugg

SEQ ID NO: 1031843 - RNA, 21 nt, Human
ugauccuuucccccauguugc

SEQ ID NO: 1031844 - RNA, 22 nt, Human
uccuggauucugcccugaaggc

SEQ ID NO: 1031845 - RNA, 21 nt, Human
ugcuucucuagaucaacuacu

SEQ ID NO: 1031846 - RNA, 22 nt, Human
cauuucugauuacagaauacua

SEQ ID NO: 1031847 - RNA, 22 nt, Human
acaaaaauuagcugggcauggu

SEQ ID NO: 1031848 - RNA, 22 nt, Human
uugauacaggcucuauuucauc

SEQ ID NO: 1031849 - RNA, 22 nt, Human
gcugcccaguucugcugcugcc

SEQ ID NO: 1031850 - RNA, 22 nt, Human
caggaggcaucauggagcggac

SEQ ID NO: 1031851 - RNA, 22 nt, Human
ggcccagcugugcuuccagccc

SEQ ID NO: 1031852 - RNA, 22 nt, Human
ucaaaugcucuuugcagagagg

SEQ ID NO: 1031853 - RNA, 22 nt, Human
cccuccagcucaaagcaaccgg

SEQ ID NO: 1031854 - RNA, 22 nt, Human
uauugaaauucuucauguccuc

SEQ ID NO: 1031855 - RNA, 22 nt, Human
caggguggcacucagcgcaucu

SEQ ID NO: 1031856 - RNA, 22 nt, Human
ggcugcaguuugucuuuugcuu

SEQ ID NO: 1031857 - RNA, 22 nt, Human
uggccugcagcucucagggaag

SEQ ID NO: 1031858 - RNA, 23 nt, Human
agggaaaguaguaauggccuuug

SEQ ID NO: 1031859 - RNA, 22 nt, Human
cuggggaggcagggcugccccu

SEQ ID NO: 1031860 - RNA, 22 nt, Human
aaggcagccucugccagccggg

SEQ ID NO: 1031861 - RNA, 22 nt, Human
ggcuggcauccagggaaaucca

SEQ ID NO: 1031862 - RNA, 22 nt, Human
ccagcgcuucccaucagggagg

SEQ ID NO: 1031863 - RNA, 22 nt, Human
agagcugggugaagugccauca

SEQ ID NO: 1031864 - RNA, 21 nt, Human
ugccagggauuuacagagccu

SEQ ID NO: 1031865 - RNA, 22 nt, Human
ccagcagagggucuuggccauu

SEQ ID NO: 1031866 - RNA, 22 nt, Human
agcagccaggaaucugcagagc

SEQ ID NO: 1031867 - RNA, 22 nt, Human
uggcucugggaaucuguugcuu

SEQ ID NO: 1031868 - RNA, 22 nt, Human
ucacagcaaaagugugcagagc

SEQ ID NO: 1031869 - RNA, 23 nt, Human
gggaccagcuagggcugugaccu

SEQ ID NO: 1031870 - RNA, 22 nt, Human
ucugagcuuuuauuaucaaccu

SEQ ID NO: 1031871 - RNA, 22 nt, Human
uuuucacacaaggugauaaguu

SEQ ID NO: 1031872 - RNA, 22 nt, Human
cugccucucaggucccugagau

SEQ ID NO: 1031873 - RNA, 22 nt, Human
uggccuggugcucaggcaguag

SEQ ID NO: 1031874 - RNA, 22 nt, Human
gcagagccaggagcccaggauc

SEQ ID NO: 1031875 - RNA, 22 nt, Human
ggagccugcgggagcucccauu

SEQ ID NO: 1031876 - RNA, 22 nt, Human
acuggcagcuguaggaugcaug

SEQ ID NO: 1031877 - RNA, 22 nt, Human
uucuuaaagaggcaaaacacag

SEQ ID NO: 1031878 - RNA, 22 nt, Human
uuggcuucuggcagucuggacg

SEQ ID NO: 1031879 - RNA, 22 nt, Human
gugcgccagcucaaggggaggc

SEQ ID NO: 1031880 - RNA, 22 nt, Human
ucugccugcaguguggcagggc

SEQ ID NO: 1031881 - RNA, 22 nt, Human
gcccagagagaugcuguagacc

SEQ ID NO: 1031882 - RNA, 22 nt, Human
ccuggagcaggagcugcagagg

SEQ ID NO: 1031883 - RNA, 22 nt, Human
aucacaggugguaggaaaagaa

SEQ ID NO: 1031884 - RNA, 22 nt, Human
cagugccucuuaagugucaccc

SEQ ID NO: 1031885 - RNA, 22 nt, Human
cugggagauugcuagagaugca

SEQ ID NO: 1031886 - RNA, 17 nt, Human
agcagcuggguugaucu

SEQ ID NO: 1031887 - RNA, 22 nt, Human
cagagggagcccuccaggagca

SEQ ID NO: 1031888 - RNA, 22 nt, Human
agggcuggcaagggauugaaau

SEQ ID NO: 1031889 - RNA, 22 nt, Human
cagaggugcauacaggucauua

SEQ ID NO: 1031890 - RNA, 22 nt, Human
ucucauguauugcccuggugug

SEQ ID NO: 1031891 - RNA, 22 nt, Human
gaggcaggcagauugcuugagg

SEQ ID NO: 1031892 - RNA, 22 nt, Human
agcagugggugacagagcugag

SEQ ID NO: 1031893 - RNA, 17 nt, Human
aucuggcugcuucuaga

SEQ ID NO: 1031894 - RNA, 22 nt, Human
guacaugucaaaaaaugcauaa

SEQ ID NO: 1031895 - RNA, 22 nt, Human
uauguacaaucagcaguucaua

SEQ ID NO: 1031896 - RNA, 22 nt, Human
gcaccacaucaaugaggggagc

SEQ ID NO: 1031897 - RNA, 20 nt, Human
auacaaagagauugauguau

SEQ ID NO: 1031898 - RNA, 22 nt, Human
accaugggucagccaccucagc

SEQ ID NO: 1031899 - RNA, 22 nt, Human
aggagaaggaagugcaucacua

SEQ ID NO: 1031900 - RNA, 22 nt, Human
aaacagaaggguagguaaacau

SEQ ID NO: 1031901 - RNA, 22 nt, Human
acagccuggacuggcucucugc

SEQ ID NO: 1031902 - RNA, 22 nt, Human
gccaggcauucuagaaguagug

SEQ ID NO: 1031903 - RNA, 22 nt, Human
uuucagaucauuuuuuaaguac

SEQ ID NO: 1031904 - RNA, 22 nt, Human
cagggccaagcugcagcaucug

SEQ ID NO: 1031905 - RNA, 22 nt, Human
ggaggccauaguuugggaguca

SEQ ID NO: 1031906 - RNA, 22 nt, Human
cagggccauaucuugugcacca

SEQ ID NO: 1031907 - RNA, 22 nt, Human
ugugucccuuggaaccucagcu

SEQ ID NO: 1031908 - RNA, 22 nt, Human
auaacagaguugggaagugaaa

SEQ ID NO: 1031909 - RNA, 22 nt, Human
gccuuuuuuguugcucugucac

SEQ ID NO: 1031910 - RNA, 22 nt, Human
gccugccuucggugcgcagcgg

SEQ ID NO: 1031911 - RNA, 22 nt, Human
gguggggccugcuccagcggcc

SEQ ID NO: 1031912 - RNA, 22 nt, Human
cucuggaauguuuacaugcccu

SEQ ID NO: 1031913 - RNA, 22 nt, Human
guggccugaugccagcccugug

SEQ ID NO: 1031914 - RNA, 22 nt, Human
aagcagcauaauugcuauuuua

SEQ ID NO: 1031915 - RNA, 22 nt, Human
ggcugggcaaacaagacucuuc

SEQ ID NO: 1031916 - RNA, 19 nt, Human
ucacaggcaucuccccaga

SEQ ID NO: 1031917 - RNA, 22 nt, Human
ccugcugggccugagcaaugag

SEQ ID NO: 1031918 - RNA, 22 nt, Human
gcagacaggcccaguggaggga

SEQ ID NO: 1031919 - RNA, 22 nt, Human
ucaaaguagggguaagccaggc

SEQ ID NO: 1031920 - RNA, 22 nt, Human
ccuuccuggcuguccgccugau

SEQ ID NO: 1031921 - RNA, 22 nt, Human
cugugccuaagaugcaugucuc

SEQ ID NO: 1031922 - RNA, 23 nt, Human
cuggccuccgacacuggccaaga

SEQ ID NO: 1031923 - RNA, 22 nt, Human
agaaacugaauuauuucugagg

SEQ ID NO: 1031924 - RNA, 22 nt, Human
ggcaggugcaccugagccaucu

SEQ ID NO: 1031925 - RNA, 22 nt, Human
ucagggcagaauccaaagaauu

SEQ ID NO: 1031926 - RNA, 22 nt, Human
ugcucuguugugcaugugggau

SEQ ID NO: 1031927 - RNA, 22 nt, Human
aagcugccugccacgcuagaua

SEQ ID NO: 1031928 - RNA, 22 nt, Human
ggccucucuccuuggcuugcag

SEQ ID NO: 1031929 - RNA, 22 nt, Human
gagcagugacuggagcaugaga

SEQ ID NO: 1031930 - RNA, 22 nt, Human
ugacaauacagagagagcaaaa

SEQ ID NO: 1031931 - RNA, 22 nt, Human
uaaaguuuggcagacaauaaca

SEQ ID NO: 1031932 - RNA, 22 nt, Human
ggaaggaggggcaaagcaguuc

SEQ ID NO: 1031933 - RNA, 22 nt, Human
uuagauaacaguagaauaucaa

SEQ ID NO: 1031934 - RNA, 23 nt, Human
ccagccucugggucuucauccag

SEQ ID NO: 1031935 - RNA, 22 nt, Human
cuggagagaaaugacaaagcua

SEQ ID NO: 1031936 - RNA, 22 nt, Human
uguauuuucuucuggaagcuua

SEQ ID NO: 1031937 - RNA, 22 nt, Human
uguggccaccagagcugcuauu

SEQ ID NO: 1031938 - RNA, 22 nt, Human
gguggcagucuuaagagaucuu

SEQ ID NO: 1031939 - RNA, 22 nt, Human
agacccagaaagcagcugcauu

SEQ ID NO: 1031940 - RNA, 23 nt, Human
ugagcccaggaggucaaggcugc

SEQ ID NO: 1031941 - RNA, 22 nt, Human
cuuuauguccaccagacugcaa

SEQ ID NO: 1031942 - RNA, 22 nt, Human
agccucuguagaaagcagugug

SEQ ID NO: 1031943 - RNA, 22 nt, Human
ugcugucccuaagucucuucaa

SEQ ID NO: 1031944 - RNA, 22 nt, Human
cacagcuuaugccacugauugg

SEQ ID NO: 1031945 - RNA, 22 nt, Human
gaugauuuuaugucuugucauu

SEQ ID NO: 1031946 - RNA, 22 nt, Human
gagcugagccuggguggaccgc

SEQ ID NO: 1031947 - RNA, 22 nt, Human
ucugcaggaaaaaagugccugg

SEQ ID NO: 1031948 - RNA, 22 nt, Human
aagagcuggaguuugcagcccu

SEQ ID NO: 1031949 - RNA, 22 nt, Human
agaaaaaucuuggcgcuugucu

SEQ ID NO: 1031950 - RNA, 22 nt, Human
agugggaggcggcugacgggcg

SEQ ID NO: 1031951 - RNA, 20 nt, Human
accucugcaucaauccuuug

SEQ ID NO: 1031952 - RNA, 22 nt, Human
augguacaaaauguauaaaguc

SEQ ID NO: 1031953 - RNA, 22 nt, Human
ccuggagcacagcccaguccca

SEQ ID NO: 1031954 - RNA, 22 nt, Human
ucucagagauuuuguuucccuu

SEQ ID NO: 1031955 - RNA, 22 nt, Human
ggcagcuggggcagugcccugu

SEQ ID NO: 1031956 - RNA, 22 nt, Human
uucagucagugacuaagcaguu

SEQ ID NO: 1031957 - RNA, 18 nt, Human
ggaaaaggagugucuagc

SEQ ID NO: 1031958 - RNA, 17 nt, Human
uagcugccccgaaugcu

SEQ ID NO: 1031959 - RNA, 22 nt, Human
cagggcacaguuauggaggugg

SEQ ID NO: 1031960 - RNA, 22 nt, Human
gaugguuuggaaugaaguagcu

SEQ ID NO: 1031961 - RNA, 22 nt, Human
ugcuggagaucauuaauguuca

SEQ ID NO: 1031962 - RNA, 22 nt, Human
agaggcuccuagccacuggcuu

SEQ ID NO: 1031963 - RNA, 22 nt, Human
gcugucugcaucucuagagcuu

SEQ ID NO: 1031964 - RNA, 22 nt, Human
aggcccugcccagagcuccucg

SEQ ID NO: 1031965 - RNA, 22 nt, Human
ucuuagaaugucaacugauguu

SEQ ID NO: 1031966 - RNA, 22 nt, Human
cccccagccagcagugcucagc

SEQ ID NO: 1031967 - RNA, 22 nt, Human
ucaaaugcacguagagaaaaua

SEQ ID NO: 1031968 - RNA, 18 nt, Human
agucucagcggaggagua

SEQ ID NO: 1031969 - RNA, 22 nt, Human
auccuugaacuuagacacuagg

SEQ ID NO: 1031970 - RNA, 22 nt, Human
uuuccucuccggggccuccagg

SEQ ID NO: 1031971 - RNA, 22 nt, Human
ugucccagauacuggacauaga

SEQ ID NO: 1031972 - RNA, 20 nt, Human
cuccagggaacagacuggag

SEQ ID NO: 1031973 - RNA, 22 nt, Human
gggagggaggugcugguucacg

SEQ ID NO: 1031974 - RNA, 22 nt, Human
gcaggaugggagcuucacucug

SEQ ID NO: 1031975 - RNA, 22 nt, Human
agggggcaggagagaccugcug

SEQ ID NO: 1031976 - RNA, 22 nt, Human
aaaugugucaguuucauucucu

SEQ ID NO: 1031977 - RNA, 20 nt, Human
cucaggauacugcaaaguug

SEQ ID NO: 1031978 - RNA, 22 nt, Human
ccagcugacgaugccuggucuc

SEQ ID NO: 1031979 - RNA, 22 nt, Human
auguuuuauauuuugcagcagu

SEQ ID NO: 1031980 - RNA, 22 nt, Human
aagcaggcauuccagagacaau

SEQ ID NO: 1031981 - RNA, 22 nt, Human
ucuuugcaugcauuuucccuua

SEQ ID NO: 1031982 - RNA, 22 nt, Human
agaccagcugccucccagggcc

SEQ ID NO: 1031983 - RNA, 22 nt, Human
guccucagagugggcagguccu

SEQ ID NO: 1031984 - RNA, 22 nt, Human
cugggagcuagcucugagcuga

SEQ ID NO: 1031985 - RNA, 19 nt, Human
ugucuuaauuaacucagag

SEQ ID NO: 1031986 - RNA, 18 nt, Human
agaaggagcuaugggcag

SEQ ID NO: 1031987 - RNA, 22 nt, Human
cuggccugaucucaugcugucc

SEQ ID NO: 1031988 - RNA, 22 nt, Human
aaggcagccgugugacugcaug

SEQ ID NO: 1031989 - RNA, 22 nt, Human
uccugagggcgauucagcaggu

SEQ ID NO: 1031990 - RNA, 22 nt, Human
cagcuuugauucuuucugccau

SEQ ID NO: 1031991 - RNA, 22 nt, Human
ggggaugguggcauuuguaaaa

SEQ ID NO: 1031992 - RNA, 22 nt, Human
gcugauuauuacaugucugugg

SEQ ID NO: 1031993 - RNA, 22 nt, Human
cugugcuuccaggauggcagcu

SEQ ID NO: 1031994 - RNA, 22 nt, Human
aaggcacuguacuaguuaguua

SEQ ID NO: 1031995 - RNA, 22 nt, Human
gcccugugcgacucuagagguu

SEQ ID NO: 1031996 - RNA, 21 nt, Human
ccugggccaaauucccuggac

SEQ ID NO: 1031997 - RNA, 22 nt, Human
cuggcagcucugagucccuucu

SEQ ID NO: 1031998 - RNA, 22 nt, Human
gagcagcuggacaggccucccu

SEQ ID NO: 1031999 - RNA, 22 nt, Human
gcuuccuaaaugcacagggcag

SEQ ID NO: 1032000 - RNA, 22 nt, Human
ugcagaaggccugacauugcac

SEQ ID NO: 1032001 - RNA, 22 nt, Human
uggagaagucaaagugaacagg

SEQ ID NO: 1032002 - RNA, 22 nt, Human
gcauccagagguagccacugug

SEQ ID NO: 1032003 - RNA, 23 nt, Human
uggauaaagcugugcugcauagg

SEQ ID NO: 1032004 - RNA, 23 nt, Human
agcaauaagaagggauacaugug

SEQ ID NO: 1032005 - RNA, 22 nt, Human
cugccaggacugacgucuucag

SEQ ID NO: 1032006 - RNA, 22 nt, Human
ccugggugucaugggcagcugg

SEQ ID NO: 1032007 - RNA, 22 nt, Human
aggugccagcucucaggcagga

SEQ ID NO: 1032008 - RNA, 22 nt, Human
gggauggcucaaaggagucagg

SEQ ID NO: 1032009 - RNA, 22 nt, Human
gagcuguccgccccugggccga

SEQ ID NO: 1032010 - RNA, 22 nt, Human
ggcugcagcagagggacucacg

SEQ ID NO: 1032011 - RNA, 22 nt, Human
ggagccaguuuagaccucaguu

SEQ ID NO: 1032012 - RNA, 22 nt, Human
auucucaaacaagugguuugau

SEQ ID NO: 1032013 - RNA, 22 nt, Human
ggguggcuccuaugggcauagc

SEQ ID NO: 1032014 - RNA, 22 nt, Human
ccagcuccaaguuugggcauca

SEQ ID NO: 1032015 - RNA, 22 nt, Human
caaaagauacuugcaucuaacu

SEQ ID NO: 1032016 - RNA, 22 nt, Human
aaaaugugaucuacaaaugcaa

SEQ ID NO: 1032017 - RNA, 22 nt, Human
ccagagucuaugaguccucauu

SEQ ID NO: 1032018 - RNA, 22 nt, Human
gaaugcacuuccaacaucuauu

SEQ ID NO: 1032019 - RNA, 22 nt, Human
augggaggaaggaggcccuuga

SEQ ID NO: 1032020 - RNA, 22 nt, Human
cccuccagagcuugaccugcug

SEQ ID NO: 1032021 - RNA, 22 nt, Human
ugggcagauguccucugaagug

SEQ ID NO: 1032022 - RNA, 21 nt, Human
gagacagcccagugccagggc

SEQ ID NO: 1032023 - RNA, 22 nt, Human
uccagagggcgauggcuggggg

SEQ ID NO: 1032024 - RNA, 22 nt, Human
ccucagaguaggucucagcugu

SEQ ID NO: 1032025 - RNA, 22 nt, Human
aagccagguguugugguaagag

SEQ ID NO: 1032026 - RNA, 21 nt, Human
ucagaguggaagacaguuuga

SEQ ID NO: 1032027 - RNA, 22 nt, Human
gccuggaguucagccaaguccc

SEQ ID NO: 1032028 - RNA, 22 nt, Human
ucaugacaucuguuuaucucaa

SEQ ID NO: 1032029 - RNA, 22 nt, Human
uucauucccuuauauuagcauu

SEQ ID NO: 1032030 - RNA, 22 nt, Human
uggcacuggcgcaggauggcgg

SEQ ID NO: 1032031 - RNA, 22 nt, Human
gagaggcuaugagguucugugu

SEQ ID NO: 1032032 - RNA, 22 nt, Human
augcucugggcaggagcccugg

SEQ ID NO: 1032033 - RNA, 22 nt, Human
agccuggcuguaaccucauggu

SEQ ID NO: 1032034 - RNA, 22 nt, Human
cugggaguguucuaggucacau

SEQ ID NO: 1032035 - RNA, 22 nt, Human
acuuuguauaagacaauaaaga

SEQ ID NO: 1032036 - RNA, 22 nt, Human
gagaggaguaggcugauggugc

SEQ ID NO: 1032037 - RNA, 22 nt, Human
uccagggaugccagccauguug

SEQ ID NO: 1032038 - RNA, 22 nt, Human
ucccagggacaccaagcuguuu

SEQ ID NO: 1032039 - RNA, 22 nt, Human
ccagggugggaggcugaaggcg

SEQ ID NO: 1032040 - RNA, 18 nt, Human
gcugucugaggucugagg

SEQ ID NO: 1032041 - RNA, 22 nt, Human
uaucuugagagacaacacagca

SEQ ID NO: 1032042 - RNA, 20 nt, Human
uggagccacagucagguucc

SEQ ID NO: 1032043 - RNA, 22 nt, Human
ucugagagccucuagccuaagu

SEQ ID NO: 1032044 - RNA, 22 nt, Human
gcccugugccagucacgcugug

SEQ ID NO: 1032045 - RNA, 22 nt, Human
uccaguggugguuugaagggca

SEQ ID NO: 1032046 - RNA, 22 nt, Human
uuguuuucacagcuuugcccgg

SEQ ID NO: 1032047 - RNA, 22 nt, Human
ccugggcaacauagugagaccu

SEQ ID NO: 1032048 - RNA, 22 nt, Human
cugggaggcacuauucaggagg

SEQ ID NO: 1032049 - RNA, 22 nt, Human
cuccugaguaguagcauuguca

SEQ ID NO: 1032050 - RNA, 22 nt, Human
ucagagugugagacauauugga

SEQ ID NO: 1032051 - RNA, 22 nt, Human
aagggcaggcagagaucauaua

SEQ ID NO: 1032052 - RNA, 22 nt, Human
caguggcaugguugacugcagu

SEQ ID NO: 1032053 - RNA, 22 nt, Human
ugaaggagcucaaugaugaugc

SEQ ID NO: 1032054 - RNA, 20 nt, Human
ccucaagcagacugacagcu

SEQ ID NO: 1032055 - RNA, 22 nt, Human
agccucugauggcucccaagga

SEQ ID NO: 1032056 - RNA, 22 nt, Human
gaaggcugaugacagauucugc

SEQ ID NO: 1032057 - RNA, 22 nt, Human
gagcugggacauggguccucuc

SEQ ID NO: 1032058 - RNA, 22 nt, Human
gcagaugguggggcaggaaaau

SEQ ID NO: 1032059 - RNA, 22 nt, Human
gacauucacagguaaacauucc

SEQ ID NO: 1032060 - RNA, 22 nt, Human
aguugcagacgcagagauguug

SEQ ID NO: 1032061 - RNA, 22 nt, Human
uccucacaagcaagcacaggua

SEQ ID NO: 1032062 - RNA, 22 nt, Human
ugaaauguuugaagaccacuga

SEQ ID NO: 1032063 - RNA, 19 nt, Human
uuggaaggagccagagugg

SEQ ID NO: 1032064 - RNA, 22 nt, Human
ugcaguggaagagguggagauc

SEQ ID NO: 1032065 - RNA, 18 nt, Human
gcaggugccacugcuguu

SEQ ID NO: 1032066 - RNA, 22 nt, Human
gcuggccauagaagccaaagag

SEQ ID NO: 1032067 - RNA, 22 nt, Human
agagccugucugccuuucuacc

SEQ ID NO: 1032068 - RNA, 22 nt, Human
gcaaagucucaagacccaagug

SEQ ID NO: 1032069 - RNA, 22 nt, Human
ucccagagaagagcuggaugga

SEQ ID NO: 1032070 - RNA, 22 nt, Human
auccugggcagugugucacucu

SEQ ID NO: 1032071 - RNA, 22 nt, Human
uaaaugcaguuaguacuugcca

SEQ ID NO: 1032072 - RNA, 22 nt, Human
uuucagaugcaauuaauuuuca

SEQ ID NO: 1032073 - RNA, 22 nt, Human
acagcagcuaaaggugucuccu

SEQ ID NO: 1032074 - RNA, 22 nt, Human
gaggcagcuuggggcugugggu

SEQ ID NO: 1032075 - RNA, 22 nt, Human
ucaguuuucucauuuaugagau

SEQ ID NO: 1032076 - RNA, 22 nt, Human
uauacuuuccugcaacuuugau

SEQ ID NO: 1032077 - RNA, 22 nt, Human
gcaggcagaucaccugucagga

SEQ ID NO: 1032078 - RNA, 22 nt, Human
ccaggguggcguagaugcuggg

SEQ ID NO: 1032079 - RNA, 22 nt, Human
ugaaaucuccucuuuauauauc

SEQ ID NO: 1032080 - RNA, 21 nt, Human
uccugccuuaguccagagcag

SEQ ID NO: 1032081 - RNA, 22 nt, Human
ucagggcucaccagccucugcc

SEQ ID NO: 1032082 - RNA, 22 nt, Human
aggaggccccuccuggguugcu

SEQ ID NO: 1032083 - RNA, 22 nt, Human
gcuugcuggugccugcaggcuc

SEQ ID NO: 1032084 - RNA, 20 nt, Human
gagccugggaagucuaaggu

SEQ ID NO: 1032085 - RNA, 22 nt, Human
agccccuuccaguucucagauc

SEQ ID NO: 1032086 - RNA, 22 nt, Human
aggguccaucaaggacugcaca

SEQ ID NO: 1032087 - RNA, 22 nt, Human
guucacauccuugugaggauuu

SEQ ID NO: 1032088 - RNA, 22 nt, Human
ggagcugggacccugucaucug

SEQ ID NO: 1032089 - RNA, 22 nt, Human
cugaggaguuuggguuguucaa

SEQ ID NO: 1032090 - RNA, 22 nt, Human
agggccuggugaccuggguccu

SEQ ID NO: 1032091 - RNA, 22 nt, Human
augcaguaaauguuaagaaaaa

SEQ ID NO: 1032092 - RNA, 22 nt, Human
cccuggagcaucucugcugucu

SEQ ID NO: 1032093 - RNA, 22 nt, Human
gucucccaucguuugugaggaa

SEQ ID NO: 1032094 - RNA, 22 nt, Human
ccaggugggaggaaagcagaga

SEQ ID NO: 1032095 - RNA, 22 nt, Human
aaccaggacaauuuugaaagua

SEQ ID NO: 1032096 - RNA, 22 nt, Human
uuuauuauagugguggggacug

SEQ ID NO: 1032097 - RNA, 22 nt, Human
uggcccugaggacccagugugg

SEQ ID NO: 1032098 - RNA, 22 nt, Human
uuugaaaauuuaagugcuacac

SEQ ID NO: 1032099 - RNA, 22 nt, Human
agugucugccaacugcaugguc

SEQ ID NO: 1032100 - RNA, 22 nt, Human
ucucagagggaaaggccaauuu

SEQ ID NO: 1032101 - RNA, 22 nt, Human
auguacaguuucuagacucaaa

SEQ ID NO: 1032102 - RNA, 22 nt, Human
cugccucuauucacugaggcag

SEQ ID NO: 1032103 - RNA, 22 nt, Human
agagccagcauuugacacuggc

SEQ ID NO: 1032104 - RNA, 22 nt, Human
ggccucacccaucggugccuuu

SEQ ID NO: 1032105 - RNA, 22 nt, Human
cuucuuaaugacagauuaaaau

SEQ ID NO: 1032106 - RNA, 22 nt, Human
ugggaggagcccucugggaagg

SEQ ID NO: 1032107 - RNA, 22 nt, Human
uaaaugcaagugcuccugggag

SEQ ID NO: 1032108 - RNA, 22 nt, Human
cagcuuggaggaggaucuaaga

SEQ ID NO: 1032109 - RNA, 22 nt, Human
accugaggccuccccagcagac

SEQ ID NO: 1032110 - RNA, 22 nt, Human
gcugcccagcaggccccagggg

SEQ ID NO: 1032111 - RNA, 22 nt, Human
cuauugaaaguguacaauucaa

SEQ ID NO: 1032112 - RNA, 22 nt, Human
agggagagguugaaaccucagu

SEQ ID NO: 1032113 - RNA, 22 nt, Human
cccaagcagggugcagaggcau

SEQ ID NO: 1032114 - RNA, 21 nt, Human
gcagccacugccuucaacaau

SEQ ID NO: 1032115 - RNA, 22 nt, Human
ccuggcagcuguuuggcuuggc

SEQ ID NO: 1032116 - RNA, 22 nt, Human
agcaauauuucagcuagcaggu

SEQ ID NO: 1032117 - RNA, 22 nt, Human
agcagcucuuaacaaagcaugg

SEQ ID NO: 1032118 - RNA, 22 nt, Human
uuguaacagguacuaaauaacu

SEQ ID NO: 1032119 - RNA, 22 nt, Human
cugaagcaaaggaucgagcuaa

SEQ ID NO: 1032120 - RNA, 22 nt, Human
gcugagagcaaagcaugucuag

SEQ ID NO: 1032121 - RNA, 22 nt, Human
ggaggccacgguuuagcaccga

SEQ ID NO: 1032122 - RNA, 22 nt, Human
cuggagccagccagggcccucu

SEQ ID NO: 1032123 - RNA, 22 nt, Human
uggcugcuagccagagcuucag

SEQ ID NO: 1032124 - RNA, 22 nt, Human
caggaaauaucuccuggcagag

SEQ ID NO: 1032125 - RNA, 22 nt, Human
caggccuggggcuggcuuccag

SEQ ID NO: 1032126 - RNA, 22 nt, Human
ccugcagacacuuguccagcaa

SEQ ID NO: 1032127 - RNA, 22 nt, Human
agcagccagagucugaacauua

SEQ ID NO: 1032128 - RNA, 21 nt, Human
aaggaaaagcuuggucucuga

SEQ ID NO: 1032129 - RNA, 21 nt, Human
cccuguguuccacagcagaca

SEQ ID NO: 1032130 - RNA, 22 nt, Human
cucuuucaguucugauagucuc

SEQ ID NO: 1032131 - RNA, 22 nt, Human
acaggagugaaucuggcacuua

SEQ ID NO: 1032132 - RNA, 17 nt, Human
ugguggcuggagucagg

SEQ ID NO: 1032133 - RNA, 22 nt, Human
ccucugagagaaggccuucagc

SEQ ID NO: 1032134 - RNA, 22 nt, Human
ccuaagaauuaaugaauacacc

SEQ ID NO: 1032135 - RNA, 22 nt, Human
gggcagcagagcccugccgagu

SEQ ID NO: 1032136 - RNA, 22 nt, Human
cagcuuggcuuccgcuuuacug

SEQ ID NO: 1032137 - RNA, 22 nt, Human
uucauucaucucuaaaaugccu

SEQ ID NO: 1032138 - RNA, 22 nt, Human
gagccuggagcuggaacgaagc

SEQ ID NO: 1032139 - RNA, 22 nt, Human
gcugagcugaggcagggcuggg

SEQ ID NO: 1032140 - RNA, 20 nt, Human
cagcucugggaaagaggcca

SEQ ID NO: 1032141 - RNA, 22 nt, Human
aagcugcccuguguuagaguuc

SEQ ID NO: 1032142 - RNA, 22 nt, Human
ugcagaggaccauuguccugga

SEQ ID NO: 1032143 - RNA, 22 nt, Human
ugcuaucucuauauccauuuau

SEQ ID NO: 1032144 - RNA, 22 nt, Human
agccaggcugcaguuggcuggc

SEQ ID NO: 1032145 - RNA, 22 nt, Human
aagaacagauucagccugaacu

SEQ ID NO: 1032146 - RNA, 22 nt, Human
uccaggagagguguggggacug

SEQ ID NO: 1032147 - RNA, 22 nt, Human
ugccaggcauauggccucuuug

SEQ ID NO: 1032148 - RNA, 18 nt, Human
gggaagaggaucuggccc

SEQ ID NO: 1032149 - RNA, 22 nt, Human
ugccuggguguaaagggccaac

SEQ ID NO: 1032150 - RNA, 20 nt, Human
gagauggcuaagugcugaac

SEQ ID NO: 1032151 - RNA, 22 nt, Human
agagugauucuaguuagggaau

SEQ ID NO: 1032152 - RNA, 22 nt, Human
gcuggugcauuagcugcaguuc

SEQ ID NO: 1032153 - RNA, 22 nt, Human
ugaggccagucucaucacaggc

SEQ ID NO: 1032154 - RNA, 22 nt, Human
uacaguaacauguuguacaagc

SEQ ID NO: 1032155 - RNA, 22 nt, Human
gggcagugguuacacagcugag

SEQ ID NO: 1032156 - RNA, 22 nt, Human
ccugacgaaaggcgugcuggag

SEQ ID NO: 1032157 - RNA, 20 nt, Human
ccaggcacugucccaugcag

SEQ ID NO: 1032158 - RNA, 22 nt, Human
uggguagagacacagucugggg

SEQ ID NO: 1032159 - RNA, 22 nt, Human
cuuggcagagggcugggcucag

SEQ ID NO: 1032160 - RNA, 19 nt, Human
gcuggcagauguggccgug

SEQ ID NO: 1032161 - RNA, 23 nt, Human
ugcugguguuuuugggaccaggg

SEQ ID NO: 1032162 - RNA, 22 nt, Human
auuugucuagugguauucacgu

SEQ ID NO: 1032163 - RNA, 22 nt, Human
gccagcagcccagaaggacuuu

SEQ ID NO: 1032164 - RNA, 22 nt, Human
guuuuuccuugcugaggacccg

SEQ ID NO: 1032165 - RNA, 22 nt, Human
ccagcugggauuaagggaaaau

SEQ ID NO: 1032166 - RNA, 22 nt, Human
uccagggguaccggccaggcag

SEQ ID NO: 1032167 - RNA, 23 nt, Human
ucuuuccucagcacacaccaaga

SEQ ID NO: 1032168 - RNA, 22 nt, Human
aauggacaggagagcauaguca

SEQ ID NO: 1032169 - RNA, 22 nt, Human
ugcuggccgugagcucucggga

SEQ ID NO: 1032170 - RNA, 22 nt, Human
uggcucuguugagguauggauu

SEQ ID NO: 1032171 - RNA, 22 nt, Human
cugaggcugcccagggccaggu

SEQ ID NO: 1032172 - RNA, 22 nt, Human
gaagcucucaaacucuccccuu

SEQ ID NO: 1032173 - RNA, 22 nt, Human
cugaagcacagcauauaaauaa

SEQ ID NO: 1032174 - RNA, 22 nt, Human
uugcauaaagauuuuauugcau

SEQ ID NO: 1032175 - RNA, 22 nt, Human
cugagcugggaguggauagugg

SEQ ID NO: 1032176 - RNA, 22 nt, Human
ugugccaggcacuugcccaggc

SEQ ID NO: 1032177 - RNA, 22 nt, Human
uguguuuuacaaauucucuuaa

SEQ ID NO: 1032178 - RNA, 22 nt, Human
ccucagggccaucucugucccu

SEQ ID NO: 1032179 - RNA, 19 nt, Human
acagaaauguaagugagac

SEQ ID NO: 1032180 - RNA, 22 nt, Human
acccaggagguggaggcugcag

SEQ ID NO: 1032181 - RNA, 22 nt, Human
uguguuccugccuggcucuggu

SEQ ID NO: 1032182 - RNA, 22 nt, Human
ggcacugagcugccuuggggca

SEQ ID NO: 1032183 - RNA, 19 nt, Human
acuuugcaugugugucuaa

SEQ ID NO: 1032184 - RNA, 20 nt, Human
cccagccccuaccuguugcc

SEQ ID NO: 1032185 - RNA, 22 nt, Human
aguuucauauuaccaugucacc

SEQ ID NO: 1032186 - RNA, 20 nt, Human
cccuggccuguuucaugccc

SEQ ID NO: 1032187 - RNA, 22 nt, Human
ucacguuuuacugagugagaua

SEQ ID NO: 1032188 - RNA, 22 nt, Human
ggccugggcccacugucaagag

SEQ ID NO: 1032189 - RNA, 22 nt, Human
uagagcuguaucaaagagccuu

SEQ ID NO: 1032190 - RNA, 18 nt, Human
agagcagcggcaucacac

SEQ ID NO: 1032191 - RNA, 22 nt, Human
guacuuccagccaagugagaca

SEQ ID NO: 1032192 - RNA, 22 nt, Human
ggccucugccucaucugggcac

SEQ ID NO: 1032193 - RNA, 22 nt, Human
cccuggagugccggaaucaaga

SEQ ID NO: 1032194 - RNA, 22 nt, Human
gaggagggagcuggaagcucuu

SEQ ID NO: 1032195 - RNA, 22 nt, Human
ucugggcccuaaaccagcucua

SEQ ID NO: 1032196 - RNA, 22 nt, Human
cuggugguucaggagaauggcu

SEQ ID NO: 1032197 - RNA, 21 nt, Human
ggcuccugcuuugugaggggc

SEQ ID NO: 1032198 - RNA, 22 nt, Human
cuggcucaauuuguacugcugu

SEQ ID NO: 1032199 - RNA, 22 nt, Human
aagcugccugggaggaagggcu

SEQ ID NO: 1032200 - RNA, 22 nt, Human
gcacacaggcaguuuccagcca

SEQ ID NO: 1032201 - RNA, 21 nt, Human
aagagcuggaucaaggauaag

SEQ ID NO: 1032202 - RNA, 22 nt, Human
agaaaguucacugguauauuuu

SEQ ID NO: 1032203 - RNA, 22 nt, Human
aggggcugacuggaaagugcca

SEQ ID NO: 1032204 - RNA, 22 nt, Human
ugugccagccucuggcuguguc

SEQ ID NO: 1032205 - RNA, 22 nt, Human
uguuccaugucuuuguaggacu

SEQ ID NO: 1032206 - RNA, 22 nt, Human
gaggaguggaguugcuggguug

SEQ ID NO: 1032207 - RNA, 22 nt, Human
ccuggcucucugcagauccugg

SEQ ID NO: 1032208 - RNA, 21 nt, Human
uccagggaacuucucaggaau

SEQ ID NO: 1032209 - RNA, 22 nt, Human
gaugcacuuucuuuucaacagu

SEQ ID NO: 1032210 - RNA, 22 nt, Human
caggaaagguagucacaaugua

SEQ ID NO: 1032211 - RNA, 18 nt, Human
gggcaucauucacaaagu

SEQ ID NO: 1032212 - RNA, 22 nt, Human
cuggaaggucuguccccacugc

SEQ ID NO: 1032213 - RNA, 22 nt, Human
cuaaaugcccuacaaugacugg

SEQ ID NO: 1032214 - RNA, 22 nt, Human
uagcauuuauggucaugugucc

SEQ ID NO: 1032215 - RNA, 22 nt, Human
ggaagggccucgggcgugggac

SEQ ID NO: 1032216 - RNA, 22 nt, Human
ggccugcuccgggggcugagcu

SEQ ID NO: 1032217 - RNA, 22 nt, Human
cucagaguccccacaucugggu

SEQ ID NO: 1032218 - RNA, 19 nt, Human
uggcaggcccaggauggac

SEQ ID NO: 1032219 - RNA, 22 nt, Human
auucaguucuaaggucagugcc

SEQ ID NO: 1032220 - RNA, 22 nt, Human
ucagaguguggugagaugugca

SEQ ID NO: 1032221 - RNA, 22 nt, Human
cacguuuuaugacagaagaagc

SEQ ID NO: 1032222 - RNA, 22 nt, Human
ugcagagguguugcugagauaa

SEQ ID NO: 1032223 - RNA, 22 nt, Human
ggcagcucugcuccacaugagu

SEQ ID NO: 1032224 - RNA, 23 nt, Human
uggcucuguggaucccucaggag

SEQ ID NO: 1032225 - RNA, 22 nt, Human
caggcagcaggagcccugcucg

SEQ ID NO: 1032226 - RNA, 19 nt, Human
ugagugggccccugcagac

SEQ ID NO: 1032227 - RNA, 22 nt, Human
ucagccucucugaguccagacc

SEQ ID NO: 1032228 - RNA, 22 nt, Human
acugucuccucaucaugccugg

SEQ ID NO: 1032229 - RNA, 22 nt, Human
uacaaaguauauuucuagcugu

SEQ ID NO: 1032230 - RNA, 22 nt, Human
caggcuggagugcaguugugca

SEQ ID NO: 1032231 - RNA, 22 nt, Human
cagugucuccagaugcuccaau

SEQ ID NO: 1032232 - RNA, 22 nt, Human
ccccagccagcaggaccucuga

SEQ ID NO: 1032233 - RNA, 22 nt, Human
ucccagagccaagcuauggaug

SEQ ID NO: 1032234 - RNA, 22 nt, Human
aggggcugcuggguccgccccu

SEQ ID NO: 1032235 - RNA, 19 nt, Human
agaggccucagcagcuggc

SEQ ID NO: 1032236 - RNA, 22 nt, Human
uggcucugaccagguagaggag

SEQ ID NO: 1032237 - RNA, 18 nt, Human
aggccugggaagcugagg

SEQ ID NO: 1032238 - RNA, 22 nt, Human
uggcagggugccaguugcgagu

SEQ ID NO: 1032239 - RNA, 22 nt, Human
ggacccugggcuugcuccuggg

SEQ ID NO: 1032240 - RNA, 22 nt, Human
guggccuggcgagcuggcgcgg

SEQ ID NO: 1032241 - RNA, 22 nt, Human
aaggccaugcacauccuaggca

SEQ ID NO: 1032242 - RNA, 23 nt, Human
agccacuucuaucuugcuccugg

SEQ ID NO: 1032243 - RNA, 21 nt, Human
cuguuucuugugaagugacac

SEQ ID NO: 1032244 - RNA, 22 nt, Human
caggcacugugcuagauccuug

SEQ ID NO: 1032245 - RNA, 22 nt, Human
ggccuugggauguggcugcagc

SEQ ID NO: 1032246 - RNA, 22 nt, Human
ggugaggcuaagugacacaggg

SEQ ID NO: 1032247 - RNA, 22 nt, Human
aagcccagcugaaagcauuuuu

SEQ ID NO: 1032248 - RNA, 22 nt, Human
ccuggguggcagagguugcagu

SEQ ID NO: 1032249 - RNA, 22 nt, Human
gggcacuggaaggcucucaggc

SEQ ID NO: 1032250 - RNA, 22 nt, Human
aacagaauugcugcugccaaug

SEQ ID NO: 1032251 - RNA, 22 nt, Human
auaaggcacacauagauagggu

SEQ ID NO: 1032252 - RNA, 23 nt, Human
agaggcaggaguggcuugcccgg

SEQ ID NO: 1032253 - RNA, 18 nt, Human
aaaugcuaggcuacauga

SEQ ID NO: 1032254 - RNA, 22 nt, Human
cugggagucaccaggagcaagg

SEQ ID NO: 1032255 - RNA, 22 nt, Human
uuauuauugugaccugagaaug

SEQ ID NO: 1032256 - RNA, 22 nt, Human
cccaaggccucuccuuggcuug

SEQ ID NO: 1032257 - RNA, 22 nt, Human
aaaaucugguaauuugaaugug

SEQ ID NO: 1032258 - RNA, 22 nt, Human
ccugccuguacuagagacccag

SEQ ID NO: 1032259 - RNA, 22 nt, Human
gccagggaacccaagggccuca

SEQ ID NO: 1032260 - RNA, 22 nt, Human
gagcaacaguuuaugguuuuuc

SEQ ID NO: 1032261 - RNA, 22 nt, Human
cugucuguuucugauucaaccu

SEQ ID NO: 1032262 - RNA, 22 nt, Human
aggccagagaggggaccagccu

SEQ ID NO: 1032263 - RNA, 22 nt, Human
agcaagcuaccuagauagucua

SEQ ID NO: 1032264 - RNA, 22 nt, Human
agauuuccugcacugccuuuga

SEQ ID NO: 1032265 - RNA, 22 nt, Human
uaaguucagaguucucauuugu

SEQ ID NO: 1032266 - RNA, 22 nt, Human
ugcacacaaaugugaacgugcc

SEQ ID NO: 1032267 - RNA, 22 nt, Human
gagccaggucgggccgcggcga

SEQ ID NO: 1032268 - RNA, 22 nt, Human
caggcccugggcaggaucagcc

SEQ ID NO: 1032269 - RNA, 22 nt, Human
ggcucugcgcgguaaagugacu

SEQ ID NO: 1032270 - RNA, 22 nt, Human
cucagcuggcaauucuggcucc

SEQ ID NO: 1032271 - RNA, 22 nt, Human
gcuccugggcucuaccuugcua

SEQ ID NO: 1032272 - RNA, 22 nt, Human
gccaggugggagacagacagca

SEQ ID NO: 1032273 - RNA, 22 nt, Human
uguuaaauguuccuuuacugga

SEQ ID NO: 1032274 - RNA, 22 nt, Human
aagagcuggagcugcuacagga

SEQ ID NO: 1032275 - RNA, 22 nt, Human
uagugcacacgcauguagcagu

SEQ ID NO: 1032276 - RNA, 22 nt, Human
ccuccaaguuugacucaggaca

SEQ ID NO: 1032277 - RNA, 22 nt, Human
cccagcauggagugaggacuca

SEQ ID NO: 1032278 - RNA, 20 nt, Human
uauuucugggcaaccauuua

SEQ ID NO: 1032279 - RNA, 22 nt, Human
acagggcccuugccagcacaag

SEQ ID NO: 1032280 - RNA, 22 nt, Human
acuuugaaggggaacauuuuaa

SEQ ID NO: 1032281 - RNA, 22 nt, Human
ugguccagaugccuuggcuuua

SEQ ID NO: 1032282 - RNA, 22 nt, Human
ugugugcagccucugucuuugg

SEQ ID NO: 1032283 - RNA, 22 nt, Human
gugcaugugucuuuauaguaga

SEQ ID NO: 1032284 - RNA, 22 nt, Human
aagugacaaaaggguauccaaa

SEQ ID NO: 1032285 - RNA, 22 nt, Human
agggcagagaucugagugggca

SEQ ID NO: 1032286 - RNA, 22 nt, Human
agggccagggaagcuguauuuu

SEQ ID NO: 1032287 - RNA, 22 nt, Human
gggcagagguucaacuucaaca

SEQ ID NO: 1032288 - RNA, 22 nt, Human
gagcugccggcccacaguacua

SEQ ID NO: 1032289 - RNA, 19 nt, Human
ccauggcaaugaucugaug

SEQ ID NO: 1032290 - RNA, 22 nt, Human
cagggcagggccacacccccug

SEQ ID NO: 1032291 - RNA, 22 nt, Human
ucuggagccacaaaccucagcu

SEQ ID NO: 1032292 - RNA, 22 nt, Human
auaacagauacucucugugagg

SEQ ID NO: 1032293 - RNA, 22 nt, Human
ccugcagguaaggcuaacugcc

SEQ ID NO: 1032294 - RNA, 22 nt, Human
cucuggagggaggcugagcugg

SEQ ID NO: 1032295 - RNA, 22 nt, Human
ugaaaaggguagaucccuaagu

SEQ ID NO: 1032296 - RNA, 22 nt, Human
ggccugcucugcagccucuaca

SEQ ID NO: 1032297 - RNA, 20 nt, Human
ugaaaaggucaggagacaug

SEQ ID NO: 1032298 - RNA, 22 nt, Human
agcaggagcccuuaucaccagg

SEQ ID NO: 1032299 - RNA, 22 nt, Human
ugagcuuccucccugcauccau

SEQ ID NO: 1032300 - RNA, 22 nt, Human
uagcagggguagauagagugug

SEQ ID NO: 1032301 - RNA, 22 nt, Human
gcucugucuucagcacacagua

SEQ ID NO: 1032302 - RNA, 22 nt, Human
gcaguggcuaagcucgcaugca

SEQ ID NO: 1032303 - RNA, 22 nt, Human
cccagcuccuuggaugggcagg

SEQ ID NO: 1032304 - RNA, 22 nt, Human
augugacaauauuuggucuuau

SEQ ID NO: 1032305 - RNA, 22 nt, Human
cacucugcagcugaagggcugg

SEQ ID NO: 1032306 - RNA, 23 nt, Human
uggcagagacccagaaucuacau

SEQ ID NO: 1032307 - RNA, 19 nt, Human
ggucucagugcagcugcag

SEQ ID NO: 1032308 - RNA, 22 nt, Human
ggccuguguccuccuugcccug

SEQ ID NO: 1032309 - RNA, 22 nt, Human
ucuccugugcacccucccugug

SEQ ID NO: 1032310 - RNA, 22 nt, Human
ucucagaggcccgacguucucc

SEQ ID NO: 1032311 - RNA, 22 nt, Human
gccuggagcucaugugggcauu

SEQ ID NO: 1032312 - RNA, 22 nt, Human
uguaugcuuguguauaauauaa

SEQ ID NO: 1032313 - RNA, 22 nt, Human
uguaacaguaagccugugagcu

SEQ ID NO: 1032314 - RNA, 22 nt, Human
ggguggaggagaacaggcccca

SEQ ID NO: 1032315 - RNA, 22 nt, Human
gcagauggacuguaugaccuga

SEQ ID NO: 1032316 - RNA, 19 nt, Human
gggcuucugggaucaagag

SEQ ID NO: 1032317 - RNA, 22 nt, Human
cggcuggguucggcugcaggcc

SEQ ID NO: 1032318 - RNA, 20 nt, Human
aggaaaaggguggugguaga

SEQ ID NO: 1032319 - RNA, 22 nt, Human
aacccagccguguagcugccgc

SEQ ID NO: 1032320 - RNA, 22 nt, Human
agagcugaaaaagcugacccgg

SEQ ID NO: 1032321 - RNA, 22 nt, Human
aaaagagguuaaccaggugugu

SEQ ID NO: 1032322 - RNA, 22 nt, Human
ucucccacuggccuuguaugau

SEQ ID NO: 1032323 - RNA, 22 nt, Human
ccaggccuggaccaugccaggg

SEQ ID NO: 1032324 - RNA, 22 nt, Human
caguagcaggcacucagcacgu

SEQ ID NO: 1032325 - RNA, 22 nt, Human
gaggcugcuguuagcccugggc

SEQ ID NO: 1032326 - RNA, 22 nt, Human
uggccucugugggagcugagca

SEQ ID NO: 1032327 - RNA, 22 nt, Human
cugggcuucucccccuggcaga

SEQ ID NO: 1032328 - RNA, 22 nt, Human
ccugagguggcugcagcacugc

SEQ ID NO: 1032329 - RNA, 22 nt, Human
ugaaggcuguuggauggggaag

SEQ ID NO: 1032330 - RNA, 22 nt, Human
ggaggugguggcagugacaauu

SEQ ID NO: 1032331 - RNA, 22 nt, Human
acguguucaauuuccaucugac

SEQ ID NO: 1032332 - RNA, 22 nt, Human
gaaugugucacccugucccaug

SEQ ID NO: 1032333 - RNA, 22 nt, Human
acccuggguucccgcagcacca

SEQ ID NO: 1032334 - RNA, 22 nt, Human
acagagcauuugggacagagag

SEQ ID NO: 1032335 - RNA, 22 nt, Human
ggucccaggcucccucuugucc

SEQ ID NO: 1032336 - RNA, 22 nt, Human
uaguaucuauuaguaacaagag

SEQ ID NO: 1032337 - RNA, 22 nt, Human
ugcucuguaaggucagaaaagg

SEQ ID NO: 1032338 - RNA, 22 nt, Human
uccuggccugucuggaguagcu

SEQ ID NO: 1032339 - RNA, 22 nt, Human
uucaagaucgaguuuaaaguga

SEQ ID NO: 1032340 - RNA, 20 nt, Human
ucuggcucuuugcuccuccc

SEQ ID NO: 1032341 - RNA, 22 nt, Human
uagccgggugugguggaacucc

SEQ ID NO: 1032342 - RNA, 22 nt, Human
cuuccucccggcccaugcucug

SEQ ID NO: 1032343 - RNA, 22 nt, Human
acauuucuccuugcaggaguca

SEQ ID NO: 1032344 - RNA, 21 nt, Human
uugaaggaucacuucuguacc

SEQ ID NO: 1032345 - RNA, 22 nt, Human
gaaaggagggaaacagagcggu

SEQ ID NO: 1032346 - RNA, 22 nt, Human
agaggcugggaaggguccccgg

SEQ ID NO: 1032347 - RNA, 22 nt, Human
ccagcaugagacgaugaugaag

SEQ ID NO: 1032348 - RNA, 22 nt, Human
ugucacauugaauaugauuuau

SEQ ID NO: 1032349 - RNA, 22 nt, Human
auccuugagccaaugacugauu

SEQ ID NO: 1032350 - RNA, 22 nt, Human
agguggagaagagaugggcagu

SEQ ID NO: 1032351 - RNA, 22 nt, Human
uccucuggauauaagccucacc

SEQ ID NO: 1032352 - RNA, 22 nt, Human
uggcagcagggccccuggagga

SEQ ID NO: 1032353 - RNA, 20 nt, Human
aguaccuuuuguauguuacc

SEQ ID NO: 1032354 - RNA, 22 nt, Human
agcccaaggcuucccugcuggc

SEQ ID NO: 1032355 - RNA, 22 nt, Human
aggcacugugcagucccaagca

SEQ ID NO: 1032356 - RNA, 22 nt, Human
ugcaguggaggccgugagacag

SEQ ID NO: 1032357 - RNA, 22 nt, Human
ugugugccugagccgugccugg

SEQ ID NO: 1032358 - RNA, 22 nt, Human
cccagcugcaccucuauggccu

SEQ ID NO: 1032359 - RNA, 22 nt, Human
aaugcugcaagaggugaaaaga

SEQ ID NO: 1032360 - RNA, 22 nt, Human
cuccagggagcuguggagguuu

SEQ ID NO: 1032361 - RNA, 22 nt, Human
acauuucugcuagaauagguga

SEQ ID NO: 1032362 - RNA, 22 nt, Human
guggguggaggcgucgagggca

SEQ ID NO: 1032363 - RNA, 22 nt, Human
ugauuaacugucuauuaaucau

SEQ ID NO: 1032364 - RNA, 22 nt, Human
ggcagucagugugguucauaaa

SEQ ID NO: 1032365 - RNA, 22 nt, Human
guuauaaauaccuaauaggauu

SEQ ID NO: 1032366 - RNA, 22 nt, Human
agugcuguccaguuucacaggu

SEQ ID NO: 1032367 - RNA, 22 nt, Human
ggccaccuuccaguugccugca

SEQ ID NO: 1032368 - RNA, 22 nt, Human
aagccuuccugagugcaaggcc

SEQ ID NO: 1032369 - RNA, 23 nt, Human
acucacaaagcaggaucauguug

SEQ ID NO: 1032370 - RNA, 22 nt, Human
gccuggagcucuccacuugggg

SEQ ID NO: 1032371 - RNA, 22 nt, Human
agcuugaguuuuggaugaagug

SEQ ID NO: 1032372 - RNA, 22 nt, Human
cugccuuggaaaaugugguaau

SEQ ID NO: 1032373 - RNA, 22 nt, Human
agaagugccauacuguggucca

SEQ ID NO: 1032374 - RNA, 21 nt, Human
gccagccuguuuaccuguggu

SEQ ID NO: 1032375 - RNA, 22 nt, Human
ggaggccaggguggguggaucg

SEQ ID NO: 1032376 - RNA, 22 nt, Human
agcugcucuuugaaggacacuu

SEQ ID NO: 1032377 - RNA, 22 nt, Human
cagggcugguuugucgaagaaa

SEQ ID NO: 1032378 - RNA, 22 nt, Human
ucuggcucuguguccucaccca

SEQ ID NO: 1032379 - RNA, 22 nt, Human
uccuuuuugguccaaggugacc

SEQ ID NO: 1032380 - RNA, 22 nt, Human
ggcucugccugcccagcagcac

SEQ ID NO: 1032381 - RNA, 19 nt, Human
gcugcucugggucucaucu

SEQ ID NO: 1032382 - RNA, 22 nt, Human
uuuuaucaaucauuaagacauu

SEQ ID NO: 1032383 - RNA, 22 nt, Human
aggagguggccugagcgugccc

SEQ ID NO: 1032384 - RNA, 22 nt, Human
ucucccacagccgugcuucaag

SEQ ID NO: 1032385 - RNA, 22 nt, Human
aggaaaaucgagucuggaggca

SEQ ID NO: 1032386 - RNA, 22 nt, Human
cuucuggaggacacuggcccca

SEQ ID NO: 1032387 - RNA, 22 nt, Human
caguuuuuagauuaguuggugg

SEQ ID NO: 1032388 - RNA, 22 nt, Human
uccucccacauaggacaauggg

SEQ ID NO: 1032389 - RNA, 22 nt, Human
aggcacugacagauucuguguc

SEQ ID NO: 1032390 - RNA, 22 nt, Human
cugcagagcuaggcugagugaa

SEQ ID NO: 1032391 - RNA, 22 nt, Human
agcuucuggaagccuggcagca

SEQ ID NO: 1032392 - RNA, 22 nt, Human
aaagguaguacuucuagaaggg

SEQ ID NO: 1032393 - RNA, 22 nt, Human
gcacugaaaauguuggauucca

SEQ ID NO: 1032394 - RNA, 22 nt, Human
ucagaagagcuggugcugccug

SEQ ID NO: 1032395 - RNA, 22 nt, Human
aguaaacauaauuuaccuguag

SEQ ID NO: 1032396 - RNA, 22 nt, Human
cuuaacagauacaucugugguu

SEQ ID NO: 1032397 - RNA, 22 nt, Human
gcagauggcucagacacugggg

SEQ ID NO: 1032398 - RNA, 22 nt, Human
caagaacauugugaucacuuca

SEQ ID NO: 1032399 - RNA, 22 nt, Human
cacaggcuuccaguccccagcu

SEQ ID NO: 1032400 - RNA, 22 nt, Human
gagcugcccugagcuuugcaug

SEQ ID NO: 1032401 - RNA, 22 nt, Human
ccugauggagcccugcugcaug

SEQ ID NO: 1032402 - RNA, 22 nt, Human
gcaggccagcugugcagauggg

SEQ ID NO: 1032403 - RNA, 22 nt, Human
gccugguggacacugggcauca

SEQ ID NO: 1032404 - RNA, 22 nt, Human
auucuagaugcuguaaguagca

SEQ ID NO: 1032405 - RNA, 22 nt, Human
ggacuggccggcgcugaggccc

SEQ ID NO: 1032406 - RNA, 22 nt, Human
gcagcaugagcuauacaaagua

SEQ ID NO: 1032407 - RNA, 22 nt, Human
uucuuacuaguauguuucagca

SEQ ID NO: 1032408 - RNA, 22 nt, Human
cagcugagcucccaggccauca

SEQ ID NO: 1032409 - RNA, 22 nt, Human
acguuuucagccuuaauguaga

SEQ ID NO: 1032410 - RNA, 22 nt, Human
caggggcucugggugaugugag

SEQ ID NO: 1032411 - RNA, 22 nt, Human
ccucugccaccucccacgaggc

SEQ ID NO: 1032412 - RNA, 19 nt, Human
uccuccuuacuuccucuug

SEQ ID NO: 1032413 - RNA, 22 nt, Human
gcucugagucucagcuaccaca

SEQ ID NO: 1032414 - RNA, 22 nt, Human
agagggagcccagucauagcug

SEQ ID NO: 1032415 - RNA, 22 nt, Human
gcuguccucugaucucuggagg

SEQ ID NO: 1032416 - RNA, 22 nt, Human
gcugccuucaguucugauucau

SEQ ID NO: 1032417 - RNA, 17 nt, Human
ccuuucucuuucaucuc

SEQ ID NO: 1032418 - RNA, 22 nt, Human
aggaguggaauuacuggguucu

SEQ ID NO: 1032419 - RNA, 20 nt, Human
cugggcagguguuugaucuc

SEQ ID NO: 1032420 - RNA, 22 nt, Human
augcagguugggcaaguguggg

SEQ ID NO: 1032421 - RNA, 22 nt, Human
cugagcccaggcgggagcugag

SEQ ID NO: 1032422 - RNA, 22 nt, Human
cauguuuucuaggcuuucacaa

SEQ ID NO: 1032423 - RNA, 22 nt, Human
ugaggcaggaguucaggcugcg

SEQ ID NO: 1032424 - RNA, 22 nt, Human
gcaggcagguggcaucuuguga

SEQ ID NO: 1032425 - RNA, 22 nt, Human
cuugccuguggcuaguuggcuc

SEQ ID NO: 1032426 - RNA, 22 nt, Human
ccucagggacuccaugcugcag

SEQ ID NO: 1032427 - RNA, 22 nt, Human
aauucauccaugaacaauucca

SEQ ID NO: 1032428 - RNA, 20 nt, Human
acugagcugcauggagagga

SEQ ID NO: 1032429 - RNA, 22 nt, Human
agcaaggcagucagcuggcugg

SEQ ID NO: 1032430 - RNA, 22 nt, Human
auguaagguucagaguauguga

SEQ ID NO: 1032431 - RNA, 22 nt, Human
uugcucugacuggagugcagug

SEQ ID NO: 1032432 - RNA, 22 nt, Human
uccagggcuggguuggcucagc

SEQ ID NO: 1032433 - RNA, 22 nt, Human
cuggucugagggcucuugaggc

SEQ ID NO: 1032434 - RNA, 22 nt, Human
acaggcugcugggcuccgugcu

SEQ ID NO: 1032435 - RNA, 22 nt, Human
aaaugcaucagcucauaagaga

SEQ ID NO: 1032436 - RNA, 18 nt, Human
uuaagagcugaaagggga

SEQ ID NO: 1032437 - RNA, 22 nt, Human
ugugucagaaggcaauggggau

SEQ ID NO: 1032438 - RNA, 22 nt, Human
ucagcagggagaggagaaugca

SEQ ID NO: 1032439 - RNA, 22 nt, Human
ucauccuuuugcaugggaaggc

SEQ ID NO: 1032440 - RNA, 22 nt, Human
uccagcagguccgagacaaguu

SEQ ID NO: 1032441 - RNA, 22 nt, Human
aaggcagcaccgccuccugaaa

SEQ ID NO: 1032442 - RNA, 22 nt, Human
cuacacaguucugccuaauggc

SEQ ID NO: 1032443 - RNA, 22 nt, Human
caagaauuguacaaacugggug

SEQ ID NO: 1032444 - RNA, 22 nt, Human
uuaggaaauuaugguuucagau

SEQ ID NO: 1032445 - RNA, 22 nt, Human
cugugucucuccuuacaagacu

SEQ ID NO: 1032446 - RNA, 22 nt, Human
ccucccaccguaucucaguggc

SEQ ID NO: 1032447 - RNA, 22 nt, Human
cagcugaggucaaagaagcagg

SEQ ID NO: 1032448 - RNA, 22 nt, Human
aagauuucuuacuuauugaugc

SEQ ID NO: 1032449 - RNA, 22 nt, Human
ucugagagucucugaggcagau

SEQ ID NO: 1032450 - RNA, 22 nt, Human
cugagagcagggacuugagcca

SEQ ID NO: 1032451 - RNA, 22 nt, Human
ccauggcauuuuaugugucuua

SEQ ID NO: 1032452 - RNA, 22 nt, Human
ccacagaguuacaaaacaguca

SEQ ID NO: 1032453 - RNA, 19 nt, Human
gcauuucucuuuacagcca

SEQ ID NO: 1032454 - RNA, 22 nt, Human
ugccaggagagugcaugcaggg

SEQ ID NO: 1032455 - RNA, 22 nt, Human
ugggcuggagcuuguugcuucc

SEQ ID NO: 1032456 - RNA, 22 nt, Human
aaagcaaugaugguagacacgu

SEQ ID NO: 1032457 - RNA, 21 nt, Human
aggagggcacaaggccaggaa

SEQ ID NO: 1032458 - RNA, 22 nt, Human
ucugcagauuuaucagcagcug

SEQ ID NO: 1032459 - RNA, 22 nt, Human
ugcagcccuuccuuccucuggg

SEQ ID NO: 1032460 - RNA, 22 nt, Human
cuuacauuuaaucaugugucau

SEQ ID NO: 1032461 - RNA, 22 nt, Human
gccugccuagaauugcagcuuu

SEQ ID NO: 1032462 - RNA, 22 nt, Human
aaagaacaauguggaaucuccu

SEQ ID NO: 1032463 - RNA, 22 nt, Human
agaggcccucucucuccugaug

SEQ ID NO: 1032464 - RNA, 22 nt, Human
ccuauugacaauucucuucucc

SEQ ID NO: 1032465 - RNA, 22 nt, Human
uccugucugcucacagagcugg

SEQ ID NO: 1032466 - RNA, 22 nt, Human
cugaggaugguguggucuucuc

SEQ ID NO: 1032467 - RNA, 22 nt, Human
guguacauagaauugugcuuug

SEQ ID NO: 1032468 - RNA, 22 nt, Human
uuguauuagcuguaaauuuucu

SEQ ID NO: 1032469 - RNA, 22 nt, Human
ccuggccugcucggcucuuaag

SEQ ID NO: 1032470 - RNA, 18 nt, Human
aagcugcccucaggcagg

SEQ ID NO: 1032471 - RNA, 22 nt, Human
gccugggagugcacagugaggu

SEQ ID NO: 1032472 - RNA, 22 nt, Human
ggcuugcuucuuguccaggaau

SEQ ID NO: 1032473 - RNA, 19 nt, Human
ugucacugucauggcccag

SEQ ID NO: 1032474 - RNA, 22 nt, Human
ggagacagugguagggccuaag

SEQ ID NO: 1032475 - RNA, 22 nt, Human
ggugggcaggcgaggcccaggu

SEQ ID NO: 1032476 - RNA, 22 nt, Human
gcagcagaugcuuucauggaca

SEQ ID NO: 1032477 - RNA, 21 nt, Human
gcagcagaggcuugacagaca

SEQ ID NO: 1032478 - RNA, 19 nt, Human
ugaagcagcaaacucucag

SEQ ID NO: 1032479 - RNA, 22 nt, Human
aaaagucagucucuccuagcuc

SEQ ID NO: 1032480 - RNA, 22 nt, Human
ggagaaggugcuggucacugug

SEQ ID NO: 1032481 - RNA, 22 nt, Human
gguucacacuaagcuuaagugg

SEQ ID NO: 1032482 - RNA, 22 nt, Human
ucuggcucuccagugcucuuag

SEQ ID NO: 1032483 - RNA, 22 nt, Human
aaggcucuuggagugaaugcag

SEQ ID NO: 1032484 - RNA, 20 nt, Human
ccugggcuccaggagccccg

SEQ ID NO: 1032485 - RNA, 22 nt, Human
uggccuggcucacagugagauu

SEQ ID NO: 1032486 - RNA, 22 nt, Human
gccuucccacccugcgaggcug

SEQ ID NO: 1032487 - RNA, 22 nt, Human
cucucuggcuuggcacggagau

SEQ ID NO: 1032488 - RNA, 22 nt, Human
ucacacguccuugcuacuccuc

SEQ ID NO: 1032489 - RNA, 22 nt, Human
ugcuauaagaauuauauuacuc

SEQ ID NO: 1032490 - RNA, 22 nt, Human
ucaguguagcagacuuguagcc

SEQ ID NO: 1032491 - RNA, 22 nt, Human
agaaaucaugacuaagagcagu

SEQ ID NO: 1032492 - RNA, 22 nt, Human
cagcucccgccaucgggaggca

SEQ ID NO: 1032493 - RNA, 22 nt, Human
ccagguggaggugugagguccu

SEQ ID NO: 1032494 - RNA, 22 nt, Human
cuuccucacggugcaacaggaa

SEQ ID NO: 1032495 - RNA, 22 nt, Human
ugacacaggcagcucccagcac

SEQ ID NO: 1032496 - RNA, 22 nt, Human
cugggaggcagucucucuagaa

SEQ ID NO: 1032497 - RNA, 22 nt, Human
agaagaaacugucggggauauu

SEQ ID NO: 1032498 - RNA, 22 nt, Human
ccugggcuuucaaaaccagccu

SEQ ID NO: 1032499 - RNA, 22 nt, Human
cugggccagucucggccgcucu

SEQ ID NO: 1032500 - RNA, 23 nt, Human
ucagugauguugaaccuagcagu

SEQ ID NO: 1032501 - RNA, 21 nt, Human
agaggccuuacaggauagacc

SEQ ID NO: 1032502 - RNA, 22 nt, Human
uggagcugguaaacagugacau

SEQ ID NO: 1032503 - RNA, 22 nt, Human
ccagccaggcauugcaaacuga

SEQ ID NO: 1032504 - RNA, 17 nt, Human
uuccuggaagucauucc

SEQ ID NO: 1032505 - RNA, 22 nt, Human
gagcagcucugggugacccagu

SEQ ID NO: 1032506 - RNA, 22 nt, Human
uagaaaugauuuugaugcuuca

SEQ ID NO: 1032507 - RNA, 22 nt, Human
cagggccagcgcccaggcccag

SEQ ID NO: 1032508 - RNA, 22 nt, Human
gugccugggcaugagcuuguug

SEQ ID NO: 1032509 - RNA, 17 nt, Human
agaggcagauacuugga

SEQ ID NO: 1032510 - RNA, 22 nt, Human
gagcugccuacauugccaagag

SEQ ID NO: 1032511 - RNA, 22 nt, Human
ugcugucugauucagggugauu

SEQ ID NO: 1032512 - RNA, 22 nt, Human
ucaguuuuguauguuguaaguc

SEQ ID NO: 1032513 - RNA, 22 nt, Human
cauuaugugggaaaauguucuu

SEQ ID NO: 1032514 - RNA, 22 nt, Human
agccuggaccaggggccucaga

SEQ ID NO: 1032515 - RNA, 22 nt, Human
acuuggagagcauugcugggga

SEQ ID NO: 1032516 - RNA, 22 nt, Human
auaaggcagucccuuaacaagg

SEQ ID NO: 1032517 - RNA, 22 nt, Human
ucucaggcuaccuugcacaagg

SEQ ID NO: 1032518 - RNA, 22 nt, Human
agguaaagacugcaaggagaau

SEQ ID NO: 1032519 - RNA, 22 nt, Human
auaugcacacucugcccacaga

SEQ ID NO: 1032520 - RNA, 22 nt, Human
uggcuccuaucaaggagugggu

SEQ ID NO: 1032521 - RNA, 22 nt, Human
aaaaaucacuuuuauaggcagc

SEQ ID NO: 1032522 - RNA, 22 nt, Human
cuccagggcagcauggcagugg

SEQ ID NO: 1032523 - RNA, 22 nt, Human
ugagccuguccugugcauguga

SEQ ID NO: 1032524 - RNA, 22 nt, Human
ugagggcugcuuccagagcuag

SEQ ID NO: 1032525 - RNA, 22 nt, Human
cuggcucaggaaaguugcugcu

SEQ ID NO: 1032526 - RNA, 22 nt, Human
aucaguuuugggggacauacug

SEQ ID NO: 1032527 - RNA, 22 nt, Human
uccaagaucuacagcaguuuag

SEQ ID NO: 1032528 - RNA, 17 nt, Human
ugagacagggcaggccc

SEQ ID NO: 1032529 - RNA, 22 nt, Human
acucacuuuccauucaagcacc

SEQ ID NO: 1032530 - RNA, 22 nt, Human
agggcugcuauguugauucaga

SEQ ID NO: 1032531 - RNA, 22 nt, Human
aaguuauaucaucucauugacg

SEQ ID NO: 1032532 - RNA, 22 nt, Human
gccucugcugcaagccugguug

SEQ ID NO: 1032533 - RNA, 22 nt, Human
cccuggagucagguuggccugg

SEQ ID NO: 1032534 - RNA, 22 nt, Human
ucuagaaacaugacauugaucu

SEQ ID NO: 1032535 - RNA, 22 nt, Human
agugaaauuuguuuagauaggu

SEQ ID NO: 1032536 - RNA, 22 nt, Human
gagggaaagguuaauacaugau

SEQ ID NO: 1032537 - RNA, 22 nt, Human
ucuggccuacuggaguccauga

SEQ ID NO: 1032538 - RNA, 22 nt, Human
ucaucacuguaucauugauaga

SEQ ID NO: 1032539 - RNA, 22 nt, Human
gcaaaaaaugcuuguugcuuag

SEQ ID NO: 1032540 - RNA, 22 nt, Human
cugugcuuaccugcccagguga

SEQ ID NO: 1032541 - RNA, 22 nt, Human
uucaacacaggaacaugauaua

SEQ ID NO: 1032542 - RNA, 22 nt, Human
cugccucugguuuuggucccug

SEQ ID NO: 1032543 - RNA, 22 nt, Human
auggcaggcccagguguucauu

SEQ ID NO: 1032544 - RNA, 22 nt, Human
uggcagcaauuugugauguuga

SEQ ID NO: 1032545 - RNA, 22 nt, Human
cuccuuccugguuagcaccuua

SEQ ID NO: 1032546 - RNA, 22 nt, Human
cugcucugagaggcucuuccua

SEQ ID NO: 1032547 - RNA, 21 nt, Human
gcucccugcucagcuccuggg

SEQ ID NO: 1032548 - RNA, 19 nt, Human
gccugagccagccaugcaa

SEQ ID NO: 1032549 - RNA, 22 nt, Human
ucucccaggcugcccuguggac

SEQ ID NO: 1032550 - RNA, 23 nt, Human
ugcugggguaguuuguggcacag

SEQ ID NO: 1032551 - RNA, 22 nt, Human
cuguauuuaguuaaaaugcuaa

SEQ ID NO: 1032552 - RNA, 20 nt, Human
agagccuggaaaaagacauc

SEQ ID NO: 1032553 - RNA, 22 nt, Human
aaagaucagucugaagcaacau

SEQ ID NO: 1032554 - RNA, 22 nt, Human
gcugcucugugacagccuccgg

SEQ ID NO: 1032555 - RNA, 22 nt, Human
ucucagagaucuuucugcaugu

SEQ ID NO: 1032556 - RNA, 22 nt, Human
ucagcugaguucuagagcacuc

SEQ ID NO: 1032557 - RNA, 22 nt, Human
aguguuccugcucucaggaagc

SEQ ID NO: 1032558 - RNA, 22 nt, Human
ggcagcucugugucugggaagc

SEQ ID NO: 1032559 - RNA, 22 nt, Human
aaaaaugaaacggcugguuggc

SEQ ID NO: 1032560 - RNA, 22 nt, Human
agggcccaggacagcaucaggg

SEQ ID NO: 1032561 - RNA, 22 nt, Human
guggcuucacauggcauuuggc

SEQ ID NO: 1032562 - RNA, 22 nt, Human
gggaaggagguggcuugaagug

SEQ ID NO: 1032563 - RNA, 22 nt, Human
aagcaucucuauguggagagug

SEQ ID NO: 1032564 - RNA, 22 nt, Human
uuagaaaauuugcuucuuugga

SEQ ID NO: 1032565 - RNA, 22 nt, Human
ucuggcucuuugggugauugua

SEQ ID NO: 1032566 - RNA, 20 nt, Human
gaggcucugggcauggcgcc

SEQ ID NO: 1032567 - RNA, 22 nt, Human
ugugccaugaggcucugauaug

SEQ ID NO: 1032568 - RNA, 22 nt, Human
ucacugcucucuaagcaucgcc

SEQ ID NO: 1032569 - RNA, 22 nt, Human
cuggcugccacuucagggucuu

SEQ ID NO: 1032570 - RNA, 22 nt, Human
ggagccagagggaugcaguuga

SEQ ID NO: 1032571 - RNA, 22 nt, Human
agaagcaguuauuuuuugcaca

SEQ ID NO: 1032572 - RNA, 16 nt, Human
uguuagcugugcauua

SEQ ID NO: 1032573 - RNA, 22 nt, Human
auguuaaaugguuuauuauuaa

SEQ ID NO: 1032574 - RNA, 22 nt, Human
gcccaugcacuuucugugaugg

SEQ ID NO: 1032575 - RNA, 22 nt, Human
gccacaugcaauugcagcacgu

SEQ ID NO: 1032576 - RNA, 22 nt, Human
aauagguagccagauauauaaa

SEQ ID NO: 1032577 - RNA, 22 nt, Human
gcagccugaugaucuggguugu

SEQ ID NO: 1032578 - RNA, 22 nt, Human
uagaaacauguucuguucuguu

SEQ ID NO: 1032579 - RNA, 22 nt, Human
cugaggccuaagacaugaauga

SEQ ID NO: 1032580 - RNA, 22 nt, Human
gacagggcgagacucagucuca

SEQ ID NO: 1032581 - RNA, 22 nt, Human
gcugauccuuuuaugucuagcu

SEQ ID NO: 1032582 - RNA, 22 nt, Human
ccuaugccugucacucugcgcu

SEQ ID NO: 1032583 - RNA, 22 nt, Human
ugcaaucucggcacuuugggag

SEQ ID NO: 1032584 - RNA, 22 nt, Human
gaaaucugcggugaggccugag

SEQ ID NO: 1032585 - RNA, 22 nt, Human
cuggcugcuuguagacucgacu

SEQ ID NO: 1032586 - RNA, 22 nt, Human
cucuggaguuagugaucugggc

SEQ ID NO: 1032587 - RNA, 22 nt, Human
uuggaaggcccugccuagcagg

SEQ ID NO: 1032588 - RNA, 19 nt, Human
gccugcagaaaaggcaggg

SEQ ID NO: 1032589 - RNA, 22 nt, Human
gaggccugucgcuaggccucug

SEQ ID NO: 1032590 - RNA, 23 nt, Human
cuugcagggcuggaggcuuagaa

SEQ ID NO: 1032591 - RNA, 22 nt, Human
ccuggcacgaagggcugagguu

SEQ ID NO: 1032592 - RNA, 22 nt, Human
aagggcugccagggggugccag

SEQ ID NO: 1032593 - RNA, 22 nt, Human
uuccuggugguggugacagcac

SEQ ID NO: 1032594 - RNA, 22 nt, Human
uccucugccccagaugaaauuu

SEQ ID NO: 1032595 - RNA, 22 nt, Human
agccuggaguucccaggagaag

SEQ ID NO: 1032596 - RNA, 22 nt, Human
gcucuggagauggagccuugag

SEQ ID NO: 1032597 - RNA, 22 nt, Human
acagcagcaauagcagugacau

SEQ ID NO: 1032598 - RNA, 22 nt, Human
caguggccaugguggcaggggu

SEQ ID NO: 1032599 - RNA, 22 nt, Human
cuggagcauccaugcccagggu

SEQ ID NO: 1032600 - RNA, 22 nt, Human
agagccugugauugucaucacc

SEQ ID NO: 1032601 - RNA, 21 nt, Human
aggaaguggccagauugggaa

SEQ ID NO: 1032602 - RNA, 22 nt, Human
aggggcuggaguucgagguuac

SEQ ID NO: 1032603 - RNA, 22 nt, Human
agcagaacauuuucagggcugu

SEQ ID NO: 1032604 - RNA, 22 nt, Human
agcugccaaguuucucaguuua

SEQ ID NO: 1032605 - RNA, 22 nt, Human
uucauauauaugcacuacguac

SEQ ID NO: 1032606 - RNA, 22 nt, Human
gcagcccagguguagcucuuug

SEQ ID NO: 1032607 - RNA, 22 nt, Human
ucagaacagaagcuggcuauaa

SEQ ID NO: 1032608 - RNA, 22 nt, Human
ucccagagauuuccucuccuuc

SEQ ID NO: 1032609 - RNA, 22 nt, Human
gcuggcauuacaggagagaacc

SEQ ID NO: 1032610 - RNA, 22 nt, Human
ugcagccuugccuccucccagc

SEQ ID NO: 1032611 - RNA, 19 nt, Human
uagcagcugccaaaggaga

SEQ ID NO: 1032612 - RNA, 22 nt, Human
gaagagcuuaguuguccuagaa

SEQ ID NO: 1032613 - RNA, 22 nt, Human
gacagggcgcccagccuguuuc

SEQ ID NO: 1032614 - RNA, 20 nt, Human
ggagagcagggaagacagua

SEQ ID NO: 1032615 - RNA, 22 nt, Human
ccauuguaaagaguauacuuug

SEQ ID NO: 1032616 - RNA, 22 nt, Human
ccucaggcuuacgggcaaugga

SEQ ID NO: 1032617 - RNA, 22 nt, Human
cuggccugagaaugcuacccuu

SEQ ID NO: 1032618 - RNA, 22 nt, Human
agucugcacucagguggagguc

SEQ ID NO: 1032619 - RNA, 22 nt, Human
aaguucaaguaguguuacaugg

SEQ ID NO: 1032620 - RNA, 22 nt, Human
cagaaagaccugggcucaagag

SEQ ID NO: 1032621 - RNA, 22 nt, Human
ugagccugggagauggaggcug

SEQ ID NO: 1032622 - RNA, 22 nt, Human
agcugccauccuguucagcacc

SEQ ID NO: 1032623 - RNA, 20 nt, Human
uggcuccucuuggcuguggc

SEQ ID NO: 1032624 - RNA, 22 nt, Human
ucaaagucacaacucucuaauu

SEQ ID NO: 1032625 - RNA, 22 nt, Human
uccagagccuauauguucaacu

SEQ ID NO: 1032626 - RNA, 22 nt, Human
ccaggccauucccagaguugcu

SEQ ID NO: 1032627 - RNA, 22 nt, Human
agaauucuggaguugggaggaa

SEQ ID NO: 1032628 - RNA, 22 nt, Human
gaaggagagagacaucgucccu

SEQ ID NO: 1032629 - RNA, 22 nt, Human
agggugccuggaagccacucac

SEQ ID NO: 1032630 - RNA, 22 nt, Human
ccuggccuccuggccuucucau

SEQ ID NO: 1032631 - RNA, 22 nt, Human
ccagcuggugggucuuucucug

SEQ ID NO: 1032632 - RNA, 22 nt, Human
guaucuuuuacaccaggaaauu

SEQ ID NO: 1032633 - RNA, 22 nt, Human
aagagggaggugcgggugcaga

SEQ ID NO: 1032634 - RNA, 22 nt, Human
ggccugcugacccaaguccugu

SEQ ID NO: 1032635 - RNA, 16 nt, Human
agaggccuugaggaag

SEQ ID NO: 1032636 - RNA, 22 nt, Human
gguuugcacgauauuuccaugg

SEQ ID NO: 1032637 - RNA, 22 nt, Human
gcucagagcuugaaguuccacu

SEQ ID NO: 1032638 - RNA, 20 nt, Human
ccuggcuuugcaucugugau

SEQ ID NO: 1032639 - RNA, 22 nt, Human
ugcaccauacccauuccccucu

SEQ ID NO: 1032640 - RNA, 22 nt, Human
uggccgggccgggcgccuccac

SEQ ID NO: 1032641 - RNA, 23 nt, Human
aagcuuccuucacgucuccuggg

SEQ ID NO: 1032642 - RNA, 22 nt, Human
aagggaggggauguaagccugg

SEQ ID NO: 1032643 - RNA, 22 nt, Human
gaccagagaaaggcacuggaag

SEQ ID NO: 1032644 - RNA, 22 nt, Human
cccuggaggagcuuagagcuug

SEQ ID NO: 1032645 - RNA, 22 nt, Human
ccaggcugcuuagccuuaucuu

SEQ ID NO: 1032646 - RNA, 22 nt, Human
gaccugccugagcugccucugc

SEQ ID NO: 1032647 - RNA, 22 nt, Human
ugacagaacagguugggagcaa

SEQ ID NO: 1032648 - RNA, 22 nt, Human
cagggcugugcccaucuucccc

SEQ ID NO: 1032649 - RNA, 22 nt, Human
cacagccugcugcacucaagaa

SEQ ID NO: 1032650 - RNA, 22 nt, Human
gccuggcacucacugaagaggc

SEQ ID NO: 1032651 - RNA, 17 nt, Human
uucaagauauugaaaug

SEQ ID NO: 1032652 - RNA, 22 nt, Human
uggccugaauuauggcagaucu

SEQ ID NO: 1032653 - RNA, 22 nt, Human
gaggccacagcuaucagggaca

SEQ ID NO: 1032654 - RNA, 22 nt, Human
agggcugcugaggaagccuugc

SEQ ID NO: 1032655 - RNA, 22 nt, Human
gggcacagcugcuacccagugc

SEQ ID NO: 1032656 - RNA, 22 nt, Human
gcagcugggccccagccucucc

SEQ ID NO: 1032657 - RNA, 22 nt, Human
aagagcuggucacagguccauu

SEQ ID NO: 1032658 - RNA, 22 nt, Human
augccagucaaagaagaugaca

SEQ ID NO: 1032659 - RNA, 22 nt, Human
ucugagaguagagcugccucuu

SEQ ID NO: 1032660 - RNA, 22 nt, Human
ugggcacuauggcucugugcac

SEQ ID NO: 1032661 - RNA, 22 nt, Human
cccagcuccaagggacagcgaa

SEQ ID NO: 1032662 - RNA, 23 nt, Human
ucagaaugcacugaauuuacccu

SEQ ID NO: 1032663 - RNA, 20 nt, Human
gccuggcacccggggcuggc

SEQ ID NO: 1032664 - RNA, 22 nt, Human
uagagaaauaagcuuugccuug

SEQ ID NO: 1032665 - RNA, 22 nt, Human
acagcaggauuuggcgauguug

SEQ ID NO: 1032666 - RNA, 20 nt, Human
ugcuuccuggccacugcggg

SEQ ID NO: 1032667 - RNA, 22 nt, Human
uccugggcuugcuccuccagcu

SEQ ID NO: 1032668 - RNA, 22 nt, Human
uccuggguccauggcagccgaa

SEQ ID NO: 1032669 - RNA, 22 nt, Human
cagacacagcaauucuguguug

SEQ ID NO: 1032670 - RNA, 22 nt, Human
uggagccaaggccaguucucag

SEQ ID NO: 1032671 - RNA, 22 nt, Human
auacaaagacaaaucucaaucu

SEQ ID NO: 1032672 - RNA, 22 nt, Human
gcugcagcagaaguucucagag

SEQ ID NO: 1032673 - RNA, 22 nt, Human
cagggcagugaagaacacacgu

SEQ ID NO: 1032674 - RNA, 22 nt, Human
agccuggaggaggaguugagca

SEQ ID NO: 1032675 - RNA, 22 nt, Human
ccuggcuggcaagaucgugaag

SEQ ID NO: 1032676 - RNA, 20 nt, Human
aaaguguaagcauauaauua

SEQ ID NO: 1032677 - RNA, 20 nt, Human
acagaauaugcugguugugg

SEQ ID NO: 1032678 - RNA, 22 nt, Human
cugggcaguuuauucaguucug

SEQ ID NO: 1032679 - RNA, 22 nt, Human
ugagaaccaugaaaagcuguca

SEQ ID NO: 1032680 - RNA, 22 nt, Human
auuguggcuagacagucacaau

SEQ ID NO: 1032681 - RNA, 22 nt, Human
caggggaagaugccaagggaga

SEQ ID NO: 1032682 - RNA, 22 nt, Human
ugcuggaggccugacuguguuu

SEQ ID NO: 1032683 - RNA, 22 nt, Human
aaaguguaaaagcauguuaggg

SEQ ID NO: 1032684 - RNA, 22 nt, Human
cugcccugggaguaccuguccu

SEQ ID NO: 1032685 - RNA, 22 nt, Human
uucauuccuucccuaagcaacu

SEQ ID NO: 1032686 - RNA, 22 nt, Human
ucuuugcaacucccauuuccau

SEQ ID NO: 1032687 - RNA, 22 nt, Human
aaauuguugaucuacaguaagg

SEQ ID NO: 1032688 - RNA, 20 nt, Human
aggagaaauucgggacaccu

SEQ ID NO: 1032689 - RNA, 22 nt, Human
ggcugggccagggccuguggac

SEQ ID NO: 1032690 - RNA, 23 nt, Human
ggcagagagcauggcuggggccc

SEQ ID NO: 1032691 - RNA, 22 nt, Human
ucauggagacuuugagccuguu

SEQ ID NO: 1032692 - RNA, 22 nt, Human
gcaggguccauggaggcagccc

SEQ ID NO: 1032693 - RNA, 22 nt, Human
ggaggccaguccuggccgggcu

SEQ ID NO: 1032694 - RNA, 22 nt, Human
agccagggagguggagguugca

SEQ ID NO: 1032695 - RNA, 22 nt, Human
aaggccugcucagcugucugug

SEQ ID NO: 1032696 - RNA, 22 nt, Human
ccagggucuuggagaggagugc

SEQ ID NO: 1032697 - RNA, 22 nt, Human
ccucccacauccuagcucugcu

SEQ ID NO: 1032698 - RNA, 22 nt, Human
agauacauagcugugagcacac

SEQ ID NO: 1032699 - RNA, 22 nt, Human
cuguggagcuuguggcaguggg

SEQ ID NO: 1032700 - RNA, 22 nt, Human
cuggggcuucaaugcuucggug

SEQ ID NO: 1032701 - RNA, 22 nt, Human
gccaccagccccaugcgcugug

SEQ ID NO: 1032702 - RNA, 22 nt, Human
gcagacagacugcagugauuuu

SEQ ID NO: 1032703 - RNA, 22 nt, Human
auugcaccuuggguuuugaaag

SEQ ID NO: 1032704 - RNA, 22 nt, Human
cugcugccggcgagccucccuu

SEQ ID NO: 1032705 - RNA, 22 nt, Human
uugauacauagcacaguuuagg

SEQ ID NO: 1032706 - RNA, 22 nt, Human
uuuuugcaccaaccuaauagaa

SEQ ID NO: 1032707 - RNA, 22 nt, Human
acugaaggcuuucccaagguca

SEQ ID NO: 1032708 - RNA, 22 nt, Human
gccuaauaacuagcuguguaac

SEQ ID NO: 1032709 - RNA, 22 nt, Human
ggaccagagaagugagcaccug

SEQ ID NO: 1032710 - RNA, 22 nt, Human
augcacaagaggcuagaaaaga

SEQ ID NO: 1032711 - RNA, 22 nt, Human
caagaaauuucuuaagaacuaa

SEQ ID NO: 1032712 - RNA, 22 nt, Human
uuccagggcuaauuccugugga

SEQ ID NO: 1032713 - RNA, 22 nt, Human
ccugccugcggcccgcggggag

SEQ ID NO: 1032714 - RNA, 22 nt, Human
gcucugcugaagccccuugcau

SEQ ID NO: 1032715 - RNA, 22 nt, Human
cuggggcucucuggaaugcuug

SEQ ID NO: 1032716 - RNA, 21 nt, Human
ccccugggagcccugucagua

SEQ ID NO: 1032717 - RNA, 22 nt, Human
ggaggccuugaggccaggagcu

SEQ ID NO: 1032718 - RNA, 22 nt, Human
cacauuuaaagguugaagcuga

SEQ ID NO: 1032719 - RNA, 22 nt, Human
ugguaaaguguacugaauauga

SEQ ID NO: 1032720 - RNA, 22 nt, Human
acccuuucuuacucacacgcuc

SEQ ID NO: 1032721 - RNA, 22 nt, Human
caguguggagggagagagccug

SEQ ID NO: 1032722 - RNA, 22 nt, Human
gagcacagcuggagguagcauu

SEQ ID NO: 1032723 - RNA, 22 nt, Human
gcccucagaguuccccacagug

SEQ ID NO: 1032724 - RNA, 22 nt, Human
ccccuuccaggaagcagaaucg

SEQ ID NO: 1032725 - RNA, 22 nt, Human
cuggccuggucuggccucucca

SEQ ID NO: 1032726 - RNA, 22 nt, Human
uccugggaagagaccugagcau

SEQ ID NO: 1032727 - RNA, 22 nt, Human
caauaauauccugugcuguuug

SEQ ID NO: 1032728 - RNA, 22 nt, Human
cucucugcuguauccuuaggcu

SEQ ID NO: 1032729 - RNA, 21 nt, Human
ggcagaaguagcauggacggg

SEQ ID NO: 1032730 - RNA, 22 nt, Human
ggcaccuggauguagcagugaa

SEQ ID NO: 1032731 - RNA, 22 nt, Human
aaaucaguucucccuuucuuca

SEQ ID NO: 1032732 - RNA, 22 nt, Human
agggcagcucucaccucuggcc

SEQ ID NO: 1032733 - RNA, 22 nt, Human
gcagauggugggggaggaguac

SEQ ID NO: 1032734 - RNA, 22 nt, Human
aaggucauuuuuuccucuguug

SEQ ID NO: 1032735 - RNA, 22 nt, Human
ugccucagaguugucccuacca

SEQ ID NO: 1032736 - RNA, 22 nt, Human
ugcaugcauaaauguacacaca

SEQ ID NO: 1032737 - RNA, 22 nt, Human
agccuggacagcuacggagaac

SEQ ID NO: 1032738 - RNA, 22 nt, Human
auuucauugaaguuaauucuuc

SEQ ID NO: 1032739 - RNA, 22 nt, Human
acaggugauucaggcucuggga

SEQ ID NO: 1032740 - RNA, 22 nt, Human
ucuguagcaagugagaggcauu

SEQ ID NO: 1032741 - RNA, 21 nt, Human
aggcccagcuuuccucuugcu

SEQ ID NO: 1032742 - RNA, 22 nt, Human
ucugccuggauuccauucucca

SEQ ID NO: 1032743 - RNA, 22 nt, Human
uucaagaucuuccaaaggauac

SEQ ID NO: 1032744 - RNA, 22 nt, Human
aaguuuaagguggaaguggugg

SEQ ID NO: 1032745 - RNA, 22 nt, Human
gcugagagaaaagugagguucu

SEQ ID NO: 1032746 - RNA, 22 nt, Human
guggagacgggacagaagcuaa

SEQ ID NO: 1032747 - RNA, 22 nt, Human
uggagggcucuuucaccuggua

SEQ ID NO: 1032748 - RNA, 22 nt, Human
caggguggcccuguggucucau

SEQ ID NO: 1032749 - RNA, 22 nt, Human
aggaaagggguagguguggacg

SEQ ID NO: 1032750 - RNA, 22 nt, Human
acucugggccccagguggagcu

SEQ ID NO: 1032751 - RNA, 22 nt, Human
cagcaggcugcgauugcucauu

SEQ ID NO: 1032752 - RNA, 22 nt, Human
ggguccagcuacaucagggugg

SEQ ID NO: 1032753 - RNA, 22 nt, Human
ugccagcacuucuggcugucug

SEQ ID NO: 1032754 - RNA, 22 nt, Human
cagaauuugaaguaauauucca

SEQ ID NO: 1032755 - RNA, 18 nt, Human
ccuggagcuccacagcaa

SEQ ID NO: 1032756 - RNA, 22 nt, Human
cacagggccuggggcagcugcu

SEQ ID NO: 1032757 - RNA, 22 nt, Human
ggaggacaggggcugcagcaca

SEQ ID NO: 1032758 - RNA, 22 nt, Human
aaguuugagagccuuuaguaua

SEQ ID NO: 1032759 - RNA, 22 nt, Human
ccagggcaacgcugucucagag

SEQ ID NO: 1032760 - RNA, 22 nt, Human
ucucagagaacaguuggugcuu

SEQ ID NO: 1032761 - RNA, 22 nt, Human
uucaagaucuggguuuucagcu

SEQ ID NO: 1032762 - RNA, 20 nt, Human
cucugcugcccgccggcugc

SEQ ID NO: 1032763 - RNA, 22 nt, Human
agaggcugagaaacccucuucu

SEQ ID NO: 1032764 - RNA, 22 nt, Human
cagcuggggcagccacgugcgg

SEQ ID NO: 1032765 - RNA, 22 nt, Human
ugaccaaagaguugcuuguauu

SEQ ID NO: 1032766 - RNA, 22 nt, Human
gaguuauuucagaaggaaagau

SEQ ID NO: 1032767 - RNA, 22 nt, Human
aauaaacugcucaauugcauca

SEQ ID NO: 1032768 - RNA, 22 nt, Human
aagguacagaaauuaacaagga

SEQ ID NO: 1032769 - RNA, 22 nt, Human
uaaagguaguuuuaaaggugcu

SEQ ID NO: 1032770 - RNA, 22 nt, Human
agugugugcaugcauucgugca

SEQ ID NO: 1032771 - RNA, 22 nt, Human
ggcagccaugcacgcugccugg

SEQ ID NO: 1032772 - RNA, 22 nt, Human
guccuggguccccgcaggucag

SEQ ID NO: 1032773 - RNA, 22 nt, Human
agggguggccugccuuacuccc

SEQ ID NO: 1032774 - RNA, 22 nt, Human
ucugcagcuugcacaggcaggc

SEQ ID NO: 1032775 - RNA, 22 nt, Human
ucaacagaagugauagcuauua

SEQ ID NO: 1032776 - RNA, 22 nt, Human
ugcauuauacuuuuagaaauuu

SEQ ID NO: 1032777 - RNA, 21 nt, Human
ugggaugggucugggaccagc

SEQ ID NO: 1032778 - RNA, 22 nt, Human
gcagcuguggguuccaagucua

SEQ ID NO: 1032779 - RNA, 22 nt, Human
aggaccaguaugagagcaucug

SEQ ID NO: 1032780 - RNA, 22 nt, Human
uggcugggccgggccuugugcc

SEQ ID NO: 1032781 - RNA, 21 nt, Human
ccuggcuucagggugcacugg

SEQ ID NO: 1032782 - RNA, 22 nt, Human
gcagggugugucucauacaguu

SEQ ID NO: 1032783 - RNA, 22 nt, Human
ucucagaguuuagagcugagcc

SEQ ID NO: 1032784 - RNA, 22 nt, Human
uccucuggggucagggcacuac

SEQ ID NO: 1032785 - RNA, 22 nt, Human
cucccuggcacagcgagagguu

SEQ ID NO: 1032786 - RNA, 22 nt, Human
acuggcugaaguuuacuuuuug

SEQ ID NO: 1032787 - RNA, 22 nt, Human
aggccugacuugaauuuagggc

SEQ ID NO: 1032788 - RNA, 22 nt, Human
ucagagcuuuggagaccaggaa

SEQ ID NO: 1032789 - RNA, 22 nt, Human
caaggccugccucuggcagaaa

SEQ ID NO: 1032790 - RNA, 22 nt, Human
cucuggaaaaccacuagcagga

SEQ ID NO: 1032791 - RNA, 22 nt, Human
gcuggccugcugggcaccaccg

SEQ ID NO: 1032792 - RNA, 22 nt, Human
acagcuuuucaauucugcugag

SEQ ID NO: 1032793 - RNA, 22 nt, Human
ggcaggcugcuugggucauguc

SEQ ID NO: 1032794 - RNA, 22 nt, Human
aggcagagcuggguuuugaaau

SEQ ID NO: 1032795 - RNA, 22 nt, Human
acagccagguaaaggcauggca

SEQ ID NO: 1032796 - RNA, 22 nt, Human
cagagccugcucacgucucugu

SEQ ID NO: 1032797 - RNA, 22 nt, Human
aggcacugggggaugagcaagg

SEQ ID NO: 1032798 - RNA, 22 nt, Human
uggccugccuucgcugagcuga

SEQ ID NO: 1032799 - RNA, 22 nt, Human
ugacagggcuagaggcaaugca

SEQ ID NO: 1032800 - RNA, 22 nt, Human
auaccuuuuagacauguaguug

SEQ ID NO: 1032801 - RNA, 19 nt, Human
gggaugggcccucacccuc

SEQ ID NO: 1032802 - RNA, 22 nt, Human
gaggccugaaaggggaccuaug

SEQ ID NO: 1032803 - RNA, 22 nt, Human
acauuucugcaucucagagcua

SEQ ID NO: 1032804 - RNA, 22 nt, Human
guguggcugccagccaagaggc

SEQ ID NO: 1032805 - RNA, 22 nt, Human
ggaggaccugcuggcccugcaa

SEQ ID NO: 1032806 - RNA, 17 nt, Human
gcagcagagagacccuc

SEQ ID NO: 1032807 - RNA, 22 nt, Human
aaggcugaguaaaacagagaac

SEQ ID NO: 1032808 - RNA, 22 nt, Human
ugcauuccuccaccuccugcac

SEQ ID NO: 1032809 - RNA, 19 nt, Human
uagcugccuguuaccucca

SEQ ID NO: 1032810 - RNA, 22 nt, Human
uggagccauaacccuuucguac

SEQ ID NO: 1032811 - RNA, 22 nt, Human
cggagccugcuuguugcagcug

SEQ ID NO: 1032812 - RNA, 22 nt, Human
ugggugaggaugaugaggcagc

SEQ ID NO: 1032813 - RNA, 22 nt, Human
augaaaacggaccagagcuauu

SEQ ID NO: 1032814 - RNA, 22 nt, Human
ggcagcaggagccaucugguag

SEQ ID NO: 1032815 - RNA, 22 nt, Human
ccuuucucuggcagcaggacag

SEQ ID NO: 1032816 - RNA, 22 nt, Human
gggcugcacagaucuucaaggg

SEQ ID NO: 1032817 - RNA, 18 nt, Human
ccagcaugccagaggcug

SEQ ID NO: 1032818 - RNA, 22 nt, Human
gcagagguggcaucugggcucu

SEQ ID NO: 1032819 - RNA, 22 nt, Human
caagagcauuuaguuagcuggu

SEQ ID NO: 1032820 - RNA, 22 nt, Human
cugccuggcauggagaagagaa

SEQ ID NO: 1032821 - RNA, 22 nt, Human
acaaaugccauauauaaauucu

SEQ ID NO: 1032822 - RNA, 22 nt, Human
ugcugggcuugaaagcugcuaa

SEQ ID NO: 1032823 - RNA, 22 nt, Human
ucuuuucuggacucugcaugga

SEQ ID NO: 1032824 - RNA, 22 nt, Human
ucagggcagccuaaggcaccuc

SEQ ID NO: 1032825 - RNA, 22 nt, Human
auaaaacuuauuagaauugugu

SEQ ID NO: 1032826 - RNA, 21 nt, Human
uguaugcacgcacaugcacac

SEQ ID NO: 1032827 - RNA, 22 nt, Human
uggcucagcuuuccccaucugg

SEQ ID NO: 1032828 - RNA, 22 nt, Human
uggaagcaucacuucuugccug

SEQ ID NO: 1032829 - RNA, 22 nt, Human
cccagcauccucagggagcggg

SEQ ID NO: 1032830 - RNA, 22 nt, Human
ggcugagcacuuuaggcaggag

SEQ ID NO: 1032831 - RNA, 22 nt, Human
cucagaguucuccugggaggug

SEQ ID NO: 1032832 - RNA, 22 nt, Human
aaacuguauauuuauggcaugu

SEQ ID NO: 1032833 - RNA, 22 nt, Human
gggagggaggugaugcuuggcu

SEQ ID NO: 1032834 - RNA, 22 nt, Human
uacaagagguauauagaaacag

SEQ ID NO: 1032835 - RNA, 22 nt, Human
agucauaauuauaaacaucagu

SEQ ID NO: 1032836 - RNA, 22 nt, Human
uggcagaguuggagguggaaga

SEQ ID NO: 1032837 - RNA, 22 nt, Human
gcuggccugggcucaagaccag

SEQ ID NO: 1032838 - RNA, 22 nt, Human
uccuuccuggggucucugcugc

SEQ ID NO: 1032839 - RNA, 22 nt, Human
gggcuggugaggcugcccugca

SEQ ID NO: 1032840 - RNA, 22 nt, Human
ggcucuggugugaagcagccuc

SEQ ID NO: 1032841 - RNA, 22 nt, Human
cuggccuguccugacccagccu

SEQ ID NO: 1032842 - RNA, 20 nt, Human
cugugccuaaaccuccgggu

SEQ ID NO: 1032843 - RNA, 22 nt, Human
acugcagccuagggaccacagu

SEQ ID NO: 1032844 - RNA, 22 nt, Human
ggaggcucccacgcagcucaca

SEQ ID NO: 1032845 - RNA, 22 nt, Human
uuuuccucugcagagcaguuag

SEQ ID NO: 1032846 - RNA, 22 nt, Human
cugcucuggcuguguacuucag

SEQ ID NO: 1032847 - RNA, 22 nt, Human
aggagcuggguuccuuuggugg

SEQ ID NO: 1032848 - RNA, 22 nt, Human
ucagaggugguaaaggacagca

SEQ ID NO: 1032849 - RNA, 22 nt, Human
ucagagccccuccgcuguccca

SEQ ID NO: 1032850 - RNA, 20 nt, Human
cucuggcuccgcgugaccgc

SEQ ID NO: 1032851 - RNA, 20 nt, Human
auaaaauaacugccacaaga

SEQ ID NO: 1032852 - RNA, 23 nt, Human
agcagccagagauccucggcccu

SEQ ID NO: 1032853 - RNA, 22 nt, Human
gcacugaacuuuaaucauuucu

SEQ ID NO: 1032854 - RNA, 22 nt, Human
uuacuuugaugaucaaugagcg

SEQ ID NO: 1032855 - RNA, 22 nt, Human
aggaggccgauuucagaggucg

SEQ ID NO: 1032856 - RNA, 22 nt, Human
gagccuggauagccuuguucca

SEQ ID NO: 1032857 - RNA, 22 nt, Human
ccaggagcaaagaucacuggga

SEQ ID NO: 1032858 - RNA, 22 nt, Human
ggcucaggaugagccuucucau

SEQ ID NO: 1032859 - RNA, 22 nt, Human
cauggcaggaggcugcuggcag

SEQ ID NO: 1032860 - RNA, 21 nt, Human
ugcagcugacacugguaugcc

SEQ ID NO: 1032861 - RNA, 22 nt, Human
ugcagaagaaaacagcugugug

SEQ ID NO: 1032862 - RNA, 20 nt, Human
aaggcacuaugucugcuagc

SEQ ID NO: 1032863 - RNA, 22 nt, Human
cuggcucccucgcugaggugcu

SEQ ID NO: 1032864 - RNA, 21 nt, Human
gcuccuggugcugcguggcgc

SEQ ID NO: 1032865 - RNA, 22 nt, Human
gugugcagaagacacaagacau

SEQ ID NO: 1032866 - RNA, 22 nt, Human
cuggcagcgcagcaugaagucg

SEQ ID NO: 1032867 - RNA, 22 nt, Human
gugucacaugguuuacugcagc

SEQ ID NO: 1032868 - RNA, 22 nt, Human
gggggcuggacuuucccacaca

SEQ ID NO: 1032869 - RNA, 17 nt, Human
agccccucagcgucacc

SEQ ID NO: 1032870 - RNA, 22 nt, Human
aggcuuccuggaggaagaggua

SEQ ID NO: 1032871 - RNA, 22 nt, Human
cauugcacagcccuguggugau

SEQ ID NO: 1032872 - RNA, 22 nt, Human
acagaaauugggcaaauggaag

SEQ ID NO: 1032873 - RNA, 22 nt, Human
guacauuggcaacucucuuaga

SEQ ID NO: 1032874 - RNA, 22 nt, Human
ccugccugcaccuucucugggg

SEQ ID NO: 1032875 - RNA, 22 nt, Human
cagcagggggcagcgcagauca

SEQ ID NO: 1032876 - RNA, 22 nt, Human
ucuuuacaguccucugucaauc

SEQ ID NO: 1032877 - RNA, 22 nt, Human
cacagcuucugagugaggauuu

SEQ ID NO: 1032878 - RNA, 22 nt, Human
cagcugccuucugcgggaaguc

SEQ ID NO: 1032879 - RNA, 20 nt, Human
acccagcucugugcccuggg

SEQ ID NO: 1032880 - RNA, 22 nt, Human
ccacagagacaggguccuugcu

SEQ ID NO: 1032881 - RNA, 22 nt, Human
agcugcugagagucugccgggc

SEQ ID NO: 1032882 - RNA, 22 nt, Human
aguaaugugccugaaauacuug

SEQ ID NO: 1032883 - RNA, 22 nt, Human
cucagggacguuagaggacagg

SEQ ID NO: 1032884 - RNA, 22 nt, Human
gaggccuggugugucucccgcu

SEQ ID NO: 1032885 - RNA, 22 nt, Human
auauuucuugagcaccugguau

SEQ ID NO: 1032886 - RNA, 22 nt, Human
aaugcuguaaagaugcuaucug

SEQ ID NO: 1032887 - RNA, 22 nt, Human
aauuaguauugcgauucauuag

SEQ ID NO: 1032888 - RNA, 22 nt, Human
cucuggagguggagguugcagu

SEQ ID NO: 1032889 - RNA, 22 nt, Human
cuggccuuggaagggagcccgu

SEQ ID NO: 1032890 - RNA, 22 nt, Human
uccuugaaaagaaugucuccau

SEQ ID NO: 1032891 - RNA, 22 nt, Human
ucaaaguuuuugagaauuacau

SEQ ID NO: 1032892 - RNA, 23 nt, Human
agaagcagcuucuggaguaucgg

SEQ ID NO: 1032893 - RNA, 22 nt, Human
cuggaagguucuuugugugccu

SEQ ID NO: 1032894 - RNA, 20 nt, Human
gccagcccugacacaggagc

SEQ ID NO: 1032895 - RNA, 22 nt, Human
cagccagaaccuaggaugagcu

SEQ ID NO: 1032896 - RNA, 22 nt, Human
uaacagaagaugaaacuucuuu

SEQ ID NO: 1032897 - RNA, 22 nt, Human
aucuacagcugucugcacagua

SEQ ID NO: 1032898 - RNA, 22 nt, Human
ugaagcagcaccauuuuagagc

SEQ ID NO: 1032899 - RNA, 22 nt, Human
ugugccuucucaguccugcuca

SEQ ID NO: 1032900 - RNA, 22 nt, Human
aggcugcuucagcugcagggag

SEQ ID NO: 1032901 - RNA, 22 nt, Human
cccucugccucugaguaggaca

SEQ ID NO: 1032902 - RNA, 21 nt, Human
gccaccccuggcacaggugcu

SEQ ID NO: 1032903 - RNA, 22 nt, Human
agccacagggggugagggacaa

SEQ ID NO: 1032904 - RNA, 22 nt, Human
agaauucuccuucagggcagga

SEQ ID NO: 1032905 - RNA, 22 nt, Human
uaacagaauuugcuaaacuccg

SEQ ID NO: 1032906 - RNA, 22 nt, Human
agcagggccaacaguaaacacc

SEQ ID NO: 1032907 - RNA, 22 nt, Human
ugccuggaugugcuggccucac

SEQ ID NO: 1032908 - RNA, 22 nt, Human
ccaggagcaacuugaaggcaag

SEQ ID NO: 1032909 - RNA, 22 nt, Human
cagggcagggagcuuagaauga

SEQ ID NO: 1032910 - RNA, 23 nt, Human
gugagcagcccacuaggaaugcc

SEQ ID NO: 1032911 - RNA, 21 nt, Human
cagcuuugucugucuucgggg

SEQ ID NO: 1032912 - RNA, 22 nt, Human
cagugggcugugauggauucac

SEQ ID NO: 1032913 - RNA, 22 nt, Human
gagugguaggcaguguuaggaa

SEQ ID NO: 1032914 - RNA, 22 nt, Human
gcaggccugacuguagggggca

SEQ ID NO: 1032915 - RNA, 22 nt, Human
agcugaaggcuagaacagcugg

SEQ ID NO: 1032916 - RNA, 22 nt, Human
ucuggccagugaaaugcagaau

SEQ ID NO: 1032917 - RNA, 22 nt, Human
aagaauuauugcaauacuagau

SEQ ID NO: 1032918 - RNA, 22 nt, Human
aguauuucugcucaugaaagag

SEQ ID NO: 1032919 - RNA, 22 nt, Human
cacagggcagagaccugggugc

SEQ ID NO: 1032920 - RNA, 22 nt, Human
agcagagcugcaguggccugcu

SEQ ID NO: 1032921 - RNA, 22 nt, Human
ggcagaaggccucccagcuccu

SEQ ID NO: 1032922 - RNA, 21 nt, Human
gggccacaccuucugcagacc

SEQ ID NO: 1032923 - RNA, 22 nt, Human
ugcagcauuauucacaguagcc

SEQ ID NO: 1032924 - RNA, 22 nt, Human
caggggcucccugggugccagu

SEQ ID NO: 1032925 - RNA, 22 nt, Human
aaugcacauguuguaauaaaua

SEQ ID NO: 1032926 - RNA, 22 nt, Human
cagacuuucaaggagugaaggc

SEQ ID NO: 1032927 - RNA, 21 nt, Human
ggagauggguaucgccugggc

SEQ ID NO: 1032928 - RNA, 22 nt, Human
aauaguguuguucacucaggag

SEQ ID NO: 1032929 - RNA, 22 nt, Human
agguacagaugaaagucuaguu

SEQ ID NO: 1032930 - RNA, 22 nt, Human
uggcuggggccugaauccugca

SEQ ID NO: 1032931 - RNA, 22 nt, Human
ggcucagguuuccuucccagcu

SEQ ID NO: 1032932 - RNA, 21 nt, Human
uggagcugccacuuguccucc

SEQ ID NO: 1032933 - RNA, 22 nt, Human
auggcagggcagccucucagag

SEQ ID NO: 1032934 - RNA, 22 nt, Human
cagccagguucaaguccuuaua

SEQ ID NO: 1032935 - RNA, 22 nt, Human
gcagacuguaucaaugucagua

SEQ ID NO: 1032936 - RNA, 19 nt, Human
ucaaaugccaaugucacag

SEQ ID NO: 1032937 - RNA, 22 nt, Human
cagugguggaaugaggaauugu

SEQ ID NO: 1032938 - RNA, 22 nt, Human
gcaggaguguauuugcauguaa

SEQ ID NO: 1032939 - RNA, 22 nt, Human
gaggggcugcccuggugucagg

SEQ ID NO: 1032940 - RNA, 22 nt, Human
gugccagcaguuauggugauuu

SEQ ID NO: 1032941 - RNA, 22 nt, Human
ggccuggcucuugcccagccug

SEQ ID NO: 1032942 - RNA, 22 nt, Human
auuauguauuugguauaguuug

SEQ ID NO: 1032943 - RNA, 22 nt, Human
cugagccuuauucaccagcccu

SEQ ID NO: 1032944 - RNA, 22 nt, Human
ugcugccacaaauucagcugcc

SEQ ID NO: 1032945 - RNA, 22 nt, Human
uaagaacaguguuucaucucua

SEQ ID NO: 1032946 - RNA, 22 nt, Human
agcagggcuugccgcuuguccu

SEQ ID NO: 1032947 - RNA, 22 nt, Human
ccucugcaccauagccuucagc

SEQ ID NO: 1032948 - RNA, 22 nt, Human
cuggcucagacagcugugcagu

SEQ ID NO: 1032949 - RNA, 22 nt, Human
cagagccaggucuaggagucuc

SEQ ID NO: 1032950 - RNA, 22 nt, Human
ggcagcuccucaaaaaauuaaa

SEQ ID NO: 1032951 - RNA, 22 nt, Human
agcugagccagcagcaacagga

SEQ ID NO: 1032952 - RNA, 22 nt, Human
cagguaggauggaagggcucaa

SEQ ID NO: 1032953 - RNA, 22 nt, Human
gucucagauaacauguauucua

SEQ ID NO: 1032954 - RNA, 22 nt, Human
ugauuuuuagcuauucugaaga

SEQ ID NO: 1032955 - RNA, 22 nt, Human
cagcugccagcuucucuccauc

SEQ ID NO: 1032956 - RNA, 22 nt, Human
ucuuagaaaugaaguucuuucu

SEQ ID NO: 1032957 - RNA, 22 nt, Human
uaagacacaugcguacaagaua

SEQ ID NO: 1032958 - RNA, 22 nt, Human
ccacugucugcaggccucagca

SEQ ID NO: 1032959 - RNA, 22 nt, Human
gcucccagggcagcgcagaaga

SEQ ID NO: 1032960 - RNA, 22 nt, Human
auacauuagcucauaugauuaa

SEQ ID NO: 1032961 - RNA, 18 nt, Human
gcugccugcauuccucac

SEQ ID NO: 1032962 - RNA, 22 nt, Human
ccagagcuucggggcggcugua

SEQ ID NO: 1032963 - RNA, 22 nt, Human
ucuuuggauaucgcuagaccgu

SEQ ID NO: 1032964 - RNA, 22 nt, Human
aaagauuucacaucccaagccu

SEQ ID NO: 1032965 - RNA, 22 nt, Human
ccucugaguccucccugguugc

SEQ ID NO: 1032966 - RNA, 22 nt, Human
cagggcuguuagcugcugcucu

SEQ ID NO: 1032967 - RNA, 22 nt, Human
uuccuguauucuaaagggaaag

SEQ ID NO: 1032968 - RNA, 22 nt, Human
acagaaauuagcagugaguuua

SEQ ID NO: 1032969 - RNA, 22 nt, Human
auuuagaaguuggagggcaaga

SEQ ID NO: 1032970 - RNA, 22 nt, Human
aucuucaacuugaucauuugaa

SEQ ID NO: 1032971 - RNA, 22 nt, Human
gggcaagcucuucagaagcucu

SEQ ID NO: 1032972 - RNA, 22 nt, Human
accaaggagacaaagguguauu

SEQ ID NO: 1032973 - RNA, 22 nt, Human
ugcucccaaacgaccuacugug

SEQ ID NO: 1032974 - RNA, 20 nt, Human
uuugagaccagucugcccaa

SEQ ID NO: 1032975 - RNA, 22 nt, Human
gcagggcucauucuaguacaau

SEQ ID NO: 1032976 - RNA, 22 nt, Human
cuccucccucuuugccacacau

SEQ ID NO: 1032977 - RNA, 22 nt, Human
agucucagggccacccggggaa

SEQ ID NO: 1032978 - RNA, 22 nt, Human
ggggugggcgugcagggacacc

SEQ ID NO: 1032979 - RNA, 22 nt, Human
agauacaucauuuauaccuuca

SEQ ID NO: 1032980 - RNA, 22 nt, Human
ccugucauacuaacguaguggg

SEQ ID NO: 1032981 - RNA, 22 nt, Human
gcugccugccuugccuggagga

SEQ ID NO: 1032982 - RNA, 22 nt, Human
aaagccuugggauuugugauca

SEQ ID NO: 1032983 - RNA, 22 nt, Human
acuuccuguguuggucuugcug

SEQ ID NO: 1032984 - RNA, 19 nt, Human
agggcugcucuggccuggg

SEQ ID NO: 1032985 - RNA, 22 nt, Human
uccaggagaggccugaccaggu

SEQ ID NO: 1032986 - RNA, 22 nt, Human
ucugggcuuuacacugugcuua

SEQ ID NO: 1032987 - RNA, 22 nt, Human
agcagcugaccagugaguccug

SEQ ID NO: 1032988 - RNA, 22 nt, Human
uugaaaggugacauuguuagag

SEQ ID NO: 1032989 - RNA, 22 nt, Human
uggccaggcagguagaacggcc

SEQ ID NO: 1032990 - RNA, 22 nt, Human
guguccacggcugagaaugauu

SEQ ID NO: 1032991 - RNA, 22 nt, Human
aaguucaaggcucuagaguucc

SEQ ID NO: 1032992 - RNA, 23 nt, Human
ucaguuuuggcuguucaguguug

SEQ ID NO: 1032993 - RNA, 22 nt, Human
aggcacugaaagguggccagag

SEQ ID NO: 1032994 - RNA, 22 nt, Human
uggcccugcuggccaaaggcua

SEQ ID NO: 1032995 - RNA, 22 nt, Human
agcugcagagguuugugcaaca

SEQ ID NO: 1032996 - RNA, 22 nt, Human
gagagucacugucugcauuucc

SEQ ID NO: 1032997 - RNA, 22 nt, Human
ugacagaaauaguucuuaauuu

SEQ ID NO: 1032998 - RNA, 22 nt, Human
augaaggauggcuggcugcccu

SEQ ID NO: 1032999 - RNA, 22 nt, Human
ucugccagaaguucugagagua

SEQ ID NO: 1033000 - RNA, 22 nt, Human
acagaggccccgugggagagcc

SEQ ID NO: 1033001 - RNA, 22 nt, Human
ggaggguuagcaaaggcacaga

SEQ ID NO: 1033002 - RNA, 22 nt, Human
aggccuccugcagggaugagug

SEQ ID NO: 1033003 - RNA, 22 nt, Human
uggcuggcuagugggcaggauu

SEQ ID NO: 1033004 - RNA, 22 nt, Human
aguguccccuccaagggccugg

SEQ ID NO: 1033005 - RNA, 22 nt, Human
agaaauuccuaagguacacaag

SEQ ID NO: 1033006 - RNA, 22 nt, Human
gcugccugaagugucuacacug

SEQ ID NO: 1033007 - RNA, 22 nt, Human
cagcaagauuuuuaaagcaagg

SEQ ID NO: 1033008 - RNA, 22 nt, Human
auguuacauaguccuuauuugu

SEQ ID NO: 1033009 - RNA, 22 nt, Human
aaggucauggcaaauuacuuuu

SEQ ID NO: 1033010 - RNA, 22 nt, Human
ggcucuggagcacagacgucug

SEQ ID NO: 1033011 - RNA, 22 nt, Human
ccugcagagccacgugccagcg

SEQ ID NO: 1033012 - RNA, 22 nt, Human
cagcagcugggaaggaggcuga

SEQ ID NO: 1033013 - RNA, 22 nt, Human
agaaauguuacaguuguuauuu

SEQ ID NO: 1033014 - RNA, 22 nt, Human
agagcugggacuuggacucaau

SEQ ID NO: 1033015 - RNA, 22 nt, Human
ccagcuccuucugucuguggag

SEQ ID NO: 1033016 - RNA, 22 nt, Human
gagauauguuagaaagcuauug

SEQ ID NO: 1033017 - RNA, 19 nt, Human
ugccagcauuaggcugaag

SEQ ID NO: 1033018 - RNA, 22 nt, Human
uucuaacucuguuauguguuuc

SEQ ID NO: 1033019 - RNA, 22 nt, Human
uaagaacaagauguuccuguuu

SEQ ID NO: 1033020 - RNA, 22 nt, Human
gccuguccuggaugcucugcaa

SEQ ID NO: 1033021 - RNA, 22 nt, Human
gggcuaggcuuggccagcacug

SEQ ID NO: 1033022 - RNA, 22 nt, Human
ggugccaggcuguagucagggu

SEQ ID NO: 1033023 - RNA, 22 nt, Human
ucacugcagagaccucuaguca

SEQ ID NO: 1033024 - RNA, 22 nt, Human
gagcugggcacacgccacuuga

SEQ ID NO: 1033025 - RNA, 22 nt, Human
ugagccuggguggucgaggcug

SEQ ID NO: 1033026 - RNA, 22 nt, Human
gcucugggugaacuuggagcaa

SEQ ID NO: 1033027 - RNA, 22 nt, Human
cccaggaguuugaguucagcau

SEQ ID NO: 1033028 - RNA, 22 nt, Human
uccauaagcagguucuuccuga

SEQ ID NO: 1033029 - RNA, 22 nt, Human
uggcagaguggaccauacucaa

SEQ ID NO: 1033030 - RNA, 22 nt, Human
ggccuugguaaagggaugcaug

SEQ ID NO: 1033031 - RNA, 22 nt, Human
caggagugcagguggugaggca

SEQ ID NO: 1033032 - RNA, 22 nt, Human
caaggagaaaacggcuucugaa

SEQ ID NO: 1033033 - RNA, 22 nt, Human
ugggcagacgggagcuugccuu

SEQ ID NO: 1033034 - RNA, 22 nt, Human
agagcccucucauuggcuuauu

SEQ ID NO: 1033035 - RNA, 22 nt, Human
ggcucaggggccaggccugucc

SEQ ID NO: 1033036 - RNA, 22 nt, Human
ccuccuggcccugggccuggaa

SEQ ID NO: 1033037 - RNA, 22 nt, Human
agggccuggcuucacuuucuca

SEQ ID NO: 1033038 - RNA, 21 nt, Human
gcccagcaaggugagaaggcc

SEQ ID NO: 1033039 - RNA, 22 nt, Human
uacauggguagguuaagucaua

SEQ ID NO: 1033040 - RNA, 22 nt, Human
cagaaguaagauuacugugaga

SEQ ID NO: 1033041 - RNA, 22 nt, Human
cacugcaguaacucuaggacug

SEQ ID NO: 1033042 - RNA, 22 nt, Human
cugccagcagaggccagcgcug

SEQ ID NO: 1033043 - RNA, 20 nt, Human
ucugugugccaucaccuaac

SEQ ID NO: 1033044 - RNA, 22 nt, Human
aucuggcuugacuuugcgacuu

SEQ ID NO: 1033045 - RNA, 22 nt, Human
ugugaaaggggucacagggaaa

SEQ ID NO: 1033046 - RNA, 22 nt, Human
gggcagcugccaagugcaucgc

SEQ ID NO: 1033047 - RNA, 22 nt, Human
auaaggaaugauguaucaguuu

SEQ ID NO: 1033048 - RNA, 22 nt, Human
ugcaguggaaagacucagacuu

SEQ ID NO: 1033049 - RNA, 22 nt, Human
agccucugacugucagcaaggu

SEQ ID NO: 1033050 - RNA, 22 nt, Human
ucaaagucauggcuaguaauga

SEQ ID NO: 1033051 - RNA, 22 nt, Human
aggggcugggacagagccaagc

SEQ ID NO: 1033052 - RNA, 22 nt, Human
ucuggaguccagauccauuugg

SEQ ID NO: 1033053 - RNA, 22 nt, Human
uauguagaagcugcucaaagaa

SEQ ID NO: 1033054 - RNA, 20 nt, Human
cccugagacaaaggaggggc

SEQ ID NO: 1033055 - RNA, 22 nt, Human
ugccugcugcuaagcucuuugu

SEQ ID NO: 1033056 - RNA, 20 nt, Human
gccugagcuccgccuccugu

SEQ ID NO: 1033057 - RNA, 22 nt, Human
uguagcacagagcuuugacacu

SEQ ID NO: 1033058 - RNA, 19 nt, Human
agcagagcccugaagaucc

SEQ ID NO: 1033059 - RNA, 22 nt, Human
cagggccugcuuccuucuuguu

SEQ ID NO: 1033060 - RNA, 22 nt, Human
uguggcuuaagaaugccuuuaa

SEQ ID NO: 1033061 - RNA, 22 nt, Human
aagccagggucaggggccuccu

SEQ ID NO: 1033062 - RNA, 20 nt, Human
gggcuggcgcauggggaaag

SEQ ID NO: 1033063 - RNA, 22 nt, Human
ugcagggcuaagucagagccug

SEQ ID NO: 1033064 - RNA, 22 nt, Human
acaguguccuuguggucccugu

SEQ ID NO: 1033065 - RNA, 23 nt, Human
uccagggauuaaugaagucaguc

SEQ ID NO: 1033066 - RNA, 22 nt, Human
ugccuuccuggagcugaaggcu

SEQ ID NO: 1033067 - RNA, 22 nt, Human
gcuggaccaggugugcacaggc

SEQ ID NO: 1033068 - RNA, 22 nt, Human
uggcugggagcuggaacugggc

SEQ ID NO: 1033069 - RNA, 22 nt, Human
gggccuggggacaccaccauga

SEQ ID NO: 1033070 - RNA, 22 nt, Human
ucagaagaagagacuccacagc

SEQ ID NO: 1033071 - RNA, 22 nt, Human
aaacagaaauuuccucaugcuc

SEQ ID NO: 1033072 - RNA, 22 nt, Human
caggaacacaaguucagggaug

SEQ ID NO: 1033073 - RNA, 22 nt, Human
cagggccucuccuccaggaacu

SEQ ID NO: 1033074 - RNA, 20 nt, Human
ugugugcacacaugacauuc

SEQ ID NO: 1033075 - RNA, 22 nt, Human
guggcugcagagggcacagcau

SEQ ID NO: 1033076 - RNA, 22 nt, Human
cagccagguaugggcgugcggg

SEQ ID NO: 1033077 - RNA, 17 nt, Human
aggugcuggagcaucag

SEQ ID NO: 1033078 - RNA, 22 nt, Human
cccagacuccucuggcuggugg

SEQ ID NO: 1033079 - RNA, 22 nt, Human
cagagccagcuguccuuggcau

SEQ ID NO: 1033080 - RNA, 22 nt, Human
agccuggccacucagggccuga

SEQ ID NO: 1033081 - RNA, 22 nt, Human
gaucaaaagcuggguucuaaaa

SEQ ID NO: 1033082 - RNA, 22 nt, Human
auagacuugguuaguaaauuug

SEQ ID NO: 1033083 - RNA, 22 nt, Human
agagccuggggauuggcaaggg

SEQ ID NO: 1033084 - RNA, 22 nt, Human
agcaccuggucuccuggcgcug

SEQ ID NO: 1033085 - RNA, 22 nt, Human
ggugaaggcacaagagggcaag

SEQ ID NO: 1033086 - RNA, 22 nt, Human
caggacaguauaggcuuuagga

SEQ ID NO: 1033087 - RNA, 19 nt, Human
ugaagcaauaccauuuuug

SEQ ID NO: 1033088 - RNA, 22 nt, Human
ugggcucugaagucagucugcu

SEQ ID NO: 1033089 - RNA, 22 nt, Human
agugaaaacacuaguucuugcc

SEQ ID NO: 1033090 - RNA, 22 nt, Human
uccagcucuaacaugcugggcc

SEQ ID NO: 1033091 - RNA, 22 nt, Human
ucagagugaggcgucaacauga

SEQ ID NO: 1033092 - RNA, 22 nt, Human
uccauguggccagacacuggca

SEQ ID NO: 1033093 - RNA, 22 nt, Human
cugccaaggcuggggaggacaa

SEQ ID NO: 1033094 - RNA, 22 nt, Human
uaagaacauaaauucauacggg

SEQ ID NO: 1033095 - RNA, 22 nt, Human
augugaaacugaagcauccaua

SEQ ID NO: 1033096 - RNA, 22 nt, Human
ggcagccagagggcagcuggau

SEQ ID NO: 1033097 - RNA, 22 nt, Human
ugucccagaucacaggagggga

SEQ ID NO: 1033098 - RNA, 22 nt, Human
gugauuucaaauauagagugag

SEQ ID NO: 1033099 - RNA, 22 nt, Human
gauggggaugagaagugagcag

SEQ ID NO: 1033100 - RNA, 19 nt, Human
cucuggagcagacacugga

SEQ ID NO: 1033101 - RNA, 22 nt, Human
ggagacaguauggcuuguagcu

SEQ ID NO: 1033102 - RNA, 20 nt, Human
cagagcuguuauggaugaug

SEQ ID NO: 1033103 - RNA, 19 nt, Human
uugaggggccaggggagau

SEQ ID NO: 1033104 - RNA, 22 nt, Human
ggagccagggaagcugcuuccu

SEQ ID NO: 1033105 - RNA, 21 nt, Human
ggccugaguauaggacaggcc

SEQ ID NO: 1033106 - RNA, 22 nt, Human
cauuccuuaacguggggagucu

SEQ ID NO: 1033107 - RNA, 22 nt, Human
gcugggagccguaccugucacg

SEQ ID NO: 1033108 - RNA, 22 nt, Human
aagcagccuggacuugggcugg

SEQ ID NO: 1033109 - RNA, 22 nt, Human
caggcacuggggaugcugggau

SEQ ID NO: 1033110 - RNA, 22 nt, Human
ccagcagacacacaggcguggg

SEQ ID NO: 1033111 - RNA, 18 nt, Human
aucucccauuggccaagg

SEQ ID NO: 1033112 - RNA, 22 nt, Human
aacuagaaccacuuguauuucc

SEQ ID NO: 1033113 - RNA, 22 nt, Human
gugucaugggagucagaaguga

SEQ ID NO: 1033114 - RNA, 22 nt, Human
cagaaauguuuauauguggugu

SEQ ID NO: 1033115 - RNA, 22 nt, Human
gacaggaggcagagcucaggug

SEQ ID NO: 1033116 - RNA, 22 nt, Human
ccaggcagagugcuccagaaag

SEQ ID NO: 1033117 - RNA, 22 nt, Human
ggugacugguuuaucuggcagu

SEQ ID NO: 1033118 - RNA, 21 nt, Human
aaggcagaagcauggaaugag

SEQ ID NO: 1033119 - RNA, 22 nt, Human
uggggugguaauacaccguucu

SEQ ID NO: 1033120 - RNA, 22 nt, Human
uucagagcaucucuaaagccag

SEQ ID NO: 1033121 - RNA, 22 nt, Human
agccuucagcaguucaggugcc

SEQ ID NO: 1033122 - RNA, 22 nt, Human
gcugucacaagcaucuggggca

SEQ ID NO: 1033123 - RNA, 22 nt, Human
aaugcagugagccauuaaaugg

SEQ ID NO: 1033124 - RNA, 21 nt, Human
aaguaaaucagagaaauaacc

SEQ ID NO: 1033125 - RNA, 20 nt, Human
ucucugcuguccacauuugc

SEQ ID NO: 1033126 - RNA, 22 nt, Human
ccugugucuuccccacuggugu

SEQ ID NO: 1033127 - RNA, 22 nt, Human
acuggcaguggcagcagaaaga

SEQ ID NO: 1033128 - RNA, 22 nt, Human
uucacauugguucuugauagcu

SEQ ID NO: 1033129 - RNA, 22 nt, Human
uggcucaguuucaguccugguu

SEQ ID NO: 1033130 - RNA, 22 nt, Human
caaagccucugauuucacuugu

SEQ ID NO: 1033131 - RNA, 22 nt, Human
gcuuccucgcugggcagaggca

SEQ ID NO: 1033132 - RNA, 22 nt, Human
cugggggcaagcagacagcugu

SEQ ID NO: 1033133 - RNA, 22 nt, Human
agugacugggcagggcagggcc

SEQ ID NO: 1033134 - RNA, 22 nt, Human
agggcuggaggguacuaguuua

SEQ ID NO: 1033135 - RNA, 22 nt, Human
aaaugcaccuugcugugagacu

SEQ ID NO: 1033136 - RNA, 22 nt, Human
uggcucaggccacuucuuuuau

SEQ ID NO: 1033137 - RNA, 22 nt, Human
caggagacaauggcuguggggc

SEQ ID NO: 1033138 - RNA, 22 nt, Human
gagcugucucuauaugaaugcu

SEQ ID NO: 1033139 - RNA, 22 nt, Human
aaucaguuagaaggaagagaau

SEQ ID NO: 1033140 - RNA, 22 nt, Human
agccacagucugaugccugaga

SEQ ID NO: 1033141 - RNA, 22 nt, Human
cuggagccacuuuuuauccuuu

SEQ ID NO: 1033142 - RNA, 22 nt, Human
agcagggcuucugugccugugc

SEQ ID NO: 1033143 - RNA, 21 nt, Human
cagaggggcuagccuggcugc

SEQ ID NO: 1033144 - RNA, 22 nt, Human
ucagaggaccuuacugagaacc

SEQ ID NO: 1033145 - RNA, 22 nt, Human
ucccagagucuucuccuguaau

SEQ ID NO: 1033146 - RNA, 22 nt, Human
caggagugaguuggggucuaca

SEQ ID NO: 1033147 - RNA, 22 nt, Human
ucugagaguacgggcugcgcgc

SEQ ID NO: 1033148 - RNA, 22 nt, Human
gcagagcagugcuugcccagcg

SEQ ID NO: 1033149 - RNA, 22 nt, Human
cugcccuggcagccuaccaugg

SEQ ID NO: 1033150 - RNA, 18 nt, Human
ucagcuggggcugcagcc

SEQ ID NO: 1033151 - RNA, 22 nt, Human
uggaggagggcuggugucugua

SEQ ID NO: 1033152 - RNA, 22 nt, Human
aggugauguccacagcuugcag

SEQ ID NO: 1033153 - RNA, 22 nt, Human
uaaaauguguuucuguaugguu

SEQ ID NO: 1033154 - RNA, 22 nt, Human
gugccuggcaugcgccggugcu

SEQ ID NO: 1033155 - RNA, 22 nt, Human
caaagggcucuagacucagcag

SEQ ID NO: 1033156 - RNA, 22 nt, Human
acaggccugacacacagagggc

SEQ ID NO: 1033157 - RNA, 22 nt, Human
ucaaaguccuugcuuuuucugu

SEQ ID NO: 1033158 - RNA, 22 nt, Human
gcagggucugaggccacagagg

SEQ ID NO: 1033159 - RNA, 22 nt, Human
ggccagggccuggggacugucc

SEQ ID NO: 1033160 - RNA, 20 nt, Human
ggggcccaagcccucuugcc

SEQ ID NO: 1033161 - RNA, 22 nt, Human
cucaggagaugacagaagguau

SEQ ID NO: 1033162 - RNA, 22 nt, Human
aaguucuacuguggguaaaaug

SEQ ID NO: 1033163 - RNA, 22 nt, Human
gcuggggagcuagaccucagca

SEQ ID NO: 1033164 - RNA, 23 nt, Human
cccagcagauuguaaagugucca

SEQ ID NO: 1033165 - RNA, 22 nt, Human
gccuggagcucggcugagggcg

SEQ ID NO: 1033166 - RNA, 22 nt, Human
acagggucaagggugcuacaag

SEQ ID NO: 1033167 - RNA, 22 nt, Human
gcagggccagggcucaggcugu

SEQ ID NO: 1033168 - RNA, 22 nt, Human
aaggucauuuaacaauuuauga

SEQ ID NO: 1033169 - RNA, 22 nt, Human
ccucuccuugcacccgucccgc

SEQ ID NO: 1033170 - RNA, 22 nt, Human
aauguguacaugacagauagaa

SEQ ID NO: 1033171 - RNA, 22 nt, Human
ggccuggcauggggacuaaggg

SEQ ID NO: 1033172 - RNA, 18 nt, Human
gccugggaggaggaaaug

SEQ ID NO: 1033173 - RNA, 22 nt, Human
uuucaugugcaauuagcaauau

SEQ ID NO: 1033174 - RNA, 22 nt, Human
agucccagaucuacaggaggga

SEQ ID NO: 1033175 - RNA, 22 nt, Human
agggugccugcugcagguucag

SEQ ID NO: 1033176 - RNA, 17 nt, Human
ccagguggaaucgugga

SEQ ID NO: 1033177 - RNA, 23 nt, Human
aaggucacagaacuuagcaagcc

SEQ ID NO: 1033178 - RNA, 19 nt, Human
ggcugucuggcguguggau

SEQ ID NO: 1033179 - RNA, 22 nt, Human
ugucucagaauggcucauaaua

SEQ ID NO: 1033180 - RNA, 22 nt, Human
cugugaggcccugggugcugga

SEQ ID NO: 1033181 - RNA, 22 nt, Human
cucuggccgcagcucagcucug

SEQ ID NO: 1033182 - RNA, 22 nt, Human
ggagcugaugacgucaccaugg

SEQ ID NO: 1033183 - RNA, 22 nt, Human
ucaggcugcccguucagggcuc

SEQ ID NO: 1033184 - RNA, 20 nt, Human
cagcccuccaguggaggcag

SEQ ID NO: 1033185 - RNA, 22 nt, Human
uacaaagccugguagauaucug

SEQ ID NO: 1033186 - RNA, 22 nt, Human
cugggccugucagggcuuuuug

SEQ ID NO: 1033187 - RNA, 22 nt, Human
ucaagauaccaccauuauaugu

SEQ ID NO: 1033188 - RNA, 22 nt, Human
ccuguggcugccacuuggguga

SEQ ID NO: 1033189 - RNA, 22 nt, Human
agccaaggagugcagguggcuu

SEQ ID NO: 1033190 - RNA, 22 nt, Human
cugagccauccauaccagcuua

SEQ ID NO: 1033191 - RNA, 19 nt, Human
aggcagcacccaguccuug

SEQ ID NO: 1033192 - RNA, 22 nt, Human
gcaggcaguugcaguuuucuag

SEQ ID NO: 1033193 - RNA, 22 nt, Human
uggacaggaucugagacugaga

SEQ ID NO: 1033194 - RNA, 22 nt, Human
agagcuguggauaguccuggau

SEQ ID NO: 1033195 - RNA, 22 nt, Human
uuguuuugcuaaagggucauca

SEQ ID NO: 1033196 - RNA, 22 nt, Human
auguaacuguuauauuuuguug

SEQ ID NO: 1033197 - RNA, 18 nt, Human
auccuugaugagaggucu

SEQ ID NO: 1033198 - RNA, 22 nt, Human
ccugucuggccuuccacggggg

SEQ ID NO: 1033199 - RNA, 22 nt, Human
gggacugggagauccuccuggc

SEQ ID NO: 1033200 - RNA, 22 nt, Human
ucaaaugcugccuuugugugcc

SEQ ID NO: 1033201 - RNA, 22 nt, Human
ucuuccagcaaugugaaaucac

SEQ ID NO: 1033202 - RNA, 22 nt, Human
auaugcauaugucaaaacuuau

SEQ ID NO: 1033203 - RNA, 22 nt, Human
aggauccuccuuagaaaagacc

SEQ ID NO: 1033204 - RNA, 22 nt, Human
cuccagggggcauccacacagc

SEQ ID NO: 1033205 - RNA, 22 nt, Human
cuguguggacugguugaggccc

SEQ ID NO: 1033206 - RNA, 22 nt, Human
agccagugcaacagcagugaag

SEQ ID NO: 1033207 - RNA, 22 nt, Human
gcccacagcucguuccucuccu

SEQ ID NO: 1033208 - RNA, 18 nt, Human
cccucuccugcuaguggg

SEQ ID NO: 1033209 - RNA, 22 nt, Human
ucucagggcgcagugaggcagu

SEQ ID NO: 1033210 - RNA, 22 nt, Human
gaaugcagauggcugguguaug

SEQ ID NO: 1033211 - RNA, 22 nt, Human
cugagccacugcuuguucagug

SEQ ID NO: 1033212 - RNA, 22 nt, Human
ugccugaguuuaacccucagag

SEQ ID NO: 1033213 - RNA, 22 nt, Human
gugcagugagcagugcagcacc

SEQ ID NO: 1033214 - RNA, 22 nt, Human
aauguguagauguugcauuccu

SEQ ID NO: 1033215 - RNA, 22 nt, Human
acagagaugcaaguguguauuu

SEQ ID NO: 1033216 - RNA, 17 nt, Human
ugaggccugcaucagug

SEQ ID NO: 1033217 - RNA, 22 nt, Human
accagagcagacuacuggaggu

SEQ ID NO: 1033218 - RNA, 22 nt, Human
ugaugcugcugggaguggugcu

SEQ ID NO: 1033219 - RNA, 22 nt, Human
caguacuuugcaucauuccacu

SEQ ID NO: 1033220 - RNA, 22 nt, Human
ccuggcagcaggugggcccgug

SEQ ID NO: 1033221 - RNA, 22 nt, Human
ugaaaucuuuaguuucuguccc

SEQ ID NO: 1033222 - RNA, 17 nt, Human
agcugccagggagugug

SEQ ID NO: 1033223 - RNA, 22 nt, Human
ccagggcagccaacccagaugc

SEQ ID NO: 1033224 - RNA, 22 nt, Human
cucagaauuacaucccauuuua

SEQ ID NO: 1033225 - RNA, 17 nt, Human
ggccuuggggccucagu

SEQ ID NO: 1033226 - RNA, 22 nt, Human
ggcuggagauaugucuggaaca

SEQ ID NO: 1033227 - RNA, 19 nt, Human
aagaagcaauaagcuguga

SEQ ID NO: 1033228 - RNA, 22 nt, Human
acagggucauuuuaugaucugu

SEQ ID NO: 1033229 - RNA, 22 nt, Human
ucaucuaagagucuuacauuua

SEQ ID NO: 1033230 - RNA, 22 nt, Human
caguuucuacgacuuaagcaca

SEQ ID NO: 1033231 - RNA, 22 nt, Human
cuggggacuugcagacacaauu

SEQ ID NO: 1033232 - RNA, 22 nt, Human
gaggaaugucagcacaggccuc

SEQ ID NO: 1033233 - RNA, 22 nt, Human
cugggccugggaggccaggucu

SEQ ID NO: 1033234 - RNA, 22 nt, Human
gcuccuggucuggagcuucaag

SEQ ID NO: 1033235 - RNA, 22 nt, Human
aggaggugacagccugcaucug

SEQ ID NO: 1033236 - RNA, 22 nt, Human
ugcagggcuuccucuuggaguu

SEQ ID NO: 1033237 - RNA, 22 nt, Human
gagagcuguccggcugagcagc

SEQ ID NO: 1033238 - RNA, 22 nt, Human
aucagcugaaaaacaggcagca

SEQ ID NO: 1033239 - RNA, 22 nt, Human
acagccuguuugaucuggugcu

SEQ ID NO: 1033240 - RNA, 22 nt, Human
agacagaacagaauaauuguug

SEQ ID NO: 1033241 - RNA, 22 nt, Human
ugcaagagguaaaaugaaagga

SEQ ID NO: 1033242 - RNA, 22 nt, Human
ccagggccucguguucugagug

SEQ ID NO: 1033243 - RNA, 22 nt, Human
aaaaguguccagauuaugaaga

SEQ ID NO: 1033244 - RNA, 22 nt, Human
ugucucagggcagcagcagggg

SEQ ID NO: 1033245 - RNA, 22 nt, Human
accaucagucacauguagagaa

SEQ ID NO: 1033246 - RNA, 21 nt, Human
ccagcagcucaaggaucucuu

SEQ ID NO: 1033247 - RNA, 22 nt, Human
uagcugucagcaaucaaguggu

SEQ ID NO: 1033248 - RNA, 18 nt, Human
aggccagcccugcuacug

SEQ ID NO: 1033249 - RNA, 22 nt, Human
gagggcaguagccucguacccu

SEQ ID NO: 1033250 - RNA, 22 nt, Human
agggcugccugcucugcauuga

SEQ ID NO: 1033251 - RNA, 22 nt, Human
gaaaaaugcuccaaaucugugg

SEQ ID NO: 1033252 - RNA, 22 nt, Human
auccaggguguggagagagcuc

SEQ ID NO: 1033253 - RNA, 22 nt, Human
auccuugagaaaauaaaugacc

SEQ ID NO: 1033254 - RNA, 22 nt, Human
aggggugauuugggacaggaca

SEQ ID NO: 1033255 - RNA, 21 nt, Human
gugguuauuuucauuagcauc

SEQ ID NO: 1033256 - RNA, 22 nt, Human
gcucccagcauugcuucccagg

SEQ ID NO: 1033257 - RNA, 22 nt, Human
uggcugccuuucaccucaucuc

SEQ ID NO: 1033258 - RNA, 22 nt, Human
cccaaggcauggcaugguggca

SEQ ID NO: 1033259 - RNA, 21 nt, Human
gccugcagaccccaccaggcu

SEQ ID NO: 1033260 - RNA, 20 nt, Human
accauaauguuaauuacaaa

SEQ ID NO: 1033261 - RNA, 22 nt, Human
uacccagcuucaagucaggacu

SEQ ID NO: 1033262 - RNA, 22 nt, Human
aggcuggcgacaucuggcgggc

SEQ ID NO: 1033263 - RNA, 21 nt, Human
gagccuucccucugcccuuuc

SEQ ID NO: 1033264 - RNA, 22 nt, Human
uacaguaucuucuggcaagcau

SEQ ID NO: 1033265 - RNA, 22 nt, Human
aggcucugcagugcuggaggac

SEQ ID NO: 1033266 - RNA, 21 nt, Human
ugauuuccaucuuaaaauaaa

SEQ ID NO: 1033267 - RNA, 22 nt, Human
gggagggaucugcuaggcaaug

SEQ ID NO: 1033268 - RNA, 23 nt, Human
acacaaggguaacugccagccau

SEQ ID NO: 1033269 - RNA, 22 nt, Human
ggcugagccuggagcaucuggu

SEQ ID NO: 1033270 - RNA, 22 nt, Human
caggcagcagaggaguguggga

SEQ ID NO: 1033271 - RNA, 22 nt, Human
agcugccacauggugucacugu

SEQ ID NO: 1033272 - RNA, 22 nt, Human
gaaaugcauggaucuuggcaga

SEQ ID NO: 1033273 - RNA, 17 nt, Human
gagagcugcugcuuccg

SEQ ID NO: 1033274 - RNA, 22 nt, Human
uuuccuuccuugcuagccugag

SEQ ID NO: 1033275 - RNA, 23 nt, Human
uccagcagagccuuccaggaggg

SEQ ID NO: 1033276 - RNA, 22 nt, Human
gcagauggcugagccugcagau

SEQ ID NO: 1033277 - RNA, 22 nt, Human
cagagcugguaagugguagagg

SEQ ID NO: 1033278 - RNA, 22 nt, Human
cuuugcauacaauuuuuagaaa

SEQ ID NO: 1033279 - RNA, 22 nt, Human
cagcuugggaguuugguuuuau

SEQ ID NO: 1033280 - RNA, 22 nt, Human
gcugcucugaaaaugacuguug

SEQ ID NO: 1033281 - RNA, 22 nt, Human
agcuggccuccgggugccuggg

SEQ ID NO: 1033282 - RNA, 19 nt, Human
aguguguacugaaagcacu

SEQ ID NO: 1033283 - RNA, 22 nt, Human
ggcagggcuugucucugugaug

SEQ ID NO: 1033284 - RNA, 22 nt, Human
cuuccugaacaaugccaucaau

SEQ ID NO: 1033285 - RNA, 22 nt, Human
agccaaagaucagugugcaagu

SEQ ID NO: 1033286 - RNA, 22 nt, Human
ccucuugccaaucagcuacaga

SEQ ID NO: 1033287 - RNA, 22 nt, Human
cucugaagggagggccaagccc

SEQ ID NO: 1033288 - RNA, 22 nt, Human
gcagacuggucuucagccuugg

SEQ ID NO: 1033289 - RNA, 22 nt, Human
ccugcagcuguaggagaaggcg

SEQ ID NO: 1033290 - RNA, 22 nt, Human
uguaugugcuugagaagguggg

SEQ ID NO: 1033291 - RNA, 22 nt, Human
ggcaaggccuugcccagcauuc

SEQ ID NO: 1033292 - RNA, 19 nt, Human
ucuaacagaagugucgucc

SEQ ID NO: 1033293 - RNA, 22 nt, Human
aggagagagaacacuugggucc

SEQ ID NO: 1033294 - RNA, 22 nt, Human
ccagggugaggaggcucccacg

SEQ ID NO: 1033295 - RNA, 23 nt, Human
gcugagguacauuuacaggaaga

SEQ ID NO: 1033296 - RNA, 22 nt, Human
cccaggcuggagugcaauggug

SEQ ID NO: 1033297 - RNA, 22 nt, Human
ucuggcuccguguccgcuccca

SEQ ID NO: 1033298 - RNA, 22 nt, Human
agcagcaggcuguguggacuga

SEQ ID NO: 1033299 - RNA, 19 nt, Human
acaggcagaauugggugug

SEQ ID NO: 1033300 - RNA, 22 nt, Human
gccuuccuuuuaccaccagcca

SEQ ID NO: 1033301 - RNA, 22 nt, Human
agccucucuccagcuuggcaga

SEQ ID NO: 1033302 - RNA, 22 nt, Human
uggcuggcaguaggcuaguggc

SEQ ID NO: 1033303 - RNA, 22 nt, Human
gggcuccaacggugagcaugga

SEQ ID NO: 1033304 - RNA, 22 nt, Human
ggcucugcagugacuugagggg

SEQ ID NO: 1033305 - RNA, 22 nt, Human
ccaaaguccuuucuccaccugc

SEQ ID NO: 1033306 - RNA, 22 nt, Human
aaaggucauugaaaaggaggaa

SEQ ID NO: 1033307 - RNA, 22 nt, Human
gaaggagacccugaagaugcug

SEQ ID NO: 1033308 - RNA, 22 nt, Human
augcuuuuccuaaaaugaugcc

SEQ ID NO: 1033309 - RNA, 22 nt, Human
ugaaaaggaguccuuguuuuca

SEQ ID NO: 1033310 - RNA, 22 nt, Human
ccagggcagcagaauuggggca

SEQ ID NO: 1033311 - RNA, 22 nt, Human
caaagugcuggaauuacaggug

SEQ ID NO: 1033312 - RNA, 22 nt, Human
caggugggagcggagacugauu

SEQ ID NO: 1033313 - RNA, 22 nt, Human
agaugcugccucuccucacaag

SEQ ID NO: 1033314 - RNA, 22 nt, Human
aggcucauucuugccucugagc

SEQ ID NO: 1033315 - RNA, 23 nt, Human
aucaaacuggugagaaugucagu

SEQ ID NO: 1033316 - RNA, 22 nt, Human
gagcugccugugugccaugaug

SEQ ID NO: 1033317 - RNA, 22 nt, Human
ggcugugcgggcagccguggga

SEQ ID NO: 1033318 - RNA, 22 nt, Human
aaugaacaucaaaugccuacca

SEQ ID NO: 1033319 - RNA, 22 nt, Human
ggagggagcauccccuugcuga

SEQ ID NO: 1033320 - RNA, 18 nt, Human
agggucagugucacuggc

SEQ ID NO: 1033321 - RNA, 22 nt, Human
uuugcauugccucugacuuaug

SEQ ID NO: 1033322 - RNA, 22 nt, Human
gaggcagcugaaggagugacag

SEQ ID NO: 1033323 - RNA, 22 nt, Human
ccagugcacagccaggcaggug

SEQ ID NO: 1033324 - RNA, 22 nt, Human
gggcacugugcuaggugcugag

SEQ ID NO: 1033325 - RNA, 22 nt, Human
gccuucugaucgcuggacugac

SEQ ID NO: 1033326 - RNA, 22 nt, Human
guggcagcggcccaggccgucu

SEQ ID NO: 1033327 - RNA, 22 nt, Human
agccagcaugaagacagaggcc

SEQ ID NO: 1033328 - RNA, 19 nt, Human
guaagggcuaauggacuau

SEQ ID NO: 1033329 - RNA, 22 nt, Human
ccugucuguauugguuugcuau

SEQ ID NO: 1033330 - RNA, 22 nt, Human
caguagcaggcaggugcuuuug

SEQ ID NO: 1033331 - RNA, 22 nt, Human
ucaggccacggcucacugagac

SEQ ID NO: 1033332 - RNA, 22 nt, Human
ucagaggguggcugggagcauc

SEQ ID NO: 1033333 - RNA, 22 nt, Human
cagcuggcauaccugggcccgg

SEQ ID NO: 1033334 - RNA, 22 nt, Human
uggcagcugaggggaggcuuug

SEQ ID NO: 1033335 - RNA, 22 nt, Human
ugcacacaguucucaggaaaga

SEQ ID NO: 1033336 - RNA, 22 nt, Human
gggugggagucuggcccucaaa

SEQ ID NO: 1033337 - RNA, 22 nt, Human
cacagggcagaggguccguggc

SEQ ID NO: 1033338 - RNA, 22 nt, Human
ccugccucaucaacuugucgug

SEQ ID NO: 1033339 - RNA, 22 nt, Human
ucaguuuuuacggucacaggga

SEQ ID NO: 1033340 - RNA, 22 nt, Human
acagccagggucucaggaggcg

SEQ ID NO: 1033341 - RNA, 22 nt, Human
ugggccugaaggagcugcgccc

SEQ ID NO: 1033342 - RNA, 22 nt, Human
caaauguguuuuuucuucuaca

SEQ ID NO: 1033343 - RNA, 22 nt, Human
acacacaacucauuguguaaua

SEQ ID NO: 1033344 - RNA, 18 nt, Human
agcagaauucuaggguuc

SEQ ID NO: 1033345 - RNA, 22 nt, Human
uuccucuccucccaccagguga

SEQ ID NO: 1033346 - RNA, 22 nt, Human
caggcagcugggucaccguccc

SEQ ID NO: 1033347 - RNA, 21 nt, Human
accaggcuugugggagggagc

SEQ ID NO: 1033348 - RNA, 22 nt, Human
cacugcuuucacaguuuguucc

SEQ ID NO: 1033349 - RNA, 22 nt, Human
aggcacugguccauuuucugca

SEQ ID NO: 1033350 - RNA, 22 nt, Human
gcucugcugagauaucugggag

SEQ ID NO: 1033351 - RNA, 22 nt, Human
uucaagguaugguagcugguca

SEQ ID NO: 1033352 - RNA, 22 nt, Human
ggaaagagcccagcagugcuug

SEQ ID NO: 1033353 - RNA, 22 nt, Human
uccugcagaccucagucagguc

SEQ ID NO: 1033354 - RNA, 22 nt, Human
aagcugcccucauucccagugc

SEQ ID NO: 1033355 - RNA, 22 nt, Human
ugguggccuugauggcaucugc

SEQ ID NO: 1033356 - RNA, 22 nt, Human
ggagugacucucggggccacua

SEQ ID NO: 1033357 - RNA, 23 nt, Human
uuguuuuuagagguggcaugaga

SEQ ID NO: 1033358 - RNA, 22 nt, Human
guguuuccucuagaagccaugg

SEQ ID NO: 1033359 - RNA, 22 nt, Human
cuuauguauaauguuccacaua

SEQ ID NO: 1033360 - RNA, 22 nt, Human
ggcugccauaacugauaccaua

SEQ ID NO: 1033361 - RNA, 22 nt, Human
gaugcugaagugaagugaucuu

SEQ ID NO: 1033362 - RNA, 22 nt, Human
uggccuggugucugcgaggccu

SEQ ID NO: 1033363 - RNA, 22 nt, Human
gcucaagggaugggagugggug

SEQ ID NO: 1033364 - RNA, 22 nt, Human
aggcagcaaagaaaugaugcug

SEQ ID NO: 1033365 - RNA, 22 nt, Human
cagcagaggaaagcaaaucuaa

SEQ ID NO: 1033366 - RNA, 22 nt, Human
uggccuggccacauccagcagg

SEQ ID NO: 1033367 - RNA, 22 nt, Human
cagaaauguucuaaugauucag

SEQ ID NO: 1033368 - RNA, 20 nt, Human
acaggagaucugaggaaagg

SEQ ID NO: 1033369 - RNA, 22 nt, Human
cauuuagacauuugauuugggg

SEQ ID NO: 1033370 - RNA, 22 nt, Human
cacagcagaaauaugaaggcag

SEQ ID NO: 1033371 - RNA, 17 nt, Human
accagccucuccugggg

SEQ ID NO: 1033372 - RNA, 22 nt, Human
uggcacugggacagaugcucuc

SEQ ID NO: 1033373 - RNA, 22 nt, Human
ucucagagcuucaguuauuuuc

SEQ ID NO: 1033374 - RNA, 19 nt, Human
agcauccagucaugggauc

SEQ ID NO: 1033375 - RNA, 22 nt, Human
acugcuuuucagagucugccug

SEQ ID NO: 1033376 - RNA, 22 nt, Human
gcacugcaucuacuggcaagua

SEQ ID NO: 1033377 - RNA, 22 nt, Human
cauuucugucacguucuuuuau

SEQ ID NO: 1033378 - RNA, 22 nt, Human
ugaagccacagagcaucugccu

SEQ ID NO: 1033379 - RNA, 22 nt, Human
ugcagcugaggccagcuaugcc

SEQ ID NO: 1033380 - RNA, 22 nt, Human
gacagagugcagggcuagaaga

SEQ ID NO: 1033381 - RNA, 22 nt, Human
cuugugcaauugacauugaauc

SEQ ID NO: 1033382 - RNA, 22 nt, Human
ggccccugcggacugccuagag

SEQ ID NO: 1033383 - RNA, 22 nt, Human
acaggcugacuuccugccaugu

SEQ ID NO: 1033384 - RNA, 22 nt, Human
guucagggagggacagaugaag

SEQ ID NO: 1033385 - RNA, 22 nt, Human
cugucucucuaggacacugggg

SEQ ID NO: 1033386 - RNA, 22 nt, Human
uuaucguacgcuucagaaauuu

SEQ ID NO: 1033387 - RNA, 22 nt, Human
ugggggugacuaucucgggaau

SEQ ID NO: 1033388 - RNA, 22 nt, Human
uacaguagacaauguuaguaug

SEQ ID NO: 1033389 - RNA, 22 nt, Human
acauuucuaauuuaauguaaca

SEQ ID NO: 1033390 - RNA, 22 nt, Human
cucagggcaguauggcugagag

SEQ ID NO: 1033391 - RNA, 22 nt, Human
uauguacaucguugaauucaaa

SEQ ID NO: 1033392 - RNA, 22 nt, Human
cacaugggcguaauguccaugg

SEQ ID NO: 1033393 - RNA, 20 nt, Human
cuuggccuacuuagcuuugu

SEQ ID NO: 1033394 - RNA, 22 nt, Human
cuucaagaagacagcagagcau

SEQ ID NO: 1033395 - RNA, 22 nt, Human
cacagcugccauggcugcacuu

SEQ ID NO: 1033396 - RNA, 22 nt, Human
gggcacuguacacugugcaugg

SEQ ID NO: 1033397 - RNA, 22 nt, Human
gcagagccugggggucugcgga

SEQ ID NO: 1033398 - RNA, 22 nt, Human
agcugggucuugggccaggaga

SEQ ID NO: 1033399 - RNA, 22 nt, Human
cugucugcuagaacaucuauac

SEQ ID NO: 1033400 - RNA, 20 nt, Human
gcaaauggaucccacaagcc

SEQ ID NO: 1033401 - RNA, 22 nt, Human
caggcagcucgaugccuuguug

SEQ ID NO: 1033402 - RNA, 22 nt, Human
ugucaccagcugcuccucagga

SEQ ID NO: 1033403 - RNA, 22 nt, Human
ugacucuguaccugucugccuu

SEQ ID NO: 1033404 - RNA, 17 nt, Human
agaaagaggauccacag

SEQ ID NO: 1033405 - RNA, 22 nt, Human
uggcagcagccauggaaggccc

SEQ ID NO: 1033406 - RNA, 21 nt, Human
aaauguguuccauaaugcuuu

SEQ ID NO: 1033407 - RNA, 22 nt, Human
gccugaagaacagcugugagga

SEQ ID NO: 1033408 - RNA, 22 nt, Human
caguggaggcucaagugugcuu

SEQ ID NO: 1033409 - RNA, 22 nt, Human
uuucuuauauucugucauuguu

SEQ ID NO: 1033410 - RNA, 22 nt, Human
agcuggcccucgagagccaauu

SEQ ID NO: 1033411 - RNA, 22 nt, Human
gcaggagagucugugccagguu

SEQ ID NO: 1033412 - RNA, 22 nt, Human
ucugucacccagagugcagugg

SEQ ID NO: 1033413 - RNA, 22 nt, Human
gcucuguacgcaggaugagggg

SEQ ID NO: 1033414 - RNA, 22 nt, Human
augaaacaugagaaauggagag

SEQ ID NO: 1033415 - RNA, 22 nt, Human
uguggccuugcagccuggaggu

SEQ ID NO: 1033416 - RNA, 22 nt, Human
ucucaggccccugaguuucucu

SEQ ID NO: 1033417 - RNA, 22 nt, Human
gccaggcugaggcucuggaaga

SEQ ID NO: 1033418 - RNA, 22 nt, Human
cccauuuaaacacaagcuuuca

SEQ ID NO: 1033419 - RNA, 22 nt, Human
cagcuccugcagcugcugccgu

SEQ ID NO: 1033420 - RNA, 22 nt, Human
cccaggccccagggcuugucag

SEQ ID NO: 1033421 - RNA, 22 nt, Human
uuuccucuucuggcaggcaggg

SEQ ID NO: 1033422 - RNA, 22 nt, Human
uagcugcccaucuuuccuuuag

SEQ ID NO: 1033423 - RNA, 22 nt, Human
ggcacagggagccgcaguugca

SEQ ID NO: 1033424 - RNA, 22 nt, Human
ugcagcugauuaaagggcagac

SEQ ID NO: 1033425 - RNA, 22 nt, Human
cagccucuaagcacagccucuc

SEQ ID NO: 1033426 - RNA, 22 nt, Human
agagccugggaauuugcauguu

SEQ ID NO: 1033427 - RNA, 22 nt, Human
uaacagaaaggggacagaaaua

SEQ ID NO: 1033428 - RNA, 22 nt, Human
aagaguuuucuauaaucuuggc

SEQ ID NO: 1033429 - RNA, 22 nt, Human
uccauuuacuauucucauaucg

SEQ ID NO: 1033430 - RNA, 22 nt, Human
auauguguacgugcaguauaua

SEQ ID NO: 1033431 - RNA, 22 nt, Human
agggggcccuugcaggugagcg

SEQ ID NO: 1033432 - RNA, 22 nt, Human
caugggcuuuggaggcuggagg

SEQ ID NO: 1033433 - RNA, 22 nt, Human
ggcugggcucgcugauuggcug

SEQ ID NO: 1033434 - RNA, 22 nt, Human
cagagcuguugcggggcuuggc

SEQ ID NO: 1033435 - RNA, 22 nt, Human
ucccagccuuucuuuucugcug

SEQ ID NO: 1033436 - RNA, 22 nt, Human
agggcugcaggcaagauauggc

SEQ ID NO: 1033437 - RNA, 22 nt, Human
ucuggcuccugaguccaugcuc

SEQ ID NO: 1033438 - RNA, 22 nt, Human
ucaacacuauccaggcaaucuu

SEQ ID NO: 1033439 - RNA, 22 nt, Human
cuguacaucccgagagccagua

SEQ ID NO: 1033440 - RNA, 22 nt, Human
gagcccagguucugcuuccagc

SEQ ID NO: 1033441 - RNA, 18 nt, Human
cuuucagauggauaugcu

SEQ ID NO: 1033442 - RNA, 21 nt, Human
gagugcagcaagguagagucu

SEQ ID NO: 1033443 - RNA, 22 nt, Human
auacaaguugugauaauguaaa

SEQ ID NO: 1033444 - RNA, 21 nt, Human
ucccugcuuucuggcccaguc

SEQ ID NO: 1033445 - RNA, 22 nt, Human
gcugcaggagcuggagcugugg

SEQ ID NO: 1033446 - RNA, 22 nt, Human
cuuggcugucuauaggaaagag

SEQ ID NO: 1033447 - RNA, 22 nt, Human
ccaggcugggcggggaaccugg

SEQ ID NO: 1033448 - RNA, 22 nt, Human
aucuggcugcugugcuuaagcu

SEQ ID NO: 1033449 - RNA, 22 nt, Human
agggccuggcgcguggccgccg

SEQ ID NO: 1033450 - RNA, 22 nt, Human
uauagaaguaagcauugugaug

SEQ ID NO: 1033451 - RNA, 22 nt, Human
ggggagaguccuuuccaguucc

SEQ ID NO: 1033452 - RNA, 22 nt, Human
gccucucucuacccaguaugau

SEQ ID NO: 1033453 - RNA, 22 nt, Human
gcagagcucaagguguucagcu

SEQ ID NO: 1033454 - RNA, 22 nt, Human
cuggcagcuuccuuugcaucug

SEQ ID NO: 1033455 - RNA, 22 nt, Human
gaggaguguauuccacaccacu

SEQ ID NO: 1033456 - RNA, 22 nt, Human
uuccauaaaggugauaguauac

SEQ ID NO: 1033457 - RNA, 22 nt, Human
uuuauguaguuacggacuauca

SEQ ID NO: 1033458 - RNA, 22 nt, Human
uuucagauggagguuuaggaca

SEQ ID NO: 1033459 - RNA, 22 nt, Human
augauacaucuucaugucagug

SEQ ID NO: 1033460 - RNA, 22 nt, Human
gaagcccagggcguggccgggc

SEQ ID NO: 1033461 - RNA, 22 nt, Human
gaagcagcuuucuggugaggag

SEQ ID NO: 1033462 - RNA, 22 nt, Human
ucauccaguuguggagagggaa

SEQ ID NO: 1033463 - RNA, 22 nt, Human
gccucugcggagcuguacauca

SEQ ID NO: 1033464 - RNA, 22 nt, Human
ggugcagaucuuucucuucagg

SEQ ID NO: 1033465 - RNA, 22 nt, Human
gagccugaauuugaccugcuua

SEQ ID NO: 1033466 - RNA, 22 nt, Human
gggaaauugucaacacucucaa

SEQ ID NO: 1033467 - RNA, 22 nt, Human
agcugccugcuuaugagcucca

SEQ ID NO: 1033468 - RNA, 23 nt, Human
uuucuguuggguauauauccaag

SEQ ID NO: 1033469 - RNA, 22 nt, Human
cagcccugccauggagccuccu

SEQ ID NO: 1033470 - RNA, 22 nt, Human
gagagcccugcuccuaucccag

SEQ ID NO: 1033471 - RNA, 19 nt, Human
acagaagcauagaaaagga

SEQ ID NO: 1033472 - RNA, 22 nt, Human
gucuggagccacccuaagcauu

SEQ ID NO: 1033473 - RNA, 22 nt, Human
cugugcaagcccaagauaaaac

SEQ ID NO: 1033474 - RNA, 22 nt, Human
auccugggaagcugacauugaa

SEQ ID NO: 1033475 - RNA, 22 nt, Human
cccaggagguggagguugcagc

SEQ ID NO: 1033476 - RNA, 22 nt, Human
gguucacauauugagaguauuc

SEQ ID NO: 1033477 - RNA, 22 nt, Human
agcuuccucaccucagaggucu

SEQ ID NO: 1033478 - RNA, 22 nt, Human
aaaugucuuucuucugcuacgu

SEQ ID NO: 1033479 - RNA, 22 nt, Human
uauucacaaaaugagguccuca

SEQ ID NO: 1033480 - RNA, 22 nt, Human
ggggcugggauuugaacccagg

SEQ ID NO: 1033481 - RNA, 22 nt, Human
cuuacauugucuuaguuuucaa

SEQ ID NO: 1033482 - RNA, 22 nt, Human
auuucuucaggucagaaauaga

SEQ ID NO: 1033483 - RNA, 22 nt, Human
aggcacugaagaacucuuuuug

SEQ ID NO: 1033484 - RNA, 22 nt, Human
uaaaugugcacuuuacuuuuca

SEQ ID NO: 1033485 - RNA, 22 nt, Human
cuggccagaguuggagggugug

SEQ ID NO: 1033486 - RNA, 22 nt, Human
agagccagccuucucagcuuac

SEQ ID NO: 1033487 - RNA, 22 nt, Human
uuuuaaguuaauauaauugagg

SEQ ID NO: 1033488 - RNA, 20 nt, Human
ugggagcuggugaggucuca

SEQ ID NO: 1033489 - RNA, 17 nt, Human
uggacccuugggccucc

SEQ ID NO: 1033490 - RNA, 18 nt, Human
cagagcagagguggagcg

SEQ ID NO: 1033491 - RNA, 22 nt, Human
ugaaacagucuccagacuugga

SEQ ID NO: 1033492 - RNA, 22 nt, Human
ccagcccugucaccaacuggag

SEQ ID NO: 1033493 - RNA, 22 nt, Human
ggcaaaguuuucaucucauaac

SEQ ID NO: 1033494 - RNA, 22 nt, Human
cuggcuuccucaggagcagugg

SEQ ID NO: 1033495 - RNA, 22 nt, Human
uugggcugaaguagagggcaga

SEQ ID NO: 1033496 - RNA, 22 nt, Human
agcugccuguccuaggccauca

SEQ ID NO: 1033497 - RNA, 22 nt, Human
agcaggguuuggggauuggcac

SEQ ID NO: 1033498 - RNA, 22 nt, Human
guccucugggagccuugagccu

SEQ ID NO: 1033499 - RNA, 22 nt, Human
ugccucuguggaaauggugguc

SEQ ID NO: 1033500 - RNA, 22 nt, Human
agucaguggcuccgagccuggu

SEQ ID NO: 1033501 - RNA, 22 nt, Human
cuggcagguggauggggacucc

SEQ ID NO: 1033502 - RNA, 22 nt, Human
ggcucuggaaaguguccuugau

SEQ ID NO: 1033503 - RNA, 19 nt, Human
ccugugugggguagagauc

SEQ ID NO: 1033504 - RNA, 22 nt, Human
guacuucccugggaggcaagca

SEQ ID NO: 1033505 - RNA, 22 nt, Human
gaaagaagcuuuagauggcuau

SEQ ID NO: 1033506 - RNA, 22 nt, Human
uguauguaaaguuuguaauaga

SEQ ID NO: 1033507 - RNA, 23 nt, Human
ucaugcccaggcuccagauguca

SEQ ID NO: 1033508 - RNA, 22 nt, Human
gaauguaauagucaguagaaca

SEQ ID NO: 1033509 - RNA, 22 nt, Human
caagccugucucaccagugcua

SEQ ID NO: 1033510 - RNA, 22 nt, Human
gaagagcugugauucaggcuua

SEQ ID NO: 1033511 - RNA, 22 nt, Human
guggcccugucccaggccuccu

SEQ ID NO: 1033512 - RNA, 20 nt, Human
ggcucuggaaucuggugggc

SEQ ID NO: 1033513 - RNA, 22 nt, Human
caaauaucuuuggcaaagagaa

SEQ ID NO: 1033514 - RNA, 22 nt, Human
aaaauguaaagcuugaguguag

SEQ ID NO: 1033515 - RNA, 22 nt, Human
cagcaggguuaagugacucacc

SEQ ID NO: 1033516 - RNA, 22 nt, Human
agcagcagauccaaaaaaugug

SEQ ID NO: 1033517 - RNA, 22 nt, Human
acccugggucauauacagugug

SEQ ID NO: 1033518 - RNA, 22 nt, Human
guccucugcuucaugcccugau

SEQ ID NO: 1033519 - RNA, 21 nt, Human
cugugcuucuuccuaagccag

SEQ ID NO: 1033520 - RNA, 21 nt, Human
uucaagauauuuaaaaggugg

SEQ ID NO: 1033521 - RNA, 22 nt, Human
acaaugcaccagcaucuucacc

SEQ ID NO: 1033522 - RNA, 21 nt, Human
gggugggaggacacagcaggc

SEQ ID NO: 1033523 - RNA, 22 nt, Human
gaaaucugaacaacagcuguca

SEQ ID NO: 1033524 - RNA, 22 nt, Human
ucccacucccaggcaggccucu

SEQ ID NO: 1033525 - RNA, 22 nt, Human
aggcacugaaggaagcuugcgc

SEQ ID NO: 1033526 - RNA, 22 nt, Human
ccagggugggguccaggaacca

SEQ ID NO: 1033527 - RNA, 22 nt, Human
agugaaauaaagcugccuaugg

SEQ ID NO: 1033528 - RNA, 22 nt, Human
acugucugcaaaacucauacuc

SEQ ID NO: 1033529 - RNA, 23 nt, Human
uggaccugaaccagugccucugu

SEQ ID NO: 1033530 - RNA, 22 nt, Human
gcucccaccuccagccugaguu

SEQ ID NO: 1033531 - RNA, 22 nt, Human
auugucuucuggucuuaucuuu

SEQ ID NO: 1033532 - RNA, 22 nt, Human
ugucuccucauacugucauauu

SEQ ID NO: 1033533 - RNA, 22 nt, Human
aagugacacauggcacuucuau

SEQ ID NO: 1033534 - RNA, 19 nt, Human
aggcugcaagguggugggc

SEQ ID NO: 1033535 - RNA, 22 nt, Human
ugcccacauggugccauggcca

SEQ ID NO: 1033536 - RNA, 22 nt, Human
uguccucaaggagcuucagucu

SEQ ID NO: 1033537 - RNA, 22 nt, Human
caggggcaagaaugcugucagc

SEQ ID NO: 1033538 - RNA, 22 nt, Human
gugccagcucuccccacaucug

SEQ ID NO: 1033539 - RNA, 22 nt, Human
cugggugaguugaugaaggaga

SEQ ID NO: 1033540 - RNA, 22 nt, Human
cugcagcugucucuacugggca

SEQ ID NO: 1033541 - RNA, 22 nt, Human
aggggugaaagagggcccucaa

SEQ ID NO: 1033542 - RNA, 22 nt, Human
augaagucugcacaugcaugug

SEQ ID NO: 1033543 - RNA, 22 nt, Human
gccugucugcagggcugucauu

SEQ ID NO: 1033544 - RNA, 22 nt, Human
uaaauucccaacucugcucuuc

SEQ ID NO: 1033545 - RNA, 22 nt, Human
agucccagugagaugagccacg

SEQ ID NO: 1033546 - RNA, 23 nt, Human
uagagcagggaaaucugucagag

SEQ ID NO: 1033547 - RNA, 22 nt, Human
ccucuguccuggggaguggagc

SEQ ID NO: 1033548 - RNA, 22 nt, Human
ccagggugcucuguggcgucgc

SEQ ID NO: 1033549 - RNA, 22 nt, Human
uaauguguugaauauuuguaca

SEQ ID NO: 1033550 - RNA, 22 nt, Human
gagguucacaggcuaucacagu

SEQ ID NO: 1033551 - RNA, 22 nt, Human
gauuucuguaacacuucagaua

SEQ ID NO: 1033552 - RNA, 22 nt, Human
gcacccaggcuugggcagcaac

SEQ ID NO: 1033553 - RNA, 22 nt, Human
aggcuucccaagcagcugcaaa

SEQ ID NO: 1033554 - RNA, 22 nt, Human
ggugugccuggggcuuagcugc

SEQ ID NO: 1033555 - RNA, 22 nt, Human
ccucgaccuccccaggcucagg

SEQ ID NO: 1033556 - RNA, 22 nt, Human
cugcucuggcguacucggcauc

SEQ ID NO: 1033557 - RNA, 22 nt, Human
aggugccagaugcacagcugaa

SEQ ID NO: 1033558 - RNA, 22 nt, Human
ugcacagagagaugagacacgu

SEQ ID NO: 1033559 - RNA, 22 nt, Human
accaggggugucaacagcauuu

SEQ ID NO: 1033560 - RNA, 22 nt, Human
cuucaagagaaugcagggaugu

SEQ ID NO: 1033561 - RNA, 22 nt, Human
cuggccacaacuagcccaggac

SEQ ID NO: 1033562 - RNA, 22 nt, Human
aaugauguauuaguacaacaca

SEQ ID NO: 1033563 - RNA, 22 nt, Human
caaaugugacuuuugggcuucu

SEQ ID NO: 1033564 - RNA, 22 nt, Human
caggugggcguggcgagaaggc

SEQ ID NO: 1033565 - RNA, 22 nt, Human
ucugugcucuucucaguaucac

SEQ ID NO: 1033566 - RNA, 20 nt, Human
cucuccuugccgacuuggca

SEQ ID NO: 1033567 - RNA, 22 nt, Human
caggacagagcccagacugugu

SEQ ID NO: 1033568 - RNA, 20 nt, Human
uuguuucugcuauuuucuaa

SEQ ID NO: 1033569 - RNA, 22 nt, Human
agcaggaggguuuuguagaguc

SEQ ID NO: 1033570 - RNA, 22 nt, Human
caauguguuugcauauuaaaau

SEQ ID NO: 1033571 - RNA, 22 nt, Human
gucccagaggcuuuggccacag

SEQ ID NO: 1033572 - RNA, 22 nt, Human
cauggccugccuccuccuggug

SEQ ID NO: 1033573 - RNA, 22 nt, Human
cuggcugguuacuauuucuggu

SEQ ID NO: 1033574 - RNA, 22 nt, Human
ggagccuugggcgcucucccau

SEQ ID NO: 1033575 - RNA, 22 nt, Human
caguggguccuaaguacaguuc

SEQ ID NO: 1033576 - RNA, 22 nt, Human
ugccuucaaucaggauggucuc

SEQ ID NO: 1033577 - RNA, 20 nt, Human
ugaagcagccuugauucugu

SEQ ID NO: 1033578 - RNA, 22 nt, Human
agggcugggcugcuuguuguca

SEQ ID NO: 1033579 - RNA, 23 nt, Human
uugucugugcuuuuccaguugcu

SEQ ID NO: 1033580 - RNA, 17 nt, Human
cucagaguugcuuuguc

SEQ ID NO: 1033581 - RNA, 22 nt, Human
gcugucagaaggugaaggguaa

SEQ ID NO: 1033582 - RNA, 22 nt, Human
ggcacugaaccaggacacaagc

SEQ ID NO: 1033583 - RNA, 22 nt, Human
ucauugcauuuauucacuggca

SEQ ID NO: 1033584 - RNA, 22 nt, Human
uggccugggccugccggugcaa

SEQ ID NO: 1033585 - RNA, 22 nt, Human
gauuucaagcccccagagauuc

SEQ ID NO: 1033586 - RNA, 20 nt, Human
aggaaaaauggaaacuggag

SEQ ID NO: 1033587 - RNA, 22 nt, Human
cagggguggcugcagcagaggu

SEQ ID NO: 1033588 - RNA, 22 nt, Human
cugggccagauccagccucaca

SEQ ID NO: 1033589 - RNA, 22 nt, Human
ucugaggccccugggcaggaug

SEQ ID NO: 1033590 - RNA, 22 nt, Human
aggccugaaguguggagugggg

SEQ ID NO: 1033591 - RNA, 22 nt, Human
acagagcacauagauuggaguu

SEQ ID NO: 1033592 - RNA, 22 nt, Human
agagccuguuuugugggagaug

SEQ ID NO: 1033593 - RNA, 22 nt, Human
uccucugcuccaggcuggacuu

SEQ ID NO: 1033594 - RNA, 22 nt, Human
ucuccuuugaaaguuaggacug

SEQ ID NO: 1033595 - RNA, 22 nt, Human
ggcacugauuccauucaugaag

SEQ ID NO: 1033596 - RNA, 22 nt, Human
uggagcaggugcucaggguaau

SEQ ID NO: 1033597 - RNA, 19 nt, Human
aggaaagguggccuuagca

SEQ ID NO: 1033598 - RNA, 22 nt, Human
gacugucauucuagugcccaug

SEQ ID NO: 1033599 - RNA, 22 nt, Human
cuacauuuguucuauagcuuuu

SEQ ID NO: 1033600 - RNA, 22 nt, Human
cccuggagugugacgaggcauu

SEQ ID NO: 1033601 - RNA, 22 nt, Human
uccugccucacaguugaaguuu

SEQ ID NO: 1033602 - RNA, 20 nt, Human
uaacagaaguagaagugggu

SEQ ID NO: 1033603 - RNA, 22 nt, Human
cuggagagaccgaaagaggcug

SEQ ID NO: 1033604 - RNA, 21 nt, Human
ugcagcagaguaagcagggga

SEQ ID NO: 1033605 - RNA, 22 nt, Human
aucuggcuuucuuaaugacuua

SEQ ID NO: 1033606 - RNA, 23 nt, Human
aggcuuccuaucuuagagcuggg

SEQ ID NO: 1033607 - RNA, 18 nt, Human
auggucucauacugggag

SEQ ID NO: 1033608 - RNA, 21 nt, Human
gcacagggacagaucaucaca

SEQ ID NO: 1033609 - RNA, 22 nt, Human
ccccaccugugcgucugccgca

SEQ ID NO: 1033610 - RNA, 22 nt, Human
uucuucaauuauuggaaagaaa

SEQ ID NO: 1033611 - RNA, 22 nt, Human
agucaguguucuccggagaggc

SEQ ID NO: 1033612 - RNA, 23 nt, Human
augcucugggcugugggaccugc

SEQ ID NO: 1033613 - RNA, 22 nt, Human
cuucacauguuggaguccuuug

SEQ ID NO: 1033614 - RNA, 22 nt, Human
gauuucaaccuaacaguaugac

SEQ ID NO: 1033615 - RNA, 22 nt, Human
augacagaaggccucccugaca

SEQ ID NO: 1033616 - RNA, 22 nt, Human
aaaugcacagguuuuaaauccu

SEQ ID NO: 1033617 - RNA, 23 nt, Human
auucuucauuaucuucuagaaaa

SEQ ID NO: 1033618 - RNA, 22 nt, Human
augcacgccccacacuggugug

SEQ ID NO: 1033619 - RNA, 22 nt, Human
ucuuugcagaauuuaacuuugc

SEQ ID NO: 1033620 - RNA, 22 nt, Human
ugcugaggucaccuugcugcua

SEQ ID NO: 1033621 - RNA, 22 nt, Human
ucagcagcagcucagcauguuu

SEQ ID NO: 1033622 - RNA, 22 nt, Human
gcugagugauugauauuuuagu

SEQ ID NO: 1033623 - RNA, 22 nt, Human
ccucaggggcuuuucguuguug

SEQ ID NO: 1033624 - RNA, 22 nt, Human
aguuauauuccauagauucaga

SEQ ID NO: 1033625 - RNA, 22 nt, Human
agcagccaagguaaccugugcu

SEQ ID NO: 1033626 - RNA, 22 nt, Human
cagaggaggccaccgcauaggc

SEQ ID NO: 1033627 - RNA, 18 nt, Human
uggcucugcagccagaug

SEQ ID NO: 1033628 - RNA, 22 nt, Human
cugggaggcccacguugggaag

SEQ ID NO: 1033629 - RNA, 22 nt, Human
agagaagagcaaugauaaauuu

SEQ ID NO: 1033630 - RNA, 22 nt, Human
uuguuuuggagaugagcuaaaa

SEQ ID NO: 1033631 - RNA, 22 nt, Human
ucccaggaucugagggcagaga

SEQ ID NO: 1033632 - RNA, 23 nt, Human
gggugggccaaauuagguagccu

SEQ ID NO: 1033633 - RNA, 22 nt, Human
uccucagacacccugcuggcuu

SEQ ID NO: 1033634 - RNA, 22 nt, Human
ugcaggagcugugcggugaggg

SEQ ID NO: 1033635 - RNA, 22 nt, Human
ugauuuccaguugcugggugcu

SEQ ID NO: 1033636 - RNA, 22 nt, Human
ugccaggccucaggagucucca

SEQ ID NO: 1033637 - RNA, 22 nt, Human
gggcugcuuuuaagggucucag

SEQ ID NO: 1033638 - RNA, 22 nt, Human
gucccagaggacagggucacau

SEQ ID NO: 1033639 - RNA, 22 nt, Human
uucauguauuuaucauguaaau

SEQ ID NO: 1033640 - RNA, 22 nt, Human
gccucccuguucuuccacaaua

SEQ ID NO: 1033641 - RNA, 22 nt, Human
cccugcagaccaaugccauaga

SEQ ID NO: 1033642 - RNA, 22 nt, Human
uggcagagaacacggcugaucu

SEQ ID NO: 1033643 - RNA, 22 nt, Human
guuugcauaucugugaaaugga

SEQ ID NO: 1033644 - RNA, 22 nt, Human
uggccuguggcuuaaggucugu

SEQ ID NO: 1033645 - RNA, 22 nt, Human
uggccuggaaccuggcagggac

SEQ ID NO: 1033646 - RNA, 22 nt, Human
cuggcucacaggugagaugcau

SEQ ID NO: 1033647 - RNA, 22 nt, Human
gcucccagacugaccagaggug

SEQ ID NO: 1033648 - RNA, 22 nt, Human
cauacauugcucauucaguauc

SEQ ID NO: 1033649 - RNA, 22 nt, Human
cagcccugcacgcugccuccgc

SEQ ID NO: 1033650 - RNA, 22 nt, Human
cgggcagauugggaagguucau

SEQ ID NO: 1033651 - RNA, 22 nt, Human
ugauuucaaguagugacaugcu

SEQ ID NO: 1033652 - RNA, 22 nt, Human
ggcucugcugguaagaugccuc

SEQ ID NO: 1033653 - RNA, 22 nt, Human
aggugagguuugggagguguca

SEQ ID NO: 1033654 - RNA, 22 nt, Human
ugucagugguagacccagaggu

SEQ ID NO: 1033655 - RNA, 22 nt, Human
uaaugcaguacugauauaaaca

SEQ ID NO: 1033656 - RNA, 22 nt, Human
ugggaaauguguuucuggacca

SEQ ID NO: 1033657 - RNA, 22 nt, Human
gcugucugggaugucacugcug

SEQ ID NO: 1033658 - RNA, 22 nt, Human
ggcugcuguacugaugucaguu

SEQ ID NO: 1033659 - RNA, 22 nt, Human
auugaaagaguuuucugcugca

SEQ ID NO: 1033660 - RNA, 22 nt, Human
gaacagaagaggcuggugccac

SEQ ID NO: 1033661 - RNA, 22 nt, Human
agucuccuuggccucaaugccu

SEQ ID NO: 1033662 - RNA, 23 nt, Human
ugcucugggaggcccuggagagc

SEQ ID NO: 1033663 - RNA, 22 nt, Human
gggcuucuagaccagcagugag

SEQ ID NO: 1033664 - RNA, 22 nt, Human
gagcugccagacaugggaauga

SEQ ID NO: 1033665 - RNA, 22 nt, Human
agaugguguuuccccaggugga

SEQ ID NO: 1033666 - RNA, 23 nt, Human
auggagcugguacuagcuaccuc

SEQ ID NO: 1033667 - RNA, 22 nt, Human
aggcccaguuauccuacuuguu

SEQ ID NO: 1033668 - RNA, 22 nt, Human
ugucacagggauaccauggggc

SEQ ID NO: 1033669 - RNA, 22 nt, Human
uacaaaaguaauuacgguuuuu

SEQ ID NO: 1033670 - RNA, 22 nt, Human
gggccagagcuuggcagcuggg

SEQ ID NO: 1033671 - RNA, 19 nt, Human
cugguccugacugaggggu

SEQ ID NO: 1033672 - RNA, 22 nt, Human
gaagcagcuggugagauggagc

SEQ ID NO: 1033673 - RNA, 22 nt, Human
gcucaggacuggaggagcgggg

SEQ ID NO: 1033674 - RNA, 16 nt, Human
gggcugggggauucug

SEQ ID NO: 1033675 - RNA, 22 nt, Human
cacagggcuaaaugaaggguug

SEQ ID NO: 1033676 - RNA, 22 nt, Human
cugggcagagcuaacaccugag

SEQ ID NO: 1033677 - RNA, 22 nt, Human
cuggagccauguauagccuaug

SEQ ID NO: 1033678 - RNA, 22 nt, Human
uacauuaacuuacguccacaug

SEQ ID NO: 1033679 - RNA, 22 nt, Human
ccagcugcagguguuccagaug

SEQ ID NO: 1033680 - RNA, 23 nt, Human
ggccuguguuuugucugaaguac

SEQ ID NO: 1033681 - RNA, 22 nt, Human
ccagcucugccaagcgucagcu

SEQ ID NO: 1033682 - RNA, 22 nt, Human
ucgagucauguucucccauuaa

SEQ ID NO: 1033683 - RNA, 22 nt, Human
cagcaugguggagcugcucuuu

SEQ ID NO: 1033684 - RNA, 22 nt, Human
gggaaccagccgcuuccgccuc

SEQ ID NO: 1033685 - RNA, 21 nt, Human
ugagccaggcugacggcugug

SEQ ID NO: 1033686 - RNA, 22 nt, Human
uggcagcuugaaugcagucuuu

SEQ ID NO: 1033687 - RNA, 22 nt, Human
aaaauaucagcaaagggugaca

SEQ ID NO: 1033688 - RNA, 22 nt, Human
gcagggugccgacuucagggau

SEQ ID NO: 1033689 - RNA, 22 nt, Human
ugaagcaguuacuggguguuaa

SEQ ID NO: 1033690 - RNA, 22 nt, Human
uuccaaagucauguugcugaua

SEQ ID NO: 1033691 - RNA, 22 nt, Human
ccucagaggugaacaucagugc

SEQ ID NO: 1033692 - RNA, 22 nt, Human
cagggcuggcucaugaaaaguu

SEQ ID NO: 1033693 - RNA, 22 nt, Human
agcagcuuacauguggccuauc

SEQ ID NO: 1033694 - RNA, 22 nt, Human
aguugaaauuagaguccuggcu

SEQ ID NO: 1033695 - RNA, 22 nt, Human
uggagugaaguaaagaggacaa

SEQ ID NO: 1033696 - RNA, 22 nt, Human
gcagagccccucaagccagccu

SEQ ID NO: 1033697 - RNA, 22 nt, Human
cagagccccucagcucucuccc

SEQ ID NO: 1033698 - RNA, 22 nt, Human
gagaaccucuccacaagucugg

SEQ ID NO: 1033699 - RNA, 22 nt, Human
ucaucacauaugucaugauuug

SEQ ID NO: 1033700 - RNA, 22 nt, Human
guuugcauuucuugaacuauau

SEQ ID NO: 1033701 - RNA, 22 nt, Human
uguagcucuccagccagcaagg

SEQ ID NO: 1033702 - RNA, 22 nt, Human
cacauuugaaggaauuagcauu

SEQ ID NO: 1033703 - RNA, 22 nt, Human
gauuucaauccagcuuucuucu

SEQ ID NO: 1033704 - RNA, 22 nt, Human
auuuauuaugggauuuggcaca

SEQ ID NO: 1033705 - RNA, 17 nt, Human
agcagcugaagcagcca

SEQ ID NO: 1033706 - RNA, 22 nt, Human
gaugcacugcaguauauacugu

SEQ ID NO: 1033707 - RNA, 22 nt, Human
ggcgaggccgggacaggcugga

SEQ ID NO: 1033708 - RNA, 22 nt, Human
ccaggccuggccaggggaugcc

SEQ ID NO: 1033709 - RNA, 21 nt, Human
ccagcuccaggaccuuggauc

SEQ ID NO: 1033710 - RNA, 22 nt, Human
aggaggccgggauucuggagau

SEQ ID NO: 1033711 - RNA, 22 nt, Human
uaguaaaaguuuaguugaaagu

SEQ ID NO: 1033712 - RNA, 22 nt, Human
guugggaagcagauggaugagc

SEQ ID NO: 1033713 - RNA, 22 nt, Human
gccagcucccaagugagccccu

SEQ ID NO: 1033714 - RNA, 22 nt, Human
cuuucaaugugccugccuuggg

SEQ ID NO: 1033715 - RNA, 22 nt, Human
ccagaccacccuggccaugcac

SEQ ID NO: 1033716 - RNA, 22 nt, Human
aggagcugucagagugccagag

SEQ ID NO: 1033717 - RNA, 22 nt, Human
aagacauuuauuugaaucaauu

SEQ ID NO: 1033718 - RNA, 22 nt, Human
accucugcuucccggguucaag

SEQ ID NO: 1033719 - RNA, 22 nt, Human
gcucagagcaucccagugaaug

SEQ ID NO: 1033720 - RNA, 20 nt, Human
ugggcagcacugcuggcugg

SEQ ID NO: 1033721 - RNA, 22 nt, Human
cccaggagguagagguugcagu

SEQ ID NO: 1033722 - RNA, 22 nt, Human
gaaaggucuuccggucuuccag

SEQ ID NO: 1033723 - RNA, 21 nt, Human
uccauaagagaccaucuccua

SEQ ID NO: 1033724 - RNA, 22 nt, Human
ugcuccuuccucauccugugca

SEQ ID NO: 1033725 - RNA, 19 nt, Human
gagcugccuuuugaagacc

SEQ ID NO: 1033726 - RNA, 22 nt, Human
ucuuaaaaguaugccaauugga

SEQ ID NO: 1033727 - RNA, 22 nt, Human
cacccagccuucacacaggagu

SEQ ID NO: 1033728 - RNA, 22 nt, Human
acaggggaauuuacugucauua

SEQ ID NO: 1033729 - RNA, 22 nt, Human
uuauuuaauuuucucacucaga

SEQ ID NO: 1033730 - RNA, 22 nt, Human
uaaagaacacagggaauagcac

SEQ ID NO: 1033731 - RNA, 22 nt, Human
cugagcuuccaguuccuccagg

SEQ ID NO: 1033732 - RNA, 22 nt, Human
gcugugugacugagagccuggc

SEQ ID NO: 1033733 - RNA, 22 nt, Human
acagaacuuccugcuggagugg

SEQ ID NO: 1033734 - RNA, 22 nt, Human
cagacuggccacaucugcacug

SEQ ID NO: 1033735 - RNA, 18 nt, Human
cccagcuccacuucccuc

SEQ ID NO: 1033736 - RNA, 22 nt, Human
caggugggcuugggagaacacu

SEQ ID NO: 1033737 - RNA, 22 nt, Human
uuggcagggccaggcucucucu

SEQ ID NO: 1033738 - RNA, 22 nt, Human
uguacaaugccgagacuaacuc

SEQ ID NO: 1033739 - RNA, 22 nt, Human
ccuggcuguggcggugcucuca

SEQ ID NO: 1033740 - RNA, 22 nt, Human
cugcagaggccucgccuccucu

SEQ ID NO: 1033741 - RNA, 23 nt, Human
gagugcagaauagacaugcagug

SEQ ID NO: 1033742 - RNA, 22 nt, Human
auggccuggccagagcucugcu

SEQ ID NO: 1033743 - RNA, 22 nt, Human
uaaguucauaagcuuauucuua

SEQ ID NO: 1033744 - RNA, 22 nt, Human
uggucaguugcaucagagaagu

SEQ ID NO: 1033745 - RNA, 22 nt, Human
cccuggcaugcaugucccuggc

SEQ ID NO: 1033746 - RNA, 22 nt, Human
gggaggucagggugccugcugg

SEQ ID NO: 1033747 - RNA, 20 nt, Human
aggaagccaaaggcugucuu

SEQ ID NO: 1033748 - RNA, 22 nt, Human
ugaugggaggugcugcaggacc

SEQ ID NO: 1033749 - RNA, 22 nt, Human
ggggcacacuuuugguagauau

SEQ ID NO: 1033750 - RNA, 22 nt, Human
cuggcaggcagacuucugcaag

SEQ ID NO: 1033751 - RNA, 22 nt, Human
aggcuccuuguucaucauccau

SEQ ID NO: 1033752 - RNA, 22 nt, Human
aaaaaugucauuauggaacuga

SEQ ID NO: 1033753 - RNA, 22 nt, Human
cagggccagccgcagcauccac

SEQ ID NO: 1033754 - RNA, 20 nt, Human
auuccauaguuggcacuuuu

SEQ ID NO: 1033755 - RNA, 22 nt, Human
ugcagcucauugcuggggucug

SEQ ID NO: 1033756 - RNA, 22 nt, Human
ccagggcaaaugagaucauagc

SEQ ID NO: 1033757 - RNA, 22 nt, Human
uagaaaagaauuuuauuugaua

SEQ ID NO: 1033758 - RNA, 22 nt, Human
cugucaggggcggguggagcgg

SEQ ID NO: 1033759 - RNA, 22 nt, Human
cagcccuguccagcagagggug

SEQ ID NO: 1033760 - RNA, 22 nt, Human
agaaagaacgcacuugugcugc

SEQ ID NO: 1033761 - RNA, 22 nt, Human
acuuugcagagccagaagagaa

SEQ ID NO: 1033762 - RNA, 22 nt, Human
gcugccuggagcucagccugcc

SEQ ID NO: 1033763 - RNA, 22 nt, Human
ugcuugggaauguggagucaga

SEQ ID NO: 1033764 - RNA, 22 nt, Human
auggauaagucaaagaguaucc

SEQ ID NO: 1033765 - RNA, 22 nt, Human
cugggccuagaggaagcugaca

SEQ ID NO: 1033766 - RNA, 17 nt, Human
ccagagcuacugagacu

SEQ ID NO: 1033767 - RNA, 22 nt, Human
aagggcuggaucucucugagca

SEQ ID NO: 1033768 - RNA, 22 nt, Human
acauuucucauaggagagccac

SEQ ID NO: 1033769 - RNA, 22 nt, Human
ugagaggccccagcucuuggcc

SEQ ID NO: 1033770 - RNA, 22 nt, Human
gccagggcaggggagcaucugc

SEQ ID NO: 1033771 - RNA, 22 nt, Human
aagcuccccgaaacccaccucu

SEQ ID NO: 1033772 - RNA, 22 nt, Human
ucugguaaccuuuaucccuccu

SEQ ID NO: 1033773 - RNA, 22 nt, Human
ccacccagccagaugcaggaag

SEQ ID NO: 1033774 - RNA, 22 nt, Human
uggcucaguagcagugugguca

SEQ ID NO: 1033775 - RNA, 22 nt, Human
aagcagcuuaaauuagagccug

SEQ ID NO: 1033776 - RNA, 22 nt, Human
agauuucaauggauauugcaag

SEQ ID NO: 1033777 - RNA, 22 nt, Human
cugagcugggacucaguagcaa

SEQ ID NO: 1033778 - RNA, 22 nt, Human
gccugggaagacuaagugggag

SEQ ID NO: 1033779 - RNA, 22 nt, Human
gucagugucuuaacagagauua

SEQ ID NO: 1033780 - RNA, 22 nt, Human
uggcacuggaaucguagccuug

SEQ ID NO: 1033781 - RNA, 22 nt, Human
uagugauuaaaggcagaauguu

SEQ ID NO: 1033782 - RNA, 22 nt, Human
acaagagauuaucuacagauga

SEQ ID NO: 1033783 - RNA, 22 nt, Human
ccugaggacacacgcugcagga

SEQ ID NO: 1033784 - RNA, 22 nt, Human
ggucccaggcugcgggcuggug

SEQ ID NO: 1033785 - RNA, 22 nt, Human
gcucccacgcaauucuuuucag

SEQ ID NO: 1033786 - RNA, 21 nt, Human
aaaguucaugcuuuaauauuc

SEQ ID NO: 1033787 - RNA, 22 nt, Human
ggcuccuggggaggugagcuug

SEQ ID NO: 1033788 - RNA, 22 nt, Human
cugagcugguggaagcaugcag

SEQ ID NO: 1033789 - RNA, 22 nt, Human
auguagcaugaggcacugugcc

SEQ ID NO: 1033790 - RNA, 22 nt, Human
cagcugcccugccuugcccuua

SEQ ID NO: 1033791 - RNA, 23 nt, Human
aaaguguagccagguuaagaacc

SEQ ID NO: 1033792 - RNA, 22 nt, Human
cagccagccucucaaccaugca

SEQ ID NO: 1033793 - RNA, 22 nt, Human
ggccucugcaacuggcuguggc

SEQ ID NO: 1033794 - RNA, 22 nt, Human
aguuucuaccgguacauucagg

SEQ ID NO: 1033795 - RNA, 22 nt, Human
cagggcagcuuccuuuguuagg

SEQ ID NO: 1033796 - RNA, 22 nt, Human
acugaaggucucagcaaggaug

SEQ ID NO: 1033797 - RNA, 22 nt, Human
uggugcugauaauggcaggauu

SEQ ID NO: 1033798 - RNA, 22 nt, Human
guuugcauguauuaagucaaua

SEQ ID NO: 1033799 - RNA, 22 nt, Human
aagauuucucuccuggaaagca

SEQ ID NO: 1033800 - RNA, 21 nt, Human
uucagcaguccucuagagaua

SEQ ID NO: 1033801 - RNA, 22 nt, Human
uccuguaguugcuaaguuuguu

SEQ ID NO: 1033802 - RNA, 22 nt, Human
caggcuugcugcuagagcacuu

SEQ ID NO: 1033803 - RNA, 22 nt, Human
aauguacaaggguuccaguuuu

SEQ ID NO: 1033804 - RNA, 22 nt, Human
ccuggggcucaagauggcgccg

SEQ ID NO: 1033805 - RNA, 22 nt, Human
cugucuccuccacugcauggga

SEQ ID NO: 1033806 - RNA, 22 nt, Human
ugaaauauuuagagaguaaguu

SEQ ID NO: 1033807 - RNA, 22 nt, Human
gguggggcccuggcacugguau

SEQ ID NO: 1033808 - RNA, 22 nt, Human
ugagcccagagaucugagcuau

SEQ ID NO: 1033809 - RNA, 22 nt, Human
ugggcagaguugugaugaacug

SEQ ID NO: 1033810 - RNA, 22 nt, Human
ggagcagacauaaccuuacaga

SEQ ID NO: 1033811 - RNA, 22 nt, Human
aggccuggcaugagaccugaga

SEQ ID NO: 1033812 - RNA, 22 nt, Human
gcucuguguugucagaggcacc

SEQ ID NO: 1033813 - RNA, 22 nt, Human
uucaguuucagucuugcaaaaa

SEQ ID NO: 1033814 - RNA, 22 nt, Human
ucccagcagggccgaccagccu

SEQ ID NO: 1033815 - RNA, 22 nt, Human
uuccucucgcucuccggggccc

SEQ ID NO: 1033816 - RNA, 22 nt, Human
cccugccuacaggguuuucuuu

SEQ ID NO: 1033817 - RNA, 22 nt, Human
ucccaggauguuggcggcaggu

SEQ ID NO: 1033818 - RNA, 22 nt, Human
gcaccuggcugcccagguggag

SEQ ID NO: 1033819 - RNA, 22 nt, Human
ugcugguggagaaaguggaggu

SEQ ID NO: 1033820 - RNA, 22 nt, Human
aaggcugagggcuguaccuggc

SEQ ID NO: 1033821 - RNA, 22 nt, Human
cccugccucugaagcugcucag

SEQ ID NO: 1033822 - RNA, 22 nt, Human
agaaaucucaguaucucaggga

SEQ ID NO: 1033823 - RNA, 22 nt, Human
agcugguggauuaugcuguaca

SEQ ID NO: 1033824 - RNA, 22 nt, Human
acaaacuaccuacagauguuca

SEQ ID NO: 1033825 - RNA, 22 nt, Human
agggucuguggaugcaucuggg

SEQ ID NO: 1033826 - RNA, 22 nt, Human
agcugcagauucuaucuagaag

SEQ ID NO: 1033827 - RNA, 22 nt, Human
uagagcuauuuagagcauuuua

SEQ ID NO: 1033828 - RNA, 22 nt, Human
ggccagaaaguuaagcuguggc

SEQ ID NO: 1033829 - RNA, 22 nt, Human
cuacauggagaagaaaauucuu

SEQ ID NO: 1033830 - RNA, 19 nt, Human
aucuuacagagcagaguac

SEQ ID NO: 1033831 - RNA, 22 nt, Human
gcugccacuuggucaugucaug

SEQ ID NO: 1033832 - RNA, 22 nt, Human
uuagaaaaaggcuguggucuua

SEQ ID NO: 1033833 - RNA, 22 nt, Human
acagagcugggaucugaaccca

SEQ ID NO: 1033834 - RNA, 22 nt, Human
uggcucagauuuuuguaggcuu

SEQ ID NO: 1033835 - RNA, 22 nt, Human
gccuaggaguacagaaugguuu

SEQ ID NO: 1033836 - RNA, 22 nt, Human
agcccuucaaccugccuacucc

SEQ ID NO: 1033837 - RNA, 22 nt, Human
cagagcagugaggaguugugua

SEQ ID NO: 1033838 - RNA, 23 nt, Human
agaaaagcuuggacacauggccu

SEQ ID NO: 1033839 - RNA, 22 nt, Human
acugaaagauaaaucaguuagc

SEQ ID NO: 1033840 - RNA, 22 nt, Human
cuagagaggcagauguccugug

SEQ ID NO: 1033841 - RNA, 22 nt, Human
cagugggaagggcagaggcuuu

SEQ ID NO: 1033842 - RNA, 22 nt, Human
cucaggagacaguguccacaug

SEQ ID NO: 1033843 - RNA, 22 nt, Human
cuccuggacauggagcggagga

SEQ ID NO: 1033844 - RNA, 20 nt, Human
gugugaagcccucaggagga

SEQ ID NO: 1033845 - RNA, 19 nt, Human
uucacauuggaagaaguag

SEQ ID NO: 1033846 - RNA, 22 nt, Human
uguaucaaaccaaauuaauucu

SEQ ID NO: 1033847 - RNA, 17 nt, Human
agaugcuggccacaugu

SEQ ID NO: 1033848 - RNA, 18 nt, Human
aggcuucuuggcucaguc

SEQ ID NO: 1033849 - RNA, 22 nt, Human
cuggcagcugugugaagaacug

SEQ ID NO: 1033850 - RNA, 22 nt, Human
ggugacuggagggacccaggcc

SEQ ID NO: 1033851 - RNA, 22 nt, Human
aaauguauccuacuuccugagu

SEQ ID NO: 1033852 - RNA, 22 nt, Human
cuggggcuggugaggcaggcuc

SEQ ID NO: 1033853 - RNA, 22 nt, Human
aggcuccaugcaaaggcuguuu

SEQ ID NO: 1033854 - RNA, 22 nt, Human
aguguugucaaacggcucagca

SEQ ID NO: 1033855 - RNA, 22 nt, Human
uagcaguggaaucuuuugucca

SEQ ID NO: 1033856 - RNA, 22 nt, Human
cucuuaguuuaucuuugacaaa

SEQ ID NO: 1033857 - RNA, 22 nt, Human
ucgugucagaucagagguuccu

SEQ ID NO: 1033858 - RNA, 22 nt, Human
cauuaucugccauugacaccau

SEQ ID NO: 1033859 - RNA, 22 nt, Human
augcuguagaucuuagccucua

SEQ ID NO: 1033860 - RNA, 22 nt, Human
gggcugcugcugccagcgacac

SEQ ID NO: 1033861 - RNA, 22 nt, Human
gagccaggcccguacuugcugu

SEQ ID NO: 1033862 - RNA, 22 nt, Human
uaaagucaucuuuacaucuuug

SEQ ID NO: 1033863 - RNA, 18 nt, Human
ucacagugcucuugccua

SEQ ID NO: 1033864 - RNA, 22 nt, Human
gucccaggcuuauguggagcuu

SEQ ID NO: 1033865 - RNA, 22 nt, Human
gccuggcuccuaaggacuggcu

SEQ ID NO: 1033866 - RNA, 22 nt, Human
ucccagagcagaugugcuaaag

SEQ ID NO: 1033867 - RNA, 23 nt, Human
cacugcagcguggucuggcagga

SEQ ID NO: 1033868 - RNA, 22 nt, Human
uuuccucuuugugacacagcug

SEQ ID NO: 1033869 - RNA, 17 nt, Human
aggugcagaggcagagc

SEQ ID NO: 1033870 - RNA, 22 nt, Human
caguguacuuggaauguaacag

SEQ ID NO: 1033871 - RNA, 22 nt, Human
cuggcucuaucuccaaggcugg

SEQ ID NO: 1033872 - RNA, 22 nt, Human
uucauuccugagcccauauuua

SEQ ID NO: 1033873 - RNA, 22 nt, Human
auggcucauuuaucuugcagcc

SEQ ID NO: 1033874 - RNA, 22 nt, Human
ugacuucaaaggcucuacuccu

SEQ ID NO: 1033875 - RNA, 18 nt, Human
uggcucuggacuugcucc

SEQ ID NO: 1033876 - RNA, 22 nt, Human
cacugaaggaaggacuacugca

SEQ ID NO: 1033877 - RNA, 22 nt, Human
uggagccuguguuucugcccag

SEQ ID NO: 1033878 - RNA, 22 nt, Human
uguccacaucacucacuuguca

SEQ ID NO: 1033879 - RNA, 22 nt, Human
cacuguaucuuuuccaaagucu

SEQ ID NO: 1033880 - RNA, 22 nt, Human
uuuuuaagcuccuuugauguca

SEQ ID NO: 1033881 - RNA, 22 nt, Human
ccagguggacggcgaguacagg

SEQ ID NO: 1033882 - RNA, 22 nt, Human
cucaaggaaagucuggagaaga

SEQ ID NO: 1033883 - RNA, 19 nt, Human
cacagggcaggucucaugu

SEQ ID NO: 1033884 - RNA, 22 nt, Human
ugaagcagaggggucuugagcu

SEQ ID NO: 1033885 - RNA, 22 nt, Human
aaugcacaugucuuggccucac

SEQ ID NO: 1033886 - RNA, 16 nt, Human
ugggcagaugagaaga

SEQ ID NO: 1033887 - RNA, 23 nt, Human
cccuggagcuagucugagcagag

SEQ ID NO: 1033888 - RNA, 22 nt, Human
uggaagcagugauucuugucug

SEQ ID NO: 1033889 - RNA, 22 nt, Human
ucuguaguagguuguaguucuu

SEQ ID NO: 1033890 - RNA, 22 nt, Human
uucucuucuguucagugcccaa

SEQ ID NO: 1033891 - RNA, 22 nt, Human
caggagcagaggguggucagca

SEQ ID NO: 1033892 - RNA, 22 nt, Human
cagccaggagccucugcaacua

SEQ ID NO: 1033893 - RNA, 22 nt, Human
guccucagggaauguggcgggu

SEQ ID NO: 1033894 - RNA, 22 nt, Human
cuggcucaugugaugagggcaa

SEQ ID NO: 1033895 - RNA, 22 nt, Human
uuguaacacuuuucuauuaaua

SEQ ID NO: 1033896 - RNA, 18 nt, Human
caugggugacagguggau

SEQ ID NO: 1033897 - RNA, 22 nt, Human
gggcugccaagccugccugccu

SEQ ID NO: 1033898 - RNA, 22 nt, Human
aagaacagguucuagaaccauu

SEQ ID NO: 1033899 - RNA, 22 nt, Human
cucucugagugagggacaagcu

SEQ ID NO: 1033900 - RNA, 18 nt, Human
gagacacaagggccugga

SEQ ID NO: 1033901 - RNA, 22 nt, Human
auuguauuuccagcuugaaugu

SEQ ID NO: 1033902 - RNA, 22 nt, Human
gauacaaauucaugucugaauu

SEQ ID NO: 1033903 - RNA, 22 nt, Human
aggcaggggagcuggaagggua

SEQ ID NO: 1033904 - RNA, 22 nt, Human
caagggcuucaaguggccaaga

SEQ ID NO: 1033905 - RNA, 22 nt, Human
gcucugcuggagggaaagagaa

SEQ ID NO: 1033906 - RNA, 22 nt, Human
cuguucaugcugauucuguaug

SEQ ID NO: 1033907 - RNA, 22 nt, Human
caggcugcggucggcucugguc

SEQ ID NO: 1033908 - RNA, 22 nt, Human
cuuguccuuuacuugagacuca

SEQ ID NO: 1033909 - RNA, 22 nt, Human
uccucugccaaagggaguugcc

SEQ ID NO: 1033910 - RNA, 22 nt, Human
ccugccugucccucaguccaca

SEQ ID NO: 1033911 - RNA, 22 nt, Human
ugggccacuugaaaguggaugu

SEQ ID NO: 1033912 - RNA, 22 nt, Human
uggcaggagguuuucuccagga

SEQ ID NO: 1033913 - RNA, 22 nt, Human
gagccugagugcugccuccccu

SEQ ID NO: 1033914 - RNA, 22 nt, Human
accaaggagaaggugcaagcuu

SEQ ID NO: 1033915 - RNA, 22 nt, Human
caugagcugcugggagccuguc

SEQ ID NO: 1033916 - RNA, 22 nt, Human
cucuugggagugcucuggagaa

SEQ ID NO: 1033917 - RNA, 22 nt, Human
aagggaggaggauuuauuguac

SEQ ID NO: 1033918 - RNA, 22 nt, Human
ccaggccuccugugaguggacc

SEQ ID NO: 1033919 - RNA, 22 nt, Human
aggugcagcaugaguccaacgg

SEQ ID NO: 1033920 - RNA, 20 nt, Human
ggaccagguggggcgguggc

SEQ ID NO: 1033921 - RNA, 19 nt, Human
ggcugucucggcccagcca

SEQ ID NO: 1033922 - RNA, 22 nt, Human
ggagccaguauuuaguggucuu

SEQ ID NO: 1033923 - RNA, 22 nt, Human
gacccagcuuaagucacauguu

SEQ ID NO: 1033924 - RNA, 22 nt, Human
caaaguuuggcucucaugacau

SEQ ID NO: 1033925 - RNA, 22 nt, Human
cugggcaggagggcucuaugga

SEQ ID NO: 1033926 - RNA, 22 nt, Human
aagcacuuagaagagugccugc

SEQ ID NO: 1033927 - RNA, 23 nt, Human
uugaaagguagcuggcagcuaga

SEQ ID NO: 1033928 - RNA, 22 nt, Human
uaguccauuuucacacugcuga

SEQ ID NO: 1033929 - RNA, 22 nt, Human
cccuggagggacagcugcucua

SEQ ID NO: 1033930 - RNA, 22 nt, Human
aaguucaaucagaugaaaaagc

SEQ ID NO: 1033931 - RNA, 22 nt, Human
cagucccagacauaguaaggga

SEQ ID NO: 1033932 - RNA, 22 nt, Human
aaggcgacacaggcagcaggcc

SEQ ID NO: 1033933 - RNA, 18 nt, Human
uccucucuuuccccaggg

SEQ ID NO: 1033934 - RNA, 23 nt, Human
gcugucaguuguuuuugucucua

SEQ ID NO: 1033935 - RNA, 22 nt, Human
gcugcccuaauaucacauguua

SEQ ID NO: 1033936 - RNA, 22 nt, Human
augggcuguccuaguccagccc

SEQ ID NO: 1033937 - RNA, 22 nt, Human
aagggcagcugacagaugcuua

SEQ ID NO: 1033938 - RNA, 22 nt, Human
acacagccaggguaguaaggcu

SEQ ID NO: 1033939 - RNA, 22 nt, Human
gaggugggaugugugugcuacu

SEQ ID NO: 1033940 - RNA, 22 nt, Human
uuuuaagaugcuaguauuucag

SEQ ID NO: 1033941 - RNA, 22 nt, Human
ggccucaguuucuucaacugua

SEQ ID NO: 1033942 - RNA, 22 nt, Human
gagggcugauaacaggaauaca

SEQ ID NO: 1033943 - RNA, 22 nt, Human
caggguagacaguaggugucug

SEQ ID NO: 1033944 - RNA, 23 nt, Human
ggacagggcccugcccuauggcc

SEQ ID NO: 1033945 - RNA, 22 nt, Human
ucucaagagggaggcaaucaug

SEQ ID NO: 1033946 - RNA, 22 nt, Human
gggcuggcaucgguugcugaga

SEQ ID NO: 1033947 - RNA, 22 nt, Human
augaugugugcugaucaagcuu

SEQ ID NO: 1033948 - RNA, 22 nt, Human
uuuccucuucgauuaaguuugg

SEQ ID NO: 1033949 - RNA, 22 nt, Human
cucugggcaaagaugccucauc

SEQ ID NO: 1033950 - RNA, 22 nt, Human
cacaguggauugggugaugccc

SEQ ID NO: 1033951 - RNA, 22 nt, Human
ucugaggcccugcaggcagugu

SEQ ID NO: 1033952 - RNA, 22 nt, Human
gcucaggaaaacagucuaguaa

SEQ ID NO: 1033953 - RNA, 21 nt, Human
uggcccuggccacggcugcca

SEQ ID NO: 1033954 - RNA, 22 nt, Human
uuucucugaggcuggccucccu

SEQ ID NO: 1033955 - RNA, 22 nt, Human
accugccuauggagccacaugg

SEQ ID NO: 1033956 - RNA, 22 nt, Human
agaauccugaugaaaaggagag

SEQ ID NO: 1033957 - RNA, 22 nt, Human
cagagcugggcauggugaaagg

SEQ ID NO: 1033958 - RNA, 22 nt, Human
acagccugcugccugcuucuug

SEQ ID NO: 1033959 - RNA, 22 nt, Human
gagcccaggcagagguugcagu

SEQ ID NO: 1033960 - RNA, 22 nt, Human
gccugagccgccugagcggcgg

SEQ ID NO: 1033961 - RNA, 21 nt, Human
gcucucugcaugguggcucag

SEQ ID NO: 1033962 - RNA, 22 nt, Human
accagguggccccagcgugguu

SEQ ID NO: 1033963 - RNA, 19 nt, Human
ccagucccauacaggagau

SEQ ID NO: 1033964 - RNA, 21 nt, Human
ugguuugcggccaaaguuaaa

SEQ ID NO: 1033965 - RNA, 22 nt, Human
cugccagcacugccuccugagg

SEQ ID NO: 1033966 - RNA, 22 nt, Human
ucaggugggaccugcuaggaca

SEQ ID NO: 1033967 - RNA, 22 nt, Human
gagcaggcauucuaguggcuga

SEQ ID NO: 1033968 - RNA, 22 nt, Human
uuggccuucccuaccugggcca

SEQ ID NO: 1033969 - RNA, 22 nt, Human
uggcucuguuuguuaacuagac

SEQ ID NO: 1033970 - RNA, 22 nt, Human
agugacugacaccuguaauccc

SEQ ID NO: 1033971 - RNA, 22 nt, Human
guguccagggccguguugucuu

SEQ ID NO: 1033972 - RNA, 22 nt, Human
gucccugcccuccugggacuca

SEQ ID NO: 1033973 - RNA, 22 nt, Human
ugaauggucacugagcaucugu

SEQ ID NO: 1033974 - RNA, 22 nt, Human
ggaaaaggccauuguuucucug

SEQ ID NO: 1033975 - RNA, 22 nt, Human
ugcuagaaaucugaaacuagca

SEQ ID NO: 1033976 - RNA, 22 nt, Human
gaaaggucaguuccacuuccau

SEQ ID NO: 1033977 - RNA, 22 nt, Human
gcugccugucccaggaugagga

SEQ ID NO: 1033978 - RNA, 19 nt, Human
gccucugcuggggacaggc

SEQ ID NO: 1033979 - RNA, 22 nt, Human
ggagccugugcccaagcccaga

SEQ ID NO: 1033980 - RNA, 17 nt, Human
ugcauuguuggaaauuu

SEQ ID NO: 1033981 - RNA, 22 nt, Human
uggcagcugauuagauggugcc

SEQ ID NO: 1033982 - RNA, 22 nt, Human
gugaggugguacaauauuaacu

SEQ ID NO: 1033983 - RNA, 22 nt, Human
ugggcuggugagggaucauuua

SEQ ID NO: 1033984 - RNA, 22 nt, Human
ucugggagagcugcugucagag

SEQ ID NO: 1033985 - RNA, 22 nt, Human
ggcugccucaaagcucaagcuc

SEQ ID NO: 1033986 - RNA, 18 nt, Human
caggaugagugaugggga

SEQ ID NO: 1033987 - RNA, 22 nt, Human
acugugcaugaaccgaaacaaa

SEQ ID NO: 1033988 - RNA, 22 nt, Human
uucacagggccacuggcaggag

SEQ ID NO: 1033989 - RNA, 22 nt, Human
ugggccuccaauuccagcggga

SEQ ID NO: 1033990 - RNA, 22 nt, Human
aggccagguuccucaaucuuga

SEQ ID NO: 1033991 - RNA, 22 nt, Human
agggggcaucagguccuggcuc

SEQ ID NO: 1033992 - RNA, 22 nt, Human
gaagccaagugcaaaugccuua

SEQ ID NO: 1033993 - RNA, 22 nt, Human
ugacagaaugugacucucagau

SEQ ID NO: 1033994 - RNA, 22 nt, Human
cagcaauaaugucuacaaaucu

SEQ ID NO: 1033995 - RNA, 22 nt, Human
cccagggcccuggacagcuaca

SEQ ID NO: 1033996 - RNA, 22 nt, Human
cagggagaagucuggucagucc

SEQ ID NO: 1033997 - RNA, 22 nt, Human
ugccugucuuggaguccuggcc

SEQ ID NO: 1033998 - RNA, 22 nt, Human
gcugucucauacaaggcccugc

SEQ ID NO: 1033999 - RNA, 22 nt, Human
aagccgggccugagaaaugaca

SEQ ID NO: 1034000 - RNA, 22 nt, Human
acacugaaugcuguuuagaaau

SEQ ID NO: 1034001 - RNA, 22 nt, Human
aggccuggccugggcggcauug

SEQ ID NO: 1034002 - RNA, 22 nt, Human
gcuggcuguuggagguaccugc

SEQ ID NO: 1034003 - RNA, 19 nt, Human
cucagcuguagcucaugug

SEQ ID NO: 1034004 - RNA, 22 nt, Human
uaugaagacaaugauagcauga

SEQ ID NO: 1034005 - RNA, 22 nt, Human
ggcuguccuuggccaaggcacu

SEQ ID NO: 1034006 - RNA, 17 nt, Human
acagagguuauacagac

SEQ ID NO: 1034007 - RNA, 22 nt, Human
ggagcugcauuuagggagccuu

SEQ ID NO: 1034008 - RNA, 18 nt, Human
uggcagccagcugcuccu

SEQ ID NO: 1034009 - RNA, 22 nt, Human
augccuggacugacaugcacug

SEQ ID NO: 1034010 - RNA, 22 nt, Human
uggcucagaggggaagugguuu

SEQ ID NO: 1034011 - RNA, 22 nt, Human
caucacuguccaaaguucaguu

SEQ ID NO: 1034012 - RNA, 22 nt, Human
agucucaggcagaggaaggcua

SEQ ID NO: 1034013 - RNA, 21 nt, Human
ucuuugcaucaguuguuuucu

SEQ ID NO: 1034014 - RNA, 22 nt, Human
ucacauuuuaucuauuuuaagu

SEQ ID NO: 1034015 - RNA, 22 nt, Human
cuucccagacgggguggcagcc

SEQ ID NO: 1034016 - RNA, 22 nt, Human
gaaggcaggcuucugauuaggu

SEQ ID NO: 1034017 - RNA, 22 nt, Human
aagcagccagccaucaugcccg

SEQ ID NO: 1034018 - RNA, 22 nt, Human
ggcuucucucccccagcuccac

SEQ ID NO: 1034019 - RNA, 21 nt, Human
ugugucacuaacuagaggcua

SEQ ID NO: 1034020 - RNA, 22 nt, Human
cugacucuccucaagcauaaau

SEQ ID NO: 1034021 - RNA, 22 nt, Human
uuagaaaucaccucugaagauc

SEQ ID NO: 1034022 - RNA, 22 nt, Human
aaaguguggagauugaacuaaa

SEQ ID NO: 1034023 - RNA, 22 nt, Human
acccacgaagaugagcggcaug

SEQ ID NO: 1034024 - RNA, 22 nt, Human
aagccaggaagagagccuucac

SEQ ID NO: 1034025 - RNA, 22 nt, Human
ucuggagcuuccucauuuacag

SEQ ID NO: 1034026 - RNA, 19 nt, Human
gcagccaggugcucuaccu

SEQ ID NO: 1034027 - RNA, 19 nt, Human
cagcugccuuuucuuugca

SEQ ID NO: 1034028 - RNA, 22 nt, Human
gagcagagacaguacaacuggc

SEQ ID NO: 1034029 - RNA, 22 nt, Human
uguaugcagggcuuguaugcag

SEQ ID NO: 1034030 - RNA, 22 nt, Human
gcaaggcugugcacuuugcauu

SEQ ID NO: 1034031 - RNA, 22 nt, Human
auuguauuagcacaauacaauu

SEQ ID NO: 1034032 - RNA, 22 nt, Human
caguacuuugaagauauuuuag

SEQ ID NO: 1034033 - RNA, 22 nt, Human
agcaguggcugaagauguuccu

SEQ ID NO: 1034034 - RNA, 22 nt, Human
gagagugaggccugggaaucua

SEQ ID NO: 1034035 - RNA, 22 nt, Human
ggaaggagggcggcaaugauga

SEQ ID NO: 1034036 - RNA, 22 nt, Human
cagggccaagccccuuuggcug

SEQ ID NO: 1034037 - RNA, 22 nt, Human
ggccucugaggacagccuuggc

SEQ ID NO: 1034038 - RNA, 22 nt, Human
uaguacuuaucucugucauugu

SEQ ID NO: 1034039 - RNA, 20 nt, Human
gcugccuguuucuguaagua

SEQ ID NO: 1034040 - RNA, 22 nt, Human
ugugcccauuacacagaggcau

SEQ ID NO: 1034041 - RNA, 22 nt, Human
cugcucugcaaggcacagugau

SEQ ID NO: 1034042 - RNA, 22 nt, Human
ggcagccauacucagaccuggg

SEQ ID NO: 1034043 - RNA, 22 nt, Human
cucaggccauucuuccagcugc

SEQ ID NO: 1034044 - RNA, 22 nt, Human
uaaaauguuugcaagagaccag

SEQ ID NO: 1034045 - RNA, 22 nt, Human
agcugggaggugggcagugaga

SEQ ID NO: 1034046 - RNA, 22 nt, Human
augaguaaaaccacuauuuaca

SEQ ID NO: 1034047 - RNA, 22 nt, Human
agccuccuggaguuucugggau

SEQ ID NO: 1034048 - RNA, 23 nt, Human
ucccuggaggcagguccagggcc

SEQ ID NO: 1034049 - RNA, 22 nt, Human
aaucagaauuuauugaaucuuu

SEQ ID NO: 1034050 - RNA, 22 nt, Human
ugggacagggaaucugaucccc

SEQ ID NO: 1034051 - RNA, 22 nt, Human
caaagguauaaguuaauauaca

SEQ ID NO: 1034052 - RNA, 22 nt, Human
aucuggcuuuuacugaauugcu

SEQ ID NO: 1034053 - RNA, 22 nt, Human
aggucacccguuugacuaucca

SEQ ID NO: 1034054 - RNA, 22 nt, Human
uagagcugcuggacuguaacag

SEQ ID NO: 1034055 - RNA, 22 nt, Human
acauuguauaaugauuaucaca

SEQ ID NO: 1034056 - RNA, 22 nt, Human
gcagcguggggacaggagcuca

SEQ ID NO: 1034057 - RNA, 22 nt, Human
aaagccuugcccgucacuggga

SEQ ID NO: 1034058 - RNA, 22 nt, Human
aucuggcuauugacauguuaua

SEQ ID NO: 1034059 - RNA, 22 nt, Human
cugcaggaauucaaagugagcu

SEQ ID NO: 1034060 - RNA, 22 nt, Human
aaaaaugcugugguagcugugu

SEQ ID NO: 1034061 - RNA, 22 nt, Human
uggcucaggggucuggcucugu

SEQ ID NO: 1034062 - RNA, 22 nt, Human
ucugucacuuuuauuuacugaa

SEQ ID NO: 1034063 - RNA, 20 nt, Human
cucugcuuuaggagagucag

SEQ ID NO: 1034064 - RNA, 22 nt, Human
uucuucaaaauccagcaugauu

SEQ ID NO: 1034065 - RNA, 18 nt, Human
cagggcuguggggucacu

SEQ ID NO: 1034066 - RNA, 22 nt, Human
gagagugauucccucccauaga

SEQ ID NO: 1034067 - RNA, 22 nt, Human
aggcucuguuauucuagagggc

SEQ ID NO: 1034068 - RNA, 22 nt, Human
gaaggagggugcggaucugagc

SEQ ID NO: 1034069 - RNA, 22 nt, Human
ugcagcaggcacaggacggaag

SEQ ID NO: 1034070 - RNA, 23 nt, Human
uagggcagcugggagggacaugc

SEQ ID NO: 1034071 - RNA, 22 nt, Human
cugcuucuaagaaccugcagcu

SEQ ID NO: 1034072 - RNA, 20 nt, Human
uauuugaaauggccaagugu

SEQ ID NO: 1034073 - RNA, 22 nt, Human
ucccuggagauaacuucuggga

SEQ ID NO: 1034074 - RNA, 22 nt, Human
ucaggcagagcuguggagcucu

SEQ ID NO: 1034075 - RNA, 22 nt, Human
cagaggcucaccagccuuucac

SEQ ID NO: 1034076 - RNA, 22 nt, Human
auuuccuagccucucuugcagu

SEQ ID NO: 1034077 - RNA, 22 nt, Human
cucaggcccacagcagacccac

SEQ ID NO: 1034078 - RNA, 22 nt, Human
cuccaguaucuguaggaaaagg

SEQ ID NO: 1034079 - RNA, 22 nt, Human
uuuuuccuaagcaguggagcug

SEQ ID NO: 1034080 - RNA, 19 nt, Human
augagcuggcauuucaggu

SEQ ID NO: 1034081 - RNA, 21 nt, Human
uccuuccuugagguccuuucc

SEQ ID NO: 1034082 - RNA, 22 nt, Human
gguuugcaugugauguugggca

SEQ ID NO: 1034083 - RNA, 22 nt, Human
agucaguguagaaagcccaggc

SEQ ID NO: 1034084 - RNA, 22 nt, Human
agugugcugcuuaaacaguugu

SEQ ID NO: 1034085 - RNA, 22 nt, Human
aggcugaggcagguggaucauu

SEQ ID NO: 1034086 - RNA, 22 nt, Human
uacaguaaccagucuacuuaga

SEQ ID NO: 1034087 - RNA, 22 nt, Human
agcuuccuacaaccaucucaga

SEQ ID NO: 1034088 - RNA, 22 nt, Human
ggccuggccuccagaugugggc

SEQ ID NO: 1034089 - RNA, 22 nt, Human
cauugcacucuggcuggaacgg

SEQ ID NO: 1034090 - RNA, 22 nt, Human
acauuucucaucuaguagagua

SEQ ID NO: 1034091 - RNA, 22 nt, Human
uugcaggggaaggagcagagcu

SEQ ID NO: 1034092 - RNA, 22 nt, Human
auuugucuucaguagguucuuc

SEQ ID NO: 1034093 - RNA, 22 nt, Human
ucugagaggauuccugucccga

SEQ ID NO: 1034094 - RNA, 22 nt, Human
ugugcuucagguugucgccacg

SEQ ID NO: 1034095 - RNA, 22 nt, Human
cuaggaggcgggggcugcagua

SEQ ID NO: 1034096 - RNA, 22 nt, Human
uccuggaggggacagcaugggc

SEQ ID NO: 1034097 - RNA, 22 nt, Human
cagggucuuauaaggccaauuu

SEQ ID NO: 1034098 - RNA, 22 nt, Human
ugcguugcgcuccugcagcagg

SEQ ID NO: 1034099 - RNA, 22 nt, Human
ggaaggucgagcugcaucuggc

SEQ ID NO: 1034100 - RNA, 22 nt, Human
ugggcucugugccagguuggug

SEQ ID NO: 1034101 - RNA, 22 nt, Human
agaugcugugaggaagcuagga

SEQ ID NO: 1034102 - RNA, 22 nt, Human
ucugucugcaccuaagcacagu

SEQ ID NO: 1034103 - RNA, 22 nt, Human
aucagcaaucucguguauuagg

SEQ ID NO: 1034104 - RNA, 22 nt, Human
guccagggcuaaaucagguucc

SEQ ID NO: 1034105 - RNA, 22 nt, Human
auguaacaggugaagcucugag

SEQ ID NO: 1034106 - RNA, 22 nt, Human
gccugcuguuaacugcaggaau

SEQ ID NO: 1034107 - RNA, 22 nt, Human
aagaacauuuuguagaaugaca

SEQ ID NO: 1034108 - RNA, 22 nt, Human
ugcucagggacaauggagaggg

SEQ ID NO: 1034109 - RNA, 22 nt, Human
gcugccugcucggcuccuggga

SEQ ID NO: 1034110 - RNA, 22 nt, Human
gggcugacucugcacugagcca

SEQ ID NO: 1034111 - RNA, 22 nt, Human
augggaugcauggcuguggcca

SEQ ID NO: 1034112 - RNA, 22 nt, Human
cagucccaucucccagguggcu

SEQ ID NO: 1034113 - RNA, 22 nt, Human
gcagggucuugagaggcagcca

SEQ ID NO: 1034114 - RNA, 22 nt, Human
guggcugcucgggcuccggccc

SEQ ID NO: 1034115 - RNA, 22 nt, Human
aagagcuggcucuugcagcagc

SEQ ID NO: 1034116 - RNA, 17 nt, Human
aggaaacauuuucuuuc

SEQ ID NO: 1034117 - RNA, 22 nt, Human
ccugucucuuucaaucugagag

SEQ ID NO: 1034118 - RNA, 22 nt, Human
uggccugcagaggcuguggggc

SEQ ID NO: 1034119 - RNA, 22 nt, Human
ucuggcucuguguccccaccca

SEQ ID NO: 1034120 - RNA, 22 nt, Human
ucuggccugggccugccggugc

SEQ ID NO: 1034121 - RNA, 20 nt, Human
ugcuggggacauacagggug

SEQ ID NO: 1034122 - RNA, 22 nt, Human
gggaccaggugggugcauuccg

SEQ ID NO: 1034123 - RNA, 22 nt, Human
acagagccaaaaggacauagua

SEQ ID NO: 1034124 - RNA, 19 nt, Human
gcagcugugggaagagcca

SEQ ID NO: 1034125 - RNA, 22 nt, Human
gggcccacuggcugucugaccc

SEQ ID NO: 1034126 - RNA, 19 nt, Human
cugaagucuuuucagcugg

SEQ ID NO: 1034127 - RNA, 22 nt, Human
auacauguaacugcauuguaau

SEQ ID NO: 1034128 - RNA, 22 nt, Human
uguguacaagaguguuuacugu

SEQ ID NO: 1034129 - RNA, 22 nt, Human
ucugucacaauuugcuuacucu

SEQ ID NO: 1034130 - RNA, 22 nt, Human
aggagccaugagugacaucaca

SEQ ID NO: 1034131 - RNA, 22 nt, Human
caggcacugugcugagcucugc

SEQ ID NO: 1034132 - RNA, 22 nt, Human
gaaagagaaccugggccuagau

SEQ ID NO: 1034133 - RNA, 22 nt, Human
cuugggagacacaagaagacau

SEQ ID NO: 1034134 - RNA, 22 nt, Human
cacccaggcuggagugcagggg

SEQ ID NO: 1034135 - RNA, 21 nt, Human
agagaagaggacuuucucaca

SEQ ID NO: 1034136 - RNA, 22 nt, Human
gagcuuaggccagggacaggga

SEQ ID NO: 1034137 - RNA, 22 nt, Human
gggaguggguuuggccuaggcc

SEQ ID NO: 1034138 - RNA, 22 nt, Human
uacaaaguagaaauucaguaaa

SEQ ID NO: 1034139 - RNA, 22 nt, Human
agcacagauucugaagaguccu

SEQ ID NO: 1034140 - RNA, 22 nt, Human
ggcugagggccagggcuagucu

SEQ ID NO: 1034141 - RNA, 22 nt, Human
aggaagccugcaggugacugcu

SEQ ID NO: 1034142 - RNA, 22 nt, Human
uggcucucaggccugcugcguu

SEQ ID NO: 1034143 - RNA, 22 nt, Human
aagagcauauuaauaguggaga

SEQ ID NO: 1034144 - RNA, 22 nt, Human
gccuucagcccugacuggccag

SEQ ID NO: 1034145 - RNA, 22 nt, Human
ucuucuuccuccacagggccca

SEQ ID NO: 1034146 - RNA, 22 nt, Human
uagugaaauuuaugcacagcua

SEQ ID NO: 1034147 - RNA, 17 nt, Human
auuuccucagggcugag

SEQ ID NO: 1034148 - RNA, 22 nt, Human
cccagcccugaccuauuggaaa

SEQ ID NO: 1034149 - RNA, 22 nt, Human
acagcacaaucugagucccaga

SEQ ID NO: 1034150 - RNA, 22 nt, Human
uucaaugauuuuuagggaucau

SEQ ID NO: 1034151 - RNA, 22 nt, Human
ggcugccaggagaagcucagug

SEQ ID NO: 1034152 - RNA, 22 nt, Human
agugaccaaucaugguuagauu

SEQ ID NO: 1034153 - RNA, 22 nt, Human
guggauggacaugggcaagagg

SEQ ID NO: 1034154 - RNA, 22 nt, Human
ucagcugccuuucccaugcuag

SEQ ID NO: 1034155 - RNA, 22 nt, Human
ugcuugagacacauaugaauuu

SEQ ID NO: 1034156 - RNA, 22 nt, Human
cacagcuggugcacuagcucug

SEQ ID NO: 1034157 - RNA, 22 nt, Human
gugccugguuuggggaauguuc

SEQ ID NO: 1034158 - RNA, 22 nt, Human
cacugaagccacuggaagagga

SEQ ID NO: 1034159 - RNA, 22 nt, Human
caguuucucucaauaagcaucg

SEQ ID NO: 1034160 - RNA, 22 nt, Human
uuacuuuguucucaagauaugu

SEQ ID NO: 1034161 - RNA, 22 nt, Human
agacaaagaaaccguagaagca

SEQ ID NO: 1034162 - RNA, 22 nt, Human
cccacagguccccaugaacucg

SEQ ID NO: 1034163 - RNA, 22 nt, Human
gggaucagcaagccacugcacc

SEQ ID NO: 1034164 - RNA, 22 nt, Human
ugagugaggaagcgguggagga

SEQ ID NO: 1034165 - RNA, 22 nt, Human
ucccagagcucuggagguugga

SEQ ID NO: 1034166 - RNA, 22 nt, Human
cuggguggaaagugcugagaau

SEQ ID NO: 1034167 - RNA, 22 nt, Human
acugagcugugacaaugcuuaa

SEQ ID NO: 1034168 - RNA, 22 nt, Human
ccagagcccagggucaugcagg

SEQ ID NO: 1034169 - RNA, 22 nt, Human
ccggggacuuaaagugaaggaa

SEQ ID NO: 1034170 - RNA, 22 nt, Human
uguagaaagaauauguuucaua

SEQ ID NO: 1034171 - RNA, 22 nt, Human
uaacagaagagcaggcagcccu

SEQ ID NO: 1034172 - RNA, 22 nt, Human
ucuggccauggcaagccgagug

SEQ ID NO: 1034173 - RNA, 22 nt, Human
cagccaucaguaaagacagcuu

SEQ ID NO: 1034174 - RNA, 22 nt, Human
cacaguggcagguguggguugu

SEQ ID NO: 1034175 - RNA, 22 nt, Human
ugcagggccuucuagaccaugg

SEQ ID NO: 1034176 - RNA, 22 nt, Human
ucccagagcucugacaccagcu

SEQ ID NO: 1034177 - RNA, 22 nt, Human
cuggcagcuuagcacucugguu

SEQ ID NO: 1034178 - RNA, 22 nt, Human
gaggggcuugaggcccugaugg

SEQ ID NO: 1034179 - RNA, 22 nt, Human
ccugucugcggaggaguggaag

SEQ ID NO: 1034180 - RNA, 22 nt, Human
agcuggugcugaagcucuugag

SEQ ID NO: 1034181 - RNA, 22 nt, Human
uuggaaggagucaaccagcuga

SEQ ID NO: 1034182 - RNA, 22 nt, Human
uuagauaauguagagauaugag

SEQ ID NO: 1034183 - RNA, 22 nt, Human
gccuuccugcagcucugagcgu

SEQ ID NO: 1034184 - RNA, 22 nt, Human
ggaugcugggagacagcaggca

SEQ ID NO: 1034185 - RNA, 22 nt, Human
ggaggaugagcuacgaggagcu

SEQ ID NO: 1034186 - RNA, 22 nt, Human
gggaguggauuauguggaccca

SEQ ID NO: 1034187 - RNA, 22 nt, Human
agaagccauguuuaguaggaug

SEQ ID NO: 1034188 - RNA, 22 nt, Human
ccugucagaugaaguaauugug

SEQ ID NO: 1034189 - RNA, 22 nt, Human
uagcacaucuggcgcuuauagg

SEQ ID NO: 1034190 - RNA, 22 nt, Human
caggugccgggaaugcagcaau

SEQ ID NO: 1034191 - RNA, 22 nt, Human
uccuugaacagagggccugggu

SEQ ID NO: 1034192 - RNA, 22 nt, Human
agcaggaaagaaaaaucugugu

SEQ ID NO: 1034193 - RNA, 22 nt, Human
uggauaaacucacuguaaguug

SEQ ID NO: 1034194 - RNA, 22 nt, Human
cucucugguacauagaguuugg

SEQ ID NO: 1034195 - RNA, 23 nt, Human
ucccagggaaggugagcgaggcu

SEQ ID NO: 1034196 - RNA, 22 nt, Human
agcucccagcuccuuugagaga

SEQ ID NO: 1034197 - RNA, 22 nt, Human
accaggggaugguuggcacugu

SEQ ID NO: 1034198 - RNA, 22 nt, Human
ugaaagguuauuuaggucugcu

SEQ ID NO: 1034199 - RNA, 22 nt, Human
gugauuucuaaucaucugaaug

SEQ ID NO: 1034200 - RNA, 22 nt, Human
ugcagcagcagggaggaggcuc

SEQ ID NO: 1034201 - RNA, 22 nt, Human
cagcaauaagguaagcuucucc

SEQ ID NO: 1034202 - RNA, 22 nt, Human
ugcccugcagugagugcgucug

SEQ ID NO: 1034203 - RNA, 22 nt, Human
cuugugcauuucauuccucagg

SEQ ID NO: 1034204 - RNA, 22 nt, Human
ccacugucuuuuccaggcugaa

SEQ ID NO: 1034205 - RNA, 22 nt, Human
gagcuggcaggaggcuccccga

SEQ ID NO: 1034206 - RNA, 22 nt, Human
gaggggcuggguagggcaaccc

SEQ ID NO: 1034207 - RNA, 22 nt, Human
ugcuggccaauggcagaggcgg

SEQ ID NO: 1034208 - RNA, 22 nt, Human
ccaaaugcuccacugacuuugg

SEQ ID NO: 1034209 - RNA, 22 nt, Human
ugcucuggaguggcuugugcac

SEQ ID NO: 1034210 - RNA, 22 nt, Human
acagguggcuuauuggcugauu

SEQ ID NO: 1034211 - RNA, 22 nt, Human
auggauaagaacaaauaucuga

SEQ ID NO: 1034212 - RNA, 22 nt, Human
ugcauugcauuugucaugaaga

SEQ ID NO: 1034213 - RNA, 22 nt, Human
agaggccuaaccaagauguccu

SEQ ID NO: 1034214 - RNA, 22 nt, Human
cuugccuucuguuccuauagaa

SEQ ID NO: 1034215 - RNA, 22 nt, Human
uaaauucugaucaaguuccuuc

SEQ ID NO: 1034216 - RNA, 22 nt, Human
gcaggaugccagggcagcagcg

SEQ ID NO: 1034217 - RNA, 22 nt, Human
ucucugcucugugccucaguuu

SEQ ID NO: 1034218 - RNA, 22 nt, Human
cagccuguagaauacaguaaau

SEQ ID NO: 1034219 - RNA, 20 nt, Human
ugucagugccugaggcacag

SEQ ID NO: 1034220 - RNA, 22 nt, Human
ugacagcauaacacuggucuug

SEQ ID NO: 1034221 - RNA, 22 nt, Human
agucagcagccuggccaggaga

SEQ ID NO: 1034222 - RNA, 22 nt, Human
agccauugaguuuuaugugcua

SEQ ID NO: 1034223 - RNA, 22 nt, Human
acagaaagaagguguauuugag

SEQ ID NO: 1034224 - RNA, 22 nt, Human
caguuucuuaucuucaaaauug

SEQ ID NO: 1034225 - RNA, 20 nt, Human
cagggccacgcuccaaggca

SEQ ID NO: 1034226 - RNA, 22 nt, Human
aaaagacauaugugggcauucu

SEQ ID NO: 1034227 - RNA, 22 nt, Human
ucaucacucauuggacaacaga

SEQ ID NO: 1034228 - RNA, 22 nt, Human
cuggcaggcggcagagcccagg

SEQ ID NO: 1034229 - RNA, 22 nt, Human
cagagcuggagggaacccuggc

SEQ ID NO: 1034230 - RNA, 22 nt, Human
uuugaacaugcugcaugauaau

SEQ ID NO: 1034231 - RNA, 22 nt, Human
cuggcagcagcuucuggaucga

SEQ ID NO: 1034232 - RNA, 22 nt, Human
ugagaaagugggugccuagcaa

SEQ ID NO: 1034233 - RNA, 22 nt, Human
agguggaacguucaggugcuag

SEQ ID NO: 1034234 - RNA, 23 nt, Human
gccuggagaaaagcugcaguuca

SEQ ID NO: 1034235 - RNA, 22 nt, Human
gaaauguguuguucauuucuaa

SEQ ID NO: 1034236 - RNA, 22 nt, Human
ugcagccaucuuucuuggagga

SEQ ID NO: 1034237 - RNA, 22 nt, Human
ggcuucaccgcgggguugcagg

SEQ ID NO: 1034238 - RNA, 22 nt, Human
cagcagcaaaucuagaagagga

SEQ ID NO: 1034239 - RNA, 22 nt, Human
uauuucaugugcaccauaauuc

SEQ ID NO: 1034240 - RNA, 21 nt, Human
ugguggagugugcugagcaug

SEQ ID NO: 1034241 - RNA, 17 nt, Human
gagauggguggaucacc

SEQ ID NO: 1034242 - RNA, 22 nt, Human
uucacauuagugguucuauaua

SEQ ID NO: 1034243 - RNA, 22 nt, Human
ggaaccaggaguuacacgaguu

SEQ ID NO: 1034244 - RNA, 22 nt, Human
gccagggagucugggccacaga

SEQ ID NO: 1034245 - RNA, 22 nt, Human
ccugaagagcacucuagaguug

SEQ ID NO: 1034246 - RNA, 22 nt, Human
ggcagcagggcugucucccuac

SEQ ID NO: 1034247 - RNA, 22 nt, Human
gacagacauuuccugauccaau

SEQ ID NO: 1034248 - RNA, 22 nt, Human
ccaggcugcuguugguguccgc

SEQ ID NO: 1034249 - RNA, 22 nt, Human
agagcugaggauccagcugagc

SEQ ID NO: 1034250 - RNA, 17 nt, Human
agcagcuggcacaggag

SEQ ID NO: 1034251 - RNA, 22 nt, Human
ugccagcacaaguuaagagauc

SEQ ID NO: 1034252 - RNA, 21 nt, Human
ucccagagugcuugggacugc

SEQ ID NO: 1034253 - RNA, 22 nt, Human
auggcagcaaaugucuggcugg

SEQ ID NO: 1034254 - RNA, 22 nt, Human
ugaggcaggagguugagaacug

SEQ ID NO: 1034255 - RNA, 22 nt, Human
gcuggccauggccugcgccauc

SEQ ID NO: 1034256 - RNA, 22 nt, Human
caggcagcaucagucugcugua

SEQ ID NO: 1034257 - RNA, 22 nt, Human
cugucuguucagauucauuacu

SEQ ID NO: 1034258 - RNA, 22 nt, Human
gcagcagagaacacaaugaugg

SEQ ID NO: 1034259 - RNA, 22 nt, Human
gcagcccagagcgcaggacccc

SEQ ID NO: 1034260 - RNA, 22 nt, Human
ggcaccugcucaucuggacuca

SEQ ID NO: 1034261 - RNA, 22 nt, Human
ccaaagucugcauuuuaacaug

SEQ ID NO: 1034262 - RNA, 22 nt, Human
uggaagggggaagacagcucug

SEQ ID NO: 1034263 - RNA, 22 nt, Human
guaacacagaaaugaaauucca

SEQ ID NO: 1034264 - RNA, 22 nt, Human
ggucccagcugcucaagaggcu

SEQ ID NO: 1034265 - RNA, 20 nt, Human
ucacaggggaccaggagcag

SEQ ID NO: 1034266 - RNA, 22 nt, Human
ugaacgcagguccacauggcuc

SEQ ID NO: 1034267 - RNA, 22 nt, Human
gcagcagaggcccuacucuuug

SEQ ID NO: 1034268 - RNA, 22 nt, Human
aaggccuggauuuagguuguga

SEQ ID NO: 1034269 - RNA, 22 nt, Human
aaugggagagaacacaaagucc

SEQ ID NO: 1034270 - RNA, 21 nt, Human
gugcucugggcagcagagggc

SEQ ID NO: 1034271 - RNA, 15 nt, Human
ugggcagaucacuug

SEQ ID NO: 1034272 - RNA, 22 nt, Human
gcugggcuucucaaugcugccu

SEQ ID NO: 1034273 - RNA, 22 nt, Human
cuucuugcaauuuucaucuuau

SEQ ID NO: 1034274 - RNA, 22 nt, Human
ucugagggcuugaggggaagua

SEQ ID NO: 1034275 - RNA, 22 nt, Human
cugcagcuccccugagaucaag

SEQ ID NO: 1034276 - RNA, 22 nt, Human
gcugccuuuuaaagccucgcuu

SEQ ID NO: 1034277 - RNA, 22 nt, Human
aacagacagaaaaaugugaucu

SEQ ID NO: 1034278 - RNA, 20 nt, Human
gucaucgccggcagcaaaga

SEQ ID NO: 1034279 - RNA, 22 nt, Human
aggcacuggucuaccccuuagu

SEQ ID NO: 1034280 - RNA, 22 nt, Human
gcucccacaaccuucuugcucc

SEQ ID NO: 1034281 - RNA, 22 nt, Human
guuuuccuucucagccauugcc

SEQ ID NO: 1034282 - RNA, 22 nt, Human
gucaugccuggcuucuuagaca

SEQ ID NO: 1034283 - RNA, 22 nt, Human
uguuuguucccucucuuuccug

SEQ ID NO: 1034284 - RNA, 22 nt, Human
uggguggaauaaaucaguucug

SEQ ID NO: 1034285 - RNA, 22 nt, Human
uccuucagaggacggcagccag

SEQ ID NO: 1034286 - RNA, 22 nt, Human
uggcacugagcagccgcggcag

SEQ ID NO: 1034287 - RNA, 22 nt, Human
aggcugcucugcgaagucagcu

SEQ ID NO: 1034288 - RNA, 17 nt, Human
gcagccagugcagcagg

SEQ ID NO: 1034289 - RNA, 22 nt, Human
ggacacaguggaagacagcuug

SEQ ID NO: 1034290 - RNA, 22 nt, Human
ggccccacgggggaguccuagu

SEQ ID NO: 1034291 - RNA, 22 nt, Human
gccucuggucccucaugcugug

SEQ ID NO: 1034292 - RNA, 19 nt, Human
ugggcuuccccagggcaga

SEQ ID NO: 1034293 - RNA, 22 nt, Human
ccagcagagucuaggaaggagg

SEQ ID NO: 1034294 - RNA, 22 nt, Human
uuccaggaauucagcucucagu

SEQ ID NO: 1034295 - RNA, 22 nt, Human
ucucagagauucagggagaagu

SEQ ID NO: 1034296 - RNA, 22 nt, Human
guggcugggcuccgagcggcuu

SEQ ID NO: 1034297 - RNA, 22 nt, Human
ggcugccucuggaagcuggaga

SEQ ID NO: 1034298 - RNA, 22 nt, Human
cugggggcaauggucagagugu

SEQ ID NO: 1034299 - RNA, 22 nt, Human
acacagggcaaugcuuugaccu

SEQ ID NO: 1034300 - RNA, 23 nt, Human
ccuggcagcaaacgaggagguua

SEQ ID NO: 1034301 - RNA, 22 nt, Human
auguucaaacuuuuuacacacc

SEQ ID NO: 1034302 - RNA, 21 nt, Human
gccagggaagagaguuggcug

SEQ ID NO: 1034303 - RNA, 22 nt, Human
gccaggcaaauuaaggaaugca

SEQ ID NO: 1034304 - RNA, 22 nt, Human
uuugcaaauaccaugaaacuug

SEQ ID NO: 1034305 - RNA, 22 nt, Human
aaaguguaaggaauuuaaguaa

SEQ ID NO: 1034306 - RNA, 22 nt, Human
ugcagcucauugguguccuggu

SEQ ID NO: 1034307 - RNA, 22 nt, Human
gccucugggcucugccccuggc

SEQ ID NO: 1034308 - RNA, 23 nt, Human
cccagcagagaugaggagggguc

SEQ ID NO: 1034309 - RNA, 22 nt, Human
aggacuccauguguccuggaga

SEQ ID NO: 1034310 - RNA, 22 nt, Human
cuggcagggugggcuuugcuuu

SEQ ID NO: 1034311 - RNA, 22 nt, Human
cugggcacauuuugacuagugu

SEQ ID NO: 1034312 - RNA, 22 nt, Human
gcugccuuugugagccaagggg

SEQ ID NO: 1034313 - RNA, 21 nt, Human
acaguucaugauaacuccauc

SEQ ID NO: 1034314 - RNA, 22 nt, Human
augcagcaguuuacaaagcaau

SEQ ID NO: 1034315 - RNA, 22 nt, Human
cacaugcauaaggauaauuacu

SEQ ID NO: 1034316 - RNA, 21 nt, Human
uggcagaguugaguaguuaug

SEQ ID NO: 1034317 - RNA, 22 nt, Human
aauccagguggcggagguugug

SEQ ID NO: 1034318 - RNA, 22 nt, Human
ccaucagcaugggagcaugggc

SEQ ID NO: 1034319 - RNA, 20 nt, Human
cuggcaggagcgagucuacc

SEQ ID NO: 1034320 - RNA, 20 nt, Human
ggcagcucacuacuuucugu

SEQ ID NO: 1034321 - RNA, 22 nt, Human
aggccugagguuccugugcuca

SEQ ID NO: 1034322 - RNA, 22 nt, Human
ccaggcugagcaugauuggagc

SEQ ID NO: 1034323 - RNA, 22 nt, Human
ucacuguauuugcugaugcaua

SEQ ID NO: 1034324 - RNA, 22 nt, Human
gugauuucagguuuuucauacu

SEQ ID NO: 1034325 - RNA, 20 nt, Human
uuuuuccuucucuacaggca

SEQ ID NO: 1034326 - RNA, 22 nt, Human
uccucugcucagcauuccucac

SEQ ID NO: 1034327 - RNA, 19 nt, Human
gcuccugggccucacucau

SEQ ID NO: 1034328 - RNA, 22 nt, Human
cuguuuaucccuuuggucagca

SEQ ID NO: 1034329 - RNA, 22 nt, Human
gagggcaggggucuugcacggu

SEQ ID NO: 1034330 - RNA, 22 nt, Human
acuuucucaggaauucacagac

SEQ ID NO: 1034331 - RNA, 22 nt, Human
ccugcagguugcagaggcggaa

SEQ ID NO: 1034332 - RNA, 22 nt, Human
acagagcaauaacagggagagg

SEQ ID NO: 1034333 - RNA, 22 nt, Human
gcuggccuucugcagaguucug

SEQ ID NO: 1034334 - RNA, 20 nt, Human
aggcacuggggauagguaag

SEQ ID NO: 1034335 - RNA, 22 nt, Human
cagaagcaaaugccuugcugag

SEQ ID NO: 1034336 - RNA, 22 nt, Human
uggugcaagucucugaggaggg

SEQ ID NO: 1034337 - RNA, 22 nt, Human
aagugguaggaagagagcacug

SEQ ID NO: 1034338 - RNA, 23 nt, Human
gugcaugugucuuuacaguagca

SEQ ID NO: 1034339 - RNA, 22 nt, Human
uuauuuuuaaaaguucacacag

SEQ ID NO: 1034340 - RNA, 22 nt, Human
cuuccugcauugugccagaguu

SEQ ID NO: 1034341 - RNA, 22 nt, Human
auuuauguaucuguguagauca

SEQ ID NO: 1034342 - RNA, 22 nt, Human
aacagcagggggaccugcuggu

SEQ ID NO: 1034343 - RNA, 22 nt, Human
caaagugcuaggauuacaggcc

SEQ ID NO: 1034344 - RNA, 22 nt, Human
gagccugaaauacaggucacug

SEQ ID NO: 1034345 - RNA, 20 nt, Human
caggccucugggggcccugg

SEQ ID NO: 1034346 - RNA, 22 nt, Human
caguacuuuucaaccaguauga

SEQ ID NO: 1034347 - RNA, 22 nt, Human
gaaaugcauaaucuuaguagau

SEQ ID NO: 1034348 - RNA, 22 nt, Human
guguccaucagcagccacugug

SEQ ID NO: 1034349 - RNA, 22 nt, Human
gagaagccgagucagcugagcc

SEQ ID NO: 1034350 - RNA, 22 nt, Human
ucaaagucuaucuguaauuacu

SEQ ID NO: 1034351 - RNA, 22 nt, Human
gcaaagguagccaaggagcuca

SEQ ID NO: 1034352 - RNA, 18 nt, Human
uggagcugagugcugugc

SEQ ID NO: 1034353 - RNA, 22 nt, Human
aaugucugagucucuguauccc

SEQ ID NO: 1034354 - RNA, 22 nt, Human
ugcauuaugcuacccagaagcu

SEQ ID NO: 1034355 - RNA, 22 nt, Human
ucacaggguuuggaagccuccu

SEQ ID NO: 1034356 - RNA, 22 nt, Human
gccuucugcgcucgugucuccg

SEQ ID NO: 1034357 - RNA, 17 nt, Human
agagagagcaugccacc

SEQ ID NO: 1034358 - RNA, 22 nt, Human
acauuucugcauguaggguaau

SEQ ID NO: 1034359 - RNA, 22 nt, Human
gcuccugucuuggggcacuggc

SEQ ID NO: 1034360 - RNA, 22 nt, Human
ucagccagugccuugaucuugc

SEQ ID NO: 1034361 - RNA, 22 nt, Human
aaaugcauuuuuaauuagaccc

SEQ ID NO: 1034362 - RNA, 22 nt, Human
ugcugccauggucgcugguguc

SEQ ID NO: 1034363 - RNA, 20 nt, Human
gugcauuucaccuguacugu

SEQ ID NO: 1034364 - RNA, 22 nt, Human
ucucccacagucucccauggcu

SEQ ID NO: 1034365 - RNA, 22 nt, Human
gccagagcaugcacugccugca

SEQ ID NO: 1034366 - RNA, 19 nt, Human
ugucucagugucccuuccu

SEQ ID NO: 1034367 - RNA, 22 nt, Human
ugucccagacauaaguggacau

SEQ ID NO: 1034368 - RNA, 23 nt, Human
ggccucuguguucugcccacaug

SEQ ID NO: 1034369 - RNA, 22 nt, Human
ugggcagagaguagaggcaacg

SEQ ID NO: 1034370 - RNA, 22 nt, Human
uggucucuucuuccaagauggc

SEQ ID NO: 1034371 - RNA, 22 nt, Human
agagccuggcucccagcuaccg

SEQ ID NO: 1034372 - RNA, 20 nt, Human
ggcugcugugggcagagagg

SEQ ID NO: 1034373 - RNA, 22 nt, Human
guggauggauuuugaggaaugg

SEQ ID NO: 1034374 - RNA, 22 nt, Human
gaggcccaguccugcaagcacg

SEQ ID NO: 1034375 - RNA, 22 nt, Human
gcugccaugccacagcacucac

SEQ ID NO: 1034376 - RNA, 22 nt, Human
uugggguguuggauggagcaag

SEQ ID NO: 1034377 - RNA, 22 nt, Human
gagcuuccauggacgccaucug

SEQ ID NO: 1034378 - RNA, 22 nt, Human
caaagucccagcugcuuagaga

SEQ ID NO: 1034379 - RNA, 22 nt, Human
aaaggugacacucugccagcug

SEQ ID NO: 1034380 - RNA, 22 nt, Human
gucccuggggaaucagcuggag

SEQ ID NO: 1034381 - RNA, 19 nt, Human
ggaccagguccugggcagc

SEQ ID NO: 1034382 - RNA, 22 nt, Human
cuagucacucagcacugacaaa

SEQ ID NO: 1034383 - RNA, 23 nt, Human
ggccauggagacuuagaaugggc

SEQ ID NO: 1034384 - RNA, 22 nt, Human
uucagcagugcagacacccagu

SEQ ID NO: 1034385 - RNA, 22 nt, Human
caaaggagguaaugggugugag

SEQ ID NO: 1034386 - RNA, 22 nt, Human
ugcucuguaacaaauugacaug

SEQ ID NO: 1034387 - RNA, 22 nt, Human
ugcagccauuuucugccaaugc

SEQ ID NO: 1034388 - RNA, 22 nt, Human
uuaugacaggaaaaucacagaa

SEQ ID NO: 1034389 - RNA, 22 nt, Human
cagggugggcacccagccucca

SEQ ID NO: 1034390 - RNA, 22 nt, Human
gagaagguggaccugaaggagc

SEQ ID NO: 1034391 - RNA, 22 nt, Human
cugaaauuccauuucagccaca

SEQ ID NO: 1034392 - RNA, 22 nt, Human
cccugggcaagcccuauuuucc

SEQ ID NO: 1034393 - RNA, 22 nt, Human
ugcagcuccucuggcugccuga

SEQ ID NO: 1034394 - RNA, 22 nt, Human
cagcagcugcgugcccaggccg

SEQ ID NO: 1034395 - RNA, 22 nt, Human
uaaguucaguuggucgaaguag

SEQ ID NO: 1034396 - RNA, 22 nt, Human
ugcuuuggccacuagaauucag

SEQ ID NO: 1034397 - RNA, 22 nt, Human
gcucugugcaguucagggacac

SEQ ID NO: 1034398 - RNA, 22 nt, Human
ggggauggaggcgugugguccu

SEQ ID NO: 1034399 - RNA, 22 nt, Human
gcugucugucuucacaucucgc

SEQ ID NO: 1034400 - RNA, 22 nt, Human
uuuuccucaggaaugcuaagcu

SEQ ID NO: 1034401 - RNA, 20 nt, Human
cccagggaccugagcuccau

SEQ ID NO: 1034402 - RNA, 22 nt, Human
caggccagugugcuucccaggc

SEQ ID NO: 1034403 - RNA, 22 nt, Human
caggaaagagcugccaggcagg

SEQ ID NO: 1034404 - RNA, 22 nt, Human
uggagcugacucacaccagcua

SEQ ID NO: 1034405 - RNA, 22 nt, Human
gcuggggucugugaggagggcu

SEQ ID NO: 1034406 - RNA, 22 nt, Human
gcuuccuagaucugugguacuc

SEQ ID NO: 1034407 - RNA, 22 nt, Human
acagaaauauagaagguaggaa

SEQ ID NO: 1034408 - RNA, 22 nt, Human
ggcagcugagcauggcuaccuu

SEQ ID NO: 1034409 - RNA, 22 nt, Human
cucaccaggaacagcugcggag

SEQ ID NO: 1034410 - RNA, 22 nt, Human
uggcucaggauaauuuucccaa

SEQ ID NO: 1034411 - RNA, 22 nt, Human
ccagucugugugccagccugcg

SEQ ID NO: 1034412 - RNA, 22 nt, Human
acacccagagcgccagugccga

SEQ ID NO: 1034413 - RNA, 22 nt, Human
aggaaaaauaaggcagcagggc

SEQ ID NO: 1034414 - RNA, 22 nt, Human
ccagggcugcugugggacucca

SEQ ID NO: 1034415 - RNA, 22 nt, Human
aacucagucauaaagcgaaugc

SEQ ID NO: 1034416 - RNA, 22 nt, Human
gggcugagucugcugccuguca

SEQ ID NO: 1034417 - RNA, 22 nt, Human
uccucaggauguggaguagaau

SEQ ID NO: 1034418 - RNA, 23 nt, Human
ucagagaaguuguaggcugggga

SEQ ID NO: 1034419 - RNA, 22 nt, Human
gugcagcugugugagagcucca

SEQ ID NO: 1034420 - RNA, 22 nt, Human
agcagagcggggccuccggaag

SEQ ID NO: 1034421 - RNA, 17 nt, Human
uggagcugcguguguuc

SEQ ID NO: 1034422 - RNA, 21 nt, Human
aggcucagagaucaaacagua

SEQ ID NO: 1034423 - RNA, 22 nt, Human
ccuggcagguggagguugcagu

SEQ ID NO: 1034424 - RNA, 22 nt, Human
ugcagggcuacaggacuacaac

SEQ ID NO: 1034425 - RNA, 22 nt, Human
agauacauauagaaaacaucaa

SEQ ID NO: 1034426 - RNA, 22 nt, Human
gugccuggcacacagaaggcaa

SEQ ID NO: 1034427 - RNA, 22 nt, Human
ugcauuaucuuuaauguucuca

SEQ ID NO: 1034428 - RNA, 22 nt, Human
uuggcugaagguuaagugcugg

SEQ ID NO: 1034429 - RNA, 22 nt, Human
aaaucuaggcucauccuggucc

SEQ ID NO: 1034430 - RNA, 22 nt, Human
gugagcagaacagguggcuucu

SEQ ID NO: 1034431 - RNA, 22 nt, Human
guccucugggcagcugccccac

SEQ ID NO: 1034432 - RNA, 22 nt, Human
aaagguuaagguguucaagaaa

SEQ ID NO: 1034433 - RNA, 22 nt, Human
gcugccacgaucucugcuguag

SEQ ID NO: 1034434 - RNA, 22 nt, Human
gcucucugccuuucucaaugac

SEQ ID NO: 1034435 - RNA, 22 nt, Human
ucccagaguauuagcaauugcu

SEQ ID NO: 1034436 - RNA, 22 nt, Human
ucaaaagucugcauucuucaca

SEQ ID NO: 1034437 - RNA, 20 nt, Human
uucauucauuccacaacuuc

SEQ ID NO: 1034438 - RNA, 20 nt, Human
ugccaugguaacagagugug

SEQ ID NO: 1034439 - RNA, 22 nt, Human
ucucagggccucccucuguuuc

SEQ ID NO: 1034440 - RNA, 22 nt, Human
gcagccagaagacucagaacaa

SEQ ID NO: 1034441 - RNA, 22 nt, Human
ugcagcagguuccaaaggguua

SEQ ID NO: 1034442 - RNA, 22 nt, Human
ggcagggaggaggugaaaguga

SEQ ID NO: 1034443 - RNA, 20 nt, Human
aagcagaagcugcucucagc

SEQ ID NO: 1034444 - RNA, 20 nt, Human
gugggcagcaggcauacugg

SEQ ID NO: 1034445 - RNA, 22 nt, Human
aguguguguuugggcgguuuau

SEQ ID NO: 1034446 - RNA, 22 nt, Human
cugcuggccuagcccauccucu

SEQ ID NO: 1034447 - RNA, 22 nt, Human
gcaggggcugagcaccagcggg

SEQ ID NO: 1034448 - RNA, 22 nt, Human
auuucuuuucaagagggugcuu

SEQ ID NO: 1034449 - RNA, 22 nt, Human
ccaggaggcggaagguacagug

SEQ ID NO: 1034450 - RNA, 22 nt, Human
ugggcacaaacaucugccuguu

SEQ ID NO: 1034451 - RNA, 22 nt, Human
cagcuggaucccugcagaacuu

SEQ ID NO: 1034452 - RNA, 22 nt, Human
ccugccaggagcuggugcugca

SEQ ID NO: 1034453 - RNA, 22 nt, Human
cagugcauagauccugaggccu

SEQ ID NO: 1034454 - RNA, 22 nt, Human
cucuuuccaggguaccccaggu

SEQ ID NO: 1034455 - RNA, 22 nt, Human
gucugucucucuccagagugca

SEQ ID NO: 1034456 - RNA, 22 nt, Human
caggccucagagaguggcgggg

SEQ ID NO: 1034457 - RNA, 22 nt, Human
acagagcucccagccaucuccu

SEQ ID NO: 1034458 - RNA, 22 nt, Human
gaaggccuagggaugcucugcg

SEQ ID NO: 1034459 - RNA, 22 nt, Human
agucagugaaaacuagaauguu

SEQ ID NO: 1034460 - RNA, 22 nt, Human
cacugccuggaaggagagacau

SEQ ID NO: 1034461 - RNA, 22 nt, Human
gaagcccacguuuggugaugua

SEQ ID NO: 1034462 - RNA, 22 nt, Human
augguuuguguggcccagauga

SEQ ID NO: 1034463 - RNA, 22 nt, Human
ugcugcacaauuggaaaguauc

SEQ ID NO: 1034464 - RNA, 22 nt, Human
ccaggccaaauucagucagcag

SEQ ID NO: 1034465 - RNA, 22 nt, Human
ccagcugguuaaaauagagaaa

SEQ ID NO: 1034466 - RNA, 19 nt, Human
ucccuggcgccucucgggc

SEQ ID NO: 1034467 - RNA, 22 nt, Human
acagcuggaggucugugagcac

SEQ ID NO: 1034468 - RNA, 18 nt, Human
ggagccagucugucucug

SEQ ID NO: 1034469 - RNA, 22 nt, Human
cuccagggaugagacagaguag

SEQ ID NO: 1034470 - RNA, 22 nt, Human
ccugagcuggaagagcuugugc

SEQ ID NO: 1034471 - RNA, 22 nt, Human
ugcaggggcuugucugggccug

SEQ ID NO: 1034472 - RNA, 22 nt, Human
auuauauugaguauaaccagag

SEQ ID NO: 1034473 - RNA, 20 nt, Human
auguagaugaaagcaaaggc

SEQ ID NO: 1034474 - RNA, 22 nt, Human
aaguguguauuguuuaugcugc

SEQ ID NO: 1034475 - RNA, 22 nt, Human
uccagugguacauggagacacu

SEQ ID NO: 1034476 - RNA, 22 nt, Human
aagcgccaugguuccugcgcag

SEQ ID NO: 1034477 - RNA, 22 nt, Human
gaggacagugugaucugccagc

SEQ ID NO: 1034478 - RNA, 22 nt, Human
gugcauauaugcacauaugugu

SEQ ID NO: 1034479 - RNA, 22 nt, Human
gagagcugggggacuguggaug

SEQ ID NO: 1034480 - RNA, 22 nt, Human
gagcuuggugaugccuccuggu

SEQ ID NO: 1034481 - RNA, 22 nt, Human
cucagcagagaccagggaggaa

SEQ ID NO: 1034482 - RNA, 22 nt, Human
ucaggcagcuccaggaauggua

SEQ ID NO: 1034483 - RNA, 22 nt, Human
aauaauuuccagccaacuggaa

SEQ ID NO: 1034484 - RNA, 22 nt, Human
aggaggcccuagagcucuagag

SEQ ID NO: 1034485 - RNA, 17 nt, Human
cucugcagugcauggcu

SEQ ID NO: 1034486 - RNA, 22 nt, Human
uggcucaguuuagcagcucagu

SEQ ID NO: 1034487 - RNA, 22 nt, Human
gcagcugcuguggcaucaagcu

SEQ ID NO: 1034488 - RNA, 22 nt, Human
ucauugucuugauaugauuguc

SEQ ID NO: 1034489 - RNA, 23 nt, Human
caggcaggaugaggacuacacuc

SEQ ID NO: 1034490 - RNA, 22 nt, Human
agauaauuugaguaaauuaauu

SEQ ID NO: 1034491 - RNA, 22 nt, Human
agccaaggcagcuagagcucug

SEQ ID NO: 1034492 - RNA, 22 nt, Human
gguccccagcaguggcugcuuc

SEQ ID NO: 1034493 - RNA, 20 nt, Human
uagauuucauacuucucuuu

SEQ ID NO: 1034494 - RNA, 22 nt, Human
cagggugacugcccuggccacu

SEQ ID NO: 1034495 - RNA, 22 nt, Human
gccucugcaucuucgccgcacu

SEQ ID NO: 1034496 - RNA, 22 nt, Human
gaggaaaauggaguguaauuaa

SEQ ID NO: 1034497 - RNA, 22 nt, Human
cccagacugcagagcgggcaga

SEQ ID NO: 1034498 - RNA, 22 nt, Human
gcagggcuguggacacuuuggu

SEQ ID NO: 1034499 - RNA, 22 nt, Human
ucacugcaaucucugccuucca

SEQ ID NO: 1034500 - RNA, 23 nt, Human
acuuuagauaaauuaugugcaca

SEQ ID NO: 1034501 - RNA, 22 nt, Human
ugccucagcugaggccgcucca

SEQ ID NO: 1034502 - RNA, 22 nt, Human
cugggcugucaauggcccucug

SEQ ID NO: 1034503 - RNA, 20 nt, Human
cugagcccccagccugcagg

SEQ ID NO: 1034504 - RNA, 19 nt, Human
guggccugcgcugggugcg

SEQ ID NO: 1034505 - RNA, 22 nt, Human
gcucaggagcugacagccucaa

SEQ ID NO: 1034506 - RNA, 22 nt, Human
auaaauuuauaauuguuuccug

SEQ ID NO: 1034507 - RNA, 22 nt, Human
ucaaaaguuucacauagagaua

SEQ ID NO: 1034508 - RNA, 22 nt, Human
caggcacuagcagaaugaggcu

SEQ ID NO: 1034509 - RNA, 22 nt, Human
ucccuggccauuccucuaggcc

SEQ ID NO: 1034510 - RNA, 21 nt, Human
acagcaagccuuccuuucagg

SEQ ID NO: 1034511 - RNA, 22 nt, Human
uagggcagccacccaggcugcu

SEQ ID NO: 1034512 - RNA, 22 nt, Human
agauacaugucaagagacuuau

SEQ ID NO: 1034513 - RNA, 18 nt, Human
uccuccuuuggccuuuuc

SEQ ID NO: 1034514 - RNA, 22 nt, Human
uguaggacauguacuuguaaca

SEQ ID NO: 1034515 - RNA, 22 nt, Human
uggcagcaauuagcuagagcug

SEQ ID NO: 1034516 - RNA, 20 nt, Human
ugcuguaagauuagagagcu

SEQ ID NO: 1034517 - RNA, 22 nt, Human
cugagucucccggcaguggagg

SEQ ID NO: 1034518 - RNA, 22 nt, Human
aaagucauguaaugauaugauu

SEQ ID NO: 1034519 - RNA, 22 nt, Human
cagagagcuuagugugcugcau

SEQ ID NO: 1034520 - RNA, 22 nt, Human
ucacaggaaccaucagagaaau

SEQ ID NO: 1034521 - RNA, 22 nt, Human
acaaagucaaauugcagccgcc

SEQ ID NO: 1034522 - RNA, 20 nt, Human
ugcagcugguuucacaggga

SEQ ID NO: 1034523 - RNA, 22 nt, Human
uggggacauagccagucuggcu

SEQ ID NO: 1034524 - RNA, 22 nt, Human
aguggcagccgagcaggagaug

SEQ ID NO: 1034525 - RNA, 22 nt, Human
cuggagcuaggaaguccaagau

SEQ ID NO: 1034526 - RNA, 22 nt, Human
uggcucugugcuucuaguaucu

SEQ ID NO: 1034527 - RNA, 22 nt, Human
acuucucuucauagguggcaau

SEQ ID NO: 1034528 - RNA, 22 nt, Human
gggugacauuucccaaugagcc

SEQ ID NO: 1034529 - RNA, 22 nt, Human
gcuggcugaggucuagcucuuu

SEQ ID NO: 1034530 - RNA, 22 nt, Human
gaaaguuuauagguuauauaau

SEQ ID NO: 1034531 - RNA, 22 nt, Human
agucauauguggcauuuucuaa

SEQ ID NO: 1034532 - RNA, 22 nt, Human
auaauaaaccaggaugggucug

SEQ ID NO: 1034533 - RNA, 22 nt, Human
uggggagugaugccucggauaa

SEQ ID NO: 1034534 - RNA, 22 nt, Human
uagaaagcuugggguguuuaaa

SEQ ID NO: 1034535 - RNA, 22 nt, Human
agcagccacccagcugcucauu

SEQ ID NO: 1034536 - RNA, 22 nt, Human
uccuucaggccucauucucaua

SEQ ID NO: 1034537 - RNA, 22 nt, Human
uggagcaggcaucuuucucucu

SEQ ID NO: 1034538 - RNA, 22 nt, Human
cugucaguucuuccagauagag

SEQ ID NO: 1034539 - RNA, 22 nt, Human
cuccagggagcugcgggagcca

SEQ ID NO: 1034540 - RNA, 23 nt, Human
ugucacauuuaguuggcauuguu

SEQ ID NO: 1034541 - RNA, 21 nt, Human
cugcuuuacuucagaggaucu

SEQ ID NO: 1034542 - RNA, 22 nt, Human
cacugcuuauaaauucuaggca

SEQ ID NO: 1034543 - RNA, 22 nt, Human
uggcugaaggaagauucuucua

SEQ ID NO: 1034544 - RNA, 22 nt, Human
ugacacagaaauuaagcuguca

SEQ ID NO: 1034545 - RNA, 22 nt, Human
ugucccagacacaguaugcgcu

SEQ ID NO: 1034546 - RNA, 22 nt, Human
agcuggagcuucaagcagguaa

SEQ ID NO: 1034547 - RNA, 19 nt, Human
cccuggcaggcaagccugg

SEQ ID NO: 1034548 - RNA, 22 nt, Human
gcagcuguguaaugagcccaca

SEQ ID NO: 1034549 - RNA, 22 nt, Human
gacccaggguuucugcacaggg

SEQ ID NO: 1034550 - RNA, 22 nt, Human
ggcagcagaacuggcccuguau

SEQ ID NO: 1034551 - RNA, 22 nt, Human
ucaccagucuuucuuaccauug

SEQ ID NO: 1034552 - RNA, 22 nt, Human
gggcagagacucagaaacagaa

SEQ ID NO: 1034553 - RNA, 22 nt, Human
ucucacugggucacagcagagg

SEQ ID NO: 1034554 - RNA, 22 nt, Human
uugacaauugggagauauaaag

SEQ ID NO: 1034555 - RNA, 22 nt, Human
cgggcuggcugcagcugcugga

SEQ ID NO: 1034556 - RNA, 23 nt, Human
ucacagggcacuggcugggguug

SEQ ID NO: 1034557 - RNA, 23 nt, Human
uuugcaaauuggacacaaccaca

SEQ ID NO: 1034558 - RNA, 22 nt, Human
uccuugaaaggggcugcagggc

SEQ ID NO: 1034559 - RNA, 22 nt, Human
agcagccagaaauccagaggug

SEQ ID NO: 1034560 - RNA, 21 nt, Human
aacaaagggaugcucaucuuu

SEQ ID NO: 1034561 - RNA, 22 nt, Human
acaugauuggacuccuuccccu

SEQ ID NO: 1034562 - RNA, 22 nt, Human
ucccagccacagguguagcccu

SEQ ID NO: 1034563 - RNA, 22 nt, Human
uucuuuaaaauagugagaaaga

SEQ ID NO: 1034564 - RNA, 22 nt, Human
ugagagugaaaugucacauguc

SEQ ID NO: 1034565 - RNA, 22 nt, Human
agcagggcagcugaugcgcacg

SEQ ID NO: 1034566 - RNA, 22 nt, Human
accucugcaacccuggaauggg

SEQ ID NO: 1034567 - RNA, 22 nt, Human
uggcugaauaaaauaugguguu

SEQ ID NO: 1034568 - RNA, 22 nt, Human
cagagccucagaauccugugga

SEQ ID NO: 1034569 - RNA, 21 nt, Human
cucaggaucuuauauauuagu

SEQ ID NO: 1034570 - RNA, 22 nt, Human
gcugucacacaugggaucucag

SEQ ID NO: 1034571 - RNA, 21 nt, Human
agacagaacaacugcucucca

SEQ ID NO: 1034572 - RNA, 22 nt, Human
cacagaagaaucaugcuguguu

SEQ ID NO: 1034573 - RNA, 22 nt, Human
agagcuguagcuuccuagagcc

SEQ ID NO: 1034574 - RNA, 22 nt, Human
aggcugucaucuuugcaggcag

SEQ ID NO: 1034575 - RNA, 22 nt, Human
ggagagcaggguccugagauac

SEQ ID NO: 1034576 - RNA, 22 nt, Human
gcugccugcacagagcugcuuu

SEQ ID NO: 1034577 - RNA, 22 nt, Human
cagucccaccaggaucgcucuu

SEQ ID NO: 1034578 - RNA, 22 nt, Human
gcagccacugggagugcuuaua

SEQ ID NO: 1034579 - RNA, 22 nt, Human
ggcacugagaacaggcugacuu

SEQ ID NO: 1034580 - RNA, 22 nt, Human
ucuuucucucuaaucaagcaca

SEQ ID NO: 1034581 - RNA, 22 nt, Human
cugagccaaaaagcagagcuug

SEQ ID NO: 1034582 - RNA, 22 nt, Human
cuggggugagcagaaacagggg

SEQ ID NO: 1034583 - RNA, 22 nt, Human
agcauuuaguuaguaaauguuu

SEQ ID NO: 1034584 - RNA, 22 nt, Human
gggccuccggggugagcugugg

SEQ ID NO: 1034585 - RNA, 22 nt, Human
acaaagucuuuuacaacaguca

SEQ ID NO: 1034586 - RNA, 22 nt, Human
uuacaucuaaacugugaacaau

SEQ ID NO: 1034587 - RNA, 22 nt, Human
acuuucucaaaucagacuuuaa

SEQ ID NO: 1034588 - RNA, 22 nt, Human
aagcuuccugaaugcucauuua

SEQ ID NO: 1034589 - RNA, 22 nt, Human
ugggcugccggcaggcucugcc

SEQ ID NO: 1034590 - RNA, 20 nt, Human
uugcauuggaugugcaggug

SEQ ID NO: 1034591 - RNA, 22 nt, Human
ccagucacagguguguuuauau

SEQ ID NO: 1034592 - RNA, 22 nt, Human
ggccuagggaguggccaugccu

SEQ ID NO: 1034593 - RNA, 22 nt, Human
ucugccuguucaagucuucuag

SEQ ID NO: 1034594 - RNA, 22 nt, Human
cccagcccaucucaaaggucua

SEQ ID NO: 1034595 - RNA, 22 nt, Human
auugucuguacuuuaaaaaugu

SEQ ID NO: 1034596 - RNA, 22 nt, Human
ucagaggaauaaugcugcauuu

SEQ ID NO: 1034597 - RNA, 22 nt, Human
cugaggccucucuccugggcuu

SEQ ID NO: 1034598 - RNA, 22 nt, Human
cugcagugaaaucaggaagcaa

SEQ ID NO: 1034599 - RNA, 22 nt, Human
gugcuuccugccuggugccuuu

SEQ ID NO: 1034600 - RNA, 22 nt, Human
uuugcauuuuagauuuaggccu

SEQ ID NO: 1034601 - RNA, 22 nt, Human
uucauuccuucuguaccuugcc

SEQ ID NO: 1034602 - RNA, 22 nt, Human
auugacaaauggauguugacau

SEQ ID NO: 1034603 - RNA, 22 nt, Human
acucucagaggguggcagcaau

SEQ ID NO: 1034604 - RNA, 17 nt, Human
gcuggcugacccaugcc

SEQ ID NO: 1034605 - RNA, 22 nt, Human
auguuauuuuggaaaauacaaa

SEQ ID NO: 1034606 - RNA, 22 nt, Human
agccagcaggugagugcagccu

SEQ ID NO: 1034607 - RNA, 22 nt, Human
uagccuucucaagacaaaguug

SEQ ID NO: 1034608 - RNA, 22 nt, Human
cugggacacccaaggaaagagc

SEQ ID NO: 1034609 - RNA, 22 nt, Human
aggagcugcauggauaccuggu

SEQ ID NO: 1034610 - RNA, 18 nt, Human
ucaagacaucaugaaaua

SEQ ID NO: 1034611 - RNA, 22 nt, Human
aagauuuagggccaguuuacau

SEQ ID NO: 1034612 - RNA, 23 nt, Human
uaagaacagacaagcauuuacau

SEQ ID NO: 1034613 - RNA, 22 nt, Human
ucuaaaaaagucuguucacuug

SEQ ID NO: 1034614 - RNA, 20 nt, Human
ggccuuggguuucgccuguu

SEQ ID NO: 1034615 - RNA, 22 nt, Human
ccugucuguccucucaugagcc

SEQ ID NO: 1034616 - RNA, 22 nt, Human
agucccagcuacucaagaggcu

SEQ ID NO: 1034617 - RNA, 22 nt, Human
aaaugaccagaauacaggcuuc

SEQ ID NO: 1034618 - RNA, 22 nt, Human
acauuucuugaugccucuguga

SEQ ID NO: 1034619 - RNA, 22 nt, Human
gagccuggauugucaccgacuu

SEQ ID NO: 1034620 - RNA, 22 nt, Human
ugcaauaaggaguaauaguaaa

SEQ ID NO: 1034621 - RNA, 22 nt, Human
gcugugcagccaagugccucug

SEQ ID NO: 1034622 - RNA, 22 nt, Human
gaaggaaaucugugauuuaugc

SEQ ID NO: 1034623 - RNA, 22 nt, Human
ggaggcaggaaagacagguuca

SEQ ID NO: 1034624 - RNA, 22 nt, Human
uacuuugucauucuaaccuucc

SEQ ID NO: 1034625 - RNA, 22 nt, Human
gugucccagccccacaggccug

SEQ ID NO: 1034626 - RNA, 22 nt, Human
agucccaguucgguucuuccuc

SEQ ID NO: 1034627 - RNA, 22 nt, Human
ugggccacaagccaugggacca

SEQ ID NO: 1034628 - RNA, 22 nt, Human
ugccagaagauucucuaucaga

SEQ ID NO: 1034629 - RNA, 23 nt, Human
ucuuuacauacugaugaguucuc

SEQ ID NO: 1034630 - RNA, 22 nt, Human
aaguauauuuuuugaagcauau

SEQ ID NO: 1034631 - RNA, 22 nt, Human
ggaggaugccaagcugugcaca

SEQ ID NO: 1034632 - RNA, 22 nt, Human
uguggcugacuccuggucccca

SEQ ID NO: 1034633 - RNA, 20 nt, Human
agauggugaaggccagggag

SEQ ID NO: 1034634 - RNA, 22 nt, Human
aagcccaguuucacacugagac

SEQ ID NO: 1034635 - RNA, 22 nt, Human
gucaaguuuauccgcucauuca

SEQ ID NO: 1034636 - RNA, 22 nt, Human
gagcaggcucugccuguguguc

SEQ ID NO: 1034637 - RNA, 19 nt, Human
gcuguauuaaagauacaug

SEQ ID NO: 1034638 - RNA, 22 nt, Human
gcugccaguguggcaugaugca

SEQ ID NO: 1034639 - RNA, 22 nt, Human
agccaggaaugcaugcucugcu

SEQ ID NO: 1034640 - RNA, 22 nt, Human
ugccugucuucaggagugucac

SEQ ID NO: 1034641 - RNA, 22 nt, Human
ggagaccagaaggaagcuucga

SEQ ID NO: 1034642 - RNA, 22 nt, Human
aggacuucuccgauaagucaga

SEQ ID NO: 1034643 - RNA, 22 nt, Human
uccugggcugugugccacucug

SEQ ID NO: 1034644 - RNA, 22 nt, Human
gaggucagucagaccaggguuu

SEQ ID NO: 1034645 - RNA, 22 nt, Human
gggugggccugucuggccaugu

SEQ ID NO: 1034646 - RNA, 22 nt, Human
uaugaguacaaggacucugucu

SEQ ID NO: 1034647 - RNA, 22 nt, Human
aagagcugcccaaggugaacag

SEQ ID NO: 1034648 - RNA, 22 nt, Human
agggugcagaaggagccuagga

SEQ ID NO: 1034649 - RNA, 22 nt, Human
uugcaccauuucacuuccauua

SEQ ID NO: 1034650 - RNA, 22 nt, Human
cacagaguggaggcuuggccug

SEQ ID NO: 1034651 - RNA, 22 nt, Human
caugaagcuugaagcaguccac

SEQ ID NO: 1034652 - RNA, 22 nt, Human
caucacugacgcugagauucca

SEQ ID NO: 1034653 - RNA, 22 nt, Human
acagggcauuuccucuaugugu

SEQ ID NO: 1034654 - RNA, 22 nt, Human
ugggccuggagcccuggagagu

SEQ ID NO: 1034655 - RNA, 22 nt, Human
cuguuuauuacacuggauagca

SEQ ID NO: 1034656 - RNA, 22 nt, Human
gcagccacagaggagggaugca

SEQ ID NO: 1034657 - RNA, 22 nt, Human
accaggcuggagugcaguggcg

SEQ ID NO: 1034658 - RNA, 22 nt, Human
aaaggucaagcuggacucaggu

SEQ ID NO: 1034659 - RNA, 22 nt, Human
auggaaaggcuguggaaacuua

SEQ ID NO: 1034660 - RNA, 19 nt, Human
caguggagauuggaggagg

SEQ ID NO: 1034661 - RNA, 22 nt, Human
ccuggcagcuaagugcuuugag

SEQ ID NO: 1034662 - RNA, 22 nt, Human
cugagguggaacagaggugaag

SEQ ID NO: 1034663 - RNA, 22 nt, Human
gagggauggugugagaggcuca

SEQ ID NO: 1034664 - RNA, 22 nt, Human
aaaugcacaauaaaguaaaggc

SEQ ID NO: 1034665 - RNA, 22 nt, Human
gcugccacucugagcuugcuuc

SEQ ID NO: 1034666 - RNA, 22 nt, Human
cauugcucaggcccagcaggaa

SEQ ID NO: 1034667 - RNA, 22 nt, Human
gccuccugagaagccacaggcu

SEQ ID NO: 1034668 - RNA, 22 nt, Human
guuauugcaguauagaggucua

SEQ ID NO: 1034669 - RNA, 22 nt, Human
gccuggaggggacagucucugg

SEQ ID NO: 1034670 - RNA, 22 nt, Human
uccucaggcugccuggaagacu

SEQ ID NO: 1034671 - RNA, 22 nt, Human
gagcacagccaaaguaagaagg

SEQ ID NO: 1034672 - RNA, 22 nt, Human
gccaggugcauggcugagucuc

SEQ ID NO: 1034673 - RNA, 22 nt, Human
uggaagcacuuggguuuuguug

SEQ ID NO: 1034674 - RNA, 22 nt, Human
gccugggagagggauagugcag

SEQ ID NO: 1034675 - RNA, 22 nt, Human
agcagcauucucugguaugggg

SEQ ID NO: 1034676 - RNA, 22 nt, Human
aaucaguuaaauauugaguaca

SEQ ID NO: 1034677 - RNA, 22 nt, Human
uccucucagugugguuguggga

SEQ ID NO: 1034678 - RNA, 22 nt, Human
augcacuugcguguuugcaaau

SEQ ID NO: 1034679 - RNA, 22 nt, Human
ggcugccugugcccaggcacac

SEQ ID NO: 1034680 - RNA, 22 nt, Human
gaagagcugcaguuuccugggc

SEQ ID NO: 1034681 - RNA, 22 nt, Human
gcagggugaaggucacauagaa

SEQ ID NO: 1034682 - RNA, 22 nt, Human
ucuccuucgaggcccagcuccc

SEQ ID NO: 1034683 - RNA, 22 nt, Human
aggccugaggaccuucuggagg

SEQ ID NO: 1034684 - RNA, 22 nt, Human
aggagcugacuuguaaagcauu

SEQ ID NO: 1034685 - RNA, 22 nt, Human
cauucauuagaauagauaugua

SEQ ID NO: 1034686 - RNA, 22 nt, Human
acagggccagccugggaccugg

SEQ ID NO: 1034687 - RNA, 19 nt, Human
cugaggugcaguaagaggc

SEQ ID NO: 1034688 - RNA, 20 nt, Human
ucagggcaugggacagcccc

SEQ ID NO: 1034689 - RNA, 22 nt, Human
cugccucaugcugccugcagcc

SEQ ID NO: 1034690 - RNA, 22 nt, Human
ugggcugcugucugcacaugcu

SEQ ID NO: 1034691 - RNA, 22 nt, Human
ugccuggguucccaccccaaag

SEQ ID NO: 1034692 - RNA, 22 nt, Human
ucagcuccucaugcaggggaua

SEQ ID NO: 1034693 - RNA, 22 nt, Human
uuaugcuaaaugaaucaaguca

SEQ ID NO: 1034694 - RNA, 22 nt, Human
agcagcugguaggaguggccac

SEQ ID NO: 1034695 - RNA, 22 nt, Human
uauuucuggcuuugagggugau

SEQ ID NO: 1034696 - RNA, 22 nt, Human
uacauguaauuuucauaguaag

SEQ ID NO: 1034697 - RNA, 22 nt, Human
ugccugucucugacugccauua

SEQ ID NO: 1034698 - RNA, 22 nt, Human
ucuguuccaguagaaaggugca

SEQ ID NO: 1034699 - RNA, 22 nt, Human
ccagcuugaagaugugcugguu

SEQ ID NO: 1034700 - RNA, 22 nt, Human
ugaacccaggagguugcaguga

SEQ ID NO: 1034701 - RNA, 21 nt, Human
cauuucuauugaugagaaaag

SEQ ID NO: 1034702 - RNA, 22 nt, Human
cugcagagcauaaaucugaaua

SEQ ID NO: 1034703 - RNA, 22 nt, Human
aauuccugucuuaacaguucug

SEQ ID NO: 1034704 - RNA, 22 nt, Human
gcugucccgaaccccugguaau

SEQ ID NO: 1034705 - RNA, 22 nt, Human
ccgggccucgggacaccgggua

SEQ ID NO: 1034706 - RNA, 20 nt, Human
gcccacucuaauccacuguc

SEQ ID NO: 1034707 - RNA, 22 nt, Human
cagggccuuauccugccauuga

SEQ ID NO: 1034708 - RNA, 22 nt, Human
agcagcugucccuuaacaucag

SEQ ID NO: 1034709 - RNA, 22 nt, Human
cccaggaggcagagcuugcagu

SEQ ID NO: 1034710 - RNA, 22 nt, Human
augcagagacagauguggcaug

SEQ ID NO: 1034711 - RNA, 22 nt, Human
ugccugucuccucugcagggug

SEQ ID NO: 1034712 - RNA, 22 nt, Human
ugucuucaguaaaauacacuau

SEQ ID NO: 1034713 - RNA, 22 nt, Human
uauaagaaacaaggcaaauuuu

SEQ ID NO: 1034714 - RNA, 22 nt, Human
auaauuuaaauuaguaugugau

SEQ ID NO: 1034715 - RNA, 22 nt, Human
ggaggaccccagcagcucccca

SEQ ID NO: 1034716 - RNA, 22 nt, Human
caggcaccccaggugagcacug

SEQ ID NO: 1034717 - RNA, 23 nt, Human
uuacaguaggaguuggaaaacca

SEQ ID NO: 1034718 - RNA, 22 nt, Human
ugucccagucaaggcugucauc

SEQ ID NO: 1034719 - RNA, 22 nt, Human
ucccugggccacagcugugagc

SEQ ID NO: 1034720 - RNA, 22 nt, Human
ucccagcauaacaaacugcccg

SEQ ID NO: 1034721 - RNA, 22 nt, Human
gacagaagaggaacuuggacag

SEQ ID NO: 1034722 - RNA, 22 nt, Human
ggcuucagugacuggugcccuc

SEQ ID NO: 1034723 - RNA, 22 nt, Human
aaugcacauauauguguauaca

SEQ ID NO: 1034724 - RNA, 22 nt, Human
ucccagaggcuccagucucuau

SEQ ID NO: 1034725 - RNA, 22 nt, Human
gucccagaaacauauugcuggu

SEQ ID NO: 1034726 - RNA, 18 nt, Human
ggcugccuguuccugaag

SEQ ID NO: 1034727 - RNA, 22 nt, Human
cugucaccuguucacugcagca

SEQ ID NO: 1034728 - RNA, 22 nt, Human
cugccugugccaaugcuccuuu

SEQ ID NO: 1034729 - RNA, 22 nt, Human
ugcugccuccaacuccugggcu

SEQ ID NO: 1034730 - RNA, 22 nt, Human
agggcagcuaaggugcugacug

SEQ ID NO: 1034731 - RNA, 22 nt, Human
acuuccuguuaugugugccucu

SEQ ID NO: 1034732 - RNA, 22 nt, Human
ccuggagauuauuugguccaau

SEQ ID NO: 1034733 - RNA, 22 nt, Human
aggccuguuccuuccugggcac

SEQ ID NO: 1034734 - RNA, 22 nt, Human
augggcagcagcugccauucau

SEQ ID NO: 1034735 - RNA, 22 nt, Human
gagcagggccacuucuguaccu

SEQ ID NO: 1034736 - RNA, 22 nt, Human
guuccacaaaauguacccaguu

SEQ ID NO: 1034737 - RNA, 22 nt, Human
uuguccuuggaugaagcuggga

SEQ ID NO: 1034738 - RNA, 22 nt, Human
ugcuggaggggccugaccagga

SEQ ID NO: 1034739 - RNA, 22 nt, Human
gacaugcaacaauuuggcauuu

SEQ ID NO: 1034740 - RNA, 22 nt, Human
acuuugaaacuaaaauucauua

SEQ ID NO: 1034741 - RNA, 22 nt, Human
agccuccaaaugucaggucccg

SEQ ID NO: 1034742 - RNA, 22 nt, Human
cugugcaagacuuacuuuaaua

SEQ ID NO: 1034743 - RNA, 22 nt, Human
ucuuccucuagaucugaggccc

SEQ ID NO: 1034744 - RNA, 22 nt, Human
caucacuguccucagcauucca

SEQ ID NO: 1034745 - RNA, 22 nt, Human
gccaggcucucagugacugccc

SEQ ID NO: 1034746 - RNA, 22 nt, Human
ucuggagcuuguuucagauggu

SEQ ID NO: 1034747 - RNA, 22 nt, Human
auugaaagguuuugagcagaua

SEQ ID NO: 1034748 - RNA, 22 nt, Human
aaggcacuuuuccugagaugau

SEQ ID NO: 1034749 - RNA, 22 nt, Human
agggagacacaugaggaaguca

SEQ ID NO: 1034750 - RNA, 22 nt, Human
aagggcuggcccugggaagagu

SEQ ID NO: 1034751 - RNA, 22 nt, Human
gaacagcugcuagagaucugug

SEQ ID NO: 1034752 - RNA, 22 nt, Human
ggccugcacagagguggcucua

SEQ ID NO: 1034753 - RNA, 22 nt, Human
caggccugagacaucugagaua

SEQ ID NO: 1034754 - RNA, 22 nt, Human
aggagaaagacuggacagccaa

SEQ ID NO: 1034755 - RNA, 22 nt, Human
gagcagcugagcuggaaugaga

SEQ ID NO: 1034756 - RNA, 22 nt, Human
ucagggcauucaagaggccugg

SEQ ID NO: 1034757 - RNA, 20 nt, Human
uccaguuuuggagacauucu

SEQ ID NO: 1034758 - RNA, 22 nt, Human
cucuuccucucaugcggucaua

SEQ ID NO: 1034759 - RNA, 22 nt, Human
aggguauaaagagcaagcagaa

SEQ ID NO: 1034760 - RNA, 22 nt, Human
acagccaggaauucuggagaag

SEQ ID NO: 1034761 - RNA, 22 nt, Human
ugggccugaguuugggaacugg

SEQ ID NO: 1034762 - RNA, 22 nt, Human
gcucagagauggggaaugaaaa

SEQ ID NO: 1034763 - RNA, 22 nt, Human
gcugagggcuguaacagcagag

SEQ ID NO: 1034764 - RNA, 22 nt, Human
aagcagccucauuugugguaag

SEQ ID NO: 1034765 - RNA, 22 nt, Human
aggcccuguccauggugcugaa

SEQ ID NO: 1034766 - RNA, 22 nt, Human
ugcucuucggggccacugcuug

SEQ ID NO: 1034767 - RNA, 23 nt, Human
agcagggccagaauacuugcugu

SEQ ID NO: 1034768 - RNA, 22 nt, Human
gagaaagauguaggcugggagg

SEQ ID NO: 1034769 - RNA, 22 nt, Human
gccuucugauugcuggacugac

SEQ ID NO: 1034770 - RNA, 22 nt, Human
uggcucugucaaacugcacaca

SEQ ID NO: 1034771 - RNA, 23 nt, Human
agagcuuucuaaaauguaaaucu

SEQ ID NO: 1034772 - RNA, 22 nt, Human
ggguccagaguugaagagguua

SEQ ID NO: 1034773 - RNA, 22 nt, Human
ggcaggcuggcuuuguuccagg

SEQ ID NO: 1034774 - RNA, 22 nt, Human
ugagccaggcucaagugauccu

SEQ ID NO: 1034775 - RNA, 19 nt, Human
agguggucuaggcuggaga

SEQ ID NO: 1034776 - RNA, 22 nt, Human
gcugccaguaguuggagcucca

SEQ ID NO: 1034777 - RNA, 23 nt, Human
aagcugccuucgcaguuggucug

SEQ ID NO: 1034778 - RNA, 22 nt, Human
caggccaggcugcauuugcccc

SEQ ID NO: 1034779 - RNA, 22 nt, Human
gcacuaaaccaacauguaauaa

SEQ ID NO: 1034780 - RNA, 22 nt, Human
ugagugccugaacauagaguag

SEQ ID NO: 1034781 - RNA, 22 nt, Human
ccaaggagcucauauucuuguu

SEQ ID NO: 1034782 - RNA, 22 nt, Human
agccccacacucucucugagaa

SEQ ID NO: 1034783 - RNA, 22 nt, Human
gccaggccugcaagugcuggug

SEQ ID NO: 1034784 - RNA, 22 nt, Human
agagaacacgugcaucugcaau

SEQ ID NO: 1034785 - RNA, 22 nt, Human
cagcugaauucuucagacucca

SEQ ID NO: 1034786 - RNA, 22 nt, Human
guguguccaggcgggagucaag

SEQ ID NO: 1034787 - RNA, 22 nt, Human
cucuggagaacuccuugugucu

SEQ ID NO: 1034788 - RNA, 22 nt, Human
agggacacacuccaguguuauu

SEQ ID NO: 1034789 - RNA, 22 nt, Human
cuggcucauuuuagcaucaggu

SEQ ID NO: 1034790 - RNA, 22 nt, Human
uccucaggcggugaggaggggc

SEQ ID NO: 1034791 - RNA, 22 nt, Human
cccagcagaaucugaugagggc

SEQ ID NO: 1034792 - RNA, 22 nt, Human
aacagaaaucauuuagggcucu

SEQ ID NO: 1034793 - RNA, 22 nt, Human
gaaaucugaacucuguauccuu

SEQ ID NO: 1034794 - RNA, 22 nt, Human
uccaggcuggacaugaggcggg

SEQ ID NO: 1034795 - RNA, 22 nt, Human
cugccugugccaccgccucauu

SEQ ID NO: 1034796 - RNA, 22 nt, Human
gaaacccaaacuaagacaguag

SEQ ID NO: 1034797 - RNA, 22 nt, Human
ugcaggccucacaccuggcacc

SEQ ID NO: 1034798 - RNA, 22 nt, Human
uucacauuggugauauguuucu

SEQ ID NO: 1034799 - RNA, 22 nt, Human
gaaaugcaaauucucucucgcu

SEQ ID NO: 1034800 - RNA, 22 nt, Human
cagggagaaaucuccaggaggu

SEQ ID NO: 1034801 - RNA, 22 nt, Human
ugugucagagguagagauggca

SEQ ID NO: 1034802 - RNA, 22 nt, Human
gcuggccuugugucugaggaag

SEQ ID NO: 1034803 - RNA, 22 nt, Human
acugagcucuugacugggaguu

SEQ ID NO: 1034804 - RNA, 22 nt, Human
uuauuuucagcuaggaaagcca

SEQ ID NO: 1034805 - RNA, 22 nt, Human
uuagaaaucugcugccaugcaa

SEQ ID NO: 1034806 - RNA, 22 nt, Human
cuguccuguggaccugaggacg

SEQ ID NO: 1034807 - RNA, 22 nt, Human
ggcggggguccaggagccugca

SEQ ID NO: 1034808 - RNA, 22 nt, Human
cccagggucccugcucucugug

SEQ ID NO: 1034809 - RNA, 22 nt, Human
ggccagagagccgcuguuagga

SEQ ID NO: 1034810 - RNA, 22 nt, Human
agcaucuggucaugagugagaa

SEQ ID NO: 1034811 - RNA, 22 nt, Human
ucucuggaagcgcagaucuguu

SEQ ID NO: 1034812 - RNA, 22 nt, Human
uggcagugccccuugaccagug

SEQ ID NO: 1034813 - RNA, 22 nt, Human
ucaguggauauuucuguggcug

SEQ ID NO: 1034814 - RNA, 22 nt, Human
cagcuucugagcaagccagggg

SEQ ID NO: 1034815 - RNA, 22 nt, Human
aaucagucauuagcucugaccu

SEQ ID NO: 1034816 - RNA, 19 nt, Human
aggucauugauagugcagg

SEQ ID NO: 1034817 - RNA, 22 nt, Human
ggcugccugcuccuccugcacg

SEQ ID NO: 1034818 - RNA, 22 nt, Human
gaggccuggaccagccacagag

SEQ ID NO: 1034819 - RNA, 22 nt, Human
acauacuuuuuaaaagauugcu

SEQ ID NO: 1034820 - RNA, 22 nt, Human
ccccuuccuuccucagacagcc

SEQ ID NO: 1034821 - RNA, 23 nt, Human
aucaaaguggaaaucaauuaucu

SEQ ID NO: 1034822 - RNA, 22 nt, Human
aaggccaugaccacuugcugug

SEQ ID NO: 1034823 - RNA, 22 nt, Human
gagccugggacugggggucaug

SEQ ID NO: 1034824 - RNA, 22 nt, Human
gccuuucaguuccaucaaagga

SEQ ID NO: 1034825 - RNA, 19 nt, Human
ucauaaggagagaggaaau

SEQ ID NO: 1034826 - RNA, 22 nt, Human
agagcccucuucacugccccuu

SEQ ID NO: 1034827 - RNA, 22 nt, Human
cacucccuucaggagccuagga

SEQ ID NO: 1034828 - RNA, 22 nt, Human
agcagggcuuugcagacuuggg

SEQ ID NO: 1034829 - RNA, 22 nt, Human
gcuggggcugggcugaggaaga

SEQ ID NO: 1034830 - RNA, 20 nt, Human
aggcugccaggucucacauc

SEQ ID NO: 1034831 - RNA, 22 nt, Human
ccaggaaugaaauguagauaaa

SEQ ID NO: 1034832 - RNA, 22 nt, Human
aaggcugccucugccagaggag

SEQ ID NO: 1034833 - RNA, 22 nt, Human
cagcugagaccagaaugcaggu

SEQ ID NO: 1034834 - RNA, 22 nt, Human
ggagggcaucaaucaggccugg

SEQ ID NO: 1034835 - RNA, 22 nt, Human
aguuuuucuccccuggcuucau

SEQ ID NO: 1034836 - RNA, 22 nt, Human
ucccucuguguugggcaugccu

SEQ ID NO: 1034837 - RNA, 22 nt, Human
gucucagaguccuacuuauucc

SEQ ID NO: 1034838 - RNA, 22 nt, Human
aggcacuguacuagguacaggg

SEQ ID NO: 1034839 - RNA, 22 nt, Human
ccacaggaccagaggagaucac

SEQ ID NO: 1034840 - RNA, 22 nt, Human
caagcagacaguaggccuagaa

SEQ ID NO: 1034841 - RNA, 16 nt, Human
cagaguguaaacagga

SEQ ID NO: 1034842 - RNA, 22 nt, Human
ucugcuguaaagaauuucugcc

SEQ ID NO: 1034843 - RNA, 22 nt, Human
ggccuguccagccugccuggcu

SEQ ID NO: 1034844 - RNA, 22 nt, Human
ucugccuggguguggagcagag

SEQ ID NO: 1034845 - RNA, 22 nt, Human
cccucccaagcacucugacaua

SEQ ID NO: 1034846 - RNA, 22 nt, Human
acagggccauuaucuguucuag

SEQ ID NO: 1034847 - RNA, 22 nt, Human
aaguucaaggaagccuccaguu

SEQ ID NO: 1034848 - RNA, 22 nt, Human
cuuccaaacccaggguaugggc

SEQ ID NO: 1034849 - RNA, 22 nt, Human
augucacagucugacucaguga

SEQ ID NO: 1034850 - RNA, 22 nt, Human
gccagagccggcuucacaggau

SEQ ID NO: 1034851 - RNA, 22 nt, Human
ugcaauaacccaguaucuguga

SEQ ID NO: 1034852 - RNA, 22 nt, Human
ccaggcuggagugcaauggugc

SEQ ID NO: 1034853 - RNA, 22 nt, Human
aaaucaguuagugguaggauug

SEQ ID NO: 1034854 - RNA, 22 nt, Human
ccugccagauccccugagcuga

SEQ ID NO: 1034855 - RNA, 20 nt, Human
ugaaaggugggaauuguggg

SEQ ID NO: 1034856 - RNA, 23 nt, Human
ccugcagcugcuggggcuccacc

SEQ ID NO: 1034857 - RNA, 18 nt, Human
acagaaauagcugugccu

SEQ ID NO: 1034858 - RNA, 20 nt, Human
acugccuugguucaguaggu

SEQ ID NO: 1034859 - RNA, 22 nt, Human
cucaggacccgguccagguggg

SEQ ID NO: 1034860 - RNA, 20 nt, Human
ggccugagcauggcuggcag

SEQ ID NO: 1034861 - RNA, 22 nt, Human
uugugaaacauucauggauuug

SEQ ID NO: 1034862 - RNA, 22 nt, Human
aacaguaaugugguguuggguu

SEQ ID NO: 1034863 - RNA, 22 nt, Human
gccuggcuccuaagagcacaac

SEQ ID NO: 1034864 - RNA, 22 nt, Human
augacacaauuuuagagcugaa

SEQ ID NO: 1034865 - RNA, 22 nt, Human
caaaauguucuggcaccuuuaa

SEQ ID NO: 1034866 - RNA, 22 nt, Human
ucagggcaagucucagaagguu

SEQ ID NO: 1034867 - RNA, 22 nt, Human
ucuucacaccgggcagcaggaa

SEQ ID NO: 1034868 - RNA, 22 nt, Human
uggagcaggaagucuauggcug

SEQ ID NO: 1034869 - RNA, 22 nt, Human
ugaccaaaggugguuuauuugg

SEQ ID NO: 1034870 - RNA, 22 nt, Human
aggccugggacgggagccguga

SEQ ID NO: 1034871 - RNA, 22 nt, Human
uccucuucugcccaucagaggc

SEQ ID NO: 1034872 - RNA, 22 nt, Human
uggcucagagccuugagagcug

SEQ ID NO: 1034873 - RNA, 22 nt, Human
aaauguguuuagaugguuuauu

SEQ ID NO: 1034874 - RNA, 20 nt, Human
acaauagauuugagcaaagu

SEQ ID NO: 1034875 - RNA, 22 nt, Human
aguauguagugcaaucagucag

SEQ ID NO: 1034876 - RNA, 22 nt, Human
gcucagagaugucugcugccuu

SEQ ID NO: 1034877 - RNA, 22 nt, Human
gcugccaauccagcugugggag

SEQ ID NO: 1034878 - RNA, 22 nt, Human
gcagugaaacaauaggaucaaa

SEQ ID NO: 1034879 - RNA, 22 nt, Human
uugaaaggugcugugugcugau

SEQ ID NO: 1034880 - RNA, 22 nt, Human
agagccagcaacucuagcccug

SEQ ID NO: 1034881 - RNA, 22 nt, Human
gaggcugccccuuccucagcug

SEQ ID NO: 1034882 - RNA, 22 nt, Human
cugccucuugacagaucguggc

SEQ ID NO: 1034883 - RNA, 22 nt, Human
cagccccucacagagcuguccu

SEQ ID NO: 1034884 - RNA, 22 nt, Human
aguguuucuggcaaaugaaagu

SEQ ID NO: 1034885 - RNA, 22 nt, Human
cagcugccccauaaaucacagu

SEQ ID NO: 1034886 - RNA, 22 nt, Human
gccucugcgccucagccgaccu

SEQ ID NO: 1034887 - RNA, 22 nt, Human
agccucucuuuauucccagcua

SEQ ID NO: 1034888 - RNA, 23 nt, Human
uggcccugugcaugcugcuuccc

SEQ ID NO: 1034889 - RNA, 22 nt, Human
ugaaggaaaugacggcagaaga

SEQ ID NO: 1034890 - RNA, 22 nt, Human
ggagaugguggaagcuggugca

SEQ ID NO: 1034891 - RNA, 22 nt, Human
uggccuggggaagaccaugggc

SEQ ID NO: 1034892 - RNA, 23 nt, Human
uugcuucugugcaauucaguacu

SEQ ID NO: 1034893 - RNA, 22 nt, Human
cugcagccucaaccuccugagc

SEQ ID NO: 1034894 - RNA, 22 nt, Human
uuagaaaggaaucuucauuuca

SEQ ID NO: 1034895 - RNA, 22 nt, Human
cuggagaggcugggaacagguu

SEQ ID NO: 1034896 - RNA, 22 nt, Human
gcucacugccauucucuagaug

SEQ ID NO: 1034897 - RNA, 22 nt, Human
aggcagagagcaguggccgucu

SEQ ID NO: 1034898 - RNA, 22 nt, Human
cugaaggaagcagaagcgaggu

SEQ ID NO: 1034899 - RNA, 22 nt, Human
acaggcagcgucauugcugcuc

SEQ ID NO: 1034900 - RNA, 22 nt, Human
ggcugcagcggauuggggauug

SEQ ID NO: 1034901 - RNA, 22 nt, Human
cuggccagacuacacaugugug

SEQ ID NO: 1034902 - RNA, 22 nt, Human
gccagagccacuuuugggugau

SEQ ID NO: 1034903 - RNA, 22 nt, Human
ccuggccucagccuagggcuga

SEQ ID NO: 1034904 - RNA, 22 nt, Human
cguguacagucuaucuuuuuuc

SEQ ID NO: 1034905 - RNA, 22 nt, Human
cuggccucauagccaagcugug

SEQ ID NO: 1034906 - RNA, 22 nt, Human
gugucccaggccucuggaauua

SEQ ID NO: 1034907 - RNA, 22 nt, Human
agaauucugacaauagaauugg

SEQ ID NO: 1034908 - RNA, 22 nt, Human
agggccagcugaugagaaugag

SEQ ID NO: 1034909 - RNA, 22 nt, Human
ucacugcaaggaggcuucucaa

SEQ ID NO: 1034910 - RNA, 22 nt, Human
uagugaaacaguuaucaaucug

SEQ ID NO: 1034911 - RNA, 22 nt, Human
cuuccucccccacacacucacu

SEQ ID NO: 1034912 - RNA, 22 nt, Human
cagagccaggguugcaccccug

SEQ ID NO: 1034913 - RNA, 22 nt, Human
ccugagugaauucccucacugu

SEQ ID NO: 1034914 - RNA, 22 nt, Human
ccagcuccgggaguugcugcug

SEQ ID NO: 1034915 - RNA, 22 nt, Human
aggagcccugcgggaggcagag

SEQ ID NO: 1034916 - RNA, 22 nt, Human
ggugggcacauucagucucugu

SEQ ID NO: 1034917 - RNA, 22 nt, Human
gaauuguacgcuuuacauaggu

SEQ ID NO: 1034918 - RNA, 22 nt, Human
cagagcugcagauugaaggcau

SEQ ID NO: 1034919 - RNA, 22 nt, Human
uggugaagucagcggagcccgg

SEQ ID NO: 1034920 - RNA, 22 nt, Human
cucugagaaagcugugagcuaa

SEQ ID NO: 1034921 - RNA, 22 nt, Human
uggcucaggccuacgacgccuu

SEQ ID NO: 1034922 - RNA, 22 nt, Human
caggcagcagccacucugguau

SEQ ID NO: 1034923 - RNA, 22 nt, Human
aauauuucuccuucguuauagc

SEQ ID NO: 1034924 - RNA, 22 nt, Human
auuugucuuuggaccugugaga

SEQ ID NO: 1034925 - RNA, 22 nt, Human
acuucauuguaauauuauagca

SEQ ID NO: 1034926 - RNA, 22 nt, Human
aaugcugcucucauaauuauag

SEQ ID NO: 1034927 - RNA, 22 nt, Human
auuucacucuuaauugcuuccu

SEQ ID NO: 1034928 - RNA, 22 nt, Human
guggagcccugccuugcucaug

SEQ ID NO: 1034929 - RNA, 22 nt, Human
gaggggcugggguugacuccaa

SEQ ID NO: 1034930 - RNA, 23 nt, Human
ggccuccuggucuaggcuagacu

SEQ ID NO: 1034931 - RNA, 22 nt, Human
gagcaggccagcaauggaaggg

SEQ ID NO: 1034932 - RNA, 22 nt, Human
ucagcuggcaguucagaggcug

SEQ ID NO: 1034933 - RNA, 22 nt, Human
gccuucaggaggguuccagaca

SEQ ID NO: 1034934 - RNA, 22 nt, Human
caagagcugaggcuggagaggu

SEQ ID NO: 1034935 - RNA, 19 nt, Human
gagcagcugcacccauuga

SEQ ID NO: 1034936 - RNA, 21 nt, Human
uaaauaauaaguugcugagau

SEQ ID NO: 1034937 - RNA, 22 nt, Human
gccaggcagccacccucugcga

SEQ ID NO: 1034938 - RNA, 22 nt, Human
auugaaaguccuaucuaaggga

SEQ ID NO: 1034939 - RNA, 22 nt, Human
gagcucugacugcugggugaca

SEQ ID NO: 1034940 - RNA, 20 nt, Human
agugacagagacuguguggc

SEQ ID NO: 1034941 - RNA, 22 nt, Human
ucaggggagguugaaucgucuc

SEQ ID NO: 1034942 - RNA, 22 nt, Human
gaaaucugcccagugcacuggu

SEQ ID NO: 1034943 - RNA, 22 nt, Human
cagccugcuagggcaaugccuu

SEQ ID NO: 1034944 - RNA, 22 nt, Human
agugucauuccagggacccucg

SEQ ID NO: 1034945 - RNA, 22 nt, Human
ggagccugugggaugagaugug

SEQ ID NO: 1034946 - RNA, 22 nt, Human
agagccugcagcugugaagaaa

SEQ ID NO: 1034947 - RNA, 22 nt, Human
uuggccuuguuaaggaggcccu

SEQ ID NO: 1034948 - RNA, 22 nt, Human
ccugggcucuauccugacccag

SEQ ID NO: 1034949 - RNA, 22 nt, Human
uuaaacaguguuucaugugggg

SEQ ID NO: 1034950 - RNA, 22 nt, Human
ugauuuccuagcugacaugaaa

SEQ ID NO: 1034951 - RNA, 22 nt, Human
gcagcuuuuuggaugucaguua

SEQ ID NO: 1034952 - RNA, 18 nt, Human
gucauugcaacauacugu

SEQ ID NO: 1034953 - RNA, 22 nt, Human
cugaggucaauuaaucaacaac

SEQ ID NO: 1034954 - RNA, 22 nt, Human
gcccaggcuagcguagagugca

SEQ ID NO: 1034955 - RNA, 22 nt, Human
aaagaggaaccaagagcacgug

SEQ ID NO: 1034956 - RNA, 22 nt, Human
ucagccagguaauguggagaug

SEQ ID NO: 1034957 - RNA, 23 nt, Human
aggauccugguacaggagcagag

SEQ ID NO: 1034958 - RNA, 22 nt, Human
agcucagggcgaucugucucgg

SEQ ID NO: 1034959 - RNA, 22 nt, Human
ccagggcuccauugcucauccu

SEQ ID NO: 1034960 - RNA, 22 nt, Human
ccagacuguggaguuccuggug

SEQ ID NO: 1034961 - RNA, 22 nt, Human
cugccuggagcauucugaaggu

SEQ ID NO: 1034962 - RNA, 22 nt, Human
aaaugguauuuacucuguauua

SEQ ID NO: 1034963 - RNA, 22 nt, Human
gcccagcugcacccuggugggu

SEQ ID NO: 1034964 - RNA, 22 nt, Human
accuuaaaacugacacauggag

SEQ ID NO: 1034965 - RNA, 22 nt, Human
gcucugugggugaguagaaucu

SEQ ID NO: 1034966 - RNA, 18 nt, Human
uccagagguguuggagcc

SEQ ID NO: 1034967 - RNA, 22 nt, Human
ucucugucugagccuggcagac

SEQ ID NO: 1034968 - RNA, 21 nt, Human
gggccuggcugcgcaggacgg

SEQ ID NO: 1034969 - RNA, 22 nt, Human
cucugugggggagaggcagcug

SEQ ID NO: 1034970 - RNA, 22 nt, Human
ugcagccaggaaauauuugcug

SEQ ID NO: 1034971 - RNA, 22 nt, Human
uaauuuauuucaacugccaagg

SEQ ID NO: 1034972 - RNA, 22 nt, Human
augaugguuguccuaggugcau

SEQ ID NO: 1034973 - RNA, 22 nt, Human
ucucaggggauucacuggcacc

SEQ ID NO: 1034974 - RNA, 22 nt, Human
aaagaacaucggagugggcggg

SEQ ID NO: 1034975 - RNA, 22 nt, Human
ucaggaucaggggccuuuccuu

SEQ ID NO: 1034976 - RNA, 22 nt, Human
cuuauguaaaacggaaagggaa

SEQ ID NO: 1034977 - RNA, 22 nt, Human
uacaaagucaccagcuucuugc

SEQ ID NO: 1034978 - RNA, 22 nt, Human
uauagagguggaaacugagguu

SEQ ID NO: 1034979 - RNA, 21 nt, Human
ggccuuggcgggggccgaauu

SEQ ID NO: 1034980 - RNA, 22 nt, Human
ccagggccaguaagauuggcau

SEQ ID NO: 1034981 - RNA, 22 nt, Human
cacauaaguggguuccauugca

SEQ ID NO: 1034982 - RNA, 22 nt, Human
agcagcugccagagagaguucc

SEQ ID NO: 1034983 - RNA, 22 nt, Human
ugcugucccccgugucugggcu

SEQ ID NO: 1034984 - RNA, 22 nt, Human
uuugugaaaugaagucacaacu

SEQ ID NO: 1034985 - RNA, 22 nt, Human
gccaaagcagucuugccucugc

SEQ ID NO: 1034986 - RNA, 22 nt, Human
cccugcagccggccagcucauu

SEQ ID NO: 1034987 - RNA, 22 nt, Human
agagugaaguaauuguuaggau

SEQ ID NO: 1034988 - RNA, 22 nt, Human
agauuucacaugcugcucuauu

SEQ ID NO: 1034989 - RNA, 22 nt, Human
aagcagccuggcaugaugcuuu

SEQ ID NO: 1034990 - RNA, 22 nt, Human
ggagcugucuguagggcacagg

SEQ ID NO: 1034991 - RNA, 21 nt, Human
agaaaaguagaguuuucagag

SEQ ID NO: 1034992 - RNA, 22 nt, Human
caaugauggcuaggcagcugcu

SEQ ID NO: 1034993 - RNA, 22 nt, Human
aaguuuuaacaaguacuuacua

SEQ ID NO: 1034994 - RNA, 22 nt, Human
acauuucuuagccuaguuccag

SEQ ID NO: 1034995 - RNA, 22 nt, Human
cucagcagcagggaagagguca

SEQ ID NO: 1034996 - RNA, 22 nt, Human
uuccucagaaaauacuguccaa

SEQ ID NO: 1034997 - RNA, 22 nt, Human
ggccucgcggcuucugguggcu

SEQ ID NO: 1034998 - RNA, 22 nt, Human
acagacauuuucuguauugccu

SEQ ID NO: 1034999 - RNA, 22 nt, Human
aaucaguuguccaaaguucaca

SEQ ID NO: 1035000 - RNA, 22 nt, Human
agucuucagagaaauuaacucu

SEQ ID NO: 1035001 - RNA, 22 nt, Human
ggcugcuggaagacugaacaag

SEQ ID NO: 1035002 - RNA, 22 nt, Human
ucugucaggagauuggcagcug

SEQ ID NO: 1035003 - RNA, 22 nt, Human
aaaucaguucacguucugaggu

SEQ ID NO: 1035004 - RNA, 21 nt, Human
cccuugccugcacuccucggc

SEQ ID NO: 1035005 - RNA, 22 nt, Human
uuaugggagcaauuggggaggu

SEQ ID NO: 1035006 - RNA, 22 nt, Human
ucauuucuccgaccugcugucc

SEQ ID NO: 1035007 - RNA, 22 nt, Human
guuugucuuaauuaggcaucga

SEQ ID NO: 1035008 - RNA, 17 nt, Human
ugcauguccuuuguucc

SEQ ID NO: 1035009 - RNA, 22 nt, Human
gaguccaguuguucacagaggc

SEQ ID NO: 1035010 - RNA, 22 nt, Human
ggcucuggagacauguggagag

SEQ ID NO: 1035011 - RNA, 22 nt, Human
gugugccagacaugaugcuaug

SEQ ID NO: 1035012 - RNA, 23 nt, Human
cauggcagcaagagcucauggcc

SEQ ID NO: 1035013 - RNA, 22 nt, Human
aggaagcucggagagggcaaau

SEQ ID NO: 1035014 - RNA, 22 nt, Human
cacaugggugugccuggaggaa

SEQ ID NO: 1035015 - RNA, 22 nt, Human
gcagccagccccucugaccucu

SEQ ID NO: 1035016 - RNA, 22 nt, Human
ggcccagcacagugcuuggggg

SEQ ID NO: 1035017 - RNA, 22 nt, Human
ugucucugccagcuagcagaau

SEQ ID NO: 1035018 - RNA, 22 nt, Human
caugugucaaaugauguagcug

SEQ ID NO: 1035019 - RNA, 21 nt, Human
augacagaugcugcagaucgu

SEQ ID NO: 1035020 - RNA, 22 nt, Human
uccugucagugaggcagaugaa

SEQ ID NO: 1035021 - RNA, 22 nt, Human
cugguuuagcuguaagguuccc

SEQ ID NO: 1035022 - RNA, 22 nt, Human
gggccaggucggugaaugguca

SEQ ID NO: 1035023 - RNA, 21 nt, Human
guggcccugguguggcugcac

SEQ ID NO: 1035024 - RNA, 22 nt, Human
cugcuuuguguggucccuccag

SEQ ID NO: 1035025 - RNA, 22 nt, Human
ugcucuggagggugaagcuuuu

SEQ ID NO: 1035026 - RNA, 22 nt, Human
ucugucuccucugaggugccag

SEQ ID NO: 1035027 - RNA, 22 nt, Human
ccagggugugagaaggaaguag

SEQ ID NO: 1035028 - RNA, 20 nt, Human
gacaucauguacacauugcc

SEQ ID NO: 1035029 - RNA, 22 nt, Human
cugccagccaggccagguaggc

SEQ ID NO: 1035030 - RNA, 22 nt, Human
cucuggcuucuaccuugcaguu

SEQ ID NO: 1035031 - RNA, 22 nt, Human
acugugcacaauucuaaguccu

SEQ ID NO: 1035032 - RNA, 22 nt, Human
uugcauuguaggauguuagaag

SEQ ID NO: 1035033 - RNA, 22 nt, Human
ugugaaagauacuaggcagagg

SEQ ID NO: 1035034 - RNA, 22 nt, Human
uacauucuggaaaggcacagac

SEQ ID NO: 1035035 - RNA, 22 nt, Human
aggcugccucgugagcucgcug

SEQ ID NO: 1035036 - RNA, 22 nt, Human
agggagaacaguugcagcagac

SEQ ID NO: 1035037 - RNA, 22 nt, Human
aggcuggaguacaguggcuauu

SEQ ID NO: 1035038 - RNA, 22 nt, Human
ucuguggauuuuaguguucaug

SEQ ID NO: 1035039 - RNA, 22 nt, Human
agccugguguggggcugcagag

SEQ ID NO: 1035040 - RNA, 22 nt, Human
gagaaacuuggaguuauucugg

SEQ ID NO: 1035041 - RNA, 22 nt, Human
uccagccaagccuugguagcug

SEQ ID NO: 1035042 - RNA, 22 nt, Human
cagcaguggccaucuguguggu

SEQ ID NO: 1035043 - RNA, 21 nt, Human
ucuccaguauccuucucugag

SEQ ID NO: 1035044 - RNA, 22 nt, Human
gucuugaucuccugaccuugug

SEQ ID NO: 1035045 - RNA, 22 nt, Human
uaugcacagaaguuugcugaau

SEQ ID NO: 1035046 - RNA, 22 nt, Human
cugagccagcgggcucacuuuu

SEQ ID NO: 1035047 - RNA, 22 nt, Human
uuuuccucuguauuugaaaugc

SEQ ID NO: 1035048 - RNA, 22 nt, Human
ugcaggugugguuccucagcca

SEQ ID NO: 1035049 - RNA, 22 nt, Human
uccagggaucuuuagagucuuu

SEQ ID NO: 1035050 - RNA, 22 nt, Human
agagccagguguagucucggag

SEQ ID NO: 1035051 - RNA, 22 nt, Human
ugcuguagcccugcacagugca

SEQ ID NO: 1035052 - RNA, 22 nt, Human
cugcccugucugcagccuggcu

SEQ ID NO: 1035053 - RNA, 22 nt, Human
acccagaggcggagguugcagu

SEQ ID NO: 1035054 - RNA, 22 nt, Human
gcacacagccagcugagggcua

SEQ ID NO: 1035055 - RNA, 19 nt, Human
gagcacagcggcauuuggu

SEQ ID NO: 1035056 - RNA, 22 nt, Human
acagaauauugguuacuguugc

SEQ ID NO: 1035057 - RNA, 22 nt, Human
agccucugguccucccucagcu

SEQ ID NO: 1035058 - RNA, 21 nt, Human
ucagaguguguuacagcaagc

SEQ ID NO: 1035059 - RNA, 22 nt, Human
ugcugggggugucucaccaggc

SEQ ID NO: 1035060 - RNA, 22 nt, Human
uaaugaauaaacuugagaguca

SEQ ID NO: 1035061 - RNA, 22 nt, Human
caggccacaaguuggguucaag

SEQ ID NO: 1035062 - RNA, 19 nt, Human
cccucaggucugagcaguc

SEQ ID NO: 1035063 - RNA, 22 nt, Human
aggccagggucccacacucgca

SEQ ID NO: 1035064 - RNA, 22 nt, Human
cucagagaaaaggagcaagggu

SEQ ID NO: 1035065 - RNA, 20 nt, Human
gguagcagcugcugucaucc

SEQ ID NO: 1035066 - RNA, 22 nt, Human
ucuagaaaaaaacugcugugga

SEQ ID NO: 1035067 - RNA, 22 nt, Human
uggugccuugggccuacagcgc

SEQ ID NO: 1035068 - RNA, 22 nt, Human
uuguggcucgugagauguuagg

SEQ ID NO: 1035069 - RNA, 22 nt, Human
agaagccauugaagcagaccuc

SEQ ID NO: 1035070 - RNA, 22 nt, Human
uguguacuugaaagggcagguc

SEQ ID NO: 1035071 - RNA, 22 nt, Human
uggcccugacacgugguacugg

SEQ ID NO: 1035072 - RNA, 22 nt, Human
uugcauugggagugaggagacc

SEQ ID NO: 1035073 - RNA, 22 nt, Human
aggcaaaauuacaaaguuauua

SEQ ID NO: 1035074 - RNA, 22 nt, Human
agggcuggcuaggugcguuccc

SEQ ID NO: 1035075 - RNA, 22 nt, Human
uggcucagcugacucggcuucu

SEQ ID NO: 1035076 - RNA, 22 nt, Human
ugaggaggucagagucuggcug

SEQ ID NO: 1035077 - RNA, 19 nt, Human
caggagagcaugcacuuug

SEQ ID NO: 1035078 - RNA, 21 nt, Human
cagaggcugagagggcaaucu

SEQ ID NO: 1035079 - RNA, 22 nt, Human
gccaggcuggugcaaggauauu

SEQ ID NO: 1035080 - RNA, 22 nt, Human
cuccuuccccuacucagcaucc

SEQ ID NO: 1035081 - RNA, 22 nt, Human
uugaagcaggaaaauuucuauu

SEQ ID NO: 1035082 - RNA, 22 nt, Human
aaaugucuuucaauagagaaau

SEQ ID NO: 1035083 - RNA, 22 nt, Human
ccugucuguaucgguucagagu

SEQ ID NO: 1035084 - RNA, 22 nt, Human
caugcuccaaaaacaagagaau

SEQ ID NO: 1035085 - RNA, 22 nt, Human
aaaugcaggaaauuaugcuuuu

SEQ ID NO: 1035086 - RNA, 21 nt, Human
gacaggggaagaagcaaggag

SEQ ID NO: 1035087 - RNA, 22 nt, Human
aggcucugugacaaucaagcug

SEQ ID NO: 1035088 - RNA, 22 nt, Human
gcagcugcaggcaggcuugcug

SEQ ID NO: 1035089 - RNA, 18 nt, Human
gguggcaggucagaugcc

SEQ ID NO: 1035090 - RNA, 22 nt, Human
acuguguggaaauuugugaggg

SEQ ID NO: 1035091 - RNA, 22 nt, Human
ugaaaggugacauuucuuggau

SEQ ID NO: 1035092 - RNA, 22 nt, Human
ccagcagcagcguccaaggaga

SEQ ID NO: 1035093 - RNA, 22 nt, Human
gggaguggagagcaauggauga

SEQ ID NO: 1035094 - RNA, 22 nt, Human
ccugggcaaaugccagagacaa

SEQ ID NO: 1035095 - RNA, 22 nt, Human
caggcugcagcagcaguggccc

SEQ ID NO: 1035096 - RNA, 17 nt, Human
uccuggcucugccacug

SEQ ID NO: 1035097 - RNA, 22 nt, Human
ccauggaguuccucuggucuau

SEQ ID NO: 1035098 - RNA, 22 nt, Human
ucuguuuaggcaaaauagcuac

SEQ ID NO: 1035099 - RNA, 22 nt, Human
agguggggccaaaugcuacagu

SEQ ID NO: 1035100 - RNA, 22 nt, Human
uacuuuuugucucuuugaaugu

SEQ ID NO: 1035101 - RNA, 22 nt, Human
gcauccagucuuggcuccugga

SEQ ID NO: 1035102 - RNA, 23 nt, Human
uggcucucucagugcugcagagg

SEQ ID NO: 1035103 - RNA, 22 nt, Human
gagauucuguagucaggcaucu

SEQ ID NO: 1035104 - RNA, 22 nt, Human
ugggcuacucugggagccuaac

SEQ ID NO: 1035105 - RNA, 22 nt, Human
cucucccagucaggcucaggau

SEQ ID NO: 1035106 - RNA, 22 nt, Human
ugaggcuguucuaccagggcca

SEQ ID NO: 1035107 - RNA, 22 nt, Human
cagccaucccagccugugguuc

SEQ ID NO: 1035108 - RNA, 22 nt, Human
cuggccacaugugugcugagca

SEQ ID NO: 1035109 - RNA, 22 nt, Human
ggcagugguuagaaacaugagc

SEQ ID NO: 1035110 - RNA, 21 nt, Human
aggccucuucauggccaugau

SEQ ID NO: 1035111 - RNA, 22 nt, Human
agggauguaaauucuucuucuu

SEQ ID NO: 1035112 - RNA, 22 nt, Human
uaaaugcagauuccugagccua

SEQ ID NO: 1035113 - RNA, 22 nt, Human
ugucacaaacauacauuauaga

SEQ ID NO: 1035114 - RNA, 22 nt, Human
gugcccugaguggguaggagag

SEQ ID NO: 1035115 - RNA, 22 nt, Human
uucuggagagaaaccuuacaaa

SEQ ID NO: 1035116 - RNA, 22 nt, Human
caguagcagggauuauuuuagg

SEQ ID NO: 1035117 - RNA, 22 nt, Human
auggauaauggugauaguugca

SEQ ID NO: 1035118 - RNA, 22 nt, Human
ccucagcugcuucccuggagcc

SEQ ID NO: 1035119 - RNA, 22 nt, Human
cugcccugaccugccucagagu

SEQ ID NO: 1035120 - RNA, 22 nt, Human
gagagaagaaagccaugguccu

SEQ ID NO: 1035121 - RNA, 22 nt, Human
uuguuucugaguuuucauguau

SEQ ID NO: 1035122 - RNA, 22 nt, Human
ggcugcagagcugggugggccu

SEQ ID NO: 1035123 - RNA, 22 nt, Human
agugaggcuaauaggcaauggu

SEQ ID NO: 1035124 - RNA, 22 nt, Human
gcaaggcuuugugaauuuuaaa

SEQ ID NO: 1035125 - RNA, 22 nt, Human
ucuucagagacucugagccccu

SEQ ID NO: 1035126 - RNA, 22 nt, Human
ucagaacagaagaaggaacacg

SEQ ID NO: 1035127 - RNA, 22 nt, Human
cacucaggcugugucaggagga

SEQ ID NO: 1035128 - RNA, 22 nt, Human
uuagugucuucuucauccucug

SEQ ID NO: 1035129 - RNA, 18 nt, Human
uggagcagguaggcauga

SEQ ID NO: 1035130 - RNA, 22 nt, Human
ucuggccaacaaaaacuaaguc

SEQ ID NO: 1035131 - RNA, 22 nt, Human
aaguuauugcagcaauccaagu

SEQ ID NO: 1035132 - RNA, 19 nt, Human
auuugaaagcugugcuugc

SEQ ID NO: 1035133 - RNA, 22 nt, Human
aagagcuguaugccauaugauu

SEQ ID NO: 1035134 - RNA, 22 nt, Human
gugucccaaagauuagaaauca

SEQ ID NO: 1035135 - RNA, 22 nt, Human
aauuucaaugcacucaugguug

SEQ ID NO: 1035136 - RNA, 22 nt, Human
gcugugcuggaaggggaccugc

SEQ ID NO: 1035137 - RNA, 22 nt, Human
cucugcagaggcccaaggcuga

SEQ ID NO: 1035138 - RNA, 22 nt, Human
aaguugaagcaugaaccaaggu

SEQ ID NO: 1035139 - RNA, 22 nt, Human
ucugcgcugccuugauccuugg

SEQ ID NO: 1035140 - RNA, 22 nt, Human
uaagaacauuuucggaaagaua

SEQ ID NO: 1035141 - RNA, 22 nt, Human
acauuuaggauguuuugagaga

SEQ ID NO: 1035142 - RNA, 22 nt, Human
cugcccugacugaccuuuugaa

SEQ ID NO: 1035143 - RNA, 22 nt, Human
agcucuccacacauaggacuag

SEQ ID NO: 1035144 - RNA, 22 nt, Human
agaauuguaagcaauuugauua

SEQ ID NO: 1035145 - RNA, 20 nt, Human
gcagagcuguucugugggga

SEQ ID NO: 1035146 - RNA, 22 nt, Human
cucucugggggccaugccaaga

SEQ ID NO: 1035147 - RNA, 21 nt, Human
aggcagaaagagcccaggcug

SEQ ID NO: 1035148 - RNA, 22 nt, Human
agcagcauguugggaugugaaa

SEQ ID NO: 1035149 - RNA, 22 nt, Human
uggagcaggugccaggugugug

SEQ ID NO: 1035150 - RNA, 22 nt, Human
gcagauggaaagugcuugaggg

SEQ ID NO: 1035151 - RNA, 22 nt, Human
ucugucuccugccagugccucu

SEQ ID NO: 1035152 - RNA, 22 nt, Human
cagggccuuuuagcaucuucuc

SEQ ID NO: 1035153 - RNA, 22 nt, Human
gggcuggaggaccggccucgga

SEQ ID NO: 1035154 - RNA, 22 nt, Human
guccacauaggaacccagcuuc

SEQ ID NO: 1035155 - RNA, 17 nt, Human
auuucacuuagcaugag

SEQ ID NO: 1035156 - RNA, 22 nt, Human
caggcuugggagcagagccacu

SEQ ID NO: 1035157 - RNA, 22 nt, Human
uccugcaggccuguucccagua

SEQ ID NO: 1035158 - RNA, 22 nt, Human
acaaagucacaauaauuaaccu

SEQ ID NO: 1035159 - RNA, 22 nt, Human
ucagagcuuaucucuugcugga

SEQ ID NO: 1035160 - RNA, 23 nt, Human
guggccuccccggaaugccucgc

SEQ ID NO: 1035161 - RNA, 22 nt, Human
aaagauuuaugaaguucaauua

SEQ ID NO: 1035162 - RNA, 22 nt, Human
cagcauggggaucacuguaggc

SEQ ID NO: 1035163 - RNA, 22 nt, Human
ucugucacucccugaugaugaa

SEQ ID NO: 1035164 - RNA, 22 nt, Human
ccaggacuuauuacaguauaac

SEQ ID NO: 1035165 - RNA, 22 nt, Human
acugugcaaugaguaauaaacu

SEQ ID NO: 1035166 - RNA, 22 nt, Human
cuggugagacgguugacaggag

SEQ ID NO: 1035167 - RNA, 22 nt, Human
gcucagccgaacuucagagcag

SEQ ID NO: 1035168 - RNA, 22 nt, Human
uggcucagcagguuagaaacua

SEQ ID NO: 1035169 - RNA, 22 nt, Human
gcuggccuccugcuagauggaa

SEQ ID NO: 1035170 - RNA, 22 nt, Human
gagugcagaugaacagaagauu

SEQ ID NO: 1035171 - RNA, 22 nt, Human
auguuacagaaagcaaagauga

SEQ ID NO: 1035172 - RNA, 22 nt, Human
uuaucauugucgcagucuaauu

SEQ ID NO: 1035173 - RNA, 22 nt, Human
gccuggcaggccuguuggggcu

SEQ ID NO: 1035174 - RNA, 22 nt, Human
caucacagauguuguguggagu

SEQ ID NO: 1035175 - RNA, 22 nt, Human
agcuguccuggcucaggcugug

SEQ ID NO: 1035176 - RNA, 17 nt, Human
ugagaaguaggcaucau

SEQ ID NO: 1035177 - RNA, 22 nt, Human
gcacagggccuggcacauaaga

SEQ ID NO: 1035178 - RNA, 22 nt, Human
ugaaagcacucacuucugcucu

SEQ ID NO: 1035179 - RNA, 22 nt, Human
ucagcaguguaguuuaucauuc

SEQ ID NO: 1035180 - RNA, 22 nt, Human
agcugauuccacuuuuucccca

SEQ ID NO: 1035181 - RNA, 22 nt, Human
ggcugcagaaguacuuccggau

SEQ ID NO: 1035182 - RNA, 22 nt, Human
acauuaucccuggcacaacugc

SEQ ID NO: 1035183 - RNA, 22 nt, Human
ggccuucacgugaccuggcgug

SEQ ID NO: 1035184 - RNA, 22 nt, Human
ucucagaggucuucagccucug

SEQ ID NO: 1035185 - RNA, 22 nt, Human
ugggauggcauccugggccuug

SEQ ID NO: 1035186 - RNA, 22 nt, Human
cagcugagcaucacuagucugg

SEQ ID NO: 1035187 - RNA, 22 nt, Human
agagaugaaaaguggagacugg

SEQ ID NO: 1035188 - RNA, 22 nt, Human
ucagaagcaaacaucacucuag

SEQ ID NO: 1035189 - RNA, 22 nt, Human
ugaagcaacuggacaaguuggc

SEQ ID NO: 1035190 - RNA, 22 nt, Human
ggcugccugaacuuuggggaaa

SEQ ID NO: 1035191 - RNA, 22 nt, Human
aaucuggcucagaagaagauga

SEQ ID NO: 1035192 - RNA, 22 nt, Human
ggcagauggaagaggcuggguc

SEQ ID NO: 1035193 - RNA, 22 nt, Human
caccaucagcagcaggugucaa

SEQ ID NO: 1035194 - RNA, 22 nt, Human
ggcugcugaguuggccaggaga

SEQ ID NO: 1035195 - RNA, 22 nt, Human
cagcagggcccccgggugcgcc

SEQ ID NO: 1035196 - RNA, 22 nt, Human
agccaggauuggcugagccuua

SEQ ID NO: 1035197 - RNA, 21 nt, Human
uaaaugugagcagggcugggc

SEQ ID NO: 1035198 - RNA, 22 nt, Human
ugaaagaacuagcaucuucaag

SEQ ID NO: 1035199 - RNA, 22 nt, Human
uucagaaagugaaucuuguuau

SEQ ID NO: 1035200 - RNA, 20 nt, Human
gccagcacagggagcaguuc

SEQ ID NO: 1035201 - RNA, 17 nt, Human
uucaaugauuaaugcau

SEQ ID NO: 1035202 - RNA, 22 nt, Human
ugccucuguugagccuuggcug

SEQ ID NO: 1035203 - RNA, 22 nt, Human
ugucccauggauaccaggcuau

SEQ ID NO: 1035204 - RNA, 22 nt, Human
cugugagcuggguggccaggac

SEQ ID NO: 1035205 - RNA, 22 nt, Human
uggaaggagcuaaggaccuggg

SEQ ID NO: 1035206 - RNA, 22 nt, Human
aauaauuuuagcucagaguugu

SEQ ID NO: 1035207 - RNA, 22 nt, Human
aaaugucuguuagucauaucau

SEQ ID NO: 1035208 - RNA, 22 nt, Human
cuggcuccaucacugggugaug

SEQ ID NO: 1035209 - RNA, 22 nt, Human
ggucucagcuggaguccuuggu

SEQ ID NO: 1035210 - RNA, 22 nt, Human
cagcucucuaaggucuugcuuu

SEQ ID NO: 1035211 - RNA, 20 nt, Human
auaauuuacccugcaccacu

SEQ ID NO: 1035212 - RNA, 22 nt, Human
agcuggccuuagugagcaccug

SEQ ID NO: 1035213 - RNA, 21 nt, Human
ugggcacugagggugcugcuc

SEQ ID NO: 1035214 - RNA, 22 nt, Human
cuggccuggggccucagcugcu

SEQ ID NO: 1035215 - RNA, 22 nt, Human
aggggccugguuggccucuguu

SEQ ID NO: 1035216 - RNA, 21 nt, Human
agcugggccucagccugcagu

SEQ ID NO: 1035217 - RNA, 22 nt, Human
uuauacauguguuuugagauga

SEQ ID NO: 1035218 - RNA, 22 nt, Human
aaggcacuuaacgugggaggau

SEQ ID NO: 1035219 - RNA, 22 nt, Human
ucacaugcucaccuaagccaca

SEQ ID NO: 1035220 - RNA, 22 nt, Human
agggaagaagcugguaguaggu

SEQ ID NO: 1035221 - RNA, 22 nt, Human
uucuggagcuaaaguccacucu

SEQ ID NO: 1035222 - RNA, 22 nt, Human
aaaguuucaauagaggaagugg

SEQ ID NO: 1035223 - RNA, 22 nt, Human
cacagaaguuucauagucucga

SEQ ID NO: 1035224 - RNA, 22 nt, Human
gagggcugcaaugagacagaga

SEQ ID NO: 1035225 - RNA, 19 nt, Human
ucaguuuuagucaucaguu

SEQ ID NO: 1035226 - RNA, 22 nt, Human
uucugaggcacuggcucuccca

SEQ ID NO: 1035227 - RNA, 22 nt, Human
gaaaucugcuucuugcauagua

SEQ ID NO: 1035228 - RNA, 22 nt, Human
cagagcagggugcaccuugggc

SEQ ID NO: 1035229 - RNA, 22 nt, Human
ucucuggagggcuccaggcggg

SEQ ID NO: 1035230 - RNA, 22 nt, Human
cuugaaagucacaugcagcccu

SEQ ID NO: 1035231 - RNA, 22 nt, Human
guguuuccucacuucucugacu

SEQ ID NO: 1035232 - RNA, 22 nt, Human
gguggccugcccugaucccugg

SEQ ID NO: 1035233 - RNA, 22 nt, Human
ucagguguuagaagaaauuuca

SEQ ID NO: 1035234 - RNA, 22 nt, Human
ucugucugcgcuugcccuggug

SEQ ID NO: 1035235 - RNA, 22 nt, Human
cucaggauguacuacagaaggc

SEQ ID NO: 1035236 - RNA, 22 nt, Human
ggugcagcugcagccugggagc

SEQ ID NO: 1035237 - RNA, 22 nt, Human
agacagcaggggagucugguuu

SEQ ID NO: 1035238 - RNA, 22 nt, Human
augccaggccccacgcugggca

SEQ ID NO: 1035239 - RNA, 22 nt, Human
agcagccacagucugggacagg

SEQ ID NO: 1035240 - RNA, 22 nt, Human
cugggagcggcugucacugguu

SEQ ID NO: 1035241 - RNA, 22 nt, Human
cugagguguugaugaccuaugc

SEQ ID NO: 1035242 - RNA, 22 nt, Human
ucuggcucucaacaaauauuua

SEQ ID NO: 1035243 - RNA, 22 nt, Human
uggccucuuaggacauccucua

SEQ ID NO: 1035244 - RNA, 22 nt, Human
ucccagaggaaauggcagcuga

SEQ ID NO: 1035245 - RNA, 20 nt, Human
ugccagggccagcagaggcu

SEQ ID NO: 1035246 - RNA, 22 nt, Human
ggcaugggccgaggugccuccu

SEQ ID NO: 1035247 - RNA, 22 nt, Human
agcuuccugaugcaagagggcu

SEQ ID NO: 1035248 - RNA, 22 nt, Human
cccuggagggauuucucaauca

SEQ ID NO: 1035249 - RNA, 22 nt, Human
caggcagaagaaguggaaggac

SEQ ID NO: 1035250 - RNA, 22 nt, Human
gcagggaggaagagaugcuucc

SEQ ID NO: 1035251 - RNA, 22 nt, Human
ccucccucuuucagucccacag

SEQ ID NO: 1035252 - RNA, 22 nt, Human
ccagccagccuugaucugagua

SEQ ID NO: 1035253 - RNA, 22 nt, Human
gauccuugcacuugacuuggca

SEQ ID NO: 1035254 - RNA, 22 nt, Human
cuguuuuugugcugugucuccc

SEQ ID NO: 1035255 - RNA, 17 nt, Human
aggcuggcucacaggga

SEQ ID NO: 1035256 - RNA, 22 nt, Human
uucaaucauuagaaucucaggc

SEQ ID NO: 1035257 - RNA, 22 nt, Human
ucccagggucaguggugaggcc

SEQ ID NO: 1035258 - RNA, 22 nt, Human
cccuggcaaaacacucucuuga

SEQ ID NO: 1035259 - RNA, 22 nt, Human
aagcucugcucagcagacuagg

SEQ ID NO: 1035260 - RNA, 22 nt, Human
agcugcucccuauccuuuccuu

SEQ ID NO: 1035261 - RNA, 22 nt, Human
ugucaugcuuauguuacauacu

SEQ ID NO: 1035262 - RNA, 22 nt, Human
cugucuguuuuaccuucuccag

SEQ ID NO: 1035263 - RNA, 22 nt, Human
ugcugccaagcccgugcuccug

SEQ ID NO: 1035264 - RNA, 21 nt, Human
agcuuccugcagugggagguc

SEQ ID NO: 1035265 - RNA, 22 nt, Human
cuuuggcaaugaaacacaagaa

SEQ ID NO: 1035266 - RNA, 23 nt, Human
uugaaggagaaagcuuucuuggu

SEQ ID NO: 1035267 - RNA, 22 nt, Human
cuggagcccaggccuggugucu

SEQ ID NO: 1035268 - RNA, 22 nt, Human
cucuggagugcagccugguggc

SEQ ID NO: 1035269 - RNA, 22 nt, Human
cagccagcugaauguaccauga

SEQ ID NO: 1035270 - RNA, 22 nt, Human
uagagugguuaacaguuuagaa

SEQ ID NO: 1035271 - RNA, 22 nt, Human
cagggcugaaaucaagguguag

SEQ ID NO: 1035272 - RNA, 22 nt, Human
ucagcugccucucccuggaaga

SEQ ID NO: 1035273 - RNA, 22 nt, Human
ggcucagggaaugaggaagaau

SEQ ID NO: 1035274 - RNA, 22 nt, Human
acacuuuacagcuuccuuugca

SEQ ID NO: 1035275 - RNA, 22 nt, Human
agccuucaguaaauccacugug

SEQ ID NO: 1035276 - RNA, 22 nt, Human
cagguggguacaucacagagac

SEQ ID NO: 1035277 - RNA, 22 nt, Human
gcacagaacuucucuuaguagg

SEQ ID NO: 1035278 - RNA, 22 nt, Human
uggcccugcuuaugucucucuu

SEQ ID NO: 1035279 - RNA, 19 nt, Human
ccagcagacacagcugccc

SEQ ID NO: 1035280 - RNA, 22 nt, Human
cgcagaagagguugucuagucc

SEQ ID NO: 1035281 - RNA, 20 nt, Human
gcagagccucacugcaaggg

SEQ ID NO: 1035282 - RNA, 22 nt, Human
gagcagugaagacagaaguaca

SEQ ID NO: 1035283 - RNA, 20 nt, Human
caccaggcgcucugagaaca

SEQ ID NO: 1035284 - RNA, 19 nt, Human
ggaagagaggaaaggugga

SEQ ID NO: 1035285 - RNA, 22 nt, Human
acagagcuucccagccugagca

SEQ ID NO: 1035286 - RNA, 22 nt, Human
augucacagcucccauuccucc

SEQ ID NO: 1035287 - RNA, 22 nt, Human
augauggugagguugagcacag

SEQ ID NO: 1035288 - RNA, 23 nt, Human
aaguaacagggauaauagcaguu

SEQ ID NO: 1035289 - RNA, 22 nt, Human
agggccugucagcgguguccug

SEQ ID NO: 1035290 - RNA, 22 nt, Human
agacaucagcuugugugcaggg

SEQ ID NO: 1035291 - RNA, 22 nt, Human
uacauagcaaggaaaugacaga

SEQ ID NO: 1035292 - RNA, 22 nt, Human
caugcacuuaccugaaauucaa

SEQ ID NO: 1035293 - RNA, 22 nt, Human
cugaagagcucuccuguccccu

SEQ ID NO: 1035294 - RNA, 22 nt, Human
ggcugccugcucaggugcggcg

SEQ ID NO: 1035295 - RNA, 22 nt, Human
uggccugcuuucauuugaugcu

SEQ ID NO: 1035296 - RNA, 21 nt, Human
gagcauggcuuacaucagcag

SEQ ID NO: 1035297 - RNA, 22 nt, Human
cugagcuuggccaggaaugaau

SEQ ID NO: 1035298 - RNA, 21 nt, Human
gagugucuaauccaggcuguc

SEQ ID NO: 1035299 - RNA, 22 nt, Human
uguacuuccccaaugacagcac

SEQ ID NO: 1035300 - RNA, 22 nt, Human
ucccagagcccaaguuggagag

SEQ ID NO: 1035301 - RNA, 22 nt, Human
gccuggcaggccugggccagca

SEQ ID NO: 1035302 - RNA, 22 nt, Human
aaaguggucaccuucucauuuc

SEQ ID NO: 1035303 - RNA, 22 nt, Human
agcauuuaggagaauuugagaa

SEQ ID NO: 1035304 - RNA, 22 nt, Human
gaggccuggcugggaggaggug

SEQ ID NO: 1035305 - RNA, 22 nt, Human
uccguauuugacuauugcaccg

SEQ ID NO: 1035306 - RNA, 22 nt, Human
ucccagaaaaaggaggcuauga

SEQ ID NO: 1035307 - RNA, 22 nt, Human
agcaguggagcgagauguuuaa

SEQ ID NO: 1035308 - RNA, 21 nt, Human
ccagagccugcugagcccccu

SEQ ID NO: 1035309 - RNA, 19 nt, Human
auagucuuuccaauuauac

SEQ ID NO: 1035310 - RNA, 22 nt, Human
cucaggggaccuggcuccgagu

SEQ ID NO: 1035311 - RNA, 22 nt, Human
cagcucccagagugaccagcag

SEQ ID NO: 1035312 - RNA, 22 nt, Human
agaugcugucacacacacuguu

SEQ ID NO: 1035313 - RNA, 22 nt, Human
uuuguaaaaggaggaagcaugg

SEQ ID NO: 1035314 - RNA, 22 nt, Human
ccaucuccacugucccugucaa

SEQ ID NO: 1035315 - RNA, 22 nt, Human
cucaggaucgcuugcccuaggg

SEQ ID NO: 1035316 - RNA, 22 nt, Human
aagaaaugcagaaaugugcugg

SEQ ID NO: 1035317 - RNA, 22 nt, Human
aaaaguuaccucuguaauauaa

SEQ ID NO: 1035318 - RNA, 21 nt, Human
agcugcuuucagcuccuagag

SEQ ID NO: 1035319 - RNA, 22 nt, Human
aaaugcagauuuugaugcagca

SEQ ID NO: 1035320 - RNA, 22 nt, Human
accugccucuaagcagcaggug

SEQ ID NO: 1035321 - RNA, 22 nt, Human
uccucacagucaacacuuugag

SEQ ID NO: 1035322 - RNA, 22 nt, Human
caagggcucacggucugcuggg

SEQ ID NO: 1035323 - RNA, 22 nt, Human
uagaacagaggguugcccagau

SEQ ID NO: 1035324 - RNA, 22 nt, Human
ccaggcucugucuggucagaag

SEQ ID NO: 1035325 - RNA, 22 nt, Human
gccaugccugugucuccaggcc

SEQ ID NO: 1035326 - RNA, 22 nt, Human
cucuccagaucugcugagccag

SEQ ID NO: 1035327 - RNA, 22 nt, Human
cuccugggcucaagugauccuc

SEQ ID NO: 1035328 - RNA, 22 nt, Human
ccucauggaccucagacugucc

SEQ ID NO: 1035329 - RNA, 22 nt, Human
ugaggcagcuuuuucugugugu

SEQ ID NO: 1035330 - RNA, 21 nt, Human
ccugugugucugacugggcua

SEQ ID NO: 1035331 - RNA, 22 nt, Human
cucugugcccuacugcucagcu

SEQ ID NO: 1035332 - RNA, 22 nt, Human
agcaggagagcagugcgugguc

SEQ ID NO: 1035333 - RNA, 22 nt, Human
auguaucagaaauagcauuggc

SEQ ID NO: 1035334 - RNA, 22 nt, Human
gaggccugggagccuguccucc

SEQ ID NO: 1035335 - RNA, 22 nt, Human
auucacagggacaaugggagag

SEQ ID NO: 1035336 - RNA, 22 nt, Human
uggccugauuuugcuaagagaa

SEQ ID NO: 1035337 - RNA, 22 nt, Human
caagggugguauugggagcaua

SEQ ID NO: 1035338 - RNA, 22 nt, Human
agggcagcuagcuguagaaaga

SEQ ID NO: 1035339 - RNA, 22 nt, Human
cagcaucuaaucuucaugccgg

SEQ ID NO: 1035340 - RNA, 22 nt, Human
gcucagaaaagugaggcucagu

SEQ ID NO: 1035341 - RNA, 22 nt, Human
ugucucaguacacuccgauguu

SEQ ID NO: 1035342 - RNA, 22 nt, Human
cugagccaaggggacagugaca

SEQ ID NO: 1035343 - RNA, 22 nt, Human
uuugacagauccuuaacucagc

SEQ ID NO: 1035344 - RNA, 22 nt, Human
gagauuggauuuaauggccaaa

SEQ ID NO: 1035345 - RNA, 22 nt, Human
aagcaaaagguuacacuucugg

SEQ ID NO: 1035346 - RNA, 22 nt, Human
ucugaggcuaagagacagaggc

SEQ ID NO: 1035347 - RNA, 22 nt, Human
gcccagcaggacagagugguuu

SEQ ID NO: 1035348 - RNA, 22 nt, Human
ccucucccacguggcagaggcu

SEQ ID NO: 1035349 - RNA, 22 nt, Human
uuguggaaauacagacuccaag

SEQ ID NO: 1035350 - RNA, 22 nt, Human
aucugacaaccuauugacuuga

SEQ ID NO: 1035351 - RNA, 22 nt, Human
cagagcuguccaaacccugaca

SEQ ID NO: 1035352 - RNA, 22 nt, Human
agagcuggauggucaagauggc

SEQ ID NO: 1035353 - RNA, 22 nt, Human
uaaguucaaugaacucaguucu

SEQ ID NO: 1035354 - RNA, 22 nt, Human
aggagcugagggagcgcccuug

SEQ ID NO: 1035355 - RNA, 22 nt, Human
aauuuagaauucgcuagcuaau

SEQ ID NO: 1035356 - RNA, 22 nt, Human
ugaaaaggagccuuagguaggu

SEQ ID NO: 1035357 - RNA, 22 nt, Human
aucuggcuauuucuggucgggg

SEQ ID NO: 1035358 - RNA, 22 nt, Human
aucuuugaagaggacuugaagu

SEQ ID NO: 1035359 - RNA, 22 nt, Human
cccugaggggaguggugaggug

SEQ ID NO: 1035360 - RNA, 22 nt, Human
cuacauuucccagcugccuucc

SEQ ID NO: 1035361 - RNA, 22 nt, Human
ccaaggagaaaugcugugcuuu

SEQ ID NO: 1035362 - RNA, 22 nt, Human
cagcaggguagguuguaucagu

SEQ ID NO: 1035363 - RNA, 22 nt, Human
ggaagaagggucauuggcagcc

SEQ ID NO: 1035364 - RNA, 22 nt, Human
agagugaaguucaucgugcagc

SEQ ID NO: 1035365 - RNA, 22 nt, Human
cugccuggaaggagcaagggga

SEQ ID NO: 1035366 - RNA, 22 nt, Human
gaguuauuuguagggauuauau

SEQ ID NO: 1035367 - RNA, 22 nt, Human
gcacagagggcagugagccucu

SEQ ID NO: 1035368 - RNA, 22 nt, Human
uaaccauauuuuccauuaaguu

SEQ ID NO: 1035369 - RNA, 22 nt, Human
caguuucuguuuuaaauagcag

SEQ ID NO: 1035370 - RNA, 22 nt, Human
ugcagaggagucagccugggca

SEQ ID NO: 1035371 - RNA, 22 nt, Human
caggaggaggugagguagaacu

SEQ ID NO: 1035372 - RNA, 22 nt, Human
ugucucuggcccaugagcagag

SEQ ID NO: 1035373 - RNA, 22 nt, Human
cgcugccaggauccccugccgg

SEQ ID NO: 1035374 - RNA, 22 nt, Human
uucuguguggguagcuccuguu

SEQ ID NO: 1035375 - RNA, 22 nt, Human
uccuucagggcugaccacaggc

SEQ ID NO: 1035376 - RNA, 22 nt, Human
acaggcugcccgcuccccaccu

SEQ ID NO: 1035377 - RNA, 22 nt, Human
cccaggcucccaggugggacaa

SEQ ID NO: 1035378 - RNA, 22 nt, Human
cagacagaccugcaagggcaca

SEQ ID NO: 1035379 - RNA, 23 nt, Human
ggaaagagaggaguugugcauag

SEQ ID NO: 1035380 - RNA, 22 nt, Human
cuccauugaacauccucucaga

SEQ ID NO: 1035381 - RNA, 22 nt, Human
ugccucugugggccuuccuggc

SEQ ID NO: 1035382 - RNA, 22 nt, Human
aggcacuguggguguggccgga

SEQ ID NO: 1035383 - RNA, 22 nt, Human
aaggcagauauaaagacuagag

SEQ ID NO: 1035384 - RNA, 22 nt, Human
acuccugguuuguguccuggcu

SEQ ID NO: 1035385 - RNA, 22 nt, Human
ggcagcugaccuagcaccaucc

SEQ ID NO: 1035386 - RNA, 22 nt, Human
ccaggcaggcgauggugcagug

SEQ ID NO: 1035387 - RNA, 22 nt, Human
gcugccuguguggccacucacu

SEQ ID NO: 1035388 - RNA, 22 nt, Human
ccuugcaggggaacaggcagug

SEQ ID NO: 1035389 - RNA, 22 nt, Human
gcuugcucaacccccgucucuc

SEQ ID NO: 1035390 - RNA, 22 nt, Human
aacaaauguguuuuguaauuaa

SEQ ID NO: 1035391 - RNA, 22 nt, Human
ccuguggcucucuuuggagguc

SEQ ID NO: 1035392 - RNA, 22 nt, Human
aaggacuccaauucuuucaucu

SEQ ID NO: 1035393 - RNA, 17 nt, Human
uggcucugaggcugaau

SEQ ID NO: 1035394 - RNA, 22 nt, Human
uggcagagcccagaacugagca

SEQ ID NO: 1035395 - RNA, 22 nt, Human
ucucacugcaaauauuauguau

SEQ ID NO: 1035396 - RNA, 22 nt, Human
cuccaggccauggcugcggagg

SEQ ID NO: 1035397 - RNA, 22 nt, Human
uggcagggccugaaucuuauac

SEQ ID NO: 1035398 - RNA, 17 nt, Human
acagggcagaaacagcu

SEQ ID NO: 1035399 - RNA, 22 nt, Human
ucucagagcaucauuuucuuag

SEQ ID NO: 1035400 - RNA, 21 nt, Human
ucaggcaggcgcagagggaag

SEQ ID NO: 1035401 - RNA, 22 nt, Human
accuuuuuucagaacucuaaag

SEQ ID NO: 1035402 - RNA, 22 nt, Human
uccucaggagagcuccuaugcc

SEQ ID NO: 1035403 - RNA, 22 nt, Human
gccucugcaucaucacuccagc

SEQ ID NO: 1035404 - RNA, 22 nt, Human
auaaaaguaggaccaacuuaca

SEQ ID NO: 1035405 - RNA, 22 nt, Human
uagucucuggagacucuagggg

SEQ ID NO: 1035406 - RNA, 22 nt, Human
agacagcaugauacaugaugcu

SEQ ID NO: 1035407 - RNA, 22 nt, Human
uccuucaguuaucacaguacug

SEQ ID NO: 1035408 - RNA, 22 nt, Human
gcacugaaugccaaaguguagg

SEQ ID NO: 1035409 - RNA, 22 nt, Human
aaggagucucagcugggccuga

SEQ ID NO: 1035410 - RNA, 22 nt, Human
gcagcugagagaagaacagggc

SEQ ID NO: 1035411 - RNA, 22 nt, Human
cccaggcugauguucagcgggu

SEQ ID NO: 1035412 - RNA, 22 nt, Human
uaggccaguggcagguugugug

SEQ ID NO: 1035413 - RNA, 22 nt, Human
cagggccagccauccugcuggg

SEQ ID NO: 1035414 - RNA, 22 nt, Human
agcagccaguucucugugguag

SEQ ID NO: 1035415 - RNA, 22 nt, Human
aagccagccagugccagucuua

SEQ ID NO: 1035416 - RNA, 22 nt, Human
ucagcagauggguuguguuggc

SEQ ID NO: 1035417 - RNA, 22 nt, Human
cccagggagguagcaggagaaa

SEQ ID NO: 1035418 - RNA, 22 nt, Human
ugcagaagaauguaggcauaag

SEQ ID NO: 1035419 - RNA, 22 nt, Human
ucugagagcuguagaagccuau

SEQ ID NO: 1035420 - RNA, 22 nt, Human
agcccagaggcugggcgugcau

SEQ ID NO: 1035421 - RNA, 22 nt, Human
aucaguuuaaaugggcuguugg

SEQ ID NO: 1035422 - RNA, 22 nt, Human
gggagggauuaguucugccugg

SEQ ID NO: 1035423 - RNA, 21 nt, Human
uggcagggguaguaguacagc

SEQ ID NO: 1035424 - RNA, 23 nt, Human
uccaagggcuacaaacacagacc

SEQ ID NO: 1035425 - RNA, 22 nt, Human
uguggcugucuguucuccuagg

SEQ ID NO: 1035426 - RNA, 22 nt, Human
ucacuugccuagcccaguucag

SEQ ID NO: 1035427 - RNA, 22 nt, Human
agccaggacguugcucagcucc

SEQ ID NO: 1035428 - RNA, 22 nt, Human
uaguaucuuucuauauuuccca

SEQ ID NO: 1035429 - RNA, 22 nt, Human
gguggguauaguuagggccucu

SEQ ID NO: 1035430 - RNA, 22 nt, Human
agggcagcauugccuuucucca

SEQ ID NO: 1035431 - RNA, 22 nt, Human
uggcugggugcuauccaguacu

SEQ ID NO: 1035432 - RNA, 22 nt, Human
cagcagagcauuugguaggagg

SEQ ID NO: 1035433 - RNA, 22 nt, Human
auaguauuuaauaguuagcuca

SEQ ID NO: 1035434 - RNA, 22 nt, Human
cagugcauaaucuaaauggggg

SEQ ID NO: 1035435 - RNA, 22 nt, Human
ugggagcucagaaagggagguc

SEQ ID NO: 1035436 - RNA, 18 nt, Human
cguuuuuccgggauugca

SEQ ID NO: 1035437 - RNA, 22 nt, Human
uggcaggggaggugcuugcuua

SEQ ID NO: 1035438 - RNA, 19 nt, Human
ccuuccuccccagggccau

SEQ ID NO: 1035439 - RNA, 22 nt, Human
ugggguggauagaaagugaugu

SEQ ID NO: 1035440 - RNA, 22 nt, Human
ugccugggccuucccaccucug

SEQ ID NO: 1035441 - RNA, 23 nt, Human
gggggcugguugacucucugcag

SEQ ID NO: 1035442 - RNA, 22 nt, Human
augcugcacaagccacauguag

SEQ ID NO: 1035443 - RNA, 22 nt, Human
gcugccucugcgacucugggcg

SEQ ID NO: 1035444 - RNA, 20 nt, Human
cuuagaaauuuuuacccugg

SEQ ID NO: 1035445 - RNA, 22 nt, Human
gcacugaaugcuuuuacuguaa

SEQ ID NO: 1035446 - RNA, 22 nt, Human
auuuguagugaagugaaaauaa

SEQ ID NO: 1035447 - RNA, 22 nt, Human
agaggggcucauauccugucau

SEQ ID NO: 1035448 - RNA, 22 nt, Human
auuucacucucccugccacuua

SEQ ID NO: 1035449 - RNA, 20 nt, Human
agggcagagggauuacaggc

SEQ ID NO: 1035450 - RNA, 22 nt, Human
aagcugccagcugagcugaggc

SEQ ID NO: 1035451 - RNA, 22 nt, Human
ugggacugcucuugcugggguc

SEQ ID NO: 1035452 - RNA, 22 nt, Human
uggcacugccuggcagggcccc

SEQ ID NO: 1035453 - RNA, 19 nt, Human
acacugaauguagaauugg

SEQ ID NO: 1035454 - RNA, 22 nt, Human
agggcagagaaauguaguugag

SEQ ID NO: 1035455 - RNA, 23 nt, Human
cuggcucauccugguugcagugg

SEQ ID NO: 1035456 - RNA, 21 nt, Human
uaagaacauuaucuucuuccu

SEQ ID NO: 1035457 - RNA, 22 nt, Human
gagcugaguuaccuccagauca

SEQ ID NO: 1035458 - RNA, 22 nt, Human
uuccauuguuucugucuucacu

SEQ ID NO: 1035459 - RNA, 22 nt, Human
ucugagaguccaucuccaagcc

SEQ ID NO: 1035460 - RNA, 22 nt, Human
ccucugcagcagagagccagag

SEQ ID NO: 1035461 - RNA, 22 nt, Human
aagcagcagaccugauuuugaa

SEQ ID NO: 1035462 - RNA, 22 nt, Human
agugggcaugaucuggugucug

SEQ ID NO: 1035463 - RNA, 22 nt, Human
ccugugugucugucacugcaca

SEQ ID NO: 1035464 - RNA, 19 nt, Human
gagaggccugugcuugaag

SEQ ID NO: 1035465 - RNA, 22 nt, Human
gugacagaguuuuagaucucau

SEQ ID NO: 1035466 - RNA, 22 nt, Human
cuguacaucucugaggacagua

SEQ ID NO: 1035467 - RNA, 22 nt, Human
accacugcccauggugaaaacu

SEQ ID NO: 1035468 - RNA, 22 nt, Human
ggcugcugggaauaugccagcu

SEQ ID NO: 1035469 - RNA, 22 nt, Human
ucccugggccuccugcuaugca

SEQ ID NO: 1035470 - RNA, 22 nt, Human
ccagcuccugggucuuagucag

SEQ ID NO: 1035471 - RNA, 22 nt, Human
ugggcugcuguuacaggggcug

SEQ ID NO: 1035472 - RNA, 22 nt, Human
uggcucugucacugugagcuau

SEQ ID NO: 1035473 - RNA, 22 nt, Human
uggccuccccuaacagccucuu

SEQ ID NO: 1035474 - RNA, 22 nt, Human
ccucagccuuggccccaggcag

SEQ ID NO: 1035475 - RNA, 22 nt, Human
ucugggcacugcugagccugua

SEQ ID NO: 1035476 - RNA, 22 nt, Human
gaaaagcuaggccaguucagcu

SEQ ID NO: 1035477 - RNA, 19 nt, Human
ucccgcccacugagcgugc

SEQ ID NO: 1035478 - RNA, 22 nt, Human
ucagccugcuccaagugcugcc

SEQ ID NO: 1035479 - RNA, 22 nt, Human
gcagggaccugccacugcuguc

SEQ ID NO: 1035480 - RNA, 22 nt, Human
uacaugaacaaaauagcagaaa

SEQ ID NO: 1035481 - RNA, 21 nt, Human
gagugcaggucugaugccauc

SEQ ID NO: 1035482 - RNA, 22 nt, Human
cccucugcaggcuggaccugcc

SEQ ID NO: 1035483 - RNA, 22 nt, Human
ggccucagugggccgcugcagg

SEQ ID NO: 1035484 - RNA, 22 nt, Human
ggagugggcagcacugcccugu

SEQ ID NO: 1035485 - RNA, 22 nt, Human
cugaaggauguguggugggagu

SEQ ID NO: 1035486 - RNA, 22 nt, Human
ggccucuguucugcauuccucc

SEQ ID NO: 1035487 - RNA, 22 nt, Human
cacacaggagagugcuggaggu

SEQ ID NO: 1035488 - RNA, 22 nt, Human
gcacagggaggcuggccuggcc

SEQ ID NO: 1035489 - RNA, 22 nt, Human
aaugcacauaaauauggucuua

SEQ ID NO: 1035490 - RNA, 22 nt, Human
auccaaagcccuaaguuaacug

SEQ ID NO: 1035491 - RNA, 22 nt, Human
uguauauucugccuaaaagcuu

SEQ ID NO: 1035492 - RNA, 22 nt, Human
cacaagucuguggucuccaaca

SEQ ID NO: 1035493 - RNA, 22 nt, Human
ccugccugcagaaaguaucucc

SEQ ID NO: 1035494 - RNA, 21 nt, Human
aagggagauaggaaucaggcc

SEQ ID NO: 1035495 - RNA, 22 nt, Human
uugaagcaaggcgaaucuugug

SEQ ID NO: 1035496 - RNA, 22 nt, Human
aagggccuccuggggagccugg

SEQ ID NO: 1035497 - RNA, 22 nt, Human
guaucuuucccaccaaucacaa

SEQ ID NO: 1035498 - RNA, 22 nt, Human
gcugccagcucacucuccugag

SEQ ID NO: 1035499 - RNA, 22 nt, Human
ugucagugaguuaguugcaagu

SEQ ID NO: 1035500 - RNA, 22 nt, Human
uuaacagagaacauagaaguag

SEQ ID NO: 1035501 - RNA, 20 nt, Human
cucugcagcaaggccugggu

SEQ ID NO: 1035502 - RNA, 22 nt, Human
aguaggaggcgggagcaugaag

SEQ ID NO: 1035503 - RNA, 22 nt, Human
ugugcaguuucuauguugucca

SEQ ID NO: 1035504 - RNA, 22 nt, Human
aguggggacuuaugccagcauu

SEQ ID NO: 1035505 - RNA, 18 nt, Human
cagaaguccuucaaggcc

SEQ ID NO: 1035506 - RNA, 22 nt, Human
uaugagcuuccaguguugcaug

SEQ ID NO: 1035507 - RNA, 22 nt, Human
agccagcagggcuuagaggaca

SEQ ID NO: 1035508 - RNA, 22 nt, Human
cauugcuguuaauugucucuag

SEQ ID NO: 1035509 - RNA, 22 nt, Human
ugcuuuauuuauaaaauagcaa

SEQ ID NO: 1035510 - RNA, 22 nt, Human
cugcucucuguuccccuggauc

SEQ ID NO: 1035511 - RNA, 20 nt, Human
gcugccagugccugaugcuu

SEQ ID NO: 1035512 - RNA, 22 nt, Human
uugggcucaggaguuugagacc

SEQ ID NO: 1035513 - RNA, 22 nt, Human
ugauuuccuaggucuggagaag

SEQ ID NO: 1035514 - RNA, 22 nt, Human
gcagagugauggaaugugggug

SEQ ID NO: 1035515 - RNA, 22 nt, Human
gcuggcugcgucaucacagggc

SEQ ID NO: 1035516 - RNA, 22 nt, Human
uugaagcaaauucugugcagua

SEQ ID NO: 1035517 - RNA, 22 nt, Human
ugcuuuauguuaucagaagggu

SEQ ID NO: 1035518 - RNA, 22 nt, Human
gcagccaggaaagcuggacccu

SEQ ID NO: 1035519 - RNA, 22 nt, Human
uggcucugaucagauguccagu

SEQ ID NO: 1035520 - RNA, 22 nt, Human
cuggccugaggucggcuguagg

SEQ ID NO: 1035521 - RNA, 22 nt, Human
agagcagcacguuguccccaca

SEQ ID NO: 1035522 - RNA, 22 nt, Human
ggcucaggacacagugguuuag

SEQ ID NO: 1035523 - RNA, 22 nt, Human
gccuggaguuguggugaagcca

SEQ ID NO: 1035524 - RNA, 19 nt, Human
uccaaaggacccaccucca

SEQ ID NO: 1035525 - RNA, 22 nt, Human
uagcagggccaggcugggaacc

SEQ ID NO: 1035526 - RNA, 22 nt, Human
aacagugagaagguggacagga

SEQ ID NO: 1035527 - RNA, 22 nt, Human
ggagccuggccuggcucugugu

SEQ ID NO: 1035528 - RNA, 22 nt, Human
gagguagccacagauagagacu

SEQ ID NO: 1035529 - RNA, 22 nt, Human
cagggacauugguggccagguu

SEQ ID NO: 1035530 - RNA, 22 nt, Human
ccugucuggaacauggccuguu

SEQ ID NO: 1035531 - RNA, 22 nt, Human
ucaggugguccuaagugccauc

SEQ ID NO: 1035532 - RNA, 22 nt, Human
cagagcugagaauguugaugcu

SEQ ID NO: 1035533 - RNA, 22 nt, Human
uuaauaaaguaugaauuggaaa

SEQ ID NO: 1035534 - RNA, 23 nt, Human
cagggcugggcuugguguuaggc

SEQ ID NO: 1035535 - RNA, 20 nt, Human
ccagagcagccacugaaguu

SEQ ID NO: 1035536 - RNA, 22 nt, Human
gcagggcucaacaggacacccc

SEQ ID NO: 1035537 - RNA, 22 nt, Human
gagcugcugguugcuggugccu

SEQ ID NO: 1035538 - RNA, 18 nt, Human
uccagcgugcuccagggc

SEQ ID NO: 1035539 - RNA, 22 nt, Human
ugagccuggcggaagcagcgug

SEQ ID NO: 1035540 - RNA, 22 nt, Human
caggggcugugggcggagccuc

SEQ ID NO: 1035541 - RNA, 22 nt, Human
auugagaauccauuugagauga

SEQ ID NO: 1035542 - RNA, 22 nt, Human
aauaauuuugagagccuggaaa

SEQ ID NO: 1035543 - RNA, 22 nt, Human
uccaggcugggcugaagggugc

SEQ ID NO: 1035544 - RNA, 22 nt, Human
ugagccagucugucugggugaa

SEQ ID NO: 1035545 - RNA, 22 nt, Human
agccugccuugggcugcuugag

SEQ ID NO: 1035546 - RNA, 22 nt, Human
agcagggcugcagugugucuuu

SEQ ID NO: 1035547 - RNA, 22 nt, Human
gcugccacauuuucaggacuaa

SEQ ID NO: 1035548 - RNA, 20 nt, Human
cccugagaccagagagcagc

SEQ ID NO: 1035549 - RNA, 22 nt, Human
gaagcccuauccucuccuggga

SEQ ID NO: 1035550 - RNA, 22 nt, Human
uggccugccccgagauccuggc

SEQ ID NO: 1035551 - RNA, 22 nt, Human
cugggagggguagccaauccua

SEQ ID NO: 1035552 - RNA, 22 nt, Human
caugggagguuggcuuggcaug

SEQ ID NO: 1035553 - RNA, 22 nt, Human
agggcacaucugcugggaaugg

SEQ ID NO: 1035554 - RNA, 22 nt, Human
agcugcccuggcggagcugcuc

SEQ ID NO: 1035555 - RNA, 22 nt, Human
agcucccagaaggcccugcgcc

SEQ ID NO: 1035556 - RNA, 19 nt, Human
gcugugugaccuugggcaa

SEQ ID NO: 1035557 - RNA, 22 nt, Human
ugcaggugcguuuucaagccuc

SEQ ID NO: 1035558 - RNA, 22 nt, Human
agaggugacauaggagaggcuc

SEQ ID NO: 1035559 - RNA, 22 nt, Human
agugaguggacccugcaaggaa

SEQ ID NO: 1035560 - RNA, 22 nt, Human
aguuacuugagacguuuaugaa

SEQ ID NO: 1035561 - RNA, 22 nt, Human
gcugucuggaggcucugaggga

SEQ ID NO: 1035562 - RNA, 22 nt, Human
ggcuccuguccuccuggagcuc

SEQ ID NO: 1035563 - RNA, 22 nt, Human
ggagccuguggccgucacgacu

SEQ ID NO: 1035564 - RNA, 22 nt, Human
ugguggcuucugaggauggcga

SEQ ID NO: 1035565 - RNA, 23 nt, Human
gccucugcagccuaguuaguguc

SEQ ID NO: 1035566 - RNA, 22 nt, Human
caggccagguggcaggcaaaac

SEQ ID NO: 1035567 - RNA, 21 nt, Human
cagagcuguccaaacccugac

SEQ ID NO: 1035568 - RNA, 22 nt, Human
gacacagcacuguacaaggaau

SEQ ID NO: 1035569 - RNA, 22 nt, Human
uaacagaauagcagaaacagaa

SEQ ID NO: 1035570 - RNA, 22 nt, Human
agccaaggacacggagccuccu

SEQ ID NO: 1035571 - RNA, 21 nt, Human
agcagccauggaugguaugua

SEQ ID NO: 1035572 - RNA, 22 nt, Human
uucacagggcagcagcugagcc

SEQ ID NO: 1035573 - RNA, 22 nt, Human
uuccauaauaaccugagagaaa

SEQ ID NO: 1035574 - RNA, 22 nt, Human
uaugcacaauaugaucuauuug

SEQ ID NO: 1035575 - RNA, 22 nt, Human
uguguguauaugcauuuaucua

SEQ ID NO: 1035576 - RNA, 22 nt, Human
ggaggccaaggcagguggaucg

SEQ ID NO: 1035577 - RNA, 22 nt, Human
ccaggcuggauuuugcaguuca

SEQ ID NO: 1035578 - RNA, 22 nt, Human
agcaggaguuugaugcuuuuau

SEQ ID NO: 1035579 - RNA, 22 nt, Human
agcaggcuccuuccuucucugg

SEQ ID NO: 1035580 - RNA, 22 nt, Human
uugcauaaaugcuuaaaauuug

SEQ ID NO: 1035581 - RNA, 21 nt, Human
gcaggcuggucaaaccucagu

SEQ ID NO: 1035582 - RNA, 22 nt, Human
cagaagcacuaggaggaaacgu

SEQ ID NO: 1035583 - RNA, 22 nt, Human
cagagcuggguuugggaaaccu

SEQ ID NO: 1035584 - RNA, 22 nt, Human
uuuucucuacaaaauaaccagc

SEQ ID NO: 1035585 - RNA, 22 nt, Human
gaagagcuuagacagaaucaaa

SEQ ID NO: 1035586 - RNA, 21 nt, Human
cugaggcagcacagcuaguca

SEQ ID NO: 1035587 - RNA, 22 nt, Human
guccucuggccuuucccaggac

SEQ ID NO: 1035588 - RNA, 22 nt, Human
ggcugcuggcauugagguaggu

SEQ ID NO: 1035589 - RNA, 22 nt, Human
ccagggugagugucauggguua

SEQ ID NO: 1035590 - RNA, 22 nt, Human
gcuguuccugcuuagaggucgg

SEQ ID NO: 1035591 - RNA, 20 nt, Human
ugugcccaauguccagguuc

SEQ ID NO: 1035592 - RNA, 22 nt, Human
gccaccucuuugucucugccgc

SEQ ID NO: 1035593 - RNA, 22 nt, Human
gcucuguguccacagcuggaaa

SEQ ID NO: 1035594 - RNA, 22 nt, Human
uggaggaugagugugggcucug

SEQ ID NO: 1035595 - RNA, 22 nt, Human
guaagagcacugucuccugcug

SEQ ID NO: 1035596 - RNA, 22 nt, Human
caggcagcugcuggguucagcc

SEQ ID NO: 1035597 - RNA, 22 nt, Human
uaaggcaccauaauauauuuaa

SEQ ID NO: 1035598 - RNA, 22 nt, Human
gaaaugcagaaccugagaccau

SEQ ID NO: 1035599 - RNA, 22 nt, Human
ccaggcucaggugcgagagaca

SEQ ID NO: 1035600 - RNA, 22 nt, Human
agggcucugggguggcagagau

SEQ ID NO: 1035601 - RNA, 22 nt, Human
ggccugagucacaucaggagag

SEQ ID NO: 1035602 - RNA, 22 nt, Human
ggaggccaucuggcuggaggcu

SEQ ID NO: 1035603 - RNA, 22 nt, Human
uuccagaauuuuguucugcuug

SEQ ID NO: 1035604 - RNA, 22 nt, Human
gcccucucggcauagcaggggc

SEQ ID NO: 1035605 - RNA, 18 nt, Human
uggcucagauggcuuuaa

SEQ ID NO: 1035606 - RNA, 22 nt, Human
uggcuagcccuuguggggagag

SEQ ID NO: 1035607 - RNA, 22 nt, Human
uugccuugauucuucucaugug

SEQ ID NO: 1035608 - RNA, 22 nt, Human
cugggcugcagcgggagcgacg

SEQ ID NO: 1035609 - RNA, 22 nt, Human
cauugcuuugugcauauuuaaa

SEQ ID NO: 1035610 - RNA, 22 nt, Human
uggcucagugcauucacaguaa

SEQ ID NO: 1035611 - RNA, 22 nt, Human
ugcaauaacuacuuuaauguug

SEQ ID NO: 1035612 - RNA, 22 nt, Human
cucccaagggguaagggagcug

SEQ ID NO: 1035613 - RNA, 22 nt, Human
ugggccugauucuugaauccug

SEQ ID NO: 1035614 - RNA, 22 nt, Human
ucacaggguaucugggauggau

SEQ ID NO: 1035615 - RNA, 22 nt, Human
ggcuucuccccuuugagucuuc

SEQ ID NO: 1035616 - RNA, 22 nt, Human
gcugucacaaauauuucucagc

SEQ ID NO: 1035617 - RNA, 22 nt, Human
ccuuucucuuggauaccgauug

SEQ ID NO: 1035618 - RNA, 17 nt, Human
uguggccuucugagcuu

SEQ ID NO: 1035619 - RNA, 22 nt, Human
aaugcuagugugauauguaagg

SEQ ID NO: 1035620 - RNA, 22 nt, Human
ggccugcuucucagugagcuug

SEQ ID NO: 1035621 - RNA, 22 nt, Human
ugugcccaucccucuggagugu

SEQ ID NO: 1035622 - RNA, 22 nt, Human
cauugaaaccuaacauaggcug

SEQ ID NO: 1035623 - RNA, 22 nt, Human
agcccccaaaagugcuuaugau

SEQ ID NO: 1035624 - RNA, 22 nt, Human
ugaagccagcuuuggaagacac

SEQ ID NO: 1035625 - RNA, 22 nt, Human
gcaggagccaggccgagcuggu

SEQ ID NO: 1035626 - RNA, 22 nt, Human
uagaggugucacuuugggaagu

SEQ ID NO: 1035627 - RNA, 22 nt, Human
uuucuagaggcuccaggggagu

SEQ ID NO: 1035628 - RNA, 22 nt, Human
acagaccaaguuuccagcaggu

SEQ ID NO: 1035629 - RNA, 22 nt, Human
ugccaggcccagcuccagagcu

SEQ ID NO: 1035630 - RNA, 22 nt, Human
cugaagccacgauagcuuccua

SEQ ID NO: 1035631 - RNA, 22 nt, Human
gggcuuggcacaugggcucagc

SEQ ID NO: 1035632 - RNA, 22 nt, Human
gccuggaguagcauggcaagcc

SEQ ID NO: 1035633 - RNA, 22 nt, Human
gaggagcacaugaggcugaggg

SEQ ID NO: 1035634 - RNA, 22 nt, Human
agucucagcaagcauggcuagu

SEQ ID NO: 1035635 - RNA, 22 nt, Human
caaaggcaacauauacuuguuu

SEQ ID NO: 1035636 - RNA, 22 nt, Human
ugggcuggcguggagaguuuag

SEQ ID NO: 1035637 - RNA, 22 nt, Human
ucuggauggucagcucuuccug

SEQ ID NO: 1035638 - RNA, 22 nt, Human
cacagguguaugaauaugucca

SEQ ID NO: 1035639 - RNA, 22 nt, Human
uagaaauccccagucucauagu

SEQ ID NO: 1035640 - RNA, 22 nt, Human
aaaaagguugauccagauuagg

SEQ ID NO: 1035641 - RNA, 22 nt, Human
uuccucucucuugccagaaugu

SEQ ID NO: 1035642 - RNA, 22 nt, Human
ucccagaguucaaugggaaggu

SEQ ID NO: 1035643 - RNA, 22 nt, Human
ucuggagagucacagugccaga

SEQ ID NO: 1035644 - RNA, 22 nt, Human
aaugauggucauggcaacuuuu

SEQ ID NO: 1035645 - RNA, 22 nt, Human
cacagaggaaaggcaguuggua

SEQ ID NO: 1035646 - RNA, 22 nt, Human
agggugggcuagacucuucccc

SEQ ID NO: 1035647 - RNA, 20 nt, Human
ccuggcugcauucaggacgg

SEQ ID NO: 1035648 - RNA, 22 nt, Human
auguguagaacuguaaugccca

SEQ ID NO: 1035649 - RNA, 22 nt, Human
ucugcucuaguugcuuccugcc

SEQ ID NO: 1035650 - RNA, 22 nt, Human
gagguacagaguguuccaaugu

SEQ ID NO: 1035651 - RNA, 22 nt, Human
auaaacacuucuagggcacaca

SEQ ID NO: 1035652 - RNA, 22 nt, Human
cugccugggccggccacccucu

SEQ ID NO: 1035653 - RNA, 22 nt, Human
auuuuuaugacaaaccauccuc

SEQ ID NO: 1035654 - RNA, 20 nt, Human
aggcucagcugagcucuugg

SEQ ID NO: 1035655 - RNA, 22 nt, Human
gggcugcacguauucugcucac

SEQ ID NO: 1035656 - RNA, 22 nt, Human
uugaaaggaauacagaggccua

SEQ ID NO: 1035657 - RNA, 17 nt, Human
agcagaagucagaggga

SEQ ID NO: 1035658 - RNA, 22 nt, Human
aaugcacaugccacauguggua

SEQ ID NO: 1035659 - RNA, 22 nt, Human
ugcagcucugaacagucaugaa

SEQ ID NO: 1035660 - RNA, 22 nt, Human
aucucagacauguuguccauga

SEQ ID NO: 1035661 - RNA, 22 nt, Human
auagucuuagucuauaguuuug

SEQ ID NO: 1035662 - RNA, 23 nt, Human
ucucaggacacacaugucuauca

SEQ ID NO: 1035663 - RNA, 22 nt, Human
aucuagaaguggcaugaauuac

SEQ ID NO: 1035664 - RNA, 22 nt, Human
ugccugggggacuaaggccaaa

SEQ ID NO: 1035665 - RNA, 22 nt, Human
acaguaaugauucugagucucu

SEQ ID NO: 1035666 - RNA, 22 nt, Human
uggugcuguggaggggcagaag

SEQ ID NO: 1035667 - RNA, 22 nt, Human
aagauuuccauuucuagcucau

SEQ ID NO: 1035668 - RNA, 22 nt, Human
gcugcucucucccuaaguuggg

SEQ ID NO: 1035669 - RNA, 22 nt, Human
ucuggcuccacaccucacugca

SEQ ID NO: 1035670 - RNA, 22 nt, Human
cugccacuagcuuucacaucuu

SEQ ID NO: 1035671 - RNA, 22 nt, Human
cucugggcaaguuucuucauga

SEQ ID NO: 1035672 - RNA, 22 nt, Human
acuguguggaccacucugaggc

SEQ ID NO: 1035673 - RNA, 20 nt, Human
cacaggcuauaugagagcca

SEQ ID NO: 1035674 - RNA, 22 nt, Human
cuggcaggaagaggaaagguca

SEQ ID NO: 1035675 - RNA, 22 nt, Human
gugccuggagcuaauguguaua

SEQ ID NO: 1035676 - RNA, 19 nt, Human
cugucaggggcuggauguu

SEQ ID NO: 1035677 - RNA, 22 nt, Human
gguggcagaggugcaucagccc

SEQ ID NO: 1035678 - RNA, 22 nt, Human
gacaggguacgggcuaggcaca

SEQ ID NO: 1035679 - RNA, 22 nt, Human
aggaggccgcugaugggcuccc

SEQ ID NO: 1035680 - RNA, 17 nt, Human
cagugcagagcccuuuc

SEQ ID NO: 1035681 - RNA, 22 nt, Human
ugccugcucuuaccacucuccc

SEQ ID NO: 1035682 - RNA, 22 nt, Human
ugucccagguccuagaugacca

SEQ ID NO: 1035683 - RNA, 22 nt, Human
aucaguuugauaauaaggcuug

SEQ ID NO: 1035684 - RNA, 22 nt, Human
aaaaguaauugaugcaaucgua

SEQ ID NO: 1035685 - RNA, 22 nt, Human
cuggagcaggcuugucccagcu

SEQ ID NO: 1035686 - RNA, 22 nt, Human
aguaacaagugccaacguuaga

SEQ ID NO: 1035687 - RNA, 22 nt, Human
guaggcagauaggagugcagcc

SEQ ID NO: 1035688 - RNA, 22 nt, Human
uguaagauauucagcuuauuga

SEQ ID NO: 1035689 - RNA, 22 nt, Human
ccaggagcaggagcuggacaga

SEQ ID NO: 1035690 - RNA, 22 nt, Human
aggcugggaaauguagucuucc

SEQ ID NO: 1035691 - RNA, 22 nt, Human
cacugggcguguccugggugag

SEQ ID NO: 1035692 - RNA, 22 nt, Human
gccucugcucggacuuugccuc

SEQ ID NO: 1035693 - RNA, 22 nt, Human
gccagagcagaauagaguggcc

SEQ ID NO: 1035694 - RNA, 22 nt, Human
acacugcagaugaaagcauaag

SEQ ID NO: 1035695 - RNA, 22 nt, Human
cugcucugaguauuaacggagg

SEQ ID NO: 1035696 - RNA, 22 nt, Human
aagggcagcuuaaauugguagc

SEQ ID NO: 1035697 - RNA, 22 nt, Human
gccaggggacgcggagcgacga

SEQ ID NO: 1035698 - RNA, 22 nt, Human
ucaggauccauagacucccaaa

SEQ ID NO: 1035699 - RNA, 22 nt, Human
uggccugccucccggcuucuuu

SEQ ID NO: 1035700 - RNA, 22 nt, Human
ggagauggcucugcaaggucua

SEQ ID NO: 1035701 - RNA, 22 nt, Human
gcagcccaauggacugagacag

SEQ ID NO: 1035702 - RNA, 22 nt, Human
agguggguccuggcucugccau

SEQ ID NO: 1035703 - RNA, 22 nt, Human
guggauggauugaggcaguggg

SEQ ID NO: 1035704 - RNA, 22 nt, Human
gagaaagacguaggcugggagg

SEQ ID NO: 1035705 - RNA, 22 nt, Human
gguggcaggcccugagcauccc

SEQ ID NO: 1035706 - RNA, 22 nt, Human
ucccagaggucucugcugguuc

SEQ ID NO: 1035707 - RNA, 22 nt, Human
uagcuuuacaaagugcugcacc

SEQ ID NO: 1035708 - RNA, 22 nt, Human
gcagcuggggccacacuuaggc

SEQ ID NO: 1035709 - RNA, 22 nt, Human
cagucccacuagugccaauacc

SEQ ID NO: 1035710 - RNA, 22 nt, Human
aagauuuccuggauguaauucc

SEQ ID NO: 1035711 - RNA, 22 nt, Human
ccuggcugaaccaaugaagugg

SEQ ID NO: 1035712 - RNA, 22 nt, Human
ccaggcauccauugcuuccucu

SEQ ID NO: 1035713 - RNA, 22 nt, Human
aagccagcauuuucccauuccu

SEQ ID NO: 1035714 - RNA, 22 nt, Human
cacuggcaugugaggcgguggc

SEQ ID NO: 1035715 - RNA, 20 nt, Human
gaggcugcggacugcuggac

SEQ ID NO: 1035716 - RNA, 22 nt, Human
ugugacaugugucaucuuuucu

SEQ ID NO: 1035717 - RNA, 22 nt, Human
agcauggggcuccgcaaugaac

SEQ ID NO: 1035718 - RNA, 22 nt, Human
uggcccugccacucacugcuga

SEQ ID NO: 1035719 - RNA, 22 nt, Human
gggaucagaaacauagcccuga

SEQ ID NO: 1035720 - RNA, 22 nt, Human
aaggcaggaugcggacccaucu

SEQ ID NO: 1035721 - RNA, 22 nt, Human
agcaggugacagggcuguggug

SEQ ID NO: 1035722 - RNA, 22 nt, Human
ucccagaguuuccuguguccca

SEQ ID NO: 1035723 - RNA, 22 nt, Human
ucacagaauagcacuguaagcg

SEQ ID NO: 1035724 - RNA, 22 nt, Human
gcugugcacuaccuauacaucc

SEQ ID NO: 1035725 - RNA, 21 nt, Human
acaggcucuggggaugcuggg

SEQ ID NO: 1035726 - RNA, 22 nt, Human
aaagcaguauauugguaguugu

SEQ ID NO: 1035727 - RNA, 22 nt, Human
gagccuggccuccugccucagc

SEQ ID NO: 1035728 - RNA, 22 nt, Human
auuuaaaugcuuaagaggguuu

SEQ ID NO: 1035729 - RNA, 22 nt, Human
gcuuccugauauucauacuguu

SEQ ID NO: 1035730 - RNA, 22 nt, Human
cggcuggggcuguccccaugac

SEQ ID NO: 1035731 - RNA, 22 nt, Human
uccagggaccucccugagagcu

SEQ ID NO: 1035732 - RNA, 22 nt, Human
ucucuggguuuuuguccuguac

SEQ ID NO: 1035733 - RNA, 18 nt, Human
ucuggcucaggacugaac

SEQ ID NO: 1035734 - RNA, 22 nt, Human
caggucagaggcgcagccccca

SEQ ID NO: 1035735 - RNA, 23 nt, Human
aggagccaggaaccagcuucccc

SEQ ID NO: 1035736 - RNA, 22 nt, Human
ugcucccaggcauucucuguug

SEQ ID NO: 1035737 - RNA, 22 nt, Human
gggcugugagaguggggcugcu

SEQ ID NO: 1035738 - RNA, 22 nt, Human
uaguccaguaaaacagcuaacg

SEQ ID NO: 1035739 - RNA, 22 nt, Human
cagaacugggcagggagcagag

SEQ ID NO: 1035740 - RNA, 22 nt, Human
cagucccaaggaggaagcaguc

SEQ ID NO: 1035741 - RNA, 22 nt, Human
gcugucugacuccaaguuggag

SEQ ID NO: 1035742 - RNA, 22 nt, Human
ggugcagugguguggcaaaggg

SEQ ID NO: 1035743 - RNA, 22 nt, Human
cugcuuugaggggcucuguaua

SEQ ID NO: 1035744 - RNA, 22 nt, Human
uuauguacucugcaauguuuga

SEQ ID NO: 1035745 - RNA, 22 nt, Human
ccaggccucccuuuuccagcca

SEQ ID NO: 1035746 - RNA, 22 nt, Human
ggagggcucaauugacuccuga

SEQ ID NO: 1035747 - RNA, 22 nt, Human
cuggugugauugagcccaggug

SEQ ID NO: 1035748 - RNA, 22 nt, Human
uggccuggaaaaaugcagaugg

SEQ ID NO: 1035749 - RNA, 22 nt, Human
cccaggcagucuggcucuaaag

SEQ ID NO: 1035750 - RNA, 22 nt, Human
gauuuccuagacauggggcaga

SEQ ID NO: 1035751 - RNA, 19 nt, Human
cugugcuuuaaacuccuau

SEQ ID NO: 1035752 - RNA, 22 nt, Human
agaagcugccuacaugaccagc

SEQ ID NO: 1035753 - RNA, 22 nt, Human
gccauccucugagcacuaggca

SEQ ID NO: 1035754 - RNA, 22 nt, Human
uggcucugugucucccagcagc

SEQ ID NO: 1035755 - RNA, 22 nt, Human
ccuggcugcauuuugcuggaug

SEQ ID NO: 1035756 - RNA, 22 nt, Human
cuggcucccagcuuucagggag

SEQ ID NO: 1035757 - RNA, 22 nt, Human
gcucucuguuauuaagaucuuu

SEQ ID NO: 1035758 - RNA, 22 nt, Human
auaucacaaacaagucuguacu

SEQ ID NO: 1035759 - RNA, 20 nt, Human
ccacaggaguccagucgacc

SEQ ID NO: 1035760 - RNA, 22 nt, Human
ggcaggagaauggcgugaacuc

SEQ ID NO: 1035761 - RNA, 22 nt, Human
ucugcaggacugaggccuguuu

SEQ ID NO: 1035762 - RNA, 22 nt, Human
cucugcugcccaggccugcuag

SEQ ID NO: 1035763 - RNA, 20 nt, Human
aggcacuguugucuguaucc

SEQ ID NO: 1035764 - RNA, 22 nt, Human
ccaggagcauuaagagaacaua

SEQ ID NO: 1035765 - RNA, 22 nt, Human
gaagcagcucagauugacugaa

SEQ ID NO: 1035766 - RNA, 22 nt, Human
aggaagccaugguggacgucua

SEQ ID NO: 1035767 - RNA, 22 nt, Human
agcugccaaguuggaguagcaa

SEQ ID NO: 1035768 - RNA, 22 nt, Human
acagaauucucucugcagaggc

SEQ ID NO: 1035769 - RNA, 22 nt, Human
acagugucugacacauuguagc

SEQ ID NO: 1035770 - RNA, 22 nt, Human
cagcugccaagaaucuuuucua

SEQ ID NO: 1035771 - RNA, 22 nt, Human
caggagcccguugcuccggcgg

SEQ ID NO: 1035772 - RNA, 22 nt, Human
aucagugcuaaagcaaaugccc

SEQ ID NO: 1035773 - RNA, 22 nt, Human
cagccaggacagggaaacuagu

SEQ ID NO: 1035774 - RNA, 22 nt, Human
agcagagucugugugcacuuua

SEQ ID NO: 1035775 - RNA, 22 nt, Human
cccagagcugagucugauauau

SEQ ID NO: 1035776 - RNA, 22 nt, Human
gccugccugcugugugcaaguu

SEQ ID NO: 1035777 - RNA, 22 nt, Human
cuggcuccauccuugagcucug

SEQ ID NO: 1035778 - RNA, 17 nt, Human
aggcauggucuggggug

SEQ ID NO: 1035779 - RNA, 22 nt, Human
augguguagcaugugauaugac

SEQ ID NO: 1035780 - RNA, 22 nt, Human
acugggaggcaucuggagcuga

SEQ ID NO: 1035781 - RNA, 22 nt, Human
uauagaagagacaugugcauag

SEQ ID NO: 1035782 - RNA, 22 nt, Human
agagaagacuuacagccacagu

SEQ ID NO: 1035783 - RNA, 20 nt, Human
guggccuguccuguuguggg

SEQ ID NO: 1035784 - RNA, 22 nt, Human
caggagcaaggagcagugggau

SEQ ID NO: 1035785 - RNA, 22 nt, Human
gccccagcucugccacaacuag

SEQ ID NO: 1035786 - RNA, 23 nt, Human
auacauacagucuuacugacuuu

SEQ ID NO: 1035787 - RNA, 22 nt, Human
aucuggcucccuuggaauccgu

SEQ ID NO: 1035788 - RNA, 20 nt, Human
agggucaguagcacagagcu

SEQ ID NO: 1035789 - RNA, 22 nt, Human
ugauuucccucaucauaacaga

SEQ ID NO: 1035790 - RNA, 22 nt, Human
uggagcugaacuuugaggccag

SEQ ID NO: 1035791 - RNA, 22 nt, Human
gagggugguggcuuaaggugcu

SEQ ID NO: 1035792 - RNA, 22 nt, Human
ucagaggacgcacuaggguugu

SEQ ID NO: 1035793 - RNA, 22 nt, Human
ccucuggcuguaccacuggcac

SEQ ID NO: 1035794 - RNA, 22 nt, Human
uugaacagcuguuacauuguua

SEQ ID NO: 1035795 - RNA, 22 nt, Human
agagccugugggagaugcagcu

SEQ ID NO: 1035796 - RNA, 22 nt, Human
aaugcacacauuugguacugaa

SEQ ID NO: 1035797 - RNA, 22 nt, Human
cccugcaggggaccugcagccu

SEQ ID NO: 1035798 - RNA, 21 nt, Human
gggaaauuaggauugcucauc

SEQ ID NO: 1035799 - RNA, 19 nt, Human
ccuggguccacucagacua

SEQ ID NO: 1035800 - RNA, 22 nt, Human
uaagaacagugucugucucaca

SEQ ID NO: 1035801 - RNA, 22 nt, Human
cagagccaaaugcugugguuau

SEQ ID NO: 1035802 - RNA, 20 nt, Human
ggcugugcccuuccguggcc

SEQ ID NO: 1035803 - RNA, 22 nt, Human
aggcaguguauugcuagcggcu

SEQ ID NO: 1035804 - RNA, 22 nt, Human
gccugccuuuguaugacccuga

SEQ ID NO: 1035805 - RNA, 22 nt, Human
gcugagcuagcuaucucagucu

SEQ ID NO: 1035806 - RNA, 22 nt, Human
ucccacacagcccgcucaccgg

SEQ ID NO: 1035807 - RNA, 22 nt, Human
gcaaugauauugaagugaugaa

SEQ ID NO: 1035808 - RNA, 22 nt, Human
gcucuguccagcgugcacagaa

SEQ ID NO: 1035809 - RNA, 22 nt, Human
cacugcaggucugagauggggg

SEQ ID NO: 1035810 - RNA, 22 nt, Human
uagcuuuaccauagaagaguau

SEQ ID NO: 1035811 - RNA, 22 nt, Human
uggugcugacaguucugagugc

SEQ ID NO: 1035812 - RNA, 22 nt, Human
aaagccuucaaguagauguaag

SEQ ID NO: 1035813 - RNA, 20 nt, Human
gcacugaaauucaauguuug

SEQ ID NO: 1035814 - RNA, 22 nt, Human
uauuuccugcauggugauguaa

SEQ ID NO: 1035815 - RNA, 22 nt, Human
agauuuagugguggaauuuugg

SEQ ID NO: 1035816 - RNA, 22 nt, Human
ucuggcucucauacucgccagu

SEQ ID NO: 1035817 - RNA, 22 nt, Human
gccucugcaacuccgccuuggu

SEQ ID NO: 1035818 - RNA, 22 nt, Human
cacugcaguuccccagugcgca

SEQ ID NO: 1035819 - RNA, 20 nt, Human
uccugagauuuaagggguuc

SEQ ID NO: 1035820 - RNA, 22 nt, Human
agucucagcuacuugggaggcu

SEQ ID NO: 1035821 - RNA, 22 nt, Human
gugcagcagggggaagacagug

SEQ ID NO: 1035822 - RNA, 22 nt, Human
uccuucagggggccgccugcac

SEQ ID NO: 1035823 - RNA, 22 nt, Human
uagagcaguuggcagcuguauu

SEQ ID NO: 1035824 - RNA, 22 nt, Human
ccaggccugcaucugcugcgca

SEQ ID NO: 1035825 - RNA, 22 nt, Human
cagaguguuagcgcugguuggg

SEQ ID NO: 1035826 - RNA, 23 nt, Human
ucccagccucuucucuugcauac

SEQ ID NO: 1035827 - RNA, 22 nt, Human
gaggggcuggcacgauggcugc

SEQ ID NO: 1035828 - RNA, 22 nt, Human
gagcagcucgagaaggaagcag

SEQ ID NO: 1035829 - RNA, 22 nt, Human
gaggccacgguuuuccuugggg

SEQ ID NO: 1035830 - RNA, 22 nt, Human
gcuggcucccauugguccuucc

SEQ ID NO: 1035831 - RNA, 22 nt, Human
ggucccaguugcccaggucagg

SEQ ID NO: 1035832 - RNA, 22 nt, Human
guggccugccgugugguauggg

SEQ ID NO: 1035833 - RNA, 22 nt, Human
cucugagagagcuggugagcac

SEQ ID NO: 1035834 - RNA, 22 nt, Human
caggcacucauucagagaggug

SEQ ID NO: 1035835 - RNA, 22 nt, Human
gcucugagccgggggccugucc

SEQ ID NO: 1035836 - RNA, 22 nt, Human
cauguacauucuguagauggag

SEQ ID NO: 1035837 - RNA, 19 nt, Human
agcagagcagggccguggg

SEQ ID NO: 1035838 - RNA, 22 nt, Human
gagauggggaauaggagcaagc

SEQ ID NO: 1035839 - RNA, 22 nt, Human
uacaggaggauuaucaaaggau

SEQ ID NO: 1035840 - RNA, 22 nt, Human
aagagagaacucccuucgccag

SEQ ID NO: 1035841 - RNA, 19 nt, Human
ggcuccuguggcugcagcc

SEQ ID NO: 1035842 - RNA, 22 nt, Human
acugggaggcaaagagcaagga

SEQ ID NO: 1035843 - RNA, 22 nt, Human
caaaguccauaguuuacaauag

SEQ ID NO: 1035844 - RNA, 22 nt, Human
ccaguggguaggccauggugag

SEQ ID NO: 1035845 - RNA, 22 nt, Human
ggcucugcaugugagugggugg

SEQ ID NO: 1035846 - RNA, 22 nt, Human
ucucuucuagcuucuugugguu

SEQ ID NO: 1035847 - RNA, 22 nt, Human
gccagccccuuagggcucuccc

SEQ ID NO: 1035848 - RNA, 22 nt, Human
guuauaaaugacugcaaaaguu

SEQ ID NO: 1035849 - RNA, 22 nt, Human
acugaaggaaacuuuuguguuu

SEQ ID NO: 1035850 - RNA, 22 nt, Human
gccaagagaaugugagagaaau

SEQ ID NO: 1035851 - RNA, 22 nt, Human
cccaggccagaacuugguugcu

SEQ ID NO: 1035852 - RNA, 22 nt, Human
gaggccagaaugagcugaaugc

SEQ ID NO: 1035853 - RNA, 22 nt, Human
ugugcccauuccacuugaguac

SEQ ID NO: 1035854 - RNA, 22 nt, Human
gccuucugauaucucuuggcau

SEQ ID NO: 1035855 - RNA, 22 nt, Human
cagccagggagggcaaaugaga

SEQ ID NO: 1035856 - RNA, 22 nt, Human
gcaggcaguuauuuaguagaau

SEQ ID NO: 1035857 - RNA, 22 nt, Human
uaucuuugcaaauaucucuaag

SEQ ID NO: 1035858 - RNA, 22 nt, Human
gucacuggggccacaugcagaa

SEQ ID NO: 1035859 - RNA, 22 nt, Human
uauuucugauugcucaugaggc

SEQ ID NO: 1035860 - RNA, 22 nt, Human
agggccagaaucccucagucua

SEQ ID NO: 1035861 - RNA, 22 nt, Human
gcugucuuccuugcuccaaggg

SEQ ID NO: 1035862 - RNA, 22 nt, Human
uggcagaggagaauuaagauua

SEQ ID NO: 1035863 - RNA, 22 nt, Human
ucagccacuacccaccuuaaca

SEQ ID NO: 1035864 - RNA, 22 nt, Human
cagccagagaaagggcacugcc

SEQ ID NO: 1035865 - RNA, 22 nt, Human
cucaggauuaaggaaucuaaau

SEQ ID NO: 1035866 - RNA, 22 nt, Human
auucuguauggaaaagcacuau

SEQ ID NO: 1035867 - RNA, 22 nt, Human
ggcuucagugagcugagcucac

SEQ ID NO: 1035868 - RNA, 22 nt, Human
agggagguaggagcuucuagcu

SEQ ID NO: 1035869 - RNA, 22 nt, Human
aggugaaguugaggaggcagaa

SEQ ID NO: 1035870 - RNA, 20 nt, Human
cagaccugcacccacuucga

SEQ ID NO: 1035871 - RNA, 22 nt, Human
cguuggagacacuugaggacuu

SEQ ID NO: 1035872 - RNA, 22 nt, Human
caugcacagugauaucugaaga

SEQ ID NO: 1035873 - RNA, 22 nt, Human
ggaugcuggggaccaaucucug

SEQ ID NO: 1035874 - RNA, 22 nt, Human
aagggccauaacuugcaguguu

SEQ ID NO: 1035875 - RNA, 22 nt, Human
uauuaucauugguaauaugguc

SEQ ID NO: 1035876 - RNA, 22 nt, Human
cccagccagccucuucccauau

SEQ ID NO: 1035877 - RNA, 22 nt, Human
agaaaugugagccccuuaucaa

SEQ ID NO: 1035878 - RNA, 22 nt, Human
ugggccuggacaaggccacuag

SEQ ID NO: 1035879 - RNA, 22 nt, Human
gaaaugcaggcuuggauucagc

SEQ ID NO: 1035880 - RNA, 22 nt, Human
caugucuguguacacaugcaca

SEQ ID NO: 1035881 - RNA, 19 nt, Human
cccagagcauccugaacuu

SEQ ID NO: 1035882 - RNA, 22 nt, Human
uggaggagaauuuauggucgaa

SEQ ID NO: 1035883 - RNA, 19 nt, Human
auaaggcagugacuuuuuu

SEQ ID NO: 1035884 - RNA, 22 nt, Human
uuuuccuaguaggccuauuaga

SEQ ID NO: 1035885 - RNA, 22 nt, Human
uggggcuggcuauugucucccu

SEQ ID NO: 1035886 - RNA, 22 nt, Human
cuggugccauucuguggccuag

SEQ ID NO: 1035887 - RNA, 22 nt, Human
ggaggccaaggugggcggauca

SEQ ID NO: 1035888 - RNA, 22 nt, Human
agagcagauggagcuggaagag

SEQ ID NO: 1035889 - RNA, 22 nt, Human
aacucaguucuuuccacaaugc

SEQ ID NO: 1035890 - RNA, 23 nt, Human
cccagagcacagccuccagaugc

SEQ ID NO: 1035891 - RNA, 22 nt, Human
aucuacagugcacaggacagcc

SEQ ID NO: 1035892 - RNA, 22 nt, Human
aggugcuggagucugggcagga

SEQ ID NO: 1035893 - RNA, 22 nt, Human
ugccaaggguaugggcaagaua

SEQ ID NO: 1035894 - RNA, 22 nt, Human
cauuuagagucuugcaauuuua

SEQ ID NO: 1035895 - RNA, 22 nt, Human
gccaggcucagcagucaaccug

SEQ ID NO: 1035896 - RNA, 22 nt, Human
gcugucugucucugucccacca

SEQ ID NO: 1035897 - RNA, 22 nt, Human
ggcugcagggcagcuggugugg

SEQ ID NO: 1035898 - RNA, 22 nt, Human
uccugcagccacugcaggcaga

SEQ ID NO: 1035899 - RNA, 22 nt, Human
ccucuccaguuuuaacgugacc

SEQ ID NO: 1035900 - RNA, 22 nt, Human
ggccuugggcuggcugcaguau

SEQ ID NO: 1035901 - RNA, 22 nt, Human
uagaaacucaggauacucuucc

SEQ ID NO: 1035902 - RNA, 22 nt, Human
aaguguuaaaagauuaaaugcu

SEQ ID NO: 1035903 - RNA, 22 nt, Human
gggcucugguacuuccuggcuc

SEQ ID NO: 1035904 - RNA, 22 nt, Human
cagcagcuuugccaagucagcc

SEQ ID NO: 1035905 - RNA, 22 nt, Human
ggcucaggccuguaauccuagc

SEQ ID NO: 1035906 - RNA, 22 nt, Human
ugccagccagguucugaggcua

SEQ ID NO: 1035907 - RNA, 22 nt, Human
auaacagaugugaagugcuaau

SEQ ID NO: 1035908 - RNA, 22 nt, Human
uaaauucuacaacuucaaagau

SEQ ID NO: 1035909 - RNA, 22 nt, Human
uaaauguguuagucaugguuuu

SEQ ID NO: 1035910 - RNA, 22 nt, Human
cccuggagcuagucugagcaga

SEQ ID NO: 1035911 - RNA, 22 nt, Human
gcugucacacauggccccagcu

SEQ ID NO: 1035912 - RNA, 22 nt, Human
gugcuuuccauccucccugcug

SEQ ID NO: 1035913 - RNA, 22 nt, Human
cauagcaacagcaucaagucaa

SEQ ID NO: 1035914 - RNA, 22 nt, Human
ucccagggcagcuguccagaag

SEQ ID NO: 1035915 - RNA, 19 nt, Human
gggcuccuugggccucucu

SEQ ID NO: 1035916 - RNA, 19 nt, Human
uuuggcacucugaaguguu

SEQ ID NO: 1035917 - RNA, 23 nt, Human
ucacacagcuggucagguacaga

SEQ ID NO: 1035918 - RNA, 22 nt, Human
gaacagcuucuugggagcuggg

SEQ ID NO: 1035919 - RNA, 22 nt, Human
gccuucaguaguauccucauga

SEQ ID NO: 1035920 - RNA, 22 nt, Human
cucucuggaagggggagcugau

SEQ ID NO: 1035921 - RNA, 22 nt, Human
cuacauuuugugauuaugaaau

SEQ ID NO: 1035922 - RNA, 21 nt, Human
ccagccucagaucagggagcu

SEQ ID NO: 1035923 - RNA, 22 nt, Human
agccacagugcaagagagaaaa

SEQ ID NO: 1035924 - RNA, 22 nt, Human
uaauaaaugaaagugcuggcau

SEQ ID NO: 1035925 - RNA, 22 nt, Human
ucugcagcuuuuugguggggug

SEQ ID NO: 1035926 - RNA, 22 nt, Human
agagguagagguugcagugagc

SEQ ID NO: 1035927 - RNA, 22 nt, Human
aagaaauuaaggaaugcaacga

SEQ ID NO: 1035928 - RNA, 20 nt, Human
agcccaggccugugugaguc

SEQ ID NO: 1035929 - RNA, 22 nt, Human
cccagccucagcuuuacuucca

SEQ ID NO: 1035930 - RNA, 23 nt, Human
aacaccaaggcucagagagauaa

SEQ ID NO: 1035931 - RNA, 22 nt, Human
ggucucagacuggcaggcagug

SEQ ID NO: 1035932 - RNA, 22 nt, Human
ucagaaauagucuuuaaaauga

SEQ ID NO: 1035933 - RNA, 22 nt, Human
uuacugaaaauucuucaggauu

SEQ ID NO: 1035934 - RNA, 22 nt, Human
ugggcugcugagaaugagagag

SEQ ID NO: 1035935 - RNA, 22 nt, Human
gggccacacagaaccuccuggu

SEQ ID NO: 1035936 - RNA, 22 nt, Human
uuugucagucaugucugcuuuu

SEQ ID NO: 1035937 - RNA, 22 nt, Human
uuccuguauuuugcgaauuuuc

SEQ ID NO: 1035938 - RNA, 22 nt, Human
aggcccugggcaguucuguagc

SEQ ID NO: 1035939 - RNA, 22 nt, Human
acaggcagggaccuuggcuaag

SEQ ID NO: 1035940 - RNA, 20 nt, Human
cccugcagccaugggagugg

SEQ ID NO: 1035941 - RNA, 22 nt, Human
agccagagagccccagguucua

SEQ ID NO: 1035942 - RNA, 22 nt, Human
gccaggcagcagcgaggauggu

SEQ ID NO: 1035943 - RNA, 22 nt, Human
uucucuggaacugaaacaagau

SEQ ID NO: 1035944 - RNA, 22 nt, Human
caguacuuguccucagguguua

SEQ ID NO: 1035945 - RNA, 22 nt, Human
uucauguaauuccauaagguaa

SEQ ID NO: 1035946 - RNA, 22 nt, Human
gagcuggugugugcccgagcac

SEQ ID NO: 1035947 - RNA, 22 nt, Human
ugcagggccgcuggaggucaug

SEQ ID NO: 1035948 - RNA, 22 nt, Human
cucuguccuugcacaguuccua

SEQ ID NO: 1035949 - RNA, 22 nt, Human
ugauacagucagcucacaauug

SEQ ID NO: 1035950 - RNA, 22 nt, Human
uccagggaugguaaugagcagu

SEQ ID NO: 1035951 - RNA, 23 nt, Human
gccugccugaccugugcaaaguc

SEQ ID NO: 1035952 - RNA, 20 nt, Human
cucucuggaaggugggagcc

SEQ ID NO: 1035953 - RNA, 22 nt, Human
gccaggcuggucuugaacuccu

SEQ ID NO: 1035954 - RNA, 22 nt, Human
uccugggcuguggccccgggca

SEQ ID NO: 1035955 - RNA, 22 nt, Human
uccugaggaaaguucaugaaug

SEQ ID NO: 1035956 - RNA, 22 nt, Human
cugccacuuacuaggcauggug

SEQ ID NO: 1035957 - RNA, 23 nt, Human
uggcucagggucucuuaugaagu

SEQ ID NO: 1035958 - RNA, 22 nt, Human
agcagcauagaagcugggagga

SEQ ID NO: 1035959 - RNA, 22 nt, Human
uccugccuucauacugcuguau

SEQ ID NO: 1035960 - RNA, 22 nt, Human
aaggagagguuguccguguugu

SEQ ID NO: 1035961 - RNA, 22 nt, Human
gcaagcugcuuaagcucauugu

SEQ ID NO: 1035962 - RNA, 22 nt, Human
gcaugcugcaccagagccucuc

SEQ ID NO: 1035963 - RNA, 22 nt, Human
gggcacugaaugccaagcuagg

SEQ ID NO: 1035964 - RNA, 22 nt, Human
aaguccaucucugccccacaca

SEQ ID NO: 1035965 - RNA, 20 nt, Human
agcuggagaagggcccuucc

SEQ ID NO: 1035966 - RNA, 22 nt, Human
gagcucauucauucauugccug

SEQ ID NO: 1035967 - RNA, 22 nt, Human
uagacacaucaaguauaguuaa

SEQ ID NO: 1035968 - RNA, 22 nt, Human
aggcccuggguuagggcccacu

SEQ ID NO: 1035969 - RNA, 22 nt, Human
ugggaauggaugcuaagugcua

SEQ ID NO: 1035970 - RNA, 22 nt, Human
uacagauacagaucuagauaca

SEQ ID NO: 1035971 - RNA, 22 nt, Human
cagcugggagcuccauuagaua

SEQ ID NO: 1035972 - RNA, 17 nt, Human
uuccucucacauuuuuu

SEQ ID NO: 1035973 - RNA, 22 nt, Human
cuggagcugcuguccuugggug

SEQ ID NO: 1035974 - RNA, 22 nt, Human
caggauccccaggucgccgucc

SEQ ID NO: 1035975 - RNA, 22 nt, Human
gggcugagggguaucucauggg

SEQ ID NO: 1035976 - RNA, 18 nt, Human
gcagagugcgucucugug

SEQ ID NO: 1035977 - RNA, 22 nt, Human
uagcagggaaggugugcugagc

SEQ ID NO: 1035978 - RNA, 22 nt, Human
ccugccugggcucacuugccag

SEQ ID NO: 1035979 - RNA, 22 nt, Human
uacuuccagcaaucugcauauu

SEQ ID NO: 1035980 - RNA, 23 nt, Human
augcaguauaugucaguaguuua

SEQ ID NO: 1035981 - RNA, 22 nt, Human
cagcccagcagucuuagccugc

SEQ ID NO: 1035982 - RNA, 22 nt, Human
uggagcagagaugggagcccaa

SEQ ID NO: 1035983 - RNA, 22 nt, Human
cagagagagugggguguggauu

SEQ ID NO: 1035984 - RNA, 22 nt, Human
cugagccauaagggaggcuggg

SEQ ID NO: 1035985 - RNA, 22 nt, Human
aggagcagaacuguuguggagg

SEQ ID NO: 1035986 - RNA, 22 nt, Human
ucuggagauaagacagacagau

SEQ ID NO: 1035987 - RNA, 18 nt, Human
cugaggcuggcaggagcc

SEQ ID NO: 1035988 - RNA, 22 nt, Human
gcucaggaaauaguuuaguguu

SEQ ID NO: 1035989 - RNA, 22 nt, Human
aagugacaccucuucccuuucc

SEQ ID NO: 1035990 - RNA, 22 nt, Human
ggaaggaggaugcucuggccuu

SEQ ID NO: 1035991 - RNA, 23 nt, Human
uucaagauacgguuuccaggcug

SEQ ID NO: 1035992 - RNA, 19 nt, Human
cccaaggcccugggcaggc

SEQ ID NO: 1035993 - RNA, 22 nt, Human
aggucauuggggacuaucuccg

SEQ ID NO: 1035994 - RNA, 22 nt, Human
ucagagugugacuuggucauga

SEQ ID NO: 1035995 - RNA, 22 nt, Human
aaaaguauuggccaccauuucu

SEQ ID NO: 1035996 - RNA, 22 nt, Human
ugagcuucuuuauuuggccaga

SEQ ID NO: 1035997 - RNA, 22 nt, Human
agaaugcaagauaaacuuuauu

SEQ ID NO: 1035998 - RNA, 22 nt, Human
uaauuuacuugcaaauaacaau

SEQ ID NO: 1035999 - RNA, 22 nt, Human
augugcauuaaaugucaauguu

SEQ ID NO: 1036000 - RNA, 22 nt, Human
ucuugccucuuccccuuuccau

SEQ ID NO: 1036001 - RNA, 22 nt, Human
cacagcuucuccuugauaucgc

SEQ ID NO: 1036002 - RNA, 17 nt, Human
cccugccaccaggaagc

SEQ ID NO: 1036003 - RNA, 20 nt, Human
uguucacaguaguugcugcu

SEQ ID NO: 1036004 - RNA, 22 nt, Human
uugggugcugucauggggcacg

SEQ ID NO: 1036005 - RNA, 22 nt, Human
agccacagagcaggagaccuuu

SEQ ID NO: 1036006 - RNA, 22 nt, Human
ggucauuguucuuuucugugau

SEQ ID NO: 1036007 - RNA, 18 nt, Human
cuuuaugugcagagcuuu

SEQ ID NO: 1036008 - RNA, 22 nt, Human
ggaguuggugagcaccaggcuu

SEQ ID NO: 1036009 - RNA, 22 nt, Human
agauacauugaguuuccuccug

SEQ ID NO: 1036010 - RNA, 22 nt, Human
gcuggcuguaucaccuggccag

SEQ ID NO: 1036011 - RNA, 22 nt, Human
ucugggagcacacgcagugauc

SEQ ID NO: 1036012 - RNA, 22 nt, Human
cugaaggagaaggccacuguuc

SEQ ID NO: 1036013 - RNA, 18 nt, Human
ugucucaggcugaaacag

SEQ ID NO: 1036014 - RNA, 22 nt, Human
agcaggcuaagggaccuguuua

SEQ ID NO: 1036015 - RNA, 22 nt, Human
gggcuggucuggcuuagucagg

SEQ ID NO: 1036016 - RNA, 22 nt, Human
aggucauuacaauuaucauuuu

SEQ ID NO: 1036017 - RNA, 22 nt, Human
acacacagguaaaggagccugg

SEQ ID NO: 1036018 - RNA, 22 nt, Human
uccauuuucaucucauguauaa

SEQ ID NO: 1036019 - RNA, 22 nt, Human
uggagcugggaguccugggcug

SEQ ID NO: 1036020 - RNA, 22 nt, Human
ucugaagaacugaguaaacaug

SEQ ID NO: 1036021 - RNA, 22 nt, Human
guggccagcaagugcugccucu

SEQ ID NO: 1036022 - RNA, 22 nt, Human
cagggcugagaauuuagagaca

SEQ ID NO: 1036023 - RNA, 22 nt, Human
cacagggccuugugugacugca

SEQ ID NO: 1036024 - RNA, 22 nt, Human
aggcucagcaucugauucauau

SEQ ID NO: 1036025 - RNA, 22 nt, Human
gcaguggcaugaugugggcuca

SEQ ID NO: 1036026 - RNA, 21 nt, Human
cuccugggcuaagauauagug

SEQ ID NO: 1036027 - RNA, 22 nt, Human
guacauuuuacuuuguuugaau

SEQ ID NO: 1036028 - RNA, 22 nt, Human
cagaggccaccuguggccacug

SEQ ID NO: 1036029 - RNA, 22 nt, Human
agggacacugaugagaaauucu

SEQ ID NO: 1036030 - RNA, 22 nt, Human
gagacagaguuucacucuuguu

SEQ ID NO: 1036031 - RNA, 22 nt, Human
aggcugagauagguggaucauu

SEQ ID NO: 1036032 - RNA, 22 nt, Human
aggguggcaguuacuggagcaa

SEQ ID NO: 1036033 - RNA, 22 nt, Human
caggcugcagugcaguggcuau

SEQ ID NO: 1036034 - RNA, 22 nt, Human
cuuaacagcaagaucuguguca

SEQ ID NO: 1036035 - RNA, 22 nt, Human
ccugucucccuggcauggcuca

SEQ ID NO: 1036036 - RNA, 22 nt, Human
ugcuggcugggcugcuggagac

SEQ ID NO: 1036037 - RNA, 22 nt, Human
ccacagggauaggaauggggcu

SEQ ID NO: 1036038 - RNA, 22 nt, Human
ucccuggcuguguucaggugcg

SEQ ID NO: 1036039 - RNA, 21 nt, Human
ugaaaguuggagucaaaugua

SEQ ID NO: 1036040 - RNA, 22 nt, Human
uggcucagccuggcccuuucau

SEQ ID NO: 1036041 - RNA, 22 nt, Human
ccugccagcauggcuuaucucc

SEQ ID NO: 1036042 - RNA, 22 nt, Human
ugcugugcuggcggcagaggcc

SEQ ID NO: 1036043 - RNA, 22 nt, Human
uagcugccuaugugauaagaga

SEQ ID NO: 1036044 - RNA, 22 nt, Human
auggaaagggaagcaaggaaca

SEQ ID NO: 1036045 - RNA, 22 nt, Human
gucccacaccuugaggggucuu

SEQ ID NO: 1036046 - RNA, 22 nt, Human
uggguagagcaggcuggggcuu

SEQ ID NO: 1036047 - RNA, 20 nt, Human
gcugucuggauuagaagccu

SEQ ID NO: 1036048 - RNA, 22 nt, Human
cagagggcucuuggcugccugc

SEQ ID NO: 1036049 - RNA, 22 nt, Human
acuggcagccacaacuggcagg

SEQ ID NO: 1036050 - RNA, 22 nt, Human
guggccuggauagacuccaucu

SEQ ID NO: 1036051 - RNA, 22 nt, Human
aacuuuaaggcuauaaauuaug

SEQ ID NO: 1036052 - RNA, 22 nt, Human
ugcauuguuugauaggugaauu

SEQ ID NO: 1036053 - RNA, 22 nt, Human
ggagagagaugccgccuugcuc

SEQ ID NO: 1036054 - RNA, 20 nt, Human
accuugaacccgccagccau

SEQ ID NO: 1036055 - RNA, 22 nt, Human
caggaguggugugagggacucc

SEQ ID NO: 1036056 - RNA, 22 nt, Human
ucuguggcacgauugcacugca

SEQ ID NO: 1036057 - RNA, 23 nt, Human
uggagcugacagucagagggagg

SEQ ID NO: 1036058 - RNA, 22 nt, Human
uguacacugcaggaugcauugc

SEQ ID NO: 1036059 - RNA, 22 nt, Human
aaguuguauauaccgcuuuaag

SEQ ID NO: 1036060 - RNA, 22 nt, Human
aagggaggccagagguuuugca

SEQ ID NO: 1036061 - RNA, 22 nt, Human
ccagucugaggccuggugaggg

SEQ ID NO: 1036062 - RNA, 22 nt, Human
uggccugccugggagcagcagg

SEQ ID NO: 1036063 - RNA, 22 nt, Human
gcaggagucacugacuuggucc

SEQ ID NO: 1036064 - RNA, 22 nt, Human
cagagaaacucagauagcugau

SEQ ID NO: 1036065 - RNA, 22 nt, Human
ugucuagggagcugcucaggcu

SEQ ID NO: 1036066 - RNA, 22 nt, Human
aagaacaguguccugggacucg

SEQ ID NO: 1036067 - RNA, 22 nt, Human
gcagccacuuugcaaccaagag

SEQ ID NO: 1036068 - RNA, 22 nt, Human
ucugccuuccccauaaucugau

SEQ ID NO: 1036069 - RNA, 22 nt, Human
caaaaugugagucccaccucaa

SEQ ID NO: 1036070 - RNA, 22 nt, Human
uagggcuauaagagaauaagac

SEQ ID NO: 1036071 - RNA, 22 nt, Human
cagagccaggccugcccucuuu

SEQ ID NO: 1036072 - RNA, 22 nt, Human
agcugccugggcuuguacaccu

SEQ ID NO: 1036073 - RNA, 22 nt, Human
cauaccuuucucaagcacaugu

SEQ ID NO: 1036074 - RNA, 22 nt, Human
acagcuguggccacuugcaucc

SEQ ID NO: 1036075 - RNA, 22 nt, Human
ucacugaagacugggcucuaaa

SEQ ID NO: 1036076 - RNA, 22 nt, Human
ugguccugccccgugcacagag

SEQ ID NO: 1036077 - RNA, 22 nt, Human
gggcagagagcuggaacuccuu

SEQ ID NO: 1036078 - RNA, 22 nt, Human
ccagagcugauuccugggacuu

SEQ ID NO: 1036079 - RNA, 22 nt, Human
guccucaguaagagggccucug

SEQ ID NO: 1036080 - RNA, 22 nt, Human
aauaacaggcucaucagaugcu

SEQ ID NO: 1036081 - RNA, 22 nt, Human
gccuugccucagccauggaaac

SEQ ID NO: 1036082 - RNA, 22 nt, Human
uggaaagaaaaacaggccauga

SEQ ID NO: 1036083 - RNA, 20 nt, Human
gugggcagaugugugcaugg

SEQ ID NO: 1036084 - RNA, 22 nt, Human
cauugcccaguaggaucaccag

SEQ ID NO: 1036085 - RNA, 22 nt, Human
uucacaggauauaugugcaggg

SEQ ID NO: 1036086 - RNA, 22 nt, Human
guucauauuacuuugagugcag

SEQ ID NO: 1036087 - RNA, 22 nt, Human
gcacagcaauuucuauaagcuc

SEQ ID NO: 1036088 - RNA, 22 nt, Human
uaacagaaguuguucauugugg

SEQ ID NO: 1036089 - RNA, 22 nt, Human
auucuccagcucacuguccaua

SEQ ID NO: 1036090 - RNA, 22 nt, Human
gggcuggcaucaguugccgaga

SEQ ID NO: 1036091 - RNA, 22 nt, Human
auuauaaagaacaugugugugg

SEQ ID NO: 1036092 - RNA, 22 nt, Human
cauaagaaauaaugaugaugac

SEQ ID NO: 1036093 - RNA, 22 nt, Human
ucuggagcuggcagggcccugg

SEQ ID NO: 1036094 - RNA, 19 nt, Human
ggcugggucuggcagguuc

SEQ ID NO: 1036095 - RNA, 22 nt, Human
augcaagauguauagaagacuu

SEQ ID NO: 1036096 - RNA, 22 nt, Human
agaaaugugaauuucauuuccu

SEQ ID NO: 1036097 - RNA, 22 nt, Human
aaguucaaguguaaucuuuauu

SEQ ID NO: 1036098 - RNA, 22 nt, Human
acauguuagaaaugcagaaucu

SEQ ID NO: 1036099 - RNA, 22 nt, Human
cauucugugauucuaaaucccu

SEQ ID NO: 1036100 - RNA, 22 nt, Human
agaccacagucaggcuccuggu

SEQ ID NO: 1036101 - RNA, 22 nt, Human
gggcuggcucugucuagaaagg

SEQ ID NO: 1036102 - RNA, 22 nt, Human
gcccuuccuuagacagcaggau

SEQ ID NO: 1036103 - RNA, 22 nt, Human
uagccucuggaauccuuucucu

SEQ ID NO: 1036104 - RNA, 22 nt, Human
uccuucagugucccgcucaggu

SEQ ID NO: 1036105 - RNA, 22 nt, Human
cacacauugaauucauucuugu

SEQ ID NO: 1036106 - RNA, 22 nt, Human
auuuaucaccaguuagcugacu

SEQ ID NO: 1036107 - RNA, 22 nt, Human
agaugcugugucuguucccuug

SEQ ID NO: 1036108 - RNA, 22 nt, Human
gugggccuugcagggugcaggg

SEQ ID NO: 1036109 - RNA, 22 nt, Human
aacaugaaaguugcuaagugca

SEQ ID NO: 1036110 - RNA, 19 nt, Human
agcaaauauaauaguguuc

SEQ ID NO: 1036111 - RNA, 22 nt, Human
ugagguguguccccagggaggu

SEQ ID NO: 1036112 - RNA, 22 nt, Human
guauuugauagauuucaaagga

SEQ ID NO: 1036113 - RNA, 22 nt, Human
cugagcuggucuauggacuugg

SEQ ID NO: 1036114 - RNA, 22 nt, Human
ccuggggagaagagcuuccccc

SEQ ID NO: 1036115 - RNA, 22 nt, Human
uuucacaaguaaaguccuaagu

SEQ ID NO: 1036116 - RNA, 22 nt, Human
aaugaacacagcccucuacuuu

SEQ ID NO: 1036117 - RNA, 22 nt, Human
ccucagcucuucccugugcaca

SEQ ID NO: 1036118 - RNA, 22 nt, Human
ccaggccuuucuucuuggucug

SEQ ID NO: 1036119 - RNA, 22 nt, Human
aaaguguugauaugugacaucc

SEQ ID NO: 1036120 - RNA, 22 nt, Human
ugcugcuccccagcacacagca

SEQ ID NO: 1036121 - RNA, 22 nt, Human
ugcagaagaaugagcuuggagu

SEQ ID NO: 1036122 - RNA, 22 nt, Human
caggcugucugaauggaggccc

SEQ ID NO: 1036123 - RNA, 22 nt, Human
accagagcuggcagaguaucaa

SEQ ID NO: 1036124 - RNA, 22 nt, Human
agagccuggucugagauaggac

SEQ ID NO: 1036125 - RNA, 22 nt, Human
cugaggccucuguucaccagaa

SEQ ID NO: 1036126 - RNA, 22 nt, Human
cgccugggaguccacaccugcu

SEQ ID NO: 1036127 - RNA, 22 nt, Human
auaaggcagugacuucaucuau

SEQ ID NO: 1036128 - RNA, 22 nt, Human
cuggcagcccaaccuagagucu

SEQ ID NO: 1036129 - RNA, 22 nt, Human
caguggcgugaucucugcucac

SEQ ID NO: 1036130 - RNA, 22 nt, Human
agccuucauaaucuugggcuuu

SEQ ID NO: 1036131 - RNA, 22 nt, Human
ucugggcucuuaguguacccuc

SEQ ID NO: 1036132 - RNA, 22 nt, Human
caguugcuacaguucaagugug

SEQ ID NO: 1036133 - RNA, 20 nt, Human
cagaaggucuaagcuuuaga

SEQ ID NO: 1036134 - RNA, 22 nt, Human
acugucucucuagcaguucagg

SEQ ID NO: 1036135 - RNA, 22 nt, Human
ggccucucuggcauggcugccc

SEQ ID NO: 1036136 - RNA, 19 nt, Human
ccucccacggauuccuucc

SEQ ID NO: 1036137 - RNA, 22 nt, Human
uaucuuuaacuugcaguauuua

SEQ ID NO: 1036138 - RNA, 22 nt, Human
ggagagcugguagcuggcucca

SEQ ID NO: 1036139 - RNA, 22 nt, Human
ugggcugcccugaugguccuca

SEQ ID NO: 1036140 - RNA, 19 nt, Human
cagcaauaaugccagaugg

SEQ ID NO: 1036141 - RNA, 22 nt, Human
gcacccagcccagggcgugaug

SEQ ID NO: 1036142 - RNA, 22 nt, Human
agggauggaagcucgucugcaa

SEQ ID NO: 1036143 - RNA, 22 nt, Human
ugggagaagcagcagccaagug

SEQ ID NO: 1036144 - RNA, 22 nt, Human
gacucagugauuugacaugccu

SEQ ID NO: 1036145 - RNA, 22 nt, Human
ugaagccaucaggaagccagca

SEQ ID NO: 1036146 - RNA, 22 nt, Human
auugacaagugagcugggcugc

SEQ ID NO: 1036147 - RNA, 23 nt, Human
gcagauggccccagagugcugcc

SEQ ID NO: 1036148 - RNA, 22 nt, Human
ggcaggguggcccuccagugag

SEQ ID NO: 1036149 - RNA, 22 nt, Human
cauuucugugacacuuccaucu

SEQ ID NO: 1036150 - RNA, 22 nt, Human
cucugggcaaguaugauagaaa

SEQ ID NO: 1036151 - RNA, 22 nt, Human
aagcagaauuucccacuaguug

SEQ ID NO: 1036152 - RNA, 19 nt, Human
cugaggcccauguaccaug

SEQ ID NO: 1036153 - RNA, 22 nt, Human
caagagcuuuagaaaugcucau

SEQ ID NO: 1036154 - RNA, 22 nt, Human
ccagcuccccucagcagguaau

SEQ ID NO: 1036155 - RNA, 19 nt, Human
uuucaauggcuuagagaaa

SEQ ID NO: 1036156 - RNA, 22 nt, Human
aaaugcacacaccaggaaacua

SEQ ID NO: 1036157 - RNA, 21 nt, Human
ccugccaggaaacugaguguc

SEQ ID NO: 1036158 - RNA, 22 nt, Human
agaggcagcagucauacuacag

SEQ ID NO: 1036159 - RNA, 22 nt, Human
cuggagggugagccucaucucu

SEQ ID NO: 1036160 - RNA, 22 nt, Human
ucagggcauccauugccuguug

SEQ ID NO: 1036161 - RNA, 22 nt, Human
ugaugggacugccagcugcuga

SEQ ID NO: 1036162 - RNA, 22 nt, Human
cggcagcuccgcgccguaggac

SEQ ID NO: 1036163 - RNA, 22 nt, Human
accucugccacuuucuaacucu

SEQ ID NO: 1036164 - RNA, 22 nt, Human
ccagggcuggguuugucggugu

SEQ ID NO: 1036165 - RNA, 22 nt, Human
cagggacugagauccagacugu

SEQ ID NO: 1036166 - RNA, 22 nt, Human
gcagagugggagcccagggcug

SEQ ID NO: 1036167 - RNA, 22 nt, Human
acagagauggcacagagaaggu

SEQ ID NO: 1036168 - RNA, 22 nt, Human
agcugcucucacuggacgccug

SEQ ID NO: 1036169 - RNA, 19 nt, Human
acauuuagaauguacuugc

SEQ ID NO: 1036170 - RNA, 22 nt, Human
ggcagccaugucccagggcuuc

SEQ ID NO: 1036171 - RNA, 22 nt, Human
guccucuguagggcugggccac

SEQ ID NO: 1036172 - RNA, 21 nt, Human
aguucauacugaguaacaaaa

SEQ ID NO: 1036173 - RNA, 22 nt, Human
guuccaggcaagugggauagga

SEQ ID NO: 1036174 - RNA, 22 nt, Human
ugagccagauaagggcucacgc

SEQ ID NO: 1036175 - RNA, 22 nt, Human
uacauguauugauuucucuucu

SEQ ID NO: 1036176 - RNA, 22 nt, Human
gccugagagucugcauuucuaa

SEQ ID NO: 1036177 - RNA, 22 nt, Human
uccugagauucugcauuucuaa

SEQ ID NO: 1036178 - RNA, 22 nt, Human
ugaaggaagaauaggcaguguu

SEQ ID NO: 1036179 - RNA, 23 nt, Human
aguuccagaaaaaugcucaagca

SEQ ID NO: 1036180 - RNA, 22 nt, Human
ggaggccaaggcgggcggauca

SEQ ID NO: 1036181 - RNA, 22 nt, Human
uaggaaaaauacagaauuauau

SEQ ID NO: 1036182 - RNA, 22 nt, Human
gcucaggauuucauccaugugu

SEQ ID NO: 1036183 - RNA, 22 nt, Human
aggcucagcugguggugaucgc

SEQ ID NO: 1036184 - RNA, 22 nt, Human
cacugcuucuggaggaauuugg

SEQ ID NO: 1036185 - RNA, 22 nt, Human
aggugcagcugguggagucugg

SEQ ID NO: 1036186 - RNA, 22 nt, Human
ccuggccucagacagagggugg

SEQ ID NO: 1036187 - RNA, 22 nt, Human
gcuggcuuugcacugggugcau

SEQ ID NO: 1036188 - RNA, 22 nt, Human
aaauugugcucacacugauauu

SEQ ID NO: 1036189 - RNA, 22 nt, Human
accccagcccugcuucugggag

SEQ ID NO: 1036190 - RNA, 22 nt, Human
cucccaggguagggagagacua

SEQ ID NO: 1036191 - RNA, 22 nt, Human
guaggcagucucucaggugauc

SEQ ID NO: 1036192 - RNA, 22 nt, Human
cuggagaggccccaagauauuu

SEQ ID NO: 1036193 - RNA, 22 nt, Human
cuggcaggagcauucacagagg

SEQ ID NO: 1036194 - RNA, 18 nt, Human
gagcccugagucugcaca

SEQ ID NO: 1036195 - RNA, 22 nt, Human
acagagccuccaggagugcugg

SEQ ID NO: 1036196 - RNA, 22 nt, Human
gggacagacccaugggccaggu

SEQ ID NO: 1036197 - RNA, 22 nt, Human
ggaggcccagagaggugaagug

SEQ ID NO: 1036198 - RNA, 22 nt, Human
cacugugucaguuugguuagac

SEQ ID NO: 1036199 - RNA, 22 nt, Human
aggucagaagugccagggaauu

SEQ ID NO: 1036200 - RNA, 22 nt, Human
gccuccuggauuuuagugccau

SEQ ID NO: 1036201 - RNA, 22 nt, Human
cagcauggugccagugagucca

SEQ ID NO: 1036202 - RNA, 21 nt, Human
gcaggaugcaucuuggugucu

SEQ ID NO: 1036203 - RNA, 22 nt, Human
ccaccagcuuugccacccugcu

SEQ ID NO: 1036204 - RNA, 22 nt, Human
cuggccgguauuugccucuggg

SEQ ID NO: 1036205 - RNA, 22 nt, Human
augaugguggguaauguguaaa

SEQ ID NO: 1036206 - RNA, 22 nt, Human
ucaggcaguagaauugcuugaa

SEQ ID NO: 1036207 - RNA, 22 nt, Human
acaggcugcugagccauuugcu

SEQ ID NO: 1036208 - RNA, 23 nt, Human
ucacaggggccagcgcucugugg

SEQ ID NO: 1036209 - RNA, 20 nt, Human
cuaucuccuggcgugccuuc

SEQ ID NO: 1036210 - RNA, 19 nt, Human
agacacacuugauaugugu

SEQ ID NO: 1036211 - RNA, 22 nt, Human
acucugccuuucagcagaugaa

SEQ ID NO: 1036212 - RNA, 22 nt, Human
uggggugccgacagggagggca

SEQ ID NO: 1036213 - RNA, 22 nt, Human
acagaagagcacauuuaguaug

SEQ ID NO: 1036214 - RNA, 22 nt, Human
cagggccacuguagaugaggag

SEQ ID NO: 1036215 - RNA, 22 nt, Human
ucugucacuauuggccagaaca

SEQ ID NO: 1036216 - RNA, 22 nt, Human
aucuggcucauucagggaacgg

SEQ ID NO: 1036217 - RNA, 17 nt, Human
guuugcaugguguuaac

SEQ ID NO: 1036218 - RNA, 22 nt, Human
cagagcugcucaugguggccag

SEQ ID NO: 1036219 - RNA, 22 nt, Human
cauuucuguucucuuccuguac

SEQ ID NO: 1036220 - RNA, 19 nt, Human
ggcucucuuaaagcuguuu

SEQ ID NO: 1036221 - RNA, 22 nt, Human
ggaggugggagacauaggcggc

SEQ ID NO: 1036222 - RNA, 22 nt, Human
cagaaugagauaacccagauug

SEQ ID NO: 1036223 - RNA, 22 nt, Human
ugauggcuaucccuggaagggc

SEQ ID NO: 1036224 - RNA, 22 nt, Human
accagagcuggcucugagcacc

SEQ ID NO: 1036225 - RNA, 22 nt, Human
ggucccaggaaucuguguucua

SEQ ID NO: 1036226 - RNA, 22 nt, Human
cucacagguaccagcacccucc

SEQ ID NO: 1036227 - RNA, 22 nt, Human
cugccagcucaaagcgcagcua

SEQ ID NO: 1036228 - RNA, 22 nt, Human
aagauucuacaguagguacauu

SEQ ID NO: 1036229 - RNA, 22 nt, Human
aggagccuccuucucaugugca

SEQ ID NO: 1036230 - RNA, 22 nt, Human
gcagagccaggcuggggcaggu

SEQ ID NO: 1036231 - RNA, 19 nt, Human
augauacaggugaaaauug

SEQ ID NO: 1036232 - RNA, 22 nt, Human
cggggcugcgcucuuccugccg

SEQ ID NO: 1036233 - RNA, 22 nt, Human
ccuggcagacugugagggcagg

SEQ ID NO: 1036234 - RNA, 22 nt, Human
gccuggcaggggccugggagug

SEQ ID NO: 1036235 - RNA, 22 nt, Human
agcaugaaagcauaggacaguc

SEQ ID NO: 1036236 - RNA, 22 nt, Human
cugucacacugauaucaggcuu

SEQ ID NO: 1036237 - RNA, 22 nt, Human
cuggccacuggagguggcaccc

SEQ ID NO: 1036238 - RNA, 22 nt, Human
gagagcugcauucucagacaca

SEQ ID NO: 1036239 - RNA, 20 nt, Human
ggcucugcuugugagcagcc

SEQ ID NO: 1036240 - RNA, 22 nt, Human
aggccugaaggaagaugagcug

SEQ ID NO: 1036241 - RNA, 22 nt, Human
cugcccuggucccauggcugau

SEQ ID NO: 1036242 - RNA, 22 nt, Human
ggcugcagauagccagccacca

SEQ ID NO: 1036243 - RNA, 22 nt, Human
cagagccauuauggagacuugc

SEQ ID NO: 1036244 - RNA, 22 nt, Human
gucccugggaugcccuucuggg

SEQ ID NO: 1036245 - RNA, 22 nt, Human
ucuggcucuauaacuccuagcu

SEQ ID NO: 1036246 - RNA, 23 nt, Human
agcuggaggcugucuacucccaa

SEQ ID NO: 1036247 - RNA, 22 nt, Human
uuuccucuuccgagggggaggc

SEQ ID NO: 1036248 - RNA, 20 nt, Human
cccucccagaugcuucccaa

SEQ ID NO: 1036249 - RNA, 22 nt, Human
gcugguuaggugagggugcgcc

SEQ ID NO: 1036250 - RNA, 19 nt, Human
cagaguacaccagauagga

SEQ ID NO: 1036251 - RNA, 19 nt, Human
acagggcagcaauaggaua

SEQ ID NO: 1036252 - RNA, 22 nt, Human
uauuuuguuaauaauccagucc

SEQ ID NO: 1036253 - RNA, 22 nt, Human
uggcugggggugcuauagcugc

SEQ ID NO: 1036254 - RNA, 22 nt, Human
gucagaggggcagcugccaggc

SEQ ID NO: 1036255 - RNA, 22 nt, Human
agugaguggguuacagauggga

SEQ ID NO: 1036256 - RNA, 22 nt, Human
agguccagcuguugcagccucc

SEQ ID NO: 1036257 - RNA, 22 nt, Human
cugggcacagcguugggcucuu

SEQ ID NO: 1036258 - RNA, 22 nt, Human
aaggagcuuguucgccuuccuc

SEQ ID NO: 1036259 - RNA, 22 nt, Human
gguggcuggaggagcugaugga

SEQ ID NO: 1036260 - RNA, 22 nt, Human
uuucuucugagaucagggagaa

SEQ ID NO: 1036261 - RNA, 22 nt, Human
caguguguggauccucccagga

SEQ ID NO: 1036262 - RNA, 19 nt, Human
uggcagcauugguaccuug

SEQ ID NO: 1036263 - RNA, 22 nt, Human
aagggcugaaugaaggguugaa

SEQ ID NO: 1036264 - RNA, 23 nt, Human
uugcauguagcccaugaguaacu

SEQ ID NO: 1036265 - RNA, 23 nt, Human
gggcugcuccaggccaaggcugg

SEQ ID NO: 1036266 - RNA, 22 nt, Human
cuggcagguccagcuggacuca

SEQ ID NO: 1036267 - RNA, 22 nt, Human
acugcaggagacacagcugcug

SEQ ID NO: 1036268 - RNA, 18 nt, Human
aguaguggguuuagcuuc

SEQ ID NO: 1036269 - RNA, 22 nt, Human
aggcugcagugcagguaggauu

SEQ ID NO: 1036270 - RNA, 22 nt, Human
ugcugccacauuuaaagagggg

SEQ ID NO: 1036271 - RNA, 22 nt, Human
aguguggguuuuauggagcccu

SEQ ID NO: 1036272 - RNA, 22 nt, Human
uggccuuguguuuuagagaaag

SEQ ID NO: 1036273 - RNA, 22 nt, Human
agccuucacugggaccuuggau

SEQ ID NO: 1036274 - RNA, 20 nt, Human
ccugucugcaauggagguca

SEQ ID NO: 1036275 - RNA, 22 nt, Human
gacaucauagggugggaggaaa

SEQ ID NO: 1036276 - RNA, 22 nt, Human
gcauacagagaggauguggcau

SEQ ID NO: 1036277 - RNA, 22 nt, Human
aaauguauugcauaggauauuu

SEQ ID NO: 1036278 - RNA, 22 nt, Human
gcagauggugccaugucuugug

SEQ ID NO: 1036279 - RNA, 22 nt, Human
gggacagaaggaagugagcaca

SEQ ID NO: 1036280 - RNA, 22 nt, Human
gggcaguggguggcugcagccu

SEQ ID NO: 1036281 - RNA, 22 nt, Human
cuggggugugcucagagcaggg

SEQ ID NO: 1036282 - RNA, 22 nt, Human
gcaggcucuucuuucugcccag

SEQ ID NO: 1036283 - RNA, 22 nt, Human
cuguggcuaugguguacauacu

SEQ ID NO: 1036284 - RNA, 22 nt, Human
ccagcugcuugggaaaaugucu

SEQ ID NO: 1036285 - RNA, 19 nt, Human
cugcucaggucagucuguc

SEQ ID NO: 1036286 - RNA, 22 nt, Human
uuauuuauggcacuguuggugg

SEQ ID NO: 1036287 - RNA, 22 nt, Human
uuucaguggguuuauuucaugu

SEQ ID NO: 1036288 - RNA, 21 nt, Human
ugcaugcuauguuuuuauuuc

SEQ ID NO: 1036289 - RNA, 16 nt, Human
gagccaggugccuuga

SEQ ID NO: 1036290 - RNA, 22 nt, Human
uccauuggucucugugcccagg

SEQ ID NO: 1036291 - RNA, 22 nt, Human
ccagggcagcgccccuccacgc

SEQ ID NO: 1036292 - RNA, 22 nt, Human
aaaugcuugcucuugauuauuu

SEQ ID NO: 1036293 - RNA, 20 nt, Human
aauaaaagaagccuucaccc

SEQ ID NO: 1036294 - RNA, 22 nt, Human
agguagagcuccaguagaaaau

SEQ ID NO: 1036295 - RNA, 22 nt, Human
cagcagcccacgcgugcugucc

SEQ ID NO: 1036296 - RNA, 18 nt, Human
uaaaugcauguuaauaac

SEQ ID NO: 1036297 - RNA, 22 nt, Human
cagcugcccaggccaccuggag

SEQ ID NO: 1036298 - RNA, 22 nt, Human
gcagcaggcuuuucauaccuug

SEQ ID NO: 1036299 - RNA, 22 nt, Human
cagcagguauguuuguucagca

SEQ ID NO: 1036300 - RNA, 22 nt, Human
cugaagaugucugagaugcuca

SEQ ID NO: 1036301 - RNA, 22 nt, Human
ugccucugugugcaggugagca

SEQ ID NO: 1036302 - RNA, 22 nt, Human
ggcccaaggcccaggucgagcu

SEQ ID NO: 1036303 - RNA, 22 nt, Human
cagcaguguacaaggugucaga

SEQ ID NO: 1036304 - RNA, 23 nt, Human
cagugcagggcaacucagacucc

SEQ ID NO: 1036305 - RNA, 22 nt, Human
aggggaggagcuuuucuugccu

SEQ ID NO: 1036306 - RNA, 22 nt, Human
ucaaggugcugugcugugcuag

SEQ ID NO: 1036307 - RNA, 22 nt, Human
ucugucucaaguucuugcacuc

SEQ ID NO: 1036308 - RNA, 22 nt, Human
ccugggaggcuguuuccagccu

SEQ ID NO: 1036309 - RNA, 21 nt, Human
aggcuguccuuugccagcccu

SEQ ID NO: 1036310 - RNA, 22 nt, Human
caggcagagugagguggucuaa

SEQ ID NO: 1036311 - RNA, 22 nt, Human
ggcugccuugacccuggcuccg

SEQ ID NO: 1036312 - RNA, 19 nt, Human
gccugggaugggcagaacu

SEQ ID NO: 1036313 - RNA, 22 nt, Human
agcaccaucagaugcaauaucu

SEQ ID NO: 1036314 - RNA, 22 nt, Human
ucacagacaauuguuuuggugu

SEQ ID NO: 1036315 - RNA, 22 nt, Human
cucacaggagaaagucaugguc

SEQ ID NO: 1036316 - RNA, 22 nt, Human
ugcaucuuacguuuugaaaggg

SEQ ID NO: 1036317 - RNA, 22 nt, Human
uguuaaucaaucaacaguauua

SEQ ID NO: 1036318 - RNA, 22 nt, Human
ugucaugccaggaaauaguccc

SEQ ID NO: 1036319 - RNA, 22 nt, Human
gcucugcugcuuacuagauggu

SEQ ID NO: 1036320 - RNA, 22 nt, Human
acugucuuccaggucuggaggu

SEQ ID NO: 1036321 - RNA, 22 nt, Human
agaaugcauuuuguguagcuau

SEQ ID NO: 1036322 - RNA, 22 nt, Human
uggcccugacuuggaggccuga

SEQ ID NO: 1036323 - RNA, 22 nt, Human
gccagagcugagacacgagucc

SEQ ID NO: 1036324 - RNA, 22 nt, Human
aggggccucgcaggaccgcucc

SEQ ID NO: 1036325 - RNA, 22 nt, Human
augcaguacagauaauucuaca

SEQ ID NO: 1036326 - RNA, 22 nt, Human
gccucugcacuguggcacacca

SEQ ID NO: 1036327 - RNA, 22 nt, Human
gccucugccaagggggcugcgg

SEQ ID NO: 1036328 - RNA, 22 nt, Human
uggagcuggaauuugagcugga

SEQ ID NO: 1036329 - RNA, 22 nt, Human
ccucaugguacuuacuguagcu

SEQ ID NO: 1036330 - RNA, 22 nt, Human
uugcagcagggugaauucacuc

SEQ ID NO: 1036331 - RNA, 22 nt, Human
cugggaugucuauagaacacuu

SEQ ID NO: 1036332 - RNA, 22 nt, Human
ggcugccugggagcccuccucu

SEQ ID NO: 1036333 - RNA, 22 nt, Human
gccccucccagucaggagcacu

SEQ ID NO: 1036334 - RNA, 22 nt, Human
aagagggcugcaaucuuauugc

SEQ ID NO: 1036335 - RNA, 22 nt, Human
cugaggcaugaaugugggcuuu

SEQ ID NO: 1036336 - RNA, 22 nt, Human
uuuuccucuguuauuaguguga

SEQ ID NO: 1036337 - RNA, 22 nt, Human
gcccagcacauugcugaggacc

SEQ ID NO: 1036338 - RNA, 22 nt, Human
cuguucucuggcgguggcuguu

SEQ ID NO: 1036339 - RNA, 22 nt, Human
ccuuuggguucaaucucggucu

SEQ ID NO: 1036340 - RNA, 22 nt, Human
gccugccugcugucaucugccu

SEQ ID NO: 1036341 - RNA, 22 nt, Human
ugucacauaauuuaucuguagg

SEQ ID NO: 1036342 - RNA, 22 nt, Human
cagaggccauauuucuucacuc

SEQ ID NO: 1036343 - RNA, 22 nt, Human
cccagguggguuggccucuguc

SEQ ID NO: 1036344 - RNA, 22 nt, Human
uggggcuggcacagucucuauu

SEQ ID NO: 1036345 - RNA, 22 nt, Human
uauuucuugaguggucaguuuc

SEQ ID NO: 1036346 - RNA, 22 nt, Human
aggugaguugguaggaaguuug

SEQ ID NO: 1036347 - RNA, 22 nt, Human
caagaaaugggauuugacugcc

SEQ ID NO: 1036348 - RNA, 22 nt, Human
ggucaugcugugaaucagugcu

SEQ ID NO: 1036349 - RNA, 22 nt, Human
uccugagaugagacagugcugc

SEQ ID NO: 1036350 - RNA, 22 nt, Human
gggagagagaaaacguggcgca

SEQ ID NO: 1036351 - RNA, 22 nt, Human
aagguacaccaaaguucaaguu

SEQ ID NO: 1036352 - RNA, 20 nt, Human
agucccuuuggucagguauu

SEQ ID NO: 1036353 - RNA, 22 nt, Human
gagagugaggcaucaggggcag

SEQ ID NO: 1036354 - RNA, 22 nt, Human
cuggacuuuggcccaucugcca

SEQ ID NO: 1036355 - RNA, 19 nt, Human
gcucagagggcccugugcu

SEQ ID NO: 1036356 - RNA, 22 nt, Human
auaauuaauuucaguaaucucc

SEQ ID NO: 1036357 - RNA, 22 nt, Human
ucagaggucccuagcaggagug

SEQ ID NO: 1036358 - RNA, 22 nt, Human
uaacacugguauuucauuuagu

SEQ ID NO: 1036359 - RNA, 22 nt, Human
acaugcuuucuagguccuucug

SEQ ID NO: 1036360 - RNA, 22 nt, Human
aaaaguaauugcaauuuuguag

SEQ ID NO: 1036361 - RNA, 22 nt, Human
ugggcagaaugugggauccaga

SEQ ID NO: 1036362 - RNA, 22 nt, Human
agccccaguccgcugcgggcgg

SEQ ID NO: 1036363 - RNA, 22 nt, Human
gcugcucuuuucagagaugaga

SEQ ID NO: 1036364 - RNA, 22 nt, Human
augaguaagaccauaauuuuug

SEQ ID NO: 1036365 - RNA, 22 nt, Human
cccagcuugcccaggacugagg

SEQ ID NO: 1036366 - RNA, 18 nt, Human
gaugggagcaagagaaga

SEQ ID NO: 1036367 - RNA, 22 nt, Human
gaugcacaugugaguauagaag

SEQ ID NO: 1036368 - RNA, 22 nt, Human
cuugcaggcagggccuccugga

SEQ ID NO: 1036369 - RNA, 22 nt, Human
uagauuucucauucauagauug

SEQ ID NO: 1036370 - RNA, 17 nt, Human
agugacuuggaaagagc

SEQ ID NO: 1036371 - RNA, 22 nt, Human
ugcagggcacacgcacgggugu

SEQ ID NO: 1036372 - RNA, 22 nt, Human
ggcagagcugcaugagcacuca

SEQ ID NO: 1036373 - RNA, 22 nt, Human
uggcucagcaagacauugaccu

SEQ ID NO: 1036374 - RNA, 19 nt, Human
cagagccucagagcuagaa

SEQ ID NO: 1036375 - RNA, 22 nt, Human
cauacuuugggauaagagugga

SEQ ID NO: 1036376 - RNA, 22 nt, Human
cugugcuugacagugggaagca

SEQ ID NO: 1036377 - RNA, 22 nt, Human
ggugggcaggucacucugccuc

SEQ ID NO: 1036378 - RNA, 22 nt, Human
cccugccuuguuggagccuaug

SEQ ID NO: 1036379 - RNA, 21 nt, Human
aacugcuggucuuuucugucu

SEQ ID NO: 1036380 - RNA, 22 nt, Human
uacaguauuaugagugauugaa

SEQ ID NO: 1036381 - RNA, 22 nt, Human
ggcagcaggcgacuucccuauu

SEQ ID NO: 1036382 - RNA, 22 nt, Human
gggccucucccuucucacgcau

SEQ ID NO: 1036383 - RNA, 22 nt, Human
ggcuuccuaauacucccuacac

SEQ ID NO: 1036384 - RNA, 22 nt, Human
gcagugguggagcuuacauauc

SEQ ID NO: 1036385 - RNA, 21 nt, Human
agcagccauuucacagagacu

SEQ ID NO: 1036386 - RNA, 22 nt, Human
aaugaugguauugaugagcuaa

SEQ ID NO: 1036387 - RNA, 22 nt, Human
ugucccagcacuuugggagucu

SEQ ID NO: 1036388 - RNA, 22 nt, Human
caggcagcauuuacucugauga

SEQ ID NO: 1036389 - RNA, 22 nt, Human
cuggagccccagacagggagag

SEQ ID NO: 1036390 - RNA, 22 nt, Human
cuagagggauguuaggauagca

SEQ ID NO: 1036391 - RNA, 22 nt, Human
cuggcccuucucuugcuuccug

SEQ ID NO: 1036392 - RNA, 22 nt, Human
gaggccuggcucugcccuccug

SEQ ID NO: 1036393 - RNA, 22 nt, Human
agccagccgggggaccacagug

SEQ ID NO: 1036394 - RNA, 22 nt, Human
gauuuauuggucuuucauuggu

SEQ ID NO: 1036395 - RNA, 22 nt, Human
gcaggcuggaggcuguucuggg

SEQ ID NO: 1036396 - RNA, 22 nt, Human
ugccugugucacagugauguuu

SEQ ID NO: 1036397 - RNA, 22 nt, Human
gccuuggccaacaccuugcaaa

SEQ ID NO: 1036398 - RNA, 22 nt, Human
uucacaggcuuggagguggggg

SEQ ID NO: 1036399 - RNA, 22 nt, Human
aucuuccuucacuuucucccac

SEQ ID NO: 1036400 - RNA, 22 nt, Human
cagcagcuggugagacacagcc

SEQ ID NO: 1036401 - RNA, 22 nt, Human
agcugcugcgccucacccuggc

SEQ ID NO: 1036402 - RNA, 22 nt, Human
aauaauguugacgauagucuua

SEQ ID NO: 1036403 - RNA, 22 nt, Human
guuuagaauucuaacuuuaagg

SEQ ID NO: 1036404 - RNA, 22 nt, Human
gccaggcagcaggaagccagug

SEQ ID NO: 1036405 - RNA, 22 nt, Human
cagagcagcagagcuuccaugg

SEQ ID NO: 1036406 - RNA, 22 nt, Human
ccuggcagcauugguagagauu

SEQ ID NO: 1036407 - RNA, 22 nt, Human
ccuggcaguggugaagaagagg

SEQ ID NO: 1036408 - RNA, 22 nt, Human
acuucuggugucauacugcauu

SEQ ID NO: 1036409 - RNA, 22 nt, Human
cagagugaaauaggggaucaag

SEQ ID NO: 1036410 - RNA, 22 nt, Human
ucagaagacuacuaggacacau

SEQ ID NO: 1036411 - RNA, 22 nt, Human
agaauaaaucaaauguccugag

SEQ ID NO: 1036412 - RNA, 22 nt, Human
gcucugcuguguuuguucagca

SEQ ID NO: 1036413 - RNA, 22 nt, Human
gagcaggcuugcagagaagggg

SEQ ID NO: 1036414 - RNA, 22 nt, Human
ccugccagcccgcguucaugcc

SEQ ID NO: 1036415 - RNA, 22 nt, Human
uuuuccucugagcuuugaauaa

SEQ ID NO: 1036416 - RNA, 22 nt, Human
auucuaggcuugaaacaugaag

SEQ ID NO: 1036417 - RNA, 22 nt, Human
uaacagaaauauuuccagguga

SEQ ID NO: 1036418 - RNA, 20 nt, Human
aaagucuuaugguuaauuuu

SEQ ID NO: 1036419 - RNA, 23 nt, Human
aagcugccagucugaagccuggg

SEQ ID NO: 1036420 - RNA, 23 nt, Human
acuuaaaugguucuuuaucucag

SEQ ID NO: 1036421 - RNA, 22 nt, Human
cuguccuaugaguacucacuag

SEQ ID NO: 1036422 - RNA, 22 nt, Human
uucuccgcuaaguucucugcag

SEQ ID NO: 1036423 - RNA, 22 nt, Human
cagcugccugucuggaggcaau

SEQ ID NO: 1036424 - RNA, 19 nt, Human
gcccugcaggagguggggc

SEQ ID NO: 1036425 - RNA, 22 nt, Human
gugccugggguugagcuaugaa

SEQ ID NO: 1036426 - RNA, 22 nt, Human
gcaugugucuccccaguggagg

SEQ ID NO: 1036427 - RNA, 22 nt, Human
guggagacuucuacuagagacc

SEQ ID NO: 1036428 - RNA, 22 nt, Human
caaauguguaaggaaguguuag

SEQ ID NO: 1036429 - RNA, 19 nt, Human
ccucugccagcccgccucu

SEQ ID NO: 1036430 - RNA, 21 nt, Human
ccaccaggucuucugcucggg

SEQ ID NO: 1036431 - RNA, 22 nt, Human
ccagggcacguugggacaguac

SEQ ID NO: 1036432 - RNA, 22 nt, Human
caaagugcugagauuacaggua

SEQ ID NO: 1036433 - RNA, 18 nt, Human
guucaaggucaagagaga

SEQ ID NO: 1036434 - RNA, 22 nt, Human
agcagugaugcaugacagccua

SEQ ID NO: 1036435 - RNA, 22 nt, Human
gggucucucucggcuccacgcg

SEQ ID NO: 1036436 - RNA, 22 nt, Human
cauugcacuccaucuugggcaa

SEQ ID NO: 1036437 - RNA, 22 nt, Human
aauaugugagguauguucagug

SEQ ID NO: 1036438 - RNA, 22 nt, Human
gaggaggcuggcgccgccugcc

SEQ ID NO: 1036439 - RNA, 21 nt, Human
cagagguggccugaccucuga

SEQ ID NO: 1036440 - RNA, 22 nt, Human
ccaaaguccauaguuuacauua

SEQ ID NO: 1036441 - RNA, 22 nt, Human
aaggcugagagucacaguccua

SEQ ID NO: 1036442 - RNA, 23 nt, Human
ugggggugcacgggccacaucuu

SEQ ID NO: 1036443 - RNA, 22 nt, Human
gggcuucucuuuagugagcuga

SEQ ID NO: 1036444 - RNA, 22 nt, Human
uccaggaggguuuucugccuuc

SEQ ID NO: 1036445 - RNA, 22 nt, Human
aaaguuugaaugauauauuagu

SEQ ID NO: 1036446 - RNA, 22 nt, Human
guggccuuuccugaagaaauga

SEQ ID NO: 1036447 - RNA, 22 nt, Human
ugcaggcuuuagccccauggcu

SEQ ID NO: 1036448 - RNA, 22 nt, Human
caggccugauacacugaacucu

SEQ ID NO: 1036449 - RNA, 22 nt, Human
ggagcuguaacgagccauugcu

SEQ ID NO: 1036450 - RNA, 22 nt, Human
agcccagccggauucccaguuc

SEQ ID NO: 1036451 - RNA, 22 nt, Human
cugcugggaaggucugcucagu

SEQ ID NO: 1036452 - RNA, 22 nt, Human
uguccucuuccagugcuccuuc

SEQ ID NO: 1036453 - RNA, 22 nt, Human
gugagcaggauuucauggugua

SEQ ID NO: 1036454 - RNA, 22 nt, Human
uuacaguauuguuaaacucuuu

SEQ ID NO: 1036455 - RNA, 22 nt, Human
uucaaugaggauagaacuggau

SEQ ID NO: 1036456 - RNA, 22 nt, Human
ggcucaggaccugggauugcca

SEQ ID NO: 1036457 - RNA, 22 nt, Human
aaaggcuaugagauagaagaua

SEQ ID NO: 1036458 - RNA, 17 nt, Human
agguggguggaucaccu

SEQ ID NO: 1036459 - RNA, 22 nt, Human
gugcugcucacaucuggaggua

SEQ ID NO: 1036460 - RNA, 18 nt, Human
caugucugcgccacaagg

SEQ ID NO: 1036461 - RNA, 22 nt, Human
gcagaggcaaucagguaugugg

SEQ ID NO: 1036462 - RNA, 22 nt, Human
cucuuuccucagccacagucua

SEQ ID NO: 1036463 - RNA, 22 nt, Human
aagggcaggugggcauuucugg

SEQ ID NO: 1036464 - RNA, 22 nt, Human
ggaggccaccugaccugcuguu

SEQ ID NO: 1036465 - RNA, 21 nt, Human
ggugggcacaggagagcagag

SEQ ID NO: 1036466 - RNA, 21 nt, Human
gccacugcacuccagccuggg

SEQ ID NO: 1036467 - RNA, 22 nt, Human
uuuaccaagcuuuaauuacaua

SEQ ID NO: 1036468 - RNA, 22 nt, Human
cucaggaugcaauuccaucaag

SEQ ID NO: 1036469 - RNA, 22 nt, Human
aaggacagaaacagauugcugg

SEQ ID NO: 1036470 - RNA, 23 nt, Human
gccucugcucugcguuggggacu

SEQ ID NO: 1036471 - RNA, 22 nt, Human
ggugauuuucgaguuucauguu

SEQ ID NO: 1036472 - RNA, 22 nt, Human
cacagggcuucucauggggugc

SEQ ID NO: 1036473 - RNA, 22 nt, Human
gggauggggagcuggaaagggg

SEQ ID NO: 1036474 - RNA, 22 nt, Human
guuuuauaggugaaauauuacu

SEQ ID NO: 1036475 - RNA, 22 nt, Human
gagccauacaaccuauaaagug

SEQ ID NO: 1036476 - RNA, 22 nt, Human
uaugcacauucacacaaaaaug

SEQ ID NO: 1036477 - RNA, 22 nt, Human
aucaguuuggaacauucaggcc

SEQ ID NO: 1036478 - RNA, 22 nt, Human
auguguacaaccaagcacuaaa

SEQ ID NO: 1036479 - RNA, 22 nt, Human
ugcagaagcagagccgguggcc

SEQ ID NO: 1036480 - RNA, 22 nt, Human
uuuccucugacugcuccccugc

SEQ ID NO: 1036481 - RNA, 22 nt, Human
uagaaacauauaggauggcagg

SEQ ID NO: 1036482 - RNA, 22 nt, Human
gccagcagguggagagaucaag

SEQ ID NO: 1036483 - RNA, 22 nt, Human
gguagcacauugcauuaggaga

SEQ ID NO: 1036484 - RNA, 22 nt, Human
aagcccagaugggagcauuuca

SEQ ID NO: 1036485 - RNA, 22 nt, Human
cccagcucaucaggagccgccc

SEQ ID NO: 1036486 - RNA, 22 nt, Human
guuggccugaauggucaagagg

SEQ ID NO: 1036487 - RNA, 22 nt, Human
gcauuucuuccuggugugagcc

SEQ ID NO: 1036488 - RNA, 22 nt, Human
gcagacagccagacugcacugg

SEQ ID NO: 1036489 - RNA, 22 nt, Human
cccagcaguuguuggugcacau

SEQ ID NO: 1036490 - RNA, 22 nt, Human
aggucaaggccaaaagaguggu

SEQ ID NO: 1036491 - RNA, 19 nt, Human
agggaaggauucugucauu

SEQ ID NO: 1036492 - RNA, 20 nt, Human
cugagcgucuaagaggugag

SEQ ID NO: 1036493 - RNA, 20 nt, Human
gcacugaagguuccagggga

SEQ ID NO: 1036494 - RNA, 21 nt, Human
agcugccacccuagcuucuga

SEQ ID NO: 1036495 - RNA, 23 nt, Human
cauuucugggagauuuauaaaau

SEQ ID NO: 1036496 - RNA, 22 nt, Human
gaggggcagaaugugaucaggg

SEQ ID NO: 1036497 - RNA, 22 nt, Human
auuaaaagcuucccaagaguua

SEQ ID NO: 1036498 - RNA, 22 nt, Human
gccugagcuacuagggagucug

SEQ ID NO: 1036499 - RNA, 23 nt, Human
aggagccaggugcagcccuugug

SEQ ID NO: 1036500 - RNA, 22 nt, Human
uguagcauguaaauugguuauu

SEQ ID NO: 1036501 - RNA, 22 nt, Human
caggaucccuggccuccgccca

SEQ ID NO: 1036502 - RNA, 22 nt, Human
ugugacaucgcugugucuguuu

SEQ ID NO: 1036503 - RNA, 22 nt, Human
acugcuuuucuaagauucugug

SEQ ID NO: 1036504 - RNA, 22 nt, Human
ggugcagaaggaagggagcugg

SEQ ID NO: 1036505 - RNA, 22 nt, Human
auauacuuggagacuaucauug

SEQ ID NO: 1036506 - RNA, 22 nt, Human
ucucaccaaagccuugaccaua

SEQ ID NO: 1036507 - RNA, 22 nt, Human
gcugcagcuuuaggauccagug

SEQ ID NO: 1036508 - RNA, 22 nt, Human
caaaugcuaacuucuuuccaaa

SEQ ID NO: 1036509 - RNA, 21 nt, Human
ccuucucuugcuucagcuuca

SEQ ID NO: 1036510 - RNA, 22 nt, Human
cagaccugagguugaguaccag

SEQ ID NO: 1036511 - RNA, 22 nt, Human
ccugggucuugguucaugcucu

SEQ ID NO: 1036512 - RNA, 19 nt, Human
cuggcagccugucuguguc

SEQ ID NO: 1036513 - RNA, 19 nt, Human
ucaggacugacuugaaguc

SEQ ID NO: 1036514 - RNA, 22 nt, Human
cagggcaggaugcugugauuau

SEQ ID NO: 1036515 - RNA, 22 nt, Human
agggacacaugugauuauuuau

SEQ ID NO: 1036516 - RNA, 22 nt, Human
gagauuggccuggcuugccaac

SEQ ID NO: 1036517 - RNA, 23 nt, Human
agaauuguaaauagaauauaccu

SEQ ID NO: 1036518 - RNA, 21 nt, Human
agggagcuauuuauaguaagc

SEQ ID NO: 1036519 - RNA, 22 nt, Human
guuagaaacacauucuuauuga

SEQ ID NO: 1036520 - RNA, 22 nt, Human
agagcuguucaacguagcaaug

SEQ ID NO: 1036521 - RNA, 22 nt, Human
ucagcugaaguggagaagcaga

SEQ ID NO: 1036522 - RNA, 22 nt, Human
agggcagaaaucgauuacaccu

SEQ ID NO: 1036523 - RNA, 20 nt, Human
agugucuggugcagggccuc

SEQ ID NO: 1036524 - RNA, 22 nt, Human
gagugagggcagcaggggcugc

SEQ ID NO: 1036525 - RNA, 22 nt, Human
cuggcagccaagugggauacuc

SEQ ID NO: 1036526 - RNA, 22 nt, Human
auacauguucguguacauguuc

SEQ ID NO: 1036527 - RNA, 23 nt, Human
aggaggaaaaguuaucugcugag

SEQ ID NO: 1036528 - RNA, 22 nt, Human
aaagaacaaaugauauaugguu

SEQ ID NO: 1036529 - RNA, 22 nt, Human
agccauugaauuuagugccuuu

SEQ ID NO: 1036530 - RNA, 22 nt, Human
cacagcagagggagccauugaa

SEQ ID NO: 1036531 - RNA, 22 nt, Human
agaacagaugugggcagaccug

SEQ ID NO: 1036532 - RNA, 22 nt, Human
acagagcaauucuuggguguuu

SEQ ID NO: 1036533 - RNA, 22 nt, Human
cuguggcugcagccuugguccu

SEQ ID NO: 1036534 - RNA, 21 nt, Human
ccaggcuccugaggcugguca

SEQ ID NO: 1036535 - RNA, 22 nt, Human
aggcugggaagguaaaguugua

SEQ ID NO: 1036536 - RNA, 23 nt, Human
ccagcccuccaccagcucuaggc

SEQ ID NO: 1036537 - RNA, 22 nt, Human
ggaggccaaggaggagcuugcc

SEQ ID NO: 1036538 - RNA, 22 nt, Human
aagucauuaucucuucuaaucu

SEQ ID NO: 1036539 - RNA, 22 nt, Human
uacauuugcuuugauuuucagc

SEQ ID NO: 1036540 - RNA, 22 nt, Human
acagagcacugcccugugccgc

SEQ ID NO: 1036541 - RNA, 22 nt, Human
aagggcuggccacauucugggu

SEQ ID NO: 1036542 - RNA, 22 nt, Human
cucuccuugcagauggcugccu

SEQ ID NO: 1036543 - RNA, 22 nt, Human
auaucuuuguaugguucagcag

SEQ ID NO: 1036544 - RNA, 22 nt, Human
aggaggcugguucaggccauau

SEQ ID NO: 1036545 - RNA, 22 nt, Human
uccacuuuagcaaugauugaau

SEQ ID NO: 1036546 - RNA, 22 nt, Human
agcauggggcaaugcaugugcu

SEQ ID NO: 1036547 - RNA, 22 nt, Human
uauuucuguaugcauaaaagga

SEQ ID NO: 1036548 - RNA, 18 nt, Human
ccugagcccugcuuacuu

SEQ ID NO: 1036549 - RNA, 21 nt, Human
ggcagcugaccgcgcggugca

SEQ ID NO: 1036550 - RNA, 19 nt, Human
cugccuguuauggagagaa

SEQ ID NO: 1036551 - RNA, 20 nt, Human
uggcccuguuuucuccaggc

SEQ ID NO: 1036552 - RNA, 22 nt, Human
auaugaagucagacaaacuggg

SEQ ID NO: 1036553 - RNA, 22 nt, Human
aagaacugugcuccaggcucca

SEQ ID NO: 1036554 - RNA, 22 nt, Human
uucuuucagaacacaagugauu

SEQ ID NO: 1036555 - RNA, 20 nt, Human
uccaggagaacugggagccg

SEQ ID NO: 1036556 - RNA, 22 nt, Human
ugaagcagcuucuuucugucaa

SEQ ID NO: 1036557 - RNA, 22 nt, Human
uguuccuaaauaugaauggaga

SEQ ID NO: 1036558 - RNA, 22 nt, Human
ccucagagccuccagaaggaau

SEQ ID NO: 1036559 - RNA, 22 nt, Human
cagagcucagagcagggcacuc

SEQ ID NO: 1036560 - RNA, 22 nt, Human
aggagagaauguuccaggcuug

SEQ ID NO: 1036561 - RNA, 18 nt, Human
uggagccagcucuaggau

SEQ ID NO: 1036562 - RNA, 22 nt, Human
gcugcccauuccacuggauggu

SEQ ID NO: 1036563 - RNA, 22 nt, Human
ucccagaggcaguugguaacuu

SEQ ID NO: 1036564 - RNA, 22 nt, Human
gcagcagcccagggcucucaga

SEQ ID NO: 1036565 - RNA, 20 nt, Human
uugcagcagugaggugaagg

SEQ ID NO: 1036566 - RNA, 22 nt, Human
gacauuucaaucucauuauggg

SEQ ID NO: 1036567 - RNA, 19 nt, Human
gggaaauucacuugcuucc

SEQ ID NO: 1036568 - RNA, 22 nt, Human
ucaucaaagucaaagaaugacu

SEQ ID NO: 1036569 - RNA, 22 nt, Human
acuggcaguuugagaaugcauu

SEQ ID NO: 1036570 - RNA, 22 nt, Human
uaagugcaauguuuuacuuaaa

SEQ ID NO: 1036571 - RNA, 22 nt, Human
aggccugaggaccagauaaaug

SEQ ID NO: 1036572 - RNA, 22 nt, Human
gggugaggagcugccagucaug

SEQ ID NO: 1036573 - RNA, 22 nt, Human
gcugagguggagauugcaguga

SEQ ID NO: 1036574 - RNA, 22 nt, Human
auaauguagguauguguauuua

SEQ ID NO: 1036575 - RNA, 22 nt, Human
agucccagcucagaaccacuag

SEQ ID NO: 1036576 - RNA, 23 nt, Human
ugcucccaggugacgcugcuguu

SEQ ID NO: 1036577 - RNA, 22 nt, Human
cacagaauuaagggagaaauau

SEQ ID NO: 1036578 - RNA, 22 nt, Human
aggacuucaucaccuguauaaa

SEQ ID NO: 1036579 - RNA, 22 nt, Human
gucuuguuugggauguggaugg

SEQ ID NO: 1036580 - RNA, 22 nt, Human
cuggccaggcuugggacagaca

SEQ ID NO: 1036581 - RNA, 15 nt, Human
cagucccagggaccc

SEQ ID NO: 1036582 - RNA, 20 nt, Human
caggcacacucauuccugcu

SEQ ID NO: 1036583 - RNA, 23 nt, Human
ucugucaccuauggcugcucuuc

SEQ ID NO: 1036584 - RNA, 22 nt, Human
auagucuuagaucagauaaagu

SEQ ID NO: 1036585 - RNA, 22 nt, Human
uguggcucucagauccuccaau

SEQ ID NO: 1036586 - RNA, 22 nt, Human
cuuuggcaugguccucacuaua

SEQ ID NO: 1036587 - RNA, 22 nt, Human
agugaaauagcauuuaugaagc

SEQ ID NO: 1036588 - RNA, 22 nt, Human
cuucuaggcuucucagggggca

SEQ ID NO: 1036589 - RNA, 22 nt, Human
cagguggguguaugaaugcaaa

SEQ ID NO: 1036590 - RNA, 22 nt, Human
gcaaggcagcgcggaguagcua

SEQ ID NO: 1036591 - RNA, 22 nt, Human
acaggcugccuaccaaguauca

SEQ ID NO: 1036592 - RNA, 22 nt, Human
agaauucucuuccauugaaaca

SEQ ID NO: 1036593 - RNA, 22 nt, Human
cucugagcuccuggaagcgugc

SEQ ID NO: 1036594 - RNA, 22 nt, Human
caguagccacuagacacaugua

SEQ ID NO: 1036595 - RNA, 22 nt, Human
agugcagccgagaucaggugcu

SEQ ID NO: 1036596 - RNA, 22 nt, Human
aguguuucccaguaggaugaaa

SEQ ID NO: 1036597 - RNA, 22 nt, Human
ccuccaggcugaauaucuagaa

SEQ ID NO: 1036598 - RNA, 22 nt, Human
aggcugggcuccgcccaacucc

SEQ ID NO: 1036599 - RNA, 22 nt, Human
aguuacaaccaugacacaagca

SEQ ID NO: 1036600 - RNA, 22 nt, Human
ggccagaggccauccuccugcu

SEQ ID NO: 1036601 - RNA, 22 nt, Human
acagcagcauaaacugacuaag

SEQ ID NO: 1036602 - RNA, 22 nt, Human
acagaaauaacuuuuuauguuu

SEQ ID NO: 1036603 - RNA, 23 nt, Human
auaauaacgucugucuugucucu

SEQ ID NO: 1036604 - RNA, 22 nt, Human
gucucagauucagacaucuaca

SEQ ID NO: 1036605 - RNA, 22 nt, Human
agcuuuaugggagcuuagauaa

SEQ ID NO: 1036606 - RNA, 19 nt, Human
uccccagcaccucugaguc

SEQ ID NO: 1036607 - RNA, 22 nt, Human
uggguggcacuucuggggucca

SEQ ID NO: 1036608 - RNA, 22 nt, Human
cagcaggguauacagggaauuu

SEQ ID NO: 1036609 - RNA, 22 nt, Human
ugagagagccugaaucucuuac

SEQ ID NO: 1036610 - RNA, 22 nt, Human
ccugcuggccaguggagggcug

SEQ ID NO: 1036611 - RNA, 22 nt, Human
cugccucucagccugaccgcca

SEQ ID NO: 1036612 - RNA, 22 nt, Human
ugcugcacgauaaauaauuucu

SEQ ID NO: 1036613 - RNA, 19 nt, Human
ccugcagggaugagagguu

SEQ ID NO: 1036614 - RNA, 19 nt, Human
ucuggagcugaugcaggug

SEQ ID NO: 1036615 - RNA, 20 nt, Human
gucagaggacccuagagcga

SEQ ID NO: 1036616 - RNA, 22 nt, Human
gaguggggucugggcaucaguc

SEQ ID NO: 1036617 - RNA, 20 nt, Human
ccugccugccucggcucauu

SEQ ID NO: 1036618 - RNA, 19 nt, Human
agaggcugucaccuguagc

SEQ ID NO: 1036619 - RNA, 22 nt, Human
aagggaaaucauauggugcagu

SEQ ID NO: 1036620 - RNA, 22 nt, Human
caggacaguuugcuuugcccug

SEQ ID NO: 1036621 - RNA, 23 nt, Human
gugauuucagggaacagaaucag

SEQ ID NO: 1036622 - RNA, 22 nt, Human
caggaggcuccuagggcucugu

SEQ ID NO: 1036623 - RNA, 22 nt, Human
gacacagagauaggccuguguu

SEQ ID NO: 1036624 - RNA, 22 nt, Human
caguagcacuagauaugugugg

SEQ ID NO: 1036625 - RNA, 22 nt, Human
ggugaaggucuacugugugcca

SEQ ID NO: 1036626 - RNA, 22 nt, Human
gggguggauuccuacaggucca

SEQ ID NO: 1036627 - RNA, 22 nt, Human
ggcuggucacaccacugcaggg

SEQ ID NO: 1036628 - RNA, 22 nt, Human
ucaguuuuucuauacuuuguag

SEQ ID NO: 1036629 - RNA, 22 nt, Human
gauuucuucauucauuagaugg

SEQ ID NO: 1036630 - RNA, 22 nt, Human
cagaggccuuucuacagugaua

SEQ ID NO: 1036631 - RNA, 22 nt, Human
uggcugccuagucccucagccu

SEQ ID NO: 1036632 - RNA, 22 nt, Human
ucaguuuugaaaacauugaaug

SEQ ID NO: 1036633 - RNA, 23 nt, Human
uccagcagccaagaaggguagaa

SEQ ID NO: 1036634 - RNA, 22 nt, Human
cugggcucagcccaugcugucc

SEQ ID NO: 1036635 - RNA, 22 nt, Human
ccagagacgucggucagggcgc

SEQ ID NO: 1036636 - RNA, 22 nt, Human
aucuggcugacuuugugggaca

SEQ ID NO: 1036637 - RNA, 21 nt, Human
agcuggcagauauggugucug

SEQ ID NO: 1036638 - RNA, 22 nt, Human
uucacauugugcagauuauggu

SEQ ID NO: 1036639 - RNA, 22 nt, Human
auaaacagcuccauuuagugcc

SEQ ID NO: 1036640 - RNA, 21 nt, Human
ggucagggggugccuccaggu

SEQ ID NO: 1036641 - RNA, 22 nt, Human
gugauugcccagcaccauuguu

SEQ ID NO: 1036642 - RNA, 22 nt, Human
ggccugcuuuccgagccugcag

SEQ ID NO: 1036643 - RNA, 22 nt, Human
cuguccuguagcuccaucaguc

SEQ ID NO: 1036644 - RNA, 22 nt, Human
ucccagccuuccagucugguuu

SEQ ID NO: 1036645 - RNA, 22 nt, Human
uuugaguugcuuauuuaauagg

SEQ ID NO: 1036646 - RNA, 22 nt, Human
ggucacaggggagaagagugau

SEQ ID NO: 1036647 - RNA, 22 nt, Human
ugcagaagcagagaguugccaa

SEQ ID NO: 1036648 - RNA, 22 nt, Human
gaaaauguuagcuucauaguca

SEQ ID NO: 1036649 - RNA, 22 nt, Human
ugccagggugucaggagagcua

SEQ ID NO: 1036650 - RNA, 22 nt, Human
uccugucugucuuuggucccuu

SEQ ID NO: 1036651 - RNA, 22 nt, Human
ugauuucccuguagccucugaa

SEQ ID NO: 1036652 - RNA, 22 nt, Human
ucugucugacaggguaugaacu

SEQ ID NO: 1036653 - RNA, 21 nt, Human
gccagagcaguacaaugaggu

SEQ ID NO: 1036654 - RNA, 22 nt, Human
gcagaagcugggcagcgaggug

SEQ ID NO: 1036655 - RNA, 22 nt, Human
agugccuggaccccaugacaua

SEQ ID NO: 1036656 - RNA, 19 nt, Human
uguuuuguuaaagcagucc

SEQ ID NO: 1036657 - RNA, 22 nt, Human
gucuggggaagucagggcauca

SEQ ID NO: 1036658 - RNA, 22 nt, Human
gcacacccucucaccagcacug

SEQ ID NO: 1036659 - RNA, 22 nt, Human
ugggacaguuguccuccacucu

SEQ ID NO: 1036660 - RNA, 22 nt, Human
guuugcauaaaguggaugcagg

SEQ ID NO: 1036661 - RNA, 22 nt, Human
gccuggagaaaggaagguggga

SEQ ID NO: 1036662 - RNA, 22 nt, Human
accucaggauguggacacagaa

SEQ ID NO: 1036663 - RNA, 22 nt, Human
agccuggagaggcgccauacac

SEQ ID NO: 1036664 - RNA, 20 nt, Human
uccagccacuuccgcugguc

SEQ ID NO: 1036665 - RNA, 22 nt, Human
agagaaggucacuaaggaccca

SEQ ID NO: 1036666 - RNA, 22 nt, Human
ccugggaggcggagguugcagu

SEQ ID NO: 1036667 - RNA, 22 nt, Human
acagagcaguucuggagcuggc

SEQ ID NO: 1036668 - RNA, 22 nt, Human
guggcucuaggugagcauggag

SEQ ID NO: 1036669 - RNA, 22 nt, Human
ugaagcaguucucagaaguggg

SEQ ID NO: 1036670 - RNA, 22 nt, Human
ucacugggagaugugggaaggg

SEQ ID NO: 1036671 - RNA, 22 nt, Human
ccaaggagcugcaggcacuugu

SEQ ID NO: 1036672 - RNA, 22 nt, Human
gccuggagacaaggacaaaggg

SEQ ID NO: 1036673 - RNA, 22 nt, Human
ucauccaguaccauggaaggca

SEQ ID NO: 1036674 - RNA, 22 nt, Human
auggccugggcccgcuucagau

SEQ ID NO: 1036675 - RNA, 22 nt, Human
cuuugaaagcucccaggacuua

SEQ ID NO: 1036676 - RNA, 22 nt, Human
gcucugggaacugacugccuuc

SEQ ID NO: 1036677 - RNA, 22 nt, Human
uugauaaaaugauaucuucuuu

SEQ ID NO: 1036678 - RNA, 22 nt, Human
gaaaugugugacaaguuucaau

SEQ ID NO: 1036679 - RNA, 22 nt, Human
gccuccugguugcuucuccaac

SEQ ID NO: 1036680 - RNA, 22 nt, Human
ugcauuauuugcaugugccugu

SEQ ID NO: 1036681 - RNA, 22 nt, Human
gaugugagugguagcugggauu

SEQ ID NO: 1036682 - RNA, 22 nt, Human
gccuggccgcuccgagcuccgc

SEQ ID NO: 1036683 - RNA, 22 nt, Human
acccaggccugagagacaggag

SEQ ID NO: 1036684 - RNA, 22 nt, Human
cucugcagaauuugagcugcuc

SEQ ID NO: 1036685 - RNA, 22 nt, Human
cagugucuuauuuguagcucag

SEQ ID NO: 1036686 - RNA, 22 nt, Human
cccagggauuauaaaggugaaa

SEQ ID NO: 1036687 - RNA, 22 nt, Human
cugaagcaaaugaaacagcucu

SEQ ID NO: 1036688 - RNA, 22 nt, Human
ugucaugcagguuuguuauaga

SEQ ID NO: 1036689 - RNA, 22 nt, Human
auaaaaacugacccauccuuug

SEQ ID NO: 1036690 - RNA, 22 nt, Human
ucccacugugaauccaaggccu

SEQ ID NO: 1036691 - RNA, 22 nt, Human
cugugccaggcccagcugacuu

SEQ ID NO: 1036692 - RNA, 22 nt, Human
cagagccuuccuagcagacucu

SEQ ID NO: 1036693 - RNA, 22 nt, Human
cgaugguucuggcugcuuguau

SEQ ID NO: 1036694 - RNA, 17 nt, Human
uuuucucucuuggauuc

SEQ ID NO: 1036695 - RNA, 22 nt, Human
uccuugaaaaucuugguuuaga

SEQ ID NO: 1036696 - RNA, 22 nt, Human
aaauguguuucgaaaacuggug

SEQ ID NO: 1036697 - RNA, 22 nt, Human
uugcauugaaugcacauuuuua

SEQ ID NO: 1036698 - RNA, 22 nt, Human
gcuggccucuggagaagggcuu

SEQ ID NO: 1036699 - RNA, 22 nt, Human
acauuucuuccacaugcugcug

SEQ ID NO: 1036700 - RNA, 22 nt, Human
ggcagccauggacacuggcuag

SEQ ID NO: 1036701 - RNA, 22 nt, Human
acacugaagagcacuuucaaag

SEQ ID NO: 1036702 - RNA, 22 nt, Human
gagugcaucguggccauuuuaa

SEQ ID NO: 1036703 - RNA, 22 nt, Human
gcagugguccaguucacaccca

SEQ ID NO: 1036704 - RNA, 22 nt, Human
ugagguaggugguaagagauac

SEQ ID NO: 1036705 - RNA, 21 nt, Human
gcacagcaugaguguuggcau

SEQ ID NO: 1036706 - RNA, 22 nt, Human
auguaucaugcaggguccauga

SEQ ID NO: 1036707 - RNA, 19 nt, Human
ugcucauggggacuucucc

SEQ ID NO: 1036708 - RNA, 22 nt, Human
ucaagcaggguagcaagcuggu

SEQ ID NO: 1036709 - RNA, 21 nt, Human
accucaagcaacaaccaaggu

SEQ ID NO: 1036710 - RNA, 22 nt, Human
uggcucagcgguggcagcagac

SEQ ID NO: 1036711 - RNA, 22 nt, Human
gagaggcugaaaucacaggagc

SEQ ID NO: 1036712 - RNA, 22 nt, Human
ccaggugguucaggucaccaua

SEQ ID NO: 1036713 - RNA, 22 nt, Human
caggguccggcugccuggcugu

SEQ ID NO: 1036714 - RNA, 22 nt, Human
ugacacagauuagagacauacc

SEQ ID NO: 1036715 - RNA, 22 nt, Human
uauucacauguacauaugcuca

SEQ ID NO: 1036716 - RNA, 22 nt, Human
gccagcucagaugcaggaagga

SEQ ID NO: 1036717 - RNA, 22 nt, Human
gccugguggugugcucaagugg

SEQ ID NO: 1036718 - RNA, 22 nt, Human
agggcagaggcggacacggaag

SEQ ID NO: 1036719 - RNA, 22 nt, Human
uggcugcucaagggaggaggcu

SEQ ID NO: 1036720 - RNA, 22 nt, Human
uuuacuuugugucaagucaaga

SEQ ID NO: 1036721 - RNA, 22 nt, Human
agguggggaaaccagcgauccc

SEQ ID NO: 1036722 - RNA, 22 nt, Human
gucuggaggaggaagaaggcac

SEQ ID NO: 1036723 - RNA, 22 nt, Human
ucugggagguaaccaugcugau

SEQ ID NO: 1036724 - RNA, 22 nt, Human
cagagaccccgcugcccuucug

SEQ ID NO: 1036725 - RNA, 22 nt, Human
gcuggcagucccaucagcuggg

SEQ ID NO: 1036726 - RNA, 22 nt, Human
aaggucauuguugcauguucuc

SEQ ID NO: 1036727 - RNA, 22 nt, Human
uuugcauuaguuuagauuucaa

SEQ ID NO: 1036728 - RNA, 22 nt, Human
ucauacaucuuguauaucuauc

SEQ ID NO: 1036729 - RNA, 22 nt, Human
guccuggggauacagaagugaa

SEQ ID NO: 1036730 - RNA, 22 nt, Human
ucccuggcagcuaagggugguc

SEQ ID NO: 1036731 - RNA, 22 nt, Human
aaugggagguaguaugggaggu

SEQ ID NO: 1036732 - RNA, 22 nt, Human
gggucagcugcugggggcugac

SEQ ID NO: 1036733 - RNA, 22 nt, Human
gggggcuguccugugcauugua

SEQ ID NO: 1036734 - RNA, 22 nt, Human
gcauuuauuucuuuacugcauc

SEQ ID NO: 1036735 - RNA, 22 nt, Human
caguccaggccuggaggagcca

SEQ ID NO: 1036736 - RNA, 22 nt, Human
gcacagggagacagccguggcc

SEQ ID NO: 1036737 - RNA, 22 nt, Human
uaugcauauagaugcacacaca

SEQ ID NO: 1036738 - RNA, 22 nt, Human
ugccucugcugcuguggcauca

SEQ ID NO: 1036739 - RNA, 22 nt, Human
gccuaggaguggggauggcggu

SEQ ID NO: 1036740 - RNA, 22 nt, Human
ccaccagcuucagcagccgcgg

SEQ ID NO: 1036741 - RNA, 22 nt, Human
ugagcccagucugucugacaug

SEQ ID NO: 1036742 - RNA, 22 nt, Human
uccuugaauauaauaacaguag

SEQ ID NO: 1036743 - RNA, 22 nt, Human
ggagccagaggcugcugcugug

SEQ ID NO: 1036744 - RNA, 22 nt, Human
cagggcagggauguugcggcag

SEQ ID NO: 1036745 - RNA, 22 nt, Human
gcauguguggaggagaugugcu

SEQ ID NO: 1036746 - RNA, 22 nt, Human
agaguguuuuucugucaaggac

SEQ ID NO: 1036747 - RNA, 22 nt, Human
ugcaaacaggagaguaaguaua

SEQ ID NO: 1036748 - RNA, 22 nt, Human
uggcagggaguugcaggauuuc

SEQ ID NO: 1036749 - RNA, 22 nt, Human
gaaaauguuuguccggagcuga

SEQ ID NO: 1036750 - RNA, 17 nt, Human
gcacugaacaauccugu

SEQ ID NO: 1036751 - RNA, 22 nt, Human
acauuucucauucuccccuaac

SEQ ID NO: 1036752 - RNA, 21 nt, Human
cugguguagcacucaggugcu

SEQ ID NO: 1036753 - RNA, 22 nt, Human
uggcagagguauauugggagga

SEQ ID NO: 1036754 - RNA, 22 nt, Human
auaaagaggauguauuuacagc

SEQ ID NO: 1036755 - RNA, 22 nt, Human
auguagcagaagauguuuuccu

SEQ ID NO: 1036756 - RNA, 22 nt, Human
uuuauuaugauggacaccuucg

SEQ ID NO: 1036757 - RNA, 22 nt, Human
ucaguuuucucaucuguaauuu

SEQ ID NO: 1036758 - RNA, 22 nt, Human
uuuaucuuuaggacuuugcaga

SEQ ID NO: 1036759 - RNA, 22 nt, Human
auccuugacacacuccaguacu

SEQ ID NO: 1036760 - RNA, 22 nt, Human
gcaggcugaugacuggaguugg

SEQ ID NO: 1036761 - RNA, 22 nt, Human
ggaggagacaguaaaaagcacg

SEQ ID NO: 1036762 - RNA, 22 nt, Human
accugccuucucaaggacauga

SEQ ID NO: 1036763 - RNA, 22 nt, Human
gagcagugggaaggaacagggu

SEQ ID NO: 1036764 - RNA, 22 nt, Human
gcccagcuggcuuccagcacau

SEQ ID NO: 1036765 - RNA, 19 nt, Human
uuacaucugcaacacuggu

SEQ ID NO: 1036766 - RNA, 22 nt, Human
cugccucuguugggcauggucu

SEQ ID NO: 1036767 - RNA, 22 nt, Human
cuguggugagcaacugacugaa

SEQ ID NO: 1036768 - RNA, 22 nt, Human
ugguccugagcaccagccugac

SEQ ID NO: 1036769 - RNA, 22 nt, Human
aggggcuguggaaaccaacucu

SEQ ID NO: 1036770 - RNA, 22 nt, Human
ggcuggccuguguggccgccac

SEQ ID NO: 1036771 - RNA, 22 nt, Human
cagcuccagcccaggcagcucc

SEQ ID NO: 1036772 - RNA, 22 nt, Human
uuugcauuguuucaaaagugaa

SEQ ID NO: 1036773 - RNA, 22 nt, Human
ggccaggagcaagccaggcucu

SEQ ID NO: 1036774 - RNA, 22 nt, Human
ucaguggagcuaagcaugagau

SEQ ID NO: 1036775 - RNA, 22 nt, Human
gucugcugcagagcauggcuuu

SEQ ID NO: 1036776 - RNA, 22 nt, Human
cagguaagagacggauuggccc

SEQ ID NO: 1036777 - RNA, 17 nt, Human
ggugagaccucccacuc

SEQ ID NO: 1036778 - RNA, 22 nt, Human
cagaggcucuuccucacugccc

SEQ ID NO: 1036779 - RNA, 22 nt, Human
gagccagcgccuugccucuggg

SEQ ID NO: 1036780 - RNA, 18 nt, Human
ggcugagguugacuagaa

SEQ ID NO: 1036781 - RNA, 19 nt, Human
ucagaggauuuggcuauga

SEQ ID NO: 1036782 - RNA, 22 nt, Human
aagcccagcaucccugcaccag

SEQ ID NO: 1036783 - RNA, 22 nt, Human
aaggcacuacgcugcuggggcg

SEQ ID NO: 1036784 - RNA, 22 nt, Human
aaugaugggaaggagaaaagca

SEQ ID NO: 1036785 - RNA, 22 nt, Human
ggcugucucugugacugccacc

SEQ ID NO: 1036786 - RNA, 22 nt, Human
cuggccugggagcugcuagcgu

SEQ ID NO: 1036787 - RNA, 22 nt, Human
gcagagccugugucugagcaaa

SEQ ID NO: 1036788 - RNA, 22 nt, Human
gcucucugucguuaugcuucau

SEQ ID NO: 1036789 - RNA, 22 nt, Human
agugaaauuccuggucuuuguu

SEQ ID NO: 1036790 - RNA, 22 nt, Human
ccuuggagcggucagcacuggu

SEQ ID NO: 1036791 - RNA, 22 nt, Human
uaggccaggacagagcuuccag

SEQ ID NO: 1036792 - RNA, 22 nt, Human
ucccagacaaucauuggccacc

SEQ ID NO: 1036793 - RNA, 22 nt, Human
uggcucagaguucaucuuuuag

SEQ ID NO: 1036794 - RNA, 22 nt, Human
cagcagcuacuuggagcagcag

SEQ ID NO: 1036795 - RNA, 22 nt, Human
aggcucugcagaccccagcugu

SEQ ID NO: 1036796 - RNA, 21 nt, Human
ugagagccuccaaccggcuac

SEQ ID NO: 1036797 - RNA, 22 nt, Human
augcaguaaauguucuaguuug

SEQ ID NO: 1036798 - RNA, 23 nt, Human
ggcucugugcugggccugcagga

SEQ ID NO: 1036799 - RNA, 22 nt, Human
agagcugcccacacagcagauu

SEQ ID NO: 1036800 - RNA, 22 nt, Human
uugcauugauguuccuucuugc

SEQ ID NO: 1036801 - RNA, 22 nt, Human
acagcagcacuauugacauuuu

SEQ ID NO: 1036802 - RNA, 22 nt, Human
ggggcugguggugguuucucca

SEQ ID NO: 1036803 - RNA, 18 nt, Human
ccagguggugacagagau

SEQ ID NO: 1036804 - RNA, 19 nt, Human
agagaggcugugugaggga

SEQ ID NO: 1036805 - RNA, 22 nt, Human
uggcucaguuccaucaucugga

SEQ ID NO: 1036806 - RNA, 22 nt, Human
uguggccucaaggcugcccuca

SEQ ID NO: 1036807 - RNA, 22 nt, Human
cacacuagucuauccauuagcu

SEQ ID NO: 1036808 - RNA, 19 nt, Human
uugcauuguaguuggacug

SEQ ID NO: 1036809 - RNA, 23 nt, Human
uggcucugugucacauacaggau

SEQ ID NO: 1036810 - RNA, 19 nt, Human
acaaagcugugagcagcuu

SEQ ID NO: 1036811 - RNA, 21 nt, Human
gcaugccugcaucuuaguguu

SEQ ID NO: 1036812 - RNA, 22 nt, Human
cuagaaaugcucaagagaaagu

SEQ ID NO: 1036813 - RNA, 22 nt, Human
uagggcaguuauaacauuagug

SEQ ID NO: 1036814 - RNA, 22 nt, Human
caggagacuauggcccaaggcc

SEQ ID NO: 1036815 - RNA, 22 nt, Human
ugugugcauucacaugcaugcc

SEQ ID NO: 1036816 - RNA, 22 nt, Human
uguauuuuuaggaaugcgcuau

SEQ ID NO: 1036817 - RNA, 19 nt, Human
aggcucugagcuccuggag

SEQ ID NO: 1036818 - RNA, 23 nt, Human
cuguggcugaguccuguuggagu

SEQ ID NO: 1036819 - RNA, 22 nt, Human
uuuauuguuguuagucauaagu

SEQ ID NO: 1036820 - RNA, 22 nt, Human
ucauugcagugauguuguaugu

SEQ ID NO: 1036821 - RNA, 22 nt, Human
ggagugaaucacuagaugcaga

SEQ ID NO: 1036822 - RNA, 22 nt, Human
cauugcaccacauugcaucccu

SEQ ID NO: 1036823 - RNA, 20 nt, Human
cuuugccuauucucugccug

SEQ ID NO: 1036824 - RNA, 22 nt, Human
uagcugccauugcuccaggaag

SEQ ID NO: 1036825 - RNA, 21 nt, Human
ugcaggcaggcagagaugcug

SEQ ID NO: 1036826 - RNA, 22 nt, Human
gcugaagcccacguggcuugua

SEQ ID NO: 1036827 - RNA, 22 nt, Human
aaugcuguauaucuuagcuaau

SEQ ID NO: 1036828 - RNA, 22 nt, Human
gcugagcugcuguucauccugc

SEQ ID NO: 1036829 - RNA, 22 nt, Human
uuuccuuccagguuccuaaggc

SEQ ID NO: 1036830 - RNA, 22 nt, Human
gcugaguguaaugauggcagag

SEQ ID NO: 1036831 - RNA, 22 nt, Human
ugggaguguucuuggcuugcuu

SEQ ID NO: 1036832 - RNA, 22 nt, Human
ccacaggggucucuguagcuga

SEQ ID NO: 1036833 - RNA, 18 nt, Human
gguggccuugacuucucu

SEQ ID NO: 1036834 - RNA, 22 nt, Human
gcugcaggcauuuuccugggca

SEQ ID NO: 1036835 - RNA, 22 nt, Human
gcaggauggugcccuuucugcc

SEQ ID NO: 1036836 - RNA, 22 nt, Human
ucuggcuccaccuccuuuacua

SEQ ID NO: 1036837 - RNA, 23 nt, Human
gacagagugagaccuugucuuac

SEQ ID NO: 1036838 - RNA, 22 nt, Human
cauuagaagaacaguuauauua

SEQ ID NO: 1036839 - RNA, 22 nt, Human
ggggcagagagaaggaagcuug

SEQ ID NO: 1036840 - RNA, 22 nt, Human
uuaugcuaagugcaacaagcca

SEQ ID NO: 1036841 - RNA, 22 nt, Human
ucugggugaugaaaugcacugu

SEQ ID NO: 1036842 - RNA, 22 nt, Human
aaaugcagguucuugagccaag

SEQ ID NO: 1036843 - RNA, 22 nt, Human
aucccugcccucauggagcuua

SEQ ID NO: 1036844 - RNA, 22 nt, Human
gccuuccuuacaccugcucagc

SEQ ID NO: 1036845 - RNA, 22 nt, Human
uuggcuucucuuaacccuaaag

SEQ ID NO: 1036846 - RNA, 22 nt, Human
auauucguggucaaguaaggcc

SEQ ID NO: 1036847 - RNA, 22 nt, Human
caccaggcuggagugcagaggu

SEQ ID NO: 1036848 - RNA, 22 nt, Human
cugcaggcucgaagacacggau

SEQ ID NO: 1036849 - RNA, 22 nt, Human
ugagcccaggaguuggagaccg

SEQ ID NO: 1036850 - RNA, 22 nt, Human
uggcagcauguuauguaaggaa

SEQ ID NO: 1036851 - RNA, 22 nt, Human
cagcucugugggagcguaugug

SEQ ID NO: 1036852 - RNA, 22 nt, Human
uacaaacuuguuuuaaguaagu

SEQ ID NO: 1036853 - RNA, 22 nt, Human
ggcuucugccacgagagggaag

SEQ ID NO: 1036854 - RNA, 22 nt, Human
cacagggcagugauuguccaca

SEQ ID NO: 1036855 - RNA, 17 nt, Human
cgagggcuugcuggcuc

SEQ ID NO: 1036856 - RNA, 17 nt, Human
aggagucucagaugagc

SEQ ID NO: 1036857 - RNA, 22 nt, Human
agcauugccugccuauugcuaa

SEQ ID NO: 1036858 - RNA, 22 nt, Human
cagaacauucacucauaugugg

SEQ ID NO: 1036859 - RNA, 22 nt, Human
uccaugugccaaggggcagagg

SEQ ID NO: 1036860 - RNA, 22 nt, Human
agcaggaguguccccuggcugu

SEQ ID NO: 1036861 - RNA, 22 nt, Human
ccugucugcaugaucccugcca

SEQ ID NO: 1036862 - RNA, 22 nt, Human
agcagcucuggcacuguagcau

SEQ ID NO: 1036863 - RNA, 22 nt, Human
acacagccgugaaucugcuucu

SEQ ID NO: 1036864 - RNA, 22 nt, Human
ccugggagagucuguggucucc

SEQ ID NO: 1036865 - RNA, 22 nt, Human
aaaugcaauuguauguacucca

SEQ ID NO: 1036866 - RNA, 22 nt, Human
uuuccucugucaugacagcuga

SEQ ID NO: 1036867 - RNA, 22 nt, Human
ugcaguggaaucuggagagcag

SEQ ID NO: 1036868 - RNA, 22 nt, Human
cagggagcuggcuggcgugagu

SEQ ID NO: 1036869 - RNA, 22 nt, Human
cugucccucaucaccucugggu

SEQ ID NO: 1036870 - RNA, 20 nt, Human
aagaaacuugaaaguacaag

SEQ ID NO: 1036871 - RNA, 22 nt, Human
ggggcuggcucacuaagagacu

SEQ ID NO: 1036872 - RNA, 22 nt, Human
acuuccugcaaucguccacucc

SEQ ID NO: 1036873 - RNA, 22 nt, Human
uuagagaaauucugguaaugua

SEQ ID NO: 1036874 - RNA, 22 nt, Human
auguccuucuccucuuaccugc

SEQ ID NO: 1036875 - RNA, 22 nt, Human
gaaguucaggugggaauugagc

SEQ ID NO: 1036876 - RNA, 22 nt, Human
auuuguacaaauuuauguuagu

SEQ ID NO: 1036877 - RNA, 22 nt, Human
cauuacauuucaaaauguuucc

SEQ ID NO: 1036878 - RNA, 22 nt, Human
aaaggucagcugccaucguucu

SEQ ID NO: 1036879 - RNA, 22 nt, Human
uuacuuuggauggucaagaaag

SEQ ID NO: 1036880 - RNA, 22 nt, Human
ccacacugaaccucagugucuu

SEQ ID NO: 1036881 - RNA, 22 nt, Human
ggcacugaaguggguguugggu

SEQ ID NO: 1036882 - RNA, 22 nt, Human
gcuggccugucuagagccuuac

SEQ ID NO: 1036883 - RNA, 22 nt, Human
ggaccagagcucgggcuucuca

SEQ ID NO: 1036884 - RNA, 22 nt, Human
cagggcaguaccgcccucuggc

SEQ ID NO: 1036885 - RNA, 22 nt, Human
ucagagaaguaagguggggugc

SEQ ID NO: 1036886 - RNA, 22 nt, Human
gcagagaaaguuuuguccucag

SEQ ID NO: 1036887 - RNA, 22 nt, Human
ggggcagagucuggacuguugu

SEQ ID NO: 1036888 - RNA, 22 nt, Human
uccugugccuccaccugcuccg

SEQ ID NO: 1036889 - RNA, 22 nt, Human
aagauacugaugauguaggcua

SEQ ID NO: 1036890 - RNA, 22 nt, Human
ccuggcugcuuucacuauggag

SEQ ID NO: 1036891 - RNA, 22 nt, Human
cuggcucauccagguguugcuc

SEQ ID NO: 1036892 - RNA, 22 nt, Human
agaaaacauuacauaggugugu

SEQ ID NO: 1036893 - RNA, 22 nt, Human
caggccugggcuucggggcuga

SEQ ID NO: 1036894 - RNA, 22 nt, Human
uucuuuccaaccagauauuggu

SEQ ID NO: 1036895 - RNA, 22 nt, Human
gcaguggcaccgcuggcucugg

SEQ ID NO: 1036896 - RNA, 22 nt, Human
gcucugcuggaaguucucugga

SEQ ID NO: 1036897 - RNA, 22 nt, Human
cagagcugucauuugccaguga

SEQ ID NO: 1036898 - RNA, 22 nt, Human
aagagcuggcccaaucugagca

SEQ ID NO: 1036899 - RNA, 22 nt, Human
gaguguuccagaaacuggcccu

SEQ ID NO: 1036900 - RNA, 22 nt, Human
ucccagccuuccuuguggugaa

SEQ ID NO: 1036901 - RNA, 22 nt, Human
cagcuccugccugggcagcugu

SEQ ID NO: 1036902 - RNA, 22 nt, Human
agcugcucuugggugacuucaa

SEQ ID NO: 1036903 - RNA, 23 nt, Human
aguguuccaguugguugagagug

SEQ ID NO: 1036904 - RNA, 22 nt, Human
cccagaggugcuucagaggugc

SEQ ID NO: 1036905 - RNA, 22 nt, Human
ggagccaggcaaucuguacuuu

SEQ ID NO: 1036906 - RNA, 22 nt, Human
ggcccugagcugaaguacugug

SEQ ID NO: 1036907 - RNA, 22 nt, Human
ucagcagaggggaaggcaucug

SEQ ID NO: 1036908 - RNA, 22 nt, Human
uggcucaggcuugaaaauagau

SEQ ID NO: 1036909 - RNA, 22 nt, Human
caagaugccccugguagggauc

SEQ ID NO: 1036910 - RNA, 20 nt, Human
gccuggaggcaaugggaaga

SEQ ID NO: 1036911 - RNA, 21 nt, Human
uggcugcuggcccucucucca

SEQ ID NO: 1036912 - RNA, 22 nt, Human
cagcucucacacccuccuccca

SEQ ID NO: 1036913 - RNA, 20 nt, Human
aggcagacaaggagucuguu

SEQ ID NO: 1036914 - RNA, 22 nt, Human
acagcugggugcugcucagagc

SEQ ID NO: 1036915 - RNA, 22 nt, Human
cagcauggcuugaguguuuccu

SEQ ID NO: 1036916 - RNA, 22 nt, Human
gccacugcacuccagcccaggc

SEQ ID NO: 1036917 - RNA, 18 nt, Human
ucuuggaguaaugaucaa

SEQ ID NO: 1036918 - RNA, 22 nt, Human
aggccuagaggaauggccaggg

SEQ ID NO: 1036919 - RNA, 22 nt, Human
guucuccauucagcuuccugug

SEQ ID NO: 1036920 - RNA, 19 nt, Human
aacuagaaagguuuugaga

SEQ ID NO: 1036921 - RNA, 22 nt, Human
aaugaacaggugaaugucagau

SEQ ID NO: 1036922 - RNA, 22 nt, Human
aggcacuguucccaguuauccu

SEQ ID NO: 1036923 - RNA, 22 nt, Human
ucacaggcuccagggccuggau

SEQ ID NO: 1036924 - RNA, 22 nt, Human
acagugucaugucguguucccc

SEQ ID NO: 1036925 - RNA, 22 nt, Human
gccugagcaggcguggaccaug

SEQ ID NO: 1036926 - RNA, 22 nt, Human
cugucucugucuuaacucccag

SEQ ID NO: 1036927 - RNA, 22 nt, Human
uggguggcggccugguucugag

SEQ ID NO: 1036928 - RNA, 21 nt, Human
cugagggccgcagcugggcuc

SEQ ID NO: 1036929 - RNA, 22 nt, Human
caugaagcauguuuugucauga

SEQ ID NO: 1036930 - RNA, 22 nt, Human
uuauccaaacuggugaaucauu

SEQ ID NO: 1036931 - RNA, 22 nt, Human
gaagaacaagcagugcuuuccu

SEQ ID NO: 1036932 - RNA, 22 nt, Human
ggcugaguugagaggauuacuu

SEQ ID NO: 1036933 - RNA, 19 nt, Human
gguaaaagugagcuucagg

SEQ ID NO: 1036934 - RNA, 17 nt, Human
aaaauucuguaaagagg

SEQ ID NO: 1036935 - RNA, 22 nt, Human
cugcagcuauauuuucccacag

SEQ ID NO: 1036936 - RNA, 21 nt, Human
gcagcaguguucuagaauacu

SEQ ID NO: 1036937 - RNA, 22 nt, Human
ucauucagguugggcaaguguc

SEQ ID NO: 1036938 - RNA, 22 nt, Human
gguggccaggccagcucuggcc

SEQ ID NO: 1036939 - RNA, 22 nt, Human
ccagccuucugagcugccugga

SEQ ID NO: 1036940 - RNA, 22 nt, Human
gggcaggaugcaguuucagaga

SEQ ID NO: 1036941 - RNA, 22 nt, Human
gacccuguuucuacaaauaauu

SEQ ID NO: 1036942 - RNA, 22 nt, Human
agucucugcacaguaagaagca

SEQ ID NO: 1036943 - RNA, 22 nt, Human
gggggcucugacucccucagcu

SEQ ID NO: 1036944 - RNA, 22 nt, Human
ggcaguggaggacccugugucu

SEQ ID NO: 1036945 - RNA, 22 nt, Human
uggaagagggagcuggguggcc

SEQ ID NO: 1036946 - RNA, 20 nt, Human
gaaaugugaccucuucugug

SEQ ID NO: 1036947 - RNA, 22 nt, Human
uaaacauggauucugaucacag

SEQ ID NO: 1036948 - RNA, 22 nt, Human
ccugccugauuccaggauggcu

SEQ ID NO: 1036949 - RNA, 22 nt, Human
acauguggucaaucuguguagg

SEQ ID NO: 1036950 - RNA, 16 nt, Human
ggagagugucugcaaa

SEQ ID NO: 1036951 - RNA, 16 nt, Human
uggaaggggucuccgg

SEQ ID NO: 1036952 - RNA, 22 nt, Human
ggcagaagaaaggcuaagucuc

SEQ ID NO: 1036953 - RNA, 22 nt, Human
acucugaggcaggucagggcag

SEQ ID NO: 1036954 - RNA, 18 nt, Human
aggcacuggaauuaaggg

SEQ ID NO: 1036955 - RNA, 22 nt, Human
agcagcucugagaggccagcac

SEQ ID NO: 1036956 - RNA, 20 nt, Human
guccugggagccacagcaca

SEQ ID NO: 1036957 - RNA, 22 nt, Human
uauuucuuguuauucucguuga

SEQ ID NO: 1036958 - RNA, 22 nt, Human
cagguccccuccccuaccaggc

SEQ ID NO: 1036959 - RNA, 22 nt, Human
ccacagagagugucagccuuug

SEQ ID NO: 1036960 - RNA, 22 nt, Human
ucaagagacaggacguguuuca

SEQ ID NO: 1036961 - RNA, 22 nt, Human
aagauuuccuucaguagagcua

SEQ ID NO: 1036962 - RNA, 22 nt, Human
agaggccaucugcucugugggg

SEQ ID NO: 1036963 - RNA, 22 nt, Human
cagagcuguuacuauucaugaa

SEQ ID NO: 1036964 - RNA, 22 nt, Human
cugaugcuauaagccacagugg

SEQ ID NO: 1036965 - RNA, 22 nt, Human
uccuuuuuauaguuagagaaac

SEQ ID NO: 1036966 - RNA, 22 nt, Human
uaagaagcuucugcuaaugccu

SEQ ID NO: 1036967 - RNA, 22 nt, Human
acuguguguuugucuagcacag

SEQ ID NO: 1036968 - RNA, 22 nt, Human
agcagugggggaguguuaguuu

SEQ ID NO: 1036969 - RNA, 22 nt, Human
ccagcagcucccucaggguccg

SEQ ID NO: 1036970 - RNA, 22 nt, Human
gcugucuucacuuccugguuuc

SEQ ID NO: 1036971 - RNA, 18 nt, Human
ggagagugacagagucgu

SEQ ID NO: 1036972 - RNA, 22 nt, Human
ugugcucuggaguugccuucac

SEQ ID NO: 1036973 - RNA, 22 nt, Human
cugaagccaugugcucacuggu

SEQ ID NO: 1036974 - RNA, 22 nt, Human
ugguggcaauguccuggagaag

SEQ ID NO: 1036975 - RNA, 22 nt, Human
uccugcagagacagaggccuca

SEQ ID NO: 1036976 - RNA, 22 nt, Human
uggcuuccugcauggauccucu

SEQ ID NO: 1036977 - RNA, 22 nt, Human
gaaaucugaaucuucuguuggu

SEQ ID NO: 1036978 - RNA, 22 nt, Human
agacaaaggauuaaugaugaug

SEQ ID NO: 1036979 - RNA, 17 nt, Human
cucuccuuccucugagg

SEQ ID NO: 1036980 - RNA, 22 nt, Human
acccagagccagggucaggagc

SEQ ID NO: 1036981 - RNA, 22 nt, Human
ucugucacugagcucaggauuc

SEQ ID NO: 1036982 - RNA, 22 nt, Human
uaagacauuugaaaugugaucc

SEQ ID NO: 1036983 - RNA, 22 nt, Human
cuuaagaauauugaaguugugg

SEQ ID NO: 1036984 - RNA, 22 nt, Human
ccuggcaggccccuccuggauu

SEQ ID NO: 1036985 - RNA, 22 nt, Human
uccagccaugacucggacagug

SEQ ID NO: 1036986 - RNA, 22 nt, Human
gagcagcugguaggugaaccca

SEQ ID NO: 1036987 - RNA, 22 nt, Human
agggcagaaauauugauacugu

SEQ ID NO: 1036988 - RNA, 22 nt, Human
gugucaugcacacucaguguug

SEQ ID NO: 1036989 - RNA, 22 nt, Human
aauguguagcauuuaaugcagu

SEQ ID NO: 1036990 - RNA, 22 nt, Human
cugccuguuagucuagcaguua

SEQ ID NO: 1036991 - RNA, 22 nt, Human
ccucugcugcuguugagcaccg

SEQ ID NO: 1036992 - RNA, 22 nt, Human
cugggcagugguggcccuuccc

SEQ ID NO: 1036993 - RNA, 22 nt, Human
ccacagccauuccagggaggcu

SEQ ID NO: 1036994 - RNA, 22 nt, Human
cucuggacacuggcaugggguc

SEQ ID NO: 1036995 - RNA, 22 nt, Human
cuggagcuaauaauccaucuga

SEQ ID NO: 1036996 - RNA, 22 nt, Human
cccuggaguccggagcucaccu

SEQ ID NO: 1036997 - RNA, 22 nt, Human
aucagcaagcaugguuaggugu

SEQ ID NO: 1036998 - RNA, 22 nt, Human
aggcacugcuucuaaguaggaa

SEQ ID NO: 1036999 - RNA, 22 nt, Human
aauugugcuaugauuaugaaag

SEQ ID NO: 1037000 - RNA, 22 nt, Human
aaaguguugggaagaaagugca

SEQ ID NO: 1037001 - RNA, 22 nt, Human
cucuggagcauuucaccuacau

SEQ ID NO: 1037002 - RNA, 22 nt, Human
ggggcagaaagcccacagagug

SEQ ID NO: 1037003 - RNA, 22 nt, Human
cccccaggcucugacacaggag

SEQ ID NO: 1037004 - RNA, 21 nt, Human
acaugucucuaaucucaguga

SEQ ID NO: 1037005 - RNA, 22 nt, Human
gaagaacacuucaugauucauu

SEQ ID NO: 1037006 - RNA, 22 nt, Human
uggcuggacagugggcagugga

SEQ ID NO: 1037007 - RNA, 21 nt, Human
uccuccuucaaguccuggccu

SEQ ID NO: 1037008 - RNA, 20 nt, Human
agccugccagcuggcccaga

SEQ ID NO: 1037009 - RNA, 22 nt, Human
cuugaaagcuuugcgucuucua

SEQ ID NO: 1037010 - RNA, 22 nt, Human
aguguuccacacaucuggggaa

SEQ ID NO: 1037011 - RNA, 21 nt, Human
acagcagggcuggcaugacag

SEQ ID NO: 1037012 - RNA, 22 nt, Human
aggccugggucucgugccuacc

SEQ ID NO: 1037013 - RNA, 22 nt, Human
ggcuucccuuuccgagaggaga

SEQ ID NO: 1037014 - RNA, 22 nt, Human
augggaggcagcagagcccagc

SEQ ID NO: 1037015 - RNA, 22 nt, Human
caggggcagucugugugcgugg

SEQ ID NO: 1037016 - RNA, 20 nt, Human
aggaacuggaagggaggaaa

SEQ ID NO: 1037017 - RNA, 22 nt, Human
uacauuguuuuuucuugccauc

SEQ ID NO: 1037018 - RNA, 22 nt, Human
cucagggucugguccuuagauu

SEQ ID NO: 1037019 - RNA, 22 nt, Human
cuucccugauaagagccucaga

SEQ ID NO: 1037020 - RNA, 22 nt, Human
ccugcaggggagagacuucuag

SEQ ID NO: 1037021 - RNA, 22 nt, Human
guuguauagagggcaugaaucu

SEQ ID NO: 1037022 - RNA, 22 nt, Human
ggagcagagcauuucacagccu

SEQ ID NO: 1037023 - RNA, 22 nt, Human
augcauaauguauguauugacu

SEQ ID NO: 1037024 - RNA, 20 nt, Human
caaugcacacagcugcuucu

SEQ ID NO: 1037025 - RNA, 19 nt, Human
ucucagagcccuagaggcc

SEQ ID NO: 1037026 - RNA, 22 nt, Human
cuucaagauauuucuagaauca

SEQ ID NO: 1037027 - RNA, 22 nt, Human
ucuggccaggauggcaagacca

SEQ ID NO: 1037028 - RNA, 22 nt, Human
ccugagcugaacuaagcaguuu

SEQ ID NO: 1037029 - RNA, 22 nt, Human
agugggcagugcgcucggaugc

SEQ ID NO: 1037030 - RNA, 22 nt, Human
gccuuugcaccaucagugcaau

SEQ ID NO: 1037031 - RNA, 22 nt, Human
aggcccuguuaugagccacugu

SEQ ID NO: 1037032 - RNA, 22 nt, Human
gugccugugcggacucagggaa

SEQ ID NO: 1037033 - RNA, 22 nt, Human
uccagggauguccuguagcacu

SEQ ID NO: 1037034 - RNA, 22 nt, Human
caaaugcuggcccugcuacuua

SEQ ID NO: 1037035 - RNA, 22 nt, Human
ccucacuggccagccaggggug

SEQ ID NO: 1037036 - RNA, 18 nt, Human
aaugcacacauuuacucc

SEQ ID NO: 1037037 - RNA, 22 nt, Human
agcugcugaaugacacugcaag

SEQ ID NO: 1037038 - RNA, 20 nt, Human
aaucagaaagugugagcucu

SEQ ID NO: 1037039 - RNA, 22 nt, Human
ccugucaggguuugccucagaa

SEQ ID NO: 1037040 - RNA, 22 nt, Human
uggcagagcaaaaagauagaau

SEQ ID NO: 1037041 - RNA, 22 nt, Human
gaguuauuaauggcugaguuug

SEQ ID NO: 1037042 - RNA, 22 nt, Human
cagcccucagguccucagcagc

SEQ ID NO: 1037043 - RNA, 22 nt, Human
ucugccugagggagcugaggaa

SEQ ID NO: 1037044 - RNA, 22 nt, Human
gucucagagagcuacucucuua

SEQ ID NO: 1037045 - RNA, 22 nt, Human
aucuggcuuggguguggguagc

SEQ ID NO: 1037046 - RNA, 18 nt, Human
agugugugcccuuucagg

SEQ ID NO: 1037047 - RNA, 17 nt, Human
uugggagagaaagguau

SEQ ID NO: 1037048 - RNA, 22 nt, Human
gcugagcugggacaguccuggg

SEQ ID NO: 1037049 - RNA, 22 nt, Human
ggcuagaacuuuacacuuugca

SEQ ID NO: 1037050 - RNA, 22 nt, Human
cgcuggccauagccuccugugu

SEQ ID NO: 1037051 - RNA, 22 nt, Human
aaaugugcuugugaucagcugu

SEQ ID NO: 1037052 - RNA, 19 nt, Human
uggcuccugccugccuucu

SEQ ID NO: 1037053 - RNA, 22 nt, Human
cugaaugucgaucagcuugggu

SEQ ID NO: 1037054 - RNA, 22 nt, Human
agaaauguuuauggcugccuau

SEQ ID NO: 1037055 - RNA, 22 nt, Human
cuuauguauauuuggaacguac

SEQ ID NO: 1037056 - RNA, 21 nt, Human
agaaauguaucauucuuuucc

SEQ ID NO: 1037057 - RNA, 22 nt, Human
gggcugcugcccaggaggcacc

SEQ ID NO: 1037058 - RNA, 22 nt, Human
cacagguggcuccaaguuagag

SEQ ID NO: 1037059 - RNA, 22 nt, Human
caccuggcuggaagugcuccgg

SEQ ID NO: 1037060 - RNA, 22 nt, Human
agaaauguggaucguuuuaaaa

SEQ ID NO: 1037061 - RNA, 22 nt, Human
aguguuguaugggaugacugcu

SEQ ID NO: 1037062 - RNA, 22 nt, Human
acauuuaaugauccuacuguga

SEQ ID NO: 1037063 - RNA, 22 nt, Human
gagcuuccacucuagaaggagu

SEQ ID NO: 1037064 - RNA, 22 nt, Human
ccuggcagacagcacugaagcu

SEQ ID NO: 1037065 - RNA, 22 nt, Human
gcaguccucucauuggccuccu

SEQ ID NO: 1037066 - RNA, 22 nt, Human
ugcugugagguugagaaggaag

SEQ ID NO: 1037067 - RNA, 22 nt, Human
gucaccagucccagcuccugaa

SEQ ID NO: 1037068 - RNA, 22 nt, Human
ggcucuggucagugaggggccu

SEQ ID NO: 1037069 - RNA, 22 nt, Human
uugaagcauuucuuugagcuuc

SEQ ID NO: 1037070 - RNA, 22 nt, Human
ccugggcauaaaucacuccaag

SEQ ID NO: 1037071 - RNA, 22 nt, Human
uagggaggcuacuucuuguagg

SEQ ID NO: 1037072 - RNA, 22 nt, Human
gggcugcuguagagaacauguu

SEQ ID NO: 1037073 - RNA, 23 nt, Human
gagcugggauacaggcuuacugc

SEQ ID NO: 1037074 - RNA, 21 nt, Human
ccucugcucgggcaugcguuu

SEQ ID NO: 1037075 - RNA, 22 nt, Human
ucucagagugguggucccucug

SEQ ID NO: 1037076 - RNA, 22 nt, Human
ccagaggcuggguucaccucag

SEQ ID NO: 1037077 - RNA, 22 nt, Human
agcuucuguucaucuuccaggc

SEQ ID NO: 1037078 - RNA, 22 nt, Human
agugaccaacaaugcugagaag

SEQ ID NO: 1037079 - RNA, 22 nt, Human
ucugagagagggucagaugcua

SEQ ID NO: 1037080 - RNA, 22 nt, Human
uauguacaguccuuaacuuaaa

SEQ ID NO: 1037081 - RNA, 22 nt, Human
caggguggaaaagcuaguugga

SEQ ID NO: 1037082 - RNA, 22 nt, Human
cagcagcugauggggaagugau

SEQ ID NO: 1037083 - RNA, 22 nt, Human
gacagggccgcagauggagacu

SEQ ID NO: 1037084 - RNA, 22 nt, Human
ugcaggugccucuugagcuugu

SEQ ID NO: 1037085 - RNA, 22 nt, Human
gugggcuggacccuccugcucc

SEQ ID NO: 1037086 - RNA, 23 nt, Human
auuuccuacuauaaaagagguaa

SEQ ID NO: 1037087 - RNA, 22 nt, Human
gcuggccacacugcugauggag

SEQ ID NO: 1037088 - RNA, 22 nt, Human
uuggaaggugagucccuggguu

SEQ ID NO: 1037089 - RNA, 22 nt, Human
cuguccuuacugcuucuggcuu

SEQ ID NO: 1037090 - RNA, 22 nt, Human
ggaggcuccacugcucuuccug

SEQ ID NO: 1037091 - RNA, 22 nt, Human
aguaaugucccuuaaauguggu

SEQ ID NO: 1037092 - RNA, 22 nt, Human
gaggccugcagcguggucccug

SEQ ID NO: 1037093 - RNA, 22 nt, Human
ccacagggucagccacucugca

SEQ ID NO: 1037094 - RNA, 22 nt, Human
uguuaacaucuuggacucguga

SEQ ID NO: 1037095 - RNA, 20 nt, Human
agaaucugacccagagagac

SEQ ID NO: 1037096 - RNA, 22 nt, Human
uagaucugauacaauucaucug

SEQ ID NO: 1037097 - RNA, 18 nt, Human
agcuggggccucuggucc

SEQ ID NO: 1037098 - RNA, 22 nt, Human
ggcuggcuuucucuccgcaccu

SEQ ID NO: 1037099 - RNA, 22 nt, Human
ggugaggcccagugaucugugu

SEQ ID NO: 1037100 - RNA, 23 nt, Human
cugcagucgccggccugggugcc

SEQ ID NO: 1037101 - RNA, 22 nt, Human
gagacugauggggcucccagaa

SEQ ID NO: 1037102 - RNA, 22 nt, Human
gcaggggaguggcaggcccgga

SEQ ID NO: 1037103 - RNA, 22 nt, Human
cuaaaugccuuuccuaccuaac

SEQ ID NO: 1037104 - RNA, 22 nt, Human
uacauuguucaugcaugagaaa

SEQ ID NO: 1037105 - RNA, 22 nt, Human
auccccagaaaauaggugccua

SEQ ID NO: 1037106 - RNA, 22 nt, Human
agagcuuauaucuuggccaucc

SEQ ID NO: 1037107 - RNA, 22 nt, Human
agguggagacccagagaaggcg

SEQ ID NO: 1037108 - RNA, 22 nt, Human
acacaugcauaagccuucccuu

SEQ ID NO: 1037109 - RNA, 22 nt, Human
uccucagaugcucuuggacgcc

SEQ ID NO: 1037110 - RNA, 22 nt, Human
ucaccugggagggcugugguag

SEQ ID NO: 1037111 - RNA, 22 nt, Human
aggcagccagauggcagccugc

SEQ ID NO: 1037112 - RNA, 22 nt, Human
uuccugagggacuuuugagauu

SEQ ID NO: 1037113 - RNA, 22 nt, Human
cacaaaaguaggaggcaggcgg

SEQ ID NO: 1037114 - RNA, 21 nt, Human
agcagcugggcaacauggagg

SEQ ID NO: 1037115 - RNA, 20 nt, Human
gaagcagcuucauguagaca

SEQ ID NO: 1037116 - RNA, 22 nt, Human
ugcccugucuaagcugucagua

SEQ ID NO: 1037117 - RNA, 22 nt, Human
ugguuuauuucucugaaagguu

SEQ ID NO: 1037118 - RNA, 22 nt, Human
uggccugcccagagcagcucug

SEQ ID NO: 1037119 - RNA, 22 nt, Human
acauuugucuucuuucagauua

SEQ ID NO: 1037120 - RNA, 22 nt, Human
guggcucucgccagccugcggg

SEQ ID NO: 1037121 - RNA, 22 nt, Human
uagaaaugcaguguacuguguc

SEQ ID NO: 1037122 - RNA, 22 nt, Human
uuuugaaagccagguuuguaug

SEQ ID NO: 1037123 - RNA, 22 nt, Human
ucucagagaggggccgggccuu

SEQ ID NO: 1037124 - RNA, 22 nt, Human
ugcuguuauacuuagcugguua

SEQ ID NO: 1037125 - RNA, 18 nt, Human
cugcugcaggcacucagg

SEQ ID NO: 1037126 - RNA, 22 nt, Human
cuggcuggccggagcgaggcgg

SEQ ID NO: 1037127 - RNA, 22 nt, Human
cagaguguugaccauaagccca

SEQ ID NO: 1037128 - RNA, 19 nt, Human
cucugccucuggcuguggc

SEQ ID NO: 1037129 - RNA, 22 nt, Human
gggaaauugugugagaucuuug

SEQ ID NO: 1037130 - RNA, 22 nt, Human
aaaugcuguaacugauauucug

SEQ ID NO: 1037131 - RNA, 22 nt, Human
gccugagacagugugguccaau

SEQ ID NO: 1037132 - RNA, 22 nt, Human
ucuggccacccgaggccccugc

SEQ ID NO: 1037133 - RNA, 21 nt, Human
ucccacucuaaauggacugaa

SEQ ID NO: 1037134 - RNA, 22 nt, Human
cugcucuggucucuucauguuu

SEQ ID NO: 1037135 - RNA, 22 nt, Human
cauugcacuuuggguccaggac

SEQ ID NO: 1037136 - RNA, 22 nt, Human
agcagcugcagagggcuccccc

SEQ ID NO: 1037137 - RNA, 21 nt, Human
cugugcuuuuuaagugugaug

SEQ ID NO: 1037138 - RNA, 22 nt, Human
ggagucagccugucagagugua

SEQ ID NO: 1037139 - RNA, 22 nt, Human
uagcugccaaaagggugggcua

SEQ ID NO: 1037140 - RNA, 20 nt, Human
ugaugguucuuuccggguug

SEQ ID NO: 1037141 - RNA, 22 nt, Human
uggaugcuguaggacacgcucu

SEQ ID NO: 1037142 - RNA, 22 nt, Human
ugagggaggcccuuugagcaga

SEQ ID NO: 1037143 - RNA, 20 nt, Human
gggaguggugguagccugug

SEQ ID NO: 1037144 - RNA, 22 nt, Human
agagggcauuaacucugucuug

SEQ ID NO: 1037145 - RNA, 22 nt, Human
uaugaagaaguucugugaaaug

SEQ ID NO: 1037146 - RNA, 22 nt, Human
aggcacuggguaauuaguagcu

SEQ ID NO: 1037147 - RNA, 22 nt, Human
gccaggcuggccagcaccuucu

SEQ ID NO: 1037148 - RNA, 22 nt, Human
ccuggagggcgccgcacagucc

SEQ ID NO: 1037149 - RNA, 22 nt, Human
aucuggcucaccuggguaaaua

SEQ ID NO: 1037150 - RNA, 22 nt, Human
ccuggaaguuggagguugcagu

SEQ ID NO: 1037151 - RNA, 22 nt, Human
uggcucuggggacaguaagucc

SEQ ID NO: 1037152 - RNA, 22 nt, Human
uggggccuggucagagcugcac

SEQ ID NO: 1037153 - RNA, 22 nt, Human
ggcagagguagcuggaaccagg

SEQ ID NO: 1037154 - RNA, 22 nt, Human
aggaagcccuugucauuucugu

SEQ ID NO: 1037155 - RNA, 22 nt, Human
cucucugggcccaguuggcacc

SEQ ID NO: 1037156 - RNA, 22 nt, Human
uccagucauuuccauuguuccc

SEQ ID NO: 1037157 - RNA, 22 nt, Human
ugcuggggguucagaugaguaa

SEQ ID NO: 1037158 - RNA, 22 nt, Human
gcugggcugagcuagacuuggc

SEQ ID NO: 1037159 - RNA, 22 nt, Human
gugucccaggagaggagacaau

SEQ ID NO: 1037160 - RNA, 22 nt, Human
ugaucagucccaugaucuucca

SEQ ID NO: 1037161 - RNA, 22 nt, Human
agaggcuccuucacucuggcac

SEQ ID NO: 1037162 - RNA, 22 nt, Human
ugcugcucuguaaagugaugag

SEQ ID NO: 1037163 - RNA, 22 nt, Human
agccaucauuucugucacuggc

SEQ ID NO: 1037164 - RNA, 22 nt, Human
uggcuucaucugcagcacugcc

SEQ ID NO: 1037165 - RNA, 18 nt, Human
uguuccaaggaaggaauc

SEQ ID NO: 1037166 - RNA, 20 nt, Human
aaaaacaguaaugcugaaga

SEQ ID NO: 1037167 - RNA, 22 nt, Human
ccuggccucuccgaguaaccug

SEQ ID NO: 1037168 - RNA, 22 nt, Human
ugggccugccccaggcuucagc

SEQ ID NO: 1037169 - RNA, 22 nt, Human
agaaggccuaacuugggggcaa

SEQ ID NO: 1037170 - RNA, 22 nt, Human
uugacaauguccuuugaauuuc

SEQ ID NO: 1037171 - RNA, 22 nt, Human
uuugacagacauuuacuacauu

SEQ ID NO: 1037172 - RNA, 22 nt, Human
auuauguagcuaaaaauugugu

SEQ ID NO: 1037173 - RNA, 22 nt, Human
uugauacagcagccugugaucc

SEQ ID NO: 1037174 - RNA, 22 nt, Human
aggcuucuaggguuggcagcgg

SEQ ID NO: 1037175 - RNA, 22 nt, Human
cugggcugucccaaccccaucc

SEQ ID NO: 1037176 - RNA, 22 nt, Human
cuggugucugcucccucacagc

SEQ ID NO: 1037177 - RNA, 23 nt, Human
gggagaauaugaggaugauggug

SEQ ID NO: 1037178 - RNA, 18 nt, Human
gcagcugcaguuguagcu

SEQ ID NO: 1037179 - RNA, 18 nt, Human
ccucaggggaccuggcag

SEQ ID NO: 1037180 - RNA, 22 nt, Human
gaagaagcaggaguguguagca

SEQ ID NO: 1037181 - RNA, 22 nt, Human
ugcauuguugaccaguugugca

SEQ ID NO: 1037182 - RNA, 22 nt, Human
ugugggcaggcccgggucugag

SEQ ID NO: 1037183 - RNA, 19 nt, Human
uuagaaacuguugacacug

SEQ ID NO: 1037184 - RNA, 22 nt, Human
caggaugggauguagugggccc

SEQ ID NO: 1037185 - RNA, 22 nt, Human
cauugcacuccacccuaggcaa

SEQ ID NO: 1037186 - RNA, 22 nt, Human
ggcagggagagcaugcugauaa

SEQ ID NO: 1037187 - RNA, 22 nt, Human
ccagcucucagcgggagacuca

SEQ ID NO: 1037188 - RNA, 22 nt, Human
cccucccagaugggcuugaggu

SEQ ID NO: 1037189 - RNA, 22 nt, Human
ucuggcucauacaagccugcaa

SEQ ID NO: 1037190 - RNA, 23 nt, Human
ggaguuggauuguacuugcugcu

SEQ ID NO: 1037191 - RNA, 22 nt, Human
agccucugcacgggcacgggug

SEQ ID NO: 1037192 - RNA, 22 nt, Human
agaaaucuaagaugcucaagga

SEQ ID NO: 1037193 - RNA, 22 nt, Human
cagcugugcuguauuaagcucu

SEQ ID NO: 1037194 - RNA, 22 nt, Human
cccuggagcugcuugcauguug

SEQ ID NO: 1037195 - RNA, 23 nt, Human
agcuggguggccugcgugaagcu

SEQ ID NO: 1037196 - RNA, 22 nt, Human
caggaagagaacauggaggcug

SEQ ID NO: 1037197 - RNA, 21 nt, Human
uuagcaaagcaaacacaugcu

SEQ ID NO: 1037198 - RNA, 22 nt, Human
acacaggggaaaguggagcuga

SEQ ID NO: 1037199 - RNA, 22 nt, Human
gggugcugacuggggccugaaa

SEQ ID NO: 1037200 - RNA, 22 nt, Human
aggagucagauaugggaaaguu

SEQ ID NO: 1037201 - RNA, 22 nt, Human
gcugcucuugaggggcucacug

SEQ ID NO: 1037202 - RNA, 22 nt, Human
gcccagcagaucucagugucuc

SEQ ID NO: 1037203 - RNA, 22 nt, Human
gccugggugucgaucacuagug

SEQ ID NO: 1037204 - RNA, 22 nt, Human
ucagagugggagaaugugccaa

SEQ ID NO: 1037205 - RNA, 22 nt, Human
gcuuccuggagggagagagcug

SEQ ID NO: 1037206 - RNA, 22 nt, Human
agcucccagggcugggcaaguu

SEQ ID NO: 1037207 - RNA, 22 nt, Human
uuucuuaggcucuaaaaugacu

SEQ ID NO: 1037208 - RNA, 21 nt, Human
aggcugcuggcucaggguccu

SEQ ID NO: 1037209 - RNA, 22 nt, Human
ucagcaaugugauacugugcaa

SEQ ID NO: 1037210 - RNA, 22 nt, Human
aaguguauauaugacuuauaaa

SEQ ID NO: 1037211 - RNA, 22 nt, Human
cccuucagcugagugggacagc

SEQ ID NO: 1037212 - RNA, 22 nt, Human
agccccugggaguagcugcugc

SEQ ID NO: 1037213 - RNA, 22 nt, Human
uccaggacuagcauuucugaua

SEQ ID NO: 1037214 - RNA, 22 nt, Human
caaugauguuuagauaaaaucc

SEQ ID NO: 1037215 - RNA, 22 nt, Human
agccacagcgaaccucucuucc

SEQ ID NO: 1037216 - RNA, 22 nt, Human
guggagcccugguagggacccc

SEQ ID NO: 1037217 - RNA, 22 nt, Human
gccuggaguacuccuugaagug

SEQ ID NO: 1037218 - RNA, 22 nt, Human
ugcagcuucuuguccugugauu

SEQ ID NO: 1037219 - RNA, 22 nt, Human
cgcugccaggucaccaggggua

SEQ ID NO: 1037220 - RNA, 22 nt, Human
aagagagagcauucuucuguua

SEQ ID NO: 1037221 - RNA, 22 nt, Human
uauuugaaaguguacaaaaacu

SEQ ID NO: 1037222 - RNA, 22 nt, Human
ugaacauauucaccucuaaaua

SEQ ID NO: 1037223 - RNA, 19 nt, Human
uggcucugucgaaggcaca

SEQ ID NO: 1037224 - RNA, 22 nt, Human
gccaccagguuagauccagccu

SEQ ID NO: 1037225 - RNA, 22 nt, Human
ugcuuuuaagaacaaugcugcu

SEQ ID NO: 1037226 - RNA, 22 nt, Human
agugucauaugccacugcaucc

SEQ ID NO: 1037227 - RNA, 22 nt, Human
gugcaguggcagauccuagcuc

SEQ ID NO: 1037228 - RNA, 22 nt, Human
gcagcuggggaggucgugggga

SEQ ID NO: 1037229 - RNA, 22 nt, Human
gagcagaacuacucacauaucg

SEQ ID NO: 1037230 - RNA, 22 nt, Human
uucauuacugcgguagucacac

SEQ ID NO: 1037231 - RNA, 22 nt, Human
cugggcacaaguggcccuggau

SEQ ID NO: 1037232 - RNA, 19 nt, Human
uggcagggagaguuugaag

SEQ ID NO: 1037233 - RNA, 22 nt, Human
ggagccuguggcugcuugaagc

SEQ ID NO: 1037234 - RNA, 22 nt, Human
auguacaaaaugccacugaauu

SEQ ID NO: 1037235 - RNA, 22 nt, Human
aacagacaacuccuguggcuca

SEQ ID NO: 1037236 - RNA, 22 nt, Human
uaaucacaucaggguaaauggg

SEQ ID NO: 1037237 - RNA, 22 nt, Human
gagaugaauguaaacaaaggca

SEQ ID NO: 1037238 - RNA, 22 nt, Human
agcucccauuaucuucugaaac

SEQ ID NO: 1037239 - RNA, 22 nt, Human
uccugccuguuuaccuguacuu

SEQ ID NO: 1037240 - RNA, 22 nt, Human
cuggccaguuguccuggcuugg

SEQ ID NO: 1037241 - RNA, 22 nt, Human
uguaauggaagugggauugcau

SEQ ID NO: 1037242 - RNA, 22 nt, Human
gcaggguaggugacagguaguc

SEQ ID NO: 1037243 - RNA, 22 nt, Human
uguuuaagcugaugagguaucg

SEQ ID NO: 1037244 - RNA, 22 nt, Human
ucucacucauuuccuaggucuu

SEQ ID NO: 1037245 - RNA, 22 nt, Human
aggcacugacucaagggagcca

SEQ ID NO: 1037246 - RNA, 21 nt, Human
agugaaaugaaguguaugcuc

SEQ ID NO: 1037247 - RNA, 22 nt, Human
gccucugcugacaagauggaca

SEQ ID NO: 1037248 - RNA, 22 nt, Human
aucaaaaugcuccagugauggu

SEQ ID NO: 1037249 - RNA, 22 nt, Human
aagggcaggcacccacccucac

SEQ ID NO: 1037250 - RNA, 22 nt, Human
gccugaggaaugcuccugacuu

SEQ ID NO: 1037251 - RNA, 22 nt, Human
agccucugucaagcuuuucaaa

SEQ ID NO: 1037252 - RNA, 22 nt, Human
augaugguaaauucaguauccg

SEQ ID NO: 1037253 - RNA, 19 nt, Human
ggccaggcugacugugguc

SEQ ID NO: 1037254 - RNA, 22 nt, Human
ugcugccacugguagucucauu

SEQ ID NO: 1037255 - RNA, 22 nt, Human
uagggcagauucgguggaguuu

SEQ ID NO: 1037256 - RNA, 23 nt, Human
cugaggccugcugcguucagguu

SEQ ID NO: 1037257 - RNA, 22 nt, Human
gaaccaaguaggauacaaggag

SEQ ID NO: 1037258 - RNA, 19 nt, Human
gaguuauugccagggcaug

SEQ ID NO: 1037259 - RNA, 22 nt, Human
ugggcugcagggguugagagcu

SEQ ID NO: 1037260 - RNA, 21 nt, Human
gccuggcagguggaagggcuc

SEQ ID NO: 1037261 - RNA, 22 nt, Human
uggugugggcguggcaggcaag

SEQ ID NO: 1037262 - RNA, 23 nt, Human
cuccucguaacucuguggugggu

SEQ ID NO: 1037263 - RNA, 22 nt, Human
cacugaguucccugacauuuca

SEQ ID NO: 1037264 - RNA, 22 nt, Human
uuaacagagugccuggcaugua

SEQ ID NO: 1037265 - RNA, 22 nt, Human
cugcagaggucuugcugauggu

SEQ ID NO: 1037266 - RNA, 22 nt, Human
ucaggagauggucuuuauaggc

SEQ ID NO: 1037267 - RNA, 22 nt, Human
ucaguauccacaaaugcucaaa

SEQ ID NO: 1037268 - RNA, 22 nt, Human
aagcagaaguugaucuaccaua

SEQ ID NO: 1037269 - RNA, 21 nt, Human
agagucugcauuucugacaag

SEQ ID NO: 1037270 - RNA, 22 nt, Human
aagaauguucuuguagucauga

SEQ ID NO: 1037271 - RNA, 22 nt, Human
ggagugaguacuggaguagcug

SEQ ID NO: 1037272 - RNA, 20 nt, Human
cagcaggaaaagugccucag

SEQ ID NO: 1037273 - RNA, 22 nt, Human
guguggcugugggagauguuca

SEQ ID NO: 1037274 - RNA, 22 nt, Human
agccagcugccuuucacaucug

SEQ ID NO: 1037275 - RNA, 22 nt, Human
caggccugucugcacaugaggc

SEQ ID NO: 1037276 - RNA, 22 nt, Human
caucuggcuagcuaucauugug

SEQ ID NO: 1037277 - RNA, 22 nt, Human
auguaaggcugccuaugacacu

SEQ ID NO: 1037278 - RNA, 19 nt, Human
ucugcuggcagaauucccu

SEQ ID NO: 1037279 - RNA, 20 nt, Human
caguagcaauaauuagaagc

SEQ ID NO: 1037280 - RNA, 17 nt, Human
ucagcaggggccaagcu

SEQ ID NO: 1037281 - RNA, 22 nt, Human
ccaaggcuggagugcaguggcg

SEQ ID NO: 1037282 - RNA, 22 nt, Human
acaaagugcacaagaugagaac

SEQ ID NO: 1037283 - RNA, 22 nt, Human
ugcagcugcuugauucaucuug

SEQ ID NO: 1037284 - RNA, 22 nt, Human
aggagaguucacacuggucaga

SEQ ID NO: 1037285 - RNA, 22 nt, Human
acucugccccgaguucugggaa

SEQ ID NO: 1037286 - RNA, 22 nt, Human
ccaaagucuggagcagcagagc

SEQ ID NO: 1037287 - RNA, 22 nt, Human
gcagauggcagcccaggcuggg

SEQ ID NO: 1037288 - RNA, 23 nt, Human
ggcuggcccggggcugcuccuga

SEQ ID NO: 1037289 - RNA, 22 nt, Human
acugccaggauggcacuagagg

SEQ ID NO: 1037290 - RNA, 20 nt, Human
gcucccagccugcagucccc

SEQ ID NO: 1037291 - RNA, 22 nt, Human
ucuucuccagugcuucugcaca

SEQ ID NO: 1037292 - RNA, 22 nt, Human
agaaauguacgauguuaugcag

SEQ ID NO: 1037293 - RNA, 18 nt, Human
agcagcugucagaaugcc

SEQ ID NO: 1037294 - RNA, 22 nt, Human
gggcaguggcucacgccuguaa

SEQ ID NO: 1037295 - RNA, 22 nt, Human
agcuugccucuuaaucaccuca

SEQ ID NO: 1037296 - RNA, 22 nt, Human
gcucugagagugggugauucug

SEQ ID NO: 1037297 - RNA, 22 nt, Human
ggcaaaaaccgcaauaacuucu

SEQ ID NO: 1037298 - RNA, 22 nt, Human
ucagcagucacauguuguccca

SEQ ID NO: 1037299 - RNA, 22 nt, Human
ccucccuggccagagcagcagc

SEQ ID NO: 1037300 - RNA, 22 nt, Human
aaaaaugugaccacaggguguu

SEQ ID NO: 1037301 - RNA, 22 nt, Human
aggugcuuggcucgugcacaca

SEQ ID NO: 1037302 - RNA, 22 nt, Human
cccagccugugacagccguccu

SEQ ID NO: 1037303 - RNA, 22 nt, Human
gucucagaccacccucuuuggc

SEQ ID NO: 1037304 - RNA, 22 nt, Human
guggcugcuacagagcuggagg

SEQ ID NO: 1037305 - RNA, 22 nt, Human
gaaggagcuaaagggagcccug

SEQ ID NO: 1037306 - RNA, 23 nt, Human
uguagcaucucuuauuucucagc

SEQ ID NO: 1037307 - RNA, 22 nt, Human
ggggugggguuacucauugugc

SEQ ID NO: 1037308 - RNA, 22 nt, Human
uauguacaccggggaagguggg

SEQ ID NO: 1037309 - RNA, 22 nt, Human
uugaaucauuacaauagauaag

SEQ ID NO: 1037310 - RNA, 22 nt, Human
ccugcuucagggaugauggcac

SEQ ID NO: 1037311 - RNA, 22 nt, Human
aagaugauaggacuugcuuaag

SEQ ID NO: 1037312 - RNA, 22 nt, Human
caggagacaaguuagcagcuga

SEQ ID NO: 1037313 - RNA, 22 nt, Human
cgagaguggacagggcgcagcu

SEQ ID NO: 1037314 - RNA, 22 nt, Human
cagcugccaugacauguccugc

SEQ ID NO: 1037315 - RNA, 22 nt, Human
cuccucuggaaauuccucugcc

SEQ ID NO: 1037316 - RNA, 22 nt, Human
ucagugcuucggcgagcaccua

SEQ ID NO: 1037317 - RNA, 18 nt, Human
ugcuggcaacuacuauug

SEQ ID NO: 1037318 - RNA, 22 nt, Human
cagcuggguuuaguggggugug

SEQ ID NO: 1037319 - RNA, 22 nt, Human
ccugccugcuuucugcuuugca

SEQ ID NO: 1037320 - RNA, 22 nt, Human
cagccaggagcucccccugcuc

SEQ ID NO: 1037321 - RNA, 22 nt, Human
ccugggagcuguggaaaggcug

SEQ ID NO: 1037322 - RNA, 22 nt, Human
ugggcugcagagcccggccuuc

SEQ ID NO: 1037323 - RNA, 22 nt, Human
gugcagugacccuggagagcug

SEQ ID NO: 1037324 - RNA, 19 nt, Human
aagggcugggcaccucacu

SEQ ID NO: 1037325 - RNA, 20 nt, Human
gccugcagagaaggucagag

SEQ ID NO: 1037326 - RNA, 21 nt, Human
ugaggcuguuguaccagggag

SEQ ID NO: 1037327 - RNA, 20 nt, Human
guaaaauauggucuuugggu

SEQ ID NO: 1037328 - RNA, 22 nt, Human
uuauuuauuguguaccuacugu

SEQ ID NO: 1037329 - RNA, 22 nt, Human
uggggcugaggagccucacucu

SEQ ID NO: 1037330 - RNA, 22 nt, Human
auacaugucaucauauguuugu

SEQ ID NO: 1037331 - RNA, 21 nt, Human
ccagacuggccuaugugguag

SEQ ID NO: 1037332 - RNA, 22 nt, Human
uaaguuuaaauguacaugaagc

SEQ ID NO: 1037333 - RNA, 22 nt, Human
uccaucagauucccuccugaga

SEQ ID NO: 1037334 - RNA, 22 nt, Human
uauugaaaugaaugacagugau

SEQ ID NO: 1037335 - RNA, 22 nt, Human
gcccacacaccagcucaggagg

SEQ ID NO: 1037336 - RNA, 22 nt, Human
ccuggugcuuaccagagcuuuu

SEQ ID NO: 1037337 - RNA, 22 nt, Human
ucagcagugcagggugaggcag

SEQ ID NO: 1037338 - RNA, 22 nt, Human
agaggggcucaagcaguggucu

SEQ ID NO: 1037339 - RNA, 22 nt, Human
caaagguauucucauuuuggaa

SEQ ID NO: 1037340 - RNA, 22 nt, Human
gccacaggcacuuaagggcugg

SEQ ID NO: 1037341 - RNA, 22 nt, Human
aagaggaagucuccauggagag

SEQ ID NO: 1037342 - RNA, 22 nt, Human
ucauguaaguauagaaagcagu

SEQ ID NO: 1037343 - RNA, 22 nt, Human
ggacagcccauacacaugucug

SEQ ID NO: 1037344 - RNA, 22 nt, Human
aaauauguauggaguucaugaa

SEQ ID NO: 1037345 - RNA, 22 nt, Human
aagcaauaagccagauuuggau

SEQ ID NO: 1037346 - RNA, 22 nt, Human
acagggccucagcugauucugg

SEQ ID NO: 1037347 - RNA, 22 nt, Human
ugcugucuguuuacuggcuaua

SEQ ID NO: 1037348 - RNA, 22 nt, Human
gaggggcuggcuguggucccau

SEQ ID NO: 1037349 - RNA, 22 nt, Human
acagaaugcguagugcauguug

SEQ ID NO: 1037350 - RNA, 22 nt, Human
gauaccagacagggagggagaa

SEQ ID NO: 1037351 - RNA, 22 nt, Human
gggcagagaaauggacaguugg

SEQ ID NO: 1037352 - RNA, 22 nt, Human
gaggcugcccaacuggagugga

SEQ ID NO: 1037353 - RNA, 22 nt, Human
ucugggcagcagcagcuaguag

SEQ ID NO: 1037354 - RNA, 22 nt, Human
uccaagggcagccauagaacuu

SEQ ID NO: 1037355 - RNA, 23 nt, Human
acagcaagaggaccagaugugag

SEQ ID NO: 1037356 - RNA, 22 nt, Human
uccuuggcaugccgucuucucc

SEQ ID NO: 1037357 - RNA, 22 nt, Human
ucagcugagcuccagcucauag

SEQ ID NO: 1037358 - RNA, 22 nt, Human
caggaaaggugugucaugaugg

SEQ ID NO: 1037359 - RNA, 22 nt, Human
cagcagcucccauccgcugagc

SEQ ID NO: 1037360 - RNA, 22 nt, Human
ucuguccucuuugaagcugcuc

SEQ ID NO: 1037361 - RNA, 22 nt, Human
ugcagaccucccauggcugccu

SEQ ID NO: 1037362 - RNA, 22 nt, Human
caggcugaucagggcugggaug

SEQ ID NO: 1037363 - RNA, 22 nt, Human
uuacaugguuguuggaaaugcu

SEQ ID NO: 1037364 - RNA, 22 nt, Human
gagagcugggaaagccguggag

SEQ ID NO: 1037365 - RNA, 22 nt, Human
aaauguguuucuuugugaaugg

SEQ ID NO: 1037366 - RNA, 22 nt, Human
aaggcacugaaaaauugugugu

SEQ ID NO: 1037367 - RNA, 22 nt, Human
auugacaauguauuuguaucug

SEQ ID NO: 1037368 - RNA, 22 nt, Human
ugcuggcuacugauggcaggcc

SEQ ID NO: 1037369 - RNA, 22 nt, Human
gaagagcuaaaggcacaggcuu

SEQ ID NO: 1037370 - RNA, 22 nt, Human
uacaaagcuguauagccugguc

SEQ ID NO: 1037371 - RNA, 22 nt, Human
aaugcaguuucauuuguagaau

SEQ ID NO: 1037372 - RNA, 22 nt, Human
uggcucuggcgugaagcccaga

SEQ ID NO: 1037373 - RNA, 23 nt, Human
ugcaggggaggcuuaaagcaggu

SEQ ID NO: 1037374 - RNA, 22 nt, Human
gagcuggcuccgccaugcugcu

SEQ ID NO: 1037375 - RNA, 22 nt, Human
ccuuuccuuuuuagugugggag

SEQ ID NO: 1037376 - RNA, 22 nt, Human
aggcucaguuugguuuccauug

SEQ ID NO: 1037377 - RNA, 22 nt, Human
ucccuggcugggggcugccuug

SEQ ID NO: 1037378 - RNA, 22 nt, Human
cuggcucucugagauauugagu

SEQ ID NO: 1037379 - RNA, 22 nt, Human
uguccugcaacugaaggagaag

SEQ ID NO: 1037380 - RNA, 21 nt, Human
ggagcugcaggagccgaaggc

SEQ ID NO: 1037381 - RNA, 22 nt, Human
agcuggcauacuuugcuaggaa

SEQ ID NO: 1037382 - RNA, 22 nt, Human
ucugucugagggagugacauuu

SEQ ID NO: 1037383 - RNA, 22 nt, Human
agaggucagaacaggaaagugu

SEQ ID NO: 1037384 - RNA, 22 nt, Human
ugggcucugcugcguaccaguu

SEQ ID NO: 1037385 - RNA, 22 nt, Human
gacuguguccaugugcuggauu

SEQ ID NO: 1037386 - RNA, 22 nt, Human
augcaucauggaaaacucaguu

SEQ ID NO: 1037387 - RNA, 17 nt, Human
agauggcaggaggcaga

SEQ ID NO: 1037388 - RNA, 22 nt, Human
uucuuacagcccuauuacuaaa

SEQ ID NO: 1037389 - RNA, 22 nt, Human
uccagccuuucuacucacugag

SEQ ID NO: 1037390 - RNA, 22 nt, Human
agcacagguacggagaugcuac

SEQ ID NO: 1037391 - RNA, 22 nt, Human
ccacagaggacaacugccuggc

SEQ ID NO: 1037392 - RNA, 22 nt, Human
gccuggagggauagaaugcaag

SEQ ID NO: 1037393 - RNA, 22 nt, Human
cuggcucaccuccgcuccagca

SEQ ID NO: 1037394 - RNA, 22 nt, Human
ggagacagugacuuagagacug

SEQ ID NO: 1037395 - RNA, 20 nt, Human
ccucucugaagaggucaucu

SEQ ID NO: 1037396 - RNA, 22 nt, Human
guggagaccuccuaggaugugu

SEQ ID NO: 1037397 - RNA, 22 nt, Human
agucccuguacuuuccacugcc

SEQ ID NO: 1037398 - RNA, 22 nt, Human
cagcauggagacaaagugggca

SEQ ID NO: 1037399 - RNA, 22 nt, Human
uggccucaagucugagggccuu

SEQ ID NO: 1037400 - RNA, 22 nt, Human
ucaaaccaccuuguuacugggg

SEQ ID NO: 1037401 - RNA, 22 nt, Human
agaacagaagggaggaaggccu

SEQ ID NO: 1037402 - RNA, 22 nt, Human
uggcuggcaaggcuggagucag

SEQ ID NO: 1037403 - RNA, 22 nt, Human
cagaguguaucuguguaagcau

SEQ ID NO: 1037404 - RNA, 22 nt, Human
aggguagggcccggagacagac

SEQ ID NO: 1037405 - RNA, 22 nt, Human
cuuacauugugugcaugagggg

SEQ ID NO: 1037406 - RNA, 22 nt, Human
ggcugcugugaccucaggugau

SEQ ID NO: 1037407 - RNA, 22 nt, Human
ugaagcagauggucuggucauu

SEQ ID NO: 1037408 - RNA, 22 nt, Human
ggcacugauaauguccucucuc

SEQ ID NO: 1037409 - RNA, 22 nt, Human
agcaauauaaauguuggguaga

SEQ ID NO: 1037410 - RNA, 22 nt, Human
ggaaccaguggaaugauaugcu

SEQ ID NO: 1037411 - RNA, 22 nt, Human
aggucaaguuuagauagaguua

SEQ ID NO: 1037412 - RNA, 22 nt, Human
cauugcacuccagcuugggcaa

SEQ ID NO: 1037413 - RNA, 22 nt, Human
agcuucuugaccaagccuguaa

SEQ ID NO: 1037414 - RNA, 22 nt, Human
ucaaguguaguggugucagguc

SEQ ID NO: 1037415 - RNA, 22 nt, Human
guggugcaggccagcaggggcg

SEQ ID NO: 1037416 - RNA, 22 nt, Human
aaaguguugggauuacaggugu

SEQ ID NO: 1037417 - RNA, 22 nt, Human
ucugcuggccuuagcaggucua

SEQ ID NO: 1037418 - RNA, 22 nt, Human
gcccagcagcugguggagaagg

SEQ ID NO: 1037419 - RNA, 22 nt, Human
cuucuuuacuuucuagaaauaa

SEQ ID NO: 1037420 - RNA, 22 nt, Human
aggcacugagaggcuguguugc

SEQ ID NO: 1037421 - RNA, 22 nt, Human
augaccccuaaaauuuacuguc

SEQ ID NO: 1037422 - RNA, 17 nt, Human
gcucccugaggacagcu

SEQ ID NO: 1037423 - RNA, 22 nt, Human
cugaggucuagacaccccaggg

SEQ ID NO: 1037424 - RNA, 17 nt, Human
ucuguccagggagugug

SEQ ID NO: 1037425 - RNA, 22 nt, Human
aggcacugugcuucuuauaugu

SEQ ID NO: 1037426 - RNA, 22 nt, Human
uccucagggcggccuccgucuu

SEQ ID NO: 1037427 - RNA, 23 nt, Human
caugggagugagaaugccagcuc

SEQ ID NO: 1037428 - RNA, 22 nt, Human
ggcuggaaguccaagaucaagg

SEQ ID NO: 1037429 - RNA, 21 nt, Human
gccugccugcgugacccucuu

SEQ ID NO: 1037430 - RNA, 22 nt, Human
uacauuaucuuguuaucuuuca

SEQ ID NO: 1037431 - RNA, 21 nt, Human
gcugucucuggcuccugggaa

SEQ ID NO: 1037432 - RNA, 20 nt, Human
uguuccaugacuauuuggau

SEQ ID NO: 1037433 - RNA, 22 nt, Human
cugggccauggaagucucugcc

SEQ ID NO: 1037434 - RNA, 22 nt, Human
accugccuaucagcugccugcu

SEQ ID NO: 1037435 - RNA, 22 nt, Human
ggacacagcugcagccacaccc

SEQ ID NO: 1037436 - RNA, 21 nt, Human
agcucagccgggcacaguggc

SEQ ID NO: 1037437 - RNA, 22 nt, Human
gcucagagauguucaguagcuu

SEQ ID NO: 1037438 - RNA, 22 nt, Human
ugucucagauacgccaucaagg

SEQ ID NO: 1037439 - RNA, 22 nt, Human
cagcugccccgcuggcugacca

SEQ ID NO: 1037440 - RNA, 22 nt, Human
uggggcuguccuuagucugaga

SEQ ID NO: 1037441 - RNA, 22 nt, Human
gccuggagugcaguggcgugau

SEQ ID NO: 1037442 - RNA, 22 nt, Human
ggucccagguugacagggagac

SEQ ID NO: 1037443 - RNA, 22 nt, Human
gccuggcugagguggggaggca

SEQ ID NO: 1037444 - RNA, 22 nt, Human
ugggcucuccuggaggacaaca

SEQ ID NO: 1037445 - RNA, 20 nt, Human
ccugccuguguuugugauga

SEQ ID NO: 1037446 - RNA, 22 nt, Human
aggccuggguguucaccagaag

SEQ ID NO: 1037447 - RNA, 22 nt, Human
aaagaaauagauggcauuuaaa

SEQ ID NO: 1037448 - RNA, 20 nt, Human
gcugggggugugcugaguga

SEQ ID NO: 1037449 - RNA, 22 nt, Human
ccagggcaucacauccaguguu

SEQ ID NO: 1037450 - RNA, 22 nt, Human
cauggacucugguuuggggagc

SEQ ID NO: 1037451 - RNA, 22 nt, Human
cuguccuggagggcauaggacg

SEQ ID NO: 1037452 - RNA, 22 nt, Human
aaacuuuaagacaguccucaag

SEQ ID NO: 1037453 - RNA, 22 nt, Human
gaaggagagggucaaggauaau

SEQ ID NO: 1037454 - RNA, 22 nt, Human
gccagccugugcuuggccaggc

SEQ ID NO: 1037455 - RNA, 19 nt, Human
cucuggccucuggaugcug

SEQ ID NO: 1037456 - RNA, 22 nt, Human
gaugguuugguaaaaguauguu

SEQ ID NO: 1037457 - RNA, 22 nt, Human
ggcacugagaggcucuuccuaa

SEQ ID NO: 1037458 - RNA, 22 nt, Human
aucuggcucacuuagucuagga

SEQ ID NO: 1037459 - RNA, 19 nt, Human
cagcugcaccgugaccauc

SEQ ID NO: 1037460 - RNA, 22 nt, Human
cugggagcugucaggagcgugu

SEQ ID NO: 1037461 - RNA, 22 nt, Human
ggcugcucuucuuggcgaccuc

SEQ ID NO: 1037462 - RNA, 22 nt, Human
caggcacuucugcugcuugucu

SEQ ID NO: 1037463 - RNA, 22 nt, Human
agugcacagcgugauguauugg

SEQ ID NO: 1037464 - RNA, 22 nt, Human
acuuccuggcugggugaccugg

SEQ ID NO: 1037465 - RNA, 22 nt, Human
agagccugcaucaggcuugggg

SEQ ID NO: 1037466 - RNA, 22 nt, Human
gccuaauaugcaaaauugauac

SEQ ID NO: 1037467 - RNA, 22 nt, Human
gcacaugagcugcugggauggg

SEQ ID NO: 1037468 - RNA, 21 nt, Human
ggagucagggucuggcugggg

SEQ ID NO: 1037469 - RNA, 22 nt, Human
cacagcuuguuuagugacucac

SEQ ID NO: 1037470 - RNA, 22 nt, Human
ggcugaaguguaguggcucacu

SEQ ID NO: 1037471 - RNA, 22 nt, Human
ggcuccucucuggccgcucccg

SEQ ID NO: 1037472 - RNA, 22 nt, Human
cucacaggcaucucaucaggcu

SEQ ID NO: 1037473 - RNA, 22 nt, Human
aggucccaggcauagcuggucu

SEQ ID NO: 1037474 - RNA, 22 nt, Human
uggcucaguuaggucagaaaca

SEQ ID NO: 1037475 - RNA, 22 nt, Human
ggcuuucuagaucuagcucugu

SEQ ID NO: 1037476 - RNA, 20 nt, Human
ccagagcugauggcugcccg

SEQ ID NO: 1037477 - RNA, 22 nt, Human
ucuuuccuagaggcugaugagu

SEQ ID NO: 1037478 - RNA, 22 nt, Human
gggcuacagacaugcucuaagc

SEQ ID NO: 1037479 - RNA, 22 nt, Human
aaggcagagggcuggaucagag

SEQ ID NO: 1037480 - RNA, 22 nt, Human
uggcagcugucuguggggucuc

SEQ ID NO: 1037481 - RNA, 22 nt, Human
cacaggggcaaacuguagggga

SEQ ID NO: 1037482 - RNA, 22 nt, Human
caggucccgccccgggcugacc

SEQ ID NO: 1037483 - RNA, 22 nt, Human
agucucugagguucagaugccu

SEQ ID NO: 1037484 - RNA, 22 nt, Human
cugcccugggauggucugugcg

SEQ ID NO: 1037485 - RNA, 22 nt, Human
auggggcucugcggcugcuccc

SEQ ID NO: 1037486 - RNA, 22 nt, Human
aaaucaguuggaacacaagcag

SEQ ID NO: 1037487 - RNA, 22 nt, Human
gcuggugagcaaaggagaagga

SEQ ID NO: 1037488 - RNA, 19 nt, Human
ucgagucaagacacuaggc

SEQ ID NO: 1037489 - RNA, 22 nt, Human
agucccagacuccaguuuucug

SEQ ID NO: 1037490 - RNA, 22 nt, Human
agaacagcagcacgucaagcug

SEQ ID NO: 1037491 - RNA, 21 nt, Human
agcugcuccagggagcucagg

SEQ ID NO: 1037492 - RNA, 22 nt, Human
ucaaaugcuucuacuccuaaga

SEQ ID NO: 1037493 - RNA, 22 nt, Human
cugagagucagcuucuccuccu

SEQ ID NO: 1037494 - RNA, 22 nt, Human
aaggcacugacugugcagggga

SEQ ID NO: 1037495 - RNA, 22 nt, Human
cacagggccacuuucccaguaa

SEQ ID NO: 1037496 - RNA, 22 nt, Human
ccagggagccuggugugucagc

SEQ ID NO: 1037497 - RNA, 22 nt, Human
cagagccagcccacuguucccg

SEQ ID NO: 1037498 - RNA, 22 nt, Human
gcucugggauuaccagccuuag

SEQ ID NO: 1037499 - RNA, 19 nt, Human
aggugaugugacucuagaa

SEQ ID NO: 1037500 - RNA, 22 nt, Human
ugagccagccuugcagcugugc

SEQ ID NO: 1037501 - RNA, 22 nt, Human
ccugugcccucagccuggcucu

SEQ ID NO: 1037502 - RNA, 22 nt, Human
agcaccuguggcucaugcucgu

SEQ ID NO: 1037503 - RNA, 22 nt, Human
aggagccccucuucaguccugg

SEQ ID NO: 1037504 - RNA, 22 nt, Human
agucccagagaggucggggcca

SEQ ID NO: 1037505 - RNA, 22 nt, Human
uccuccagugucuggggccuug

SEQ ID NO: 1037506 - RNA, 22 nt, Human
aagucacacuagacaacugagg

SEQ ID NO: 1037507 - RNA, 22 nt, Human
uggcucaguggcagccgcagcu

SEQ ID NO: 1037508 - RNA, 22 nt, Human
gucccucugugucccugcaguc

SEQ ID NO: 1037509 - RNA, 22 nt, Human
ugcugccagccaggccauggag

SEQ ID NO: 1037510 - RNA, 22 nt, Human
cugggaguugacgaggcuugua

SEQ ID NO: 1037511 - RNA, 22 nt, Human
agcagcuguggaaaaguaacua

SEQ ID NO: 1037512 - RNA, 22 nt, Human
aguggcaguagaugagcugguu

SEQ ID NO: 1037513 - RNA, 22 nt, Human
ugggaggacuugugggcuucau

SEQ ID NO: 1037514 - RNA, 22 nt, Human
agcaugcacaugacuggcuuaa

SEQ ID NO: 1037515 - RNA, 22 nt, Human
ucacauuuuccuugguaucugu

SEQ ID NO: 1037516 - RNA, 22 nt, Human
gcuggcagaagagcugguucaa

SEQ ID NO: 1037517 - RNA, 21 nt, Human
auuauuauuucuguguccagc

SEQ ID NO: 1037518 - RNA, 22 nt, Human
cccuggaguagcacugggucgc

SEQ ID NO: 1037519 - RNA, 22 nt, Human
gugcuucucuucacacccaacu

SEQ ID NO: 1037520 - RNA, 22 nt, Human
gcuggcuguguuucaucucuga

SEQ ID NO: 1037521 - RNA, 22 nt, Human
aggcaagggggcgccaccuucc

SEQ ID NO: 1037522 - RNA, 22 nt, Human
acuuccugggcaugcagagucc

SEQ ID NO: 1037523 - RNA, 22 nt, Human
ugaggccaaugacccugggcag

SEQ ID NO: 1037524 - RNA, 22 nt, Human
cucagggggaaucaggucacag

SEQ ID NO: 1037525 - RNA, 21 nt, Human
uggcucuguucaauauaugga

SEQ ID NO: 1037526 - RNA, 22 nt, Human
ucucagaguaauucuuuaaggu

SEQ ID NO: 1037527 - RNA, 22 nt, Human
uggcucagcugucacagccugg

SEQ ID NO: 1037528 - RNA, 22 nt, Human
agaaugcuccagagcugaaaga

SEQ ID NO: 1037529 - RNA, 22 nt, Human
ccagcccugaacccugcugcau

SEQ ID NO: 1037530 - RNA, 22 nt, Human
cuuuauguucaguacaaugcuu

SEQ ID NO: 1037531 - RNA, 22 nt, Human
gggccacauugaagggugggua

SEQ ID NO: 1037532 - RNA, 22 nt, Human
ugaaguccuagaacuccuggua

SEQ ID NO: 1037533 - RNA, 20 nt, Human
aagagaagaagucuuugaaa

SEQ ID NO: 1037534 - RNA, 22 nt, Human
uugucugaaagaucauuacauu

SEQ ID NO: 1037535 - RNA, 22 nt, Human
auguguauacuugugcuuacuc

SEQ ID NO: 1037536 - RNA, 22 nt, Human
caaaguauauuggauugaaugg

SEQ ID NO: 1037537 - RNA, 22 nt, Human
ccuuagagaguacugggcugcc

SEQ ID NO: 1037538 - RNA, 22 nt, Human
ggcacugacugugcagcgcacc

SEQ ID NO: 1037539 - RNA, 22 nt, Human
augugucaauuuucaaaugcuu

SEQ ID NO: 1037540 - RNA, 22 nt, Human
uagccggguguugugucaugca

SEQ ID NO: 1037541 - RNA, 22 nt, Human
agaucucaccucuguguauuau

SEQ ID NO: 1037542 - RNA, 22 nt, Human
agccuggauccauguggcuacc

SEQ ID NO: 1037543 - RNA, 22 nt, Human
uaaauuguuuucuagaaguugu

SEQ ID NO: 1037544 - RNA, 22 nt, Human
ggaugcaggacggcauggaugu

SEQ ID NO: 1037545 - RNA, 22 nt, Human
ugccuuggugcuucuucaugug

SEQ ID NO: 1037546 - RNA, 22 nt, Human
agagcuggaaucagaccucagg

SEQ ID NO: 1037547 - RNA, 22 nt, Human
ccacagggccuuuccugcuggc

SEQ ID NO: 1037548 - RNA, 22 nt, Human
gccuggagcuacuggacacuga

SEQ ID NO: 1037549 - RNA, 22 nt, Human
gagggcagugaauuuugaagcu

SEQ ID NO: 1037550 - RNA, 22 nt, Human
aggugagugugacugcaagaga

SEQ ID NO: 1037551 - RNA, 22 nt, Human
agcucucaagauaagaaagaac

SEQ ID NO: 1037552 - RNA, 22 nt, Human
cugcuggggucagagcacuggg

SEQ ID NO: 1037553 - RNA, 22 nt, Human
aauuucaagucuugaagaagua

SEQ ID NO: 1037554 - RNA, 22 nt, Human
cagagguaccagcagccucugg

SEQ ID NO: 1037555 - RNA, 22 nt, Human
agcagccagaaagggcagucga

SEQ ID NO: 1037556 - RNA, 22 nt, Human
ucaggcagaggauggggagcgu

SEQ ID NO: 1037557 - RNA, 22 nt, Human
agggagccagaguugggagcuc

SEQ ID NO: 1037558 - RNA, 22 nt, Human
cugguccuugacgcgugggagg

SEQ ID NO: 1037559 - RNA, 22 nt, Human
ggagucccagcaaagccuuccc

SEQ ID NO: 1037560 - RNA, 22 nt, Human
uaaagcaggccacauaugugau

SEQ ID NO: 1037561 - RNA, 22 nt, Human
uuuggaaaguugucacuuuaga

SEQ ID NO: 1037562 - RNA, 22 nt, Human
aggggacacggcuucuccaggg

SEQ ID NO: 1037563 - RNA, 22 nt, Human
aaacaaguguaaacuagucugu

SEQ ID NO: 1037564 - RNA, 22 nt, Human
agcugccacaugcccaagggca

SEQ ID NO: 1037565 - RNA, 22 nt, Human
aauguacaauaagacaaagagg

SEQ ID NO: 1037566 - RNA, 22 nt, Human
uuuugaaagaguccugcuacag

SEQ ID NO: 1037567 - RNA, 22 nt, Human
acacagaaccucauagccucuc

SEQ ID NO: 1037568 - RNA, 22 nt, Human
ccucagagaaagguauggcuga

SEQ ID NO: 1037569 - RNA, 22 nt, Human
gggcugcugccaccagguggau

SEQ ID NO: 1037570 - RNA, 22 nt, Human
agcucccagcagagcuggccac

SEQ ID NO: 1037571 - RNA, 22 nt, Human
gcucccaccaggcagaccuacc

SEQ ID NO: 1037572 - RNA, 22 nt, Human
ccuggcaggcuggggacagugc

SEQ ID NO: 1037573 - RNA, 22 nt, Human
aggccuguuggcgugggcucua

SEQ ID NO: 1037574 - RNA, 22 nt, Human
aggagccaagauggggcaagua

SEQ ID NO: 1037575 - RNA, 22 nt, Human
agggaaggaaaagcugucgcuu

SEQ ID NO: 1037576 - RNA, 22 nt, Human
gcacagaagagcuuuggaauga

SEQ ID NO: 1037577 - RNA, 22 nt, Human
gacagguggggaaacuaaggua

SEQ ID NO: 1037578 - RNA, 21 nt, Human
cagaggcagguccugggacgg

SEQ ID NO: 1037579 - RNA, 21 nt, Human
ccagaggccucucuuggccac

SEQ ID NO: 1037580 - RNA, 22 nt, Human
ugcugcauuuaucuucucaaac

SEQ ID NO: 1037581 - RNA, 22 nt, Human
ccuggagcucacugggagccgg

SEQ ID NO: 1037582 - RNA, 22 nt, Human
ggguggggcccaggaaaucuau

SEQ ID NO: 1037583 - RNA, 22 nt, Human
ggcucugcccagaugaagagga

SEQ ID NO: 1037584 - RNA, 22 nt, Human
ggggcagaguagcuggggugug

SEQ ID NO: 1037585 - RNA, 22 nt, Human
auggggugagacuaggauuaaa

SEQ ID NO: 1037586 - RNA, 22 nt, Human
gagcagcugcagugcagacccu

SEQ ID NO: 1037587 - RNA, 22 nt, Human
cucugagcugaaacaugagcau

SEQ ID NO: 1037588 - RNA, 22 nt, Human
cugccuguuuucugauagauuu

SEQ ID NO: 1037589 - RNA, 22 nt, Human
uggagcugagagccaggcuggc

SEQ ID NO: 1037590 - RNA, 20 nt, Human
aggcugggguguuuugccca

SEQ ID NO: 1037591 - RNA, 22 nt, Human
ccugggcagggcuggacucuca

SEQ ID NO: 1037592 - RNA, 22 nt, Human
augaagauaagaccaggcugga

SEQ ID NO: 1037593 - RNA, 22 nt, Human
gcagcugauggaaguccuauug

SEQ ID NO: 1037594 - RNA, 22 nt, Human
ucccugcucagcucaccuggca

SEQ ID NO: 1037595 - RNA, 22 nt, Human
gcucugcugucuucuugcaggc

SEQ ID NO: 1037596 - RNA, 22 nt, Human
acacugaauguuuaagaacuug

SEQ ID NO: 1037597 - RNA, 22 nt, Human
gcugcucuggcucugcaguguc

SEQ ID NO: 1037598 - RNA, 20 nt, Human
cagagccaagagcagcaucu

SEQ ID NO: 1037599 - RNA, 22 nt, Human
agcugagcugcagaugacugua

SEQ ID NO: 1037600 - RNA, 22 nt, Human
agcuggcuccagaaggagucgu

SEQ ID NO: 1037601 - RNA, 22 nt, Human
uggccucuggcugaggacuaac

SEQ ID NO: 1037602 - RNA, 22 nt, Human
uuuguaaagucuguucugaguu

SEQ ID NO: 1037603 - RNA, 22 nt, Human
cacagcagaaaguguaggagga

SEQ ID NO: 1037604 - RNA, 20 nt, Human
cacaagagaauacacacugg

SEQ ID NO: 1037605 - RNA, 20 nt, Human
acauguacuaaugaauacag

SEQ ID NO: 1037606 - RNA, 22 nt, Human
aaaguucaugguguuauagaaa

SEQ ID NO: 1037607 - RNA, 22 nt, Human
ucagagcuaaggggagagcaaa

SEQ ID NO: 1037608 - RNA, 22 nt, Human
agggagcugcucugcuuccgug

SEQ ID NO: 1037609 - RNA, 22 nt, Human
cucacugcaaguuccaccuacc

SEQ ID NO: 1037610 - RNA, 20 nt, Human
cccaggagugagcagcuuua

SEQ ID NO: 1037611 - RNA, 22 nt, Human
uuucaaauggagucgugaaaug

SEQ ID NO: 1037612 - RNA, 22 nt, Human
acagggcagagaggcaggcuug

SEQ ID NO: 1037613 - RNA, 22 nt, Human
uuuccucugggcccugccaccc

SEQ ID NO: 1037614 - RNA, 22 nt, Human
gcucucuggaggccauggacag

SEQ ID NO: 1037615 - RNA, 22 nt, Human
aacagaaaagguagguggcuuu

SEQ ID NO: 1037616 - RNA, 22 nt, Human
uauugacaauaggcaacugagg

SEQ ID NO: 1037617 - RNA, 22 nt, Human
augaagcugaccuugucuugcu

SEQ ID NO: 1037618 - RNA, 20 nt, Human
cagcugccuggcucugggau

SEQ ID NO: 1037619 - RNA, 22 nt, Human
uagcagagcagggaucagagcc

SEQ ID NO: 1037620 - RNA, 22 nt, Human
aguuuuucugcuggucucacua

SEQ ID NO: 1037621 - RNA, 20 nt, Human
uaggcagagcugugcagccu

SEQ ID NO: 1037622 - RNA, 22 nt, Human
uggcagcacuugaacuugagcc

SEQ ID NO: 1037623 - RNA, 22 nt, Human
aggcuccuugcucacaggcuca

SEQ ID NO: 1037624 - RNA, 22 nt, Human
auccuugagccuuaucuuuugu

SEQ ID NO: 1037625 - RNA, 22 nt, Human
cugugcccuggccaggccucuc

SEQ ID NO: 1037626 - RNA, 22 nt, Human
ugccucagagugggcuugcuau

SEQ ID NO: 1037627 - RNA, 23 nt, Human
ucuggcuccauccuuggggaucc

SEQ ID NO: 1037628 - RNA, 22 nt, Human
gggcuccagcccgggaccaggu

SEQ ID NO: 1037629 - RNA, 20 nt, Human
agugcaagaaagcacagcug

SEQ ID NO: 1037630 - RNA, 22 nt, Human
cccugagaugccucacccuagu

SEQ ID NO: 1037631 - RNA, 18 nt, Human
ugacucacccugucagug

SEQ ID NO: 1037632 - RNA, 22 nt, Human
ccacugggcguuucuguccaau

SEQ ID NO: 1037633 - RNA, 22 nt, Human
cugugucccaguaccuugggua

SEQ ID NO: 1037634 - RNA, 22 nt, Human
ccuuuuucccuggagggacagc

SEQ ID NO: 1037635 - RNA, 22 nt, Human
aggcucugaucagguggcugug

SEQ ID NO: 1037636 - RNA, 22 nt, Human
gcugucuugcucacucuugcag

SEQ ID NO: 1037637 - RNA, 22 nt, Human
acuuuggaucugauguaaucag

SEQ ID NO: 1037638 - RNA, 22 nt, Human
ccagcccuucccaacuggccag

SEQ ID NO: 1037639 - RNA, 22 nt, Human
gcaggccuuggcaaugagccug

SEQ ID NO: 1037640 - RNA, 22 nt, Human
gcaaaugcucuccuuggucagg

SEQ ID NO: 1037641 - RNA, 22 nt, Human
uuuucauuuuuguagaugcaag

SEQ ID NO: 1037642 - RNA, 22 nt, Human
gcugccuccugaaagcgcucug

SEQ ID NO: 1037643 - RNA, 22 nt, Human
gggcugugcugaguaggaggug

SEQ ID NO: 1037644 - RNA, 22 nt, Human
cugcagagaauuguggggcuuc

SEQ ID NO: 1037645 - RNA, 22 nt, Human
gagggcugccacguugggcgag

SEQ ID NO: 1037646 - RNA, 22 nt, Human
ggacucagcagccaggaguggc

SEQ ID NO: 1037647 - RNA, 22 nt, Human
ugccucagucuaaagucucuca

SEQ ID NO: 1037648 - RNA, 22 nt, Human
caccaggcugaaccagagggga

SEQ ID NO: 1037649 - RNA, 22 nt, Human
ucaugacaacuauauuauucca

SEQ ID NO: 1037650 - RNA, 22 nt, Human
gcugggagccccgagccagcgc

SEQ ID NO: 1037651 - RNA, 22 nt, Human
caggauggucagaugcauuguc

SEQ ID NO: 1037652 - RNA, 22 nt, Human
guauuugauacaugaaauggug

SEQ ID NO: 1037653 - RNA, 22 nt, Human
cccaggagagaggccaguuggc

SEQ ID NO: 1037654 - RNA, 22 nt, Human
ccagcucuuggugcacuuacau

SEQ ID NO: 1037655 - RNA, 22 nt, Human
cagcagugucuccagcaucaca

SEQ ID NO: 1037656 - RNA, 22 nt, Human
uccucaggugacuagguaucuu

SEQ ID NO: 1037657 - RNA, 22 nt, Human
cugugcuggagaugggccagag

SEQ ID NO: 1037658 - RNA, 22 nt, Human
uaaggcacccuucugaguagag

SEQ ID NO: 1037659 - RNA, 22 nt, Human
ccugggugacccgugagcgucc

SEQ ID NO: 1037660 - RNA, 22 nt, Human
cagguggcaugacugccuacaa

SEQ ID NO: 1037661 - RNA, 22 nt, Human
cccaucaggaacccaggagccc

SEQ ID NO: 1037662 - RNA, 22 nt, Human
uuuauuauguacaggcacuaua

SEQ ID NO: 1037663 - RNA, 23 nt, Human
agcccagcagagaaccuaggucc

SEQ ID NO: 1037664 - RNA, 22 nt, Human
aaggccugggaggccucucuuc

SEQ ID NO: 1037665 - RNA, 20 nt, Human
gcugaccccugcugucaugc

SEQ ID NO: 1037666 - RNA, 22 nt, Human
ggccucggcccacugcugcggu

SEQ ID NO: 1037667 - RNA, 22 nt, Human
ccagaggucuccugcacgggau

SEQ ID NO: 1037668 - RNA, 22 nt, Human
ggcagagcuugcagugagccga

SEQ ID NO: 1037669 - RNA, 22 nt, Human
cucagaguccauaguuuacagu

SEQ ID NO: 1037670 - RNA, 22 nt, Human
gggcagcucuggcugugggaag

SEQ ID NO: 1037671 - RNA, 22 nt, Human
agggccucugacgcccccagcc

SEQ ID NO: 1037672 - RNA, 16 nt, Human
gagggcagaggcggaa

SEQ ID NO: 1037673 - RNA, 22 nt, Human
gcuaccugagcaagagcuucaa

SEQ ID NO: 1037674 - RNA, 22 nt, Human
agccucucuguuagucacuggg

SEQ ID NO: 1037675 - RNA, 22 nt, Human
gaagcagcaaguauaggacagg

SEQ ID NO: 1037676 - RNA, 22 nt, Human
gaggcaggcacuguuaucagca

SEQ ID NO: 1037677 - RNA, 22 nt, Human
ucugggagacguguguugucag

SEQ ID NO: 1037678 - RNA, 22 nt, Human
gagucaguaauggauaugucau

SEQ ID NO: 1037679 - RNA, 22 nt, Human
cagaagcauugacuccuugcuc

SEQ ID NO: 1037680 - RNA, 22 nt, Human
gcuggcucuucaguggagauag

SEQ ID NO: 1037681 - RNA, 20 nt, Human
ucacauccucucccaacaug

SEQ ID NO: 1037682 - RNA, 22 nt, Human
agcagacaacccagaugaccca

SEQ ID NO: 1037683 - RNA, 22 nt, Human
gccuggagcccaguguggggcu

SEQ ID NO: 1037684 - RNA, 22 nt, Human
agagaaaagaguucaggcuuug

SEQ ID NO: 1037685 - RNA, 22 nt, Human
ugcuagaauaccuaccuggagg

SEQ ID NO: 1037686 - RNA, 20 nt, Human
ggcagagcuaugucuguugc

SEQ ID NO: 1037687 - RNA, 22 nt, Human
aguguuccuugcuuucccagag

SEQ ID NO: 1037688 - RNA, 22 nt, Human
gcugcucuccauggccgugagu

SEQ ID NO: 1037689 - RNA, 18 nt, Human
gaagggagcuggaaugca

SEQ ID NO: 1037690 - RNA, 19 nt, Human
gcauaaaaugucaaugugu

SEQ ID NO: 1037691 - RNA, 22 nt, Human
uccagggagauacuggcugcca

SEQ ID NO: 1037692 - RNA, 22 nt, Human
uuacauuagacccacuuucaug

SEQ ID NO: 1037693 - RNA, 22 nt, Human
ggcuucuguccucuggaucugu

SEQ ID NO: 1037694 - RNA, 22 nt, Human
caguauuuauggcuugaguauu

SEQ ID NO: 1037695 - RNA, 22 nt, Human
aaggcucucugauggcagcagu

SEQ ID NO: 1037696 - RNA, 22 nt, Human
aggaaaaagaguugcugccuuc

SEQ ID NO: 1037697 - RNA, 18 nt, Human
ccuggcagccaugcgcgc

SEQ ID NO: 1037698 - RNA, 22 nt, Human
cacugcauggaugauggcugua

SEQ ID NO: 1037699 - RNA, 22 nt, Human
ugacccugcuucuuggugcagg

SEQ ID NO: 1037700 - RNA, 21 nt, Human
acagggcaugcagcuggcugu

SEQ ID NO: 1037701 - RNA, 22 nt, Human
ccagggugagaaaaggcuggau

SEQ ID NO: 1037702 - RNA, 22 nt, Human
ucaggggcugugcauuucccag

SEQ ID NO: 1037703 - RNA, 22 nt, Human
cugcccugucuuuuucugauga

SEQ ID NO: 1037704 - RNA, 22 nt, Human
uccuucagccaugggcucucca

SEQ ID NO: 1037705 - RNA, 22 nt, Human
aguguauugauuggaacagccu

SEQ ID NO: 1037706 - RNA, 22 nt, Human
ggucccaggagaauaggugcaa

SEQ ID NO: 1037707 - RNA, 22 nt, Human
gaggaugugucuggucugggca

SEQ ID NO: 1037708 - RNA, 22 nt, Human
ccaggagcagggcuggcugcac

SEQ ID NO: 1037709 - RNA, 20 nt, Human
agugccagggcaggugagag

SEQ ID NO: 1037710 - RNA, 22 nt, Human
uggcuuccacugugugcccccu

SEQ ID NO: 1037711 - RNA, 22 nt, Human
uggcuuccugcacagugucugc

SEQ ID NO: 1037712 - RNA, 22 nt, Human
aagcacaaugaacaucuuagau

SEQ ID NO: 1037713 - RNA, 22 nt, Human
acugggccuggauuggcguguc

SEQ ID NO: 1037714 - RNA, 22 nt, Human
uauuuagaacagacaauagaaa

SEQ ID NO: 1037715 - RNA, 22 nt, Human
uggguaaacugggucuggagag

SEQ ID NO: 1037716 - RNA, 22 nt, Human
aauguguguucggggcccagag

SEQ ID NO: 1037717 - RNA, 22 nt, Human
ccugggaggcugugggucugcu

SEQ ID NO: 1037718 - RNA, 22 nt, Human
uguggccagcagguggcugugu

SEQ ID NO: 1037719 - RNA, 22 nt, Human
gagcagaugugugccaggaugc

SEQ ID NO: 1037720 - RNA, 17 nt, Human
gagugcugguggagcuc

SEQ ID NO: 1037721 - RNA, 22 nt, Human
ugacacauuaaaugcucacaaa

SEQ ID NO: 1037722 - RNA, 22 nt, Human
aggguggagggagucccugagc

SEQ ID NO: 1037723 - RNA, 22 nt, Human
ccucucucuccugcacacacac

SEQ ID NO: 1037724 - RNA, 22 nt, Human
gcucucugccauaugaggauac

SEQ ID NO: 1037725 - RNA, 22 nt, Human
uccagggagauggcagaggcug

SEQ ID NO: 1037726 - RNA, 22 nt, Human
guuauguauugggaaauccaag

SEQ ID NO: 1037727 - RNA, 23 nt, Human
gccucagagaaacagcugcacac

SEQ ID NO: 1037728 - RNA, 22 nt, Human
ugugccuggaucucugugacaa

SEQ ID NO: 1037729 - RNA, 22 nt, Human
cugcagaguggagccucggcug

SEQ ID NO: 1037730 - RNA, 22 nt, Human
guucauuuuacuguaaauagca

SEQ ID NO: 1037731 - RNA, 22 nt, Human
guccucaggaaagcagauaaca

SEQ ID NO: 1037732 - RNA, 22 nt, Human
agcccaugcaacaggccuagcg

SEQ ID NO: 1037733 - RNA, 22 nt, Human
cauuuacagugagaguuuuuac

SEQ ID NO: 1037734 - RNA, 22 nt, Human
uaacagaaacagauaaguguaa

SEQ ID NO: 1037735 - RNA, 22 nt, Human
ugaagcugugggcaguggagcc

SEQ ID NO: 1037736 - RNA, 23 nt, Human
ccucagcauggcaggagcccagc

SEQ ID NO: 1037737 - RNA, 22 nt, Human
guaucuuuugguggaaaaauaa

SEQ ID NO: 1037738 - RNA, 22 nt, Human
acagggcaugugcaagagacau

SEQ ID NO: 1037739 - RNA, 22 nt, Human
uccuuugacuucuugcagucca

SEQ ID NO: 1037740 - RNA, 22 nt, Human
agagccagcaagugaauaguga

SEQ ID NO: 1037741 - RNA, 22 nt, Human
ccuggcugggguagaagugagg

SEQ ID NO: 1037742 - RNA, 22 nt, Human
ccagcucccugaagccuggucu

SEQ ID NO: 1037743 - RNA, 22 nt, Human
cugcccugcuugaugacagcga

SEQ ID NO: 1037744 - RNA, 22 nt, Human
ugcccaaguguuuggcugaguc

SEQ ID NO: 1037745 - RNA, 22 nt, Human
uuucuguagggauuucacaguu

SEQ ID NO: 1037746 - RNA, 22 nt, Human
uaaacagaaagcagauguacuu

SEQ ID NO: 1037747 - RNA, 22 nt, Human
uucaggagcuggcugcgaagga

SEQ ID NO: 1037748 - RNA, 22 nt, Human
cagcccuggugccaagguuccc

SEQ ID NO: 1037749 - RNA, 22 nt, Human
gggacuggcacagggcugggag

SEQ ID NO: 1037750 - RNA, 20 nt, Human
ucugcccaccccggcuccca

SEQ ID NO: 1037751 - RNA, 17 nt, Human
uccuucagggccucaca

SEQ ID NO: 1037752 - RNA, 22 nt, Human
aaagaugucauacacauuaaga

SEQ ID NO: 1037753 - RNA, 22 nt, Human
aguaauaauuuauauuagggag

SEQ ID NO: 1037754 - RNA, 18 nt, Human
gggcucugauccuucacc

SEQ ID NO: 1037755 - RNA, 22 nt, Human
uacauguaagacaugagacucu

SEQ ID NO: 1037756 - RNA, 18 nt, Human
gggcuguguucaugccca

SEQ ID NO: 1037757 - RNA, 22 nt, Human
aaguuugagaagcuuauagaua

SEQ ID NO: 1037758 - RNA, 22 nt, Human
ucuggcccagccccugagguca

SEQ ID NO: 1037759 - RNA, 22 nt, Human
ugucagggcaugcgguccagcc

SEQ ID NO: 1037760 - RNA, 22 nt, Human
aggcagugcagaguccucuucu

SEQ ID NO: 1037761 - RNA, 22 nt, Human
agaauucuuggugguuagaaua

SEQ ID NO: 1037762 - RNA, 22 nt, Human
ugccacccagccaggaguggga

SEQ ID NO: 1037763 - RNA, 22 nt, Human
agagcagagggcucugggacaa

SEQ ID NO: 1037764 - RNA, 22 nt, Human
uggggaggacgggcgccuuccu

SEQ ID NO: 1037765 - RNA, 22 nt, Human
guaaaguucuacuagaaucaac

SEQ ID NO: 1037766 - RNA, 22 nt, Human
aaaugcacucugcuucugugac

SEQ ID NO: 1037767 - RNA, 22 nt, Human
uuucaauguaugucuuucugag

SEQ ID NO: 1037768 - RNA, 22 nt, Human
cagcuggcguggagugauugca

SEQ ID NO: 1037769 - RNA, 22 nt, Human
cagcugccacaggacuuucuga

SEQ ID NO: 1037770 - RNA, 22 nt, Human
caggauccuggcugcauggacg

SEQ ID NO: 1037771 - RNA, 22 nt, Human
gccuucugugcuccuggccuuu

SEQ ID NO: 1037772 - RNA, 22 nt, Human
cuggcagcaguuaugaaacaau

SEQ ID NO: 1037773 - RNA, 22 nt, Human
ccugggaggcagagguugcagu

SEQ ID NO: 1037774 - RNA, 22 nt, Human
gggcucuguccauuccuucaua

SEQ ID NO: 1037775 - RNA, 22 nt, Human
cugugcauugucuugucuguag

SEQ ID NO: 1037776 - RNA, 22 nt, Human
uguauagaguuggaagaugacu

SEQ ID NO: 1037777 - RNA, 22 nt, Human
uaaaugcagcaguuucuguucu

SEQ ID NO: 1037778 - RNA, 22 nt, Human
guguaucaaagcacagacuuca

SEQ ID NO: 1037779 - RNA, 20 nt, Human
cucaggauugucuagccccu

SEQ ID NO: 1037780 - RNA, 22 nt, Human
ccugccugaaggucagccaccc

SEQ ID NO: 1037781 - RNA, 22 nt, Human
gcccaggccggagagcagugcu

SEQ ID NO: 1037782 - RNA, 19 nt, Human
ugcaggaggacugagcaga

SEQ ID NO: 1037783 - RNA, 22 nt, Human
acagaguauuggaaaggcagug

SEQ ID NO: 1037784 - RNA, 22 nt, Human
agccucucuuucugguggcuaa

SEQ ID NO: 1037785 - RNA, 22 nt, Human
cuggcucaauaaauauuagcug

SEQ ID NO: 1037786 - RNA, 22 nt, Human
cuuauguacacacauauauugu

SEQ ID NO: 1037787 - RNA, 22 nt, Human
cauggccucaaaggacugcaga

SEQ ID NO: 1037788 - RNA, 22 nt, Human
ucauuacagagauauaaucuac

SEQ ID NO: 1037789 - RNA, 22 nt, Human
uagaaaucagcaggcauaugua

SEQ ID NO: 1037790 - RNA, 22 nt, Human
cuuucucugugugguaaagggc

SEQ ID NO: 1037791 - RNA, 19 nt, Human
caucuggaugauucuccug

SEQ ID NO: 1037792 - RNA, 22 nt, Human
caguacuugggaaugcugggga

SEQ ID NO: 1037793 - RNA, 22 nt, Human
aggccuggccuuuauguucaag

SEQ ID NO: 1037794 - RNA, 21 nt, Human
ugcuccuuagcugccccugcc

SEQ ID NO: 1037795 - RNA, 22 nt, Human
gcagaaggucuggcacuucagg

SEQ ID NO: 1037796 - RNA, 22 nt, Human
ucaagagauugaauaauaacug

SEQ ID NO: 1037797 - RNA, 22 nt, Human
ucccagggacucucugccuucc

SEQ ID NO: 1037798 - RNA, 22 nt, Human
cagucccagaagagccugggag

SEQ ID NO: 1037799 - RNA, 22 nt, Human
cauggcaggugcagauucugug

SEQ ID NO: 1037800 - RNA, 22 nt, Human
cucuguccuaugcuugauagaa

SEQ ID NO: 1037801 - RNA, 22 nt, Human
ugggcaggauaauaucucaugu

SEQ ID NO: 1037802 - RNA, 22 nt, Human
gauuucaaggaguuuucacagu

SEQ ID NO: 1037803 - RNA, 22 nt, Human
ggggccugcgagguucaacuuc

SEQ ID NO: 1037804 - RNA, 22 nt, Human
accaucaguacuggaugcugac

SEQ ID NO: 1037805 - RNA, 22 nt, Human
gggcuggggcucaauaauuugu

SEQ ID NO: 1037806 - RNA, 22 nt, Human
ucucagagaagugaugagcaau

SEQ ID NO: 1037807 - RNA, 22 nt, Human
ugagagucucagaccuccuggu

SEQ ID NO: 1037808 - RNA, 22 nt, Human
ccugcagaccacacucaguccu

SEQ ID NO: 1037809 - RNA, 22 nt, Human
gcucccagauuucagccuugug

SEQ ID NO: 1037810 - RNA, 22 nt, Human
ugcucugugguccaagauggcu

SEQ ID NO: 1037811 - RNA, 22 nt, Human
uauguacaugauuucauuugcu

SEQ ID NO: 1037812 - RNA, 22 nt, Human
cagacagacagccguggccacc

SEQ ID NO: 1037813 - RNA, 22 nt, Human
guggccuggaguuugauguagg

SEQ ID NO: 1037814 - RNA, 22 nt, Human
ccagagaccagaacauggggau

SEQ ID NO: 1037815 - RNA, 22 nt, Human
cucacugcccugaaguuggguu

SEQ ID NO: 1037816 - RNA, 22 nt, Human
aaaagggacuacucucagcucc

SEQ ID NO: 1037817 - RNA, 22 nt, Human
uuuucuuacugucugugauccu

SEQ ID NO: 1037818 - RNA, 20 nt, Human
uuucagugguuugugccuag

SEQ ID NO: 1037819 - RNA, 22 nt, Human
cacaggagguuaggaagugguc

SEQ ID NO: 1037820 - RNA, 22 nt, Human
gaggcugcggggaggagccugc

SEQ ID NO: 1037821 - RNA, 22 nt, Human
acuuccugcagcuucucagccc

SEQ ID NO: 1037822 - RNA, 22 nt, Human
cacauacaaugguguuauuugg

SEQ ID NO: 1037823 - RNA, 22 nt, Human
gcagggagguuugcugaccugg

SEQ ID NO: 1037824 - RNA, 22 nt, Human
agagccuugaagaucuggaaaa

SEQ ID NO: 1037825 - RNA, 22 nt, Human
agggccugagcuggcugaccuc

SEQ ID NO: 1037826 - RNA, 22 nt, Human
uccuugaagcaacgugcagaca

SEQ ID NO: 1037827 - RNA, 22 nt, Human
agguuauaugucauacugaagu

SEQ ID NO: 1037828 - RNA, 22 nt, Human
agggcugguauguccaugaaag

SEQ ID NO: 1037829 - RNA, 22 nt, Human
cugagggcaugaacauuccaua

SEQ ID NO: 1037830 - RNA, 22 nt, Human
uggaagccaggcccgcuccuaa

SEQ ID NO: 1037831 - RNA, 22 nt, Human
auugacaagcaguaugucuuag

SEQ ID NO: 1037832 - RNA, 22 nt, Human
uauugacagagggucagaagag

SEQ ID NO: 1037833 - RNA, 21 nt, Human
gcacagugccaggcacacagu

SEQ ID NO: 1037834 - RNA, 21 nt, Human
ucucuggaguuagcagagaga

SEQ ID NO: 1037835 - RNA, 22 nt, Human
ggcagcuuuuaucccugacaga

SEQ ID NO: 1037836 - RNA, 22 nt, Human
ggggcagaaguagugccccuga

SEQ ID NO: 1037837 - RNA, 22 nt, Human
ggcaggagaaaggucucuucuu

SEQ ID NO: 1037838 - RNA, 22 nt, Human
ucagccugcgucauggugacac

SEQ ID NO: 1037839 - RNA, 22 nt, Human
cagggccugccugguuccugga

SEQ ID NO: 1037840 - RNA, 22 nt, Human
ugugaugguucacugggcauga

SEQ ID NO: 1037841 - RNA, 22 nt, Human
gcucccugcacucugcagcccu

SEQ ID NO: 1037842 - RNA, 22 nt, Human
agguuuucagcuguauccugag

SEQ ID NO: 1037843 - RNA, 22 nt, Human
gccugagauucccggagccgug

SEQ ID NO: 1037844 - RNA, 23 nt, Human
acaguuauagcugugaauaacau

SEQ ID NO: 1037845 - RNA, 22 nt, Human
agaauuagucacaauuauagga

SEQ ID NO: 1037846 - RNA, 18 nt, Human
cuuguucuucucuuggcg

SEQ ID NO: 1037847 - RNA, 22 nt, Human
cugaggcuuugugugcaugccu

SEQ ID NO: 1037848 - RNA, 22 nt, Human
ugggacagagugagcuuuggcc

SEQ ID NO: 1037849 - RNA, 22 nt, Human
gcaccugggacccagaggcacc

SEQ ID NO: 1037850 - RNA, 20 nt, Human
ugggccugagccugugggcu

SEQ ID NO: 1037851 - RNA, 22 nt, Human
gaggcuggugguuaguuccauu

SEQ ID NO: 1037852 - RNA, 22 nt, Human
agccauggcgccacuagaggga

SEQ ID NO: 1037853 - RNA, 22 nt, Human
ccuuggaggacugcugcuucuu

SEQ ID NO: 1037854 - RNA, 22 nt, Human
uggaaagagguagaggaucugg

SEQ ID NO: 1037855 - RNA, 22 nt, Human
ucccagcauuaaugccugucag

SEQ ID NO: 1037856 - RNA, 22 nt, Human
ucugggugcccuuugcucuguu

SEQ ID NO: 1037857 - RNA, 22 nt, Human
uuccuguaugucagugaagagc

SEQ ID NO: 1037858 - RNA, 22 nt, Human
caugggcucuucuggacugcac

SEQ ID NO: 1037859 - RNA, 22 nt, Human
augcugagacuggagcagcugg

SEQ ID NO: 1037860 - RNA, 22 nt, Human
ugucuguaagguguuuauguua

SEQ ID NO: 1037861 - RNA, 22 nt, Human
uggggacacagagguucguugg

SEQ ID NO: 1037862 - RNA, 22 nt, Human
aguggcaggaaaguggaagaga

SEQ ID NO: 1037863 - RNA, 22 nt, Human
uagaaauguuagauguauugag

SEQ ID NO: 1037864 - RNA, 22 nt, Human
ugccaggcuaaguggaggacuu

SEQ ID NO: 1037865 - RNA, 20 nt, Human
guucucacugaucugcaggg

SEQ ID NO: 1037866 - RNA, 22 nt, Human
aagcugccuagaguugaauguc

SEQ ID NO: 1037867 - RNA, 22 nt, Human
uaggaaaagucuagauugauga

SEQ ID NO: 1037868 - RNA, 22 nt, Human
agggccugcucuaucacucuca

SEQ ID NO: 1037869 - RNA, 22 nt, Human
gaggccugguuuccagcauccu

SEQ ID NO: 1037870 - RNA, 22 nt, Human
cuggcucaguucuugguuuuca

SEQ ID NO: 1037871 - RNA, 22 nt, Human
guacaaaguggaccugauagua

SEQ ID NO: 1037872 - RNA, 22 nt, Human
ccugggagugugccaucucugu

SEQ ID NO: 1037873 - RNA, 22 nt, Human
ccuuucucuuugcugaucaugu

SEQ ID NO: 1037874 - RNA, 22 nt, Human
uagauuuccucuuccucauucc

SEQ ID NO: 1037875 - RNA, 22 nt, Human
ggcugaaacagauuucaagaca

SEQ ID NO: 1037876 - RNA, 22 nt, Human
ucagaggacaagcucccuggug

SEQ ID NO: 1037877 - RNA, 22 nt, Human
cagcucccaguggcagcuccuu

SEQ ID NO: 1037878 - RNA, 22 nt, Human
gagaggccaaaaucccugcccc

SEQ ID NO: 1037879 - RNA, 22 nt, Human
agggagcuguggucagcucagu

SEQ ID NO: 1037880 - RNA, 22 nt, Human
uaugcacauuaucuaauccauu

SEQ ID NO: 1037881 - RNA, 22 nt, Human
ucucagagauuuauggaaaacu

SEQ ID NO: 1037882 - RNA, 17 nt, Human
agcuccugcccauggcu

SEQ ID NO: 1037883 - RNA, 22 nt, Human
cagagcugugauaaauagauau

SEQ ID NO: 1037884 - RNA, 22 nt, Human
ugaagcaggguggccagauugu

SEQ ID NO: 1037885 - RNA, 22 nt, Human
auccaaagauggaaagaacuuu

SEQ ID NO: 1037886 - RNA, 23 nt, Human
ugggccuggccucccaguccagc

SEQ ID NO: 1037887 - RNA, 22 nt, Human
acagcuguggggacucuugccc

SEQ ID NO: 1037888 - RNA, 22 nt, Human
uggcccugaggggcugugcccc

SEQ ID NO: 1037889 - RNA, 22 nt, Human
ugggccuguggcuuggcucuag

SEQ ID NO: 1037890 - RNA, 22 nt, Human
aggcugccuguuccaaucuccu

SEQ ID NO: 1037891 - RNA, 22 nt, Human
gcccucagaugggaaaggaggg

SEQ ID NO: 1037892 - RNA, 22 nt, Human
aaucuggcauuugagaguagga

SEQ ID NO: 1037893 - RNA, 22 nt, Human
ucaaacuagccugacugguauu

SEQ ID NO: 1037894 - RNA, 22 nt, Human
cucugagcccgcugcagcccca

SEQ ID NO: 1037895 - RNA, 22 nt, Human
gcuuggaaguaggauugggaga

SEQ ID NO: 1037896 - RNA, 22 nt, Human
uagucuuuuuaauaaauaaugc

SEQ ID NO: 1037897 - RNA, 22 nt, Human
agccucugcuggcccuggcacu

SEQ ID NO: 1037898 - RNA, 22 nt, Human
uauaguacauggaaucuucaua

SEQ ID NO: 1037899 - RNA, 18 nt, Human
uggugaaggguggaggag

SEQ ID NO: 1037900 - RNA, 20 nt, Human
uucaggauucuagaccacac

SEQ ID NO: 1037901 - RNA, 22 nt, Human
cugggaggugcagcaaaaauca

SEQ ID NO: 1037902 - RNA, 22 nt, Human
cagggccaguucucgcagcagu

SEQ ID NO: 1037903 - RNA, 22 nt, Human
gcaaagucugcaucuggaucag

SEQ ID NO: 1037904 - RNA, 22 nt, Human
cacugcuuaguugguaaaugug

SEQ ID NO: 1037905 - RNA, 22 nt, Human
cagugcagaacacauggaaaau

SEQ ID NO: 1037906 - RNA, 22 nt, Human
cucuggaguucucaugaggaac

SEQ ID NO: 1037907 - RNA, 22 nt, Human
cugcugcauuacucuucucaag

SEQ ID NO: 1037908 - RNA, 22 nt, Human
caggugggagcgaggagcuacu

SEQ ID NO: 1037909 - RNA, 22 nt, Human
uguaaucauuacaguacaugga

SEQ ID NO: 1037910 - RNA, 22 nt, Human
gagaagcaaucaguggccaccc

SEQ ID NO: 1037911 - RNA, 22 nt, Human
gaggucaggcuugcagcagggu

SEQ ID NO: 1037912 - RNA, 22 nt, Human
caaggaaaaagcgagcucgggg

SEQ ID NO: 1037913 - RNA, 22 nt, Human
auuguacaaugccuggaacauu

SEQ ID NO: 1037914 - RNA, 22 nt, Human
uuccuuccgggcaccaggcacu

SEQ ID NO: 1037915 - RNA, 22 nt, Human
gaggcagcagggcugguuccuu

SEQ ID NO: 1037916 - RNA, 22 nt, Human
caguggguggcuaaguggcuga

SEQ ID NO: 1037917 - RNA, 22 nt, Human
augcuauacucaaagaaauuca

SEQ ID NO: 1037918 - RNA, 22 nt, Human
cugccuggccugaucuccacgc

SEQ ID NO: 1037919 - RNA, 21 nt, Human
aagccucaagcagaagacaga

SEQ ID NO: 1037920 - RNA, 22 nt, Human
cagcccaggccgacaguuccuc

SEQ ID NO: 1037921 - RNA, 21 nt, Human
ccuggcagaagccugauaugc

SEQ ID NO: 1037922 - RNA, 22 nt, Human
ucaauuaugccauugcaauauu

SEQ ID NO: 1037923 - RNA, 22 nt, Human
cugggguggugcaggccucaug

SEQ ID NO: 1037924 - RNA, 22 nt, Human
ugcaccauuaauuuaugugaga

SEQ ID NO: 1037925 - RNA, 22 nt, Human
gucugagaaucuugcauaucau

SEQ ID NO: 1037926 - RNA, 22 nt, Human
gccuggcacauugcaguggauu

SEQ ID NO: 1037927 - RNA, 22 nt, Human
cugggcuacguguugacagcau

SEQ ID NO: 1037928 - RNA, 22 nt, Human
caggcagcguccugcuuccugu

SEQ ID NO: 1037929 - RNA, 22 nt, Human
ccugcacuaccuggggcugcug

SEQ ID NO: 1037930 - RNA, 22 nt, Human
uuuagaguugaguauucauugg

SEQ ID NO: 1037931 - RNA, 20 nt, Human
caccacagaauuggggacag

SEQ ID NO: 1037932 - RNA, 22 nt, Human
ucuggagccuuggaugggaaag

SEQ ID NO: 1037933 - RNA, 22 nt, Human
gcuguccagagcaugggagcaa

SEQ ID NO: 1037934 - RNA, 22 nt, Human
ggcuuccuggagaaggucugag

SEQ ID NO: 1037935 - RNA, 22 nt, Human
aucugguuuggggauccuugug

SEQ ID NO: 1037936 - RNA, 22 nt, Human
cggcagcaaaggaagccagguc

SEQ ID NO: 1037937 - RNA, 22 nt, Human
uggccuggggaccugugagacc

SEQ ID NO: 1037938 - RNA, 20 nt, Human
ucucaggccccaguuuucuu

SEQ ID NO: 1037939 - RNA, 22 nt, Human
ugaaaucugucccacuuuagcu

SEQ ID NO: 1037940 - RNA, 22 nt, Human
ucacauuuucauauucucugag

SEQ ID NO: 1037941 - RNA, 22 nt, Human
cagcugccccuccagggcuggg

SEQ ID NO: 1037942 - RNA, 22 nt, Human
gcuguauuuaacaacuggcuca

SEQ ID NO: 1037943 - RNA, 22 nt, Human
acacagggggcauucuaggagu

SEQ ID NO: 1037944 - RNA, 22 nt, Human
uugaagauggaucgccacucuc

SEQ ID NO: 1037945 - RNA, 22 nt, Human
cagcugccugcaacacaagcuu

SEQ ID NO: 1037946 - RNA, 22 nt, Human
ccagcagcgauagggugagugc

SEQ ID NO: 1037947 - RNA, 22 nt, Human
uaagauaugguaggaaguuugg

SEQ ID NO: 1037948 - RNA, 22 nt, Human
uccuggaguauuucuguggugu

SEQ ID NO: 1037949 - RNA, 22 nt, Human
uuagucuucuuccuuauauguu

SEQ ID NO: 1037950 - RNA, 22 nt, Human
ucacagugaugacgugggagca

SEQ ID NO: 1037951 - RNA, 22 nt, Human
gugcagggagcccagaaggucc

SEQ ID NO: 1037952 - RNA, 22 nt, Human
aaaagagucuuaggcagucaua

SEQ ID NO: 1037953 - RNA, 22 nt, Human
gcacagaacagagaaauagcca

SEQ ID NO: 1037954 - RNA, 20 nt, Human
accccagccccucuaucuga

SEQ ID NO: 1037955 - RNA, 22 nt, Human
ugagagugguucagcucagaag

SEQ ID NO: 1037956 - RNA, 22 nt, Human
cccuggaggcggauguugcagu

SEQ ID NO: 1037957 - RNA, 22 nt, Human
uacaguucacaguaucauaaau

SEQ ID NO: 1037958 - RNA, 22 nt, Human
aagugaguggccuggagaggug

SEQ ID NO: 1037959 - RNA, 22 nt, Human
ugggagagugcucaaugugcaa

SEQ ID NO: 1037960 - RNA, 22 nt, Human
gugccuuccccgguggucuguu

SEQ ID NO: 1037961 - RNA, 22 nt, Human
acccaggguagagugcaguggc

SEQ ID NO: 1037962 - RNA, 22 nt, Human
agcugcaguaaagcucuccagg

SEQ ID NO: 1037963 - RNA, 22 nt, Human
gaacaguaaauuuaugcagcac

SEQ ID NO: 1037964 - RNA, 18 nt, Human
uccugccugugccccagg

SEQ ID NO: 1037965 - RNA, 22 nt, Human
aagggagguaaagcuauuuaaa

SEQ ID NO: 1037966 - RNA, 18 nt, Human
ucucagaggccauccuag

SEQ ID NO: 1037967 - RNA, 22 nt, Human
acauuucugucuuagggacugu

SEQ ID NO: 1037968 - RNA, 22 nt, Human
cacagcuugggcucugacaaua

SEQ ID NO: 1037969 - RNA, 22 nt, Human
uuaaacagagucugaaauguaa

SEQ ID NO: 1037970 - RNA, 22 nt, Human
cugccucuauaggaguccacca

SEQ ID NO: 1037971 - RNA, 20 nt, Human
cugggaggucuuccaaauca

SEQ ID NO: 1037972 - RNA, 22 nt, Human
uaugcacaguuacaagaauauc

SEQ ID NO: 1037973 - RNA, 22 nt, Human
ccaaggaggccccaggucagcu

SEQ ID NO: 1037974 - RNA, 22 nt, Human
cagggcuggauccuccagacuc

SEQ ID NO: 1037975 - RNA, 22 nt, Human
uccugggcugcagggaagagca

SEQ ID NO: 1037976 - RNA, 22 nt, Human
ucaagagaaggggaaauagacu

SEQ ID NO: 1037977 - RNA, 22 nt, Human
cagcuccccaugguuccugaag

SEQ ID NO: 1037978 - RNA, 22 nt, Human
ccaggguggggcaggcccacug

SEQ ID NO: 1037979 - RNA, 22 nt, Human
uaugagaaaauaaauaucuguu

SEQ ID NO: 1037980 - RNA, 22 nt, Human
ucucagagugacaaugagaauu

SEQ ID NO: 1037981 - RNA, 21 nt, Human
agagagaaggccauauggucc

SEQ ID NO: 1037982 - RNA, 22 nt, Human
uucauucauuacgugccaggca

SEQ ID NO: 1037983 - RNA, 22 nt, Human
aguuauucauuuauucuguaca

SEQ ID NO: 1037984 - RNA, 22 nt, Human
uccuugaauggacauuacacug

SEQ ID NO: 1037985 - RNA, 22 nt, Human
guggcugcagcccagcggcacg

SEQ ID NO: 1037986 - RNA, 22 nt, Human
ugucugagugugccugggcauu

SEQ ID NO: 1037987 - RNA, 22 nt, Human
ccagcaccuugaucuuggaguu

SEQ ID NO: 1037988 - RNA, 22 nt, Human
gggcucugggauucagagcaag

SEQ ID NO: 1037989 - RNA, 22 nt, Human
gcagagcucuguucuuaucucc

SEQ ID NO: 1037990 - RNA, 22 nt, Human
acaggcagcacuaaucucuggu

SEQ ID NO: 1037991 - RNA, 22 nt, Human
gcccuuccaacccagagggcaa

SEQ ID NO: 1037992 - RNA, 22 nt, Human
ggcucaggccagaccacgacuc

SEQ ID NO: 1037993 - RNA, 22 nt, Human
gcugucaguuuuacccacagac

SEQ ID NO: 1037994 - RNA, 22 nt, Human
uagacagauuucuuguuagaca

SEQ ID NO: 1037995 - RNA, 22 nt, Human
cagucccaugagcccagaacau

SEQ ID NO: 1037996 - RNA, 22 nt, Human
cagggccuccccggcagucuuu

SEQ ID NO: 1037997 - RNA, 22 nt, Human
cugggcacuuuggggagccuac

SEQ ID NO: 1037998 - RNA, 22 nt, Human
gcugggcuugguuucccugcuu

SEQ ID NO: 1037999 - RNA, 22 nt, Human
guucucucugcuuccaagaugg

SEQ ID NO: 1038000 - RNA, 20 nt, Human
agguggcuccugcugggggu

SEQ ID NO: 1038001 - RNA, 22 nt, Human
agcagccauccuuagagaaaga

SEQ ID NO: 1038002 - RNA, 22 nt, Human
gccaggcugcuccagggaggcc

SEQ ID NO: 1038003 - RNA, 22 nt, Human
uaguccagccuuggguguagcc

SEQ ID NO: 1038004 - RNA, 17 nt, Human
ccucccacaccgcccug

SEQ ID NO: 1038005 - RNA, 22 nt, Human
ugcagaagauggucugagcacc

SEQ ID NO: 1038006 - RNA, 22 nt, Human
ggcacugacacuagcauggcac

SEQ ID NO: 1038007 - RNA, 22 nt, Human
uacauggugguggcacuugacu

SEQ ID NO: 1038008 - RNA, 22 nt, Human
uuauguacaauguuaauguaaa

SEQ ID NO: 1038009 - RNA, 22 nt, Human
aacauacagugagcaguggacu

SEQ ID NO: 1038010 - RNA, 22 nt, Human
cucacugucuguacuagcugau

SEQ ID NO: 1038011 - RNA, 22 nt, Human
cagggagggacaauugucaccu

SEQ ID NO: 1038012 - RNA, 22 nt, Human
ugcagggccagacuggguugga

SEQ ID NO: 1038013 - RNA, 23 nt, Human
ccuggcuggauucucugcauuca

SEQ ID NO: 1038014 - RNA, 22 nt, Human
uagcugugagcacccaggcugu

SEQ ID NO: 1038015 - RNA, 22 nt, Human
aggcccaguagugcugccuuua

SEQ ID NO: 1038016 - RNA, 21 nt, Human
cuggacugaggagacagucgc

SEQ ID NO: 1038017 - RNA, 22 nt, Human
uugaaagggauauaucuuucug

SEQ ID NO: 1038018 - RNA, 19 nt, Human
ccucugcgcuguccugcuc

SEQ ID NO: 1038019 - RNA, 22 nt, Human
auuuacagaugaugcuauuuga

SEQ ID NO: 1038020 - RNA, 22 nt, Human
ucucagaguuugaaucuggagu

SEQ ID NO: 1038021 - RNA, 22 nt, Human
uagauuucgcugcaucucaauc

SEQ ID NO: 1038022 - RNA, 22 nt, Human
gcucucagguacaaagcugugu

SEQ ID NO: 1038023 - RNA, 22 nt, Human
uagggcagaguccaggaugggc

SEQ ID NO: 1038024 - RNA, 22 nt, Human
ugcauuguugaauauuucauag

SEQ ID NO: 1038025 - RNA, 18 nt, Human
gccugccuagagcuugcc

SEQ ID NO: 1038026 - RNA, 22 nt, Human
agggcacaagacucugagcccc

SEQ ID NO: 1038027 - RNA, 19 nt, Human
uugguggugguuuugguuc

SEQ ID NO: 1038028 - RNA, 21 nt, Human
cacucaggguaugugccaggc

SEQ ID NO: 1038029 - RNA, 22 nt, Human
uagcagcugugaguaaaagcca

SEQ ID NO: 1038030 - RNA, 19 nt, Human
uguagcaguuuaaaacaac

SEQ ID NO: 1038031 - RNA, 22 nt, Human
cugggccaucagaggggcugga

SEQ ID NO: 1038032 - RNA, 22 nt, Human
ggagccuguuaguugagugcuc

SEQ ID NO: 1038033 - RNA, 22 nt, Human
agcagggcagugaucagaaagg

SEQ ID NO: 1038034 - RNA, 20 nt, Human
uacugggcaagcccacagac

SEQ ID NO: 1038035 - RNA, 22 nt, Human
ccagggcacuuaggcccagccc

SEQ ID NO: 1038036 - RNA, 22 nt, Human
ucaaugauaucagcaggaugug

SEQ ID NO: 1038037 - RNA, 22 nt, Human
cugaggccagcugcagagcucu

SEQ ID NO: 1038038 - RNA, 22 nt, Human
auacagaaaaugaugcagaguu

SEQ ID NO: 1038039 - RNA, 22 nt, Human
ugcugcacucaccaacagauaa

SEQ ID NO: 1038040 - RNA, 22 nt, Human
uuucauaaugucacagucaaaa

SEQ ID NO: 1038041 - RNA, 22 nt, Human
acacagggucuagaguuaggcc

SEQ ID NO: 1038042 - RNA, 22 nt, Human
cuugccuucuuuuccuauagaa

SEQ ID NO: 1038043 - RNA, 22 nt, Human
ccugggcaacauagugagaccc

SEQ ID NO: 1038044 - RNA, 22 nt, Human
gcuggucacucugggagcugcu

SEQ ID NO: 1038045 - RNA, 22 nt, Human
gcccucugcuggccucaccucg

SEQ ID NO: 1038046 - RNA, 22 nt, Human
cccucugccugggaccaagucc

SEQ ID NO: 1038047 - RNA, 22 nt, Human
ggcucaggacugcagcguagag

SEQ ID NO: 1038048 - RNA, 22 nt, Human
aaaucaguaaauguucauuaac

SEQ ID NO: 1038049 - RNA, 22 nt, Human
aaggagaaaugguagaugugca

SEQ ID NO: 1038050 - RNA, 22 nt, Human
gauggcagguaguggucucauc

SEQ ID NO: 1038051 - RNA, 17 nt, Human
ucugggcuucagugguc

SEQ ID NO: 1038052 - RNA, 21 nt, Human
ugauuuccagaaaauuggccc

SEQ ID NO: 1038053 - RNA, 22 nt, Human
ggucucagcaguugcuuugacu

SEQ ID NO: 1038054 - RNA, 20 nt, Human
uucuuucaucuacacguugu

SEQ ID NO: 1038055 - RNA, 22 nt, Human
caggccuccacuccacgcagac

SEQ ID NO: 1038056 - RNA, 22 nt, Human
cccuggagguggagguugcagg

SEQ ID NO: 1038057 - RNA, 22 nt, Human
acaagagacaagagguucuucu

SEQ ID NO: 1038058 - RNA, 19 nt, Human
gccacuccugaugcugccc

SEQ ID NO: 1038059 - RNA, 22 nt, Human
aacccuggggcagcugcuaggg

SEQ ID NO: 1038060 - RNA, 22 nt, Human
aacugcauuugcauaaguccau

SEQ ID NO: 1038061 - RNA, 22 nt, Human
agccaggaaccagcuacagucu

SEQ ID NO: 1038062 - RNA, 22 nt, Human
agcuggagaucaugcugauacu

SEQ ID NO: 1038063 - RNA, 22 nt, Human
ucucaggggccuggaguccugg

SEQ ID NO: 1038064 - RNA, 17 nt, Human
gccucugcuugugucau

SEQ ID NO: 1038065 - RNA, 22 nt, Human
acagggcagagggcaguuggua

SEQ ID NO: 1038066 - RNA, 22 nt, Human
guggcagagguuccucagugug

SEQ ID NO: 1038067 - RNA, 22 nt, Human
gcugucugagaacaugguggaa

SEQ ID NO: 1038068 - RNA, 22 nt, Human
ggcugcuucucacucauuugca

SEQ ID NO: 1038069 - RNA, 23 nt, Human
cuggcucuguagguggcauccuu

SEQ ID NO: 1038070 - RNA, 22 nt, Human
ucagggacauuuagacacugau

SEQ ID NO: 1038071 - RNA, 22 nt, Human
ccagccugaaaugccucauccu

SEQ ID NO: 1038072 - RNA, 22 nt, Human
cacaggguuguucugaggauuc

SEQ ID NO: 1038073 - RNA, 22 nt, Human
guagcccaccuggggagggcga

SEQ ID NO: 1038074 - RNA, 22 nt, Human
caguuauuaugaggucauuagg

SEQ ID NO: 1038075 - RNA, 19 nt, Human
ggcuggcaagugacagugu

SEQ ID NO: 1038076 - RNA, 22 nt, Human
cacuacuugaaagaauuacaga

SEQ ID NO: 1038077 - RNA, 22 nt, Human
uggaaagaugaagauguuuaag

SEQ ID NO: 1038078 - RNA, 22 nt, Human
cucuggccagagccugcgggaa

SEQ ID NO: 1038079 - RNA, 22 nt, Human
ggcagcucacugauuagcaauu

SEQ ID NO: 1038080 - RNA, 22 nt, Human
ucauucuccucuggaaaaggca

SEQ ID NO: 1038081 - RNA, 22 nt, Human
ugcucacagcccagaacauaau

SEQ ID NO: 1038082 - RNA, 22 nt, Human
agagcuguuuggacaucugagu

SEQ ID NO: 1038083 - RNA, 22 nt, Human
uagaaaucauuuagaaguauug

SEQ ID NO: 1038084 - RNA, 22 nt, Human
gggcccuggggccugauuugca

SEQ ID NO: 1038085 - RNA, 22 nt, Human
cuucccagaccuuagagugcag

SEQ ID NO: 1038086 - RNA, 22 nt, Human
ccucccaccauuuagagagagc

SEQ ID NO: 1038087 - RNA, 22 nt, Human
uaaaucccuacaucuguguuuu

SEQ ID NO: 1038088 - RNA, 22 nt, Human
cgucuuccucuuacgaugcgcu

SEQ ID NO: 1038089 - RNA, 22 nt, Human
uccagccaccaccuugauugcc

SEQ ID NO: 1038090 - RNA, 22 nt, Human
gggcugucaugugucagugacc

SEQ ID NO: 1038091 - RNA, 21 nt, Human
agaagccuggguggagguggg

SEQ ID NO: 1038092 - RNA, 22 nt, Human
auugcacaaacacagucagacu

SEQ ID NO: 1038093 - RNA, 22 nt, Human
gaggccugguagccgagcccca

SEQ ID NO: 1038094 - RNA, 22 nt, Human
guucacaucacuucacugaacc

SEQ ID NO: 1038095 - RNA, 22 nt, Human
ccagagcugcauccagcagguu

SEQ ID NO: 1038096 - RNA, 22 nt, Human
uuuugaaagggugauuuggcuu

SEQ ID NO: 1038097 - RNA, 21 nt, Human
uuugcauuuuacaugugggga

SEQ ID NO: 1038098 - RNA, 22 nt, Human
aauuagagaucaguucuuugac

SEQ ID NO: 1038099 - RNA, 22 nt, Human
uugaaaggugaacaugaugcac

SEQ ID NO: 1038100 - RNA, 22 nt, Human
ccuggcagcuccuccccggcgg

SEQ ID NO: 1038101 - RNA, 22 nt, Human
guacauuuugagguuaaaacaa

SEQ ID NO: 1038102 - RNA, 22 nt, Human
uuguuuuuaugaacauccagga

SEQ ID NO: 1038103 - RNA, 22 nt, Human
ggaccugccagaacucaggcua

SEQ ID NO: 1038104 - RNA, 22 nt, Human
ugguuucccauuaucugcagga

SEQ ID NO: 1038105 - RNA, 22 nt, Human
ccagggcuggugggagaugcug

SEQ ID NO: 1038106 - RNA, 22 nt, Human
aaagagcuaacauugccgagau

SEQ ID NO: 1038107 - RNA, 22 nt, Human
ccagcuccucuucccaguguca

SEQ ID NO: 1038108 - RNA, 22 nt, Human
cugggccagcaacugcaaugga

SEQ ID NO: 1038109 - RNA, 22 nt, Human
ugcugccuuagcagccaggcaa

SEQ ID NO: 1038110 - RNA, 22 nt, Human
aucagcaaaaaugccuucagaa

SEQ ID NO: 1038111 - RNA, 22 nt, Human
ccuggcaguuuugcccaggauu

SEQ ID NO: 1038112 - RNA, 22 nt, Human
ugcuggcccuggcucagggaac

SEQ ID NO: 1038113 - RNA, 22 nt, Human
gcugucuguggugucagcugac

SEQ ID NO: 1038114 - RNA, 22 nt, Human
gagccucguggcggccacugcg

SEQ ID NO: 1038115 - RNA, 22 nt, Human
cccugccugugggcaucaacau

SEQ ID NO: 1038116 - RNA, 22 nt, Human
auaauuuacaacugcuuuuaau

SEQ ID NO: 1038117 - RNA, 22 nt, Human
uguucaauccccagguccugaa

SEQ ID NO: 1038118 - RNA, 22 nt, Human
ucugucacccgagcaggcgaga

SEQ ID NO: 1038119 - RNA, 22 nt, Human
gucccagggaagaaggcagcac

SEQ ID NO: 1038120 - RNA, 22 nt, Human
ugaagcagagaauuugacaguc

SEQ ID NO: 1038121 - RNA, 22 nt, Human
gugcagguguuuuggcugccag

SEQ ID NO: 1038122 - RNA, 22 nt, Human
uuccaaaggaauggggagcuau

SEQ ID NO: 1038123 - RNA, 22 nt, Human
gcugcagccaaauucauuguca

SEQ ID NO: 1038124 - RNA, 22 nt, Human
uuccauaauuaaguggagagaa

SEQ ID NO: 1038125 - RNA, 22 nt, Human
cugaaggauuuaguucuuugcu

SEQ ID NO: 1038126 - RNA, 22 nt, Human
agagcagugcugaagaguaggg

SEQ ID NO: 1038127 - RNA, 22 nt, Human
uuacaaagagugccagagugug

SEQ ID NO: 1038128 - RNA, 22 nt, Human
cacugcuuuuuuggcuauguac

SEQ ID NO: 1038129 - RNA, 22 nt, Human
gcuccacuugcagcuaggcuug

SEQ ID NO: 1038130 - RNA, 22 nt, Human
gagggacagcuaaagagaaauu

SEQ ID NO: 1038131 - RNA, 23 nt, Human
aggagaagagauuuccacaugca

SEQ ID NO: 1038132 - RNA, 22 nt, Human
ucuguaucacccguucccagaa

SEQ ID NO: 1038133 - RNA, 22 nt, Human
agauggguaacuggagucugcu

SEQ ID NO: 1038134 - RNA, 22 nt, Human
acagauauaaacuauaguagug

SEQ ID NO: 1038135 - RNA, 22 nt, Human
aagugguagacaaagauaauug

SEQ ID NO: 1038136 - RNA, 22 nt, Human
aauguauaaaguguuaauaacu

SEQ ID NO: 1038137 - RNA, 22 nt, Human
uuguuuucuccacugcaucuua

SEQ ID NO: 1038138 - RNA, 22 nt, Human
ucuuugcaaauguuauuaucuu

SEQ ID NO: 1038139 - RNA, 21 nt, Human
ggggcagagcuaggcccugca

SEQ ID NO: 1038140 - RNA, 22 nt, Human
augcccaaugucacaauuuuug

SEQ ID NO: 1038141 - RNA, 22 nt, Human
gcugggcaccggagagacccca

SEQ ID NO: 1038142 - RNA, 22 nt, Human
cagagacaguuucacagggucu

SEQ ID NO: 1038143 - RNA, 22 nt, Human
agcaaagucaguggaaccaucc

SEQ ID NO: 1038144 - RNA, 22 nt, Human
ggcuggcuggcugguagacaag

SEQ ID NO: 1038145 - RNA, 22 nt, Human
cccagcacuuugaauaugucac

SEQ ID NO: 1038146 - RNA, 22 nt, Human
cugcuggagguuggagcaugca

SEQ ID NO: 1038147 - RNA, 22 nt, Human
gcagcugaaagggaucucuaca

SEQ ID NO: 1038148 - RNA, 22 nt, Human
ugacagcugagccccaggcaag

SEQ ID NO: 1038149 - RNA, 22 nt, Human
gggcucagccccauugaaccag

SEQ ID NO: 1038150 - RNA, 22 nt, Human
gcuguccugggaacaggcacua

SEQ ID NO: 1038151 - RNA, 22 nt, Human
gggagggaagguaccuguguga

SEQ ID NO: 1038152 - RNA, 23 nt, Human
ucugcucugaaguucggcugagc

SEQ ID NO: 1038153 - RNA, 22 nt, Human
acucaagauagggaaaguacaa

SEQ ID NO: 1038154 - RNA, 22 nt, Human
ucaguuuuuaagaguuaugcga

SEQ ID NO: 1038155 - RNA, 19 nt, Human
ccugggagucagcugaagg

SEQ ID NO: 1038156 - RNA, 22 nt, Human
uccuggaguugugcagugcaca

SEQ ID NO: 1038157 - RNA, 22 nt, Human
aagccagauagaagaacucauu

SEQ ID NO: 1038158 - RNA, 19 nt, Human
gggcucuggccucaguggg

SEQ ID NO: 1038159 - RNA, 22 nt, Human
uugggcugaacccugcagcuga

SEQ ID NO: 1038160 - RNA, 22 nt, Human
gcagcuggugcaaaugucacuc

SEQ ID NO: 1038161 - RNA, 22 nt, Human
ugagccuguggggugacaacca

SEQ ID NO: 1038162 - RNA, 22 nt, Human
gcccagaaguugaggcugcagu

SEQ ID NO: 1038163 - RNA, 22 nt, Human
gcccaucaucacuguggaggcu

SEQ ID NO: 1038164 - RNA, 22 nt, Human
cugaggagagaucacguggugu

SEQ ID NO: 1038165 - RNA, 22 nt, Human
ucagaggaaaggucagauggcu

SEQ ID NO: 1038166 - RNA, 22 nt, Human
ccugagggaggguauaggcugu

SEQ ID NO: 1038167 - RNA, 22 nt, Human
auugaaagagaauguagcucuu

SEQ ID NO: 1038168 - RNA, 22 nt, Human
acaaggaggucuggggggcccu

SEQ ID NO: 1038169 - RNA, 22 nt, Human
ugggggacugcacuggcgucag

SEQ ID NO: 1038170 - RNA, 19 nt, Human
aagcagcccuggcaagagc

SEQ ID NO: 1038171 - RNA, 21 nt, Human
uccucugcucucauaccacaa

SEQ ID NO: 1038172 - RNA, 22 nt, Human
cgugucaucugagccuugggcg

SEQ ID NO: 1038173 - RNA, 22 nt, Human
uguggccuggaaggggcugcuc

SEQ ID NO: 1038174 - RNA, 22 nt, Human
uccagagguauguagagaguau

SEQ ID NO: 1038175 - RNA, 21 nt, Human
gagacagacuuucguccccug

SEQ ID NO: 1038176 - RNA, 22 nt, Human
agcugccagaugacagugcuau

SEQ ID NO: 1038177 - RNA, 22 nt, Human
cugggacuuuacccuguggccc

SEQ ID NO: 1038178 - RNA, 22 nt, Human
aggugcagaaaaaaguccuuua

SEQ ID NO: 1038179 - RNA, 22 nt, Human
gcuuuccuggcccugucccugc

SEQ ID NO: 1038180 - RNA, 18 nt, Human
ucagagguacagaaaagu

SEQ ID NO: 1038181 - RNA, 21 nt, Human
uuucaauguguucuuuguagu

SEQ ID NO: 1038182 - RNA, 22 nt, Human
uuuccucugagugagcugggag

SEQ ID NO: 1038183 - RNA, 22 nt, Human
ccuguguggccaggcuggaguc

SEQ ID NO: 1038184 - RNA, 22 nt, Human
aggcuucccagcugagcucagc

SEQ ID NO: 1038185 - RNA, 22 nt, Human
aaggagugcaugacucagagua

SEQ ID NO: 1038186 - RNA, 22 nt, Human
ggccugagcucuggggaggcaa

SEQ ID NO: 1038187 - RNA, 22 nt, Human
uggcugaacuaaugugcuguuu

SEQ ID NO: 1038188 - RNA, 22 nt, Human
gcagggacaacugugcaccuga

SEQ ID NO: 1038189 - RNA, 22 nt, Human
gcaccaggcuuagagccccagg

SEQ ID NO: 1038190 - RNA, 22 nt, Human
ugucccaguuuaucugggacug

SEQ ID NO: 1038191 - RNA, 22 nt, Human
gcaaggcugagcacauuugcau

SEQ ID NO: 1038192 - RNA, 22 nt, Human
acucugccaucccaggugcugu

SEQ ID NO: 1038193 - RNA, 22 nt, Human
ggacuggacucucaggcucaca

SEQ ID NO: 1038194 - RNA, 22 nt, Human
uaaauguaccuucugccuuacu

SEQ ID NO: 1038195 - RNA, 22 nt, Human
aguacuuugcacuuugcucaga

SEQ ID NO: 1038196 - RNA, 22 nt, Human
ucugccuggauuuuggaaagcu

SEQ ID NO: 1038197 - RNA, 22 nt, Human
caaaugcauaguuuauaagaag

SEQ ID NO: 1038198 - RNA, 22 nt, Human
cagcccugagaaggaggaucuc

SEQ ID NO: 1038199 - RNA, 22 nt, Human
ucccaggguccucuucuggaau

SEQ ID NO: 1038200 - RNA, 22 nt, Human
ggguuggggcccagcagucugc

SEQ ID NO: 1038201 - RNA, 22 nt, Human
aagggcagaauagagaagaugg

SEQ ID NO: 1038202 - RNA, 22 nt, Human
ggagcugcuccuucagccaagu

SEQ ID NO: 1038203 - RNA, 22 nt, Human
ccuccaggauaagucagggccu

SEQ ID NO: 1038204 - RNA, 22 nt, Human
ccaccaggacagcccugagggg

SEQ ID NO: 1038205 - RNA, 22 nt, Human
ggucucaggagacuggagagca

SEQ ID NO: 1038206 - RNA, 22 nt, Human
gagccagguuugaaucucaguc

SEQ ID NO: 1038207 - RNA, 22 nt, Human
aaaaacuguaauuacuuuugca

SEQ ID NO: 1038208 - RNA, 22 nt, Human
ucugccuuuucacugccacuaa

SEQ ID NO: 1038209 - RNA, 22 nt, Human
gccagcucagugccaggccccu

SEQ ID NO: 1038210 - RNA, 22 nt, Human
ccugccuggaucagccauccug

SEQ ID NO: 1038211 - RNA, 22 nt, Human
ggagauuuauagcacacuucag

SEQ ID NO: 1038212 - RNA, 20 nt, Human
gacauucauaguuauuacca

SEQ ID NO: 1038213 - RNA, 22 nt, Human
ucaggagaaucagggcuguccu

SEQ ID NO: 1038214 - RNA, 22 nt, Human
agcccagcagaaaguccagccu

SEQ ID NO: 1038215 - RNA, 22 nt, Human
agggagcaugggugaagcaggc

SEQ ID NO: 1038216 - RNA, 22 nt, Human
gugccugccccacuccucagca

SEQ ID NO: 1038217 - RNA, 22 nt, Human
agcugccagggacugggcaugg

SEQ ID NO: 1038218 - RNA, 22 nt, Human
aggcaggugggucacuugaguc

SEQ ID NO: 1038219 - RNA, 22 nt, Human
acuacuuugggccauuuguuua

SEQ ID NO: 1038220 - RNA, 22 nt, Human
uggagggcaucuguggucaggc

SEQ ID NO: 1038221 - RNA, 22 nt, Human
caggcagauuugcugcccucca

SEQ ID NO: 1038222 - RNA, 22 nt, Human
gcagcuuggauuucuguaguuu

SEQ ID NO: 1038223 - RNA, 22 nt, Human
agguaaggcuguaagcuaagcc

SEQ ID NO: 1038224 - RNA, 22 nt, Human
agggcugcugcuccgggcccag

SEQ ID NO: 1038225 - RNA, 22 nt, Human
agacaaagacagcaucucaggu

SEQ ID NO: 1038226 - RNA, 21 nt, Human
uggcucaguugcugggcacag

SEQ ID NO: 1038227 - RNA, 19 nt, Human
gugaggauacugcucagag

SEQ ID NO: 1038228 - RNA, 22 nt, Human
ggcucugcuucagaaggcucau

SEQ ID NO: 1038229 - RNA, 22 nt, Human
cuggccuggcagggagggcaug

SEQ ID NO: 1038230 - RNA, 22 nt, Human
agcuggaggauaacucacuucu

SEQ ID NO: 1038231 - RNA, 22 nt, Human
ucuggcuccaggaccgggcaca

SEQ ID NO: 1038232 - RNA, 22 nt, Human
aaugccaguguguugauuccag

SEQ ID NO: 1038233 - RNA, 22 nt, Human
acucagaguuugcguuccauac

SEQ ID NO: 1038234 - RNA, 22 nt, Human
agaauaguggcaaugacugcac

SEQ ID NO: 1038235 - RNA, 22 nt, Human
cugggacagcugagacaggaga

SEQ ID NO: 1038236 - RNA, 22 nt, Human
uggagcagccaugaugacagag

SEQ ID NO: 1038237 - RNA, 22 nt, Human
ucagagugaggcccagcaaucu

SEQ ID NO: 1038238 - RNA, 22 nt, Human
ggcugcaggcaggguauccacu

SEQ ID NO: 1038239 - RNA, 22 nt, Human
gcaggagcagucaggggcagcu

SEQ ID NO: 1038240 - RNA, 22 nt, Human
ccugggaguggcacucacagca

SEQ ID NO: 1038241 - RNA, 23 nt, Human
ccaggcaguagcuauugaaguga

SEQ ID NO: 1038242 - RNA, 22 nt, Human
ugggccuggcccuguggaggag

SEQ ID NO: 1038243 - RNA, 19 nt, Human
ggcugcugguuacagaggc

SEQ ID NO: 1038244 - RNA, 22 nt, Human
agcuucucaggagucugaggca

SEQ ID NO: 1038245 - RNA, 22 nt, Human
uggcucagucauggaugaguaa

SEQ ID NO: 1038246 - RNA, 22 nt, Human
ggccuuggggaggauggugucc

SEQ ID NO: 1038247 - RNA, 20 nt, Human
uauuuagauucaaguaugga

SEQ ID NO: 1038248 - RNA, 22 nt, Human
gcccagcacagcuggaagaguc

SEQ ID NO: 1038249 - RNA, 21 nt, Human
ugaagccugaggcauagcccc

SEQ ID NO: 1038250 - RNA, 22 nt, Human
uuauugccugauugaggucauu

SEQ ID NO: 1038251 - RNA, 23 nt, Human
cugcagccgcguggggacgugga

SEQ ID NO: 1038252 - RNA, 22 nt, Human
cucacuggcaagacuacaggug

SEQ ID NO: 1038253 - RNA, 22 nt, Human
uuacaaagaguguucuuuucca

SEQ ID NO: 1038254 - RNA, 22 nt, Human
ggaggccaaggcagguggauca

SEQ ID NO: 1038255 - RNA, 22 nt, Human
uucuuccucagcagggcugccu

SEQ ID NO: 1038256 - RNA, 21 nt, Human
auggagccuaagaguggaggu

SEQ ID NO: 1038257 - RNA, 22 nt, Human
cugcaggggccucgagcacagg

SEQ ID NO: 1038258 - RNA, 22 nt, Human
agaaaugcucuuccugaccaga

SEQ ID NO: 1038259 - RNA, 20 nt, Human
auacacauauucuugcaacu

SEQ ID NO: 1038260 - RNA, 18 nt, Human
cagcagagacauucaaaa

SEQ ID NO: 1038261 - RNA, 22 nt, Human
ccacagcugaccgcaggugagc

SEQ ID NO: 1038262 - RNA, 22 nt, Human
uccagagcagguggucagaagg

SEQ ID NO: 1038263 - RNA, 22 nt, Human
uaaugugugucaucaguagagu

SEQ ID NO: 1038264 - RNA, 22 nt, Human
gcagugggagcuuaggcagugc

SEQ ID NO: 1038265 - RNA, 22 nt, Human
gggugggccacugagcagcgug

SEQ ID NO: 1038266 - RNA, 22 nt, Human
gacagccucaugaggagcaaaa

SEQ ID NO: 1038267 - RNA, 22 nt, Human
aaguucuaauuuugcauucagg

SEQ ID NO: 1038268 - RNA, 22 nt, Human
ucacauuuguuccucugcacuu

SEQ ID NO: 1038269 - RNA, 22 nt, Human
ggcugccuccugcugggcugga

SEQ ID NO: 1038270 - RNA, 22 nt, Human
cugcuuugauuagaagaguaca

SEQ ID NO: 1038271 - RNA, 22 nt, Human
uauuucugaauccaaaagguca

SEQ ID NO: 1038272 - RNA, 22 nt, Human
uuugacagcuuguuacaaaguu

SEQ ID NO: 1038273 - RNA, 22 nt, Human
uagcugccagaccauucuuacu

SEQ ID NO: 1038274 - RNA, 22 nt, Human
uauguuaaauguuugauguuua

SEQ ID NO: 1038275 - RNA, 22 nt, Human
cuucuccucugaguccugggag

SEQ ID NO: 1038276 - RNA, 22 nt, Human
uuaaacagguuuuugaauggcc

SEQ ID NO: 1038277 - RNA, 22 nt, Human
agcacagaguugcagagagcgu

SEQ ID NO: 1038278 - RNA, 22 nt, Human
caggccugcaggaaaggcuccc

SEQ ID NO: 1038279 - RNA, 22 nt, Human
uuccuccacgugacaggagcca

SEQ ID NO: 1038280 - RNA, 22 nt, Human
ugguuuugcuccaguauaaaua

SEQ ID NO: 1038281 - RNA, 22 nt, Human
uccuggaggcaaaugagcacau

SEQ ID NO: 1038282 - RNA, 22 nt, Human
gaaggaaaggucucaugccuuu

SEQ ID NO: 1038283 - RNA, 22 nt, Human
agcucauggugcuaucucaggg

SEQ ID NO: 1038284 - RNA, 23 nt, Human
cuggcuccgaagacuccaggauc

SEQ ID NO: 1038285 - RNA, 22 nt, Human
ugcuggcuguauaugugagagu

SEQ ID NO: 1038286 - RNA, 22 nt, Human
cuccucugucuggcccugagcc

SEQ ID NO: 1038287 - RNA, 22 nt, Human
ugcugucuuccaggauggugaa

SEQ ID NO: 1038288 - RNA, 22 nt, Human
aggagcugagucagcccgacag

SEQ ID NO: 1038289 - RNA, 22 nt, Human
caggggcuuuuccucuauaagg

SEQ ID NO: 1038290 - RNA, 22 nt, Human
acaggggcuccgaaggugaggg

SEQ ID NO: 1038291 - RNA, 22 nt, Human
uccugccugcaaucccagcacu

SEQ ID NO: 1038292 - RNA, 22 nt, Human
ucagaaauuuucucaguaguuc

SEQ ID NO: 1038293 - RNA, 22 nt, Human
auuguguaauuuucagcucaua

SEQ ID NO: 1038294 - RNA, 22 nt, Human
cugccuuccaaccccagacucc

SEQ ID NO: 1038295 - RNA, 22 nt, Human
aagcagccacuggccaguuaua

SEQ ID NO: 1038296 - RNA, 22 nt, Human
auaguacacauccuacaauguu

SEQ ID NO: 1038297 - RNA, 22 nt, Human
ucaguaacuuacuuauucaccu

SEQ ID NO: 1038298 - RNA, 22 nt, Human
gugcugcagagucucgugccgc

SEQ ID NO: 1038299 - RNA, 22 nt, Human
cugggagaugacucagagcagg

SEQ ID NO: 1038300 - RNA, 22 nt, Human
agaaggaguguacaggucaugc

SEQ ID NO: 1038301 - RNA, 22 nt, Human
gagggcugaugcuuacuuauuu

SEQ ID NO: 1038302 - RNA, 22 nt, Human
cucaggaggaggaaguucauug

SEQ ID NO: 1038303 - RNA, 22 nt, Human
uauucacaggcuggagugaugu

SEQ ID NO: 1038304 - RNA, 22 nt, Human
agcugagagguggcaagcugua

SEQ ID NO: 1038305 - RNA, 22 nt, Human
gcugccugauguccagcaggac

SEQ ID NO: 1038306 - RNA, 22 nt, Human
cccuggguucuggcugggcugc

SEQ ID NO: 1038307 - RNA, 18 nt, Human
cagaugagaugcaaucuc

SEQ ID NO: 1038308 - RNA, 23 nt, Human
aguacauucgaaaaauucuguga

SEQ ID NO: 1038309 - RNA, 22 nt, Human
ccagcuggaagagugcagaacu

SEQ ID NO: 1038310 - RNA, 22 nt, Human
ugggggagauugugcaucucua

SEQ ID NO: 1038311 - RNA, 19 nt, Human
ucucuggggacacuuucac

SEQ ID NO: 1038312 - RNA, 22 nt, Human
cuggcuggcaaguagaacacaa

SEQ ID NO: 1038313 - RNA, 22 nt, Human
cagggcccaagacacaaugagg

SEQ ID NO: 1038314 - RNA, 22 nt, Human
cagagcugggaucccaugggcg

SEQ ID NO: 1038315 - RNA, 22 nt, Human
agaaaucugacugcugugcaca

SEQ ID NO: 1038316 - RNA, 22 nt, Human
gguguccaucaggcugugcuuc

SEQ ID NO: 1038317 - RNA, 22 nt, Human
aggcugcuggcaggcguggacg

SEQ ID NO: 1038318 - RNA, 22 nt, Human
gguggccuccagggcauaggug

SEQ ID NO: 1038319 - RNA, 22 nt, Human
cccagccucuguuugcuccucu

SEQ ID NO: 1038320 - RNA, 22 nt, Human
uuucaaagguggaagagugaau

SEQ ID NO: 1038321 - RNA, 22 nt, Human
gccaggcuguuuuuauuacugu

SEQ ID NO: 1038322 - RNA, 22 nt, Human
aaggccugaacaugaggagaug

SEQ ID NO: 1038323 - RNA, 23 nt, Human
aguuuuucugcaugguucuguau

SEQ ID NO: 1038324 - RNA, 22 nt, Human
uccagccacucagcagggauug

SEQ ID NO: 1038325 - RNA, 22 nt, Human
aggaaagcucccaguagggcuc

SEQ ID NO: 1038326 - RNA, 22 nt, Human
augucuuucgcaucaguagcua

SEQ ID NO: 1038327 - RNA, 21 nt, Human
agagaauugccuuagauguuc

SEQ ID NO: 1038328 - RNA, 22 nt, Human
ccugggcuugcaucugugcugg

SEQ ID NO: 1038329 - RNA, 23 nt, Human
uggcucagcuaguuuuccauuuc

SEQ ID NO: 1038330 - RNA, 22 nt, Human
ugugcagggaagggcaugcuau

SEQ ID NO: 1038331 - RNA, 22 nt, Human
aaggcacuuuucuaaagaccuu

SEQ ID NO: 1038332 - RNA, 22 nt, Human
ucuggcugcugcgugagugcuu

SEQ ID NO: 1038333 - RNA, 22 nt, Human
ucuggcucauaggaaggccauu

SEQ ID NO: 1038334 - RNA, 22 nt, Human
ucuggagaacuugcaagaggau

SEQ ID NO: 1038335 - RNA, 22 nt, Human
agaggcuguuacacucccagau

SEQ ID NO: 1038336 - RNA, 22 nt, Human
uggcagagagacucuccuugau

SEQ ID NO: 1038337 - RNA, 22 nt, Human
gggcagcucucacagcagccaa

SEQ ID NO: 1038338 - RNA, 19 nt, Human
agccuggagggcuggucac

SEQ ID NO: 1038339 - RNA, 22 nt, Human
augcaguaaaauaggagguaau

SEQ ID NO: 1038340 - RNA, 22 nt, Human
gcuguucugcgucccaggcugg

SEQ ID NO: 1038341 - RNA, 19 nt, Human
acaagggcaggcaagguga

SEQ ID NO: 1038342 - RNA, 22 nt, Human
gcucccaguucccaaagugacc

SEQ ID NO: 1038343 - RNA, 22 nt, Human
agccuggaggccaggagacagu

SEQ ID NO: 1038344 - RNA, 22 nt, Human
ucagagugcagggaguagcagc

SEQ ID NO: 1038345 - RNA, 22 nt, Human
guuauguaugggggccuuauga

SEQ ID NO: 1038346 - RNA, 22 nt, Human
gagccagccgcaagagcuguga

SEQ ID NO: 1038347 - RNA, 22 nt, Human
agggacagaugaaugacugagu

SEQ ID NO: 1038348 - RNA, 22 nt, Human
cuggcagcauggagccugugcu

SEQ ID NO: 1038349 - RNA, 22 nt, Human
ccagcagcccacaggcgucccu

SEQ ID NO: 1038350 - RNA, 22 nt, Human
agcagcugcagggagggucugc

SEQ ID NO: 1038351 - RNA, 22 nt, Human
ccacagagacagagcccagggu

SEQ ID NO: 1038352 - RNA, 22 nt, Human
auggaaagcuaagccauuuacc

SEQ ID NO: 1038353 - RNA, 21 nt, Human
ccuggcugcacaguugcuggu

SEQ ID NO: 1038354 - RNA, 22 nt, Human
ugccaggaggaggugggacaga

SEQ ID NO: 1038355 - RNA, 22 nt, Human
acagugucuccugguacccagu

SEQ ID NO: 1038356 - RNA, 22 nt, Human
ccucaggguggcaucagaucuu

SEQ ID NO: 1038357 - RNA, 22 nt, Human
ugcuuccuugagcucuccaauc

SEQ ID NO: 1038358 - RNA, 22 nt, Human
agauguguuucuaguuccugca

SEQ ID NO: 1038359 - RNA, 20 nt, Human
uccagggcuagggagcucau

SEQ ID NO: 1038360 - RNA, 22 nt, Human
gagaggcugacuggcuguccug

SEQ ID NO: 1038361 - RNA, 22 nt, Human
auugcagcuggucaggguaauu

SEQ ID NO: 1038362 - RNA, 22 nt, Human
gcucaggagcucuugguggcgc

SEQ ID NO: 1038363 - RNA, 22 nt, Human
cagaguacugggagaacagaag

SEQ ID NO: 1038364 - RNA, 22 nt, Human
cagccagcuucagauccaagcc

SEQ ID NO: 1038365 - RNA, 22 nt, Human
cagcagagcuuauguuggguca

SEQ ID NO: 1038366 - RNA, 22 nt, Human
uggcacugccaaccugcuaggu

SEQ ID NO: 1038367 - RNA, 22 nt, Human
cuggggccacaacggcgcacgc

SEQ ID NO: 1038368 - RNA, 22 nt, Human
auucaguuaaaaacuguacuuc

SEQ ID NO: 1038369 - RNA, 23 nt, Human
ucuccagugucucuucauugagu

SEQ ID NO: 1038370 - RNA, 19 nt, Human
ucccagagucuagagguug

SEQ ID NO: 1038371 - RNA, 22 nt, Human
cuacugaguccuucagcugcca

SEQ ID NO: 1038372 - RNA, 22 nt, Human
cugugugcugaaaugcagugag

SEQ ID NO: 1038373 - RNA, 22 nt, Human
ccaggagccacucaggcccaca

SEQ ID NO: 1038374 - RNA, 22 nt, Human
aaccaggacaauuugaauagaa

SEQ ID NO: 1038375 - RNA, 22 nt, Human
acauuucuuccuaauuaucccu

SEQ ID NO: 1038376 - RNA, 22 nt, Human
uggagcaggccggaaguggcuu

SEQ ID NO: 1038377 - RNA, 22 nt, Human
ggcagcaugagccuggugaauu

SEQ ID NO: 1038378 - RNA, 22 nt, Human
ggccccuggcaccaggcugauu

SEQ ID NO: 1038379 - RNA, 23 nt, Human
ccugggcauuggcugcagcuucu

SEQ ID NO: 1038380 - RNA, 22 nt, Human
uggcagggccugcucaucaucc

SEQ ID NO: 1038381 - RNA, 22 nt, Human
uccaguucuaggucacucucug

SEQ ID NO: 1038382 - RNA, 21 nt, Human
uccacaaguuagaaggaaauu

SEQ ID NO: 1038383 - RNA, 22 nt, Human
aucaguuugagugcugugucaa

SEQ ID NO: 1038384 - RNA, 22 nt, Human
guggagccaggggcuguaggua

SEQ ID NO: 1038385 - RNA, 22 nt, Human
uauuucugucagccagauaugg

SEQ ID NO: 1038386 - RNA, 22 nt, Human
gcucccagcuggagccucaaca

SEQ ID NO: 1038387 - RNA, 21 nt, Human
gggagcuggaaacugggugac

SEQ ID NO: 1038388 - RNA, 20 nt, Human
uguacacaguacuuuacaau

SEQ ID NO: 1038389 - RNA, 23 nt, Human
cagagcuggcucagagcugccug

SEQ ID NO: 1038390 - RNA, 22 nt, Human
gaggggcugggcagucccugga

SEQ ID NO: 1038391 - RNA, 22 nt, Human
uagcagggaagaugaucagaau

SEQ ID NO: 1038392 - RNA, 22 nt, Human
uuugggaagaggaaucucugga

SEQ ID NO: 1038393 - RNA, 22 nt, Human
cacucugacuggcccugcagga

SEQ ID NO: 1038394 - RNA, 22 nt, Human
ggagggagucagcugauuagaa

SEQ ID NO: 1038395 - RNA, 22 nt, Human
auaaaaguuuccaaucaugccu

SEQ ID NO: 1038396 - RNA, 17 nt, Human
uagagcugguucaggag

SEQ ID NO: 1038397 - RNA, 22 nt, Human
ccccuuccacagugcuuccuaa

SEQ ID NO: 1038398 - RNA, 22 nt, Human
aauuugcaugaugagaacaaua

SEQ ID NO: 1038399 - RNA, 22 nt, Human
gccaggcuccaggcccuccuga

SEQ ID NO: 1038400 - RNA, 22 nt, Human
ugccugucuuuccucccucgua

SEQ ID NO: 1038401 - RNA, 22 nt, Human
aacagaauaguugauguacagu

SEQ ID NO: 1038402 - RNA, 19 nt, Human
ggccuggauuuagggcucc

SEQ ID NO: 1038403 - RNA, 22 nt, Human
gcuuagucaauuauaaauaggc

SEQ ID NO: 1038404 - RNA, 22 nt, Human
gaguggggcccacugcugggug

SEQ ID NO: 1038405 - RNA, 22 nt, Human
gcaggggaguggaugauggauu

SEQ ID NO: 1038406 - RNA, 22 nt, Human
ugccaggcccugugcuggaugc

SEQ ID NO: 1038407 - RNA, 22 nt, Human
cugggagagaagcgaagcuggg

SEQ ID NO: 1038408 - RNA, 22 nt, Human
ugucuuuucuacuguaagcaua

SEQ ID NO: 1038409 - RNA, 22 nt, Human
acaaaggugcgucccuucagcu

SEQ ID NO: 1038410 - RNA, 22 nt, Human
gcugcccugugguccagcaggu

SEQ ID NO: 1038411 - RNA, 22 nt, Human
ccugucagcugauggcuaugua

SEQ ID NO: 1038412 - RNA, 22 nt, Human
uugggcuggcagagguggucuu

SEQ ID NO: 1038413 - RNA, 22 nt, Human
uggcuuccuccagagcaggagg

SEQ ID NO: 1038414 - RNA, 22 nt, Human
agaacuuaggaacaacagcuua

SEQ ID NO: 1038415 - RNA, 22 nt, Human
ucacuuauaaaaugcaagaucu

SEQ ID NO: 1038416 - RNA, 22 nt, Human
acaguaauaaguguuggugagg

SEQ ID NO: 1038417 - RNA, 18 nt, Human
aaggcuucaaagaguaga

SEQ ID NO: 1038418 - RNA, 22 nt, Human
uuucauuacguguuugacuugu

SEQ ID NO: 1038419 - RNA, 19 nt, Human
gccugccuggguuucugag

SEQ ID NO: 1038420 - RNA, 22 nt, Human
agagcagguggcaacucuggga

SEQ ID NO: 1038421 - RNA, 22 nt, Human
guguacauauugagucugcuga

SEQ ID NO: 1038422 - RNA, 17 nt, Human
ggcugcugugcuggugc

SEQ ID NO: 1038423 - RNA, 22 nt, Human
auauguguauuugguuagccua

SEQ ID NO: 1038424 - RNA, 22 nt, Human
ccagaggugccacagaaagagc

SEQ ID NO: 1038425 - RNA, 22 nt, Human
ugucacuucaggaaugcaggga

SEQ ID NO: 1038426 - RNA, 18 nt, Human
acauuucuaugcuucugg

SEQ ID NO: 1038427 - RNA, 22 nt, Human
uuccagaaaucuuucagcucaa

SEQ ID NO: 1038428 - RNA, 22 nt, Human
aagcugccacacggugaguacu

SEQ ID NO: 1038429 - RNA, 22 nt, Human
agauggggcagaauggagccau

SEQ ID NO: 1038430 - RNA, 22 nt, Human
aaggagagagcuuugcuggaac

SEQ ID NO: 1038431 - RNA, 22 nt, Human
ucucagagggaggauuacugcc

SEQ ID NO: 1038432 - RNA, 22 nt, Human
ugcacacacaugaaguagcaug

SEQ ID NO: 1038433 - RNA, 19 nt, Human
ccaguagagacagcugcag

SEQ ID NO: 1038434 - RNA, 22 nt, Human
augauuuccaguuguugcuaag

SEQ ID NO: 1038435 - RNA, 23 nt, Human
cauguacagaguuugauaaagug

SEQ ID NO: 1038436 - RNA, 22 nt, Human
ggucaggguuccagguaucuuc

SEQ ID NO: 1038437 - RNA, 22 nt, Human
gccuccugaaaggaagagcucc

SEQ ID NO: 1038438 - RNA, 22 nt, Human
aaacucuggagauguuuaugca

SEQ ID NO: 1038439 - RNA, 22 nt, Human
cugccuggaccggcagcccucc

SEQ ID NO: 1038440 - RNA, 22 nt, Human
cccucuggcucuucucaggccg

SEQ ID NO: 1038441 - RNA, 22 nt, Human
aagggcugcuguagaagcagag

SEQ ID NO: 1038442 - RNA, 22 nt, Human
ugggcagacuaaggucaaagcu

SEQ ID NO: 1038443 - RNA, 22 nt, Human
ugcagugccucggcagugcagc

SEQ ID NO: 1038444 - RNA, 22 nt, Human
uggggcugucccgguuuggcga

SEQ ID NO: 1038445 - RNA, 22 nt, Human
agggcugcccagugugagagcu

SEQ ID NO: 1038446 - RNA, 22 nt, Human
uuagauauguuuuugcuaaugc

SEQ ID NO: 1038447 - RNA, 22 nt, Human
ucugagaggcagaccuuccuaa

SEQ ID NO: 1038448 - RNA, 22 nt, Human
aaaugcauguagaauaauagag

SEQ ID NO: 1038449 - RNA, 22 nt, Human
caaggaaacaugaaaugcauug

SEQ ID NO: 1038450 - RNA, 22 nt, Human
auuuuucucucacacuuaccag

SEQ ID NO: 1038451 - RNA, 22 nt, Human
cucuggagguugagcccagcaa

SEQ ID NO: 1038452 - RNA, 22 nt, Human
ggccucugcccucacuccuguc

SEQ ID NO: 1038453 - RNA, 22 nt, Human
gggccugugcacaguucuguua

SEQ ID NO: 1038454 - RNA, 22 nt, Human
cagcaauaguguguuuguuuca

SEQ ID NO: 1038455 - RNA, 22 nt, Human
cagcaggcccaggugcugguga

SEQ ID NO: 1038456 - RNA, 22 nt, Human
caacagaagguguacuacugaa

SEQ ID NO: 1038457 - RNA, 22 nt, Human
uguauuuucugaagauaaucaa

SEQ ID NO: 1038458 - RNA, 22 nt, Human
gggauggggucaacauguaccu

SEQ ID NO: 1038459 - RNA, 22 nt, Human
gagaggagucccuaucacaguu

SEQ ID NO: 1038460 - RNA, 22 nt, Human
aaucuuucccuauuaaaugugg

SEQ ID NO: 1038461 - RNA, 22 nt, Human
uuuaaaaaacuagucugagucu

SEQ ID NO: 1038462 - RNA, 22 nt, Human
cugcucugacccuuucaccuuc

SEQ ID NO: 1038463 - RNA, 18 nt, Human
aagaggaggagcagguug

SEQ ID NO: 1038464 - RNA, 22 nt, Human
cagcuugggucaggugccugcu

SEQ ID NO: 1038465 - RNA, 22 nt, Human
gaaggaaaaauacucuguaagg

SEQ ID NO: 1038466 - RNA, 22 nt, Human
agcagccagagaaugaugcagu

SEQ ID NO: 1038467 - RNA, 22 nt, Human
cuucucucugcauaggcauggg

SEQ ID NO: 1038468 - RNA, 22 nt, Human
cagcuggcgggcagagccgcca

SEQ ID NO: 1038469 - RNA, 22 nt, Human
uguccugggaaugggaugcagu

SEQ ID NO: 1038470 - RNA, 22 nt, Human
ccugucugaaggcagggggaug

SEQ ID NO: 1038471 - RNA, 22 nt, Human
agcagaagaaagccacaugacu

SEQ ID NO: 1038472 - RNA, 22 nt, Human
ggcaggaggugaguggcgggug

SEQ ID NO: 1038473 - RNA, 22 nt, Human
gcucugucauuuugcagacacu

SEQ ID NO: 1038474 - RNA, 22 nt, Human
cuauugaauuaacuauuaaagu

SEQ ID NO: 1038475 - RNA, 22 nt, Human
cagcaucaccgccauuucugau

SEQ ID NO: 1038476 - RNA, 22 nt, Human
cacaaugcguacauauaucaaa

SEQ ID NO: 1038477 - RNA, 22 nt, Human
aagaaauguagagccuaguaaa

SEQ ID NO: 1038478 - RNA, 22 nt, Human
acagcuggcaggggggcaugaa

SEQ ID NO: 1038479 - RNA, 22 nt, Human
uggccucugcaauggauucacc

SEQ ID NO: 1038480 - RNA, 22 nt, Human
cagggccacccucugcugggug

SEQ ID NO: 1038481 - RNA, 22 nt, Human
cuguccauuuucgugccuccuu

SEQ ID NO: 1038482 - RNA, 22 nt, Human
uccagggacacagaguccuucu

SEQ ID NO: 1038483 - RNA, 22 nt, Human
ucucuucuugauuuucacugga

SEQ ID NO: 1038484 - RNA, 22 nt, Human
uacaguagaauuuuuaguaacu

SEQ ID NO: 1038485 - RNA, 22 nt, Human
cugcagcuuuggaaaccuguuu

SEQ ID NO: 1038486 - RNA, 22 nt, Human
ugcugucugcaacaguacuaca

SEQ ID NO: 1038487 - RNA, 22 nt, Human
uuccucucaacaugccugccgg

SEQ ID NO: 1038488 - RNA, 22 nt, Human
ucucuggaauuggcugaggcaa

SEQ ID NO: 1038489 - RNA, 22 nt, Human
aauacaaucaaauucacuagca

SEQ ID NO: 1038490 - RNA, 22 nt, Human
ucagaggagccaaaguucugag

SEQ ID NO: 1038491 - RNA, 22 nt, Human
ggcagggaaacagcugauccca

SEQ ID NO: 1038492 - RNA, 21 nt, Human
agccuggcccagggggaggcu

SEQ ID NO: 1038493 - RNA, 20 nt, Human
uacuugaauguugcagcagu

SEQ ID NO: 1038494 - RNA, 22 nt, Human
gccugggagggcagcagugugg

SEQ ID NO: 1038495 - RNA, 22 nt, Human
cagcuggcuccaccucugggcu

SEQ ID NO: 1038496 - RNA, 22 nt, Human
cucuccagaauaugccgccgug

SEQ ID NO: 1038497 - RNA, 22 nt, Human
cuccugagcucugaggaagcuu

SEQ ID NO: 1038498 - RNA, 22 nt, Human
cugggcagugcagcuauagaac

SEQ ID NO: 1038499 - RNA, 22 nt, Human
auucuccacacauccagaccuu

SEQ ID NO: 1038500 - RNA, 22 nt, Human
uagaaaugcccagauucugcua

SEQ ID NO: 1038501 - RNA, 22 nt, Human
gaggcagagugcaccccaggag

SEQ ID NO: 1038502 - RNA, 22 nt, Human
ccugccuguaagauggguacaa

SEQ ID NO: 1038503 - RNA, 22 nt, Human
uugcacagaugagggugaugcu

SEQ ID NO: 1038504 - RNA, 22 nt, Human
gagguauguaugcuacauucuu

SEQ ID NO: 1038505 - RNA, 22 nt, Human
aguguuucucagaagggccuau

SEQ ID NO: 1038506 - RNA, 22 nt, Human
uggcucagaagaaaagguaaac

SEQ ID NO: 1038507 - RNA, 22 nt, Human
gggcuucucuuaugcuaacugg

SEQ ID NO: 1038508 - RNA, 22 nt, Human
guuugcauuccaauuuagggga

SEQ ID NO: 1038509 - RNA, 22 nt, Human
caggcagggagcuggaaaggau

SEQ ID NO: 1038510 - RNA, 19 nt, Human
gcaggcacagcccugggug

SEQ ID NO: 1038511 - RNA, 22 nt, Human
gaggcagaggaagguggucucu

SEQ ID NO: 1038512 - RNA, 22 nt, Human
aagggagacaguugugugagga

SEQ ID NO: 1038513 - RNA, 22 nt, Human
acugcaucugaaacauggguca

SEQ ID NO: 1038514 - RNA, 22 nt, Human
gggcagccucggugccugcugc

SEQ ID NO: 1038515 - RNA, 19 nt, Human
auaaggcaauuggauuugg

SEQ ID NO: 1038516 - RNA, 22 nt, Human
caagauggacauaaggagagaa

SEQ ID NO: 1038517 - RNA, 22 nt, Human
gcucugcucuaacauuccugac

SEQ ID NO: 1038518 - RNA, 22 nt, Human
uggccucuuacgacauagccuu

SEQ ID NO: 1038519 - RNA, 22 nt, Human
cauuaagauuuuuuucuacugg

SEQ ID NO: 1038520 - RNA, 22 nt, Human
cagccugcauuuguaucuguau

SEQ ID NO: 1038521 - RNA, 22 nt, Human
uggccugaggcucggcaugggu

SEQ ID NO: 1038522 - RNA, 22 nt, Human
uaaagguaacaugaacugcuuu

SEQ ID NO: 1038523 - RNA, 22 nt, Human
uuagauaauguuauuguaauuu

SEQ ID NO: 1038524 - RNA, 22 nt, Human
gcaaaugaguuguaacauaaaa

SEQ ID NO: 1038525 - RNA, 22 nt, Human
agcuuuauauuuaaugaauucu

SEQ ID NO: 1038526 - RNA, 22 nt, Human
cuggccaacuugcuuguuggca

SEQ ID NO: 1038527 - RNA, 22 nt, Human
ugccuggcaacuguggugggcu

SEQ ID NO: 1038528 - RNA, 22 nt, Human
ggugggcagcucuuggcaggca

SEQ ID NO: 1038529 - RNA, 22 nt, Human
uauuuugucuucugcucaucac

SEQ ID NO: 1038530 - RNA, 22 nt, Human
acauuucuggaguuucucaaca

SEQ ID NO: 1038531 - RNA, 22 nt, Human
aggcagcagccacaaggccuga

SEQ ID NO: 1038532 - RNA, 18 nt, Human
gugacagcugcuagcuca

SEQ ID NO: 1038533 - RNA, 22 nt, Human
aagugagauuauauguacggga

SEQ ID NO: 1038534 - RNA, 22 nt, Human
uaguaacagauuuauacagucu

SEQ ID NO: 1038535 - RNA, 22 nt, Human
ucccaguguggcaggccaugga

SEQ ID NO: 1038536 - RNA, 22 nt, Human
guuuggggucugcagagcggcg

SEQ ID NO: 1038537 - RNA, 21 nt, Human
aacauuucaggauccaaauug

SEQ ID NO: 1038538 - RNA, 22 nt, Human
gcuggccugggcagccugucgg

SEQ ID NO: 1038539 - RNA, 22 nt, Human
aagaugauagaucugucaaugu

SEQ ID NO: 1038540 - RNA, 23 nt, Human
agcagccauagggaagcaauaca

SEQ ID NO: 1038541 - RNA, 22 nt, Human
agggccugggauguccuccuag

SEQ ID NO: 1038542 - RNA, 22 nt, Human
uguguacauaucuauccuagau

SEQ ID NO: 1038543 - RNA, 22 nt, Human
uccucagaaaccccugugaggu

SEQ ID NO: 1038544 - RNA, 22 nt, Human
gcagccacacuguuacagaaug

SEQ ID NO: 1038545 - RNA, 17 nt, Human
acacagccagguucucc

SEQ ID NO: 1038546 - RNA, 19 nt, Human
cucugccucccuccugggu

SEQ ID NO: 1038547 - RNA, 22 nt, Human
ccagggcauguccaagacuuag

SEQ ID NO: 1038548 - RNA, 22 nt, Human
ggcucagguuuaaagugcuuua

SEQ ID NO: 1038549 - RNA, 22 nt, Human
acagaacugcaggaggaaaagc

SEQ ID NO: 1038550 - RNA, 22 nt, Human
acauuucuauagugcaucuguu

SEQ ID NO: 1038551 - RNA, 22 nt, Human
gggagggaaggaggcgccgugu

SEQ ID NO: 1038552 - RNA, 22 nt, Human
gaaucacgguauucugcacggg

SEQ ID NO: 1038553 - RNA, 22 nt, Human
uuccaguucccaugaggauuaa

SEQ ID NO: 1038554 - RNA, 22 nt, Human
gugucccacucuggaggugaag

SEQ ID NO: 1038555 - RNA, 22 nt, Human
ccaggccuagccccugagggua

SEQ ID NO: 1038556 - RNA, 21 nt, Human
aagagcugucaggaaggcugc

SEQ ID NO: 1038557 - RNA, 22 nt, Human
uccagggaaggugugaggcugg

SEQ ID NO: 1038558 - RNA, 22 nt, Human
uccugcagagccgcccucaggu

SEQ ID NO: 1038559 - RNA, 22 nt, Human
acauucuagaagucuuugcaau

SEQ ID NO: 1038560 - RNA, 22 nt, Human
ucagagaaaugaaguagggauu

SEQ ID NO: 1038561 - RNA, 22 nt, Human
gaggccuggaauuccagccugg

SEQ ID NO: 1038562 - RNA, 22 nt, Human
gcagcccaaaaaagagguagau

SEQ ID NO: 1038563 - RNA, 20 nt, Human
agccagaagaaggcuggaga

SEQ ID NO: 1038564 - RNA, 20 nt, Human
ucccuggaggugguggcauc

SEQ ID NO: 1038565 - RNA, 22 nt, Human
cugccagcucgccacaaugaca

SEQ ID NO: 1038566 - RNA, 22 nt, Human
ugaaccagagucuccagugguu

SEQ ID NO: 1038567 - RNA, 22 nt, Human
gcagggcaugggcccugucugc

SEQ ID NO: 1038568 - RNA, 23 nt, Human
aaguucaagucacagccugucuu

SEQ ID NO: 1038569 - RNA, 23 nt, Human
ggcagcucucaucugaugacuga

SEQ ID NO: 1038570 - RNA, 22 nt, Human
ugggcugccagcucuccagaug

SEQ ID NO: 1038571 - RNA, 22 nt, Human
cacaagacuuauuuguguagaa

SEQ ID NO: 1038572 - RNA, 22 nt, Human
ccugagaggcccucucacuguc

SEQ ID NO: 1038573 - RNA, 22 nt, Human
ggccugucucacccccgggugc

SEQ ID NO: 1038574 - RNA, 22 nt, Human
caaagguaaagaucugcugugg

SEQ ID NO: 1038575 - RNA, 22 nt, Human
cacauuucugugagucaauauu

SEQ ID NO: 1038576 - RNA, 22 nt, Human
auggaagguccuacagagcgca

SEQ ID NO: 1038577 - RNA, 22 nt, Human
ccagcuucucucugaugcagcu

SEQ ID NO: 1038578 - RNA, 22 nt, Human
uaaugcacagaauugacauggg

SEQ ID NO: 1038579 - RNA, 22 nt, Human
gaagccccaaacccucgccauc

SEQ ID NO: 1038580 - RNA, 22 nt, Human
ugggugggagcgcccugucugg

SEQ ID NO: 1038581 - RNA, 22 nt, Human
guggccugucagaagccguggg

SEQ ID NO: 1038582 - RNA, 22 nt, Human
cugcugggcagaggcugcauga

SEQ ID NO: 1038583 - RNA, 22 nt, Human
acugggccggugcagaguaguu

SEQ ID NO: 1038584 - RNA, 22 nt, Human
cugggccuagcaacagaggagu

SEQ ID NO: 1038585 - RNA, 20 nt, Human
gucugaggagcagugggaaa

SEQ ID NO: 1038586 - RNA, 22 nt, Human
aucaaaguucguaacugauaac

SEQ ID NO: 1038587 - RNA, 22 nt, Human
aggaccugacuggcuccugcuu

SEQ ID NO: 1038588 - RNA, 22 nt, Human
auuuugaaaagcauuugaguaa

SEQ ID NO: 1038589 - RNA, 22 nt, Human
ugcccacaggaagacaccagcg

SEQ ID NO: 1038590 - RNA, 22 nt, Human
gcaggugggggucggugcaucu

SEQ ID NO: 1038591 - RNA, 23 nt, Human
gccagccuugcucuccugcagcc

SEQ ID NO: 1038592 - RNA, 22 nt, Human
cugagccagagggagucggguc

SEQ ID NO: 1038593 - RNA, 22 nt, Human
uccucaggaugugggguagaau

SEQ ID NO: 1038594 - RNA, 22 nt, Human
cugaagaggacgcagcagcaag

SEQ ID NO: 1038595 - RNA, 22 nt, Human
gccugccugaaggcuguaccag

SEQ ID NO: 1038596 - RNA, 22 nt, Human
gcuggccaguguggugaccacc

SEQ ID NO: 1038597 - RNA, 22 nt, Human
uugacagcuauuuugcuuugau

SEQ ID NO: 1038598 - RNA, 22 nt, Human
agcugcugagccaggcugaugu

SEQ ID NO: 1038599 - RNA, 21 nt, Human
ugggcagauggcaguguggcu

SEQ ID NO: 1038600 - RNA, 22 nt, Human
uacauaguauucacauuguuuu

SEQ ID NO: 1038601 - RNA, 22 nt, Human
ccuggcugccgagugugcagcg

SEQ ID NO: 1038602 - RNA, 22 nt, Human
uaaaaguuuuaguuguacauaa

SEQ ID NO: 1038603 - RNA, 22 nt, Human
augucuuuauaaauguauaaug

SEQ ID NO: 1038604 - RNA, 22 nt, Human
ugggcacuguagcuggugcugg

SEQ ID NO: 1038605 - RNA, 17 nt, Human
acaagcaguggccaugg

SEQ ID NO: 1038606 - RNA, 22 nt, Human
ggcagggugccuggcuccuguu

SEQ ID NO: 1038607 - RNA, 22 nt, Human
ugggcagaaggaagagccaccu

SEQ ID NO: 1038608 - RNA, 22 nt, Human
agaggccagguccagaguuugu

SEQ ID NO: 1038609 - RNA, 22 nt, Human
gaggcugcuuugaugacaggag

SEQ ID NO: 1038610 - RNA, 22 nt, Human
uccucaugccgggucucacgcu

SEQ ID NO: 1038611 - RNA, 22 nt, Human
acagcuguauccccagagcuca

SEQ ID NO: 1038612 - RNA, 22 nt, Human
caagggccuccaccuugcucgu

SEQ ID NO: 1038613 - RNA, 22 nt, Human
ucagaacauuuaaaaagugguu

SEQ ID NO: 1038614 - RNA, 22 nt, Human
guaagcaucugucucuucugca

SEQ ID NO: 1038615 - RNA, 23 nt, Human
ccucccaccuauuucacuuucuu

SEQ ID NO: 1038616 - RNA, 22 nt, Human
gagcagcuuaugucaagccaga

SEQ ID NO: 1038617 - RNA, 22 nt, Human
agggaauguagcaagaugccaa

SEQ ID NO: 1038618 - RNA, 22 nt, Human
ucucugggauaaacugggccag

SEQ ID NO: 1038619 - RNA, 22 nt, Human
cagcagcuucuguugaucagaa

SEQ ID NO: 1038620 - RNA, 22 nt, Human
uuugcuauuuuucugugcagcu

SEQ ID NO: 1038621 - RNA, 22 nt, Human
uuuuucaugagacuagaaguca

SEQ ID NO: 1038622 - RNA, 22 nt, Human
caaauguguagagcuuuugggg

SEQ ID NO: 1038623 - RNA, 22 nt, Human
gauuuccuugcauauugguaau

SEQ ID NO: 1038624 - RNA, 22 nt, Human
uuugcauuuauaaguuggugga

SEQ ID NO: 1038625 - RNA, 22 nt, Human
accuggccauccagcuggcauc

SEQ ID NO: 1038626 - RNA, 22 nt, Human
uggagcagagaugguggccuuc

SEQ ID NO: 1038627 - RNA, 22 nt, Human
cuggguggaucgcagccccagg

SEQ ID NO: 1038628 - RNA, 20 nt, Human
cccuggagagaagcuccacg

SEQ ID NO: 1038629 - RNA, 22 nt, Human
ccuggagcuuggucacgcugcg

SEQ ID NO: 1038630 - RNA, 22 nt, Human
cccugcagaaccacagacaaac

SEQ ID NO: 1038631 - RNA, 22 nt, Human
agagaauuacagaagaauguca

SEQ ID NO: 1038632 - RNA, 22 nt, Human
ucaguuuucauuucaugagcag

SEQ ID NO: 1038633 - RNA, 22 nt, Human
ccugccagugaagcugacgggc

SEQ ID NO: 1038634 - RNA, 18 nt, Human
ggcugugcguggaggcug

SEQ ID NO: 1038635 - RNA, 22 nt, Human
agcagcuccugccaugagugcu

SEQ ID NO: 1038636 - RNA, 22 nt, Human
ucaaauguucccuguacuggcc

SEQ ID NO: 1038637 - RNA, 21 nt, Human
ugucagaaauaagcaugugau

SEQ ID NO: 1038638 - RNA, 22 nt, Human
ccaggagucuggaugagguguc

SEQ ID NO: 1038639 - RNA, 22 nt, Human
gucucagggacugcuucugggg

SEQ ID NO: 1038640 - RNA, 22 nt, Human
gacagcaggagaucaugauaga

SEQ ID NO: 1038641 - RNA, 22 nt, Human
agauuucagguuggggcagaag

SEQ ID NO: 1038642 - RNA, 22 nt, Human
ucugccuucgcugcucccugaa

SEQ ID NO: 1038643 - RNA, 22 nt, Human
uccugagauguggagcuccaug

SEQ ID NO: 1038644 - RNA, 22 nt, Human
gcccugggauuggguggaggcu

SEQ ID NO: 1038645 - RNA, 20 nt, Human
cucaguguggccugaguguu

SEQ ID NO: 1038646 - RNA, 20 nt, Human
uacauucaaaacaaacucug

SEQ ID NO: 1038647 - RNA, 23 nt, Human
uggccugcagaguuucugcuggg

SEQ ID NO: 1038648 - RNA, 22 nt, Human
gggcaugguggcaggcaccugu

SEQ ID NO: 1038649 - RNA, 19 nt, Human
gagguggguccccgcagcc

SEQ ID NO: 1038650 - RNA, 22 nt, Human
aaaugcauaucaaagacuugaa

SEQ ID NO: 1038651 - RNA, 22 nt, Human
ucugggcucugucagcaccucu

SEQ ID NO: 1038652 - RNA, 22 nt, Human
cagaauaugacaagauuuuccu

SEQ ID NO: 1038653 - RNA, 22 nt, Human
uuccuguaguugugcaauguac

SEQ ID NO: 1038654 - RNA, 22 nt, Human
ccauuugucaccucugcacucc

SEQ ID NO: 1038655 - RNA, 22 nt, Human
acuggaagccaguugacaauca

SEQ ID NO: 1038656 - RNA, 22 nt, Human
caggagcucuuaaggaugugau

SEQ ID NO: 1038657 - RNA, 22 nt, Human
ugucucagaguaucccugaacu

SEQ ID NO: 1038658 - RNA, 22 nt, Human
ccagucagccaagcugcagcgg

SEQ ID NO: 1038659 - RNA, 22 nt, Human
gcucugggcugcccucuggaca

SEQ ID NO: 1038660 - RNA, 23 nt, Human
gcucugagggcuuaucccuccca

SEQ ID NO: 1038661 - RNA, 22 nt, Human
uguaggauuuucaccagaccuu

SEQ ID NO: 1038662 - RNA, 22 nt, Human
uggcucagucuggguugacuga

SEQ ID NO: 1038663 - RNA, 22 nt, Human
ccaccuccaccuauugccagcc

SEQ ID NO: 1038664 - RNA, 22 nt, Human
gggaggcuggcucuggccacag

SEQ ID NO: 1038665 - RNA, 22 nt, Human
caugggaggucugcaaggugcu

SEQ ID NO: 1038666 - RNA, 22 nt, Human
ucaggcugaggucaucugcauc

SEQ ID NO: 1038667 - RNA, 22 nt, Human
ccuguccuccaagagcacaucu

SEQ ID NO: 1038668 - RNA, 22 nt, Human
cacaggcugcccgcagcuggga

SEQ ID NO: 1038669 - RNA, 22 nt, Human
aggcuccuaucgcuuucagcaa

SEQ ID NO: 1038670 - RNA, 22 nt, Human
cugaggcucaagggcagguggg

SEQ ID NO: 1038671 - RNA, 22 nt, Human
agguauagaauugaaaggguuu

SEQ ID NO: 1038672 - RNA, 22 nt, Human
ucuguggccuguguccaagugc

SEQ ID NO: 1038673 - RNA, 22 nt, Human
ucuggcucugaauucacuucug

SEQ ID NO: 1038674 - RNA, 20 nt, Human
aggcacuggauuucuuauau

SEQ ID NO: 1038675 - RNA, 22 nt, Human
ggauggagaugaccauggugac

SEQ ID NO: 1038676 - RNA, 22 nt, Human
auuuuucucuccacuccauuaa

SEQ ID NO: 1038677 - RNA, 22 nt, Human
cuuaacagagagaaguguugcu

SEQ ID NO: 1038678 - RNA, 22 nt, Human
cccagccugucuuucccaauga

SEQ ID NO: 1038679 - RNA, 22 nt, Human
cucaggauuuacuaauuucaag

SEQ ID NO: 1038680 - RNA, 19 nt, Human
uccauaagcuuguguucau

SEQ ID NO: 1038681 - RNA, 22 nt, Human
aagggcagggaguuugugucua

SEQ ID NO: 1038682 - RNA, 22 nt, Human
aaggcacugagccagccgucuc

SEQ ID NO: 1038683 - RNA, 22 nt, Human
agggcagcagcuccuccuagcu

SEQ ID NO: 1038684 - RNA, 22 nt, Human
uaugcacacauguaugcaugug

SEQ ID NO: 1038685 - RNA, 18 nt, Human
uucacaggaaaugucuuu

SEQ ID NO: 1038686 - RNA, 22 nt, Human
gucucccaaccccugugcccag

SEQ ID NO: 1038687 - RNA, 22 nt, Human
ccaggacucaguggggaaaggg

SEQ ID NO: 1038688 - RNA, 22 nt, Human
ucauaaaacacaccagguaguu

SEQ ID NO: 1038689 - RNA, 22 nt, Human
gcaggaagaugagcucagguaa

SEQ ID NO: 1038690 - RNA, 22 nt, Human
uuuucuaacaucuaguaauuug

SEQ ID NO: 1038691 - RNA, 22 nt, Human
gcaggcaggcuuccuugaacug

SEQ ID NO: 1038692 - RNA, 22 nt, Human
ggcagagacuggguuggcagag

SEQ ID NO: 1038693 - RNA, 22 nt, Human
caggaccuggaaugcuugugaa

SEQ ID NO: 1038694 - RNA, 22 nt, Human
agccagcuggugggucagcugg

SEQ ID NO: 1038695 - RNA, 22 nt, Human
cagggcuccccgcaccgcagcc

SEQ ID NO: 1038696 - RNA, 22 nt, Human
uguuccaucaguuuuugguuga

SEQ ID NO: 1038697 - RNA, 22 nt, Human
agagccuggaccugagcuacaa

SEQ ID NO: 1038698 - RNA, 22 nt, Human
ugaggcagcaauuguauuguau

SEQ ID NO: 1038699 - RNA, 22 nt, Human
ccugacucuggccaggccagcu

SEQ ID NO: 1038700 - RNA, 22 nt, Human
ucucagagcucacaccuccugg

SEQ ID NO: 1038701 - RNA, 21 nt, Human
aaagagguuaauauuguaagu

SEQ ID NO: 1038702 - RNA, 22 nt, Human
ggcugagcucaggggcagcagg

SEQ ID NO: 1038703 - RNA, 22 nt, Human
gggcagaggggcgcuucccucu

SEQ ID NO: 1038704 - RNA, 22 nt, Human
auucagcaguuccugcuucagu

SEQ ID NO: 1038705 - RNA, 21 nt, Human
uccaggaguggcugggcaggg

SEQ ID NO: 1038706 - RNA, 22 nt, Human
gccugccuuugugaggaagcgg

SEQ ID NO: 1038707 - RNA, 22 nt, Human
ggaaagaccugagauaggaaua

SEQ ID NO: 1038708 - RNA, 22 nt, Human
ugaagcaggaaacuucuuguuu

SEQ ID NO: 1038709 - RNA, 22 nt, Human
uauccaauucaccauugauggg

SEQ ID NO: 1038710 - RNA, 22 nt, Human
cagagcugcuucccaguuugug

SEQ ID NO: 1038711 - RNA, 22 nt, Human
gcugggagcaaguacucaucuu

SEQ ID NO: 1038712 - RNA, 22 nt, Human
ccagggcagggaccacgugucu

SEQ ID NO: 1038713 - RNA, 22 nt, Human
cugccagcucucuggaggcucu

SEQ ID NO: 1038714 - RNA, 22 nt, Human
gccaggaguucagaugcauguu

SEQ ID NO: 1038715 - RNA, 22 nt, Human
aaaguuuuagaacuaggaagca

SEQ ID NO: 1038716 - RNA, 22 nt, Human
gugccugcagcaauccauggca

SEQ ID NO: 1038717 - RNA, 22 nt, Human
cucccagagaccaagcugagaa

SEQ ID NO: 1038718 - RNA, 22 nt, Human
cuggccugaggccgccuucaga

SEQ ID NO: 1038719 - RNA, 22 nt, Human
gcuuucucuucacugauguuca

SEQ ID NO: 1038720 - RNA, 22 nt, Human
agcagcucacaggauuccugaa

SEQ ID NO: 1038721 - RNA, 22 nt, Human
uucugggacaucuggacaguuu

SEQ ID NO: 1038722 - RNA, 22 nt, Human
cucagagcaaugaacaugcaaa

SEQ ID NO: 1038723 - RNA, 22 nt, Human
uauucacaguugauuuacaguu

SEQ ID NO: 1038724 - RNA, 22 nt, Human
ggcugcuuuaucggcugcugaa

SEQ ID NO: 1038725 - RNA, 22 nt, Human
cuuuggaagugaccacaauccu

SEQ ID NO: 1038726 - RNA, 22 nt, Human
uggcagaguuauggguauuuau

SEQ ID NO: 1038727 - RNA, 22 nt, Human
agggcuggccacaugauuuggu

SEQ ID NO: 1038728 - RNA, 22 nt, Human
aagauguaucaguuaagucuuc

SEQ ID NO: 1038729 - RNA, 22 nt, Human
acucccacuccagaguagaagc

SEQ ID NO: 1038730 - RNA, 22 nt, Human
uccauuuuguagguaugcuaca

SEQ ID NO: 1038731 - RNA, 22 nt, Human
cucaggauagcugcgcagccug

SEQ ID NO: 1038732 - RNA, 22 nt, Human
ggccgggcaggucucagccagc

SEQ ID NO: 1038733 - RNA, 22 nt, Human
caagagcuggagaggcagucua

SEQ ID NO: 1038734 - RNA, 22 nt, Human
cugcagcuguagaggacagugg

SEQ ID NO: 1038735 - RNA, 22 nt, Human
ucccaagugucuuggaccaggg

SEQ ID NO: 1038736 - RNA, 22 nt, Human
ugccagcaguagcaguaggcca

SEQ ID NO: 1038737 - RNA, 19 nt, Human
aggacucuggaggcaugag

SEQ ID NO: 1038738 - RNA, 22 nt, Human
acccagagcugggcuuggcaaa

SEQ ID NO: 1038739 - RNA, 22 nt, Human
uacaugcuccacuuucuccugu

SEQ ID NO: 1038740 - RNA, 22 nt, Human
auucaagagcccauguuuccug

SEQ ID NO: 1038741 - RNA, 20 nt, Human
ucagugauuaucucugagug

SEQ ID NO: 1038742 - RNA, 22 nt, Human
aaaaucugcuuccuuuuacaga

SEQ ID NO: 1038743 - RNA, 22 nt, Human
ucacagggcauuauggcuccag

SEQ ID NO: 1038744 - RNA, 22 nt, Human
ccauaagguuuggggccaugca

SEQ ID NO: 1038745 - RNA, 22 nt, Human
agcuccugcacccagccuugag

SEQ ID NO: 1038746 - RNA, 22 nt, Human
ggagaaggaagaaagcuacuau

SEQ ID NO: 1038747 - RNA, 22 nt, Human
acauauuuccaugcagcauguc

SEQ ID NO: 1038748 - RNA, 21 nt, Human
gcucuuggaaggggcucagcu

SEQ ID NO: 1038749 - RNA, 22 nt, Human
cagcacugcuucgcagccaggg

SEQ ID NO: 1038750 - RNA, 22 nt, Human
ucugcagcgugcaggcuggugc

SEQ ID NO: 1038751 - RNA, 22 nt, Human
cauggccuugagugacugcacu

SEQ ID NO: 1038752 - RNA, 22 nt, Human
cccaagaucuuucgugcacuaa

SEQ ID NO: 1038753 - RNA, 22 nt, Human
cugggaggcaccgcgucgugcu

SEQ ID NO: 1038754 - RNA, 22 nt, Human
uccuucagcucucuauuuagau

SEQ ID NO: 1038755 - RNA, 22 nt, Human
aggagccaguuccaccccagga

SEQ ID NO: 1038756 - RNA, 22 nt, Human
ggccuuggugcucuguguugca

SEQ ID NO: 1038757 - RNA, 22 nt, Human
uacuuuggauccuuacaauagc

SEQ ID NO: 1038758 - RNA, 22 nt, Human
uauguguacaucugguugagca

SEQ ID NO: 1038759 - RNA, 22 nt, Human
cagcuugcaguacuuguuuuug

SEQ ID NO: 1038760 - RNA, 22 nt, Human
accaguccgcggagcuccgggg

SEQ ID NO: 1038761 - RNA, 22 nt, Human
ugugccuggcauucugggcuuc

SEQ ID NO: 1038762 - RNA, 22 nt, Human
gaaagaggaaggagauguauua

SEQ ID NO: 1038763 - RNA, 22 nt, Human
auaugugugccauuucagcagu

SEQ ID NO: 1038764 - RNA, 22 nt, Human
uggcucagccagcccuaggaac

SEQ ID NO: 1038765 - RNA, 22 nt, Human
gagccaggcaccuucuguguug

SEQ ID NO: 1038766 - RNA, 22 nt, Human
caggcacuguguuaggcacugu

SEQ ID NO: 1038767 - RNA, 22 nt, Human
cagggcuggcuguggcaaucuc

SEQ ID NO: 1038768 - RNA, 22 nt, Human
agagccugcuguguaagucaca

SEQ ID NO: 1038769 - RNA, 22 nt, Human
auuauguagguuaggugguugu

SEQ ID NO: 1038770 - RNA, 17 nt, Human
guccugggaggagagag

SEQ ID NO: 1038771 - RNA, 22 nt, Human
ggcccaucucuugcucuggguu

SEQ ID NO: 1038772 - RNA, 21 nt, Human
cagaggccucaugcucugugc

SEQ ID NO: 1038773 - RNA, 22 nt, Human
cugagaggcacaaggcauuucg

SEQ ID NO: 1038774 - RNA, 22 nt, Human
ggccugagcagacagcaugaug

SEQ ID NO: 1038775 - RNA, 22 nt, Human
cagacaggcuagccagacucac

SEQ ID NO: 1038776 - RNA, 22 nt, Human
ggagugacucacagcugggaca

SEQ ID NO: 1038777 - RNA, 22 nt, Human
ucagggcacauucugcaguggc

SEQ ID NO: 1038778 - RNA, 22 nt, Human
ggcaguggguuccccaaggcac

SEQ ID NO: 1038779 - RNA, 22 nt, Human
gggaugucacugugccuggcac

SEQ ID NO: 1038780 - RNA, 22 nt, Human
uuucacauaaauauuaugccua

SEQ ID NO: 1038781 - RNA, 22 nt, Human
uugucugucccagcuugugcau

SEQ ID NO: 1038782 - RNA, 22 nt, Human
ugcccaaguccuccaccgaggu

SEQ ID NO: 1038783 - RNA, 21 nt, Human
ucacuuauaauguauuugcug

SEQ ID NO: 1038784 - RNA, 22 nt, Human
ugcucuguauucuauggcaguu

SEQ ID NO: 1038785 - RNA, 22 nt, Human
gccaggcauuuguuaggugcug

SEQ ID NO: 1038786 - RNA, 22 nt, Human
aguccuucaagaaaucuggaaa

SEQ ID NO: 1038787 - RNA, 21 nt, Human
uuacuuuugcagcaaccuaau

SEQ ID NO: 1038788 - RNA, 22 nt, Human
ucccagcagucagagcuaugug

SEQ ID NO: 1038789 - RNA, 22 nt, Human
ugggaggcagguaggugaugau

SEQ ID NO: 1038790 - RNA, 22 nt, Human
uggggacacagagccaaacuau

SEQ ID NO: 1038791 - RNA, 22 nt, Human
uggcuggggagccccgacuccc

SEQ ID NO: 1038792 - RNA, 22 nt, Human
uaugugaauacagcaguggaug

SEQ ID NO: 1038793 - RNA, 22 nt, Human
acagaaauauucguggugcuug

SEQ ID NO: 1038794 - RNA, 22 nt, Human
gcaggcaguuugcuuuucccuc

SEQ ID NO: 1038795 - RNA, 22 nt, Human
accagccugucugagucguggg

SEQ ID NO: 1038796 - RNA, 22 nt, Human
aagcagcugauuucacagcuca

SEQ ID NO: 1038797 - RNA, 22 nt, Human
aguuuauguagaauuggcaaua

SEQ ID NO: 1038798 - RNA, 22 nt, Human
cauacauuuugcauauuuacca

SEQ ID NO: 1038799 - RNA, 22 nt, Human
agaaguaggcagggcuguauca

SEQ ID NO: 1038800 - RNA, 22 nt, Human
uaagcauucaaugcuuagcacu

SEQ ID NO: 1038801 - RNA, 22 nt, Human
gggcacuguggggcccaugcug

SEQ ID NO: 1038802 - RNA, 22 nt, Human
uaguuuuuucaacaaauggugc

SEQ ID NO: 1038803 - RNA, 22 nt, Human
agggucccgaaggagacagcaa

SEQ ID NO: 1038804 - RNA, 22 nt, Human
gcucccugacucaguuccugag

SEQ ID NO: 1038805 - RNA, 22 nt, Human
gcugggcagccccuacagagag

SEQ ID NO: 1038806 - RNA, 22 nt, Human
uggacagcgaaagugccuggga

SEQ ID NO: 1038807 - RNA, 22 nt, Human
gcucccagggaccgcagggcag

SEQ ID NO: 1038808 - RNA, 22 nt, Human
uaucuacaggugucagguaaga

SEQ ID NO: 1038809 - RNA, 22 nt, Human
auacaucuaugccuuucugaca

SEQ ID NO: 1038810 - RNA, 22 nt, Human
acauguguauagccuguauaga

SEQ ID NO: 1038811 - RNA, 22 nt, Human
gcaggggaguccacucuaugca

SEQ ID NO: 1038812 - RNA, 22 nt, Human
caaugugucaggaaaagggcca

SEQ ID NO: 1038813 - RNA, 22 nt, Human
accucugcaguagggcugugcc

SEQ ID NO: 1038814 - RNA, 22 nt, Human
aagaaugucguugguauuuuaa

SEQ ID NO: 1038815 - RNA, 22 nt, Human
aggcacugaccugcuuccuuga

SEQ ID NO: 1038816 - RNA, 22 nt, Human
cagcaauaagccagguuagaca

SEQ ID NO: 1038817 - RNA, 22 nt, Human
cauugacaucaggcuuggccaa

SEQ ID NO: 1038818 - RNA, 22 nt, Human
caggaacacaaugagucucaaa

SEQ ID NO: 1038819 - RNA, 22 nt, Human
uuugcauuuguucaaguauuga

SEQ ID NO: 1038820 - RNA, 22 nt, Human
agugucauuuuguccaucuucu

SEQ ID NO: 1038821 - RNA, 22 nt, Human
ucaguuuuuguuugccagauag

SEQ ID NO: 1038822 - RNA, 22 nt, Human
gcagggugauagugaggcucag

SEQ ID NO: 1038823 - RNA, 22 nt, Human
aagaacaacugcuuuaaaagca

SEQ ID NO: 1038824 - RNA, 22 nt, Human
agaggcuggauugagcauagac

SEQ ID NO: 1038825 - RNA, 22 nt, Human
gagcuuccugaugccgaccagu

SEQ ID NO: 1038826 - RNA, 22 nt, Human
cccugccuugggguccacaccg

SEQ ID NO: 1038827 - RNA, 22 nt, Human
cugcucuguuucuuagcugggu

SEQ ID NO: 1038828 - RNA, 17 nt, Human
ugagcaguagaagaugc

SEQ ID NO: 1038829 - RNA, 22 nt, Human
ggauggagguucucagaugcuc

SEQ ID NO: 1038830 - RNA, 22 nt, Human
uauguacauaacaugaaaugca

SEQ ID NO: 1038831 - RNA, 22 nt, Human
ucucacuggguauaaaugagua

SEQ ID NO: 1038832 - RNA, 22 nt, Human
ugucauguguucuuaaauacau

SEQ ID NO: 1038833 - RNA, 22 nt, Human
gcacacagauuaggaaacagaa

SEQ ID NO: 1038834 - RNA, 22 nt, Human
cagcugccacuugcucucggcu

SEQ ID NO: 1038835 - RNA, 22 nt, Human
accaucagagcacaguccgugc

SEQ ID NO: 1038836 - RNA, 22 nt, Human
ccugagggcgccgagcucccag

SEQ ID NO: 1038837 - RNA, 22 nt, Human
gugucauggaaaauugcaaugg

SEQ ID NO: 1038838 - RNA, 22 nt, Human
ugcagucuggauguccucagau

SEQ ID NO: 1038839 - RNA, 22 nt, Human
guguuuccuaguuuaaugaaug

SEQ ID NO: 1038840 - RNA, 22 nt, Human
uacuuuaaaaacugauaauuca

SEQ ID NO: 1038841 - RNA, 22 nt, Human
cccugcugucaggugcugggag

SEQ ID NO: 1038842 - RNA, 22 nt, Human
gugucccaaucuacuuuucccu

SEQ ID NO: 1038843 - RNA, 21 nt, Human
ggccugagcaccuguccaccu

SEQ ID NO: 1038844 - RNA, 22 nt, Human
guccucagucaguuuggugggg

SEQ ID NO: 1038845 - RNA, 22 nt, Human
agugagggaugaagaacugcgg

SEQ ID NO: 1038846 - RNA, 22 nt, Human
aggcuggggaauugaauuugcu

SEQ ID NO: 1038847 - RNA, 22 nt, Human
guggccugccagcagauggcgc

SEQ ID NO: 1038848 - RNA, 22 nt, Human
agcccagcaaagggagguucag

SEQ ID NO: 1038849 - RNA, 20 nt, Human
uaugaguauuacuuucagga

SEQ ID NO: 1038850 - RNA, 22 nt, Human
cugccagcaaugugaccaugcu

SEQ ID NO: 1038851 - RNA, 22 nt, Human
uccaaacacccuccaugcugca

SEQ ID NO: 1038852 - RNA, 22 nt, Human
ccuguguggaaaccgcaugacg

SEQ ID NO: 1038853 - RNA, 22 nt, Human
uccuggagauaauugcagugaa

SEQ ID NO: 1038854 - RNA, 22 nt, Human
ggcucuggugcccuggcuccca

SEQ ID NO: 1038855 - RNA, 22 nt, Human
caugucuggguauaugcauaug

SEQ ID NO: 1038856 - RNA, 22 nt, Human
gaggccugguuugcaugagaau

SEQ ID NO: 1038857 - RNA, 22 nt, Human
aaaucaaaagacauguguuuua

SEQ ID NO: 1038858 - RNA, 22 nt, Human
aacaggagaguaaauauaugau

SEQ ID NO: 1038859 - RNA, 22 nt, Human
agggcccauagaucgucagcuu

SEQ ID NO: 1038860 - RNA, 22 nt, Human
cacagaaaaaggcuugaaaauc

SEQ ID NO: 1038861 - RNA, 22 nt, Human
cugccugcuucugagccagagg

SEQ ID NO: 1038862 - RNA, 22 nt, Human
cagcugaguguuggcauguuca

SEQ ID NO: 1038863 - RNA, 22 nt, Human
uggccacagccucugccaguuc

SEQ ID NO: 1038864 - RNA, 22 nt, Human
acaguaauauugaugcucguca

SEQ ID NO: 1038865 - RNA, 22 nt, Human
uccucagacuucccuuugugua

SEQ ID NO: 1038866 - RNA, 22 nt, Human
cugggcugugguguggcccaaa

SEQ ID NO: 1038867 - RNA, 22 nt, Human
auuuuuccaugauacuuaucug

SEQ ID NO: 1038868 - RNA, 22 nt, Human
acugucaccaucagagcgggaa

SEQ ID NO: 1038869 - RNA, 22 nt, Human
gacucugcuacaggccgagguu

SEQ ID NO: 1038870 - RNA, 22 nt, Human
ugccugggguuggcaaacugcu

SEQ ID NO: 1038871 - RNA, 21 nt, Human
acaugcauagagagauuucug

SEQ ID NO: 1038872 - RNA, 22 nt, Human
uacagucuuuggaaagagauag

SEQ ID NO: 1038873 - RNA, 22 nt, Human
uauguacagggauagaacuuga

SEQ ID NO: 1038874 - RNA, 22 nt, Human
acugggccuugccauggcagcc

SEQ ID NO: 1038875 - RNA, 22 nt, Human
cccagcaucuccaggcauggcc

SEQ ID NO: 1038876 - RNA, 22 nt, Human
ccagguggugaaagugggcccu

SEQ ID NO: 1038877 - RNA, 22 nt, Human
ucuggagcgaggucccugucug

SEQ ID NO: 1038878 - RNA, 22 nt, Human
ugggcccugacuucaagcaucc

SEQ ID NO: 1038879 - RNA, 22 nt, Human
aaacauugcuaaauaaugcugc

SEQ ID NO: 1038880 - RNA, 17 nt, Human
cugcuuugugcaacgcu

SEQ ID NO: 1038881 - RNA, 22 nt, Human
cccuggaggucagaggccuggg

SEQ ID NO: 1038882 - RNA, 22 nt, Human
uauucacagcugccgcacucag

SEQ ID NO: 1038883 - RNA, 22 nt, Human
aaguucaauggaaaagcuuuag

SEQ ID NO: 1038884 - RNA, 22 nt, Human
cuuugcaauagaggcacacaug

SEQ ID NO: 1038885 - RNA, 22 nt, Human
ccuuccuggagcccaugcagau

SEQ ID NO: 1038886 - RNA, 22 nt, Human
auuuaugacuggugaauagaac

SEQ ID NO: 1038887 - RNA, 22 nt, Human
cagagguagccgagugcaaucg

SEQ ID NO: 1038888 - RNA, 22 nt, Human
ccaucagcuccaguaucuucug

SEQ ID NO: 1038889 - RNA, 22 nt, Human
gaagcagcaaaucugcaguauc

SEQ ID NO: 1038890 - RNA, 22 nt, Human
ucugucacccaggcuggagugc

SEQ ID NO: 1038891 - RNA, 19 nt, Human
acccagagcccuuugcagg

SEQ ID NO: 1038892 - RNA, 21 nt, Human
uaaagaagaugaaugugauca

SEQ ID NO: 1038893 - RNA, 22 nt, Human
gcagcugcagguggucccaugc

SEQ ID NO: 1038894 - RNA, 22 nt, Human
ggcagagcuuguuccuucuguu

SEQ ID NO: 1038895 - RNA, 22 nt, Human
ugcuggggagugauugaccauc

SEQ ID NO: 1038896 - RNA, 18 nt, Human
aaagaaggauuggagagc

SEQ ID NO: 1038897 - RNA, 22 nt, Human
agggagcuuccgaacuacagcu

SEQ ID NO: 1038898 - RNA, 22 nt, Human
gaggcucagagggagcaugguc

SEQ ID NO: 1038899 - RNA, 21 nt, Human
ugcaggagucugugagucagg

SEQ ID NO: 1038900 - RNA, 22 nt, Human
gugcagagaaaugagaagucga

SEQ ID NO: 1038901 - RNA, 22 nt, Human
agcccagguugaggcugcagug

SEQ ID NO: 1038902 - RNA, 23 nt, Human
uguaaaaugggguaguguuacca

SEQ ID NO: 1038903 - RNA, 22 nt, Human
ugcaugcagcuggugauaagaa

SEQ ID NO: 1038904 - RNA, 22 nt, Human
gccuggagacagcagaggcggc

SEQ ID NO: 1038905 - RNA, 22 nt, Human
cuauugaauagcccaaaucauu

SEQ ID NO: 1038906 - RNA, 22 nt, Human
uuccgcuggggccgccuggcgg

SEQ ID NO: 1038907 - RNA, 21 nt, Human
agcuggugucagagcucuggg

SEQ ID NO: 1038908 - RNA, 22 nt, Human
acauuuaaauaugccuuauauu

SEQ ID NO: 1038909 - RNA, 22 nt, Human
uaagaacagugacagccaacau

SEQ ID NO: 1038910 - RNA, 22 nt, Human
gcugccuguugaagggucugug

SEQ ID NO: 1038911 - RNA, 22 nt, Human
aggcacuguggaagacaugguu

SEQ ID NO: 1038912 - RNA, 22 nt, Human
gcaggagcucguuuccaggcug

SEQ ID NO: 1038913 - RNA, 22 nt, Human
ugggccaggauuucaagacccu

SEQ ID NO: 1038914 - RNA, 22 nt, Human
aagaugcuuauugcuccugcag

SEQ ID NO: 1038915 - RNA, 22 nt, Human
cugucagguuggucucagagcu

SEQ ID NO: 1038916 - RNA, 19 nt, Human
gccaggagggcucuggcug

SEQ ID NO: 1038917 - RNA, 22 nt, Human
acugagcugcaagucagggagg

SEQ ID NO: 1038918 - RNA, 22 nt, Human
ucugggagauccaagcagaacu

SEQ ID NO: 1038919 - RNA, 22 nt, Human
gggcagcagcaggaggucucug

SEQ ID NO: 1038920 - RNA, 22 nt, Human
cagcagugugcaggugugcugg

SEQ ID NO: 1038921 - RNA, 22 nt, Human
gggugggguguaucggauccua

SEQ ID NO: 1038922 - RNA, 22 nt, Human
gaacagaauuaccgaagaucug

SEQ ID NO: 1038923 - RNA, 22 nt, Human
cucuggagcgcugcuucccgcg

SEQ ID NO: 1038924 - RNA, 22 nt, Human
gagagcugugguuugaccaggc

SEQ ID NO: 1038925 - RNA, 22 nt, Human
uuauuaaugaguacaaguuauu

SEQ ID NO: 1038926 - RNA, 22 nt, Human
acagcagcuaaccccugggcca

SEQ ID NO: 1038927 - RNA, 22 nt, Human
caguacuuauuucuauuuaggg

SEQ ID NO: 1038928 - RNA, 19 nt, Human
acagagcucucugcuucug

SEQ ID NO: 1038929 - RNA, 22 nt, Human
uggaggcaucagagugcuuggc

SEQ ID NO: 1038930 - RNA, 22 nt, Human
gcaggcugauagaggauuccau

SEQ ID NO: 1038931 - RNA, 22 nt, Human
aaucgguugaacccaggaagug

SEQ ID NO: 1038932 - RNA, 22 nt, Human
cccacucccugcacgccugccg

SEQ ID NO: 1038933 - RNA, 22 nt, Human
cagacaugauguaagcagaggc

SEQ ID NO: 1038934 - RNA, 22 nt, Human
gugugccaccagucaaggugaa

SEQ ID NO: 1038935 - RNA, 22 nt, Human
ggcccugggcagaggagugggc

SEQ ID NO: 1038936 - RNA, 19 nt, Human
cugugcaggccgggcugag

SEQ ID NO: 1038937 - RNA, 22 nt, Human
gccugugacucgucuugggcca

SEQ ID NO: 1038938 - RNA, 22 nt, Human
uccugccuugccugggacauca

SEQ ID NO: 1038939 - RNA, 22 nt, Human
aaauucuuucauggcuaauaag

SEQ ID NO: 1038940 - RNA, 20 nt, Human
uucuggaggcuacaagucug

SEQ ID NO: 1038941 - RNA, 22 nt, Human
uauuacugagguuuuauggagu

SEQ ID NO: 1038942 - RNA, 22 nt, Human
aagaguuaagcaacagauacca

SEQ ID NO: 1038943 - RNA, 22 nt, Human
gagagugaugaaugguuaaaca

SEQ ID NO: 1038944 - RNA, 22 nt, Human
agggcucugagugggaaagagg

SEQ ID NO: 1038945 - RNA, 21 nt, Human
agaugaggauacugaggccua

SEQ ID NO: 1038946 - RNA, 22 nt, Human
acugaaggcuuaacucuuucau

SEQ ID NO: 1038947 - RNA, 22 nt, Human
gcugcucugcuguguaagcagg

SEQ ID NO: 1038948 - RNA, 22 nt, Human
ggcugcuguuucagagacuguu

SEQ ID NO: 1038949 - RNA, 22 nt, Human
gaugaggggucauuggcuggga

SEQ ID NO: 1038950 - RNA, 22 nt, Human
ugucccaggcugaaguacagug

SEQ ID NO: 1038951 - RNA, 22 nt, Human
cugcccugcccaggccuugggc

SEQ ID NO: 1038952 - RNA, 22 nt, Human
agggcagacuaggauggaagug

SEQ ID NO: 1038953 - RNA, 22 nt, Human
agggcugccugacuccagagcc

SEQ ID NO: 1038954 - RNA, 22 nt, Human
uuuagaaauugcagagugggug

SEQ ID NO: 1038955 - RNA, 22 nt, Human
ggaggugaggccguagggugug

SEQ ID NO: 1038956 - RNA, 20 nt, Human
ccagguggugccuggagagg

SEQ ID NO: 1038957 - RNA, 22 nt, Human
uggaggcaccacuggcugcccg

SEQ ID NO: 1038958 - RNA, 22 nt, Human
gcucacagccggcuggcagggg

SEQ ID NO: 1038959 - RNA, 22 nt, Human
cagacacaccaggcccauucug

SEQ ID NO: 1038960 - RNA, 22 nt, Human
gccaccucggcuuucucugcuc

SEQ ID NO: 1038961 - RNA, 22 nt, Human
ccaggacuuuaaguccagcacu

SEQ ID NO: 1038962 - RNA, 22 nt, Human
cuuccucugcggcgccgggcgc

SEQ ID NO: 1038963 - RNA, 17 nt, Human
gcaaucucagucuccuu

SEQ ID NO: 1038964 - RNA, 22 nt, Human
agcagggguaacagaaggaaag

SEQ ID NO: 1038965 - RNA, 22 nt, Human
uuacaaagcguugagacaagua

SEQ ID NO: 1038966 - RNA, 22 nt, Human
aggaaaaaccuguuaaugguag

SEQ ID NO: 1038967 - RNA, 22 nt, Human
ccugagagagaagcgaccuggu

SEQ ID NO: 1038968 - RNA, 21 nt, Human
aggugccaaggagaagcaggc

SEQ ID NO: 1038969 - RNA, 22 nt, Human
gcagcugccuauucagggcuug

SEQ ID NO: 1038970 - RNA, 22 nt, Human
acccucccauuuccauguagca

SEQ ID NO: 1038971 - RNA, 22 nt, Human
cacauuucuaggaaauuaaaug

SEQ ID NO: 1038972 - RNA, 22 nt, Human
caggaaugacugcagauggggc

SEQ ID NO: 1038973 - RNA, 22 nt, Human
ggcugucugugguggagcguug

SEQ ID NO: 1038974 - RNA, 22 nt, Human
aggacccagaggcagaggacgu

SEQ ID NO: 1038975 - RNA, 20 nt, Human
gccugccucagcuagcugag

SEQ ID NO: 1038976 - RNA, 22 nt, Human
agaaaagggcaggagggauaca

SEQ ID NO: 1038977 - RNA, 22 nt, Human
aggauccuuuggccacuucuua

SEQ ID NO: 1038978 - RNA, 22 nt, Human
gcugccugccuaguuccacagu

SEQ ID NO: 1038979 - RNA, 22 nt, Human
aagcagugcgcucaucuaaggg

SEQ ID NO: 1038980 - RNA, 22 nt, Human
gcagagcugggucuguauccaa

SEQ ID NO: 1038981 - RNA, 22 nt, Human
uauguacacauacacuuguaau

SEQ ID NO: 1038982 - RNA, 22 nt, Human
agggaggagaauggacuccuuc

SEQ ID NO: 1038983 - RNA, 22 nt, Human
ugggcagagaucuggaucaaac

SEQ ID NO: 1038984 - RNA, 22 nt, Human
ggcuggaaaagacaaagcuauu

SEQ ID NO: 1038985 - RNA, 22 nt, Human
gcugucacauuuggagcacugg

SEQ ID NO: 1038986 - RNA, 22 nt, Human
ggagcuguugcgcaugcgcucg

SEQ ID NO: 1038987 - RNA, 22 nt, Human
agcaggguauguuagagcugua

SEQ ID NO: 1038988 - RNA, 22 nt, Human
auauucuuccaaaacaucauuu

SEQ ID NO: 1038989 - RNA, 22 nt, Human
acagguggaggcuuuaggaggu

SEQ ID NO: 1038990 - RNA, 22 nt, Human
cuguguccugcgucaagccaau

SEQ ID NO: 1038991 - RNA, 22 nt, Human
cugaaggacuuggugauaguug

SEQ ID NO: 1038992 - RNA, 22 nt, Human
cuuugaaaacuuaaauaacagc

SEQ ID NO: 1038993 - RNA, 22 nt, Human
ugcagcaggagccaggccuggu

SEQ ID NO: 1038994 - RNA, 22 nt, Human
gcucccugcagcugagaguucc

SEQ ID NO: 1038995 - RNA, 22 nt, Human
uccaggcuagguuuacaggaca

SEQ ID NO: 1038996 - RNA, 23 nt, Human
ugucccagagggagggauaggcu

SEQ ID NO: 1038997 - RNA, 22 nt, Human
ccaggcagccaagugugugugu

SEQ ID NO: 1038998 - RNA, 22 nt, Human
uacauugugauguuucaauaca

SEQ ID NO: 1038999 - RNA, 22 nt, Human
ucagagugguagccuauuuucu

SEQ ID NO: 1039000 - RNA, 18 nt, Human
gaaaugugauucuagggc

SEQ ID NO: 1039001 - RNA, 22 nt, Human
auucuguauuucuaauaagauc

SEQ ID NO: 1039002 - RNA, 22 nt, Human
caagcagagacuagauagcugu

SEQ ID NO: 1039003 - RNA, 23 nt, Human
uggcagcagaucuuaaagugacc

SEQ ID NO: 1039004 - RNA, 22 nt, Human
cugggagguggagguugcauug

SEQ ID NO: 1039005 - RNA, 22 nt, Human
gguagcagggcugugagucaga

SEQ ID NO: 1039006 - RNA, 22 nt, Human
cuccaggagcugugucuuucuu

SEQ ID NO: 1039007 - RNA, 22 nt, Human
ggccucagaccggagcuggcca

SEQ ID NO: 1039008 - RNA, 17 nt, Human
ucaugcccaacuauuac

SEQ ID NO: 1039009 - RNA, 22 nt, Human
cugagggcccugaagcuuggca

SEQ ID NO: 1039010 - RNA, 22 nt, Human
uuaaaaugcagauucugauuca

SEQ ID NO: 1039011 - RNA, 22 nt, Human
gcagggcucugcuguaguccua

SEQ ID NO: 1039012 - RNA, 22 nt, Human
ggcaggugcucugugggccugg

SEQ ID NO: 1039013 - RNA, 22 nt, Human
ccagccagcugcccuuggggcc

SEQ ID NO: 1039014 - RNA, 22 nt, Human
uaaugcacaugacugaacuauu

SEQ ID NO: 1039015 - RNA, 22 nt, Human
ugggggugaaagucuggacagu

SEQ ID NO: 1039016 - RNA, 22 nt, Human
cugugcugauucagcacaggcc

SEQ ID NO: 1039017 - RNA, 22 nt, Human
cagagacagggcagggagugug

SEQ ID NO: 1039018 - RNA, 22 nt, Human
aucagcaaucaaauugcagagu

SEQ ID NO: 1039019 - RNA, 22 nt, Human
ugacaugcuuguuuuccuugaa

SEQ ID NO: 1039020 - RNA, 22 nt, Human
caguggcuguuucuggaaggca

SEQ ID NO: 1039021 - RNA, 22 nt, Human
acauagcuuaaaugagaagaua

SEQ ID NO: 1039022 - RNA, 22 nt, Human
gaagcagcuaggaucuucauuu

SEQ ID NO: 1039023 - RNA, 22 nt, Human
guuccauaucacagcagacgaa

SEQ ID NO: 1039024 - RNA, 22 nt, Human
ucauugcaguagggagagaccc

SEQ ID NO: 1039025 - RNA, 22 nt, Human
gcagcugggacacugaggccag

SEQ ID NO: 1039026 - RNA, 22 nt, Human
uccucugcuguucugguucuuu

SEQ ID NO: 1039027 - RNA, 22 nt, Human
acagaauuaaugaaaauuacaa

SEQ ID NO: 1039028 - RNA, 22 nt, Human
uaccugagcccagugcagcaua

SEQ ID NO: 1039029 - RNA, 22 nt, Human
aggcaguguguagcuggaagag

SEQ ID NO: 1039030 - RNA, 22 nt, Human
uggcagcuggagggcaauggcc

SEQ ID NO: 1039031 - RNA, 22 nt, Human
ugaagcagagugaaggugaauu

SEQ ID NO: 1039032 - RNA, 22 nt, Human
uggagggaacccaggcugcucu

SEQ ID NO: 1039033 - RNA, 22 nt, Human
aaagguuaguucuuagaagugc

SEQ ID NO: 1039034 - RNA, 22 nt, Human
ccagagcuccagggcuacagaa

SEQ ID NO: 1039035 - RNA, 18 nt, Human
acugugguuuauguguag

SEQ ID NO: 1039036 - RNA, 21 nt, Human
ugcccacagcaaaugcagagg

SEQ ID NO: 1039037 - RNA, 22 nt, Human
ucugggcugggagcguguggac

SEQ ID NO: 1039038 - RNA, 23 nt, Human
agucaguguaaguuuggaaugca

SEQ ID NO: 1039039 - RNA, 22 nt, Human
ccugaggggcugcaggccagcu

SEQ ID NO: 1039040 - RNA, 22 nt, Human
uccagucaucucccuucacauu

SEQ ID NO: 1039041 - RNA, 23 nt, Human
cauguacacacagcuguacagug

SEQ ID NO: 1039042 - RNA, 22 nt, Human
aggcaugugacccuggacucag

SEQ ID NO: 1039043 - RNA, 22 nt, Human
caagcccaggauuccccaguua

SEQ ID NO: 1039044 - RNA, 22 nt, Human
aaugcacagcuaaagugguucc

SEQ ID NO: 1039045 - RNA, 22 nt, Human
uggagcagggcaucacugugcg

SEQ ID NO: 1039046 - RNA, 22 nt, Human
acaacaggguaaggcaggccau

SEQ ID NO: 1039047 - RNA, 22 nt, Human
aggagcugaagucucugcacuc

SEQ ID NO: 1039048 - RNA, 22 nt, Human
cacccacccacugcucauuggc

SEQ ID NO: 1039049 - RNA, 22 nt, Human
aauguguagggugccuguuuuu

SEQ ID NO: 1039050 - RNA, 22 nt, Human
guguaauugaaauugagaacca

SEQ ID NO: 1039051 - RNA, 22 nt, Human
aucuuucaguuucauaccaauu

SEQ ID NO: 1039052 - RNA, 22 nt, Human
agccacagcuccuugguggaga

SEQ ID NO: 1039053 - RNA, 22 nt, Human
ccugggugaaaucucuccugca

SEQ ID NO: 1039054 - RNA, 22 nt, Human
auguaguauuuggaaauguaaa

SEQ ID NO: 1039055 - RNA, 22 nt, Human
aagccaggcaugcuuggacagu

SEQ ID NO: 1039056 - RNA, 22 nt, Human
gguucacacuuucaugauuuca

SEQ ID NO: 1039057 - RNA, 22 nt, Human
ugcagcugcuggcccaggugcu

SEQ ID NO: 1039058 - RNA, 23 nt, Human
aggcugcagaagaauagggucau

SEQ ID NO: 1039059 - RNA, 19 nt, Human
agaaaucucgagauuuguu

SEQ ID NO: 1039060 - RNA, 22 nt, Human
cacauguaguaagcaggcaaug

SEQ ID NO: 1039061 - RNA, 22 nt, Human
agagccuggacuuuucugagcc

SEQ ID NO: 1039062 - RNA, 22 nt, Human
aauaaauguuaagauugucuca

SEQ ID NO: 1039063 - RNA, 22 nt, Human
cuguuuauacgacagguggagg

SEQ ID NO: 1039064 - RNA, 17 nt, Human
ugcauuguaggcuagcc

SEQ ID NO: 1039065 - RNA, 22 nt, Human
cucagagucugcauuucuguca

SEQ ID NO: 1039066 - RNA, 22 nt, Human
guguaauuauauaaagaucuac

SEQ ID NO: 1039067 - RNA, 22 nt, Human
auuuaaauuuucugauggagag

SEQ ID NO: 1039068 - RNA, 22 nt, Human
gaaaagagaacaucugaggauc

SEQ ID NO: 1039069 - RNA, 22 nt, Human
gcugggagaggcccugaaguga

SEQ ID NO: 1039070 - RNA, 22 nt, Human
uccuuucccuuuccauccuggc

SEQ ID NO: 1039071 - RNA, 22 nt, Human
acuccagggcuccaucccuugu

SEQ ID NO: 1039072 - RNA, 22 nt, Human
aacaaaugauaccaguucucaa

SEQ ID NO: 1039073 - RNA, 22 nt, Human
agugaaauccuggucaacaggu

SEQ ID NO: 1039074 - RNA, 22 nt, Human
aggggccauuguucugcccgcu

SEQ ID NO: 1039075 - RNA, 21 nt, Human
guggcucugccaggacugaaa

SEQ ID NO: 1039076 - RNA, 20 nt, Human
ucagaggcugccagcugggg

SEQ ID NO: 1039077 - RNA, 22 nt, Human
ugcagaagugagucaugaggaa

SEQ ID NO: 1039078 - RNA, 22 nt, Human
caucugcuguuccuuggacuca

SEQ ID NO: 1039079 - RNA, 22 nt, Human
auagugguuggauaugucagag

SEQ ID NO: 1039080 - RNA, 22 nt, Human
ugcccuguuccugccuccagcu

SEQ ID NO: 1039081 - RNA, 22 nt, Human
cuucccuuggugaacagagcau

SEQ ID NO: 1039082 - RNA, 21 nt, Human
ugcauaaagaaauacaaauac

SEQ ID NO: 1039083 - RNA, 22 nt, Human
cacuggggugggccugguagag

SEQ ID NO: 1039084 - RNA, 22 nt, Human
gggucccaggaaggagcagugu

SEQ ID NO: 1039085 - RNA, 22 nt, Human
ccacccugagccgcaagagcag

SEQ ID NO: 1039086 - RNA, 22 nt, Human
uccuccuucgggacugcuugac

SEQ ID NO: 1039087 - RNA, 22 nt, Human
aucuggcucuuccuggaguucc

SEQ ID NO: 1039088 - RNA, 23 nt, Human
ccugucugugcuggguggacaca

SEQ ID NO: 1039089 - RNA, 22 nt, Human
cggcagagcuuccugcucagcg

SEQ ID NO: 1039090 - RNA, 22 nt, Human
uggcucugcaccucaguguacc

SEQ ID NO: 1039091 - RNA, 22 nt, Human
gggccuggggugacguaccccu

SEQ ID NO: 1039092 - RNA, 22 nt, Human
uuagucaauagugaauauagag

SEQ ID NO: 1039093 - RNA, 22 nt, Human
ccaaagugcugggguuacaggc

SEQ ID NO: 1039094 - RNA, 22 nt, Human
ccuggcagcgccgaagcuggcc

SEQ ID NO: 1039095 - RNA, 23 nt, Human
uggccucuccccaccuggcagaa

SEQ ID NO: 1039096 - RNA, 22 nt, Human
aguacauuuauuaaugguaaaa

SEQ ID NO: 1039097 - RNA, 22 nt, Human
augcccgauaccuaguuaacuc

SEQ ID NO: 1039098 - RNA, 22 nt, Human
auucauucugaccucaagagaa

SEQ ID NO: 1039099 - RNA, 22 nt, Human
ucucugggugauggcagggcac

SEQ ID NO: 1039100 - RNA, 22 nt, Human
ccagaaaaugcagaacauagaa

SEQ ID NO: 1039101 - RNA, 22 nt, Human
caagaacaguuugccaaauugg

SEQ ID NO: 1039102 - RNA, 22 nt, Human
ucaggggcccuucccucagcag

SEQ ID NO: 1039103 - RNA, 23 nt, Human
aggugcagcccuggaccugcccc

SEQ ID NO: 1039104 - RNA, 22 nt, Human
ccaaggagcaaguuuacaccug

SEQ ID NO: 1039105 - RNA, 22 nt, Human
gccagggaggcuguaggguccu

SEQ ID NO: 1039106 - RNA, 22 nt, Human
uggacagguugaguaggaggag

SEQ ID NO: 1039107 - RNA, 22 nt, Human
ggaagagagggcugggccucaa

SEQ ID NO: 1039108 - RNA, 18 nt, Human
caggucagccuggccuca

SEQ ID NO: 1039109 - RNA, 19 nt, Human
ggucacagggguuacaagg

SEQ ID NO: 1039110 - RNA, 22 nt, Human
ggggacugccuuccacagacac

SEQ ID NO: 1039111 - RNA, 22 nt, Human
ucuggcucugacacuacuguua

SEQ ID NO: 1039112 - RNA, 22 nt, Human
gaaaaaugagcugaugucaggg

SEQ ID NO: 1039113 - RNA, 22 nt, Human
acuucuugggacccuggcaccg

SEQ ID NO: 1039114 - RNA, 18 nt, Human
guccugagcucugcugua

SEQ ID NO: 1039115 - RNA, 22 nt, Human
gccacguugccacccgggugac

SEQ ID NO: 1039116 - RNA, 22 nt, Human
gcucccacugcagcccugagcc

SEQ ID NO: 1039117 - RNA, 22 nt, Human
gaugauggacaaagcauuggug

SEQ ID NO: 1039118 - RNA, 20 nt, Human
aggagccauugacugcagca

SEQ ID NO: 1039119 - RNA, 22 nt, Human
agagagcccgggccagggcaca

SEQ ID NO: 1039120 - RNA, 22 nt, Human
gcaggcuccaggccggccccuu

SEQ ID NO: 1039121 - RNA, 22 nt, Human
aaaucuggccccuugccuauuu

SEQ ID NO: 1039122 - RNA, 22 nt, Human
acagguggagugguuagcaggc

SEQ ID NO: 1039123 - RNA, 22 nt, Human
ggcugccugaggcugaggcccg

SEQ ID NO: 1039124 - RNA, 22 nt, Human
gugggggcaggcagugcuagga

SEQ ID NO: 1039125 - RNA, 22 nt, Human
cagcuuccaucuccacugcccu

SEQ ID NO: 1039126 - RNA, 22 nt, Human
gcagagugaggaagagcuucca

SEQ ID NO: 1039127 - RNA, 22 nt, Human
uggcucagcuuacuuuugaggg

SEQ ID NO: 1039128 - RNA, 22 nt, Human
cauuacaugguccaggauauau

SEQ ID NO: 1039129 - RNA, 22 nt, Human
guggcugcuaagucuccuuccu

SEQ ID NO: 1039130 - RNA, 22 nt, Human
gcagagacuccacugucuugug

SEQ ID NO: 1039131 - RNA, 19 nt, Human
agugucaucagcuacucag

SEQ ID NO: 1039132 - RNA, 22 nt, Human
cacagggcuuugauggcugagu

SEQ ID NO: 1039133 - RNA, 22 nt, Human
cucuccuggggagcacacacac

SEQ ID NO: 1039134 - RNA, 22 nt, Human
cuccagaagacccauccucaug

SEQ ID NO: 1039135 - RNA, 22 nt, Human
ucugagccaauuucugugucca

SEQ ID NO: 1039136 - RNA, 22 nt, Human
cauuuagaaacuguuuuuaaca

SEQ ID NO: 1039137 - RNA, 22 nt, Human
gggcucuggaaggugcaccaug

SEQ ID NO: 1039138 - RNA, 22 nt, Human
cuucagaggggacucaaaguca

SEQ ID NO: 1039139 - RNA, 22 nt, Human
agugacagcugggaaggugaaa

SEQ ID NO: 1039140 - RNA, 22 nt, Human
cuucucuucccagggacacagg

SEQ ID NO: 1039141 - RNA, 22 nt, Human
ccugucugaggaggugcucuuu

SEQ ID NO: 1039142 - RNA, 20 nt, Human
aggagaugauccagagucag

SEQ ID NO: 1039143 - RNA, 22 nt, Human
cuccccagguucaggagguggg

SEQ ID NO: 1039144 - RNA, 22 nt, Human
uggcagcuccggguaggggcug

SEQ ID NO: 1039145 - RNA, 22 nt, Human
uaagacaauucuucagucacaa

SEQ ID NO: 1039146 - RNA, 22 nt, Human
ccuguggcacaugcagggauuc

SEQ ID NO: 1039147 - RNA, 22 nt, Human
aggggagccccugguccuggug

SEQ ID NO: 1039148 - RNA, 22 nt, Human
aucaaaguggaaguuuacuagg

SEQ ID NO: 1039149 - RNA, 22 nt, Human
acagaauacuacagacugguua

SEQ ID NO: 1039150 - RNA, 22 nt, Human
ggcugcugcccaccccugcaug

SEQ ID NO: 1039151 - RNA, 22 nt, Human
uguacauuuagagcucaauaga

SEQ ID NO: 1039152 - RNA, 22 nt, Human
uacagaguggugagaucuuuug

SEQ ID NO: 1039153 - RNA, 22 nt, Human
cuccucuggcuuccuggaggca

SEQ ID NO: 1039154 - RNA, 22 nt, Human
uucaaucauuuuuacauagucc

SEQ ID NO: 1039155 - RNA, 22 nt, Human
gagauuucuuuugaugccuguc

SEQ ID NO: 1039156 - RNA, 18 nt, Human
gcuccuggaccaggucac

SEQ ID NO: 1039157 - RNA, 22 nt, Human
agcugagcuaguaguuccagug

SEQ ID NO: 1039158 - RNA, 22 nt, Human
cugagccagcuggcaugugcua

SEQ ID NO: 1039159 - RNA, 22 nt, Human
aguaaaaucuuaagcacagugg

SEQ ID NO: 1039160 - RNA, 22 nt, Human
cugcagggcccgccugagcccu

SEQ ID NO: 1039161 - RNA, 22 nt, Human
auauucacugagcauaaagcca

SEQ ID NO: 1039162 - RNA, 22 nt, Human
cucaggauagauuguccucuca

SEQ ID NO: 1039163 - RNA, 22 nt, Human
ggugcagaggagccagcugggg

SEQ ID NO: 1039164 - RNA, 22 nt, Human
cacugaaggcuaggauuagaug

SEQ ID NO: 1039165 - RNA, 22 nt, Human
uauguguaggaggaggacaggg

SEQ ID NO: 1039166 - RNA, 22 nt, Human
uacuuagagcgauaauuuauac

SEQ ID NO: 1039167 - RNA, 22 nt, Human
ccuuucucauuuuaagcauuag

SEQ ID NO: 1039168 - RNA, 23 nt, Human
gaagcagaugucugaguaggcag

SEQ ID NO: 1039169 - RNA, 22 nt, Human
uggcagagaauaaaucuugacu

SEQ ID NO: 1039170 - RNA, 22 nt, Human
aguuaaagucugaaauagagaa

SEQ ID NO: 1039171 - RNA, 22 nt, Human
uggcccugacagguccugggca

SEQ ID NO: 1039172 - RNA, 22 nt, Human
augucuaaaagauaaaguuuaa

SEQ ID NO: 1039173 - RNA, 22 nt, Human
gcuguccucuuggacucagggc

SEQ ID NO: 1039174 - RNA, 22 nt, Human
ggcugcugguggaaugguaggc

SEQ ID NO: 1039175 - RNA, 22 nt, Human
cguguggucccggcaaggcaag

SEQ ID NO: 1039176 - RNA, 22 nt, Human
gggcucuggauggagccugcag

SEQ ID NO: 1039177 - RNA, 22 nt, Human
cugcugggcuccucaugugacu

SEQ ID NO: 1039178 - RNA, 22 nt, Human
gugcauuugugcaugcacaugu

SEQ ID NO: 1039179 - RNA, 22 nt, Human
uaucuacuccucuuucagaugc

SEQ ID NO: 1039180 - RNA, 22 nt, Human
gggaagggagggaccucagucu

SEQ ID NO: 1039181 - RNA, 22 nt, Human
ucacaggagggagagacaccca

SEQ ID NO: 1039182 - RNA, 22 nt, Human
cugcugagcccuggcacaggug

SEQ ID NO: 1039183 - RNA, 22 nt, Human
ucuuuccuacuuuauugugaac

SEQ ID NO: 1039184 - RNA, 19 nt, Human
cuugguuaugguaugaugc

SEQ ID NO: 1039185 - RNA, 22 nt, Human
agacccugcaccucucgugggc

SEQ ID NO: 1039186 - RNA, 22 nt, Human
aggccucacauugggcuucaag

SEQ ID NO: 1039187 - RNA, 22 nt, Human
gcauggcagugaggauggugcu

SEQ ID NO: 1039188 - RNA, 22 nt, Human
ccugccuggcugucagcagagc

SEQ ID NO: 1039189 - RNA, 22 nt, Human
cuccugggaauuuaguugugag

SEQ ID NO: 1039190 - RNA, 22 nt, Human
cugccgaguacagccauagaaa

SEQ ID NO: 1039191 - RNA, 22 nt, Human
uuugcuauaaaagggucacacg

SEQ ID NO: 1039192 - RNA, 22 nt, Human
auuuuucucuuuccacugagau

SEQ ID NO: 1039193 - RNA, 18 nt, Human
agcagagcccaugcauuc

SEQ ID NO: 1039194 - RNA, 22 nt, Human
ggcugccauaacagaguaccac

SEQ ID NO: 1039195 - RNA, 22 nt, Human
agagaggcugggcguagggcuu

SEQ ID NO: 1039196 - RNA, 22 nt, Human
uagucuuuugagaaguauaucu

SEQ ID NO: 1039197 - RNA, 22 nt, Human
cucccucugucuuguccagaaa

SEQ ID NO: 1039198 - RNA, 22 nt, Human
ucacagugagccaugucagaga

SEQ ID NO: 1039199 - RNA, 22 nt, Human
aaaguucagugccuucuauaca

SEQ ID NO: 1039200 - RNA, 22 nt, Human
cuggagccaugucuugacugcu

SEQ ID NO: 1039201 - RNA, 22 nt, Human
ugucucugauaaguaguucagu

SEQ ID NO: 1039202 - RNA, 22 nt, Human
ggcugugccucaaggcuacuca

SEQ ID NO: 1039203 - RNA, 22 nt, Human
cugagcugaaacuugagaggcu

SEQ ID NO: 1039204 - RNA, 22 nt, Human
augagcugugggauuccagagg

SEQ ID NO: 1039205 - RNA, 22 nt, Human
cucugaacucuugggcagcaug

SEQ ID NO: 1039206 - RNA, 23 nt, Human
gcauugucuccccacuucugggc

SEQ ID NO: 1039207 - RNA, 22 nt, Human
uggcagagucucuccuuuccag

SEQ ID NO: 1039208 - RNA, 22 nt, Human
agcagaaccugcagaccugucu

SEQ ID NO: 1039209 - RNA, 22 nt, Human
caagccucagaaucuucuccau

SEQ ID NO: 1039210 - RNA, 22 nt, Human
agggucugacuccucuggcaag

SEQ ID NO: 1039211 - RNA, 22 nt, Human
uuggaggcaaugggaaggaggc

SEQ ID NO: 1039212 - RNA, 22 nt, Human
caaugguggugucagaagagau

SEQ ID NO: 1039213 - RNA, 18 nt, Human
ugcucuguuuaaugauuu

SEQ ID NO: 1039214 - RNA, 22 nt, Human
augcaguacugauacaugccac

SEQ ID NO: 1039215 - RNA, 22 nt, Human
augucccagcugagagacaacu

SEQ ID NO: 1039216 - RNA, 22 nt, Human
aaagcccauguggaaguacagg

SEQ ID NO: 1039217 - RNA, 22 nt, Human
ucugagcauugaauuuucuucc

SEQ ID NO: 1039218 - RNA, 22 nt, Human
caggaccccauauucacugaac

SEQ ID NO: 1039219 - RNA, 22 nt, Human
auguguaggugaaucgaggcug

SEQ ID NO: 1039220 - RNA, 18 nt, Human
agcagcugugccacacug

SEQ ID NO: 1039221 - RNA, 22 nt, Human
aggcacugcagauuacaggcgc

SEQ ID NO: 1039222 - RNA, 22 nt, Human
ugcugccagagagacagggacu

SEQ ID NO: 1039223 - RNA, 22 nt, Human
caagagcuagacuuugucagga

SEQ ID NO: 1039224 - RNA, 19 nt, Human
ugcagaagacacaguggug

SEQ ID NO: 1039225 - RNA, 22 nt, Human
aaguuucauguggagguagacu

SEQ ID NO: 1039226 - RNA, 22 nt, Human
ggcugccuacuuucccagaguu

SEQ ID NO: 1039227 - RNA, 22 nt, Human
cuacauuuuaauaagcugcuua

SEQ ID NO: 1039228 - RNA, 22 nt, Human
gguuggggcgagcuggaggccc

SEQ ID NO: 1039229 - RNA, 22 nt, Human
uccucuggcucuuucccuagga

SEQ ID NO: 1039230 - RNA, 22 nt, Human
ucucagagagaugaaacuucca

SEQ ID NO: 1039231 - RNA, 22 nt, Human
caggggcaggugugagaucauc

SEQ ID NO: 1039232 - RNA, 22 nt, Human
ucccagagacagagccuccucc

SEQ ID NO: 1039233 - RNA, 23 nt, Human
ccaggccucucagagggugugcc

SEQ ID NO: 1039234 - RNA, 21 nt, Human
cacaggugggucagugaggcc

SEQ ID NO: 1039235 - RNA, 22 nt, Human
ugaacagauggcccagcagagg

SEQ ID NO: 1039236 - RNA, 22 nt, Human
uauacagaaccgccugaagucu

SEQ ID NO: 1039237 - RNA, 22 nt, Human
guuauaaaggugauaaugguca

SEQ ID NO: 1039238 - RNA, 22 nt, Human
gcaguggggaaugcuggggaga

SEQ ID NO: 1039239 - RNA, 22 nt, Human
guggcccaggcuuggcgcuggc

SEQ ID NO: 1039240 - RNA, 22 nt, Human
augagcuucccagacaggaugg

SEQ ID NO: 1039241 - RNA, 22 nt, Human
ugguggcuguugcagaacugag

SEQ ID NO: 1039242 - RNA, 22 nt, Human
uucacauuugcccuuaugugug

SEQ ID NO: 1039243 - RNA, 21 nt, Human
ggcccugguuacgccuccucu

SEQ ID NO: 1039244 - RNA, 18 nt, Human
ucugggcuucccgaggcu

SEQ ID NO: 1039245 - RNA, 22 nt, Human
gaggccugaggcugccuggagc

SEQ ID NO: 1039246 - RNA, 22 nt, Human
uccuugaaugaauguucucucc

SEQ ID NO: 1039247 - RNA, 22 nt, Human
gagaaggggugauguggguaau

SEQ ID NO: 1039248 - RNA, 22 nt, Human
gagaagcaauuuccaacugugc

SEQ ID NO: 1039249 - RNA, 22 nt, Human
cuggcagcgugagcagcaucca

SEQ ID NO: 1039250 - RNA, 22 nt, Human
cucuucagauaaaagggauauu

SEQ ID NO: 1039251 - RNA, 22 nt, Human
gcuuccugucccucagccauga

SEQ ID NO: 1039252 - RNA, 22 nt, Human
cuggugcaggaaggagcuggca

SEQ ID NO: 1039253 - RNA, 22 nt, Human
augacagaggagugcaggugau

SEQ ID NO: 1039254 - RNA, 22 nt, Human
caucaaauggcaagugaaagcu

SEQ ID NO: 1039255 - RNA, 21 nt, Human
ccaggcagagcugugaguucu

SEQ ID NO: 1039256 - RNA, 20 nt, Human
uaagaacaagacuaggaagc

SEQ ID NO: 1039257 - RNA, 22 nt, Human
gaagaacaccugcugcccagug

SEQ ID NO: 1039258 - RNA, 18 nt, Human
gaggccugagaaccaggu

SEQ ID NO: 1039259 - RNA, 22 nt, Human
cugggcagccucacacaauguu

SEQ ID NO: 1039260 - RNA, 22 nt, Human
augggaggaucacuugaggcca

SEQ ID NO: 1039261 - RNA, 22 nt, Human
uuugaacaagagcuucacauua

SEQ ID NO: 1039262 - RNA, 22 nt, Human
aaguuaugaaauuuggacagcu

SEQ ID NO: 1039263 - RNA, 22 nt, Human
uggcagucggacuucuaucuca

SEQ ID NO: 1039264 - RNA, 22 nt, Human
uauauuaacacccacuugccuc

SEQ ID NO: 1039265 - RNA, 22 nt, Human
ccaaggagcaaggcucaacaag

SEQ ID NO: 1039266 - RNA, 22 nt, Human
ugccugaugcaggaguaucaga

SEQ ID NO: 1039267 - RNA, 22 nt, Human
cugaaggagcauagucaguuuu

SEQ ID NO: 1039268 - RNA, 22 nt, Human
cuggcagcucuacucagagccu

SEQ ID NO: 1039269 - RNA, 22 nt, Human
ucuacuuuucccuauacaguuu

SEQ ID NO: 1039270 - RNA, 22 nt, Human
cuccucugucuaccacgagggu

SEQ ID NO: 1039271 - RNA, 22 nt, Human
gucuggaguggggccugagaau

SEQ ID NO: 1039272 - RNA, 22 nt, Human
auuuagaaauuccaaaaguauu

SEQ ID NO: 1039273 - RNA, 22 nt, Human
cccagccucugggcucacccaa

SEQ ID NO: 1039274 - RNA, 22 nt, Human
ccucucuguguggccucuccau

SEQ ID NO: 1039275 - RNA, 22 nt, Human
caaaggcaguuacugaaugaag

SEQ ID NO: 1039276 - RNA, 22 nt, Human
aaaaugugcaguuuuuaagcug

SEQ ID NO: 1039277 - RNA, 22 nt, Human
acagagaaagugggcugaagau

SEQ ID NO: 1039278 - RNA, 19 nt, Human
ugacaggcuguugccuuga

SEQ ID NO: 1039279 - RNA, 22 nt, Human
caugggcuacagaagcaugcug

SEQ ID NO: 1039280 - RNA, 22 nt, Human
gccugaugagcuuccagcugag

SEQ ID NO: 1039281 - RNA, 22 nt, Human
ccagagccuaagaucugauccu

SEQ ID NO: 1039282 - RNA, 20 nt, Human
uggagcuccagcguccaugu

SEQ ID NO: 1039283 - RNA, 20 nt, Human
agaggcuuccuugggaggag

SEQ ID NO: 1039284 - RNA, 22 nt, Human
acuuugcaaugggcagaaccca

SEQ ID NO: 1039285 - RNA, 22 nt, Human
cccaggcuggagugcaauggca

SEQ ID NO: 1039286 - RNA, 22 nt, Human
gccugcagaggugcugcuagcu

SEQ ID NO: 1039287 - RNA, 22 nt, Human
cugggcucagaugagaggaagg

SEQ ID NO: 1039288 - RNA, 19 nt, Human
ggaugagggucaggcauag

SEQ ID NO: 1039289 - RNA, 22 nt, Human
auggggcugggauucuccucgg

SEQ ID NO: 1039290 - RNA, 22 nt, Human
ggcuggcuugccaagcucaggg

SEQ ID NO: 1039291 - RNA, 22 nt, Human
uguuuauaccuugguauaacca

SEQ ID NO: 1039292 - RNA, 22 nt, Human
ucugccuugagguccucagcuc

SEQ ID NO: 1039293 - RNA, 22 nt, Human
agcaggagcugugggaagaugg

SEQ ID NO: 1039294 - RNA, 18 nt, Human
gccugcaggcacgggggu

SEQ ID NO: 1039295 - RNA, 22 nt, Human
agcagcugggcucagagcuggg

SEQ ID NO: 1039296 - RNA, 22 nt, Human
auaugccauuagcuagaaauaa

SEQ ID NO: 1039297 - RNA, 22 nt, Human
ugcaggagaaaguacggagcgu

SEQ ID NO: 1039298 - RNA, 22 nt, Human
gcagccuguuguaccagccugu

SEQ ID NO: 1039299 - RNA, 22 nt, Human
cugugcaguaggucagggcugg

SEQ ID NO: 1039300 - RNA, 22 nt, Human
gccuucaggaaaucaguccuug

SEQ ID NO: 1039301 - RNA, 22 nt, Human
caggaacagcaccaggagcuag

SEQ ID NO: 1039302 - RNA, 22 nt, Human
ugugaggagaggcccagcuccc

SEQ ID NO: 1039303 - RNA, 22 nt, Human
uagccucucuccuccacaaccu

SEQ ID NO: 1039304 - RNA, 21 nt, Human
ggagggcagcccagacuggcu

SEQ ID NO: 1039305 - RNA, 22 nt, Human
cagggacaugacuggucucugu

SEQ ID NO: 1039306 - RNA, 22 nt, Human
gcagagugagccgaggcugcuc

SEQ ID NO: 1039307 - RNA, 22 nt, Human
ccacugggggcugcaggcacuc

SEQ ID NO: 1039308 - RNA, 22 nt, Human
agcagcuucuuucacuccugga

SEQ ID NO: 1039309 - RNA, 22 nt, Human
auguguaaaaagugcuuaauau

SEQ ID NO: 1039310 - RNA, 22 nt, Human
cuggccucaccucagacuuacu

SEQ ID NO: 1039311 - RNA, 22 nt, Human
agaaaucaauaucuauauguug

SEQ ID NO: 1039312 - RNA, 22 nt, Human
gcugaagggagugcugagucug

SEQ ID NO: 1039313 - RNA, 22 nt, Human
ugauuuccccagucuugcugcu

SEQ ID NO: 1039314 - RNA, 22 nt, Human
caggaaaaaugccaggagucag

SEQ ID NO: 1039315 - RNA, 22 nt, Human
agcugguucauucauucauggu

SEQ ID NO: 1039316 - RNA, 22 nt, Human
uccuucaguuaaagaucucaca

SEQ ID NO: 1039317 - RNA, 22 nt, Human
cugugucggacgugggcagcag

SEQ ID NO: 1039318 - RNA, 22 nt, Human
aggcccugaagucggccccuca

SEQ ID NO: 1039319 - RNA, 22 nt, Human
ugcucucucaggccuggcccac

SEQ ID NO: 1039320 - RNA, 22 nt, Human
cccaggagauggagguugcagu

SEQ ID NO: 1039321 - RNA, 22 nt, Human
gcaggcagagaaggaacauuua

SEQ ID NO: 1039322 - RNA, 22 nt, Human
uuacaggggacauuggggacau

SEQ ID NO: 1039323 - RNA, 22 nt, Human
gaggcccaggucaagcagccac

SEQ ID NO: 1039324 - RNA, 22 nt, Human
ucuggcucaaaauacguacucu

SEQ ID NO: 1039325 - RNA, 22 nt, Human
uuucagugcuucuguuuaccgg

SEQ ID NO: 1039326 - RNA, 22 nt, Human
cagagccagaacuagaccuugu

SEQ ID NO: 1039327 - RNA, 22 nt, Human
ucucagggagggcgagucagcg

SEQ ID NO: 1039328 - RNA, 22 nt, Human
gagacauggcaaaagcacuggu

SEQ ID NO: 1039329 - RNA, 22 nt, Human
cugccugugugugccugcagaa

SEQ ID NO: 1039330 - RNA, 22 nt, Human
ugcaggugaaaauuaugaggau

SEQ ID NO: 1039331 - RNA, 22 nt, Human
gccuggugguauccuggcaaga

SEQ ID NO: 1039332 - RNA, 19 nt, Human
gaucuuugccaauuuaagc

SEQ ID NO: 1039333 - RNA, 22 nt, Human
uuucacauacaguguauaguag

SEQ ID NO: 1039334 - RNA, 22 nt, Human
agagacaggguuuugucguguu

SEQ ID NO: 1039335 - RNA, 22 nt, Human
uagucaaaccucagaauacccc

SEQ ID NO: 1039336 - RNA, 22 nt, Human
uagacagauuuaaaggaaugga

SEQ ID NO: 1039337 - RNA, 20 nt, Human
cagccuccacucacucagcu

SEQ ID NO: 1039338 - RNA, 22 nt, Human
ggagagugggagcaacuguugc

SEQ ID NO: 1039339 - RNA, 22 nt, Human
ugagccugguugcagugucugg

SEQ ID NO: 1039340 - RNA, 22 nt, Human
accacuguaucuccagcacauu

SEQ ID NO: 1039341 - RNA, 22 nt, Human
aagccaggggcugcuuaggaga

SEQ ID NO: 1039342 - RNA, 22 nt, Human
uguguacacaaugauugcagag

SEQ ID NO: 1039343 - RNA, 22 nt, Human
accagagaaaacacagcaggcu

SEQ ID NO: 1039344 - RNA, 22 nt, Human
acaggugugagaacaugccuug

SEQ ID NO: 1039345 - RNA, 22 nt, Human
ggggcccagcaccccuccucgc

SEQ ID NO: 1039346 - RNA, 22 nt, Human
acaguaauuaaaauggaucugc

SEQ ID NO: 1039347 - RNA, 22 nt, Human
cuggcaggucucgcugacgugu

SEQ ID NO: 1039348 - RNA, 22 nt, Human
ucagggcaagauugguuaauaa

SEQ ID NO: 1039349 - RNA, 22 nt, Human
aaucaguuucuuggcaaguuua

SEQ ID NO: 1039350 - RNA, 22 nt, Human
uucuaguguccuuggacuugcu

SEQ ID NO: 1039351 - RNA, 22 nt, Human
caguuuuucaaaauuacaugau

SEQ ID NO: 1039352 - RNA, 21 nt, Human
acccuggguucuccauacccu

SEQ ID NO: 1039353 - RNA, 17 nt, Human
ucuggccuuccugaacu

SEQ ID NO: 1039354 - RNA, 22 nt, Human
gccuggagaagauggaacuagc

SEQ ID NO: 1039355 - RNA, 22 nt, Human
ccaggcaucacgggcauguggc

SEQ ID NO: 1039356 - RNA, 22 nt, Human
uggcagaguaggauggcccugu

SEQ ID NO: 1039357 - RNA, 22 nt, Human
aggucauuccagccauuccccu

SEQ ID NO: 1039358 - RNA, 22 nt, Human
ucucugcugagaagggcuggca

SEQ ID NO: 1039359 - RNA, 23 nt, Human
ugcagagggacugaagccagcuu

SEQ ID NO: 1039360 - RNA, 22 nt, Human
ucuccaagcagggcugcaaggc

SEQ ID NO: 1039361 - RNA, 22 nt, Human
guccucugggcuuugagcaguc

SEQ ID NO: 1039362 - RNA, 22 nt, Human
agugaaaugauucugagcaaga

SEQ ID NO: 1039363 - RNA, 23 nt, Human
agggcugaugccauugcagcucu

SEQ ID NO: 1039364 - RNA, 22 nt, Human
ugcagcugguuuagaacuagau

SEQ ID NO: 1039365 - RNA, 22 nt, Human
gggagcugguuccugcccucca

SEQ ID NO: 1039366 - RNA, 22 nt, Human
cugugugugucugcagcauacu

SEQ ID NO: 1039367 - RNA, 22 nt, Human
gaguuauuggguggaaagguag

SEQ ID NO: 1039368 - RNA, 21 nt, Human
cagcaaaucauugggcagacu

SEQ ID NO: 1039369 - RNA, 18 nt, Human
accugccuguucuucucu

SEQ ID NO: 1039370 - RNA, 22 nt, Human
uggcccugugugcaggcugcac

SEQ ID NO: 1039371 - RNA, 22 nt, Human
ccugggaagagcugacaggagg

SEQ ID NO: 1039372 - RNA, 22 nt, Human
cagagagagucaaaucuuugcu

SEQ ID NO: 1039373 - RNA, 17 nt, Human
uuagcaaaauagcacuu

SEQ ID NO: 1039374 - RNA, 22 nt, Human
gcugccucuguagcuuuggacc

SEQ ID NO: 1039375 - RNA, 22 nt, Human
ugggcagacgcuguuggaaggc

SEQ ID NO: 1039376 - RNA, 22 nt, Human
caggagccccaggcugacaaua

SEQ ID NO: 1039377 - RNA, 22 nt, Human
acugccuuauaugcugugugug

SEQ ID NO: 1039378 - RNA, 22 nt, Human
augucuuuggcuuugacauggc

SEQ ID NO: 1039379 - RNA, 22 nt, Human
ugagccugcugucgcuggaccc

SEQ ID NO: 1039380 - RNA, 22 nt, Human
ucaguuuuaagguuugagaauu

SEQ ID NO: 1039381 - RNA, 22 nt, Human
cagagcugcacauucuaugaug

SEQ ID NO: 1039382 - RNA, 23 nt, Human
ggagugcaauggcgccaucucgg

SEQ ID NO: 1039383 - RNA, 22 nt, Human
agaauuguugggguaauaaaag

SEQ ID NO: 1039384 - RNA, 22 nt, Human
agggcucuguccccagaggccc

SEQ ID NO: 1039385 - RNA, 22 nt, Human
cucucugguuucagcgaagggg

SEQ ID NO: 1039386 - RNA, 22 nt, Human
gggcuggcgggaaaggcaauuc

SEQ ID NO: 1039387 - RNA, 22 nt, Human
ugcauuguugaugaguugaaua

SEQ ID NO: 1039388 - RNA, 22 nt, Human
cacucugcgcugggcgccagcg

SEQ ID NO: 1039389 - RNA, 22 nt, Human
aagauuuaccacuuuauucaag

SEQ ID NO: 1039390 - RNA, 22 nt, Human
aagcaauauacugauaugauua

SEQ ID NO: 1039391 - RNA, 22 nt, Human
gcuuuguguagaaggaggaugg

SEQ ID NO: 1039392 - RNA, 22 nt, Human
agcaucuggugagggccuaguu

SEQ ID NO: 1039393 - RNA, 22 nt, Human
ggcuccugaaagacuaugggaa

SEQ ID NO: 1039394 - RNA, 22 nt, Human
uacaguaaagcugcuaugaauu

SEQ ID NO: 1039395 - RNA, 21 nt, Human
uucaaagagugggcauuguca

SEQ ID NO: 1039396 - RNA, 22 nt, Human
agagugggccucugagucccag

SEQ ID NO: 1039397 - RNA, 22 nt, Human
ccagugggugcugggcucugcc

SEQ ID NO: 1039398 - RNA, 22 nt, Human
uccugccuagcaggugaccuau

SEQ ID NO: 1039399 - RNA, 22 nt, Human
agcagagccaggucucucugua

SEQ ID NO: 1039400 - RNA, 22 nt, Human
uuugcaauuugugcugcaaaug

SEQ ID NO: 1039401 - RNA, 22 nt, Human
uuugcauugcagugguuuacag

SEQ ID NO: 1039402 - RNA, 22 nt, Human
aggcucagauucacauuugguu

SEQ ID NO: 1039403 - RNA, 22 nt, Human
gcugaaggaggcucugguacua

SEQ ID NO: 1039404 - RNA, 22 nt, Human
uacaugcucaguaacuuucagu

SEQ ID NO: 1039405 - RNA, 22 nt, Human
ccucagggaggccucuguggcu

SEQ ID NO: 1039406 - RNA, 22 nt, Human
gaacagcccuguuaagucuguu

SEQ ID NO: 1039407 - RNA, 22 nt, Human
aagacaagcaucaaaucaggca

SEQ ID NO: 1039408 - RNA, 22 nt, Human
acuuucuccagaaaaccaagga

SEQ ID NO: 1039409 - RNA, 22 nt, Human
cacuucaauuaacuucagcauu

SEQ ID NO: 1039410 - RNA, 22 nt, Human
cagggguguuuuuggccaggag

SEQ ID NO: 1039411 - RNA, 22 nt, Human
ccagccuccauguagauagcug

SEQ ID NO: 1039412 - RNA, 22 nt, Human
caggguacagaguuuucuaaac

SEQ ID NO: 1039413 - RNA, 23 nt, Human
ggucccaguggagaggccucacc

SEQ ID NO: 1039414 - RNA, 22 nt, Human
ccagucccagcucugccaugcu

SEQ ID NO: 1039415 - RNA, 22 nt, Human
agagggcccauguugggcugcu

SEQ ID NO: 1039416 - RNA, 22 nt, Human
ugcagccaccaccucugcugaa

SEQ ID NO: 1039417 - RNA, 22 nt, Human
gcuggccucaucacugacuucu

SEQ ID NO: 1039418 - RNA, 22 nt, Human
ucugcagcuucuugccagagag

SEQ ID NO: 1039419 - RNA, 22 nt, Human
acacugaauaauugagaguuga

SEQ ID NO: 1039420 - RNA, 22 nt, Human
ggguacaaagauuucauaagau

SEQ ID NO: 1039421 - RNA, 22 nt, Human
ggaggccaaggagggcggauca

SEQ ID NO: 1039422 - RNA, 21 nt, Human
uggagcugaauuuuuggcauc

SEQ ID NO: 1039423 - RNA, 22 nt, Human
ccugggagugucagacuugcuu

SEQ ID NO: 1039424 - RNA, 22 nt, Human
gaggagagagggacugucugca

SEQ ID NO: 1039425 - RNA, 22 nt, Human
agggccagcacuccuggcagga

SEQ ID NO: 1039426 - RNA, 22 nt, Human
aacaaauggaacacaaaucuuu

SEQ ID NO: 1039427 - RNA, 22 nt, Human
aaacuguaagagaauaaacuac

SEQ ID NO: 1039428 - RNA, 22 nt, Human
ccuucugcucccuggccagggc

SEQ ID NO: 1039429 - RNA, 22 nt, Human
cugcugcucgaccagucccagg

SEQ ID NO: 1039430 - RNA, 22 nt, Human
acacaggggcucggcugggugc

SEQ ID NO: 1039431 - RNA, 22 nt, Human
cccucagcuccacccucagcag

SEQ ID NO: 1039432 - RNA, 22 nt, Human
uugcagggcaggaccauggaca

SEQ ID NO: 1039433 - RNA, 22 nt, Human
acagagcuguacaugugccaug

SEQ ID NO: 1039434 - RNA, 22 nt, Human
ccagcuccagguagaugggcag

SEQ ID NO: 1039435 - RNA, 22 nt, Human
aggaccagaggccagagucagc

SEQ ID NO: 1039436 - RNA, 22 nt, Human
cagagccauccaggugccuguu

SEQ ID NO: 1039437 - RNA, 22 nt, Human
gaugggaggaaccugggucccu

SEQ ID NO: 1039438 - RNA, 22 nt, Human
acaauucucucauaucuuauua

SEQ ID NO: 1039439 - RNA, 20 nt, Human
ugcugcaguuucaugggacu

SEQ ID NO: 1039440 - RNA, 22 nt, Human
gcugucaggccaugugggccuu

SEQ ID NO: 1039441 - RNA, 22 nt, Human
uccuuggcagcagggagcauga

SEQ ID NO: 1039442 - RNA, 22 nt, Human
ugguccuggggaucugcaguga

SEQ ID NO: 1039443 - RNA, 22 nt, Human
ggaugcugcuaucaggcuucga

SEQ ID NO: 1039444 - RNA, 22 nt, Human
uggcucuguucgccaucaggag

SEQ ID NO: 1039445 - RNA, 23 nt, Human
cucccuggaguuucuggaagaug

SEQ ID NO: 1039446 - RNA, 22 nt, Human
gugcuuaauacaugucaauaac

SEQ ID NO: 1039447 - RNA, 22 nt, Human
ggcccucccugagccagguggg

SEQ ID NO: 1039448 - RNA, 19 nt, Human
ccuggaggugaagguucuc

SEQ ID NO: 1039449 - RNA, 22 nt, Human
acauuucucuugaugucucuau

SEQ ID NO: 1039450 - RNA, 22 nt, Human
guggcagcaaaauccugcauuc

SEQ ID NO: 1039451 - RNA, 22 nt, Human
ggccugccucacagucagcacc

SEQ ID NO: 1039452 - RNA, 22 nt, Human
gcugucacucuccggccuuccc

SEQ ID NO: 1039453 - RNA, 22 nt, Human
gcagggacaucuuugucuagua

SEQ ID NO: 1039454 - RNA, 22 nt, Human
aaauguguuugauaggaauauu

SEQ ID NO: 1039455 - RNA, 22 nt, Human
uaauuuaauccaaguguuacau

SEQ ID NO: 1039456 - RNA, 22 nt, Human
gaauucuuuucuuucugaaagu

SEQ ID NO: 1039457 - RNA, 22 nt, Human
ugaagcagcaaaugaugggaga

SEQ ID NO: 1039458 - RNA, 22 nt, Human
gauuuagagaauguuuuguaag

SEQ ID NO: 1039459 - RNA, 22 nt, Human
ugccuugguucucuacuuggag

SEQ ID NO: 1039460 - RNA, 22 nt, Human
uagccaggcgaggucagugucg

SEQ ID NO: 1039461 - RNA, 22 nt, Human
aaguuauuuccucgugacugaa

SEQ ID NO: 1039462 - RNA, 22 nt, Human
gcugccuggaauaacggcuggc

SEQ ID NO: 1039463 - RNA, 22 nt, Human
auggcagccuguggacagucaa

SEQ ID NO: 1039464 - RNA, 20 nt, Human
ggguggaguugcggucugug

SEQ ID NO: 1039465 - RNA, 22 nt, Human
cugacccauauaagaguggagg

SEQ ID NO: 1039466 - RNA, 22 nt, Human
ugaaagguguccaauauuucuc

SEQ ID NO: 1039467 - RNA, 20 nt, Human
agcagcuguguuuucauccu

SEQ ID NO: 1039468 - RNA, 17 nt, Human
gccuuccuuccuccaca

SEQ ID NO: 1039469 - RNA, 22 nt, Human
ugaagguggcauaggagagaug

SEQ ID NO: 1039470 - RNA, 22 nt, Human
ccuccagcugccucagucucuu

SEQ ID NO: 1039471 - RNA, 22 nt, Human
auucccaucgucaacuucacug

SEQ ID NO: 1039472 - RNA, 20 nt, Human
gagagcuggggaugaggcug

SEQ ID NO: 1039473 - RNA, 19 nt, Human
aucagcaagguaggaugug

SEQ ID NO: 1039474 - RNA, 22 nt, Human
cucccuggcuuuguccugaggc

SEQ ID NO: 1039475 - RNA, 23 nt, Human
gcccaugcuguugggcccgagca

SEQ ID NO: 1039476 - RNA, 22 nt, Human
ggacagaggguugacagaguau

SEQ ID NO: 1039477 - RNA, 22 nt, Human
agcagcaacuuauuuuucuuau

SEQ ID NO: 1039478 - RNA, 22 nt, Human
agcccucauggaacagcuccua

SEQ ID NO: 1039479 - RNA, 22 nt, Human
cacugaagcuuucauucucuug

SEQ ID NO: 1039480 - RNA, 22 nt, Human
ggacaggguaaguacuagugug

SEQ ID NO: 1039481 - RNA, 22 nt, Human
ggcccacuugaaauggagcuca

SEQ ID NO: 1039482 - RNA, 22 nt, Human
cccccaaggccaggcugagacc

SEQ ID NO: 1039483 - RNA, 22 nt, Human
cagaccuggaaaacaggcuugc

SEQ ID NO: 1039484 - RNA, 22 nt, Human
gugcccugguccccagcauaua

SEQ ID NO: 1039485 - RNA, 22 nt, Human
cucuuccuacagucugcuaugc

SEQ ID NO: 1039486 - RNA, 22 nt, Human
ucaagcaucuuggucuacgauc

SEQ ID NO: 1039487 - RNA, 22 nt, Human
ccugccugacagagaagguuca

SEQ ID NO: 1039488 - RNA, 18 nt, Human
ccagagcuggcuccucgc

SEQ ID NO: 1039489 - RNA, 22 nt, Human
guuugcauauuugcacaggaau

SEQ ID NO: 1039490 - RNA, 22 nt, Human
aggaugggccugggauaugcuu

SEQ ID NO: 1039491 - RNA, 22 nt, Human
ccaaggaguagagcaggaagcu

SEQ ID NO: 1039492 - RNA, 22 nt, Human
gcugggagugggcaagaugaga

SEQ ID NO: 1039493 - RNA, 22 nt, Human
ccugagagcauuccacacugaa

SEQ ID NO: 1039494 - RNA, 22 nt, Human
aucucccagccacagcauucuu

SEQ ID NO: 1039495 - RNA, 22 nt, Human
cagggcaguaacgggaacaucu

SEQ ID NO: 1039496 - RNA, 19 nt, Human
agucccaggcccgaaagag

SEQ ID NO: 1039497 - RNA, 19 nt, Human
uguuggugcggauguggag

SEQ ID NO: 1039498 - RNA, 23 nt, Human
uggggagaguuacccuggaagcg

SEQ ID NO: 1039499 - RNA, 22 nt, Human
gccuggagugguccugcugccc

SEQ ID NO: 1039500 - RNA, 22 nt, Human
aaaugcacagaaaggaugugga

SEQ ID NO: 1039501 - RNA, 22 nt, Human
gggcugugggacccggcacuuu

SEQ ID NO: 1039502 - RNA, 22 nt, Human
caggaaagaaaugagaacacca

SEQ ID NO: 1039503 - RNA, 22 nt, Human
uucccaguauuaccuucaggaa

SEQ ID NO: 1039504 - RNA, 22 nt, Human
cagucccagacccagaaggugg

SEQ ID NO: 1039505 - RNA, 22 nt, Human
cuccucacacccacugcaacca

SEQ ID NO: 1039506 - RNA, 22 nt, Human
ggcccacacugacagcugagcu

SEQ ID NO: 1039507 - RNA, 22 nt, Human
ucccagagucagagguggggcc

SEQ ID NO: 1039508 - RNA, 22 nt, Human
gcuggagccaagcugcucuugg

SEQ ID NO: 1039509 - RNA, 20 nt, Human
acauugauuauguuuguaga

SEQ ID NO: 1039510 - RNA, 21 nt, Human
auacuuugaauuacagccuug

SEQ ID NO: 1039511 - RNA, 22 nt, Human
uccagccuaauguucuucccac

SEQ ID NO: 1039512 - RNA, 22 nt, Human
acagagauguggaugagggauu

SEQ ID NO: 1039513 - RNA, 22 nt, Human
aucuggcuuuuaccccacggcc

SEQ ID NO: 1039514 - RNA, 22 nt, Human
uuuccucuuauacaguguuuau

SEQ ID NO: 1039515 - RNA, 23 nt, Human
cccuggccuuggggcacaggcug

SEQ ID NO: 1039516 - RNA, 22 nt, Human
ggcccugugguuuugcaaaguc

SEQ ID NO: 1039517 - RNA, 22 nt, Human
uuuccuucaucaucugagagcu

SEQ ID NO: 1039518 - RNA, 22 nt, Human
uggaggaaucagggcuuaggcu

SEQ ID NO: 1039519 - RNA, 22 nt, Human
acauuucuaucauccuguaaug

SEQ ID NO: 1039520 - RNA, 22 nt, Human
aaagauuucagaagccugugcc

SEQ ID NO: 1039521 - RNA, 22 nt, Human
cgcuggggcuuuuugcuugaga

SEQ ID NO: 1039522 - RNA, 22 nt, Human
ucagaggauugccucagcgagc

SEQ ID NO: 1039523 - RNA, 22 nt, Human
guuauguaaucuaacacucagu

SEQ ID NO: 1039524 - RNA, 22 nt, Human
agucccagccuguaggauuggg

SEQ ID NO: 1039525 - RNA, 22 nt, Human
cagcccaaagccccaggcuaga

SEQ ID NO: 1039526 - RNA, 22 nt, Human
cagccagggagcaaagaguuga

SEQ ID NO: 1039527 - RNA, 22 nt, Human
aagcagcacaguaauauuggug

SEQ ID NO: 1039528 - RNA, 22 nt, Human
gaaaauguuuccuguuauuugc

SEQ ID NO: 1039529 - RNA, 22 nt, Human
cauggcccucuucuggagcaau

SEQ ID NO: 1039530 - RNA, 22 nt, Human
aacaaauguaaaaugcagaugc

SEQ ID NO: 1039531 - RNA, 22 nt, Human
acagaguaggugcugucgacug

SEQ ID NO: 1039532 - RNA, 22 nt, Human
uguggccuccccacuucugggg

SEQ ID NO: 1039533 - RNA, 22 nt, Human
cacagaggacuguagcggggag

SEQ ID NO: 1039534 - RNA, 22 nt, Human
uauuucuguaacucagggucug

SEQ ID NO: 1039535 - RNA, 22 nt, Human
agccacagagagggagcugcaa

SEQ ID NO: 1039536 - RNA, 22 nt, Human
aagauacauaaagguagagucu

SEQ ID NO: 1039537 - RNA, 22 nt, Human
caggaaagggaugggcugccac

SEQ ID NO: 1039538 - RNA, 22 nt, Human
cagcugccuguauuguccucau

SEQ ID NO: 1039539 - RNA, 22 nt, Human
agguggguaucaugagagauua

SEQ ID NO: 1039540 - RNA, 22 nt, Human
accuuucacgguaucagacauc

SEQ ID NO: 1039541 - RNA, 22 nt, Human
uggcagaaguacacaagcaugc

SEQ ID NO: 1039542 - RNA, 22 nt, Human
gccaccaggagcccaguccaaa

SEQ ID NO: 1039543 - RNA, 22 nt, Human
cagacagcugcuuucuugcugu

SEQ ID NO: 1039544 - RNA, 22 nt, Human
ucucauucauacccuacaugcu

SEQ ID NO: 1039545 - RNA, 22 nt, Human
agcugguuagcaaucuaaguga

SEQ ID NO: 1039546 - RNA, 22 nt, Human
ggcucacgcaauuaucccggcc

SEQ ID NO: 1039547 - RNA, 22 nt, Human
uuccaguugguagaauguaagg

SEQ ID NO: 1039548 - RNA, 22 nt, Human
acaaaugcagcauaaagugaac

SEQ ID NO: 1039549 - RNA, 23 nt, Human
cagguggcuccacgagggguggg

SEQ ID NO: 1039550 - RNA, 22 nt, Human
cccucccaggaguggccagaga

SEQ ID NO: 1039551 - RNA, 22 nt, Human
cuuggcagcuuuuggaggagcc

SEQ ID NO: 1039552 - RNA, 22 nt, Human
ugcugccuugaccuccugggcu

SEQ ID NO: 1039553 - RNA, 22 nt, Human
cccacaggcuagggguagggca

SEQ ID NO: 1039554 - RNA, 22 nt, Human
cccuggagggcagacagaugcc

SEQ ID NO: 1039555 - RNA, 22 nt, Human
agugugggugagggaggcccuc

SEQ ID NO: 1039556 - RNA, 22 nt, Human
aacaaaugaccugauuucuucc

SEQ ID NO: 1039557 - RNA, 22 nt, Human
uguuacuuaucucacgugaugc

SEQ ID NO: 1039558 - RNA, 22 nt, Human
uguaucaaggguuuauguaagc

SEQ ID NO: 1039559 - RNA, 22 nt, Human
cugggagcccgcguccuggugg

SEQ ID NO: 1039560 - RNA, 21 nt, Human
aagcuucccugcucuccaggg

SEQ ID NO: 1039561 - RNA, 21 nt, Human
cucuggagucaagagcuucca

SEQ ID NO: 1039562 - RNA, 22 nt, Human
gcagcugaagcugcaguuccag

SEQ ID NO: 1039563 - RNA, 22 nt, Human
augcucuggaguacgugaaauu

SEQ ID NO: 1039564 - RNA, 22 nt, Human
caccugagugucaguauucuca

SEQ ID NO: 1039565 - RNA, 22 nt, Human
aacauuuaugguagucauugca

SEQ ID NO: 1039566 - RNA, 21 nt, Human
ucucugggcccuccugugggg

SEQ ID NO: 1039567 - RNA, 22 nt, Human
gcauuuguguucuuccuagagc

SEQ ID NO: 1039568 - RNA, 22 nt, Human
cccagcucuuuuagcggcaucu

SEQ ID NO: 1039569 - RNA, 22 nt, Human
uccugccucuccaugcuaacua

SEQ ID NO: 1039570 - RNA, 19 nt, Human
ccagcccugucacuucuug

SEQ ID NO: 1039571 - RNA, 22 nt, Human
aguggggagguccaggccaccc

SEQ ID NO: 1039572 - RNA, 22 nt, Human
ccagcuggucugugcucauguu

SEQ ID NO: 1039573 - RNA, 22 nt, Human
guggcaggucccauuggagcag

SEQ ID NO: 1039574 - RNA, 22 nt, Human
cuguccuccggccaccuacagu

SEQ ID NO: 1039575 - RNA, 22 nt, Human
ccugggcaucucaugcaccugc

SEQ ID NO: 1039576 - RNA, 22 nt, Human
ucucccaggugggugccuggag

SEQ ID NO: 1039577 - RNA, 22 nt, Human
ccuccugggacaggcuggcaca

SEQ ID NO: 1039578 - RNA, 22 nt, Human
guuugcauuuauuagucuucug

SEQ ID NO: 1039579 - RNA, 22 nt, Human
gcauuuagcuuuaaaauauuuc

SEQ ID NO: 1039580 - RNA, 22 nt, Human
uagagcugauaaugaggccaag

SEQ ID NO: 1039581 - RNA, 22 nt, Human
cagagugagggccugcaccugc

SEQ ID NO: 1039582 - RNA, 22 nt, Human
cccaggagguggagguugcagu

SEQ ID NO: 1039583 - RNA, 22 nt, Human
uggaaggggagcuggaaagggg

SEQ ID NO: 1039584 - RNA, 22 nt, Human
cuagaaauacaggcacgugcca

SEQ ID NO: 1039585 - RNA, 21 nt, Human
ugcuuuaugggaaaaauguca

SEQ ID NO: 1039586 - RNA, 22 nt, Human
ugccuggcaagaggggcuggcu

SEQ ID NO: 1039587 - RNA, 22 nt, Human
gagccagguuggaggcugcagu

SEQ ID NO: 1039588 - RNA, 22 nt, Human
acagcagagugugagauagcca

SEQ ID NO: 1039589 - RNA, 22 nt, Human
auggacagugugucuguuucca

SEQ ID NO: 1039590 - RNA, 22 nt, Human
uggcagagcuggcugcggauga

SEQ ID NO: 1039591 - RNA, 22 nt, Human
agaugaagauaucugcaggggc

SEQ ID NO: 1039592 - RNA, 22 nt, Human
gggcagauggggcacaggcuga

SEQ ID NO: 1039593 - RNA, 22 nt, Human
acugugugggccgcucacuggg

SEQ ID NO: 1039594 - RNA, 22 nt, Human
uuccuuguuuguagcucuggga

SEQ ID NO: 1039595 - RNA, 22 nt, Human
ccucugggagacugcuacugag

SEQ ID NO: 1039596 - RNA, 22 nt, Human
ugcacacacgcggcacaucugu

SEQ ID NO: 1039597 - RNA, 17 nt, Human
ugccagccugucccagg

SEQ ID NO: 1039598 - RNA, 22 nt, Human
agcuccugaaaagcgcuugcuu

SEQ ID NO: 1039599 - RNA, 23 nt, Human
cagcugaagcagccugggcugga

SEQ ID NO: 1039600 - RNA, 22 nt, Human
aguuuuauuccaaugugcagca

SEQ ID NO: 1039601 - RNA, 22 nt, Human
ucccagcagagccagcaagccg

SEQ ID NO: 1039602 - RNA, 22 nt, Human
gucaggggccaugggccaagga

SEQ ID NO: 1039603 - RNA, 22 nt, Human
ucuucucccaucuccaggcagg

SEQ ID NO: 1039604 - RNA, 22 nt, Human
aaaauacacauacuaggggaaa

SEQ ID NO: 1039605 - RNA, 22 nt, Human
cagcaggcccagaguuucaugg

SEQ ID NO: 1039606 - RNA, 22 nt, Human
gccacagggcagaugcgcagag

SEQ ID NO: 1039607 - RNA, 22 nt, Human
ggacacagauaaucacacagau

SEQ ID NO: 1039608 - RNA, 19 nt, Human
cuggcucuuggguggagga

SEQ ID NO: 1039609 - RNA, 22 nt, Human
agggcuggcaucucuaaugcug

SEQ ID NO: 1039610 - RNA, 22 nt, Human
cucaccacagagccuguccagc

SEQ ID NO: 1039611 - RNA, 22 nt, Human
gcaggggcugcugggaacucgg

SEQ ID NO: 1039612 - RNA, 19 nt, Human
ugagaaggcaguggggagc

SEQ ID NO: 1039613 - RNA, 22 nt, Human
ugcugggcuaggguggagcucu

SEQ ID NO: 1039614 - RNA, 22 nt, Human
uggaaagacauucagccgcugg

SEQ ID NO: 1039615 - RNA, 22 nt, Human
uccuugaagaaugauucuugga

SEQ ID NO: 1039616 - RNA, 21 nt, Human
ggucuuccaaauaaggagaaa

SEQ ID NO: 1039617 - RNA, 22 nt, Human
uuguuuguaugcugagaagaau

SEQ ID NO: 1039618 - RNA, 22 nt, Human
gucaccaggucugaugcagcca

SEQ ID NO: 1039619 - RNA, 22 nt, Human
agcaguggccuggggcucugug

SEQ ID NO: 1039620 - RNA, 22 nt, Human
ccucugagaccagcucugcacc

SEQ ID NO: 1039621 - RNA, 22 nt, Human
gccuccccugcaauuguccuug

SEQ ID NO: 1039622 - RNA, 22 nt, Human
uggaaggcaugggaacuguucu

SEQ ID NO: 1039623 - RNA, 22 nt, Human
gauggcagucaaccaggugagg

SEQ ID NO: 1039624 - RNA, 22 nt, Human
auuuuuccaauuaggauaaaga

SEQ ID NO: 1039625 - RNA, 22 nt, Human
uagggcuauucugaguaauaau

SEQ ID NO: 1039626 - RNA, 22 nt, Human
ccaaaguccauaguuuacauaa

SEQ ID NO: 1039627 - RNA, 22 nt, Human
gcuguggcuguacagagaccau

SEQ ID NO: 1039628 - RNA, 22 nt, Human
gcuggagccauuggcuuggccu

SEQ ID NO: 1039629 - RNA, 22 nt, Human
gccugugcauagcagcggacuc

SEQ ID NO: 1039630 - RNA, 22 nt, Human
cccaggucuaugccagcucuga

SEQ ID NO: 1039631 - RNA, 22 nt, Human
uggagcugauacagcuggcuuu

SEQ ID NO: 1039632 - RNA, 22 nt, Human
cagacagaaggcuccuugaggu

SEQ ID NO: 1039633 - RNA, 22 nt, Human
aagccaggcugcacuugcuggg

SEQ ID NO: 1039634 - RNA, 22 nt, Human
gugcucacugugagacguccug

SEQ ID NO: 1039635 - RNA, 20 nt, Human
cccucugcuacacugggagc

SEQ ID NO: 1039636 - RNA, 22 nt, Human
agcugggagcagagccacagcc

SEQ ID NO: 1039637 - RNA, 22 nt, Human
uuuauuccaugugucuaugacc

SEQ ID NO: 1039638 - RNA, 22 nt, Human
ugcuccauucucuagccagugc

SEQ ID NO: 1039639 - RNA, 20 nt, Human
ucagagucaucaaagauggu

SEQ ID NO: 1039640 - RNA, 22 nt, Human
ccugagaccaaguugcagccau

SEQ ID NO: 1039641 - RNA, 22 nt, Human
cacagcuuccauuagaaugaga

SEQ ID NO: 1039642 - RNA, 22 nt, Human
uuugacaguaauaaagcacaag

SEQ ID NO: 1039643 - RNA, 22 nt, Human
ggcaaaaacagcaaugacuuuu

SEQ ID NO: 1039644 - RNA, 22 nt, Human
ucacaucuuauuagaguaucuc

SEQ ID NO: 1039645 - RNA, 22 nt, Human
aaugcacagcguuccaugcuug

SEQ ID NO: 1039646 - RNA, 22 nt, Human
uaagcuauuccugaagaagguu

SEQ ID NO: 1039647 - RNA, 22 nt, Human
guggcugcagagccagcaagcu

SEQ ID NO: 1039648 - RNA, 22 nt, Human
agcugguucagaaauuagaugg

SEQ ID NO: 1039649 - RNA, 22 nt, Human
ccuccaggaacuugagagacac

SEQ ID NO: 1039650 - RNA, 22 nt, Human
uuaaacagucccagaggcugac

SEQ ID NO: 1039651 - RNA, 22 nt, Human
cugggugguucuaacuguugau

SEQ ID NO: 1039652 - RNA, 22 nt, Human
ggucccaguccucucccugcua

SEQ ID NO: 1039653 - RNA, 22 nt, Human
acagaauucuaguauguggcuu

SEQ ID NO: 1039654 - RNA, 22 nt, Human
gcauuucugugcauacacauga

SEQ ID NO: 1039655 - RNA, 22 nt, Human
gccuuggccuuccuaggccuga

SEQ ID NO: 1039656 - RNA, 22 nt, Human
gcagccccaggagacgcccagg

SEQ ID NO: 1039657 - RNA, 22 nt, Human
gcugggaggaauuuggggaaua

SEQ ID NO: 1039658 - RNA, 22 nt, Human
ggcuccugauaggagaaugcgg

SEQ ID NO: 1039659 - RNA, 22 nt, Human
ccuggaagauucaccacuacca

SEQ ID NO: 1039660 - RNA, 22 nt, Human
cccuggaagguucucuggcuca

SEQ ID NO: 1039661 - RNA, 22 nt, Human
agggcagcagcggcccaggccu

SEQ ID NO: 1039662 - RNA, 23 nt, Human
ucucagaggauuccugggccuug

SEQ ID NO: 1039663 - RNA, 22 nt, Human
agagcucaagacgcucacagua

SEQ ID NO: 1039664 - RNA, 22 nt, Human
ucagcugcucuguugagcugaa

SEQ ID NO: 1039665 - RNA, 22 nt, Human
uggcuucagacuucugcuacgu

SEQ ID NO: 1039666 - RNA, 22 nt, Human
acugucugcccugagaugccag

SEQ ID NO: 1039667 - RNA, 22 nt, Human
uuccucaugggguuccuucaga

SEQ ID NO: 1039668 - RNA, 22 nt, Human
uucagcagucguccaggaaaag

SEQ ID NO: 1039669 - RNA, 22 nt, Human
agaaauguauucuguauguuuu

SEQ ID NO: 1039670 - RNA, 22 nt, Human
caguugaugggacucauguggg

SEQ ID NO: 1039671 - RNA, 22 nt, Human
ccugcccagcuucaccucaggc

SEQ ID NO: 1039672 - RNA, 22 nt, Human
ccagccagucccgcaugaccgc

SEQ ID NO: 1039673 - RNA, 22 nt, Human
uagcugccuuugggcuccugcu

SEQ ID NO: 1039674 - RNA, 22 nt, Human
aggggagcuaacaccagagccc

SEQ ID NO: 1039675 - RNA, 22 nt, Human
agcugcugugugcucaggcagg

SEQ ID NO: 1039676 - RNA, 22 nt, Human
uuuauguacauauccacaagga

SEQ ID NO: 1039677 - RNA, 22 nt, Human
gccagcagguugucaaggagcu

SEQ ID NO: 1039678 - RNA, 22 nt, Human
cagcaucuuucucuucuggagu

SEQ ID NO: 1039679 - RNA, 22 nt, Human
acucugcuuauugcugcaggca

SEQ ID NO: 1039680 - RNA, 22 nt, Human
gcccagcuccucugcagacccu

SEQ ID NO: 1039681 - RNA, 22 nt, Human
cuccagggaaaggggcguccgc

SEQ ID NO: 1039682 - RNA, 22 nt, Human
auggccuggggagcaugggaag

SEQ ID NO: 1039683 - RNA, 22 nt, Human
agccuggcacugaggcagggcg

SEQ ID NO: 1039684 - RNA, 22 nt, Human
aagacauuacuggaaucugacu

SEQ ID NO: 1039685 - RNA, 22 nt, Human
aucaguuucacuugcuugcaaa

SEQ ID NO: 1039686 - RNA, 22 nt, Human
aggaagccuggggcugcccucg

SEQ ID NO: 1039687 - RNA, 22 nt, Human
aggccaggcaacauucugaagu

SEQ ID NO: 1039688 - RNA, 22 nt, Human
cugcaggcccccuuccuggagu

SEQ ID NO: 1039689 - RNA, 22 nt, Human
caggaacaauguaagucucauu

SEQ ID NO: 1039690 - RNA, 22 nt, Human
uggggcuggggaucuugagccu

SEQ ID NO: 1039691 - RNA, 22 nt, Human
agcagccauagauagcaugcaa

SEQ ID NO: 1039692 - RNA, 22 nt, Human
guccuggcccacuggcaggcug

SEQ ID NO: 1039693 - RNA, 22 nt, Human
uaaggcagaaauaugagcaggg

SEQ ID NO: 1039694 - RNA, 22 nt, Human
aggugaguuacaggaggagguc

SEQ ID NO: 1039695 - RNA, 22 nt, Human
agggccagaggcaccuugcagc

SEQ ID NO: 1039696 - RNA, 22 nt, Human
cacauguacagaagcaggcugg

SEQ ID NO: 1039697 - RNA, 22 nt, Human
acaguggagaaggcaugaggcu

SEQ ID NO: 1039698 - RNA, 22 nt, Human
uuccaugugaguacacugugau

SEQ ID NO: 1039699 - RNA, 19 nt, Human
agcagcuggagguggagug

SEQ ID NO: 1039700 - RNA, 22 nt, Human
gaggagcuggcagcgucuccgc

SEQ ID NO: 1039701 - RNA, 22 nt, Human
aucuggguucaccaugcuccug

SEQ ID NO: 1039702 - RNA, 21 nt, Human
guauugcagaguuaugugcuc

SEQ ID NO: 1039703 - RNA, 23 nt, Human
agucucagcuggaaacauguguc

SEQ ID NO: 1039704 - RNA, 22 nt, Human
cagaaauggaauuuuccaucac

SEQ ID NO: 1039705 - RNA, 22 nt, Human
aggccugagcagaggaguggac

SEQ ID NO: 1039706 - RNA, 22 nt, Human
ugauuuccaaaaggcuucuaag

SEQ ID NO: 1039707 - RNA, 22 nt, Human
ccagagccucgcccggagccuc

SEQ ID NO: 1039708 - RNA, 20 nt, Human
acaaaugcauucugugacau

SEQ ID NO: 1039709 - RNA, 22 nt, Human
aggcugggcaccguuuugaucc

SEQ ID NO: 1039710 - RNA, 22 nt, Human
caaaugcagucccuuuguugcu

SEQ ID NO: 1039711 - RNA, 22 nt, Human
aguuuuaugcaguguucugaua

SEQ ID NO: 1039712 - RNA, 22 nt, Human
uccuucaaagcuccuagugagc

SEQ ID NO: 1039713 - RNA, 22 nt, Human
cccuuucccuucuggcucaggg

SEQ ID NO: 1039714 - RNA, 22 nt, Human
agagcagccugugaugaugcac

SEQ ID NO: 1039715 - RNA, 22 nt, Human
ugccagggcugcuacuggcuga

SEQ ID NO: 1039716 - RNA, 20 nt, Human
gcugccuuguccugcuuggu

SEQ ID NO: 1039717 - RNA, 22 nt, Human
gaugcacagugacccugccagu

SEQ ID NO: 1039718 - RNA, 18 nt, Human
cagggccccagaauuauc

SEQ ID NO: 1039719 - RNA, 22 nt, Human
ucacaacuugaagcugauuuaa

SEQ ID NO: 1039720 - RNA, 22 nt, Human
gaggggcucuuuaauaguaaca

SEQ ID NO: 1039721 - RNA, 22 nt, Human
uggccuugggcagguggccugc

SEQ ID NO: 1039722 - RNA, 22 nt, Human
ccucuggggugagugggccacu

SEQ ID NO: 1039723 - RNA, 17 nt, Human
uuccccugaccaagccu

SEQ ID NO: 1039724 - RNA, 22 nt, Human
agcagggcagugcuucagcucu

SEQ ID NO: 1039725 - RNA, 22 nt, Human
acugcagccuugaacucugggc

SEQ ID NO: 1039726 - RNA, 22 nt, Human
uacauacacaaauauacuguuu

SEQ ID NO: 1039727 - RNA, 22 nt, Human
auacaucuuccuuuuaaaaugc

SEQ ID NO: 1039728 - RNA, 19 nt, Human
ucaaggcucccugagggau

SEQ ID NO: 1039729 - RNA, 22 nt, Human
cagcagagacgguaagcagaac

SEQ ID NO: 1039730 - RNA, 21 nt, Human
aagaagcaauuuauuggaagg

SEQ ID NO: 1039731 - RNA, 22 nt, Human
ugaggcagaaauuccuguuuuc

SEQ ID NO: 1039732 - RNA, 22 nt, Human
aagacuuucucccaaauccuca

SEQ ID NO: 1039733 - RNA, 22 nt, Human
cugcagccuaggugcagcuggg

SEQ ID NO: 1039734 - RNA, 22 nt, Human
ucucuggccgagagucccuggg

SEQ ID NO: 1039735 - RNA, 22 nt, Human
ucaggccacuucacaggugauu

SEQ ID NO: 1039736 - RNA, 22 nt, Human
aggaaaaaagucugugauuaua

SEQ ID NO: 1039737 - RNA, 22 nt, Human
gccuggugugcgccgcgcagcu

SEQ ID NO: 1039738 - RNA, 22 nt, Human
gcacagccacugagugagaacc

SEQ ID NO: 1039739 - RNA, 22 nt, Human
gcuggugccuuguuguuguuac

SEQ ID NO: 1039740 - RNA, 22 nt, Human
acacagggaggaggugcugugc

SEQ ID NO: 1039741 - RNA, 22 nt, Human
gguggccuuucaguggaucagg

SEQ ID NO: 1039742 - RNA, 20 nt, Human
ccuccaggcacacccaugug

SEQ ID NO: 1039743 - RNA, 22 nt, Human
ucucagggugaggaaagaauuu

SEQ ID NO: 1039744 - RNA, 22 nt, Human
ggucagggcucuuccaguggcu

SEQ ID NO: 1039745 - RNA, 22 nt, Human
uggcagcaaaaccagaaucaga

SEQ ID NO: 1039746 - RNA, 22 nt, Human
ccugaggcccuggcugugcuga

SEQ ID NO: 1039747 - RNA, 22 nt, Human
uagaaacugauagucuugugcu

SEQ ID NO: 1039748 - RNA, 23 nt, Human
gugugccaagcacugugccagga

SEQ ID NO: 1039749 - RNA, 20 nt, Human
ugcuccaucuaaagugauua

SEQ ID NO: 1039750 - RNA, 18 nt, Human
gcugagguggugucagag

SEQ ID NO: 1039751 - RNA, 22 nt, Human
ucacauacacuaggauauuuuu

SEQ ID NO: 1039752 - RNA, 22 nt, Human
uuuguuuucaaugugucauuca

SEQ ID NO: 1039753 - RNA, 22 nt, Human
ggcagugacuguucagacgucc

SEQ ID NO: 1039754 - RNA, 22 nt, Human
uccuggagccacggagcuuuca

SEQ ID NO: 1039755 - RNA, 22 nt, Human
ggcacucagagauucaggcugu

SEQ ID NO: 1039756 - RNA, 22 nt, Human
gggggcuggaauauccaucaac

SEQ ID NO: 1039757 - RNA, 22 nt, Human
uuugcauuaucucacuuauaua

SEQ ID NO: 1039758 - RNA, 22 nt, Human
ugcuucucccaaccagggccug

SEQ ID NO: 1039759 - RNA, 22 nt, Human
ugguaaagaaggcuagaucuga

SEQ ID NO: 1039760 - RNA, 15 nt, Human
ugauuuccuacuaac

SEQ ID NO: 1039761 - RNA, 22 nt, Human
ccagaagucaggaaugagucuu

SEQ ID NO: 1039762 - RNA, 22 nt, Human
ggcaggaggaagaguuagcacc

SEQ ID NO: 1039763 - RNA, 22 nt, Human
aaagagcuucauuuccauuuau

SEQ ID NO: 1039764 - RNA, 22 nt, Human
caaggagauaaaauguugagcu

SEQ ID NO: 1039765 - RNA, 22 nt, Human
auaugaagaauuccaauuugga

SEQ ID NO: 1039766 - RNA, 22 nt, Human
cagggagaggcaucauagggaa

SEQ ID NO: 1039767 - RNA, 22 nt, Human
cagguggggcgcccucaggcag

SEQ ID NO: 1039768 - RNA, 22 nt, Human
uagcagcucacagccucccauu

SEQ ID NO: 1039769 - RNA, 22 nt, Human
agucucagaguaccugagggac

SEQ ID NO: 1039770 - RNA, 22 nt, Human
acaggcuucucacagaaaaggg

SEQ ID NO: 1039771 - RNA, 22 nt, Human
ugccugccaugcagaaagcuga

SEQ ID NO: 1039772 - RNA, 22 nt, Human
cagguggaucucuaaggacuga

SEQ ID NO: 1039773 - RNA, 20 nt, Human
ugcagcuucaccugugucau

SEQ ID NO: 1039774 - RNA, 22 nt, Human
caggccuggcccccggcacacc

SEQ ID NO: 1039775 - RNA, 22 nt, Human
auuauguaacugugguucagca

SEQ ID NO: 1039776 - RNA, 22 nt, Human
ugugcuucuugcagcuccugua

SEQ ID NO: 1039777 - RNA, 22 nt, Human
ucccagcagcauagcucagaau

SEQ ID NO: 1039778 - RNA, 22 nt, Human
ccaguccagugccaugcauggc

SEQ ID NO: 1039779 - RNA, 22 nt, Human
agcagccaaaugaagauuuuac

SEQ ID NO: 1039780 - RNA, 22 nt, Human
augggaggaagagaagaugucu

SEQ ID NO: 1039781 - RNA, 20 nt, Human
ccaccuggccaaggcugugc

SEQ ID NO: 1039782 - RNA, 22 nt, Human
ugaaaucuucacuaagucucuu

SEQ ID NO: 1039783 - RNA, 22 nt, Human
cccagguggcagaagcugcagu

SEQ ID NO: 1039784 - RNA, 22 nt, Human
cacugucuuuugugaagacaau

SEQ ID NO: 1039785 - RNA, 22 nt, Human
uccagggcuuggcugggacggu

SEQ ID NO: 1039786 - RNA, 22 nt, Human
guauuuauaggggaaugagagu

SEQ ID NO: 1039787 - RNA, 22 nt, Human
cagauggccagaggcagcugca

SEQ ID NO: 1039788 - RNA, 22 nt, Human
ugucucaguauacgaaacacuu

SEQ ID NO: 1039789 - RNA, 22 nt, Human
acauuuguaugcguuuuuacug

SEQ ID NO: 1039790 - RNA, 22 nt, Human
uuuuuccuagcgauuugucagc

SEQ ID NO: 1039791 - RNA, 22 nt, Human
acauuguagacuuuucauaugu

SEQ ID NO: 1039792 - RNA, 22 nt, Human
gggcugggcaugguguucccuc

SEQ ID NO: 1039793 - RNA, 22 nt, Human
ggccuggaaugcuuuccuacca

SEQ ID NO: 1039794 - RNA, 22 nt, Human
caguaugucuacuggacaaagu

SEQ ID NO: 1039795 - RNA, 22 nt, Human
gcccugucccuuggcuucuagg

SEQ ID NO: 1039796 - RNA, 22 nt, Human
agaaauguauagugaauuuuuc

SEQ ID NO: 1039797 - RNA, 22 nt, Human
ccagcuccaggacugggagcug

SEQ ID NO: 1039798 - RNA, 22 nt, Human
acugaaauacugcucuuggauu

SEQ ID NO: 1039799 - RNA, 22 nt, Human
ucagaccauccugcuguuagug

SEQ ID NO: 1039800 - RNA, 22 nt, Human
ucuggcucaucucuccagguaa

SEQ ID NO: 1039801 - RNA, 22 nt, Human
ucagggcaggacaguguaggcc

SEQ ID NO: 1039802 - RNA, 18 nt, Human
cagaaaucacaccagcac

SEQ ID NO: 1039803 - RNA, 22 nt, Human
gccagcuggagacuggcagggg

SEQ ID NO: 1039804 - RNA, 22 nt, Human
uggccugggugcugcugacauc

SEQ ID NO: 1039805 - RNA, 22 nt, Human
agguaagggucacaguucauau

SEQ ID NO: 1039806 - RNA, 22 nt, Human
cauacuuuugcccugacauucu

SEQ ID NO: 1039807 - RNA, 21 nt, Human
gaaaggucuuaacuuacagag

SEQ ID NO: 1039808 - RNA, 22 nt, Human
aggggcucaguuacuuuggcag

SEQ ID NO: 1039809 - RNA, 22 nt, Human
gggcugcugccaaucacagccu

SEQ ID NO: 1039810 - RNA, 22 nt, Human
cccaggucugugccagcucuga

SEQ ID NO: 1039811 - RNA, 22 nt, Human
ccaggagcagauauggacauaa

SEQ ID NO: 1039812 - RNA, 22 nt, Human
auguuacacauaggcauaaaug

SEQ ID NO: 1039813 - RNA, 22 nt, Human
gcacccagaauaaggacaggac

SEQ ID NO: 1039814 - RNA, 22 nt, Human
acaaagucugaaaccugaggca

SEQ ID NO: 1039815 - RNA, 22 nt, Human
ugggccugggucuuugcugcca

SEQ ID NO: 1039816 - RNA, 22 nt, Human
uggagcccagacacuggcauug

SEQ ID NO: 1039817 - RNA, 22 nt, Human
gugcauuuggugacucucaccc

SEQ ID NO: 1039818 - RNA, 22 nt, Human
uaugcauaauuggauaaguaga

SEQ ID NO: 1039819 - RNA, 22 nt, Human
ccuggcugguggcagcgacaag

SEQ ID NO: 1039820 - RNA, 20 nt, Human
gugaccagaagacagugggu

SEQ ID NO: 1039821 - RNA, 22 nt, Human
ugagcccaggaguaugaggcug

SEQ ID NO: 1039822 - RNA, 22 nt, Human
gucucuggguuaagcagugcau

SEQ ID NO: 1039823 - RNA, 22 nt, Human
ccagcuuguuugaagcucguca

SEQ ID NO: 1039824 - RNA, 22 nt, Human
cccuuccucccaggcuucugug

SEQ ID NO: 1039825 - RNA, 22 nt, Human
cucuccagccacagaagcugcu

SEQ ID NO: 1039826 - RNA, 23 nt, Human
agggguggucaguacccgcagug

SEQ ID NO: 1039827 - RNA, 22 nt, Human
caagcuccuuacauccacaggg

SEQ ID NO: 1039828 - RNA, 22 nt, Human
cugggagucuggccucuggucc

SEQ ID NO: 1039829 - RNA, 22 nt, Human
agggccuggaacugugggcagg

SEQ ID NO: 1039830 - RNA, 22 nt, Human
ugcugucaguuggcaggaugag

SEQ ID NO: 1039831 - RNA, 22 nt, Human
gcagaagcccggucagcgcacg

SEQ ID NO: 1039832 - RNA, 22 nt, Human
augggaggaugcucgggugcuc

SEQ ID NO: 1039833 - RNA, 22 nt, Human
ugcaccauguaaguggccacgu

SEQ ID NO: 1039834 - RNA, 22 nt, Human
acagguggcauaggcaguuuga

SEQ ID NO: 1039835 - RNA, 22 nt, Human
uggcagagucugggcuugggca

SEQ ID NO: 1039836 - RNA, 22 nt, Human
gucucccacuuucuggccucuu

SEQ ID NO: 1039837 - RNA, 22 nt, Human
ggcaugggguguauguggcacg

SEQ ID NO: 1039838 - RNA, 22 nt, Human
gcauaauauacaugcuugaucc

SEQ ID NO: 1039839 - RNA, 22 nt, Human
cagggcagccaggccccguggg

SEQ ID NO: 1039840 - RNA, 22 nt, Human
aggagcugaaacuucucauaug

SEQ ID NO: 1039841 - RNA, 22 nt, Human
gguggccucugcaggccucgac

SEQ ID NO: 1039842 - RNA, 22 nt, Human
ugaagccuuguguggccucucu

SEQ ID NO: 1039843 - RNA, 22 nt, Human
gcagagcuguuaauggagcuga

SEQ ID NO: 1039844 - RNA, 22 nt, Human
gagcccuccauggagccaggca

SEQ ID NO: 1039845 - RNA, 22 nt, Human
acacaguaugaaaagucuaguu

SEQ ID NO: 1039846 - RNA, 22 nt, Human
cuggagccggaccagggacggu

SEQ ID NO: 1039847 - RNA, 22 nt, Human
ucucucagucagaugcuaaaga

SEQ ID NO: 1039848 - RNA, 20 nt, Human
gagccuuccccucaccacug

SEQ ID NO: 1039849 - RNA, 22 nt, Human
ucugucaccauucagcuugaau

SEQ ID NO: 1039850 - RNA, 22 nt, Human
uggagaugaauauguguaccug

SEQ ID NO: 1039851 - RNA, 23 nt, Human
gcugucugucaucucugcgggag

SEQ ID NO: 1039852 - RNA, 22 nt, Human
ucuuugcaugugcuucuuggcc

SEQ ID NO: 1039853 - RNA, 22 nt, Human
cugggcugcaggaguggggcaa

SEQ ID NO: 1039854 - RNA, 22 nt, Human
uccaaagggaagcgcuuucugu

SEQ ID NO: 1039855 - RNA, 22 nt, Human
aacuagaacgucuaguugcugg

SEQ ID NO: 1039856 - RNA, 22 nt, Human
aaagguuugcauggaauuuacc

SEQ ID NO: 1039857 - RNA, 22 nt, Human
aaaaaugcuuggacuuaauaaa

SEQ ID NO: 1039858 - RNA, 23 nt, Human
cagaccuggcagucauccucaac

SEQ ID NO: 1039859 - RNA, 22 nt, Human
aagaaaagaaaccugaggcuuu

SEQ ID NO: 1039860 - RNA, 22 nt, Human
gcagccacuaguuuuccuguuu

SEQ ID NO: 1039861 - RNA, 22 nt, Human
uaugugcaguuugcucuuaaca

SEQ ID NO: 1039862 - RNA, 22 nt, Human
ugggacacccucacgccugcac

SEQ ID NO: 1039863 - RNA, 22 nt, Human
accuuuuuguucuguucucagc

SEQ ID NO: 1039864 - RNA, 22 nt, Human
cuacauuaaauuggcuuacuua

SEQ ID NO: 1039865 - RNA, 22 nt, Human
auuagcugaccucuaaggagcc

SEQ ID NO: 1039866 - RNA, 22 nt, Human
ccugggcaggaugggcccggug

SEQ ID NO: 1039867 - RNA, 17 nt, Human
gccuggcccagccuggc

SEQ ID NO: 1039868 - RNA, 22 nt, Human
gggcucucaugaguguguggua

SEQ ID NO: 1039869 - RNA, 22 nt, Human
ggcugcuugcuguuucuuggau

SEQ ID NO: 1039870 - RNA, 22 nt, Human
auuguaauuuuagagaaagugg

SEQ ID NO: 1039871 - RNA, 18 nt, Human
acaaauguagugucuuaa

SEQ ID NO: 1039872 - RNA, 22 nt, Human
agggccaggaacaccugaaggg

SEQ ID NO: 1039873 - RNA, 18 nt, Human
gagaggcccggcugugcc

SEQ ID NO: 1039874 - RNA, 22 nt, Human
gcagcaggagaguuuguccugc

SEQ ID NO: 1039875 - RNA, 22 nt, Human
gccaggcuggaaagaacagaca

SEQ ID NO: 1039876 - RNA, 22 nt, Human
cuguggcuaggaagcuguggga

SEQ ID NO: 1039877 - RNA, 22 nt, Human
uugcagagaucagcagguuuga

SEQ ID NO: 1039878 - RNA, 17 nt, Human
gucugggcuuuagagac

SEQ ID NO: 1039879 - RNA, 22 nt, Human
cucugggcaccaaagagcagcu

SEQ ID NO: 1039880 - RNA, 22 nt, Human
cugagaggugacagcgugcugg

SEQ ID NO: 1039881 - RNA, 22 nt, Human
agucuucccugugccagagugu

SEQ ID NO: 1039882 - RNA, 22 nt, Human
cuucaagauccauagauauugc

SEQ ID NO: 1039883 - RNA, 22 nt, Human
ucagaggucacacagcaaguuu

SEQ ID NO: 1039884 - RNA, 21 nt, Human
ucagcagcuuuugcagucccu

SEQ ID NO: 1039885 - RNA, 20 nt, Human
agaagcugauacugauggaa

SEQ ID NO: 1039886 - RNA, 23 nt, Human
uccuuccuuugagaggcuccauc

SEQ ID NO: 1039887 - RNA, 22 nt, Human
gcaggaugagugaguacauuua

SEQ ID NO: 1039888 - RNA, 21 nt, Human
ggacuuacauagguaaggggu

SEQ ID NO: 1039889 - RNA, 22 nt, Human
gccaggcuggcaaaaggaaacc

SEQ ID NO: 1039890 - RNA, 22 nt, Human
ugcuccagugagcuggccaucc

SEQ ID NO: 1039891 - RNA, 22 nt, Human
aggaggcuguggagcacuccau

SEQ ID NO: 1039892 - RNA, 22 nt, Human
ggaggggccggcugccugccac

SEQ ID NO: 1039893 - RNA, 22 nt, Human
uuacaguaugaucaacuuuuca

SEQ ID NO: 1039894 - RNA, 22 nt, Human
ucugucugcucauuuaccucag

SEQ ID NO: 1039895 - RNA, 22 nt, Human
cuggaaggcucugcugccuguc

SEQ ID NO: 1039896 - RNA, 22 nt, Human
ggccagagaauaugccuuacgu

SEQ ID NO: 1039897 - RNA, 22 nt, Human
uggcacugaccccaggccugug

SEQ ID NO: 1039898 - RNA, 22 nt, Human
ucccagagacaucauuucuccg

SEQ ID NO: 1039899 - RNA, 22 nt, Human
ccagagccugcugagccccauu

SEQ ID NO: 1039900 - RNA, 22 nt, Human
cagagccaugguaugggcuugu

SEQ ID NO: 1039901 - RNA, 22 nt, Human
acauuucuucccuuuagcagaa

SEQ ID NO: 1039902 - RNA, 22 nt, Human
gaggcagcaaaauauaucauaa

SEQ ID NO: 1039903 - RNA, 22 nt, Human
cuucuugcugggggccucagug

SEQ ID NO: 1039904 - RNA, 22 nt, Human
gcagggacaaggcagguguucu

SEQ ID NO: 1039905 - RNA, 22 nt, Human
uccaguggagugugggggugaa

SEQ ID NO: 1039906 - RNA, 22 nt, Human
acuguacuguguauuguagaau

SEQ ID NO: 1039907 - RNA, 22 nt, Human
caagugucuauaucagugcuug

SEQ ID NO: 1039908 - RNA, 22 nt, Human
agagucugaggcagcugcagcc

SEQ ID NO: 1039909 - RNA, 22 nt, Human
ugugaagcuggauccuggagcu

SEQ ID NO: 1039910 - RNA, 22 nt, Human
guaagggauuugaacauagguu

SEQ ID NO: 1039911 - RNA, 20 nt, Human
ccuggaagagcuccccaggc

SEQ ID NO: 1039912 - RNA, 23 nt, Human
ggggccugcaccggucugcgcgg

SEQ ID NO: 1039913 - RNA, 22 nt, Human
gcucaggaccgaggggugggaa

SEQ ID NO: 1039914 - RNA, 22 nt, Human
ugcugccucagcuuccugggcu

SEQ ID NO: 1039915 - RNA, 22 nt, Human
aggagccaagcagaacuaagga

SEQ ID NO: 1039916 - RNA, 18 nt, Human
ggcucaggcuauccuaac

SEQ ID NO: 1039917 - RNA, 22 nt, Human
acugcagccuuugggcucauaa

SEQ ID NO: 1039918 - RNA, 22 nt, Human
cuggugggagcagcaggcagcu

SEQ ID NO: 1039919 - RNA, 22 nt, Human
auuuugaaaccaaguuauuucc

SEQ ID NO: 1039920 - RNA, 22 nt, Human
aucagcaagauugugucuugua

SEQ ID NO: 1039921 - RNA, 22 nt, Human
cagaggcuaagaugagugggug

SEQ ID NO: 1039922 - RNA, 23 nt, Human
agaggccaacuucuugccccucc

SEQ ID NO: 1039923 - RNA, 20 nt, Human
cagcuuggaugagaggcuga

SEQ ID NO: 1039924 - RNA, 23 nt, Human
ucugagagaacaaugccuccuau

SEQ ID NO: 1039925 - RNA, 19 nt, Human
gggcuuggggcugaagccu

SEQ ID NO: 1039926 - RNA, 22 nt, Human
aguuuagaguucaaauuaguuc

SEQ ID NO: 1039927 - RNA, 21 nt, Human
agcagagugcuuugacuuugu

SEQ ID NO: 1039928 - RNA, 22 nt, Human
cucuggaguggguggccgggag

SEQ ID NO: 1039929 - RNA, 22 nt, Human
uuuuauuggagugauaccaagc

SEQ ID NO: 1039930 - RNA, 22 nt, Human
aggcuggcuggcaggggacaca

SEQ ID NO: 1039931 - RNA, 22 nt, Human
ggcauggcuggguucuggugag

SEQ ID NO: 1039932 - RNA, 21 nt, Human
agcugagcccagaagacuggu

SEQ ID NO: 1039933 - RNA, 22 nt, Human
uccuuggcuuucuggagcuucu

SEQ ID NO: 1039934 - RNA, 22 nt, Human
ugccugggaaccaauccuggcu

SEQ ID NO: 1039935 - RNA, 22 nt, Human
caggccuggagugcaauggcac

SEQ ID NO: 1039936 - RNA, 23 nt, Human
ccuccugggcacaggccugaugg

SEQ ID NO: 1039937 - RNA, 22 nt, Human
ccauaagguugaaaacuguaca

SEQ ID NO: 1039938 - RNA, 22 nt, Human
ucacuguaucauguugcacuua

SEQ ID NO: 1039939 - RNA, 22 nt, Human
augcaguagauaggcacuuuua

SEQ ID NO: 1039940 - RNA, 22 nt, Human
aucauaaagugcuaucugauug

SEQ ID NO: 1039941 - RNA, 22 nt, Human
uggccugguuauauugcuauca

SEQ ID NO: 1039942 - RNA, 22 nt, Human
aggaguguggccagggcucugg

SEQ ID NO: 1039943 - RNA, 23 nt, Human
uggcucugagcuuccugguggcc

SEQ ID NO: 1039944 - RNA, 22 nt, Human
cugggagcccugacuagccugg

SEQ ID NO: 1039945 - RNA, 21 nt, Human
gcagcuggucucagagcuugc

SEQ ID NO: 1039946 - RNA, 22 nt, Human
uaaauguguaaaccuccauuac

SEQ ID NO: 1039947 - RNA, 22 nt, Human
uuguaacagcugcuuaauagag

SEQ ID NO: 1039948 - RNA, 22 nt, Human
augugcaugcacuuacaugugu

SEQ ID NO: 1039949 - RNA, 22 nt, Human
ggaagggcaaaagagaugaacu

SEQ ID NO: 1039950 - RNA, 22 nt, Human
gugcugucguggaacugggcug

SEQ ID NO: 1039951 - RNA, 22 nt, Human
uugaaggacaucuuguuucuag

SEQ ID NO: 1039952 - RNA, 22 nt, Human
auacuuuggggguuaguguaga

SEQ ID NO: 1039953 - RNA, 22 nt, Human
uggagcaggugggaugucguga

SEQ ID NO: 1039954 - RNA, 22 nt, Human
gauucugagcugguguuuuacg

SEQ ID NO: 1039955 - RNA, 22 nt, Human
gccugcagaacugugaggcaau

SEQ ID NO: 1039956 - RNA, 22 nt, Human
ccacacagggggaugaguuauu

SEQ ID NO: 1039957 - RNA, 22 nt, Human
ucuccucugcgcggcagugccc

SEQ ID NO: 1039958 - RNA, 20 nt, Human
agcaggaaugaugcuuucau

SEQ ID NO: 1039959 - RNA, 22 nt, Human
gcugagugagguccagagcuug

SEQ ID NO: 1039960 - RNA, 22 nt, Human
aagaugcagcuuccacuuuugc

SEQ ID NO: 1039961 - RNA, 22 nt, Human
uauugaaauccauuacguucuu

SEQ ID NO: 1039962 - RNA, 22 nt, Human
uggcucagagcagggacucugg

SEQ ID NO: 1039963 - RNA, 22 nt, Human
cuaucuuucgauucuagcuuaa

SEQ ID NO: 1039964 - RNA, 22 nt, Human
ucaaaugcuguauuguaguaau

SEQ ID NO: 1039965 - RNA, 22 nt, Human
gugcugucaauugcuuucagua

SEQ ID NO: 1039966 - RNA, 22 nt, Human
acaaagcuagagaagagaauug

SEQ ID NO: 1039967 - RNA, 22 nt, Human
uucuggaguauuccuggcaccu

SEQ ID NO: 1039968 - RNA, 22 nt, Human
caggcugggaacgccacccgcu

SEQ ID NO: 1039969 - RNA, 22 nt, Human
uauucacauucucaggccuggu

SEQ ID NO: 1039970 - RNA, 22 nt, Human
uugaccauaccuccaggcaguu

SEQ ID NO: 1039971 - RNA, 21 nt, Human
uuacuuuugcaccaaccuaau

SEQ ID NO: 1039972 - RNA, 22 nt, Human
ggcuucccaaggagccaggaug

SEQ ID NO: 1039973 - RNA, 19 nt, Human
gagcccucuccauggccac

SEQ ID NO: 1039974 - RNA, 22 nt, Human
cugugccuggggggcagagcug

SEQ ID NO: 1039975 - RNA, 22 nt, Human
uucaagauccagcacaacagug

SEQ ID NO: 1039976 - RNA, 22 nt, Human
auugacaaggaaacuauaccag

SEQ ID NO: 1039977 - RNA, 22 nt, Human
aacucaguuacauauuagaaua

SEQ ID NO: 1039978 - RNA, 22 nt, Human
ccugaagcaaggguaggcaggu

SEQ ID NO: 1039979 - RNA, 21 nt, Human
aacauuucugggagaacucac

SEQ ID NO: 1039980 - RNA, 22 nt, Human
agccagaggccagccugccuca

SEQ ID NO: 1039981 - RNA, 22 nt, Human
ugggcagagucauacaggagac

SEQ ID NO: 1039982 - RNA, 22 nt, Human
gcaccugcaggaugagccaggg

SEQ ID NO: 1039983 - RNA, 22 nt, Human
acaaaguuugugguauuccaag

SEQ ID NO: 1039984 - RNA, 22 nt, Human
uugcacuccagcccgagcaaca

SEQ ID NO: 1039985 - RNA, 22 nt, Human
cucaggauauugggcuggagca

SEQ ID NO: 1039986 - RNA, 22 nt, Human
guuuuuaucuaauagcaguuau

SEQ ID NO: 1039987 - RNA, 22 nt, Human
acaggugguaaaauggacuguc

SEQ ID NO: 1039988 - RNA, 22 nt, Human
gcugagcucccagcaguaucug

SEQ ID NO: 1039989 - RNA, 22 nt, Human
uccuugaaugaagagaggugac

SEQ ID NO: 1039990 - RNA, 22 nt, Human
uacaaaguuugagaaugcuuuc

SEQ ID NO: 1039991 - RNA, 22 nt, Human
uaggagcuaaaauauuuuauau

SEQ ID NO: 1039992 - RNA, 22 nt, Human
cauguacaaaaggcaaaugccu

SEQ ID NO: 1039993 - RNA, 19 nt, Human
ccugggaggcggagguugc

SEQ ID NO: 1039994 - RNA, 22 nt, Human
ucuggcucuaacuaggcaucag

SEQ ID NO: 1039995 - RNA, 21 nt, Human
gaggccacuaauaggggcaga

SEQ ID NO: 1039996 - RNA, 23 nt, Human
ugcucugugaauaguuggugacu

SEQ ID NO: 1039997 - RNA, 22 nt, Human
aauguuaaaaccuucagugcuu

SEQ ID NO: 1039998 - RNA, 22 nt, Human
gcugggaggaucucucccuguc

SEQ ID NO: 1039999 - RNA, 22 nt, Human
caggaggaaaugugacccugcu

SEQ ID NO: 1040000 - RNA, 22 nt, Human
uugacagcaaagauugugccua

SEQ ID NO: 1040001 - RNA, 22 nt, Human
caggccugaguguggaagucuu

SEQ ID NO: 1040002 - RNA, 22 nt, Human
ggagggcugccagguggagcgg

SEQ ID NO: 1040003 - RNA, 22 nt, Human
uggcugcugcuuggucuucuuc

SEQ ID NO: 1040004 - RNA, 23 nt, Human
agaugaaagcuucccaucacagu

SEQ ID NO: 1040005 - RNA, 22 nt, Human
uguaggaguccaaucaggagac

SEQ ID NO: 1040006 - RNA, 17 nt, Human
gguggccugcaguggcu

SEQ ID NO: 1040007 - RNA, 22 nt, Human
uugaagcacaaugucuuuuauc

SEQ ID NO: 1040008 - RNA, 22 nt, Human
gaagcagcgaaguggaagggac

SEQ ID NO: 1040009 - RNA, 22 nt, Human
uugcucuguaauaaucuggggu

SEQ ID NO: 1040010 - RNA, 22 nt, Human
gagccuggggacccuccugagu

SEQ ID NO: 1040011 - RNA, 22 nt, Human
ugcaggugguuuggacacugcu

SEQ ID NO: 1040012 - RNA, 22 nt, Human
ugagguggcuagggaggcacuc

SEQ ID NO: 1040013 - RNA, 22 nt, Human
ugcagccaauucauucauucuu

SEQ ID NO: 1040014 - RNA, 22 nt, Human
cugcagggcagggccuccuggc

SEQ ID NO: 1040015 - RNA, 22 nt, Human
cagaagcauuccagcaaauagu

SEQ ID NO: 1040016 - RNA, 22 nt, Human
aauguguguauuucuaggcgag

SEQ ID NO: 1040017 - RNA, 22 nt, Human
ccugccugguguaagucuaagg

SEQ ID NO: 1040018 - RNA, 22 nt, Human
ggagucaggagcaggcugggcu

SEQ ID NO: 1040019 - RNA, 22 nt, Human
cuuccaaagcacuuuauggacc

SEQ ID NO: 1040020 - RNA, 22 nt, Human
ugccugaggagucagggcaggu

SEQ ID NO: 1040021 - RNA, 22 nt, Human
gugacucacacaggccugggcu

SEQ ID NO: 1040022 - RNA, 22 nt, Human
acccagaggugucuagcaagcu

SEQ ID NO: 1040023 - RNA, 22 nt, Human
ucagggacuaggugcugccuga

SEQ ID NO: 1040024 - RNA, 22 nt, Human
cuuuuuccagcuucaggguggg

SEQ ID NO: 1040025 - RNA, 22 nt, Human
ccuggcagguggcgcccucggc

SEQ ID NO: 1040026 - RNA, 22 nt, Human
uuccauaacugaccgaaugcau

SEQ ID NO: 1040027 - RNA, 22 nt, Human
ugaaggaaugagggaguggguc

SEQ ID NO: 1040028 - RNA, 21 nt, Human
gccaccucgucucggagcagc

SEQ ID NO: 1040029 - RNA, 22 nt, Human
aaauguguauaugaaacaugau

SEQ ID NO: 1040030 - RNA, 22 nt, Human
agugaccauuuucagcuagagg

SEQ ID NO: 1040031 - RNA, 22 nt, Human
aguuuuuccugauuuuacagaa

SEQ ID NO: 1040032 - RNA, 22 nt, Human
auugacaauuagcccuuaggug

SEQ ID NO: 1040033 - RNA, 22 nt, Human
gcugcagcccggcgcgccugag

SEQ ID NO: 1040034 - RNA, 22 nt, Human
agggcuggagccacagcuggga

SEQ ID NO: 1040035 - RNA, 22 nt, Human
ugagcccagagcccuuguaggg

SEQ ID NO: 1040036 - RNA, 22 nt, Human
ccuggaaggugaugguacagca

SEQ ID NO: 1040037 - RNA, 22 nt, Human
aagaugauguuguguuuucacu

SEQ ID NO: 1040038 - RNA, 22 nt, Human
acgcagaagggccuggcgugcc

SEQ ID NO: 1040039 - RNA, 22 nt, Human
gugaccaucagagaauaacaaa

SEQ ID NO: 1040040 - RNA, 22 nt, Human
accagagcgcucaagccuuccc

SEQ ID NO: 1040041 - RNA, 22 nt, Human
cauggggagacaccuagggaaa

SEQ ID NO: 1040042 - RNA, 20 nt, Human
ccugaggguuuguguucuuu

SEQ ID NO: 1040043 - RNA, 22 nt, Human
caccagcuuugcccacugccca

SEQ ID NO: 1040044 - RNA, 22 nt, Human
acagaauugaaaguauaaucug

SEQ ID NO: 1040045 - RNA, 22 nt, Human
uguauuagagcaguagaauuau

SEQ ID NO: 1040046 - RNA, 19 nt, Human
gaagaagcuugagaaguag

SEQ ID NO: 1040047 - RNA, 22 nt, Human
cuggaagaggaagccagcugga

SEQ ID NO: 1040048 - RNA, 22 nt, Human
accaggaggccuggagcacaaa

SEQ ID NO: 1040049 - RNA, 22 nt, Human
gggcauggaggucugucugcag

SEQ ID NO: 1040050 - RNA, 22 nt, Human
cugaggugagcuucccugggcu

SEQ ID NO: 1040051 - RNA, 22 nt, Human
uaagcauaacuaaaaaugauuu

SEQ ID NO: 1040052 - RNA, 22 nt, Human
uggaccugcuggaugggcaggu

SEQ ID NO: 1040053 - RNA, 22 nt, Human
uaaaucacuccuaauaaucagu

SEQ ID NO: 1040054 - RNA, 22 nt, Human
cugaaggacacgugaggagcca

SEQ ID NO: 1040055 - RNA, 21 nt, Human
ucugggcccaugcugccucac

SEQ ID NO: 1040056 - RNA, 22 nt, Human
gucagcaggguccccuugagug

SEQ ID NO: 1040057 - RNA, 22 nt, Human
caggucagagucccccuguccu

SEQ ID NO: 1040058 - RNA, 22 nt, Human
aagggcagccugacucacgguc

SEQ ID NO: 1040059 - RNA, 22 nt, Human
uccuucagcuuauuucuuagga

SEQ ID NO: 1040060 - RNA, 18 nt, Human
gggaucaggcugccuagg

SEQ ID NO: 1040061 - RNA, 22 nt, Human
aucagcaaguccuguuaauucu

SEQ ID NO: 1040062 - RNA, 22 nt, Human
cacacaugagucuccccauugg

SEQ ID NO: 1040063 - RNA, 22 nt, Human
aagcacagaaaaggagcaugga

SEQ ID NO: 1040064 - RNA, 22 nt, Human
ugcagaguaaaagcagaugcua

SEQ ID NO: 1040065 - RNA, 23 nt, Human
ugacacauuuccuuuccacugca

SEQ ID NO: 1040066 - RNA, 22 nt, Human
agagucuuccaggcagccugag

SEQ ID NO: 1040067 - RNA, 22 nt, Human
gugugcaugcauagacaccaca

SEQ ID NO: 1040068 - RNA, 22 nt, Human
ugucccaguucccaggguugcu

SEQ ID NO: 1040069 - RNA, 22 nt, Human
ucuggccuauuucugucagauc

SEQ ID NO: 1040070 - RNA, 22 nt, Human
ucagggacuuacaaaccagaag

SEQ ID NO: 1040071 - RNA, 22 nt, Human
cuggugccuccucccugugcuu

SEQ ID NO: 1040072 - RNA, 19 nt, Human
ggacacagaaagcugcauu

SEQ ID NO: 1040073 - RNA, 22 nt, Human
ucacuggggccuuuggucagga

SEQ ID NO: 1040074 - RNA, 22 nt, Human
ggcuggguuauuuauggccaag

SEQ ID NO: 1040075 - RNA, 22 nt, Human
ccugggugaugugcugcccucg

SEQ ID NO: 1040076 - RNA, 22 nt, Human
ccagcugagaaguguaaaguga

SEQ ID NO: 1040077 - RNA, 22 nt, Human
ggcugggcuccgggagcaugcg

SEQ ID NO: 1040078 - RNA, 22 nt, Human
ugaaagguagcuggccucauag

SEQ ID NO: 1040079 - RNA, 22 nt, Human
gcagcuuggugaaaggugaugg

SEQ ID NO: 1040080 - RNA, 22 nt, Human
gaugcagaaaguagacaccauc

SEQ ID NO: 1040081 - RNA, 22 nt, Human
ggcucugcuggauugaggccag

SEQ ID NO: 1040082 - RNA, 22 nt, Human
agggcagagcugucuaaauggc

SEQ ID NO: 1040083 - RNA, 22 nt, Human
ucagaagcugguguccuuugaa

SEQ ID NO: 1040084 - RNA, 22 nt, Human
agugguaacuaaguccugcuua

SEQ ID NO: 1040085 - RNA, 19 nt, Human
acucaagucuaaugaaauc

SEQ ID NO: 1040086 - RNA, 22 nt, Human
ccagcugaggcagccacacagg

SEQ ID NO: 1040087 - RNA, 22 nt, Human
uccucaggaucuaggagugcuu

SEQ ID NO: 1040088 - RNA, 22 nt, Human
gaaggaagugcucauacuaguu

SEQ ID NO: 1040089 - RNA, 23 nt, Human
cccagcgcugagcccugcaggca

SEQ ID NO: 1040090 - RNA, 22 nt, Human
ugcaccccauuuuacauuuaca

SEQ ID NO: 1040091 - RNA, 22 nt, Human
ccuggcagcagcacaugccuuc

SEQ ID NO: 1040092 - RNA, 22 nt, Human
agagcuggguggacuuguaguu

SEQ ID NO: 1040093 - RNA, 22 nt, Human
agauacauuguucuaagcauug

SEQ ID NO: 1040094 - RNA, 22 nt, Human
caaggcugcugcgggucgcacc

SEQ ID NO: 1040095 - RNA, 22 nt, Human
gggagccaugcuggucuucuuu

SEQ ID NO: 1040096 - RNA, 21 nt, Human
cucuggaggcaagggagagug

SEQ ID NO: 1040097 - RNA, 22 nt, Human
auuugucugcuugcugccuucc

SEQ ID NO: 1040098 - RNA, 22 nt, Human
uggcucagaaggcugccuucac

SEQ ID NO: 1040099 - RNA, 22 nt, Human
caggccugugaguugaggcccc

SEQ ID NO: 1040100 - RNA, 22 nt, Human
ugggugggagcacccugucugg

SEQ ID NO: 1040101 - RNA, 20 nt, Human
ccagacagcaccugccuggu

SEQ ID NO: 1040102 - RNA, 22 nt, Human
accucuggccuucaggcaucau

SEQ ID NO: 1040103 - RNA, 22 nt, Human
acugaaggaaagccuuugcaug

SEQ ID NO: 1040104 - RNA, 22 nt, Human
ggcacugagcgggcucugagcg

SEQ ID NO: 1040105 - RNA, 22 nt, Human
ggcagcuggccuccucgcccac

SEQ ID NO: 1040106 - RNA, 22 nt, Human
caggagugucuccacacagcaa

SEQ ID NO: 1040107 - RNA, 22 nt, Human
agaggaugguugaggaagaccu

SEQ ID NO: 1040108 - RNA, 22 nt, Human
uaugcacaccuggguccuuguc

SEQ ID NO: 1040109 - RNA, 22 nt, Human
ggcaguagccagggacuggcag

SEQ ID NO: 1040110 - RNA, 22 nt, Human
uccccagccgugaaggagagga

SEQ ID NO: 1040111 - RNA, 22 nt, Human
ucuuccucucuaauugaucaga

SEQ ID NO: 1040112 - RNA, 22 nt, Human
uacccaggagaaacagcagggc

SEQ ID NO: 1040113 - RNA, 22 nt, Human
ggcagaggaagcuggaaguggg

SEQ ID NO: 1040114 - RNA, 22 nt, Human
agagcagaggcauggccguggg

SEQ ID NO: 1040115 - RNA, 22 nt, Human
caauagcagcuucugaaugcaa

SEQ ID NO: 1040116 - RNA, 17 nt, Human
gggcagggacuccuggg

SEQ ID NO: 1040117 - RNA, 22 nt, Human
gcaaggaccuuugagcgugcca

SEQ ID NO: 1040118 - RNA, 22 nt, Human
aagauuucagaguuugggggaa

SEQ ID NO: 1040119 - RNA, 22 nt, Human
acuuuuuacaggguguauacca

SEQ ID NO: 1040120 - RNA, 21 nt, Human
cagugcucaaucugacagugg

SEQ ID NO: 1040121 - RNA, 22 nt, Human
agaguguuucagucuuccuaga

SEQ ID NO: 1040122 - RNA, 22 nt, Human
ccacagggugucaucagcuuga

SEQ ID NO: 1040123 - RNA, 22 nt, Human
uccaguggguugcugagggagg

SEQ ID NO: 1040124 - RNA, 22 nt, Human
acauuucucuuagaguuggacu

SEQ ID NO: 1040125 - RNA, 22 nt, Human
ugccucugaggaagauuguguu

SEQ ID NO: 1040126 - RNA, 22 nt, Human
ccugggaggcggagguugcagg

SEQ ID NO: 1040127 - RNA, 22 nt, Human
agagccaggacugugucucacu

SEQ ID NO: 1040128 - RNA, 20 nt, Human
gugccuggagaagaggcugu

SEQ ID NO: 1040129 - RNA, 22 nt, Human
ggagauagacuuggugagccac

SEQ ID NO: 1040130 - RNA, 22 nt, Human
ggaggccaaggcaggcggauca

SEQ ID NO: 1040131 - RNA, 22 nt, Human
cuuauguaugcuacuuuguggu

SEQ ID NO: 1040132 - RNA, 22 nt, Human
gccaccagugggggccugggca

SEQ ID NO: 1040133 - RNA, 22 nt, Human
acaaaguccugguguauggcca

SEQ ID NO: 1040134 - RNA, 22 nt, Human
ccugagacaugaaccaggcucc

SEQ ID NO: 1040135 - RNA, 22 nt, Human
aggacuuagaacauuauguacu

SEQ ID NO: 1040136 - RNA, 22 nt, Human
guccugucccccaaggcugugg

SEQ ID NO: 1040137 - RNA, 22 nt, Human
aaugaugguuucaucacuugaa

SEQ ID NO: 1040138 - RNA, 22 nt, Human
uggcuucugggacuugugagca

SEQ ID NO: 1040139 - RNA, 22 nt, Human
gauuucaccugaucuugucauc

SEQ ID NO: 1040140 - RNA, 22 nt, Human
ucacaggguguacaucaccuau

SEQ ID NO: 1040141 - RNA, 22 nt, Human
aagucacagcuaaauagcuaag

SEQ ID NO: 1040142 - RNA, 22 nt, Human
aaugcacaaaaauuguauguaa

SEQ ID NO: 1040143 - RNA, 22 nt, Human
gcugcuuccuuuccugcugacc

SEQ ID NO: 1040144 - RNA, 22 nt, Human
ugcuucaggaagaaacgccagg

SEQ ID NO: 1040145 - RNA, 22 nt, Human
aacacaaagaagcugcaggauc

SEQ ID NO: 1040146 - RNA, 22 nt, Human
agagggaucacccuguuucugg

SEQ ID NO: 1040147 - RNA, 22 nt, Human
aggaccuguaccucagcaucua

SEQ ID NO: 1040148 - RNA, 19 nt, Human
gucacauuugucucccagg

SEQ ID NO: 1040149 - RNA, 22 nt, Human
agaagauuuagguugacgcuau

SEQ ID NO: 1040150 - RNA, 22 nt, Human
gagucacauuaauuuaauuuua

SEQ ID NO: 1040151 - RNA, 22 nt, Human
gggagcuguaguccagauaccg

SEQ ID NO: 1040152 - RNA, 22 nt, Human
uuaugaaagacauuucuguugg

SEQ ID NO: 1040153 - RNA, 22 nt, Human
agugcacaccuuaguacaaagu

SEQ ID NO: 1040154 - RNA, 21 nt, Human
uagcacuucgcuguaauuggg

SEQ ID NO: 1040155 - RNA, 22 nt, Human
gcuggaaggcuaggcucaguug

SEQ ID NO: 1040156 - RNA, 20 nt, Human
uguugauuggugucaucuca

SEQ ID NO: 1040157 - RNA, 22 nt, Human
ccaggaggcagagguuacagug

SEQ ID NO: 1040158 - RNA, 22 nt, Human
aaaguguacuaugucaugaaca

SEQ ID NO: 1040159 - RNA, 22 nt, Human
acagggcaaccucugggagacu

SEQ ID NO: 1040160 - RNA, 22 nt, Human
ccaggggcuggugcugagcugg

SEQ ID NO: 1040161 - RNA, 21 nt, Human
ucagggcagcugcucuucaga

SEQ ID NO: 1040162 - RNA, 22 nt, Human
ggggauggugggaaggcaaucu

SEQ ID NO: 1040163 - RNA, 22 nt, Human
auagauacauuagguaacuugu

SEQ ID NO: 1040164 - RNA, 22 nt, Human
ggguguguuccuaaggaaacca

SEQ ID NO: 1040165 - RNA, 22 nt, Human
ccagggugaccagcuggccuag

SEQ ID NO: 1040166 - RNA, 22 nt, Human
cagcaggcguugggagaaagac

SEQ ID NO: 1040167 - RNA, 22 nt, Human
aaaugugucauauucaaaguca

SEQ ID NO: 1040168 - RNA, 22 nt, Human
ugggcugcuuccucagcugaga

SEQ ID NO: 1040169 - RNA, 23 nt, Human
uggagaugccccacucccugucu

SEQ ID NO: 1040170 - RNA, 22 nt, Human
auucuccaucaccacuggcacu

SEQ ID NO: 1040171 - RNA, 23 nt, Human
uggcccugaaucuguccuggagg

SEQ ID NO: 1040172 - RNA, 22 nt, Human
gagccagcugagcugcacuguc

SEQ ID NO: 1040173 - RNA, 21 nt, Human
agauuguauggaggugagagg

SEQ ID NO: 1040174 - RNA, 22 nt, Human
gagcugccugaacaagcagcag

SEQ ID NO: 1040175 - RNA, 22 nt, Human
gcugucuccauagcuguguguc

SEQ ID NO: 1040176 - RNA, 22 nt, Human
acagauugaucuugagaauuau

SEQ ID NO: 1040177 - RNA, 22 nt, Human
agccccaggcccggacgccucu

SEQ ID NO: 1040178 - RNA, 22 nt, Human
ugagccuggagucguggagggg

SEQ ID NO: 1040179 - RNA, 22 nt, Human
gugucauuaaccaccaugcaaa

SEQ ID NO: 1040180 - RNA, 22 nt, Human
uggcagcagggaggccaguguu

SEQ ID NO: 1040181 - RNA, 18 nt, Human
acaggccucaguccugca

SEQ ID NO: 1040182 - RNA, 22 nt, Human
ugaagaugucagcagggguggu

SEQ ID NO: 1040183 - RNA, 22 nt, Human
aagcugcagacccccugucuca

SEQ ID NO: 1040184 - RNA, 22 nt, Human
cucaggguaaugaaagacgaau

SEQ ID NO: 1040185 - RNA, 22 nt, Human
aaaggucagacuuaggcugggc

SEQ ID NO: 1040186 - RNA, 22 nt, Human
ucccagaggacuguuggugcua

SEQ ID NO: 1040187 - RNA, 21 nt, Human
auccauccaucuuggccuaac

SEQ ID NO: 1040188 - RNA, 19 nt, Human
ugagagugaggaaggcuuc

SEQ ID NO: 1040189 - RNA, 22 nt, Human
ggcaguggugggaggcucgcuc

SEQ ID NO: 1040190 - RNA, 22 nt, Human
agaggagguggugaugcuuuaa

SEQ ID NO: 1040191 - RNA, 22 nt, Human
ggcaucuguccaucucuccagc

SEQ ID NO: 1040192 - RNA, 22 nt, Human
uggcucagagagggagugugga

SEQ ID NO: 1040193 - RNA, 22 nt, Human
ccuggcagaauauuaaagugca

SEQ ID NO: 1040194 - RNA, 22 nt, Human
gcccagcugucuggcagggaug

SEQ ID NO: 1040195 - RNA, 22 nt, Human
acugugugcccugacgccaggg

SEQ ID NO: 1040196 - RNA, 22 nt, Human
ucccugggcaucacguugcuuc

SEQ ID NO: 1040197 - RNA, 22 nt, Human
agggagcucaguuggaagcggu

SEQ ID NO: 1040198 - RNA, 22 nt, Human
aaaaagauguccugaaguuuag

SEQ ID NO: 1040199 - RNA, 22 nt, Human
cugugcuucgcaacuccaaggu

SEQ ID NO: 1040200 - RNA, 22 nt, Human
cuguuuauaaauagaggggagu

SEQ ID NO: 1040201 - RNA, 22 nt, Human
gcuggcuccucuguccucacgg

SEQ ID NO: 1040202 - RNA, 22 nt, Human
cuuagaaauaaugguuucaguu

SEQ ID NO: 1040203 - RNA, 22 nt, Human
cacauuucucuaccucacacaa

SEQ ID NO: 1040204 - RNA, 22 nt, Human
aaggcugcuuuuaacaugcaua

SEQ ID NO: 1040205 - RNA, 19 nt, Human
ugcagcucagggcaggggc

SEQ ID NO: 1040206 - RNA, 22 nt, Human
uggaggugagugugguacagca

SEQ ID NO: 1040207 - RNA, 18 nt, Human
uggguggcuagggaguuu

SEQ ID NO: 1040208 - RNA, 22 nt, Human
cugccacuuucacccagugcuc

SEQ ID NO: 1040209 - RNA, 22 nt, Human
gccuguccacuaaacagccaag

SEQ ID NO: 1040210 - RNA, 22 nt, Human
gccaccagggggcuccagugag

SEQ ID NO: 1040211 - RNA, 22 nt, Human
auucugucuuuuuaaaauaaua

SEQ ID NO: 1040212 - RNA, 22 nt, Human
uccuucagauuccugcuucugg

SEQ ID NO: 1040213 - RNA, 22 nt, Human
gcucucugaggugcuggcagag

SEQ ID NO: 1040214 - RNA, 22 nt, Human
gcucugcuugcaucaugacugc

SEQ ID NO: 1040215 - RNA, 22 nt, Human
agggcugagacuaaggccagau

SEQ ID NO: 1040216 - RNA, 18 nt, Human
gucuggaggucaggagcu

SEQ ID NO: 1040217 - RNA, 17 nt, Human
ucaggauccaggguucu

SEQ ID NO: 1040218 - RNA, 21 nt, Human
agagccugagaucuuccagca

SEQ ID NO: 1040219 - RNA, 22 nt, Human
gcugagaguguaggauguuuac

SEQ ID NO: 1040220 - RNA, 22 nt, Human
cccccuggcaggcuggccucuc

SEQ ID NO: 1040221 - RNA, 22 nt, Human
uguguacucaauugagccauuu

SEQ ID NO: 1040222 - RNA, 22 nt, Human
ccucuuugugccugcaggcugc

SEQ ID NO: 1040223 - RNA, 22 nt, Human
agccaggaauuggacaacacau

SEQ ID NO: 1040224 - RNA, 22 nt, Human
acugucacuccaacugagucgu

SEQ ID NO: 1040225 - RNA, 22 nt, Human
uuauuauuuuguguacagcaaa

SEQ ID NO: 1040226 - RNA, 22 nt, Human
ucugcaggccucgacaaggcca

SEQ ID NO: 1040227 - RNA, 22 nt, Human
agugaaaugacugaaucagaua

SEQ ID NO: 1040228 - RNA, 19 nt, Human
aggcagaggcuuggcuagc

SEQ ID NO: 1040229 - RNA, 22 nt, Human
acaauguaggauauguacuugu

SEQ ID NO: 1040230 - RNA, 22 nt, Human
cugccuggucucaggcaugggg

SEQ ID NO: 1040231 - RNA, 22 nt, Human
cugagauggaguuucgcucuuc

SEQ ID NO: 1040232 - RNA, 22 nt, Human
cugggguggauggguccaaguu

SEQ ID NO: 1040233 - RNA, 22 nt, Human
aggcagagcugauguucuguga

SEQ ID NO: 1040234 - RNA, 22 nt, Human
agagcuggccagggaucacucu

SEQ ID NO: 1040235 - RNA, 22 nt, Human
cagagacauuaagugccaugau

SEQ ID NO: 1040236 - RNA, 22 nt, Human
cugcugcauuccucuuuaugag

SEQ ID NO: 1040237 - RNA, 22 nt, Human
cuggccuuuaaaaugaccuuau

SEQ ID NO: 1040238 - RNA, 22 nt, Human
ggccugcugcuaugacuuccug

SEQ ID NO: 1040239 - RNA, 20 nt, Human
ucucaggguucagcaaagua

SEQ ID NO: 1040240 - RNA, 22 nt, Human
aacaaauguguggcaguguggg

SEQ ID NO: 1040241 - RNA, 22 nt, Human
cugggcuccuaaccauccaggu

SEQ ID NO: 1040242 - RNA, 22 nt, Human
gcaggccuccccugcuggagcu

SEQ ID NO: 1040243 - RNA, 22 nt, Human
ugggccacggggguggagagcu

SEQ ID NO: 1040244 - RNA, 22 nt, Human
cuggcugcaggaaggagugggc

SEQ ID NO: 1040245 - RNA, 22 nt, Human
uguguauuucuggaacagacua

SEQ ID NO: 1040246 - RNA, 22 nt, Human
auuuccauacacccauuucuga

SEQ ID NO: 1040247 - RNA, 19 nt, Human
cugcugggugcugagggag

SEQ ID NO: 1040248 - RNA, 22 nt, Human
aagacagagggaagcaaugaug

SEQ ID NO: 1040249 - RNA, 22 nt, Human
cuggcagguuuggugucuggug

SEQ ID NO: 1040250 - RNA, 20 nt, Human
gagauuuccaaucaugccca

SEQ ID NO: 1040251 - RNA, 22 nt, Human
uaaugcacauagaaguacuuag

SEQ ID NO: 1040252 - RNA, 22 nt, Human
gcucccagcaauugaggcagcc

SEQ ID NO: 1040253 - RNA, 22 nt, Human
agagcugugaaaaugagguuug

SEQ ID NO: 1040254 - RNA, 22 nt, Human
ucuuguccuaagagcuggauuc

SEQ ID NO: 1040255 - RNA, 22 nt, Human
ccuuggcccuagccucaggcaa

SEQ ID NO: 1040256 - RNA, 22 nt, Human
ccaggccugauugggaaucuug

SEQ ID NO: 1040257 - RNA, 22 nt, Human
gagcuggcuaauacugacuuau

SEQ ID NO: 1040258 - RNA, 19 nt, Human
gcuucccaccagccagccc

SEQ ID NO: 1040259 - RNA, 22 nt, Human
ucagaagccggaagugcuccuc

SEQ ID NO: 1040260 - RNA, 22 nt, Human
gcugguccacucccuggaggcu

SEQ ID NO: 1040261 - RNA, 22 nt, Human
ccuggagcacauggcaggaggc

SEQ ID NO: 1040262 - RNA, 22 nt, Human
uuggcuuccaggaucucagcag

SEQ ID NO: 1040263 - RNA, 22 nt, Human
gagcucagcacuaaaaucaugu

SEQ ID NO: 1040264 - RNA, 22 nt, Human
ccaggagguggagauugcagug

SEQ ID NO: 1040265 - RNA, 22 nt, Human
agaggcaggaagagcugauuuu

SEQ ID NO: 1040266 - RNA, 22 nt, Human
aaaguuugagugauuugacaca

SEQ ID NO: 1040267 - RNA, 22 nt, Human
uucccaggcugugcuaccagag

SEQ ID NO: 1040268 - RNA, 22 nt, Human
ggccucuguuuggagccaggau

SEQ ID NO: 1040269 - RNA, 22 nt, Human
uauaucuuauaugugcagguac

SEQ ID NO: 1040270 - RNA, 20 nt, Human
cuuccacacaagaagcacag

SEQ ID NO: 1040271 - RNA, 22 nt, Human
aggcuggcuuggcucuccugug

SEQ ID NO: 1040272 - RNA, 22 nt, Human
cacagcugaaguagccaugugg

SEQ ID NO: 1040273 - RNA, 22 nt, Human
cugcugcugagagcucagccug

SEQ ID NO: 1040274 - RNA, 22 nt, Human
cccagccaaggugcugguguug

SEQ ID NO: 1040275 - RNA, 22 nt, Human
gggauggacuuggggacuccag

SEQ ID NO: 1040276 - RNA, 22 nt, Human
agugcauauaugaagaguauga

SEQ ID NO: 1040277 - RNA, 22 nt, Human
gccagcagggcccaaaugcugg

SEQ ID NO: 1040278 - RNA, 22 nt, Human
uugaagcauuugcuauagcauu

SEQ ID NO: 1040279 - RNA, 22 nt, Human
agaggaugauuuuaaggacacu

SEQ ID NO: 1040280 - RNA, 22 nt, Human
uauaauccauucauugauuucu

SEQ ID NO: 1040281 - RNA, 22 nt, Human
gaggugggagggcagucccuaa

SEQ ID NO: 1040282 - RNA, 22 nt, Human
cucagaguggggcucccugagg

SEQ ID NO: 1040283 - RNA, 22 nt, Human
aauguuguuuuucugcaugucu

SEQ ID NO: 1040284 - RNA, 22 nt, Human
uuuuuccaccguacuuccugag

SEQ ID NO: 1040285 - RNA, 22 nt, Human
cugccugcugccuguggagggu

SEQ ID NO: 1040286 - RNA, 22 nt, Human
ucaggcugguggucagauggcu

SEQ ID NO: 1040287 - RNA, 22 nt, Human
cuccuguauguugggcuucaca

SEQ ID NO: 1040288 - RNA, 22 nt, Human
uggcccugcuguaucaucugcu

SEQ ID NO: 1040289 - RNA, 22 nt, Human
gccugugcuuaacugacgugag

SEQ ID NO: 1040290 - RNA, 22 nt, Human
cugagcugggaguagagacucu

SEQ ID NO: 1040291 - RNA, 22 nt, Human
caaugauucugcaacugugugc

SEQ ID NO: 1040292 - RNA, 22 nt, Human
uccauugucuuugguccuagcc

SEQ ID NO: 1040293 - RNA, 22 nt, Human
ucagcaguggcucucaugcagu

SEQ ID NO: 1040294 - RNA, 22 nt, Human
ucuucagauugcacugagcaag

SEQ ID NO: 1040295 - RNA, 23 nt, Human
uggcagcuguguaagagaaagca

SEQ ID NO: 1040296 - RNA, 21 nt, Human
cagagcagcguucugcugugg

SEQ ID NO: 1040297 - RNA, 22 nt, Human
ucagggcaaugucccucagaag

SEQ ID NO: 1040298 - RNA, 22 nt, Human
agccugagccccauccagcuga

SEQ ID NO: 1040299 - RNA, 19 nt, Human
ucugucacuggggguauuc

SEQ ID NO: 1040300 - RNA, 23 nt, Human
uccucccaaauuucagccucauu

SEQ ID NO: 1040301 - RNA, 22 nt, Human
uaagaacaagcuggggguucca

SEQ ID NO: 1040302 - RNA, 22 nt, Human
ugugccugaguuggcugaguac

SEQ ID NO: 1040303 - RNA, 22 nt, Human
uccucacauggugagccacaca

SEQ ID NO: 1040304 - RNA, 22 nt, Human
ucaggaaagaagaugcucagug

SEQ ID NO: 1040305 - RNA, 22 nt, Human
ggggcggggcucugagaagcau

SEQ ID NO: 1040306 - RNA, 22 nt, Human
agcucacagaaauccugcagga

SEQ ID NO: 1040307 - RNA, 22 nt, Human
ucuggccugaaaguccaugcuu

SEQ ID NO: 1040308 - RNA, 22 nt, Human
uucaagaugccagggacgcggc

SEQ ID NO: 1040309 - RNA, 22 nt, Human
gccugcuggcuguccauugcag

SEQ ID NO: 1040310 - RNA, 22 nt, Human
auguacauuuagaucauuucug

SEQ ID NO: 1040311 - RNA, 21 nt, Human
gcaggggauagaaauggucug

SEQ ID NO: 1040312 - RNA, 22 nt, Human
ccugggcauucuuugaguucuc

SEQ ID NO: 1040313 - RNA, 20 nt, Human
uggagcuguaaucuugucug

SEQ ID NO: 1040314 - RNA, 22 nt, Human
agcugucuccagauacaggauu

SEQ ID NO: 1040315 - RNA, 22 nt, Human
cuuccagagauagggccucaag

SEQ ID NO: 1040316 - RNA, 22 nt, Human
ugcagucuuccagcugcacaaa

SEQ ID NO: 1040317 - RNA, 22 nt, Human
cucuggcuuugcucaugcaucc

SEQ ID NO: 1040318 - RNA, 22 nt, Human
aagcugcccaagacugaagcau

SEQ ID NO: 1040319 - RNA, 20 nt, Human
caggccagagguuugauggc

SEQ ID NO: 1040320 - RNA, 22 nt, Human
uuagaaauacaagugagguuga

SEQ ID NO: 1040321 - RNA, 21 nt, Human
gccauuguuuucuaccuggag

SEQ ID NO: 1040322 - RNA, 22 nt, Human
aagcugccaaugguaagcugcu

SEQ ID NO: 1040323 - RNA, 21 nt, Human
aagcaggacauaugaugcccu

SEQ ID NO: 1040324 - RNA, 22 nt, Human
ccuggcugucguuuugugaaau

SEQ ID NO: 1040325 - RNA, 22 nt, Human
ccuggcugggccugauuucuca

SEQ ID NO: 1040326 - RNA, 22 nt, Human
uuaaugcagaaaucaaacugac

SEQ ID NO: 1040327 - RNA, 22 nt, Human
uccuuccucggggacccagauc

SEQ ID NO: 1040328 - RNA, 22 nt, Human
auaaggcagucacuggaauguu

SEQ ID NO: 1040329 - RNA, 22 nt, Human
uauguuuuucaagugcacacua

SEQ ID NO: 1040330 - RNA, 22 nt, Human
uuuccuuccaaaugcccgggag

SEQ ID NO: 1040331 - RNA, 20 nt, Human
gcugaggucauuaugccuca

SEQ ID NO: 1040332 - RNA, 19 nt, Human
agauggggaagagugugag

SEQ ID NO: 1040333 - RNA, 23 nt, Human
gccugggacucaggaggagcuca

SEQ ID NO: 1040334 - RNA, 22 nt, Human
ggucucuguugccuccaucaag

SEQ ID NO: 1040335 - RNA, 22 nt, Human
agcaggugaauuccuggaugug

SEQ ID NO: 1040336 - RNA, 22 nt, Human
caccagggacaaugcuaggggu

SEQ ID NO: 1040337 - RNA, 22 nt, Human
aggcccugcccagugccacaag

SEQ ID NO: 1040338 - RNA, 22 nt, Human
agcugggaugauaaccucaguc

SEQ ID NO: 1040339 - RNA, 22 nt, Human
agaaaugggccuugggacacaa

SEQ ID NO: 1040340 - RNA, 22 nt, Human
cuggagccggcgagccccagcc

SEQ ID NO: 1040341 - RNA, 21 nt, Human
ucagcagcaucugccuagagu

SEQ ID NO: 1040342 - RNA, 22 nt, Human
aaggcacuagcaagcugccugg

SEQ ID NO: 1040343 - RNA, 22 nt, Human
uuaagucacuuaucuaaagaca

SEQ ID NO: 1040344 - RNA, 22 nt, Human
cacaggugcuccucggggagcu

SEQ ID NO: 1040345 - RNA, 22 nt, Human
uugcagggaccugcagaaagcu

SEQ ID NO: 1040346 - RNA, 22 nt, Human
ggcugagcaauuuugaugacau

SEQ ID NO: 1040347 - RNA, 22 nt, Human
ucaggcagaccaccgugggcag

SEQ ID NO: 1040348 - RNA, 22 nt, Human
cuggcagcauuaacagagagca

SEQ ID NO: 1040349 - RNA, 22 nt, Human
agaaacauuuagauuauauguc

SEQ ID NO: 1040350 - RNA, 22 nt, Human
gcagguggauuaucagaagugc

SEQ ID NO: 1040351 - RNA, 22 nt, Human
ccagcccuguaaggaugaggca

SEQ ID NO: 1040352 - RNA, 22 nt, Human
gcugcccaggguggagccggcu

SEQ ID NO: 1040353 - RNA, 22 nt, Human
ugauuucauaguauauacauga

SEQ ID NO: 1040354 - RNA, 22 nt, Human
acagcagagacacucaggaggc

SEQ ID NO: 1040355 - RNA, 22 nt, Human
acugggaguucuccaugucccu

SEQ ID NO: 1040356 - RNA, 22 nt, Human
cccugagcccauaguugacauu

SEQ ID NO: 1040357 - RNA, 22 nt, Human
ggcagcugggucacaccgaucu

SEQ ID NO: 1040358 - RNA, 22 nt, Human
agccuggaagaaccugaagucu

SEQ ID NO: 1040359 - RNA, 22 nt, Human
gagagaagggggauaugagccu

SEQ ID NO: 1040360 - RNA, 22 nt, Human
aagucagagcaacugagacauu

SEQ ID NO: 1040361 - RNA, 22 nt, Human
caccagcagaagacugagggug

SEQ ID NO: 1040362 - RNA, 22 nt, Human
auacauauaugguacuuccugg

SEQ ID NO: 1040363 - RNA, 22 nt, Human
uugucuguaaagacggccacca

SEQ ID NO: 1040364 - RNA, 22 nt, Human
gggcaugguggugcacaccugu

SEQ ID NO: 1040365 - RNA, 20 nt, Human
gcauugaguauagacagaug

SEQ ID NO: 1040366 - RNA, 22 nt, Human
ugggugcuucgucagcucugag

SEQ ID NO: 1040367 - RNA, 22 nt, Human
cuggguggcgucuggggccagu

SEQ ID NO: 1040368 - RNA, 22 nt, Human
ugcagugggccggaggccaggg

SEQ ID NO: 1040369 - RNA, 22 nt, Human
cagagacagaaaauggaucuag

SEQ ID NO: 1040370 - RNA, 22 nt, Human
agucucugcugguugugccuau

SEQ ID NO: 1040371 - RNA, 23 nt, Human
ccugaagggucaggguccucagc

SEQ ID NO: 1040372 - RNA, 22 nt, Human
cagggcccauggcucagguagg

SEQ ID NO: 1040373 - RNA, 22 nt, Human
ggcgugggaaguggggcuucug

SEQ ID NO: 1040374 - RNA, 22 nt, Human
ugcucugcaagcaggagcaaga

SEQ ID NO: 1040375 - RNA, 22 nt, Human
gccccagguugccugucccagg

SEQ ID NO: 1040376 - RNA, 20 nt, Human
ggcacuggaagcacacagga

SEQ ID NO: 1040377 - RNA, 22 nt, Human
gauaugaaguggcauugugaag

SEQ ID NO: 1040378 - RNA, 22 nt, Human
gcugagguaggagguugcagug

SEQ ID NO: 1040379 - RNA, 22 nt, Human
agcaggugcauggcgagcgcgg

SEQ ID NO: 1040380 - RNA, 22 nt, Human
gucauugcaguggcaaaucaca

SEQ ID NO: 1040381 - RNA, 19 nt, Human
gccagcagaaugaugaggc

SEQ ID NO: 1040382 - RNA, 22 nt, Human
ccaggguguagggauuccagau

SEQ ID NO: 1040383 - RNA, 22 nt, Human
gaagagcuguagccugcucuuu

SEQ ID NO: 1040384 - RNA, 23 nt, Human
ugggccuggaaagccuuagagag

SEQ ID NO: 1040385 - RNA, 22 nt, Human
uugcauugaucccagcuugggc

SEQ ID NO: 1040386 - RNA, 22 nt, Human
gagguggccucaagcagucuuc

SEQ ID NO: 1040387 - RNA, 22 nt, Human
aaaaaugaauucuucaguggca

SEQ ID NO: 1040388 - RNA, 22 nt, Human
gucccuggaauggacucugcgc

SEQ ID NO: 1040389 - RNA, 22 nt, Human
aaaucagucccucuuggaauuu

SEQ ID NO: 1040390 - RNA, 22 nt, Human
uggagcagcuaagccucugaga

SEQ ID NO: 1040391 - RNA, 21 nt, Human
ucucugggaggacuugugaga

SEQ ID NO: 1040392 - RNA, 22 nt, Human
agugauggagcuuccucugcua

SEQ ID NO: 1040393 - RNA, 22 nt, Human
gggcccagcgugguuccaucug

SEQ ID NO: 1040394 - RNA, 22 nt, Human
uuucaaugacacaaaagagaaa

SEQ ID NO: 1040395 - RNA, 22 nt, Human
ugaaagguuaaaaguaguauug

SEQ ID NO: 1040396 - RNA, 22 nt, Human
acuuccugcuaugagcuucugu

SEQ ID NO: 1040397 - RNA, 22 nt, Human
ccagcagaagcucccgcugggu

SEQ ID NO: 1040398 - RNA, 22 nt, Human
gggugggaucuguggagccuca

SEQ ID NO: 1040399 - RNA, 22 nt, Human
uugaaggaggcuccuuuuuaaa

SEQ ID NO: 1040400 - RNA, 22 nt, Human
gcagggcagccacaggcccccu

SEQ ID NO: 1040401 - RNA, 22 nt, Human
ccugggagagccaucuguggcc

SEQ ID NO: 1040402 - RNA, 22 nt, Human
acagaacugggaaaugcacaua

SEQ ID NO: 1040403 - RNA, 22 nt, Human
ccuucagaccuagacaggaauc

SEQ ID NO: 1040404 - RNA, 22 nt, Human
caagagcugugaccucauucac

SEQ ID NO: 1040405 - RNA, 22 nt, Human
ugcauuauaacugaauguuguu

SEQ ID NO: 1040406 - RNA, 22 nt, Human
cugucccaggagcuguaagaca

SEQ ID NO: 1040407 - RNA, 22 nt, Human
aucaguuucuaccauguggaau

SEQ ID NO: 1040408 - RNA, 22 nt, Human
ucccaggcuaggccucugcguu

SEQ ID NO: 1040409 - RNA, 22 nt, Human
cugguucauccccuuccaggaa

SEQ ID NO: 1040410 - RNA, 19 nt, Human
gcucugagaggggcauggg

SEQ ID NO: 1040411 - RNA, 22 nt, Human
ucucaggaauagaguggcagca

SEQ ID NO: 1040412 - RNA, 22 nt, Human
ugcccugugugugcaagcacug

SEQ ID NO: 1040413 - RNA, 22 nt, Human
aagcagaugggacuccaaggca

SEQ ID NO: 1040414 - RNA, 22 nt, Human
cugagccagggccacacaugga

SEQ ID NO: 1040415 - RNA, 22 nt, Human
gcuccuggcuccaggcagccaa

SEQ ID NO: 1040416 - RNA, 22 nt, Human
aggcagaggagaaugaucuucc

SEQ ID NO: 1040417 - RNA, 22 nt, Human
agccacagcccacaggacucuu

SEQ ID NO: 1040418 - RNA, 22 nt, Human
uggccugguccuugucaaggca

SEQ ID NO: 1040419 - RNA, 22 nt, Human
auccaaaccuggacaugagugg

SEQ ID NO: 1040420 - RNA, 22 nt, Human
acaggugaccugcucauaugaa

SEQ ID NO: 1040421 - RNA, 22 nt, Human
ccagagccagagaggugccugc

SEQ ID NO: 1040422 - RNA, 22 nt, Human
cuggcccauggugagcucuggg

SEQ ID NO: 1040423 - RNA, 22 nt, Human
uacauauagacaguuacucuag

SEQ ID NO: 1040424 - RNA, 22 nt, Human
gggcugggauugcuugcuguga

SEQ ID NO: 1040425 - RNA, 22 nt, Human
cugucuccagggcaggugcagg

SEQ ID NO: 1040426 - RNA, 22 nt, Human
uggcucugagacacaggcucuc

SEQ ID NO: 1040427 - RNA, 21 nt, Human
cagggcacacagaggauggua

SEQ ID NO: 1040428 - RNA, 22 nt, Human
ccagucccgcaugguccagaau

SEQ ID NO: 1040429 - RNA, 22 nt, Human
ccccuuccgucucuugaguguc

SEQ ID NO: 1040430 - RNA, 22 nt, Human
ugaaaucuuauacuuugguagu

SEQ ID NO: 1040431 - RNA, 22 nt, Human
caucagcacuaugauuaaagua

SEQ ID NO: 1040432 - RNA, 22 nt, Human
ccagcccugccagagagagcug

SEQ ID NO: 1040433 - RNA, 21 nt, Human
aggugggagaccauguagguc

SEQ ID NO: 1040434 - RNA, 22 nt, Human
aaaugcagcagcuaauugaaaa

SEQ ID NO: 1040435 - RNA, 23 nt, Human
uggagcugggcucagacccuggg

SEQ ID NO: 1040436 - RNA, 22 nt, Human
auuuguaauuucuuaucugugu

SEQ ID NO: 1040437 - RNA, 20 nt, Human
uccuugaaagugggguauau

SEQ ID NO: 1040438 - RNA, 20 nt, Human
gcaggcagggaaugggggug

SEQ ID NO: 1040439 - RNA, 22 nt, Human
uuagauaaauugcaacuugauu

SEQ ID NO: 1040440 - RNA, 22 nt, Human
accagcuguguccuggcugcag

SEQ ID NO: 1040441 - RNA, 22 nt, Human
cugcuuccaugcaauggcaguc

SEQ ID NO: 1040442 - RNA, 22 nt, Human
gcucuggguagccacugccugg

SEQ ID NO: 1040443 - RNA, 22 nt, Human
uguggccuccuguuccugggua

SEQ ID NO: 1040444 - RNA, 22 nt, Human
ugggaccaagucauuucuuuag

SEQ ID NO: 1040445 - RNA, 18 nt, Human
gcagcugacacuggaguu

SEQ ID NO: 1040446 - RNA, 22 nt, Human
cucucugaggaaggagcaucug

SEQ ID NO: 1040447 - RNA, 22 nt, Human
aaaggucaaaaucgugacauug

SEQ ID NO: 1040448 - RNA, 22 nt, Human
ucuuuccuguaacugcuguuca

SEQ ID NO: 1040449 - RNA, 21 nt, Human
agcagaggcagaauguaugca

SEQ ID NO: 1040450 - RNA, 22 nt, Human
auuuaguguguauugcuauuau

SEQ ID NO: 1040451 - RNA, 22 nt, Human
uuguaacagcuguuuauauagu

SEQ ID NO: 1040452 - RNA, 17 nt, Human
ggccuguguggcugcag

SEQ ID NO: 1040453 - RNA, 21 nt, Human
ggcagcccgcccucuccuggc

SEQ ID NO: 1040454 - RNA, 22 nt, Human
gaggccuggguuggaggugcau

SEQ ID NO: 1040455 - RNA, 19 nt, Human
aauguaguguuaugucaac

SEQ ID NO: 1040456 - RNA, 22 nt, Human
ccaaagugcugagauuacaggu

SEQ ID NO: 1040457 - RNA, 22 nt, Human
gaugggggccagggccugcuuu

SEQ ID NO: 1040458 - RNA, 20 nt, Human
ugcuugucaugcacucaggc

SEQ ID NO: 1040459 - RNA, 22 nt, Human
cuuauuauaaaauccuguuuga

SEQ ID NO: 1040460 - RNA, 22 nt, Human
cagcugcaggaacaaaaaugug

SEQ ID NO: 1040461 - RNA, 19 nt, Human
uacauuuguguacacuugu

SEQ ID NO: 1040462 - RNA, 22 nt, Human
gcgaaaaauguguaaauauguu

SEQ ID NO: 1040463 - RNA, 20 nt, Human
cugcugugugugccucagcc

SEQ ID NO: 1040464 - RNA, 22 nt, Human
uaaacaugugagugugcauaua

SEQ ID NO: 1040465 - RNA, 22 nt, Human
ggagcugcucagagccaguccc

SEQ ID NO: 1040466 - RNA, 22 nt, Human
cagagcaguccuugucaaucag

SEQ ID NO: 1040467 - RNA, 22 nt, Human
gcuucccacagcuggacugggg

SEQ ID NO: 1040468 - RNA, 22 nt, Human
agggcagccaugagccuucagg

SEQ ID NO: 1040469 - RNA, 17 nt, Human
ucagagggaugagcagg

SEQ ID NO: 1040470 - RNA, 20 nt, Human
gucucagaauggauuugcau

SEQ ID NO: 1040471 - RNA, 22 nt, Human
uggcaguguauagguggcuccu

SEQ ID NO: 1040472 - RNA, 17 nt, Human
cccagcuggcagugccg

SEQ ID NO: 1040473 - RNA, 22 nt, Human
guuauguaugagggaaugauua

SEQ ID NO: 1040474 - RNA, 22 nt, Human
ggagcugcacgcucugaagccu

SEQ ID NO: 1040475 - RNA, 22 nt, Human
ccaggggaaacagggagcacuc

SEQ ID NO: 1040476 - RNA, 22 nt, Human
ugucccagcagcuggguucucu

SEQ ID NO: 1040477 - RNA, 22 nt, Human
ucacaugcuacugagccagacc

SEQ ID NO: 1040478 - RNA, 22 nt, Human
ucugccagugguuuggcccuga

SEQ ID NO: 1040479 - RNA, 22 nt, Human
agcugcccuucucuugcccuug

SEQ ID NO: 1040480 - RNA, 22 nt, Human
gauuuccuaauguggaucucug

SEQ ID NO: 1040481 - RNA, 22 nt, Human
caguguuccaggcggcagugaa

SEQ ID NO: 1040482 - RNA, 22 nt, Human
cugcugcaggaugggcacucug

SEQ ID NO: 1040483 - RNA, 22 nt, Human
gcucccucugcucaggcacuug

SEQ ID NO: 1040484 - RNA, 22 nt, Human
aggucaccauggcaugcuccac

SEQ ID NO: 1040485 - RNA, 22 nt, Human
auuugagaugguaaauaacuuu

SEQ ID NO: 1040486 - RNA, 22 nt, Human
ccucuggggguccucagagucu

SEQ ID NO: 1040487 - RNA, 22 nt, Human
gugcucaggaagcuguuccugc

SEQ ID NO: 1040488 - RNA, 22 nt, Human
acagaauugauggaaaucucag

SEQ ID NO: 1040489 - RNA, 22 nt, Human
uaaaugugcacagguuagaagg

SEQ ID NO: 1040490 - RNA, 22 nt, Human
aaaaguucccugguuagaaaag

SEQ ID NO: 1040491 - RNA, 22 nt, Human
cuuccugguuugaagcucgccg

SEQ ID NO: 1040492 - RNA, 22 nt, Human
ucaggggcuugaggugcauguc

SEQ ID NO: 1040493 - RNA, 22 nt, Human
ggggcagagcauagcuccaauu

SEQ ID NO: 1040494 - RNA, 22 nt, Human
uccuuuccagccucaccucagc

SEQ ID NO: 1040495 - RNA, 22 nt, Human
uaaauguguuguggaugaaguu

SEQ ID NO: 1040496 - RNA, 22 nt, Human
gcagggcuguucaggagggugg

SEQ ID NO: 1040497 - RNA, 19 nt, Human
uagaaugcccacuuaaaaa

SEQ ID NO: 1040498 - RNA, 22 nt, Human
gggcaugagagggcagcuggca

SEQ ID NO: 1040499 - RNA, 22 nt, Human
gggcugggauggcuugaagauu

SEQ ID NO: 1040500 - RNA, 22 nt, Human
gcuggccucgcaggcaggaugu

SEQ ID NO: 1040501 - RNA, 22 nt, Human
uaugcacauugguuuccucauu

SEQ ID NO: 1040502 - RNA, 22 nt, Human
ggccuugggcagacacgucaca

SEQ ID NO: 1040503 - RNA, 22 nt, Human
uaaguaaauuuauaaugugauu

SEQ ID NO: 1040504 - RNA, 22 nt, Human
uaugcacacaucgcagcaggaa

SEQ ID NO: 1040505 - RNA, 22 nt, Human
guacaguuuucaguguucacug

SEQ ID NO: 1040506 - RNA, 22 nt, Human
agggcagauggaacuuccccga

SEQ ID NO: 1040507 - RNA, 22 nt, Human
uggcagggccuaccccaauauc

SEQ ID NO: 1040508 - RNA, 22 nt, Human
aucauguuccagaaacagugau

SEQ ID NO: 1040509 - RNA, 17 nt, Human
aggccucccuccaggcc

SEQ ID NO: 1040510 - RNA, 22 nt, Human
uggacagguuugggugccuguu

SEQ ID NO: 1040511 - RNA, 22 nt, Human
ucaggcagaugcagggauggau

SEQ ID NO: 1040512 - RNA, 22 nt, Human
ugaaaucugcaugcaaaguccu

SEQ ID NO: 1040513 - RNA, 22 nt, Human
cccuucccuucugggagaucca

SEQ ID NO: 1040514 - RNA, 22 nt, Human
gccuggccugaacuaggaggug

SEQ ID NO: 1040515 - RNA, 22 nt, Human
ugcagggcccuugggguugaac

SEQ ID NO: 1040516 - RNA, 23 nt, Human
cuggggcuuucaaaucugggcag

SEQ ID NO: 1040517 - RNA, 22 nt, Human
aaaugccucugcuguacacaau

SEQ ID NO: 1040518 - RNA, 18 nt, Human
ggccugaggauuucagca

SEQ ID NO: 1040519 - RNA, 22 nt, Human
ucugguuagccaauaaugccaa

SEQ ID NO: 1040520 - RNA, 22 nt, Human
gaaaugugggucaugacccauu

SEQ ID NO: 1040521 - RNA, 19 nt, Human
ccugucugucuucagcuag

SEQ ID NO: 1040522 - RNA, 22 nt, Human
agcucccaggcagucaugagga

SEQ ID NO: 1040523 - RNA, 22 nt, Human
aaagccuugagauccuauaguu

SEQ ID NO: 1040524 - RNA, 22 nt, Human
gcguggugcugcccugcacaca

SEQ ID NO: 1040525 - RNA, 21 nt, Human
guguuuccuguuuauggcuug

SEQ ID NO: 1040526 - RNA, 21 nt, Human
aggcagcucaggcccagagag

SEQ ID NO: 1040527 - RNA, 22 nt, Human
acaguuucuccauuuacaccuu

SEQ ID NO: 1040528 - RNA, 22 nt, Human
gaaaaugugucaucccuacugu

SEQ ID NO: 1040529 - RNA, 22 nt, Human
gagagcugggcuuugggugaag

SEQ ID NO: 1040530 - RNA, 22 nt, Human
ugcccacauucaaaaggugaug

SEQ ID NO: 1040531 - RNA, 22 nt, Human
aagaggucauaccagauaaggg

SEQ ID NO: 1040532 - RNA, 23 nt, Human
ugcauuauccucucugaagacca

SEQ ID NO: 1040533 - RNA, 22 nt, Human
auguccuuccauuuugaucugu

SEQ ID NO: 1040534 - RNA, 22 nt, Human
uccuuuuuaagucguuguggua

SEQ ID NO: 1040535 - RNA, 22 nt, Human
agcucacaguguccuuccucaa

SEQ ID NO: 1040536 - RNA, 22 nt, Human
uuuaaucaggcaaagcauaaua

SEQ ID NO: 1040537 - RNA, 22 nt, Human
uuaaacagacaguaaaugaaac

SEQ ID NO: 1040538 - RNA, 20 nt, Human
ucugaggcugagcucuacuu

SEQ ID NO: 1040539 - RNA, 22 nt, Human
ccagccucacuggcaucaccua

SEQ ID NO: 1040540 - RNA, 22 nt, Human
agucucugcaugaugcagcaca

SEQ ID NO: 1040541 - RNA, 22 nt, Human
cacaggagagcugggaggugcc

SEQ ID NO: 1040542 - RNA, 22 nt, Human
gccugcuggauguggccaggcc

SEQ ID NO: 1040543 - RNA, 22 nt, Human
agagacaggguuuugccauguu

SEQ ID NO: 1040544 - RNA, 22 nt, Human
cacaggaggaggugcccgggcc

SEQ ID NO: 1040545 - RNA, 22 nt, Human
cuggcuggucaucagcaguacg

SEQ ID NO: 1040546 - RNA, 22 nt, Human
gugggacucuucuuuggcagug

SEQ ID NO: 1040547 - RNA, 21 nt, Human
gcagagccugagguucuugag

SEQ ID NO: 1040548 - RNA, 22 nt, Human
ccucugcucccuggugucugag

SEQ ID NO: 1040549 - RNA, 22 nt, Human
cucagaaguucagccuagagua

SEQ ID NO: 1040550 - RNA, 22 nt, Human
agagugggugaucucuguuguc

SEQ ID NO: 1040551 - RNA, 22 nt, Human
auccaguucucagugcuuacag

SEQ ID NO: 1040552 - RNA, 22 nt, Human
gcuggcaccugcaccaagcagg

SEQ ID NO: 1040553 - RNA, 22 nt, Human
agagccaggcaggcaauguuga

SEQ ID NO: 1040554 - RNA, 22 nt, Human
aggacagaccuaggacuggagc

SEQ ID NO: 1040555 - RNA, 21 nt, Human
cugcucuggggaccggcugug

SEQ ID NO: 1040556 - RNA, 22 nt, Human
gucaccagugcuaagaggugga

SEQ ID NO: 1040557 - RNA, 19 nt, Human
ugcucaggccaaggagccc

SEQ ID NO: 1040558 - RNA, 22 nt, Human
uccuggagagugggcgagcaca

SEQ ID NO: 1040559 - RNA, 21 nt, Human
gccucugcugucuuauuguga

SEQ ID NO: 1040560 - RNA, 22 nt, Human
aggacucaucccugcuugucag

SEQ ID NO: 1040561 - RNA, 22 nt, Human
agccuccacagaugcaaagggc

SEQ ID NO: 1040562 - RNA, 22 nt, Human
augcacagacccaaaggccauc

SEQ ID NO: 1040563 - RNA, 22 nt, Human
acaaaugcuuaguucaccaaaa

SEQ ID NO: 1040564 - RNA, 22 nt, Human
gccaggcacaguucuaggugcu

SEQ ID NO: 1040565 - RNA, 22 nt, Human
agcucccagaagccagagucgg

SEQ ID NO: 1040566 - RNA, 22 nt, Human
cagaagaauggugucugagcuc

SEQ ID NO: 1040567 - RNA, 22 nt, Human
cacaggaggaggccagagcgua

SEQ ID NO: 1040568 - RNA, 21 nt, Human
gagcucucaggcaagaagcag

SEQ ID NO: 1040569 - RNA, 22 nt, Human
ggggggugcugaucaguggagc

SEQ ID NO: 1040570 - RNA, 22 nt, Human
agcaggugacccaagcaggcug

SEQ ID NO: 1040571 - RNA, 20 nt, Human
ggcagcaggaguuuccucuu

SEQ ID NO: 1040572 - RNA, 22 nt, Human
gcuuccuucuaccacaucaugc

SEQ ID NO: 1040573 - RNA, 22 nt, Human
cccagcagaccgcugugauggc

SEQ ID NO: 1040574 - RNA, 22 nt, Human
aggagaaguaaggcuagaugau

SEQ ID NO: 1040575 - RNA, 22 nt, Human
ugucauuuaguccucugugugu

SEQ ID NO: 1040576 - RNA, 22 nt, Human
uguaugcaaauuuauuagcaca

SEQ ID NO: 1040577 - RNA, 22 nt, Human
ugcaagaggaauucuagaagca

SEQ ID NO: 1040578 - RNA, 22 nt, Human
uugugaaauguuucaaaauagu

SEQ ID NO: 1040579 - RNA, 22 nt, Human
ccagcagccaccuucucgaaau

SEQ ID NO: 1040580 - RNA, 22 nt, Human
agugcagugguuaggagccagg

SEQ ID NO: 1040581 - RNA, 22 nt, Human
caucagcaggcaacacucuugg

SEQ ID NO: 1040582 - RNA, 22 nt, Human
aggccucagugaucaucaucag

SEQ ID NO: 1040583 - RNA, 22 nt, Human
aaugggaggauuuucucucuug

SEQ ID NO: 1040584 - RNA, 20 nt, Human
uccagcugucuuucagagac

SEQ ID NO: 1040585 - RNA, 22 nt, Human
caaaguuaucaacugcaacauu

SEQ ID NO: 1040586 - RNA, 22 nt, Human
cacugccuccccaggcuccaca

SEQ ID NO: 1040587 - RNA, 22 nt, Human
cagcuggaugggagaccauguu

SEQ ID NO: 1040588 - RNA, 22 nt, Human
gcucucuggguggugggcaaca

SEQ ID NO: 1040589 - RNA, 22 nt, Human
aagcuggagaguuaggugaaua

SEQ ID NO: 1040590 - RNA, 22 nt, Human
cccagcuccagagccagaaaca

SEQ ID NO: 1040591 - RNA, 22 nt, Human
caggaggaacaagagguucugg

SEQ ID NO: 1040592 - RNA, 22 nt, Human
auaaacaguagagaaagguggu

SEQ ID NO: 1040593 - RNA, 22 nt, Human
gagugugucggucagcguggcg

SEQ ID NO: 1040594 - RNA, 22 nt, Human
cagggcagaacauauagauagu

SEQ ID NO: 1040595 - RNA, 22 nt, Human
ucacuuauugcucaucucaugc

SEQ ID NO: 1040596 - RNA, 22 nt, Human
agggaguguaaauggugcucag

SEQ ID NO: 1040597 - RNA, 22 nt, Human
gucagcugucuccccagagugg

SEQ ID NO: 1040598 - RNA, 22 nt, Human
uguguuccuucgucuucccuuc

SEQ ID NO: 1040599 - RNA, 22 nt, Human
gcaggagagccagcaggcuucc

SEQ ID NO: 1040600 - RNA, 22 nt, Human
uguggcccagaugagugugcua

SEQ ID NO: 1040601 - RNA, 22 nt, Human
ucucaggaagauuagggcuaag

SEQ ID NO: 1040602 - RNA, 22 nt, Human
caggcacuggccagucagcaca

SEQ ID NO: 1040603 - RNA, 22 nt, Human
ucugugacuugcgggaggagaa

SEQ ID NO: 1040604 - RNA, 18 nt, Human
uugagggaggggcagagu

SEQ ID NO: 1040605 - RNA, 22 nt, Human
ccuccagggcagacggggagca

SEQ ID NO: 1040606 - RNA, 22 nt, Human
ggcucuggcguccaauggagcg

SEQ ID NO: 1040607 - RNA, 22 nt, Human
ggcagaguggagugcggccucc

SEQ ID NO: 1040608 - RNA, 22 nt, Human
uggcuccuucauucuccugcca

SEQ ID NO: 1040609 - RNA, 22 nt, Human
gcugugcagucuuuggugugcc

SEQ ID NO: 1040610 - RNA, 20 nt, Human
uaucaaucagaaagaagacu

SEQ ID NO: 1040611 - RNA, 22 nt, Human
caguauguuugggagacaugac

SEQ ID NO: 1040612 - RNA, 19 nt, Human
ggaggccuggguauuugcc

SEQ ID NO: 1040613 - RNA, 22 nt, Human
uacagggguaacaguggggaau

SEQ ID NO: 1040614 - RNA, 22 nt, Human
uuuuuccuuagggguuacucac

SEQ ID NO: 1040615 - RNA, 22 nt, Human
cagugggugaugaguccugggg

SEQ ID NO: 1040616 - RNA, 22 nt, Human
gcauuccugagaaugcagagug

SEQ ID NO: 1040617 - RNA, 22 nt, Human
cuuguagaauugaaauggucuc

SEQ ID NO: 1040618 - RNA, 22 nt, Human
uugaagcagagaaauacuugaa

SEQ ID NO: 1040619 - RNA, 23 nt, Human
agacagaggcugaggcuggccgc

SEQ ID NO: 1040620 - RNA, 22 nt, Human
gcagggcacagacagugccaag

SEQ ID NO: 1040621 - RNA, 22 nt, Human
aaguuacuggcaagggcugcag

SEQ ID NO: 1040622 - RNA, 22 nt, Human
gucacaggccuggaugaggggc

SEQ ID NO: 1040623 - RNA, 22 nt, Human
ucuggcucaggagcuguguuca

SEQ ID NO: 1040624 - RNA, 22 nt, Human
uaacaucuuuagcagcucgaac

SEQ ID NO: 1040625 - RNA, 20 nt, Human
ucacaucuggcagcugauga

SEQ ID NO: 1040626 - RNA, 22 nt, Human
caaaugcaugagaaauaagagg

SEQ ID NO: 1040627 - RNA, 22 nt, Human
cugccucuggccucaggcccag

SEQ ID NO: 1040628 - RNA, 22 nt, Human
caagagcucagaaacccuugcu

SEQ ID NO: 1040629 - RNA, 22 nt, Human
cauuguauugaggauacuuaag

SEQ ID NO: 1040630 - RNA, 22 nt, Human
acucccagguugccuggcaggc

SEQ ID NO: 1040631 - RNA, 22 nt, Human
ccugccaggacauugcuugaag

SEQ ID NO: 1040632 - RNA, 22 nt, Human
ugcauuucagaagaaaauucgg

SEQ ID NO: 1040633 - RNA, 18 nt, Human
gggcccuggcguccgccc

SEQ ID NO: 1040634 - RNA, 22 nt, Human
cugagggccuuggcuccugccc

SEQ ID NO: 1040635 - RNA, 22 nt, Human
auaaggcagaaauagggaaagu

SEQ ID NO: 1040636 - RNA, 22 nt, Human
uggcccugcugggucagagcug

SEQ ID NO: 1040637 - RNA, 22 nt, Human
gggcuggaggugagcaggacag

SEQ ID NO: 1040638 - RNA, 22 nt, Human
guggcucuccauugacauggaa

SEQ ID NO: 1040639 - RNA, 23 nt, Human
ugagcugguauuguccaucucca

SEQ ID NO: 1040640 - RNA, 22 nt, Human
ucaugucaguuucuucuauaaa

SEQ ID NO: 1040641 - RNA, 22 nt, Human
ucaggagucugugcaguuccac

SEQ ID NO: 1040642 - RNA, 22 nt, Human
gggcagaggcucuggcccaucc

SEQ ID NO: 1040643 - RNA, 22 nt, Human
cccucugcugccuggcuggguc

SEQ ID NO: 1040644 - RNA, 22 nt, Human
uugcucaggcuuagagcuacua

SEQ ID NO: 1040645 - RNA, 20 nt, Human
uccaagcccuccuuccauuc

SEQ ID NO: 1040646 - RNA, 20 nt, Human
aauuuacucacagaaugaau

SEQ ID NO: 1040647 - RNA, 18 nt, Human
acagaacucaggggcacc

SEQ ID NO: 1040648 - RNA, 22 nt, Human
auuccaguucuccucucuaaag

SEQ ID NO: 1040649 - RNA, 22 nt, Human
gugucccagcagcacauuggcu

SEQ ID NO: 1040650 - RNA, 19 nt, Human
guggccucggagcgcgcgg

SEQ ID NO: 1040651 - RNA, 22 nt, Human
cauaucccauuggccaggacau

SEQ ID NO: 1040652 - RNA, 22 nt, Human
acagccaggagccaugggcagg

SEQ ID NO: 1040653 - RNA, 22 nt, Human
cuuagaaaucgaacucagguua

SEQ ID NO: 1040654 - RNA, 22 nt, Human
caggggcuguggcacauggugu

SEQ ID NO: 1040655 - RNA, 22 nt, Human
gcucagaggcacgaccucuugg

SEQ ID NO: 1040656 - RNA, 22 nt, Human
cccuggccagcucaugucugag

SEQ ID NO: 1040657 - RNA, 22 nt, Human
augaaauaucuugaagaaauuc

SEQ ID NO: 1040658 - RNA, 22 nt, Human
acaauucuggguauuuauauag

SEQ ID NO: 1040659 - RNA, 22 nt, Human
agccuggagguaaugaggaaac

SEQ ID NO: 1040660 - RNA, 23 nt, Human
cucugcaggagagugggcagggc

SEQ ID NO: 1040661 - RNA, 22 nt, Human
cugccugugcaugcagucagaa

SEQ ID NO: 1040662 - RNA, 22 nt, Human
ccuuccaggugcaggcaagccu

SEQ ID NO: 1040663 - RNA, 22 nt, Human
aggcugggaaaccugaaguugu

SEQ ID NO: 1040664 - RNA, 22 nt, Human
ucagggcaaagggcagaguuug

SEQ ID NO: 1040665 - RNA, 22 nt, Human
ccugcagcuccggauuucuggg

SEQ ID NO: 1040666 - RNA, 22 nt, Human
uaauacuuaccuugcagagucu

SEQ ID NO: 1040667 - RNA, 22 nt, Human
aaaugcacugaacacauguugu

SEQ ID NO: 1040668 - RNA, 22 nt, Human
cuggagcuccagggucuccucu

SEQ ID NO: 1040669 - RNA, 22 nt, Human
aggcacugaauauccaguaaaa

SEQ ID NO: 1040670 - RNA, 22 nt, Human
agcccugggaggccagcuugua

SEQ ID NO: 1040671 - RNA, 22 nt, Human
agagcugagaauguggcuuccu

SEQ ID NO: 1040672 - RNA, 22 nt, Human
agcucuggaauaaugaugugau

SEQ ID NO: 1040673 - RNA, 22 nt, Human
cucaguuucuucauauuguagg

SEQ ID NO: 1040674 - RNA, 22 nt, Human
ugugacagaucuuuaaauaaug

SEQ ID NO: 1040675 - RNA, 22 nt, Human
ucccuggacaacagacuucacu

SEQ ID NO: 1040676 - RNA, 22 nt, Human
agucucagaaaauaugcuuuuu

SEQ ID NO: 1040677 - RNA, 23 nt, Human
aaccagauaaauggcuccagggc

SEQ ID NO: 1040678 - RNA, 22 nt, Human
ucucccacugcaagcccaggcu

SEQ ID NO: 1040679 - RNA, 22 nt, Human
gucacacucagaaugacuagag

SEQ ID NO: 1040680 - RNA, 22 nt, Human
cucuggacagcaggugcugugg

SEQ ID NO: 1040681 - RNA, 22 nt, Human
uggcagccacaucucguggauu

SEQ ID NO: 1040682 - RNA, 22 nt, Human
gcuggagcugaguucccugggc

SEQ ID NO: 1040683 - RNA, 22 nt, Human
agaagcagacucugaggcaagg

SEQ ID NO: 1040684 - RNA, 22 nt, Human
agaaauguuguggguuuuguua

SEQ ID NO: 1040685 - RNA, 22 nt, Human
caucaguguggcaguucacugu

SEQ ID NO: 1040686 - RNA, 21 nt, Human
aggcucagcagguguauaaag

SEQ ID NO: 1040687 - RNA, 22 nt, Human
aacagaacccgagugugaaucu

SEQ ID NO: 1040688 - RNA, 22 nt, Human
uucucucauucaaauuaaagug

SEQ ID NO: 1040689 - RNA, 21 nt, Human
aauaaaacaguuggugucaau

SEQ ID NO: 1040690 - RNA, 22 nt, Human
ucagcagggcugugguguggcu

SEQ ID NO: 1040691 - RNA, 22 nt, Human
uggcuucugcuuucaguggagg

SEQ ID NO: 1040692 - RNA, 21 nt, Human
aaacugaccuugccugagaca

SEQ ID NO: 1040693 - RNA, 22 nt, Human
accagcucagaagccagaaaga

SEQ ID NO: 1040694 - RNA, 22 nt, Human
agcagcuggugagcaagcucag

SEQ ID NO: 1040695 - RNA, 22 nt, Human
cugcugagcaucagggcugccc

SEQ ID NO: 1040696 - RNA, 22 nt, Human
gcucccugaaaagaacaaaguc

SEQ ID NO: 1040697 - RNA, 22 nt, Human
caucugccuaaguggcccuguu

SEQ ID NO: 1040698 - RNA, 22 nt, Human
cugagagccuccuguuggcuag

SEQ ID NO: 1040699 - RNA, 22 nt, Human
ccugccaggccagugagcuucc

SEQ ID NO: 1040700 - RNA, 22 nt, Human
aucaguuuaacugucaagagcc

SEQ ID NO: 1040701 - RNA, 22 nt, Human
ugugcuucaucacuucucaguu

SEQ ID NO: 1040702 - RNA, 22 nt, Human
ggccaggcuggucucagacuuc

SEQ ID NO: 1040703 - RNA, 22 nt, Human
gcuggguggaucggaggcucug

SEQ ID NO: 1040704 - RNA, 22 nt, Human
gcucugucaacagcuagcugug

SEQ ID NO: 1040705 - RNA, 22 nt, Human
cagagccuaaaacgacuccacu

SEQ ID NO: 1040706 - RNA, 22 nt, Human
cugcuuugcauagcugccagag

SEQ ID NO: 1040707 - RNA, 19 nt, Human
agacagagcucaguggguu

SEQ ID NO: 1040708 - RNA, 22 nt, Human
agugccaggagcaaggagcucc

SEQ ID NO: 1040709 - RNA, 19 nt, Human
ugucccagacuccgugucu

SEQ ID NO: 1040710 - RNA, 22 nt, Human
uggagccugagucagcggaggc

SEQ ID NO: 1040711 - RNA, 22 nt, Human
uagucccauuuugagguauuug

SEQ ID NO: 1040712 - RNA, 22 nt, Human
acagcuggaggccccauugucc

SEQ ID NO: 1040713 - RNA, 22 nt, Human
uggagcugggguuugaaucugg

SEQ ID NO: 1040714 - RNA, 22 nt, Human
gcuggccugaccugaggcuggg

SEQ ID NO: 1040715 - RNA, 22 nt, Human
caguacuuggucaaggaagcag

SEQ ID NO: 1040716 - RNA, 23 nt, Human
gcucagagguuuuucucuggaug

SEQ ID NO: 1040717 - RNA, 22 nt, Human
cugggccagggaggugucugua

SEQ ID NO: 1040718 - RNA, 22 nt, Human
agauuuagacugccuuaaucau

SEQ ID NO: 1040719 - RNA, 22 nt, Human
ccucccuuggccauagccagcc

SEQ ID NO: 1040720 - RNA, 22 nt, Human
agcuaggaaauugaggcugaga

SEQ ID NO: 1040721 - RNA, 20 nt, Human
gcaaggcacagugaggaggg

SEQ ID NO: 1040722 - RNA, 18 nt, Human
ggagagugagaucaaaca

SEQ ID NO: 1040723 - RNA, 22 nt, Human
agcugucuuucugccuccugau

SEQ ID NO: 1040724 - RNA, 22 nt, Human
agaggccacuuugccugugaug

SEQ ID NO: 1040725 - RNA, 22 nt, Human
uggcagagaugaagaguuguuu

SEQ ID NO: 1040726 - RNA, 22 nt, Human
cuggccuucagacucggacuga

SEQ ID NO: 1040727 - RNA, 22 nt, Human
guggcuugaccaucccugcuac

SEQ ID NO: 1040728 - RNA, 22 nt, Human
ugagaauuacaaaugagucaca

SEQ ID NO: 1040729 - RNA, 22 nt, Human
aggcacugugcugaugucuuau

SEQ ID NO: 1040730 - RNA, 22 nt, Human
ccucuggcaacuucacagccca

SEQ ID NO: 1040731 - RNA, 22 nt, Human
ccuuccaggagucucugcaggu

SEQ ID NO: 1040732 - RNA, 22 nt, Human
ugccagcccaccuuggggccuc

SEQ ID NO: 1040733 - RNA, 22 nt, Human
caaauccagaucccagucguag

SEQ ID NO: 1040734 - RNA, 22 nt, Human
gcugaagcugcagcaggaggaa

SEQ ID NO: 1040735 - RNA, 22 nt, Human
uucugucacuuaggaggucaua

SEQ ID NO: 1040736 - RNA, 22 nt, Human
uggcagcaaguucuugggaggu

SEQ ID NO: 1040737 - RNA, 22 nt, Human
ggcagaggaaggaugaauucac

SEQ ID NO: 1040738 - RNA, 22 nt, Human
cucauggauauaagaacuguuu

SEQ ID NO: 1040739 - RNA, 22 nt, Human
guggcuucuggcugggccucag

SEQ ID NO: 1040740 - RNA, 22 nt, Human
uagcugccuagacagcuauagc

SEQ ID NO: 1040741 - RNA, 22 nt, Human
ggcagcuccucucagcaaaaga

SEQ ID NO: 1040742 - RNA, 23 nt, Human
ugggcaucuccucugugccaggc

SEQ ID NO: 1040743 - RNA, 22 nt, Human
aggccuggugaaugaaguaucu

SEQ ID NO: 1040744 - RNA, 22 nt, Human
uugcauuguugcaaugaaguau

SEQ ID NO: 1040745 - RNA, 22 nt, Human
cacccaggcuagagugcagugg

SEQ ID NO: 1040746 - RNA, 22 nt, Human
gugcaugucggggugcauguca

SEQ ID NO: 1040747 - RNA, 22 nt, Human
aagaacaguugggaggugagcc

SEQ ID NO: 1040748 - RNA, 22 nt, Human
auauaaaguguuuagaaagcug

SEQ ID NO: 1040749 - RNA, 22 nt, Human
uuuucauuuacauuagggaaga

SEQ ID NO: 1040750 - RNA, 22 nt, Human
gcuggcagguccaagauagagc

SEQ ID NO: 1040751 - RNA, 22 nt, Human
aauaugcauguauacaugugua

SEQ ID NO: 1040752 - RNA, 22 nt, Human
agaagccaacagggcaggagag

SEQ ID NO: 1040753 - RNA, 22 nt, Human
agcugcagucaagcugggccac

SEQ ID NO: 1040754 - RNA, 22 nt, Human
ccaaaguccacaguuuacauua

SEQ ID NO: 1040755 - RNA, 22 nt, Human
cugccucuccccagaguggccc

SEQ ID NO: 1040756 - RNA, 21 nt, Human
cugcaucucauagaacauguc

SEQ ID NO: 1040757 - RNA, 23 nt, Human
gggagccaggaccucgcgcccca

SEQ ID NO: 1040758 - RNA, 22 nt, Human
uggcugggcccccaccugccuc

SEQ ID NO: 1040759 - RNA, 23 nt, Human
guggagccacaucacaggcuccu

SEQ ID NO: 1040760 - RNA, 22 nt, Human
gggagggaaggaccuuaugaau

SEQ ID NO: 1040761 - RNA, 22 nt, Human
agcaccuucacaggcucucagg

SEQ ID NO: 1040762 - RNA, 18 nt, Human
ugacagaaccuggagccu

SEQ ID NO: 1040763 - RNA, 22 nt, Human
gcucccagaaccaaggcugggg

SEQ ID NO: 1040764 - RNA, 22 nt, Human
cugcccagaaucacucacucga

SEQ ID NO: 1040765 - RNA, 22 nt, Human
cuggcuuccaugcuguaguggc

SEQ ID NO: 1040766 - RNA, 22 nt, Human
aaggccugggaguacugggaca

SEQ ID NO: 1040767 - RNA, 23 nt, Human
gggauauggaccuuggaggaguc

SEQ ID NO: 1040768 - RNA, 22 nt, Human
cuggguggcagagccugcagug

SEQ ID NO: 1040769 - RNA, 22 nt, Human
guggaggacaaaagaagccuuu

SEQ ID NO: 1040770 - RNA, 22 nt, Human
gcacagggagcaggucucuggu

SEQ ID NO: 1040771 - RNA, 22 nt, Human
agguaggguuaauggagauaua

SEQ ID NO: 1040772 - RNA, 22 nt, Human
acacagggcggaaagcaugaga

SEQ ID NO: 1040773 - RNA, 22 nt, Human
accauuuaauaaguauuuccau

SEQ ID NO: 1040774 - RNA, 22 nt, Human
aagaacauguuaaaagauucac

SEQ ID NO: 1040775 - RNA, 22 nt, Human
cccagcucaagcagagagcuaa

SEQ ID NO: 1040776 - RNA, 22 nt, Human
uugcauugaugucuauacgcug

SEQ ID NO: 1040777 - RNA, 22 nt, Human
cuuccuggccauugccauggca

SEQ ID NO: 1040778 - RNA, 22 nt, Human
gagagcuggccagcuucaguau

SEQ ID NO: 1040779 - RNA, 22 nt, Human
uuuuggucagguuggucucgaa

SEQ ID NO: 1040780 - RNA, 22 nt, Human
acucugaggagugacuagaggu

SEQ ID NO: 1040781 - RNA, 22 nt, Human
ggccugugagcccuugcaugua

SEQ ID NO: 1040782 - RNA, 22 nt, Human
uucaagaugcacaguggcauuc

SEQ ID NO: 1040783 - RNA, 22 nt, Human
augcaguauaaaucauuucugg

SEQ ID NO: 1040784 - RNA, 22 nt, Human
ccuguguguaggccaggggagu

SEQ ID NO: 1040785 - RNA, 22 nt, Human
cagcuggcccuuugguagccuu

SEQ ID NO: 1040786 - RNA, 19 nt, Human
uguggccaugguucagcug

SEQ ID NO: 1040787 - RNA, 22 nt, Human
agggacugagcuaggaucuagu

SEQ ID NO: 1040788 - RNA, 22 nt, Human
gagcucaggagcaucagaagaa

SEQ ID NO: 1040789 - RNA, 22 nt, Human
gggagcaggagccugccugcca

SEQ ID NO: 1040790 - RNA, 22 nt, Human
cugagcauggccgguccauggu

SEQ ID NO: 1040791 - RNA, 22 nt, Human
ugaaggaaugaguauacuguuu

SEQ ID NO: 1040792 - RNA, 17 nt, Human
uccagagcacagagcuc

SEQ ID NO: 1040793 - RNA, 22 nt, Human
ccagagucuuuauauuccugaa

SEQ ID NO: 1040794 - RNA, 22 nt, Human
agauaacuuuuggguauucaug

SEQ ID NO: 1040795 - RNA, 22 nt, Human
caagaaauguuuacugagcauc

SEQ ID NO: 1040796 - RNA, 22 nt, Human
agacaacaccaaaugcuagugu

SEQ ID NO: 1040797 - RNA, 22 nt, Human
aagaagagaaaugugcugcugg

SEQ ID NO: 1040798 - RNA, 22 nt, Human
aucagcaaggcaaucacugcag

SEQ ID NO: 1040799 - RNA, 16 nt, Human
ccuuucucugccuucc

SEQ ID NO: 1040800 - RNA, 22 nt, Human
ugggcagaggcagcagaaaccu

SEQ ID NO: 1040801 - RNA, 22 nt, Human
acaggggauugauuggaagucu

SEQ ID NO: 1040802 - RNA, 22 nt, Human
gugcauuggugcgccacuucac

SEQ ID NO: 1040803 - RNA, 22 nt, Human
uuuccucugaugcugacuugga

SEQ ID NO: 1040804 - RNA, 22 nt, Human
agcugagcucaggcugauguaa

SEQ ID NO: 1040805 - RNA, 22 nt, Human
agugaaaugauaguguaaauac

SEQ ID NO: 1040806 - RNA, 22 nt, Human
ucagaagcaggagugugcacaa

SEQ ID NO: 1040807 - RNA, 22 nt, Human
gucccagagagcacuaguccau

SEQ ID NO: 1040808 - RNA, 22 nt, Human
gaguaagagcuggcuuuggugu

SEQ ID NO: 1040809 - RNA, 22 nt, Human
caggggccaggcugucugcugu

SEQ ID NO: 1040810 - RNA, 22 nt, Human
gccagggggucagcaggcacuu

SEQ ID NO: 1040811 - RNA, 22 nt, Human
ccagggcagugggagaaggugc

SEQ ID NO: 1040812 - RNA, 20 nt, Human
cugagcugagcuccaugggu

SEQ ID NO: 1040813 - RNA, 22 nt, Human
ggcuagaauaauugacuucauu

SEQ ID NO: 1040814 - RNA, 22 nt, Human
uauuuguauuucaugcaguaaa

SEQ ID NO: 1040815 - RNA, 23 nt, Human
gccuggccaccccagggcugcuu

SEQ ID NO: 1040816 - RNA, 22 nt, Human
guccuggggaauacagaagccg

SEQ ID NO: 1040817 - RNA, 22 nt, Human
cugcuuugaaaauaaacuuguc

SEQ ID NO: 1040818 - RNA, 22 nt, Human
ugugccagaaaauaugcugagg

SEQ ID NO: 1040819 - RNA, 21 nt, Human
agagaagggacucuuccaguc

SEQ ID NO: 1040820 - RNA, 22 nt, Human
ucagaguguuuuacuaaacaag

SEQ ID NO: 1040821 - RNA, 22 nt, Human
agcagaacugaugagacuugag

SEQ ID NO: 1040822 - RNA, 22 nt, Human
cugcucugcagcuuggacuccc

SEQ ID NO: 1040823 - RNA, 22 nt, Human
ucccagccugacagugcaucaa

SEQ ID NO: 1040824 - RNA, 22 nt, Human
augaagucuagcaagcauugaa

SEQ ID NO: 1040825 - RNA, 22 nt, Human
uccauggguagcccugguugag

SEQ ID NO: 1040826 - RNA, 22 nt, Human
auuugucucugcacuuuacuca

SEQ ID NO: 1040827 - RNA, 22 nt, Human
gagugaaaaaggaagggccaua

SEQ ID NO: 1040828 - RNA, 22 nt, Human
acaaauguggacauggauaaug

SEQ ID NO: 1040829 - RNA, 22 nt, Human
auagaacagaaacagaugcaca

SEQ ID NO: 1040830 - RNA, 22 nt, Human
aaguucaagagugacauauuag

SEQ ID NO: 1040831 - RNA, 22 nt, Human
gaaugcacucacccaucacuca

SEQ ID NO: 1040832 - RNA, 22 nt, Human
gaaggccauugcguccugggau

SEQ ID NO: 1040833 - RNA, 22 nt, Human
gcugcucuacccaugcaucugu

SEQ ID NO: 1040834 - RNA, 22 nt, Human
agcccuagagcuggaggucagu

SEQ ID NO: 1040835 - RNA, 21 nt, Human
ugcucacagaugugcucagug

SEQ ID NO: 1040836 - RNA, 17 nt, Human
auccccagcaucuagaa

SEQ ID NO: 1040837 - RNA, 20 nt, Human
agacccuguguccuguggcc

SEQ ID NO: 1040838 - RNA, 22 nt, Human
caggugggagccacagcguaca

SEQ ID NO: 1040839 - RNA, 22 nt, Human
uaaggcacccauguucauacag

SEQ ID NO: 1040840 - RNA, 22 nt, Human
gagaccaggaaguacagcagcc

SEQ ID NO: 1040841 - RNA, 22 nt, Human
aagggcagagggaaucccacau

SEQ ID NO: 1040842 - RNA, 22 nt, Human
augugaaagagguguucagugg

SEQ ID NO: 1040843 - RNA, 22 nt, Human
uggagcugagaaguggagcucu

SEQ ID NO: 1040844 - RNA, 22 nt, Human
agaggccagcagugccuaucug

SEQ ID NO: 1040845 - RNA, 21 nt, Human
guauucuuuaugaagugaaaa

SEQ ID NO: 1040846 - RNA, 22 nt, Human
gcacagggcugccaggcggcuu

SEQ ID NO: 1040847 - RNA, 22 nt, Human
ggagagaaauugagguagcaag

SEQ ID NO: 1040848 - RNA, 22 nt, Human
aguggcagagcaggugcuggaa

SEQ ID NO: 1040849 - RNA, 22 nt, Human
ggccaagauggaaggagagaug

SEQ ID NO: 1040850 - RNA, 22 nt, Human
ggcagcaguaggagcuaaucuu

SEQ ID NO: 1040851 - RNA, 22 nt, Human
auccaaaucaugucagaagaac

SEQ ID NO: 1040852 - RNA, 22 nt, Human
cuguaauucacuagggucagcg

SEQ ID NO: 1040853 - RNA, 22 nt, Human
uaaauguggagacucaggaguc

SEQ ID NO: 1040854 - RNA, 22 nt, Human
gagccagccuucuucugagguc

SEQ ID NO: 1040855 - RNA, 22 nt, Human
uguuuuguuuaugagagcacag

SEQ ID NO: 1040856 - RNA, 22 nt, Human
ccuggccucgugcucacggcuc

SEQ ID NO: 1040857 - RNA, 20 nt, Human
caggaggcaaggucaagguc

SEQ ID NO: 1040858 - RNA, 21 nt, Human
aaugugugcuauuuaucuuuu

SEQ ID NO: 1040859 - RNA, 22 nt, Human
gaggccuggcugucagucccca

SEQ ID NO: 1040860 - RNA, 22 nt, Human
agguacagggugaaaguuuaug

SEQ ID NO: 1040861 - RNA, 22 nt, Human
gaggcagcaugguaccuuggag

SEQ ID NO: 1040862 - RNA, 22 nt, Human
gcuggagguuucaccugaguuu

SEQ ID NO: 1040863 - RNA, 22 nt, Human
ggcaggugugagaucgaggcca

SEQ ID NO: 1040864 - RNA, 22 nt, Human
acagagcaugcucaguguguga

SEQ ID NO: 1040865 - RNA, 20 nt, Human
cacaggccuugugagcagac

SEQ ID NO: 1040866 - RNA, 22 nt, Human
ucccagagccucugccacucug

SEQ ID NO: 1040867 - RNA, 22 nt, Human
caggugcucccagagaagugcu

SEQ ID NO: 1040868 - RNA, 22 nt, Human
uaaggcacccgugagcugccag

SEQ ID NO: 1040869 - RNA, 22 nt, Human
agucccagcccaguccuguaag

SEQ ID NO: 1040870 - RNA, 22 nt, Human
ugucaguguauacauacaguau

SEQ ID NO: 1040871 - RNA, 22 nt, Human
cugcugggucuaugcaagugga

SEQ ID NO: 1040872 - RNA, 22 nt, Human
cacugaagguaggaccaaggcu

SEQ ID NO: 1040873 - RNA, 23 nt, Human
auaaggcauaaagguacauugga

SEQ ID NO: 1040874 - RNA, 22 nt, Human
ugggcugcccaagguggccaug

SEQ ID NO: 1040875 - RNA, 22 nt, Human
ucagagaacacagaggugaugu

SEQ ID NO: 1040876 - RNA, 22 nt, Human
ccuucugcuggucaucccagug

SEQ ID NO: 1040877 - RNA, 22 nt, Human
cggggcuguagcacagcugagc

SEQ ID NO: 1040878 - RNA, 22 nt, Human
uguauuuugugaggaucacucu

SEQ ID NO: 1040879 - RNA, 22 nt, Human
ccugccugcaaaaugggacaag

SEQ ID NO: 1040880 - RNA, 22 nt, Human
cuggcucauagagcagcuccaa

SEQ ID NO: 1040881 - RNA, 22 nt, Human
ccagggcauguaacuaauggug

SEQ ID NO: 1040882 - RNA, 22 nt, Human
aaaugguguuucuaaugcuaga

SEQ ID NO: 1040883 - RNA, 18 nt, Human
ucaaagucuggcuccacu

SEQ ID NO: 1040884 - RNA, 22 nt, Human
gugccagggggcacugaacaga

SEQ ID NO: 1040885 - RNA, 22 nt, Human
gggcguggauggucagugcagg

SEQ ID NO: 1040886 - RNA, 22 nt, Human
aagagcugcaucuaagccauga

SEQ ID NO: 1040887 - RNA, 22 nt, Human
ucaggggacuuaggagagaagu

SEQ ID NO: 1040888 - RNA, 22 nt, Human
gcagggccagugcagagaggaa

SEQ ID NO: 1040889 - RNA, 22 nt, Human
gccccugggagcagagccacca

SEQ ID NO: 1040890 - RNA, 22 nt, Human
cagagccugccucuggcugugg

SEQ ID NO: 1040891 - RNA, 22 nt, Human
agaggcugucccuugcuauucc

SEQ ID NO: 1040892 - RNA, 22 nt, Human
ugugaaggcagcagcucugucc

SEQ ID NO: 1040893 - RNA, 23 nt, Human
agccagggcacugguggagauug

SEQ ID NO: 1040894 - RNA, 22 nt, Human
uaaguucauuagacuacagaua

SEQ ID NO: 1040895 - RNA, 22 nt, Human
agcugccaucugaagaacugca

SEQ ID NO: 1040896 - RNA, 22 nt, Human
agggucaggagacacuggcaac

SEQ ID NO: 1040897 - RNA, 22 nt, Human
ccaggaagcggugagggcugcc

SEQ ID NO: 1040898 - RNA, 22 nt, Human
cugcaggauucucccaguugga

SEQ ID NO: 1040899 - RNA, 22 nt, Human
cagcaggcagccauuucacugu

SEQ ID NO: 1040900 - RNA, 22 nt, Human
uugcuuccaguccaagucuguu

SEQ ID NO: 1040901 - RNA, 22 nt, Human
gcugcaggcgccugcggucucu

SEQ ID NO: 1040902 - RNA, 22 nt, Human
cugagauggaguuuugcucuug

SEQ ID NO: 1040903 - RNA, 22 nt, Human
aaaucaguuguuauauuaaaga

SEQ ID NO: 1040904 - RNA, 22 nt, Human
accuuucauuaaagucuguagu

SEQ ID NO: 1040905 - RNA, 22 nt, Human
gagauggggucagcugggacau

SEQ ID NO: 1040906 - RNA, 22 nt, Human
gcaggcugugaggcucagaugg

SEQ ID NO: 1040907 - RNA, 22 nt, Human
caagagcuagaaauugguuaga

SEQ ID NO: 1040908 - RNA, 22 nt, Human
ccugccagggccuuggaagaaa

SEQ ID NO: 1040909 - RNA, 22 nt, Human
augcacagcagugaguucagug

SEQ ID NO: 1040910 - RNA, 22 nt, Human
ucacugaauacuugucucaucc

SEQ ID NO: 1040911 - RNA, 22 nt, Human
ugcagugguugagagcccagac

SEQ ID NO: 1040912 - RNA, 22 nt, Human
gcacagggcccugugcguaggu

SEQ ID NO: 1040913 - RNA, 22 nt, Human
gcuccagguauuugcccuuuua

SEQ ID NO: 1040914 - RNA, 22 nt, Human
acagccagaggugguccugggu

SEQ ID NO: 1040915 - RNA, 22 nt, Human
ucagaacaauugggaaccauua

SEQ ID NO: 1040916 - RNA, 22 nt, Human
caggcaggagccagggauucca

SEQ ID NO: 1040917 - RNA, 22 nt, Human
acuguguccucauguggcagaa

SEQ ID NO: 1040918 - RNA, 22 nt, Human
agagcugcaccuaugcagaccu

SEQ ID NO: 1040919 - RNA, 22 nt, Human
cagagccacugucugccaggca

SEQ ID NO: 1040920 - RNA, 21 nt, Human
agcagcugcaguuucuaucug

SEQ ID NO: 1040921 - RNA, 22 nt, Human
gcccuggccuucaucucagaca

SEQ ID NO: 1040922 - RNA, 22 nt, Human
cacauguuuggcaugucaccaa

SEQ ID NO: 1040923 - RNA, 22 nt, Human
ucuggcucagggcucugaggga

SEQ ID NO: 1040924 - RNA, 22 nt, Human
ucagggcaucaucaugaauaua

SEQ ID NO: 1040925 - RNA, 22 nt, Human
cugcucuggggaagccagaugu

SEQ ID NO: 1040926 - RNA, 22 nt, Human
gcagggcuaauggggcaaguag

SEQ ID NO: 1040927 - RNA, 22 nt, Human
guaacagaaagucaugcucauu

SEQ ID NO: 1040928 - RNA, 22 nt, Human
cugagcucuaaugucagccuug

SEQ ID NO: 1040929 - RNA, 22 nt, Human
agaaaugacacacaugagacau

SEQ ID NO: 1040930 - RNA, 22 nt, Human
cccagcucugcagaccugcccu

SEQ ID NO: 1040931 - RNA, 22 nt, Human
cuuguauuccccuaucucuaaa

SEQ ID NO: 1040932 - RNA, 22 nt, Human
gcucaaggcaggcagacaugag

SEQ ID NO: 1040933 - RNA, 22 nt, Human
agugcauugcaucucugcuuca

SEQ ID NO: 1040934 - RNA, 22 nt, Human
cugccagguuggcgcucgcucu

SEQ ID NO: 1040935 - RNA, 22 nt, Human
ggcuggagugggcuccagaguu

SEQ ID NO: 1040936 - RNA, 22 nt, Human
cuggcagcuucaggacacucgg

SEQ ID NO: 1040937 - RNA, 22 nt, Human
ccagggcaggggcuggaguuca

SEQ ID NO: 1040938 - RNA, 21 nt, Human
agcagaggggacauguuugau

SEQ ID NO: 1040939 - RNA, 20 nt, Human
gauuucaaagcagaguggcc

SEQ ID NO: 1040940 - RNA, 22 nt, Human
ccaggaggcagaaguugcagug

SEQ ID NO: 1040941 - RNA, 22 nt, Human
cacagagagcuacgugcagcgu

SEQ ID NO: 1040942 - RNA, 22 nt, Human
uuuauugcauacacaaauguca

SEQ ID NO: 1040943 - RNA, 22 nt, Human
ucccagagcaguacuccaggag

SEQ ID NO: 1040944 - RNA, 22 nt, Human
uccugagagcagaguccaggug

SEQ ID NO: 1040945 - RNA, 22 nt, Human
aggaccagccuccaggucucuu

SEQ ID NO: 1040946 - RNA, 22 nt, Human
agggaggaucugcuccuugucu

SEQ ID NO: 1040947 - RNA, 22 nt, Human
gugcagggcuggcaccggaggc

SEQ ID NO: 1040948 - RNA, 22 nt, Human
gaguggagcaaaagagguagau

SEQ ID NO: 1040949 - RNA, 22 nt, Human
aagaauguuaguuucugauaca

SEQ ID NO: 1040950 - RNA, 22 nt, Human
agggcagaaguacagacacuua

SEQ ID NO: 1040951 - RNA, 22 nt, Human
caggaaccuaaugaaggcucac

SEQ ID NO: 1040952 - RNA, 22 nt, Human
auggacaggcugagcuuccuca

SEQ ID NO: 1040953 - RNA, 22 nt, Human
cugugucccccucagccaggug

SEQ ID NO: 1040954 - RNA, 23 nt, Human
ggcugagacuacaggcgcuugcc

SEQ ID NO: 1040955 - RNA, 22 nt, Human
ugggcuggcugaacuucaaccu

SEQ ID NO: 1040956 - RNA, 22 nt, Human
guccucugacucagccuuggga

SEQ ID NO: 1040957 - RNA, 20 nt, Human
gaggaaaagcugccaggccu

SEQ ID NO: 1040958 - RNA, 21 nt, Human
aaggccugcuuacugcuaguu

SEQ ID NO: 1040959 - RNA, 23 nt, Human
ugucauugugacuacagaaccag

SEQ ID NO: 1040960 - RNA, 22 nt, Human
agcugagcauuugauccaccuc

SEQ ID NO: 1040961 - RNA, 22 nt, Human
agggcugccauuucuggcccaa

SEQ ID NO: 1040962 - RNA, 22 nt, Human
aggagucacucagggcuucauc

SEQ ID NO: 1040963 - RNA, 22 nt, Human
cuacuucugugaugaaacuaca

SEQ ID NO: 1040964 - RNA, 22 nt, Human
gagcugccaagauuacaaucag

SEQ ID NO: 1040965 - RNA, 17 nt, Human
gccaaaggguuccaauc

SEQ ID NO: 1040966 - RNA, 22 nt, Human
ugggugagugggaaaagcccag

SEQ ID NO: 1040967 - RNA, 22 nt, Human
uuuugucuaagaacuuugcaaa

SEQ ID NO: 1040968 - RNA, 22 nt, Human
uggccucugggaaagcagauuc

SEQ ID NO: 1040969 - RNA, 22 nt, Human
acugcuuuuagaaaucuauaga

SEQ ID NO: 1040970 - RNA, 22 nt, Human
ggcucaagcagucugccugccu

SEQ ID NO: 1040971 - RNA, 22 nt, Human
gaggucaauaauaugugcuuua

SEQ ID NO: 1040972 - RNA, 22 nt, Human
gggagcuggagcuggaagacuc

SEQ ID NO: 1040973 - RNA, 22 nt, Human
accaggcugugaagugagacua

SEQ ID NO: 1040974 - RNA, 22 nt, Human
agggcuggcuccguuaccuuga

SEQ ID NO: 1040975 - RNA, 22 nt, Human
ucagaggagaaguugggaaaau

SEQ ID NO: 1040976 - RNA, 22 nt, Human
ucauugcaccccagucccagcu

SEQ ID NO: 1040977 - RNA, 20 nt, Human
aggagcugaauuagaggguu

SEQ ID NO: 1040978 - RNA, 22 nt, Human
gagagugaaggcuucccagcaa

SEQ ID NO: 1040979 - RNA, 22 nt, Human
ucagcaguuuuauaugcagcuu

SEQ ID NO: 1040980 - RNA, 22 nt, Human
aggucauugaaguuauuuucuu

SEQ ID NO: 1040981 - RNA, 22 nt, Human
ugcucuggggagcuccucugcg

SEQ ID NO: 1040982 - RNA, 22 nt, Human
agccagcuggagaccacuguuu

SEQ ID NO: 1040983 - RNA, 22 nt, Human
gcagaggcauuucugacgcugc

SEQ ID NO: 1040984 - RNA, 23 nt, Human
ugggaguguugggaucucugcuc

SEQ ID NO: 1040985 - RNA, 22 nt, Human
gggguugguuuaaaugcuugag

SEQ ID NO: 1040986 - RNA, 21 nt, Human
ccugcagcaccagaaggagau

SEQ ID NO: 1040987 - RNA, 22 nt, Human
ggccucuggcaggcaggcccuc

SEQ ID NO: 1040988 - RNA, 22 nt, Human
ucuuucagccacuuaccugucu

SEQ ID NO: 1040989 - RNA, 22 nt, Human
gaggguccccaugcagagcuca

SEQ ID NO: 1040990 - RNA, 22 nt, Human
uguggucucguuauguugccca

SEQ ID NO: 1040991 - RNA, 22 nt, Human
ccacagggcucuaggcgcuucc

SEQ ID NO: 1040992 - RNA, 22 nt, Human
ucaaaugcggucauggcuuuua

SEQ ID NO: 1040993 - RNA, 22 nt, Human
gcagggacgccagggacagcaa

SEQ ID NO: 1040994 - RNA, 21 nt, Human
ucaggggcuguguuuuccauc

SEQ ID NO: 1040995 - RNA, 23 nt, Human
cccuggaguaaauucuuggaagg

SEQ ID NO: 1040996 - RNA, 22 nt, Human
ugggaggaaugucacugagcca

SEQ ID NO: 1040997 - RNA, 22 nt, Human
cuuuauguuggggugucuuagu

SEQ ID NO: 1040998 - RNA, 22 nt, Human
caggcaggugcagauuccucuu

SEQ ID NO: 1040999 - RNA, 21 nt, Human
ggccucugucauccugggaag

SEQ ID NO: 1041000 - RNA, 22 nt, Human
ggcuggccucaggguccucgcu

SEQ ID NO: 1041001 - RNA, 22 nt, Human
gggcagggguagcauuccaagu

SEQ ID NO: 1041002 - RNA, 22 nt, Human
aggucacacuuggaucauagaa

SEQ ID NO: 1041003 - RNA, 22 nt, Human
uaauccacaauagagauuaucu

SEQ ID NO: 1041004 - RNA, 22 nt, Human
aagccagggauuccugagggag

SEQ ID NO: 1041005 - RNA, 22 nt, Human
caggguggaagcuguagagugg

SEQ ID NO: 1041006 - RNA, 22 nt, Human
acagagcauauaaagugcuuug

SEQ ID NO: 1041007 - RNA, 22 nt, Human
cauuuguauguuccuccuuagg

SEQ ID NO: 1041008 - RNA, 22 nt, Human
ccuccuggugggcgcuucuggc

SEQ ID NO: 1041009 - RNA, 17 nt, Human
acacagggagagggagc

SEQ ID NO: 1041010 - RNA, 22 nt, Human
cugagaggaugcugcaguggag

SEQ ID NO: 1041011 - RNA, 19 nt, Human
ugaggccaaggucacagau

SEQ ID NO: 1041012 - RNA, 19 nt, Human
caugagcugcucacuuccc

SEQ ID NO: 1041013 - RNA, 22 nt, Human
cagggcaggaauuugacauugc

SEQ ID NO: 1041014 - RNA, 22 nt, Human
cagcccugagagaaccaucuau

SEQ ID NO: 1041015 - RNA, 18 nt, Human
uuccauaauguauguaac

SEQ ID NO: 1041016 - RNA, 22 nt, Human
caugcuuuaccaaagcagugau

SEQ ID NO: 1041017 - RNA, 22 nt, Human
acaaagguggaccauguggcuu

SEQ ID NO: 1041018 - RNA, 22 nt, Human
uacaaaugaguuguaugaacca

SEQ ID NO: 1041019 - RNA, 20 nt, Human
cugccuggaggccucuaccu

SEQ ID NO: 1041020 - RNA, 22 nt, Human
auccuucaaggggcugacagcu

SEQ ID NO: 1041021 - RNA, 22 nt, Human
ucagagugaccuuacauggucu

SEQ ID NO: 1041022 - RNA, 22 nt, Human
cuggcaggaaguuagaugguaa

SEQ ID NO: 1041023 - RNA, 22 nt, Human
ucagugucuugggcuugaaugc

SEQ ID NO: 1041024 - RNA, 22 nt, Human
cagccugacaccagcuuugggc

SEQ ID NO: 1041025 - RNA, 22 nt, Human
ccagguggaaggucugugcucu

SEQ ID NO: 1041026 - RNA, 22 nt, Human
agaugcuucaguguuuaauuua

SEQ ID NO: 1041027 - RNA, 22 nt, Human
ccuggugccacuagagaauguc

SEQ ID NO: 1041028 - RNA, 22 nt, Human
auugaaaggcaaaguaggaagc

SEQ ID NO: 1041029 - RNA, 22 nt, Human
acugccuugaaagauuguugag

SEQ ID NO: 1041030 - RNA, 22 nt, Human
gccugccuguuggcugaggugc

SEQ ID NO: 1041031 - RNA, 22 nt, Human
aaaugaacaguugcauucucug

SEQ ID NO: 1041032 - RNA, 22 nt, Human
ccagcuggugacauccccaacc

SEQ ID NO: 1041033 - RNA, 22 nt, Human
ucagaaauguaagcugaugacu

SEQ ID NO: 1041034 - RNA, 22 nt, Human
agcagagcccuuccauggccuu

SEQ ID NO: 1041035 - RNA, 22 nt, Human
ucagagguaagggcugagagga

SEQ ID NO: 1041036 - RNA, 22 nt, Human
cuggcagcgguuugcagccugg

SEQ ID NO: 1041037 - RNA, 22 nt, Human
acacuuuguuguggcauauacg

SEQ ID NO: 1041038 - RNA, 22 nt, Human
cugaggugcuauggaggauacg

SEQ ID NO: 1041039 - RNA, 22 nt, Human
acagaauuaaaguguuugugga

SEQ ID NO: 1041040 - RNA, 22 nt, Human
guguacaugagaaaucaacuuu

SEQ ID NO: 1041041 - RNA, 19 nt, Human
ucugaggguccagaugcau

SEQ ID NO: 1041042 - RNA, 22 nt, Human
uauugacaauuugugaaacuau

SEQ ID NO: 1041043 - RNA, 22 nt, Human
uuccuauuuccaugaaacacaa

SEQ ID NO: 1041044 - RNA, 21 nt, Human
agcaggaggcagucacagcuc

SEQ ID NO: 1041045 - RNA, 22 nt, Human
cagaacauuccaugugcccugc

SEQ ID NO: 1041046 - RNA, 22 nt, Human
aagccucaccuuuuagaagcua

SEQ ID NO: 1041047 - RNA, 22 nt, Human
uaaaugugucuuuuuaaggccu

SEQ ID NO: 1041048 - RNA, 22 nt, Human
gcagggcugggugggagacaga

SEQ ID NO: 1041049 - RNA, 22 nt, Human
uuuaucuuuggaucuucagaaa

SEQ ID NO: 1041050 - RNA, 22 nt, Human
acagaggucauggagaguucuc

SEQ ID NO: 1041051 - RNA, 22 nt, Human
gccuggguuccaugaucuccag

SEQ ID NO: 1041052 - RNA, 22 nt, Human
cuggaggcugaguugggucucc

SEQ ID NO: 1041053 - RNA, 22 nt, Human
acagagccacuuuggugccuac

SEQ ID NO: 1041054 - RNA, 23 nt, Human
uaguuauuuucucuguaauuugc

SEQ ID NO: 1041055 - RNA, 20 nt, Human
ugcagggcucugcuucucuc

SEQ ID NO: 1041056 - RNA, 22 nt, Human
gcagugcuuuagucuguccuuu

SEQ ID NO: 1041057 - RNA, 22 nt, Human
agcagaaccacagcacuguuga

SEQ ID NO: 1041058 - RNA, 22 nt, Human
uuaagaauggaaugaggaauuu

SEQ ID NO: 1041059 - RNA, 22 nt, Human
ucuggcaggcaaucggcucugg

SEQ ID NO: 1041060 - RNA, 19 nt, Human
aggccugggguuuugcacu

SEQ ID NO: 1041061 - RNA, 22 nt, Human
cugggcagugguggcaucuuug

SEQ ID NO: 1041062 - RNA, 22 nt, Human
uagagcuggaaaacugcaggua

SEQ ID NO: 1041063 - RNA, 22 nt, Human
uuccucugaaauggcuuggaaa

SEQ ID NO: 1041064 - RNA, 23 nt, Human
agccuucaggcaaugucaguaga

SEQ ID NO: 1041065 - RNA, 22 nt, Human
aaaagguaguugccaaauaagg

SEQ ID NO: 1041066 - RNA, 17 nt, Human
ucugccgacugccagcu

SEQ ID NO: 1041067 - RNA, 17 nt, Human
ggugaguguccaggugg

SEQ ID NO: 1041068 - RNA, 22 nt, Human
aggcugcaggucugggucaugu

SEQ ID NO: 1041069 - RNA, 22 nt, Human
ugccagcuccgaggagcugcag

SEQ ID NO: 1041070 - RNA, 22 nt, Human
gggccccuuguaucucuggcuc

SEQ ID NO: 1041071 - RNA, 22 nt, Human
augauacaagcaaaacuaauca

SEQ ID NO: 1041072 - RNA, 20 nt, Human
agugugcauuuagagucugc

SEQ ID NO: 1041073 - RNA, 17 nt, Human
gcagugaaaagagauca

SEQ ID NO: 1041074 - RNA, 21 nt, Human
guuuuaagggagaaaaccuag

SEQ ID NO: 1041075 - RNA, 22 nt, Human
cagucccacaagaucuccacaa

SEQ ID NO: 1041076 - RNA, 18 nt, Human
uccauuguucuacuguga

SEQ ID NO: 1041077 - RNA, 22 nt, Human
gcugagguggcugccuuaguaa

SEQ ID NO: 1041078 - RNA, 22 nt, Human
gaggcagcaucuauggugggaa

SEQ ID NO: 1041079 - RNA, 22 nt, Human
agcccaagcuaugaggugaccu

SEQ ID NO: 1041080 - RNA, 22 nt, Human
agagcugcaauuucauguggug

SEQ ID NO: 1041081 - RNA, 22 nt, Human
ucuggagcuggagggcaaggca

SEQ ID NO: 1041082 - RNA, 22 nt, Human
aggcugcuuccuuacguggcug

SEQ ID NO: 1041083 - RNA, 22 nt, Human
ucugaggcauaaccuguucugc

SEQ ID NO: 1041084 - RNA, 22 nt, Human
cacugagaggucucauuuccaa

SEQ ID NO: 1041085 - RNA, 22 nt, Human
agauuucccucuuguauuugca

SEQ ID NO: 1041086 - RNA, 22 nt, Human
aguggggaagagcaugggcccu

SEQ ID NO: 1041087 - RNA, 22 nt, Human
cugcugcugcuaucuacccagg

SEQ ID NO: 1041088 - RNA, 22 nt, Human
ugggcugcugcggugcucuugg

SEQ ID NO: 1041089 - RNA, 22 nt, Human
agacaggacacaagcugcauaa

SEQ ID NO: 1041090 - RNA, 22 nt, Human
cacagaggcaaccuucuggggu

SEQ ID NO: 1041091 - RNA, 23 nt, Human
acaaaugcccauacaucuaguuc

SEQ ID NO: 1041092 - RNA, 22 nt, Human
gaagagcugcucagaacaugau

SEQ ID NO: 1041093 - RNA, 22 nt, Human
cccaccaguacagaugguagau

SEQ ID NO: 1041094 - RNA, 22 nt, Human
cagaguguuucuuugggugggu

SEQ ID NO: 1041095 - RNA, 22 nt, Human
ugggcaaguaucggacucugag

SEQ ID NO: 1041096 - RNA, 22 nt, Human
aaauguaguauguugcauguau

SEQ ID NO: 1041097 - RNA, 22 nt, Human
gcucuggacccuggaguggcug

SEQ ID NO: 1041098 - RNA, 22 nt, Human
cugggccucaaucucagaguuu

SEQ ID NO: 1041099 - RNA, 22 nt, Human
uggagcucaaaggccuguggga

SEQ ID NO: 1041100 - RNA, 22 nt, Human
cucagggccaaggaugcuguug

SEQ ID NO: 1041101 - RNA, 22 nt, Human
agauaugacuagaagcucauuu

SEQ ID NO: 1041102 - RNA, 22 nt, Human
cagggagaucuuggcuccuggu

SEQ ID NO: 1041103 - RNA, 22 nt, Human
cauuauguucaguagcuuaaaa

SEQ ID NO: 1041104 - RNA, 21 nt, Human
ucccagggccaggugccauca

SEQ ID NO: 1041105 - RNA, 18 nt, Human
cggcagagugcuucuagc

SEQ ID NO: 1041106 - RNA, 21 nt, Human
uucuuuccccagaggacuaaa

SEQ ID NO: 1041107 - RNA, 20 nt, Human
uccugcaguuccuaggaggg

SEQ ID NO: 1041108 - RNA, 22 nt, Human
guuuccauggcucuguuaaugg

SEQ ID NO: 1041109 - RNA, 22 nt, Human
caaacugagcaucagaaaguuu

SEQ ID NO: 1041110 - RNA, 22 nt, Human
gggaaggagccugcuugcuaga

SEQ ID NO: 1041111 - RNA, 20 nt, Human
gggugagauguaggagaggg

SEQ ID NO: 1041112 - RNA, 22 nt, Human
cucagagcccaggguacacccg

SEQ ID NO: 1041113 - RNA, 18 nt, Human
auuuugaacaaugcugua

SEQ ID NO: 1041114 - RNA, 22 nt, Human
agccagacauggcuccugcucc

SEQ ID NO: 1041115 - RNA, 22 nt, Human
ucugccugcuaacuccugcacc

SEQ ID NO: 1041116 - RNA, 22 nt, Human
cugugccuuuguagcugugccu

SEQ ID NO: 1041117 - RNA, 22 nt, Human
ugcucacugaacucuugcuguc

SEQ ID NO: 1041118 - RNA, 21 nt, Human
agaaaaaccagcauguuuuca

SEQ ID NO: 1041119 - RNA, 20 nt, Human
aucagcaacugccacucagu

SEQ ID NO: 1041120 - RNA, 22 nt, Human
ugucaccucuuuggcugcagcu

SEQ ID NO: 1041121 - RNA, 22 nt, Human
acagcagcuggguucccaccau

SEQ ID NO: 1041122 - RNA, 22 nt, Human
cauggaaggcaaaagacacaga

SEQ ID NO: 1041123 - RNA, 22 nt, Human
ucccuguccugggcaaucccag

SEQ ID NO: 1041124 - RNA, 20 nt, Human
cuguggcucaugcaucugcc

SEQ ID NO: 1041125 - RNA, 22 nt, Human
ucauggcacuuagcacaguccu

SEQ ID NO: 1041126 - RNA, 22 nt, Human
aucacgucaugguuugaucugg

SEQ ID NO: 1041127 - RNA, 22 nt, Human
agcaccugcuuaaugugcagug

SEQ ID NO: 1041128 - RNA, 22 nt, Human
uugcaaaagccgaggcacucca

SEQ ID NO: 1041129 - RNA, 22 nt, Human
ccacccuggacaggccucugag

SEQ ID NO: 1041130 - RNA, 22 nt, Human
gacccugccaugagugacaggg

SEQ ID NO: 1041131 - RNA, 19 nt, Human
uggcauugguccagauaaa

SEQ ID NO: 1041132 - RNA, 22 nt, Human
gagggagagugauggaccauug

SEQ ID NO: 1041133 - RNA, 22 nt, Human
ugcuggcuggccuggccuggac

SEQ ID NO: 1041134 - RNA, 22 nt, Human
cugcucugaagccaggauucug

SEQ ID NO: 1041135 - RNA, 22 nt, Human
gcagcuggaagugacacucugu

SEQ ID NO: 1041136 - RNA, 22 nt, Human
accacugggcgggcagccugcu

SEQ ID NO: 1041137 - RNA, 22 nt, Human
uccagcagguuggucaggugca

SEQ ID NO: 1041138 - RNA, 22 nt, Human
gaggcagaaguugcagugagca

SEQ ID NO: 1041139 - RNA, 22 nt, Human
uaaagguacgaagugagggauu

SEQ ID NO: 1041140 - RNA, 22 nt, Human
auacagaagaacuauagccacu

SEQ ID NO: 1041141 - RNA, 22 nt, Human
agagacaccgcgcaucauggcu

SEQ ID NO: 1041142 - RNA, 18 nt, Human
ccgggcuuuggugacaca

SEQ ID NO: 1041143 - RNA, 22 nt, Human
ggcugccagugagugcagaccg

SEQ ID NO: 1041144 - RNA, 22 nt, Human
cugccuuggcccuaguucaugg

SEQ ID NO: 1041145 - RNA, 22 nt, Human
ucagggcauggcugcacuuggc

SEQ ID NO: 1041146 - RNA, 22 nt, Human
acagccuguguaccagcuggga

SEQ ID NO: 1041147 - RNA, 21 nt, Human
ggugucaguuuuggucauuag

SEQ ID NO: 1041148 - RNA, 22 nt, Human
uccugccugagcguggaggagg

SEQ ID NO: 1041149 - RNA, 22 nt, Human
cagcucugugcaggccugggga

SEQ ID NO: 1041150 - RNA, 22 nt, Human
ugcucagacaagcugaacagua

SEQ ID NO: 1041151 - RNA, 22 nt, Human
cugcucuguucccccaucaucu

SEQ ID NO: 1041152 - RNA, 22 nt, Human
agcugcucugauaaaccuacuu

SEQ ID NO: 1041153 - RNA, 22 nt, Human
caggcagcugaggacuuugcua

SEQ ID NO: 1041154 - RNA, 21 nt, Human
uucaaugaaaacaaagugagg

SEQ ID NO: 1041155 - RNA, 22 nt, Human
aggcacugggaauaugcugagg

SEQ ID NO: 1041156 - RNA, 22 nt, Human
auguguccacaggugugagaga

SEQ ID NO: 1041157 - RNA, 22 nt, Human
ugaggccacuuccccacagccc

SEQ ID NO: 1041158 - RNA, 22 nt, Human
agcuguucccucacugcaguca

SEQ ID NO: 1041159 - RNA, 22 nt, Human
cuuucagagguuacucaggaaa

SEQ ID NO: 1041160 - RNA, 22 nt, Human
gugcagugaaaaaagaaugucc

SEQ ID NO: 1041161 - RNA, 22 nt, Human
ugaagcaggaaccagcagcauu

SEQ ID NO: 1041162 - RNA, 22 nt, Human
ggccugugucugugccuguccu

SEQ ID NO: 1041163 - RNA, 22 nt, Human
agccuggagaagauguguauug

SEQ ID NO: 1041164 - RNA, 22 nt, Human
ccuccugggccuugcucuguga

SEQ ID NO: 1041165 - RNA, 20 nt, Human
uggagcugugguaaggagca

SEQ ID NO: 1041166 - RNA, 22 nt, Human
gacagggcauggugcagaguuc

SEQ ID NO: 1041167 - RNA, 22 nt, Human
gucccuaguggaaagacaugau

SEQ ID NO: 1041168 - RNA, 22 nt, Human
gagagcugcaagguagggcggg

SEQ ID NO: 1041169 - RNA, 22 nt, Human
uagaaaucagguuuuuagaaag

SEQ ID NO: 1041170 - RNA, 22 nt, Human
aguacagaccugucucuuccug

SEQ ID NO: 1041171 - RNA, 23 nt, Human
gccucuggagccccagugcucag

SEQ ID NO: 1041172 - RNA, 22 nt, Human
ugcacccucaucagucaaaugg

SEQ ID NO: 1041173 - RNA, 22 nt, Human
caugcuuugggucagaaaugcc

SEQ ID NO: 1041174 - RNA, 22 nt, Human
gggcuguggagccgcgagggcu

SEQ ID NO: 1041175 - RNA, 22 nt, Human
cgccaggcuugguagcucaugc

SEQ ID NO: 1041176 - RNA, 22 nt, Human
aggggugugcauccuggaggau

SEQ ID NO: 1041177 - RNA, 22 nt, Human
gggcccuggauuuaagcaugga

SEQ ID NO: 1041178 - RNA, 22 nt, Human
ucuugggauugcccugcaguuc

SEQ ID NO: 1041179 - RNA, 22 nt, Human
uggaggcauaggccugggcccu

SEQ ID NO: 1041180 - RNA, 22 nt, Human
auaaggcauauagucacuuuuu

SEQ ID NO: 1041181 - RNA, 22 nt, Human
ggagcuggucagccuugagcau

SEQ ID NO: 1041182 - RNA, 20 nt, Human
agucccagaucaaauuucug

SEQ ID NO: 1041183 - RNA, 19 nt, Human
ugucucugaaagaugagcu

SEQ ID NO: 1041184 - RNA, 22 nt, Human
gcucugagauugagccuuuggu

SEQ ID NO: 1041185 - RNA, 22 nt, Human
ggcuccuguggcaagacagcuu

SEQ ID NO: 1041186 - RNA, 22 nt, Human
aacaugaagguaggaugguuuu

SEQ ID NO: 1041187 - RNA, 22 nt, Human
ugcagauucaaaugaaaugcaa

SEQ ID NO: 1041188 - RNA, 22 nt, Human
ggcucuggcaaggggaggcuac

SEQ ID NO: 1041189 - RNA, 22 nt, Human
cugggcagcuaccaccacugcu

SEQ ID NO: 1041190 - RNA, 17 nt, Human
ucaggcugugccuggua

SEQ ID NO: 1041191 - RNA, 22 nt, Human
ccaggacuucgaggcuacagug

SEQ ID NO: 1041192 - RNA, 22 nt, Human
ggcacagggaggcccuggugug

SEQ ID NO: 1041193 - RNA, 22 nt, Human
aggccuggcuuugguuugcuga

SEQ ID NO: 1041194 - RNA, 22 nt, Human
caaagcucaugcucuuagccau

SEQ ID NO: 1041195 - RNA, 22 nt, Human
agaugauggccauguccucucc

SEQ ID NO: 1041196 - RNA, 22 nt, Human
gcaggcagucaucuuucauauu

SEQ ID NO: 1041197 - RNA, 23 nt, Human
aaaguugauuugcaguuuaagag

SEQ ID NO: 1041198 - RNA, 23 nt, Human
ugcuucucugcuugacaguucug

SEQ ID NO: 1041199 - RNA, 22 nt, Human
cccauuuagauaacaguucaaa

SEQ ID NO: 1041200 - RNA, 22 nt, Human
cacagggcaccaguuggccauc

SEQ ID NO: 1041201 - RNA, 22 nt, Human
cgcagcagccccgugguaggug

SEQ ID NO: 1041202 - RNA, 17 nt, Human
aauagcugcucagagag

SEQ ID NO: 1041203 - RNA, 20 nt, Human
cagcaguggaugagaguuuu

SEQ ID NO: 1041204 - RNA, 22 nt, Human
cucccuggaggugagcuggcac

SEQ ID NO: 1041205 - RNA, 22 nt, Human
aaggcacugaacuuaaauucug

SEQ ID NO: 1041206 - RNA, 22 nt, Human
ggugcugguucaggguggcugu

SEQ ID NO: 1041207 - RNA, 22 nt, Human
cuguagccagaagcagaaggcc

SEQ ID NO: 1041208 - RNA, 22 nt, Human
gcugugcuauaucucugagugu

SEQ ID NO: 1041209 - RNA, 22 nt, Human
uggcagggugggcuucagcccc

SEQ ID NO: 1041210 - RNA, 22 nt, Human
ggcaggagggcggacaaugacc

SEQ ID NO: 1041211 - RNA, 22 nt, Human
ccacagaaaguugucuagagua

SEQ ID NO: 1041212 - RNA, 22 nt, Human
aaggucauugguucugaauucu

SEQ ID NO: 1041213 - RNA, 22 nt, Human
cccauuuaucccaagguuacuc

SEQ ID NO: 1041214 - RNA, 19 nt, Human
augucccaccgccccugag

SEQ ID NO: 1041215 - RNA, 22 nt, Human
ccaaggagaaugacaccaugga

SEQ ID NO: 1041216 - RNA, 22 nt, Human
gguacaaggagugaagguuugg

SEQ ID NO: 1041217 - RNA, 22 nt, Human
acccugagucagacagccugac

SEQ ID NO: 1041218 - RNA, 17 nt, Human
ugcugccaagucccaac

SEQ ID NO: 1041219 - RNA, 22 nt, Human
uccuuccugcaggccaaguccu

SEQ ID NO: 1041220 - RNA, 22 nt, Human
acuccugggugcugaccagcgu

SEQ ID NO: 1041221 - RNA, 22 nt, Human
aguaucaaggaucuccagcacc

SEQ ID NO: 1041222 - RNA, 22 nt, Human
gcuccagaugaaaggccagagg

SEQ ID NO: 1041223 - RNA, 22 nt, Human
ggccucuggucaagacaagcau

SEQ ID NO: 1041224 - RNA, 22 nt, Human
ggcugccugccuccaagccggg

SEQ ID NO: 1041225 - RNA, 22 nt, Human
uaaagguagcaugaaacugcaa

SEQ ID NO: 1041226 - RNA, 22 nt, Human
aacuagaaaacaagaugcugau

SEQ ID NO: 1041227 - RNA, 22 nt, Human
cccugagagugagugccaccuu

SEQ ID NO: 1041228 - RNA, 22 nt, Human
gcacagccagcaucugagggau

SEQ ID NO: 1041229 - RNA, 23 nt, Human
cccagcuuucccacugccgagag

SEQ ID NO: 1041230 - RNA, 22 nt, Human
aucaguuucugugaagaacaca

SEQ ID NO: 1041231 - RNA, 22 nt, Human
gggcugccuuucuucugggagc

SEQ ID NO: 1041232 - RNA, 22 nt, Human
gggagguucuguucgcacuuga

SEQ ID NO: 1041233 - RNA, 22 nt, Human
uuucauguuuauggaaaaugag

SEQ ID NO: 1041234 - RNA, 22 nt, Human
gggauggcuuuguggcugacuc

SEQ ID NO: 1041235 - RNA, 22 nt, Human
gggagccuugggagugccagcc

SEQ ID NO: 1041236 - RNA, 22 nt, Human
gcugccuguccugaggaguccg

SEQ ID NO: 1041237 - RNA, 22 nt, Human
aagccagguuccauggaggagc

SEQ ID NO: 1041238 - RNA, 21 nt, Human
uugcaccaugauaaauucaga

SEQ ID NO: 1041239 - RNA, 22 nt, Human
uugaagcaugguacuuguucaa

SEQ ID NO: 1041240 - RNA, 22 nt, Human
uggaaagaauuccuaugguuca

SEQ ID NO: 1041241 - RNA, 22 nt, Human
aucaguuuuguucacuacuaua

SEQ ID NO: 1041242 - RNA, 22 nt, Human
aaaugucugagacuucugaacu

SEQ ID NO: 1041243 - RNA, 18 nt, Human
cucagggcaucagucugg

SEQ ID NO: 1041244 - RNA, 22 nt, Human
gaggcucugugaugugccaggc

SEQ ID NO: 1041245 - RNA, 22 nt, Human
cagagcagguaucuuuggugaa

SEQ ID NO: 1041246 - RNA, 22 nt, Human
gcacugcagccucagauggugg

SEQ ID NO: 1041247 - RNA, 22 nt, Human
gggccuggcaugcagccccguu

SEQ ID NO: 1041248 - RNA, 22 nt, Human
gagcagggagacaacucuggug

SEQ ID NO: 1041249 - RNA, 22 nt, Human
gcaagcaagcagguagagcuga

SEQ ID NO: 1041250 - RNA, 22 nt, Human
caaaugaagaaccuucucaccu

SEQ ID NO: 1041251 - RNA, 22 nt, Human
ucucccacgguacaggauaaac

SEQ ID NO: 1041252 - RNA, 22 nt, Human
gugucccaauguucaggacggc

SEQ ID NO: 1041253 - RNA, 19 nt, Human
auuuacugccuaaaaucuc

SEQ ID NO: 1041254 - RNA, 22 nt, Human
ucaaaugcaggucuggucuugg

SEQ ID NO: 1041255 - RNA, 22 nt, Human
acagccugagaguggagcuggc

SEQ ID NO: 1041256 - RNA, 22 nt, Human
gucacacuagggccaaguggag

SEQ ID NO: 1041257 - RNA, 22 nt, Human
cucaggaugcaggucacaggac

SEQ ID NO: 1041258 - RNA, 22 nt, Human
cugugcuugcggguguggagcc

SEQ ID NO: 1041259 - RNA, 22 nt, Human
agcagcucaaagccugcaagga

SEQ ID NO: 1041260 - RNA, 22 nt, Human
gaggacagcuuagggcuuccug

SEQ ID NO: 1041261 - RNA, 23 nt, Human
aagaauaaaugacauuaaaggug

SEQ ID NO: 1041262 - RNA, 22 nt, Human
gaggcugcugagagcccuguuu

SEQ ID NO: 1041263 - RNA, 18 nt, Human
aguggucuguuauaucau

SEQ ID NO: 1041264 - RNA, 22 nt, Human
ugcauauuuguaugauguuuag

SEQ ID NO: 1041265 - RNA, 22 nt, Human
uaaggcaccuguccaggcuggg

SEQ ID NO: 1041266 - RNA, 22 nt, Human
aggacugggugcagagggcauc

SEQ ID NO: 1041267 - RNA, 22 nt, Human
uugaacaguuuugucagguuca

SEQ ID NO: 1041268 - RNA, 22 nt, Human
ccagcagcuuuauuggcucucc

SEQ ID NO: 1041269 - RNA, 22 nt, Human
cacacaugucucuccaugcucu

SEQ ID NO: 1041270 - RNA, 22 nt, Human
aguacuucagaggcugcccagg

SEQ ID NO: 1041271 - RNA, 22 nt, Human
acguuuucagugacugugcuuc

SEQ ID NO: 1041272 - RNA, 22 nt, Human
gagggcagagucuaaugaugca

SEQ ID NO: 1041273 - RNA, 22 nt, Human
uucacaggaggguggaugcaug

SEQ ID NO: 1041274 - RNA, 22 nt, Human
cccagcccagcguucgaggggu

SEQ ID NO: 1041275 - RNA, 22 nt, Human
agcccaagcauaggagggaggc

SEQ ID NO: 1041276 - RNA, 22 nt, Human
ccaaaguccauaguuuacuuua

SEQ ID NO: 1041277 - RNA, 22 nt, Human
gccaggcuguggggaacuugaa

SEQ ID NO: 1041278 - RNA, 22 nt, Human
ucauccaguucacauggugagu

SEQ ID NO: 1041279 - RNA, 22 nt, Human
uggccuggcagagcaaggccug

SEQ ID NO: 1041280 - RNA, 22 nt, Human
acugucuguccugcucuccgug

SEQ ID NO: 1041281 - RNA, 22 nt, Human
gcauuauuaauagcugcaugag

SEQ ID NO: 1041282 - RNA, 22 nt, Human
ccagcugauucgguggugguug

SEQ ID NO: 1041283 - RNA, 22 nt, Human
agucucugugagcucccaaugg

SEQ ID NO: 1041284 - RNA, 22 nt, Human
gcccagccuccaagcuccaagg

SEQ ID NO: 1041285 - RNA, 22 nt, Human
agcugcucaggagagccagguc

SEQ ID NO: 1041286 - RNA, 19 nt, Human
caagugaagccugggaugg

SEQ ID NO: 1041287 - RNA, 22 nt, Human
cagcugcccauccugggaaaug

SEQ ID NO: 1041288 - RNA, 22 nt, Human
uggccugucuuguugugcuaga

SEQ ID NO: 1041289 - RNA, 22 nt, Human
uagacacauccguggaagcuuc

SEQ ID NO: 1041290 - RNA, 22 nt, Human
ucccagggugcgccugcccucg

SEQ ID NO: 1041291 - RNA, 21 nt, Human
gugucaugguugacuuuggca

SEQ ID NO: 1041292 - RNA, 22 nt, Human
gcagcugguuaaugggagaauu

SEQ ID NO: 1041293 - RNA, 21 nt, Human
aggucccagguuugggcagca

SEQ ID NO: 1041294 - RNA, 22 nt, Human
ugagcuuacgugggaacagacu

SEQ ID NO: 1041295 - RNA, 22 nt, Human
ucagagucucccccaguuuggg

SEQ ID NO: 1041296 - RNA, 18 nt, Human
cucucugggugaggacaa

SEQ ID NO: 1041297 - RNA, 22 nt, Human
agacagagauacuauguuguca

SEQ ID NO: 1041298 - RNA, 22 nt, Human
uggggugggcaugcgcuguccu

SEQ ID NO: 1041299 - RNA, 22 nt, Human
ggccagaaguuggaaaagagcc

SEQ ID NO: 1041300 - RNA, 22 nt, Human
gccucaggacuggcauacucau

SEQ ID NO: 1041301 - RNA, 18 nt, Human
ugugguggagcugccuuc

SEQ ID NO: 1041302 - RNA, 22 nt, Human
caggccuggguucaaaucccuu

SEQ ID NO: 1041303 - RNA, 22 nt, Human
gccagguggcugagugacugag

SEQ ID NO: 1041304 - RNA, 22 nt, Human
gcagagccugacgggauuuuuc

SEQ ID NO: 1041305 - RNA, 22 nt, Human
agagcugcaggguggacccagg

SEQ ID NO: 1041306 - RNA, 22 nt, Human
gcugagagcggccagcugggaa

SEQ ID NO: 1041307 - RNA, 23 nt, Human
ugcagccacucaggagcucagug

SEQ ID NO: 1041308 - RNA, 22 nt, Human
cuguagcaaguuauucaauaaa

SEQ ID NO: 1041309 - RNA, 22 nt, Human
agcuccuccugugccaggccag

SEQ ID NO: 1041310 - RNA, 22 nt, Human
agagacaggauaucugcucaug

SEQ ID NO: 1041311 - RNA, 22 nt, Human
cuuagaaauuguuacucauuca

SEQ ID NO: 1041312 - RNA, 22 nt, Human
aggcacugauucuguuuuccau

SEQ ID NO: 1041313 - RNA, 21 nt, Human
ccaggguccagcugccauggu

SEQ ID NO: 1041314 - RNA, 22 nt, Human
uccaguggcacuggagacuaga

SEQ ID NO: 1041315 - RNA, 22 nt, Human
guuuacaaauauuuuaaauggu

SEQ ID NO: 1041316 - RNA, 22 nt, Human
ggcucagguuaccagucccucc

SEQ ID NO: 1041317 - RNA, 17 nt, Human
gcugcagcgguaggcag

SEQ ID NO: 1041318 - RNA, 22 nt, Human
augcugaggacaaagagaucaa

SEQ ID NO: 1041319 - RNA, 22 nt, Human
agggaagagcuugcaagaaacc

SEQ ID NO: 1041320 - RNA, 22 nt, Human
uccuugaauccuagcauccuau

SEQ ID NO: 1041321 - RNA, 22 nt, Human
gucccuuggcucacaaacagcu

SEQ ID NO: 1041322 - RNA, 19 nt, Human
uggcagggagugauauuag

SEQ ID NO: 1041323 - RNA, 22 nt, Human
agccacagcauguguguaugua

SEQ ID NO: 1041324 - RNA, 22 nt, Human
agacagggucuugaucagagcu

SEQ ID NO: 1041325 - RNA, 19 nt, Human
cagaacagaggucauggcc

SEQ ID NO: 1041326 - RNA, 22 nt, Human
ugagcccaggaguuggaggcug

SEQ ID NO: 1041327 - RNA, 22 nt, Human
ggcgcuggccacgguggcucug

SEQ ID NO: 1041328 - RNA, 22 nt, Human
aguuuauagcccagauucaugg

SEQ ID NO: 1041329 - RNA, 22 nt, Human
ccuggaaggcaggcauggauug

SEQ ID NO: 1041330 - RNA, 21 nt, Human
auugaaagucaacaaucaguu

SEQ ID NO: 1041331 - RNA, 21 nt, Human
ccuucuccacagggucuccgg

SEQ ID NO: 1041332 - RNA, 18 nt, Human
agaguguucucagugaaa

SEQ ID NO: 1041333 - RNA, 22 nt, Human
cagagugaaaacugagcucaaa

SEQ ID NO: 1041334 - RNA, 22 nt, Human
agguggcuccucccauggcugg

SEQ ID NO: 1041335 - RNA, 22 nt, Human
uguaccuuuuucugugcaugcu

SEQ ID NO: 1041336 - RNA, 22 nt, Human
ucucuggagcugcagauccagg

SEQ ID NO: 1041337 - RNA, 22 nt, Human
ggcaggagcucuccaguuugcc

SEQ ID NO: 1041338 - RNA, 22 nt, Human
uaaaauguagcuucuaggcugg

SEQ ID NO: 1041339 - RNA, 21 nt, Human
cugccuugaaugguacuggga

SEQ ID NO: 1041340 - RNA, 22 nt, Human
uugggcaaaguguuucuggagc

SEQ ID NO: 1041341 - RNA, 22 nt, Human
cagcucuggcgucagggagcga

SEQ ID NO: 1041342 - RNA, 22 nt, Human
ugggcuccagcaccugugcucu

SEQ ID NO: 1041343 - RNA, 22 nt, Human
gucauuucuguuucuucagugc

SEQ ID NO: 1041344 - RNA, 22 nt, Human
auucuuggagcagucaaagaag

SEQ ID NO: 1041345 - RNA, 22 nt, Human
uuugcagcaaggagagagcauu

SEQ ID NO: 1041346 - RNA, 22 nt, Human
agccuggauccuaggcucagcu

SEQ ID NO: 1041347 - RNA, 22 nt, Human
cugggccucauccucagaguuu

SEQ ID NO: 1041348 - RNA, 22 nt, Human
gcucugcucuugacuuaccagg

SEQ ID NO: 1041349 - RNA, 22 nt, Human
aucccuggacggcgccucccca

SEQ ID NO: 1041350 - RNA, 22 nt, Human
agggcugcaucugccuggugaa

SEQ ID NO: 1041351 - RNA, 22 nt, Human
cucugguguccuuuagaauuua

SEQ ID NO: 1041352 - RNA, 22 nt, Human
guaacagaggguuugcagauau

SEQ ID NO: 1041353 - RNA, 22 nt, Human
gcugccugaucauacaccaggg

SEQ ID NO: 1041354 - RNA, 22 nt, Human
aucuacaggcugaggugggagg

SEQ ID NO: 1041355 - RNA, 22 nt, Human
gcaucuuucuguccauucagca

SEQ ID NO: 1041356 - RNA, 22 nt, Human
ggcagggguccugguguugacu

SEQ ID NO: 1041357 - RNA, 22 nt, Human
ugagccugcaauaagcacagcc

SEQ ID NO: 1041358 - RNA, 22 nt, Human
gaggagguuccggguggagaag

SEQ ID NO: 1041359 - RNA, 22 nt, Human
agccaagcacucaacuccugga

SEQ ID NO: 1041360 - RNA, 22 nt, Human
cagcugagucugagguucuuug

SEQ ID NO: 1041361 - RNA, 22 nt, Human
agccugagugcuuaggacuguu

SEQ ID NO: 1041362 - RNA, 22 nt, Human
ucucuucuuguguuuuccugcc

SEQ ID NO: 1041363 - RNA, 22 nt, Human
cauguacacucauguaacuaua

SEQ ID NO: 1041364 - RNA, 22 nt, Human
cugggugguuuugaugugaauu

SEQ ID NO: 1041365 - RNA, 22 nt, Human
aguggccagugcugcucugggg

SEQ ID NO: 1041366 - RNA, 22 nt, Human
uggacaggugagugacucaggg

SEQ ID NO: 1041367 - RNA, 22 nt, Human
aguucacauuccgagguacugg

SEQ ID NO: 1041368 - RNA, 22 nt, Human
ucacagggauggaauagaaaua

SEQ ID NO: 1041369 - RNA, 22 nt, Human
cagagggcucaguccugcugga

SEQ ID NO: 1041370 - RNA, 22 nt, Human
ugcugggggcuuucuggauacc

SEQ ID NO: 1041371 - RNA, 22 nt, Human
aggugccagugcuguggucccc

SEQ ID NO: 1041372 - RNA, 22 nt, Human
augggaugaacuugaucugcuu

SEQ ID NO: 1041373 - RNA, 22 nt, Human
ugaguagcggcuauguguaacu

SEQ ID NO: 1041374 - RNA, 22 nt, Human
ggauaagaaaauuguaauaacu

SEQ ID NO: 1041375 - RNA, 22 nt, Human
gaagcagcuagcccacuaguca

SEQ ID NO: 1041376 - RNA, 22 nt, Human
uggagcaggacugcugcccuca

SEQ ID NO: 1041377 - RNA, 22 nt, Human
ccagcccuugcugaaggguggc

SEQ ID NO: 1041378 - RNA, 22 nt, Human
cuguuuucaaagagagagaaug

SEQ ID NO: 1041379 - RNA, 22 nt, Human
gagcucagauucuggugucaga

SEQ ID NO: 1041380 - RNA, 22 nt, Human
cuccagggaggucugcaggacu

SEQ ID NO: 1041381 - RNA, 22 nt, Human
cagcaauauacacagucuaugg

SEQ ID NO: 1041382 - RNA, 22 nt, Human
ggccccaggaccuccacggucc

SEQ ID NO: 1041383 - RNA, 22 nt, Human
guguguccucaguaguggcaug

SEQ ID NO: 1041384 - RNA, 22 nt, Human
gcauuuaaauuugaacuucaga

SEQ ID NO: 1041385 - RNA, 22 nt, Human
agagcccuuucuccaggcaccu

SEQ ID NO: 1041386 - RNA, 22 nt, Human
agaguguuauuugcucuguauu

SEQ ID NO: 1041387 - RNA, 22 nt, Human
gcagggccuuagcagcggcugc

SEQ ID NO: 1041388 - RNA, 20 nt, Human
uguuucuuuuaaugagcggc

SEQ ID NO: 1041389 - RNA, 22 nt, Human
gagcucauccccaugguccguc

SEQ ID NO: 1041390 - RNA, 22 nt, Human
gcugguuagaaaacagagcuca

SEQ ID NO: 1041391 - RNA, 22 nt, Human
ugcccagcacugugccagucac

SEQ ID NO: 1041392 - RNA, 22 nt, Human
cuggcuccacucccugccugac

SEQ ID NO: 1041393 - RNA, 21 nt, Human
gcaaggcuuuuguguuuccca

SEQ ID NO: 1041394 - RNA, 22 nt, Human
cuucugugcuucacaguugcca

SEQ ID NO: 1041395 - RNA, 22 nt, Human
uucucuuauucuggauaugcag

SEQ ID NO: 1041396 - RNA, 22 nt, Human
uagaggugacacugagaccaua

SEQ ID NO: 1041397 - RNA, 22 nt, Human
gaggugaguggaucacgagguc

SEQ ID NO: 1041398 - RNA, 22 nt, Human
acccugccgugggcugcuugug

SEQ ID NO: 1041399 - RNA, 23 nt, Human
uggccuggagagaaaagaugagu

SEQ ID NO: 1041400 - RNA, 22 nt, Human
cagcacugcugcuguacacaca

SEQ ID NO: 1041401 - RNA, 22 nt, Human
aagccagguguuuaggccagcg

SEQ ID NO: 1041402 - RNA, 22 nt, Human
gugaggugggcuggccagagac

SEQ ID NO: 1041403 - RNA, 22 nt, Human
caggcugaggcaguaggguuug

SEQ ID NO: 1041404 - RNA, 21 nt, Human
ucugucugguuuuagaguggc

SEQ ID NO: 1041405 - RNA, 22 nt, Human
acuuagaacaggcagaauucca

SEQ ID NO: 1041406 - RNA, 22 nt, Human
auugacaagacaauggcucuua

SEQ ID NO: 1041407 - RNA, 22 nt, Human
gugggccucuugaggguggcua

SEQ ID NO: 1041408 - RNA, 22 nt, Human
cccucaggagaugucagcugga

SEQ ID NO: 1041409 - RNA, 22 nt, Human
gggcagcagaggaucccuuaau

SEQ ID NO: 1041410 - RNA, 22 nt, Human
uugcauaaaagaguauaucuua

SEQ ID NO: 1041411 - RNA, 22 nt, Human
cugcaagauuggaagaugcaau

SEQ ID NO: 1041412 - RNA, 22 nt, Human
guuuuuccugcugacuuggguc

SEQ ID NO: 1041413 - RNA, 22 nt, Human
gcaggaaagguugagacuuugc

SEQ ID NO: 1041414 - RNA, 22 nt, Human
aggggcugccuggcuuggcacu

SEQ ID NO: 1041415 - RNA, 22 nt, Human
ucauugcagcuucagguguuca

SEQ ID NO: 1041416 - RNA, 22 nt, Human
agggccuggaacuggagaccac

SEQ ID NO: 1041417 - RNA, 21 nt, Human
uagagaaaagaagcuguuccu

SEQ ID NO: 1041418 - RNA, 22 nt, Human
agagccaggaucuguuuugggg

SEQ ID NO: 1041419 - RNA, 22 nt, Human
ccaggaguuugaggcugcagug

SEQ ID NO: 1041420 - RNA, 22 nt, Human
aagcagccaccucaucuccacu

SEQ ID NO: 1041421 - RNA, 22 nt, Human
agcaguggcuggauggugugcu

SEQ ID NO: 1041422 - RNA, 22 nt, Human
agccugucugucuccaaagcug

SEQ ID NO: 1041423 - RNA, 22 nt, Human
uggcucugccacuaacuuggua

SEQ ID NO: 1041424 - RNA, 22 nt, Human
uacaaagugagcaaccucuuuu

SEQ ID NO: 1041425 - RNA, 22 nt, Human
accuggagucauuugaggagua

SEQ ID NO: 1041426 - RNA, 21 nt, Human
agggcagauuagcuguaagag

SEQ ID NO: 1041427 - RNA, 22 nt, Human
agacuucucaguuuuauuagua

SEQ ID NO: 1041428 - RNA, 22 nt, Human
uuaagucauuucugauuauaga

SEQ ID NO: 1041429 - RNA, 22 nt, Human
gcagugccuugcuucucugucu

SEQ ID NO: 1041430 - RNA, 22 nt, Human
ggcagcuguaagaugagugaau

SEQ ID NO: 1041431 - RNA, 22 nt, Human
ccacagggacuguuaaaacccu

SEQ ID NO: 1041432 - RNA, 22 nt, Human
agcugccaggccccugagaacc

SEQ ID NO: 1041433 - RNA, 17 nt, Human
uggcuucccugggccac

SEQ ID NO: 1041434 - RNA, 22 nt, Human
uagggcaguuucauguuaucuu

SEQ ID NO: 1041435 - RNA, 22 nt, Human
gcugggagcccuggucugcucc

SEQ ID NO: 1041436 - RNA, 23 nt, Human
ggguccagagacaggcaugggug

SEQ ID NO: 1041437 - RNA, 19 nt, Human
uggcagaggcaguuuguac

SEQ ID NO: 1041438 - RNA, 22 nt, Human
uagagcuagcuucaaaaugcga

SEQ ID NO: 1041439 - RNA, 22 nt, Human
guggaggagaggcgccuugcgg

SEQ ID NO: 1041440 - RNA, 22 nt, Human
gcuggccauucucuuugagaug

SEQ ID NO: 1041441 - RNA, 22 nt, Human
gccuggucucuuucaugucagu

SEQ ID NO: 1041442 - RNA, 19 nt, Human
cgcaggagccgaggugacc

SEQ ID NO: 1041443 - RNA, 22 nt, Human
gaagcccaggcuuccuuggcuu

SEQ ID NO: 1041444 - RNA, 22 nt, Human
aggcucagauccuuguguccug

SEQ ID NO: 1041445 - RNA, 22 nt, Human
uugucuguccaggcaccccaag

SEQ ID NO: 1041446 - RNA, 22 nt, Human
cuucaucaacucuaacaaaugu

SEQ ID NO: 1041447 - RNA, 22 nt, Human
agucccagcuucccccaugcag

SEQ ID NO: 1041448 - RNA, 22 nt, Human
ggcacugaucugauuucccucc

SEQ ID NO: 1041449 - RNA, 22 nt, Human
gcccugcugucuucagaguaua

SEQ ID NO: 1041450 - RNA, 22 nt, Human
cucuguccacagguuugucccu

SEQ ID NO: 1041451 - RNA, 22 nt, Human
gagaggccauggcugugcagug

SEQ ID NO: 1041452 - RNA, 22 nt, Human
acagagguaggacaugagauau

SEQ ID NO: 1041453 - RNA, 22 nt, Human
gcagcuggucuggccuagagua

SEQ ID NO: 1041454 - RNA, 22 nt, Human
uccucagggggccaacccagcc

SEQ ID NO: 1041455 - RNA, 23 nt, Human
aaagacugcugagaauuuuagga

SEQ ID NO: 1041456 - RNA, 22 nt, Human
gagccaggguuugaaacuagac

SEQ ID NO: 1041457 - RNA, 22 nt, Human
cagcucugaggaacacuccuuu

SEQ ID NO: 1041458 - RNA, 22 nt, Human
cuggcagcguguuuaugaacau

SEQ ID NO: 1041459 - RNA, 22 nt, Human
acauuucugagcagggagcugu

SEQ ID NO: 1041460 - RNA, 22 nt, Human
ccagcugcugugcagggaggcu

SEQ ID NO: 1041461 - RNA, 22 nt, Human
gguggguauugaauacaggugu

SEQ ID NO: 1041462 - RNA, 22 nt, Human
ggcuucauggaggaggugaguc

SEQ ID NO: 1041463 - RNA, 22 nt, Human
aggucacacaacugucagaggc

SEQ ID NO: 1041464 - RNA, 20 nt, Human
ugucaugcauuagaugaaga

SEQ ID NO: 1041465 - RNA, 22 nt, Human
uggagcagcaucacuuugagcu

SEQ ID NO: 1041466 - RNA, 22 nt, Human
uaucuuuagaggaagagaaucu

SEQ ID NO: 1041467 - RNA, 22 nt, Human
ugaagacacauacaagggaaug

SEQ ID NO: 1041468 - RNA, 22 nt, Human
gaagagcuauguccagggagca

SEQ ID NO: 1041469 - RNA, 22 nt, Human
cccagcacaggcaauuccauac

SEQ ID NO: 1041470 - RNA, 22 nt, Human
agcuuccuguugagagagggag

SEQ ID NO: 1041471 - RNA, 22 nt, Human
guccucugcccaggucaagguu

SEQ ID NO: 1041472 - RNA, 22 nt, Human
agcugcugcggaaagaugccac

SEQ ID NO: 1041473 - RNA, 22 nt, Human
ggcagccuccagggcacuggug

SEQ ID NO: 1041474 - RNA, 21 nt, Human
aaaaugugagcgugaugcuua

SEQ ID NO: 1041475 - RNA, 22 nt, Human
gaggcccuccagcugucagcug

SEQ ID NO: 1041476 - RNA, 22 nt, Human
auuucagcccaguaugagcccc

SEQ ID NO: 1041477 - RNA, 22 nt, Human
auccaguuuaugucauauucuu

SEQ ID NO: 1041478 - RNA, 22 nt, Human
aucaaaguccaucagaagguag

SEQ ID NO: 1041479 - RNA, 22 nt, Human
agcuggccuucggugucacugg

SEQ ID NO: 1041480 - RNA, 22 nt, Human
uuagcugcauuaucaaaguuau

SEQ ID NO: 1041481 - RNA, 22 nt, Human
uaagaacaucuguccccagauu

SEQ ID NO: 1041482 - RNA, 19 nt, Human
ggugaccaccuggucagug

SEQ ID NO: 1041483 - RNA, 23 nt, Human
ugccagaggcagucacaguggug

SEQ ID NO: 1041484 - RNA, 22 nt, Human
aaaugucuuugaguauuucugc

SEQ ID NO: 1041485 - RNA, 19 nt, Human
cugagcagcggcagcacuu

SEQ ID NO: 1041486 - RNA, 22 nt, Human
gcagcuggacccacacggcuua

SEQ ID NO: 1041487 - RNA, 22 nt, Human
ucacuuuugaucccuaugcagu

SEQ ID NO: 1041488 - RNA, 22 nt, Human
uuugcauugcauuaaguauucu

SEQ ID NO: 1041489 - RNA, 22 nt, Human
agcauuuaauuacaguuuaauu

SEQ ID NO: 1041490 - RNA, 22 nt, Human
ucaguuuuuaaaugauauaauu

SEQ ID NO: 1041491 - RNA, 22 nt, Human
gaagcccauuuguacagcacau

SEQ ID NO: 1041492 - RNA, 22 nt, Human
uggagcuggaauuucugggccu

SEQ ID NO: 1041493 - RNA, 22 nt, Human
ugcauauugugaaaauguagau

SEQ ID NO: 1041494 - RNA, 22 nt, Human
gagcagugagugaauguugccu

SEQ ID NO: 1041495 - RNA, 22 nt, Human
cccagcucucucaguucugcuu

SEQ ID NO: 1041496 - RNA, 22 nt, Human
cagcucaaguuucccaggucag

SEQ ID NO: 1041497 - RNA, 22 nt, Human
aucuggcucgcuaggcucuggg

SEQ ID NO: 1041498 - RNA, 22 nt, Human
ggccucucauguccugggcuuc

SEQ ID NO: 1041499 - RNA, 22 nt, Human
aaggaaagacauauaaaugacu

SEQ ID NO: 1041500 - RNA, 22 nt, Human
cagcuggcuggucagugcacaa

SEQ ID NO: 1041501 - RNA, 19 nt, Human
ggcucagggcgcugccgcc

SEQ ID NO: 1041502 - RNA, 22 nt, Human
gcagggcugcagagggcacugu

SEQ ID NO: 1041503 - RNA, 22 nt, Human
auucagcauaaucaguagcuug

SEQ ID NO: 1041504 - RNA, 22 nt, Human
uugcauugaaaauauauuuuaa

SEQ ID NO: 1041505 - RNA, 22 nt, Human
gccugcagauauauaggauggu

SEQ ID NO: 1041506 - RNA, 22 nt, Human
guguccagagaaacucacagcu

SEQ ID NO: 1041507 - RNA, 22 nt, Human
cuggacagaaagggcugcugug

SEQ ID NO: 1041508 - RNA, 20 nt, Human
gugcuucagaagccauugcu

SEQ ID NO: 1041509 - RNA, 21 nt, Human
uagaaaucagcuggugccucu

SEQ ID NO: 1041510 - RNA, 17 nt, Human
gguguauggggagggaa

SEQ ID NO: 1041511 - RNA, 22 nt, Human
uggccacccagcugacgccuuc

SEQ ID NO: 1041512 - RNA, 22 nt, Human
gcuggccauggggagugaggag

SEQ ID NO: 1041513 - RNA, 22 nt, Human
agagccugaggccaggaaaaug

SEQ ID NO: 1041514 - RNA, 22 nt, Human
cagaguccuggacacagagaca

SEQ ID NO: 1041515 - RNA, 22 nt, Human
gccucugcggggcccgagcccg

SEQ ID NO: 1041516 - RNA, 22 nt, Human
uaguuauuauuguuacuaucag

SEQ ID NO: 1041517 - RNA, 22 nt, Human
caauauucaguggaaaagccau

SEQ ID NO: 1041518 - RNA, 22 nt, Human
caggggacauuaaagcuccaua

SEQ ID NO: 1041519 - RNA, 21 nt, Human
ccugagccuguuuauccagaa

SEQ ID NO: 1041520 - RNA, 22 nt, Human
aaggguggauuucugagcucua

SEQ ID NO: 1041521 - RNA, 18 nt, Human
gguggcucagucaugggg

SEQ ID NO: 1041522 - RNA, 22 nt, Human
aagcagggugucuugacccaug

SEQ ID NO: 1041523 - RNA, 22 nt, Human
acagaggaaggcugagcugccc

SEQ ID NO: 1041524 - RNA, 22 nt, Human
aagcugccagauucagucugcu

SEQ ID NO: 1041525 - RNA, 22 nt, Human
guuguauucuucaauaucagag

SEQ ID NO: 1041526 - RNA, 22 nt, Human
auguacauuuuccuaauguuuu

SEQ ID NO: 1041527 - RNA, 23 nt, Human
acagagaucuugacuuguaugga

SEQ ID NO: 1041528 - RNA, 22 nt, Human
cauugaaaaacguugacugagu

SEQ ID NO: 1041529 - RNA, 22 nt, Human
aucuaggauuugaaugcacagu

SEQ ID NO: 1041530 - RNA, 22 nt, Human
uccagaguacggaagagucauc

SEQ ID NO: 1041531 - RNA, 22 nt, Human
acugcagggcauccuggccaag

SEQ ID NO: 1041532 - RNA, 22 nt, Human
ucacaggacccugaggguggcg

SEQ ID NO: 1041533 - RNA, 21 nt, Human
gcugcugccccuagugaggcc

SEQ ID NO: 1041534 - RNA, 22 nt, Human
gcaggugguccccguggagugg

SEQ ID NO: 1041535 - RNA, 22 nt, Human
augggaggcagacacuaaguuc

SEQ ID NO: 1041536 - RNA, 22 nt, Human
accaaggaagagauucucaguu

SEQ ID NO: 1041537 - RNA, 22 nt, Human
uacaaaugaccauagccacuua

SEQ ID NO: 1041538 - RNA, 18 nt, Human
uggcagcaggaagccauu

SEQ ID NO: 1041539 - RNA, 22 nt, Human
aggcugcagaacagucaggugc

SEQ ID NO: 1041540 - RNA, 22 nt, Human
aggcucagagagcuguguccau

SEQ ID NO: 1041541 - RNA, 17 nt, Human
aggcugcugggccaggg

SEQ ID NO: 1041542 - RNA, 22 nt, Human
cugcugcucagugucaucaugu

SEQ ID NO: 1041543 - RNA, 22 nt, Human
aaaugucuuuaucucauguaac

SEQ ID NO: 1041544 - RNA, 22 nt, Human
gucaaacaaauuaacauaucca

SEQ ID NO: 1041545 - RNA, 22 nt, Human
gcaggggcuaaggacacagaga

SEQ ID NO: 1041546 - RNA, 22 nt, Human
gguggcagcgucuaucugacau

SEQ ID NO: 1041547 - RNA, 22 nt, Human
cucagaaucugccaaguucagg

SEQ ID NO: 1041548 - RNA, 22 nt, Human
ucagcugccccaguggccccag

SEQ ID NO: 1041549 - RNA, 22 nt, Human
ucauugaauuucacagcuuuau

SEQ ID NO: 1041550 - RNA, 22 nt, Human
aaagauuugaguucugcuuaua

SEQ ID NO: 1041551 - RNA, 22 nt, Human
ucuuuccuuagaauaauucuuu

SEQ ID NO: 1041552 - RNA, 22 nt, Human
cagaggccuauccaguguccau

SEQ ID NO: 1041553 - RNA, 22 nt, Human
ggcagggucuggacugaaagcu

SEQ ID NO: 1041554 - RNA, 22 nt, Human
gggcauggugaugugcaccugu

SEQ ID NO: 1041555 - RNA, 22 nt, Human
auaugugugaugcauggacuaa

SEQ ID NO: 1041556 - RNA, 22 nt, Human
gcugucagugaggugagacaug

SEQ ID NO: 1041557 - RNA, 20 nt, Human
gucucaaguaucucacaguc

SEQ ID NO: 1041558 - RNA, 22 nt, Human
cauaacuagagugaaauguuga

SEQ ID NO: 1041559 - RNA, 22 nt, Human
cacugaagaugcgacuagugcu

SEQ ID NO: 1041560 - RNA, 22 nt, Human
uuccauuuauucuuguccagau

SEQ ID NO: 1041561 - RNA, 22 nt, Human
ggccugagucccaccuggcugu

SEQ ID NO: 1041562 - RNA, 18 nt, Human
cugaaggauccaggugua

SEQ ID NO: 1041563 - RNA, 22 nt, Human
uguacaguguagucaugagguu

SEQ ID NO: 1041564 - RNA, 22 nt, Human
ugggggucaggaugaggccuug

SEQ ID NO: 1041565 - RNA, 22 nt, Human
gccagggcucgcggucccucgu

SEQ ID NO: 1041566 - RNA, 22 nt, Human
uggcagcaguggagguagaaag

SEQ ID NO: 1041567 - RNA, 22 nt, Human
gcugcugcgcuugucuacuguu

SEQ ID NO: 1041568 - RNA, 22 nt, Human
acauuucucagguaagucauuu

SEQ ID NO: 1041569 - RNA, 22 nt, Human
ugggcugcacccucagccucug

SEQ ID NO: 1041570 - RNA, 22 nt, Human
acagggccucagccagggcaga

SEQ ID NO: 1041571 - RNA, 22 nt, Human
ucaugcaaggcugaaacauggu

SEQ ID NO: 1041572 - RNA, 22 nt, Human
ugucucugugacuccuuccgcc

SEQ ID NO: 1041573 - RNA, 22 nt, Human
cauugaaauauggaaacugaug

SEQ ID NO: 1041574 - RNA, 22 nt, Human
gcccucucuucugcagccucca

SEQ ID NO: 1041575 - RNA, 22 nt, Human
cccagccuggugcacugugggg

SEQ ID NO: 1041576 - RNA, 22 nt, Human
gccggggcuggggagagacaug

SEQ ID NO: 1041577 - RNA, 22 nt, Human
ggaucauuaacacauccaucac

SEQ ID NO: 1041578 - RNA, 18 nt, Human
cuccagggaacucaguca

SEQ ID NO: 1041579 - RNA, 22 nt, Human
ugcugggcuagaagcugaggcc

SEQ ID NO: 1041580 - RNA, 22 nt, Human
acagggcaccugagguaggaag

SEQ ID NO: 1041581 - RNA, 22 nt, Human
agagugaaguuuuugaaaguga

SEQ ID NO: 1041582 - RNA, 22 nt, Human
acagguggggaggcugagguuc

SEQ ID NO: 1041583 - RNA, 22 nt, Human
agcagcaggagccgugggguga

SEQ ID NO: 1041584 - RNA, 22 nt, Human
ugagcccuaagggucaagcagg

SEQ ID NO: 1041585 - RNA, 22 nt, Human
uagcagggucucaggagucagg

SEQ ID NO: 1041586 - RNA, 22 nt, Human
ccaggccuguguuguguggagg

SEQ ID NO: 1041587 - RNA, 22 nt, Human
gcuguggccaacaaaccacuuu

SEQ ID NO: 1041588 - RNA, 22 nt, Human
uggcagagaaccugggcuuugu

SEQ ID NO: 1041589 - RNA, 22 nt, Human
auugucugaauccaaagcucug

SEQ ID NO: 1041590 - RNA, 22 nt, Human
cugccuggguucaaguccuguu

SEQ ID NO: 1041591 - RNA, 22 nt, Human
uggcugaaucugcagcaggaag

SEQ ID NO: 1041592 - RNA, 22 nt, Human
aggacaggauugagcugaacug

SEQ ID NO: 1041593 - RNA, 22 nt, Human
agaaagaacguugguuaucuua

SEQ ID NO: 1041594 - RNA, 22 nt, Human
gugugcagugagcaaaagaucu

SEQ ID NO: 1041595 - RNA, 22 nt, Human
ugggcagaggacagggaagauc

SEQ ID NO: 1041596 - RNA, 22 nt, Human
cacuggggaaaacaggcuucuu

SEQ ID NO: 1041597 - RNA, 22 nt, Human
ccagcugguguuccuuaggacc

SEQ ID NO: 1041598 - RNA, 22 nt, Human
ggggcagcucccgagggcagga

SEQ ID NO: 1041599 - RNA, 22 nt, Human
uggccugggccggcagauauac

SEQ ID NO: 1041600 - RNA, 22 nt, Human
acaugcauucucuaaaagcaaa

SEQ ID NO: 1041601 - RNA, 22 nt, Human
uuucucaucuggaaacagugcu

SEQ ID NO: 1041602 - RNA, 22 nt, Human
cuggagagggagcccuggcagu

SEQ ID NO: 1041603 - RNA, 22 nt, Human
caaaugcaaaauauaacccugu

SEQ ID NO: 1041604 - RNA, 22 nt, Human
gccuggcccagggcuccgcagg

SEQ ID NO: 1041605 - RNA, 22 nt, Human
gcagguggcagaggugggaucu

SEQ ID NO: 1041606 - RNA, 22 nt, Human
aaaaugcaugagaaugugcucg

SEQ ID NO: 1041607 - RNA, 22 nt, Human
gcagugggaagguuggcacaug

SEQ ID NO: 1041608 - RNA, 22 nt, Human
acagggccaggugagaggugcu

SEQ ID NO: 1041609 - RNA, 22 nt, Human
cuggggcugcagcgaucuucau

SEQ ID NO: 1041610 - RNA, 22 nt, Human
acagugaaugcccaagaaaagu

SEQ ID NO: 1041611 - RNA, 22 nt, Human
cugcccugccuggccagugugg

SEQ ID NO: 1041612 - RNA, 22 nt, Human
ggucagggggaucugugaggua

SEQ ID NO: 1041613 - RNA, 23 nt, Human
ccugugugcccuuaauucacagc

SEQ ID NO: 1041614 - RNA, 22 nt, Human
aguagaaagaaggcacugggcc

SEQ ID NO: 1041615 - RNA, 22 nt, Human
ucucagggcagcaaggaagcau

SEQ ID NO: 1041616 - RNA, 22 nt, Human
uguuacacagcagaauagcaag

SEQ ID NO: 1041617 - RNA, 22 nt, Human
caagagcuacccugugccauau

SEQ ID NO: 1041618 - RNA, 22 nt, Human
gccucacugcagccccaggaag

SEQ ID NO: 1041619 - RNA, 22 nt, Human
acauuugaggauguuaagaaug

SEQ ID NO: 1041620 - RNA, 22 nt, Human
cagggccaugaggcacaggguc

SEQ ID NO: 1041621 - RNA, 22 nt, Human
gagcacaggcuuugguggacac

SEQ ID NO: 1041622 - RNA, 22 nt, Human
ggugggcacccgagacuggauc

SEQ ID NO: 1041623 - RNA, 22 nt, Human
ggucaggggcugcucuacagag

SEQ ID NO: 1041624 - RNA, 21 nt, Human
acagaacuguauagugauaaa

SEQ ID NO: 1041625 - RNA, 22 nt, Human
gagcacagaaucuucccaugca

SEQ ID NO: 1041626 - RNA, 22 nt, Human
accccagcucugagccacacca

SEQ ID NO: 1041627 - RNA, 22 nt, Human
cggggacacacuggcagcuccu

SEQ ID NO: 1041628 - RNA, 22 nt, Human
gaaggaaaacagaucugccuga

SEQ ID NO: 1041629 - RNA, 20 nt, Human
gccugcagguuggaugggau

SEQ ID NO: 1041630 - RNA, 22 nt, Human
cauugcacgggcgucugucugu

SEQ ID NO: 1041631 - RNA, 22 nt, Human
aaggccaggacaccaggggacu

SEQ ID NO: 1041632 - RNA, 22 nt, Human
ucugaggcauacccaggccccc

SEQ ID NO: 1041633 - RNA, 22 nt, Human
gcccagcuuuuugaggcaggca

SEQ ID NO: 1041634 - RNA, 22 nt, Human
agaggcaguauacaauccgagc

SEQ ID NO: 1041635 - RNA, 22 nt, Human
caguagcauguaauaaagacag

SEQ ID NO: 1041636 - RNA, 22 nt, Human
uggcucucagcucccagcagcc

SEQ ID NO: 1041637 - RNA, 21 nt, Human
ugcagccauucagcccuaugc

SEQ ID NO: 1041638 - RNA, 22 nt, Human
gaaaggugccccauaggcagga

SEQ ID NO: 1041639 - RNA, 22 nt, Human
uuugcauuucucguaaggaaac

SEQ ID NO: 1041640 - RNA, 22 nt, Human
acagagcugggugcccccugga

SEQ ID NO: 1041641 - RNA, 22 nt, Human
gcucccagcauugcugcugaau

SEQ ID NO: 1041642 - RNA, 22 nt, Human
cccacucuggcucccuucuagu

SEQ ID NO: 1041643 - RNA, 22 nt, Human
aauguguacuuuuucaugcuca

SEQ ID NO: 1041644 - RNA, 22 nt, Human
uucagagaugacaccugguguu

SEQ ID NO: 1041645 - RNA, 22 nt, Human
gcagagccaugggagguuuuug

SEQ ID NO: 1041646 - RNA, 22 nt, Human
ucuuccaguguagacaucugcc

SEQ ID NO: 1041647 - RNA, 22 nt, Human
uuguuuuggaagaacuuacucu

SEQ ID NO: 1041648 - RNA, 22 nt, Human
ugggccuggaguuuguccagag

SEQ ID NO: 1041649 - RNA, 22 nt, Human
cuggagccuagguugaccuggg

SEQ ID NO: 1041650 - RNA, 22 nt, Human
aggcuucuuagauuggcuggag

SEQ ID NO: 1041651 - RNA, 22 nt, Human
ccucagagguuuucauucugua

SEQ ID NO: 1041652 - RNA, 22 nt, Human
guccagggaaauagcgacaggg

SEQ ID NO: 1041653 - RNA, 22 nt, Human
aaggcccuggcaggaagcagga

SEQ ID NO: 1041654 - RNA, 22 nt, Human
ucucagagagcuguguuuuccu

SEQ ID NO: 1041655 - RNA, 22 nt, Human
uguacaguaggaacuuguuauu

SEQ ID NO: 1041656 - RNA, 22 nt, Human
gcugccaugguccaggcuccag

SEQ ID NO: 1041657 - RNA, 22 nt, Human
agagccacugggagacagagca

SEQ ID NO: 1041658 - RNA, 22 nt, Human
acuugauuuugaaccuuucuac

SEQ ID NO: 1041659 - RNA, 22 nt, Human
uugcauugugauuacagaggug

SEQ ID NO: 1041660 - RNA, 22 nt, Human
gcugggagcaaagccaugcaua

SEQ ID NO: 1041661 - RNA, 22 nt, Human
cccuguccuuggcugugaggcu

SEQ ID NO: 1041662 - RNA, 22 nt, Human
uuaguaauguguuaauaugaau

SEQ ID NO: 1041663 - RNA, 19 nt, Human
ccaggccuccugggagguc

SEQ ID NO: 1041664 - RNA, 22 nt, Human
cauuuucucaaugaacccucuu

SEQ ID NO: 1041665 - RNA, 22 nt, Human
uguguauuaccauuuuacagcu

SEQ ID NO: 1041666 - RNA, 17 nt, Human
gcuuccugugcugggga

SEQ ID NO: 1041667 - RNA, 22 nt, Human
uagggcagagcuuguacacgau

SEQ ID NO: 1041668 - RNA, 20 nt, Human
aggcucagagcaguaguaca

SEQ ID NO: 1041669 - RNA, 22 nt, Human
gcagcugagcgugaggaagagu

SEQ ID NO: 1041670 - RNA, 22 nt, Human
uuuauucuugagagugagaaga

SEQ ID NO: 1041671 - RNA, 22 nt, Human
gcuggccagggcugcucgcgga

SEQ ID NO: 1041672 - RNA, 22 nt, Human
agggaaaggcugaugcuguggg

SEQ ID NO: 1041673 - RNA, 22 nt, Human
cggcagagacggcgcuuugaac

SEQ ID NO: 1041674 - RNA, 22 nt, Human
ugucauugaggaaaacuaggug

SEQ ID NO: 1041675 - RNA, 22 nt, Human
gagagugagauaauuucacaua

SEQ ID NO: 1041676 - RNA, 22 nt, Human
cugagaaggaagccuccacucu

SEQ ID NO: 1041677 - RNA, 22 nt, Human
uccugggccuguacuccauccg

SEQ ID NO: 1041678 - RNA, 22 nt, Human
ggcucuggugaggguaggagau

SEQ ID NO: 1041679 - RNA, 22 nt, Human
agagaggcgaguuaccugugcu

SEQ ID NO: 1041680 - RNA, 22 nt, Human
cagcucugcugggaggaugcag

SEQ ID NO: 1041681 - RNA, 18 nt, Human
aaaaugcaggcgacaugg

SEQ ID NO: 1041682 - RNA, 20 nt, Human
uccucagaagacauuugggg

SEQ ID NO: 1041683 - RNA, 22 nt, Human
guggccaggccgacugccaggc

SEQ ID NO: 1041684 - RNA, 22 nt, Human
uccuucagucuucugagccaua

SEQ ID NO: 1041685 - RNA, 22 nt, Human
aguguacauguuuacagcaucu

SEQ ID NO: 1041686 - RNA, 22 nt, Human
ggagcagagcucuucaucugca

SEQ ID NO: 1041687 - RNA, 22 nt, Human
ccucccucuguuagagcugucu

SEQ ID NO: 1041688 - RNA, 22 nt, Human
uggccuuggacagagcgcuccu

SEQ ID NO: 1041689 - RNA, 22 nt, Human
cugcaggcugagcgccugccgg

SEQ ID NO: 1041690 - RNA, 20 nt, Human
gccugagcuauugccaggau

SEQ ID NO: 1041691 - RNA, 22 nt, Human
ucaccacugaacagaccuuugg

SEQ ID NO: 1041692 - RNA, 22 nt, Human
augcacccagugucuggacuau

SEQ ID NO: 1041693 - RNA, 21 nt, Human
cccagggaagccgcagucacc

SEQ ID NO: 1041694 - RNA, 22 nt, Human
ggaagagccuggggugucaggc

SEQ ID NO: 1041695 - RNA, 22 nt, Human
cucucuucccgugaguguugca

SEQ ID NO: 1041696 - RNA, 22 nt, Human
gcuggggaggcagcagagaaca

SEQ ID NO: 1041697 - RNA, 22 nt, Human
aaguucaaggugauaguggcag

SEQ ID NO: 1041698 - RNA, 22 nt, Human
ucucagaguuccucuggagucc

SEQ ID NO: 1041699 - RNA, 22 nt, Human
cuuauaguaugauguugagaau

SEQ ID NO: 1041700 - RNA, 19 nt, Human
cuggugcuugagugaguca

SEQ ID NO: 1041701 - RNA, 22 nt, Human
agcucccagagcucgagaguaa

SEQ ID NO: 1041702 - RNA, 22 nt, Human
gccccuggcuggccagcuccuc

SEQ ID NO: 1041703 - RNA, 22 nt, Human
acagauauaugauuguguaaau

SEQ ID NO: 1041704 - RNA, 18 nt, Human
aggcacagagcauacaua

SEQ ID NO: 1041705 - RNA, 21 nt, Human
guggccugauuaugaaugggu

SEQ ID NO: 1041706 - RNA, 22 nt, Human
cuguagccaguuuggccucacc

SEQ ID NO: 1041707 - RNA, 20 nt, Human
ucugucucugagcuagacuu

SEQ ID NO: 1041708 - RNA, 22 nt, Human
aagccucuggggccucaucugu

SEQ ID NO: 1041709 - RNA, 22 nt, Human
ccugucaguugcugucagggau

SEQ ID NO: 1041710 - RNA, 22 nt, Human
cugacucagcagcugaugaucc

SEQ ID NO: 1041711 - RNA, 22 nt, Human
ccucugcucugguccaugugcu

SEQ ID NO: 1041712 - RNA, 22 nt, Human
ugaacagaucaauagaacugac

SEQ ID NO: 1041713 - RNA, 22 nt, Human
caggcagcgcucguggccuggc

SEQ ID NO: 1041714 - RNA, 22 nt, Human
uggcagaggcucugugauguug

SEQ ID NO: 1041715 - RNA, 22 nt, Human
gagagaagaauguuccgaggcc

SEQ ID NO: 1041716 - RNA, 22 nt, Human
ugcucugggcaacagccucccu

SEQ ID NO: 1041717 - RNA, 20 nt, Human
uaugaagauaugugaacagc

SEQ ID NO: 1041718 - RNA, 22 nt, Human
uguggcugcucaggugcagacc

SEQ ID NO: 1041719 - RNA, 22 nt, Human
cagggaguuuuuguuccucuag

SEQ ID NO: 1041720 - RNA, 22 nt, Human
agggaaaguaagcauuucauua

SEQ ID NO: 1041721 - RNA, 22 nt, Human
uucaagauaauaggaaugaaaa

SEQ ID NO: 1041722 - RNA, 22 nt, Human
agagaugucgccuugcccaggg

SEQ ID NO: 1041723 - RNA, 22 nt, Human
aggcagagaaaaaccagauaug

SEQ ID NO: 1041724 - RNA, 22 nt, Human
aggcuuccgaguagcugggacu

SEQ ID NO: 1041725 - RNA, 22 nt, Human
uggcccgaccucugcucaugca

SEQ ID NO: 1041726 - RNA, 20 nt, Human
gcagcugcccccagucccug

SEQ ID NO: 1041727 - RNA, 23 nt, Human
ugaugggaaggaacgacuaccac

SEQ ID NO: 1041728 - RNA, 21 nt, Human
uaucuacuggugucuuucaga

SEQ ID NO: 1041729 - RNA, 22 nt, Human
uugcaccaaaugaguuaaaauu

SEQ ID NO: 1041730 - RNA, 22 nt, Human
gcucuggacuggggccugagaa

SEQ ID NO: 1041731 - RNA, 22 nt, Human
uuucacaaugcaauccuacuuc

SEQ ID NO: 1041732 - RNA, 22 nt, Human
aucaguuuauacuuauaaaucu

SEQ ID NO: 1041733 - RNA, 22 nt, Human
uccugccucaggcucuggagua

SEQ ID NO: 1041734 - RNA, 19 nt, Human
uguguaaagucugugguca

SEQ ID NO: 1041735 - RNA, 22 nt, Human
uaaauguauaggcacuaaaccu

SEQ ID NO: 1041736 - RNA, 22 nt, Human
ugggacagugugccuugcuccu

SEQ ID NO: 1041737 - RNA, 21 nt, Human
agucccaggggugagugaugu

SEQ ID NO: 1041738 - RNA, 22 nt, Human
ucccagagugagccaggggcag

SEQ ID NO: 1041739 - RNA, 22 nt, Human
gccucugcccuccugggacugc

SEQ ID NO: 1041740 - RNA, 22 nt, Human
agucucugccagcuuguccucu

SEQ ID NO: 1041741 - RNA, 22 nt, Human
cagggccucauccucagagauu

SEQ ID NO: 1041742 - RNA, 21 nt, Human
gcagccagccgagaccaugcc

SEQ ID NO: 1041743 - RNA, 22 nt, Human
uggcagaguucgcuccuauuca

SEQ ID NO: 1041744 - RNA, 22 nt, Human
caguuuuugccauuaagaguaa

SEQ ID NO: 1041745 - RNA, 22 nt, Human
gagcagugguugaacagaggca

SEQ ID NO: 1041746 - RNA, 22 nt, Human
ggcagaggagcuggaaacaugg

SEQ ID NO: 1041747 - RNA, 22 nt, Human
aggccugggcaagaaggggcgu

SEQ ID NO: 1041748 - RNA, 22 nt, Human
accucccagcucugagcuuggg

SEQ ID NO: 1041749 - RNA, 22 nt, Human
ugucacauguguggcauuuuuc

SEQ ID NO: 1041750 - RNA, 22 nt, Human
ugcugccuucuaggcgugcccu

SEQ ID NO: 1041751 - RNA, 22 nt, Human
cagccagggucaggcagcuucu

SEQ ID NO: 1041752 - RNA, 22 nt, Human
cagagguauugcaaaagccuag

SEQ ID NO: 1041753 - RNA, 22 nt, Human
aaacagcugucauuguuuuaaa

SEQ ID NO: 1041754 - RNA, 22 nt, Human
uuugcauuauauuuauagaaga

SEQ ID NO: 1041755 - RNA, 22 nt, Human
aacaucagaauauccauguugg

SEQ ID NO: 1041756 - RNA, 22 nt, Human
uuuauuugucuugccauuuagu

SEQ ID NO: 1041757 - RNA, 22 nt, Human
ccuccugguccagcaucucuuu

SEQ ID NO: 1041758 - RNA, 18 nt, Human
ugucauugccagggaagc

SEQ ID NO: 1041759 - RNA, 22 nt, Human
aaaugcacaggagaaccaauuc

SEQ ID NO: 1041760 - RNA, 22 nt, Human
agccagagcugaugucauucuc

SEQ ID NO: 1041761 - RNA, 22 nt, Human
agcagcagaggucagaaaggua

SEQ ID NO: 1041762 - RNA, 22 nt, Human
ugucccaguuuugcagguuaga

SEQ ID NO: 1041763 - RNA, 22 nt, Human
agauguaguagugggucuuuua

SEQ ID NO: 1041764 - RNA, 22 nt, Human
gguggccucucaugcaagguag

SEQ ID NO: 1041765 - RNA, 20 nt, Human
uauaacaguguugggugugu

SEQ ID NO: 1041766 - RNA, 22 nt, Human
ucaggcugugggcacuggccau

SEQ ID NO: 1041767 - RNA, 22 nt, Human
cuggagccccaggcugugcaga

SEQ ID NO: 1041768 - RNA, 22 nt, Human
gguuggaggugggaauagcuag

SEQ ID NO: 1041769 - RNA, 22 nt, Human
ugcagaagcugcaggucagugg

SEQ ID NO: 1041770 - RNA, 22 nt, Human
cagggugcagugucgcugcuag

SEQ ID NO: 1041771 - RNA, 22 nt, Human
gagcugucuggggacucugggu

SEQ ID NO: 1041772 - RNA, 22 nt, Human
uagggcaggugaagaaaagcua

SEQ ID NO: 1041773 - RNA, 22 nt, Human
gagcucagcccaaagagcagug

SEQ ID NO: 1041774 - RNA, 22 nt, Human
ccagagcaauucucacagaacu

SEQ ID NO: 1041775 - RNA, 22 nt, Human
agcagggccucuggcacugguc

SEQ ID NO: 1041776 - RNA, 22 nt, Human
agccuguggaucccugcacugg

SEQ ID NO: 1041777 - RNA, 22 nt, Human
agccacagcaacaagugcaauu

SEQ ID NO: 1041778 - RNA, 19 nt, Human
acagaaauuaguuauuuuc

SEQ ID NO: 1041779 - RNA, 22 nt, Human
uuagaaacccagacucuuaggu

SEQ ID NO: 1041780 - RNA, 18 nt, Human
gaaaggagagacaguagg

SEQ ID NO: 1041781 - RNA, 22 nt, Human
guuugauucaagaacaaagagu

SEQ ID NO: 1041782 - RNA, 22 nt, Human
gagaaguuucugguuugcauag

SEQ ID NO: 1041783 - RNA, 22 nt, Human
uugaacauuaacuucagucuau

SEQ ID NO: 1041784 - RNA, 22 nt, Human
guggccagaagacugcaaugcu

SEQ ID NO: 1041785 - RNA, 22 nt, Human
cccagggacagcuagguggggc

SEQ ID NO: 1041786 - RNA, 22 nt, Human
uucaagaugacccagucacacg

SEQ ID NO: 1041787 - RNA, 22 nt, Human
ccagcccuccuccaucagagga

SEQ ID NO: 1041788 - RNA, 22 nt, Human
acuggcucagaguuccuagaga

SEQ ID NO: 1041789 - RNA, 20 nt, Human
cuguccccgaggucaccagg

SEQ ID NO: 1041790 - RNA, 22 nt, Human
ggccugagaaccauggggccaa

SEQ ID NO: 1041791 - RNA, 22 nt, Human
ggacacaagcuccggggcugca

SEQ ID NO: 1041792 - RNA, 22 nt, Human
ugguacuuggaggcagaaaaau

SEQ ID NO: 1041793 - RNA, 22 nt, Human
uauuucugggaguucagaaauu

SEQ ID NO: 1041794 - RNA, 22 nt, Human
guuugcauguguacuuaauugg

SEQ ID NO: 1041795 - RNA, 22 nt, Human
ccacagcaugcaggccugacac

SEQ ID NO: 1041796 - RNA, 22 nt, Human
gagugugggcacgggggccuug

SEQ ID NO: 1041797 - RNA, 22 nt, Human
augggggccugaacaggcaaaa

SEQ ID NO: 1041798 - RNA, 22 nt, Human
ccucaggggugcccacagcugc

SEQ ID NO: 1041799 - RNA, 22 nt, Human
cccucugcucaggugcauaggc

SEQ ID NO: 1041800 - RNA, 22 nt, Human
cauauaaauacaacauguguua

SEQ ID NO: 1041801 - RNA, 22 nt, Human
gaugugggguugagggaccagc

SEQ ID NO: 1041802 - RNA, 22 nt, Human
ucucagagaugucaagagucua

SEQ ID NO: 1041803 - RNA, 22 nt, Human
uucauucccaagaguaaacaua

SEQ ID NO: 1041804 - RNA, 22 nt, Human
cccagcuccgagcuccgagccg

SEQ ID NO: 1041805 - RNA, 17 nt, Human
cagggcugucugccuag

SEQ ID NO: 1041806 - RNA, 22 nt, Human
ggcugccaggagggaggccagu

SEQ ID NO: 1041807 - RNA, 22 nt, Human
uccugcugagcgucugucauuu

SEQ ID NO: 1041808 - RNA, 22 nt, Human
agcugcaggcccaugcucaguc

SEQ ID NO: 1041809 - RNA, 22 nt, Human
ucucagagcuucagaaagcacc

SEQ ID NO: 1041810 - RNA, 22 nt, Human
auauuucuccaaauguuuucaa

SEQ ID NO: 1041811 - RNA, 22 nt, Human
uagggcagcugcaucaggcacu

SEQ ID NO: 1041812 - RNA, 22 nt, Human
gcucccugccuacacggaccuu

SEQ ID NO: 1041813 - RNA, 22 nt, Human
cugaaggaagcagguggccugu

SEQ ID NO: 1041814 - RNA, 22 nt, Human
aaguuacaggagaaagagauca

SEQ ID NO: 1041815 - RNA, 22 nt, Human
uaugcauaugaccccaagcuug

SEQ ID NO: 1041816 - RNA, 22 nt, Human
ggcuuccuggggccuccugcaa

SEQ ID NO: 1041817 - RNA, 22 nt, Human
cugcaggcaucuaacugugggc

SEQ ID NO: 1041818 - RNA, 19 nt, Human
gcuuuuuguugucaaaggu

SEQ ID NO: 1041819 - RNA, 22 nt, Human
ugucccuggaacuauggcucca

SEQ ID NO: 1041820 - RNA, 22 nt, Human
guguggcuaccucagaggagca

SEQ ID NO: 1041821 - RNA, 22 nt, Human
acccugggcuuggccugcucag

SEQ ID NO: 1041822 - RNA, 22 nt, Human
aggaccuguagggccugcaucc

SEQ ID NO: 1041823 - RNA, 22 nt, Human
caggcagccugcggucugcaca

SEQ ID NO: 1041824 - RNA, 22 nt, Human
cauggcagagaaggggaacugg

SEQ ID NO: 1041825 - RNA, 22 nt, Human
aggccucuucagggagcaugga

SEQ ID NO: 1041826 - RNA, 22 nt, Human
ccagcucugcagggccuggggu

SEQ ID NO: 1041827 - RNA, 22 nt, Human
ucucaagcuuguugguauguuu

SEQ ID NO: 1041828 - RNA, 22 nt, Human
agcuggguguguaucagauaaa

SEQ ID NO: 1041829 - RNA, 22 nt, Human
cccaggcugaguuagagguguc

SEQ ID NO: 1041830 - RNA, 22 nt, Human
auuuucugguugagguuuaaca

SEQ ID NO: 1041831 - RNA, 22 nt, Human
gccugagcccaggugugcagag

SEQ ID NO: 1041832 - RNA, 22 nt, Human
ggucacugcucuaaacaaaagu

SEQ ID NO: 1041833 - RNA, 22 nt, Human
ugucucaggggcauugaaauaa

SEQ ID NO: 1041834 - RNA, 18 nt, Human
cagaagcaggcagugcag

SEQ ID NO: 1041835 - RNA, 22 nt, Human
ucaaauaugugauagaagcuaa

SEQ ID NO: 1041836 - RNA, 22 nt, Human
ugggggugugccagggaccucc

SEQ ID NO: 1041837 - RNA, 22 nt, Human
ugcagcuguuacggacccuguc

SEQ ID NO: 1041838 - RNA, 22 nt, Human
ugcaauaaguuguguuaucacu

SEQ ID NO: 1041839 - RNA, 22 nt, Human
gagccuguguuuccuguagcca

SEQ ID NO: 1041840 - RNA, 20 nt, Human
acuggagccaucucagccua

SEQ ID NO: 1041841 - RNA, 22 nt, Human
cuguuuaucuaggaguugcagg

SEQ ID NO: 1041842 - RNA, 22 nt, Human
uugaggagucaggggcacggaa

SEQ ID NO: 1041843 - RNA, 23 nt, Human
acugagccagggccugggucagc

SEQ ID NO: 1041844 - RNA, 22 nt, Human
gcugucuggguugagggcccug

SEQ ID NO: 1041845 - RNA, 22 nt, Human
auucuucauguugaagcuguca

SEQ ID NO: 1041846 - RNA, 22 nt, Human
ucagagagccucaggcacugcc

SEQ ID NO: 1041847 - RNA, 22 nt, Human
gugcaugugcauccauguguac

SEQ ID NO: 1041848 - RNA, 22 nt, Human
gggccugacugagagcuccuca

SEQ ID NO: 1041849 - RNA, 23 nt, Human
gguggcaggaguggaugcugagc

SEQ ID NO: 1041850 - RNA, 22 nt, Human
ggccagaggccacagcuguguc

SEQ ID NO: 1041851 - RNA, 22 nt, Human
ugcaguggugguaaagaugcuc

SEQ ID NO: 1041852 - RNA, 21 nt, Human
uuaagagcuuagcaguaggcc

SEQ ID NO: 1041853 - RNA, 22 nt, Human
cagcagccuacaaugcacagaa

SEQ ID NO: 1041854 - RNA, 22 nt, Human
uucuggagaucugccuauggga

SEQ ID NO: 1041855 - RNA, 22 nt, Human
uauuucugaggcccaggaagug

SEQ ID NO: 1041856 - RNA, 22 nt, Human
uggccuuggcagugagaagagu

SEQ ID NO: 1041857 - RNA, 21 nt, Human
agugaaauugcaucagaggga

SEQ ID NO: 1041858 - RNA, 22 nt, Human
gagcucuggcagggcaggucug

SEQ ID NO: 1041859 - RNA, 22 nt, Human
auuguaucuugucauuaugcau

SEQ ID NO: 1041860 - RNA, 22 nt, Human
acagguggccccgagggagugg

SEQ ID NO: 1041861 - RNA, 22 nt, Human
ugcagaggagcuggaaggcugg

SEQ ID NO: 1041862 - RNA, 22 nt, Human
gagcuuugcuggaagccugggg

SEQ ID NO: 1041863 - RNA, 23 nt, Human
ugcuguccaacagacuggccaug

SEQ ID NO: 1041864 - RNA, 21 nt, Human
ucagggcagugggagguuccu

SEQ ID NO: 1041865 - RNA, 20 nt, Human
uccagcugggaacagcugau

SEQ ID NO: 1041866 - RNA, 22 nt, Human
gcccucagcuccuggacacaug

SEQ ID NO: 1041867 - RNA, 22 nt, Human
ccuggccuuaagggcagggagc

SEQ ID NO: 1041868 - RNA, 22 nt, Human
cagcugaguuacucugaggucu

SEQ ID NO: 1041869 - RNA, 19 nt, Human
ggagccuggagcacgugcc

SEQ ID NO: 1041870 - RNA, 22 nt, Human
ggcccugggaugcucagcagug

SEQ ID NO: 1041871 - RNA, 22 nt, Human
uuaaaaccaucagcuguaagau

SEQ ID NO: 1041872 - RNA, 22 nt, Human
ccacagggcacagacaggaagc

SEQ ID NO: 1041873 - RNA, 22 nt, Human
caggccucccggugcacacuga

SEQ ID NO: 1041874 - RNA, 22 nt, Human
aaucaguucuacaucuuaucca

SEQ ID NO: 1041875 - RNA, 22 nt, Human
gcucuggcuacuguggcuaccg

SEQ ID NO: 1041876 - RNA, 22 nt, Human
ggcuuccuuucacuacccucag

SEQ ID NO: 1041877 - RNA, 22 nt, Human
cuccaggggccagaagccuggc

SEQ ID NO: 1041878 - RNA, 22 nt, Human
uggcaguggcucagagugcaga

SEQ ID NO: 1041879 - RNA, 22 nt, Human
aauucuagcauugugaaaauau

SEQ ID NO: 1041880 - RNA, 22 nt, Human
gccuggcaggccucaugagggg

SEQ ID NO: 1041881 - RNA, 22 nt, Human
cagcagagcugugugggaaggg

SEQ ID NO: 1041882 - RNA, 22 nt, Human
uagagcauuuagaggggcagga

SEQ ID NO: 1041883 - RNA, 22 nt, Human
aagaaucauccugcaagagucu

SEQ ID NO: 1041884 - RNA, 22 nt, Human
gcugcagcuguaggacacaauu

SEQ ID NO: 1041885 - RNA, 22 nt, Human
acacaggaagucagcacugaug

SEQ ID NO: 1041886 - RNA, 19 nt, Human
ugccugucaguagaucuca

SEQ ID NO: 1041887 - RNA, 22 nt, Human
ggcaggcaggagcgugcuuggg

SEQ ID NO: 1041888 - RNA, 22 nt, Human
ccagcugcgggcaucgagaguu

SEQ ID NO: 1041889 - RNA, 22 nt, Human
acuccuggggcugccaucacag

SEQ ID NO: 1041890 - RNA, 19 nt, Human
auacacauacguaaacuga

SEQ ID NO: 1041891 - RNA, 22 nt, Human
ccugugaggucaucugugguaa

SEQ ID NO: 1041892 - RNA, 22 nt, Human
aacaguaucuuuuaucagaaau

SEQ ID NO: 1041893 - RNA, 22 nt, Human
cuguguggccucaagccagccu

SEQ ID NO: 1041894 - RNA, 22 nt, Human
cugggaggcggagguuguagug

SEQ ID NO: 1041895 - RNA, 22 nt, Human
uucuuuccacagaggggaugau

SEQ ID NO: 1041896 - RNA, 22 nt, Human
aggucaaaccacagcucuaggc

SEQ ID NO: 1041897 - RNA, 22 nt, Human
cuggcugcaggaugaggcugcc

SEQ ID NO: 1041898 - RNA, 22 nt, Human
gcugagaggcacuaucuccgga

SEQ ID NO: 1041899 - RNA, 20 nt, Human
ccugucuccucuuaccuggc

SEQ ID NO: 1041900 - RNA, 22 nt, Human
uugcucagcacuggagccagcu

SEQ ID NO: 1041901 - RNA, 22 nt, Human
gucauuguguggacauggagaa

SEQ ID NO: 1041902 - RNA, 16 nt, Human
gccuggaguggcaggg

SEQ ID NO: 1041903 - RNA, 22 nt, Human
gcucaggaucccaggggugugc

SEQ ID NO: 1041904 - RNA, 22 nt, Human
aggcuuccucgugccuuagaua

SEQ ID NO: 1041905 - RNA, 22 nt, Human
gcuggcagaauuucuucuugcu

SEQ ID NO: 1041906 - RNA, 22 nt, Human
ugcugccaugcagagcaacaga

SEQ ID NO: 1041907 - RNA, 22 nt, Human
aggagggugauccgggcugguc

SEQ ID NO: 1041908 - RNA, 22 nt, Human
aaugaacaaaauaugcuuugca

SEQ ID NO: 1041909 - RNA, 18 nt, Human
ccuggaccugucuccuuu

SEQ ID NO: 1041910 - RNA, 22 nt, Human
cuaauacucauuucuguaacuc

SEQ ID NO: 1041911 - RNA, 22 nt, Human
ucucagagaccugaacucccug

SEQ ID NO: 1041912 - RNA, 21 nt, Human
uggcugccuacaugcugcagg

SEQ ID NO: 1041913 - RNA, 22 nt, Human
agccucugcuuaugcaaaggua

SEQ ID NO: 1041914 - RNA, 22 nt, Human
cucugggcacauuuuccaggac

SEQ ID NO: 1041915 - RNA, 22 nt, Human
agaaaagguugaaaguaggauu

SEQ ID NO: 1041916 - RNA, 22 nt, Human
acugcuuuagaccuagagcucu

SEQ ID NO: 1041917 - RNA, 22 nt, Human
cagggccagagagggcuggcug

SEQ ID NO: 1041918 - RNA, 22 nt, Human
caggagcccagaguccucagcu

SEQ ID NO: 1041919 - RNA, 22 nt, Human
uaaagguaugucuuaaucaaac

SEQ ID NO: 1041920 - RNA, 21 nt, Human
acagacagggccagugucccc

SEQ ID NO: 1041921 - RNA, 22 nt, Human
ugcucugguaacucacuuccau

SEQ ID NO: 1041922 - RNA, 22 nt, Human
aaggcugagacagcacaggucc

SEQ ID NO: 1041923 - RNA, 21 nt, Human
agguggggcugcaccucugcu

SEQ ID NO: 1041924 - RNA, 22 nt, Human
gcccucugcacagcucugagca

SEQ ID NO: 1041925 - RNA, 23 nt, Human
acagggcauugcuggccucgagg

SEQ ID NO: 1041926 - RNA, 22 nt, Human
gagucccaugaugauagccaca

SEQ ID NO: 1041927 - RNA, 22 nt, Human
ccagagccggauugugaagugc

SEQ ID NO: 1041928 - RNA, 22 nt, Human
gggcagugguccaggcuacagc

SEQ ID NO: 1041929 - RNA, 22 nt, Human
ugguccaggguguaguacagag

SEQ ID NO: 1041930 - RNA, 22 nt, Human
agcuggggcugcagagaacagg

SEQ ID NO: 1041931 - RNA, 22 nt, Human
auaauuuaauuuucacaguggu

SEQ ID NO: 1041932 - RNA, 22 nt, Human
gggcuggaucuccugcaggcag

SEQ ID NO: 1041933 - RNA, 22 nt, Human
cagccaggccuggugaccaaag

SEQ ID NO: 1041934 - RNA, 22 nt, Human
guccugggcccaggggcugccu

SEQ ID NO: 1041935 - RNA, 22 nt, Human
uggcucagaugcucuuccagug

SEQ ID NO: 1041936 - RNA, 22 nt, Human
ccucacucugcacccugcagca

SEQ ID NO: 1041937 - RNA, 21 nt, Human
uggcacugcuuagcagguucc

SEQ ID NO: 1041938 - RNA, 22 nt, Human
cagaggcugcucuggguggcau

SEQ ID NO: 1041939 - RNA, 22 nt, Human
ugggccugggcuccuguccucu

SEQ ID NO: 1041940 - RNA, 22 nt, Human
uguguccauucaggcacugacc

SEQ ID NO: 1041941 - RNA, 22 nt, Human
gccaggcugcuggcugcugucc

SEQ ID NO: 1041942 - RNA, 22 nt, Human
uggcagaggaaaaagucacugg

SEQ ID NO: 1041943 - RNA, 22 nt, Human
gggcacugcuggaggcucccug

SEQ ID NO: 1041944 - RNA, 19 nt, Human
gaaggagagcugaguuagg

SEQ ID NO: 1041945 - RNA, 23 nt, Human
auuugagaaaguauuuuuaagac

SEQ ID NO: 1041946 - RNA, 22 nt, Human
caguauguacucuuaucaugua

SEQ ID NO: 1041947 - RNA, 20 nt, Human
gucagugucuucaguaguga

SEQ ID NO: 1041948 - RNA, 22 nt, Human
cccugccuucuuggccuuuaaa

SEQ ID NO: 1041949 - RNA, 22 nt, Human
uuuauguaauuucauaggugug

SEQ ID NO: 1041950 - RNA, 22 nt, Human
gcaggaugggagcuucacuuug

SEQ ID NO: 1041951 - RNA, 22 nt, Human
ucaaaguaaaaguauagaguuu

SEQ ID NO: 1041952 - RNA, 22 nt, Human
agauuucaaugugagcauuagu

SEQ ID NO: 1041953 - RNA, 22 nt, Human
uaugaagauauaucugaucucu

SEQ ID NO: 1041954 - RNA, 22 nt, Human
uuuggaaaguguacaaauuuga

SEQ ID NO: 1041955 - RNA, 21 nt, Human
acagagccgggcacaaagcug

SEQ ID NO: 1041956 - RNA, 22 nt, Human
ucacuuaaaaauucuaguuaug

SEQ ID NO: 1041957 - RNA, 23 nt, Human
gcagaggagcaagcuggacacca

SEQ ID NO: 1041958 - RNA, 22 nt, Human
ugaagccaucccucagauggcc

SEQ ID NO: 1041959 - RNA, 22 nt, Human
ucuccuuuaagauuuccucagg

SEQ ID NO: 1041960 - RNA, 23 nt, Human
acacaauagaguacuauucagcc

SEQ ID NO: 1041961 - RNA, 22 nt, Human
cuucccacuaguaucacagagc

SEQ ID NO: 1041962 - RNA, 22 nt, Human
agauacauuaguaguuacuugu

SEQ ID NO: 1041963 - RNA, 17 nt, Human
cugagcauccgugcucu

SEQ ID NO: 1041964 - RNA, 22 nt, Human
gcuggggagggcgucaaggcca

SEQ ID NO: 1041965 - RNA, 22 nt, Human
aguuuauguaaaauuaguaaug

SEQ ID NO: 1041966 - RNA, 22 nt, Human
cucugugauuuugugagccaga

SEQ ID NO: 1041967 - RNA, 21 nt, Human
agacagagugcagucuacaua

SEQ ID NO: 1041968 - RNA, 22 nt, Human
acagacagauuuugucugaugu

SEQ ID NO: 1041969 - RNA, 22 nt, Human
cuugcuuuguccagaaauucag

SEQ ID NO: 1041970 - RNA, 22 nt, Human
gagcuucccucugcagucccug

SEQ ID NO: 1041971 - RNA, 21 nt, Human
guggcccugccgcagugucca

SEQ ID NO: 1041972 - RNA, 22 nt, Human
gccagccuucuguggccugcaa

SEQ ID NO: 1041973 - RNA, 22 nt, Human
uggcucuguuuuaugaguacca

SEQ ID NO: 1041974 - RNA, 22 nt, Human
aaugagcuagaccugcuuccuc

SEQ ID NO: 1041975 - RNA, 22 nt, Human
gcuggccugggcagaggcuaug

SEQ ID NO: 1041976 - RNA, 18 nt, Human
aggcccuggccucgaaca

SEQ ID NO: 1041977 - RNA, 22 nt, Human
aggggagaguuaaugugaaugu

SEQ ID NO: 1041978 - RNA, 22 nt, Human
aaggaagacacagaugaaguga

SEQ ID NO: 1041979 - RNA, 22 nt, Human
ccagaagggcuauugcagugac

SEQ ID NO: 1041980 - RNA, 22 nt, Human
aggauccuuuuucugcuguuug

SEQ ID NO: 1041981 - RNA, 22 nt, Human
ggucauugucagagccuguacu

SEQ ID NO: 1041982 - RNA, 22 nt, Human
uggccuuccuggugacucauga

SEQ ID NO: 1041983 - RNA, 22 nt, Human
uucuuuccucccagccuuugga

SEQ ID NO: 1041984 - RNA, 22 nt, Human
ggggauggauuccgggucccug

SEQ ID NO: 1041985 - RNA, 22 nt, Human
cucugcuuggaacuggacagaa

SEQ ID NO: 1041986 - RNA, 22 nt, Human
ggccucucucccuggcuugcag

SEQ ID NO: 1041987 - RNA, 22 nt, Human
accaaggaguuugguauuuuag

SEQ ID NO: 1041988 - RNA, 22 nt, Human
cagccugcccuggaagcccagc

SEQ ID NO: 1041989 - RNA, 22 nt, Human
ccagcuggagccaagguggacu

SEQ ID NO: 1041990 - RNA, 21 nt, Human
aaggagccuaggaggcucagg

SEQ ID NO: 1041991 - RNA, 22 nt, Human
ggaggccaaagugugggcggcu

SEQ ID NO: 1041992 - RNA, 22 nt, Human
agcugcuguggggcucggccug

SEQ ID NO: 1041993 - RNA, 22 nt, Human
caauguguguguuuuucucaac

SEQ ID NO: 1041994 - RNA, 22 nt, Human
agggaucaaaaaauguacaugc

SEQ ID NO: 1041995 - RNA, 22 nt, Human
uccagccaagggagguuacuag

SEQ ID NO: 1041996 - RNA, 22 nt, Human
aaggcugaggagggccugcagg

SEQ ID NO: 1041997 - RNA, 22 nt, Human
caggccucaggggcucaggcug

SEQ ID NO: 1041998 - RNA, 22 nt, Human
aagauucucagagugaaagaau

SEQ ID NO: 1041999 - RNA, 22 nt, Human
aggcagcuggcagcacccaggg

SEQ ID NO: 1042000 - RNA, 22 nt, Human
ccugggcuggaguacagcagug

SEQ ID NO: 1042001 - RNA, 19 nt, Human
accucugcagagauguuua

SEQ ID NO: 1042002 - RNA, 22 nt, Human
gccuucagcggccgcucgcugc

SEQ ID NO: 1042003 - RNA, 22 nt, Human
cagaaugcaaauuuuauaauau

SEQ ID NO: 1042004 - RNA, 19 nt, Human
acacagggcuagaguuaca

SEQ ID NO: 1042005 - RNA, 22 nt, Human
aggcugccaaagcuucugucuc

SEQ ID NO: 1042006 - RNA, 22 nt, Human
gcagcaaucuucacagugucau

SEQ ID NO: 1042007 - RNA, 18 nt, Human
acagacaaaauggaaaug

SEQ ID NO: 1042008 - RNA, 22 nt, Human
cauuuacauuuaagguuaauau

SEQ ID NO: 1042009 - RNA, 22 nt, Human
uuguccuuaccucaaucuggaa

SEQ ID NO: 1042010 - RNA, 22 nt, Human
cauuaucucuucuauaugcuag

SEQ ID NO: 1042011 - RNA, 22 nt, Human
uggcucaggagggaucuuugcu

SEQ ID NO: 1042012 - RNA, 22 nt, Human
accaucagucauugucaguggg

SEQ ID NO: 1042013 - RNA, 22 nt, Human
cugagcugggcucucuugaggg

SEQ ID NO: 1042014 - RNA, 22 nt, Human
cagagagaggccacugcuauua

SEQ ID NO: 1042015 - RNA, 22 nt, Human
ggccugagcuugggcagcguau

SEQ ID NO: 1042016 - RNA, 22 nt, Human
gcaugggcaagaggacuggggg

SEQ ID NO: 1042017 - RNA, 22 nt, Human
gccuggaggaauguagcugagg

SEQ ID NO: 1042018 - RNA, 22 nt, Human
agagcugugcuuugcaccacgu

SEQ ID NO: 1042019 - RNA, 22 nt, Human
gcuugggauaugcugauguaaa

SEQ ID NO: 1042020 - RNA, 18 nt, Human
aucuuuccauagcauguu

SEQ ID NO: 1042021 - RNA, 22 nt, Human
uaggacaggugaggggcugugg

SEQ ID NO: 1042022 - RNA, 22 nt, Human
gaacccaguccaggugcagccu

SEQ ID NO: 1042023 - RNA, 22 nt, Human
cuucagggugacgcaggcugca

SEQ ID NO: 1042024 - RNA, 22 nt, Human
ugcaccauuuugucaggcuacu

SEQ ID NO: 1042025 - RNA, 22 nt, Human
accaaggagccacauacaaccu

SEQ ID NO: 1042026 - RNA, 22 nt, Human
uggccuggaagagaggucgagg

SEQ ID NO: 1042027 - RNA, 22 nt, Human
aaaauguguuuaugcauuucgu

SEQ ID NO: 1042028 - RNA, 22 nt, Human
uaggcaggugugcacugcccac

SEQ ID NO: 1042029 - RNA, 22 nt, Human
acauacauaugacaacuuuccu

SEQ ID NO: 1042030 - RNA, 22 nt, Human
uugaaaggguuaaagugguaaa

SEQ ID NO: 1042031 - RNA, 22 nt, Human
uucuggaggccccuuccuucuc

SEQ ID NO: 1042032 - RNA, 22 nt, Human
aucaguuuggugcuuucaguga

SEQ ID NO: 1042033 - RNA, 22 nt, Human
ccagccaggcuggcuguggagg

SEQ ID NO: 1042034 - RNA, 22 nt, Human
ccugggcucaagugauccuccu

SEQ ID NO: 1042035 - RNA, 22 nt, Human
gcugccugauuuacauagugaa

SEQ ID NO: 1042036 - RNA, 22 nt, Human
ucaaugauagacaagaucuaag

SEQ ID NO: 1042037 - RNA, 22 nt, Human
uagagcuggaauuugcagcaag

SEQ ID NO: 1042038 - RNA, 22 nt, Human
agccaggauggucucgaucggc

SEQ ID NO: 1042039 - RNA, 22 nt, Human
gaggcugguaggaaaggaaaca

SEQ ID NO: 1042040 - RNA, 22 nt, Human
uggcagaguucgcugugccuuu

SEQ ID NO: 1042041 - RNA, 18 nt, Human
caguuuuuauaucuggca

SEQ ID NO: 1042042 - RNA, 22 nt, Human
gcucaagagagaugcaguucuu

SEQ ID NO: 1042043 - RNA, 22 nt, Human
uuugggaaacuuaggggucaga

SEQ ID NO: 1042044 - RNA, 22 nt, Human
gagcagcuagauaaagcccuuc

SEQ ID NO: 1042045 - RNA, 22 nt, Human
guguaaggccccagguucuuua

SEQ ID NO: 1042046 - RNA, 22 nt, Human
uaaggcacacaguugcugcaug

SEQ ID NO: 1042047 - RNA, 20 nt, Human
gaggccucagccucagcucc

SEQ ID NO: 1042048 - RNA, 22 nt, Human
acagaguaucuaucaggaguau

SEQ ID NO: 1042049 - RNA, 22 nt, Human
ccugcagguccccggaugcgca

SEQ ID NO: 1042050 - RNA, 22 nt, Human
gaagcagcugccagagaugucu

SEQ ID NO: 1042051 - RNA, 22 nt, Human
uucuuucccuuccagcagcucc

SEQ ID NO: 1042052 - RNA, 22 nt, Human
ucaggaucggccuuuuuuuaag

SEQ ID NO: 1042053 - RNA, 22 nt, Human
ggcagcuggguuggccagaaac

SEQ ID NO: 1042054 - RNA, 22 nt, Human
aagagcuggaugaagaaaucaa

SEQ ID NO: 1042055 - RNA, 22 nt, Human
gggcugggaauggcuaaguaug

SEQ ID NO: 1042056 - RNA, 22 nt, Human
cagcugccacaccucuuucucu

SEQ ID NO: 1042057 - RNA, 22 nt, Human
uauugucuguccgggucaaagc

SEQ ID NO: 1042058 - RNA, 22 nt, Human
caggcuggagugaguguagugg

SEQ ID NO: 1042059 - RNA, 20 nt, Human
ugagugauggaggcggguca

SEQ ID NO: 1042060 - RNA, 22 nt, Human
gauuauauaauggaagcucuug

SEQ ID NO: 1042061 - RNA, 22 nt, Human
acagggcagaaauguugcaucu

SEQ ID NO: 1042062 - RNA, 22 nt, Human
uguuaucugagcaacgucgacg

SEQ ID NO: 1042063 - RNA, 22 nt, Human
gggcuugcugauuugggcagga

SEQ ID NO: 1042064 - RNA, 22 nt, Human
gucccuggaucugggacagcug

SEQ ID NO: 1042065 - RNA, 22 nt, Human
ggccagggggcuucagacucca

SEQ ID NO: 1042066 - RNA, 22 nt, Human
cuggcuucugggccagggcaga

SEQ ID NO: 1042067 - RNA, 19 nt, Human
ucauucaggaccaguggau

SEQ ID NO: 1042068 - RNA, 22 nt, Human
ucucugauguauaucagagaac

SEQ ID NO: 1042069 - RNA, 22 nt, Human
auugaaagauaggcuacugugg

SEQ ID NO: 1042070 - RNA, 20 nt, Human
ucauccaggacaggaguggc

SEQ ID NO: 1042071 - RNA, 22 nt, Human
ccagcuggcaggagagucaggg

SEQ ID NO: 1042072 - RNA, 22 nt, Human
uggccaggggaguuccccucca

SEQ ID NO: 1042073 - RNA, 22 nt, Human
ugucucugguauuaggugaaaa

SEQ ID NO: 1042074 - RNA, 20 nt, Human
cagagacccaggcuucagcu

SEQ ID NO: 1042075 - RNA, 22 nt, Human
agcuucuggaaggcaaggcuug

SEQ ID NO: 1042076 - RNA, 22 nt, Human
uauauagaaaagcagauguugg

SEQ ID NO: 1042077 - RNA, 22 nt, Human
gauacauuuuaucuccuaacag

SEQ ID NO: 1042078 - RNA, 20 nt, Human
gcucccugguagaaauguuu

SEQ ID NO: 1042079 - RNA, 22 nt, Human
gcugcaggggggucuggacuug

SEQ ID NO: 1042080 - RNA, 22 nt, Human
ucccagagaaagucaaggucuu

SEQ ID NO: 1042081 - RNA, 22 nt, Human
ugaggccaggaucccaggcucu

SEQ ID NO: 1042082 - RNA, 22 nt, Human
caggaaccuaaagagacauuac

SEQ ID NO: 1042083 - RNA, 23 nt, Human
aucaagauaauccagaugaccua

SEQ ID NO: 1042084 - RNA, 22 nt, Human
ugggcagaggcucugaagucca

SEQ ID NO: 1042085 - RNA, 22 nt, Human
gcaugguggccuuaggguagcc

SEQ ID NO: 1042086 - RNA, 22 nt, Human
agcgggugcugugucagcccuc

SEQ ID NO: 1042087 - RNA, 22 nt, Human
gguggccucgguggugcacagg

SEQ ID NO: 1042088 - RNA, 22 nt, Human
aagggcaggaaaagauggaugu

SEQ ID NO: 1042089 - RNA, 22 nt, Human
ggguaauuggggccuugcagug

SEQ ID NO: 1042090 - RNA, 22 nt, Human
gcccaugcucucaggcgggccu

SEQ ID NO: 1042091 - RNA, 22 nt, Human
gcugcccucccagggcaagcuu

SEQ ID NO: 1042092 - RNA, 20 nt, Human
ugucauuguuucuaggaccu

SEQ ID NO: 1042093 - RNA, 22 nt, Human
auucuuggcaaggagauuuaaa

SEQ ID NO: 1042094 - RNA, 22 nt, Human
agcugguaugaacaggauagga

SEQ ID NO: 1042095 - RNA, 22 nt, Human
ucauaacagcuaagucccuuuc

SEQ ID NO: 1042096 - RNA, 22 nt, Human
guccugggaaggaagccaggga

SEQ ID NO: 1042097 - RNA, 22 nt, Human
ucagggacugcagagggaagcu

SEQ ID NO: 1042098 - RNA, 22 nt, Human
cacaccuguaauaccagcuacu

SEQ ID NO: 1042099 - RNA, 22 nt, Human
aggcuauuuccacucuucucau

SEQ ID NO: 1042100 - RNA, 20 nt, Human
cacagcuugccuuuuaugac

SEQ ID NO: 1042101 - RNA, 22 nt, Human
cugccuggcuaaacucaagucg

SEQ ID NO: 1042102 - RNA, 22 nt, Human
uggcagcagacaaaaggccauu

SEQ ID NO: 1042103 - RNA, 22 nt, Human
ccaggccucuggcugcuuaguc

SEQ ID NO: 1042104 - RNA, 22 nt, Human
ccagggucucugcugccugaga

SEQ ID NO: 1042105 - RNA, 22 nt, Human
ugugugacccccagugaagccu

SEQ ID NO: 1042106 - RNA, 22 nt, Human
gcucaggaaacagcagggcuug

SEQ ID NO: 1042107 - RNA, 22 nt, Human
agcagagaagacacaggcuuca

SEQ ID NO: 1042108 - RNA, 22 nt, Human
uggcucagaacuacuucuaguu

SEQ ID NO: 1042109 - RNA, 23 nt, Human
acagcugcaccuggccgccuggc

SEQ ID NO: 1042110 - RNA, 22 nt, Human
cuugcaggauuuugcugcugua

SEQ ID NO: 1042111 - RNA, 22 nt, Human
agaacagcaguuaugguucauu

SEQ ID NO: 1042112 - RNA, 19 nt, Human
acacagggaucagaggguu

SEQ ID NO: 1042113 - RNA, 22 nt, Human
ugauuuccugugcgcccuuagg

SEQ ID NO: 1042114 - RNA, 16 nt, Human
agcagccagcacugga

SEQ ID NO: 1042115 - RNA, 22 nt, Human
cacaagagagugcgcguugcaa

SEQ ID NO: 1042116 - RNA, 22 nt, Human
caugccaguuuugagaugcacc

SEQ ID NO: 1042117 - RNA, 22 nt, Human
ggguccagcgacagcaggcuca

SEQ ID NO: 1042118 - RNA, 22 nt, Human
ccacacagucaguuuccaagaa

SEQ ID NO: 1042119 - RNA, 22 nt, Human
cagagguagaaggcaugcagug

SEQ ID NO: 1042120 - RNA, 22 nt, Human
gcugucagcgcccaaggagcuc

SEQ ID NO: 1042121 - RNA, 21 nt, Human
ugcugccaucaugcagagaug

SEQ ID NO: 1042122 - RNA, 22 nt, Human
gggcacugcuuugcucugucac

SEQ ID NO: 1042123 - RNA, 22 nt, Human
agcugccacugagggugcacag

SEQ ID NO: 1042124 - RNA, 22 nt, Human
cagagcugguguuacaagucca

SEQ ID NO: 1042125 - RNA, 22 nt, Human
gcucagaggaugcuccuuuaug

SEQ ID NO: 1042126 - RNA, 21 nt, Human
ugggagagggcucagcuaccc

SEQ ID NO: 1042127 - RNA, 22 nt, Human
ccuggagccccucuggccagcc

SEQ ID NO: 1042128 - RNA, 22 nt, Human
aaagacuagcauuuauauguac

SEQ ID NO: 1042129 - RNA, 22 nt, Human
cugggcuggcgcauccgacacg

SEQ ID NO: 1042130 - RNA, 22 nt, Human
cuggccuuuuguuucuggagaa

SEQ ID NO: 1042131 - RNA, 22 nt, Human
ucucagaguuuacggggcugaa

SEQ ID NO: 1042132 - RNA, 22 nt, Human
augauucagcaauuuuauaucu

SEQ ID NO: 1042133 - RNA, 22 nt, Human
ucagagcugcccaugcaagggg

SEQ ID NO: 1042134 - RNA, 22 nt, Human
agcagagcgccugcucagaggg

SEQ ID NO: 1042135 - RNA, 17 nt, Human
ccugggaggaguuauga

SEQ ID NO: 1042136 - RNA, 22 nt, Human
aucuucaaagcacaucguuugu

SEQ ID NO: 1042137 - RNA, 22 nt, Human
caggagcuacucagguuggguu

SEQ ID NO: 1042138 - RNA, 22 nt, Human
agggaggauaguagucaguuua

SEQ ID NO: 1042139 - RNA, 22 nt, Human
acaaaaguguaggaauuccuua

SEQ ID NO: 1042140 - RNA, 20 nt, Human
uccuucaggcagggccuagu

SEQ ID NO: 1042141 - RNA, 19 nt, Human
agcaccugugagagccugg

SEQ ID NO: 1042142 - RNA, 22 nt, Human
accuuucaaaguggcuaucacu

SEQ ID NO: 1042143 - RNA, 21 nt, Human
cucaggauggcggccuggugg

SEQ ID NO: 1042144 - RNA, 22 nt, Human
cagggugcgccacucagaugua

SEQ ID NO: 1042145 - RNA, 22 nt, Human
aaaugcagaucccugaaucuca

SEQ ID NO: 1042146 - RNA, 22 nt, Human
gcaaagcugggugugaaugcac

SEQ ID NO: 1042147 - RNA, 22 nt, Human
gucagcagugucagcucugggg

SEQ ID NO: 1042148 - RNA, 22 nt, Human
ucaguguccggagccugagugc

SEQ ID NO: 1042149 - RNA, 22 nt, Human
cuggggcugcgguggaggagcc

SEQ ID NO: 1042150 - RNA, 22 nt, Human
ucugggggcgaccagggacugc

SEQ ID NO: 1042151 - RNA, 22 nt, Human
ugcagagggacagccacagcuc

SEQ ID NO: 1042152 - RNA, 22 nt, Human
ccaguugguuucaaugggacag

SEQ ID NO: 1042153 - RNA, 22 nt, Human
aguaacuaugcuugagaaucag

SEQ ID NO: 1042154 - RNA, 22 nt, Human
uacaguaaccuuauuugucauu

SEQ ID NO: 1042155 - RNA, 22 nt, Human
agaaaugcauuagcacauauag

SEQ ID NO: 1042156 - RNA, 22 nt, Human
agggcagagacaugcuuccuga

SEQ ID NO: 1042157 - RNA, 22 nt, Human
ugugccauuucuauucugcagc

SEQ ID NO: 1042158 - RNA, 22 nt, Human
aaaucagugcucauuugaaagg

SEQ ID NO: 1042159 - RNA, 22 nt, Human
ugggcucugcaucagugcccau

SEQ ID NO: 1042160 - RNA, 22 nt, Human
aagauuuacuagcauaauagcu

SEQ ID NO: 1042161 - RNA, 22 nt, Human
cacacaggaugaagcagcagaa

SEQ ID NO: 1042162 - RNA, 22 nt, Human
uuucaguguaagguuuccagga

SEQ ID NO: 1042163 - RNA, 22 nt, Human
caggggcuagcacuuaauguuu

SEQ ID NO: 1042164 - RNA, 22 nt, Human
ccuggcucuguccucgcgcaaa

SEQ ID NO: 1042165 - RNA, 22 nt, Human
uuuccucuuuguaccuugacua

SEQ ID NO: 1042166 - RNA, 22 nt, Human
cuuccucaugugcaaugcaagc

SEQ ID NO: 1042167 - RNA, 22 nt, Human
uggcagcuuccugcucauagga

SEQ ID NO: 1042168 - RNA, 22 nt, Human
uuuccucuucuucccaugucau

SEQ ID NO: 1042169 - RNA, 22 nt, Human
caggaacauuuaaccacagggu

SEQ ID NO: 1042170 - RNA, 22 nt, Human
ugcagcagacugaguaugagaa

SEQ ID NO: 1042171 - RNA, 22 nt, Human
ccaggcagcucugauuuauguc

SEQ ID NO: 1042172 - RNA, 22 nt, Human
gacagcagacagaacuaccugc

SEQ ID NO: 1042173 - RNA, 22 nt, Human
uagauuucaggcuggcuugcgg

SEQ ID NO: 1042174 - RNA, 22 nt, Human
cccagcucucgcacuuacuagc

SEQ ID NO: 1042175 - RNA, 22 nt, Human
ccagagcccagcacacggugcu

SEQ ID NO: 1042176 - RNA, 18 nt, Human
ucugucuguacaaguauc

SEQ ID NO: 1042177 - RNA, 22 nt, Human
guccuggcuuaguucgcuguaa

SEQ ID NO: 1042178 - RNA, 22 nt, Human
aggucauuuuugccuucuauuu

SEQ ID NO: 1042179 - RNA, 22 nt, Human
ggaggccaggaaggcucggaga

SEQ ID NO: 1042180 - RNA, 21 nt, Human
gggugcuguggucaugcagga

SEQ ID NO: 1042181 - RNA, 22 nt, Human
agcucugggccaggaacccuaa

SEQ ID NO: 1042182 - RNA, 22 nt, Human
aaauaauuauagcgagucuauc

SEQ ID NO: 1042183 - RNA, 22 nt, Human
ucauugcagaaauaaaggugaa

SEQ ID NO: 1042184 - RNA, 22 nt, Human
ucugcugcugagcacacuccua

SEQ ID NO: 1042185 - RNA, 22 nt, Human
uuauguaccugaauuaguaaag

SEQ ID NO: 1042186 - RNA, 23 nt, Human
ucugucacuuucugcuguggagu

SEQ ID NO: 1042187 - RNA, 20 nt, Human
cuucaggacccauccucccc

SEQ ID NO: 1042188 - RNA, 22 nt, Human
cagaauuuagcacaauguaugg

SEQ ID NO: 1042189 - RNA, 22 nt, Human
agggcccuccccgcucagggca

SEQ ID NO: 1042190 - RNA, 22 nt, Human
gggacagcuguagugcuuggcu

SEQ ID NO: 1042191 - RNA, 22 nt, Human
gggcuggagccagcuguggcug

SEQ ID NO: 1042192 - RNA, 22 nt, Human
uaaauguguguagccaucugug

SEQ ID NO: 1042193 - RNA, 22 nt, Human
ucccuuaaaacucauguguugu

SEQ ID NO: 1042194 - RNA, 23 nt, Human
aggcagagccaaggucaaaaccc

SEQ ID NO: 1042195 - RNA, 22 nt, Human
ggaugcugacuuuggagcaugg

SEQ ID NO: 1042196 - RNA, 22 nt, Human
uauuaguagcuugaaauuggug

SEQ ID NO: 1042197 - RNA, 22 nt, Human
ucagacaguuugcagugugccu

SEQ ID NO: 1042198 - RNA, 22 nt, Human
cuggcagcugcccgagaugccc

SEQ ID NO: 1042199 - RNA, 22 nt, Human
guggccucugugcuccugccua

SEQ ID NO: 1042200 - RNA, 22 nt, Human
ggggcagagaauaaaaaccuaa

SEQ ID NO: 1042201 - RNA, 22 nt, Human
ucugccugaaauucacauguaa

SEQ ID NO: 1042202 - RNA, 22 nt, Human
uuuauguaaguggaaugaugcc

SEQ ID NO: 1042203 - RNA, 22 nt, Human
ugcugcucaaugagaugccauc

SEQ ID NO: 1042204 - RNA, 19 nt, Human
ggcucucccuugagagagc

SEQ ID NO: 1042205 - RNA, 18 nt, Human
aggaagcaggaggaaggc

SEQ ID NO: 1042206 - RNA, 22 nt, Human
caaggcaggcaguucacuugag

SEQ ID NO: 1042207 - RNA, 22 nt, Human
ggucauugaaaucagaaggguu

SEQ ID NO: 1042208 - RNA, 22 nt, Human
gcaaggcugcugccacccaucu

SEQ ID NO: 1042209 - RNA, 23 nt, Human
ugccucugccucccuagucugca

SEQ ID NO: 1042210 - RNA, 22 nt, Human
agagugaucagauaucaggugu

SEQ ID NO: 1042211 - RNA, 22 nt, Human
aagcccagaugugagaacugag

SEQ ID NO: 1042212 - RNA, 22 nt, Human
ccugucugcagauaucucaggu

SEQ ID NO: 1042213 - RNA, 21 nt, Human
ucuguacaucauugagucccc

SEQ ID NO: 1042214 - RNA, 22 nt, Human
aaaagcucuuucugcuguagau

SEQ ID NO: 1042215 - RNA, 22 nt, Human
gccucugcucucagguagccuc

SEQ ID NO: 1042216 - RNA, 22 nt, Human
caggcagcugacugucagauau

SEQ ID NO: 1042217 - RNA, 22 nt, Human
aggccuuccucggagacaggga

SEQ ID NO: 1042218 - RNA, 22 nt, Human
auggggagagaagggcugagcu

SEQ ID NO: 1042219 - RNA, 22 nt, Human
uucucuagguuuuagaugaaga

SEQ ID NO: 1042220 - RNA, 22 nt, Human
ggcuccuggcaucuggugggua

SEQ ID NO: 1042221 - RNA, 21 nt, Human
ucucuacacuuucacuaggcu

SEQ ID NO: 1042222 - RNA, 22 nt, Human
caggugcuguccugcacauguc

SEQ ID NO: 1042223 - RNA, 22 nt, Human
cagcauggggcuuggagucagc

SEQ ID NO: 1042224 - RNA, 22 nt, Human
caggguggcaggcaccauggcc

SEQ ID NO: 1042225 - RNA, 22 nt, Human
ggucccaggauugguugcgcag

SEQ ID NO: 1042226 - RNA, 22 nt, Human
uuuagaaauucaucuauggccu

SEQ ID NO: 1042227 - RNA, 22 nt, Human
gagccuucaucgcagccuuguu

SEQ ID NO: 1042228 - RNA, 22 nt, Human
uuugacaggacuaacauauggc

SEQ ID NO: 1042229 - RNA, 22 nt, Human
acagggcagugucuugaaaaau

SEQ ID NO: 1042230 - RNA, 22 nt, Human
acagccauagaugcuuauguaa

SEQ ID NO: 1042231 - RNA, 22 nt, Human
ccagcagcccucuuccaagacu

SEQ ID NO: 1042232 - RNA, 19 nt, Human
agggagaauuccaagagga

SEQ ID NO: 1042233 - RNA, 22 nt, Human
uguaguaagugcgcaauaaaua

SEQ ID NO: 1042234 - RNA, 22 nt, Human
aggcucugguuggcaaguaaag

SEQ ID NO: 1042235 - RNA, 22 nt, Human
ucccagagugugggcaucaagg

SEQ ID NO: 1042236 - RNA, 22 nt, Human
aagcugccuugcugaggagaaa

SEQ ID NO: 1042237 - RNA, 22 nt, Human
gcuggcuguguuccuucugcca

SEQ ID NO: 1042238 - RNA, 22 nt, Human
agggagaaaauuggaugcacaa

SEQ ID NO: 1042239 - RNA, 22 nt, Human
cagccacguagcccuuggccgu

SEQ ID NO: 1042240 - RNA, 19 nt, Human
ccuuugaaucaggacacuu

SEQ ID NO: 1042241 - RNA, 22 nt, Human
auuguacuuuuauuacauguag

SEQ ID NO: 1042242 - RNA, 22 nt, Human
aucuaagaguuaacaucaagaa

SEQ ID NO: 1042243 - RNA, 22 nt, Human
gcugccugguuucucagcugca

SEQ ID NO: 1042244 - RNA, 22 nt, Human
gccugcagugagugcagaaggu

SEQ ID NO: 1042245 - RNA, 22 nt, Human
gcccugucggaacugcgaccuc

SEQ ID NO: 1042246 - RNA, 22 nt, Human
uggcuuccgccgcgggccucgg

SEQ ID NO: 1042247 - RNA, 22 nt, Human
uccuccaggucuaggguggcuu

SEQ ID NO: 1042248 - RNA, 22 nt, Human
ugaggcucaaggucugguggag

SEQ ID NO: 1042249 - RNA, 22 nt, Human
uuccucuccucacaugagucac

SEQ ID NO: 1042250 - RNA, 22 nt, Human
uuccauaaugagauucccagcc

SEQ ID NO: 1042251 - RNA, 21 nt, Human
ucugucucuccacugcccugc

SEQ ID NO: 1042252 - RNA, 22 nt, Human
uauaguaaaauuuucauuuaug

SEQ ID NO: 1042253 - RNA, 22 nt, Human
gcagggucgcucuaggagauca

SEQ ID NO: 1042254 - RNA, 22 nt, Human
ucuuggagaauggcagagaagc

SEQ ID NO: 1042255 - RNA, 22 nt, Human
gcacccaggccggcgacugcag

SEQ ID NO: 1042256 - RNA, 22 nt, Human
aaacugaauucccaagggcaug

SEQ ID NO: 1042257 - RNA, 22 nt, Human
uguauacauuuaacuagauaga

SEQ ID NO: 1042258 - RNA, 22 nt, Human
gcugccuuuugcuccucccacc

SEQ ID NO: 1042259 - RNA, 22 nt, Human
gcugucacaucaaggcacuaaa

SEQ ID NO: 1042260 - RNA, 20 nt, Human
uguauauuuucugguguaaa

SEQ ID NO: 1042261 - RNA, 22 nt, Human
ccucccacauugaggacaugcu

SEQ ID NO: 1042262 - RNA, 22 nt, Human
ugcuggccaacaaggcuccaag

SEQ ID NO: 1042263 - RNA, 22 nt, Human
uuauuuucuccucagaaagugg

SEQ ID NO: 1042264 - RNA, 22 nt, Human
uccucuggcccagcugccucug

SEQ ID NO: 1042265 - RNA, 22 nt, Human
gaggccuggagccgccuaggcg

SEQ ID NO: 1042266 - RNA, 22 nt, Human
ggagcugggguuggcaucuucc

SEQ ID NO: 1042267 - RNA, 22 nt, Human
augggguggaguccgggcagcg

SEQ ID NO: 1042268 - RNA, 22 nt, Human
ucugaggcuucagacuguacug

SEQ ID NO: 1042269 - RNA, 22 nt, Human
gcugcagcaagcccuccagggg

SEQ ID NO: 1042270 - RNA, 22 nt, Human
uuuccuaugauauucuaugugu

SEQ ID NO: 1042271 - RNA, 22 nt, Human
ucagcaauaugauaggcuuugu

SEQ ID NO: 1042272 - RNA, 22 nt, Human
gggacaggccccucgcuagcuu

SEQ ID NO: 1042273 - RNA, 22 nt, Human
ccacagggaacaugacagccuu

SEQ ID NO: 1042274 - RNA, 22 nt, Human
agccagggacgcugcaggcuac

SEQ ID NO: 1042275 - RNA, 22 nt, Human
aggcacugauucucagaguuac

SEQ ID NO: 1042276 - RNA, 22 nt, Human
aaguucaagcucugccuaaaau

SEQ ID NO: 1042277 - RNA, 22 nt, Human
guaacaaaguuucuaggugcug

SEQ ID NO: 1042278 - RNA, 22 nt, Human
gagagcuguguucauucuacca

SEQ ID NO: 1042279 - RNA, 22 nt, Human
ugaggugaccgcagaugggaag

SEQ ID NO: 1042280 - RNA, 18 nt, Human
uucaccagugugaugggu

SEQ ID NO: 1042281 - RNA, 22 nt, Human
ggcugccuucccugagccccgg

SEQ ID NO: 1042282 - RNA, 19 nt, Human
auagaaaggguuaaagaca

SEQ ID NO: 1042283 - RNA, 22 nt, Human
auguauguuaguguauuaucua

SEQ ID NO: 1042284 - RNA, 22 nt, Human
aagggcaggagaagacggauau

SEQ ID NO: 1042285 - RNA, 22 nt, Human
ggcaugggagugagcaaccuua

SEQ ID NO: 1042286 - RNA, 22 nt, Human
gaaggcuggcuuucugagagca

SEQ ID NO: 1042287 - RNA, 22 nt, Human
gcaggagcugcucuccugacga

SEQ ID NO: 1042288 - RNA, 21 nt, Human
uggcucugaaagagugcugca

SEQ ID NO: 1042289 - RNA, 22 nt, Human
cugcucuguuaauuaaacuuug

SEQ ID NO: 1042290 - RNA, 22 nt, Human
acaguaccugcucucaagcaaa

SEQ ID NO: 1042291 - RNA, 22 nt, Human
agcaggguuccaggaguugcag

SEQ ID NO: 1042292 - RNA, 22 nt, Human
cagucacacaaguggacuuggg

SEQ ID NO: 1042293 - RNA, 23 nt, Human
uggcuucugccccauucucucca

SEQ ID NO: 1042294 - RNA, 22 nt, Human
uggaggaugccuggggaggccu

SEQ ID NO: 1042295 - RNA, 22 nt, Human
acaggcuuacaggcugcaagua

SEQ ID NO: 1042296 - RNA, 22 nt, Human
uaccuuuugcuuauuaugacac

SEQ ID NO: 1042297 - RNA, 22 nt, Human
ggaggccaucagggagggcauu

SEQ ID NO: 1042298 - RNA, 22 nt, Human
augagcugggccauccagugau

SEQ ID NO: 1042299 - RNA, 22 nt, Human
ccucccagugccuccagagcag

SEQ ID NO: 1042300 - RNA, 22 nt, Human
agggccugacacccuugccagc

SEQ ID NO: 1042301 - RNA, 22 nt, Human
uucaagauggcugcaaauacuu

SEQ ID NO: 1042302 - RNA, 22 nt, Human
ugucucaguucccuucucugga

SEQ ID NO: 1042303 - RNA, 22 nt, Human
ucugagcuacgaugccugucac

SEQ ID NO: 1042304 - RNA, 22 nt, Human
ugaaggaauggaggaucagagc

SEQ ID NO: 1042305 - RNA, 20 nt, Human
agucucuguagugccugaga

SEQ ID NO: 1042306 - RNA, 22 nt, Human
auuguaaguagaaauguuaugg

SEQ ID NO: 1042307 - RNA, 22 nt, Human
aggagucaggaccaaauggaaa

SEQ ID NO: 1042308 - RNA, 22 nt, Human
gcagacagcauguugggcuauu

SEQ ID NO: 1042309 - RNA, 22 nt, Human
aaggugucacugggacaggaaa

SEQ ID NO: 1042310 - RNA, 22 nt, Human
aagauuucugcuuuuggaggca

SEQ ID NO: 1042311 - RNA, 22 nt, Human
guuuucuuugaaugcuucuaga

SEQ ID NO: 1042312 - RNA, 22 nt, Human
gcuguucccauguggggcucag

SEQ ID NO: 1042313 - RNA, 22 nt, Human
ggcaguggcuccucucuacucc

SEQ ID NO: 1042314 - RNA, 22 nt, Human
acugugugaaacaucaaugugu

SEQ ID NO: 1042315 - RNA, 22 nt, Human
uuguaacaggcacucugugcca

SEQ ID NO: 1042316 - RNA, 22 nt, Human
gcaucuucacacaaagccagug

SEQ ID NO: 1042317 - RNA, 22 nt, Human
ugggcagacugagcccuguccc

SEQ ID NO: 1042318 - RNA, 22 nt, Human
cagggcagagccaggauuucaa

SEQ ID NO: 1042319 - RNA, 22 nt, Human
gcagcugccgugagcucacgcc

SEQ ID NO: 1042320 - RNA, 22 nt, Human
gagcagcuccagccgcaugacu

SEQ ID NO: 1042321 - RNA, 22 nt, Human
aaauacagaguugcuuaaaagc

SEQ ID NO: 1042322 - RNA, 22 nt, Human
accaaggaagaaucuauuugag

SEQ ID NO: 1042323 - RNA, 22 nt, Human
ugugcuucugcagagacuauuu

SEQ ID NO: 1042324 - RNA, 22 nt, Human
ucucagggaccaugaugaugac

SEQ ID NO: 1042325 - RNA, 22 nt, Human
uuuuuaagagauucuccagucu

SEQ ID NO: 1042326 - RNA, 22 nt, Human
acagcugugaaaauccacagga

SEQ ID NO: 1042327 - RNA, 22 nt, Human
gccucugcaggugcgguuaucc

SEQ ID NO: 1042328 - RNA, 18 nt, Human
aagccagagaccacugcc

SEQ ID NO: 1042329 - RNA, 20 nt, Human
aguguuccggaagacuggca

SEQ ID NO: 1042330 - RNA, 23 nt, Human
cuuuccuuucuuugacacccagc

SEQ ID NO: 1042331 - RNA, 22 nt, Human
ccugccaggcuuugggcuucug

SEQ ID NO: 1042332 - RNA, 23 nt, Human
uacauuguggauggaguccuggg

SEQ ID NO: 1042333 - RNA, 22 nt, Human
gggagggaaagcuugaucuguc

SEQ ID NO: 1042334 - RNA, 22 nt, Human
aggguggggugcuacaucuuua

SEQ ID NO: 1042335 - RNA, 22 nt, Human
ucaagagagugcugcuuggggu

SEQ ID NO: 1042336 - RNA, 22 nt, Human
gggcccuggacguggcggcaga

SEQ ID NO: 1042337 - RNA, 22 nt, Human
ccauaaggagccagacauucca

SEQ ID NO: 1042338 - RNA, 22 nt, Human
cuggcuccuccaaggccuggag

SEQ ID NO: 1042339 - RNA, 22 nt, Human
aacucaguguguuucuuaguau

SEQ ID NO: 1042340 - RNA, 20 nt, Human
gcagcugaaaguaugacacc

SEQ ID NO: 1042341 - RNA, 20 nt, Human
cacguuuuuccacuagcaaa

SEQ ID NO: 1042342 - RNA, 22 nt, Human
ugcucugucaagaaaagaugcc

SEQ ID NO: 1042343 - RNA, 22 nt, Human
uggggccugagguggagcugca

SEQ ID NO: 1042344 - RNA, 19 nt, Human
gcugcuggcucuggcugga

SEQ ID NO: 1042345 - RNA, 22 nt, Human
cagcugcccaagccccagaugu

SEQ ID NO: 1042346 - RNA, 22 nt, Human
uuugcauuguaauauuuaguuc

SEQ ID NO: 1042347 - RNA, 22 nt, Human
ucccagagcugauaagccuuua

SEQ ID NO: 1042348 - RNA, 22 nt, Human
guggggggacguuggucacuuu

SEQ ID NO: 1042349 - RNA, 22 nt, Human
ucagggcagguuaacuugggug

SEQ ID NO: 1042350 - RNA, 19 nt, Human
ggaaacaggggccagagga

SEQ ID NO: 1042351 - RNA, 22 nt, Human
gucaaguuaagauaaggucaug

SEQ ID NO: 1042352 - RNA, 22 nt, Human
gcuguccaugucuggccucagu

SEQ ID NO: 1042353 - RNA, 22 nt, Human
gcauuccuacaggcugcuauga

SEQ ID NO: 1042354 - RNA, 22 nt, Human
guuacacaggaaaacauuagca

SEQ ID NO: 1042355 - RNA, 22 nt, Human
ugccuggguccaggccaagccu

SEQ ID NO: 1042356 - RNA, 22 nt, Human
ucuggcucccuggagcuccaca

SEQ ID NO: 1042357 - RNA, 16 nt, Human
agcagggcgggaagga

SEQ ID NO: 1042358 - RNA, 22 nt, Human
auucaguaggucuagaauaaga

SEQ ID NO: 1042359 - RNA, 22 nt, Human
ugcagcauugcaaagcagucuu

SEQ ID NO: 1042360 - RNA, 22 nt, Human
ggagagaauuccauggacaugu

SEQ ID NO: 1042361 - RNA, 20 nt, Human
agcugguuaucuuaauucuu

SEQ ID NO: 1042362 - RNA, 22 nt, Human
cacugggcaauucugagccuaa

SEQ ID NO: 1042363 - RNA, 22 nt, Human
ucagggcauguauguuucuuua

SEQ ID NO: 1042364 - RNA, 20 nt, Human
uggcuccugcgguggaacca

SEQ ID NO: 1042365 - RNA, 17 nt, Human
uauguaguacuuauaaa

SEQ ID NO: 1042366 - RNA, 22 nt, Human
gccagcccagcuccaggggaaa

SEQ ID NO: 1042367 - RNA, 22 nt, Human
uggcccugacugauguggaggg

SEQ ID NO: 1042368 - RNA, 22 nt, Human
uaauuauaacaguuacaucuua

SEQ ID NO: 1042369 - RNA, 22 nt, Human
gggcuacauugugagagaaguu

SEQ ID NO: 1042370 - RNA, 22 nt, Human
uuccuucucagcccucgaggau

SEQ ID NO: 1042371 - RNA, 17 nt, Human
gaaagguccuagaaauc

SEQ ID NO: 1042372 - RNA, 22 nt, Human
gccuggagaauuaaaaggaagg

SEQ ID NO: 1042373 - RNA, 22 nt, Human
cccuguccuggaugggagcacu

SEQ ID NO: 1042374 - RNA, 23 nt, Human
gaguguucauagcaggcucuugc

SEQ ID NO: 1042375 - RNA, 19 nt, Human
gugauuucuuuccacaagc

SEQ ID NO: 1042376 - RNA, 22 nt, Human
uuguuacacauaauaacauuuu

SEQ ID NO: 1042377 - RNA, 22 nt, Human
gucugaggaagaugcaggggga

SEQ ID NO: 1042378 - RNA, 22 nt, Human
ugaugggaaaaugaggccuggg

SEQ ID NO: 1042379 - RNA, 22 nt, Human
ugcauuugucuugucucaugaa

SEQ ID NO: 1042380 - RNA, 22 nt, Human
gcucuuccauuucucuugaacu

SEQ ID NO: 1042381 - RNA, 22 nt, Human
gagagugucgggggccccagga

SEQ ID NO: 1042382 - RNA, 18 nt, Human
ucucuuuuccccucauug

SEQ ID NO: 1042383 - RNA, 18 nt, Human
agcuggcccuggcugccg

SEQ ID NO: 1042384 - RNA, 22 nt, Human
caaaugugguuucucagcauuc

SEQ ID NO: 1042385 - RNA, 22 nt, Human
ccagugcaggugagcaccaggu

SEQ ID NO: 1042386 - RNA, 23 nt, Human
uggcuggcagaaacugaagcaug

SEQ ID NO: 1042387 - RNA, 22 nt, Human
aggggccuggacauggacgcgc

SEQ ID NO: 1042388 - RNA, 22 nt, Human
cagggcuguaaauuagugcuga

SEQ ID NO: 1042389 - RNA, 22 nt, Human
ccuggcugcuauagcagcaugu

SEQ ID NO: 1042390 - RNA, 22 nt, Human
aaaugcacagaggccagagagg

SEQ ID NO: 1042391 - RNA, 22 nt, Human
gcagggacaccuuugugaagcu

SEQ ID NO: 1042392 - RNA, 22 nt, Human
cuguccugcaguugggggcagg

SEQ ID NO: 1042393 - RNA, 22 nt, Human
aaucaguuaggguguuaaugag

SEQ ID NO: 1042394 - RNA, 22 nt, Human
gaguguggugaacaggagcacc

SEQ ID NO: 1042395 - RNA, 22 nt, Human
cugccuuugcccuugacacugu

SEQ ID NO: 1042396 - RNA, 22 nt, Human
ugaagcccugugucagcuucca

SEQ ID NO: 1042397 - RNA, 22 nt, Human
cuucucucccuggcacucagac

SEQ ID NO: 1042398 - RNA, 22 nt, Human
ccugagagcagcuuccugcuua

SEQ ID NO: 1042399 - RNA, 22 nt, Human
agcaggaaguagucuguaagca

SEQ ID NO: 1042400 - RNA, 22 nt, Human
cugucaguaggcucccaucauu

SEQ ID NO: 1042401 - RNA, 22 nt, Human
acuuugcacuaaguuacucauu

SEQ ID NO: 1042402 - RNA, 21 nt, Human
aggggacagaguagcuccagg

SEQ ID NO: 1042403 - RNA, 21 nt, Human
aaagugguaaggauuauuuug

SEQ ID NO: 1042404 - RNA, 22 nt, Human
cccagcaggucggugcugccug

SEQ ID NO: 1042405 - RNA, 21 nt, Human
uucaaaguuugccuaaagauu

SEQ ID NO: 1042406 - RNA, 22 nt, Human
agccacaccuguccugccagcu

SEQ ID NO: 1042407 - RNA, 22 nt, Human
ccaggcugggcuacaaguugag

SEQ ID NO: 1042408 - RNA, 22 nt, Human
cucuggagcaccgggcuaucca

SEQ ID NO: 1042409 - RNA, 22 nt, Human
gccugucaauuuuguguacaau

SEQ ID NO: 1042410 - RNA, 22 nt, Human
ggucaggguauaaucaagugag

SEQ ID NO: 1042411 - RNA, 22 nt, Human
cagaaauggagcccaggaaucu

SEQ ID NO: 1042412 - RNA, 20 nt, Human
gccuggaggcagagauaaag

SEQ ID NO: 1042413 - RNA, 22 nt, Human
aauauguucaaaauagaucacu

SEQ ID NO: 1042414 - RNA, 22 nt, Human
gcagccaccucccauggcgggg

SEQ ID NO: 1042415 - RNA, 22 nt, Human
cagacccucgggugaguuggcc

SEQ ID NO: 1042416 - RNA, 22 nt, Human
ugggcagacauugaguuuguuc

SEQ ID NO: 1042417 - RNA, 22 nt, Human
gccaggcagcugggagggugcc

SEQ ID NO: 1042418 - RNA, 22 nt, Human
uccaggagguuuggaggaagca

SEQ ID NO: 1042419 - RNA, 22 nt, Human
cucaggaugaaagucaugguga

SEQ ID NO: 1042420 - RNA, 22 nt, Human
ggaggcucugcuccguguguuc

SEQ ID NO: 1042421 - RNA, 22 nt, Human
cuggcugcgucugcucugacag

SEQ ID NO: 1042422 - RNA, 22 nt, Human
caggccugugacaccgugucug

SEQ ID NO: 1042423 - RNA, 22 nt, Human
ucugagccguauggcuuggcua

SEQ ID NO: 1042424 - RNA, 22 nt, Human
uggcucuggauuaaucuaggaa

SEQ ID NO: 1042425 - RNA, 22 nt, Human
uggcucugcugaaccuagugca

SEQ ID NO: 1042426 - RNA, 22 nt, Human
uggcuuucucccccagcuucuc

SEQ ID NO: 1042427 - RNA, 22 nt, Human
gcugcuucucugauggagucca

SEQ ID NO: 1042428 - RNA, 22 nt, Human
aguggcagagcugugucuugaa

SEQ ID NO: 1042429 - RNA, 22 nt, Human
uggcagaaguucacuaguagcu

SEQ ID NO: 1042430 - RNA, 22 nt, Human
acagcagccugcagcccugugu

SEQ ID NO: 1042431 - RNA, 23 nt, Human
caugccaguuugugcaggcagau

SEQ ID NO: 1042432 - RNA, 22 nt, Human
agcuuccuuggcgcugaggccu

SEQ ID NO: 1042433 - RNA, 22 nt, Human
uagaaaagauaacauucugugc

SEQ ID NO: 1042434 - RNA, 22 nt, Human
ggcuucuuccugugaacauguu

SEQ ID NO: 1042435 - RNA, 22 nt, Human
ccuggagcgcgggucaagcugg

SEQ ID NO: 1042436 - RNA, 22 nt, Human
caguuaaaggcccaauaucugg

SEQ ID NO: 1042437 - RNA, 22 nt, Human
agagccugaggaugucccagcu

SEQ ID NO: 1042438 - RNA, 22 nt, Human
uacuuuuagccuauuugauucu

SEQ ID NO: 1042439 - RNA, 22 nt, Human
agcagccacacgccuccuucuc

SEQ ID NO: 1042440 - RNA, 22 nt, Human
ccuccugggcuccugucugcac

SEQ ID NO: 1042441 - RNA, 22 nt, Human
agucucagccacacagaccuau

SEQ ID NO: 1042442 - RNA, 22 nt, Human
uucaaugagcccggggccauag

SEQ ID NO: 1042443 - RNA, 22 nt, Human
gaaaagggcaagagagagggca

SEQ ID NO: 1042444 - RNA, 22 nt, Human
cuguccucuguccucagcagga

SEQ ID NO: 1042445 - RNA, 22 nt, Human
gcuggcagagacaagaagacua

SEQ ID NO: 1042446 - RNA, 22 nt, Human
uggggcuguggauucucacgaa

SEQ ID NO: 1042447 - RNA, 22 nt, Human
uagagcuggccgggacagcugg

SEQ ID NO: 1042448 - RNA, 22 nt, Human
agccucucugaugugacagcua

SEQ ID NO: 1042449 - RNA, 22 nt, Human
agacccugucaguguuaggaaa

SEQ ID NO: 1042450 - RNA, 22 nt, Human
agcagccaaccuuacauucauc

SEQ ID NO: 1042451 - RNA, 19 nt, Human
gcuggggccugaccagaca

SEQ ID NO: 1042452 - RNA, 22 nt, Human
auaacagagagcuacugaacug

SEQ ID NO: 1042453 - RNA, 22 nt, Human
ccaggccuuccaguacgcagaa

SEQ ID NO: 1042454 - RNA, 22 nt, Human
ugaagcaggugaauggaugucg

SEQ ID NO: 1042455 - RNA, 22 nt, Human
aguggcagaagucacuggguag

SEQ ID NO: 1042456 - RNA, 22 nt, Human
ggcacugggagaggugagacgg

SEQ ID NO: 1042457 - RNA, 20 nt, Human
cacugaagacuucuugcuca

SEQ ID NO: 1042458 - RNA, 22 nt, Human
agcagaugagccucaugacugg

SEQ ID NO: 1042459 - RNA, 22 nt, Human
ucugucacuuauuaagauggau

SEQ ID NO: 1042460 - RNA, 22 nt, Human
ucagagaugcagugccaccuac

SEQ ID NO: 1042461 - RNA, 22 nt, Human
ucuuugcaucccuuccauaguu

SEQ ID NO: 1042462 - RNA, 22 nt, Human
cugugcuggcagaccuggaguu

SEQ ID NO: 1042463 - RNA, 22 nt, Human
guucaaagcuccugguacagua

SEQ ID NO: 1042464 - RNA, 22 nt, Human
gcccugagacugagcauggguu

SEQ ID NO: 1042465 - RNA, 22 nt, Human
cagaagccugccucagaugcac

SEQ ID NO: 1042466 - RNA, 22 nt, Human
uuaugacauaugaguacaagua

SEQ ID NO: 1042467 - RNA, 22 nt, Human
cugcccuguggcucugagucau

SEQ ID NO: 1042468 - RNA, 22 nt, Human
gaggccugcuuuggcacucugg

SEQ ID NO: 1042469 - RNA, 22 nt, Human
gcccagaguucaaggcugcagu

SEQ ID NO: 1042470 - RNA, 22 nt, Human
gaggccuggucuaugagauguu

SEQ ID NO: 1042471 - RNA, 22 nt, Human
agguggggugagcugcagacua

SEQ ID NO: 1042472 - RNA, 22 nt, Human
ggugcuggacacguggcacucc

SEQ ID NO: 1042473 - RNA, 22 nt, Human
gagggcagaaaauuaugcggug

SEQ ID NO: 1042474 - RNA, 22 nt, Human
cccugcagccuugcaugccuuc

SEQ ID NO: 1042475 - RNA, 22 nt, Human
gcagcugccccgacugugaguc

SEQ ID NO: 1042476 - RNA, 22 nt, Human
agcucccagucuccucuccaug

SEQ ID NO: 1042477 - RNA, 22 nt, Human
uggcucagauaauucaaggggc

SEQ ID NO: 1042478 - RNA, 22 nt, Human
gcugagucuugagcacugagca

SEQ ID NO: 1042479 - RNA, 22 nt, Human
cugaggucucuuuccauaguga

SEQ ID NO: 1042480 - RNA, 22 nt, Human
ugucucaggcccaagccaguaa

SEQ ID NO: 1042481 - RNA, 20 nt, Human
agcuggccuguccuaggccu

SEQ ID NO: 1042482 - RNA, 22 nt, Human
auugucuuuggugcuuccagga

SEQ ID NO: 1042483 - RNA, 22 nt, Human
agaugaagacucaggagcaggu

SEQ ID NO: 1042484 - RNA, 22 nt, Human
gcagagcccuggggguauggug

SEQ ID NO: 1042485 - RNA, 22 nt, Human
cacagggcagugcugcccacuc

SEQ ID NO: 1042486 - RNA, 22 nt, Human
aggcacugaagugguaaaugua

SEQ ID NO: 1042487 - RNA, 22 nt, Human
agucccagaucuccauucgguc

SEQ ID NO: 1042488 - RNA, 22 nt, Human
cucccaggcacagggaggagcc

SEQ ID NO: 1042489 - RNA, 22 nt, Human
gcagcaggcacggucucgacau

SEQ ID NO: 1042490 - RNA, 22 nt, Human
aaaagaggagugguuuaugaca

SEQ ID NO: 1042491 - RNA, 22 nt, Human
ggggaggcugaugugggcaaag

SEQ ID NO: 1042492 - RNA, 22 nt, Human
agugauggugagugagaagcuc

SEQ ID NO: 1042493 - RNA, 22 nt, Human
uuucauguuuucuuaaauggca

SEQ ID NO: 1042494 - RNA, 23 nt, Human
aguuuguaaagaaauauuugcac

SEQ ID NO: 1042495 - RNA, 22 nt, Human
uggcucugggcaccguguccac

SEQ ID NO: 1042496 - RNA, 22 nt, Human
cccaggcuggauuucgguggca

SEQ ID NO: 1042497 - RNA, 22 nt, Human
gcaggcaggagcccaacugccu

SEQ ID NO: 1042498 - RNA, 22 nt, Human
gcugcuccgucugagcucuggu

SEQ ID NO: 1042499 - RNA, 22 nt, Human
gugcuuccaucuagagggucac

SEQ ID NO: 1042500 - RNA, 22 nt, Human
cuggugggaggcaagguggaag

SEQ ID NO: 1042501 - RNA, 22 nt, Human
agggcagagauuaauuaagaca

SEQ ID NO: 1042502 - RNA, 22 nt, Human
ugucuguacaaauuuucugugu

SEQ ID NO: 1042503 - RNA, 22 nt, Human
acaaaguuaacaguuggauagu

SEQ ID NO: 1042504 - RNA, 22 nt, Human
aaaguucugggggagaagaacg

SEQ ID NO: 1042505 - RNA, 22 nt, Human
ugcugcucucagccaccaggaa

SEQ ID NO: 1042506 - RNA, 22 nt, Human
ucagaaauacuaucagcuuuug

SEQ ID NO: 1042507 - RNA, 22 nt, Human
ucuaggagaaccaucagggagg

SEQ ID NO: 1042508 - RNA, 22 nt, Human
ggcugcucugccuuccagcugg

SEQ ID NO: 1042509 - RNA, 22 nt, Human
uugaaaggcacaggcaccuggg

SEQ ID NO: 1042510 - RNA, 22 nt, Human
aacagcaugcuggguaacauug

SEQ ID NO: 1042511 - RNA, 22 nt, Human
cugggccuuggauugacacugu

SEQ ID NO: 1042512 - RNA, 22 nt, Human
auacauacguacauacguaugu

SEQ ID NO: 1042513 - RNA, 22 nt, Human
ugcagcuucuccaucuccuugu

SEQ ID NO: 1042514 - RNA, 22 nt, Human
caaaugcauagaaagaugaaac

SEQ ID NO: 1042515 - RNA, 22 nt, Human
ugggggagauuagagcuucuua

SEQ ID NO: 1042516 - RNA, 22 nt, Human
cugucccagauguucucagcac

SEQ ID NO: 1042517 - RNA, 22 nt, Human
ugggcagaucuuugguggcuag

SEQ ID NO: 1042518 - RNA, 20 nt, Human
ccagucccugagcaccaggg

SEQ ID NO: 1042519 - RNA, 22 nt, Human
uuaauaaacaggugcagcugaa

SEQ ID NO: 1042520 - RNA, 22 nt, Human
acaccagggccuagccagggcg

SEQ ID NO: 1042521 - RNA, 22 nt, Human
caggagcugggucuggaagcag

SEQ ID NO: 1042522 - RNA, 21 nt, Human
gagcugggcgaggcuccgggg

SEQ ID NO: 1042523 - RNA, 22 nt, Human
gugcuaggauuacaggcauggg

SEQ ID NO: 1042524 - RNA, 22 nt, Human
aguauuucuaguugguucuacu

SEQ ID NO: 1042525 - RNA, 22 nt, Human
ggacagagcccugguggccuaa

SEQ ID NO: 1042526 - RNA, 21 nt, Human
uccuucaguucugcacuuucu

SEQ ID NO: 1042527 - RNA, 22 nt, Human
gccuucaguagugucagcugua

SEQ ID NO: 1042528 - RNA, 22 nt, Human
cuccagggagcuuggaaagacc

SEQ ID NO: 1042529 - RNA, 22 nt, Human
ggcagcuccuccuagucugccc

SEQ ID NO: 1042530 - RNA, 22 nt, Human
cuuccuguugucacagucugcg

SEQ ID NO: 1042531 - RNA, 22 nt, Human
agggggaggcugugcugcgucu

SEQ ID NO: 1042532 - RNA, 22 nt, Human
guucauuuaugauguaacaugu

SEQ ID NO: 1042533 - RNA, 22 nt, Human
gcucaggacccaggugugaccu

SEQ ID NO: 1042534 - RNA, 22 nt, Human
gcccagcaccucucucaggguu

SEQ ID NO: 1042535 - RNA, 22 nt, Human
ugcugccaccccucaccagagc

SEQ ID NO: 1042536 - RNA, 22 nt, Human
gagcccuggcagucugggaugg

SEQ ID NO: 1042537 - RNA, 22 nt, Human
ggagccagcagggugacacuga

SEQ ID NO: 1042538 - RNA, 22 nt, Human
ucuccuggauggaccuucucuu

SEQ ID NO: 1042539 - RNA, 22 nt, Human
acagcagccuuguugguuucga

SEQ ID NO: 1042540 - RNA, 22 nt, Human
auaaguucagguaaagaaauca

SEQ ID NO: 1042541 - RNA, 22 nt, Human
auuucugauaaacguaagcugc

SEQ ID NO: 1042542 - RNA, 22 nt, Human
cagggcugcuggccgugcccuc

SEQ ID NO: 1042543 - RNA, 22 nt, Human
cagggcccaggccacuggguug

SEQ ID NO: 1042544 - RNA, 22 nt, Human
agccaugcaccuuacucuugcu

SEQ ID NO: 1042545 - RNA, 22 nt, Human
auuauaggcuugagccaccgug

SEQ ID NO: 1042546 - RNA, 22 nt, Human
cugcagccuccugggguacaug

SEQ ID NO: 1042547 - RNA, 22 nt, Human
gacacauagaucuaucucacuc

SEQ ID NO: 1042548 - RNA, 22 nt, Human
agccucugugacucacagguca

SEQ ID NO: 1042549 - RNA, 22 nt, Human
cuggagcccugaaugggcagga

SEQ ID NO: 1042550 - RNA, 22 nt, Human
uauaaaguuucgaaagauguau

SEQ ID NO: 1042551 - RNA, 22 nt, Human
gacagaguuguugauguaugcu

SEQ ID NO: 1042552 - RNA, 21 nt, Human
acaggcuuuagaaaaugacuc

SEQ ID NO: 1042553 - RNA, 19 nt, Human
uccuucagucagaucuggg

SEQ ID NO: 1042554 - RNA, 22 nt, Human
agggcagcacaaggcauggacu

SEQ ID NO: 1042555 - RNA, 22 nt, Human
cugggcugagccugggcugugu

SEQ ID NO: 1042556 - RNA, 22 nt, Human
ugucaugcccaggagcaaggua

SEQ ID NO: 1042557 - RNA, 22 nt, Human
cagagccccccuucugaucaca

SEQ ID NO: 1042558 - RNA, 22 nt, Human
uagaaagugaagguuaauuaau

SEQ ID NO: 1042559 - RNA, 22 nt, Human
uggaggaaaauuacuggggucu

SEQ ID NO: 1042560 - RNA, 22 nt, Human
cuggcucacuagcccugcccug

SEQ ID NO: 1042561 - RNA, 21 nt, Human
agcagcagaucuggugagggc

SEQ ID NO: 1042562 - RNA, 22 nt, Human
cagagcagaagcgguccucaca

SEQ ID NO: 1042563 - RNA, 22 nt, Human
aaguugaaugcguacgugacau

SEQ ID NO: 1042564 - RNA, 22 nt, Human
uggucucugacucugaagaccc

SEQ ID NO: 1042565 - RNA, 22 nt, Human
accugggagucacaccugagaa

SEQ ID NO: 1042566 - RNA, 22 nt, Human
ggagcugggaauuggaucaucu

SEQ ID NO: 1042567 - RNA, 22 nt, Human
uggaggaaguggcuggccagaa

SEQ ID NO: 1042568 - RNA, 18 nt, Human
cauuaugugguuauagaa

SEQ ID NO: 1042569 - RNA, 22 nt, Human
cacaggcuugucagcaugaggc

SEQ ID NO: 1042570 - RNA, 20 nt, Human
aggcagagcgcacuuuuaga

SEQ ID NO: 1042571 - RNA, 22 nt, Human
gaagccaacauuccaaguagaa

SEQ ID NO: 1042572 - RNA, 21 nt, Human
gcaggguccuuuccauuccua

SEQ ID NO: 1042573 - RNA, 22 nt, Human
uucagugugugauaccugcugu

SEQ ID NO: 1042574 - RNA, 22 nt, Human
ccucacuuuccuuucuccuggg

SEQ ID NO: 1042575 - RNA, 22 nt, Human
ccugggagggcaagugcugaug

SEQ ID NO: 1042576 - RNA, 22 nt, Human
aaaguuugcaauuuauguuaau

SEQ ID NO: 1042577 - RNA, 22 nt, Human
gcucccaccuuugcuaucagua

SEQ ID NO: 1042578 - RNA, 22 nt, Human
uagcccagagucccaauuccag

SEQ ID NO: 1042579 - RNA, 22 nt, Human
cacccaggcagguggcugagaa

SEQ ID NO: 1042580 - RNA, 22 nt, Human
agugcugaagacuggcuaggga

SEQ ID NO: 1042581 - RNA, 22 nt, Human
uggcagagagagugcagucgac

SEQ ID NO: 1042582 - RNA, 22 nt, Human
gaacaauagugguaacaaagcc

SEQ ID NO: 1042583 - RNA, 22 nt, Human
ccuggaggagcgcugaccagcu

SEQ ID NO: 1042584 - RNA, 22 nt, Human
uaauacuuuugccuuguauuca

SEQ ID NO: 1042585 - RNA, 20 nt, Human
aagagcauaguacaggaaga

SEQ ID NO: 1042586 - RNA, 20 nt, Human
ugggccuguggcagaagucu

SEQ ID NO: 1042587 - RNA, 22 nt, Human
augaaaacuuuagccucauuag

SEQ ID NO: 1042588 - RNA, 22 nt, Human
ccagcauggcaccugagaugag

SEQ ID NO: 1042589 - RNA, 22 nt, Human
ugaaaucuacccuauucagggu

SEQ ID NO: 1042590 - RNA, 18 nt, Human
uggcagggaggaaauaua

SEQ ID NO: 1042591 - RNA, 22 nt, Human
aagagcuggauugugcugcaga

SEQ ID NO: 1042592 - RNA, 22 nt, Human
agaggagcugggaggcccucgu

SEQ ID NO: 1042593 - RNA, 22 nt, Human
ucaaugauaguacaaucagccu

SEQ ID NO: 1042594 - RNA, 22 nt, Human
gaaaccucuuagccucucuuug

SEQ ID NO: 1042595 - RNA, 22 nt, Human
guggccucuguuggcuccuagg

SEQ ID NO: 1042596 - RNA, 22 nt, Human
cuucagaacuauaaaaaguacu

SEQ ID NO: 1042597 - RNA, 22 nt, Human
gccuggagggcucuagagaggc

SEQ ID NO: 1042598 - RNA, 22 nt, Human
acacaugagaaacaucaguugu

SEQ ID NO: 1042599 - RNA, 22 nt, Human
ucugcucagugcuuaucucuaa

SEQ ID NO: 1042600 - RNA, 22 nt, Human
aaaugcagguaguauuuauuuu

SEQ ID NO: 1042601 - RNA, 22 nt, Human
agaugcugcuccacaggccagg

SEQ ID NO: 1042602 - RNA, 22 nt, Human
gccgaagcugccgucugguccu

SEQ ID NO: 1042603 - RNA, 22 nt, Human
uuucacaaguuucaggauucug

SEQ ID NO: 1042604 - RNA, 22 nt, Human
agcugcccccagggcugugcuu

SEQ ID NO: 1042605 - RNA, 22 nt, Human
uacaguuuguuacauuguuagu

SEQ ID NO: 1042606 - RNA, 21 nt, Human
cugcucugacagugaggccag

SEQ ID NO: 1042607 - RNA, 22 nt, Human
ucacaccuguaaucccaggccu

SEQ ID NO: 1042608 - RNA, 18 nt, Human
ccauuucaugauuauuac

SEQ ID NO: 1042609 - RNA, 22 nt, Human
uuacaaaguucugaguucaaac

SEQ ID NO: 1042610 - RNA, 22 nt, Human
ucccaggacaggccacauggaa

SEQ ID NO: 1042611 - RNA, 22 nt, Human
agaagccagcuucagcugcccg

SEQ ID NO: 1042612 - RNA, 22 nt, Human
augcuuuacaguuuuccaaaca

SEQ ID NO: 1042613 - RNA, 22 nt, Human
aggcaucugaguuugcaagcuu

SEQ ID NO: 1042614 - RNA, 22 nt, Human
ccuggccacucagguguggggc

SEQ ID NO: 1042615 - RNA, 22 nt, Human
gcugccuguggcccuucugggu

SEQ ID NO: 1042616 - RNA, 20 nt, Human
aguaggggaaugcaagagca

SEQ ID NO: 1042617 - RNA, 19 nt, Human
ggcugccuuuccuuaccag

SEQ ID NO: 1042618 - RNA, 22 nt, Human
cccucagcuucucccugcagcu

SEQ ID NO: 1042619 - RNA, 22 nt, Human
gggcacagagggucuugaagaa

SEQ ID NO: 1042620 - RNA, 22 nt, Human
gacagcagggacauguaggaag

SEQ ID NO: 1042621 - RNA, 17 nt, Human
cacaggugugguuugag

SEQ ID NO: 1042622 - RNA, 22 nt, Human
uaguuacagcaggcaggauaua

SEQ ID NO: 1042623 - RNA, 22 nt, Human
ugcauugcaguuaacucaguau

SEQ ID NO: 1042624 - RNA, 18 nt, Human
uucagcagcagacacacu

SEQ ID NO: 1042625 - RNA, 22 nt, Human
ugcuggggauccguaccaaccc

SEQ ID NO: 1042626 - RNA, 22 nt, Human
gagcucugggaaacaaagugua

SEQ ID NO: 1042627 - RNA, 22 nt, Human
caggcugccgugaagcaggccu

SEQ ID NO: 1042628 - RNA, 22 nt, Human
gcuggagcugcagccugggccu

SEQ ID NO: 1042629 - RNA, 22 nt, Human
cucucccccacagcagccuucu

SEQ ID NO: 1042630 - RNA, 22 nt, Human
uguucuugagccuuuagaccua

SEQ ID NO: 1042631 - RNA, 19 nt, Human
ggcagaagguguaggggga

SEQ ID NO: 1042632 - RNA, 17 nt, Human
cauguguaugugggagu

SEQ ID NO: 1042633 - RNA, 18 nt, Human
acagaggcagacauguau

SEQ ID NO: 1042634 - RNA, 22 nt, Human
uggcucaggugugagcugaaga

SEQ ID NO: 1042635 - RNA, 22 nt, Human
ccugugcauccgguggucauug

SEQ ID NO: 1042636 - RNA, 22 nt, Human
ccaggagcuggagggugcagug

SEQ ID NO: 1042637 - RNA, 22 nt, Human
gcacugcagguggguggagagg

SEQ ID NO: 1042638 - RNA, 22 nt, Human
ggcucccugccuguccucaguc

SEQ ID NO: 1042639 - RNA, 19 nt, Human
caguggccuggaggucucu

SEQ ID NO: 1042640 - RNA, 22 nt, Human
aggcagaggaaggguggauuug

SEQ ID NO: 1042641 - RNA, 22 nt, Human
agagauucauguuuacuguagg

SEQ ID NO: 1042642 - RNA, 18 nt, Human
uccugccugcgggcuccc

SEQ ID NO: 1042643 - RNA, 22 nt, Human
ggccauggaccccgagcugacc

SEQ ID NO: 1042644 - RNA, 22 nt, Human
acuuucucccacccacccgucu

SEQ ID NO: 1042645 - RNA, 22 nt, Human
ucugggcuugguuagggcuguu

SEQ ID NO: 1042646 - RNA, 21 nt, Human
agcagaacagucgagcacugc

SEQ ID NO: 1042647 - RNA, 22 nt, Human
cauuucugcagaauugcucuuc

SEQ ID NO: 1042648 - RNA, 20 nt, Human
ugcucaggauggagaggugu

SEQ ID NO: 1042649 - RNA, 22 nt, Human
cagcuggcaaguggagcagggu

SEQ ID NO: 1042650 - RNA, 22 nt, Human
agcagggggaguuagacuagau

SEQ ID NO: 1042651 - RNA, 22 nt, Human
aggagcugcuuaaaugguuggu

SEQ ID NO: 1042652 - RNA, 22 nt, Human
auaugcacauacauacauaggu

SEQ ID NO: 1042653 - RNA, 22 nt, Human
cacauuuaauccuuuauaagua

SEQ ID NO: 1042654 - RNA, 22 nt, Human
ucagggcacaggccuguggguu

SEQ ID NO: 1042655 - RNA, 22 nt, Human
ugcuggaggaguuuacuguggc

SEQ ID NO: 1042656 - RNA, 22 nt, Human
uucaagucaaggaaagaggucu

SEQ ID NO: 1042657 - RNA, 22 nt, Human
cagacuugacggcagcugcuuu

SEQ ID NO: 1042658 - RNA, 22 nt, Human
ugugaaagucaaauuaauugaa

SEQ ID NO: 1042659 - RNA, 22 nt, Human
gcacacaguauaugcucauuaa

SEQ ID NO: 1042660 - RNA, 22 nt, Human
uggagccagcccaggccccucu

SEQ ID NO: 1042661 - RNA, 22 nt, Human
ucagcaauccucccacaggugg

SEQ ID NO: 1042662 - RNA, 22 nt, Human
uucuuuccccauggaguucgga

SEQ ID NO: 1042663 - RNA, 22 nt, Human
ucacaacucuuuccauuuaaua

SEQ ID NO: 1042664 - RNA, 22 nt, Human
ccaggaguuggagguugcagug

SEQ ID NO: 1042665 - RNA, 23 nt, Human
uggcucugagagguucagaugcu

SEQ ID NO: 1042666 - RNA, 22 nt, Human
agggggugcuacuuccagaguu

SEQ ID NO: 1042667 - RNA, 22 nt, Human
ugagccuggggccugggcagcg

SEQ ID NO: 1042668 - RNA, 22 nt, Human
caggaggcccaaagggcgcaga

SEQ ID NO: 1042669 - RNA, 22 nt, Human
ucucucagggggaaggcugaag

SEQ ID NO: 1042670 - RNA, 22 nt, Human
ugucugguggguugacaggcag

SEQ ID NO: 1042671 - RNA, 22 nt, Human
ggguggaguagaaagaugaauu

SEQ ID NO: 1042672 - RNA, 22 nt, Human
ugggauaguggccaggaccccc

SEQ ID NO: 1042673 - RNA, 18 nt, Human
gggcauggaugcagcauc

SEQ ID NO: 1042674 - RNA, 21 nt, Human
ucauuuuuauugcuaccuugc

SEQ ID NO: 1042675 - RNA, 22 nt, Human
uauuuauaaucugccaaagaga

SEQ ID NO: 1042676 - RNA, 22 nt, Human
uugagggucuggaucugcugcu

SEQ ID NO: 1042677 - RNA, 22 nt, Human
ugggcagaauugugguaguuaa

SEQ ID NO: 1042678 - RNA, 22 nt, Human
cagaggcuguguaggcagacug

SEQ ID NO: 1042679 - RNA, 22 nt, Human
caaggaaaacagaugaucaaca

SEQ ID NO: 1042680 - RNA, 22 nt, Human
cagggcaguuugugccuaugag

SEQ ID NO: 1042681 - RNA, 22 nt, Human
gagggggcgugcaaggcuccgc

SEQ ID NO: 1042682 - RNA, 22 nt, Human
gcaggagugacauggaugugga

SEQ ID NO: 1042683 - RNA, 22 nt, Human
cucuccuccaacagcccugccg

SEQ ID NO: 1042684 - RNA, 21 nt, Human
gcucccuggcugugugaccug

SEQ ID NO: 1042685 - RNA, 22 nt, Human
gcucugaggcugggagcacucu

SEQ ID NO: 1042686 - RNA, 22 nt, Human
cagcaaaagccagcauaagcuc

SEQ ID NO: 1042687 - RNA, 22 nt, Human
aggcaguggcugagaccagggg

SEQ ID NO: 1042688 - RNA, 22 nt, Human
ggugaagggccuuaggagacag

SEQ ID NO: 1042689 - RNA, 22 nt, Human
ggggaugguagaccggugacgu

SEQ ID NO: 1042690 - RNA, 21 nt, Human
aggcacuguuugugguuuggg

SEQ ID NO: 1042691 - RNA, 22 nt, Human
ggccucucuccagucagugcag

SEQ ID NO: 1042692 - RNA, 20 nt, Human
ccuaggcaugcugagucucc

SEQ ID NO: 1042693 - RNA, 22 nt, Human
ugggccagcaauugcugcucag

SEQ ID NO: 1042694 - RNA, 22 nt, Human
agcugucuaccugcagaguccu

SEQ ID NO: 1042695 - RNA, 22 nt, Human
ucagguggcuucggggaguggc

SEQ ID NO: 1042696 - RNA, 22 nt, Human
ccuuugggugaauuccucucuu

SEQ ID NO: 1042697 - RNA, 22 nt, Human
gccacccccaaguagguggucu

SEQ ID NO: 1042698 - RNA, 22 nt, Human
ugcacacaaguuggagaaugaa

SEQ ID NO: 1042699 - RNA, 22 nt, Human
acuuaguauuuuucagcuuuga

SEQ ID NO: 1042700 - RNA, 22 nt, Human
aaguucaagucuccugaguaua

SEQ ID NO: 1042701 - RNA, 22 nt, Human
ccagggugugggcgucggcacg

SEQ ID NO: 1042702 - RNA, 22 nt, Human
cagagcugcaaaugccccuccg

SEQ ID NO: 1042703 - RNA, 22 nt, Human
ggcuccugggaugggacugagc

SEQ ID NO: 1042704 - RNA, 22 nt, Human
aaguucaaggcagguccugagg

SEQ ID NO: 1042705 - RNA, 22 nt, Human
ucagaagcauguggggagccug

SEQ ID NO: 1042706 - RNA, 23 nt, Human
gucagggcuggggucagagugac

SEQ ID NO: 1042707 - RNA, 22 nt, Human
gagagcacaugaacauggagga

SEQ ID NO: 1042708 - RNA, 22 nt, Human
ugcuggggucauggggcgcccg

SEQ ID NO: 1042709 - RNA, 22 nt, Human
uagggcaggggaggaaucugaa

SEQ ID NO: 1042710 - RNA, 20 nt, Human
ccaagagcaugcaugaggaa

SEQ ID NO: 1042711 - RNA, 21 nt, Human
aggagcuguguuagcuggucg

SEQ ID NO: 1042712 - RNA, 22 nt, Human
uaagacaugguugaucuagugu

SEQ ID NO: 1042713 - RNA, 22 nt, Human
uuagaaaugauuucaccucuuu

SEQ ID NO: 1042714 - RNA, 22 nt, Human
gucccuggucuaccguggcuuc

SEQ ID NO: 1042715 - RNA, 23 nt, Human
ccacagagcugccaauuccugug

SEQ ID NO: 1042716 - RNA, 22 nt, Human
agccacagagguugaugugguu

SEQ ID NO: 1042717 - RNA, 22 nt, Human
caugggagcuaucuccaucacu

SEQ ID NO: 1042718 - RNA, 22 nt, Human
cagagcuggagaaguggauuua

SEQ ID NO: 1042719 - RNA, 22 nt, Human
aaaguuacuaucacaaugaaau

SEQ ID NO: 1042720 - RNA, 22 nt, Human
gagcuggugaucagcuggagga

SEQ ID NO: 1042721 - RNA, 22 nt, Human
ggccucugggguccugagccca

SEQ ID NO: 1042722 - RNA, 22 nt, Human
ggaaagaggauaguggguaggu

SEQ ID NO: 1042723 - RNA, 22 nt, Human
ugccagugggugugcagagacu

SEQ ID NO: 1042724 - RNA, 22 nt, Human
ccucugggugggaggccgggcg

SEQ ID NO: 1042725 - RNA, 22 nt, Human
uacauuccauguguguguauuc

SEQ ID NO: 1042726 - RNA, 22 nt, Human
gcagcuggcucagagagguggg

SEQ ID NO: 1042727 - RNA, 22 nt, Human
aaaaaaucagaucuuugguuaa

SEQ ID NO: 1042728 - RNA, 22 nt, Human
aggucauuccuugucuucuugc

SEQ ID NO: 1042729 - RNA, 22 nt, Human
uuuuuccuagugcuuucuggua

SEQ ID NO: 1042730 - RNA, 22 nt, Human
ccaaggcuccucagcuggucuu

SEQ ID NO: 1042731 - RNA, 22 nt, Human
aguuuguaucaauuugcuuuau

SEQ ID NO: 1042732 - RNA, 22 nt, Human
uaggcagcugcaaacuucgguc

SEQ ID NO: 1042733 - RNA, 22 nt, Human
agcugggccugagcuggaagcu

SEQ ID NO: 1042734 - RNA, 22 nt, Human
ugauuuccaugaagcugaaggc

SEQ ID NO: 1042735 - RNA, 22 nt, Human
uuagaaaggagcuuauuucuuu

SEQ ID NO: 1042736 - RNA, 22 nt, Human
uccagaggcuccaaagggagau

SEQ ID NO: 1042737 - RNA, 22 nt, Human
gaguggggcguggauccagcgu

SEQ ID NO: 1042738 - RNA, 22 nt, Human
gcugccugggcaggaggcgcug

SEQ ID NO: 1042739 - RNA, 22 nt, Human
uggcagcacaagguggcccaug

SEQ ID NO: 1042740 - RNA, 18 nt, Human
uccagagcuacuguggug

SEQ ID NO: 1042741 - RNA, 22 nt, Human
ccugugugcugaugacgacaga

SEQ ID NO: 1042742 - RNA, 20 nt, Human
cccucugcacauggcugugg

SEQ ID NO: 1042743 - RNA, 22 nt, Human
ggagcagagcugggcuuggcug

SEQ ID NO: 1042744 - RNA, 22 nt, Human
aggucauuaaaguuaaaugagg

SEQ ID NO: 1042745 - RNA, 22 nt, Human
acagagguguuccagaccuagg

SEQ ID NO: 1042746 - RNA, 22 nt, Human
ggcuucucucuucacauggcuu

SEQ ID NO: 1042747 - RNA, 22 nt, Human
ugacaccacaacuagccauuga

SEQ ID NO: 1042748 - RNA, 17 nt, Human
cagacagauauccuggg

SEQ ID NO: 1042749 - RNA, 22 nt, Human
aaauguguguauguacauauau

SEQ ID NO: 1042750 - RNA, 22 nt, Human
agucucagaaaagaagcaugga

SEQ ID NO: 1042751 - RNA, 22 nt, Human
uuugcauuacuugacuuuaguu

SEQ ID NO: 1042752 - RNA, 21 nt, Human
ugccagcauguaggcuaguug

SEQ ID NO: 1042753 - RNA, 22 nt, Human
cccagcccccgagugucuggaa

SEQ ID NO: 1042754 - RNA, 22 nt, Human
aggcucagagaugaguaagcac

SEQ ID NO: 1042755 - RNA, 22 nt, Human
augucccaagauacagcuagag

SEQ ID NO: 1042756 - RNA, 22 nt, Human
ccuucucuacuccugaugcaug

SEQ ID NO: 1042757 - RNA, 19 nt, Human
auuccucaaggacagaaau

SEQ ID NO: 1042758 - RNA, 22 nt, Human
ugucauaaaacacaagcuguug

SEQ ID NO: 1042759 - RNA, 22 nt, Human
gggcuggcucccagguguugaa

SEQ ID NO: 1042760 - RNA, 22 nt, Human
ggagccugggcauuaguaauuu

SEQ ID NO: 1042761 - RNA, 22 nt, Human
caguccuggggaccaggcugag

SEQ ID NO: 1042762 - RNA, 22 nt, Human
ucccacugcuuugcucugcuca

SEQ ID NO: 1042763 - RNA, 22 nt, Human
auucuucacuguuucagaauga

SEQ ID NO: 1042764 - RNA, 22 nt, Human
caaagguaguauauauauuguu

SEQ ID NO: 1042765 - RNA, 18 nt, Human
ugaacagaugaguugaag

SEQ ID NO: 1042766 - RNA, 22 nt, Human
agguggccggugccagccgggc

SEQ ID NO: 1042767 - RNA, 22 nt, Human
gcaagcuggcuguuagaggaug

SEQ ID NO: 1042768 - RNA, 22 nt, Human
uuuccucuaaacgcauuugcuu

SEQ ID NO: 1042769 - RNA, 22 nt, Human
uaccaggcagcugcacagaggc

SEQ ID NO: 1042770 - RNA, 22 nt, Human
ccagagugacgugaagugugaa

SEQ ID NO: 1042771 - RNA, 22 nt, Human
cauuucugggagacaugcuaga

SEQ ID NO: 1042772 - RNA, 22 nt, Human
uguggugagaaacugguagauu

SEQ ID NO: 1042773 - RNA, 21 nt, Human
gauuucacuuaccuucauuua

SEQ ID NO: 1042774 - RNA, 22 nt, Human
ucuuugcaggagcccuuugaac

SEQ ID NO: 1042775 - RNA, 22 nt, Human
auaguaacuggcauguuuauga

SEQ ID NO: 1042776 - RNA, 22 nt, Human
acaggcuuuuuuagaaugacau

SEQ ID NO: 1042777 - RNA, 22 nt, Human
gccagaaacauacacaucacuu

SEQ ID NO: 1042778 - RNA, 22 nt, Human
gcagcuggcccugacacgcaga

SEQ ID NO: 1042779 - RNA, 22 nt, Human
guuauguacuuuuuaaaucuug

SEQ ID NO: 1042780 - RNA, 22 nt, Human
accugagggcccaaacuuggua

SEQ ID NO: 1042781 - RNA, 22 nt, Human
cugggcacacagugacucugca

SEQ ID NO: 1042782 - RNA, 22 nt, Human
acccagcucuuugauggucuug

SEQ ID NO: 1042783 - RNA, 21 nt, Human
cagaaguaaggguaacuucuc

SEQ ID NO: 1042784 - RNA, 22 nt, Human
uauaacacucagaaagaaucau

SEQ ID NO: 1042785 - RNA, 22 nt, Human
ccucuucugagugagacucccu

SEQ ID NO: 1042786 - RNA, 22 nt, Human
agagccagagaccuggguucac

SEQ ID NO: 1042787 - RNA, 22 nt, Human
cuucuggggauggagcccagaa

SEQ ID NO: 1042788 - RNA, 22 nt, Human
aggcagaauguuggaaaggaag

SEQ ID NO: 1042789 - RNA, 22 nt, Human
cacugaaggacaguaggaaggg

SEQ ID NO: 1042790 - RNA, 22 nt, Human
uagcagugccaggauuuugcug

SEQ ID NO: 1042791 - RNA, 22 nt, Human
gccugccucaaaaucccaguuc

SEQ ID NO: 1042792 - RNA, 22 nt, Human
cuuagaaaugcagauucucagg

SEQ ID NO: 1042793 - RNA, 22 nt, Human
guuugcauggaagacagugagu

SEQ ID NO: 1042794 - RNA, 22 nt, Human
agauuucccaaauacuuguuau

SEQ ID NO: 1042795 - RNA, 22 nt, Human
uguccucacaggaaugaacuuu

SEQ ID NO: 1042796 - RNA, 22 nt, Human
ucagcagggccuccuugugcag

SEQ ID NO: 1042797 - RNA, 22 nt, Human
auaucuuuguuuuugccaagau

SEQ ID NO: 1042798 - RNA, 22 nt, Human
ugaaggugucuuugugaacauc

SEQ ID NO: 1042799 - RNA, 22 nt, Human
ucugagcuggagcccaucaccu

SEQ ID NO: 1042800 - RNA, 22 nt, Human
auguuuauguugggcuauauuu

SEQ ID NO: 1042801 - RNA, 22 nt, Human
gggcagcugcagggauggugac

SEQ ID NO: 1042802 - RNA, 22 nt, Human
cuccuucccuucaaguguuccu

SEQ ID NO: 1042803 - RNA, 22 nt, Human
gugcucuccuggcugcccugac

SEQ ID NO: 1042804 - RNA, 22 nt, Human
uccucagggaagaugagccuca

SEQ ID NO: 1042805 - RNA, 22 nt, Human
ccaggcucugcgcuggacaugg

SEQ ID NO: 1042806 - RNA, 22 nt, Human
cugagccaaccacagcaggagc

SEQ ID NO: 1042807 - RNA, 22 nt, Human
ugcauauuauguguaucugucu

SEQ ID NO: 1042808 - RNA, 22 nt, Human
agguaacacuacuuaguauacu

SEQ ID NO: 1042809 - RNA, 22 nt, Human
aucuacaggauuuuacagaguu

SEQ ID NO: 1042810 - RNA, 20 nt, Human
uuccuguauacaaagaguuc

SEQ ID NO: 1042811 - RNA, 22 nt, Human
gcugucugcugggucgcucagg

SEQ ID NO: 1042812 - RNA, 18 nt, Human
gucaccuggaucagauua

SEQ ID NO: 1042813 - RNA, 22 nt, Human
uacauucuacuuuuucacuccc

SEQ ID NO: 1042814 - RNA, 22 nt, Human
gccaggcagauaugugagcuua

SEQ ID NO: 1042815 - RNA, 22 nt, Human
acacagggcugcgccugacccc

SEQ ID NO: 1042816 - RNA, 19 nt, Human
accaggcuuauggucagug

SEQ ID NO: 1042817 - RNA, 22 nt, Human
ccugagagcgaguggccucaug

SEQ ID NO: 1042818 - RNA, 22 nt, Human
ccuggcagcgugccgagcugcg

SEQ ID NO: 1042819 - RNA, 22 nt, Human
ucauugcagacuaacaaucuca

SEQ ID NO: 1042820 - RNA, 22 nt, Human
acauuucuuucuauucaguagc

SEQ ID NO: 1042821 - RNA, 22 nt, Human
acaggcucucagccaguuggca

SEQ ID NO: 1042822 - RNA, 22 nt, Human
aaucaguuguucacucugaaaa

SEQ ID NO: 1042823 - RNA, 22 nt, Human
aguuuuuccguggcuacgauaa

SEQ ID NO: 1042824 - RNA, 22 nt, Human
uccuugaagcuuguaucuaaua

SEQ ID NO: 1042825 - RNA, 22 nt, Human
ccacugucagaggggcugugcc

SEQ ID NO: 1042826 - RNA, 22 nt, Human
caagacaagaucuaagcaugcu

SEQ ID NO: 1042827 - RNA, 22 nt, Human
guaaaguucuauuugaauuuag

SEQ ID NO: 1042828 - RNA, 22 nt, Human
cacccagcagcacuuaagacua

SEQ ID NO: 1042829 - RNA, 21 nt, Human
uuuuuucuugcgugaggccug

SEQ ID NO: 1042830 - RNA, 22 nt, Human
agccacaggaaacagagacagc

SEQ ID NO: 1042831 - RNA, 22 nt, Human
ucauugcacuccagccugggca

SEQ ID NO: 1042832 - RNA, 22 nt, Human
cccaaggcugcagugagcauga

SEQ ID NO: 1042833 - RNA, 22 nt, Human
ccacccuuggguucggaggccg

SEQ ID NO: 1042834 - RNA, 22 nt, Human
aaauuuaagaagugugugcgug

SEQ ID NO: 1042835 - RNA, 22 nt, Human
ugggcagauuaaugcaguggcu

SEQ ID NO: 1042836 - RNA, 22 nt, Human
gagggggagaugugcacacacu

SEQ ID NO: 1042837 - RNA, 23 nt, Human
gugcucugcggucugcuagucug

SEQ ID NO: 1042838 - RNA, 22 nt, Human
uggcucagcauucacuggucuu

SEQ ID NO: 1042839 - RNA, 22 nt, Human
aggagcugggcugcugcuggga

SEQ ID NO: 1042840 - RNA, 22 nt, Human
gggacuguaaauucauauggcc

SEQ ID NO: 1042841 - RNA, 22 nt, Human
ccagagcccgggaccuggacuu

SEQ ID NO: 1042842 - RNA, 22 nt, Human
ucaccuuagcuagaggaagaga

SEQ ID NO: 1042843 - RNA, 22 nt, Human
caguacuucuuggaaacuggau

SEQ ID NO: 1042844 - RNA, 19 nt, Human
gcaggcaguggcauucgga

SEQ ID NO: 1042845 - RNA, 22 nt, Human
gagcugcuucugugugccgggu

SEQ ID NO: 1042846 - RNA, 22 nt, Human
uccagggccaagucauggaacc

SEQ ID NO: 1042847 - RNA, 22 nt, Human
cccagggacagaugggcagcua

SEQ ID NO: 1042848 - RNA, 22 nt, Human
aggaccaacauagcagcagugg

SEQ ID NO: 1042849 - RNA, 22 nt, Human
uuggagcccugaggaucuggau

SEQ ID NO: 1042850 - RNA, 22 nt, Human
aaauguagaccuauagggaccu

SEQ ID NO: 1042851 - RNA, 22 nt, Human
ggaggccuagccagcuccaguu

SEQ ID NO: 1042852 - RNA, 22 nt, Human
agggugcauguuugcaagagug

SEQ ID NO: 1042853 - RNA, 22 nt, Human
gaggcaggcccugaaugaguca

SEQ ID NO: 1042854 - RNA, 22 nt, Human
auguaucaauuaucugucugca

SEQ ID NO: 1042855 - RNA, 22 nt, Human
uggggaagggcacccuggagac

SEQ ID NO: 1042856 - RNA, 22 nt, Human
uuugggaacucuaucauggaaa

SEQ ID NO: 1042857 - RNA, 22 nt, Human
agagugaagguugacacuucac

SEQ ID NO: 1042858 - RNA, 22 nt, Human
agcaauauuuaaagguuugcaa

SEQ ID NO: 1042859 - RNA, 22 nt, Human
cuggagcugucuucacaggccu

SEQ ID NO: 1042860 - RNA, 22 nt, Human
uuauguauggauggcugaaagu

SEQ ID NO: 1042861 - RNA, 22 nt, Human
gggaguguugagcgcccugcca

SEQ ID NO: 1042862 - RNA, 22 nt, Human
gccugccuggagcuugagguga

SEQ ID NO: 1042863 - RNA, 22 nt, Human
gcagagcuaucuucuggauuug

SEQ ID NO: 1042864 - RNA, 22 nt, Human
agggccugggguagcuuacugc

SEQ ID NO: 1042865 - RNA, 22 nt, Human
aagcaaagaguuuaguggguga

SEQ ID NO: 1042866 - RNA, 18 nt, Human
gcccugguggagcuggug

SEQ ID NO: 1042867 - RNA, 21 nt, Human
aaagaacaggcagauguucuu

SEQ ID NO: 1042868 - RNA, 22 nt, Human
gcguaaggccucuggucucgga

SEQ ID NO: 1042869 - RNA, 22 nt, Human
gcaggagcuggaaagugauguu

SEQ ID NO: 1042870 - RNA, 22 nt, Human
aggccuccuggcuccaggccuu

SEQ ID NO: 1042871 - RNA, 20 nt, Human
ugcagcugcaggaggguggg

SEQ ID NO: 1042872 - RNA, 22 nt, Human
gggcucugcgcucagcuccagc

SEQ ID NO: 1042873 - RNA, 22 nt, Human
ucaaugaugcugaagguagcgu

SEQ ID NO: 1042874 - RNA, 18 nt, Human
cacaggcucccagugagg

SEQ ID NO: 1042875 - RNA, 22 nt, Human
ugggccuguugggguugaguua

SEQ ID NO: 1042876 - RNA, 22 nt, Human
ccuggcuccugccucugcaggg

SEQ ID NO: 1042877 - RNA, 22 nt, Human
gcaggccucuguugagggccuu

SEQ ID NO: 1042878 - RNA, 22 nt, Human
caguacuuuucuggcuuucuac

SEQ ID NO: 1042879 - RNA, 22 nt, Human
uacuguauuugauaagugaagu

SEQ ID NO: 1042880 - RNA, 22 nt, Human
guccuggggauuauagaguguu

SEQ ID NO: 1042881 - RNA, 22 nt, Human
aaauaauugaguuggucaauau

SEQ ID NO: 1042882 - RNA, 22 nt, Human
ggguccagacacuccagaggaa

SEQ ID NO: 1042883 - RNA, 22 nt, Human
uuuuuccuuggaugugucucuc

SEQ ID NO: 1042884 - RNA, 22 nt, Human
gaggucaggggagaggcugaug

SEQ ID NO: 1042885 - RNA, 22 nt, Human
aagcugccauagaacgagaggu

SEQ ID NO: 1042886 - RNA, 21 nt, Human
uauacaugugugcauacgugu

SEQ ID NO: 1042887 - RNA, 22 nt, Human
aucuagaaaguguugaagauca

SEQ ID NO: 1042888 - RNA, 22 nt, Human
gugcaggggaucagguugcagc

SEQ ID NO: 1042889 - RNA, 22 nt, Human
ugagcaguaggucugaauagug

SEQ ID NO: 1042890 - RNA, 22 nt, Human
gcagugacagggcugcugccuu

SEQ ID NO: 1042891 - RNA, 17 nt, Human
uguuccauuugaccacc

SEQ ID NO: 1042892 - RNA, 22 nt, Human
cugucucuguugccuguaggug

SEQ ID NO: 1042893 - RNA, 22 nt, Human
aggaaucccgcaccagcugcug

SEQ ID NO: 1042894 - RNA, 22 nt, Human
uuauguaauuuguuugcucuuc

SEQ ID NO: 1042895 - RNA, 22 nt, Human
uguuuuaugagccauauaaccu

SEQ ID NO: 1042896 - RNA, 22 nt, Human
ggccuugggaggagggucagaa

SEQ ID NO: 1042897 - RNA, 22 nt, Human
cagggugccuguccucagcaaa

SEQ ID NO: 1042898 - RNA, 22 nt, Human
ugccugcuaggcccugcugggu

SEQ ID NO: 1042899 - RNA, 22 nt, Human
gucagaggaauggaugagugau

SEQ ID NO: 1042900 - RNA, 22 nt, Human
aguuauauaacuaucuagaugc

SEQ ID NO: 1042901 - RNA, 22 nt, Human
cagccccucccucaggcaggug

SEQ ID NO: 1042902 - RNA, 22 nt, Human
cgggcagaucacacagggcuug

SEQ ID NO: 1042903 - RNA, 22 nt, Human
ucacaugcuugaggaaagaaaa

SEQ ID NO: 1042904 - RNA, 22 nt, Human
agccuguccagaggacagggcu

SEQ ID NO: 1042905 - RNA, 22 nt, Human
ggucccugaagaggccuggggu

SEQ ID NO: 1042906 - RNA, 22 nt, Human
cagcuggcagaaccugcaucca

SEQ ID NO: 1042907 - RNA, 22 nt, Human
ugcccaggaucuggcgaugcuc

SEQ ID NO: 1042908 - RNA, 22 nt, Human
gaguuguucaacgugugugaaa

SEQ ID NO: 1042909 - RNA, 22 nt, Human
uugauacaggccuucuagauga

SEQ ID NO: 1042910 - RNA, 22 nt, Human
uggcagagcccagacuccaguc

SEQ ID NO: 1042911 - RNA, 23 nt, Human
cugucuccugggcuagguggaau

SEQ ID NO: 1042912 - RNA, 22 nt, Human
aagguacaaaguauuauuuaaa

SEQ ID NO: 1042913 - RNA, 22 nt, Human
ugucaugccaccguuucccaga

SEQ ID NO: 1042914 - RNA, 22 nt, Human
acucucucacagcuuggcugau

SEQ ID NO: 1042915 - RNA, 22 nt, Human
agcauuuaugacuaauguaaaa

SEQ ID NO: 1042916 - RNA, 22 nt, Human
gccuggguccacugaucaugcu

SEQ ID NO: 1042917 - RNA, 22 nt, Human
ccugaggcuuaaucugucccaa

SEQ ID NO: 1042918 - RNA, 22 nt, Human
ggagaguggauuccagcuguau

SEQ ID NO: 1042919 - RNA, 22 nt, Human
ugucucugaacagcuuacuaaa

SEQ ID NO: 1042920 - RNA, 22 nt, Human
uaugcacgucuauuuaugaaga

SEQ ID NO: 1042921 - RNA, 22 nt, Human
uaaaucucacuggguauauugg

SEQ ID NO: 1042922 - RNA, 22 nt, Human
ugaagcaggcauugacugauga

SEQ ID NO: 1042923 - RNA, 22 nt, Human
ugggcugcuucuauuggugguc

SEQ ID NO: 1042924 - RNA, 22 nt, Human
ggccucugccccagccacaccu

SEQ ID NO: 1042925 - RNA, 22 nt, Human
agggcugcaccggggcuucgcg

SEQ ID NO: 1042926 - RNA, 22 nt, Human
uggcagcacuagguacugagcu

SEQ ID NO: 1042927 - RNA, 22 nt, Human
guuuuguugcugcagagcucaa

SEQ ID NO: 1042928 - RNA, 22 nt, Human
auguccuuugcuucucuggucc

SEQ ID NO: 1042929 - RNA, 22 nt, Human
gaggggcucuugggcaugaagg

SEQ ID NO: 1042930 - RNA, 22 nt, Human
cccaggaggcagaaguugcagu

SEQ ID NO: 1042931 - RNA, 22 nt, Human
ccagcucuggcuucuugcuggg

SEQ ID NO: 1042932 - RNA, 22 nt, Human
gccaggugcuaucccugcgcug

SEQ ID NO: 1042933 - RNA, 22 nt, Human
cagauaaaggcuuacuaguagu

SEQ ID NO: 1042934 - RNA, 22 nt, Human
cugggaggugaacagaaaaacu

SEQ ID NO: 1042935 - RNA, 22 nt, Human
uuggcugagagaggaaaagggc

SEQ ID NO: 1042936 - RNA, 22 nt, Human
ugagcuuacuucuguacacaga

SEQ ID NO: 1042937 - RNA, 22 nt, Human
aagaauguucauuaaacuguug

SEQ ID NO: 1042938 - RNA, 22 nt, Human
ucccuggacagccuugccuggg

SEQ ID NO: 1042939 - RNA, 22 nt, Human
uggcuuccuggacagaugcggu

SEQ ID NO: 1042940 - RNA, 22 nt, Human
gugccugugccaggggugugcu

SEQ ID NO: 1042941 - RNA, 22 nt, Human
uagaaaucuacuuagacuuucu

SEQ ID NO: 1042942 - RNA, 18 nt, Human
uggcagagugucuguucu

SEQ ID NO: 1042943 - RNA, 22 nt, Human
cucuggaguucuucaagcuacu

SEQ ID NO: 1042944 - RNA, 22 nt, Human
cuccaggccagggaaguggaca

SEQ ID NO: 1042945 - RNA, 22 nt, Human
ucccagccauuccuuuaggugu

SEQ ID NO: 1042946 - RNA, 22 nt, Human
agcagcugagccccagcuguga

SEQ ID NO: 1042947 - RNA, 22 nt, Human
cucagaguccccaguggguuug

SEQ ID NO: 1042948 - RNA, 23 nt, Human
gccuucagcucgggaaggcuccc

SEQ ID NO: 1042949 - RNA, 22 nt, Human
aagggcagaaagggacgcuuug

SEQ ID NO: 1042950 - RNA, 22 nt, Human
ugcccuuggguaacuugcugau

SEQ ID NO: 1042951 - RNA, 23 nt, Human
ugcugggcagagcuggugcugag

SEQ ID NO: 1042952 - RNA, 22 nt, Human
gcccauggcagaacugugagca

SEQ ID NO: 1042953 - RNA, 22 nt, Human
agcucccagaguccucugccca

SEQ ID NO: 1042954 - RNA, 22 nt, Human
acauuucuuuucaucucuauau

SEQ ID NO: 1042955 - RNA, 22 nt, Human
acuggcagagguuggacaccau

SEQ ID NO: 1042956 - RNA, 22 nt, Human
cauucauuuacuuucaacagcu

SEQ ID NO: 1042957 - RNA, 22 nt, Human
cagucacauggaugauggauag

SEQ ID NO: 1042958 - RNA, 21 nt, Human
gcugccaccgcgugcuccagg

SEQ ID NO: 1042959 - RNA, 22 nt, Human
agcagcuggggccugugacgau

SEQ ID NO: 1042960 - RNA, 22 nt, Human
cccagcucucugcucuuagccu

SEQ ID NO: 1042961 - RNA, 17 nt, Human
ggaaaaggaugauacag

SEQ ID NO: 1042962 - RNA, 23 nt, Human
cacaccaggagccgucugggcca

SEQ ID NO: 1042963 - RNA, 22 nt, Human
ggcaguggguggaucucaggga

SEQ ID NO: 1042964 - RNA, 20 nt, Human
ugcucugucuaaaacuuccc

SEQ ID NO: 1042965 - RNA, 23 nt, Human
aaaugcagggucgcagguuacag

SEQ ID NO: 1042966 - RNA, 22 nt, Human
ugcaauaaagugcuauaaaucc

SEQ ID NO: 1042967 - RNA, 22 nt, Human
cuggugcuggagccuagucccu

SEQ ID NO: 1042968 - RNA, 22 nt, Human
gcuggcaggguucucacugaaa

SEQ ID NO: 1042969 - RNA, 22 nt, Human
ugggccuguugccugaguccau

SEQ ID NO: 1042970 - RNA, 22 nt, Human
cagaggcugggaccucaggcau

SEQ ID NO: 1042971 - RNA, 22 nt, Human
augccacugacauggacaauuu

SEQ ID NO: 1042972 - RNA, 22 nt, Human
uggcucuggugcgggcuccugc

SEQ ID NO: 1042973 - RNA, 22 nt, Human
cagccagcuggcacugugagua

SEQ ID NO: 1042974 - RNA, 22 nt, Human
ucagaacauugacauucuuauu

SEQ ID NO: 1042975 - RNA, 22 nt, Human
acauucaugucccacuucuagc

SEQ ID NO: 1042976 - RNA, 22 nt, Human
cugcugucuuuauuucacugcu

SEQ ID NO: 1042977 - RNA, 22 nt, Human
ggcuccagggaguggagagaag

SEQ ID NO: 1042978 - RNA, 22 nt, Human
cugagcugcucccgcugcagcg

SEQ ID NO: 1042979 - RNA, 22 nt, Human
ggaaaaggccacagggacacau

SEQ ID NO: 1042980 - RNA, 17 nt, Human
cugucugcgcaugaggu

SEQ ID NO: 1042981 - RNA, 22 nt, Human
ucucagagggaaacaugaguga

SEQ ID NO: 1042982 - RNA, 22 nt, Human
aaagaauuuguacacccuacua

SEQ ID NO: 1042983 - RNA, 22 nt, Human
cugcccugugaggguccuuggg

SEQ ID NO: 1042984 - RNA, 22 nt, Human
gcacccagaggucagcagugcu

SEQ ID NO: 1042985 - RNA, 22 nt, Human
caaaguuuaaaguagauuucag

SEQ ID NO: 1042986 - RNA, 22 nt, Human
uuagcuaaacuguaacuagaau

SEQ ID NO: 1042987 - RNA, 22 nt, Human
uaggcagggauuaggguugauu

SEQ ID NO: 1042988 - RNA, 22 nt, Human
uggaggcauuuuagguugucac

SEQ ID NO: 1042989 - RNA, 22 nt, Human
cauugcacugcagcccgggcaa

SEQ ID NO: 1042990 - RNA, 22 nt, Human
uuucacauguggaaugccaggu

SEQ ID NO: 1042991 - RNA, 22 nt, Human
ucaggagagaaagaauacaauu

SEQ ID NO: 1042992 - RNA, 22 nt, Human
caggccugacccugagcuucac

SEQ ID NO: 1042993 - RNA, 22 nt, Human
uggaaggcaacggagugagcug

SEQ ID NO: 1042994 - RNA, 22 nt, Human
uggcacugggaugcuacuguua

SEQ ID NO: 1042995 - RNA, 22 nt, Human
uuuguaaauagcaguacucaug

SEQ ID NO: 1042996 - RNA, 22 nt, Human
agcagcaugaugacagagucuc

SEQ ID NO: 1042997 - RNA, 22 nt, Human
aaaaauaggucaaccguguaug

SEQ ID NO: 1042998 - RNA, 22 nt, Human
gagcagaacaggccggguggga

SEQ ID NO: 1042999 - RNA, 22 nt, Human
gggccuguguguucaggagccu

SEQ ID NO: 1043000 - RNA, 22 nt, Human
ucuggcuccacucugugcaugc

SEQ ID NO: 1043001 - RNA, 21 nt, Human
ccucuggcuugugcugugccc

SEQ ID NO: 1043002 - RNA, 18 nt, Human
ugggcugccuggccucug

SEQ ID NO: 1043003 - RNA, 22 nt, Human
gggcugcuuccuggggaaugcu

SEQ ID NO: 1043004 - RNA, 22 nt, Human
gaugagggccugguggcugugc

SEQ ID NO: 1043005 - RNA, 22 nt, Human
agguacagcaauauaagagguc

SEQ ID NO: 1043006 - RNA, 22 nt, Human
ccagaggugcugggagaggucu

SEQ ID NO: 1043007 - RNA, 22 nt, Human
uccuuuccaugcuucuagaggc

SEQ ID NO: 1043008 - RNA, 22 nt, Human
aggagaguaccauugggccgca

SEQ ID NO: 1043009 - RNA, 22 nt, Human
gugcauuucucauacacuaaau

SEQ ID NO: 1043010 - RNA, 22 nt, Human
cagucccagcugcucagaaggc

SEQ ID NO: 1043011 - RNA, 22 nt, Human
gcagcuggagcaucuucucauc

SEQ ID NO: 1043012 - RNA, 22 nt, Human
ccauggccgccgcugcucagga

SEQ ID NO: 1043013 - RNA, 22 nt, Human
cagggccagcgucucgggcuau

SEQ ID NO: 1043014 - RNA, 22 nt, Human
gccuuggcugaugugcgaauga

SEQ ID NO: 1043015 - RNA, 22 nt, Human
ucuggcuccuggcuccacugcc

SEQ ID NO: 1043016 - RNA, 22 nt, Human
cuggccuuggugcuugcagaca

SEQ ID NO: 1043017 - RNA, 22 nt, Human
cagcccuuuccuucucagcuuu

SEQ ID NO: 1043018 - RNA, 22 nt, Human
ugucuucaucuccaugcacaga

SEQ ID NO: 1043019 - RNA, 22 nt, Human
guaaaucccauccuuucucugg

SEQ ID NO: 1043020 - RNA, 22 nt, Human
uaacacugauuuguucucaggg

SEQ ID NO: 1043021 - RNA, 22 nt, Human
uuccaggggcagcagugauggu

SEQ ID NO: 1043022 - RNA, 22 nt, Human
uaggccagaggagcagcuuugg

SEQ ID NO: 1043023 - RNA, 22 nt, Human
auaaggcaagcugucaguuugu

SEQ ID NO: 1043024 - RNA, 22 nt, Human
auaaggcagaaaugauucuagu

SEQ ID NO: 1043025 - RNA, 22 nt, Human
cagucacauugcccugcauuua

SEQ ID NO: 1043026 - RNA, 22 nt, Human
uucacaggugacuggggauaac

SEQ ID NO: 1043027 - RNA, 22 nt, Human
ucuccuggucaccucagaaguc

SEQ ID NO: 1043028 - RNA, 22 nt, Human
uaacacacugaaggugagaugg

SEQ ID NO: 1043029 - RNA, 22 nt, Human
ccuggcucuucagagguuccua

SEQ ID NO: 1043030 - RNA, 22 nt, Human
uugaagcauuguggcuuguauu

SEQ ID NO: 1043031 - RNA, 22 nt, Human
cagcuucucagaaagcugaggu

SEQ ID NO: 1043032 - RNA, 22 nt, Human
cucucaggcuugggucguggca

SEQ ID NO: 1043033 - RNA, 22 nt, Human
uggcucagugaagagauaacuu

SEQ ID NO: 1043034 - RNA, 22 nt, Human
aaauugcaaaaguacuuuuagg

SEQ ID NO: 1043035 - RNA, 22 nt, Human
uccuggagcuuccuucauggua

SEQ ID NO: 1043036 - RNA, 22 nt, Human
agugucugccagcugccaggug

SEQ ID NO: 1043037 - RNA, 22 nt, Human
ccuccagcgcgauccacuccgg

SEQ ID NO: 1043038 - RNA, 21 nt, Human
ugcucaugcaaugcaugucca

SEQ ID NO: 1043039 - RNA, 22 nt, Human
ucuuacauauagcaugaguaca

SEQ ID NO: 1043040 - RNA, 22 nt, Human
guggugcauccuugaguaagcu

SEQ ID NO: 1043041 - RNA, 22 nt, Human
augggugugaaaauggucaucu

SEQ ID NO: 1043042 - RNA, 22 nt, Human
auccagggauaaaaguaagguu

SEQ ID NO: 1043043 - RNA, 22 nt, Human
uguacaaugccagggaacacca

SEQ ID NO: 1043044 - RNA, 23 nt, Human
aggcacugaaugugucagugagu

SEQ ID NO: 1043045 - RNA, 22 nt, Human
aagguacaguuuuaagaauaag

SEQ ID NO: 1043046 - RNA, 22 nt, Human
cccagagcuccgguccugccca

SEQ ID NO: 1043047 - RNA, 22 nt, Human
caggugggccaugaaaaaugac

SEQ ID NO: 1043048 - RNA, 22 nt, Human
agcccuggcccggcugugcuuu

SEQ ID NO: 1043049 - RNA, 22 nt, Human
accagcagaguugaggaggaca

SEQ ID NO: 1043050 - RNA, 19 nt, Human
agcuggggcgguguguguu

SEQ ID NO: 1043051 - RNA, 22 nt, Human
agauguuccagccaaugggaau

SEQ ID NO: 1043052 - RNA, 22 nt, Human
guaauugacucagcucuguuca

SEQ ID NO: 1043053 - RNA, 22 nt, Human
ucugugaacaucacauugacag

SEQ ID NO: 1043054 - RNA, 21 nt, Human
ggcacugagccagauggacuc

SEQ ID NO: 1043055 - RNA, 22 nt, Human
aagcugccaccagcccagggca

SEQ ID NO: 1043056 - RNA, 19 nt, Human
ucaaagucugagucacuuu

SEQ ID NO: 1043057 - RNA, 22 nt, Human
ucaggacagccagggugcagac

SEQ ID NO: 1043058 - RNA, 22 nt, Human
cucacagaugcugugggucagg

SEQ ID NO: 1043059 - RNA, 22 nt, Human
aaaugguaagacaacacauuau

SEQ ID NO: 1043060 - RNA, 22 nt, Human
ugucucugcuuuccuugcaggg

SEQ ID NO: 1043061 - RNA, 22 nt, Human
ugguaucagagccaucuguauu

SEQ ID NO: 1043062 - RNA, 22 nt, Human
cagaggccucacuuccagccag

SEQ ID NO: 1043063 - RNA, 22 nt, Human
ccagccuggacugggucuugug

SEQ ID NO: 1043064 - RNA, 22 nt, Human
ggcugcugguagggguaggaag

SEQ ID NO: 1043065 - RNA, 22 nt, Human
auugaaagcacaaagaacaagu

SEQ ID NO: 1043066 - RNA, 22 nt, Human
ggagaagggacagacucagcuu

SEQ ID NO: 1043067 - RNA, 22 nt, Human
ggggacccucaggacugcgucu

SEQ ID NO: 1043068 - RNA, 21 nt, Human
aguguccuugaucuugccuug

SEQ ID NO: 1043069 - RNA, 22 nt, Human
gucaugccagcggagcucggga

SEQ ID NO: 1043070 - RNA, 22 nt, Human
caagagcuggguggcaagcuag

SEQ ID NO: 1043071 - RNA, 22 nt, Human
ucuguaucuaauuuuacaguag

SEQ ID NO: 1043072 - RNA, 22 nt, Human
ggccuggaagaggacagagaaa

SEQ ID NO: 1043073 - RNA, 22 nt, Human
acagccagggcauugucgccga

SEQ ID NO: 1043074 - RNA, 22 nt, Human
augguuuguaacccaauacucc

SEQ ID NO: 1043075 - RNA, 23 nt, Human
ggcacugaagcuacaauggugag

SEQ ID NO: 1043076 - RNA, 20 nt, Human
gcuuuuucuaauagcagucc

SEQ ID NO: 1043077 - RNA, 22 nt, Human
auguaucaacaaauuguacagu

SEQ ID NO: 1043078 - RNA, 23 nt, Human
gccaggcuccggucuguggccac

SEQ ID NO: 1043079 - RNA, 17 nt, Human
ucagcaaagacaaagga

SEQ ID NO: 1043080 - RNA, 22 nt, Human
aauguguauacuggcaauuaag

SEQ ID NO: 1043081 - RNA, 22 nt, Human
gcaggcagagguggaggagaca

SEQ ID NO: 1043082 - RNA, 22 nt, Human
ugccuguccugaggaugagggu

SEQ ID NO: 1043083 - RNA, 22 nt, Human
ucaaugauuagaguuuagugug

SEQ ID NO: 1043084 - RNA, 22 nt, Human
cagggccaccguguuugcugcu

SEQ ID NO: 1043085 - RNA, 22 nt, Human
ccucccacuucuugcugagguc

SEQ ID NO: 1043086 - RNA, 22 nt, Human
uaaaguucuggugagagguaag

SEQ ID NO: 1043087 - RNA, 22 nt, Human
cccagcaucccagugggcagca

SEQ ID NO: 1043088 - RNA, 20 nt, Human
cuguagggugcagcaggcuc

SEQ ID NO: 1043089 - RNA, 22 nt, Human
caggcuugauuauucagacaau

SEQ ID NO: 1043090 - RNA, 19 nt, Human
uggcugggcgugccuccgu

SEQ ID NO: 1043091 - RNA, 22 nt, Human
cugggcugcaucaaagaggcau

SEQ ID NO: 1043092 - RNA, 22 nt, Human
acagggcagagugaaaugcuau

SEQ ID NO: 1043093 - RNA, 22 nt, Human
ucugcaggaggcuggcugcagg

SEQ ID NO: 1043094 - RNA, 22 nt, Human
uagcaggguccaaugugaggca

SEQ ID NO: 1043095 - RNA, 22 nt, Human
ccugccugucaucgccugcgcc

SEQ ID NO: 1043096 - RNA, 22 nt, Human
cauuuacuguugaaucccuagc

SEQ ID NO: 1043097 - RNA, 22 nt, Human
caguacuugggggguucuaagu

SEQ ID NO: 1043098 - RNA, 22 nt, Human
ggagcauguggggugagcaggg

SEQ ID NO: 1043099 - RNA, 22 nt, Human
ggcagcuccaaaaggaaacacu

SEQ ID NO: 1043100 - RNA, 22 nt, Human
ugcauuguuuagaacucuuugg

SEQ ID NO: 1043101 - RNA, 22 nt, Human
uuuaaauaggacuccugggggu

SEQ ID NO: 1043102 - RNA, 22 nt, Human
ccaguuuuuccagugcuuucug

SEQ ID NO: 1043103 - RNA, 22 nt, Human
gccaguuccuguggagucagag

SEQ ID NO: 1043104 - RNA, 22 nt, Human
aggucacauggauaaugaucag

SEQ ID NO: 1043105 - RNA, 22 nt, Human
ucagcuggagaugagaaccgaa

SEQ ID NO: 1043106 - RNA, 22 nt, Human
gguuugcauucugaaaggcuca

SEQ ID NO: 1043107 - RNA, 22 nt, Human
uuuuccuauaugcaaagaaugc

SEQ ID NO: 1043108 - RNA, 22 nt, Human
ugggcacuggaagccugcugug

SEQ ID NO: 1043109 - RNA, 22 nt, Human
ugccucugguuaucugguaccu

SEQ ID NO: 1043110 - RNA, 22 nt, Human
ugcaguggcgccaucucagcuc

SEQ ID NO: 1043111 - RNA, 19 nt, Human
uccuuugaauaucaguuga

SEQ ID NO: 1043112 - RNA, 22 nt, Human
agcugccaucagccuuuggaug

SEQ ID NO: 1043113 - RNA, 22 nt, Human
cauugucacccaaagcucauag

SEQ ID NO: 1043114 - RNA, 18 nt, Human
aaguaacagaagagcaca

SEQ ID NO: 1043115 - RNA, 21 nt, Human
gcagggacaaagcuucaggag

SEQ ID NO: 1043116 - RNA, 23 nt, Human
uugugggcagauuccauggggag

SEQ ID NO: 1043117 - RNA, 22 nt, Human
cccaccccuggacaggugagug

SEQ ID NO: 1043118 - RNA, 22 nt, Human
acagaauuaucaggaaauguua

SEQ ID NO: 1043119 - RNA, 22 nt, Human
cagggugccucccgcucgccgg

SEQ ID NO: 1043120 - RNA, 22 nt, Human
cccaggagguggagcuugcagu

SEQ ID NO: 1043121 - RNA, 22 nt, Human
uuacauuuggcuauguccucua

SEQ ID NO: 1043122 - RNA, 22 nt, Human
uggcugucagcugccuggugcg

SEQ ID NO: 1043123 - RNA, 22 nt, Human
agcagcuguacuuucaucuguu

SEQ ID NO: 1043124 - RNA, 22 nt, Human
caaaguuaugaaugauaagauu

SEQ ID NO: 1043125 - RNA, 22 nt, Human
uggcuaggcuccaagagcugga

SEQ ID NO: 1043126 - RNA, 22 nt, Human
ugagccuggccugcagagacca

SEQ ID NO: 1043127 - RNA, 22 nt, Human
ggcucagguugggucacaugac

SEQ ID NO: 1043128 - RNA, 22 nt, Human
guggagccaggaucuccgcaca

SEQ ID NO: 1043129 - RNA, 22 nt, Human
cuggaugcuuccucucugcuag

SEQ ID NO: 1043130 - RNA, 22 nt, Human
cagcauuggguuaccuuuguuu

SEQ ID NO: 1043131 - RNA, 20 nt, Human
ucaggcaguggggaaaggca

SEQ ID NO: 1043132 - RNA, 20 nt, Human
uccuggccuucucgggcagu

SEQ ID NO: 1043133 - RNA, 17 nt, Human
ugaaggaaggaugaugu

SEQ ID NO: 1043134 - RNA, 22 nt, Human
cuuucucuguguuucacaugcu

SEQ ID NO: 1043135 - RNA, 22 nt, Human
guggcugcuguccucucugguu

SEQ ID NO: 1043136 - RNA, 22 nt, Human
cugggccugguagggcuugaaa

SEQ ID NO: 1043137 - RNA, 22 nt, Human
cugcuuuguaaaauagacauaa

SEQ ID NO: 1043138 - RNA, 22 nt, Human
gcucccuccaugaggcagaccg

SEQ ID NO: 1043139 - RNA, 22 nt, Human
uccuggagggaggcggugcuac

SEQ ID NO: 1043140 - RNA, 22 nt, Human
ggcugcaggcagaggcugucug

SEQ ID NO: 1043141 - RNA, 17 nt, Human
ggcagcugccacuuuuu

SEQ ID NO: 1043142 - RNA, 22 nt, Human
acuuugcaauacuuaauacaaa

SEQ ID NO: 1043143 - RNA, 20 nt, Human
cugccaugauugauagagug

SEQ ID NO: 1043144 - RNA, 22 nt, Human
cagaauuuuucgaauguacugu

SEQ ID NO: 1043145 - RNA, 22 nt, Human
caaaagcaguucuaucugaguu

SEQ ID NO: 1043146 - RNA, 22 nt, Human
agcugguguccuccuggagcug

SEQ ID NO: 1043147 - RNA, 22 nt, Human
agauuucccacuccauguauug

SEQ ID NO: 1043148 - RNA, 22 nt, Human
agaggcuccaccuucucugucc

SEQ ID NO: 1043149 - RNA, 17 nt, Human
ucuuuccugccaugcuc

SEQ ID NO: 1043150 - RNA, 22 nt, Human
caugagauaauuuuucuccagu

SEQ ID NO: 1043151 - RNA, 22 nt, Human
gcagagcaguacucucuugacu

SEQ ID NO: 1043152 - RNA, 22 nt, Human
acucacauuucaucaggccaag

SEQ ID NO: 1043153 - RNA, 19 nt, Human
ucucacaucagcuccuagc

SEQ ID NO: 1043154 - RNA, 22 nt, Human
uuguuaaaaugcauauucuggu

SEQ ID NO: 1043155 - RNA, 22 nt, Human
ucuggcucacuucaggcuucac

SEQ ID NO: 1043156 - RNA, 22 nt, Human
aggcccugcuuuccagagcuca

SEQ ID NO: 1043157 - RNA, 22 nt, Human
aaagccuuggucaucugguucc

SEQ ID NO: 1043158 - RNA, 22 nt, Human
agcaccugcacaguggaggaaa

SEQ ID NO: 1043159 - RNA, 21 nt, Human
gcagccagacgggauucaguu

SEQ ID NO: 1043160 - RNA, 22 nt, Human
gcagaagggaauaaggagcuuu

SEQ ID NO: 1043161 - RNA, 22 nt, Human
auguagcagauauuugugcaca

SEQ ID NO: 1043162 - RNA, 22 nt, Human
aaaucacuaaguuauagugugg

SEQ ID NO: 1043163 - RNA, 17 nt, Human
gcugccaccuuuggagc

SEQ ID NO: 1043164 - RNA, 22 nt, Human
uuagaaaacauaagugguaaag

SEQ ID NO: 1043165 - RNA, 22 nt, Human
agcugcaggccucuccugggga

SEQ ID NO: 1043166 - RNA, 22 nt, Human
uugugucugggggagugacauc

SEQ ID NO: 1043167 - RNA, 22 nt, Human
ucucuccuuaucauuguguuua

SEQ ID NO: 1043168 - RNA, 22 nt, Human
acucuugucucaacuuuuguau

SEQ ID NO: 1043169 - RNA, 22 nt, Human
uggcuccuaggauggugccugg

SEQ ID NO: 1043170 - RNA, 19 nt, Human
cauaauacaguggaucuga

SEQ ID NO: 1043171 - RNA, 22 nt, Human
caggggcucuaaugcaugauca

SEQ ID NO: 1043172 - RNA, 22 nt, Human
ggaggccaugaggcucuaggug

SEQ ID NO: 1043173 - RNA, 22 nt, Human
cagcaaaauuugaggauugccu

SEQ ID NO: 1043174 - RNA, 22 nt, Human
ggugggugagcccugggagcug

SEQ ID NO: 1043175 - RNA, 22 nt, Human
cagccuucugaaugaacguacu

SEQ ID NO: 1043176 - RNA, 22 nt, Human
gaaugugugacucuauugagca

SEQ ID NO: 1043177 - RNA, 22 nt, Human
guacucucuugaaggccuuucu

SEQ ID NO: 1043178 - RNA, 22 nt, Human
agccagccaguucacuaggaaa

SEQ ID NO: 1043179 - RNA, 22 nt, Human
cugucugucaaguucaucucca

SEQ ID NO: 1043180 - RNA, 22 nt, Human
agccugagagccaagcugugca

SEQ ID NO: 1043181 - RNA, 22 nt, Human
augcaguggcagcuccuggugu

SEQ ID NO: 1043182 - RNA, 22 nt, Human
aggcagcaugcucugcuucuac

SEQ ID NO: 1043183 - RNA, 22 nt, Human
cuggccugcugggugagguccu

SEQ ID NO: 1043184 - RNA, 22 nt, Human
uagaauaugugguaggaucugg

SEQ ID NO: 1043185 - RNA, 22 nt, Human
guccucuggaagaugaguucuu

SEQ ID NO: 1043186 - RNA, 22 nt, Human
ugauuuccaauaaggagaaugu

SEQ ID NO: 1043187 - RNA, 22 nt, Human
caggguggggcuggcuaucaaa

SEQ ID NO: 1043188 - RNA, 22 nt, Human
ugccucugggugaccaaggagc

SEQ ID NO: 1043189 - RNA, 21 nt, Human
auccuugaucagaagagugcu

SEQ ID NO: 1043190 - RNA, 22 nt, Human
cugggcuguucugccccugggu

SEQ ID NO: 1043191 - RNA, 22 nt, Human
agccaacuaggagauuaaggua

SEQ ID NO: 1043192 - RNA, 22 nt, Human
guguggcugauugacaugguca

SEQ ID NO: 1043193 - RNA, 22 nt, Human
ggcacugggcaccggcugaggg

SEQ ID NO: 1043194 - RNA, 20 nt, Human
gggcaguggcgcuaucucag

SEQ ID NO: 1043195 - RNA, 22 nt, Human
uucacauuaucaggauuguuuc

SEQ ID NO: 1043196 - RNA, 22 nt, Human
uaagaacagauaaaguuucccc

SEQ ID NO: 1043197 - RNA, 20 nt, Human
uuccagagaucugcauuuua

SEQ ID NO: 1043198 - RNA, 22 nt, Human
cagagccaacgccaccugccca

SEQ ID NO: 1043199 - RNA, 22 nt, Human
caguaugagaguugaaucaagg

SEQ ID NO: 1043200 - RNA, 22 nt, Human
cuucugggcauucagcugcaca

SEQ ID NO: 1043201 - RNA, 21 nt, Human
ccugagggugguugugaagau

SEQ ID NO: 1043202 - RNA, 22 nt, Human
cccuccagccauggacccaggu

SEQ ID NO: 1043203 - RNA, 23 nt, Human
agcacagacuagaaaggucuuuc

SEQ ID NO: 1043204 - RNA, 22 nt, Human
ccucucuguaagggucccuccc

SEQ ID NO: 1043205 - RNA, 22 nt, Human
ccagcucuuuuggcugagugag

SEQ ID NO: 1043206 - RNA, 22 nt, Human
cagaaauucccauuucagauuc

SEQ ID NO: 1043207 - RNA, 22 nt, Human
aagagguaaccauagcaaccac

SEQ ID NO: 1043208 - RNA, 22 nt, Human
cacagcugcccuacuccaugug

SEQ ID NO: 1043209 - RNA, 22 nt, Human
ugaaaguugcacauaagagaau

SEQ ID NO: 1043210 - RNA, 22 nt, Human
agaguggggaagguguugagaa

SEQ ID NO: 1043211 - RNA, 22 nt, Human
gcaggggcuacucugagcuucc

SEQ ID NO: 1043212 - RNA, 18 nt, Human
aggagccuuugcacugga

SEQ ID NO: 1043213 - RNA, 22 nt, Human
aaaugucuaucuggcauauucc

SEQ ID NO: 1043214 - RNA, 22 nt, Human
cccugggcagucugcacuucag

SEQ ID NO: 1043215 - RNA, 22 nt, Human
agggucugacaaugugacuuag

SEQ ID NO: 1043216 - RNA, 22 nt, Human
agggacuggcucucugagcagg

SEQ ID NO: 1043217 - RNA, 22 nt, Human
gcugaagagagaugcguccagc

SEQ ID NO: 1043218 - RNA, 21 nt, Human
ccuccaggagcagagcccuga

SEQ ID NO: 1043219 - RNA, 22 nt, Human
ugacagggugauuaugagagcu

SEQ ID NO: 1043220 - RNA, 22 nt, Human
cugcuuuggcucagugacauca

SEQ ID NO: 1043221 - RNA, 22 nt, Human
cuggcuggccggaggcaucccu

SEQ ID NO: 1043222 - RNA, 22 nt, Human
agaagccauucccuguaggcuc

SEQ ID NO: 1043223 - RNA, 22 nt, Human
gcucuccaaacccuguggcuuu

SEQ ID NO: 1043224 - RNA, 22 nt, Human
ucauugaacgaagagcuccauu

SEQ ID NO: 1043225 - RNA, 22 nt, Human
agguaaagacagugaaagaggg

SEQ ID NO: 1043226 - RNA, 22 nt, Human
guccugggccugcugaggcuga

SEQ ID NO: 1043227 - RNA, 22 nt, Human
gacuuucucuccucccaggugu

SEQ ID NO: 1043228 - RNA, 22 nt, Human
gcugagggcauguguggcgacu

SEQ ID NO: 1043229 - RNA, 22 nt, Human
uagggcagccuuauagcuccca

SEQ ID NO: 1043230 - RNA, 22 nt, Human
gccauuuagggaggcaagguga

SEQ ID NO: 1043231 - RNA, 22 nt, Human
aaaaauguuaucuacuguccga

SEQ ID NO: 1043232 - RNA, 22 nt, Human
cagcugccuaugaccuagccuc

SEQ ID NO: 1043233 - RNA, 18 nt, Human
cugagggcagccccuggg

SEQ ID NO: 1043234 - RNA, 22 nt, Human
cccagggaaugacucuggccuu

SEQ ID NO: 1043235 - RNA, 22 nt, Human
uuuuaauacugcuauuguagga

SEQ ID NO: 1043236 - RNA, 20 nt, Human
gcccuggagccuuguccugg

SEQ ID NO: 1043237 - RNA, 22 nt, Human
aggucauuguuaagucaccaua

SEQ ID NO: 1043238 - RNA, 22 nt, Human
ucucagagaaaugugucaccau

SEQ ID NO: 1043239 - RNA, 22 nt, Human
gccucugcaauuacauugugcc

SEQ ID NO: 1043240 - RNA, 22 nt, Human
agccuggcccugcugaacucug

SEQ ID NO: 1043241 - RNA, 22 nt, Human
ucaaaguuuguggcaauuuauu

SEQ ID NO: 1043242 - RNA, 22 nt, Human
aaaucaguuaagaugaggccau

SEQ ID NO: 1043243 - RNA, 22 nt, Human
guauucuugguuaucaaaauac

SEQ ID NO: 1043244 - RNA, 20 nt, Human
uccaagggcagcagaaucag

SEQ ID NO: 1043245 - RNA, 22 nt, Human
aucaguuuuuauuaauguagcu

SEQ ID NO: 1043246 - RNA, 22 nt, Human
ucaguuuucucaucugugaaau

SEQ ID NO: 1043247 - RNA, 22 nt, Human
aauuucaaacuaauaggaacca

SEQ ID NO: 1043248 - RNA, 22 nt, Human
aagaggaacugggggcugaguc

SEQ ID NO: 1043249 - RNA, 22 nt, Human
aaggcugauuagacugauagcu

SEQ ID NO: 1043250 - RNA, 20 nt, Human
gacaggagaguuagguaggu

SEQ ID NO: 1043251 - RNA, 22 nt, Human
auaguggugagcugcauuuaug

SEQ ID NO: 1043252 - RNA, 22 nt, Human
gcagcacauauaaacaaagaga

SEQ ID NO: 1043253 - RNA, 22 nt, Human
gaagcagcagcuggggacaguu

SEQ ID NO: 1043254 - RNA, 22 nt, Human
uccuucagaaaaccucagucuu

SEQ ID NO: 1043255 - RNA, 22 nt, Human
aggcagggucuugcuauguugc

SEQ ID NO: 1043256 - RNA, 22 nt, Human
gugccaggugcuaagcugugcu

SEQ ID NO: 1043257 - RNA, 22 nt, Human
gcugucugggaggccuccacuu

SEQ ID NO: 1043258 - RNA, 22 nt, Human
aaguaacaaugcuguugaauug

SEQ ID NO: 1043259 - RNA, 22 nt, Human
ucagagugcagcgggaggcugg

SEQ ID NO: 1043260 - RNA, 22 nt, Human
auacaucuugucagauucaugu

SEQ ID NO: 1043261 - RNA, 18 nt, Human
acauuucuccuucugacc

SEQ ID NO: 1043262 - RNA, 22 nt, Human
gggcuucucccuaaggacucug

SEQ ID NO: 1043263 - RNA, 22 nt, Human
cugccuugaaaaugaagcuuua

SEQ ID NO: 1043264 - RNA, 19 nt, Human
agccuggcuuugcucugcu

SEQ ID NO: 1043265 - RNA, 22 nt, Human
cauuugaugacucaacucauaa

SEQ ID NO: 1043266 - RNA, 22 nt, Human
cucccugguguccccuccagga

SEQ ID NO: 1043267 - RNA, 22 nt, Human
agcacaggaccaaggaagcugu

SEQ ID NO: 1043268 - RNA, 22 nt, Human
guggcagcugguaugcagacag

SEQ ID NO: 1043269 - RNA, 22 nt, Human
gguugccggggcaggacuggaa

SEQ ID NO: 1043270 - RNA, 22 nt, Human
uggcagggaauacagauguuua

SEQ ID NO: 1043271 - RNA, 22 nt, Human
uccugccucuuuucuuauucca

SEQ ID NO: 1043272 - RNA, 22 nt, Human
cuggaagguuccucccagcucc

SEQ ID NO: 1043273 - RNA, 21 nt, Human
caggaaaagcggaagucuagc

SEQ ID NO: 1043274 - RNA, 22 nt, Human
ggccuuggugccauggccaguu

SEQ ID NO: 1043275 - RNA, 18 nt, Human
aaauguacuguccauggc

SEQ ID NO: 1043276 - RNA, 22 nt, Human
uugugcauuucucugagugugu

SEQ ID NO: 1043277 - RNA, 22 nt, Human
ugaugcuucacgcugaauaugc

SEQ ID NO: 1043278 - RNA, 18 nt, Human
ccugccagucuggagcag

SEQ ID NO: 1043279 - RNA, 22 nt, Human
acauuucuccuacuuguuauuu

SEQ ID NO: 1043280 - RNA, 22 nt, Human
ugggcuguccagcaccugggcu

SEQ ID NO: 1043281 - RNA, 22 nt, Human
ccucuggucccagcucugcugc

SEQ ID NO: 1043282 - RNA, 22 nt, Human
auuuccucaugaucauaaugca

SEQ ID NO: 1043283 - RNA, 22 nt, Human
gcuuuauguaaguccaaaggca

SEQ ID NO: 1043284 - RNA, 22 nt, Human
aaguucaagucugcaucuuuuu

SEQ ID NO: 1043285 - RNA, 22 nt, Human
gagggucccgagcccugucaga

SEQ ID NO: 1043286 - RNA, 22 nt, Human
augaagcuaaacccugcagcca

SEQ ID NO: 1043287 - RNA, 22 nt, Human
aaaaugaggucaauauccuuuu

SEQ ID NO: 1043288 - RNA, 22 nt, Human
uccucugcuccaucuuuacugu

SEQ ID NO: 1043289 - RNA, 22 nt, Human
aagaaauauugggccuuauaaa

SEQ ID NO: 1043290 - RNA, 22 nt, Human
uccuucaggguugaggccgacu

SEQ ID NO: 1043291 - RNA, 22 nt, Human
ucccagggacugggcuaggcuu

SEQ ID NO: 1043292 - RNA, 22 nt, Human
ccucuggguaucuguggaagua

SEQ ID NO: 1043293 - RNA, 22 nt, Human
agggguggagaguguugccagu

SEQ ID NO: 1043294 - RNA, 22 nt, Human
agguacaguagacagacaguua

SEQ ID NO: 1043295 - RNA, 22 nt, Human
cacaggcuccggccuugcagcc

SEQ ID NO: 1043296 - RNA, 22 nt, Human
cugaggcuggggaagggaagug

SEQ ID NO: 1043297 - RNA, 22 nt, Human
cugccuggggaaugugaggauu

SEQ ID NO: 1043298 - RNA, 22 nt, Human
gcagccacccucaaggcugaau

SEQ ID NO: 1043299 - RNA, 22 nt, Human
cagccugggcuccagagucccu

SEQ ID NO: 1043300 - RNA, 22 nt, Human
ugacuuccugcacucaggugau

SEQ ID NO: 1043301 - RNA, 22 nt, Human
ccagucacuggaaaaugggaau

SEQ ID NO: 1043302 - RNA, 22 nt, Human
gagucacaaagccuuucuuauu

SEQ ID NO: 1043303 - RNA, 22 nt, Human
uggagggcaugcuguccauggg

SEQ ID NO: 1043304 - RNA, 22 nt, Human
aauguacaaaagucagccaacu

SEQ ID NO: 1043305 - RNA, 22 nt, Human
uugaaggacauccuauuucuag

SEQ ID NO: 1043306 - RNA, 22 nt, Human
ugggccugacucaccugccucc

SEQ ID NO: 1043307 - RNA, 22 nt, Human
caucagcagucacaugaugcug

SEQ ID NO: 1043308 - RNA, 22 nt, Human
ggcucaggagaggggcuaaaag

SEQ ID NO: 1043309 - RNA, 22 nt, Human
uacaugcaugucacagaaugaa

SEQ ID NO: 1043310 - RNA, 22 nt, Human
gacagccaugcacuucugcugu

SEQ ID NO: 1043311 - RNA, 22 nt, Human
ccuggagcacucucccuggcug

SEQ ID NO: 1043312 - RNA, 22 nt, Human
ugcuauugugaacagugccaca

SEQ ID NO: 1043313 - RNA, 22 nt, Human
uagagaaaagcagggaucagga

SEQ ID NO: 1043314 - RNA, 22 nt, Human
gggagcugagcuggaagagaau

SEQ ID NO: 1043315 - RNA, 22 nt, Human
aacagcuuugcuucuggagaca

SEQ ID NO: 1043316 - RNA, 22 nt, Human
ucccagccggugccuggguccc

SEQ ID NO: 1043317 - RNA, 22 nt, Human
caggguuucaccauguuagcag

SEQ ID NO: 1043318 - RNA, 22 nt, Human
cugggaggauucauugagguga

SEQ ID NO: 1043319 - RNA, 22 nt, Human
auggggugaccaugagcauuua

SEQ ID NO: 1043320 - RNA, 22 nt, Human
gaggcugcaggcaaugcugccc

SEQ ID NO: 1043321 - RNA, 22 nt, Human
aucaguuuguauaugaaacacu

SEQ ID NO: 1043322 - RNA, 22 nt, Human
aagggacuuugucagcuuucca

SEQ ID NO: 1043323 - RNA, 22 nt, Human
agaaaucauucccaaacccaua

SEQ ID NO: 1043324 - RNA, 22 nt, Human
uguacauugucacucaucaagu

SEQ ID NO: 1043325 - RNA, 22 nt, Human
aaaugcacaaaguaaguguaau

SEQ ID NO: 1043326 - RNA, 22 nt, Human
cuggagccgcauggagcaggga

SEQ ID NO: 1043327 - RNA, 22 nt, Human
cugauuccugauucaugcucuu

SEQ ID NO: 1043328 - RNA, 20 nt, Human
uggagccaaggugugucugg

SEQ ID NO: 1043329 - RNA, 22 nt, Human
auugaaagcauggauuuggauu

SEQ ID NO: 1043330 - RNA, 21 nt, Human
gcugagagguugggaaguuca

SEQ ID NO: 1043331 - RNA, 22 nt, Human
uggguagaggaauugggcuacc

SEQ ID NO: 1043332 - RNA, 22 nt, Human
cuggccugagcacagcggcugc

SEQ ID NO: 1043333 - RNA, 22 nt, Human
caguggucugugcuucuguaca

SEQ ID NO: 1043334 - RNA, 19 nt, Human
uggcugggugccaauggcc

SEQ ID NO: 1043335 - RNA, 22 nt, Human
gagcugccaguguaugaauucu

SEQ ID NO: 1043336 - RNA, 22 nt, Human
cucaggauuuaaaggggcacuc

SEQ ID NO: 1043337 - RNA, 22 nt, Human
aagagguugucugugaugaguu

SEQ ID NO: 1043338 - RNA, 22 nt, Human
caaggagaguaauugaaugaga

SEQ ID NO: 1043339 - RNA, 22 nt, Human
guauuuucaagagcaguaguau

SEQ ID NO: 1043340 - RNA, 22 nt, Human
gcuuccugagaaacaaucugau

SEQ ID NO: 1043341 - RNA, 19 nt, Human
agcuccugggcucugggcc

SEQ ID NO: 1043342 - RNA, 22 nt, Human
agcacuuuccuggcaaaugugg

SEQ ID NO: 1043343 - RNA, 22 nt, Human
ugagcuguagcagaugcuguug

SEQ ID NO: 1043344 - RNA, 22 nt, Human
uguauguguauguacauaugca

SEQ ID NO: 1043345 - RNA, 22 nt, Human
acaaaugcaaguuuuaugucaa

SEQ ID NO: 1043346 - RNA, 22 nt, Human
ggagggugcauuuuacccugug

SEQ ID NO: 1043347 - RNA, 22 nt, Human
gccaggcuggugucacaacucu

SEQ ID NO: 1043348 - RNA, 22 nt, Human
ugucugucugcaagccagaaag

SEQ ID NO: 1043349 - RNA, 22 nt, Human
ucucuucugaaaccugucuuua

SEQ ID NO: 1043350 - RNA, 22 nt, Human
ggugucccaggccagcugugug

SEQ ID NO: 1043351 - RNA, 22 nt, Human
aacagcaauagcacuauucauu

SEQ ID NO: 1043352 - RNA, 22 nt, Human
accugagaaugggggcaugugu

SEQ ID NO: 1043353 - RNA, 22 nt, Human
uggucaggcugcucugcggcgu

SEQ ID NO: 1043354 - RNA, 18 nt, Human
ugagagugugugcucuug

SEQ ID NO: 1043355 - RNA, 22 nt, Human
gcugagagcaguguggccuuaa

SEQ ID NO: 1043356 - RNA, 22 nt, Human
uggcccugucccuggagccugg

SEQ ID NO: 1043357 - RNA, 23 nt, Human
agggcccaagccuggacagcagg

SEQ ID NO: 1043358 - RNA, 17 nt, Human
uucucuuccuggauagu

SEQ ID NO: 1043359 - RNA, 22 nt, Human
caaaguccuagaacagugcuug

SEQ ID NO: 1043360 - RNA, 22 nt, Human
cacagugcaugaugggcagaag

SEQ ID NO: 1043361 - RNA, 22 nt, Human
cuagaaaaauacuuuauuguga

SEQ ID NO: 1043362 - RNA, 19 nt, Human
caaggguugggucugucau

SEQ ID NO: 1043363 - RNA, 22 nt, Human
agcugccauccgaggugucaga

SEQ ID NO: 1043364 - RNA, 22 nt, Human
cacaggagcuguggggcagugu

SEQ ID NO: 1043365 - RNA, 22 nt, Human
ggcuggcucagggcuugagaga

SEQ ID NO: 1043366 - RNA, 22 nt, Human
ugccugucagggggagugggaa

SEQ ID NO: 1043367 - RNA, 22 nt, Human
gcugcccugucugcagcaggac

SEQ ID NO: 1043368 - RNA, 22 nt, Human
ggugccaggcucccagcucagg

SEQ ID NO: 1043369 - RNA, 22 nt, Human
acuguguccuauuuccuugaca

SEQ ID NO: 1043370 - RNA, 22 nt, Human
uucaaagugcauguuccucaga

SEQ ID NO: 1043371 - RNA, 22 nt, Human
cccagcagccagaaugaggagc

SEQ ID NO: 1043372 - RNA, 22 nt, Human
ggucccagaauugguuagcaca

SEQ ID NO: 1043373 - RNA, 22 nt, Human
agcagggggccacagucacagc

SEQ ID NO: 1043374 - RNA, 22 nt, Human
ugucccucauugacgcugugcc

SEQ ID NO: 1043375 - RNA, 22 nt, Human
ugaaaguuacaggaaaacagau

SEQ ID NO: 1043376 - RNA, 22 nt, Human
acaaggcugaacagugaagccg

SEQ ID NO: 1043377 - RNA, 22 nt, Human
agucccagcucugccacuuacu

SEQ ID NO: 1043378 - RNA, 22 nt, Human
cagugccaugucugagccccua

SEQ ID NO: 1043379 - RNA, 19 nt, Human
gggcagaauggcaucucag

SEQ ID NO: 1043380 - RNA, 22 nt, Human
aggggcuggcuuaucugagagu

SEQ ID NO: 1043381 - RNA, 22 nt, Human
gggugggaacaggaugccagga

SEQ ID NO: 1043382 - RNA, 22 nt, Human
aggcuggguaccugucauaugc

SEQ ID NO: 1043383 - RNA, 22 nt, Human
guggguggaucaccugagguca

SEQ ID NO: 1043384 - RNA, 22 nt, Human
gggucuggcaugcugagaugga

SEQ ID NO: 1043385 - RNA, 22 nt, Human
ugccagaagugcuuuauaagug

SEQ ID NO: 1043386 - RNA, 22 nt, Human
uacaaaguuuucuuggauugag

SEQ ID NO: 1043387 - RNA, 22 nt, Human
gccagagcugagugagguucuu

SEQ ID NO: 1043388 - RNA, 22 nt, Human
auaagguaugaaaaguaaaugg

SEQ ID NO: 1043389 - RNA, 22 nt, Human
cagcagugaugugugaggguuc

SEQ ID NO: 1043390 - RNA, 22 nt, Human
ccgggcgggggcucucgucacc

SEQ ID NO: 1043391 - RNA, 22 nt, Human
uggcucaguuucugcccagcug

SEQ ID NO: 1043392 - RNA, 22 nt, Human
aaaugcagauugucauucagga

SEQ ID NO: 1043393 - RNA, 22 nt, Human
agucucugcaugccugcugugc

SEQ ID NO: 1043394 - RNA, 22 nt, Human
ggccacuccgcugcuacuggaa

SEQ ID NO: 1043395 - RNA, 20 nt, Human
cguaaggcaagugcugcauc

SEQ ID NO: 1043396 - RNA, 22 nt, Human
accugaggcuguuagucuaggu

SEQ ID NO: 1043397 - RNA, 22 nt, Human
cccagccuuugcuuccugguuc

SEQ ID NO: 1043398 - RNA, 22 nt, Human
ugccuggcaaugccagaagcca

SEQ ID NO: 1043399 - RNA, 22 nt, Human
cugugggcugaaagugcucccg
